United States Patent Application Publication US 2013/0267429 A1 - sequence listing, part 21

SEQ ID NO: 478895 - DNA, 60 bp, Artificial
  Synthetic oligonucleotide
ttcacgatgggtttccgacagctcacctatgaaaacactcatatcctggtccaagattcg

SEQ ID NO: 478896 - DNA, 56 bp, Artificial
  Synthetic oligonucleotide
ttcacgatggttcactctttttcggtactcgcgaccaagctacaggtcaaattaac

SEQ ID NO: 478897 - DNA, 60 bp, Artificial
  Synthetic oligonucleotide
ttcacgattcctaccacaattaccatcatccaagcaagtgggtccttggatggagtcgcc

SEQ ID NO: 478898 - DNA, 57 bp, Artificial
  Synthetic oligonucleotide
ttcacgattctcaagtttctgttaaagagcgctctggcgtttctcaaaagtccggta

SEQ ID NO: 478899 - DNA, 60 bp, Artificial
  Synthetic oligonucleotide
ttcacgcaaatcctggtaccgtgactggctctgctgttggctgcaatcctgatgttgact

SEQ ID NO: 478900 - DNA, 60 bp, Artificial
  Synthetic oligonucleotide
ttcacgcacacgccgcgggatacgggagatagcgactcgagtggagtgagttacatctag

SEQ ID NO: 478901 - DNA, 50 bp, Artificial
  Synthetic oligonucleotide
ttcacgcagggcctcactattattggcgctcgctgggaagttttcgtaca

SEQ ID NO: 478902 - DNA, 55 bp, Artificial
  Synthetic oligonucleotide
ttcacgccatacttatactgtagtcccttttaacgattcggagggtgaagcatga

SEQ ID NO: 478903 - DNA, 60 bp, Artificial
  Synthetic oligonucleotide
ttcacgcctagtgtatgctcgtttacagaggttagctacattaagcgttgatggcaaaac

SEQ ID NO: 478904 - DNA, 58 bp, Artificial
  Synthetic oligonucleotide
ttcacgcgcaccgccgatgtttaatgatcaggcgagcgcgctagtactatatggtacg

SEQ ID NO: 478905 - DNA, 55 bp, Artificial
  Synthetic oligonucleotide
ttcacgcgcacctttcccaggcgcctgccgtgggtggactatcaggcccgtatct

SEQ ID NO: 478906 - DNA, 52 bp, Artificial
  Synthetic oligonucleotide
ttcacggaaaagtgcaagtcactactttcgaatcactggacagactgagatc

SEQ ID NO: 478907 - DNA, 55 bp, Artificial
  Synthetic oligonucleotide
ttcacggaaggagacgagacgcatatgttacattcccattcggtttcgttgctcc

SEQ ID NO: 478908 - DNA, 57 bp, Artificial
  Synthetic oligonucleotide
ttcacggacaattcgtcccccccggctgtaccgcagacatttcaagtggcccatcta

SEQ ID NO: 478909 - DNA, 51 bp, Artificial
  Synthetic oligonucleotide
ttcacggaggctatgaccaggtactccgccccccccggggaccccccacaa

SEQ ID NO: 478910 - DNA, 57 bp, Artificial
  Synthetic oligonucleotide
ttcacgggagatccatcacttttggtatcctcattggtccgactacggtaatcctac

SEQ ID NO: 478911 - DNA, 53 bp, Artificial
  Synthetic oligonucleotide
ttcacgggctgtggagttccccgacatcgtaagggtaattcgaggcagcttgg

SEQ ID NO: 478912 - DNA, 60 bp, Artificial
  Synthetic oligonucleotide
ttcacggggctaaagaagtagcgctcagttactctgctggtgcacttgccagttgtatgg

SEQ ID NO: 478913 - DNA, 52 bp, Artificial
  Synthetic oligonucleotide
ttcacggtaatgcttctatgaccaccgacgctggcgttacgtccgttgtcgc

SEQ ID NO: 478914 - DNA, 60 bp, Artificial
  Synthetic oligonucleotide
ttcacgtagcacctcactgtctgtgtcgctagtattggtgggagtcgtgacactatacct

SEQ ID NO: 478915 - DNA, 60 bp, Artificial
  Synthetic oligonucleotide
ttcacgtatggaagcagcggtttttgcattccacatgggaaactctatgggagagtgctg

SEQ ID NO: 478916 - DNA, 60 bp, Artificial
  Synthetic oligonucleotide
ttcacgtcagctgatcgctagggtatttaatgcggctcagaacgtcaagaggccactctt

SEQ ID NO: 478917 - DNA, 50 bp, Artificial
  Synthetic oligonucleotide
ttcacgtccgactatgtcatttgcacatccaactatcccacgtcagttat

SEQ ID NO: 478918 - DNA, 56 bp, Artificial
  Synthetic oligonucleotide
ttcacgtctgtcaaaaatcgacgaatcattggtatctttgaatcgttgaaaccggg

SEQ ID NO: 478919 - DNA, 54 bp, Artificial
  Synthetic oligonucleotide
ttcacgtgagtcaggtgtctgtggtctactctgacatgctcgacaagtggatag

SEQ ID NO: 478920 - DNA, 57 bp, Artificial
  Synthetic oligonucleotide
ttcactaaaatcaacagggcgcaaatcaaggcccatttgcgaagtagttttaacatc

SEQ ID NO: 478921 - DNA, 60 bp, Artificial
  Synthetic oligonucleotide
ttcactaaacgagttcgtgactttgtcatagcaaagctcggtgagtggcccagtatgcgt

SEQ ID NO: 478922 - DNA, 58 bp, Artificial
  Synthetic oligonucleotide
ttcactaaatgtaagatagcagcttccattagtttcagaatgaaaaaaagacttggtg

SEQ ID NO: 478923 - DNA, 60 bp, Artificial
  Synthetic oligonucleotide
ttcactaagatggttcgggatgttatagcagagagactcggaaagtggcctagcatgctt

SEQ ID NO: 478924 - DNA, 60 bp, Artificial
  Synthetic oligonucleotide
ttcactaccatgacatgaagaggattcggtctgtggaggatctgggattccgtactgtgt

SEQ ID NO: 478925 - DNA, 54 bp, Artificial
  Synthetic oligonucleotide
ttcactagaccttggaaccaagttccttcggacgccaagactaccaccgagccc

SEQ ID NO: 478926 - DNA, 58 bp, Artificial
  Synthetic oligonucleotide
ttcactagataaataaaactccgaagcatagttttttgacaaagtatggaaagcatgc

SEQ ID NO: 478927 - DNA, 60 bp, Artificial
  Synthetic oligonucleotide
ttcactagctttttctatcgctatggatttgtagccaactttagtatggagctgcctagc

SEQ ID NO: 478928 - DNA, 58 bp, Artificial
  Synthetic oligonucleotide
ttcactagggtcgtcgacgcgccctctttaacggacatgtcatgcgaggtaccagcct

SEQ ID NO: 478929 - DNA, 57 bp, Artificial
  Synthetic oligonucleotide
ttcactagtgtacttgcacgttttaatcttcaaggaggcccgcagacaccaccggac

SEQ ID NO: 478930 - DNA, 59 bp, Artificial
  Synthetic oligonucleotide
ttcactatacgacaagaaatggccagtagaggcctatgggattcctttcgtcagtccga

SEQ ID NO: 478931 - DNA, 55 bp, Artificial
  Synthetic oligonucleotide
ttcactcagggtgctatcacaatcaaaggcgacaagctattctacggtgctgttg

SEQ ID NO: 478932 - DNA, 55 bp, Artificial
  Synthetic oligonucleotide
ttcactcccctcttcccagctctggtactgcaggccccggcgggctgcaaacttc

SEQ ID NO: 478933 - DNA, 60 bp, Artificial
  Synthetic oligonucleotide
ttcactcgctcctaagggcgcgcccaatacatctcagtggatagttacaacgaatcgaga

SEQ ID NO: 478934 - DNA, 58 bp, Artificial
  Synthetic oligonucleotide
ttcactctaccgcggagcagtcttttggggtggagccctcaggctcaggggacattga

SEQ ID NO: 478935 - DNA, 60 bp, Artificial
  Synthetic oligonucleotide
ttcactctctgatctgcctggcttaggttattttgatgaccttgctgcagctcaaagtag

SEQ ID NO: 478936 - DNA, 55 bp, Artificial
  Synthetic oligonucleotide
ttcactctggcaacaggtggattcggaggcaatcctaacccacacgatctggaga

SEQ ID NO: 478937 - DNA, 56 bp, Artificial
  Synthetic oligonucleotide
ttcactcttggagatgtgccatagcacacaaattggcggagtaagaatggtagaca

SEQ ID NO: 478938 - DNA, 59 bp, Artificial
  Synthetic oligonucleotide
ttcactgaagcaaaagctggccaaaccttggcatgtttccaacacattgttctatttag

SEQ ID NO: 478939 - DNA, 53 bp, Artificial
  Synthetic oligonucleotide
ttcactgaatttcatgggttatgtaattggaagttggggtacattgccacagg

SEQ ID NO: 478940 - DNA, 60 bp, Artificial
  Synthetic oligonucleotide
ttcactgacaccctgcacttgcggctcctcggacctatacctggtcacgaggcatgccga

SEQ ID NO: 478941 - DNA, 60 bp, Artificial
  Synthetic oligonucleotide
ttcactgatgaggaatcagcagaagtgtcctcagaggatcgcaagagtgctgtggaaggc

SEQ ID NO: 478942 - DNA, 55 bp, Artificial
  Synthetic oligonucleotide
ttcactgccgatgagattaaagaagttgtcaacaaccttcgggagcaagcatggc

SEQ ID NO: 478943 - DNA, 51 bp, Artificial
  Synthetic oligonucleotide
ttcactgcgttagttacctccgggtacgacccggcccatagctcaatcacc

SEQ ID NO: 478944 - DNA, 58 bp, Artificial
  Synthetic oligonucleotide
ttcactggactaccaggcccaaccaacctatcccagtaggagacatctatagaaaatg

SEQ ID NO: 478945 - DNA, 60 bp, Artificial
  Synthetic oligonucleotide
ttcactggcagatgtttctaagtccttaaataattgtgcgtattacacacagttagatga

SEQ ID NO: 478946 - DNA, 60 bp, Artificial
  Synthetic oligonucleotide
ttcactggcagtctaggccgcacccttgcgtatccgcatgctatccttaacattagaact

SEQ ID NO: 478947 - DNA, 60 bp, Artificial
  Synthetic oligonucleotide
ttcactggcatcttcgatgcaataagtgtataaggtccatcgatgacatcactctagaga

SEQ ID NO: 478948 - DNA, 50 bp, Artificial
  Synthetic oligonucleotide
ttcactggcgtggaaagatttagtaattgggaaagtgcctcttctttgtt

SEQ ID NO: 478949 - DNA, 59 bp, Artificial
  Synthetic oligonucleotide
ttcactggggtttgggtgttgagtaattgctgtagtgcctcttctttagagatagggca

SEQ ID NO: 478950 - DNA, 54 bp, Artificial
  Synthetic oligonucleotide
ttcactgtaatggcagcaatcctggcatacaccataggaacgacatatttccaa

SEQ ID NO: 478951 - DNA, 51 bp, Artificial
  Synthetic oligonucleotide
ttcactgtgctgaagagcaaggcattactgactatatacacatgctgggtg

SEQ ID NO: 478952 - DNA, 53 bp, Artificial
  Synthetic oligonucleotide
ttcactgttcaagctgacagtactcgttggttagacccattcacattcgctgt

SEQ ID NO: 478953 - DNA, 57 bp, Artificial
  Synthetic oligonucleotide
ttcacttactcttcatttttaccgtgatacaactgacccattactccctgtcgcgaa

SEQ ID NO: 478954 - DNA, 58 bp, Artificial
  Synthetic oligonucleotide
ttcacttatgattttatgaatgcgtcgaaatattcggatgctagcgatgctggtgata

SEQ ID NO: 478955 - DNA, 60 bp, Artificial
  Synthetic oligonucleotide
ttcacttatgggtcttccatcaattcggccgggaccactaaagcatgtatgagaaatgga

SEQ ID NO: 478956 - DNA, 57 bp, Artificial
  Synthetic oligonucleotide
ttcacttcaaccccactactactctagtcgcacttaccgctacggtcccaagctcac

SEQ ID NO: 478957 - DNA, 53 bp, Artificial
  Synthetic oligonucleotide
ttcacttcggatttctttacgacaccgtggataacctcccgggaactgtcggc

SEQ ID NO: 478958 - DNA, 60 bp, Artificial
  Synthetic oligonucleotide
ttcactttaaatgtgggagataatcgtgttgctgatcttggaagtgcctactttgatatt

SEQ ID NO: 478959 - DNA, 60 bp, Artificial
  Synthetic oligonucleotide
ttcactttgataatgttgcgagatccacttattgctttttatcctgttgaatggaatggt

SEQ ID NO: 478960 - DNA, 56 bp, Artificial
  Synthetic oligonucleotide
ttcagaaaagagcacacaaaacacggactttgttttggaatataattctgaattct

SEQ ID NO: 478961 - DNA, 57 bp, Artificial
  Synthetic oligonucleotide
ttcagaaagggaacctgtgcgtgtcaggtcgtattatagagcccaatggggtcaact

SEQ ID NO: 478962 - DNA, 50 bp, Artificial
  Synthetic oligonucleotide
ttcagaaatgctaccggaacatatgccaacaatgttgccattagaaagtg

SEQ ID NO: 478963 - DNA, 57 bp, Artificial
  Synthetic oligonucleotide
ttcagaacaaaatactggagaccaactccaaagaagactaaagaaaggcgtgcaaca

SEQ ID NO: 478964 - DNA, 55 bp, Artificial
  Synthetic oligonucleotide
ttcagaaccctctcatctcagggttaagggtggttcagtgggcaactggtgccca

SEQ ID NO: 478965 - DNA, 58 bp, Artificial
  Synthetic oligonucleotide
ttcagaacgtacatcctattactattggagaatgtcccaaatacgtcaaaagcaccaa

SEQ ID NO: 478966 - DNA, 55 bp, Artificial
  Synthetic oligonucleotide
ttcagaagagtgtcaacatctcccctttcgtcgttcgaaaagttagcggggagaa

SEQ ID NO: 478967 - DNA, 60 bp, Artificial
  Synthetic oligonucleotide
ttcagaagtccagaagcatttgctacgagggccaaagcactttcaacgaagagcaatatt

SEQ ID NO: 478968 - DNA, 54 bp, Artificial
  Synthetic oligonucleotide
ttcagaatgagaccaatgttcgcagtcgggctactgtttcgcagattaacatct

SEQ ID NO: 478969 - DNA, 60 bp, Artificial
  Synthetic oligonucleotide
ttcagaatgcaagtaggcattacatgggagaatgtcccaaatatgtgaagaaggcaagct

SEQ ID NO: 478970 - DNA, 60 bp, Artificial
  Synthetic oligonucleotide
ttcagaatgtcatctctcaacagcaagcacacatagctgagcttcaagtgtacaataata

SEQ ID NO: 478971 - DNA, 60 bp, Artificial
  Synthetic oligonucleotide
ttcagaattctattctcaggcaaaccaagtattatcatatggtgatgtcacgcgttatct

SEQ ID NO: 478972 - DNA, 55 bp, Artificial
  Synthetic oligonucleotide
ttcagaattgggtgtcagcatagcagaataggaatcttgcgacagagaagagcga

SEQ ID NO: 478973 - DNA, 60 bp, Artificial
  Synthetic oligonucleotide
ttcagacagatccgaccttatcgggttatgggaggatcaaatatactgtctggacatgtc

SEQ ID NO: 478974 - DNA, 60 bp, Artificial
  Synthetic oligonucleotide
ttcagacagcggcacaacgagcaatgatggaccaagtgcgagagagccggaaccctggaa

SEQ ID NO: 478975 - DNA, 60 bp, Artificial
  Synthetic oligonucleotide
ttcagacagggtgcttgcccagtttgacatgtccttggcagcaaagcacatgtcgaacac

SEQ ID NO: 478976 - DNA, 59 bp, Artificial
  Synthetic oligonucleotide
ttcagaccatgctgtttctacactgaaggcggtttactcagaaaagctaccagatacgt

SEQ ID NO: 478977 - DNA, 52 bp, Artificial
  Synthetic oligonucleotide
ttcagaccgaatacatcaacatgctgtacactattgagggagatgatactga

SEQ ID NO: 478978 - DNA, 60 bp, Artificial
  Synthetic oligonucleotide
ttcagaccgaatcttgaagtaatttcaggcactgctatttgctcttcaagcattctgagc

SEQ ID NO: 478979 - DNA, 60 bp, Artificial
  Synthetic oligonucleotide
ttcagacctgagcttagcaacaagggcctatgtttgtagcagagattgtactataaccat

SEQ ID NO: 478980 - DNA, 58 bp, Artificial
  Synthetic oligonucleotide
ttcagacctgccacgggcttccgcgtgtccaactaggggtgcctaaggcgtgtgccag

SEQ ID NO: 478981 - DNA, 59 bp, Artificial
  Synthetic oligonucleotide
ttcagactatggcgcagtatgatggttacgctaaatgttctactgtcggtaattttaac

SEQ ID NO: 478982 - DNA, 55 bp, Artificial
  Synthetic oligonucleotide
ttcagactctgctataagaaaggccttattaggacacatagttagccctaggtga

SEQ ID NO: 478983 - DNA, 55 bp, Artificial
  Synthetic oligonucleotide
ttcagactgaggactgagcagaggaaacactttgtggagtatctgaggacaggag

SEQ ID NO: 478984 - DNA, 60 bp, Artificial
  Synthetic oligonucleotide
ttcagagaacggaacatgctatcccggtgagttcatagattatgaggaattaagagagca

SEQ ID NO: 478985 - DNA, 60 bp, Artificial
  Synthetic oligonucleotide
ttcagagaagtcagcatcggaatttgtcaacactggaaaacaaatcacatccattgcgtt

SEQ ID NO: 478986 - DNA, 60 bp, Artificial
  Synthetic oligonucleotide
ttcagagagcatttatgtcgctgtcgagccagaagtcaggaatagcggacgagattgcgg

SEQ ID NO: 478987 - DNA, 56 bp, Artificial
  Synthetic oligonucleotide
ttcagagagggcagatctacttagagagatctcttggggaagaaaagtggtgggca

SEQ ID NO: 478988 - DNA, 60 bp, Artificial
  Synthetic oligonucleotide
ttcagagcagatgatcaatacccctttcttatacatccagtaatgccaatgaaggagata

SEQ ID NO: 478989 - DNA, 59 bp, Artificial
  Synthetic oligonucleotide
ttcagagcccttatttgtgccaacaatggaggattataggtcagctgagttatttaccc

SEQ ID NO: 478990 - DNA, 55 bp, Artificial
  Synthetic oligonucleotide
ttcagagctaccaatcttggttgagggagttgatcacgaggcaaaatcacttaat

SEQ ID NO: 478991 - DNA, 55 bp, Artificial
  Synthetic oligonucleotide
ttcagagctagacatgtcagaattagcggatctgatacttaacgaatggttatgt

SEQ ID NO: 478992 - DNA, 51 bp, Artificial
  Synthetic oligonucleotide
ttcagagggtcgaaagaaatctgtcgaagagtatgagagctaacctgcgac

SEQ ID NO: 478993 - DNA, 60 bp, Artificial
  Synthetic oligonucleotide
ttcagaggttgagagattacgggagtagattatgaccggggattccatgtgtggatagaa

SEQ ID NO: 478994 - DNA, 57 bp, Artificial
  Synthetic oligonucleotide
ttcagagtaggactacacgattacgtggtagggtcgcaattaccttgcgaacctgaa

SEQ ID NO: 478995 - DNA, 60 bp, Artificial
  Synthetic oligonucleotide
ttcagagtctcctttaagctcaactttcaataaagcgatgcctacaatgcacactggtcg

SEQ ID NO: 478996 - DNA, 60 bp, Artificial
  Synthetic oligonucleotide
ttcagagtggcgttcccggcttgcacataaaggtcgaattggatgagctttccgctcacg

SEQ ID NO: 478997 - DNA, 55 bp, Artificial
  Synthetic oligonucleotide
ttcagagtgggtcacccacgcgcactgaccgaggtttggcaatgtttgttgtcct

SEQ ID NO: 478998 - DNA, 58 bp, Artificial
  Synthetic oligonucleotide
ttcagatacaggcttagtacaaattcacactgctgcctgtgaccttcgatatgcacac

SEQ ID NO: 478999 - DNA, 60 bp, Artificial
  Synthetic oligonucleotide
ttcagatatctcgcttccatagtcatcagagtaaggatggattccgtgctcgctccctct

SEQ ID NO: 479000 - DNA, 60 bp, Artificial
  Synthetic oligonucleotide
ttcagatccagtggccgtgggtatcgatgctaaaaggtttgatcaacacgtaagcgttga

SEQ ID NO: 479001 - DNA, 55 bp, Artificial
  Synthetic oligonucleotide
ttcagatcgaggttattaaccaactactcacttcggttcgctctttcctaaattc

SEQ ID NO: 479002 - DNA, 55 bp, Artificial
  Synthetic oligonucleotide
ttcagatcttgggttgaattatgactttaattccagaacgcgagacaagtcagat

SEQ ID NO: 479003 - DNA, 60 bp, Artificial
  Synthetic oligonucleotide
ttcagatgacgctccttcactagctgttaacgatgtcgtcgcttcaacaactggcggttt

SEQ ID NO: 479004 - DNA, 51 bp, Artificial
  Synthetic oligonucleotide
ttcagatgagttaaacaagagaacattaacagatcgagagggtgttgcagt

SEQ ID NO: 479005 - DNA, 60 bp, Artificial
  Synthetic oligonucleotide
ttcagatgtaccgttcgttcaggcatatagcaagttcgctgatgataatccacgtcatct

SEQ ID NO: 479006 - DNA, 53 bp, Artificial
  Synthetic oligonucleotide
ttcagattactttgttagtctgttcaatatggaggcaaaaatcatggacccgg

SEQ ID NO: 479007 - DNA, 54 bp, Artificial
  Synthetic oligonucleotide
ttcagattatatttggcctcacagcatcggcggtcgctgacagtatatcagatg

SEQ ID NO: 479008 - DNA, 55 bp, Artificial
  Synthetic oligonucleotide
ttcagatttgggtgccagcatagcagaataggaatcttgccacaaagaagagcac

SEQ ID NO: 479009 - DNA, 58 bp, Artificial
  Synthetic oligonucleotide
ttcagcacctacaaaataaatacttgggtgctaaaatgattaggaagtccctatgagc

SEQ ID NO: 479010 - DNA, 60 bp, Artificial
  Synthetic oligonucleotide
ttcagcacgcaatttctacaacaagttagcaacgcacatcaacacacctagagtactaat

SEQ ID NO: 479011 - DNA, 60 bp, Artificial
  Synthetic oligonucleotide
ttcagcagaagctcccccctgagatcattacgttgcatcccaaaattgaggaaggcttct

SEQ ID NO: 479012 - DNA, 60 bp, Artificial
  Synthetic oligonucleotide
ttcagcataaatgctccttggttgtataactttagtgtatgatggtcttgccattgtgac

SEQ ID NO: 479013 - DNA, 58 bp, Artificial
  Synthetic oligonucleotide
ttcagcatgcacttggatcctgcatccgtcatggagatcgtgcaagacgtgtctcaac

SEQ ID NO: 479014 - DNA, 60 bp, Artificial
  Synthetic oligonucleotide
ttcagcatggaactacccagttttggggtttccggaataaatgaatctgcagacatgagc

SEQ ID NO: 479015 - DNA, 57 bp, Artificial
  Synthetic oligonucleotide
ttcagccaaatccaaatttggctacggggcaaaagacgtccgttgccatgccagaaa

SEQ ID NO: 479016 - DNA, 52 bp, Artificial
  Synthetic oligonucleotide
ttcagccactcaagatcactctagatgaacattacgcagtcaatcaccagct

SEQ ID NO: 479017 - DNA, 60 bp, Artificial
  Synthetic oligonucleotide
ttcagccaggtccaagtatggctatggggcaaaagacgtccggtgccatgccagaaaggc

SEQ ID NO: 479018 - DNA, 60 bp, Artificial
  Synthetic oligonucleotide
ttcagccatgtcgacgtccaagaggaagcgggccgatgaggcgccctggaataagcggtc

SEQ ID NO: 479019 - DNA, 54 bp, Artificial
  Synthetic oligonucleotide
ttcagcccacgaaggtttgtcgggttttcttggtaacctattcatgcctctacc

SEQ ID NO: 479020 - DNA, 59 bp, Artificial
  Synthetic oligonucleotide
ttcagcccggtcgttggtttatgcgggctgcgcaggctgtaaccgccgtggtgtgtggc

SEQ ID NO: 479021 - DNA, 55 bp, Artificial
  Synthetic oligonucleotide
ttcagccgatgctagggcagtatcagaagagcaaactcaaccgagaggcttatgc

SEQ ID NO: 479022 - DNA, 60 bp, Artificial
  Synthetic oligonucleotide
ttcagccgtcattgatccattaagattgttggactcaagtagaactggtgtgctcgcgac

SEQ ID NO: 479023 - DNA, 55 bp, Artificial
  Synthetic oligonucleotide
ttcagcctgtccaagggcaaattaacatttaaagctttccccccacataattcaa

SEQ ID NO: 479024 - DNA, 60 bp, Artificial
  Synthetic oligonucleotide
ttcagccttccactggtccggcatccttggtgtgatgggattgtggacgctgtcggaaat

SEQ ID NO: 479025 - DNA, 55 bp, Artificial
  Synthetic oligonucleotide
ttcagcgaacagaagggctcctcctcctcgggagtaggcccgtagcgatggggag

SEQ ID NO: 479026 - DNA, 60 bp, Artificial
  Synthetic oligonucleotide
ttcagcgacgcaaaaccctggttttctggtatgtcaactgcggatatagagccaagagag

SEQ ID NO: 479027 - DNA, 55 bp, Artificial
  Synthetic oligonucleotide
ttcagcgcacgtaggcaagagaatataaccaaatcagctggtggagctgtcattc

SEQ ID NO: 479028 - DNA, 59 bp, Artificial
  Synthetic oligonucleotide
ttcagcgccatctgtggtgacacttactgagggtggccccgaccttctccctggaggcg

SEQ ID NO: 479029 - DNA, 60 bp, Artificial
  Synthetic oligonucleotide
ttcagcgcctggaccacaggccgtcaggccagtgtctagaccatttactgcaccgcatac

SEQ ID NO: 479030 - DNA, 60 bp, Artificial
  Synthetic oligonucleotide
ttcagcgccttcctgatgttgtaattgaaccggatttgtatgtgatagaccctgctcgtt

SEQ ID NO: 479031 - DNA, 57 bp, Artificial
  Synthetic oligonucleotide
ttcagcgccttgggcagagaacgttttagtggttccgtgtgacaacacgtggaggga

SEQ ID NO: 479032 - DNA, 55 bp, Artificial
  Synthetic oligonucleotide
ttcagcgcgtcccgagggcgggagccgaaggtgagtttacacaccgaagtctagg

SEQ ID NO: 479033 - DNA, 60 bp, Artificial
  Synthetic oligonucleotide
ttcagcggttaggcacaaagaaaatcccctgttctgacaatgatgaattcctgtttgctc

SEQ ID NO: 479034 - DNA, 57 bp, Artificial
  Synthetic oligonucleotide
ttcagcgtatacgcacacctattctacgatatgcgaatacatgcgtactccttgtgt

SEQ ID NO: 479035 - DNA, 60 bp, Artificial
  Synthetic oligonucleotide
ttcagcgttggggcgttgagagtcgctgtcagcacgtctgacagtttgaatgtaaacacg

SEQ ID NO: 479036 - DNA, 50 bp, Artificial
  Synthetic oligonucleotide
ttcagctaaatccaagtttggctatggggcgaaggacgtccgctgccatg

SEQ ID NO: 479037 - DNA, 51 bp, Artificial
  Synthetic oligonucleotide
ttcagctcataagtcaatttacagggaggggctctggcactgcaagggacc

SEQ ID NO: 479038 - DNA, 55 bp, Artificial
  Synthetic oligonucleotide
ttcagctccagcgtctggaacacaggcgggagagggtcacccgccgagcccttga

SEQ ID NO: 479039 - DNA, 59 bp, Artificial
  Synthetic oligonucleotide
ttcagctccggtgaagaacccacactgtatttggatgaactcgcgaggcctgtccccaa

SEQ ID NO: 479040 - DNA, 55 bp, Artificial
  Synthetic oligonucleotide
ttcagctcctcgtacgagtcagaatttaactatacatacgattcgagtttccggt

SEQ ID NO: 479041 - DNA, 60 bp, Artificial
  Synthetic oligonucleotide
ttcagctctagttcaaatttatgaagccgggacaaaactgcctctccacaaggatgacga

SEQ ID NO: 479042 - DNA, 57 bp, Artificial
  Synthetic oligonucleotide
ttcagctgaaacaaagtttcgactggaattctatgccacgggagaaagattggttag

SEQ ID NO: 479043 - DNA, 60 bp, Artificial
  Synthetic oligonucleotide
ttcagctggtgtcatagatggcgctgtgcaatctttatactccgaagacatgctgcttga

SEQ ID NO: 479044 - DNA, 60 bp, Artificial
  Synthetic oligonucleotide
ttcagcttggcacaccctcaatggaccgtattacaggtctggtactcactttctcaatcg

SEQ ID NO: 479045 - DNA, 52 bp, Artificial
  Synthetic oligonucleotide
ttcaggaactaaggaatagtgctgttagtttgcttaatgccacagctgtagc

SEQ ID NO: 479046 - DNA, 60 bp, Artificial
  Synthetic oligonucleotide
ttcaggaagattcgtgaaggtctcatagagatcggcacagtttcccttcgtgtccaaaga

SEQ ID NO: 479047 - DNA, 55 bp, Artificial
  Synthetic oligonucleotide
ttcaggaagtttcaaggttgggagagggccatccactcaaaattatttatacaaa

SEQ ID NO: 479048 - DNA, 50 bp, Artificial
  Synthetic oligonucleotide
ttcaggacaaaggggacattaaagtagttcctaggagaaaggcaaaaata

SEQ ID NO: 479049 - DNA, 60 bp, Artificial
  Synthetic oligonucleotide
ttcaggacccaacaacgactacctcaagatccgtactggcagcgcctacaacacatactc

SEQ ID NO: 479050 - DNA, 57 bp, Artificial
  Synthetic oligonucleotide
ttcaggagacgaatccagttacgctcaatatcgcctctgatgacaccgtcaaggcaa

SEQ ID NO: 479051 - DNA, 59 bp, Artificial
  Synthetic oligonucleotide
ttcaggagagagccacggaagaatcctgaagactgatttaaacagtggtaactgtgtag

SEQ ID NO: 479052 - DNA, 60 bp, Artificial
  Synthetic oligonucleotide
ttcaggagatgctcgacttaagcgcggaagtaattgagactgcgtcggaggaggtaccaa

SEQ ID NO: 479053 - DNA, 60 bp, Artificial
  Synthetic oligonucleotide
ttcaggagatgcttcgacgtgtagtcgaaaaacaagctgcagacgacacaaccgcgatcg

SEQ ID NO: 479054 - DNA, 60 bp, Artificial
  Synthetic oligonucleotide
ttcaggagcaccaagggagtacacttcagagtcgatgttttcctcaaagacgatcatata

SEQ ID NO: 479055 - DNA, 60 bp, Artificial
  Synthetic oligonucleotide
ttcaggaggtatcatatcattatggcaccagacagactttgttactgggagtaccactac

SEQ ID NO: 479056 - DNA, 60 bp, Artificial
  Synthetic oligonucleotide
ttcaggagtcttcctctggctcttcttggccgccgcgtgtattggttcctgagtgggaca

SEQ ID NO: 479057 - DNA, 59 bp, Artificial
  Synthetic oligonucleotide
ttcaggagtgatgagtccttcacatcccaaaccctcaccacaccatttgtaccctgttg

SEQ ID NO: 479058 - DNA, 53 bp, Artificial
  Synthetic oligonucleotide
ttcaggagtgattgactctttagggttaacaaagaacccaaactcacttttgg

SEQ ID NO: 479059 - DNA, 60 bp, Artificial
  Synthetic oligonucleotide
ttcaggatgaggcaccagtatatttcttctgtaatccataccgttatgcagttgctaact

SEQ ID NO: 479060 - DNA, 60 bp, Artificial
  Synthetic oligonucleotide
ttcaggatgattgcttacggggacgatgtgatcgcttcatacccgtggcccattgatgct

SEQ ID NO: 479061 - DNA, 60 bp, Artificial
  Synthetic oligonucleotide
ttcaggattaattgccaactgcacccgaagtgattcaatcaatgttgtattgggactttc

SEQ ID NO: 479062 - DNA, 57 bp, Artificial
  Synthetic oligonucleotide
ttcaggcaacgtttttagcaaatcacatactaatcgaatgtttagaaaaaagctcga

SEQ ID NO: 479063 - DNA, 55 bp, Artificial
  Synthetic oligonucleotide
ttcaggcaagtacttcaacagctcatcaaagtgcggagcaaagcgtggtgggaac

SEQ ID NO: 479064 - DNA, 60 bp, Artificial
  Synthetic oligonucleotide
ttcaggcagatctgaccaggtatgccagggagaagattcagtcttttcgtgactcaggaa

SEQ ID NO: 479065 - DNA, 60 bp, Artificial
  Synthetic oligonucleotide
ttcaggcagggcaatgatgtatggatgggaaggaccattagcagaacatcaagatcaggg

SEQ ID NO: 479066 - DNA, 60 bp, Artificial
  Synthetic oligonucleotide
ttcaggccacgagaacgatgttttcaacgtcgctcgagtggcatctgatgtactcaccca

SEQ ID NO: 479067 - DNA, 59 bp, Artificial
  Synthetic oligonucleotide
ttcaggcgattgtctatgcctcctacgcttggactctctatcaggcgagccacaggggg

SEQ ID NO: 479068 - DNA, 57 bp, Artificial
  Synthetic oligonucleotide
ttcaggcgctagttccgaccctgatctctcgacccaacccgcaaatctggttcacgg

SEQ ID NO: 479069 - DNA, 55 bp, Artificial
  Synthetic oligonucleotide
ttcaggcgttgattaggacccccaacgtgactaaggtggtgaggactccgtatta

SEQ ID NO: 479070 - DNA, 54 bp, Artificial
  Synthetic oligonucleotide
ttcaggctaaagagtggacgattttcggggaaggtctcccaagaagaaccagga

SEQ ID NO: 479071 - DNA, 60 bp, Artificial
  Synthetic oligonucleotide
ttcaggctacccatatgccgaagcacctgggacgctttttggactgactattggcaggcg

SEQ ID NO: 479072 - DNA, 58 bp, Artificial
  Synthetic oligonucleotide
ttcaggcttttaagagccccgatccaaaccacttcaacatccttgacgagtattgtgc

SEQ ID NO: 479073 - DNA, 59 bp, Artificial
  Synthetic oligonucleotide
ttcagggagctaaacaagagaacacaagacttcatggaagtccaattagggataccaca

SEQ ID NO: 479074 - DNA, 58 bp, Artificial
  Synthetic oligonucleotide
ttcagggatgatctaaaaaaaactgtcactcctcagaacttcacaccaggatgttacc

SEQ ID NO: 479075 - DNA, 60 bp, Artificial
  Synthetic oligonucleotide
ttcaggggaagctacttggcgggagctggactggctttctcactcataaagaatgcacag

SEQ ID NO: 479076 - DNA, 60 bp, Artificial
  Synthetic oligonucleotide
ttcagggggcgcttatgacataataatttgtgacgagtgccattccaccgatgcaacatc

SEQ ID NO: 479077 - DNA, 59 bp, Artificial
  Synthetic oligonucleotide
ttcaggggttgtcaccaattgagctctctcaaaagtccttatgaattggtggacattgg

SEQ ID NO: 479078 - DNA, 56 bp, Artificial
  Synthetic oligonucleotide
ttcagggtacgacgtgaaccctgtcaactgcggtagcagcagattagacgcgcact

SEQ ID NO: 479079 - DNA, 60 bp, Artificial
  Synthetic oligonucleotide
ttcagggtcggacataagatggctgtccgaagatatgctttgagcaagttaatgggcatc

SEQ ID NO: 479080 - DNA, 50 bp, Artificial
  Synthetic oligonucleotide
ttcagggtggctaagcctatagcacaggctcggacatcattcatgaggag

SEQ ID NO: 479081 - DNA, 55 bp, Artificial
  Synthetic oligonucleotide
ttcagggtgggtgggatcaggaaagatttaaacttcataacatactgacggaccc

SEQ ID NO: 479082 - DNA, 60 bp, Artificial
  Synthetic oligonucleotide
ttcaggtaggtggttcaaacatattagatataacggcagatccaacgacagcgccacaaa

SEQ ID NO: 479083 - DNA, 53 bp, Artificial
  Synthetic oligonucleotide
ttcaggtatttagatatggtggaacatatgacaagcaggtgcgtacaaagacc

SEQ ID NO: 479084 - DNA, 57 bp, Artificial
  Synthetic oligonucleotide
ttcaggtggtattctacgtttctatggataaaacgcttaaccagtaccctgcattga

SEQ ID NO: 479085 - DNA, 60 bp, Artificial
  Synthetic oligonucleotide
ttcaggtgtgtgctaagcgcctgggccttttattgacacctagacagcaaaagatggagg

SEQ ID NO: 479086 - DNA, 55 bp, Artificial
  Synthetic oligonucleotide
ttcaggtgttgctgatggattaccagagatggcacatctgacggcacgcccaggt

SEQ ID NO: 479087 - DNA, 55 bp, Artificial
  Synthetic oligonucleotide
ttcaggtgttttggatactgatatcatttctccattgaacttgcgtgggcatcct

SEQ ID NO: 479088 - DNA, 57 bp, Artificial
  Synthetic oligonucleotide
ttcaggttacctataaagggggtcccaatcgagctacaagtggaatgcttcacatgg

SEQ ID NO: 479089 - DNA, 60 bp, Artificial
  Synthetic oligonucleotide
ttcaggttcaggctaactgtgagtgaaccttcattttccatatcacgaactagattaagc

SEQ ID NO: 479090 - DNA, 57 bp, Artificial
  Synthetic oligonucleotide
ttcaggttgcactcggataccatcatttgacatgagcgctactcactactgctatac

SEQ ID NO: 479091 - DNA, 56 bp, Artificial
  Synthetic oligonucleotide
ttcaggttggacaacaactcccttaacggatttgtctatgaccatagattggtatt

SEQ ID NO: 479092 - DNA, 55 bp, Artificial
  Synthetic oligonucleotide
ttcaggttgtttcggttagaacagacggatctaacatttctacacagtggcccag

SEQ ID NO: 479093 - DNA, 60 bp, Artificial
  Synthetic oligonucleotide
ttcaggtttgatatattatgcaggattagaacctcataggaatattagaaaaggcttatg

SEQ ID NO: 479094 - DNA, 58 bp, Artificial
  Synthetic oligonucleotide
ttcaggttttacgaaggtttcatgcaacggtcaccggagggcaatatgcagctaagga

SEQ ID NO: 479095 - DNA, 60 bp, Artificial
  Synthetic oligonucleotide
ttcagtaacgcggcagaggcatacatcgcaaagaggaacgcaaccgagaggtacatgccg

SEQ ID NO: 479096 - DNA, 60 bp, Artificial
  Synthetic oligonucleotide
ttcagtaacgtggctgaagcgtatattgaaaaacggaattatgagaaagcatacatgcca

SEQ ID NO: 479097 - DNA, 60 bp, Artificial
  Synthetic oligonucleotide
ttcagtaattcgtgctcgcaattatgtcgaagcgtcccgccgatatagtcatttccactc

SEQ ID NO: 479098 - DNA, 60 bp, Artificial
  Synthetic oligonucleotide
ttcagtaattgagttcccaaggggggttgagtctgtagagcttccagatggctctgactc

SEQ ID NO: 479099 - DNA, 51 bp, Artificial
  Synthetic oligonucleotide
ttcagtacatgacctttataggtacattaattcaaaggctaccaagtgtcc

SEQ ID NO: 479100 - DNA, 60 bp, Artificial
  Synthetic oligonucleotide
ttcagtaccaatctccagcaatctagcaacagagatctgtgcacttgaccactgtagagc

SEQ ID NO: 479101 - DNA, 55 bp, Artificial
  Synthetic oligonucleotide
ttcagtaccagacagcggctatggcaatatggaagtggaaacagctgaagtggag

SEQ ID NO: 479102 - DNA, 60 bp, Artificial
  Synthetic oligonucleotide
ttcagtactcgagtctttgggcagtaccagcgatgtgcgcagcataggttcgtcctcgga

SEQ ID NO: 479103 - DNA, 51 bp, Artificial
  Synthetic oligonucleotide
ttcagtacttatgggcccatactccgaagaggccaagctagaatatgtggt

SEQ ID NO: 479104 - DNA, 59 bp, Artificial
  Synthetic oligonucleotide
ttcagtagccacatcaacattgaacaaaaggtcaacccctgaaatagcaacaaggccta

SEQ ID NO: 479105 - DNA, 60 bp, Artificial
  Synthetic oligonucleotide
ttcagtagtgcgctacaccccatgcggcgcgccagtggatttatctgaacagactatccc

SEQ ID NO: 479106 - DNA, 60 bp, Artificial
  Synthetic oligonucleotide
ttcagtatattacgtatcccttcctctaaattgatgaagtcgaatggtggtatgatccca

SEQ ID NO: 479107 - DNA, 60 bp, Artificial
  Synthetic oligonucleotide
ttcagtatgacaagaagtcgaagcctcctgcagtgttagaatcatctaacagttcacagg

SEQ ID NO: 479108 - DNA, 60 bp, Artificial
  Synthetic oligonucleotide
ttcagtatggagctgcccagctttggggtgtctgggattaatgaatcggctgacatgagt

SEQ ID NO: 479109 - DNA, 51 bp, Artificial
  Synthetic oligonucleotide
ttcagtattaatttgttattccagtgatttagtcatataccgagcaaatac

SEQ ID NO: 479110 - DNA, 58 bp, Artificial
  Synthetic oligonucleotide
ttcagtcaattcagacgtcaccatggctggtgcactctacgacaagcgccacaagacc

SEQ ID NO: 479111 - DNA, 51 bp, Artificial
  Synthetic oligonucleotide
ttcagtcagaaacacaatttctaacaggtataaattcacaagcagccaacg

SEQ ID NO: 479112 - DNA, 60 bp, Artificial
  Synthetic oligonucleotide
ttcagtcatatcacaatatacgcataatggactatcaagagtatcaacaattcttggcta

SEQ ID NO: 479113 - DNA, 56 bp, Artificial
  Synthetic oligonucleotide
ttcagtcatgaacacaggttatattctagtcggagtcgggttgattgcagtggtgg

SEQ ID NO: 479114 - DNA, 57 bp, Artificial
  Synthetic oligonucleotide
ttcagtcatgagactatcgggtgaaggccccacttatgactttaatacttgggctaa

SEQ ID NO: 479115 - DNA, 52 bp, Artificial
  Synthetic oligonucleotide
ttcagtccggcccctcgttcccgaagtaacccacggtcgtattgcttctttc

SEQ ID NO: 479116 - DNA, 60 bp, Artificial
  Synthetic oligonucleotide
ttcagtccttggtggctgccggtgagactatgatcacggtgcctaacggcggcatctgct

SEQ ID NO: 479117 - DNA, 60 bp, Artificial
  Synthetic oligonucleotide
ttcagtcgctagtacctaaagcagtcagaggtcaatacagcgggtttgtgagaacactat

SEQ ID NO: 479118 - DNA, 60 bp, Artificial
  Synthetic oligonucleotide
ttcagtcgtttgagttctacacatcatatcagcataataggtatagtaatgtgtgtagtg

SEQ ID NO: 479119 - DNA, 58 bp, Artificial
  Synthetic oligonucleotide
ttcagtctccctttgaatttagcgaagtgggtactctggtgaacgttcgtgtcacata

SEQ ID NO: 479120 - DNA, 55 bp, Artificial
  Synthetic oligonucleotide
ttcagtctgcgatcaaagcgactccggtcagctggcccgctgtctacaacgcttc

SEQ ID NO: 479121 - DNA, 50 bp, Artificial
  Synthetic oligonucleotide
ttcagtctgtccaagtcagctgcgagaaccaagaggtcgtcagacgttag

SEQ ID NO: 479122 - DNA, 60 bp, Artificial
  Synthetic oligonucleotide
ttcagtcttctcacacggaaaaatcaagtctttagggatgtacaacgcaatcatcgatgg

SEQ ID NO: 479123 - DNA, 60 bp, Artificial
  Synthetic oligonucleotide
ttcagtgaagaccaggtcatcgaattgataaggatggccgttggtagagaaattggaata

SEQ ID NO: 479124 - DNA, 55 bp, Artificial
  Synthetic oligonucleotide
ttcagtgaccagcaatactgcggttgtcgtgcgcttcaaccgtaacgttcctccg

SEQ ID NO: 479125 - DNA, 55 bp, Artificial
  Synthetic oligonucleotide
ttcagtgacctgcgtgtggggttccgtgtcttggtttgcctccaccggggggcgc

SEQ ID NO: 479126 - DNA, 59 bp, Artificial
  Synthetic oligonucleotide
ttcagtgacgatcctggaatcctggggccctgtccactcgctcctaattcaacgaggga

SEQ ID NO: 479127 - DNA, 60 bp, Artificial
  Synthetic oligonucleotide
ttcagtgactaatgatcagattccatcgttgtctaactccgtatctagtgcaaccacaag

SEQ ID NO: 479128 - DNA, 55 bp, Artificial
  Synthetic oligonucleotide
ttcagtgagttctcccaggtatacgatctggactacaagtgttttgatgctaccc

SEQ ID NO: 479129 - DNA, 60 bp, Artificial
  Synthetic oligonucleotide
ttcagtgatggccaaatgtaataaggatcataacgaagaattctgtgatactatgagact

SEQ ID NO: 479130 - DNA, 55 bp, Artificial
  Synthetic oligonucleotide
ttcagtgcggcattcttctcttcgtccagatattcctatagctgctgttcggacc

SEQ ID NO: 479131 - DNA, 60 bp, Artificial
  Synthetic oligonucleotide
ttcagtggacgccactaccatccttggcattggaacagtcctggatcaggctgagaccgc

SEQ ID NO: 479132 - DNA, 58 bp, Artificial
  Synthetic oligonucleotide
ttcagtggtagcatacggtgagtggccgtcttatttgtcagacaaagaggctaacccg

SEQ ID NO: 479133 - DNA, 59 bp, Artificial
  Synthetic oligonucleotide
ttcagtggttcgtagggctttcccccactgtctggctttcagttatattgatgatgtgg

SEQ ID NO: 479134 - DNA, 57 bp, Artificial
  Synthetic oligonucleotide
ttcagtgtagtcaccgtaggcccgtaatttggccgctaagctttcaggcgtctcgcg

SEQ ID NO: 479135 - DNA, 60 bp, Artificial
  Synthetic oligonucleotide
ttcagtgtataggatccagaacctaccagatagtagatgatggttcaaagtcagctatat

SEQ ID NO: 479136 - DNA, 59 bp, Artificial
  Synthetic oligonucleotide
ttcagtgtctgtgcttccgtcctttgatcagtcatccttttcaagaggccctctaaagg

SEQ ID NO: 479137 - DNA, 52 bp, Artificial
  Synthetic oligonucleotide
ttcagtgtgtgaccgggtggactacaacgccacttacagatttagcgttggt

SEQ ID NO: 479138 - DNA, 52 bp, Artificial
  Synthetic oligonucleotide
ttcagttagaacgtaacatcaatagggccatgactatcctccaggctgtcac

SEQ ID NO: 479139 - DNA, 58 bp, Artificial
  Synthetic oligonucleotide
ttcagttcgattgggctcctcagctctacctgacgtatggtattgctcaggagtcgtt

SEQ ID NO: 479140 - DNA, 52 bp, Artificial
  Synthetic oligonucleotide
ttcagttcgcgacgcctcaggattccacgttgcaccgccgccagaaaacccg

SEQ ID NO: 479141 - DNA, 55 bp, Artificial
  Synthetic oligonucleotide
ttcagttgatcccaatgataagtaaatgcagaaccaaagaagggcgacggaagac

SEQ ID NO: 479142 - DNA, 55 bp, Artificial
  Synthetic oligonucleotide
ttcagttggacaaccaatgggagcgtatactagttgagctgcctttaccttgaca

SEQ ID NO: 479143 - DNA, 60 bp, Artificial
  Synthetic oligonucleotide
ttcagttgttgaagtcgactctaatgccacaatcaaactggacgatacagttggaattaa

SEQ ID NO: 479144 - DNA, 55 bp, Artificial
  Synthetic oligonucleotide
ttcagtttcgtgtcaacttttctattcctgtgactttatttaataaaccgtctca

SEQ ID NO: 479145 - DNA, 57 bp, Artificial
  Synthetic oligonucleotide
ttcataaaactccatcgtgatccaaagaaaagtcatgagaaattccgttactgagct

SEQ ID NO: 479146 - DNA, 52 bp, Artificial
  Synthetic oligonucleotide
ttcataaaccaaagagccctcctcaggaatctcgcatcatcattcagcctgt

SEQ ID NO: 479147 - DNA, 51 bp, Artificial
  Synthetic oligonucleotide
ttcataaacttcgagttcttgatgcacacacttattagacggaatcttccg

SEQ ID NO: 479148 - DNA, 60 bp, Artificial
  Synthetic oligonucleotide
ttcataaaggatcaagccttgttaaatctgtggggatgtgctaacaggcagatctgtcac

SEQ ID NO: 479149 - DNA, 58 bp, Artificial
  Synthetic oligonucleotide
ttcataacatcaactcatgtcataccccagggcgcacaagagttcttcggggtccccg

SEQ ID NO: 479150 - DNA, 60 bp, Artificial
  Synthetic oligonucleotide
ttcataacatctcgaggatatcaatcggggactgtcccaagtatgtcaaacagggatcct

SEQ ID NO: 479151 - DNA, 55 bp, Artificial
  Synthetic oligonucleotide
ttcataaccctagtaaagaaaggttagtgtgggcagttgtgggtgtccaggtgtc

SEQ ID NO: 479152 - DNA, 59 bp, Artificial
  Synthetic oligonucleotide
ttcataacgaaaggcttaggcatctcctatggcaggaagaagcggagacaacgacgaaa

SEQ ID NO: 479153 - DNA, 58 bp, Artificial
  Synthetic oligonucleotide
ttcataagacacatggacgctgtggggtgcaaatccccccctaacttgagggaaatca

SEQ ID NO: 479154 - DNA, 57 bp, Artificial
  Synthetic oligonucleotide
ttcataagccctacaaacagatctaaaagggaatccaaggtgcaaataattctgact

SEQ ID NO: 479155 - DNA, 55 bp, Artificial
  Synthetic oligonucleotide
ttcataagtacacacaagagtatacagctggcggatatcatcaaaacggtcgatg

SEQ ID NO: 479156 - DNA, 53 bp, Artificial
  Synthetic oligonucleotide
ttcatacaagcaatcaagagaaccgattcaaagccattctacggaaaatcaag

SEQ ID NO: 479157 - DNA, 55 bp, Artificial
  Synthetic oligonucleotide
ttcatacaaggttatagaacaaccacgtatgtaacataaatgccgttcaaggtgc

SEQ ID NO: 479158 - DNA, 60 bp, Artificial
  Synthetic oligonucleotide
ttcatacattcgacgaactattcggtgcaatgatccatagtcatggtaatcttggaataa

SEQ ID NO: 479159 - DNA, 55 bp, Artificial
  Synthetic oligonucleotide
ttcataccatcaatgctacatggtgggctaatataactttagtgggaccctcaga

SEQ ID NO: 479160 - DNA, 60 bp, Artificial
  Synthetic oligonucleotide
ttcataccgaaggtatgaatcttctctttgacccatacgatgatgaatcgtctgctcatt

SEQ ID NO: 479161 - DNA, 60 bp, Artificial
  Synthetic oligonucleotide
ttcatacctccatagattcaagcacgtggaattgtccttgtcagggtcacatcgcaccac

SEQ ID NO: 479162 - DNA, 60 bp, Artificial
  Synthetic oligonucleotide
ttcatacgatggatgtttaggtatatttggactgtcaatatctttagcttcgaagccaac

SEQ ID NO: 479163 - DNA, 60 bp, Artificial
  Synthetic oligonucleotide
ttcatacgcaagaacaagaccagctcacttcatcggatgtttcgttgtcccagccgtctt

SEQ ID NO: 479164 - DNA, 60 bp, Artificial
  Synthetic oligonucleotide
ttcatacgtatacattgattattgggatgattcgcaggcgtttagaaatatggtatatgt

SEQ ID NO: 479165 - DNA, 60 bp, Artificial
  Synthetic oligonucleotide
ttcatacgtctatatcgattactgggatgattcacaagcatttcgtaacgtgatgtatgt

SEQ ID NO: 479166 - DNA, 60 bp, Artificial
  Synthetic oligonucleotide
ttcatacgtgtacattgactattgggacgactcacaagcgtttaggaacatggtatatgt

SEQ ID NO: 479167 - DNA, 52 bp, Artificial
  Synthetic oligonucleotide
ttcatactaaataactataaccctgactatataaacgtccaaattaaggacg

SEQ ID NO: 479168 - DNA, 55 bp, Artificial
  Synthetic oligonucleotide
ttcatagaacgcagcaatgctttcagcaattgttacccttatgatgtgccagatc

SEQ ID NO: 479169 - DNA, 55 bp, Artificial
  Synthetic oligonucleotide
ttcatagagcagcaacaccagacatggggcatagggaagtacataccggagggag

SEQ ID NO: 479170 - DNA, 56 bp, Artificial
  Synthetic oligonucleotide
ttcatagcccgggcggaggccgtaatacatcaatgggtcccaggtctacaggtacg

SEQ ID NO: 479171 - DNA, 60 bp, Artificial
  Synthetic oligonucleotide
ttcatagcttaggacaatatatctatgaaacttatggggatacctggacaggagttgaag

SEQ ID NO: 479172 - DNA, 60 bp, Artificial
  Synthetic oligonucleotide
ttcataggagatggggtgttcaaaaccacgttatttggagagattgcacagtattactca

SEQ ID NO: 479173 - DNA, 50 bp, Artificial
  Synthetic oligonucleotide
ttcataggccgcgggtaccaccccggcaaccaactcgggggttaggatgg

SEQ ID NO: 479174 - DNA, 55 bp, Artificial
  Synthetic oligonucleotide
ttcatagtcttttgctcgttatgtcccgaggttcaatcaagtactttacctctca

SEQ ID NO: 479175 - DNA, 57 bp, Artificial
  Synthetic oligonucleotide
ttcatatacgaaggagaaaccccaaatgccacgaccaaaagatacattgtgacgaag

SEQ ID NO: 479176 - DNA, 60 bp, Artificial
  Synthetic oligonucleotide
ttcatatatgatgaacactcattacatagaacatatatttgtgatgtatggttattattg

SEQ ID NO: 479177 - DNA, 54 bp, Artificial
  Synthetic oligonucleotide
ttcatatggatcactgtcaactggatatcacgtcctcaagacgaacactgtgga

SEQ ID NO: 479178 - DNA, 60 bp, Artificial
  Synthetic oligonucleotide
ttcatatgtacctgcgagtgatctgctgacgttatatcttgaaaggcaagtttccaacag

SEQ ID NO: 479179 - DNA, 60 bp, Artificial
  Synthetic oligonucleotide
ttcatatgtcatgaacactgattaaatagaaccgatagttgtgatatgtggttattatag

SEQ ID NO: 479180 - DNA, 53 bp, Artificial
  Synthetic oligonucleotide
ttcatattagtccattatcgggaagtgctcagcatgtggaggagtgttcttgt

SEQ ID NO: 479181 - DNA, 58 bp, Artificial
  Synthetic oligonucleotide
ttcatcaaagaatcggtatgacgatgttccgtgttgggatctttttagagtcatttta

SEQ ID NO: 479182 - DNA, 55 bp, Artificial
  Synthetic oligonucleotide
ttcatcaaaggatcaaaagacttaccaagttcggggcagtttctctctcatgttg

SEQ ID NO: 479183 - DNA, 60 bp, Artificial
  Synthetic oligonucleotide
ttcatcaatgtggttgttgcttctaccactggtggatacacaggaagcaccaccttcact

SEQ ID NO: 479184 - DNA, 55 bp, Artificial
  Synthetic oligonucleotide
ttcatcacgaatcccgttccgttatatttgtatccgttccgttatttatcaccat

SEQ ID NO: 479185 - DNA, 55 bp, Artificial
  Synthetic oligonucleotide
ttcatcagattgaaaaggaattttccgaagtggaaggaagaatccaggaccttga

SEQ ID NO: 479186 - DNA, 55 bp, Artificial
  Synthetic oligonucleotide
ttcatcaggcggcccagtcatgtgcccttccgggcacgtggtgggtgttttcagg

SEQ ID NO: 479187 - DNA, 60 bp, Artificial
  Synthetic oligonucleotide
ttcatcagtgatgcaattcaagggctattggctatcggcgggcgatgggatactattaat

SEQ ID NO: 479188 - DNA, 60 bp, Artificial
  Synthetic oligonucleotide
ttcatcataaaaggaagatctcacttaaggaatgacaccgatgtggtaaactttgtgagc

SEQ ID NO: 479189 - DNA, 53 bp, Artificial
  Synthetic oligonucleotide
ttcatcataagcgacttggttaaatggtggtcgtagtacaccatctacatgta

SEQ ID NO: 479190 - DNA, 60 bp, Artificial
  Synthetic oligonucleotide
ttcatcatcgatgatgtgggagatcaatggtcctgagtcggtgttggtcaatacttatca

SEQ ID NO: 479191 - DNA, 60 bp, Artificial
  Synthetic oligonucleotide
ttcatccactttcgttcattgggcttgagcgggaagtccccgtattcatcaaatgcagtc

SEQ ID NO: 479192 - DNA, 60 bp, Artificial
  Synthetic oligonucleotide
ttcatccatatcggccttatgcaagtcagaatacaagtgctacaccgacacgaagcaggc

SEQ ID NO: 479193 - DNA, 54 bp, Artificial
  Synthetic oligonucleotide
ttcatccatcactatcacgatgtagacagcacaatgtaaagctacggctattat

SEQ ID NO: 479194 - DNA, 57 bp, Artificial
  Synthetic oligonucleotide
ttcatccctatggggggagaccggtaagacggagactgaacttcgagacagctatcg

SEQ ID NO: 479195 - DNA, 58 bp, Artificial
  Synthetic oligonucleotide
ttcatccggaaacaaggaggaagactcgtcaaactatagaggaggttcaggatggcac

SEQ ID NO: 479196 - DNA, 54 bp, Artificial
  Synthetic oligonucleotide
ttcatcgaagtaagaaaagggtcccctctattttcctacaatccacaaacagaa

SEQ ID NO: 479197 - DNA, 55 bp, Artificial
  Synthetic oligonucleotide
ttcatcgaatcagcaattacgtcatcttgggtatccattgatgcccgcaaacgca

SEQ ID NO: 479198 - DNA, 59 bp, Artificial
  Synthetic oligonucleotide
ttcatcggtacaactacgaatccgagagtaggagggctggatatagctggcttcacggt

SEQ ID NO: 479199 - DNA, 60 bp, Artificial
  Synthetic oligonucleotide
ttcatcggtagtcaagcaccaatgacggagactatcaatgatcatctcgacatgatttgg

SEQ ID NO: 479200 - DNA, 59 bp, Artificial
  Synthetic oligonucleotide
ttcatcggttactcccacttctttcgtacaatagagcgtccaatccaggtgcggataca

SEQ ID NO: 479201 - DNA, 57 bp, Artificial
  Synthetic oligonucleotide
ttcatcggttgtcctggtgcaaagagggacggtgccacacccgattagaggcggaac

SEQ ID NO: 479202 - DNA, 55 bp, Artificial
  Synthetic oligonucleotide
ttcatcgtccccatggctgacgttaacgacaagggacggttctacacctcccgcg

SEQ ID NO: 479203 - DNA, 55 bp, Artificial
  Synthetic oligonucleotide
ttcatcgtcctttactggttacgtatccatgggtttgtcttatgactatgcggac

SEQ ID NO: 479204 - DNA, 50 bp, Artificial
  Synthetic oligonucleotide
ttcatcgtctatgatgtgggagatcaatggccccgagtcggtattagtca

SEQ ID NO: 479205 - DNA, 59 bp, Artificial
  Synthetic oligonucleotide
ttcatcgtcttgaaagtgactggactacttcagacatcgttgaaaaggttgagttaatg

SEQ ID NO: 479206 - DNA, 60 bp, Artificial
  Synthetic oligonucleotide
ttcatctaaggctagtgtctcctttggagcacctagccttctctcttcggagagtgaaga

SEQ ID NO: 479207 - DNA, 59 bp, Artificial
  Synthetic oligonucleotide
ttcatctactcaggtgggggcccaagcgtatcgttagaaaccttcaaagacatgtgcaa

SEQ ID NO: 479208 - DNA, 57 bp, Artificial
  Synthetic oligonucleotide
ttcatctcagaggtaaataaacgggacaccaatggtaattgggacaccgatacatcg

SEQ ID NO: 479209 - DNA, 60 bp, Artificial
  Synthetic oligonucleotide
ttcatctcagctggagagactcccgaaggagtgtcaaccgaaaatgatgacgggataaat

SEQ ID NO: 479210 - DNA, 55 bp, Artificial
  Synthetic oligonucleotide
ttcatctctgtgcgactctatataattgaacgcattcggtgcattggctaactga

SEQ ID NO: 479211 - DNA, 55 bp, Artificial
  Synthetic oligonucleotide
ttcatctgaccacccggggaggagagccgcacatgatagttagcaagcaggaaag

SEQ ID NO: 479212 - DNA, 59 bp, Artificial
  Synthetic oligonucleotide
ttcatctgactggtgtactatgccaaatctatggtttctattgttcttgggactagttg

SEQ ID NO: 479213 - DNA, 60 bp, Artificial
  Synthetic oligonucleotide
ttcatctgccaacggagtgaccacacattacgtttcacagattggtggcttcccaaatca

SEQ ID NO: 479214 - DNA, 60 bp, Artificial
  Synthetic oligonucleotide
ttcatctgctcataaaaaacacactcttcttcaggtgtcattgcttccttggggttaaca

SEQ ID NO: 479215 - DNA, 60 bp, Artificial
  Synthetic oligonucleotide
ttcatctggcacgattctgactcgccagccccgattatgcagggtgattagatccacact

SEQ ID NO: 479216 - DNA, 53 bp, Artificial
  Synthetic oligonucleotide
ttcatctggtgttactacatcttcatatggtgagggtattacattacttggtg

SEQ ID NO: 479217 - DNA, 59 bp, Artificial
  Synthetic oligonucleotide
ttcatcttgtcgtagtctgtggtctcttatttctacgactaccgagcctgtggcgttaa

SEQ ID NO: 479218 - DNA, 60 bp, Artificial
  Synthetic oligonucleotide
ttcatgaaataagttcactatgggattcaatgacaaccgcaaattacgtattagctagat

SEQ ID NO: 479219 - DNA, 59 bp, Artificial
  Synthetic oligonucleotide
ttcatgaacaatacagaaccattgtgtgatgctaaggggtttgcacccttttccaaaga

SEQ ID NO: 479220 - DNA, 56 bp, Artificial
  Synthetic oligonucleotide
ttcatgaaccaacttccaactgcgaaaagttcgttccttccgaaaagtatctgtga

SEQ ID NO: 479221 - DNA, 55 bp, Artificial
  Synthetic oligonucleotide
ttcatgaactacgaaccaaaacgcacgctaaagttacgatctctctttcgaccga

SEQ ID NO: 479222 - DNA, 60 bp, Artificial
  Synthetic oligonucleotide
ttcatgaatcctttagtggattcttgtgtataagaccagttactaaattgatggctcctg

SEQ ID NO: 479223 - DNA, 60 bp, Artificial
  Synthetic oligonucleotide
ttcatgacccagactacattggggggataggcaaagaactcatagtagacgacatcagtg

SEQ ID NO: 479224 - DNA, 60 bp, Artificial
  Synthetic oligonucleotide
ttcatgagacccgctcaggccgtaacgccagtaatctgtgggccagacatgatccaagtt

SEQ ID NO: 479225 - DNA, 60 bp, Artificial
  Synthetic oligonucleotide
ttcatgagctttgttgatcgattgaagtttttggaccgaatgtctcagtcgtgtatcgat

SEQ ID NO: 479226 - DNA, 60 bp, Artificial
  Synthetic oligonucleotide
ttcatgaggtctacaatccggcctcaggtatgtatgaatatggggggcttatagttgtaa

SEQ ID NO: 479227 - DNA, 55 bp, Artificial
  Synthetic oligonucleotide
ttcatgaggtgcaaggtgaaacgtttgaagatgtctcactggtaaggctgacgcc

SEQ ID NO: 479228 - DNA, 54 bp, Artificial
  Synthetic oligonucleotide
ttcatgagttcaatctactggcgcctcgtacggagcagaaggtttacttaaacc

SEQ ID NO: 479229 - DNA, 60 bp, Artificial
  Synthetic oligonucleotide
ttcatgatccttcatatcctcagaggattgttcatgctctgcttgaaactcacacatctt

SEQ ID NO: 479230 - DNA, 60 bp, Artificial
  Synthetic oligonucleotide
ttcatgatgggctacagagtaacacctgctgtgataaagttcatgttcactgggctaata

SEQ ID NO: 479231 - DNA, 60 bp, Artificial
  Synthetic oligonucleotide
ttcatgattcgtcgacaaggagtttactggttgttgacaatcccagaagatgaatttgaa

SEQ ID NO: 479232 - DNA, 55 bp, Artificial
  Synthetic oligonucleotide
ttcatgcaaaattaagtctatgctaagctttgttgagaggaacaaggcttggctt

SEQ ID NO: 479233 - DNA, 60 bp, Artificial
  Synthetic oligonucleotide
ttcatgcagctacgactcaaccgcgcacctaattgcgacgccgttgatgggaattgtagg

SEQ ID NO: 479234 - DNA, 60 bp, Artificial
  Synthetic oligonucleotide
ttcatgcatgatgttaaagtggccactaagtatgttaagaaggttactggcaaactagcc

SEQ ID NO: 479235 - DNA, 56 bp, Artificial
  Synthetic oligonucleotide
ttcatgcatttctgggcctatacatgtagcgcgcgcttttagccggaagtgaagaa

SEQ ID NO: 479236 - DNA, 60 bp, Artificial
  Synthetic oligonucleotide
ttcatgccatgacggcatctcaagaatgtcaatctgcatgtcaggacctaataacaatgc

SEQ ID NO: 479237 - DNA, 59 bp, Artificial
  Synthetic oligonucleotide
ttcatgccccgccacgaccaagctgcactcgtggcaatcctccgcaccatccccggact

SEQ ID NO: 479238 - DNA, 56 bp, Artificial
  Synthetic oligonucleotide
ttcatgctaagtgcgtagataattcaaagagaggtttatcactgagctctctgttt

SEQ ID NO: 479239 - DNA, 60 bp, Artificial
  Synthetic oligonucleotide
ttcatgctcgaatgaatggtggactccgaaggatcatgcgtaactacagtgatgaaaccg

SEQ ID NO: 479240 - DNA, 55 bp, Artificial
  Synthetic oligonucleotide
ttcatgctcggaatatcgtattcgatgtcgtaaaacccggtgagtgtaatcacca

SEQ ID NO: 479241 - DNA, 55 bp, Artificial
  Synthetic oligonucleotide
ttcatgctcggacgcgtactgctgagatgggagctgacgaaggcacagcgcagcg

SEQ ID NO: 479242 - DNA, 60 bp, Artificial
  Synthetic oligonucleotide
ttcatgcttcctgacgcggaagatcagccagtgaacatccagggggttttcgaaagcgaa

SEQ ID NO: 479243 - DNA, 59 bp, Artificial
  Synthetic oligonucleotide
ttcatggaaggatacactatcacaactatttcttataaaaggttggccaacaggatcag

SEQ ID NO: 479244 - DNA, 55 bp, Artificial
  Synthetic oligonucleotide
ttcatggaattgatacgtaccgctaatatagccccttatcccctacacatggccc

SEQ ID NO: 479245 - DNA, 60 bp, Artificial
  Synthetic oligonucleotide
ttcatggcggaatctccaattgctgggagtttatctgggaatcccgtgaatcgtgactat

SEQ ID NO: 479246 - DNA, 58 bp, Artificial
  Synthetic oligonucleotide
ttcatggctcaaaaaatttaccgaaatgtgcaatgcagctaggggtcttgaatggatt

SEQ ID NO: 479247 - DNA, 51 bp, Artificial
  Synthetic oligonucleotide
ttcatgggcaaggagtgggacgcgccctggcggaaaacgtctgcgtcacat

SEQ ID NO: 479248 - DNA, 54 bp, Artificial
  Synthetic oligonucleotide
ttcatggggtaaaaccctaagataggggcctgattgagttctacgtttctgtta

SEQ ID NO: 479249 - DNA, 60 bp, Artificial
  Synthetic oligonucleotide
ttcatgggtgcgtatggtaagagccgattgaatcgtattgcctatgctaaggacattttg

SEQ ID NO: 479250 - DNA, 50 bp, Artificial
  Synthetic oligonucleotide
ttcatggtctttttcacgggcgcttcaggcacagggaaaacttcagttgt

SEQ ID NO: 479251 - DNA, 56 bp, Artificial
  Synthetic oligonucleotide
ttcatggtgacccttgaacaaggtctagtactgcctaccgaaatgggcgggaagaa

SEQ ID NO: 479252 - DNA, 59 bp, Artificial
  Synthetic oligonucleotide
ttcatggttctcctgttaattcctatactaatacaccttatactggtgcactggggctc

SEQ ID NO: 479253 - DNA, 60 bp, Artificial
  Synthetic oligonucleotide
ttcatgtacaattgatgagcccaaatttcgtattgacgacgaaataatgagaatgtacaa

SEQ ID NO: 479254 - DNA, 55 bp, Artificial
  Synthetic oligonucleotide
ttcatgtatgatccaaacccggtaacggaaggagacttcgctaggttagatcttg

SEQ ID NO: 479255 - DNA, 53 bp, Artificial
  Synthetic oligonucleotide
ttcatgtattcagatttccacttcattgatgaacgaggtgaatcaatagttgt

SEQ ID NO: 479256 - DNA, 60 bp, Artificial
  Synthetic oligonucleotide
ttcatgtattcgaagaggagccagcattcaagcatttggcagcccagttatctgaactgg

SEQ ID NO: 479257 - DNA, 55 bp, Artificial
  Synthetic oligonucleotide
ttcatgtccaatgcaatgcatcaaaattccatcaaggcactctgggagtgttcgc

SEQ ID NO: 479258 - DNA, 60 bp, Artificial
  Synthetic oligonucleotide
ttcatgtcgctggtgttagttgtcttaaacactgtgatgcacatggcgatagcacattgt

SEQ ID NO: 479259 - DNA, 55 bp, Artificial
  Synthetic oligonucleotide
ttcatgtgccggttcaagttactctttagcaaatattgttaatgccatcagagcg

SEQ ID NO: 479260 - DNA, 60 bp, Artificial
  Synthetic oligonucleotide
ttcatgtggagatggggaatgttcatgagtacgattctgtggtgttgtatggacaatttg

SEQ ID NO: 479261 - DNA, 57 bp, Artificial
  Synthetic oligonucleotide
ttcatgtgttggtgaattgtattgttgttgcttaatcccacaagtaactaaactcat

SEQ ID NO: 479262 - DNA, 55 bp, Artificial
  Synthetic oligonucleotide
ttcatgttgaccgggctatggctgacatggttaattatgggctggcaaccgagcc

SEQ ID NO: 479263 - DNA, 56 bp, Artificial
  Synthetic oligonucleotide
ttcatgtttaattcagttgcacttctcatatgggtttgcttaactgaacgacgaat

SEQ ID NO: 479264 - DNA, 56 bp, Artificial
  Synthetic oligonucleotide
ttcatgtttactggctccactgactcaaaagcccgctacatggtggcgtacgttcc

SEQ ID NO: 479265 - DNA, 59 bp, Artificial
  Synthetic oligonucleotide
ttcattaacgcgccccatgcgagtgttcttctccgcttgcgtcaaaactctgttcccta

SEQ ID NO: 479266 - DNA, 50 bp, Artificial
  Synthetic oligonucleotide
ttcattacatcccgttgatgacacattcgatatgtttcgaatcaagcgtg

SEQ ID NO: 479267 - DNA, 55 bp, Artificial
  Synthetic oligonucleotide
ttcattactgtcgataacttgcggagtgttgtttgttgtatcacagacaacgcgg

SEQ ID NO: 479268 - DNA, 51 bp, Artificial
  Synthetic oligonucleotide
ttcattacttatgtcttcgtaattgtatcctaaggttggaaatgagttcac

SEQ ID NO: 479269 - DNA, 58 bp, Artificial
  Synthetic oligonucleotide
ttcattagaaggtctaatcctaggcaaccccaaatgtgatctttatttgaatggcagg

SEQ ID NO: 479270 - DNA, 52 bp, Artificial
  Synthetic oligonucleotide
ttcattagattcctcccatcgagacgaatccaacggacccatgctccatccg

SEQ ID NO: 479271 - DNA, 58 bp, Artificial
  Synthetic oligonucleotide
ttcattatagtagtagttgtgtggactatagtagggctagaatatagaaagttactaa

SEQ ID NO: 479272 - DNA, 50 bp, Artificial
  Synthetic oligonucleotide
ttcattatgcctgcttagcagatgaggattctaatgcagcagcttggcta

SEQ ID NO: 479273 - DNA, 58 bp, Artificial
  Synthetic oligonucleotide
ttcattcaacttgacgggcctgcggcccttaagcgttaagatacacaatcagataccc

SEQ ID NO: 479274 - DNA, 54 bp, Artificial
  Synthetic oligonucleotide
ttcattcagaattggtgaggaacgttctttctaagtcagggaaaaccctaattg

SEQ ID NO: 479275 - DNA, 60 bp, Artificial
  Synthetic oligonucleotide
ttcattccgaaatccagtttgtgtagggctagacgctagccgatttgaccagcatgtgtc

SEQ ID NO: 479276 - DNA, 55 bp, Artificial
  Synthetic oligonucleotide
ttcattccgcccaaccgcatggtctacccatggcccaacgctccactaccgcgta

SEQ ID NO: 479277 - DNA, 53 bp, Artificial
  Synthetic oligonucleotide
ttcattccgccgttagggtcaatctgcgtaccagtgctagcatttccaactgg

SEQ ID NO: 479278 - DNA, 56 bp, Artificial
  Synthetic oligonucleotide
ttcattctctcacctaaaacccgaccgaacgccaaaactgggtgttgccggcatca

SEQ ID NO: 479279 - DNA, 59 bp, Artificial
  Synthetic oligonucleotide
ttcattgaaattggagtgacacggagggaggtccacatatactacctagagaaggccaa

SEQ ID NO: 479280 - DNA, 51 bp, Artificial
  Synthetic oligonucleotide
ttcattgaaggaccggtactacatacgtcatgtgaccaaacatgtactctc

SEQ ID NO: 479281 - DNA, 60 bp, Artificial
  Synthetic oligonucleotide
ttcattgaatctggcgattggtcaggaggtaaaattggatatagccactcagcatcaatt

SEQ ID NO: 479282 - DNA, 53 bp, Artificial
  Synthetic oligonucleotide
ttcattgagaccttagaagatttcagcttctgtgttccaactgaggagctgac

SEQ ID NO: 479283 - DNA, 60 bp, Artificial
  Synthetic oligonucleotide
ttcattgagactggaaatgtattagtttctaaattgtctgttagaacagagagagctgtt

SEQ ID NO: 479284 - DNA, 60 bp, Artificial
  Synthetic oligonucleotide
ttcattgagagctcaaaggatgcaggattcccgattatcaacacaccaagtaagactaag

SEQ ID NO: 479285 - DNA, 59 bp, Artificial
  Synthetic oligonucleotide
ttcattgcgtttcacaccatcatcggaacgaatcttttttcctgggatttgatctagga

SEQ ID NO: 479286 - DNA, 60 bp, Artificial
  Synthetic oligonucleotide
ttcattgctcacgataactttcacactctagaagtcaggaaagtcagatacctccaccca

SEQ ID NO: 479287 - DNA, 60 bp, Artificial
  Synthetic oligonucleotide
ttcattggaactgttacttatagccgaaaatatatgtgttatgtggctgtgattaatgat

SEQ ID NO: 479288 - DNA, 50 bp, Artificial
  Synthetic oligonucleotide
ttcattggtacacgacatgctcaaaaggcatgcatcccggcataatggaa

SEQ ID NO: 479289 - DNA, 58 bp, Artificial
  Synthetic oligonucleotide
ttcattggtactgttggtctccctgggggcaatcagtttctggatgtgttccaatggg

SEQ ID NO: 479290 - DNA, 57 bp, Artificial
  Synthetic oligonucleotide
ttcattgtaatccaaccattcgcatgcgtgggttaacggcctttggttcgaccaata

SEQ ID NO: 479291 - DNA, 60 bp, Artificial
  Synthetic oligonucleotide
ttcattgtgaattaacgttgcataccacaattgaagctagctgcccaattaaaagctcgt

SEQ ID NO: 479292 - DNA, 54 bp, Artificial
  Synthetic oligonucleotide
ttcatttaactccaacgggttgtgctaagaacggacggcatttactgaatacag

SEQ ID NO: 479293 - DNA, 55 bp, Artificial
  Synthetic oligonucleotide
ttcatttaagtacggtaatggtgtttggataggaagaactaaaagcactagttca

SEQ ID NO: 479294 - DNA, 58 bp, Artificial
  Synthetic oligonucleotide
ttcatttaatccaccagtaggttattggatgttactttcacctactgcacctggagta

SEQ ID NO: 479295 - DNA, 60 bp, Artificial
  Synthetic oligonucleotide
ttcatttacaggaggacattattaatagatgtcaacaatatgtgggccctcttacagtta

SEQ ID NO: 479296 - DNA, 60 bp, Artificial
  Synthetic oligonucleotide
ttcatttatcctttgcttctcgactgaggagattgaatcctacttcgaaggctagagcga

SEQ ID NO: 479297 - DNA, 56 bp, Artificial
  Synthetic oligonucleotide
ttcatttcagaattggatgtcagcatagcagaataggcattactcgacgagggaga

SEQ ID NO: 479298 - DNA, 52 bp, Artificial
  Synthetic oligonucleotide
ttcatttcagaattgggtgtcgacatagcagaataggcattattcgatatcc

SEQ ID NO: 479299 - DNA, 60 bp, Artificial
  Synthetic oligonucleotide
ttcatttcagaattgggtgtcgacatagcagaataggcattcagcagaggagaccaagaa

SEQ ID NO: 479300 - DNA, 56 bp, Artificial
  Synthetic oligonucleotide
ttcatttccgatcaaaggattttcgctaacggggggcaggacttatgaagcaaatg

SEQ ID NO: 479301 - DNA, 55 bp, Artificial
  Synthetic oligonucleotide
ttcatttggtgaccccgacgtgatcgttagggaatagtggtcggccacagacggc

SEQ ID NO: 479302 - DNA, 57 bp, Artificial
  Synthetic oligonucleotide
ttcatttgtctttatatacttggtccccaagtattttgtcttgcataatgtgggacc

SEQ ID NO: 479303 - DNA, 53 bp, Artificial
  Synthetic oligonucleotide
ttcattttcagataatgtgggctaatgtcatcaatgacgttatattccacgtc

SEQ ID NO: 479304 - DNA, 59 bp, Artificial
  Synthetic oligonucleotide
ttcattttcgaaaccagattaaaatacgccgtagagtagacacaaatcctggtcatgca

SEQ ID NO: 479305 - DNA, 58 bp, Artificial
  Synthetic oligonucleotide
ttcattttgtgggcttgccagaacggaaacatccggtgtcagatttgtatttagagaa

SEQ ID NO: 479306 - DNA, 50 bp, Artificial
  Synthetic oligonucleotide
ttccaaaaactgtcaattttctcggtaaatgaccaattagtttatcacaa

SEQ ID NO: 479307 - DNA, 60 bp, Artificial
  Synthetic oligonucleotide
ttccaaaacattccaccaagctctgcaggatcccagagtaagaggcctgtattttcctgc

SEQ ID NO: 479308 - DNA, 56 bp, Artificial
  Synthetic oligonucleotide
ttccaaaactgtataatgaagcagacccaaactatggatgggtacctatttcttac

SEQ ID NO: 479309 - DNA, 51 bp, Artificial
  Synthetic oligonucleotide
ttccaaaacttctgaagcataggattgtttgatgtcatctcgaacgttgta

SEQ ID NO: 479310 - DNA, 60 bp, Artificial
  Synthetic oligonucleotide
ttccaaacacatcttctcctctcaatattatgaggtggaaggtggaatgccatcaggttg

SEQ ID NO: 479311 - DNA, 59 bp, Artificial
  Synthetic oligonucleotide
ttccaaacagctaatcaagagtttcttgatcgattattccgttaaacttctgtgcttgc

SEQ ID NO: 479312 - DNA, 57 bp, Artificial
  Synthetic oligonucleotide
ttccaaactaggttccgacagatacgcaggtaagaggcaacttgaagttgtgtcgcg

SEQ ID NO: 479313 - DNA, 60 bp, Artificial
  Synthetic oligonucleotide
ttccaaactatgtttggttttgcgcctgatgaagacatgtgtgccaccattccaacccca

SEQ ID NO: 479314 - DNA, 60 bp, Artificial
  Synthetic oligonucleotide
ttccaaactcgtacaaatcatggttaatgcaaacttgcttagtctatgatactgacgaat

SEQ ID NO: 479315 - DNA, 56 bp, Artificial
  Synthetic oligonucleotide
ttccaaagagtcgacataccttcgagtcggtgaaccaaatcgaaaaggtcgctcca

SEQ ID NO: 479316 - DNA, 58 bp, Artificial
  Synthetic oligonucleotide
ttccaaagatctggaagcgatgttgcccatgagtaaaaatgggaaaggttctaataga

SEQ ID NO: 479317 - DNA, 55 bp, Artificial
  Synthetic oligonucleotide
ttccaaagggaacaacaatttgtgacccatgtgataagcttgcgacgaaatggaa

SEQ ID NO: 479318 - DNA, 58 bp, Artificial
  Synthetic oligonucleotide
ttccaaataagaagggaattgtaatttgataggcatctcgttgttcgtcagcctgtat

SEQ ID NO: 479319 - DNA, 50 bp, Artificial
  Synthetic oligonucleotide
ttccaaatccccttgcctaaacaatttcagccctactttgcctttactgt

SEQ ID NO: 479320 - DNA, 60 bp, Artificial
  Synthetic oligonucleotide
ttccaaatgcacaaccattcgaacatcatgctacggtaggcctaacgctaagaattgaat

SEQ ID NO: 479321 - DNA, 55 bp, Artificial
  Synthetic oligonucleotide
ttccaaatgccaatgatgtatcattcttcatcccaaacaagagtcttccaccctc

SEQ ID NO: 479322 - DNA, 57 bp, Artificial
  Synthetic oligonucleotide
ttccaaatgggtcactacttgtgatttccgctggtacggaccgaagtatataacaca

SEQ ID NO: 479323 - DNA, 60 bp, Artificial
  Synthetic oligonucleotide
ttccaacaaacccgctgatgataagatgaccaaacagcgtctccatgagaatcaatatgg

SEQ ID NO: 479324 - DNA, 60 bp, Artificial
  Synthetic oligonucleotide
ttccaacaatccacatgacctgcctctgttgtgtaccttaaacaagagccatctttacat

SEQ ID NO: 479325 - DNA, 54 bp, Artificial
  Synthetic oligonucleotide
ttccaacacatagacacataaaaggtaaaccttgccctaaaccccacaggatta

SEQ ID NO: 479326 - DNA, 55 bp, Artificial
  Synthetic oligonucleotide
ttccaacaccggagctgccagcgtggttgtaccatgagtgctgtccgaggtgcgg

SEQ ID NO: 479327 - DNA, 55 bp, Artificial
  Synthetic oligonucleotide
ttccaacagagtctgaggacgaatcggacagttctttctaaccctggaaacccga

SEQ ID NO: 479328 - DNA, 60 bp, Artificial
  Synthetic oligonucleotide
ttccaacagatgcgggatgtgcttgggacttttgacacagttcagataataaaacttctc

SEQ ID NO: 479329 - DNA, 54 bp, Artificial
  Synthetic oligonucleotide
ttccaacatggataagatcctgaatccggtgcttgcgccgttttcctccgatcg

SEQ ID NO: 479330 - DNA, 60 bp, Artificial
  Synthetic oligonucleotide
ttccaaccacgtcttcaaagcaagtggattgatgtgatatctccactgacgtaagggatg

SEQ ID NO: 479331 - DNA, 60 bp, Artificial
  Synthetic oligonucleotide
ttccaaccgctggttcaagatattatcagatgagttgtttattgagtggtaccctccaga

SEQ ID NO: 479332 - DNA, 60 bp, Artificial
  Synthetic oligonucleotide
ttccaacctaaatgatgccacatatcagagaacaagagctctcgtgcgtactggaatgga

SEQ ID NO: 479333 - DNA, 55 bp, Artificial
  Synthetic oligonucleotide
ttccaacctaccgtataaatcccgacattgttaagcaaggagcttcacagacgat

SEQ ID NO: 479334 - DNA, 60 bp, Artificial
  Synthetic oligonucleotide
ttccaacgcagaactggtgatgcgtttacatatttcgggaatactcttgtcactatggct

SEQ ID NO: 479335 - DNA, 57 bp, Artificial
  Synthetic oligonucleotide
ttccaacgcatccaactttccaccggcaagagagccattacttagtgacctctttcc

SEQ ID NO: 479336 - DNA, 56 bp, Artificial
  Synthetic oligonucleotide
ttccaacggacggtcacgtggaaagatcctcgtggtcgtcaactcaccactcaaaa

SEQ ID NO: 479337 - DNA, 60 bp, Artificial
  Synthetic oligonucleotide
ttccaacgggtcctttctcagggctacgcatcactgatgtgctattatcatccgtcacgg

SEQ ID NO: 479338 - DNA, 54 bp, Artificial
  Synthetic oligonucleotide
ttccaacgtctcgatcgtgcgttagtggggaatccaccgccccacgacggaact

SEQ ID NO: 479339 - DNA, 60 bp, Artificial
  Synthetic oligonucleotide
ttccaactagcaggacaacttggtccatacatgctagtcatgaatggatgacgacggaag

SEQ ID NO: 479340 - DNA, 55 bp, Artificial
  Synthetic oligonucleotide
ttccaagaatgggtggagacccacgacatcgatctcgaagtttcggattgtaatt

SEQ ID NO: 479341 - DNA, 59 bp, Artificial
  Synthetic oligonucleotide
ttccaagatggctgcgagtgtcctccttttatggtgagtacaaattctctagaaaggcg

SEQ ID NO: 479342 - DNA, 55 bp, Artificial
  Synthetic oligonucleotide
ttccaagcaatgcagcaatagaaggaagcaatggtcacgtggtggtccaatacat

SEQ ID NO: 479343 - DNA, 58 bp, Artificial
  Synthetic oligonucleotide
ttccaagccaaccgtcacttcgactttaatcaggagacggctggttggagcacgccaa

SEQ ID NO: 479344 - DNA, 60 bp, Artificial
  Synthetic oligonucleotide
ttccaagcgtccaggattaataggtacgcagccattgcgcgtgtcgccagctctggcttc

SEQ ID NO: 479345 - DNA, 51 bp, Artificial
  Synthetic oligonucleotide
ttccaagctaaaatccgccggttcggatacattgaggagggtttcactgca

SEQ ID NO: 479346 - DNA, 54 bp, Artificial
  Synthetic oligonucleotide
ttccaaggaacctctttctatctgggcagagattcccctcttgtttttggacgt

SEQ ID NO: 479347 - DNA, 59 bp, Artificial
  Synthetic oligonucleotide
ttccaaggacaatggaatcagaattgggtcaaggggacatgtatttgtcataagagaac

SEQ ID NO: 479348 - DNA, 55 bp, Artificial
  Synthetic oligonucleotide
ttccaaggtccaccaaagttcaagcctctcacaatctcactagatacaccagctc

SEQ ID NO: 479349 - DNA, 53 bp, Artificial
  Synthetic oligonucleotide
ttccaaggttctttggacctgtcgaaatttaacgatgttgaccccaatttgaa

SEQ ID NO: 479350 - DNA, 52 bp, Artificial
  Synthetic oligonucleotide
ttccaaggttgcgaggtcacagaagagttcgcacgtgccttatcaaacgtca

SEQ ID NO: 479351 - DNA, 58 bp, Artificial
  Synthetic oligonucleotide
ttccaagttacctccgaccattattgtttgtcacacacattgtctgttgattattggt

SEQ ID NO: 479352 - DNA, 59 bp, Artificial
  Synthetic oligonucleotide
ttccaagttcggtaaggagaacttcctcaaagctgcctctatcagtccagagcagtgga

SEQ ID NO: 479353 - DNA, 59 bp, Artificial
  Synthetic oligonucleotide
ttccaatccaagcactgtggcagcttggtcaatcgtaaccctaccctggttcagaggcc

SEQ ID NO: 479354 - DNA, 53 bp, Artificial
  Synthetic oligonucleotide
ttccaatccaataactggaagtcccggtgctccgggagtgaagggatttggtt

SEQ ID NO: 479355 - DNA, 60 bp, Artificial
  Synthetic oligonucleotide
ttccaatccgagcattgtagcagcctggtcaatcgtaactctaccttggttcagaggcct

SEQ ID NO: 479356 - DNA, 57 bp, Artificial
  Synthetic oligonucleotide
ttccaatctaactcgactactcaaaacgcagtcgtttatgttagacctaatggacaa

SEQ ID NO: 479357 - DNA, 53 bp, Artificial
  Synthetic oligonucleotide
ttccaatgagcttgagtcgagctcgaaccgccttgcagggacgctctgtcaga

SEQ ID NO: 479358 - DNA, 60 bp, Artificial
  Synthetic oligonucleotide
ttccaatgcaattactgatacagctagttctattgttgattattttcgtggtgttgatca

SEQ ID NO: 479359 - DNA, 52 bp, Artificial
  Synthetic oligonucleotide
ttccaatgctgtagaggatggaaacggatgctttgaactgtaccacaaatgt

SEQ ID NO: 479360 - DNA, 55 bp, Artificial
  Synthetic oligonucleotide
ttccaattacagtttcagtggcacctatgtcatgctcatttagcgggttgcggtc

SEQ ID NO: 479361 - DNA, 59 bp, Artificial
  Synthetic oligonucleotide
ttccaattctgaattagaaaagagatgcatcgattttcatgttaagtgtgttgattatt

SEQ ID NO: 479362 - DNA, 57 bp, Artificial
  Synthetic oligonucleotide
ttccacaacattccaccaaacgctccctgctggtggctccagttccggaacagtaaa

SEQ ID NO: 479363 - DNA, 60 bp, Artificial
  Synthetic oligonucleotide
ttccacaacatttcatcacactctgctagatcccagagtgaggggcctatactttcctgc

SEQ ID NO: 479364 - DNA, 57 bp, Artificial
  Synthetic oligonucleotide
ttccacaactaaaccagacaaggtgtgataaaactgccataccattaacctggacag

SEQ ID NO: 479365 - DNA, 59 bp, Artificial
  Synthetic oligonucleotide
ttccacaagcgtgtacgcctcgggctttgaaatacgttttggctctcagagcctcaaca

SEQ ID NO: 479366 - DNA, 58 bp, Artificial
  Synthetic oligonucleotide
ttccacaagttcactagcgggttgggagtgaggacgcagtggaagaatgtaactgacg

SEQ ID NO: 479367 - DNA, 54 bp, Artificial
  Synthetic oligonucleotide
ttccacaattactccagtatatgtttgtcccccctggcgctcccgagccagaat

SEQ ID NO: 479368 - DNA, 56 bp, Artificial
  Synthetic oligonucleotide
ttccacacctcagaagcctgtgtcgggtgcatactcacagatgcattcgctacgag

SEQ ID NO: 479369 - DNA, 55 bp, Artificial
  Synthetic oligonucleotide
ttccacagaacaccaatccgccatcaatggaaaggtcaagttctttcccggccgg

SEQ ID NO: 479370 - DNA, 57 bp, Artificial
  Synthetic oligonucleotide
ttccacagattcggtagaatctggcgccaagttccgttcaaatccgttgtcaacgga

SEQ ID NO: 479371 - DNA, 60 bp, Artificial
  Synthetic oligonucleotide
ttccacagctttccaccaagctctgcaggatccaaaagtcagggccctgtattttcctgc

SEQ ID NO: 479372 - DNA, 60 bp, Artificial
  Synthetic oligonucleotide
ttccacaggttctagctgctcttgctgctagtgaaatcactgctactggttctataacag

SEQ ID NO: 479373 - DNA, 51 bp, Artificial
  Synthetic oligonucleotide
ttccacatcttagccgctatgagtgcatttgttattgtgtgtcgtatattc

SEQ ID NO: 479374 - DNA, 54 bp, Artificial
  Synthetic oligonucleotide
ttccaccaactgtgggaggagactttggccaactggcctgtttatccggggact

SEQ ID NO: 479375 - DNA, 60 bp, Artificial
  Synthetic oligonucleotide
ttccaccaatgagggatgaatacaaatacatggtatatcaagtagagcgaggagaaagcg

SEQ ID NO: 479376 - DNA, 60 bp, Artificial
  Synthetic oligonucleotide
ttccaccacttgataccttacagagcccaattgattttgcctcaatctagcaactgaact

SEQ ID NO: 479377 - DNA, 55 bp, Artificial
  Synthetic oligonucleotide
ttccaccataaccacccaagaggctgccaattcagtggtggcctatggagagtgg

SEQ ID NO: 479378 - DNA, 52 bp, Artificial
  Synthetic oligonucleotide
ttccaccatgctggaatgagacgcaaggagataaacgtggcctgattagtgc

SEQ ID NO: 479379 - DNA, 55 bp, Artificial
  Synthetic oligonucleotide
ttccaccattaccttcaggggatgaggagtttcgatgtgctcccgagattactcc

SEQ ID NO: 479380 - DNA, 54 bp, Artificial
  Synthetic oligonucleotide
ttccaccccaccccgtgtattcacatacccggtgaagttaggaacctgcttgag

SEQ ID NO: 479381 - DNA, 60 bp, Artificial
  Synthetic oligonucleotide
ttccaccgcaacacaatctttcctggcgacctgcatcaacggtgcgtgttggactgtctt

SEQ ID NO: 479382 - DNA, 57 bp, Artificial
  Synthetic oligonucleotide
ttccacctagtcttaccggctggtggtaagttccgctccattgcgactacagcgacg

SEQ ID NO: 479383 - DNA, 55 bp, Artificial
  Synthetic oligonucleotide
ttccacctccgatgatcctaagagaaagccaacattagttcgggatccccgtgtg

SEQ ID NO: 479384 - DNA, 51 bp, Artificial
  Synthetic oligonucleotide
ttccacctgtgaacgctgataaaccaataccattaggaagaagagacgtac

SEQ ID NO: 479385 - DNA, 59 bp, Artificial
  Synthetic oligonucleotide
ttccacctttaatcatgactggctttccgtacttcgtgttgctttgccagtcacgctgg

SEQ ID NO: 479386 - DNA, 54 bp, Artificial
  Synthetic oligonucleotide
ttccacctttaatttgaactggctttccgtactttgtatttgattgccagtccc

SEQ ID NO: 479387 - DNA, 55 bp, Artificial
  Synthetic oligonucleotide
ttccacgatcccatggaatgcattttcgcggactatcctgagatcggctccagca

SEQ ID NO: 479388 - DNA, 55 bp, Artificial
  Synthetic oligonucleotide
ttccacgccaatccaggcactattactggatctgctgtcggctgcaacccagaca

SEQ ID NO: 479389 - DNA, 58 bp, Artificial
  Synthetic oligonucleotide
ttccacgggtctttaccatgtcaccaacgattgccctaactcgagcattgtgtacgag

SEQ ID NO: 479390 - DNA, 55 bp, Artificial
  Synthetic oligonucleotide
ttccacgttgaagcgcctactgatgggcgattctttcttgttggccccgctatcc

SEQ ID NO: 479391 - DNA, 60 bp, Artificial
  Synthetic oligonucleotide
ttccactatcttaaagatccaatgagatacgtccacgtatgtactcaaactgacaagaga

SEQ ID NO: 479392 - DNA, 60 bp, Artificial
  Synthetic oligonucleotide
ttccactatgaaaatactgagattccagcagcttctgtccagaaagtgcaggccatattt

SEQ ID NO: 479393 - DNA, 56 bp, Artificial
  Synthetic oligonucleotide
ttccactcacgccaattatttacaaaattttgcttagattcctactcgcaaactta

SEQ ID NO: 479394 - DNA, 51 bp, Artificial
  Synthetic oligonucleotide
ttccactcatattcaccaccttattagttatttcagtggaccactcactga

SEQ ID NO: 479395 - DNA, 59 bp, Artificial
  Synthetic oligonucleotide
ttccactcgagtctctactcggctttttcgggcgataagttcgtccaaatctctctgca

SEQ ID NO: 479396 - DNA, 59 bp, Artificial
  Synthetic oligonucleotide
ttccactcgttcgttgaatcagcttattccagttacttgactagaccagatacgtggaa

SEQ ID NO: 479397 - DNA, 58 bp, Artificial
  Synthetic oligonucleotide
ttccactcttctacaacgaaggtggctcttgcttggtttatctgccctcactggcgtt

SEQ ID NO: 479398 - DNA, 60 bp, Artificial
  Synthetic oligonucleotide
ttccactgacctggctaactgtttcaccgtcgatgctcagatcccaccgacatcgatgga

SEQ ID NO: 479399 - DNA, 60 bp, Artificial
  Synthetic oligonucleotide
ttccactgacctttggatggtgcttcaagctagtaccagtagagccagagaaggtggaag

SEQ ID NO: 479400 - DNA, 56 bp, Artificial
  Synthetic oligonucleotide
ttccactgataggactacacacactacaccagttggggtctacttccttgttgctt

SEQ ID NO: 479401 - DNA, 60 bp, Artificial
  Synthetic oligonucleotide
ttccactgccttccaccaagctctgcaggatcccaaagtcagggatcctgctggtggctc

SEQ ID NO: 479402 - DNA, 60 bp, Artificial
  Synthetic oligonucleotide
ttccactggcatgctgtaaatcaagagatgtggaaaagtatgtttaatctccatgagcat

SEQ ID NO: 479403 - DNA, 59 bp, Artificial
  Synthetic oligonucleotide
ttccacttaggggacgatatggaccctgaattgaggacactagcacaaagcctgattga

SEQ ID NO: 479404 - DNA, 55 bp, Artificial
  Synthetic oligonucleotide
ttccacttcattgacgaacggggcgaatcaacaattatagaatcgggcgatccaa

SEQ ID NO: 479405 - DNA, 54 bp, Artificial
  Synthetic oligonucleotide
ttccacttgaattgttctcaaagcaatgttgcctccgtctagcatgcaggcccc

SEQ ID NO: 479406 - DNA, 55 bp, Artificial
  Synthetic oligonucleotide
ttccacttgtggagggtaacactattgcagaccaaattctgaagtggggcagctg

SEQ ID NO: 479407 - DNA, 51 bp, Artificial
  Synthetic oligonucleotide
ttccactttaaaacctttgaacgacccgtcgagaaagatcaaccatatccc

SEQ ID NO: 479408 - DNA, 60 bp, Artificial
  Synthetic oligonucleotide
ttccactttatgcttatattatccaagttcagtcacgactgaaataactgatcccgactg

SEQ ID NO: 479409 - DNA, 55 bp, Artificial
  Synthetic oligonucleotide
ttccactttcatctgagttgccaccaatgtcttcgtaagatcgaagagcctacct

SEQ ID NO: 479410 - DNA, 58 bp, Artificial
  Synthetic oligonucleotide
ttccacttttctgcggatactatgttggtgaagccggatgttgtcgcaacccttttgc

SEQ ID NO: 479411 - DNA, 55 bp, Artificial
  Synthetic oligonucleotide
ttccagaaccaacttggcatgcttttgaggaatacggaccaaccacatggggccc

SEQ ID NO: 479412 - DNA, 60 bp, Artificial
  Synthetic oligonucleotide
ttccagaacgcacgactatgcagactcaaagcttagataacgctccttcggctataagta

SEQ ID NO: 479413 - DNA, 60 bp, Artificial
  Synthetic oligonucleotide
ttccagaccgcacttggaatgtgacttacactgggacaagcaaagcatgctcaaactcat

SEQ ID NO: 479414 - DNA, 60 bp, Artificial
  Synthetic oligonucleotide
ttccagacctcggtggttgtgattggcatatcaatatgacacagtttggccattctagcc

SEQ ID NO: 479415 - DNA, 60 bp, Artificial
  Synthetic oligonucleotide
ttccagatgcgttatcaataggcatacgtcgatatgactggagacataaagagttctcaa

SEQ ID NO: 479416 - DNA, 55 bp, Artificial
  Synthetic oligonucleotide
ttccagatggctagtgccactgatgatgcacaaaaggattccatctacgcatctg

SEQ ID NO: 479417 - DNA, 55 bp, Artificial
  Synthetic oligonucleotide
ttccagatgttgcaccaaattctgatcagttgagagttctgacggctgcgcttca

SEQ ID NO: 479418 - DNA, 55 bp, Artificial
  Synthetic oligonucleotide
ttccagattatttaatgagagcaagaacgagactacaaatgggactattattctg

SEQ ID NO: 479419 - DNA, 58 bp, Artificial
  Synthetic oligonucleotide
ttccagcacatcacaactcatccggacaatcgatatattaattggaagtcattaagta

SEQ ID NO: 479420 - DNA, 55 bp, Artificial
  Synthetic oligonucleotide
ttccagcacccttgaactgaggagcagatactgggcaataaggaccaggagcgga

SEQ ID NO: 479421 - DNA, 57 bp, Artificial
  Synthetic oligonucleotide
ttccagcacctcttagcttggattcaactccgaggttcgaccccattcacggaataa

SEQ ID NO: 479422 - DNA, 58 bp, Artificial
  Synthetic oligonucleotide
ttccagcatccttcgtgatgtaagctttgccagtgggtttagggaattagcaaggttg

SEQ ID NO: 479423 - DNA, 55 bp, Artificial
  Synthetic oligonucleotide
ttccagccgcgacgccactggaccacgcaggactgcaattgttccatctacgcgg

SEQ ID NO: 479424 - DNA, 60 bp, Artificial
  Synthetic oligonucleotide
ttccagccgtgaaagcgcgcgcccttcaaacttcttctcagcactctacacaacgtagag

SEQ ID NO: 479425 - DNA, 53 bp, Artificial
  Synthetic oligonucleotide
ttccagcgaagggactttccaaggcgggacatgggcggtccggggagtggctt

SEQ ID NO: 479426 - DNA, 60 bp, Artificial
  Synthetic oligonucleotide
ttccagcgtgggagggataagggcggatcagggagtggctaaccctcagaagctgcatat

SEQ ID NO: 479427 - DNA, 60 bp, Artificial
  Synthetic oligonucleotide
ttccagctatgatcggacgctcacttacacacggttcgctgggagagtgggcatcttttg

SEQ ID NO: 479428 - DNA, 58 bp, Artificial
  Synthetic oligonucleotide
ttccaggaaagcagaggacacccggatcaagttccctacatcgtggtgtggcaggacc

SEQ ID NO: 479429 - DNA, 58 bp, Artificial
  Synthetic oligonucleotide
ttccaggaattatgtcgaagcgtcctgcagatatcgtaatttctacccccgcgtcgaa

SEQ ID NO: 479430 - DNA, 51 bp, Artificial
  Synthetic oligonucleotide
ttccaggagtactgtgcacgacatggtaaagaccagcatcatgcgtggcgc

SEQ ID NO: 479431 - DNA, 55 bp, Artificial
  Synthetic oligonucleotide
ttccaggatgtgatccctgagtataatgatggtcttcttgttccccttgcccccc

SEQ ID NO: 479432 - DNA, 59 bp, Artificial
  Synthetic oligonucleotide
ttccaggcaaatttatatcattgggagactctcctattagtattagtgcggcgtccaaa

SEQ ID NO: 479433 - DNA, 55 bp, Artificial
  Synthetic oligonucleotide
ttccaggctaatcggcacttcgacttcaatcaagaaaccgctggctggagtacac

SEQ ID NO: 479434 - DNA, 60 bp, Artificial
  Synthetic oligonucleotide
ttccagggaaaaacatgatattcgaggtagcctcattgcagtgtgttagacttcttaatg

SEQ ID NO: 479435 - DNA, 60 bp, Artificial
  Synthetic oligonucleotide
ttccagggacaacattgctgttgactataagcaaacacaactgtgcattctgggctgtac

SEQ ID NO: 479436 - DNA, 56 bp, Artificial
  Synthetic oligonucleotide
ttccagggccctggaggctaaacatatagaaccttatcaaggaccaggcaataacc

SEQ ID NO: 479437 - DNA, 60 bp, Artificial
  Synthetic oligonucleotide
ttccagggcttggaagcaaaacgtggtatgattatacaggcccgcatgggcgacagagta

SEQ ID NO: 479438 - DNA, 55 bp, Artificial
  Synthetic oligonucleotide
ttccaggggcctgtgtataaggacttagagatagacatctgcaacacaccacccc

SEQ ID NO: 479439 - DNA, 60 bp, Artificial
  Synthetic oligonucleotide
ttccaggtacagataccactatgatgctgattactctcggtgggattcaacacaacagag

SEQ ID NO: 479440 - DNA, 60 bp, Artificial
  Synthetic oligonucleotide
ttccaggtgccatacgtccgtctcgatcgtgacagagttccaacaatggttggagtaaca

SEQ ID NO: 479441 - DNA, 55 bp, Artificial
  Synthetic oligonucleotide
ttccagtaggagacatctacagaagatgggtaatactagggctaaataaagtagt

SEQ ID NO: 479442 - DNA, 54 bp, Artificial
  Synthetic oligonucleotide
ttccagtatgtcctcaacgccctttaagagagccaacctacaaagatctagtag

SEQ ID NO: 479443 - DNA, 56 bp, Artificial
  Synthetic oligonucleotide
ttccagtattggcactggcgtggtgtggttggtgtacgacgcacagcctcagggca

SEQ ID NO: 479444 - DNA, 57 bp, Artificial
  Synthetic oligonucleotide
ttccagtcagaccccaggtaccgttaagaccaatgacttataaaggagctctagatc

SEQ ID NO: 479445 - DNA, 55 bp, Artificial
  Synthetic oligonucleotide
ttccagtcaggccacaggtgcctttgagaccaatgacttataagggagctgtcga

SEQ ID NO: 479446 - DNA, 60 bp, Artificial
  Synthetic oligonucleotide
ttccagtcattcaacacaagcaatatacacttcactgatgagagaatcgaatggagagac

SEQ ID NO: 479447 - DNA, 53 bp, Artificial
  Synthetic oligonucleotide
ttccagtcgcccttcgctcgcctgtcccactggcttcgcacccacacttgggc

SEQ ID NO: 479448 - DNA, 60 bp, Artificial
  Synthetic oligonucleotide
ttccagtcgctctgttctgtctacaaccgtcacccctcagaatctatcccttttgatcca

SEQ ID NO: 479449 - DNA, 60 bp, Artificial
  Synthetic oligonucleotide
ttccagtgcttcaactttaagtattgcggagagacgtcatcaatgacgttatattccact

SEQ ID NO: 479450 - DNA, 60 bp, Artificial
  Synthetic oligonucleotide
ttccagtggactacagtgaagcaaaatgggaaatctggagcctgcaagagggcaaatgtg

SEQ ID NO: 479451 - DNA, 60 bp, Artificial
  Synthetic oligonucleotide
ttccagtggagcaatcacgttcgggccgagtctatcagactgcccagcattctctaatgg

SEQ ID NO: 479452 - DNA, 56 bp, Artificial
  Synthetic oligonucleotide
ttccagtggtccctcttgatttcgcggacgctagtagcgttcagatcccaattaca

SEQ ID NO: 479453 - DNA, 59 bp, Artificial
  Synthetic oligonucleotide
ttccagttatgtgtgctcagggcttgttggagacacacctagaaacgacgacagatcta

SEQ ID NO: 479454 - DNA, 55 bp, Artificial
  Synthetic oligonucleotide
ttccataaagcttgcgtggatagtgtgattacaaagcaaatggcatcggttgtct

SEQ ID NO: 479455 - DNA, 54 bp, Artificial
  Synthetic oligonucleotide
ttccatacaatgcatggcctcacacaaaaggccttacattttggacaatagact

SEQ ID NO: 479456 - DNA, 60 bp, Artificial
  Synthetic oligonucleotide
ttccataccttaggtcgcattgagccgttcatcccatattccgctctcttggaaatagtc

SEQ ID NO: 479457 - DNA, 60 bp, Artificial
  Synthetic oligonucleotide
ttccatactcagcttcatttactctaaacagatctcaaccaatgcatgataatttaatgg

SEQ ID NO: 479458 - DNA, 55 bp, Artificial
  Synthetic oligonucleotide
ttccatagcgggtgcttgttagtagtagtaatacccgaacatcagcttgcttcag

SEQ ID NO: 479459 - DNA, 55 bp, Artificial
  Synthetic oligonucleotide
ttccatcagtgcagggtaccatgttctaaaagcaaatatagtgtcccagttgata

SEQ ID NO: 479460 - DNA, 55 bp, Artificial
  Synthetic oligonucleotide
ttccatcatgatagtgatgtaccagcttttcttccaagggccctacgaagctagt

SEQ ID NO: 479461 - DNA, 55 bp, Artificial
  Synthetic oligonucleotide
ttccatccagtgagtatggtccgggctcttttcttttgtcacttcgagcctaaaa

SEQ ID NO: 479462 - DNA, 60 bp, Artificial
  Synthetic oligonucleotide
ttccatccattaatgaaagaggcctgtttggtgcaattgcaggattcatagaaggaggat

SEQ ID NO: 479463 - DNA, 58 bp, Artificial
  Synthetic oligonucleotide
ttccatcccgcaccaagatccgactgactcagtggaccccctcatgggctcccacctt

SEQ ID NO: 479464 - DNA, 56 bp, Artificial
  Synthetic oligonucleotide
ttccatcgcgccagagctacccggtagtcttttgttctccccgtgggtcaacagaa

SEQ ID NO: 479465 - DNA, 60 bp, Artificial
  Synthetic oligonucleotide
ttccatcggtgatattcattctcacttgttatgggaaaaggaggatggtaagattgtgag

SEQ ID NO: 479466 - DNA, 53 bp, Artificial
  Synthetic oligonucleotide
ttccatcggtttaacacccggacctaaggattactcaatattaggaccgtcta

SEQ ID NO: 479467 - DNA, 60 bp, Artificial
  Synthetic oligonucleotide
ttccatcgtacgctactagagtagctaaaattgacgagtcgatcaaggagtgcgcgatcg

SEQ ID NO: 479468 - DNA, 55 bp, Artificial
  Synthetic oligonucleotide
ttccatcgttgtctaactccgtatctagtgcaaccacaagtgctataacggtgtg

SEQ ID NO: 479469 - DNA, 55 bp, Artificial
  Synthetic oligonucleotide
ttccatctaacacacaaactatgtcttacttggacagcatccaaatcccttcctg

SEQ ID NO: 479470 - DNA, 60 bp, Artificial
  Synthetic oligonucleotide
ttccatcttagagtgggataggagcaaggaacttatgcaccgcactgaggcaatttgtgc

SEQ ID NO: 479471 - DNA, 51 bp, Artificial
  Synthetic oligonucleotide
ttccatgactccaatgtgagaaatttatatgagaaagtcaaatcacaattg

SEQ ID NO: 479472 - DNA, 55 bp, Artificial
  Synthetic oligonucleotide
ttccatgcacatcacaggttaacagcatcaaccactggatcctcactctttgtgc

SEQ ID NO: 479473 - DNA, 60 bp, Artificial
  Synthetic oligonucleotide
ttccatgccattcttattatcatacttgatcgtcataatgaattctgtgaggtgaaacat

SEQ ID NO: 479474 - DNA, 58 bp, Artificial
  Synthetic oligonucleotide
ttccatgctccgctataagttcttgtctctggattgtagtttgtcggcacacggataa

SEQ ID NO: 479475 - DNA, 60 bp, Artificial
  Synthetic oligonucleotide
ttccatggctttttgcaatgtatgcggaaaacaaatgccctgtggtgttgtccacaggag

SEQ ID NO: 479476 - DNA, 52 bp, Artificial
  Synthetic oligonucleotide
ttccatgggctaactgggttcgaccttacatggtggcttaagtatgttaaga

SEQ ID NO: 479477 - DNA, 60 bp, Artificial
  Synthetic oligonucleotide
ttccatggggctaaagaagttgcactcagctactcaaccggtgcacttgccagctgcatg

SEQ ID NO: 479478 - DNA, 60 bp, Artificial
  Synthetic oligonucleotide
ttccatgggttagtgccagtcatttcaggtacacatctagggatgaacattcagcagctg

SEQ ID NO: 479479 - DNA, 60 bp, Artificial
  Synthetic oligonucleotide
ttccatgggttagtgctagtcattatagaaacacaacaccagatacatactcttcggctg

SEQ ID NO: 479480 - DNA, 59 bp, Artificial
  Synthetic oligonucleotide
ttccatgggttgctctgaatgaaccgctttttggctgcgttacaccgttctctgccgcg

SEQ ID NO: 479481 - DNA, 57 bp, Artificial
  Synthetic oligonucleotide
ttccatgtaatccaggatgtcgggatgcaatgaatttcactgccccccataatcttg

SEQ ID NO: 479482 - DNA, 50 bp, Artificial
  Synthetic oligonucleotide
ttccatgtcaactaggctcattcttctagcaccaggtgacgtcattgtaa

SEQ ID NO: 479483 - DNA, 60 bp, Artificial
  Synthetic oligonucleotide
ttccatgttcagctaactgcagaatatgccatgctatctagatactgcgactattacgcc

SEQ ID NO: 479484 - DNA, 60 bp, Artificial
  Synthetic oligonucleotide
ttccatgttggcgacataacagaagctagacttatcgcactgatgaaagcgtacggtcta

SEQ ID NO: 479485 - DNA, 55 bp, Artificial
  Synthetic oligonucleotide
ttccatgtttttgggttgaaatgataaggggtaggccagaagaaaagacaatatg

SEQ ID NO: 479486 - DNA, 60 bp, Artificial
  Synthetic oligonucleotide
ttccattacctctatcgatcagggttctgtattcacgtgcagtgcaatgctagtaaattc

SEQ ID NO: 479487 - DNA, 57 bp, Artificial
  Synthetic oligonucleotide
ttccattcaatccaggggacttttcggagcaattgccggatttattgaaggaggatg

SEQ ID NO: 479488 - DNA, 55 bp, Artificial
  Synthetic oligonucleotide
ttccattcgacagattaagagatcttggaagagatcatctgaagcgttatgtgag

SEQ ID NO: 479489 - DNA, 55 bp, Artificial
  Synthetic oligonucleotide
ttccattcttcagaaattatgtcaacgtgcaatcgaagggatcactccctccggc

SEQ ID NO: 479490 - DNA, 60 bp, Artificial
  Synthetic oligonucleotide
ttccattgacgtaatcaatccgattaatgctatagatgattttgaatcactgatcagaaa

SEQ ID NO: 479491 - DNA, 60 bp, Artificial
  Synthetic oligonucleotide
ttccattggggagtgcatagcatcatcgttaagcaaatatatcgatcctgtgttagattt

SEQ ID NO: 479492 - DNA, 56 bp, Artificial
  Synthetic oligonucleotide
ttccattgggtgggcgttccaatacagtggtggatgttggtcctacacgtccccca

SEQ ID NO: 479493 - DNA, 56 bp, Artificial
  Synthetic oligonucleotide
ttccatttaatgcttcagactcggttgggcaacaaattaaagttattccagtcgac

SEQ ID NO: 479494 - DNA, 60 bp, Artificial
  Synthetic oligonucleotide
ttccatttatggaaggttcttgttaacatctgtaggcgactgtgcatatataggtccata

SEQ ID NO: 479495 - DNA, 60 bp, Artificial
  Synthetic oligonucleotide
ttccatttctctcatgccaacgtgggtacaagggaatctggcgaggagacggcattatgc

SEQ ID NO: 479496 - DNA, 57 bp, Artificial
  Synthetic oligonucleotide
ttcccaaaaatacagttggagggaccattttgcgcagtgatctgttggcaaatttct

SEQ ID NO: 479497 - DNA, 53 bp, Artificial
  Synthetic oligonucleotide
ttcccaaagaagccgttccccaccttctatcctggggcatcccgaactccggc

SEQ ID NO: 479498 - DNA, 55 bp, Artificial
  Synthetic oligonucleotide
ttcccaaagcttcctttttcacattctggaaataagccaatggaaatgcagttgc

SEQ ID NO: 479499 - DNA, 60 bp, Artificial
  Synthetic oligonucleotide
ttcccaaaggctgtgaaggaccttgcaaagtccagtcttacgagcagcggcacgacatca

SEQ ID NO: 479500 - DNA, 51 bp, Artificial
  Synthetic oligonucleotide
ttcccaaccctcccggagggaggtattctttctcctgagcgtgggtgcccc

SEQ ID NO: 479501 - DNA, 55 bp, Artificial
  Synthetic oligonucleotide
ttcccaagcccttcctactattgatgtcctagatgcaatgtatggccacccgtca

SEQ ID NO: 479502 - DNA, 60 bp, Artificial
  Synthetic oligonucleotide
ttcccaagcggctaatgactgtttcaagactctaattgcagcgatgctaagtcaacgaac

SEQ ID NO: 479503 - DNA, 55 bp, Artificial
  Synthetic oligonucleotide
ttcccaagtatacacgccactcatcgcttgaggagcagtgatgagttcccctgtg

SEQ ID NO: 479504 - DNA, 60 bp, Artificial
  Synthetic oligonucleotide
ttcccaattggtcaagcaacgatatcgagtgactgacgctcaaggacacgtttatagcgt

SEQ ID NO: 479505 - DNA, 54 bp, Artificial
  Synthetic oligonucleotide
ttcccacaggctcagatcgaatcgagcgaagaggccgataccgaccacagtgag

SEQ ID NO: 479506 - DNA, 59 bp, Artificial
  Synthetic oligonucleotide
ttcccacataaagctgactctggcccctcagggcggatttgacaagaatggcaacaccc

SEQ ID NO: 479507 - DNA, 60 bp, Artificial
  Synthetic oligonucleotide
ttcccacctcctgcgtccactacacctagcactatacacaaatcatttacatatccaaag

SEQ ID NO: 479508 - DNA, 58 bp, Artificial
  Synthetic oligonucleotide
ttcccacgttaagccaccaatttctccaagccgagcgccagagtatatggccgtttga

SEQ ID NO: 479509 - DNA, 50 bp, Artificial
  Synthetic oligonucleotide
ttcccactccaagtggctctcttgtctcaagtgacgcacagctctttaat

SEQ ID NO: 479510 - DNA, 50 bp, Artificial
  Synthetic oligonucleotide
ttcccagaagaccaagggccacaaagagaaccatacaatgaatgggcact

SEQ ID NO: 479511 - DNA, 60 bp, Artificial
  Synthetic oligonucleotide
ttcccagatatgccaccacagtgtttattttagccctgctcttgcctctatgtctagggt

SEQ ID NO: 479512 - DNA, 59 bp, Artificial
  Synthetic oligonucleotide
ttcccagatctttcgatttggagcgcataagtggtatggcgctgccggtaaacgggctc

SEQ ID NO: 479513 - DNA, 55 bp, Artificial
  Synthetic oligonucleotide
ttcccaggaatacacagccttggacgtcatttgataagttaactactatccacca

SEQ ID NO: 479514 - DNA, 59 bp, Artificial
  Synthetic oligonucleotide
ttcccaggcggagctataactcgagactcggtggtcgccacaatcaaggaatacactac

SEQ ID NO: 479515 - DNA, 57 bp, Artificial
  Synthetic oligonucleotide
ttcccagtggtagtcataactagatatttgagacagcttaaaaaatgccaaggtggg

SEQ ID NO: 479516 - DNA, 50 bp, Artificial
  Synthetic oligonucleotide
ttcccatatggtggatacatacatactatagtcgactcaactgcaccgtt

SEQ ID NO: 479517 - DNA, 60 bp, Artificial
  Synthetic oligonucleotide
ttcccatgacgctctctggattcactacaaacgtagctcgcattttctatggtgacgatt

SEQ ID NO: 479518 - DNA, 56 bp, Artificial
  Synthetic oligonucleotide
ttcccatgataagcaaatgtagaactaaagagggaaggcgaaagactaatttgtac

SEQ ID NO: 479519 - DNA, 57 bp, Artificial
  Synthetic oligonucleotide
ttcccatgccaggcccgggtcgatctgaccgtattcggacagctggattaggtcgat

SEQ ID NO: 479520 - DNA, 52 bp, Artificial
  Synthetic oligonucleotide
ttcccattggggaccaagagtacttccctaaatactacccaacacaccgccc

SEQ ID NO: 479521 - DNA, 60 bp, Artificial
  Synthetic oligonucleotide
ttccccaaatgtgaggcacacagggcggaccagagtggctatgcaggtacgccaggcata

SEQ ID NO: 479522 - DNA, 55 bp, Artificial
  Synthetic oligonucleotide
ttccccacagcataccaagatgtaacctacaacccactaactgacagaggcatag

SEQ ID NO: 479523 - DNA, 54 bp, Artificial
  Synthetic oligonucleotide
ttccccaccctcggacaatatatctaccacggattgaatgttattagaccagcg

SEQ ID NO: 479524 - DNA, 58 bp, Artificial
  Synthetic oligonucleotide
ttccccacgggtgaccgtgtcctagcctgcgtggcggccaacccagcttatgctggga

SEQ ID NO: 479525 - DNA, 54 bp, Artificial
  Synthetic oligonucleotide
ttccccactaaggaggcactggcagaggtcccctacaaggccgacaagttcgcc

SEQ ID NO: 479526 - DNA, 56 bp, Artificial
  Synthetic oligonucleotide
ttccccactccctcgctttgttgtgactataggtaacaggttatcatagctggtaa

SEQ ID NO: 479527 - DNA, 59 bp, Artificial
  Synthetic oligonucleotide
ttccccactcgtgcaggtcagtgcggtggggtgctcatgtctaccggcaaagtattggg

SEQ ID NO: 479528 - DNA, 60 bp, Artificial
  Synthetic oligonucleotide
ttccccactggtaacagtggtccagcctgcgtggctgcctgcacactcttatgaggtgtg

SEQ ID NO: 479529 - DNA, 56 bp, Artificial
  Synthetic oligonucleotide
ttccccagacaaacacagcttgtagagaagattttcataagggtttctattgcccg

SEQ ID NO: 479530 - DNA, 53 bp, Artificial
  Synthetic oligonucleotide
ttccccagacgataccctatcttgtacttggtttgggggtcgtgatgaagcct

SEQ ID NO: 479531 - DNA, 57 bp, Artificial
  Synthetic oligonucleotide
ttccccaggagacagtgaccgactcggacgatctaggtgactcattggaccccactt

SEQ ID NO: 479532 - DNA, 60 bp, Artificial
  Synthetic oligonucleotide
ttccccatgctagatgtagaggttggtgctgtgataccctatggagaggttaacctcagt

SEQ ID NO: 479533 - DNA, 53 bp, Artificial
  Synthetic oligonucleotide
ttccccattatgagagcgaatacgacgtcacttgtctaagtttcacgatatac

SEQ ID NO: 479534 - DNA, 55 bp, Artificial
  Synthetic oligonucleotide
ttcccccaacttgctctttgtaggacaatgagaactttaacctcccagtatcagg

SEQ ID NO: 479535 - DNA, 55 bp, Artificial
  Synthetic oligonucleotide
ttcccccacataatagtagatgttaggcaattggaacctgtgttaatccccttac

SEQ ID NO: 479536 - DNA, 60 bp, Artificial
  Synthetic oligonucleotide
ttcccccaccagtggattaatttgcgcaccaataatagcgcaacgattgtcatgccctac

SEQ ID NO: 479537 - DNA, 59 bp, Artificial
  Synthetic oligonucleotide
ttcccccagaagccctctacagactcaggtcactctacccgcaaatctacacactgacc

SEQ ID NO: 479538 - DNA, 58 bp, Artificial
  Synthetic oligonucleotide
ttcccccatgatcttggaagctgacctttatctatgaagctccttaagcgaaaggaag

SEQ ID NO: 479539 - DNA, 53 bp, Artificial
  Synthetic oligonucleotide
ttcccccctgacggggcccccccataagatggcgagaaatccactctcgggtc

SEQ ID NO: 479540 - DNA, 55 bp, Artificial
  Synthetic oligonucleotide
ttcccccgatatgttcccccaattgctctggccctcaaaactcttatgaattggg

SEQ ID NO: 479541 - DNA, 52 bp, Artificial
  Synthetic oligonucleotide
ttcccccgatctttccccgatctccccaccgccgcgtctttgggccccaatc

SEQ ID NO: 479542 - DNA, 55 bp, Artificial
  Synthetic oligonucleotide
ttcccccggtgaagctgtatagactgtttcccacggttgaaaatggctgatccgt

SEQ ID NO: 479543 - DNA, 56 bp, Artificial
  Synthetic oligonucleotide
ttcccccggtgatctcgtataggctgtacccacggctgaaaacaagtgatccgtta

SEQ ID NO: 479544 - DNA, 60 bp, Artificial
  Synthetic oligonucleotide
ttcccccggtggtagtgtacatgtatggcgatgcgaggtgtggcaaaacagaattgtcga

SEQ ID NO: 479545 - DNA, 54 bp, Artificial
  Synthetic oligonucleotide
ttccccctgtcccccccctatatgggggtggttcatcaattggatttcacagcc

SEQ ID NO: 479546 - DNA, 58 bp, Artificial
  Synthetic oligonucleotide
ttcccccttattcccatggaacaggaacaggctacacaatagacaccgtgatcagaac

SEQ ID NO: 479547 - DNA, 58 bp, Artificial
  Synthetic oligonucleotide
ttccccgatgacgtccaactggtacacgaacagctacaaataggagattggcttctgg

SEQ ID NO: 479548 - DNA, 60 bp, Artificial
  Synthetic oligonucleotide
ttccccgtgttaatcgctttagcatatgcatcattggccgtctgttgaccaccacgagca

SEQ ID NO: 479549 - DNA, 52 bp, Artificial
  Synthetic oligonucleotide
ttccccgtgttcttcagtcgttcatccttcacggttcgaaatgttcgcacgt

SEQ ID NO: 479550 - DNA, 58 bp, Artificial
  Synthetic oligonucleotide
ttcccctaccggaagaaggagctcaacacgactgccttgagattttggccgagacgca

SEQ ID NO: 479551 - DNA, 60 bp, Artificial
  Synthetic oligonucleotide
ttcccctcgtcgccggtcgcattatctggttttctgaggctcatgcccatgccgtaatgt

SEQ ID NO: 479552 - DNA, 54 bp, Artificial
  Synthetic oligonucleotide
ttcccctgcagttggagatcaacaagtgggagggtctatcgtcgatgtgatgtg

SEQ ID NO: 479553 - DNA, 60 bp, Artificial
  Synthetic oligonucleotide
ttcccctgtgcgtgaatccatagccgtggcagcgtaatgcgatgaaatatgaacaaccgc

SEQ ID NO: 479554 - DNA, 60 bp, Artificial
  Synthetic oligonucleotide
ttcccctgtgcgtgaatccatagttactgcagttgaggttgacgtacaaagagcagccac

SEQ ID NO: 479555 - DNA, 60 bp, Artificial
  Synthetic oligonucleotide
ttcccctgtgcgtgaatccatagttgatgcagttgatgtggaggtagtatgagcagccac

SEQ ID NO: 479556 - DNA, 55 bp, Artificial
  Synthetic oligonucleotide
ttcccctgtgcgtgaatccatgctgatacttgcagtttggggtgatgaaggctga

SEQ ID NO: 479557 - DNA, 60 bp, Artificial
  Synthetic oligonucleotide
ttcccctgtgcgtgaatccatggtcgtggcaggttaatgctatgaagtaagaacagccac

SEQ ID NO: 479558 - DNA, 60 bp, Artificial
  Synthetic oligonucleotide
ttcccctgtgcgtgaatccatgtcccgtacagtctatgtggaagtagatggagcacccgc

SEQ ID NO: 479559 - DNA, 51 bp, Artificial
  Synthetic oligonucleotide
ttcccgaaagagtgagacctccagatgactgggctactgatgaggatcttg

SEQ ID NO: 479560 - DNA, 60 bp, Artificial
  Synthetic oligonucleotide
ttcccgaacgttacttggtctatgtcaatgatccatctatcagtgatgtgtggggtgctc

SEQ ID NO: 479561 - DNA, 51 bp, Artificial
  Synthetic oligonucleotide
ttcccgaatactggacactatagacggaattgaaacagtttgattgtgatg

SEQ ID NO: 479562 - DNA, 57 bp, Artificial
  Synthetic oligonucleotide
ttcccgaatagaactaagccccgatgtgactcctcctgagttgatacaactaggtct

SEQ ID NO: 479563 - DNA, 54 bp, Artificial
  Synthetic oligonucleotide
ttcccgaccgatggcatctttgaggtcgtcagttgggttcctcgcctttaccaa

SEQ ID NO: 479564 - DNA, 55 bp, Artificial
  Synthetic oligonucleotide
ttcccgacggagtccctaaggaacccattattgactcccttagttatgcaaatgc

SEQ ID NO: 479565 - DNA, 53 bp, Artificial
  Synthetic oligonucleotide
ttcccgactggtggtgacggtcccgcaaatatccgtttcctaaccgtgcgtac

SEQ ID NO: 479566 - DNA, 55 bp, Artificial
  Synthetic oligonucleotide
ttcccgagagaaatgaacaggggcaaaccctttggagcaaaacgaacgatgctgg

SEQ ID NO: 479567 - DNA, 59 bp, Artificial
  Synthetic oligonucleotide
ttcccgatcaaaccgctcattgaccacgccaaacccacatttaggcagataatggccca

SEQ ID NO: 479568 - DNA, 57 bp, Artificial
  Synthetic oligonucleotide
ttcccgcaagatcctgacttccgaccaaaggattatgtcactcttcttgactacatg

SEQ ID NO: 479569 - DNA, 60 bp, Artificial
  Synthetic oligonucleotide
ttcccgcatgtgggatagggtggacatgctgacttggcgcaatacgtcagtttatcaggc

SEQ ID NO: 479570 - DNA, 53 bp, Artificial
  Synthetic oligonucleotide
ttcccgcgacgtaatcgtggatgctgggagttcgttcccaaagttaaaaccga

SEQ ID NO: 479571 - DNA, 60 bp, Artificial
  Synthetic oligonucleotide
ttcccggaaatgacaacagcacagcaacgctgtgcctgggacaccatgcagtgccaaacg

SEQ ID NO: 479572 - DNA, 57 bp, Artificial
  Synthetic oligonucleotide
ttcccggaagaatggtctctcgatgtgcttggttatcttgaaatagaggggatttgg

SEQ ID NO: 479573 - DNA, 56 bp, Artificial
  Synthetic oligonucleotide
ttcccggttgcaatatctttcctaatttcacgtccttgtagtgcgaagtgttccga

SEQ ID NO: 479574 - DNA, 60 bp, Artificial
  Synthetic oligonucleotide
ttcccgtcagcttgctctaccaaatctacatttcatgctgttccggtccatatctgggac

SEQ ID NO: 479575 - DNA, 51 bp, Artificial
  Synthetic oligonucleotide
ttccctaactattgcggcaatatgcttcctcatgcagattgccatcttagc

SEQ ID NO: 479576 - DNA, 56 bp, Artificial
  Synthetic oligonucleotide
ttccctaagatcgggagtagcagggcataggttggaagagaaacctttctgtgaaa

SEQ ID NO: 479577 - DNA, 53 bp, Artificial
  Synthetic oligonucleotide
ttccctaatccgtttccatttgacgaaaacggtaacgcagggtttgagctgtc

SEQ ID NO: 479578 - DNA, 55 bp, Artificial
  Synthetic oligonucleotide
ttccctaattattgccggaacattattgaacgatgattgttgaaatggagggacc

SEQ ID NO: 479579 - DNA, 60 bp, Artificial
  Synthetic oligonucleotide
ttccctactaggatgtgatgcctcaccatggcagtggcttaaggagaaactctgcaatat

SEQ ID NO: 479580 - DNA, 56 bp, Artificial
  Synthetic oligonucleotide
ttccctagcacgagtgcaccaagcccgagtgctgcatccggagtactacaaagact

SEQ ID NO: 479581 - DNA, 60 bp, Artificial
  Synthetic oligonucleotide
ttccctagcactggcaatcatgatggctggtttatctttatggatgtgctccaatggatc

SEQ ID NO: 479582 - DNA, 53 bp, Artificial
  Synthetic oligonucleotide
ttccctaggaaattggtttcctcgtgatacgagtctaaaaatgttgaccaatt

SEQ ID NO: 479583 - DNA, 52 bp, Artificial
  Synthetic oligonucleotide
ttccctaggaggtggcggtaagtggctttcgtcgcctcgtcgggaaccgttc

SEQ ID NO: 479584 - DNA, 56 bp, Artificial
  Synthetic oligonucleotide
ttccctaggcatatttgaagtcgtttttgtatcggtgtacaccgattacttctcta

SEQ ID NO: 479585 - DNA, 58 bp, Artificial
  Synthetic oligonucleotide
ttccctatcagggtcatctcccgcctacacagactacactttatggactactccggac

SEQ ID NO: 479586 - DNA, 55 bp, Artificial
  Synthetic oligonucleotide
ttccctcaacctacgaatactctccttagcactagaaggctcgaccttgctggca

SEQ ID NO: 479587 - DNA, 59 bp, Artificial
  Synthetic oligonucleotide
ttccctccttagagattgagtccagcggaagctggggatttctttggagtgagccatgg

SEQ ID NO: 479588 - DNA, 52 bp, Artificial
  Synthetic oligonucleotide
ttccctcgatgccgtcagccgcactcctcgacccacccagacggtatggaac

SEQ ID NO: 479589 - DNA, 60 bp, Artificial
  Synthetic oligonucleotide
ttccctcgtgatactccctgcttgtgatgcagacggacctggatcgattgccgaatcgtc

SEQ ID NO: 479590 - DNA, 60 bp, Artificial
  Synthetic oligonucleotide
ttccctctcaccgtacttaatcaatgcagttctcaatattcgtctggcatttatggaaga

SEQ ID NO: 479591 - DNA, 53 bp, Artificial
  Synthetic oligonucleotide
ttccctctgtccacctgttaccgcgggcgttccttgtacggaacggcctgtat

SEQ ID NO: 479592 - DNA, 59 bp, Artificial
  Synthetic oligonucleotide
ttccctgactctctagctgtagatctgaagacaatgaaagatggggtttatagggaact

SEQ ID NO: 479593 - DNA, 60 bp, Artificial
  Synthetic oligonucleotide
ttccctggacagacactaatctactcaacagcattgactacggactcaacaacataccca

SEQ ID NO: 479594 - DNA, 60 bp, Artificial
  Synthetic oligonucleotide
ttccctgttcttgttgctccttcaacaacgatgctcatcggtctcctcggccgcgcagcg

SEQ ID NO: 479595 - DNA, 53 bp, Artificial
  Synthetic oligonucleotide
ttcccttcgtacttgtcgcacaatgactgatggcgttgttcattccacattgc

SEQ ID NO: 479596 - DNA, 56 bp, Artificial
  Synthetic oligonucleotide
ttcccttcttccgttcacccactgctcgagaacctcttctcttcctccgcgactct

SEQ ID NO: 479597 - DNA, 58 bp, Artificial
  Synthetic oligonucleotide
ttccctttatagaggccgcatctcctagaatgatggccctgtacggggaactgttgga

SEQ ID NO: 479598 - DNA, 56 bp, Artificial
  Synthetic oligonucleotide
ttccctttggttgaagcatcggtttttgacaaactgatcaggaaggacgattctcc

SEQ ID NO: 479599 - DNA, 60 bp, Artificial
  Synthetic oligonucleotide
ttccgaaagacgctctctggaaaaccatctgctcttacttcccggactccatgctgcgcg

SEQ ID NO: 479600 - DNA, 60 bp, Artificial
  Synthetic oligonucleotide
ttccgaaagtgcgctacactcaggtatggtcgcacgacgtgacaatcgttgcgaatagca

SEQ ID NO: 479601 - DNA, 50 bp, Artificial
  Synthetic oligonucleotide
ttccgaacttttggacatcctccattagaagctagtatagcagcagaaaa

SEQ ID NO: 479602 - DNA, 56 bp, Artificial
  Synthetic oligonucleotide
ttccgaaggggtattattacaaacgcagctcttaaaagaatgtgcgaggacttcga

SEQ ID NO: 479603 - DNA, 57 bp, Artificial
  Synthetic oligonucleotide
ttccgaagtcattcggaatcggtatggagggaagtacgacctccatcttacccagca

SEQ ID NO: 479604 - DNA, 58 bp, Artificial
  Synthetic oligonucleotide
ttccgaatatgtcgttcggtgcaacggagataccttctccgggctcacaacaggtgat

SEQ ID NO: 479605 - DNA, 59 bp, Artificial
  Synthetic oligonucleotide
ttccgaatgatatgattgttgtaacttccccctgaggccattaaattgagttcttgctc

SEQ ID NO: 479606 - DNA, 51 bp, Artificial
  Synthetic oligonucleotide
ttccgaatggctgagtttatgccgcccgtccgcagcgggagcagtgacggg

SEQ ID NO: 479607 - DNA, 59 bp, Artificial
  Synthetic oligonucleotide
ttccgaatggctgagttttccacgcccgtccgcagcgaggagcagccgaagggagatcc

SEQ ID NO: 479608 - DNA, 55 bp, Artificial
  Synthetic oligonucleotide
ttccgaatggctgagttttccacgcccgtccgcggagagggagccacggagggga

SEQ ID NO: 479609 - DNA, 60 bp, Artificial
  Synthetic oligonucleotide
ttccgaattgctgctcgtttgtctggggacatcgattttgttggtgttagtgcaggctat

SEQ ID NO: 479610 - DNA, 60 bp, Artificial
  Synthetic oligonucleotide
ttccgacatcatctaagtatgaacgtgttcacatcgtctgtgggttctgtggaatttgat

SEQ ID NO: 479611 - DNA, 59 bp, Artificial
  Synthetic oligonucleotide
ttccgacattcggtgagaatatctcaataccaggataggtcccaccggatatcccacta

SEQ ID NO: 479612 - DNA, 60 bp, Artificial
  Synthetic oligonucleotide
ttccgaccagttgcttctactctagatgagccatgtcgttccagttagccctcgatgctc

SEQ ID NO: 479613 - DNA, 57 bp, Artificial
  Synthetic oligonucleotide
ttccgacctagctaaactcaactaccaatcgaccaccacctcagtcgccaccccaga

SEQ ID NO: 479614 - DNA, 58 bp, Artificial
  Synthetic oligonucleotide
ttccgacgaaggcgcgagtgcgttggctaagaccgtggtaggcttcatggagtccgac

SEQ ID NO: 479615 - DNA, 55 bp, Artificial
  Synthetic oligonucleotide
ttccgacggggaccgcaacagggtgacttgtttgttaactcacactttgagccaa

SEQ ID NO: 479616 - DNA, 60 bp, Artificial
  Synthetic oligonucleotide
ttccgactaacgatgattatcagactccaattatgaattcagtaacagtaagacaagatt

SEQ ID NO: 479617 - DNA, 51 bp, Artificial
  Synthetic oligonucleotide
ttccgactaatttcaggagtcaacactgctgggggaacaggtcgcgaagtt

SEQ ID NO: 479618 - DNA, 55 bp, Artificial
  Synthetic oligonucleotide
ttccgactacagcactctgcaagctggcccctctactcgaccacgatcccgactc

SEQ ID NO: 479619 - DNA, 58 bp, Artificial
  Synthetic oligonucleotide
ttccgagatgccgagtacttaacctcttctacccttcgagagatgagcctcgtcttgt

SEQ ID NO: 479620 - DNA, 55 bp, Artificial
  Synthetic oligonucleotide
ttccgaggaggagctcaagtaccactacgagacggttcgttccatagttaagtca

SEQ ID NO: 479621 - DNA, 60 bp, Artificial
  Synthetic oligonucleotide
ttccgagggcactagacgaattatttccaacattctgatgcggatatattctagtaacaa

SEQ ID NO: 479622 - DNA, 55 bp, Artificial
  Synthetic oligonucleotide
ttccgagtcttggagagcactccgggccgaagggaagagaagcacccagagggag

SEQ ID NO: 479623 - DNA, 51 bp, Artificial
  Synthetic oligonucleotide
ttccgagtggatagccacttcgaaaggatcgccgcaccagttgataacacg

SEQ ID NO: 479624 - DNA, 60 bp, Artificial
  Synthetic oligonucleotide
ttccgataacgtctgatttattgatcatagatgaatatacacttgctgagagcgcggaaa

SEQ ID NO: 479625 - DNA, 60 bp, Artificial
  Synthetic oligonucleotide
ttccgatacctatcagttagtctggttcgatgagatacgtgacaaggtggaacacaagca

SEQ ID NO: 479626 - DNA, 59 bp, Artificial
  Synthetic oligonucleotide
ttccgatactgctgcaaagggtactgttatcccggccatgaatcagattcccgatttcc

SEQ ID NO: 479627 - DNA, 60 bp, Artificial
  Synthetic oligonucleotide
ttccgatatcgtgacgcatgccgacatgttataatttcggaactgtatgacaaccgacca

SEQ ID NO: 479628 - DNA, 60 bp, Artificial
  Synthetic oligonucleotide
ttccgatcagaggacgtggcaaactcgttctggtacatggcagctgcaattctctgctac

SEQ ID NO: 479629 - DNA, 60 bp, Artificial
  Synthetic oligonucleotide
ttccgatcagcttgtagctcacagcgttcacgatgatacttgtagtccgtttcagtatga

SEQ ID NO: 479630 - DNA, 60 bp, Artificial
  Synthetic oligonucleotide
ttccgatctggtattcagcgctcctctgcagctacaggataaagtcgtctccttgcagct

SEQ ID NO: 479631 - DNA, 57 bp, Artificial
  Synthetic oligonucleotide
ttccgatgaaaacgacaactaattctcatttggggcacaagtttaggcatgtacctc

SEQ ID NO: 479632 - DNA, 56 bp, Artificial
  Synthetic oligonucleotide
ttccgatgacggagatacgggatccgacgttgagtcgtgctcctccatgccccccc

SEQ ID NO: 479633 - DNA, 58 bp, Artificial
  Synthetic oligonucleotide
ttccgatgattggtacaaggtacgccgtgcttttgaaatgcgtttgcgccgtcttggc

SEQ ID NO: 479634 - DNA, 57 bp, Artificial
  Synthetic oligonucleotide
ttccgatgtcactagaggtaatggtattacgcatagagtagggaaaagattctgtgt

SEQ ID NO: 479635 - DNA, 60 bp, Artificial
  Synthetic oligonucleotide
ttccgattgatccacgaaacagtttgtatgcaatttcgaaatgctccatatcgccaaccg

SEQ ID NO: 479636 - DNA, 58 bp, Artificial
  Synthetic oligonucleotide
ttccgcaccatagtctgtggccttttcccgacacaaattcaagttcggaatataatga

SEQ ID NO: 479637 - DNA, 52 bp, Artificial
  Synthetic oligonucleotide
ttccgcattcagttcccagatcagaaaggatggtagagaccctcgagcacac

SEQ ID NO: 479638 - DNA, 53 bp, Artificial
  Synthetic oligonucleotide
ttccgcctgggactttccactggggcgttccaggggtgtggtctgggcgggaa

SEQ ID NO: 479639 - DNA, 60 bp, Artificial
  Synthetic oligonucleotide
ttccgcgaatggatgagggcagcgtagtggtcccctaggcgcgttctctacgtgctatat

SEQ ID NO: 479640 - DNA, 58 bp, Artificial
  Synthetic oligonucleotide
ttccgcgatggaattacgtgagaagttggtcggaagccctctgagtaaatcgcagagg

SEQ ID NO: 479641 - DNA, 54 bp, Artificial
  Synthetic oligonucleotide
ttccgcggcgaaatccagaaggacatggacgggttcgtgttccctggcgaaacc

SEQ ID NO: 479642 - DNA, 53 bp, Artificial
  Synthetic oligonucleotide
ttccgcggggactttccactggggcgttccaggaggagtggtctgggcgggac

SEQ ID NO: 479643 - DNA, 59 bp, Artificial
  Synthetic oligonucleotide
ttccgctgaaaatagaactgtctacatattattcgtagtccactgactccagaaaagga

SEQ ID NO: 479644 - DNA, 57 bp, Artificial
  Synthetic oligonucleotide
ttccgctttccccggccgatacggccagatgtgagtgggctgattcttgaggagggg

SEQ ID NO: 479645 - DNA, 54 bp, Artificial
  Synthetic oligonucleotide
ttccggaagtctgtttaaagtgggaacttatggatgaagattaccagggaaggc

SEQ ID NO: 479646 - DNA, 55 bp, Artificial
  Synthetic oligonucleotide
ttccggaagttactccaaccagctccggattgtcataagcatgaccccagagcgt

SEQ ID NO: 479647 - DNA, 57 bp, Artificial
  Synthetic oligonucleotide
ttccggacactgtcgagtaaagcggcaacaaacgtagggttgaccacacaatgccga

SEQ ID NO: 479648 - DNA, 60 bp, Artificial
  Synthetic oligonucleotide
ttccggaccagacaatggggcggtagctgtattgaaatataatggcataataacagacac

SEQ ID NO: 479649 - DNA, 56 bp, Artificial
  Synthetic oligonucleotide
ttccggacgacaccctggagaagcacacactcaggtccgaaacctcgacttacaac

SEQ ID NO: 479650 - DNA, 55 bp, Artificial
  Synthetic oligonucleotide
ttccggacgaggcgacgaccccgaggcgcgatgtggaacgcgctgaaaacgttga

SEQ ID NO: 479651 - DNA, 57 bp, Artificial
  Synthetic oligonucleotide
ttccggagtttcttatgtgttctcttaaaccaggaataggagcggattggtatgaga

SEQ ID NO: 479652 - DNA, 55 bp, Artificial
  Synthetic oligonucleotide
ttccggatctatacgactacaaggaaaaccgattcactgaaattggtgtgacacg

SEQ ID NO: 479653 - DNA, 60 bp, Artificial
  Synthetic oligonucleotide
ttccggcaacgaaggtattgacagacctccaggcagtggattcagcaacgctgccgagta

SEQ ID NO: 479654 - DNA, 55 bp, Artificial
  Synthetic oligonucleotide
ttccggcaatacgacctgagctcgtcccaacgaaatggtggcaccttacccatag

SEQ ID NO: 479655 - DNA, 60 bp, Artificial
  Synthetic oligonucleotide
ttccggcgagtaagcgttggcaccgcactgtgcacacgtggtttcgcactccactaacca

SEQ ID NO: 479656 - DNA, 59 bp, Artificial
  Synthetic oligonucleotide
ttccggcgctttgacgaagatccgttcgagattagaacggatgttgtgattatgaagga

SEQ ID NO: 479657 - DNA, 54 bp, Artificial
  Synthetic oligonucleotide
ttccggcgttatgtgagcaccgacctgtcatatccatgcgacggcccggtggtt

SEQ ID NO: 479658 - DNA, 60 bp, Artificial
  Synthetic oligonucleotide
ttccggctcaattcattccagacccatttgtaaatctcgagaccatgctacagatagttg

SEQ ID NO: 479659 - DNA, 60 bp, Artificial
  Synthetic oligonucleotide
ttccggctctctctggtactgtcaatatgccgtactcttggtgtactccgaacattgaca

SEQ ID NO: 479660 - DNA, 55 bp, Artificial
  Synthetic oligonucleotide
ttccggctctgacgtatggggcgtcatacgtgacggtgaccgccagtccgaatgg

SEQ ID NO: 479661 - DNA, 54 bp, Artificial
  Synthetic oligonucleotide
ttccgggagggtgacgaggtcacattcggtttcgatggtgaatccacccttctt

SEQ ID NO: 479662 - DNA, 50 bp, Artificial
  Synthetic oligonucleotide
ttccggtagactccggcattcagaccttcaagacgactggggctcaactt

SEQ ID NO: 479663 - DNA, 57 bp, Artificial
  Synthetic oligonucleotide
ttccggtcaccaaatcacgacacgcgcggcagtaccaacacggaggtgggcaaacca

SEQ ID NO: 479664 - DNA, 53 bp, Artificial
  Synthetic oligonucleotide
ttccggtcggtaagatttcctccctcgagatggagaacttttccgtgtctaaa

SEQ ID NO: 479665 - DNA, 56 bp, Artificial
  Synthetic oligonucleotide
ttccggtctgagttcggaataaagagtctgtttaaagatggcgtgggagttagcgc

SEQ ID NO: 479666 - DNA, 52 bp, Artificial
  Synthetic oligonucleotide
ttccggtcttaccgggattacaggatactcgaacaactttgtttggccgtac

SEQ ID NO: 479667 - DNA, 57 bp, Artificial
  Synthetic oligonucleotide
ttccggtgccgcacttttccaacataattggttcgatggactacagctacttaagct

SEQ ID NO: 479668 - DNA, 53 bp, Artificial
  Synthetic oligonucleotide
ttccggtgtgaatttacgacacgcgcggcggtgtgtacccctcggagggtaaa

SEQ ID NO: 479669 - DNA, 53 bp, Artificial
  Synthetic oligonucleotide
ttccggtttcagctagtccaattaacctggcagacgggaatttgcccccctcg

SEQ ID NO: 479670 - DNA, 54 bp, Artificial
  Synthetic oligonucleotide
ttccgtaaagggttaggcgatactggtttagacatgtcttcaatgggtaacaac

SEQ ID NO: 479671 - DNA, 55 bp, Artificial
  Synthetic oligonucleotide
ttccgtaatgtaccacttggtcttgagtgcagttgatccacgtgaagttacgccc

SEQ ID NO: 479672 - DNA, 50 bp, Artificial
  Synthetic oligonucleotide
ttccgtaccaatcatatggaagctatttcagctcaagcatcttctaatac

SEQ ID NO: 479673 - DNA, 54 bp, Artificial
  Synthetic oligonucleotide
ttccgtacgatcaagaaccacttaatgtaggatggaaagccaacgttcagcgaa

SEQ ID NO: 479674 - DNA, 57 bp, Artificial
  Synthetic oligonucleotide
ttccgtatcgagctacctttaactgctgcttgtactgtcccttatcatcgtcgctag

SEQ ID NO: 479675 - DNA, 56 bp, Artificial
  Synthetic oligonucleotide
ttccgtcattctcttgtcgtgaatctccacaattaccgtcccggtggcgttaatcg

SEQ ID NO: 479676 - DNA, 60 bp, Artificial
  Synthetic oligonucleotide
ttccgtccatcatcaggaagttgaagcccgccccgattgtcaaatcaaatctcaatactc

SEQ ID NO: 479677 - DNA, 60 bp, Artificial
  Synthetic oligonucleotide
ttccgtcgtcgggccggctttcgccacagcctgcgtcgaagcgctccgcatactgggagc

SEQ ID NO: 479678 - DNA, 56 bp, Artificial
  Synthetic oligonucleotide
ttccgtcgttctaaagacgatctcccttttacgttctctggctcaggcactacaaa

SEQ ID NO: 479679 - DNA, 54 bp, Artificial
  Synthetic oligonucleotide
ttccgtctagctgacacctcacagaccggcaccccgcgcgctttcctggtgggg

SEQ ID NO: 479680 - DNA, 51 bp, Artificial
  Synthetic oligonucleotide
ttccgtctgaatcatcatgtgacgtacaaccatcaagaggccgcaaagtac

SEQ ID NO: 479681 - DNA, 60 bp, Artificial
  Synthetic oligonucleotide
ttccgtctgctccagaacagccaggtattcagtctaatccgacccaatgaaaatccagca

SEQ ID NO: 479682 - DNA, 60 bp, Artificial
  Synthetic oligonucleotide
ttccgtgagagaaagctccccgggcacaagactgacgatgaagtgaactctgagccagtc

SEQ ID NO: 479683 - DNA, 58 bp, Artificial
  Synthetic oligonucleotide
ttccgtgcgtagtggttgcggcgattgattacaggaatgcggaaaagcaacgtaagga

SEQ ID NO: 479684 - DNA, 55 bp, Artificial
  Synthetic oligonucleotide
ttccgtgtaaaggcaacgctacaccacaccgtggttacgtgtcaagcccgagttc

SEQ ID NO: 479685 - DNA, 57 bp, Artificial
  Synthetic oligonucleotide
ttccgtgtaaccataacaaggacgggggcgtatgcaagtcctgttcgtggattagca

SEQ ID NO: 479686 - DNA, 54 bp, Artificial
  Synthetic oligonucleotide
ttccgtgtactctttaccaccggacccggaccattttgatgggtacaaacagca

SEQ ID NO: 479687 - DNA, 57 bp, Artificial
  Synthetic oligonucleotide
ttccgtgtcgaatacttacgcgccgaaatcttatcaaagtttgatgggcaccctctc

SEQ ID NO: 479688 - DNA, 57 bp, Artificial
  Synthetic oligonucleotide
ttccgtgtcttggtttgcctccactgggggacgtgactcgaagatcgacgtgtggag

SEQ ID NO: 479689 - DNA, 60 bp, Artificial
  Synthetic oligonucleotide
ttccgttataagtgcaagcagttggatcaagagatacagtggtggttttctggaacaggc

SEQ ID NO: 479690 - DNA, 57 bp, Artificial
  Synthetic oligonucleotide
ttccgttcactgagggaacggctctctttcacaaggtccagtcttatgtccgacaag

SEQ ID NO: 479691 - DNA, 60 bp, Artificial
  Synthetic oligonucleotide
ttccgttgctgcgacactgggctttggcgcttacatgtccaaggcccacgggattgatcc

SEQ ID NO: 479692 - DNA, 60 bp, Artificial
  Synthetic oligonucleotide
ttccgtttcatttgggaaccagacaagtatgcatagcatggtccagctcaagttgtcatg

SEQ ID NO: 479693 - DNA, 52 bp, Artificial
  Synthetic oligonucleotide
ttccgtttcccacacggctggagattacgtctacgcaggggcttcagagccg

SEQ ID NO: 479694 - DNA, 57 bp, Artificial
  Synthetic oligonucleotide
ttcctaaactctccagcattgtttacagcagatgtcgtagacatcttgaaggacata

SEQ ID NO: 479695 - DNA, 53 bp, Artificial
  Synthetic oligonucleotide
ttcctaaaggattgtgggagcaaattactgattacaattattgtttcaacttc

SEQ ID NO: 479696 - DNA, 60 bp, Artificial
  Synthetic oligonucleotide
ttcctaacgattttattgttggatgcgaaccggcttacgacattgatatgtgtgagcagg

SEQ ID NO: 479697 - DNA, 59 bp, Artificial
  Synthetic oligonucleotide
ttcctaactgcaactgcaccggacttggtgccgttgctggagaacacccacgtctctta

SEQ ID NO: 479698 - DNA, 53 bp, Artificial
  Synthetic oligonucleotide
ttcctaagaagataactcttccctaccctcctggtgttgaagctcacccttca

SEQ ID NO: 479699 - DNA, 54 bp, Artificial
  Synthetic oligonucleotide
ttcctaaggtttctcccaatcaatacagggtctttagactgcgccttccagacc

SEQ ID NO: 479700 - DNA, 56 bp, Artificial
  Synthetic oligonucleotide
ttcctaagttgccaactgtgttaagatcagaactacaagtttatcttctaaatagg

SEQ ID NO: 479701 - DNA, 56 bp, Artificial
  Synthetic oligonucleotide
ttcctaatatctttataggtccaacaagaatcttcgaaacaaagtatggaaacagc

SEQ ID NO: 479702 - DNA, 55 bp, Artificial
  Synthetic oligonucleotide
ttcctacacgtggcggccatccgatataatattaccggatggccgcgcccccccc

SEQ ID NO: 479703 - DNA, 56 bp, Artificial
  Synthetic oligonucleotide
ttcctacccatacggcatacatcagcgatacactacatttcatggataggaaggac

SEQ ID NO: 479704 - DNA, 57 bp, Artificial
  Synthetic oligonucleotide
ttcctacgggaagttcccgaatcccaggtgtggcgagtatggcagccaaatcctatc

SEQ ID NO: 479705 - DNA, 60 bp, Artificial
  Synthetic oligonucleotide
ttcctacgtagacggaagtagtatatgcggctggacgatctgtggccacgtctgcggagg

SEQ ID NO: 479706 - DNA, 58 bp, Artificial
  Synthetic oligonucleotide
ttcctactcagcgaagttgagggtctagagaacattactcccgttgaaatggtcgagc

SEQ ID NO: 479707 - DNA, 59 bp, Artificial
  Synthetic oligonucleotide
ttcctactgatggatgctcttaaattaagcatcgaagacccaagccatgagggggaggg

SEQ ID NO: 479708 - DNA, 60 bp, Artificial
  Synthetic oligonucleotide
ttcctagaaatagggataatttgcttgtgtaccttgtgagaaagttgaatgatcctagca

SEQ ID NO: 479709 - DNA, 60 bp, Artificial
  Synthetic oligonucleotide
ttcctagaccatggctccatagcttaggacagcatatctatgaaacctatggggatactt

SEQ ID NO: 479710 - DNA, 60 bp, Artificial
  Synthetic oligonucleotide
ttcctagcatatcgtagcaacaatcgtgaacacacgtgctactccggattggacgttact

SEQ ID NO: 479711 - DNA, 60 bp, Artificial
  Synthetic oligonucleotide
ttcctagctgctgaagagggctgtagacaaacgaacgaacgactgtcgcaggctaagtac

SEQ ID NO: 479712 - DNA, 60 bp, Artificial
  Synthetic oligonucleotide
ttcctaggagttcttggtccaatcatgatgcctcatcaggggtgagctccgcatgtccat

SEQ ID NO: 479713 - DNA, 55 bp, Artificial
  Synthetic oligonucleotide
ttcctagggacggcaggcttctgccgcctctggatccctgggtttgcggaaatgg

SEQ ID NO: 479714 - DNA, 55 bp, Artificial
  Synthetic oligonucleotide
ttcctaggggcacgcacgccaagtatgctagatggttgtcacagtcgagggtccg

SEQ ID NO: 479715 - DNA, 51 bp, Artificial
  Synthetic oligonucleotide
ttcctaggtactgcagtcaacggcgtaatgtggaccgtctaccacggggcg

SEQ ID NO: 479716 - DNA, 56 bp, Artificial
  Synthetic oligonucleotide
ttcctagtctgttaagttctctatacgggagtaattcttctgatatacccaaatcc

SEQ ID NO: 479717 - DNA, 51 bp, Artificial
  Synthetic oligonucleotide
ttcctagtgccatagagcgtgagatcgttatttctagactagtggagagct

SEQ ID NO: 479718 - DNA, 58 bp, Artificial
  Synthetic oligonucleotide
ttcctatacaagtgggataaaaatccgtatgggtgctttggatgggagctgttgtata

SEQ ID NO: 479719 - DNA, 60 bp, Artificial
  Synthetic oligonucleotide
ttcctatacattattgtgctccagctggttatgcgattctaaagtgtaatactaagacat

SEQ ID NO: 479720 - DNA, 58 bp, Artificial
  Synthetic oligonucleotide
ttcctatactcggcacaggtatttgtaattatgaggtccacgtgtttcgcaggatagg

SEQ ID NO: 479721 - DNA, 60 bp, Artificial
  Synthetic oligonucleotide
ttcctatagcctctactggctttacctatagcaatatatttctagctctataactagtcc

SEQ ID NO: 479722 - DNA, 55 bp, Artificial
  Synthetic oligonucleotide
ttcctatagtagccggagggtttagcgaaaccacacgtttaaatcccagacatgc

SEQ ID NO: 479723 - DNA, 60 bp, Artificial
  Synthetic oligonucleotide
ttcctatggtacttcttgatgcccatgattctcctggtcttaattccagtggagtcttta

SEQ ID NO: 479724 - DNA, 52 bp, Artificial
  Synthetic oligonucleotide
ttcctatgttggtagatacaggcgcctgcctgactgcaataggaggggcggc

SEQ ID NO: 479725 - DNA, 55 bp, Artificial
  Synthetic oligonucleotide
ttcctattacaaaggtatctttaaaacctgggtgtgatggaccaagagtaaagca

SEQ ID NO: 479726 - DNA, 53 bp, Artificial
  Synthetic oligonucleotide
ttcctcaaggatgtaatggaatcaatggacaaagacgagatggaaataacaac

SEQ ID NO: 479727 - DNA, 59 bp, Artificial
  Synthetic oligonucleotide
ttcctcacaccacctcccgaccacagtaaggctatcttagctgtagcagtaggagtagg

SEQ ID NO: 479728 - DNA, 54 bp, Artificial
  Synthetic oligonucleotide
ttcctcacacgggaacgtttgtgtgtgtctcggactttacaaggggaactgggc

SEQ ID NO: 479729 - DNA, 60 bp, Artificial
  Synthetic oligonucleotide
ttcctcacgcttaagcgtaagaaccttgtttccaggcacattcgcggcgacatttgcgca

SEQ ID NO: 479730 - DNA, 57 bp, Artificial
  Synthetic oligonucleotide
ttcctcacgtcggtgacaacctccatgcactaccccacggaggccgatacgtcgacg

SEQ ID NO: 479731 - DNA, 60 bp, Artificial
  Synthetic oligonucleotide
ttcctcacttgtgtccccaatggggctagctcgggtccacaacagctgccgatcaatggg

SEQ ID NO: 479732 - DNA, 56 bp, Artificial
  Synthetic oligonucleotide
ttcctcagatccctagtctgagccacgtggataacctttggtaagggcccgctaac

SEQ ID NO: 479733 - DNA, 60 bp, Artificial
  Synthetic oligonucleotide
ttcctcatggcgcgtttcacgccaatgagaagttcgggtttgagttggtcttcacagctc

SEQ ID NO: 479734 - DNA, 55 bp, Artificial
  Synthetic oligonucleotide
ttcctcattattgagcgataagatatctgtgccacggtggacaatttgcgcgatc

SEQ ID NO: 479735 - DNA, 60 bp, Artificial
  Synthetic oligonucleotide
ttcctccaaacgatcgagatagcatattgactcttttgttgttgtcaactttggctgatg

SEQ ID NO: 479736 - DNA, 52 bp, Artificial
  Synthetic oligonucleotide
ttcctccaagttccgagcgtcatagcgtgttgcagctatgttgtacagaatc

SEQ ID NO: 479737 - DNA, 57 bp, Artificial
  Synthetic oligonucleotide
ttcctccacttcagagccggttgtcaacactcaaggatcggacaaccagggggagga

SEQ ID NO: 479738 - DNA, 59 bp, Artificial
  Synthetic oligonucleotide
ttcctcccacgtgagtgtgagtatgcctttactgatgtgaagtaaagcttcaataaatt

SEQ ID NO: 479739 - DNA, 52 bp, Artificial
  Synthetic oligonucleotide
ttcctccccccgaaggtcccgagtgaggcttatcccggggatcggcctctgt

SEQ ID NO: 479740 - DNA, 60 bp, Artificial
  Synthetic oligonucleotide
ttcctccctgcttgcaacgcaaatccaggcccagaaggatctcactttgatggggcagca

SEQ ID NO: 479741 - DNA, 58 bp, Artificial
  Synthetic oligonucleotide
ttcctccgacattatcggcttattccagatcaccctttcacatcgtttatacgcttcc

SEQ ID NO: 479742 - DNA, 60 bp, Artificial
  Synthetic oligonucleotide
ttcctccgagtaactcatgcctatgaccatgataatgacagatccaactttttgtcatcc

SEQ ID NO: 479743 - DNA, 60 bp, Artificial
  Synthetic oligonucleotide
ttcctccgccgacgatgcatttaacgccttggcatatgagtcgttagccgattgctggcc

SEQ ID NO: 479744 - DNA, 59 bp, Artificial
  Synthetic oligonucleotide
ttcctccttcggagagaaagaccatagcgatgggggagatgctaggagtaggcggcgac

SEQ ID NO: 479745 - DNA, 51 bp, Artificial
  Synthetic oligonucleotide
ttcctcgaaactttgtataattattcgagcaacgaggactccacacatgtc

SEQ ID NO: 479746 - DNA, 50 bp, Artificial
  Synthetic oligonucleotide
ttcctcgacgaacgctagtatcgtagacagcctcacaaaacttctctcac

SEQ ID NO: 479747 - DNA, 53 bp, Artificial
  Synthetic oligonucleotide
ttcctcgagcgtttactcgagttccagacccgtaaaaccgtgtacgaacacgc

SEQ ID NO: 479748 - DNA, 57 bp, Artificial
  Synthetic oligonucleotide
ttcctcgagtatggataatgttcccctttatagcacgggaaggcctatcacacctta

SEQ ID NO: 479749 - DNA, 60 bp, Artificial
  Synthetic oligonucleotide
ttcctcgattgctattgtcgtgcgtgacgtaatttctattgcgtctttactaatggcgag

SEQ ID NO: 479750 - DNA, 55 bp, Artificial
  Synthetic oligonucleotide
ttcctcgcagccaagtcccaactttcctctttccatcaagatcccaaggtgtccc

SEQ ID NO: 479751 - DNA, 59 bp, Artificial
  Synthetic oligonucleotide
ttcctcggaaggtcttaaagagcccaggaggagtggcgcagcgcatacataacctgttg

SEQ ID NO: 479752 - DNA, 57 bp, Artificial
  Synthetic oligonucleotide
ttcctcgtcagatagcctcccttaactcaatcccgagtttcatgcttaggaaagagt

SEQ ID NO: 479753 - DNA, 59 bp, Artificial
  Synthetic oligonucleotide
ttcctcgtcgaggaattctttataactgctgttgggaccaggattgcacaggaagattg

SEQ ID NO: 479754 - DNA, 56 bp, Artificial
  Synthetic oligonucleotide
ttcctcgtgaaagcgtggaagtccaagagggtcccaatggggttctcgtatgatac

SEQ ID NO: 479755 - DNA, 57 bp, Artificial
  Synthetic oligonucleotide
ttcctcgtgccagtggggtcgatggatgccgcaataaaaatttggggtactggatgg

SEQ ID NO: 479756 - DNA, 60 bp, Artificial
  Synthetic oligonucleotide
ttcctcgtgcggtacaacttttaggagcgcaatatgagcattgtaactgtatgctgctgt

SEQ ID NO: 479757 - DNA, 55 bp, Artificial
  Synthetic oligonucleotide
ttcctcgtggaaggtagttctgcaggcgtcaatcccaggggtagtacgccgagat

SEQ ID NO: 479758 - DNA, 55 bp, Artificial
  Synthetic oligonucleotide
ttcctctaacttctttcttccgcctacccactgctcgaggatctcttctctcccc

SEQ ID NO: 479759 - DNA, 60 bp, Artificial
  Synthetic oligonucleotide
ttcctctatattgttgaagtcgaaaggtggtatgatcccatcatggccgtatgtgatcag

SEQ ID NO: 479760 - DNA, 55 bp, Artificial
  Synthetic oligonucleotide
ttcctctatctcttggagacggaatagaaatgatcctcgggtgtaacttcatccg

SEQ ID NO: 479761 - DNA, 60 bp, Artificial
  Synthetic oligonucleotide
ttcctctcatcctattgccactgcaattaggtgttgtgagaacttcatcatggccagacg

SEQ ID NO: 479762 - DNA, 60 bp, Artificial
  Synthetic oligonucleotide
ttcctctcgtcaagacgaatccaatgagctcatattcgattaaaaatgtccacgtgatgt

SEQ ID NO: 479763 - DNA, 60 bp, Artificial
  Synthetic oligonucleotide
ttcctctcgtgttatgtaatccgatccaacttgcgatactgattttcctgggtccaatgc

SEQ ID NO: 479764 - DNA, 60 bp, Artificial
  Synthetic oligonucleotide
ttcctctctagagatcacccttttgaaactgttggtataatacagaggcactgataagca

SEQ ID NO: 479765 - DNA, 60 bp, Artificial
  Synthetic oligonucleotide
ttcctctctgccgcgcgagggaacagctctgagcttttaagcgagtgtgctgcgagctgg

SEQ ID NO: 479766 - DNA, 55 bp, Artificial
  Synthetic oligonucleotide
ttcctctgctacctaaggcattagcaggtaattttgttgagcggtaggctatacc

SEQ ID NO: 479767 - DNA, 60 bp, Artificial
  Synthetic oligonucleotide
ttcctctgctatgaaagcaatagcccagttgaccgcatgtggagttttaacaacctctga

SEQ ID NO: 479768 - DNA, 55 bp, Artificial
  Synthetic oligonucleotide
ttcctctggtgaagtgtacatcttggcgccgaaagttcacagagcccgccgaaat

SEQ ID NO: 479769 - DNA, 55 bp, Artificial
  Synthetic oligonucleotide
ttcctcttcggtgactgcggcagcgtgggcctgctccaacaggcgtcctcggcac

SEQ ID NO: 479770 - DNA, 60 bp, Artificial
  Synthetic oligonucleotide
ttcctcttgattgagtataggacatggttcatattgactttgtcttctaactcagagtgg

SEQ ID NO: 479771 - DNA, 56 bp, Artificial
  Synthetic oligonucleotide
ttcctcttgctccctgttgggccccttactttttcatggatgcttctccacgaaat

SEQ ID NO: 479772 - DNA, 57 bp, Artificial
  Synthetic oligonucleotide
ttcctcttgtcaaaagtatcttaatgctacccgttccttgtcttctattctggcaac

SEQ ID NO: 479773 - DNA, 60 bp, Artificial
  Synthetic oligonucleotide
ttcctcttttgtgttgtagaattgagtcgagtcgagtcatggacaaatctgaatcaacca

SEQ ID NO: 479774 - DNA, 54 bp, Artificial
  Synthetic oligonucleotide
ttcctgaaaccgttcacggttttaggtgtatgcttgcaattaaatacctacaag

SEQ ID NO: 479775 - DNA, 59 bp, Artificial
  Synthetic oligonucleotide
ttcctgaacggaatgagcaagggcaaacgctttggagtaagacaaacgatgctgggtca

SEQ ID NO: 479776 - DNA, 55 bp, Artificial
  Synthetic oligonucleotide
ttcctgaagccaatgtccatattggcggaaattctagtatgaggatggtagggcc

SEQ ID NO: 479777 - DNA, 60 bp, Artificial
  Synthetic oligonucleotide
ttcctgaaggtaatcattcacaatgcgataagaagaccctcccacttacatggacaggct

SEQ ID NO: 479778 - DNA, 55 bp, Artificial
  Synthetic oligonucleotide
ttcctgaagtagactcgtgacgggacaattgaactatttgcaggtgcaaccgtcg

SEQ ID NO: 479779 - DNA, 60 bp, Artificial
  Synthetic oligonucleotide
ttcctgacaatcttgctgtgaattctgacaggattaagaatggttctctttccaccagtt

SEQ ID NO: 479780 - DNA, 58 bp, Artificial
  Synthetic oligonucleotide
ttcctgacacccggttcgcttgctatgtcttcaccgaatacgttcagcaaaactactc

SEQ ID NO: 479781 - DNA, 58 bp, Artificial
  Synthetic oligonucleotide
ttcctgacaggttagaagacaagaagcagctccaaagatttctcggagttcttactta

SEQ ID NO: 479782 - DNA, 58 bp, Artificial
  Synthetic oligonucleotide
ttcctgacagtggtggacaccacgcgcagcacaaatgtctctttgtgtgccactgtaa

SEQ ID NO: 479783 - DNA, 59 bp, Artificial
  Synthetic oligonucleotide
ttcctgacctcttgtgcaccgttttcggtaagtatgtatagccagaggcgctttgcaac

SEQ ID NO: 479784 - DNA, 59 bp, Artificial
  Synthetic oligonucleotide
ttcctgagaggcgagatctcttgttctatttaagaggtaacgagagtgttatcaaggat

SEQ ID NO: 479785 - DNA, 52 bp, Artificial
  Synthetic oligonucleotide
ttcctgaggctcgagtggagggtctgccccttcacgtaggagtacttgccct

SEQ ID NO: 479786 - DNA, 54 bp, Artificial
  Synthetic oligonucleotide
ttcctgagtgggagtttgtcaacacccctcctctagtaaaattatggtaccaat

SEQ ID NO: 479787 - DNA, 55 bp, Artificial
  Synthetic oligonucleotide
ttcctgatatcatcagacccttgacagctgagcaccattccctggggaagggcgc

SEQ ID NO: 479788 - DNA, 57 bp, Artificial
  Synthetic oligonucleotide
ttcctgatcagcctgattttatttgtgacttttactttaattatcgttgtattaggc

SEQ ID NO: 479789 - DNA, 57 bp, Artificial
  Synthetic oligonucleotide
ttcctgattggtcagaaaactgggcggagccaaaggtgccgactcctataaattcac

SEQ ID NO: 479790 - DNA, 55 bp, Artificial
  Synthetic oligonucleotide
ttcctgcaattgattggaataccaacccacagacacattgttggggaagggtgcc

SEQ ID NO: 479791 - DNA, 55 bp, Artificial
  Synthetic oligonucleotide
ttcctgcacttgtctccgacactgccgcccaagccaaggcgtctccgagcgccgg

SEQ ID NO: 479792 - DNA, 52 bp, Artificial
  Synthetic oligonucleotide
ttcctgcagctaatgcatcagtggtggaaatcaaggatagtgctggtaaagt

SEQ ID NO: 479793 - DNA, 56 bp, Artificial
  Synthetic oligonucleotide
ttcctgccacgactcgtcggacggtctctggccaggtttccttggtcccgtctggc

SEQ ID NO: 479794 - DNA, 56 bp, Artificial
  Synthetic oligonucleotide
ttcctgccccctaacccagtcaccaaggtccttcacactgacacctatattaagcg

SEQ ID NO: 479795 - DNA, 60 bp, Artificial
  Synthetic oligonucleotide
ttcctgcggccagagttgcagttccccaagatgtggatcatcttcgggcctgccaagtgg

SEQ ID NO: 479796 - DNA, 60 bp, Artificial
  Synthetic oligonucleotide
ttcctgctcaagaaaggtcatcaaatcactgagatcatgaacaggttacgcctctttttc

SEQ ID NO: 479797 - DNA, 57 bp, Artificial
  Synthetic oligonucleotide
ttcctggaatggtaaataatcctactgcgtatctcaaagtagataggaatttaatac

SEQ ID NO: 479798 - DNA, 54 bp, Artificial
  Synthetic oligonucleotide
ttcctggatccctaagaggaaccgttcaattctcaataccagtcaaaggggaat

SEQ ID NO: 479799 - DNA, 60 bp, Artificial
  Synthetic oligonucleotide
ttcctggatctgatgagagcagtggcaaatagcatgagagaagcgccaaactctgcacag

SEQ ID NO: 479800 - DNA, 60 bp, Artificial
  Synthetic oligonucleotide
ttcctggatctgatgagagcggtagcaaatagcatgagggaggcgccaaactctcgacag

SEQ ID NO: 479801 - DNA, 56 bp, Artificial
  Synthetic oligonucleotide
ttcctggcaaatggacgcattccgaaggtaccactcggacccaagttctgtcaccc

SEQ ID NO: 479802 - DNA, 55 bp, Artificial
  Synthetic oligonucleotide
ttcctggcgacctgcatcaacggtgcgtgttggactgtctttcacggcgccggct

SEQ ID NO: 479803 - DNA, 59 bp, Artificial
  Synthetic oligonucleotide
ttcctggggagtctacaaaagagcagaatacagcctcctcgtctatttactataccaca

SEQ ID NO: 479804 - DNA, 53 bp, Artificial
  Synthetic oligonucleotide
ttcctggtcccctctataaacttggtccccaagttcccacattacaaaatgtg

SEQ ID NO: 479805 - DNA, 58 bp, Artificial
  Synthetic oligonucleotide
ttcctgtaacacacactaaagaattgctccacacagagcacaatggaatgctgtgtgc

SEQ ID NO: 479806 - DNA, 55 bp, Artificial
  Synthetic oligonucleotide
ttcctgtacctcttgtgatgaggggcgagcggacagatcggcacagaggtcgggg

SEQ ID NO: 479807 - DNA, 60 bp, Artificial
  Synthetic oligonucleotide
ttcctgtcactcgagttcccactcctaatctgtcacacattctctacggattcataccga

SEQ ID NO: 479808 - DNA, 51 bp, Artificial
  Synthetic oligonucleotide
ttcctgtcccccgagtcactttgtggcgaaggtttcgaaccttgccacagg

SEQ ID NO: 479809 - DNA, 60 bp, Artificial
  Synthetic oligonucleotide
ttcctgtcgaatcagcagctcttgatcgtgttagtggctacttagttactgacaagtatt

SEQ ID NO: 479810 - DNA, 60 bp, Artificial
  Synthetic oligonucleotide
ttcctgtgaccagctcagtggatcttgtagagacaaatcatactggaacatactgctcat

SEQ ID NO: 479811 - DNA, 54 bp, Artificial
  Synthetic oligonucleotide
ttcctgtgacgtcacttccggtgggcgggacttccggaattagggttggctctg

SEQ ID NO: 479812 - DNA, 51 bp, Artificial
  Synthetic oligonucleotide
ttcctgtgattcgtagagctgctaaattgagagctgcaatcacctggtttg

SEQ ID NO: 479813 - DNA, 60 bp, Artificial
  Synthetic oligonucleotide
ttcctgtgtggagagatgcagataccaccctattttgtgcatcagatgccaacgcacaag

SEQ ID NO: 479814 - DNA, 55 bp, Artificial
  Synthetic oligonucleotide
ttcctgttactgataaatctttccacagtaacagaggctcgtcggtttccccaac

SEQ ID NO: 479815 - DNA, 60 bp, Artificial
  Synthetic oligonucleotide
ttcctgttgctggctggaagatcctgttcacacaacataggtcatcatatagagcttcaa

SEQ ID NO: 479816 - DNA, 60 bp, Artificial
  Synthetic oligonucleotide
ttccttagagcacgacctgaggacttgattgcggataaatggtttggcttcaccagaaca

SEQ ID NO: 479817 - DNA, 56 bp, Artificial
  Synthetic oligonucleotide
ttccttaggttgtaattgaaccggatttggatgtggtatattctcgtccttgtgta

SEQ ID NO: 479818 - DNA, 54 bp, Artificial
  Synthetic oligonucleotide
ttccttatcccctcctccaaggaattgaagtcgaacggctctatgacccttccg

SEQ ID NO: 479819 - DNA, 60 bp, Artificial
  Synthetic oligonucleotide
ttccttatctagatggtacattctacttgacacatacatttcaaagagtatccatccaat

SEQ ID NO: 479820 - DNA, 55 bp, Artificial
  Synthetic oligonucleotide
ttccttattacgtattaagtacaaaagcccacaaggctttctgacttatgcggta

SEQ ID NO: 479821 - DNA, 60 bp, Artificial
  Synthetic oligonucleotide
ttccttcatatgtttgaggaagtgcggatctacgtcatcaatgacgttataccacgcatt

SEQ ID NO: 479822 - DNA, 54 bp, Artificial
  Synthetic oligonucleotide
ttccttcgaaatttagtgtgatgttggtggatgagtacactctagttcaaagtg

SEQ ID NO: 479823 - DNA, 58 bp, Artificial
  Synthetic oligonucleotide
ttccttctattcgagaccttctcgacaccgccaatgctatgtttcgggaggccttaga

SEQ ID NO: 479824 - DNA, 55 bp, Artificial
  Synthetic oligonucleotide
ttccttctggacactaagggcagactctatcgttggcggtcacccgtcattgtgg

SEQ ID NO: 479825 - DNA, 57 bp, Artificial
  Synthetic oligonucleotide
ttccttcttcggagaattcacacggcggtctttccgtctctcgacaggtgtgaatgc

SEQ ID NO: 479826 - DNA, 55 bp, Artificial
  Synthetic oligonucleotide
ttccttgactcagaagatccatgatccaaccgatagatcacaattccccgcaacc

SEQ ID NO: 479827 - DNA, 55 bp, Artificial
  Synthetic oligonucleotide
ttccttgcccaccccatcaatttttgatagtctcggtgatgtttaataaagttag

SEQ ID NO: 479828 - DNA, 57 bp, Artificial
  Synthetic oligonucleotide
ttccttgctcccggtggttcgatccctgtttagcctgatacgatagccgctaacctg

SEQ ID NO: 479829 - DNA, 50 bp, Artificial
  Synthetic oligonucleotide
ttccttgggggggcaaagcttggcgcagtaacatatgtggagtacttggc

SEQ ID NO: 479830 - DNA, 60 bp, Artificial
  Synthetic oligonucleotide
ttccttgggttcttaggaacagcaggaagcactatgggcgcagcgtcaataacgctgacg

SEQ ID NO: 479831 - DNA, 60 bp, Artificial
  Synthetic oligonucleotide
ttccttgggttcttgagtgcagcaggaagcactatgggcgcggcgtcaataacgctgacg

SEQ ID NO: 479832 - DNA, 55 bp, Artificial
  Synthetic oligonucleotide
ttccttggtattttggaagaatgctacagaacaatccacggaggaagggggccag

SEQ ID NO: 479833 - DNA, 58 bp, Artificial
  Synthetic oligonucleotide
ttccttgtccgacgtccgacgtaccgtgtgctcgagatgttctttgattccctatcta

SEQ ID NO: 479834 - DNA, 57 bp, Artificial
  Synthetic oligonucleotide
ttccttgtgggtggaaccaatatcacattccgtcatgctgttggaggttttccaact

SEQ ID NO: 479835 - DNA, 58 bp, Artificial
  Synthetic oligonucleotide
ttcctttaaggagattgctacacgtggccggccatccgatataatattaccggatggc

SEQ ID NO: 479836 - DNA, 55 bp, Artificial
  Synthetic oligonucleotide
ttcctttagactctagttgtggaggagattgctttcacagtggaggtacaatagt

SEQ ID NO: 479837 - DNA, 57 bp, Artificial
  Synthetic oligonucleotide
ttcctttagattcgaacaattaccccacatacgttctcaatctttcgagtatgtggc

SEQ ID NO: 479838 - DNA, 59 bp, Artificial
  Synthetic oligonucleotide
ttcctttcaccaagatgagtccaacgagccctcatccatcttggaatacctgcgggaag

SEQ ID NO: 479839 - DNA, 60 bp, Artificial
  Synthetic oligonucleotide
ttcctttccacagcatgttcgctcattcacaggacttagacaggctgatgaaccccttag

SEQ ID NO: 479840 - DNA, 60 bp, Artificial
  Synthetic oligonucleotide
ttcctttctaataatgctatggtgttatatacagacgtgtctcaatgggattcatctcaa

SEQ ID NO: 479841 - DNA, 60 bp, Artificial
  Synthetic oligonucleotide
ttcctttctgctactgcacctgacttggtgcctctcttcgagaacactcacgtgagttat

SEQ ID NO: 479842 - DNA, 60 bp, Artificial
  Synthetic oligonucleotide
ttcctttgacatgagtaaagaaggatcttatttcttcggagacaatgctgaggagtgtga

SEQ ID NO: 479843 - DNA, 57 bp, Artificial
  Synthetic oligonucleotide
ttcctttgatcacgcaaccgcaaccacgttcactctaagcaacgacgcttccccgat

SEQ ID NO: 479844 - DNA, 55 bp, Artificial
  Synthetic oligonucleotide
ttcctttgctggttcctggccgcgctaaatttgtggcgcgtcatttgggcagcgg

SEQ ID NO: 479845 - DNA, 60 bp, Artificial
  Synthetic oligonucleotide
ttcctttgcttgccactgcccgtgcggcacagagctcaaagttttctcagccgagtttcc

SEQ ID NO: 479846 - DNA, 60 bp, Artificial
  Synthetic oligonucleotide
ttcctttggatgggatatgagctccatcctgacaagtggacagtacaacctatacagctg

SEQ ID NO: 479847 - DNA, 60 bp, Artificial
  Synthetic oligonucleotide
ttccttttcagcaatgcatttaaacacgcttccaattacatcaagcgtcaagagttgttc

SEQ ID NO: 479848 - DNA, 60 bp, Artificial
  Synthetic oligonucleotide
ttccttttgtgcaggtctaatgctagaccatggttagaacctacacagtcctcaatggat

SEQ ID NO: 479849 - DNA, 58 bp, Artificial
  Synthetic oligonucleotide
ttcctttttcaggaatgtagtgtggttgatcaagaagaataatgcgtacccaacaata

SEQ ID NO: 479850 - DNA, 58 bp, Artificial
  Synthetic oligonucleotide
ttcgaaagagtacgctccacacggaaatcctttgcccggatagaatctgaagtggcga

SEQ ID NO: 479851 - DNA, 53 bp, Artificial
  Synthetic oligonucleotide
ttcgaaagattagaagcgtcccagttggacgttgtttgacccttcctgcgttt

SEQ ID NO: 479852 - DNA, 52 bp, Artificial
  Synthetic oligonucleotide
ttcgaaaggtaccggaggggggtgactcgaacaccggggaccagtggagcca

SEQ ID NO: 479853 - DNA, 60 bp, Artificial
  Synthetic oligonucleotide
ttcgaaataattgaaggaagagaccggacaatggcttggacagtagtgaatagcatctgc

SEQ ID NO: 479854 - DNA, 55 bp, Artificial
  Synthetic oligonucleotide
ttcgaaattgtaagaagctaggtccaagagagaatgtagctgtcatacaagttgg

SEQ ID NO: 479855 - DNA, 59 bp, Artificial
  Synthetic oligonucleotide
ttcgaaatttcctactgtgcaacagaaggcgaaacacgaggcgatgtggtatctacaat

SEQ ID NO: 479856 - DNA, 54 bp, Artificial
  Synthetic oligonucleotide
ttcgaacaggcctcacaatatggggcaaacgtaggtgttcagattaatgtggag

SEQ ID NO: 479857 - DNA, 55 bp, Artificial
  Synthetic oligonucleotide
ttcgaacatgatactcaattaactgttggtgaaagaatgcatttgtcgatttcta

SEQ ID NO: 479858 - DNA, 55 bp, Artificial
  Synthetic oligonucleotide
ttcgaacccagtcgaacaaaccagaatactcctgggtgacttcaaacgcctggga

SEQ ID NO: 479859 - DNA, 56 bp, Artificial
  Synthetic oligonucleotide
ttcgaaccgtatggccatatttgactaagtactggcttaatctcgaattcaaacga

SEQ ID NO: 479860 - DNA, 52 bp, Artificial
  Synthetic oligonucleotide
ttcgaacggggtcctcacaccgctggtactcggcaccgattattccgtgagc

SEQ ID NO: 479861 - DNA, 57 bp, Artificial
  Synthetic oligonucleotide
ttcgaacgtttgaatctattctataacattagccttagcataatccccgtttcagct

SEQ ID NO: 479862 - DNA, 60 bp, Artificial
  Synthetic oligonucleotide
ttcgaactgtatgagaacgtggagatgaggctccccattttcgtgtaattctctgcaaac

SEQ ID NO: 479863 - DNA, 51 bp, Artificial
  Synthetic oligonucleotide
ttcgaagaaacaacctcgagtctgacaccacaagttccgagtttgaaattg

SEQ ID NO: 479864 - DNA, 60 bp, Artificial
  Synthetic oligonucleotide
ttcgaagaaaggctttgggagatctcagcggcagaggtgcgcaatacctatctgagtaag

SEQ ID NO: 479865 - DNA, 56 bp, Artificial
  Synthetic oligonucleotide
ttcgaagaatggcgttttctttaacgccgatttccaacgtcgtactggagatgcgc

SEQ ID NO: 479866 - DNA, 60 bp, Artificial
  Synthetic oligonucleotide
ttcgaagcgagtaatatacgtgatagtgctcagttaaaatggatcgaagcgattaaatat

SEQ ID NO: 479867 - DNA, 60 bp, Artificial
  Synthetic oligonucleotide
ttcgaaggacttgtcgaacttggacagggcttagatgctgtcagacagctacatttgtcg

SEQ ID NO: 479868 - DNA, 54 bp, Artificial
  Synthetic oligonucleotide
ttcgaaggagtttctatgtctggggtaggcagcgtcgttcgttttagtttcttc

SEQ ID NO: 479869 - DNA, 55 bp, Artificial
  Synthetic oligonucleotide
ttcgaaggatcggttttacatacgtcatgttgctaaacgtgtcttgtcagtggag

SEQ ID NO: 479870 - DNA, 60 bp, Artificial
  Synthetic oligonucleotide
ttcgaaggcacctgaagtggtctggacagtggcaactcatcaaagctgcttatgaaatca

SEQ ID NO: 479871 - DNA, 55 bp, Artificial
  Synthetic oligonucleotide
ttcgaaggccccgctctcgcagataattgggacgttctctctgtagacgtcgggg

SEQ ID NO: 479872 - DNA, 57 bp, Artificial
  Synthetic oligonucleotide
ttcgaaggcgaaggttcatcttcacgagtgtcacgagtcaaacccctcgaagtagag

SEQ ID NO: 479873 - DNA, 53 bp, Artificial
  Synthetic oligonucleotide
ttcgaaggtcggcccgaattactcgccttagcgtaccccggacgcgccgtgct

SEQ ID NO: 479874 - DNA, 55 bp, Artificial
  Synthetic oligonucleotide
ttcgaagtccggtgagaatggcggaggagaatccctctgtgttccgtcgtgtgaa

SEQ ID NO: 479875 - DNA, 60 bp, Artificial
  Synthetic oligonucleotide
ttcgaatagatgtgaggctatcgctaaatggaacatgtcgctgaaccaggccatgtccct

SEQ ID NO: 479876 - DNA, 55 bp, Artificial
  Synthetic oligonucleotide
ttcgaatatgtctagtacggctgttcagcgtcataattctagatataatgtttcg

SEQ ID NO: 479877 - DNA, 58 bp, Artificial
  Synthetic oligonucleotide
ttcgaatgacttttatctagttgccaattatgattgggtgcctacttcaaccacaaaa

SEQ ID NO: 479878 - DNA, 57 bp, Artificial
  Synthetic oligonucleotide
ttcgaatgcccttcaaaggtaagataccagcagtgacgtttatattgcatctttacg

SEQ ID NO: 479879 - DNA, 59 bp, Artificial
  Synthetic oligonucleotide
ttcgaatggtggaaatcatatggaagagaagactgtgaccgttaaggtcggcagttctg

SEQ ID NO: 479880 - DNA, 60 bp, Artificial
  Synthetic oligonucleotide
ttcgaatgtggttcgagtgtgccgctgcggcagggtaacaccgctacgattcagcacaga

SEQ ID NO: 479881 - DNA, 56 bp, Artificial
  Synthetic oligonucleotide
ttcgaattcacaagctttttctaccgctacggttttgttgccaatttcagtatgga

SEQ ID NO: 479882 - DNA, 55 bp, Artificial
  Synthetic oligonucleotide
ttcgaattggaataagcgggtgcctaagaagaagccatcttcagctgggctgaag

SEQ ID NO: 479883 - DNA, 56 bp, Artificial
  Synthetic oligonucleotide
ttcgaattggatgagcacatggatatgcggagacccatcctcgtgaagctctctgc

SEQ ID NO: 479884 - DNA, 54 bp, Artificial
  Synthetic oligonucleotide
ttcgaatttgaaatcctggcagacccgcctaaagacgctcctcgaaagggcccc

SEQ ID NO: 479885 - DNA, 53 bp, Artificial
  Synthetic oligonucleotide
ttcgacaacgtcgattgtatttacaagaacgttatacagtacatgatcaacag

SEQ ID NO: 479886 - DNA, 58 bp, Artificial
  Synthetic oligonucleotide
ttcgacaataaggttacgccttccggtgctcttcagaggtggcactctcgcgaggagg

SEQ ID NO: 479887 - DNA, 53 bp, Artificial
  Synthetic oligonucleotide
ttcgacacacctgtcattgtgaggcccaatggctactttgacagggaggttta

SEQ ID NO: 479888 - DNA, 55 bp, Artificial
  Synthetic oligonucleotide
ttcgacaccaccaacagtagatgcgtgttaagcacgcaacactggcaatccctca

SEQ ID NO: 479889 - DNA, 59 bp, Artificial
  Synthetic oligonucleotide
ttcgacacttttgcgcgtacgcatcgtgtcgttatcgaattcaagaccgaagtgcccgc

SEQ ID NO: 479890 - DNA, 58 bp, Artificial
  Synthetic oligonucleotide
ttcgacatcaaaattgaaggtcccaatgatgggtttgagaactgggaatcacatttta

SEQ ID NO: 479891 - DNA, 55 bp, Artificial
  Synthetic oligonucleotide
ttcgaccagatagggagcttgtggcccggcaagtgaggggtgggttgacaacccc

SEQ ID NO: 479892 - DNA, 60 bp, Artificial
  Synthetic oligonucleotide
ttcgaccgcagcacatgtcgttggtaataacacttttgtgaatgtgtgctatgagggctt

SEQ ID NO: 479893 - DNA, 55 bp, Artificial
  Synthetic oligonucleotide
ttcgaccgtatcgactctaagaaccttcattggtggctcgctcaggttcttggca

SEQ ID NO: 479894 - DNA, 60 bp, Artificial
  Synthetic oligonucleotide
ttcgaccgtgctactgactagttcctgcaactgggctctagtaagtgttatgttggactc

SEQ ID NO: 479895 - DNA, 52 bp, Artificial
  Synthetic oligonucleotide
ttcgacctcccgtagtccgtcccgccgcgcgatcgtcccctccgcggtaagg

SEQ ID NO: 479896 - DNA, 60 bp, Artificial
  Synthetic oligonucleotide
ttcgacctctgcgacacgacgaaaagacccttgttcagtcgagagtgaatgcgtacaatg

SEQ ID NO: 479897 - DNA, 54 bp, Artificial
  Synthetic oligonucleotide
ttcgacgctccacggtgacccctgtgttgcgaactacggttttggggccgtctc

SEQ ID NO: 479898 - DNA, 54 bp, Artificial
  Synthetic oligonucleotide
ttcgacggaagggagaggccgactaaaaaggaaagtagctcttctttggataga

SEQ ID NO: 479899 - DNA, 57 bp, Artificial
  Synthetic oligonucleotide
ttcgacgggggccgagcaaggtgacaccaccgcacaagtcacccgaagcgccagaaa

SEQ ID NO: 479900 - DNA, 54 bp, Artificial
  Synthetic oligonucleotide
ttcgacggttacaaccaacagaccgttgttgtgatggatgatttgggacagaat

SEQ ID NO: 479901 - DNA, 60 bp, Artificial
  Synthetic oligonucleotide
ttcgacgtcacatcgatctgcttgttgggagcgctaccctctgctcggccctttacgtgg

SEQ ID NO: 479902 - DNA, 50 bp, Artificial
  Synthetic oligonucleotide
ttcgacgtcccaaccgttgtccgaagatatcgtttatttgtacgattgcg

SEQ ID NO: 479903 - DNA, 56 bp, Artificial
  Synthetic oligonucleotide
ttcgacgttcactcaattagaacggtatcggttgaacaggtcaaagcattactaac

SEQ ID NO: 479904 - DNA, 56 bp, Artificial
  Synthetic oligonucleotide
ttcgactacagcttaaggataatgcaagggaactgggtaatggttgtttcgagttc

SEQ ID NO: 479905 - DNA, 60 bp, Artificial
  Synthetic oligonucleotide
ttcgactcctcaaaacaggcgaatgtaaaatagcaggggcattatctagaattgcagtat

SEQ ID NO: 479906 - DNA, 60 bp, Artificial
  Synthetic oligonucleotide
ttcgactctctgcaggtggggccatttgggttactagagaaccttatgtgtcatgcgacc

SEQ ID NO: 479907 - DNA, 60 bp, Artificial
  Synthetic oligonucleotide
ttcgactggtctctaagagcactatgcctattaagagacaacatgaaactaggtacacaa

SEQ ID NO: 479908 - DNA, 60 bp, Artificial
  Synthetic oligonucleotide
ttcgactgtacgatcttaacgtcattcgagcattcactatttagctgcgtactgctttta

SEQ ID NO: 479909 - DNA, 60 bp, Artificial
  Synthetic oligonucleotide
ttcgactgtcgcctcatctcttgtgcttgcaatggggtttgctgcctttctgttctgggc

SEQ ID NO: 479910 - DNA, 56 bp, Artificial
  Synthetic oligonucleotide
ttcgactttaattcaccagatctagaaaagctgatcagaataccgtttaaaggaaa

SEQ ID NO: 479911 - DNA, 56 bp, Artificial
  Synthetic oligonucleotide
ttcgagaagaccaggcgccagttaagagaaaacgcggaagacatggggggtggatg

SEQ ID NO: 479912 - DNA, 55 bp, Artificial
  Synthetic oligonucleotide
ttcgagaagatgtgtaagcgggtcggaatcgacgtggactacgcaatccgctctc

SEQ ID NO: 479913 - DNA, 60 bp, Artificial
  Synthetic oligonucleotide
ttcgagaatcatacggagaaatgcctattacttgtttgttataatggcatgtactcatgc

SEQ ID NO: 479914 - DNA, 53 bp, Artificial
  Synthetic oligonucleotide
ttcgagacacccggccgcaaccctgggagacgtcccaaggacttcgggggcca

SEQ ID NO: 479915 - DNA, 51 bp, Artificial
  Synthetic oligonucleotide
ttcgagacggtaaatattggcttcgccatattccgacatttgttgattcat

SEQ ID NO: 479916 - DNA, 56 bp, Artificial
  Synthetic oligonucleotide
ttcgagacttcataatgagggtaagaggtgtttggccttgacttgtactaaggcgg

SEQ ID NO: 479917 - DNA, 56 bp, Artificial
  Synthetic oligonucleotide
ttcgagagattcgaaatattccccaaggaaagatcatggcccaaacacaacgtaac

SEQ ID NO: 479918 - DNA, 55 bp, Artificial
  Synthetic oligonucleotide
ttcgagattcttgctgaggatgacaggactgttaaggtccccaaggtctctagca

SEQ ID NO: 479919 - DNA, 56 bp, Artificial
  Synthetic oligonucleotide
ttcgagcaccacctagaagaacgtttactttggtcaaggtctggaagtcactacta

SEQ ID NO: 479920 - DNA, 57 bp, Artificial
  Synthetic oligonucleotide
ttcgagcggtggaacgaagaatgggaatcctcgcagatcagttatgcagagcttttg

SEQ ID NO: 479921 - DNA, 60 bp, Artificial
  Synthetic oligonucleotide
ttcgagctagaatgcatgggagcggagtgtgacaaaagaatagtccaccgttctaaccga

SEQ ID NO: 479922 - DNA, 60 bp, Artificial
  Synthetic oligonucleotide
ttcgagctcaaattcacggataagatgcctaatggcgaagatcatcggctcacgatggtg

SEQ ID NO: 479923 - DNA, 58 bp, Artificial
  Synthetic oligonucleotide
ttcgagctcaagtggaatgcggatgcagtcgccgatctttgctttcgcaacgggattc

SEQ ID NO: 479924 - DNA, 59 bp, Artificial
  Synthetic oligonucleotide
ttcgagctgcaaggccttaaaagttgtttacacagcttggctaattacataccatctac

SEQ ID NO: 479925 - DNA, 59 bp, Artificial
  Synthetic oligonucleotide
ttcgagctgcaaggtccgcaggagtccaccgctccgctgaaactcacgccggggttgtg

SEQ ID NO: 479926 - DNA, 60 bp, Artificial
  Synthetic oligonucleotide
ttcgagctgcaagtcccgctacctgaggtaaactttacttctgcgatggctataactcac

SEQ ID NO: 479927 - DNA, 56 bp, Artificial
  Synthetic oligonucleotide
ttcgaggacaattccctttcgttgcaggatcgttgttcactcctaaacgagataac

SEQ ID NO: 479928 - DNA, 60 bp, Artificial
  Synthetic oligonucleotide
ttcgaggcttcatatacgtgtctgtaagacaggatgatggccaaatgagaccaattatgg

SEQ ID NO: 479929 - DNA, 60 bp, Artificial
  Synthetic oligonucleotide
ttcgagggcgatgcgctgaggctctcagccaggacaaccccgcatgtggatgacggctgg

SEQ ID NO: 479930 - DNA, 55 bp, Artificial
  Synthetic oligonucleotide
ttcgaggtagcctcattgcagtgtgttagacttcttaatgcagtccctgcagatc

SEQ ID NO: 479931 - DNA, 58 bp, Artificial
  Synthetic oligonucleotide
ttcgagtaaaccttagaattgaagtccagatgaccactcaagtaattatgtgggccta

SEQ ID NO: 479932 - DNA, 55 bp, Artificial
  Synthetic oligonucleotide
ttcgagtacgccgttggggcagtcaggtcgcaaaagactcatgtcattacgggga

SEQ ID NO: 479933 - DNA, 60 bp, Artificial
  Synthetic oligonucleotide
ttcgagtacttatcaggtgacagacaagtggaagagtggcctaaagcaacctgcacaggt

SEQ ID NO: 479934 - DNA, 60 bp, Artificial
  Synthetic oligonucleotide
ttcgagtatcaccctgtgcgtgtcgagattgtgtgccgagtctgcgctacatccctatct

SEQ ID NO: 479935 - DNA, 60 bp, Artificial
  Synthetic oligonucleotide
ttcgagtcaaaggcgctacttaagggagtgcgagattttaatccaatctctgcttgcgta

SEQ ID NO: 479936 - DNA, 50 bp, Artificial
  Synthetic oligonucleotide
ttcgagtgctgagggaggaatgttacctgaccgcatgtaaatattgtgac

SEQ ID NO: 479937 - DNA, 55 bp, Artificial
  Synthetic oligonucleotide
ttcgagttgaaccaaactgtttacgctacagacttcctctcgatgacagcgttcg

SEQ ID NO: 479938 - DNA, 55 bp, Artificial
  Synthetic oligonucleotide
ttcgataacgtatcatcgatagatgaacgcactaagattgagatgagttcacgat

SEQ ID NO: 479939 - DNA, 60 bp, Artificial
  Synthetic oligonucleotide
ttcgataactatacttatcggtcgtaatggccgcgcagcggaactgacgacgttctctgc

SEQ ID NO: 479940 - DNA, 60 bp, Artificial
  Synthetic oligonucleotide
ttcgataatggaggctatttaaacctgatggtgttgtgatttccgaaatcactcatcgga

SEQ ID NO: 479941 - DNA, 55 bp, Artificial
  Synthetic oligonucleotide
ttcgataccctccttgtggaccccctccggctgtccgtctttgccccagacacca

SEQ ID NO: 479942 - DNA, 60 bp, Artificial
  Synthetic oligonucleotide
ttcgataccgaacttctcgatgtgtggatggaaggtgagtatcgcgctagggcgactact

SEQ ID NO: 479943 - DNA, 60 bp, Artificial
  Synthetic oligonucleotide
ttcgatagagattaagtgatgaaagaacttcgattagtgtagatcctcctgcgtacgcgc

SEQ ID NO: 479944 - DNA, 59 bp, Artificial
  Synthetic oligonucleotide
ttcgatattaacatggagtgcgcttgaaccagaggaggaattcttacggaattatagag

SEQ ID NO: 479945 - DNA, 55 bp, Artificial
  Synthetic oligonucleotide
ttcgatattgtgatttagattcacgtgagataatcgatccacgcactttcggtgt

SEQ ID NO: 479946 - DNA, 58 bp, Artificial
  Synthetic oligonucleotide
ttcgatcaatttatcagtactagtaccgcagcttattgttactctacctcttaacgag

SEQ ID NO: 479947 - DNA, 60 bp, Artificial
  Synthetic oligonucleotide
ttcgatcactacatgatcgattttcatgcatttgcccatcagtttgaccattttctgttc

SEQ ID NO: 479948 - DNA, 56 bp, Artificial
  Synthetic oligonucleotide
ttcgatccatggtaatggctgacaacggtgcgatgctcagcgaggggggaacccct

SEQ ID NO: 479949 - DNA, 59 bp, Artificial
  Synthetic oligonucleotide
ttcgatccccattcgagattgcccctactactacttcgcctcgtcatcccagggataga

SEQ ID NO: 479950 - DNA, 55 bp, Artificial
  Synthetic oligonucleotide
ttcgatccttcacgtccatggattgctttcttggcccatttaccattgttcggag

SEQ ID NO: 479951 - DNA, 60 bp, Artificial
  Synthetic oligonucleotide
ttcgatcgaaactagtactagtgcttatcagtttgatactaaccgtgctatgcattatat

SEQ ID NO: 479952 - DNA, 60 bp, Artificial
  Synthetic oligonucleotide
ttcgatcgagaaggcattcactcgaattcattttgaataatccactggacggtgaaaatg

SEQ ID NO: 479953 - DNA, 59 bp, Artificial
  Synthetic oligonucleotide
ttcgatctaagcaatagaccggcttgcaacttgatccttaagcgaacgtgtaagtggta

SEQ ID NO: 479954 - DNA, 55 bp, Artificial
  Synthetic oligonucleotide
ttcgatgagtccaagctattgcgtatcgtgtttgatacaccgttcgaacacatgc

SEQ ID NO: 479955 - DNA, 59 bp, Artificial
  Synthetic oligonucleotide
ttcgatgagtgtgatgacagtttttgcctattggaaagtgtcctttaactttagatcta

SEQ ID NO: 479956 - DNA, 60 bp, Artificial
  Synthetic oligonucleotide
ttcgatgcaccaaccaacaacttatgaggagtttcagggggcagtggtcagcccgccata

SEQ ID NO: 479957 - DNA, 57 bp, Artificial
  Synthetic oligonucleotide
ttcgatgccgctcctgcgactggttccgaacgtgaaatctttataacgagattttac

SEQ ID NO: 479958 - DNA, 59 bp, Artificial
  Synthetic oligonucleotide
ttcgatgctcttaagatgatccttagaaaactaggttatcccgaagacagcttggagct

SEQ ID NO: 479959 - DNA, 50 bp, Artificial
  Synthetic oligonucleotide
ttcgatggatctgcaaacgtaaccatcagcactgtctacaacgatgcaga

SEQ ID NO: 479960 - DNA, 54 bp, Artificial
  Synthetic oligonucleotide
ttcgatgggattagcgaaattgcgtttggaggcttactactttgtttaggtaaa

SEQ ID NO: 479961 - DNA, 52 bp, Artificial
  Synthetic oligonucleotide
ttcgatggggctgatgtcacacctactagtgcatctagagccaatatcacaa

SEQ ID NO: 479962 - DNA, 50 bp, Artificial
  Synthetic oligonucleotide
ttcgatgtagttaagaatatgagaggtttgccattcctaatggctgacgt

SEQ ID NO: 479963 - DNA, 55 bp, Artificial
  Synthetic oligonucleotide
ttcgatgtgcacgccactgtttacgaagagctactgaaattaatacgggaatagc

SEQ ID NO: 479964 - DNA, 58 bp, Artificial
  Synthetic oligonucleotide
ttcgatgtgctcccgagattactccgggaggcgtccccatcgtttttgtagatggtga

SEQ ID NO: 479965 - DNA, 51 bp, Artificial
  Synthetic oligonucleotide
ttcgatgttcccgtggctctctggttgaattctaatgagaccattgagaag

SEQ ID NO: 479966 - DNA, 59 bp, Artificial
  Synthetic oligonucleotide
ttcgatgttcggtcattaccgaacgccgagcatgttggttgagaactcaatagtggaag

SEQ ID NO: 479967 - DNA, 55 bp, Artificial
  Synthetic oligonucleotide
ttcgattattagtttcgtcttagagtctatcaccagctgtcaagctgagagtggt

SEQ ID NO: 479968 - DNA, 60 bp, Artificial
  Synthetic oligonucleotide
ttcgattcaaggatgacagctcctttgaggatgtgaacggaatccggaagccaaaacatc

SEQ ID NO: 479969 - DNA, 51 bp, Artificial
  Synthetic oligonucleotide
ttcgattccacatgtgtgtttgatgccagatcacgactgttaccaggcttg

SEQ ID NO: 479970 - DNA, 55 bp, Artificial
  Synthetic oligonucleotide
ttcgattcccaacacggaaggggtgttctcattggtcatagtcgttgaccgaaaa

SEQ ID NO: 479971 - DNA, 60 bp, Artificial
  Synthetic oligonucleotide
ttcgattggagatctgtgagctactggcgtctccctgtgaggtacacgtcactttaactc

SEQ ID NO: 479972 - DNA, 57 bp, Artificial
  Synthetic oligonucleotide
ttcgatttaagatcggacgttttggaagatgtgctagaggacgtgctagaaacctgg

SEQ ID NO: 479973 - DNA, 60 bp, Artificial
  Synthetic oligonucleotide
ttcgatttaagtgacataacgcatatcccatcagacctagcacgtcttgttcccagtgcg

SEQ ID NO: 479974 - DNA, 55 bp, Artificial
  Synthetic oligonucleotide
ttcgatttatgataatcttgtaaacgcctgtatagttcgtcgacgttgtttagcg

SEQ ID NO: 479975 - DNA, 60 bp, Artificial
  Synthetic oligonucleotide
ttcgcaaccagattccaaccagtcttggattgaggacatctctttcgtacactcatacgt

SEQ ID NO: 479976 - DNA, 60 bp, Artificial
  Synthetic oligonucleotide
ttcgcaacccttagctaccacatatataggcgagattgctagttattacactcattggac

SEQ ID NO: 479977 - DNA, 59 bp, Artificial
  Synthetic oligonucleotide
ttcgcaacgaacgacgattgcgcgcttattgttaaggcgatgcaaggtctcctaaaaga

SEQ ID NO: 479978 - DNA, 52 bp, Artificial
  Synthetic oligonucleotide
ttcgcaacgccagaatgggtggcactcaatgggcatcgagggccaagtcccg

SEQ ID NO: 479979 - DNA, 60 bp, Artificial
  Synthetic oligonucleotide
ttcgcaactacttacgctaaattaggcaacgcctcgactccgagatatagagcggacatg

SEQ ID NO: 479980 - DNA, 55 bp, Artificial
  Synthetic oligonucleotide
ttcgcaagaaatgattgatgatgcaagctacgacgtaacaggattgattgcagac

SEQ ID NO: 479981 - DNA, 60 bp, Artificial
  Synthetic oligonucleotide
ttcgcaagaccagattcctcccagtagctggtggaacaagcagtgtatacatcgaagtat

SEQ ID NO: 479982 - DNA, 55 bp, Artificial
  Synthetic oligonucleotide
ttcgcaagccgatcaagtgacgtggcggggcgcgctccccgtgcctgtaagacgc

SEQ ID NO: 479983 - DNA, 60 bp, Artificial
  Synthetic oligonucleotide
ttcgcaagggttaatgcaactgaagttgggttatcatccgtgtgtcgtcgagtgctggta

SEQ ID NO: 479984 - DNA, 50 bp, Artificial
  Synthetic oligonucleotide
ttcgcaagttcaattatatggttactggtgggcaatatgcgtccaaagaa

SEQ ID NO: 479985 - DNA, 52 bp, Artificial
  Synthetic oligonucleotide
ttcgcaatggaaccaaacaatttatagacgccgaaggtcttagtttggagga

SEQ ID NO: 479986 - DNA, 60 bp, Artificial
  Synthetic oligonucleotide
ttcgcaatggagactaagcagagaattagctaaaatgccactcattagactgggaataag

SEQ ID NO: 479987 - DNA, 60 bp, Artificial
  Synthetic oligonucleotide
ttcgcacagagttcggtttccacccaaacgctgagtggatactgaagactctcgtggaca

SEQ ID NO: 479988 - DNA, 55 bp, Artificial
  Synthetic oligonucleotide
ttcgcaccaactacccgattttgccgttggtcagacgatcggacttagaaagcgc

SEQ ID NO: 479989 - DNA, 60 bp, Artificial
  Synthetic oligonucleotide
ttcgcaccagtatccagaagcagatggagttagtgcgcatctctgtgcgcaagggacatt

SEQ ID NO: 479990 - DNA, 60 bp, Artificial
  Synthetic oligonucleotide
ttcgcacgaagagcagtcagttcgttgcagtcacttcgcgagaaaacaattggcaagtac

SEQ ID NO: 479991 - DNA, 58 bp, Artificial
  Synthetic oligonucleotide
ttcgcactgcgcccggagacaacggggggcatcatgacgcgtgctacctaccggttcc

SEQ ID NO: 479992 - DNA, 60 bp, Artificial
  Synthetic oligonucleotide
ttcgcactggcaacggtgatgtgattttctacacctacgggtctttctatgcattgggga

SEQ ID NO: 479993 - DNA, 60 bp, Artificial
  Synthetic oligonucleotide
ttcgcactgggatggatcccagaatgtgctccctaatgcagggttcaacacttcccagaa

SEQ ID NO: 479994 - DNA, 55 bp, Artificial
  Synthetic oligonucleotide
ttcgcacttgctggctcagcaaatgtaaaaccaaggagacacaagtatcaccttg

SEQ ID NO: 479995 - DNA, 52 bp, Artificial
  Synthetic oligonucleotide
ttcgcagaaaaacccgtaaggttgtcgcccggccaaattgaagagtacgtct

SEQ ID NO: 479996 - DNA, 60 bp, Artificial
  Synthetic oligonucleotide
ttcgcagacatcgacagcaatgaggggcgggagtttaaggagagagtgaattgggaggaa

SEQ ID NO: 479997 - DNA, 60 bp, Artificial
  Synthetic oligonucleotide
ttcgcagagttcatcagcaagaagcacattggggacgtactcttcgagaactacaagaga

SEQ ID NO: 479998 - DNA, 60 bp, Artificial
  Synthetic oligonucleotide
ttcgcagccaaggagcccatatttctagaagctagcatcaaacgtgacaagtatcacctg

SEQ ID NO: 479999 - DNA, 58 bp, Artificial
  Synthetic oligonucleotide
ttcgcagcgcattcatgagaaccaatttggtccagagtttgtgatgacacataactcc

SEQ ID NO: 480000 - DNA, 60 bp, Artificial
  Synthetic oligonucleotide
ttcgcagtgtcagcgctggacgtgcactgtatatacctccttatgacctccttttgcatg

SEQ ID NO: 480001 - DNA, 60 bp, Artificial
  Synthetic oligonucleotide
ttcgcatacaagatggcgatcgacgaattcaatcgcgacgacgagggaagcctcggcccg

SEQ ID NO: 480002 - DNA, 55 bp, Artificial
  Synthetic oligonucleotide
ttcgcatacccatcccattggggagaccgatcccgcgtgtcccctttgccagacc

SEQ ID NO: 480003 - DNA, 60 bp, Artificial
  Synthetic oligonucleotide
ttcgcatatgacacccgctgctttgactctacagtcactgagaatgatatccgtgtcgag

SEQ ID NO: 480004 - DNA, 60 bp, Artificial
  Synthetic oligonucleotide
ttcgcatcagtcatgtcggtgtttcctatcgtgtagttgttactgcaaagccccggccac

SEQ ID NO: 480005 - DNA, 55 bp, Artificial
  Synthetic oligonucleotide
ttcgcatgcgtgggttaacggcctttggttcgaccaatatcactatcatgacgag

SEQ ID NO: 480006 - DNA, 56 bp, Artificial
  Synthetic oligonucleotide
ttcgccaaaagtcggaagtacaactggtactcagacggataattttggtgctcaac

SEQ ID NO: 480007 - DNA, 55 bp, Artificial
  Synthetic oligonucleotide
ttcgccaaaatttgggtgaattgagttaaagttggacgagagtaaatcgacttga

SEQ ID NO: 480008 - DNA, 57 bp, Artificial
  Synthetic oligonucleotide
ttcgccaaggcccaacacaaggtcaacgacggctccatctttggcaactggaaagct

SEQ ID NO: 480009 - DNA, 55 bp, Artificial
  Synthetic oligonucleotide
ttcgccacgaatggaaacgtgcgctcaagctcgaaggcccctcctcttggcgcgt

SEQ ID NO: 480010 - DNA, 52 bp, Artificial
  Synthetic oligonucleotide
ttcgccagatagttcgtaatcttatttgccactctcgcgtaccccgttccct

SEQ ID NO: 480011 - DNA, 58 bp, Artificial
  Synthetic oligonucleotide
ttcgccagtcccttcagcaaggattggaccacgaaagcgcgaaggcaccagggagttg

SEQ ID NO: 480012 - DNA, 60 bp, Artificial
  Synthetic oligonucleotide
ttcgccccaagaagagaaatcccgaatactctcggtatgatcttctcccatgctgaccat

SEQ ID NO: 480013 - DNA, 58 bp, Artificial
  Synthetic oligonucleotide
ttcgcccggccagagttaactggcaagccttagtcaggttcttcaagggcagcccaga

SEQ ID NO: 480014 - DNA, 59 bp, Artificial
  Synthetic oligonucleotide
ttcgcccgttggtgggcgaaagtatatatccgtgtgtcctgcggctggtcttgtacata

SEQ ID NO: 480015 - DNA, 55 bp, Artificial
  Synthetic oligonucleotide
ttcgccgagatgactattgctcatgattatccgattgaaggtctttgcggtttga

SEQ ID NO: 480016 - DNA, 55 bp, Artificial
  Synthetic oligonucleotide
ttcgccgataaattcacaggtgacgaggtaaatgatgttaaagggcggttagacc

SEQ ID NO: 480017 - DNA, 50 bp, Artificial
  Synthetic oligonucleotide
ttcgccgtgtgaacacggaaacttatattgtgagtgcatatactgttggg

SEQ ID NO: 480018 - DNA, 56 bp, Artificial
  Synthetic oligonucleotide
ttcgccgttatttacagctctgtttgaacgtttccaacgctgcttacgctcgaagg

SEQ ID NO: 480019 - DNA, 60 bp, Artificial
  Synthetic oligonucleotide
ttcgcctaccagtggacgcgcgccagcaaaccaccactgctgccgaatcggcagatccag

SEQ ID NO: 480020 - DNA, 56 bp, Artificial
  Synthetic oligonucleotide
ttcgcctcgtggaggtatgggccctaaattggataaggccgctgcgtgggttaata

SEQ ID NO: 480021 - DNA, 55 bp, Artificial
  Synthetic oligonucleotide
ttcgcctgggatggtgtttgccacgaacaacacccccattttgtggggcggccca

SEQ ID NO: 480022 - DNA, 60 bp, Artificial
  Synthetic oligonucleotide
ttcgcctgtgctccagatcgatgtccgcctacatgtatttatgttgcaggtatggcagag

SEQ ID NO: 480023 - DNA, 60 bp, Artificial
  Synthetic oligonucleotide
ttcgcctgtgtgagctgacaaacttagtagtgtttgtgaggatttacgaggattaataca

SEQ ID NO: 480024 - DNA, 54 bp, Artificial
  Synthetic oligonucleotide
ttcgcgaaaggtatgaccaacgtcccaactttggataagggtgcggccgttgaa

SEQ ID NO: 480025 - DNA, 54 bp, Artificial
  Synthetic oligonucleotide
ttcgcgaagaaatgcccggttactattctgagtgcgagttggtttactaagcac

SEQ ID NO: 480026 - DNA, 60 bp, Artificial
  Synthetic oligonucleotide
ttcgcgacaaagagcttaacgcagacgacgaatgccgcaagtggctagagaacgcgacac

SEQ ID NO: 480027 - DNA, 59 bp, Artificial
  Synthetic oligonucleotide
ttcgcgactgggaccggctacaatggctgggccatcgcggatgtagagtttagagaacc

SEQ ID NO: 480028 - DNA, 50 bp, Artificial
  Synthetic oligonucleotide
ttcgcgagcggcacacatgttgttgtttacgtgttatagtatcgactgta

SEQ ID NO: 480029 - DNA, 55 bp, Artificial
  Synthetic oligonucleotide
ttcgcgatcgtcaagactgacgaatatcgtgccacttacggcaaaatgactctgg

SEQ ID NO: 480030 - DNA, 60 bp, Artificial
  Synthetic oligonucleotide
ttcgcgatgccattttaacagcgttgaacgccctggtgtcccagccaatgcgggagttga

SEQ ID NO: 480031 - DNA, 56 bp, Artificial
  Synthetic oligonucleotide
ttcgcgattctcggtaaaggtgaaaacgccccagacacatacgtgttcaaacgtga

SEQ ID NO: 480032 - DNA, 60 bp, Artificial
  Synthetic oligonucleotide
ttcgcgcaagtgccatcagcgcgaattcagagaagttcttttgatagatcttgtggttta

SEQ ID NO: 480033 - DNA, 57 bp, Artificial
  Synthetic oligonucleotide
ttcgcgcaatgggcaggatcctttttggtcaggttacaagagacatgcagttgtcac

SEQ ID NO: 480034 - DNA, 57 bp, Artificial
  Synthetic oligonucleotide
ttcgcgcccacttctaggcgtgaaaacgtccacacctgctaagaagtatgttggtgg

SEQ ID NO: 480035 - DNA, 54 bp, Artificial
  Synthetic oligonucleotide
ttcgcgcccccacctctgaggaaattcgcgctcacaatctgaatgcccacttac

SEQ ID NO: 480036 - DNA, 60 bp, Artificial
  Synthetic oligonucleotide
ttcgcgcgtgcataccgtcgcgtttccgcaaatctcaccacaaatcgatgctgaggtacg

SEQ ID NO: 480037 - DNA, 57 bp, Artificial
  Synthetic oligonucleotide
ttcgcgctccagatgtactatcacaggttaacaaacgtttagtcgcgtacaaaggta

SEQ ID NO: 480038 - DNA, 60 bp, Artificial
  Synthetic oligonucleotide
ttcgcgcttgctaacttcatattggttgagaattaatccgtgtctttcctgtggaatgag

SEQ ID NO: 480039 - DNA, 51 bp, Artificial
  Synthetic oligonucleotide
ttcgcggacttgtcagatccgttgcttaccattagtgagtattcggagtta

SEQ ID NO: 480040 - DNA, 56 bp, Artificial
  Synthetic oligonucleotide
ttcgcggaggagatgaacgtcagccggagctcctacattgggcacctgctgacact

SEQ ID NO: 480041 - DNA, 60 bp, Artificial
  Synthetic oligonucleotide
ttcgcggcaacaggcacagtccacttacgatgaagaaatatcgaaacagcgggattatgc

SEQ ID NO: 480042 - DNA, 52 bp, Artificial
  Synthetic oligonucleotide
ttcgcgggacgtccttctgttacgtcccctccgcggacaacccagcggacct

SEQ ID NO: 480043 - DNA, 54 bp, Artificial
  Synthetic oligonucleotide
ttcgcggtcccactcgccaagacccaggcgaatctccacgtaaaccccctgtta

SEQ ID NO: 480044 - DNA, 60 bp, Artificial
  Synthetic oligonucleotide
ttcgcgtctagagataggaagcggtttgacagaatcaggtggatatgcatagatccaatc

SEQ ID NO: 480045 - DNA, 56 bp, Artificial
  Synthetic oligonucleotide
ttcgcgtctcgctacttgattaggagaggtgacgaaattttgtgtgttcccgaccc

SEQ ID NO: 480046 - DNA, 55 bp, Artificial
  Synthetic oligonucleotide
ttcgcgtgatacgacgcatgatgggttaaacgttcccatccggcagtaccgtctc

SEQ ID NO: 480047 - DNA, 60 bp, Artificial
  Synthetic oligonucleotide
ttcgcgtgcgaagtgcgcgcgctactgcaccagacgatcgctgacgggggcgagcgcatg

SEQ ID NO: 480048 - DNA, 57 bp, Artificial
  Synthetic oligonucleotide
ttcgcgtttacgaccgcacgcaagtaaaagtacaaactcgcgaggagaatccacgca

SEQ ID NO: 480049 - DNA, 55 bp, Artificial
  Synthetic oligonucleotide
ttcgctacaatcggggtttcggcgacacctgaaataccttataccatggaatcag

SEQ ID NO: 480050 - DNA, 55 bp, Artificial
  Synthetic oligonucleotide
ttcgctacggaatgccaatccctgatcataccaggtccggaaacccatccgggcg

SEQ ID NO: 480051 - DNA, 55 bp, Artificial
  Synthetic oligonucleotide
ttcgctagagctgttcagttggactacgacaagcattaccgtatgactgcgcgct

SEQ ID NO: 480052 - DNA, 51 bp, Artificial
  Synthetic oligonucleotide
ttcgctagctgtgtgcgccttgggcgaaggccaatatgcctttgtgagacc

SEQ ID NO: 480053 - DNA, 54 bp, Artificial
  Synthetic oligonucleotide
ttcgctaggctgcatgtgcatggaatgtgcatcggaccgacgtgcagatataag

SEQ ID NO: 480054 - DNA, 60 bp, Artificial
  Synthetic oligonucleotide
ttcgctataatactcaataacatgcagcagatagagagagcttctgacaagatcgcacaa

SEQ ID NO: 480055 - DNA, 60 bp, Artificial
  Synthetic oligonucleotide
ttcgctcaaaaacttcccggaaatgacaacagcacagcaacgctgtgcctgggacaccat

SEQ ID NO: 480056 - DNA, 60 bp, Artificial
  Synthetic oligonucleotide
ttcgctcaacacttcccccgtgtagatcaggtcgatgagtcactgcaatccccacgggtg

SEQ ID NO: 480057 - DNA, 59 bp, Artificial
  Synthetic oligonucleotide
ttcgctcaccttgcgtttcacctctcgattcggaagctctgctcaccgagcgagagcca

SEQ ID NO: 480058 - DNA, 52 bp, Artificial
  Synthetic oligonucleotide
ttcgctcaggggtggggtcccatcacgtacgctgactcccacagcttggatc

SEQ ID NO: 480059 - DNA, 60 bp, Artificial
  Synthetic oligonucleotide
ttcgctcgcagcggcgttgacgcagcgttcatcggttctgtcggtctttccgaccaagaa

SEQ ID NO: 480060 - DNA, 59 bp, Artificial
  Synthetic oligonucleotide
ttcgctctgttgaattccacaaccgaaatgatctcgaaatagaggggattttctatctc

SEQ ID NO: 480061 - DNA, 60 bp, Artificial
  Synthetic oligonucleotide
ttcgctcttcctagtcgtgtgactatcattaatgtgcgacaggtaatggaatcaaggccc

SEQ ID NO: 480062 - DNA, 60 bp, Artificial
  Synthetic oligonucleotide
ttcgctgacaaaccattaatctctgagaccatgttgaagatactgacaattgacggtact

SEQ ID NO: 480063 - DNA, 60 bp, Artificial
  Synthetic oligonucleotide
ttcgctgccttatggctgagctcatcggctcgccttggtgtatcgcaatgggagatgatt

SEQ ID NO: 480064 - DNA, 59 bp, Artificial
  Synthetic oligonucleotide
ttcgctgcttcgaaggatgcctctcgtttgaaggaacagtacgggatagatgtcccgga

SEQ ID NO: 480065 - DNA, 60 bp, Artificial
  Synthetic oligonucleotide
ttcgctggagtttcgatcactcactctagaaagatctccatctaggacaaatcccaatcc

SEQ ID NO: 480066 - DNA, 60 bp, Artificial
  Synthetic oligonucleotide
ttcgctgggttcgcggcacctgcgtgtgagagcggggaagttatcaatctcgctgcgcgc

SEQ ID NO: 480067 - DNA, 60 bp, Artificial
  Synthetic oligonucleotide
ttcgctgtgaatccagcgaagggaggtcggaagcctgctcgtctgatcgtgtacccggat

SEQ ID NO: 480068 - DNA, 57 bp, Artificial
  Synthetic oligonucleotide
ttcgctgtggagtgcgccgtgaacggaactcccatgcgacttaataccgaagagcgc

SEQ ID NO: 480069 - DNA, 58 bp, Artificial
  Synthetic oligonucleotide
ttcgcttacctaagcgctagcctaaaacctaggctggagggcagaactactgcaacta

SEQ ID NO: 480070 - DNA, 60 bp, Artificial
  Synthetic oligonucleotide
ttcgcttagtgagcggattgttagcacttgcctgggacgacctgcggagcgtgcgccttt

SEQ ID NO: 480071 - DNA, 60 bp, Artificial
  Synthetic oligonucleotide
ttcgcttcgcgaggcaatcatgtggcgcccacgcactacgtccccgagtctgacgcggca

SEQ ID NO: 480072 - DNA, 54 bp, Artificial
  Synthetic oligonucleotide
ttcgcttcgtctgaggatttgcgtctgcaacaagtgatgcatctcgtcaatatt

SEQ ID NO: 480073 - DNA, 51 bp, Artificial
  Synthetic oligonucleotide
ttcgcttcgtgttgggagtaccggaggacaacgcgggacccaaaccgggga

SEQ ID NO: 480074 - DNA, 60 bp, Artificial
  Synthetic oligonucleotide
ttcgcttggatcctaatggagatcagccgcctctgtgacgccccggatggcatagctctg

SEQ ID NO: 480075 - DNA, 50 bp, Artificial
  Synthetic oligonucleotide
ttcgcttggctagaaagaacaataacagagctcaacagggtagcggtcaa

SEQ ID NO: 480076 - DNA, 50 bp, Artificial
  Synthetic oligonucleotide
ttcgctttcgatatggaggtgtacacaatgtctgagcactcaattaaagg

SEQ ID NO: 480077 - DNA, 59 bp, Artificial
  Synthetic oligonucleotide
ttcgctttcgattcaagaatgatgatgacggagcaagaatagaaagcgcttatgtgacc

SEQ ID NO: 480078 - DNA, 59 bp, Artificial
  Synthetic oligonucleotide
ttcgctttcgatttgaaggtgatggtaacagggcaagaatagaaagcgctcatgtgacc

SEQ ID NO: 480079 - DNA, 54 bp, Artificial
  Synthetic oligonucleotide
ttcgctttcggcctccgacgagtcggatctccctttgggccgcctccccgcctg

SEQ ID NO: 480080 - DNA, 55 bp, Artificial
  Synthetic oligonucleotide
ttcgctttgaaggcggttgcgactccagaaccgaagggatatgtgttggaaatct

SEQ ID NO: 480081 - DNA, 60 bp, Artificial
  Synthetic oligonucleotide
ttcggaacactatcaaactcaacaactgtgttatcccatgctctacctttgatctgtgat

SEQ ID NO: 480082 - DNA, 56 bp, Artificial
  Synthetic oligonucleotide
ttcggaaccaaagccacgggtatggaattcgtcgcttgttgcagcgtaatgggttc

SEQ ID NO: 480083 - DNA, 55 bp, Artificial
  Synthetic oligonucleotide
ttcggaactcctgtgcgcaggggtgaccttcgtaactgatgctagagagaccggc

SEQ ID NO: 480084 - DNA, 55 bp, Artificial
  Synthetic oligonucleotide
ttcggaactggacccccccttcaacagaaggcgaccgagttgtgcttgctacatc

SEQ ID NO: 480085 - DNA, 54 bp, Artificial
  Synthetic oligonucleotide
ttcggaagactagaaaacacttgtgcactcccagaactttccgaaggttgtagt

SEQ ID NO: 480086 - DNA, 52 bp, Artificial
  Synthetic oligonucleotide
ttcggaagagtatgcgcgtcttgggctccgagacctcatgttacactcgccc

SEQ ID NO: 480087 - DNA, 57 bp, Artificial
  Synthetic oligonucleotide
ttcggaaggacttcggtccgtgtacttctagcacaagatgctagtgtagagtacggg

SEQ ID NO: 480088 - DNA, 55 bp, Artificial
  Synthetic oligonucleotide
ttcggaagtgtgcagcccaacttgataatagtaacactatagaccaccgtacccc

SEQ ID NO: 480089 - DNA, 60 bp, Artificial
  Synthetic oligonucleotide
ttcggaataaagaagaagtatgggttagataagcttttgcagagtctgatggaggatatc

SEQ ID NO: 480090 - DNA, 55 bp, Artificial
  Synthetic oligonucleotide
ttcggaatcgtacctcttgaacttcacacaatggccttctttcgcggtcgagcga

SEQ ID NO: 480091 - DNA, 58 bp, Artificial
  Synthetic oligonucleotide
ttcggacacctctgcaaaataaccggaatgtctacagaagatgtaacgacctggatcc

SEQ ID NO: 480092 - DNA, 60 bp, Artificial
  Synthetic oligonucleotide
ttcggaccacattaaaagaatttgatcgttctgtctatgatgatatctatggatacactc

SEQ ID NO: 480093 - DNA, 59 bp, Artificial
  Synthetic oligonucleotide
ttcggacctattgccagatatggtactctcaacgatcttgaactatgtcccattaacct

SEQ ID NO: 480094 - DNA, 57 bp, Artificial
  Synthetic oligonucleotide
ttcggacctattgccatatatggtacccgtaacgatcttgaactgtgtcccactaac

SEQ ID NO: 480095 - DNA, 57 bp, Artificial
  Synthetic oligonucleotide
ttcggacctattgttagatatggtacgcgtaacgatcttgaactatgtcctattaac

SEQ ID NO: 480096 - DNA, 60 bp, Artificial
  Synthetic oligonucleotide
ttcggacgatccatggatcgttggattcctctcaataagcctaatgcaatgggtcatgtc

SEQ ID NO: 480097 - DNA, 55 bp, Artificial
  Synthetic oligonucleotide
ttcggacggactggcgacctgacggtccacgtgccgctgatcgaacaacagaacc

SEQ ID NO: 480098 - DNA, 59 bp, Artificial
  Synthetic oligonucleotide
ttcggacgttgactgcgtacctataccgttacgcaattcgctgtgacttgcttgactag

SEQ ID NO: 480099 - DNA, 60 bp, Artificial
  Synthetic oligonucleotide
ttcggactagtgaggttgccataggaactatgtctggtgctgggaaaatgaggatcaaag

SEQ ID NO: 480100 - DNA, 55 bp, Artificial
  Synthetic oligonucleotide
ttcggactgagtacagggcaacagtggaaagacactgactttgcgaggctgcaac

SEQ ID NO: 480101 - DNA, 55 bp, Artificial
  Synthetic oligonucleotide
ttcggacttggactttgtcctcgtatccgtgccgaagaacgcttggtctgtttta

SEQ ID NO: 480102 - DNA, 56 bp, Artificial
  Synthetic oligonucleotide
ttcggacttgtgccggagcccacaatagacgtcgttctccgcaaatatcgcctggc

SEQ ID NO: 480103 - DNA, 55 bp, Artificial
  Synthetic oligonucleotide
ttcggagatcaggtggataaggtttatggactatatcactggagctgggccaacg

SEQ ID NO: 480104 - DNA, 60 bp, Artificial
  Synthetic oligonucleotide
ttcggagcttggtgaaggctgtttggcccaacaacgacgaaggtgacattgtgcgatcga

SEQ ID NO: 480105 - DNA, 55 bp, Artificial
  Synthetic oligonucleotide
ttcggaggaggactgtatcagccgctccccgaaattcgacctctctgcggatcaa

SEQ ID NO: 480106 - DNA, 60 bp, Artificial
  Synthetic oligonucleotide
ttcggaggcgtgctaacgcgaagttcagaggttgcgtcgcaaccaatgataacgtacgca

SEQ ID NO: 480107 - DNA, 58 bp, Artificial
  Synthetic oligonucleotide
ttcggagtacgtaaaggcgcccgcacattgaacgtttatatggaatctcgtcacatta

SEQ ID NO: 480108 - DNA, 55 bp, Artificial
  Synthetic oligonucleotide
ttcggagtccgcatctgaatgcccggttcctattgtacttctagaagcccatgac

SEQ ID NO: 480109 - DNA, 59 bp, Artificial
  Synthetic oligonucleotide
ttcggagtcgtcttggattttgtgttcttcgagattagtagcattgggcattcggacaa

SEQ ID NO: 480110 - DNA, 52 bp, Artificial
  Synthetic oligonucleotide
ttcggatatgagatgctttatgacggtggcctattcgcctttgacaaggctg

SEQ ID NO: 480111 - DNA, 60 bp, Artificial
  Synthetic oligonucleotide
ttcggatatgtatgaagttcgcaatgttatgagattacggggatacagttatgtggatcg

SEQ ID NO: 480112 - DNA, 57 bp, Artificial
  Synthetic oligonucleotide
ttcggatcttcgtgaataccgcgaaaagctccgcgaggagaaagaggaacgcgcggc

SEQ ID NO: 480113 - DNA, 55 bp, Artificial
  Synthetic oligonucleotide
ttcggatgataaagcgaggcattaatgaccggaacttctggagaggcgagaacgg

SEQ ID NO: 480114 - DNA, 59 bp, Artificial
  Synthetic oligonucleotide
ttcggatgcacatggatgaatggcactgggttcaccaagacgtgcgggggccccccgtg

SEQ ID NO: 480115 - DNA, 58 bp, Artificial
  Synthetic oligonucleotide
ttcggatggaaatgtgctgacctagttggggaggtgaggtcgaagaatctattgttcc

SEQ ID NO: 480116 - DNA, 60 bp, Artificial
  Synthetic oligonucleotide
ttcggatggaaatgtgctgacctgcttggggagaccaagtcgaagaatcgcatattctgg

SEQ ID NO: 480117 - DNA, 60 bp, Artificial
  Synthetic oligonucleotide
ttcggattaaacctattggctttgcgcctacaagtcaaaggcgctatgagctgcctacga

SEQ ID NO: 480118 - DNA, 60 bp, Artificial
  Synthetic oligonucleotide
ttcggattatcttgaagggatgtacgaggcagatgcaaagatcgagagagagagtgtctc

SEQ ID NO: 480119 - DNA, 60 bp, Artificial
  Synthetic oligonucleotide
ttcggattcaacgagtgcgtgtatgtgactgaccctgacgatatctatgactcattgaac

SEQ ID NO: 480120 - DNA, 50 bp, Artificial
  Synthetic oligonucleotide
ttcggatttcgaacagtgtcaaacgagtagagtcttcggactttaagtgt

SEQ ID NO: 480121 - DNA, 55 bp, Artificial
  Synthetic oligonucleotide
ttcggcaaaaccgggacacgcagtattctaccttcttacaagcgaaggttggatc

SEQ ID NO: 480122 - DNA, 59 bp, Artificial
  Synthetic oligonucleotide
ttcggcaaagctcctttagatcagggggcatggaatagaaataagttcatgggtcacaa

SEQ ID NO: 480123 - DNA, 51 bp, Artificial
  Synthetic oligonucleotide
ttcggcaactgtttaccgtttgagttctttagacacgtttgtagtgtgagg

SEQ ID NO: 480124 - DNA, 55 bp, Artificial
  Synthetic oligonucleotide
ttcggcaatagtgaagtgcgctggtgagtgcactccaccgaaggaacatgtggtc

SEQ ID NO: 480125 - DNA, 51 bp, Artificial
  Synthetic oligonucleotide
ttcggcacatgagcacacgcgagtcgccagagcttgccctgaagcgttggg

SEQ ID NO: 480126 - DNA, 60 bp, Artificial
  Synthetic oligonucleotide
ttcggcagacggattggtcagcgtgtatatggcatgccatactctggtggtcctcaacgt

SEQ ID NO: 480127 - DNA, 55 bp, Artificial
  Synthetic oligonucleotide
ttcggcatctacccgtgcctcctgtcttgtcttactcgagcgaacccacaactcc

SEQ ID NO: 480128 - DNA, 60 bp, Artificial
  Synthetic oligonucleotide
ttcggcatgtcagtgattcaacaaaatggtctcaaagtatacacaatcctaccaacaagc

SEQ ID NO: 480129 - DNA, 60 bp, Artificial
  Synthetic oligonucleotide
ttcggcccaaactacagtgatcctacgactggccaatccttggtgaatgtggtgtccagc

SEQ ID NO: 480130 - DNA, 60 bp, Artificial
  Synthetic oligonucleotide
ttcggccccgaagcagaactaaagagcctgcgactgcaggcttcacggtggctggaacgc

SEQ ID NO: 480131 - DNA, 51 bp, Artificial
  Synthetic oligonucleotide
ttcggcccggtgagcaagcaggacaaccgcccaaccaaatcggtcgctcag

SEQ ID NO: 480132 - DNA, 53 bp, Artificial
  Synthetic oligonucleotide
ttcggccctttacgtgggggatctgtgcgggtccgtctttcttgtcggtcaac

SEQ ID NO: 480133 - DNA, 57 bp, Artificial
  Synthetic oligonucleotide
ttcggcctaattggaagaccctgtcacgtatctggacgtgacaaaagcgtgacaggg

SEQ ID NO: 480134 - DNA, 57 bp, Artificial
  Synthetic oligonucleotide
ttcggcctcgaactcaaagttgaacgatacaatccagagataggtctttgtttcctg

SEQ ID NO: 480135 - DNA, 60 bp, Artificial
  Synthetic oligonucleotide
ttcggcctgtgtccgattggaaggaacttgccactgcattcatcaatcctcatgaagttg

SEQ ID NO: 480136 - DNA, 60 bp, Artificial
  Synthetic oligonucleotide
ttcggccttcgatgccaaccactgcagtgacgcaatgaacatcatgtttgaggaggtgtt

SEQ ID NO: 480137 - DNA, 55 bp, Artificial
  Synthetic oligonucleotide
ttcggccttttctgtcccggctacagacagagatacttattaacttgatgcagcc

SEQ ID NO: 480138 - DNA, 59 bp, Artificial
  Synthetic oligonucleotide
ttcggcgatcaaacacgaaattctagctgagaaggatcttaaccggctcgcatcgttgt

SEQ ID NO: 480139 - DNA, 54 bp, Artificial
  Synthetic oligonucleotide
ttcggcgcatacaataagttcggaaacaaaacaagggtttttgttcacactgaa

SEQ ID NO: 480140 - DNA, 57 bp, Artificial
  Synthetic oligonucleotide
ttcggcgtcgtcttttcttcgcatagttttggcccgtctgtcgagctacaggcctct

SEQ ID NO: 480141 - DNA, 55 bp, Artificial
  Synthetic oligonucleotide
ttcggcgtgcatgggtaaactatgaggactctggagcgttcatcatccgtgtgaa

SEQ ID NO: 480142 - DNA, 58 bp, Artificial
  Synthetic oligonucleotide
ttcggcgttgtaccaatacaaggcccaataaacagagctgttgctcaaaacgcctatg

SEQ ID NO: 480143 - DNA, 54 bp, Artificial
  Synthetic oligonucleotide
ttcggctacggaccctacttgttgtaagtagccgaactcacagaaactcaagtt

SEQ ID NO: 480144 - DNA, 54 bp, Artificial
  Synthetic oligonucleotide
ttcggctcaccactaactgaaaacccttgcgtaaacttccagatactggggccc

SEQ ID NO: 480145 - DNA, 59 bp, Artificial
  Synthetic oligonucleotide
ttcggctcctgcaggcagcaaaagaggacatttctaatgctgtagttccaaactcagcc

SEQ ID NO: 480146 - DNA, 60 bp, Artificial
  Synthetic oligonucleotide
ttcggctcgccaacaatggcgatgattgcatggtgttcatggagagacataatgaggagt

SEQ ID NO: 480147 - DNA, 53 bp, Artificial
  Synthetic oligonucleotide
ttcggctctcctactgggggccgctgggactgcccttggaacccccgtggttg

SEQ ID NO: 480148 - DNA, 60 bp, Artificial
  Synthetic oligonucleotide
ttcggctgcatcccagctggacttgtccagctggtttgttgccggatacagcgggggaga

SEQ ID NO: 480149 - DNA, 51 bp, Artificial
  Synthetic oligonucleotide
ttcggctggattaggtgggacgatacccaggctatgccggtacgagcgcat

SEQ ID NO: 480150 - DNA, 55 bp, Artificial
  Synthetic oligonucleotide
ttcggctggttatcgctaacgtgactagtgatcgttgcattgagtgcgtgatcgc

SEQ ID NO: 480151 - DNA, 56 bp, Artificial
  Synthetic oligonucleotide
ttcggctgtacatggatgaataccactgggttcaccaagacgtgcggggggccccc

SEQ ID NO: 480152 - DNA, 50 bp, Artificial
  Synthetic oligonucleotide
ttcggcttgactactggtaagaacggtggaagcaaacctcctgtatgtcc

SEQ ID NO: 480153 - DNA, 57 bp, Artificial
  Synthetic oligonucleotide
ttcgggaagatatctagcccgctggtacgtgtcaacaggctaggcccaggaataccc

SEQ ID NO: 480154 - DNA, 60 bp, Artificial
  Synthetic oligonucleotide
ttcgggacctactcgacaattgcacacctaaccataccgctctcaggcaagctatcttgt

SEQ ID NO: 480155 - DNA, 60 bp, Artificial
  Synthetic oligonucleotide
ttcgggactgaacaagtctgtgacctgcctttatgcactccttatgcagtcgttagcgtc

SEQ ID NO: 480156 - DNA, 50 bp, Artificial
  Synthetic oligonucleotide
ttcgggagcaatccagtatccctaaggggtacctctctggatatcattgt

SEQ ID NO: 480157 - DNA, 58 bp, Artificial
  Synthetic oligonucleotide
ttcgggatctcctcgacaccgcctctgctctgtttcgggaggccttagagtctccgga

SEQ ID NO: 480158 - DNA, 55 bp, Artificial
  Synthetic oligonucleotide
ttcgggcatctgccgactatgtcgatagccgtgcatccttattttgatagctaca

SEQ ID NO: 480159 - DNA, 56 bp, Artificial
  Synthetic oligonucleotide
ttcgggcatgaacctaatgaccttagccgacttgatagggagcacactacctatgc

SEQ ID NO: 480160 - DNA, 55 bp, Artificial
  Synthetic oligonucleotide
ttcgggccgctgcgctaaacgaagttgccacattccggctacgtcgggtagaaaa

SEQ ID NO: 480161 - DNA, 54 bp, Artificial
  Synthetic oligonucleotide
ttcgggccgggattcactccaccccatgggggactgttggggtggagccctcca

SEQ ID NO: 480162 - DNA, 51 bp, Artificial
  Synthetic oligonucleotide
ttcgggccgggattcactcctccccacgggggattattggggtggagcccc

SEQ ID NO: 480163 - DNA, 55 bp, Artificial
  Synthetic oligonucleotide
ttcgggcctcatcttccgtcttcacgcgcttgcggtactgcttcctgcgccctgt

SEQ ID NO: 480164 - DNA, 60 bp, Artificial
  Synthetic oligonucleotide
ttcgggcctttattatgaggaggaaggccataaaaggtattatgtgcacttcatagatga

SEQ ID NO: 480165 - DNA, 53 bp, Artificial
  Synthetic oligonucleotide
ttcgggcgaacttttagagttacgcctgtccgataaattacgtaaacatctac

SEQ ID NO: 480166 - DNA, 58 bp, Artificial
  Synthetic oligonucleotide
ttcgggcgcgttggataggttagcgcggcgtggcagcggttactacgtcgcacgcgct

SEQ ID NO: 480167 - DNA, 55 bp, Artificial
  Synthetic oligonucleotide
ttcgggctcgcgggggacggaagctttattaaacagactccaggttgccattgga

SEQ ID NO: 480168 - DNA, 58 bp, Artificial
  Synthetic oligonucleotide
ttcggggacgcctgaaggagtacggtaagtgactctgctgtacgcggggcgaggcaga

SEQ ID NO: 480169 - DNA, 60 bp, Artificial
  Synthetic oligonucleotide
ttcggggagtggctaaccctcagaagctgcatataagcagccgctttctgcttgtaccgg

SEQ ID NO: 480170 - DNA, 55 bp, Artificial
  Synthetic oligonucleotide
ttcggggatttaaatgttatctccgaggactgttttgcagatgacatttttaatt

SEQ ID NO: 480171 - DNA, 60 bp, Artificial
  Synthetic oligonucleotide
ttcggggccatagctgggtttatagaaggaggatggacaggcatgatagatggttggtac

SEQ ID NO: 480172 - DNA, 58 bp, Artificial
  Synthetic oligonucleotide
ttcggggcgtacatgtccaaggcatatggtgtcgaccctaatattagatctggggtaa

SEQ ID NO: 480173 - DNA, 55 bp, Artificial
  Synthetic oligonucleotide
ttcggggtacttgtggattctccaggcgctattcgataggttcaccacggctcca

SEQ ID NO: 480174 - DNA, 55 bp, Artificial
  Synthetic oligonucleotide
ttcggggtcccagccagtgagatcgcggtcagttcccacggcgagttcacccaat

SEQ ID NO: 480175 - DNA, 53 bp, Artificial
  Synthetic oligonucleotide
ttcgggtcctcagatattttttgggtacagccaataactaatcaaaaaccctc

SEQ ID NO: 480176 - DNA, 49 bp, Artificial
  Synthetic oligonucleotide
ttcgggtccttactactagatcctaggggccgtccccggggtcgtttac

SEQ ID NO: 480177 - DNA, 60 bp, Artificial
  Synthetic oligonucleotide
ttcgggtgaactaaattcatctgttgcggcaaggtccggtggctgatcaccactggagga

SEQ ID NO: 480178 - DNA, 60 bp, Artificial
  Synthetic oligonucleotide
ttcgggtgcttgattgaaaaaaccgctctgatgcttcaagatgagcgaaatctacaaacg

SEQ ID NO: 480179 - DNA, 60 bp, Artificial
  Synthetic oligonucleotide
ttcgggttatgccatatacatcgcaactcttacatgtcaaccaataaagaggagtatatc

SEQ ID NO: 480180 - DNA, 55 bp, Artificial
  Synthetic oligonucleotide
ttcgggttcaaggagacaacccccactccgaggcaggagacgagagacagggaac

SEQ ID NO: 480181 - DNA, 57 bp, Artificial
  Synthetic oligonucleotide
ttcgggttccacccaaatgccgagtggatcttgaagactctcgtgaatacggaacac

SEQ ID NO: 480182 - DNA, 58 bp, Artificial
  Synthetic oligonucleotide
ttcgggttcccgctgtaggttgtccaaatccttgcagtcttgcgaagtatactcttga

SEQ ID NO: 480183 - DNA, 55 bp, Artificial
  Synthetic oligonucleotide
ttcgggttggcataaatagaggaggactgacatatagtttattgaggaaaatcag

SEQ ID NO: 480184 - DNA, 55 bp, Artificial
  Synthetic oligonucleotide
ttcgggtttattacagggacaacagagatccactttggaagggaccagcaaagct

SEQ ID NO: 480185 - DNA, 53 bp, Artificial
  Synthetic oligonucleotide
ttcgggtttcgacaaggaactgacgtatgggccggaaggacaattagtaggac

SEQ ID NO: 480186 - DNA, 53 bp, Artificial
  Synthetic oligonucleotide
ttcgggtttcgacaagggaatgacgtgtgggttggaaggacaattaataggac

SEQ ID NO: 480187 - DNA, 57 bp, Artificial
  Synthetic oligonucleotide
ttcggtaataagttcttattatccaaactgttatccaaggcagagtaagcggtgtga

SEQ ID NO: 480188 - DNA, 58 bp, Artificial
  Synthetic oligonucleotide
ttcggtacgttttgttcgcgacgtcatggccctgaccagtggtatgtacctcgtgcga

SEQ ID NO: 480189 - DNA, 55 bp, Artificial
  Synthetic oligonucleotide
ttcggtactcgcgaccaagctacaggtcaaattaacgaagttgaaacccaagtca

SEQ ID NO: 480190 - DNA, 59 bp, Artificial
  Synthetic oligonucleotide
ttcggtagacttacatgacgaaatagaacagattggatcggagaaaactcaaaatgtga

SEQ ID NO: 480191 - DNA, 57 bp, Artificial
  Synthetic oligonucleotide
ttcggtagggggtctagttgttgagtgccattatgacataaccaactagacacccca

SEQ ID NO: 480192 - DNA, 55 bp, Artificial
  Synthetic oligonucleotide
ttcggtatactctttaaatgaaccgagcgattataaacagcttactaatgccgac

SEQ ID NO: 480193 - DNA, 58 bp, Artificial
  Synthetic oligonucleotide
ttcggtatgaatactcgtttgtggtaccggtcaggcgtccaggtcttacgtgagctca

SEQ ID NO: 480194 - DNA, 52 bp, Artificial
  Synthetic oligonucleotide
ttcggtatggcaaggttcaatccgccccaaggttcgatccctcccggggtta

SEQ ID NO: 480195 - DNA, 60 bp, Artificial
  Synthetic oligonucleotide
ttcggtcaaaccagcggcgctgccggctctagcgccactattacaatcactgcccctgac

SEQ ID NO: 480196 - DNA, 52 bp, Artificial
  Synthetic oligonucleotide
ttcggtcccgtccatttccgaaaccaagttaaaatacgccgccgagtggata

SEQ ID NO: 480197 - DNA, 55 bp, Artificial
  Synthetic oligonucleotide
ttcggtcttactaagtcatactgaaagtggttattctgatgctgatgtacgagct

SEQ ID NO: 480198 - DNA, 55 bp, Artificial
  Synthetic oligonucleotide
ttcggtgaagtggtacagtcgcgtaatattagtaataccttgtggaatggatgca

SEQ ID NO: 480199 - DNA, 52 bp, Artificial
  Synthetic oligonucleotide
ttcggtgactacattgatagaggatacgtggggcaggaataaactgccccta

SEQ ID NO: 480200 - DNA, 59 bp, Artificial
  Synthetic oligonucleotide
ttcggtgcaaggatccacagccatgggaacctatctattactccttcattgaaggaccg

SEQ ID NO: 480201 - DNA, 52 bp, Artificial
  Synthetic oligonucleotide
ttcggtgcaatgatccatagtcatggtaatcttggaataactccgtctctga

SEQ ID NO: 480202 - DNA, 60 bp, Artificial
  Synthetic oligonucleotide
ttcggtgctaggatccacagccatggtaatctcgcgatagtaccctctctgaaagaccgt

SEQ ID NO: 480203 - DNA, 55 bp, Artificial
  Synthetic oligonucleotide
ttcggtggttagattaacaccaactcctctggctctgatttcaagggatagcccc

SEQ ID NO: 480204 - DNA, 56 bp, Artificial
  Synthetic oligonucleotide
ttcggtgtacagggtgttatcgtcactgacgactataatgtaaacttaccgaacca

SEQ ID NO: 480205 - DNA, 57 bp, Artificial
  Synthetic oligonucleotide
ttcggttaagtggactaccttcttcagtgattcagtccccattggtgcctgtagttc

SEQ ID NO: 480206 - DNA, 58 bp, Artificial
  Synthetic oligonucleotide
ttcggttacatggttgtggaggaatacacctggtattcctcccctagattgatatcta

SEQ ID NO: 480207 - DNA, 56 bp, Artificial
  Synthetic oligonucleotide
ttcggttaggagattgaggacctaaccatttcgtatcgtgagatacgatacctcct

SEQ ID NO: 480208 - DNA, 53 bp, Artificial
  Synthetic oligonucleotide
ttcggttccgtctctgacaagtatcgtcggaacccgaggtacgcggaattccg

SEQ ID NO: 480209 - DNA, 52 bp, Artificial
  Synthetic oligonucleotide
ttcggttggttaccactaatgagtgatatccagggtgcatatgagatgctta

SEQ ID NO: 480210 - DNA, 58 bp, Artificial
  Synthetic oligonucleotide
ttcggtttcctagatagtagcaatacatggttaggtcgcacaataagtcctcgttcaa

SEQ ID NO: 480211 - DNA, 58 bp, Artificial
  Synthetic oligonucleotide
ttcggtttcgtctgttgcgatgttcgataggtcgtataaacctgaagacgtctggata

SEQ ID NO: 480212 - DNA, 54 bp, Artificial
  Synthetic oligonucleotide
ttcggttttagacaaggaactagcgtatgggcaggaagaacaattagtgtttct

SEQ ID NO: 480213 - DNA, 59 bp, Artificial
  Synthetic oligonucleotide
ttcggttttttcattggatagctgaaattcagtcctatccgacgtcgtatatgcaatat

SEQ ID NO: 480214 - DNA, 52 bp, Artificial
  Synthetic oligonucleotide
ttcgtaaaagcatgttattaacggcggttgatagtaagactcgggttagtgt

SEQ ID NO: 480215 - DNA, 53 bp, Artificial
  Synthetic oligonucleotide
ttcgtaacatccagaaggatcgtggtattagtatccctggctgcccaatcggt

SEQ ID NO: 480216 - DNA, 53 bp, Artificial
  Synthetic oligonucleotide
ttcgtaagacaagaaataagccgccttaaacagtagggacaagttattcggta

SEQ ID NO: 480217 - DNA, 58 bp, Artificial
  Synthetic oligonucleotide
ttcgtaagtcaaacgggaggacctgttcttgagttgcaggatgtgtttcgatggataa

SEQ ID NO: 480218 - DNA, 60 bp, Artificial
  Synthetic oligonucleotide
ttcgtaagtctatcgaaaacttcactcagggtgctatcacaatcaaaggcgacaagctat

SEQ ID NO: 480219 - DNA, 60 bp, Artificial
  Synthetic oligonucleotide
ttcgtaatagatggtattggaaattgaaacgtgacactcttcccgatggagattatgatg

SEQ ID NO: 480220 - DNA, 55 bp, Artificial
  Synthetic oligonucleotide
ttcgtaatggtgtgctggctgcctgtggtccaccgggtgtgcctgaataagctgg

SEQ ID NO: 480221 - DNA, 59 bp, Artificial
  Synthetic oligonucleotide
ttcgtacactcatacgtgttaacccctgctcagctggggggactgagcaaccttcagta

SEQ ID NO: 480222 - DNA, 60 bp, Artificial
  Synthetic oligonucleotide
ttcgtacatatatcgtagtcatctgctatacgtatatcaattactggggcttcttgcatc

SEQ ID NO: 480223 - DNA, 53 bp, Artificial
  Synthetic oligonucleotide
ttcgtacgggtaccccgggtctgggaatgtaggtcgtgtgtggtactatacgc

SEQ ID NO: 480224 - DNA, 56 bp, Artificial
  Synthetic oligonucleotide
ttcgtactcgtcgataatggcggtacggggaatgttactgtcgttcctgttagcaa

SEQ ID NO: 480225 - DNA, 51 bp, Artificial
  Synthetic oligonucleotide
ttcgtactgaggaaattctacatgatgatcgtgttacaaacgaacatgtgc

SEQ ID NO: 480226 - DNA, 57 bp, Artificial
  Synthetic oligonucleotide
ttcgtactgctccctgttctttaacatccttcttcattggagaggtgaccattccgt

SEQ ID NO: 480227 - DNA, 60 bp, Artificial
  Synthetic oligonucleotide
ttcgtagaacgtgctggctggcagagggttatcataatcattgtggcttcagaaagttat

SEQ ID NO: 480228 - DNA, 55 bp, Artificial
  Synthetic oligonucleotide
ttcgtagagccattgaaaccgctcctactaaaatcaaggtacttcgaaactcttg

SEQ ID NO: 480229 - DNA, 57 bp, Artificial
  Synthetic oligonucleotide
ttcgtagatttcaagctactgtaacgggaggtcagtatgcaagcaaggagcaagcaa

SEQ ID NO: 480230 - DNA, 60 bp, Artificial
  Synthetic oligonucleotide
ttcgtagcaacgtctacaggcgcagatttcgatgaattggtagggccacaagccgtataa

SEQ ID NO: 480231 - DNA, 53 bp, Artificial
  Synthetic oligonucleotide
ttcgtagtgcaatgtatactaaacggtattcttcgcactaccaaatagtgaat

SEQ ID NO: 480232 - DNA, 53 bp, Artificial
  Synthetic oligonucleotide
ttcgtagtggttactcttattggtcaagaccgtaaggttctgactttaaatac

SEQ ID NO: 480233 - DNA, 60 bp, Artificial
  Synthetic oligonucleotide
ttcgtatagaatgcaatacatggttcatgcctaattggtcttctatctgtcgtactgctt

SEQ ID NO: 480234 - DNA, 51 bp, Artificial
  Synthetic oligonucleotide
ttcgtatccgacaagacttgccttttcacccgtcagcagttcagaacccag

SEQ ID NO: 480235 - DNA, 56 bp, Artificial
  Synthetic oligonucleotide
ttcgtatttagagtatccgtctttaaattctctataatatggcgttacattactta

SEQ ID NO: 480236 - DNA, 56 bp, Artificial
  Synthetic oligonucleotide
ttcgtcaagggatcctactactcaagaagctatccctactaggtttccgcctggta

SEQ ID NO: 480237 - DNA, 58 bp, Artificial
  Synthetic oligonucleotide
ttcgtcagaagagtttcctgtgtaactagcaatcacatttgacccaatttttagtgtg

SEQ ID NO: 480238 - DNA, 51 bp, Artificial
  Synthetic oligonucleotide
ttcgtcaggactccatctctcatgtagttacacgtatttgtaataacgtca

SEQ ID NO: 480239 - DNA, 56 bp, Artificial
  Synthetic oligonucleotide
ttcgtcatccttactcttggaccagtcaagaaataccaacgtttcttcgactccca

SEQ ID NO: 480240 - DNA, 55 bp, Artificial
  Synthetic oligonucleotide
ttcgtcattcccgagaagactgatgtaccgcccatcgtatttgttcagacatcta

SEQ ID NO: 480241 - DNA, 60 bp, Artificial
  Synthetic oligonucleotide
ttcgtccagcctcgcctgcacttgactacattccttgcgaggctcttgaagcacttcctc

SEQ ID NO: 480242 - DNA, 56 bp, Artificial
  Synthetic oligonucleotide
ttcgtcccaacacctcgcatccccttttccagtcgcccttcgctcgcctgtcccac

SEQ ID NO: 480243 - DNA, 54 bp, Artificial
  Synthetic oligonucleotide
ttcgtccctaagtagtatcttttgtactatgtgggatccattgttaaacgagtt

SEQ ID NO: 480244 - DNA, 56 bp, Artificial
  Synthetic oligonucleotide
ttcgtcctcacccactgacaacctccctccccttgagtcgatgcccttcgggccga

SEQ ID NO: 480245 - DNA, 54 bp, Artificial
  Synthetic oligonucleotide
ttcgtccttacaacataaacgacattttagcgactttgaaaaccgaggtcactg

SEQ ID NO: 480246 - DNA, 56 bp, Artificial
  Synthetic oligonucleotide
ttcgtcgaagttaaatagggcggcctacagatagtgggggggtatgaacacgatca

SEQ ID NO: 480247 - DNA, 60 bp, Artificial
  Synthetic oligonucleotide
ttcgtcgcctgttgaagcgtgataggttcctcggtgcgaaaatccctgattacattcatg

SEQ ID NO: 480248 - DNA, 55 bp, Artificial
  Synthetic oligonucleotide
ttcgtcgctaagtagttaagcgcgtcaacatgtgggatccattgttgaacgattt

SEQ ID NO: 480249 - DNA, 59 bp, Artificial
  Synthetic oligonucleotide
ttcgtcggccggtggtcagctgttttactctcgccccgtcgtctcagccaatggcgagc

SEQ ID NO: 480250 - DNA, 54 bp, Artificial
  Synthetic oligonucleotide
ttcgtcggtggtcctccctctccttgtcggtgaagtctcccctggaacgcctct

SEQ ID NO: 480251 - DNA, 59 bp, Artificial
  Synthetic oligonucleotide
ttcgtcggttacctgacaagtcgagtatgaggcatgcggcggttacgtgtcaaggccga

SEQ ID NO: 480252 - DNA, 59 bp, Artificial
  Synthetic oligonucleotide
ttcgtcgtcccaatcatcttgaaggcactttatatgttaacaacaagaggccggcagac

SEQ ID NO: 480253 - DNA, 55 bp, Artificial
  Synthetic oligonucleotide
ttcgtcgtccctataggtgcgccaactactgcttatatagtggttctgggtagcg

SEQ ID NO: 480254 - DNA, 54 bp, Artificial
  Synthetic oligonucleotide
ttcgtcgtgaacgtaggcgatataatcgtccggtttgcgttacacgttcctagc

SEQ ID NO: 480255 - DNA, 58 bp, Artificial
  Synthetic oligonucleotide
ttcgtctagtgaaagtatcagaccaaagtaaaatagacttagtagacgcagcagtaaa

SEQ ID NO: 480256 - DNA, 60 bp, Artificial
  Synthetic oligonucleotide
ttcgtctatcattccaattaatgcgtccaccaaacatgacgccagccgtaaatgcattat

SEQ ID NO: 480257 - DNA, 52 bp, Artificial
  Synthetic oligonucleotide
ttcgtctatcctcgctgaaatctggaggataatacgaaagcttgacctagcc

SEQ ID NO: 480258 - DNA, 60 bp, Artificial
  Synthetic oligonucleotide
ttcgtctattaataattgaaacgtgtaattggcttatgcgtcgaattcatatattagaca

SEQ ID NO: 480259 - DNA, 59 bp, Artificial
  Synthetic oligonucleotide
ttcgtctcactcatttgggggtgcacaccgcgtttgtgagacagattatttttatggac

SEQ ID NO: 480260 - DNA, 57 bp, Artificial
  Synthetic oligonucleotide
ttcgtctcgatgagacgggtccaacgagccctcgcccatctcgggattcctacggga

SEQ ID NO: 480261 - DNA, 58 bp, Artificial
  Synthetic oligonucleotide
ttcgtctcgccgagacgaatccaacgagctgtcacgtgtccaaaaattcttattagaa

SEQ ID NO: 480262 - DNA, 52 bp, Artificial
  Synthetic oligonucleotide
ttcgtctcggcgagacaaactcaacgagccctatgccgagtgtgtgacgtca

SEQ ID NO: 480263 - DNA, 60 bp, Artificial
  Synthetic oligonucleotide
ttcgtctctagatttaaagtattctatcaattgcaagtattgttctatggtgatgaattt

SEQ ID NO: 480264 - DNA, 60 bp, Artificial
  Synthetic oligonucleotide
ttcgtctgaacgaagaaaggatattgaggatgttgcagggtacctgagatcccaagttca

SEQ ID NO: 480265 - DNA, 55 bp, Artificial
  Synthetic oligonucleotide
ttcgtctgccaatagaaacgctccttcaaagcttatttaataagtggtcccctat

SEQ ID NO: 480266 - DNA, 60 bp, Artificial
  Synthetic oligonucleotide
ttcgtctgcctgttcggaattgtgaccaggaataaacatgtcaaagacatacgcatcgcc

SEQ ID NO: 480267 - DNA, 55 bp, Artificial
  Synthetic oligonucleotide
ttcgtctgggcacaggagcagatgacccggctgcgctcggaacgcggcgtcgaga

SEQ ID NO: 480268 - DNA, 55 bp, Artificial
  Synthetic oligonucleotide
ttcgtgaaccgaggctctgcggccacggtcccgtccaatgccagttcggtcactg

SEQ ID NO: 480269 - DNA, 53 bp, Artificial
  Synthetic oligonucleotide
ttcgtgaactgttagttggggttgattatgtgtgggacggtgtaaggggttta

SEQ ID NO: 480270 - DNA, 60 bp, Artificial
  Synthetic oligonucleotide
ttcgtgaatgatcttacgttgcattttgtagaccctatgcttgtaggcatagctatacgt

SEQ ID NO: 480271 - DNA, 60 bp, Artificial
  Synthetic oligonucleotide
ttcgtgacatgattaagttgggtgcctcagatattttgaatctctaaccatggactcttt

SEQ ID NO: 480272 - DNA, 56 bp, Artificial
  Synthetic oligonucleotide
ttcgtgactcaacttccgggttcccacgttacgtcacttctgcccttacatgtggc

SEQ ID NO: 480273 - DNA, 56 bp, Artificial
  Synthetic oligonucleotide
ttcgtgagttcaagtttcgcagcctcgttactgaccaattcaccgattgccactct

SEQ ID NO: 480274 - DNA, 60 bp, Artificial
  Synthetic oligonucleotide
ttcgtgatcgttatcaagttatgcacagattctatgctaaggtcacgggtggacaatatg

SEQ ID NO: 480275 - DNA, 60 bp, Artificial
  Synthetic oligonucleotide
ttcgtgatgagcagattggtcggattggagatcattactatacaacgaattgttacacag

SEQ ID NO: 480276 - DNA, 60 bp, Artificial
  Synthetic oligonucleotide
ttcgtgatgcatacactgacttttctgaactattgacttgttttaagcgtattcgatcgg

SEQ ID NO: 480277 - DNA, 55 bp, Artificial
  Synthetic oligonucleotide
ttcgtgattacagaaggatggcagaagcacggtaccaactacagcgtcaggtagc

SEQ ID NO: 480278 - DNA, 60 bp, Artificial
  Synthetic oligonucleotide
ttcgtgcaactatctgctgccgttaagaagcagataaaacaggagaccactcctgttaat

SEQ ID NO: 480279 - DNA, 60 bp, Artificial
  Synthetic oligonucleotide
ttcgtgcacactccacccttcctggtgcccttgtacgaggcaatcacactgcggacgctc

SEQ ID NO: 480280 - DNA, 55 bp, Artificial
  Synthetic oligonucleotide
ttcgtgcgcgtacaaggccttctccggatctgcgcgttagcgcggaagatggcag

SEQ ID NO: 480281 - DNA, 54 bp, Artificial
  Synthetic oligonucleotide
ttcgtgcggcccttttaaacaacgatacacccacgtctatcggcaatgaaacgt

SEQ ID NO: 480282 - DNA, 50 bp, Artificial
  Synthetic oligonucleotide
ttcgtgcggggtgagcttagccgagaagaatgagcacccctttttgttga

SEQ ID NO: 480283 - DNA, 54 bp, Artificial
  Synthetic oligonucleotide
ttcgtgcgttcggctgttcaactgactactgcttagagcgattagcgtctcgtg

SEQ ID NO: 480284 - DNA, 60 bp, Artificial
  Synthetic oligonucleotide
ttcgtgctatctaacgccagctagcctcattaagcgggctctcggatcgtcactcaagtt

SEQ ID NO: 480285 - DNA, 52 bp, Artificial
  Synthetic oligonucleotide
ttcgtgctattccctcacagatggttcgtaacaatatagcaagaaatttgac

SEQ ID NO: 480286 - DNA, 55 bp, Artificial
  Synthetic oligonucleotide
ttcgtgctccattgtcacctccccaactcatcgatgtggatgcaacccacacggt

SEQ ID NO: 480287 - DNA, 59 bp, Artificial
  Synthetic oligonucleotide
ttcgtgctcccactgtcctcgtcacaaacaaacgcagagcgtggtccaacagacccaat

SEQ ID NO: 480288 - DNA, 60 bp, Artificial
  Synthetic oligonucleotide
ttcgtgctgttgtggcatggaattccgttccgaatttgcgtactaagtatgatcttggta

SEQ ID NO: 480289 - DNA, 60 bp, Artificial
  Synthetic oligonucleotide
ttcgtgcttcgctggtgtgcattcgcaacgctctttctaagtttcataaactacgattgg

SEQ ID NO: 480290 - DNA, 55 bp, Artificial
  Synthetic oligonucleotide
ttcgtgcttctgtgctgttacgcgggataagcccgtaggccattcgcgggtcagg

SEQ ID NO: 480291 - DNA, 60 bp, Artificial
  Synthetic oligonucleotide
ttcgtggaattatgtcagcccttgttcatcctataaatgatgttttcgagaccacagata

SEQ ID NO: 480292 - DNA, 57 bp, Artificial
  Synthetic oligonucleotide
ttcgtggaccatccgatatacgatataccccaataacacttcgtactcacttccact

SEQ ID NO: 480293 - DNA, 60 bp, Artificial
  Synthetic oligonucleotide
ttcgtgggcacacgagtatactcgcactatccaataaaactacgtatgatactgaacgac

SEQ ID NO: 480294 - DNA, 60 bp, Artificial
  Synthetic oligonucleotide
ttcgtggggatatgataagttgacccatgaaatacgcaagttttatgcatggatgatcga

SEQ ID NO: 480295 - DNA, 54 bp, Artificial
  Synthetic oligonucleotide
ttcgtggtgaaaaggaagtggaccgtgaaccttgttactgatggacggaaggtc

SEQ ID NO: 480296 - DNA, 53 bp, Artificial
  Synthetic oligonucleotide
ttcgtggtttgtgtgacttctaagagaacccggaaaaagggagtgtgattaaa

SEQ ID NO: 480297 - DNA, 50 bp, Artificial
  Synthetic oligonucleotide
ttcgtgtactgaacttcgcagtgcgccctatcgctgacggtggcaagggg

SEQ ID NO: 480298 - DNA, 55 bp, Artificial
  Synthetic oligonucleotide
ttcgtgtagcagcttacgcgataccaagtttgtcgggcagcaatatgccatcctt

SEQ ID NO: 480299 - DNA, 60 bp, Artificial
  Synthetic oligonucleotide
ttcgtgtatataataaacgaacagcatgaatctataccgtttggtagcggatgcgcttta

SEQ ID NO: 480300 - DNA, 60 bp, Artificial
  Synthetic oligonucleotide
ttcgtgtccccgaacatcgcccatctcatgtttaagccgcatatattgttgccacgggcc

SEQ ID NO: 480301 - DNA, 57 bp, Artificial
  Synthetic oligonucleotide
ttcgtgtgtattgggtcctctacactgagtatcgtgaaatagaggggatttggtact

SEQ ID NO: 480302 - DNA, 58 bp, Artificial
  Synthetic oligonucleotide
ttcgtgtgttacggatatgcgccgcgtgtggatgggacgataccggattggaataacc

SEQ ID NO: 480303 - DNA, 57 bp, Artificial
  Synthetic oligonucleotide
ttcgttaaccaacatacattgggctggaataatgaaccataaaaccgtctcatttga

SEQ ID NO: 480304 - DNA, 55 bp, Artificial
  Synthetic oligonucleotide
ttcgttaatatattcatgcaagcttacggtgctggtcaaacaatgctgaggtggg

SEQ ID NO: 480305 - DNA, 55 bp, Artificial
  Synthetic oligonucleotide
ttcgttacaaccgtcgcttaaactggcattagaagaagaagcttgggctgcggcg

SEQ ID NO: 480306 - DNA, 55 bp, Artificial
  Synthetic oligonucleotide
ttcgttacgagcgaccaagtgtggcgacttagtgaaaaggctaagcgaaagttcc

SEQ ID NO: 480307 - DNA, 52 bp, Artificial
  Synthetic oligonucleotide
ttcgttagtgacgttgatcctttaccacccggccttcccggtgagtcgaaac

SEQ ID NO: 480308 - DNA, 58 bp, Artificial
  Synthetic oligonucleotide
ttcgttataaaagggagatctcacctgagaaatgacaccgatgtggtaaattttgtga

SEQ ID NO: 480309 - DNA, 58 bp, Artificial
  Synthetic oligonucleotide
ttcgttccaggcacgggataagcaatcagccatgtctacttccaagaggaaacgggga

SEQ ID NO: 480310 - DNA, 52 bp, Artificial
  Synthetic oligonucleotide
ttcgttcgccaacatggggaaccggacgtttacgccctctggcggaacgaac

SEQ ID NO: 480311 - DNA, 55 bp, Artificial
  Synthetic oligonucleotide
ttcgttctctgagctgaacgcgcacctgtggcggttctggatgggcgaggacgtc

SEQ ID NO: 480312 - DNA, 59 bp, Artificial
  Synthetic oligonucleotide
ttcgttgaaccgaccgctaacagctacagagcgagtttgcaacaccgcgtattttctca

SEQ ID NO: 480313 - DNA, 57 bp, Artificial
  Synthetic oligonucleotide
ttcgttgacgagtctggtaagaccagggtaggtcgcggattggccgacttctacgca

SEQ ID NO: 480314 - DNA, 58 bp, Artificial
  Synthetic oligonucleotide
ttcgttgactcgcccacttcgagtgtttttctccagtgtggttcgcgcattgttccca

SEQ ID NO: 480315 - DNA, 56 bp, Artificial
  Synthetic oligonucleotide
ttcgttgagtcaaacggtatgaacgatattcgagaaaaattgaagcaccacctaac

SEQ ID NO: 480316 - DNA, 55 bp, Artificial
  Synthetic oligonucleotide
ttcgttgcaaccgtcgcttaaattggcgttggaggaagaagcttgggcggcggcg

SEQ ID NO: 480317 - DNA, 60 bp, Artificial
  Synthetic oligonucleotide
ttcgttgcgcatagtcaccgggaggtgacgacgacagaagtagtgaagtatctcagcatt

SEQ ID NO: 480318 - DNA, 57 bp, Artificial
  Synthetic oligonucleotide
ttcgttgctctgcgttcgtctcagggccgggaatgaggattccatgccaaagcgatt

SEQ ID NO: 480319 - DNA, 60 bp, Artificial
  Synthetic oligonucleotide
ttcgttggactaaagacgcacgaagtactcaagatcatgtgcgctccctctgcttattag

SEQ ID NO: 480320 - DNA, 54 bp, Artificial
  Synthetic oligonucleotide
ttcgttggcgataagcccgttatttctactaattccggagtttacatgctatgc

SEQ ID NO: 480321 - DNA, 60 bp, Artificial
  Synthetic oligonucleotide
ttcgttgtatgctagcggttaaatatcttctacttgttgaggctacatactctccggata

SEQ ID NO: 480322 - DNA, 55 bp, Artificial
  Synthetic oligonucleotide
ttcgttgtcaaaccttactgatgcggaatatgtaattcgggtaactagagatgcg

SEQ ID NO: 480323 - DNA, 55 bp, Artificial
  Synthetic oligonucleotide
ttcgttgtctgtcatcctcttgtcgtggatctccacaattaccgaacctgtggcg

SEQ ID NO: 480324 - DNA, 60 bp, Artificial
  Synthetic oligonucleotide
ttcgttgttactaggtgtgtacttctccacgagaggcgtgcattcttggtagctatgtgt

SEQ ID NO: 480325 - DNA, 58 bp, Artificial
  Synthetic oligonucleotide
ttcgttgttgcaattgtgtgtattattggactcctatcgtacaccccacctgaaagac

SEQ ID NO: 480326 - DNA, 56 bp, Artificial
  Synthetic oligonucleotide
ttcgttgttttaacacgctcggattaggactctcgccaatggaatcataatcttgc

SEQ ID NO: 480327 - DNA, 50 bp, Artificial
  Synthetic oligonucleotide
ttcgtttagtaactcgtctgattccccttaaatagaggctgagtacggaa

SEQ ID NO: 480328 - DNA, 52 bp, Artificial
  Synthetic oligonucleotide
ttcgtttatcatttcaactgatgcgtccgccaaacatgacaccagccgtcaa

SEQ ID NO: 480329 - DNA, 55 bp, Artificial
  Synthetic oligonucleotide
ttcgtttattactttgcagtccttcgtaatgtttgtcagaatgtagaacgactcg

SEQ ID NO: 480330 - DNA, 50 bp, Artificial
  Synthetic oligonucleotide
ttcgtttcccgaggactccctaattctcgactttgggggttcctggttat

SEQ ID NO: 480331 - DNA, 60 bp, Artificial
  Synthetic oligonucleotide
ttcgtttgcataggcctgcattaacatccagacgcagcactgtaaggtttagtaggctag

SEQ ID NO: 480332 - DNA, 55 bp, Artificial
  Synthetic oligonucleotide
ttcgtttgttctcagaccctaatgcacagcgaagctctggccaatacgcaagcga

SEQ ID NO: 480333 - DNA, 59 bp, Artificial
  Synthetic oligonucleotide
ttcgttttaactacactaacatcaagcgaacaattatctgctacagcggcgactgaccg

SEQ ID NO: 480334 - DNA, 55 bp, Artificial
  Synthetic oligonucleotide
ttcgttttcatcaacgatgtcctttagtgtgtttaaaaggaagtcgcaatcacct

SEQ ID NO: 480335 - DNA, 60 bp, Artificial
  Synthetic oligonucleotide
ttcgttttttccaatcgctcaaatgttcaatccagtagatttacgagacatgcgtatcga

SEQ ID NO: 480336 - DNA, 53 bp, Artificial
  Synthetic oligonucleotide
ttctaaaaatattaaacggtttataccaaaaggcgtgttatattcatatataa

SEQ ID NO: 480337 - DNA, 60 bp, Artificial
  Synthetic oligonucleotide
ttctaaaacgaggagttctcatgttgaccaagtcaattggagacactcaactagagacac

SEQ ID NO: 480338 - DNA, 52 bp, Artificial
  Synthetic oligonucleotide
ttctaaacctggttggaacgctactcctggtggtagttttaacgggctggct

SEQ ID NO: 480339 - DNA, 55 bp, Artificial
  Synthetic oligonucleotide
ttctaaacgctgaggttttttagaggggctctgctccgactctggttttgaatcc

SEQ ID NO: 480340 - DNA, 60 bp, Artificial
  Synthetic oligonucleotide
ttctaaagaagactacagcatggcatatcgggcatttggttagggatattactgagagct

SEQ ID NO: 480341 - DNA, 59 bp, Artificial
  Synthetic oligonucleotide
ttctaaatcatccatcgataaagcagttttcaaatggaccatatttagttaaagataca

SEQ ID NO: 480342 - DNA, 51 bp, Artificial
  Synthetic oligonucleotide
ttctaacactgcaagaatagatgagttatttgctaccgtacctcgctatgt

SEQ ID NO: 480343 - DNA, 54 bp, Artificial
  Synthetic oligonucleotide
ttctaacagatcgacgctagcaaagctagtgtcatcaccaatgtcaattctagt

SEQ ID NO: 480344 - DNA, 55 bp, Artificial
  Synthetic oligonucleotide
ttctaacagcgaaaagtggggagaatgtgataagggatttgcttcccggtgagcc

SEQ ID NO: 480345 - DNA, 60 bp, Artificial
  Synthetic oligonucleotide
ttctaacaggtcatgcttatgtgaacacaaccacaaaggtcaatgtgccgctagctctca

SEQ ID NO: 480346 - DNA, 59 bp, Artificial
  Synthetic oligonucleotide
ttctaacgcaacaaccagcaagtacgattcagagtcgatagtcgtatgtcttctttccg

SEQ ID NO: 480347 - DNA, 57 bp, Artificial
  Synthetic oligonucleotide
ttctaactattcgcctcgtggaggtatgggccctaaattggataaggccgctgcgtg

SEQ ID NO: 480348 - DNA, 60 bp, Artificial
  Synthetic oligonucleotide
ttctaagaagacagtggcaaagcagatgtcaaagctggaaaggtatgagtcagtactgcc

SEQ ID NO: 480349 - DNA, 58 bp, Artificial
  Synthetic oligonucleotide
ttctaagacaagcataagatgacgaactgggcgacattgtggcctaatgatcggctgt

SEQ ID NO: 480350 - DNA, 53 bp, Artificial
  Synthetic oligonucleotide
ttctaagaggtctacgacccattccccacctcgggctataaagtagccgccgg

SEQ ID NO: 480351 - DNA, 60 bp, Artificial
  Synthetic oligonucleotide
ttctaagagtggatctaacaggtcatatcccactcaaggtttgtgaccgtgcatcaacaa

SEQ ID NO: 480352 - DNA, 52 bp, Artificial
  Synthetic oligonucleotide
ttctaagcccttggccggcccaaaaggcccaatcgtccaaatgtacaccaat

SEQ ID NO: 480353 - DNA, 60 bp, Artificial
  Synthetic oligonucleotide
ttctaaggttagatatgccgtaggacagccaatgggagcattgtcttcttgagcaatgtt

SEQ ID NO: 480354 - DNA, 54 bp, Artificial
  Synthetic oligonucleotide
ttctaagtcagggaaaaccctaattgttactccttctagagctactatcacggg

SEQ ID NO: 480355 - DNA, 60 bp, Artificial
  Synthetic oligonucleotide
ttctaagtgcagcaggtagcactatgggcgcagcgggaataacgctgtcggtacagaccc

SEQ ID NO: 480356 - DNA, 57 bp, Artificial
  Synthetic oligonucleotide
ttctaagtgtgccagaatggtcctatataatggagaaagaaaacccgagatacagtt

SEQ ID NO: 480357 - DNA, 59 bp, Artificial
  Synthetic oligonucleotide
ttctaagttactctgcttgtggtacagcaaatccaaaactaaatttcgatcgatcgaga

SEQ ID NO: 480358 - DNA, 55 bp, Artificial
  Synthetic oligonucleotide
ttctaataaagtgtgcaggtgtataaaagagaggtcgcacctccgcgtctttact

SEQ ID NO: 480359 - DNA, 60 bp, Artificial
  Synthetic oligonucleotide
ttctaatatggcgctatccagatatgtataagcgtgggttgaattacgatccgagttggg

SEQ ID NO: 480360 - DNA, 54 bp, Artificial
  Synthetic oligonucleotide
ttctaatcccttgacgaaaccagaacgagacgttctccctcccttgccgcttgt

SEQ ID NO: 480361 - DNA, 53 bp, Artificial
  Synthetic oligonucleotide
ttctaatcgggataaaacgtttggtattcggaattgatgtttggtatttgtaa

SEQ ID NO: 480362 - DNA, 55 bp, Artificial
  Synthetic oligonucleotide
ttctaatttgtcccctattaggccttcaatggttaggcaagtagctgaaagggaa

SEQ ID NO: 480363 - DNA, 55 bp, Artificial
  Synthetic oligonucleotide
ttctacaaggccatggtgttcgaagaggatacagtggacttcctcggacgcatcc

SEQ ID NO: 480364 - DNA, 52 bp, Artificial
  Synthetic oligonucleotide
ttctacaagggactttccgaggggactttccagaagaggcgtaacctgggcg

SEQ ID NO: 480365 - DNA, 56 bp, Artificial
  Synthetic oligonucleotide
ttctacactccaccagtacataaaggtatacccagttccactggaagaggtaccga

SEQ ID NO: 480366 - DNA, 60 bp, Artificial
  Synthetic oligonucleotide
ttctacatacagatgtgtactgaactccaactcagtgactatgaagggaggctgatccaa

SEQ ID NO: 480367 - DNA, 55 bp, Artificial
  Synthetic oligonucleotide
ttctaccaaactttcaccccaccccatgtatccatatacctggtgaagttaggaa

SEQ ID NO: 480368 - DNA, 54 bp, Artificial
  Synthetic oligonucleotide
ttctaccaatactactactcccaaaaccggaggtgagctccgcggtctccctac

SEQ ID NO: 480369 - DNA, 60 bp, Artificial
  Synthetic oligonucleotide
ttctaccacctgggtacatagaccttgtgatagccgcacatcagccacgcaccctggtgc

SEQ ID NO: 480370 - DNA, 59 bp, Artificial
  Synthetic oligonucleotide
ttctaccactttatgctaatgaggcaaaaagaattaaagcccttgctcataaagcatcc

SEQ ID NO: 480371 - DNA, 56 bp, Artificial
  Synthetic oligonucleotide
ttctaccccgcaattagaacaagagtggtacatttgggaggcagaacccataatag

SEQ ID NO: 480372 - DNA, 53 bp, Artificial
  Synthetic oligonucleotide
ttctacccctggacacccgaccctgagaacgtacttgcgtacgtcccctacga

SEQ ID NO: 480373 - DNA, 54 bp, Artificial
  Synthetic oligonucleotide
ttctaccgcaacccttctgagggttcgggtctggagtattacggccgcgtcgcg

SEQ ID NO: 480374 - DNA, 58 bp, Artificial
  Synthetic oligonucleotide
ttctaccgcatcaccaatagcagtcctcagtcatggaccgtgcagttagccaagtcgc

SEQ ID NO: 480375 - DNA, 58 bp, Artificial
  Synthetic oligonucleotide
ttctaccgcatcaccaatagcggtttttagtcatgggccgtgtagttagccaagttgc

SEQ ID NO: 480376 - DNA, 54 bp, Artificial
  Synthetic oligonucleotide
ttctacctacgggaggtttctagccaaccctagacagatgctaaggggggtctc

SEQ ID NO: 480377 - DNA, 55 bp, Artificial
  Synthetic oligonucleotide
ttctacctcataatgcatgtcgtctggttgaggttgtaggtaactgaaggctagc

SEQ ID NO: 480378 - DNA, 56 bp, Artificial
  Synthetic oligonucleotide
ttctaccttatgcgccgagtgttttcgagggtgcgaaggggtggaacagtgtccag

SEQ ID NO: 480379 - DNA, 59 bp, Artificial
  Synthetic oligonucleotide
ttctacgaaaggagttgaatcgtgttcaggccacctcttgcgaacccagcgcagaagcg

SEQ ID NO: 480380 - DNA, 53 bp, Artificial
  Synthetic oligonucleotide
ttctacgtcgtaattgggttctaacgccgatctctgaatggatactagttttc

SEQ ID NO: 480381 - DNA, 60 bp, Artificial
  Synthetic oligonucleotide
ttctacgtgtgctgcactcgagcctcccagtccctcacgctcacctcagacgagttccat

SEQ ID NO: 480382 - DNA, 55 bp, Artificial
  Synthetic oligonucleotide
ttctactatcaccttctatcactatacttatgggtcttaacggccgcgcagcggc

SEQ ID NO: 480383 - DNA, 60 bp, Artificial
  Synthetic oligonucleotide
ttctactcccgccctgtcgtctcagccaatggcgagccgactgtgaagctatatacatcc

SEQ ID NO: 480384 - DNA, 60 bp, Artificial
  Synthetic oligonucleotide
ttctactctccaatattgcggccacgatatctcaccccatcattcattcaaggttgaatg

SEQ ID NO: 480385 - DNA, 55 bp, Artificial
  Synthetic oligonucleotide
ttctactgctaccagtagtgctgcaacacaacgtatttcaactgtaggagtattg

SEQ ID NO: 480386 - DNA, 60 bp, Artificial
  Synthetic oligonucleotide
ttctactgtaatacaacacagctgtttaatagtacttgggatgtgaatgctactgggaat

SEQ ID NO: 480387 - DNA, 59 bp, Artificial
  Synthetic oligonucleotide
ttctactgtaatacatcaaaactgtttaatggcacctggaatgagactagtactcggaa

SEQ ID NO: 480388 - DNA, 60 bp, Artificial
  Synthetic oligonucleotide
ttctactgtgtgcagcttgctccaaacaagtgttctgtaaccgcagacccgagcgaaatg

SEQ ID NO: 480389 - DNA, 58 bp, Artificial
  Synthetic oligonucleotide
ttctacttatactactaatttaggctctgggcctgtttctatttctgctgtcggtgtc

SEQ ID NO: 480390 - DNA, 54 bp, Artificial
  Synthetic oligonucleotide
ttctacttggttttgcatcgtgccctccggaacggaccagagttcgttggtttc

SEQ ID NO: 480391 - DNA, 58 bp, Artificial
  Synthetic oligonucleotide
ttctactttgcaaaaacaatgcgctgatgaaacctcgacagtggggaaggtattctcc

SEQ ID NO: 480392 - DNA, 60 bp, Artificial
  Synthetic oligonucleotide
ttctagaaccatgtactttgatagaatctgtggcatgttcagctcctatgtgttagacga

SEQ ID NO: 480393 - DNA, 57 bp, Artificial
  Synthetic oligonucleotide
ttctagaattagcactcagaatgatttgattagagtggagccaattggtgtctggat

SEQ ID NO: 480394 - DNA, 60 bp, Artificial
  Synthetic oligonucleotide
ttctagacaacgatctagttaagttcatagtgaaaattcttgtcagaattctctgttata

SEQ ID NO: 480395 - DNA, 59 bp, Artificial
  Synthetic oligonucleotide
ttctagagcaccgagatgtaaggctaaagagaagaagtttgtgccaagaagcgttggta

SEQ ID NO: 480396 - DNA, 51 bp, Artificial
  Synthetic oligonucleotide
ttctagaggactggaactttggtataacccccccagctacaagtagtttgg

SEQ ID NO: 480397 - DNA, 55 bp, Artificial
  Synthetic oligonucleotide
ttctagatcatcaacgctgcgatcggtcaacagcgcggcttcagtgtggacggat

SEQ ID NO: 480398 - DNA, 59 bp, Artificial
  Synthetic oligonucleotide
ttctagcaggaagtgtgcgaaagggtacacgtacacttcgttggatgtcagaccgacaa

SEQ ID NO: 480399 - DNA, 60 bp, Artificial
  Synthetic oligonucleotide
ttctagcatgtgccacaaccataaacgttacatacttatcgtgcttcatatctaaagtat

SEQ ID NO: 480400 - DNA, 50 bp, Artificial
  Synthetic oligonucleotide
ttctagccgcaacacccgccttgttgcaggtttgaccaacttcaatcacc

SEQ ID NO: 480401 - DNA, 54 bp, Artificial
  Synthetic oligonucleotide
ttctagccttgctgacgcggttctgcctaccttaccggtagcttggatgcatgc

SEQ ID NO: 480402 - DNA, 55 bp, Artificial
  Synthetic oligonucleotide
ttctagcgaacaaactgtctactgcaagggatttgcttagtagactccaactggc

SEQ ID NO: 480403 - DNA, 59 bp, Artificial
  Synthetic oligonucleotide
ttctagcgcaggggtgatttgagtcacgttcccacggtctttgagtcacgcgccatctt

SEQ ID NO: 480404 - DNA, 57 bp, Artificial
  Synthetic oligonucleotide
ttctagcgcctgttctccgtctgaaattgtgaaagttacaaggcaggtagtgggagt

SEQ ID NO: 480405 - DNA, 51 bp, Artificial
  Synthetic oligonucleotide
ttctagctaaaataggatcaactcctgatgaaagctcgaatcttgagtcag

SEQ ID NO: 480406 - DNA, 56 bp, Artificial
  Synthetic oligonucleotide
ttctagcttttcatctataggtcttgactctgatgacctggaagctttacttggtg

SEQ ID NO: 480407 - DNA, 58 bp, Artificial
  Synthetic oligonucleotide
ttctaggagcacaatttgatttaatccaaattggcttgaccctaccacactcaccgaa

SEQ ID NO: 480408 - DNA, 60 bp, Artificial
  Synthetic oligonucleotide
ttctaggaggaaagcgattgagagtaatggcaagcatcgagatccctctacacgagatca

SEQ ID NO: 480409 - DNA, 52 bp, Artificial
  Synthetic oligonucleotide
ttctaggattcgagtgatggctgcatatcattgcggggctgagtgggcaatg

SEQ ID NO: 480410 - DNA, 60 bp, Artificial
  Synthetic oligonucleotide
ttctaggattgatggccgttctgagattacgaggtctattagggcttacacggatgaggc

SEQ ID NO: 480411 - DNA, 51 bp, Artificial
  Synthetic oligonucleotide
ttctaggccaattggggcttttgcaccaacccggtccgggtttatacgggc

SEQ ID NO: 480412 - DNA, 60 bp, Artificial
  Synthetic oligonucleotide
ttctaggctcaggcaattgggattacatagcatgtatgcttcaggactaacctgaaacaa

SEQ ID NO: 480413 - DNA, 53 bp, Artificial
  Synthetic oligonucleotide
ttctagggcccacgaccttcaagttacggctttagcgtccctcccgcggccga

SEQ ID NO: 480414 - DNA, 50 bp, Artificial
  Synthetic oligonucleotide
ttctaggggggctcatgtctgttgaaaagcatcagatggtcctagaaccc

SEQ ID NO: 480415 - DNA, 60 bp, Artificial
  Synthetic oligonucleotide
ttctagggtccaatatggctttaatgctcgcattgatatgcagtatgaagacgatagtgg

SEQ ID NO: 480416 - DNA, 60 bp, Artificial
  Synthetic oligonucleotide
ttctaggtcagaggatgcctcttccaggcttaagcaatgtgggttacagagcatgtatgc

SEQ ID NO: 480417 - DNA, 55 bp, Artificial
  Synthetic oligonucleotide
ttctaggtcaggagaccgaattcggttcaatatggccgtctttgcaggtgtgcac

SEQ ID NO: 480418 - DNA, 49 bp, Artificial
  Synthetic oligonucleotide
ttctaggtttcccggctaatcttctaaagtacgttttaaacgcactttt

SEQ ID NO: 480419 - DNA, 59 bp, Artificial
  Synthetic oligonucleotide
ttctagtcttagaataggcaagttccgttcaatgtctcccaagattcggctggagagac

SEQ ID NO: 480420 - DNA, 60 bp, Artificial
  Synthetic oligonucleotide
ttctagtggacacttgctgtaggtcaggaaggtgtttgcgttccggtgcctgaagcagcg

SEQ ID NO: 480421 - DNA, 53 bp, Artificial
  Synthetic oligonucleotide
ttctagttagggatcgtagacctgtagataaaccccaagattttggagaggta

SEQ ID NO: 480422 - DNA, 57 bp, Artificial
  Synthetic oligonucleotide
ttctagttccgcagcttatagtgacattacccttgaacgagtatttcgcaagggcgg

SEQ ID NO: 480423 - DNA, 50 bp, Artificial
  Synthetic oligonucleotide
ttctagttgagggtatccaataggcggtatatctaattatagggcgtgac

SEQ ID NO: 480424 - DNA, 57 bp, Artificial
  Synthetic oligonucleotide
ttctataacaaccaacaatgagacgtggtattgcccgaccgactgtttcaggaaaca

SEQ ID NO: 480425 - DNA, 60 bp, Artificial
  Synthetic oligonucleotide
ttctataaccgggagtggtacatataaatattgctgatccttagatttttcagatctgat

SEQ ID NO: 480426 - DNA, 60 bp, Artificial
  Synthetic oligonucleotide
ttctataacgcaatgatcgattttcatacagctacgactgagtcttgccgataattgcga

SEQ ID NO: 480427 - DNA, 59 bp, Artificial
  Synthetic oligonucleotide
ttctataaggaagacgactttcctcaaatgatgtcttttatccttaatcgcgctatcaa

SEQ ID NO: 480428 - DNA, 55 bp, Artificial
  Synthetic oligonucleotide
ttctatacacgtggaggatctgcagataatgtagcttaccagtacatagggtgtt

SEQ ID NO: 480429 - DNA, 60 bp, Artificial
  Synthetic oligonucleotide
ttctataccagtagatattgcctcacaacctttagccactactctcataggagaacttgc

SEQ ID NO: 480430 - DNA, 60 bp, Artificial
  Synthetic oligonucleotide
ttctatactgcatgtggaccaataaatagacttgcccaccaagttttggatccacaaaca

SEQ ID NO: 480431 - DNA, 59 bp, Artificial
  Synthetic oligonucleotide
ttctatactggtcgcaagttagagaggtatacaaaggcaagtgagtcgttagaggtgat

SEQ ID NO: 480432 - DNA, 55 bp, Artificial
  Synthetic oligonucleotide
ttctatagttgtgtcaaaaaaagatggtgattttcctcttacttgcaggaaaggt

SEQ ID NO: 480433 - DNA, 57 bp, Artificial
  Synthetic oligonucleotide
ttctatataatttccactaccaacatacgaatcattgatgttattagttatatgtcg

SEQ ID NO: 480434 - DNA, 55 bp, Artificial
  Synthetic oligonucleotide
ttctatatccagctcaaaccacgtgcttattattcatagcttacccgttgtacga

SEQ ID NO: 480435 - DNA, 53 bp, Artificial
  Synthetic oligonucleotide
ttctatatcgtccgcgttctatacaaacacttaactgaattatatcactatat

SEQ ID NO: 480436 - DNA, 60 bp, Artificial
  Synthetic oligonucleotide
ttctatatgacaaagaggaaatcaggaggatctggcgtcaagcgaacaatggagaagacg

SEQ ID NO: 480437 - DNA, 60 bp, Artificial
  Synthetic oligonucleotide
ttctatatgatttgtcgatatcataaatatttcgacagaatccgcatgtagcaccctcat

SEQ ID NO: 480438 - DNA, 55 bp, Artificial
  Synthetic oligonucleotide
ttctatcaactcaaggataggcgcaactgagcaaagttacgtggcgtcggcagtg

SEQ ID NO: 480439 - DNA, 60 bp, Artificial
  Synthetic oligonucleotide
ttctatccctagtggcgtggatcccaacgtcgtaaataccatactgccagctaggctagc

SEQ ID NO: 480440 - DNA, 59 bp, Artificial
  Synthetic oligonucleotide
ttctatcggagggaattactttcacgaggtggccagtagcggatgtgtcgatcttcttc

SEQ ID NO: 480441 - DNA, 55 bp, Artificial
  Synthetic oligonucleotide
ttctatgaattctactatattggaagagtggaattttggtcttaccccaccaccg

SEQ ID NO: 480442 - DNA, 60 bp, Artificial
  Synthetic oligonucleotide
ttctatgacatggccgaagcacccacgggacagtgggaaccgccgcagcaaggagtggga

SEQ ID NO: 480443 - DNA, 51 bp, Artificial
  Synthetic oligonucleotide
ttctatgacgcagttaacatgcctcagcagactaggaacgagtatgaacga

SEQ ID NO: 480444 - DNA, 51 bp, Artificial
  Synthetic oligonucleotide
ttctatgagaacgatttctcagcatttgacagcacacagaatctagtttct

SEQ ID NO: 480445 - DNA, 55 bp, Artificial
  Synthetic oligonucleotide
ttctatgagatcacgtctcgcacatccgtccgagcaagagaagctcacatccaga

SEQ ID NO: 480446 - DNA, 60 bp, Artificial
  Synthetic oligonucleotide
ttctatgatatcgatagcaccatacctaagagagatcttctagctgctgatgcacgtgtt

SEQ ID NO: 480447 - DNA, 50 bp, Artificial
  Synthetic oligonucleotide
ttctatgcagaagctcgccagagatacaaacgcaaatagtgaagatactc

SEQ ID NO: 480448 - DNA, 57 bp, Artificial
  Synthetic oligonucleotide
ttctatggacctcgttctgtcaatttgaattaatctttagtgctaccaattacagtt

SEQ ID NO: 480449 - DNA, 60 bp, Artificial
  Synthetic oligonucleotide
ttctatggacgaaatgagccagatttccgaagacttgcataatcttatgctgtctgatga

SEQ ID NO: 480450 - DNA, 50 bp, Artificial
  Synthetic oligonucleotide
ttctatgtatcggtgtattggagtcctatatatatggagactctaatggc

SEQ ID NO: 480451 - DNA, 60 bp, Artificial
  Synthetic oligonucleotide
ttctatgttcacaaacaagtacatgatgatgaacctccaattcatttcaatcctagatgg

SEQ ID NO: 480452 - DNA, 59 bp, Artificial
  Synthetic oligonucleotide
ttctatgttcgctggtattaagagcaccattgatgcagctaagtctatggccactaatg

SEQ ID NO: 480453 - DNA, 56 bp, Artificial
  Synthetic oligonucleotide
ttctattaatgacaaccctaatgtattgcatcgctgctttttaaaacccgtcggcc

SEQ ID NO: 480454 - DNA, 60 bp, Artificial
  Synthetic oligonucleotide
ttctattatacacgtcatgctgactccacatatacatacaccactcccagctatggtatc

SEQ ID NO: 480455 - DNA, 60 bp, Artificial
  Synthetic oligonucleotide
ttctattgctattgagttgtgtgttccaggatttcatggctgggccacagctgcactttt

SEQ ID NO: 480456 - DNA, 58 bp, Artificial
  Synthetic oligonucleotide
ttctattggtgtcaagagtggaacaggcggagacaaaaccattgttctggtaaatagc

SEQ ID NO: 480457 - DNA, 60 bp, Artificial
  Synthetic oligonucleotide
ttctattgtagtgctggagttagtattaactaccagaacagaattacatatcatgtatga

SEQ ID NO: 480458 - DNA, 60 bp, Artificial
  Synthetic oligonucleotide
ttctattgtttagatgcgcggaaatatgacgccttcctcgatccatggttgattcagatc

SEQ ID NO: 480459 - DNA, 54 bp, Artificial
  Synthetic oligonucleotide
ttctattttgatcacacaaagtggtttcagtgtgtgcgagcagagatggataac

SEQ ID NO: 480460 - DNA, 55 bp, Artificial
  Synthetic oligonucleotide
ttctcaaaacgcgagattaaaatccttgacaatgaaggatatgatcgtgtcgtca

SEQ ID NO: 480461 - DNA, 60 bp, Artificial
  Synthetic oligonucleotide
ttctcaacataatactagagttctacgaagatcaataataagagcaatggaaagactaaa

SEQ ID NO: 480462 - DNA, 51 bp, Artificial
  Synthetic oligonucleotide
ttctcaaccaggaacgtccggaggtatggtgatccccgtatcgttcgtagt

SEQ ID NO: 480463 - DNA, 55 bp, Artificial
  Synthetic oligonucleotide
ttctcaacctccgtaccaacactgagaccaataatccgtgtgccaaaaccatcgt

SEQ ID NO: 480464 - DNA, 50 bp, Artificial
  Synthetic oligonucleotide
ttctcaacttgagcgggtctgttggcttcctcgtccgccatctaacttat

SEQ ID NO: 480465 - DNA, 59 bp, Artificial
  Synthetic oligonucleotide
ttctcaagacatcaagctcctcacgaactctgaacttcgccaagtacaagttgtacgca

SEQ ID NO: 480466 - DNA, 60 bp, Artificial
  Synthetic oligonucleotide
ttctcaatatctctgatcttttagcaagttgtgactgggacaaattgcccatgtaaaccc

SEQ ID NO: 480467 - DNA, 55 bp, Artificial
  Synthetic oligonucleotide
ttctcacaaaccttcgcacaatctttggaactcgcaatcgcatgattgaagttca

SEQ ID NO: 480468 - DNA, 60 bp, Artificial
  Synthetic oligonucleotide
ttctcacaagtggaaatcacttgtgaggggcgatcaacaaacgtattacctgcacactat

SEQ ID NO: 480469 - DNA, 58 bp, Artificial
  Synthetic oligonucleotide
ttctcacacacgttgttgatttgccacgattaaaaaggttgcaacctatgactggtgt

SEQ ID NO: 480470 - DNA, 57 bp, Artificial
  Synthetic oligonucleotide
ttctcacagtagggacatcgaatttcttgtatcagcgagggtcatcatacttctccc

SEQ ID NO: 480471 - DNA, 60 bp, Artificial
  Synthetic oligonucleotide
ttctcacatcaataaaggcctgtgacatggcaatttgttacggtgcagaaagtgtaacac

SEQ ID NO: 480472 - DNA, 54 bp, Artificial
  Synthetic oligonucleotide
ttctcaccaacgtacaaggcctttctccgcaaacagtatctggacctttacccc

SEQ ID NO: 480473 - DNA, 55 bp, Artificial
  Synthetic oligonucleotide
ttctcaccaacttacaaggcctttctgagtaaacagtatctgaccctgtaccccg

SEQ ID NO: 480474 - DNA, 55 bp, Artificial
  Synthetic oligonucleotide
ttctcaccccggaggtaacgacgtgaccatcacgcagcaagacctggaccgtgcg

SEQ ID NO: 480475 - DNA, 50 bp, Artificial
  Synthetic oligonucleotide
ttctcacctcttctacctgattatcttttccctccataggttgccctgat

SEQ ID NO: 480476 - DNA, 53 bp, Artificial
  Synthetic oligonucleotide
ttctcacgaattctcactccaataggttcgcctgtttagcgaatcttactgat

SEQ ID NO: 480477 - DNA, 60 bp, Artificial
  Synthetic oligonucleotide
ttctcactgggcgagtcatgtattcacatggctcgcagaaaaatagtcaagctaatagga

SEQ ID NO: 480478 - DNA, 52 bp, Artificial
  Synthetic oligonucleotide
ttctcacttcactcacacagtgatgatggccatccagccctcatgggaaata

SEQ ID NO: 480479 - DNA, 60 bp, Artificial
  Synthetic oligonucleotide
ttctcagaacccaagagtcggagtgtgtatgccataagggaatttgtccagtagtcatga

SEQ ID NO: 480480 - DNA, 55 bp, Artificial
  Synthetic oligonucleotide
ttctcagaacgggctcgtcatgaaacagaagacgtcccacctcggctcctttacg

SEQ ID NO: 480481 - DNA, 60 bp, Artificial
  Synthetic oligonucleotide
ttctcagaaggcaagaacagcttcgcttcgctcaaccgtgtgcaacgcaagagtatgata

SEQ ID NO: 480482 - DNA, 57 bp, Artificial
  Synthetic oligonucleotide
ttctcagaagtagaagggagaattcaggacctagagaaatacgttgaagacactaaa

SEQ ID NO: 480483 - DNA, 60 bp, Artificial
  Synthetic oligonucleotide
ttctcagaccgaccagttcaacgcttttcgtgagttgctaaaacagagccgagatactgc

SEQ ID NO: 480484 - DNA, 55 bp, Artificial
  Synthetic oligonucleotide
ttctcagattggcggcttcccagatcaaacagaagacggaggactaccacaaagc

SEQ ID NO: 480485 - DNA, 60 bp, Artificial
  Synthetic oligonucleotide
ttctcagccattaacgctcattatcacgacagcaggttcatcactcgaatctccttgcta

SEQ ID NO: 480486 - DNA, 59 bp, Artificial
  Synthetic oligonucleotide
ttctcaggcgttcgcctgtaagccgtgtttcagttcgagtctttcagacattaagacca

SEQ ID NO: 480487 - DNA, 55 bp, Artificial
  Synthetic oligonucleotide
ttctcaggtaatcacgcgacgttcaagccagaccaatatgtcatcacgtcaccgg

SEQ ID NO: 480488 - DNA, 60 bp, Artificial
  Synthetic oligonucleotide
ttctcagtaacgtaccttatcggctacgcactgactaatagtcatcattcgattgactat

SEQ ID NO: 480489 - DNA, 55 bp, Artificial
  Synthetic oligonucleotide
ttctcagtcgacaaccttaaagccaactcttccgggacaatcaaattcggcccca

SEQ ID NO: 480490 - DNA, 60 bp, Artificial
  Synthetic oligonucleotide
ttctcagtgtgtacgtaaatgtcagatgtcctttaaagatgatcgcattaatttgccatg

SEQ ID NO: 480491 - DNA, 60 bp, Artificial
  Synthetic oligonucleotide
ttctcagttgatccacaattatactgtgactacaacgtagtgttaatgaaatatgacgcg

SEQ ID NO: 480492 - DNA, 55 bp, Artificial
  Synthetic oligonucleotide
ttctcagtttgtttggggacgttagccccttgcatcatcgcaccggtggctatcg

SEQ ID NO: 480493 - DNA, 55 bp, Artificial
  Synthetic oligonucleotide
ttctcatacacccagtgatgccaatgcaagacattcatgagtccattcgttggac

SEQ ID NO: 480494 - DNA, 60 bp, Artificial
  Synthetic oligonucleotide
ttctcatactttcttagcacattttgaaactccacactatgtcacagttaaaacagcgaa

SEQ ID NO: 480495 - DNA, 51 bp, Artificial
  Synthetic oligonucleotide
ttctcatcaccacctttcaatgcgtcgactacgtctacgtcaggtgggtgt

SEQ ID NO: 480496 - DNA, 57 bp, Artificial
  Synthetic oligonucleotide
ttctcatctaaaaggacagtagttagagtattactaaattgaagaactgtaggagtc

SEQ ID NO: 480497 - DNA, 55 bp, Artificial
  Synthetic oligonucleotide
ttctcatctttacccatttgctcagaatgccagtagtctccattacattctatag

SEQ ID NO: 480498 - DNA, 58 bp, Artificial
  Synthetic oligonucleotide
ttctcatgcaattctctgcagatcttgatgaacttcttgttaactggagtttgtaggt

SEQ ID NO: 480499 - DNA, 60 bp, Artificial
  Synthetic oligonucleotide
ttctcatggagttctctgcagatcttgatgaacaatttatttgttggggttgggagttgt

SEQ ID NO: 480500 - DNA, 60 bp, Artificial
  Synthetic oligonucleotide
ttctcattataggtaaggaagacagaagatacgggccagcattaagcatcaatgaactga

SEQ ID NO: 480501 - DNA, 60 bp, Artificial
  Synthetic oligonucleotide
ttctcatttacactgaatagatcacagcctcaacacgataatttaatgggtacgatgtgg

SEQ ID NO: 480502 - DNA, 57 bp, Artificial
  Synthetic oligonucleotide
ttctcatttcgtatcacaagtaccgaccgacttatctccaattccgagttcttacat

SEQ ID NO: 480503 - DNA, 56 bp, Artificial
  Synthetic oligonucleotide
ttctccaaccgaactgtttggcgatccaatctccaaacaatatacgcgtaaggaaa

SEQ ID NO: 480504 - DNA, 58 bp, Artificial
  Synthetic oligonucleotide
ttctccaacggagcctcacaagggttcaagttgcgggatgcagcgccgtttaagaaga

SEQ ID NO: 480505 - DNA, 60 bp, Artificial
  Synthetic oligonucleotide
ttctccaactcaaaaccatcaatgtagttcgcgtcaatataggccagcttactggtatcg

SEQ ID NO: 480506 - DNA, 59 bp, Artificial
  Synthetic oligonucleotide
ttctccaagattgaggagttgtggccagtactggacggctaggcgtgtggtttgtccac

SEQ ID NO: 480507 - DNA, 60 bp, Artificial
  Synthetic oligonucleotide
ttctccaatgctattcaaggggacggcgtagcccccatgttccagcatcaacaggctaaa

SEQ ID NO: 480508 - DNA, 55 bp, Artificial
  Synthetic oligonucleotide
ttctccaattgtcctgggatgacgcaaaactcactccaacctccggaaccattcg

SEQ ID NO: 480509 - DNA, 53 bp, Artificial
  Synthetic oligonucleotide
ttctccaggggtacaacccccccgcctatggcgaggaggctttcacctacctc

SEQ ID NO: 480510 - DNA, 51 bp, Artificial
  Synthetic oligonucleotide
ttctcccagatctgtatgactacaaggaagatagattcattaagattggtg

SEQ ID NO: 480511 - DNA, 60 bp, Artificial
  Synthetic oligonucleotide
ttctcccagctatacctcctgtgatgaaacagattggttggctggtaatgagtggtgtga

SEQ ID NO: 480512 - DNA, 55 bp, Artificial
  Synthetic oligonucleotide
ttctcccccggtcatagctgggagtctgctaaccccttttgcggggagagtactc

SEQ ID NO: 480513 - DNA, 52 bp, Artificial
  Synthetic oligonucleotide
ttctcccgctcctagagtccaagcccccgaggaaccccggggtaatattcat

SEQ ID NO: 480514 - DNA, 54 bp, Artificial
  Synthetic oligonucleotide
ttctcccgggggaggcccaaaatccaacagggccaatgcatgggttaataggcc

SEQ ID NO: 480515 - DNA, 54 bp, Artificial
  Synthetic oligonucleotide
ttctcccgttaactcctacaccaatacgccctatactggggcattgggacttct

SEQ ID NO: 480516 - DNA, 51 bp, Artificial
  Synthetic oligonucleotide
ttctccgattttccctctcactgaggtaaaatgccgtgccttagcctcacg

SEQ ID NO: 480517 - DNA, 57 bp, Artificial
  Synthetic oligonucleotide
ttctccggagtggacgctagcacgacgataactggtggcgtcgcggccagtggtgcc

SEQ ID NO: 480518 - DNA, 56 bp, Artificial
  Synthetic oligonucleotide
ttctcctcaaacttctgttgttcgtgtttattctacttctcctcaaccttctggaa

SEQ ID NO: 480519 - DNA, 52 bp, Artificial
  Synthetic oligonucleotide
ttctcctccatgcccagcgacatgcgcgcgtaggtatcgaagatcaccagcc

SEQ ID NO: 480520 - DNA, 55 bp, Artificial
  Synthetic oligonucleotide
ttctcctggcccgagcgaggctccaaagcagagcttcactccctgctacgccaag

SEQ ID NO: 480521 - DNA, 60 bp, Artificial
  Synthetic oligonucleotide
ttctccttgggacttgagtgtgctattatggaggagtgcggaatgccgcagtggctcatc

SEQ ID NO: 480522 - DNA, 53 bp, Artificial
  Synthetic oligonucleotide
ttctcgaaccttttggcctggttgaagagggtgctaagacggcccctaccgga

SEQ ID NO: 480523 - DNA, 50 bp, Artificial
  Synthetic oligonucleotide
ttctcgaatccgaacgtttggcttttggtccagattggcccgtggggcga

SEQ ID NO: 480524 - DNA, 60 bp, Artificial
  Synthetic oligonucleotide
ttctcgaatgtgcagtacctcgcacaccattgcaggaagaacgctccgctgtatgcagca

SEQ ID NO: 480525 - DNA, 60 bp, Artificial
  Synthetic oligonucleotide
ttctcgacgcacaagccctagtggaccaggctggtaccaatttagagatcacaatagtga

SEQ ID NO: 480526 - DNA, 60 bp, Artificial
  Synthetic oligonucleotide
ttctcgactgaggagattgaatcctacttcgaaggctagagcgattaagcagttactcgt

SEQ ID NO: 480527 - DNA, 60 bp, Artificial
  Synthetic oligonucleotide
ttctcgagactcaagatggtgtagcactggaacatatcggctcattctataatacatgca

SEQ ID NO: 480528 - DNA, 55 bp, Artificial
  Synthetic oligonucleotide
ttctcgagcccacgcgattgtggccctaacccgccacacggagaagtgcgtggta

SEQ ID NO: 480529 - DNA, 59 bp, Artificial
  Synthetic oligonucleotide
ttctcgagtatttggtgtcttttggagtgtggattcgcactcctcccgcttacagacca

SEQ ID NO: 480530 - DNA, 51 bp, Artificial
  Synthetic oligonucleotide
ttctcgagttgagagggatccccttaggcatggaatcattagtgggagtca

SEQ ID NO: 480531 - DNA, 58 bp, Artificial
  Synthetic oligonucleotide
ttctcgagtttgaaactccatactatacaggaggacagcgctttgagtctgctcggcg

SEQ ID NO: 480532 - DNA, 60 bp, Artificial
  Synthetic oligonucleotide
ttctcgatacctctagctgagcaggatagagaagctttcgcttttacggtccctgtctct

SEQ ID NO: 480533 - DNA, 58 bp, Artificial
  Synthetic oligonucleotide
ttctcgatcattcactcccccggacacccggtgttgactcaccgtggcgatggcgtcc

SEQ ID NO: 480534 - DNA, 52 bp, Artificial
  Synthetic oligonucleotide
ttctcgatgttcacggcgacggctcgtcattcgcactggccgtgatggagaa

SEQ ID NO: 480535 - DNA, 52 bp, Artificial
  Synthetic oligonucleotide
ttctcgcatatgtccctaagaaactgactaagttgaaagcagaggttcacga

SEQ ID NO: 480536 - DNA, 50 bp, Artificial
  Synthetic oligonucleotide
ttctcgcattcaaagcggtatgccttctattctgaatagccttggtaaaa

SEQ ID NO: 480537 - DNA, 54 bp, Artificial
  Synthetic oligonucleotide
ttctcgccaatttacaaggcctttctacgtcaacagtatctgaacctttacccc

SEQ ID NO: 480538 - DNA, 52 bp, Artificial
  Synthetic oligonucleotide
ttctcgcccaggtcatgaggatcccagggactctagtagatttacttgctgg

SEQ ID NO: 480539 - DNA, 56 bp, Artificial
  Synthetic oligonucleotide
ttctcgcctcgggtgccccccaagcgtcagccaaacggcacgtgcgagcccaaccc

SEQ ID NO: 480540 - DNA, 60 bp, Artificial
  Synthetic oligonucleotide
ttctcgcctgggcatatttcaattggactcttaagtccagttcttgatagtgatgcggat

SEQ ID NO: 480541 - DNA, 58 bp, Artificial
  Synthetic oligonucleotide
ttctcgctagcttttaccgttcatggactggcaaattgaggatttccatagaggaagt

SEQ ID NO: 480542 - DNA, 59 bp, Artificial
  Synthetic oligonucleotide
ttctcgctatcaccaacttgccgccaaccgtgtcgactgacaacctcctgacctagaac

SEQ ID NO: 480543 - DNA, 60 bp, Artificial
  Synthetic oligonucleotide
ttctcggaaaagatgcaggtgcattgactgaagacccagatgaaggtactgctggagtag

SEQ ID NO: 480544 - DNA, 55 bp, Artificial
  Synthetic oligonucleotide
ttctcggaaaagatgctggcactttaattgaagacccagatgaaagcacatccgg

SEQ ID NO: 480545 - DNA, 57 bp, Artificial
  Synthetic oligonucleotide
ttctcggaaggatgaacctccaacactcaaaccacgaatggaggtagaatttctgaa

SEQ ID NO: 480546 - DNA, 55 bp, Artificial
  Synthetic oligonucleotide
ttctcggcaacctaggaaatgaactgttgtacaaggcacccagaaaggccttagc

SEQ ID NO: 480547 - DNA, 55 bp, Artificial
  Synthetic oligonucleotide
ttctcggccacttctgttactctcgcgcctaacactttcacctggttagctgtac

SEQ ID NO: 480548 - DNA, 56 bp, Artificial
  Synthetic oligonucleotide
ttctcgggccgctacacgtcctgcgaccctcccggtactacggtgcacaggggagc

SEQ ID NO: 480549 - DNA, 55 bp, Artificial
  Synthetic oligonucleotide
ttctcggggagaaaatcgtctacaccgcgcaacggtggcagacggtcaaagacgt

SEQ ID NO: 480550 - DNA, 55 bp, Artificial
  Synthetic oligonucleotide
ttctcggtacagagaaatcttcccttcgaaagagcaaccattatggcagcgttca

SEQ ID NO: 480551 - DNA, 55 bp, Artificial
  Synthetic oligonucleotide
ttctcggtatagatgacgacaaggaggactaaaacaatgtattacaaaacgggtg

SEQ ID NO: 480552 - DNA, 60 bp, Artificial
  Synthetic oligonucleotide
ttctcggtggaaccgtagctgcctctacatcacttgtaagctctattagctctgtatcag

SEQ ID NO: 480553 - DNA, 60 bp, Artificial
  Synthetic oligonucleotide
ttctcggttcctggttagatcggccatccattcaaggtcagattgagcttgctgatatga

SEQ ID NO: 480554 - DNA, 55 bp, Artificial
  Synthetic oligonucleotide
ttctcgtaggtcgatagaggacgttcatagtagtacgaatttgcagctgtcgaac

SEQ ID NO: 480555 - DNA, 60 bp, Artificial
  Synthetic oligonucleotide
ttctcgtcgagacatcgccgcatcatgctggagaatgattgatgcatcatcacgtagtct

SEQ ID NO: 480556 - DNA, 55 bp, Artificial
  Synthetic oligonucleotide
ttctctaagatgaccagagacacccatctgatgatatacttctcgataagcccag

SEQ ID NO: 480557 - DNA, 55 bp, Artificial
  Synthetic oligonucleotide
ttctctaatgtcatctgcgttagtaagtatcgtactagcgtgtataaatctctag

SEQ ID NO: 480558 - DNA, 55 bp, Artificial
  Synthetic oligonucleotide
ttctctacaccaactttcaatggtatagaaacatcttcagtttaggccttggcgc

SEQ ID NO: 480559 - DNA, 53 bp, Artificial
  Synthetic oligonucleotide
ttctctacaggcttaccttaccctccaggaattaaggaatgtgaacacttaac

SEQ ID NO: 480560 - DNA, 54 bp, Artificial
  Synthetic oligonucleotide
ttctctacattttatgggttatgtcattggatgtcggggaacattgccgcaaga

SEQ ID NO: 480561 - DNA, 58 bp, Artificial
  Synthetic oligonucleotide
ttctctacgactcgcaaactcagcttctgggtatacaggtgactctcccctctgtagg

SEQ ID NO: 480562 - DNA, 60 bp, Artificial
  Synthetic oligonucleotide
ttctctagaatgaagctctacgttaccaaagatctgcttgaccatctagatgttggtggg

SEQ ID NO: 480563 - DNA, 60 bp, Artificial
  Synthetic oligonucleotide
ttctctagcggcaagatggagttcaacggaacaaccgatggtcgtcagggcatcctgtac

SEQ ID NO: 480564 - DNA, 60 bp, Artificial
  Synthetic oligonucleotide
ttctctagctattgcgacgatatgcctcctcatgcagattgccatcttagttacaactat

SEQ ID NO: 480565 - DNA, 59 bp, Artificial
  Synthetic oligonucleotide
ttctctattgactttgaaggggtagaggaagcggaaagaataactgacatgacacctga

SEQ ID NO: 480566 - DNA, 58 bp, Artificial
  Synthetic oligonucleotide
ttctctcaacactcgtggggaggtacggccgaaagacgaaattgtatgaggcagccca

SEQ ID NO: 480567 - DNA, 60 bp, Artificial
  Synthetic oligonucleotide
ttctctcactgatccgaggctggaaccacacaaatgggagaagtactgcgttcttgaaat

SEQ ID NO: 480568 - DNA, 58 bp, Artificial
  Synthetic oligonucleotide
ttctctcagcacgggtggccttaaataggggaatgttctgattagtgcgggaactgga

SEQ ID NO: 480569 - DNA, 55 bp, Artificial
  Synthetic oligonucleotide
ttctctcctggtcggtgaagtctcccgctcgggtcctcttcctaggtccggagtc

SEQ ID NO: 480570 - DNA, 55 bp, Artificial
  Synthetic oligonucleotide
ttctctcgaactgaataagcacgtggagatgaggttccccattttcgtgtagctc

SEQ ID NO: 480571 - DNA, 60 bp, Artificial
  Synthetic oligonucleotide
ttctctcgcgagcatacaagcacctggggctgtgaagaatggggttgcttagcaataggc

SEQ ID NO: 480572 - DNA, 59 bp, Artificial
  Synthetic oligonucleotide
ttctctcgctatgtcaccgttaacattttccaatctattagaatcagttccggctatta

SEQ ID NO: 480573 - DNA, 59 bp, Artificial
  Synthetic oligonucleotide
ttctctcggcctgggcactggcggggcaagatgcactactgcagcaacaaatgctcaca

SEQ ID NO: 480574 - DNA, 55 bp, Artificial
  Synthetic oligonucleotide
ttctctctccttgttaatatggagggtttgaaggctgagtctaccacaactgtgg

SEQ ID NO: 480575 - DNA, 55 bp, Artificial
  Synthetic oligonucleotide
ttctctctggctatcaggggccattgttatgttacaccctttagcttcaaggggt

SEQ ID NO: 480576 - DNA, 55 bp, Artificial
  Synthetic oligonucleotide
ttctctctggtggttgttgtggatcgtaaaccccacttgggtgcgtctggatgcc

SEQ ID NO: 480577 - DNA, 59 bp, Artificial
  Synthetic oligonucleotide
ttctctcttattattgttgtagatcggaaacctcacttgggtcctagtggttgtctgca

SEQ ID NO: 480578 - DNA, 52 bp, Artificial
  Synthetic oligonucleotide
ttctctgacctgtcagggttcgagcaagtcgtgtctgcggcgctccccgatg

SEQ ID NO: 480579 - DNA, 60 bp, Artificial
  Synthetic oligonucleotide
ttctctgatgccatcttagtctttggggcaaagcgtttccttgtgtgcctaggatccact

SEQ ID NO: 480580 - DNA, 60 bp, Artificial
  Synthetic oligonucleotide
ttctctgcacaggccctaattgaccgaggcggtcctctcgccgatgtccatgcaaaaata

SEQ ID NO: 480581 - DNA, 55 bp, Artificial
  Synthetic oligonucleotide
ttctctgcctgagctacagtgatgctctccccggtgcgtgaatccattatctgcg

SEQ ID NO: 480582 - DNA, 55 bp, Artificial
  Synthetic oligonucleotide
ttctctggggctcggatctggcaaccatgatccggtgtgctcgagcgtttggagg

SEQ ID NO: 480583 - DNA, 60 bp, Artificial
  Synthetic oligonucleotide
ttctcttagatggttggttttcattgcgttgtgcaagaccaatgcctgtctattctgttc

SEQ ID NO: 480584 - DNA, 55 bp, Artificial
  Synthetic oligonucleotide
ttctcttatattgcgtaaacttaccggagtagggccgcctcaaatatcagagtcg

SEQ ID NO: 480585 - DNA, 55 bp, Artificial
  Synthetic oligonucleotide
ttctcttatcttcctattcaaaagaggtgactcctgcacgcttccgccctctcgg

SEQ ID NO: 480586 - DNA, 58 bp, Artificial
  Synthetic oligonucleotide
ttctcttcaccaattacaggcggtcttgggagacctccaatgggtctctaggggcaca

SEQ ID NO: 480587 - DNA, 52 bp, Artificial
  Synthetic oligonucleotide
ttctcttcagttatcacttatcgatgcgtcgatgcggtgtctgaggatatgt

SEQ ID NO: 480588 - DNA, 60 bp, Artificial
  Synthetic oligonucleotide
ttctcttcatgctagttttaatttgtggtttgctttcatgctttctagagtgagctagtt

SEQ ID NO: 480589 - DNA, 58 bp, Artificial
  Synthetic oligonucleotide
ttctcttccgccgcgattcttcttcgactcggaacggctcatctcgacgagaggcggg

SEQ ID NO: 480590 - DNA, 60 bp, Artificial
  Synthetic oligonucleotide
ttctcttcgagtatgacgctcctagactcattcctccgtcgatatttctcttggctcaca

SEQ ID NO: 480591 - DNA, 60 bp, Artificial
  Synthetic oligonucleotide
ttctcttctaagaacaacaactacactcatatcgcagctgggaagactctagtactgcct

SEQ ID NO: 480592 - DNA, 55 bp, Artificial
  Synthetic oligonucleotide
ttctcttgccgtacatccgattctacaagatcctaatcgtactcgtagcccgcgt

SEQ ID NO: 480593 - DNA, 60 bp, Artificial
  Synthetic oligonucleotide
ttctctttcacggttgccatggcaatgatatgggtgtgattttgaataccctttatcacg

SEQ ID NO: 480594 - DNA, 54 bp, Artificial
  Synthetic oligonucleotide
ttctctttccttagccttacgttgattacaaatgtcatacccttggtgtttttg

SEQ ID NO: 480595 - DNA, 56 bp, Artificial
  Synthetic oligonucleotide
ttctgaaaagaataagcagttgaaggttggtagaattctgatttggttgggcttgg

SEQ ID NO: 480596 - DNA, 58 bp, Artificial
  Synthetic oligonucleotide
ttctgaaaaggtatgataaggcccattgggctaggcccaattgcaaagcggccatccg

SEQ ID NO: 480597 - DNA, 59 bp, Artificial
  Synthetic oligonucleotide
ttctgaaatttcttaataatgtttggattcctatttctgaagctcttgtgcaactggaa

SEQ ID NO: 480598 - DNA, 59 bp, Artificial
  Synthetic oligonucleotide
ttctgaacaagttacatactttctcacaaaccttcgcacaatctttggaactcgcaatc

SEQ ID NO: 480599 - DNA, 55 bp, Artificial
  Synthetic oligonucleotide
ttctgaacccctacaatatgatcatccatggctaagtcttcaagcactttcctaa

SEQ ID NO: 480600 - DNA, 55 bp, Artificial
  Synthetic oligonucleotide
ttctgaacctccggactaacaccgagaccaacaatccgtgtgccaagaccatcgt

SEQ ID NO: 480601 - DNA, 57 bp, Artificial
  Synthetic oligonucleotide
ttctgaacgtgtattaaccacgaattctacattcaaagtgtttgattcagaggactt

SEQ ID NO: 480602 - DNA, 60 bp, Artificial
  Synthetic oligonucleotide
ttctgaaggctcagcgaggtagatccacggaggagctgatctttggtcctggtgagaggc

SEQ ID NO: 480603 - DNA, 60 bp, Artificial
  Synthetic oligonucleotide
ttctgaatgtcggtgggtgactgctctaagcaggttctcgaaaaatctgatcttaattaa

SEQ ID NO: 480604 - DNA, 57 bp, Artificial
  Synthetic oligonucleotide
ttctgaattagtattcccaccctactatgacaaacggatcaattcaccgatgtttaa

SEQ ID NO: 480605 - DNA, 55 bp, Artificial
  Synthetic oligonucleotide
ttctgacacagcgccgaggcctacgtggtctacatttccagcagtttgtagtctc

SEQ ID NO: 480606 - DNA, 59 bp, Artificial
  Synthetic oligonucleotide
ttctgacaccactagggaggtggtgaatgaattcagtaggccgtagaggacctagacgc

SEQ ID NO: 480607 - DNA, 59 bp, Artificial
  Synthetic oligonucleotide
ttctgaccagtcttcttcaggtaacaagagccgtaaaactattgaggaagtgcatgacg

SEQ ID NO: 480608 - DNA, 60 bp, Artificial
  Synthetic oligonucleotide
ttctgacgcacccagaggacttcatttatgcatctgatgatatgttaaagtgccgtgtta

SEQ ID NO: 480609 - DNA, 60 bp, Artificial
  Synthetic oligonucleotide
ttctgacgtcagcgaaatagaagaagtgcctgggtgcttgctctttatatccttcggata

SEQ ID NO: 480610 - DNA, 55 bp, Artificial
  Synthetic oligonucleotide
ttctgactcgccagccccgattatgcagggtgattagatccacactggtggccac

SEQ ID NO: 480611 - DNA, 60 bp, Artificial
  Synthetic oligonucleotide
ttctgagaaacggttgtgatcgtcagactttttaccatatagatgtgagaacatcggaga

SEQ ID NO: 480612 - DNA, 57 bp, Artificial
  Synthetic oligonucleotide
ttctgagacactttcccagaagcatacgacaatttttgatcgaccgtggagggaaac

SEQ ID NO: 480613 - DNA, 60 bp, Artificial
  Synthetic oligonucleotide
ttctgagagcgagcttgcaaagaggatctacaacattgcatcaacacacgaatgccaagt

SEQ ID NO: 480614 - DNA, 60 bp, Artificial
  Synthetic oligonucleotide
ttctgagattgtgctcccatggaaatcttgttcccgtgggctagaatattgcgcttccac

SEQ ID NO: 480615 - DNA, 60 bp, Artificial
  Synthetic oligonucleotide
ttctgagcttcaaagttagagccaagtgaactcaagagttcagttatcttgcatgccttt

SEQ ID NO: 480616 - DNA, 58 bp, Artificial
  Synthetic oligonucleotide
ttctgagggaccagtcctgccgacatccaaggagcggtcgtggttcagactaacacgg

SEQ ID NO: 480617 - DNA, 60 bp, Artificial
  Synthetic oligonucleotide
ttctgagtgctccttttcgtttgagtcagctcacgaggggattgtgccggagacctcggc

SEQ ID NO: 480618 - DNA, 60 bp, Artificial
  Synthetic oligonucleotide
ttctgagtgttctttctcgtttgagtcagctcacgaggggattgtcccagagacctccgc

SEQ ID NO: 480619 - DNA, 60 bp, Artificial
  Synthetic oligonucleotide
ttctgataaagagcgttccgagctgtccgaactcaaacgaacggactcggatgcatatga

SEQ ID NO: 480620 - DNA, 54 bp, Artificial
  Synthetic oligonucleotide
ttctgataacaagccattaaccagctatgcaaagccttaacatgctcagctaga

SEQ ID NO: 480621 - DNA, 50 bp, Artificial
  Synthetic oligonucleotide
ttctgatcacgatgttcgattaccctataccgcccgagtttcagtctcgc

SEQ ID NO: 480622 - DNA, 58 bp, Artificial
  Synthetic oligonucleotide
ttctgatcgtggtgcagttgaaagacgcatcacttttgacattggagtaacccccggt

SEQ ID NO: 480623 - DNA, 55 bp, Artificial
  Synthetic oligonucleotide
ttctgatgccgttccagatgcggccccaaattcatcaaggtttcgacttaacttt

SEQ ID NO: 480624 - DNA, 60 bp, Artificial
  Synthetic oligonucleotide
ttctgatgtcatcagaaccttgacagctcaagaccatcccttgtgggagagcacctataa

SEQ ID NO: 480625 - DNA, 60 bp, Artificial
  Synthetic oligonucleotide
ttctgattggggtgtgtactgcttgcgcaaaggtgagggctggttgcttaagccggatca

SEQ ID NO: 480626 - DNA, 60 bp, Artificial
  Synthetic oligonucleotide
ttctgcaacaactactgtttattcatttcagaattgggtgccaccatagcagaataggca

SEQ ID NO: 480627 - DNA, 57 bp, Artificial
  Synthetic oligonucleotide
ttctgcaccaccaatggttcgggtccgcataggttcccagcagagggacttattatt

SEQ ID NO: 480628 - DNA, 60 bp, Artificial
  Synthetic oligonucleotide
ttctgcaccatggagaggtactcttcctttgatgtagcatgatcaatgatgtcacgcatg

SEQ ID NO: 480629 - DNA, 55 bp, Artificial
  Synthetic oligonucleotide
ttctgcaccgagaataaatgaacgtctggacgtttataaaactgctgaacgttta

SEQ ID NO: 480630 - DNA, 55 bp, Artificial
  Synthetic oligonucleotide
ttctgcacggtccacgagcgctggttgtgcgaaggctgccgcgcgttcatgaact

SEQ ID NO: 480631 - DNA, 60 bp, Artificial
  Synthetic oligonucleotide
ttctgcactaatttcaaagccaaaccactctctatagcacctgtagcagtaacactctat

SEQ ID NO: 480632 - DNA, 60 bp, Artificial
  Synthetic oligonucleotide
ttctgcagatatcatcgagaatgcagtgcctggttccgaaaggtacagatccaacatcaa

SEQ ID NO: 480633 - DNA, 60 bp, Artificial
  Synthetic oligonucleotide
ttctgcagcatttgaagatcttagagtgtcaagctttatcagaggagcaagagtggttcc

SEQ ID NO: 480634 - DNA, 60 bp, Artificial
  Synthetic oligonucleotide
ttctgcagcatttgaggacttgagggtctcgagcttcatcagggggacaagagtggtccc

SEQ ID NO: 480635 - DNA, 60 bp, Artificial
  Synthetic oligonucleotide
ttctgcatgaagtatgccccagtggtatggaactggatgttgactaacaacagtccacct

SEQ ID NO: 480636 - DNA, 58 bp, Artificial
  Synthetic oligonucleotide
ttctgcattagctgaacacgttgtttattgtcgccgtctggacagaattactttaccc

SEQ ID NO: 480637 - DNA, 60 bp, Artificial
  Synthetic oligonucleotide
ttctgccagatctgtatgattacaaagagaatagattcatcgagattggagtgacaagga

SEQ ID NO: 480638 - DNA, 51 bp, Artificial
  Synthetic oligonucleotide
ttctgccaggtttccacccaactccgcctatacatataccaggggaagtac

SEQ ID NO: 480639 - DNA, 51 bp, Artificial
  Synthetic oligonucleotide
ttctgccatcacctatgaaacttccagacacgacacgaggaggactaggag

SEQ ID NO: 480640 - DNA, 58 bp, Artificial
  Synthetic oligonucleotide
ttctgcctacttgatgaatgtcgtggctcatgctcatggttcccgtactgacttacgt

SEQ ID NO: 480641 - DNA, 59 bp, Artificial
  Synthetic oligonucleotide
ttctgcctcgagggtgttgaaacaggagtccgtagggggacgcacccacagatgatcga

SEQ ID NO: 480642 - DNA, 50 bp, Artificial
  Synthetic oligonucleotide
ttctgcctgggactttccactggggcgttccaggaggtgtggtgatgctg

SEQ ID NO: 480643 - DNA, 59 bp, Artificial
  Synthetic oligonucleotide
ttctgcgattttccaaaatcagagatggtcaaactatggaagaaaatgtggagtattac

SEQ ID NO: 480644 - DNA, 59 bp, Artificial
  Synthetic oligonucleotide
ttctgcgatttttatattatacccaggtctcaagaatcgacatgtactaactacataaa

SEQ ID NO: 480645 - DNA, 60 bp, Artificial
  Synthetic oligonucleotide
ttctgcggatactatgtaggaccagccggtgccatcaggtctccaatcacccttttcgcg

SEQ ID NO: 480646 - DNA, 50 bp, Artificial
  Synthetic oligonucleotide
ttctgcgggaccgaaggagcagggtatcctgttacgagcgttcgcatatt

SEQ ID NO: 480647 - DNA, 50 bp, Artificial
  Synthetic oligonucleotide
ttctgcggtccacgagtgccgatgttgagtgggacgcggcagccgagagg

SEQ ID NO: 480648 - DNA, 60 bp, Artificial
  Synthetic oligonucleotide
ttctgcgtcggacgagattggtctgttttcgatgcccattttgttatctgatggatagcg

SEQ ID NO: 480649 - DNA, 59 bp, Artificial
  Synthetic oligonucleotide
ttctgcgtctcttgttggttattgcggagttgatgtccacattaaagttgagaaagact

SEQ ID NO: 480650 - DNA, 60 bp, Artificial
  Synthetic oligonucleotide
ttctgcgtcttgagccatctgacaccaagacacgcagaattgagtgtgctgaagttgagt

SEQ ID NO: 480651 - DNA, 59 bp, Artificial
  Synthetic oligonucleotide
ttctgcgttcagcctgagaagggaggtcgtaagccagctcgccttattgtgttccccga

SEQ ID NO: 480652 - DNA, 60 bp, Artificial
  Synthetic oligonucleotide
ttctgctaatcaaccagaaactactataatcaatgtaggggatgtggtatcctatggaaa

SEQ ID NO: 480653 - DNA, 55 bp, Artificial
  Synthetic oligonucleotide
ttctgctcgagcctctcaagcgccgccccacagacctcactggcggtgctccttt

SEQ ID NO: 480654 - DNA, 60 bp, Artificial
  Synthetic oligonucleotide
ttctgctgcctaattttgcttctggatccaatactgcagtataccagtctcggggagccc

SEQ ID NO: 480655 - DNA, 55 bp, Artificial
  Synthetic oligonucleotide
ttctgctggtgagagcaagagagggcgtgtggatccctgtgtccatggaccgacc

SEQ ID NO: 480656 - DNA, 55 bp, Artificial
  Synthetic oligonucleotide
ttctgcttgaggcatccgcgaccaacctgctgcccaacagcgcgcagttcgaggc

SEQ ID NO: 480657 - DNA, 52 bp, Artificial
  Synthetic oligonucleotide
ttctggaaaagcaatgcgctgacgagactactaccgtcggtaaggctttctc

SEQ ID NO: 480658 - DNA, 53 bp, Artificial
  Synthetic oligonucleotide
ttctggacaccagaaggatggagtgagacaagtgcaaacgatatggctaacaa

SEQ ID NO: 480659 - DNA, 60 bp, Artificial
  Synthetic oligonucleotide
ttctggacaccagaaggttggagtctcaaaagcgtgaacggtatggctaatgacaggata

SEQ ID NO: 480660 - DNA, 56 bp, Artificial
  Synthetic oligonucleotide
ttctggacagactctaagagcccgcagctgccaaccgactttacgcgttttaaccg

SEQ ID NO: 480661 - DNA, 55 bp, Artificial
  Synthetic oligonucleotide
ttctggacgagcggaaggagaaggccaagcagcgtcggggcccgaagccgaacat

SEQ ID NO: 480662 - DNA, 59 bp, Artificial
  Synthetic oligonucleotide
ttctggactacctctcttacactactacttcttaccatgtctatgactccctgtggtat

SEQ ID NO: 480663 - DNA, 55 bp, Artificial
  Synthetic oligonucleotide
ttctggagacctccggtgcacaatgccacggggatccagcgcctgtggtacgagt

SEQ ID NO: 480664 - DNA, 55 bp, Artificial
  Synthetic oligonucleotide
ttctggatccaggaaaactggacgtcccagatgtatgtaatgaagcatccggaaa

SEQ ID NO: 480665 - DNA, 55 bp, Artificial
  Synthetic oligonucleotide
ttctggatctactattgatgagcttcgccgcaagaatgaggaactcgaagacagg

SEQ ID NO: 480666 - DNA, 58 bp, Artificial
  Synthetic oligonucleotide
ttctggatggacgagaatattaagacgaagaatcacactaacaacgtgttattctggt

SEQ ID NO: 480667 - DNA, 53 bp, Artificial
  Synthetic oligonucleotide
ttctggatgtgttccaatgggtccttgcaatgcagaatatgcatttaggactg

SEQ ID NO: 480668 - DNA, 58 bp, Artificial
  Synthetic oligonucleotide
ttctggatgtttggacatataatgccgaactgttagttctattggaaaatgaaaggac

SEQ ID NO: 480669 - DNA, 60 bp, Artificial
  Synthetic oligonucleotide
ttctggcaatgaggcagctcgatcgataaatgtggttgcgcaatattcctaatttaggta

SEQ ID NO: 480670 - DNA, 55 bp, Artificial
  Synthetic oligonucleotide
ttctggcacatatggcggagaaacagccgaataaattcgtggcggcatgggagcg

SEQ ID NO: 480671 - DNA, 55 bp, Artificial
  Synthetic oligonucleotide
ttctggcaccctacggggtcttccagggcacgaaggttgcgtctctacacgaggc

SEQ ID NO: 480672 - DNA, 57 bp, Artificial
  Synthetic oligonucleotide
ttctggccataccaccttcaaatacctcattctacaaaacaccacttgggagaacca

SEQ ID NO: 480673 - DNA, 60 bp, Artificial
  Synthetic oligonucleotide
ttctggccggcactgtacaaatgctccgggttcagacgcaactatccctggcggtattca

SEQ ID NO: 480674 - DNA, 60 bp, Artificial
  Synthetic oligonucleotide
ttctggccggcataaattcacaagcagcaaatgattgttttaaaacactgatagcagcta

SEQ ID NO: 480675 - DNA, 52 bp, Artificial
  Synthetic oligonucleotide
ttctggcgaagtaagttggtacaagcctgaatcaagtattgaccctattcct

SEQ ID NO: 480676 - DNA, 58 bp, Artificial
  Synthetic oligonucleotide
ttctggcgcgtatgtttagtcggatccgttatagattgagggctcgtggggctcttaa

SEQ ID NO: 480677 - DNA, 53 bp, Artificial
  Synthetic oligonucleotide
ttctgggacctttcaaggatggtttttggacttgtttcaacaacctccgcgaa

SEQ ID NO: 480678 - DNA, 53 bp, Artificial
  Synthetic oligonucleotide
ttctgggagcgttaaagttcggctgtaaggttttaggagatcgtttagacgta

SEQ ID NO: 480679 - DNA, 57 bp, Artificial
  Synthetic oligonucleotide
ttctgggagtggtggggcaatgggatataaacctcttacagaaggatccgtcactat

SEQ ID NO: 480680 - DNA, 60 bp, Artificial
  Synthetic oligonucleotide
ttctgggattgaaagcggattattcgtggctagccagtgtagcgattggttatctgggcg

SEQ ID NO: 480681 - DNA, 56 bp, Artificial
  Synthetic oligonucleotide
ttctgggcctgtggaggaggccccttggatgtaattggaattaaccctgaccctga

SEQ ID NO: 480682 - DNA, 51 bp, Artificial
  Synthetic oligonucleotide
ttctgggctagtgctctcactctcctatctggcataggacttcgtgagtag

SEQ ID NO: 480683 - DNA, 60 bp, Artificial
  Synthetic oligonucleotide
ttctgggctattcggtcagtgcgatcataacaccctgttcaactctgaattagtatatca

SEQ ID NO: 480684 - DNA, 59 bp, Artificial
  Synthetic oligonucleotide
ttctgggctgtacgcctcccatgggcgaacactggggtaagggcactgtgtgtgcacgc

SEQ ID NO: 480685 - DNA, 52 bp, Artificial
  Synthetic oligonucleotide
ttctggggcgtccatctcggcaggaagcaacaacgggtcttcttcacccata

SEQ ID NO: 480686 - DNA, 54 bp, Artificial
  Synthetic oligonucleotide
ttctgggggctcgagaccccggacaaaaaatttcaggacaatcctccttatgaa

SEQ ID NO: 480687 - DNA, 60 bp, Artificial
  Synthetic oligonucleotide
ttctggggtgttcaccatcctcctgacaccatggtgcagaataccctgtatgggtctggt

SEQ ID NO: 480688 - DNA, 60 bp, Artificial
  Synthetic oligonucleotide
ttctgggtactattacagtggagaggatccagctaatctgagagttgtaacatcacagtc

SEQ ID NO: 480689 - DNA, 60 bp, Artificial
  Synthetic oligonucleotide
ttctgggttgagctaatcagagggcggcccaaagagagcacaatttggactagtggaagc

SEQ ID NO: 480690 - DNA, 58 bp, Artificial
  Synthetic oligonucleotide
ttctgggttgagttggtcagagggcggcccaaagagaacacaatctggactagtggga

SEQ ID NO: 480691 - DNA, 60 bp, Artificial
  Synthetic oligonucleotide
ttctgggtttcgttccatcctccttggctctggtcagcttgacatcgctcctccaggcac

SEQ ID NO: 480692 - DNA, 55 bp, Artificial
  Synthetic oligonucleotide
ttctggtagtgctgctgctattcgccggcgttgacgcggaaacccacgtcaccgg

SEQ ID NO: 480693 - DNA, 58 bp, Artificial
  Synthetic oligonucleotide
ttctggtatctgaatgacactagaagtggtagaacctccttacctaaatgttggatgg

SEQ ID NO: 480694 - DNA, 60 bp, Artificial
  Synthetic oligonucleotide
ttctggtatgctcaacactcagttccttgactcctttggaaacttattcttgctaattga

SEQ ID NO: 480695 - DNA, 55 bp, Artificial
  Synthetic oligonucleotide
ttctggtcaagggtggccgagaagttcgtgctccccggtgtcgtcgcgacgtggt

SEQ ID NO: 480696 - DNA, 55 bp, Artificial
  Synthetic oligonucleotide
ttctggtcggtcgcgctcgcgtgaacctgtcgaagccgggccagcaggccaagat

SEQ ID NO: 480697 - DNA, 54 bp, Artificial
  Synthetic oligonucleotide
ttctggtcttcaattagattgcccgagttccgatgatagcgcatataacgtatg

SEQ ID NO: 480698 - DNA, 56 bp, Artificial
  Synthetic oligonucleotide
ttctggtgagaccgctcttaccgccacccccgcaacttacggcccgcttgcagccc

SEQ ID NO: 480699 - DNA, 60 bp, Artificial
  Synthetic oligonucleotide
ttctggtgatcccaagtacgttgacttaccgactctcgaatctgattcaatgtacatagc

SEQ ID NO: 480700 - DNA, 57 bp, Artificial
  Synthetic oligonucleotide
ttctggttagtgttggtgtgttctatctggcttatagtctgttcttgaaggattgta

SEQ ID NO: 480701 - DNA, 60 bp, Artificial
  Synthetic oligonucleotide
ttctggttggcccgcagatgtagatggacttatgcctccccggtgactcctggaataatc

SEQ ID NO: 480702 - DNA, 55 bp, Artificial
  Synthetic oligonucleotide
ttctgtaacaggtattactttccagaatggtgacgttacttgggctattacctta

SEQ ID NO: 480703 - DNA, 55 bp, Artificial
  Synthetic oligonucleotide
ttctgtacccagagtcgtggcacagcagaaggaggtaactgttaccaaggaagtt

SEQ ID NO: 480704 - DNA, 60 bp, Artificial
  Synthetic oligonucleotide
ttctgtagtttgcacaactggagccatttacacattggagcaacttctactttcgaccga

SEQ ID NO: 480705 - DNA, 55 bp, Artificial
  Synthetic oligonucleotide
ttctgtattacaaagaatccgaaactttagaaatctataccgtagagggacgcaa

SEQ ID NO: 480706 - DNA, 60 bp, Artificial
  Synthetic oligonucleotide
ttctgtcagtcaatttgaatttgcccagacctttgctgaagacctcatccttgaaccaca

SEQ ID NO: 480707 - DNA, 55 bp, Artificial
  Synthetic oligonucleotide
ttctgtcgagcaagcatgaggactttgaagatctgtgggttgagcttcacacgtg

SEQ ID NO: 480708 - DNA, 60 bp, Artificial
  Synthetic oligonucleotide
ttctgtcgtccttctcggaaatatacatcgtttccatggctgctaggttgtactgccaac

SEQ ID NO: 480709 - DNA, 55 bp, Artificial
  Synthetic oligonucleotide
ttctgtcgtgctctcccgcaagtatacatcctttccatggctgctagggtgtgct

SEQ ID NO: 480710 - DNA, 58 bp, Artificial
  Synthetic oligonucleotide
ttctgtctgaccatggcatactatgtcccaccctcccaaaagtcattccggatggttt

SEQ ID NO: 480711 - DNA, 55 bp, Artificial
  Synthetic oligonucleotide
ttctgtctggccggtacatgaggcaggactatttcgacttcaccccgtcgcacac

SEQ ID NO: 480712 - DNA, 60 bp, Artificial
  Synthetic oligonucleotide
ttctgtgaatctaggagctttctgatgtcatcggagccttgacaactcaaaaccatcccc

SEQ ID NO: 480713 - DNA, 55 bp, Artificial
  Synthetic oligonucleotide
ttctgtgaccgattataatcctacaagaacattagatgacgtctgtgatcttgag

SEQ ID NO: 480714 - DNA, 60 bp, Artificial
  Synthetic oligonucleotide
ttctgtgagggtgatgaagattgcattctttaatgcccaggcctttagcgctgcttgctt

SEQ ID NO: 480715 - DNA, 55 bp, Artificial
  Synthetic oligonucleotide
ttctgtgatggttgcagatgctggagtttggaaaggcatttgcggcattcactcc

SEQ ID NO: 480716 - DNA, 55 bp, Artificial
  Synthetic oligonucleotide
ttctgtgcacaaatgcactccaacaacggaccgcaaattggctcggcggtcggtt

SEQ ID NO: 480717 - DNA, 59 bp, Artificial
  Synthetic oligonucleotide
ttctgtggaatccaaaaacgccaaagtcttcatgattttgtgtgcaaaagtgtgtataa

SEQ ID NO: 480718 - DNA, 60 bp, Artificial
  Synthetic oligonucleotide
ttctgtggaggtccatactccaggtaactttgattcagctcatttagccttttcattgca

SEQ ID NO: 480719 - DNA, 55 bp, Artificial
  Synthetic oligonucleotide
ttctgtggttacctgatcacgccaaagggcctcatcaaagaccccctcaagctcc

SEQ ID NO: 480720 - DNA, 55 bp, Artificial
  Synthetic oligonucleotide
ttctgtgtcaccgtccattgcctcctggtttactggtgaggccatccgtatcact

SEQ ID NO: 480721 - DNA, 59 bp, Artificial
  Synthetic oligonucleotide
ttctgtgttcaaccagagaagggaggccgtaaggcagctcgccttatcgtattcccaga

SEQ ID NO: 480722 - DNA, 60 bp, Artificial
  Synthetic oligonucleotide
ttctgtgttcttaagcgaagatgcctactattcagtcacaatggtggtgttttactgtct

SEQ ID NO: 480723 - DNA, 60 bp, Artificial
  Synthetic oligonucleotide
ttctgtgttgcactttgattgatacctgagtacaatgggttgttgagggtgatgaattcc

SEQ ID NO: 480724 - DNA, 58 bp, Artificial
  Synthetic oligonucleotide
ttctgtgttggggtgagttgatgaatctggccacttgggtgggaagtaatttggaaga

SEQ ID NO: 480725 - DNA, 59 bp, Artificial
  Synthetic oligonucleotide
ttctgttaattcttgcaggggaagtctgaaagtggcagaacgccaccatgaacgctttg

SEQ ID NO: 480726 - DNA, 56 bp, Artificial
  Synthetic oligonucleotide
ttctgttacagtctcaggaggtccatacagtcacaaggagcaggccttaattagga

SEQ ID NO: 480727 - DNA, 60 bp, Artificial
  Synthetic oligonucleotide
ttctgttacatctattgtcttttcaagtacatcatataatacatgatcaactgctctaat

SEQ ID NO: 480728 - DNA, 59 bp, Artificial
  Synthetic oligonucleotide
ttctgttatattggggcctggagctaaaaactagtgctgtcaatttggttgataccata

SEQ ID NO: 480729 - DNA, 55 bp, Artificial
  Synthetic oligonucleotide
ttctgttatcgggcttgatacggcaccatttaaaacatgaccctttgagtgtttt

SEQ ID NO: 480730 - DNA, 50 bp, Artificial
  Synthetic oligonucleotide
ttctgttatggtcgattctttgtacatcacatctagcaagtttttaatcc

SEQ ID NO: 480731 - DNA, 55 bp, Artificial
  Synthetic oligonucleotide
ttctgttccgggcgctgacctagccgaagcgtgcaagcgtttcgtggctccggac

SEQ ID NO: 480732 - DNA, 58 bp, Artificial
  Synthetic oligonucleotide
ttctgttctcaacaaatactgtttggagatcgatttatctaagttcgataaatcccaa

SEQ ID NO: 480733 - DNA, 60 bp, Artificial
  Synthetic oligonucleotide
ttctgttctgagtgactgttttcggtgctgtgcgctttcggtttgcgctgtcctctcaga

SEQ ID NO: 480734 - DNA, 57 bp, Artificial
  Synthetic oligonucleotide
ttctgttgaggcctattgcattaaagaggtgcgcggacagactttcgattccgtgac

SEQ ID NO: 480735 - DNA, 60 bp, Artificial
  Synthetic oligonucleotide
ttctgttgtcctctctaggaagtacacctcctttccatggctgctcggatgtgctgcaaa

SEQ ID NO: 480736 - DNA, 56 bp, Artificial
  Synthetic oligonucleotide
ttctgtttacactgacgtggctagtgaaacaaccagcggtgactacgacccaggta

SEQ ID NO: 480737 - DNA, 55 bp, Artificial
  Synthetic oligonucleotide
ttctgtttacagacgtgggtataagactccgtataggagtccgtatggcgctcgt

SEQ ID NO: 480738 - DNA, 55 bp, Artificial
  Synthetic oligonucleotide
ttctgtttcactggctgagtgtgtgttagtgctcctaattgttccaccgcggacc

SEQ ID NO: 480739 - DNA, 56 bp, Artificial
  Synthetic oligonucleotide
ttctgtttctcaccaccaaaattaaggagaaatggggagccttatcaattcttgag

SEQ ID NO: 480740 - DNA, 58 bp, Artificial
  Synthetic oligonucleotide
ttctgtttgtatagtttgtgtactggtttacttatggcacatagtaggcctcgaagac

SEQ ID NO: 480741 - DNA, 52 bp, Artificial
  Synthetic oligonucleotide
ttctgttttggctggctccttatccctatcatatctctagtatcaatcaaga

SEQ ID NO: 480742 - DNA, 60 bp, Artificial
  Synthetic oligonucleotide
ttcttaaaatagtgaggagtatggaaaaataccagctagcagtgaccgtcatggctatgc

SEQ ID NO: 480743 - DNA, 57 bp, Artificial
  Synthetic oligonucleotide
ttcttaaacacggtgcaacgaattcacgaccaaaattattcagacttccctccagca

SEQ ID NO: 480744 - DNA, 54 bp, Artificial
  Synthetic oligonucleotide
ttcttaaactaatcgagtttttcgattggttcgctaaatacactctggatcgtt

SEQ ID NO: 480745 - DNA, 59 bp, Artificial
  Synthetic oligonucleotide
ttcttaaccgtgggagcgactggtgctgcaccagccactgttatccaatacatgtatgt

SEQ ID NO: 480746 - DNA, 60 bp, Artificial
  Synthetic oligonucleotide
ttcttaataatggggacaaacatagcatttcgaggcgtctcgcagagcaatttattgagg

SEQ ID NO: 480747 - DNA, 60 bp, Artificial
  Synthetic oligonucleotide
ttcttaatagaaagtatggagtgaatggcaagatgtactgcacaattaaaggcaatcact

SEQ ID NO: 480748 - DNA, 56 bp, Artificial
  Synthetic oligonucleotide
ttcttaatcttggacaaaaggagtatacgaagactgcttactggtgggacggtctc

SEQ ID NO: 480749 - DNA, 60 bp, Artificial
  Synthetic oligonucleotide
ttcttacatgtcccctgaaatggcgagatgggctgatgtgaaatacggcaacaataaagg

SEQ ID NO: 480750 - DNA, 60 bp, Artificial
  Synthetic oligonucleotide
ttcttaccagagcgctaaatgatgcgactaaagatttttacaacgcggtctcaggagtga

SEQ ID NO: 480751 - DNA, 52 bp, Artificial
  Synthetic oligonucleotide
ttcttacctatcgctgcacaatcccaagacatatcttcccctgaaagggttt

SEQ ID NO: 480752 - DNA, 55 bp, Artificial
  Synthetic oligonucleotide
ttcttacctggtgcatatgcacaaatatcgaatgcggctcggcaggcatggaaaa

SEQ ID NO: 480753 - DNA, 57 bp, Artificial
  Synthetic oligonucleotide
ttcttacgagctgctgggagataattgctcttcgggaaattaacgtgacgtttaata

SEQ ID NO: 480754 - DNA, 55 bp, Artificial
  Synthetic oligonucleotide
ttcttacgggcctagaggttgctggtacccgcataatctttgagaacacgatcgt

SEQ ID NO: 480755 - DNA, 56 bp, Artificial
  Synthetic oligonucleotide
ttcttactatcgtaacgaggcttacgcggtagaagattgcggcaaatttatggcgg

SEQ ID NO: 480756 - DNA, 59 bp, Artificial
  Synthetic oligonucleotide
ttcttactgatggatgcccttaaattaagcatcgaagacccgagccatgagggagaagg

SEQ ID NO: 480757 - DNA, 60 bp, Artificial
  Synthetic oligonucleotide
ttcttactgatggatgctctgaaattaagcattgaggacccgagtcatgagggggaaggg

SEQ ID NO: 480758 - DNA, 60 bp, Artificial
  Synthetic oligonucleotide
ttcttagaacacaagagtctgaatgtgtatgccacaatggaacctgtgtagcagtgatga

SEQ ID NO: 480759 - DNA, 55 bp, Artificial
  Synthetic oligonucleotide
ttcttagcacttatctgggacgacctgaggagcctgtgcctctgcatctaccacc

SEQ ID NO: 480760 - DNA, 60 bp, Artificial
  Synthetic oligonucleotide
ttcttaggaacagcaggaagcactatgggcgcagcgtcaataacgctgacggtacaggtc

SEQ ID NO: 480761 - DNA, 60 bp, Artificial
  Synthetic oligonucleotide
ttcttaggacccaagaatcagaatgtgtgtgccataaagggatctgcccagtagtcatga

SEQ ID NO: 480762 - DNA, 60 bp, Artificial
  Synthetic oligonucleotide
ttcttaggagcagcaggaagcactatgggcgcggcatcaataacgctgacggtacaggcc

SEQ ID NO: 480763 - DNA, 60 bp, Artificial
  Synthetic oligonucleotide
ttcttaggatttgatctgagcattgatttggttcactatgaagatctgacagctcattgg

SEQ ID NO: 480764 - DNA, 60 bp, Artificial
  Synthetic oligonucleotide
ttcttagtgtgctcagtgccaattgctccaaggagttattagctgagctcatgagtggtc

SEQ ID NO: 480765 - DNA, 56 bp, Artificial
  Synthetic oligonucleotide
ttcttagttctacccacttctcgaggacatcttccctcccacctcgctttctcttc

SEQ ID NO: 480766 - DNA, 60 bp, Artificial
  Synthetic oligonucleotide
ttcttatacaatacatgatcaactgctctaataattgcgttaattgagattacacccaga

SEQ ID NO: 480767 - DNA, 60 bp, Artificial
  Synthetic oligonucleotide
ttcttatacatggcatgaacgagggatactaccctctagaggacgcctacacaggtaatc

SEQ ID NO: 480768 - DNA, 50 bp, Artificial
  Synthetic oligonucleotide
ttcttatcaacgtttgtcaggaacgcaatccttagttatttaccgcgcag

SEQ ID NO: 480769 - DNA, 60 bp, Artificial
  Synthetic oligonucleotide
ttcttatcagcgacttccacgcactgtcgttcgtgacctcagctttgatgaggatgatga

SEQ ID NO: 480770 - DNA, 56 bp, Artificial
  Synthetic oligonucleotide
ttcttatcccagacaaagcagagtggggagaacctcccttacctggtagcgtacca

SEQ ID NO: 480771 - DNA, 58 bp, Artificial
  Synthetic oligonucleotide
ttcttatgattggacgattattgccaacaccctcctaagtaagtccccgtgtatgatc

SEQ ID NO: 480772 - DNA, 54 bp, Artificial
  Synthetic oligonucleotide
ttcttattatgtccaggacagtaaaggatattatgttgcatacccagaatctcg

SEQ ID NO: 480773 - DNA, 54 bp, Artificial
  Synthetic oligonucleotide
ttcttcaaggaatgtgtgaacactttgcgtacttatctagcgtattctgggagt

SEQ ID NO: 480774 - DNA, 60 bp, Artificial
  Synthetic oligonucleotide
ttcttcaattgaatggtatttaagatcaatggaattagactctgaaataaaggcagatat

SEQ ID NO: 480775 - DNA, 60 bp, Artificial
  Synthetic oligonucleotide
ttcttcaccgcaccacactgcactcaggcaagccattctttgctgggggaactaatggct

SEQ ID NO: 480776 - DNA, 58 bp, Artificial
  Synthetic oligonucleotide
ttcttcacggaagtggatggggtgcggttgcacaggtacgctccggcgtgcaaacctc

SEQ ID NO: 480777 - DNA, 54 bp, Artificial
  Synthetic oligonucleotide
ttcttcacggagtggctttgaggtccttttcatagaggacgggtgggttagacc

SEQ ID NO: 480778 - DNA, 60 bp, Artificial
  Synthetic oligonucleotide
ttcttcaggcgccgaggtcacgtggacaaattcgttaatgctgacatagttccaagagac

SEQ ID NO: 480779 - DNA, 60 bp, Artificial
  Synthetic oligonucleotide
ttcttcagtaggctaaactggttgaccaaatcaggaagcacatacccagtgctgaacgtg

SEQ ID NO: 480780 - DNA, 55 bp, Artificial
  Synthetic oligonucleotide
ttcttcatcatatgaagaccagtcgatattgttttgccagtagttgtgtcgtccg

SEQ ID NO: 480781 - DNA, 55 bp, Artificial
  Synthetic oligonucleotide
ttcttcatgcttgaaaacagcgaccatgaagtattaagaacaggagagagcacag

SEQ ID NO: 480782 - DNA, 59 bp, Artificial
  Synthetic oligonucleotide
ttcttccagtatagcaccgggttctatatctggttctagtctcgcacccggatctgtaa

SEQ ID NO: 480783 - DNA, 57 bp, Artificial
  Synthetic oligonucleotide
ttcttcccacctccggtatgtacgccatgactgctaaagagacgttaagtgtaataa

SEQ ID NO: 480784 - DNA, 55 bp, Artificial
  Synthetic oligonucleotide
ttcttccctcaacggctttacggaagtcatttctgacctcaagacctctctcttt

SEQ ID NO: 480785 - DNA, 55 bp, Artificial
  Synthetic oligonucleotide
ttcttccctttgacatcgataagatgtaatttgtgaaaaaaactccttgtttcta

SEQ ID NO: 480786 - DNA, 59 bp, Artificial
  Synthetic oligonucleotide
ttcttccgatggtggaccttgtggcccacgtttcacctggctgtagcataatgggctta

SEQ ID NO: 480787 - DNA, 52 bp, Artificial
  Synthetic oligonucleotide
ttcttccggacgctgagagatttagttttcccagagtcatcaactcagctga

SEQ ID NO: 480788 - DNA, 56 bp, Artificial
  Synthetic oligonucleotide
ttcttccggcgagtctccgaggacccaggtcctggtacaataggatccctggctac

SEQ ID NO: 480789 - DNA, 60 bp, Artificial
  Synthetic oligonucleotide
ttcttccgtagtcgtggcatcagggcgcgtttgatgaacaatggtgatgactgtgtcgta

SEQ ID NO: 480790 - DNA, 58 bp, Artificial
  Synthetic oligonucleotide
ttcttcctgttggtaagatttcgtcccttgagatggtaggatttgatgtcaagaacaa

SEQ ID NO: 480791 - DNA, 58 bp, Artificial
  Synthetic oligonucleotide
ttcttcgatttcgttatgattatatgggagggtatatgtggccttagacaatatgggt

SEQ ID NO: 480792 - DNA, 60 bp, Artificial
  Synthetic oligonucleotide
ttcttcggatcacgaagttcctatctccagtcttatcaactgcaggttcttctccccatc

SEQ ID NO: 480793 - DNA, 56 bp, Artificial
  Synthetic oligonucleotide
ttcttcggtgatcctttctctcctggtcggtgaagtctcccgctcgggtcctcttc

SEQ ID NO: 480794 - DNA, 51 bp, Artificial
  Synthetic oligonucleotide
ttcttcggtggtcccgcctctcctgttcggtgaaccctcccgggtgtttcc

SEQ ID NO: 480795 - DNA, 55 bp, Artificial
  Synthetic oligonucleotide
ttcttctacccagctccaatgagtgccatgaagtgaatatagtactacttaaccg

SEQ ID NO: 480796 - DNA, 60 bp, Artificial
  Synthetic oligonucleotide
ttcttctatgagtctctggattctataacctctagaaccatctagccaatccttcacatc

SEQ ID NO: 480797 - DNA, 55 bp, Artificial
  Synthetic oligonucleotide
ttcttctcacccagtgcgctccgttgggcaattgaccatgcttgtactgactcct

SEQ ID NO: 480798 - DNA, 55 bp, Artificial
  Synthetic oligonucleotide
ttcttctcccagaaccggagtggacataccctcgtttatcttgccagggttcaac

SEQ ID NO: 480799 - DNA, 57 bp, Artificial
  Synthetic oligonucleotide
ttcttctccggtcaaaacggttacctcagctgcctgcacccttactatcagttaatg

SEQ ID NO: 480800 - DNA, 58 bp, Artificial
  Synthetic oligonucleotide
ttcttctgactgctggtctaatgtcaactattaagacaccagttaatgttactactat

SEQ ID NO: 480801 - DNA, 55 bp, Artificial
  Synthetic oligonucleotide
ttcttctggttcaaggttgaatcctctctccagtggatgagactctctgctatgg

SEQ ID NO: 480802 - DNA, 53 bp, Artificial
  Synthetic oligonucleotide
ttcttcttagtccgggatagaagaccgtttggtactccccaagattttggtca

SEQ ID NO: 480803 - DNA, 60 bp, Artificial
  Synthetic oligonucleotide
ttcttcttgtgaagggagctaaggatcttgttaagagattgttctactggctaatgacac

SEQ ID NO: 480804 - DNA, 55 bp, Artificial
  Synthetic oligonucleotide
ttcttgaaaagatggatttacatagcttgttagagttgggtacaaaacccactgc

SEQ ID NO: 480805 - DNA, 60 bp, Artificial
  Synthetic oligonucleotide
ttcttgaaataggagacatgctcttgcggactgcaataggacaggtgtcaaggcccatgt

SEQ ID NO: 480806 - DNA, 59 bp, Artificial
  Synthetic oligonucleotide
ttcttgaaataggggacatgcttctaagaactgccataggccaagtttcaaggcccatg

SEQ ID NO: 480807 - DNA, 60 bp, Artificial
  Synthetic oligonucleotide
ttcttgaagatctcaagcgggagtgcaagaggacggtagatgaactcgtccagaacgctc

SEQ ID NO: 480808 - DNA, 59 bp, Artificial
  Synthetic oligonucleotide
ttcttgaatatttggtatctttcggagtgtggattcgcactccacccgcttacagacca

SEQ ID NO: 480809 - DNA, 60 bp, Artificial
  Synthetic oligonucleotide
ttcttgacaatgtctgcagatgaggaatatctctctggcataatatctgaggagattacc

SEQ ID NO: 480810 - DNA, 57 bp, Artificial
  Synthetic oligonucleotide
ttcttgactttgcactcgagcttgaatttaggaatttgacccctgggaacactaaca

SEQ ID NO: 480811 - DNA, 60 bp, Artificial
  Synthetic oligonucleotide
ttcttgagagcagcagaaagcactataggcgcagcgtcagtaacgctaacggtacaggcc

SEQ ID NO: 480812 - DNA, 53 bp, Artificial
  Synthetic oligonucleotide
ttcttgagcttgtgaaaccggatgtcatgtatgcgacactcgtgtacccagcg

SEQ ID NO: 480813 - DNA, 60 bp, Artificial
  Synthetic oligonucleotide
ttcttgaggggaaggtcagtcccgatcagatctactgaccatgtcgtacatgtattacca

SEQ ID NO: 480814 - DNA, 51 bp, Artificial
  Synthetic oligonucleotide
ttcttgatgatgttacttttgaaccgttagatgaccctgaacataatcccc

SEQ ID NO: 480815 - DNA, 60 bp, Artificial
  Synthetic oligonucleotide
ttcttgcaagaagtgccatccgaatgatgctctggtcccactcagagctcaacaaagggc

SEQ ID NO: 480816 - DNA, 60 bp, Artificial
  Synthetic oligonucleotide
ttcttgcacgatctgctctcattttgaggggatcagttgctcataagtcctgcctacccg

SEQ ID NO: 480817 - DNA, 60 bp, Artificial
  Synthetic oligonucleotide
ttcttgcatttcagttagatttgccagtcttagattctgaccgttcttctcaggttgtct

SEQ ID NO: 480818 - DNA, 52 bp, Artificial
  Synthetic oligonucleotide
ttcttgccaggatgagccacccctctgttgcagtagctcaagcaccctcttg

SEQ ID NO: 480819 - DNA, 60 bp, Artificial
  Synthetic oligonucleotide
ttcttgcgtgagctatgcctgctggcaggaagaagagtctcccacgactcgacgacgcca

SEQ ID NO: 480820 - DNA, 58 bp, Artificial
  Synthetic oligonucleotide
ttcttgctaccccaatgatgggaaagtagaatgcgtatgtagagacaattggacagga

SEQ ID NO: 480821 - DNA, 59 bp, Artificial
  Synthetic oligonucleotide
ttcttgctgatggacgcccttaaattgagcattgaagacccgagtcatgagggggaggg

SEQ ID NO: 480822 - DNA, 60 bp, Artificial
  Synthetic oligonucleotide
ttcttgctgatggatgccctgaaactaagcatcgaagacccgagtcatgagggagagggg

SEQ ID NO: 480823 - DNA, 59 bp, Artificial
  Synthetic oligonucleotide
ttcttggacacgtccgcaaccagtccagttcgcaaaacttccggcaagagatctgcgga

SEQ ID NO: 480824 - DNA, 52 bp, Artificial
  Synthetic oligonucleotide
ttcttggaccaatccgttaagagcggaaacaaagttaagccgttaagagcgg

SEQ ID NO: 480825 - DNA, 59 bp, Artificial
  Synthetic oligonucleotide
ttcttggagtgctcgttggaggatggtttgtgtataagcatttctcccgcaaggaagag

SEQ ID NO: 480826 - DNA, 55 bp, Artificial
  Synthetic oligonucleotide
ttcttggatccccaagaggaaccggtccatattgaacacaagccaaaggggaata

SEQ ID NO: 480827 - DNA, 57 bp, Artificial
  Synthetic oligonucleotide
ttcttggcaacccggtgttgcgctttgatcgacggaggagaagagtggttctttgag

SEQ ID NO: 480828 - DNA, 50 bp, Artificial
  Synthetic oligonucleotide
ttcttggcaatccggagtgtgatcttctactgactgcaagctcatggtca

SEQ ID NO: 480829 - DNA, 55 bp, Artificial
  Synthetic oligonucleotide
ttcttggctaggattaatactgcaagggatgcatgtgtagccaaggacatcgatg

SEQ ID NO: 480830 - DNA, 53 bp, Artificial
  Synthetic oligonucleotide
ttcttgggcattcggtcggctacgccagaacttcatctatagcggtacacaag

SEQ ID NO: 480831 - DNA, 58 bp, Artificial
  Synthetic oligonucleotide
ttcttgggcgaccgcatggtccgacttattggacataccagggcctctctcctcgaaa

SEQ ID NO: 480832 - DNA, 52 bp, Artificial
  Synthetic oligonucleotide
ttcttgggcgcgccccttcacccgtcacccccacttctcccccgtctgggct

SEQ ID NO: 480833 - DNA, 50 bp, Artificial
  Synthetic oligonucleotide
ttcttgggtgcaactttatacggagcatgtatggtggtgtacgactagaa

SEQ ID NO: 480834 - DNA, 55 bp, Artificial
  Synthetic oligonucleotide
ttcttgggtggtgatcccacggaatttgtggcctggtgttatgcgagttgcaatg

SEQ ID NO: 480835 - DNA, 55 bp, Artificial
  Synthetic oligonucleotide
ttcttggtccgtgatagaaggccctatggaaacagcccaatggattttggacagg

SEQ ID NO: 480836 - DNA, 55 bp, Artificial
  Synthetic oligonucleotide
ttcttggtcgagttctatcgtgccagactctgcttgcacagtgatggtcttcact

SEQ ID NO: 480837 - DNA, 59 bp, Artificial
  Synthetic oligonucleotide
ttcttgtaaccctataagatttgggttgtagaaccaatgatcaggagcgccagtgtcta

SEQ ID NO: 480838 - DNA, 52 bp, Artificial
  Synthetic oligonucleotide
ttcttgtaataatagccttcgtttagctaacactacatcactagcctgatta

SEQ ID NO: 480839 - DNA, 60 bp, Artificial
  Synthetic oligonucleotide
ttcttgtaccgatatcggtaactgctaaaacagtaagtagatgattgttgccaactatca

SEQ ID NO: 480840 - DNA, 56 bp, Artificial
  Synthetic oligonucleotide
ttcttgtccccagtatgtctacggtgccgtttcagtgacctgcgtgtggggttccg

SEQ ID NO: 480841 - DNA, 57 bp, Artificial
  Synthetic oligonucleotide
ttcttgtgatctactattgggagggaaagaatggtcctacattgtcgagagatcatc

SEQ ID NO: 480842 - DNA, 56 bp, Artificial
  Synthetic oligonucleotide
ttcttgtggttctggcactaacgatccgtggtgcactaacccgtttgccgtccctg

SEQ ID NO: 480843 - DNA, 53 bp, Artificial
  Synthetic oligonucleotide
ttcttgttaactggtgtcgataagctctgtaattgggaaagtgtctcctcttt

SEQ ID NO: 480844 - DNA, 53 bp, Artificial
  Synthetic oligonucleotide
ttcttgttatcctgatgctagcgaagtaatatgcgtgtgtagggataattggc

SEQ ID NO: 480845 - DNA, 60 bp, Artificial
  Synthetic oligonucleotide
ttcttgttgctccttcaacaacgatgcttatcggtctccttggccgcgcagcggggtcgc

SEQ ID NO: 480846 - DNA, 58 bp, Artificial
  Synthetic oligonucleotide
ttcttgttggtccgcagatgtataaggacttatgccgtcccggtgactcctggaataa

SEQ ID NO: 480847 - DNA, 58 bp, Artificial
  Synthetic oligonucleotide
ttcttgtttatcaaaatattacggtgggatcatcaccatcgtgtaatacgttgacgga

SEQ ID NO: 480848 - DNA, 57 bp, Artificial
  Synthetic oligonucleotide
ttctttaaaactgtctcccggtaagctgtatggacccccctagcgtcaccatctgca

SEQ ID NO: 480849 - DNA, 55 bp, Artificial
  Synthetic oligonucleotide
ttctttaaagcccaggctttcaaagctgagttcttatcctcgtccaagaattctt

SEQ ID NO: 480850 - DNA, 52 bp, Artificial
  Synthetic oligonucleotide
ttctttaacctttttcagctttataggggtcccttggatttgacaataatta

SEQ ID NO: 480851 - DNA, 60 bp, Artificial
  Synthetic oligonucleotide
ttctttaatttaattgtcaaatacgtctgccaatgagcaatggcttttcagctcgctcta

SEQ ID NO: 480852 - DNA, 53 bp, Artificial
  Synthetic oligonucleotide
ttctttacaagggaaattaagtaccagcgcaaatcttacaaacagtgtttggg

SEQ ID NO: 480853 - DNA, 58 bp, Artificial
  Synthetic oligonucleotide
ttctttaccgcttctacaacgcggaagacgatcttctctacatcggaatcacaaacaa

SEQ ID NO: 480854 - DNA, 53 bp, Artificial
  Synthetic oligonucleotide
ttctttagccgactgaattggctaacaaaatctggaaactcttaccccacatt

SEQ ID NO: 480855 - DNA, 58 bp, Artificial
  Synthetic oligonucleotide
ttctttagttagagagcactttggatatgtgaggaaatagtttttggcatttactcta

SEQ ID NO: 480856 - DNA, 56 bp, Artificial
  Synthetic oligonucleotide
ttctttagttagaggacactttggatatgttaggaaatagtttttggcatctattc

SEQ ID NO: 480857 - DNA, 59 bp, Artificial
  Synthetic oligonucleotide
ttctttatgtgcttaccgtcagactcgaaggtcttcgatgtacttattgagtgctttgt

SEQ ID NO: 480858 - DNA, 55 bp, Artificial
  Synthetic oligonucleotide
ttctttcaagatgagcccggatggtacctggcgtagtcccatgtctaaagagagt

SEQ ID NO: 480859 - DNA, 60 bp, Artificial
  Synthetic oligonucleotide
ttctttcaatataaccacagagatacaagataagaagaagacagtatacgcgcttttcta

SEQ ID NO: 480860 - DNA, 55 bp, Artificial
  Synthetic oligonucleotide
ttctttccactaggcgaacaataggtacactccagccgcacctgagtgccaggga

SEQ ID NO: 480861 - DNA, 57 bp, Artificial
  Synthetic oligonucleotide
ttctttccacttttataccacctgtgcttatgtcaacttcgtcttccaattgctggg

SEQ ID NO: 480862 - DNA, 57 bp, Artificial
  Synthetic oligonucleotide
ttctttcctaccctatgtttcgcacggcttattttgccattgcgaacgttgagaaca

SEQ ID NO: 480863 - DNA, 57 bp, Artificial
  Synthetic oligonucleotide
ttctttcgaccattgatgggtgcgtaccagaaaagtcgattaaataaggaggcatac

SEQ ID NO: 480864 - DNA, 59 bp, Artificial
  Synthetic oligonucleotide
ttctttcggatttggacctgaaatcatgtcgtctggtgttgtatctcttccgcccattg

SEQ ID NO: 480865 - DNA, 60 bp, Artificial
  Synthetic oligonucleotide
ttctttctgtatatcaattattacatattgagattcgaatttgcatatatcgttgcgccc

SEQ ID NO: 480866 - DNA, 59 bp, Artificial
  Synthetic oligonucleotide
ttctttgaaagtcaagataaattgccaggttgcccccacatgtgggattggactagcag

SEQ ID NO: 480867 - DNA, 53 bp, Artificial
  Synthetic oligonucleotide
ttctttgactgtctgactagaaaatcagcacgattaagccatactttgaaaag

SEQ ID NO: 480868 - DNA, 58 bp, Artificial
  Synthetic oligonucleotide
ttctttgacttaacggccgtcacggctcttaagagtgctgggctgacattgggacaag

SEQ ID NO: 480869 - DNA, 60 bp, Artificial
  Synthetic oligonucleotide
ttctttgacttgcatgtgatgaccaggagaccagttgtatacttcatcatgtctatatct

SEQ ID NO: 480870 - DNA, 60 bp, Artificial
  Synthetic oligonucleotide
ttctttgatcaagaatacgaacacacgagtttgcagtgaatggctcatggatggctacgt

SEQ ID NO: 480871 - DNA, 60 bp, Artificial
  Synthetic oligonucleotide
ttctttgctcatctccacatcaatcaacttaatatccctccgattctgagaatcaaggag

SEQ ID NO: 480872 - DNA, 60 bp, Artificial
  Synthetic oligonucleotide
ttctttgcttacagctgtatggtctgggggaaactcatggatcaagcagtggaactgaac

SEQ ID NO: 480873 - DNA, 55 bp, Artificial
  Synthetic oligonucleotide
ttctttggaccaaaggacccaatcaccagaacccctttgagactctcccaggaca

SEQ ID NO: 480874 - DNA, 54 bp, Artificial
  Synthetic oligonucleotide
ttctttgggtggctatggaagctagtaccagtagacgtcccacaaggtgaagag

SEQ ID NO: 480875 - DNA, 59 bp, Artificial
  Synthetic oligonucleotide
ttctttgtgtgtttcggggaccccatacaggctaattctgacttcgctagacctgctga

SEQ ID NO: 480876 - DNA, 60 bp, Artificial
  Synthetic oligonucleotide
ttcttttaaagtcacggcacttaatgtggtcagtaggaggtacttggcatcactgcacaa

SEQ ID NO: 480877 - DNA, 56 bp, Artificial
  Synthetic oligonucleotide
ttcttttaacataccctacacctcacctcttagtgttattcctaccagatttgatg

SEQ ID NO: 480878 - DNA, 59 bp, Artificial
  Synthetic oligonucleotide
ttcttttaagggtgcctttgcatcgagagctagtggagttccctcacatgtcatttact

SEQ ID NO: 480879 - DNA, 50 bp, Artificial
  Synthetic oligonucleotide
ttcttttacgcctcgtttgtctcttggcgtatctgtgttgaaccttgatc

SEQ ID NO: 480880 - DNA, 60 bp, Artificial
  Synthetic oligonucleotide
ttcttttagtcatgcctaagtcggagttctttcgtgaggagcgcaagcgcagagtcgccc

SEQ ID NO: 480881 - DNA, 53 bp, Artificial
  Synthetic oligonucleotide
ttcttttcacgactctttttaatcttgaggcaaggtttcctcataaccaccct

SEQ ID NO: 480882 - DNA, 54 bp, Artificial
  Synthetic oligonucleotide
ttcttttccactgttgttaagactttgtttccgactttgagaccgcgcgaggaa

SEQ ID NO: 480883 - DNA, 60 bp, Artificial
  Synthetic oligonucleotide
ttcttttcgattttgcaggatatgaggaacactataatggcctcaaagactgttggcacg

SEQ ID NO: 480884 - DNA, 59 bp, Artificial
  Synthetic oligonucleotide
ttcttttctatccttcaggatatgaggaacacaattatggcttctaagactgtgggcac

SEQ ID NO: 480885 - DNA, 51 bp, Artificial
  Synthetic oligonucleotide
ttcttttctcccggaaccttccttataaccgccgttgtttacggatccaca

SEQ ID NO: 480886 - DNA, 60 bp, Artificial
  Synthetic oligonucleotide
ttcttttgaaccaccttttgaccaggcgcgctggggtgtgtgctgcgaacatgccgcgag

SEQ ID NO: 480887 - DNA, 60 bp, Artificial
  Synthetic oligonucleotide
ttcttttgaagccgcagttgttgctgccacttcaactctcgaactcatgggtattcaata

SEQ ID NO: 480888 - DNA, 60 bp, Artificial
  Synthetic oligonucleotide
ttcttttgtcatgaatctcaactaatactgaacctgttgcgtttataggcacctgctgcc

SEQ ID NO: 480889 - DNA, 56 bp, Artificial
  Synthetic oligonucleotide
ttcttttgtcgtggatctccactatcactgaacccgtggcgttaatcggaacctgt

SEQ ID NO: 480890 - DNA, 52 bp, Artificial
  Synthetic oligonucleotide
ttctttttaccgtattttggatttacggttatgtcgaactggctaccaacca

SEQ ID NO: 480891 - DNA, 52 bp, Artificial
  Synthetic oligonucleotide
ttctttttctggaatattacgtaagggaaggggataaccatgccagtttttc

SEQ ID NO: 480892 - DNA, 54 bp, Artificial
  Synthetic oligonucleotide
ttgaaaaaacaaggaggcaactgagggaaaatgctgaagacatgggaaatggtt

SEQ ID NO: 480893 - DNA, 57 bp, Artificial
  Synthetic oligonucleotide
ttgaaaaacgacgtaacaaatgtaacacttggtcgattctggactgtacttgatgac

SEQ ID NO: 480894 - DNA, 55 bp, Artificial
  Synthetic oligonucleotide
ttgaaaaaggcagcgcttgcttcggcccggaaacgtcggaagtcgaaggcttcac

SEQ ID NO: 480895 - DNA, 59 bp, Artificial
  Synthetic oligonucleotide
ttgaaaaatttccactgatggctaaaatatattcgtggtcatttcatgtcgggttcaga

SEQ ID NO: 480896 - DNA, 54 bp, Artificial
  Synthetic oligonucleotide
ttgaaaacaacttatccgttaaccgctatagtacttcgagaaacctagtattgc

SEQ ID NO: 480897 - DNA, 55 bp, Artificial
  Synthetic oligonucleotide
ttgaaaacccatctgtgacacaggtgacattaggtggcaagccaatggacctagc

SEQ ID NO: 480898 - DNA, 53 bp, Artificial
  Synthetic oligonucleotide
ttgaaaaccttaaccagtgagtttatagcccataaacctttgtccaaaagtga

SEQ ID NO: 480899 - DNA, 58 bp, Artificial
  Synthetic oligonucleotide
ttgaaaacgaccggctcttggcatatttgctgtcgttttggatcggtggacactcaaa

SEQ ID NO: 480900 - DNA, 57 bp, Artificial
  Synthetic oligonucleotide
ttgaaaactcgtgtcttgaaacgatggaaattgttcaacagacaagggttgacaagc

SEQ ID NO: 480901 - DNA, 60 bp, Artificial
  Synthetic oligonucleotide
ttgaaaagaaatcagtgtgggtgctttgtataggagctgtagtgtattgttcagaaacat

SEQ ID NO: 480902 - DNA, 59 bp, Artificial
  Synthetic oligonucleotide
ttgaaaagaggttctggatcgggtattatcatttcagatacgccagtccacaattgtag

SEQ ID NO: 480903 - DNA, 54 bp, Artificial
  Synthetic oligonucleotide
ttgaaaaggaattttccgaagtggaaggaagaatccaggaccttgagaaatatg

SEQ ID NO: 480904 - DNA, 55 bp, Artificial
  Synthetic oligonucleotide
ttgaaaagggcccttcagcgctaggccgtcagcgcgtgcgtagcgaacgcggaat

SEQ ID NO: 480905 - DNA, 59 bp, Artificial
  Synthetic oligonucleotide
ttgaaaaggggcgctagggtctcacccctagcacgccaacgactgctcctacgctgtgc

SEQ ID NO: 480906 - DNA, 59 bp, Artificial
  Synthetic oligonucleotide
ttgaaaaggggcgctagggtctcacccctagcatgccaccggcagtccctgcgtctcac

SEQ ID NO: 480907 - DNA, 53 bp, Artificial
  Synthetic oligonucleotide
ttgaaaaggggcgctagggtctcacccctagtataccaacgaccgtccctgcg

SEQ ID NO: 480908 - DNA, 59 bp, Artificial
  Synthetic oligonucleotide
ttgaaaaggggcgctagggtctcactcctagaatgccaacgactgctcctgcgttgtac

SEQ ID NO: 480909 - DNA, 55 bp, Artificial
  Synthetic oligonucleotide
ttgaaaaggtcaggaatggaacatatgaccacaaggaattcgaagaggagtccaa

SEQ ID NO: 480910 - DNA, 51 bp, Artificial
  Synthetic oligonucleotide
ttgaaaagtgaaaggcttttatagcggggtcgggcggttagagtgggggac

SEQ ID NO: 480911 - DNA, 59 bp, Artificial
  Synthetic oligonucleotide
ttgaaaatacattcagaacatacgccaaaggtacatatatacactacgccgtgggactc

SEQ ID NO: 480912 - DNA, 55 bp, Artificial
  Synthetic oligonucleotide
ttgaaaataggaatttcaacgccgatcgcggttgtaacgtgggttgtgacgactc

SEQ ID NO: 480913 - DNA, 60 bp, Artificial
  Synthetic oligonucleotide
ttgaaaatgagcacaccggatctttctgctcaatcgacggaaaagcaccgataagtcttg

SEQ ID NO: 480914 - DNA, 57 bp, Artificial
  Synthetic oligonucleotide
ttgaaacaagaaacgaccagggagaaatgaaatacattgaactgtgggggagagtgc

SEQ ID NO: 480915 - DNA, 60 bp, Artificial
  Synthetic oligonucleotide
ttgaaacagattttatcgggaggtcacaaggcaattatgcagcataattcaactagcgaa

SEQ ID NO: 480916 - DNA, 60 bp, Artificial
  Synthetic oligonucleotide
ttgaaacagcaccacggacccggaagacaatagcatgttttgacatatcatgtaaccaaa

SEQ ID NO: 480917 - DNA, 55 bp, Artificial
  Synthetic oligonucleotide
ttgaaacataccaattgtggacggcattagtctccttaacgtgttcaaacacaat

SEQ ID NO: 480918 - DNA, 60 bp, Artificial
  Synthetic oligonucleotide
ttgaaacatgacactttgttaattgtacgacatcagtaggttacatgagttgcattattc

SEQ ID NO: 480919 - DNA, 54 bp, Artificial
  Synthetic oligonucleotide
ttgaaacatgggatccattggacacaccattttcgaaacgacatcataaagcta

SEQ ID NO: 480920 - DNA, 60 bp, Artificial
  Synthetic oligonucleotide
ttgaaacctttcaatcatcattgtatctatgctgtcaagtagttcttccttggtaatgtc

SEQ ID NO: 480921 - DNA, 55 bp, Artificial
  Synthetic oligonucleotide
ttgaaacgaccctccccaggatcctaaatgatctgagggccagtacacggcttcc

SEQ ID NO: 480922 - DNA, 60 bp, Artificial
  Synthetic oligonucleotide
ttgaaacgatgaatcgactggtcagcgaaattcgcatgctcgagcagaatcttcgagtca

SEQ ID NO: 480923 - DNA, 55 bp, Artificial
  Synthetic oligonucleotide
ttgaaacgatggaggttgttcagcaaacacgagtggacaagctgacacaaggccg

SEQ ID NO: 480924 - DNA, 51 bp, Artificial
  Synthetic oligonucleotide
ttgaaacgggagattacgaccctgagatccgcgaacgtaaggttgaacgct

SEQ ID NO: 480925 - DNA, 60 bp, Artificial
  Synthetic oligonucleotide
ttgaaactaagcattgaagacccaagtcacgagggagagggaataccactatacgatgca

SEQ ID NO: 480926 - DNA, 60 bp, Artificial
  Synthetic oligonucleotide
ttgaaactagatatgtgcaaacatcgcagacaagagatgaaatgagcattgaaagtttcc

SEQ ID NO: 480927 - DNA, 51 bp, Artificial
  Synthetic oligonucleotide
ttgaaactcgaacagcgtgtgccactctttaaggcacgcgtacatggccgg

SEQ ID NO: 480928 - DNA, 57 bp, Artificial
  Synthetic oligonucleotide
ttgaaactgagtgtgggttgttcccacccacacttcccatgtggagtagtacactgt

SEQ ID NO: 480929 - DNA, 54 bp, Artificial
  Synthetic oligonucleotide
ttgaaactttgtcagttaacccccctgagtcctattcggctgagaggttaattg

SEQ ID NO: 480930 - DNA, 60 bp, Artificial
  Synthetic oligonucleotide
ttgaaagaagcagtgctttcagcaattgctacccatatgacgtccctaactatgcattgc

SEQ ID NO: 480931 - DNA, 59 bp, Artificial
  Synthetic oligonucleotide
ttgaaagaagtcaagaacagttcaggacgcaagaggtggagcggaagaaatccgatatg

SEQ ID NO: 480932 - DNA, 59 bp, Artificial
  Synthetic oligonucleotide
ttgaaagacagacagtatctcctacaacccggacctgtgtcagctacttacacagaagg

SEQ ID NO: 480933 - DNA, 57 bp, Artificial
  Synthetic oligonucleotide
ttgaaagactgggaagacgtaaacgcatgaccttttcgcaggagtttctcacagact

SEQ ID NO: 480934 - DNA, 59 bp, Artificial
  Synthetic oligonucleotide
ttgaaagccgggggtgggagatccggattgccagtctactcgatatcgcaggctgggtc

SEQ ID NO: 480935 - DNA, 55 bp, Artificial
  Synthetic oligonucleotide
ttgaaaggctacatgggcttgatgccttttcactgcacacatactctccccacga

SEQ ID NO: 480936 - DNA, 55 bp, Artificial
  Synthetic oligonucleotide
ttgaaagggaaggatactccctagtcggactcgatccttttcgcttgctccaaaa

SEQ ID NO: 480937 - DNA, 58 bp, Artificial
  Synthetic oligonucleotide
ttgaaagggggcactagggtctcgctcctagtgtgccaccgacggtcctcgcgttgca

SEQ ID NO: 480938 - DNA, 52 bp, Artificial
  Synthetic oligonucleotide
ttgaaagggggcgctagggtctagccctagtgtcgcgtaacgaccgtccccg

SEQ ID NO: 480939 - DNA, 60 bp, Artificial
  Synthetic oligonucleotide
ttgaaagggggcgctagggtctcacccctagcatgccaacgacagctcctgcgtcgcaac

SEQ ID NO: 480940 - DNA, 59 bp, Artificial
  Synthetic oligonucleotide
ttgaaagggggcgctagggtctcacccctagtatgccaacggcagctcctgcgttgcac

SEQ ID NO: 480941 - DNA, 53 bp, Artificial
  Synthetic oligonucleotide
ttgaaagggggcgctagggtctcgaccctagtgtgccaccggtagtccccgcg

SEQ ID NO: 480942 - DNA, 53 bp, Artificial
  Synthetic oligonucleotide
ttgaaagggggcgctagggtcttgccctagttcgccgtaacgaccgtccctgc

SEQ ID NO: 480943 - DNA, 60 bp, Artificial
  Synthetic oligonucleotide
ttgaaagggggcgctagggtttcacccctagcatgccatcgacagtccctgcgatgcacc

SEQ ID NO: 480944 - DNA, 58 bp, Artificial
  Synthetic oligonucleotide
ttgaaagggggcgttagggtcccacccctagcatgccaacgactgctcctgcgttgca

SEQ ID NO: 480945 - DNA, 55 bp, Artificial
  Synthetic oligonucleotide
ttgaaaggggggccctgcagccgatataggctgcagggttcccctggtggggtgg

SEQ ID NO: 480946 - DNA, 60 bp, Artificial
  Synthetic oligonucleotide
ttgaaagtaagagtatgaaactccggacacaaataccagcagaaatgctcgcaaatattg

SEQ ID NO: 480947 - DNA, 56 bp, Artificial
  Synthetic oligonucleotide
ttgaaagtcgtaaggagattagaagcgtgactgaagcgaggtggattttgtttaag

SEQ ID NO: 480948 - DNA, 55 bp, Artificial
  Synthetic oligonucleotide
ttgaaagtgttagagctactaaatgaaggactaacctatcccaggtataggccgc

SEQ ID NO: 480949 - DNA, 55 bp, Artificial
  Synthetic oligonucleotide
ttgaaagtttacgtcaattacgttcatccgtagacgttatgtgtaaggacagagt

SEQ ID NO: 480950 - DNA, 60 bp, Artificial
  Synthetic oligonucleotide
ttgaaataattgaagggagagatcgtactatggcctggacagtagtgaatagtatttgca

SEQ ID NO: 480951 - DNA, 60 bp, Artificial
  Synthetic oligonucleotide
ttgaaatatgggattaagattttaacccagcctgatgacgtctccatcatgcttcgaaac

SEQ ID NO: 480952 - DNA, 60 bp, Artificial
  Synthetic oligonucleotide
ttgaaatcaagatggccgctcaagtaattatgtgggcctaatgacctagcccacattgtc

SEQ ID NO: 480953 - DNA, 60 bp, Artificial
  Synthetic oligonucleotide
ttgaaatcgagccgaatggttgcaatcatgcgtggattcaaagagtgcaccatttggtca

SEQ ID NO: 480954 - DNA, 56 bp, Artificial
  Synthetic oligonucleotide
ttgaaatcgttttggaggagccattgacttggtcaattggtaccaattgatctctt

SEQ ID NO: 480955 - DNA, 60 bp, Artificial
  Synthetic oligonucleotide
ttgaaatgcacttttgttgacagcctcgcataacagcttttgtgctcctcttgtgaagcc

SEQ ID NO: 480956 - DNA, 60 bp, Artificial
  Synthetic oligonucleotide
ttgaaatgtacggggctacctattcagtcactccgctggatttaccagctatcattgaaa

SEQ ID NO: 480957 - DNA, 60 bp, Artificial
  Synthetic oligonucleotide
ttgaaattaacattccgtcacatagggtctctgcttcgattgattttatggaacgagcga

SEQ ID NO: 480958 - DNA, 55 bp, Artificial
  Synthetic oligonucleotide
ttgaaattcaagtccagattaatcccactccctttcagcagggaggtcttatttg

SEQ ID NO: 480959 - DNA, 60 bp, Artificial
  Synthetic oligonucleotide
ttgaaattcgttccccatatcatcgaactccactgcgtttactggatggacaggcggcga

SEQ ID NO: 480960 - DNA, 51 bp, Artificial
  Synthetic oligonucleotide
ttgaaattgcctactggggtaaagaaggtacacgttataaaagagttaccg

SEQ ID NO: 480961 - DNA, 58 bp, Artificial
  Synthetic oligonucleotide
ttgaaattggagtgacacggagggaagttcacatatactatctagaaaaagccaacaa

SEQ ID NO: 480962 - DNA, 60 bp, Artificial
  Synthetic oligonucleotide
ttgaacaacagatacctgaacagctatttgaaggtctacaagttgcagaaaacgcagtag

SEQ ID NO: 480963 - DNA, 60 bp, Artificial
  Synthetic oligonucleotide
ttgaacaagaacctaacgcttgacgtgacctacactcaggcggtactgatgttgcttcag

SEQ ID NO: 480964 - DNA, 52 bp, Artificial
  Synthetic oligonucleotide
ttgaacaagcacgtgtgattgtctttgactcgaaaacctaagtggcgtctgg

SEQ ID NO: 480965 - DNA, 59 bp, Artificial
  Synthetic oligonucleotide
ttgaacaatgatggacagcaagttttacctgaattcaacccggaccaggaggagactca

SEQ ID NO: 480966 - DNA, 55 bp, Artificial
  Synthetic oligonucleotide
ttgaacaattccgatgatctctcatactttaggtataacaacgccacgtataagg

SEQ ID NO: 480967 - DNA, 60 bp, Artificial
  Synthetic oligonucleotide
ttgaacacaaaagctgcatcaataggtgtttttatgtggaattgataagaggaagaccga

SEQ ID NO: 480968 - DNA, 60 bp, Artificial
  Synthetic oligonucleotide
ttgaacaccgtcgatggtgttaatgtttctattgtgtgctccaataatgcaacacagccc

SEQ ID NO: 480969 - DNA, 50 bp, Artificial
  Synthetic oligonucleotide
ttgaacaccttgaacaacatgggaacattgtacatccgccacgttaacgg

SEQ ID NO: 480970 - DNA, 54 bp, Artificial
  Synthetic oligonucleotide
ttgaacacgccaggcagcacacaattccttacatcagatgactatcaatcccct

SEQ ID NO: 480971 - DNA, 58 bp, Artificial
  Synthetic oligonucleotide
ttgaacaggacgcaacgagtctacagacgcgcataaatccggtcgccccctgccgaat

SEQ ID NO: 480972 - DNA, 55 bp, Artificial
  Synthetic oligonucleotide
ttgaacatacacagtgagcatgcattcataagtgatcgttgtttgtggctgaggg

SEQ ID NO: 480973 - DNA, 60 bp, Artificial
  Synthetic oligonucleotide
ttgaacatcagcaactgggtaaattgaacctttgtctatactgtcaatggcagtattacc

SEQ ID NO: 480974 - DNA, 60 bp, Artificial
  Synthetic oligonucleotide
ttgaacatgcatatggaacttatgaattaacaactatgtggcttacttcttctggtttgg

SEQ ID NO: 480975 - DNA, 59 bp, Artificial
  Synthetic oligonucleotide
ttgaacatgtcagatctgacgagaccacgtacgtaggtcgttttctaggagaggtagcc

SEQ ID NO: 480976 - DNA, 54 bp, Artificial
  Synthetic oligonucleotide
ttgaaccaattttagatggaccatacccaccaacgacttttaatccacctacag

SEQ ID NO: 480977 - DNA, 60 bp, Artificial
  Synthetic oligonucleotide
ttgaaccaccacttctgaacttgacttgcattccactaccaatttagatgtcaggtcgat

SEQ ID NO: 480978 - DNA, 60 bp, Artificial
  Synthetic oligonucleotide
ttgaaccagacttaagtgtgggaccacatgaattttgttcgcagcatactatgcaaattg

SEQ ID NO: 480979 - DNA, 57 bp, Artificial
  Synthetic oligonucleotide
ttgaaccccggtaatgaaatttgtaggttgatgtgatcgttccttctacagcgttga

SEQ ID NO: 480980 - DNA, 55 bp, Artificial
  Synthetic oligonucleotide
ttgaacccgtcgcccgcattcgattccactgtctgggtgtcgcttaggaaactcc

SEQ ID NO: 480981 - DNA, 57 bp, Artificial
  Synthetic oligonucleotide
ttgaaccctgtcgtgtatctgtgtaatttctcttacctgcgaatccctggagtccgg

SEQ ID NO: 480982 - DNA, 54 bp, Artificial
  Synthetic oligonucleotide
ttgaaccctttttgaagacaacaccacgcccacttaagctaccggatgggccac

SEQ ID NO: 480983 - DNA, 59 bp, Artificial
  Synthetic oligonucleotide
ttgaacctacaaaccccactcccagaaagagatttggcagtagtcaacataaatgctca

SEQ ID NO: 480984 - DNA, 60 bp, Artificial
  Synthetic oligonucleotide
ttgaacgaccacatgcccgcataaacgtgacagctgctcaatgacaaaagggcgcaactt

SEQ ID NO: 480985 - DNA, 55 bp, Artificial
  Synthetic oligonucleotide
ttgaacgatgtaatctgtagtggtggtgattacagcttcgcattaccagtaggcg

SEQ ID NO: 480986 - DNA, 60 bp, Artificial
  Synthetic oligonucleotide
ttgaacgcagactccacctccggatctgtgttgaccgcaaagatggatacaagttcgacg

SEQ ID NO: 480987 - DNA, 55 bp, Artificial
  Synthetic oligonucleotide
ttgaacgccaagttgctcactctgcaaataaacgctgggtgccaattgtggaagc

SEQ ID NO: 480988 - DNA, 60 bp, Artificial
  Synthetic oligonucleotide
ttgaacgccattcagaatcacagtctatatgatatgatcatgttagacaacgcaatagaa

SEQ ID NO: 480989 - DNA, 60 bp, Artificial
  Synthetic oligonucleotide
ttgaacggaacttggtttctgtactcgatcacagcatggtcgaccttcatgcatctaccc

SEQ ID NO: 480990 - DNA, 56 bp, Artificial
  Synthetic oligonucleotide
ttgaacgggattcatgtaacggggtttacgcaaacataagcaagaacgccattcta

SEQ ID NO: 480991 - DNA, 55 bp, Artificial
  Synthetic oligonucleotide
ttgaacgggtgcccaagatcaatctcgtcgcatgccgcaatgtgctgacctcgcc

SEQ ID NO: 480992 - DNA, 55 bp, Artificial
  Synthetic oligonucleotide
ttgaacgtacaaaaccttattcgtatgccgataggaaacgctacaggcacggcgt

SEQ ID NO: 480993 - DNA, 60 bp, Artificial
  Synthetic oligonucleotide
ttgaactaagaccacgagcgttattgacggacatgaatgcatcaagtttaaatcaagcga

SEQ ID NO: 480994 - DNA, 60 bp, Artificial
  Synthetic oligonucleotide
ttgaactaccaatggaaagtgtcagattgactaggtggcaagcgtggctgccatatgcat

SEQ ID NO: 480995 - DNA, 60 bp, Artificial
  Synthetic oligonucleotide
ttgaactcatcaaacgatgagtccctatacatgatagccaagatattcctaatcccctct

SEQ ID NO: 480996 - DNA, 60 bp, Artificial
  Synthetic oligonucleotide
ttgaactcatgggctatctacactcacgccaaagtaagtcaacgtataaacgatatgccc

SEQ ID NO: 480997 - DNA, 58 bp, Artificial
  Synthetic oligonucleotide
ttgaactcgtacctatcattaactctaacaccattcaggacgtgatttcttattcgtg

SEQ ID NO: 480998 - DNA, 60 bp, Artificial
  Synthetic oligonucleotide
ttgaactcgtgatgtataatgggacagtgcatccacagattgaaaaactactacaagagt

SEQ ID NO: 480999 - DNA, 53 bp, Artificial
  Synthetic oligonucleotide
ttgaactctcccggctcctccgtgttagggaagtctcttggggaaatctattg

SEQ ID NO: 481000 - DNA, 60 bp, Artificial
  Synthetic oligonucleotide
ttgaactgtatttgtaccgtcatgatatcgtggttcatcaggaacggcctctcgtcgtgc

SEQ ID NO: 481001 - DNA, 55 bp, Artificial
  Synthetic oligonucleotide
ttgaacttagatagccttgtaatgccaatttaggtattgcgtatgtgcgtcacta

SEQ ID NO: 481002 - DNA, 58 bp, Artificial
  Synthetic oligonucleotide
ttgaacttggtgactataaattctcctgtggacccacccacgaaacaggtggcatgcc

SEQ ID NO: 481003 - DNA, 53 bp, Artificial
  Synthetic oligonucleotide
ttgaagaaacaaccattcggaatcgtttcaaccctgacgagaaccccttctac

SEQ ID NO: 481004 - DNA, 58 bp, Artificial
  Synthetic oligonucleotide
ttgaagaaagttagatcattaccatgttgcaatgacgctttatttaggaacgaatttc

SEQ ID NO: 481005 - DNA, 55 bp, Artificial
  Synthetic oligonucleotide
ttgaagaatcccacccaggaatctttgaaaactcgtgtcttgaaacgatggaggt

SEQ ID NO: 481006 - DNA, 60 bp, Artificial
  Synthetic oligonucleotide
ttgaagacaacaccacgccccctcagattacctgatgggcctccctgctctcagcggtca

SEQ ID NO: 481007 - DNA, 59 bp, Artificial
  Synthetic oligonucleotide
ttgaagacaagtggtacactcaacaagacctatgcaaagttccgctcgttagtattaca

SEQ ID NO: 481008 - DNA, 58 bp, Artificial
  Synthetic oligonucleotide
ttgaagacacgaaagtagatctttggtcttacaatgcggaacttctcgttgccctaga

SEQ ID NO: 481009 - DNA, 55 bp, Artificial
  Synthetic oligonucleotide
ttgaagacactcttccaattgtctatttcctcagttcctcgagggaacagtcagg

SEQ ID NO: 481010 - DNA, 50 bp, Artificial
  Synthetic oligonucleotide
ttgaagaccatctggagattcggacagaacatctgtgatgccatccaacc

SEQ ID NO: 481011 - DNA, 60 bp, Artificial
  Synthetic oligonucleotide
ttgaagacccgagtcatgagggcgaggggataccgctgtatgatgcaatcaaatgtatga

SEQ ID NO: 481012 - DNA, 60 bp, Artificial
  Synthetic oligonucleotide
ttgaagagattacacattttcgacgtggctagagttccagacgatcaaatgtatagacta

SEQ ID NO: 481013 - DNA, 59 bp, Artificial
  Synthetic oligonucleotide
ttgaagagtgttcttgctaccctaatgagggcaaagtggaatgcgtttgtagagacaac

SEQ ID NO: 481014 - DNA, 57 bp, Artificial
  Synthetic oligonucleotide
ttgaagatataaacgaaccacagtgatcgattgatgtattttccgttaagcagaatc

SEQ ID NO: 481015 - DNA, 55 bp, Artificial
  Synthetic oligonucleotide
ttgaagatctaagattattaagcttcatcagagggaccaaagtatctccaagggg

SEQ ID NO: 481016 - DNA, 51 bp, Artificial
  Synthetic oligonucleotide
ttgaagatctattcggattctcagataaagctgtgggcgacactgggatag

SEQ ID NO: 481017 - DNA, 58 bp, Artificial
  Synthetic oligonucleotide
ttgaagattctgtgagattcaatgcgtatgaatctgaaagatggaacaccaatctggt

SEQ ID NO: 481018 - DNA, 55 bp, Artificial
  Synthetic oligonucleotide
ttgaagatttgaggttgttaagcttcatcagagggaccaaagtatctccgcgggg

SEQ ID NO: 481019 - DNA, 55 bp, Artificial
  Synthetic oligonucleotide
ttgaagatttgggcggacaggtacccttttactgctgagactaagggaggacacc

SEQ ID NO: 481020 - DNA, 52 bp, Artificial
  Synthetic oligonucleotide
ttgaagcaccgaacccttactggggtttcgaaaaccgatgagtacgcgaagt

SEQ ID NO: 481021 - DNA, 60 bp, Artificial
  Synthetic oligonucleotide
ttgaagcagagcattctacatgaagtatgttcgttctagacgtactaagtatcgttcagt

SEQ ID NO: 481022 - DNA, 55 bp, Artificial
  Synthetic oligonucleotide
ttgaagcaggagagatggttaggcaaaagagtatcgcaattcgacattggacaat

SEQ ID NO: 481023 - DNA, 56 bp, Artificial
  Synthetic oligonucleotide
ttgaagcatggggctatccaactctattaaaccacataaggaagttctacctttgg

SEQ ID NO: 481024 - DNA, 55 bp, Artificial
  Synthetic oligonucleotide
ttgaagcattttgagaaaggggtggagttgtggataagtaaagaacatagtgtgg

SEQ ID NO: 481025 - DNA, 55 bp, Artificial
  Synthetic oligonucleotide
ttgaagccagcctccaatttggttgcctcagctgatgcactctcagcaattgctg

SEQ ID NO: 481026 - DNA, 55 bp, Artificial
  Synthetic oligonucleotide
ttgaagccctgtcctagaattcaaaaccctagcatatctggttttaggttaggac

SEQ ID NO: 481027 - DNA, 60 bp, Artificial
  Synthetic oligonucleotide
ttgaagctacccacgcgcatatactcgccgtggtcgcgaagcctctggtaagccttcgac

SEQ ID NO: 481028 - DNA, 58 bp, Artificial
  Synthetic oligonucleotide
ttgaagctagagaaacctaccttccattgtagcccccccatctgtctacatggttgta

SEQ ID NO: 481029 - DNA, 60 bp, Artificial
  Synthetic oligonucleotide
ttgaagctagatatgcagctgaattatccacgatgcagatggatgtacagcagctgagga

SEQ ID NO: 481030 - DNA, 55 bp, Artificial
  Synthetic oligonucleotide
ttgaagctcgaattaaaacgcgatatttgaagtctttcgggcttcctcttaatct

SEQ ID NO: 481031 - DNA, 58 bp, Artificial
  Synthetic oligonucleotide
ttgaagctggcgatagggctcagaaatgttcctcaggcccaaaaccgagggctctttg

SEQ ID NO: 481032 - DNA, 60 bp, Artificial
  Synthetic oligonucleotide
ttgaaggaataacatccagttacttacagactcctgcttgttggaatgcacaaacagcct

SEQ ID NO: 481033 - DNA, 60 bp, Artificial
  Synthetic oligonucleotide
ttgaaggagccttataacattgttcatgatccttcatatcctcagaggattgttcatgct

SEQ ID NO: 481034 - DNA, 52 bp, Artificial
  Synthetic oligonucleotide
ttgaaggagcgggttcctttgtcccccaggttgctttgcctcgtgtcccccc

SEQ ID NO: 481035 - DNA, 55 bp, Artificial
  Synthetic oligonucleotide
ttgaaggagtcttctctctggttgtagtcgttgatcgcaaacctcatttgggctc

SEQ ID NO: 481036 - DNA, 50 bp, Artificial
  Synthetic oligonucleotide
ttgaaggattgaaaatcccaatttacaagttgcgcacattagggcccctt

SEQ ID NO: 481037 - DNA, 60 bp, Artificial
  Synthetic oligonucleotide
ttgaaggatttcatctgcatattgcggagtagaaattatgccgaagcgttcaatagatac

SEQ ID NO: 481038 - DNA, 60 bp, Artificial
  Synthetic oligonucleotide
ttgaaggcaaacactgcatcaataggtgtttttatgtggagctgataagagggaggccac

SEQ ID NO: 481039 - DNA, 58 bp, Artificial
  Synthetic oligonucleotide
ttgaaggcaacttgcaataaaatgagtggaaacaagacgcttaaagcatggtgtaaac

SEQ ID NO: 481040 - DNA, 60 bp, Artificial
  Synthetic oligonucleotide
ttgaaggcacataatctatcatgtgttcagggagagtgcccatattgctttacccactgt

SEQ ID NO: 481041 - DNA, 55 bp, Artificial
  Synthetic oligonucleotide
ttgaaggcatgtacattccaaaattggaagaggaacgtgtggtgtctatcttgca

SEQ ID NO: 481042 - DNA, 60 bp, Artificial
  Synthetic oligonucleotide
ttgaagggattaaccacacgcaccatgtatatcgcaacaagacttattgtgtgcttggtg

SEQ ID NO: 481043 - DNA, 58 bp, Artificial
  Synthetic oligonucleotide
ttgaagggccgtgcctatagaaaggagttggtgacgccagctcgagattttggtcact

SEQ ID NO: 481044 - DNA, 54 bp, Artificial
  Synthetic oligonucleotide
ttgaagggcgagcctatcttcggagggtaaattgtaactttcgccaaacaggac

SEQ ID NO: 481045 - DNA, 60 bp, Artificial
  Synthetic oligonucleotide
ttgaagggctgtgtcagaaggattcttgtatatggagatcaagatgccgctctagctgct

SEQ ID NO: 481046 - DNA, 56 bp, Artificial
  Synthetic oligonucleotide
ttgaaggggcctggggatctggtgtaggttttacacttacatgcctagtatcttta

SEQ ID NO: 481047 - DNA, 52 bp, Artificial
  Synthetic oligonucleotide
ttgaagggtaaacgtagtttcaaccaggtgaaggccctatttggggatttga

SEQ ID NO: 481048 - DNA, 58 bp, Artificial
  Synthetic oligonucleotide
ttgaagggtgggtcgtgatagcaaaagacaatgcagtaagatttggggaaagtgaaca

SEQ ID NO: 481049 - DNA, 57 bp, Artificial
  Synthetic oligonucleotide
ttgaaggtacaggatgttcccgggaggttctatggtagttcctcattcatacacgac

SEQ ID NO: 481050 - DNA, 57 bp, Artificial
  Synthetic oligonucleotide
ttgaaggtggatggaatcaacgaatgcaaaggttacaaaaatctgggaacaaatata

SEQ ID NO: 481051 - DNA, 55 bp, Artificial
  Synthetic oligonucleotide
ttgaagtaagcggaattgcgatacgtagagaggacaaattacagtatccagtttt

SEQ ID NO: 481052 - DNA, 54 bp, Artificial
  Synthetic oligonucleotide
ttgaagtagaagaggccacggagggagagaacaactgcctattacaccctatat

SEQ ID NO: 481053 - DNA, 53 bp, Artificial
  Synthetic oligonucleotide
ttgaagtcaaacgacttggggataaccgaaaagtgttgacgattcaaccgaaa

SEQ ID NO: 481054 - DNA, 60 bp, Artificial
  Synthetic oligonucleotide
ttgaagtcataaaagagaattcatttgtgtatgtagattattgggatgattctcaagcat

SEQ ID NO: 481055 - DNA, 60 bp, Artificial
  Synthetic oligonucleotide
ttgaagtccagcagaatggcttgttcgccgttcatgattccatattcgtgctggttccca

SEQ ID NO: 481056 - DNA, 55 bp, Artificial
  Synthetic oligonucleotide
ttgaagtcccttacattggtccaaccccgaactcctctacttgtgttcgcgctcc

SEQ ID NO: 481057 - DNA, 54 bp, Artificial
  Synthetic oligonucleotide
ttgaagtggagtcaactaatgtggtgaatccaacaagttctgagacaagggagg

SEQ ID NO: 481058 - DNA, 58 bp, Artificial
  Synthetic oligonucleotide
ttgaagtgtagttactgtgaccattttggttggacaccattgaaagacatgggtactg

SEQ ID NO: 481059 - DNA, 56 bp, Artificial
  Synthetic oligonucleotide
ttgaagtgtttccctccatcgcgacgtggttggagatctaagttaaccgactccga

SEQ ID NO: 481060 - DNA, 55 bp, Artificial
  Synthetic oligonucleotide
ttgaataaacgagctataccaacttgcgcatcacagaattggctcacagtcgcac

SEQ ID NO: 481061 - DNA, 59 bp, Artificial
  Synthetic oligonucleotide
ttgaataacttagcaagaacatggtctacagccctaatttttaccactccatggataga

SEQ ID NO: 481062 - DNA, 59 bp, Artificial
  Synthetic oligonucleotide
ttgaataatcatggttaaaatcttgtaatgccgactttgcagattttgctactaaaaga

SEQ ID NO: 481063 - DNA, 60 bp, Artificial
  Synthetic oligonucleotide
ttgaataatgaccagctagagaatactatgacttataatcttcctttaaaacgtgatgga

SEQ ID NO: 481064 - DNA, 55 bp, Artificial
  Synthetic oligonucleotide
ttgaatacactttagggcttatacctatgtgacctctcgaatagttatgtgggcc

SEQ ID NO: 481065 - DNA, 60 bp, Artificial
  Synthetic oligonucleotide
ttgaatagcgacacatcaactgatacacagagtattgcttctgaagtgtcagataggaga

SEQ ID NO: 481066 - DNA, 60 bp, Artificial
  Synthetic oligonucleotide
ttgaatatggggcatgtcctaataacatgatgggcacgttttcagtgcggactgtgggga

SEQ ID NO: 481067 - DNA, 55 bp, Artificial
  Synthetic oligonucleotide
ttgaatattggaacagggacttcagcttacacttcacttaacgttttagctaggt

SEQ ID NO: 481068 - DNA, 60 bp, Artificial
  Synthetic oligonucleotide
ttgaatcaaagtacatggattggctttggagattcaaggactgacaaaaccaattcagct

SEQ ID NO: 481069 - DNA, 60 bp, Artificial
  Synthetic oligonucleotide
ttgaatcctccggctcctgaatgtggctaaccttaaccccgcagccagtgcacataagcc

SEQ ID NO: 481070 - DNA, 60 bp, Artificial
  Synthetic oligonucleotide
ttgaatcctgccatggcgcacgaatgtgggccacgggacagcgccttatacgcgctggag

SEQ ID NO: 481071 - DNA, 60 bp, Artificial
  Synthetic oligonucleotide
ttgaatctatgatggaaattaacaatgtgaatgacgctagtggagtggagaggctcagag

SEQ ID NO: 481072 - DNA, 60 bp, Artificial
  Synthetic oligonucleotide
ttgaatctcccgcgagtggtattggtaggccaactcgtgcgcgaatgggttacagcgtca

SEQ ID NO: 481073 - DNA, 59 bp, Artificial
  Synthetic oligonucleotide
ttgaatctgttggacgtataattgagggccaatcaactcgagacagcctccaaattaag

SEQ ID NO: 481074 - DNA, 55 bp, Artificial
  Synthetic oligonucleotide
ttgaatgacgccacataccagagaactagggcactagtgcgcacagggatggatc

SEQ ID NO: 481075 - DNA, 60 bp, Artificial
  Synthetic oligonucleotide
ttgaatgagatgttccgggctaacattgatgaggaggatttcattatacatcgtccgccc

SEQ ID NO: 481076 - DNA, 60 bp, Artificial
  Synthetic oligonucleotide
ttgaatgagtatttcgcgagagcaggagggagtactttgccagaaacacaacgtatgggc

SEQ ID NO: 481077 - DNA, 54 bp, Artificial
  Synthetic oligonucleotide
ttgaatgattggcggtatccattagtattgattgccacacgaagtggcggcagg

SEQ ID NO: 481078 - DNA, 55 bp, Artificial
  Synthetic oligonucleotide
ttgaatgccctaagtgtagaacaaaagctactgaattggaagcgttttgtagtga

SEQ ID NO: 481079 - DNA, 59 bp, Artificial
  Synthetic oligonucleotide
ttgaatgccctgtggtgtcaatgcttagatccattaagcaagttttcactaggttaaaa

SEQ ID NO: 481080 - DNA, 55 bp, Artificial
  Synthetic oligonucleotide
ttgaatgcgctggccgcctttgtcgcctagagcagggtcgtaggctggagtggct

SEQ ID NO: 481081 - DNA, 55 bp, Artificial
  Synthetic oligonucleotide
ttgaatgctaccgaataacgtacccggtgcctatatactcaactagtgacctcag

SEQ ID NO: 481082 - DNA, 57 bp, Artificial
  Synthetic oligonucleotide
ttgaatgctggacgtttctttggggccttatgttttgtttgcctctgaggtactcag

SEQ ID NO: 481083 - DNA, 57 bp, Artificial
  Synthetic oligonucleotide
ttgaatgggcttcccgtacttcgtgttgctttgccagtctctttgggcccccatgaa

SEQ ID NO: 481084 - DNA, 60 bp, Artificial
  Synthetic oligonucleotide
ttgaatggtggtatgataccgtgatgtccgtatggaatggagaatttgttcttgactagt

SEQ ID NO: 481085 - DNA, 59 bp, Artificial
  Synthetic oligonucleotide
ttgaatgtaaattaccgtactcacccgcctcttgcggacatgtcactgaagaacgagag

SEQ ID NO: 481086 - DNA, 52 bp, Artificial
  Synthetic oligonucleotide
ttgaatgtaatcaaggtactggagaaggacgccgttttcccccgccctttcc

SEQ ID NO: 481087 - DNA, 60 bp, Artificial
  Synthetic oligonucleotide
ttgaatgtctaccatctaacacacaaactatgtcttacttagacagcatccagatccctt

SEQ ID NO: 481088 - DNA, 60 bp, Artificial
  Synthetic oligonucleotide
ttgaatgtgttcatcttctgtttcactggctgagtgtgtgttagtgctcctaattgttcc

SEQ ID NO: 481089 - DNA, 60 bp, Artificial
  Synthetic oligonucleotide
ttgaatgttaagcttgtagatgatgatagtatcttgaacagcaaagcaagtgactacact

SEQ ID NO: 481090 - DNA, 60 bp, Artificial
  Synthetic oligonucleotide
ttgaatgttattgtgaggaaacacgatgtcagcaacattggatgcaaattctctcagcat

SEQ ID NO: 481091 - DNA, 60 bp, Artificial
  Synthetic oligonucleotide
ttgaatgtttggatggaaatgtgctgacctggttggggatgtgaggtcgaagaatctatt

SEQ ID NO: 481092 - DNA, 54 bp, Artificial
  Synthetic oligonucleotide
ttgaattaccaattagtgctacattgcttcattttccgacaactaagataagat

SEQ ID NO: 481093 - DNA, 60 bp, Artificial
  Synthetic oligonucleotide
ttgaattatgacgaaagcacgtataggcattttgccacacatatcaaagattttccaatt

SEQ ID NO: 481094 - DNA, 58 bp, Artificial
  Synthetic oligonucleotide
ttgaattcaacatgggtgagattgtgccttctatcaatcatcatgctgtcacaacttc

SEQ ID NO: 481095 - DNA, 60 bp, Artificial
  Synthetic oligonucleotide
ttgaattcaatcgtgagttccttgacaagatgcgtgtgctgtcagtgtcaccaaaatatt

SEQ ID NO: 481096 - DNA, 55 bp, Artificial
  Synthetic oligonucleotide
ttgaattcctggatagttgattccttgtacatgaggtctatcatgttacgtattc

SEQ ID NO: 481097 - DNA, 55 bp, Artificial
  Synthetic oligonucleotide
ttgaattggacatgaccaaatacaccatggctttgaagcggtacggtctcctccc

SEQ ID NO: 481098 - DNA, 54 bp, Artificial
  Synthetic oligonucleotide
ttgaattggcttcccgtacttgggtattgctttggcagtccctttgggccccca

SEQ ID NO: 481099 - DNA, 60 bp, Artificial
  Synthetic oligonucleotide
ttgaattgtatctgcatcgttattacgtcttgatccttgttgaatgaccgttgatcgtgc

SEQ ID NO: 481100 - DNA, 55 bp, Artificial
  Synthetic oligonucleotide
ttgaattgtattcggaggtgtatgatgtcctggtccaggttgaagggtctgctca

SEQ ID NO: 481101 - DNA, 59 bp, Artificial
  Synthetic oligonucleotide
ttgaattgtcgtcgttgatcttcacgtcgatggtaaatatcatacccttctcgttagta

SEQ ID NO: 481102 - DNA, 60 bp, Artificial
  Synthetic oligonucleotide
ttgaattgtgatggtactctactagggaacataacaatataccctcatcagtacattaat

SEQ ID NO: 481103 - DNA, 60 bp, Artificial
  Synthetic oligonucleotide
ttgaatttccagggttcgaccagctgtttggcacgtcagcaactgacaccgcagctaatg

SEQ ID NO: 481104 - DNA, 60 bp, Artificial
  Synthetic oligonucleotide
ttgaatttcccctcgaactggatgaggacgtggagatgaggctgcccatcttcgtgcagc

SEQ ID NO: 481105 - DNA, 52 bp, Artificial
  Synthetic oligonucleotide
ttgaatttcgaaaacacctcgatctgacgagtcgcgaacacttgatcgactt

SEQ ID NO: 481106 - DNA, 58 bp, Artificial
  Synthetic oligonucleotide
ttgaatttcggggccagcagtagacgtgttggtacacagaagactgttttaacagcgc

SEQ ID NO: 481107 - DNA, 60 bp, Artificial
  Synthetic oligonucleotide
ttgaatttgccgtggctatgatgaagagaaatgctagtaccgtaaagactgagtacggcg

SEQ ID NO: 481108 - DNA, 60 bp, Artificial
  Synthetic oligonucleotide
ttgaatttgtctcagcttgctagatccaatgacctatgtgcctagatgtaaccttaaggg

SEQ ID NO: 481109 - DNA, 50 bp, Artificial
  Synthetic oligonucleotide
ttgaattttactgcaggtgataaggttaatatatcggggcatttactatc

SEQ ID NO: 481110 - DNA, 58 bp, Artificial
  Synthetic oligonucleotide
ttgacaaaaaccttagtaattgggcagtgcatatacacctttactagcctgttctcat

SEQ ID NO: 481111 - DNA, 54 bp, Artificial
  Synthetic oligonucleotide
ttgacaaaaccacctccagtggccatccacaccatatacggaagaatgaatgct

SEQ ID NO: 481112 - DNA, 56 bp, Artificial
  Synthetic oligonucleotide
ttgacaaaagtcaacaacggggactacgcaagactttacatatggggagttcacca

SEQ ID NO: 481113 - DNA, 55 bp, Artificial
  Synthetic oligonucleotide
ttgacaaacgctggattgttcatagagaaggaatcctgcctggattcgaccgtcc

SEQ ID NO: 481114 - DNA, 57 bp, Artificial
  Synthetic oligonucleotide
ttgacaaacttattggtttacctattatcggtcatggtgagttggcttggtttgctg

SEQ ID NO: 481115 - DNA, 52 bp, Artificial
  Synthetic oligonucleotide
ttgacaaatatggggttgacttgcctatggttactttcttaaaggatgaact

SEQ ID NO: 481116 - DNA, 54 bp, Artificial
  Synthetic oligonucleotide
ttgacaaattgtacatttggggggttcaccacccgagtacggacagtgaccaaa

SEQ ID NO: 481117 - DNA, 60 bp, Artificial
  Synthetic oligonucleotide
ttgacaacaagggcgctcggaagtcaagcacaaccgactaggcaatggatagaccgccca

SEQ ID NO: 481118 - DNA, 58 bp, Artificial
  Synthetic oligonucleotide
ttgacaacagtaaaggctatgaacaatatgtgactcgtccaaaccccaacggatctcg

SEQ ID NO: 481119 - DNA, 57 bp, Artificial
  Synthetic oligonucleotide
ttgacaaccatggagtggaggacgaccttccaaactactgctatcctttaagcggaa

SEQ ID NO: 481120 - DNA, 55 bp, Artificial
  Synthetic oligonucleotide
ttgacaacgacggatgtgtttacagccgttcccttccctgatttcacttcacttt

SEQ ID NO: 481121 - DNA, 59 bp, Artificial
  Synthetic oligonucleotide
ttgacaacgtgaacgtaatgtggtagcgggcgcatcgggtatattaataggcagtccta

SEQ ID NO: 481122 - DNA, 54 bp, Artificial
  Synthetic oligonucleotide
ttgacaacgttcgttgcgtccgtttttcgtagcggtaagcacgccccaagccga

SEQ ID NO: 481123 - DNA, 54 bp, Artificial
  Synthetic oligonucleotide
ttgacaagaacggcaataccccacatgggaagggtgtcatgaagaccctcacca

SEQ ID NO: 481124 - DNA, 58 bp, Artificial
  Synthetic oligonucleotide
ttgacaagagatgggggtaatagtagttctgacaacgagaccttcagacctggtggag

SEQ ID NO: 481125 - DNA, 60 bp, Artificial
  Synthetic oligonucleotide
ttgacaatcactccttcgctgaaagatcggttctatatacgtcatgtgatgaaacgtgta

SEQ ID NO: 481126 - DNA, 60 bp, Artificial
  Synthetic oligonucleotide
ttgacaatctatctaagctgggcgctgatctgactcacgtgttgccagcgagtgcggtta

SEQ ID NO: 481127 - DNA, 60 bp, Artificial
  Synthetic oligonucleotide
ttgacaatgaaccgagcacagcaacggtgaagaacatgcatcgtgatcgttatcaagtct

SEQ ID NO: 481128 - DNA, 55 bp, Artificial
  Synthetic oligonucleotide
ttgacaattacaatgagacacttaccggttcacaaaagtcaacactgtttgcaac

SEQ ID NO: 481129 - DNA, 52 bp, Artificial
  Synthetic oligonucleotide
ttgacacaatcatcccaatcaatcacactacagcaacaacgtctagtgtcaa

SEQ ID NO: 481130 - DNA, 60 bp, Artificial
  Synthetic oligonucleotide
ttgacacagtactcgaaaagaacgttacagtgacacactctgtcaacctacttgaggaca

SEQ ID NO: 481131 - DNA, 55 bp, Artificial
  Synthetic oligonucleotide
ttgacaccatcagactatcatttcagcttatgagaccaccaaatatgacaccagc

SEQ ID NO: 481132 - DNA, 55 bp, Artificial
  Synthetic oligonucleotide
ttgacaccgtagggacacgtggagcacgcgcactccaacctccttcgattctgaa

SEQ ID NO: 481133 - DNA, 57 bp, Artificial
  Synthetic oligonucleotide
ttgacacctaactggaacaatatgacttggcaagagtgggaaaaacaggtgaacttc

SEQ ID NO: 481134 - DNA, 60 bp, Artificial
  Synthetic oligonucleotide
ttgacacctagatgtttggttcactatccatacaggctttggcactacccctgcactgtc

SEQ ID NO: 481135 - DNA, 55 bp, Artificial
  Synthetic oligonucleotide
ttgacacgctcggattaggacgttcgccaatggaatactaatattgccaatcgct

SEQ ID NO: 481136 - DNA, 54 bp, Artificial
  Synthetic oligonucleotide
ttgacacgtaacgaggttacgagtaaagtcgtctgcaagagaacgaccggcggg

SEQ ID NO: 481137 - DNA, 55 bp, Artificial
  Synthetic oligonucleotide
ttgacactgacagcttatgacccaaattttcaacatgcagtcactttcaccgggt

SEQ ID NO: 481138 - DNA, 60 bp, Artificial
  Synthetic oligonucleotide
ttgacagaacctacttctctccatgtttgtgaagcgtcagttctcttgacttggatgcta

SEQ ID NO: 481139 - DNA, 60 bp, Artificial
  Synthetic oligonucleotide
ttgacagccacctggcatttacacacaaggcccgtgagctgtatccggagttctacaaaa

SEQ ID NO: 481140 - DNA, 55 bp, Artificial
  Synthetic oligonucleotide
ttgacagctcttcacaatctctctgggttttagaaccaatactaacaagcccggt

SEQ ID NO: 481141 - DNA, 60 bp, Artificial
  Synthetic oligonucleotide
ttgacagcttggttagatgccatgaccactatctttgcagacactgtctgaatctcctgc

SEQ ID NO: 481142 - DNA, 58 bp, Artificial
  Synthetic oligonucleotide
ttgacaggaaacctcatgttggacctactggttcactgccaagttttgacgatctgtt

SEQ ID NO: 481143 - DNA, 60 bp, Artificial
  Synthetic oligonucleotide
ttgacagtagaccaaatcaagcgctatgtcgttgtaggcaccttgaccgcagacgagttc

SEQ ID NO: 481144 - DNA, 52 bp, Artificial
  Synthetic oligonucleotide
ttgacagtagcctagcacggagacacctagcccgagaacaacatccggagta

SEQ ID NO: 481145 - DNA, 60 bp, Artificial
  Synthetic oligonucleotide
ttgacagtgacactataatcattaccaccaatttggccaatcctgctcctctagattatg

SEQ ID NO: 481146 - DNA, 60 bp, Artificial
  Synthetic oligonucleotide
ttgacagtgataactggtctgggtattctggtatattctctgttgaaggaaaaacctgca

SEQ ID NO: 481147 - DNA, 59 bp, Artificial
  Synthetic oligonucleotide
ttgacagttgatgaaccatctttttcaatattgagaacacgtacagtgaatttgtacgg

SEQ ID NO: 481148 - DNA, 53 bp, Artificial
  Synthetic oligonucleotide
ttgacatacctgaaggagtagcccaagacagcgctatggacgccacatgcttg

SEQ ID NO: 481149 - DNA, 60 bp, Artificial
  Synthetic oligonucleotide
ttgacatagttagcgccccggactcggagcaggacaccctcacgctcagccccatcttcg

SEQ ID NO: 481150 - DNA, 60 bp, Artificial
  Synthetic oligonucleotide
ttgacatatcaacacttgcggtattagtgttgacgtatcaacagcacgacgggataggag

SEQ ID NO: 481151 - DNA, 60 bp, Artificial
  Synthetic oligonucleotide
ttgacatatctagatcataaactgatgcctattttagatcaaaattttattgaatacaaa

SEQ ID NO: 481152 - DNA, 60 bp, Artificial
  Synthetic oligonucleotide
ttgacatcaccctaccagttggcccacctggtgaggatgacaagccctgggtgccgctca

SEQ ID NO: 481153 - DNA, 55 bp, Artificial
  Synthetic oligonucleotide
ttgacatctcaaacactcgtgccactcaatctcaatttgagaagtggtatgaggg

SEQ ID NO: 481154 - DNA, 50 bp, Artificial
  Synthetic oligonucleotide
ttgacatggcggcctatcgtcttcataatatatttaccgtttcagtcgat

SEQ ID NO: 481155 - DNA, 57 bp, Artificial
  Synthetic oligonucleotide
ttgacattaattaaatgtccacctctgctagtaacatccaacatagatattaccaaa

SEQ ID NO: 481156 - DNA, 55 bp, Artificial
  Synthetic oligonucleotide
ttgacattacctgtggtggtcttgattacccttacatgggtgacgggacaactgc

SEQ ID NO: 481157 - DNA, 60 bp, Artificial
  Synthetic oligonucleotide
ttgacattggctcagccattggatgtgacccagatgtggactggactcggtttggccttg

SEQ ID NO: 481158 - DNA, 55 bp, Artificial
  Synthetic oligonucleotide
ttgacatttatgtacaaagataaggtcacccgctgatacgtagtttcaaaccggt

SEQ ID NO: 481159 - DNA, 57 bp, Artificial
  Synthetic oligonucleotide
ttgacatttcgctgcttcgcaacacttacgtcgaacccatagctcttaaattggctc

SEQ ID NO: 481160 - DNA, 54 bp, Artificial
  Synthetic oligonucleotide
ttgaccaacaagtgggctttcaaaaagccttctttaaccccagaatagcttcaa

SEQ ID NO: 481161 - DNA, 55 bp, Artificial
  Synthetic oligonucleotide
ttgaccaacatgtttctgtgcccgcgctacaatttgagcactctatctatcaggc

SEQ ID NO: 481162 - DNA, 60 bp, Artificial
  Synthetic oligonucleotide
ttgaccaagcaatcaccaggacatgaggtttttgcaatgaaggttgatatagcatcacaa

SEQ ID NO: 481163 - DNA, 50 bp, Artificial
  Synthetic oligonucleotide
ttgaccacgcaagcgcacacgcagtttgtggtcaattcaccagtcgacga

SEQ ID NO: 481164 - DNA, 60 bp, Artificial
  Synthetic oligonucleotide
ttgaccactttcacttgggtgacgatatggatcctgagcttagaggtcttgcccaggcac

SEQ ID NO: 481165 - DNA, 60 bp, Artificial
  Synthetic oligonucleotide
ttgaccagatgataaaacatgaatggtcagacaataaagacagcgaggagccaataagta

SEQ ID NO: 481166 - DNA, 60 bp, Artificial
  Synthetic oligonucleotide
ttgaccataattgtctatctgacgtcatttgtggtcccgatcatcttaaaggcactgtac

SEQ ID NO: 481167 - DNA, 60 bp, Artificial
  Synthetic oligonucleotide
ttgaccatacagttaattataagcgtaaggaggctgaatggaagcgtaaatgctctgatc

SEQ ID NO: 481168 - DNA, 53 bp, Artificial
  Synthetic oligonucleotide
ttgaccatctcactggcagccgagtagcccagcatagccttgaaggtagcttc

SEQ ID NO: 481169 - DNA, 55 bp, Artificial
  Synthetic oligonucleotide
ttgaccatgagattagaaatcgtagattagccagcttaagcggtgttgggttcac

SEQ ID NO: 481170 - DNA, 60 bp, Artificial
  Synthetic oligonucleotide
ttgaccatgcatgtcagactatgcacgttatagactccttcggttctctgacagttgggt

SEQ ID NO: 481171 - DNA, 59 bp, Artificial
  Synthetic oligonucleotide
ttgacccaaacatccggtcaggagtcaggactatcaccacgggtgcgccaatcacgtac

SEQ ID NO: 481172 - DNA, 60 bp, Artificial
  Synthetic oligonucleotide
ttgacccagtagtcgtcaagggtggagcagggtcctctgctaaggcaacccgccagcagc

SEQ ID NO: 481173 - DNA, 58 bp, Artificial
  Synthetic oligonucleotide
ttgacccccaaatgcctagtggattacccctatagattgtggcattatccgtgcaccg

SEQ ID NO: 481174 - DNA, 60 bp, Artificial
  Synthetic oligonucleotide
ttgacccgactgggcttgagccagatgaccatctcaaggagagatcaagcctcagatatg

SEQ ID NO: 481175 - DNA, 58 bp, Artificial
  Synthetic oligonucleotide
ttgacccgcgggatcctccggtcttgtactgctacggggatgacttgatatggggctc

SEQ ID NO: 481176 - DNA, 51 bp, Artificial
  Synthetic oligonucleotide
ttgaccctaccaaaacgcatcatagagccagacaccaaacaggagactccg

SEQ ID NO: 481177 - DNA, 56 bp, Artificial
  Synthetic oligonucleotide
ttgaccctcaggaatacaaccttatccgatttgttgacccacttacgggagccaca

SEQ ID NO: 481178 - DNA, 51 bp, Artificial
  Synthetic oligonucleotide
ttgaccctgtccgaagtgactggacggggactctgcataggaacagtccca

SEQ ID NO: 481179 - DNA, 60 bp, Artificial
  Synthetic oligonucleotide
ttgaccgaccgtggtccgatctcattactgacgtttcctcgacagaacatcccagccatg

SEQ ID NO: 481180 - DNA, 60 bp, Artificial
  Synthetic oligonucleotide
ttgaccgcacaaacaacgaatgaagatgacgcaaaatacatcgcacacgcccgtcaagac

SEQ ID NO: 481181 - DNA, 58 bp, Artificial
  Synthetic oligonucleotide
ttgaccgtctggggaacaaaaaatctccaggcaagagtcactgctattgagaaatacc

SEQ ID NO: 481182 - DNA, 58 bp, Artificial
  Synthetic oligonucleotide
ttgaccgtgaatcgtgtaatggcgtctatgcgaacataagcaagaacgcccttttagt

SEQ ID NO: 481183 - DNA, 60 bp, Artificial
  Synthetic oligonucleotide
ttgacctacacctgtggcaacacagcgattaatgggattgtcacctcatttatggaccgc

SEQ ID NO: 481184 - DNA, 58 bp, Artificial
  Synthetic oligonucleotide
ttgacctagcaagctaccggggcaccaagctatacttccttccacaccctaactatga

SEQ ID NO: 481185 - DNA, 57 bp, Artificial
  Synthetic oligonucleotide
ttgacctatgtaaccgtgatgtgtcccggataaccttcttccagaaagactgtaata

SEQ ID NO: 481186 - DNA, 55 bp, Artificial
  Synthetic oligonucleotide
ttgacctcatgtatgaggttgctcacgtccagtgtgttcggctcctgcaggcagc

SEQ ID NO: 481187 - DNA, 60 bp, Artificial
  Synthetic oligonucleotide
ttgacctctttgtgttcagcacaagtttctatctcattagcatcttccttcacctagtta

SEQ ID NO: 481188 - DNA, 56 bp, Artificial
  Synthetic oligonucleotide
ttgacctgtacttgccgcccgattcaccagtgaaggtgaaagaccgtgtggggtac

SEQ ID NO: 481189 - DNA, 54 bp, Artificial
  Synthetic oligonucleotide
ttgaccttgatgcgacttatcttgctactgaccaagcgatgcttgatcagaagt

SEQ ID NO: 481190 - DNA, 60 bp, Artificial
  Synthetic oligonucleotide
ttgacgaagagattctcacttggaatgctgcaggggagagggccattaaagctatttatg

SEQ ID NO: 481191 - DNA, 55 bp, Artificial
  Synthetic oligonucleotide
ttgacgaagccaagaagaccgtggaggctctcaatgggtatttggacaagcacag

SEQ ID NO: 481192 - DNA, 56 bp, Artificial
  Synthetic oligonucleotide
ttgacgaaggagactgaaaaactcatacacccacagacattaaaacgtaagaagaa

SEQ ID NO: 481193 - DNA, 60 bp, Artificial
  Synthetic oligonucleotide
ttgacgaaggaggctgtcattgctttagctcaaattcaggctgcttcttcttttaagagg

SEQ ID NO: 481194 - DNA, 60 bp, Artificial
  Synthetic oligonucleotide
ttgacgaagtgtatgattatataaatagtgagttagccgataatgttgacttaactgctg

SEQ ID NO: 481195 - DNA, 60 bp, Artificial
  Synthetic oligonucleotide
ttgacgacagattcttccaagaatgggttgaaacccatgacattgacttggaagtcacga

SEQ ID NO: 481196 - DNA, 50 bp, Artificial
  Synthetic oligonucleotide
ttgacgacccacagcttcgtgacgctctcagggatgctcacgtggccgat

SEQ ID NO: 481197 - DNA, 60 bp, Artificial
  Synthetic oligonucleotide
ttgacgagaaatcacgaaacatgaaacaactattcgcattcccactcacataccaatcac

SEQ ID NO: 481198 - DNA, 51 bp, Artificial
  Synthetic oligonucleotide
ttgacgagaacttcggccgagcaatgggaggcctagataatttttgcaacg

SEQ ID NO: 481199 - DNA, 56 bp, Artificial
  Synthetic oligonucleotide
ttgacgaggcaagtcgcgcgcgggtctatatactcgagattgggcctttttttaag

SEQ ID NO: 481200 - DNA, 60 bp, Artificial
  Synthetic oligonucleotide
ttgacgaggttgtgctgcttcattttggtcagctgtgtgctgtcatgtccaaactgaagg

SEQ ID NO: 481201 - DNA, 53 bp, Artificial
  Synthetic oligonucleotide
ttgacgagtttctagcaaactgcaacgtctccgagcgcaatgatcaagtgtcc

SEQ ID NO: 481202 - DNA, 57 bp, Artificial
  Synthetic oligonucleotide
ttgacgatttattgtttgtgtattgtccgaccgaagaagattggaaattcagtatgt

SEQ ID NO: 481203 - DNA, 60 bp, Artificial
  Synthetic oligonucleotide
ttgacgcaattgatggggaattcagactgaggactgagcagaggaaacactttgtggagt

SEQ ID NO: 481204 - DNA, 55 bp, Artificial
  Synthetic oligonucleotide
ttgacgcacattattaaatggaacacgcgacgtttgttaggacaatgccagcaca

SEQ ID NO: 481205 - DNA, 55 bp, Artificial
  Synthetic oligonucleotide
ttgacgcaggcatcggcgtaccatacattgcttatggaaggccaacccaccgggg

SEQ ID NO: 481206 - DNA, 57 bp, Artificial
  Synthetic oligonucleotide
ttgacgcatttgaacggtctccaatgtcagcgtatgcctctgaaattgatgcatccc

SEQ ID NO: 481207 - DNA, 50 bp, Artificial
  Synthetic oligonucleotide
ttgacgccatatcattgtattgcacgcagatggttatgcttcgcgcggca

SEQ ID NO: 481208 - DNA, 60 bp, Artificial
  Synthetic oligonucleotide
ttgacgctaacactgagtgttcgattgcatacactgccacaagattccatattgacaata

SEQ ID NO: 481209 - DNA, 59 bp, Artificial
  Synthetic oligonucleotide
ttgacgctttacgcactggtatgccgtctggtgagttttgcccgttgtctggtgaggac

SEQ ID NO: 481210 - DNA, 58 bp, Artificial
  Synthetic oligonucleotide
ttgacggaggcaattgacgaggaaccagatgatcgaacgatcttctgggtctatggtc

SEQ ID NO: 481211 - DNA, 58 bp, Artificial
  Synthetic oligonucleotide
ttgacggagtctctaccactggaagacgtggtttatggtattgagaatctcgagggac

SEQ ID NO: 481212 - DNA, 56 bp, Artificial
  Synthetic oligonucleotide
ttgacggagtttacctggagtatgggcggtgtggaaaacaagaaggatcaagaaca

SEQ ID NO: 481213 - DNA, 57 bp, Artificial
  Synthetic oligonucleotide
ttgacggcctacgtccaaggtgattactctacagctgccttctggaacggtatccgg

SEQ ID NO: 481214 - DNA, 60 bp, Artificial
  Synthetic oligonucleotide
ttgacgggaaagagtggatgcatgtgtgcacgacaggaaacgataatgatgcaagtgccc

SEQ ID NO: 481215 - DNA, 55 bp, Artificial
  Synthetic oligonucleotide
ttgacgggctcatagcttatgataactcaagtgaaggatggaatatcggggctgg

SEQ ID NO: 481216 - DNA, 59 bp, Artificial
  Synthetic oligonucleotide
ttgacgggggtggcgtcgcgcctgacgaagtgggagcaacacttcgatcaattggtaga

SEQ ID NO: 481217 - DNA, 52 bp, Artificial
  Synthetic oligonucleotide
ttgacgggttcaccccagaggcattcgaaagaagaattacagcgaaaataca

SEQ ID NO: 481218 - DNA, 52 bp, Artificial
  Synthetic oligonucleotide
ttgacggttatcgggctgagggcgctaaggagaacgctaagggtccgtggca

SEQ ID NO: 481219 - DNA, 55 bp, Artificial
  Synthetic oligonucleotide
ttgacgtaattccgttagccgttgagtcatacccgtcaaatcgttgtaatccaaa

SEQ ID NO: 481220 - DNA, 60 bp, Artificial
  Synthetic oligonucleotide
ttgacgtcaatccgagaaagaacaatgctctgcgaagcgaatgcattagcgcagaacata

SEQ ID NO: 481221 - DNA, 60 bp, Artificial
  Synthetic oligonucleotide
ttgacgtcatatatcactagaacgaccacttatcctatatagtcgacgtggtcaatttga

SEQ ID NO: 481222 - DNA, 60 bp, Artificial
  Synthetic oligonucleotide
ttgacgtcatcaatgacgttataccaagcactgttactgtacactttagggctaagatct

SEQ ID NO: 481223 - DNA, 60 bp, Artificial
  Synthetic oligonucleotide
ttgacgtcatcaatgacgttataccaagcactgttgctgtacacctttggactcaggtcc

SEQ ID NO: 481224 - DNA, 56 bp, Artificial
  Synthetic oligonucleotide
ttgacgtccggtagcttccgaaggaagtaaggattgcttcgcggcgaagcaaacca

SEQ ID NO: 481225 - DNA, 58 bp, Artificial
  Synthetic oligonucleotide
ttgacgtcggaacttgatttagctccctgaatgtttggatggaaatgagctgaccggg

SEQ ID NO: 481226 - DNA, 59 bp, Artificial
  Synthetic oligonucleotide
ttgacgtcggacgctgatttagctccctgaatgttcggatggaaatgtactgaccggga

SEQ ID NO: 481227 - DNA, 54 bp, Artificial
  Synthetic oligonucleotide
ttgacgtcgtcccaaaagtcccgacattctttctgcgagattagatgtcgaacc

SEQ ID NO: 481228 - DNA, 60 bp, Artificial
  Synthetic oligonucleotide
ttgacgtgctggcgtacgacgggtgcacgcagaccacccacggtgactgtgggctgccgt

SEQ ID NO: 481229 - DNA, 55 bp, Artificial
  Synthetic oligonucleotide
ttgacgtggactatacttcattgcgtgtgtgtggtgatgaagaccaatcctgttc

SEQ ID NO: 481230 - DNA, 57 bp, Artificial
  Synthetic oligonucleotide
ttgactaaagtttgtgttgacttgaccaaccaggaggaggtgatacgattccccgca

SEQ ID NO: 481231 - DNA, 60 bp, Artificial
  Synthetic oligonucleotide
ttgactacagaggcatcactgcacacaggctcgtcggtgcggaacccagacctcccgtca

SEQ ID NO: 481232 - DNA, 55 bp, Artificial
  Synthetic oligonucleotide
ttgactagagaggagtgtgttattgatgggaattggacctatagttctgctatcg

SEQ ID NO: 481233 - DNA, 57 bp, Artificial
  Synthetic oligonucleotide
ttgactagggttcgtatgacgattactcgctgctctcctgaaactgcctacctcgcc

SEQ ID NO: 481234 - DNA, 56 bp, Artificial
  Synthetic oligonucleotide
ttgactagtagttatgggtttataggggactgacaattagaccataaatctgggag

SEQ ID NO: 481235 - DNA, 60 bp, Artificial
  Synthetic oligonucleotide
ttgactatcccttcatacttgatgagcgttggtgtcttggtggatactagcctaatgtga

SEQ ID NO: 481236 - DNA, 58 bp, Artificial
  Synthetic oligonucleotide
ttgactatgcagttgctatggccaaaaggaatattgttaccgccactactagtaaagg

SEQ ID NO: 481237 - DNA, 60 bp, Artificial
  Synthetic oligonucleotide
ttgactattagagtttggtctgagctaaacattggaactggtacctcggcttacacatca

SEQ ID NO: 481238 - DNA, 57 bp, Artificial
  Synthetic oligonucleotide
ttgactatttgtttgaaaatcggaagatcgtgagggatactaccgaggcaaggtgga

SEQ ID NO: 481239 - DNA, 60 bp, Artificial
  Synthetic oligonucleotide
ttgactcaattacagaggtagaatgctttttaactccagaaatgggggactcagatgagc

SEQ ID NO: 481240 - DNA, 60 bp, Artificial
  Synthetic oligonucleotide
ttgactcacgcgttgatatctttcctttctatatcccacaccgtcatatctacggtcagc

SEQ ID NO: 481241 - DNA, 59 bp, Artificial
  Synthetic oligonucleotide
ttgactcactctctttgttagaaaccatttccgttctgtggatatgcgccagaccaaaa

SEQ ID NO: 481242 - DNA, 54 bp, Artificial
  Synthetic oligonucleotide
ttgactcagcttggctgtactctaaattttccaatcagtcctattgaaactgtg

SEQ ID NO: 481243 - DNA, 58 bp, Artificial
  Synthetic oligonucleotide
ttgactccaaagagaccagtctatcattgacacttataaagcaggacccaagccaccc

SEQ ID NO: 481244 - DNA, 52 bp, Artificial
  Synthetic oligonucleotide
ttgactccaatgccacaattaaattggatgacacagtcggaattaattctgc

SEQ ID NO: 481245 - DNA, 56 bp, Artificial
  Synthetic oligonucleotide
ttgactccgtatgaaatcttgtacggggcgcccccgcccctcgtcaacttccatga

SEQ ID NO: 481246 - DNA, 54 bp, Artificial
  Synthetic oligonucleotide
ttgactccttctccggggaagaatttcgtcacgagccggtacgccgttctcaac

SEQ ID NO: 481247 - DNA, 55 bp, Artificial
  Synthetic oligonucleotide
ttgactcttgggcccggaacaggctgtctcggcaggacagtaacaagagctcagt

SEQ ID NO: 481248 - DNA, 55 bp, Artificial
  Synthetic oligonucleotide
ttgactcttttcggtaacaagaggccttctaagtctgccggaaaggatgaaggtc

SEQ ID NO: 481249 - DNA, 59 bp, Artificial
  Synthetic oligonucleotide
ttgactcttttcggtaacaagaggccttctaagtctgtaatggcagtgttgaagtctca

SEQ ID NO: 481250 - DNA, 57 bp, Artificial
  Synthetic oligonucleotide
ttgactgatcccttgttctatccaccgtctgaccccaagatcttgaggcacttcaat

SEQ ID NO: 481251 - DNA, 60 bp, Artificial
  Synthetic oligonucleotide
ttgactgctagcttgacctcaatcggttcggccttgactacgttagctacacagctaaca

SEQ ID NO: 481252 - DNA, 52 bp, Artificial
  Synthetic oligonucleotide
ttgactgctcttcataacgatacggcagcatcagtacaagatttgcaagttg

SEQ ID NO: 481253 - DNA, 60 bp, Artificial
  Synthetic oligonucleotide
ttgactggaaatgtttcagttgggtataaacacactcatccaggtgaacaaggcagagaa

SEQ ID NO: 481254 - DNA, 56 bp, Artificial
  Synthetic oligonucleotide
ttgactgtaccgcctaatacagtcacacttatgggggccgaagggagggtactcac

SEQ ID NO: 481255 - DNA, 60 bp, Artificial
  Synthetic oligonucleotide
ttgactgtaggagaatatggtgataagaaaggtcgtatgcattggcatatgattgttttt

SEQ ID NO: 481256 - DNA, 52 bp, Artificial
  Synthetic oligonucleotide
ttgactgttataccaaatgacatgtttcttcgtgaatcgctagtcgcatgcg

SEQ ID NO: 481257 - DNA, 60 bp, Artificial
  Synthetic oligonucleotide
ttgacttagtacctacggattgtggaatatgtatggttaagactcaactgaatcaagatg

SEQ ID NO: 481258 - DNA, 58 bp, Artificial
  Synthetic oligonucleotide
ttgacttgacgacttcgaacgaggccctctctgcagtcgacccttccgaatttgtcga

SEQ ID NO: 481259 - DNA, 57 bp, Artificial
  Synthetic oligonucleotide
ttgacttgactgaactcattgacgtacgccccgtgggacccaggccgtccaaaagca

SEQ ID NO: 481260 - DNA, 59 bp, Artificial
  Synthetic oligonucleotide
ttgacttggcaagctatcggggcaccaagctttactttgttccacatcctaactatgat

SEQ ID NO: 481261 - DNA, 57 bp, Artificial
  Synthetic oligonucleotide
ttgacttggtcaatcgggtcctctcaaacttggctatgcaatcggggaatgggtcct

SEQ ID NO: 481262 - DNA, 54 bp, Artificial
  Synthetic oligonucleotide
ttgacttgtcatggtccgtgcgcgtagaacaaagagagcgtctgctgcagacct

SEQ ID NO: 481263 - DNA, 60 bp, Artificial
  Synthetic oligonucleotide
ttgactttatcatctttaggcgctatgtctattgtatatgtaggctgtatagccccactt

SEQ ID NO: 481264 - DNA, 57 bp, Artificial
  Synthetic oligonucleotide
ttgagaaaaccaggccccgcaggggcaatgtttttgatccaggcccatattaattca

SEQ ID NO: 481265 - DNA, 60 bp, Artificial
  Synthetic oligonucleotide
ttgagaaaattgggtgatcattgtcagtggacgacaaaaggtcttgatgtagtatgggcc

SEQ ID NO: 481266 - DNA, 60 bp, Artificial
  Synthetic oligonucleotide
ttgagaaacgatactgatgtagtgaattttgtgagcatggaattttctctcactgaccct

SEQ ID NO: 481267 - DNA, 60 bp, Artificial
  Synthetic oligonucleotide
ttgagaaagctgccgaagcgtacctgaacaccgttggcgctatcgaccgttctcgctcca

SEQ ID NO: 481268 - DNA, 60 bp, Artificial
  Synthetic oligonucleotide
ttgagaaatgtggctacgagccatacattatctcaccctcaccgcgtgagaaggagtacc

SEQ ID NO: 481269 - DNA, 57 bp, Artificial
  Synthetic oligonucleotide
ttgagaacaagagagcgtacgaggcgtcgttcaaaggccgcgttttcactcacgaaa

SEQ ID NO: 481270 - DNA, 59 bp, Artificial
  Synthetic oligonucleotide
ttgagaacacaagaatctgaatgtgtttgtataaacggctcgtgttttactataatgac

SEQ ID NO: 481271 - DNA, 60 bp, Artificial
  Synthetic oligonucleotide
ttgagaacgcaagagtctgaatgtgcctgtgtaaatggttcatgttttactataatgacc

SEQ ID NO: 481272 - DNA, 52 bp, Artificial
  Synthetic oligonucleotide
ttgagaacggcacctcaccaaacataaatggcgcgtggctcatgatggacgg

SEQ ID NO: 481273 - DNA, 55 bp, Artificial
  Synthetic oligonucleotide
ttgagaacggccaggtgcaatcgagccgggcggtaccaagcgaaccggactgggt

SEQ ID NO: 481274 - DNA, 60 bp, Artificial
  Synthetic oligonucleotide
ttgagaacgtggttcacagccgagagattgctcgttgatgaatgtttcttggtccatgct

SEQ ID NO: 481275 - DNA, 60 bp, Artificial
  Synthetic oligonucleotide
ttgagaactacggtggcgagacacaagcccagagacgccaacacacggacatttcgttca

SEQ ID NO: 481276 - DNA, 60 bp, Artificial
  Synthetic oligonucleotide
ttgagaactcaagagtcatcttgcacctgcatccaaggtgattgctattgggtaatgact

SEQ ID NO: 481277 - DNA, 59 bp, Artificial
  Synthetic oligonucleotide
ttgagaactcagataccggccgaaatgctcgcaagcattgatctgaaatatttcaatga

SEQ ID NO: 481278 - DNA, 58 bp, Artificial
  Synthetic oligonucleotide
ttgagaactgcgattttgaatagaaccactttaccaaatatgctaccaccaatcttcc

SEQ ID NO: 481279 - DNA, 60 bp, Artificial
  Synthetic oligonucleotide
ttgagaagaaaactagagtggttcatgctgctatgcttttcgctcctgagagtatgttag

SEQ ID NO: 481280 - DNA, 60 bp, Artificial
  Synthetic oligonucleotide
ttgagaagaacgcagaaactggcgaaattttgcgtatcaaccctcattcagatgccattc

SEQ ID NO: 481281 - DNA, 58 bp, Artificial
  Synthetic oligonucleotide
ttgagaagatataaaacccaaatagaccccagtctggcagaccaactaattcatatgc

SEQ ID NO: 481282 - DNA, 53 bp, Artificial
  Synthetic oligonucleotide
ttgagaagatgaacactcaattcactgcagtgggtaaggaattcaacaatcta

SEQ ID NO: 481283 - DNA, 55 bp, Artificial
  Synthetic oligonucleotide
ttgagaaggtttttaacttccaaggcatggcggagttgtacgaccgtatgcgtgg

SEQ ID NO: 481284 - DNA, 60 bp, Artificial
  Synthetic oligonucleotide
ttgagaatctgtggctcggtggatctaccgataatgtcgcacacgtaaataaatccatag

SEQ ID NO: 481285 - DNA, 55 bp, Artificial
  Synthetic oligonucleotide
ttgagaatgcaaaaccaacacttcgtcaaatcatgcaccatttctcagatgcagc

SEQ ID NO: 481286 - DNA, 60 bp, Artificial
  Synthetic oligonucleotide
ttgagaatttacctggctgatctgggcgataaggagttatctcctatagatggtcaatgc

SEQ ID NO: 481287 - DNA, 53 bp, Artificial
  Synthetic oligonucleotide
ttgagacataaagttttatggctcgcccatacggcttagcatttcggacccgg

SEQ ID NO: 481288 - DNA, 52 bp, Artificial
  Synthetic oligonucleotide
ttgagacccatagaagagatcaccctggactcaagtatggactacacgcccc

SEQ ID NO: 481289 - DNA, 59 bp, Artificial
  Synthetic oligonucleotide
ttgagacccgattgcgacatgaggctagtgctgagtgggaacctcgtgtggaggcgcta

SEQ ID NO: 481290 - DNA, 55 bp, Artificial
  Synthetic oligonucleotide
ttgagacgtatttggaacatggcgggcggtgatgacaagaggaactccctcgaag

SEQ ID NO: 481291 - DNA, 60 bp, Artificial
  Synthetic oligonucleotide
ttgagacgtggccgaatatgatctcaggacggctagccgactggttcatgtcccaatatg

SEQ ID NO: 481292 - DNA, 59 bp, Artificial
  Synthetic oligonucleotide
ttgagactaaccacacaggaacatattgttctttgggtggaatcagtccggtgcacctg

SEQ ID NO: 481293 - DNA, 51 bp, Artificial
  Synthetic oligonucleotide
ttgagactacttaagcaagaatcatactctgatgaattaagcaggtcgtcc

SEQ ID NO: 481294 - DNA, 60 bp, Artificial
  Synthetic oligonucleotide
ttgagagacatggttatattggttacggtggtaccactgctagcgtgtgtagtaactggc

SEQ ID NO: 481295 - DNA, 55 bp, Artificial
  Synthetic oligonucleotide
ttgagagacgttctacaatcaaacggaagaaatgtcttctaaggatgtggcagag

SEQ ID NO: 481296 - DNA, 60 bp, Artificial
  Synthetic oligonucleotide
ttgagagacttcatcttgattgcagcgaggactgtgaacctactgggacagagcagtctc

SEQ ID NO: 481297 - DNA, 57 bp, Artificial
  Synthetic oligonucleotide
ttgagagagtacttcagtttgatagatccaacacttgctaatgccttgaacaagata

SEQ ID NO: 481298 - DNA, 60 bp, Artificial
  Synthetic oligonucleotide
ttgagagatatggttgatcctattagctttctttggacatggttatttgagcgtcgttta

SEQ ID NO: 481299 - DNA, 57 bp, Artificial
  Synthetic oligonucleotide
ttgagagattctgtgatcatgttaagacctaatgcaataccaaaggtcaatcttcat

SEQ ID NO: 481300 - DNA, 59 bp, Artificial
  Synthetic oligonucleotide
ttgagagctttcgaatctcccataacaaaggaaaaattgcaatgtatcgtagatttgta

SEQ ID NO: 481301 - DNA, 55 bp, Artificial
  Synthetic oligonucleotide
ttgagaggacatcctcccgtcctccccttcgttctctcttcgcatcggactggct

SEQ ID NO: 481302 - DNA, 56 bp, Artificial
  Synthetic oligonucleotide
ttgagaggagactaagtgtactgagactgactccacgatcggtctactggcgggta

SEQ ID NO: 481303 - DNA, 59 bp, Artificial
  Synthetic oligonucleotide
ttgagaggtactgggggtttgaaatggccaaaatgccaggctttgacttgcattgccgc

SEQ ID NO: 481304 - DNA, 55 bp, Artificial
  Synthetic oligonucleotide
ttgagaggtagtcgctcacgttcacgcggcgccgggatgttgggtgggcgtgagt

SEQ ID NO: 481305 - DNA, 56 bp, Artificial
  Synthetic oligonucleotide
ttgagaggtgccgacgttcccaaaggatgtgaaggcccttgtaaggttcagtctta

SEQ ID NO: 481306 - DNA, 55 bp, Artificial
  Synthetic oligonucleotide
ttgagagtaatgtcacagttactagctcggttgaactggttgaaaatgagcacac

SEQ ID NO: 481307 - DNA, 58 bp, Artificial
  Synthetic oligonucleotide
ttgagagtacgcttaccccttgtaaggagcatgacgtaataggctcaaaggtttgcgc

SEQ ID NO: 481308 - DNA, 60 bp, Artificial
  Synthetic oligonucleotide
ttgagatcccttgcagtttcacgacatgctttcgaagagagaagagtcttggtcaggggt

SEQ ID NO: 481309 - DNA, 60 bp, Artificial
  Synthetic oligonucleotide
ttgagatgaaaatatgggaaaggctgggactggacaacttcataaaaactctgtggagca

SEQ ID NO: 481310 - DNA, 60 bp, Artificial
  Synthetic oligonucleotide
ttgagatgaggaattctgaaagtccgtatatgcctagatatggactactaaggaatctga

SEQ ID NO: 481311 - DNA, 59 bp, Artificial
  Synthetic oligonucleotide
ttgagatggacgtccgaatagccgtttcggcttgcggttactatgcagagaatttcgcc

SEQ ID NO: 481312 - DNA, 60 bp, Artificial
  Synthetic oligonucleotide
ttgagatgggcaacattcgtgcctatgatgcaatgttcgacacgagtgctgctcgtgatt

SEQ ID NO: 481313 - DNA, 59 bp, Artificial
  Synthetic oligonucleotide
ttgagatgttaatgtcggtgttttctcacgaagactacttaattgcgagagaactaata

SEQ ID NO: 481314 - DNA, 53 bp, Artificial
  Synthetic oligonucleotide
ttgagatgttcacctatgtgaggtttgattctgaggtcacattagtaccatcc

SEQ ID NO: 481315 - DNA, 60 bp, Artificial
  Synthetic oligonucleotide
ttgagcaaaccgtgctgcctgtagctccatcgtggggatgtagctccatcgtggggatgt

SEQ ID NO: 481316 - DNA, 55 bp, Artificial
  Synthetic oligonucleotide
ttgagcaacgctgataatctatcgtgggacaaacattggttttgggaaccaagca

SEQ ID NO: 481317 - DNA, 60 bp, Artificial
  Synthetic oligonucleotide
ttgagcaagacgcaggaattaagatgacggctcgtacaattcaaggactgagaatcacca

SEQ ID NO: 481318 - DNA, 60 bp, Artificial
  Synthetic oligonucleotide
ttgagcacaatccaatctgaacaagaatggaattgtcgtctttgatctcacatcgatagt

SEQ ID NO: 481319 - DNA, 60 bp, Artificial
  Synthetic oligonucleotide
ttgagcacattgcaagtatgaggagaaactatttcacagcggaagtgtctcattgcaggg

SEQ ID NO: 481320 - DNA, 51 bp, Artificial
  Synthetic oligonucleotide
ttgagcactggagacatgtgcggctggaaagtgtgttgttatataaagcgc

SEQ ID NO: 481321 - DNA, 57 bp, Artificial
  Synthetic oligonucleotide
ttgagcagaacccttcctgaagaagtagcaacgaaaattgatcaagtaaccaaggaa

SEQ ID NO: 481322 - DNA, 53 bp, Artificial
  Synthetic oligonucleotide
ttgagcagactctcagtccctaacacgaaccaccccgtgagcgacacagtttt

SEQ ID NO: 481323 - DNA, 50 bp, Artificial
  Synthetic oligonucleotide
ttgagcagagtacccagggttcattcttagacaatgaggaggtggacgag

SEQ ID NO: 481324 - DNA, 60 bp, Artificial
  Synthetic oligonucleotide
ttgagcagccacagagcatactaattgagcacagagggacgataattggaaagcagaatg

SEQ ID NO: 481325 - DNA, 60 bp, Artificial
  Synthetic oligonucleotide
ttgagcagcctcactgtaacccagctcctgaggcgattgcaccagtggataagctcggag

SEQ ID NO: 481326 - DNA, 57 bp, Artificial
  Synthetic oligonucleotide
ttgagcagcggcatgatatctctcatgttggcaaggtcatgtgcatttcggacgtga

SEQ ID NO: 481327 - DNA, 60 bp, Artificial
  Synthetic oligonucleotide
ttgagcagcgtcttcaaggctgacgcgattgtctctgatttctacgataaccgacccaat

SEQ ID NO: 481328 - DNA, 56 bp, Artificial
  Synthetic oligonucleotide
ttgagcagtctggactcccagttggaggtaatgagaagaaggccaaactggcaaat

SEQ ID NO: 481329 - DNA, 59 bp, Artificial
  Synthetic oligonucleotide
ttgagcatcaacgtaagccggtattcaagccggaacgttggcttgatcaaccggagtca

SEQ ID NO: 481330 - DNA, 60 bp, Artificial
  Synthetic oligonucleotide
ttgagcattgtggtctatcttacatcatttgtggttccaatacttctgaaggctctttac

SEQ ID NO: 481331 - DNA, 57 bp, Artificial
  Synthetic oligonucleotide
ttgagccaaaacagttgccaatatatagagcgaatggcgaacgtgaattaaggaata

SEQ ID NO: 481332 - DNA, 60 bp, Artificial
  Synthetic oligonucleotide
ttgagccaaggcacaacgctcagagggagacatgcgaacgggactatacatgataggagc

SEQ ID NO: 481333 - DNA, 60 bp, Artificial
  Synthetic oligonucleotide
ttgagccagttaattcggaggatatgcgcaatcgattcaaacagcagttagttattaact

SEQ ID NO: 481334 - DNA, 60 bp, Artificial
  Synthetic oligonucleotide
ttgagccattccagtctctggtccctaaggcagcaagaggtcaatacagcggattcgtga

SEQ ID NO: 481335 - DNA, 60 bp, Artificial
  Synthetic oligonucleotide
ttgagccatttttgaagacaacaccacgccctctcagattacctgatggacctccctgct

SEQ ID NO: 481336 - DNA, 60 bp, Artificial
  Synthetic oligonucleotide
ttgagcccgatgttagcctcccactttgacaattcagtctctggtgttgcaacaatctcg

SEQ ID NO: 481337 - DNA, 51 bp, Artificial
  Synthetic oligonucleotide
ttgagccgcatggggattttggaccagacgcgatgggtgatggtagcgacg

SEQ ID NO: 481338 - DNA, 55 bp, Artificial
  Synthetic oligonucleotide
ttgagccgccgctgacggaaactgcaggattatctcagttaggtcatgggagagc

SEQ ID NO: 481339 - DNA, 58 bp, Artificial
  Synthetic oligonucleotide
ttgagccggccaggatcgtttacagctacaatcctctgcaaactcatgcactttccca

SEQ ID NO: 481340 - DNA, 58 bp, Artificial
  Synthetic oligonucleotide
ttgagcctgttaatattttcggagctaccgcctacgttcagtaatgagtaaatagtgc

SEQ ID NO: 481341 - DNA, 55 bp, Artificial
  Synthetic oligonucleotide
ttgagcgcctacaatttcattcatcgcactctgttgtttgagtacgagcagtttg

SEQ ID NO: 481342 - DNA, 60 bp, Artificial
  Synthetic oligonucleotide
ttgagcgctgttccgagaggagttttcgtagttgagcatcgtgacgaaatggatatatac

SEQ ID NO: 481343 - DNA, 55 bp, Artificial
  Synthetic oligonucleotide
ttgagcggcattgatttaagtcatctacgaacgccgaaaatacaaccgaaaactt

SEQ ID NO: 481344 - DNA, 60 bp, Artificial
  Synthetic oligonucleotide
ttgagcggcgattgtagttcaacgagtcttgggatagcggacgcactgcggctgtcgctt

SEQ ID NO: 481345 - DNA, 55 bp, Artificial
  Synthetic oligonucleotide
ttgagcggggtctgtgattgcttggccatgcaagccattgtcaagctcggcatcg

SEQ ID NO: 481346 - DNA, 56 bp, Artificial
  Synthetic oligonucleotide
ttgagcggtcgtagttataagttcaacatcctcagtcagaggtttaggaatcccgt

SEQ ID NO: 481347 - DNA, 55 bp, Artificial
  Synthetic oligonucleotide
ttgagcgttgcgcatttcatggaaaatgaagcgtatcaagtaaatgaatttcggc

SEQ ID NO: 481348 - DNA, 54 bp, Artificial
  Synthetic oligonucleotide
ttgagctacagaagcctcggtaatggatgttccacgacgatacatgtagtccga

SEQ ID NO: 481349 - DNA, 60 bp, Artificial
  Synthetic oligonucleotide
ttgagctatatgcaagtttacagcgcaaacttgaacgcgaattcacatgggatgagtaca

SEQ ID NO: 481350 - DNA, 58 bp, Artificial
  Synthetic oligonucleotide
ttgagctcaggtgtttacatggggaatttaagctcacaacagcttgatcaaaggaggg

SEQ ID NO: 481351 - DNA, 59 bp, Artificial
  Synthetic oligonucleotide
ttgagctcagtaacatcattcgaaagattcgaaatattccccaaggaaacctcatggcc

SEQ ID NO: 481352 - DNA, 60 bp, Artificial
  Synthetic oligonucleotide
ttgagctctatttttgatccctagaaaagccagacacaatgtgcagattctactgtattt

SEQ ID NO: 481353 - DNA, 60 bp, Artificial
  Synthetic oligonucleotide
ttgagctcttagctgcctgaatgttcggatggaaatgtgctgacctgtttggggatacca

SEQ ID NO: 481354 - DNA, 60 bp, Artificial
  Synthetic oligonucleotide
ttgagctgaaaaagctatgggagcaaacccattcaaaggcaggactactggtttcagatg

SEQ ID NO: 481355 - DNA, 50 bp, Artificial
  Synthetic oligonucleotide
ttgagctgaagaagctatgggagcagacccgttcaaaggcaggactgttg

SEQ ID NO: 481356 - DNA, 60 bp, Artificial
  Synthetic oligonucleotide
ttgagctgcagtgatgggtgcccctgtgcgagaatccatggtggtgccagttgatagagg

SEQ ID NO: 481357 - DNA, 55 bp, Artificial
  Synthetic oligonucleotide
ttgagctgcggggcgaggagctggcactcagccctggggagcgggtgcacttgct

SEQ ID NO: 481358 - DNA, 60 bp, Artificial
  Synthetic oligonucleotide
ttgagctgcgtcttcaaggctgacgcgattgtctcgtatttcgacgatgaccgacccagt

SEQ ID NO: 481359 - DNA, 56 bp, Artificial
  Synthetic oligonucleotide
ttgagcttgcttagtatctttattaagtgttacacacgcatacttaaagaccgttt

SEQ ID NO: 481360 - DNA, 60 bp, Artificial
  Synthetic oligonucleotide
ttgaggaaacgacagtcgtctctgaggttccgcttagccaggtcaggttcaagcacgctc

SEQ ID NO: 481361 - DNA, 59 bp, Artificial
  Synthetic oligonucleotide
ttgaggaagtgcgttggcatgaccgttccctacgtagcaactaccgtcaactgctacca

SEQ ID NO: 481362 - DNA, 55 bp, Artificial
  Synthetic oligonucleotide
ttgaggaccgtaaggtacctgacgagttaatatccgttgacccgcatgaagttgg

SEQ ID NO: 481363 - DNA, 60 bp, Artificial
  Synthetic oligonucleotide
ttgaggacggcagattaaaggtggcaaattatgtacctgtggatacgcttcctgaggcag

SEQ ID NO: 481364 - DNA, 53 bp, Artificial
  Synthetic oligonucleotide
ttgaggactatcacacattaactgctactgttatccgtggtcatctttatata

SEQ ID NO: 481365 - DNA, 55 bp, Artificial
  Synthetic oligonucleotide
ttgaggacttgagggtgtcaagtttcatccgaggcgcacgagtactgccgagggg

SEQ ID NO: 481366 - DNA, 57 bp, Artificial
  Synthetic oligonucleotide
ttgaggacttgcttaatgagacacaggaacctttggacttgagttgtaaacgcccta

SEQ ID NO: 481367 - DNA, 55 bp, Artificial
  Synthetic oligonucleotide
ttgaggagagtgagctttgcgtgtatgaagatagtgcgctacaggacatagcaca

SEQ ID NO: 481368 - DNA, 56 bp, Artificial
  Synthetic oligonucleotide
ttgaggaggccgagggaagccacccctcggtagtactcactgagtaatttgaccga

SEQ ID NO: 481369 - DNA, 52 bp, Artificial
  Synthetic oligonucleotide
ttgaggatcatgatcagagaggtcgtatgccttggaagatcatgctagcgat

SEQ ID NO: 481370 - DNA, 50 bp, Artificial
  Synthetic oligonucleotide
ttgaggcataagatcagctagcttccctaatggggaactatcaaaggcta

SEQ ID NO: 481371 - DNA, 60 bp, Artificial
  Synthetic oligonucleotide
ttgaggcatcagataggatgagaatccatagagaatctggcttgtgtcaagggtacaaga

SEQ ID NO: 481372 - DNA, 60 bp, Artificial
  Synthetic oligonucleotide
ttgaggccaataggccgacccgcccgactctcactataactgaggatgttgcacggacag

SEQ ID NO: 481373 - DNA, 58 bp, Artificial
  Synthetic oligonucleotide
ttgaggccagtagcttaaatgattcagtgtacctcagaatgaccttcggtcatttgta

SEQ ID NO: 481374 - DNA, 55 bp, Artificial
  Synthetic oligonucleotide
ttgaggccatgttgtgaatactttaacctgacaggaaattgtagcaaaaacgggt

SEQ ID NO: 481375 - DNA, 52 bp, Artificial
  Synthetic oligonucleotide
ttgaggcccccccaagcatctggtcgagaatagtcaactttggatcaggttg

SEQ ID NO: 481376 - DNA, 55 bp, Artificial
  Synthetic oligonucleotide
ttgaggccctcaagcctcacttcaaatctcttggtcaaaccatcaccccagccga

SEQ ID NO: 481377 - DNA, 54 bp, Artificial
  Synthetic oligonucleotide
ttgaggcctccctgcccattacggactatttgtgggtccgggggcaatctccct

SEQ ID NO: 481378 - DNA, 60 bp, Artificial
  Synthetic oligonucleotide
ttgaggcctgtggttatagtgatagagtacaacaaatcacactcgggaattcaacaataa

SEQ ID NO: 481379 - DNA, 54 bp, Artificial
  Synthetic oligonucleotide
ttgaggctaagttcccgcataatcaaccttttatatgttcaaagtttttagtta

SEQ ID NO: 481380 - DNA, 60 bp, Artificial
  Synthetic oligonucleotide
ttgaggctagtagtctaaatgattcagtgtaccttagaatggctttcggtcatttgtatg

SEQ ID NO: 481381 - DNA, 55 bp, Artificial
  Synthetic oligonucleotide
ttgaggctgctcgaagggaagtcatataggtacaacttggagagccggaggttcg

SEQ ID NO: 481382 - DNA, 55 bp, Artificial
  Synthetic oligonucleotide
ttgagggaacagatgaaaggcgaaccagtggaaccatacccagtaacagtcgagt

SEQ ID NO: 481383 - DNA, 53 bp, Artificial
  Synthetic oligonucleotide
ttgagggagggtggtggaggcctgttcagagctctcaaagtcaagagtgcccc

SEQ ID NO: 481384 - DNA, 52 bp, Artificial
  Synthetic oligonucleotide
ttgagggatgttccgccgttttgacacagccgacgcacggacttgtacggat

SEQ ID NO: 481385 - DNA, 60 bp, Artificial
  Synthetic oligonucleotide
ttgagggattttcagctgaatcgagaaagctgctcctcattgttcaggcacttagggaca

SEQ ID NO: 481386 - DNA, 57 bp, Artificial
  Synthetic oligonucleotide
ttgagggcaaaagctgcgtcaataggtgtttttatgtggagttgataagggggagac

SEQ ID NO: 481387 - DNA, 57 bp, Artificial
  Synthetic oligonucleotide
ttgagggcttctaagaaatatctcatgaaaatgttttacagttccacaatttcttaa

SEQ ID NO: 481388 - DNA, 55 bp, Artificial
  Synthetic oligonucleotide
ttgaggggatgccaagaaccatagcatggatggtccaaagatccttagctcaaga

SEQ ID NO: 481389 - DNA, 58 bp, Artificial
  Synthetic oligonucleotide
ttgaggggtacgttgagggagccagagataaatacgatgccctaggacacaaatgtaa

SEQ ID NO: 481390 - DNA, 60 bp, Artificial
  Synthetic oligonucleotide
ttgaggggttaattcgtggcccgactccagcagagtgcatagctcacaatgcccacaagc

SEQ ID NO: 481391 - DNA, 58 bp, Artificial
  Synthetic oligonucleotide
ttgagggtcataggtggggactatctatgtgttgccctatctgtacgacccattgggg

SEQ ID NO: 481392 - DNA, 55 bp, Artificial
  Synthetic oligonucleotide
ttgagggtctggacaacggcaactgttcaggttacggggccgccccgcttgcaca

SEQ ID NO: 481393 - DNA, 58 bp, Artificial
  Synthetic oligonucleotide
ttgagggtgtcaggtcgggtgtgatcagtcatcctcgtgctgattctcgccgtgacat

SEQ ID NO: 481394 - DNA, 58 bp, Artificial
  Synthetic oligonucleotide
ttgagggtgtcagtgtaacgccaatggctactagggtacaacataatggtgtaatggt

SEQ ID NO: 481395 - DNA, 60 bp, Artificial
  Synthetic oligonucleotide
ttgagggttcagagggtcacaacatttggacctctgaagaccaggtcatggggcagtata

SEQ ID NO: 481396 - DNA, 50 bp, Artificial
  Synthetic oligonucleotide
ttgagggttcggactacgtcctccacataccgcccaccccgttctacggg

SEQ ID NO: 481397 - DNA, 55 bp, Artificial
  Synthetic oligonucleotide
ttgaggtaagattctctatttctgggtctggtgtcttcgggggaaaactcgccgc

SEQ ID NO: 481398 - DNA, 58 bp, Artificial
  Synthetic oligonucleotide
ttgaggtacaatggattcggtaccaagtccacgggtatggaattcgtcgcttgttgca

SEQ ID NO: 481399 - DNA, 59 bp, Artificial
  Synthetic oligonucleotide
ttgaggtaccaagtggctcattcatcaaggtgagctacttcacaagccctttgaaaaac

SEQ ID NO: 481400 - DNA, 56 bp, Artificial
  Synthetic oligonucleotide
ttgaggtcgaaagccaaaacattcctggacccagattcaaaagagatggtttctta

SEQ ID NO: 481401 - DNA, 60 bp, Artificial
  Synthetic oligonucleotide
ttgaggtcgatagtgacaatccgagcgttatccgtgccgcaggaattgcgaacttgcgta

SEQ ID NO: 481402 - DNA, 60 bp, Artificial
  Synthetic oligonucleotide
ttgaggttcccaaagccaataaggactgatgtgacgggcatgatcttagaggaaggtgcc

SEQ ID NO: 481403 - DNA, 60 bp, Artificial
  Synthetic oligonucleotide
ttgaggttcctaatgctactgagctagttcaaagctcctcaacggggaaaatatgcaaca

SEQ ID NO: 481404 - DNA, 52 bp, Artificial
  Synthetic oligonucleotide
ttgaggttctaagtaacatgcggtcaacccttgtagggtacaggcaagttgt

SEQ ID NO: 481405 - DNA, 55 bp, Artificial
  Synthetic oligonucleotide
ttgagtaaagtcacgtccagtatgtcgttgcaagaagttcattctgttaacgaca

SEQ ID NO: 481406 - DNA, 55 bp, Artificial
  Synthetic oligonucleotide
ttgagtacacgtctaggcgcagtaacatcatgtgggaattgccatctgtggctag

SEQ ID NO: 481407 - DNA, 60 bp, Artificial
  Synthetic oligonucleotide
ttgagtacatagagagaccttcaaatgaatactacatgaacaacaccgaaccactttgtg

SEQ ID NO: 481408 - DNA, 60 bp, Artificial
  Synthetic oligonucleotide
ttgagtacctgtcaggtgatagacaggtagaagagtggcccaaggcgacctgtacaggcg

SEQ ID NO: 481409 - DNA, 55 bp, Artificial
  Synthetic oligonucleotide
ttgagtacgatcgccgatatgatcaatgctggatatcgtgaccctgtcggcaata

SEQ ID NO: 481410 - DNA, 57 bp, Artificial
  Synthetic oligonucleotide
ttgagtacgtaacgaatcctgccgctattcaaccactggaggggcttttgcggagac

SEQ ID NO: 481411 - DNA, 54 bp, Artificial
  Synthetic oligonucleotide
ttgagtataataataagaccatgcaggattgaatgtggttgccatgcctgccac

SEQ ID NO: 481412 - DNA, 60 bp, Artificial
  Synthetic oligonucleotide
ttgagtatacattgggtcagctcgctaatttggatactatcgatataagttacggtgtag

SEQ ID NO: 481413 - DNA, 58 bp, Artificial
  Synthetic oligonucleotide
ttgagtatctcgtccacttatctgttggatttcccctattaactcaactcacgcctgt

SEQ ID NO: 481414 - DNA, 55 bp, Artificial
  Synthetic oligonucleotide
ttgagtatgatgacaccattcacagaggggttggggccagtttatcggctgaaca

SEQ ID NO: 481415 - DNA, 59 bp, Artificial
  Synthetic oligonucleotide
ttgagtatggttgaattagtcaatcgttatgtaacaagcgcagacagaacaaggtaccc

SEQ ID NO: 481416 - DNA, 52 bp, Artificial
  Synthetic oligonucleotide
ttgagtcaaatgatggtacaataccagaaagttgctcagtcagtccaggtgg

SEQ ID NO: 481417 - DNA, 60 bp, Artificial
  Synthetic oligonucleotide
ttgagtcagtcgcttggtcagcaagtgcttgccatgatggcatcagttggctgacaattg

SEQ ID NO: 481418 - DNA, 55 bp, Artificial
  Synthetic oligonucleotide
ttgagtccctgtccgccctccaagtggaaaccatccagacagctcagcggtgcga

SEQ ID NO: 481419 - DNA, 55 bp, Artificial
  Synthetic oligonucleotide
ttgagtcgagccaaggatggttcgaaggatcgtttaacagatccccctggtttac

SEQ ID NO: 481420 - DNA, 59 bp, Artificial
  Synthetic oligonucleotide
ttgagtctagggagaccaatctatcattgacactgacaaaacaagatcctaaccaccct

SEQ ID NO: 481421 - DNA, 60 bp, Artificial
  Synthetic oligonucleotide
ttgagtctctacggagccatgtggatctgatggtaggggctgctactgtttgttcagccc

SEQ ID NO: 481422 - DNA, 60 bp, Artificial
  Synthetic oligonucleotide
ttgagtgacccagcggtagccatttgctcaggcgagaagtatgcaccgggcctgtactgg

SEQ ID NO: 481423 - DNA, 60 bp, Artificial
  Synthetic oligonucleotide
ttgagtgactacgagttgaactgcaagtgttggtctctttaccagcagttcaaccctgat

SEQ ID NO: 481424 - DNA, 60 bp, Artificial
  Synthetic oligonucleotide
ttgagtgagatttttacctctgtttgtgataattacagatattatagtgattatcgcgta

SEQ ID NO: 481425 - DNA, 55 bp, Artificial
  Synthetic oligonucleotide
ttgagtgcgacatcttgacacttcgagatcctgcgatcgactatggacactcgag

SEQ ID NO: 481426 - DNA, 56 bp, Artificial
  Synthetic oligonucleotide
ttgagtgcgattgtggcaccgaaccagcggttcccagaaacagggtcccgggtgta

SEQ ID NO: 481427 - DNA, 60 bp, Artificial
  Synthetic oligonucleotide
ttgagtgcgggtcatttgttcgacgatcagagtatgcggtttgctacggatcctagtaat

SEQ ID NO: 481428 - DNA, 55 bp, Artificial
  Synthetic oligonucleotide
ttgagtgggagacaacaagtcggtatgcgtgtaaattggggtagtataattgttg

SEQ ID NO: 481429 - DNA, 58 bp, Artificial
  Synthetic oligonucleotide
ttgagtggtctacacgctcgtgtatcgtgtgggttgacctacacgggtacgtgagaag

SEQ ID NO: 481430 - DNA, 59 bp, Artificial
  Synthetic oligonucleotide
ttgagtgtggttagaatgggtgccccaccattccttattgggatatgctctttgggtgc

SEQ ID NO: 481431 - DNA, 57 bp, Artificial
  Synthetic oligonucleotide
ttgagttagagtgcagagacaaaagaaaggagttatcactcaaatgtttggattttc

SEQ ID NO: 481432 - DNA, 60 bp, Artificial
  Synthetic oligonucleotide
ttgagttcaactggcaacttgcacacatttgatgagctatttggtgcaagaattcacagt

SEQ ID NO: 481433 - DNA, 51 bp, Artificial
  Synthetic oligonucleotide
ttgagttcacaagttttttctaccggtatgggtttgtggccaacttcagta

SEQ ID NO: 481434 - DNA, 58 bp, Artificial
  Synthetic oligonucleotide
ttgagttcattgaaccaatcaacccaacaatgaacgtgtagttcttgtactgtaactc

SEQ ID NO: 481435 - DNA, 60 bp, Artificial
  Synthetic oligonucleotide
ttgagttgatgaggctatgtggacaaaatgttatcggttcacgctcaactactgcttgga

SEQ ID NO: 481436 - DNA, 57 bp, Artificial
  Synthetic oligonucleotide
ttgagttgccacgagctcaatcggaacccttagtccctagggtctgtctcccgcgag

SEQ ID NO: 481437 - DNA, 54 bp, Artificial
  Synthetic oligonucleotide
ttgagttgcgccggtatttatttaagcccatattctgcggctgtgcactctcat

SEQ ID NO: 481438 - DNA, 60 bp, Artificial
  Synthetic oligonucleotide
ttgagttgtttacttactcaagatttgacctggagttgacatttgtcatcacagagcggt

SEQ ID NO: 481439 - DNA, 58 bp, Artificial
  Synthetic oligonucleotide
ttgagtttatgtactttgcgaagcattttgagataaacgaggggtatgtcgaatcctg

SEQ ID NO: 481440 - DNA, 59 bp, Artificial
  Synthetic oligonucleotide
ttgagtttgactaattatgggtgcacaagtgtctagacaacagactggttcccatgaaa

SEQ ID NO: 481441 - DNA, 58 bp, Artificial
  Synthetic oligonucleotide
ttgataaaccacaagattttggagaggtatttaatatgtttgataatgagcccagtac

SEQ ID NO: 481442 - DNA, 55 bp, Artificial
  Synthetic oligonucleotide
ttgataaacgtgtggcaccggtcttcggaatcccttgtgtcgagaaacttttgga

SEQ ID NO: 481443 - DNA, 60 bp, Artificial
  Synthetic oligonucleotide
ttgataaactcactgggattgatctctctcatttgaaagtagcggatatccatcctcata

SEQ ID NO: 481444 - DNA, 55 bp, Artificial
  Synthetic oligonucleotide
ttgataaatgccgctagtcgacaatctcctgacttcgagcctaacaagatctcac

SEQ ID NO: 481445 - DNA, 51 bp, Artificial
  Synthetic oligonucleotide
ttgataaattgcaaatggcatgtgaattggaccgtgattatctggacgccc

SEQ ID NO: 481446 - DNA, 58 bp, Artificial
  Synthetic oligonucleotide
ttgataacacccaaccccacaatcgaaaacaatggtggaggcttcatagaaatgcagt

SEQ ID NO: 481447 - DNA, 59 bp, Artificial
  Synthetic oligonucleotide
ttgataaccggaacaatccgcctgtcttcatagagctcactagctttcagtgcgttaaa

SEQ ID NO: 481448 - DNA, 55 bp, Artificial
  Synthetic oligonucleotide
ttgataacctccgtgaaaggcgcgtaccggttgacatctccaccgaaccatttag

SEQ ID NO: 481449 - DNA, 60 bp, Artificial
  Synthetic oligonucleotide
ttgataacctccttaatcgtcatgtacttctaccatctggtgaagtcaccttgcagacac

SEQ ID NO: 481450 - DNA, 54 bp, Artificial
  Synthetic oligonucleotide
ttgataacgctaagagttgttcaagaacgtcctcctttgtaagaggacaacggg

SEQ ID NO: 481451 - DNA, 60 bp, Artificial
  Synthetic oligonucleotide
ttgataactgctgctcttggtatgagtgcagagtctggagagtttaccgaagtagtaaag

SEQ ID NO: 481452 - DNA, 58 bp, Artificial
  Synthetic oligonucleotide
ttgataagatctttagattacttaaacaatgatgtcttttccttatctaggatcaagg

SEQ ID NO: 481453 - DNA, 60 bp, Artificial
  Synthetic oligonucleotide
ttgataaggagatgacatagaaacctggttgattttgcagtcaccagacaaccttacaga

SEQ ID NO: 481454 - DNA, 59 bp, Artificial
  Synthetic oligonucleotide
ttgataaggcccatgcctgggtaaacaggcccatgtataggaagcccaggatatatcgg

SEQ ID NO: 481455 - DNA, 58 bp, Artificial
  Synthetic oligonucleotide
ttgataaggccgctgcttgggttaacaggcccatgtacaggaagcccaggatttatag

SEQ ID NO: 481456 - DNA, 60 bp, Artificial
  Synthetic oligonucleotide
ttgataattcccctacatctcaacatggagttggtaaaggtgcagtgcttcatccagttc

SEQ ID NO: 481457 - DNA, 60 bp, Artificial
  Synthetic oligonucleotide
ttgatacaaggcaccgtacaatcagtcattacaggagaatcgtatggagagaccgttaag

SEQ ID NO: 481458 - DNA, 60 bp, Artificial
  Synthetic oligonucleotide
ttgatacaccaatcagggacatatcctgtgatacggaggacattcaacaacaccaaaggg

SEQ ID NO: 481459 - DNA, 55 bp, Artificial
  Synthetic oligonucleotide
ttgatacctaatgtactgccacgattagcataacctatcacattacaaccagcgt

SEQ ID NO: 481460 - DNA, 60 bp, Artificial
  Synthetic oligonucleotide
ttgatactaaaagacacatggtaattctgactgatgtagttgttgattataacatcgtca

SEQ ID NO: 481461 - DNA, 56 bp, Artificial
  Synthetic oligonucleotide
ttgatactaagtattcaagttttccatgtcgaagaaaactgttccgcctatcgtta

SEQ ID NO: 481462 - DNA, 60 bp, Artificial
  Synthetic oligonucleotide
ttgatactggagattaatacacgatacgttgaacgtagcaacgtgatcagattgacaacc

SEQ ID NO: 481463 - DNA, 60 bp, Artificial
  Synthetic oligonucleotide
ttgatagacttggaaatcagctccagtatatcaatggcgaataagatgttgacttatccg

SEQ ID NO: 481464 - DNA, 60 bp, Artificial
  Synthetic oligonucleotide
ttgatagagagcgttctggcgcttaacaagagaaatatggctgctcctaggttacaagaa

SEQ ID NO: 481465 - DNA, 60 bp, Artificial
  Synthetic oligonucleotide
ttgatagagggcggatgtgagggtgatgaagatcgcattcttgatcgtccagtttctgag

SEQ ID NO: 481466 - DNA, 60 bp, Artificial
  Synthetic oligonucleotide
ttgatagaggggggcgtcgagagtgatgaagataacattcttgagtgtccaatgtttgag

SEQ ID NO: 481467 - DNA, 60 bp, Artificial
  Synthetic oligonucleotide
ttgatagcagtgtagatttggttatcccatacgtgtcaccatatgatttttcacctgtgc

SEQ ID NO: 481468 - DNA, 54 bp, Artificial
  Synthetic oligonucleotide
ttgatagcgaacgttgacgctacagtttttgcccaaatagttaaattacggaaa

SEQ ID NO: 481469 - DNA, 55 bp, Artificial
  Synthetic oligonucleotide
ttgatagctcaggaacttgctcgtaagtatgcggagtggcgtccagggcaacact

SEQ ID NO: 481470 - DNA, 60 bp, Artificial
  Synthetic oligonucleotide
ttgatagctttgtacctgttatggttgtgggtgctgagagatcttatcttccttgttaag

SEQ ID NO: 481471 - DNA, 51 bp, Artificial
  Synthetic oligonucleotide
ttgataggaagggctagaatatcccctggagccggatggaacgtgcgagac

SEQ ID NO: 481472 - DNA, 59 bp, Artificial
  Synthetic oligonucleotide
ttgataggactttcgttgagttagtgaaaggactcaagccggctaggcattagtgatac

SEQ ID NO: 481473 - DNA, 60 bp, Artificial
  Synthetic oligonucleotide
ttgataggcatctcgttgttcgtcagcctgtattcgcaactctttgtttctacgtacttg

SEQ ID NO: 481474 - DNA, 53 bp, Artificial
  Synthetic oligonucleotide
ttgatagggaggctgtggaagaggcgaaggagattggtatgcagtacacccca

SEQ ID NO: 481475 - DNA, 60 bp, Artificial
  Synthetic oligonucleotide
ttgatagggcgagtgctgacagcatgataacaaaccttctcaaacacattgccaaggcac

SEQ ID NO: 481476 - DNA, 60 bp, Artificial
  Synthetic oligonucleotide
ttgatagggttgaatccctgatagctaaggttgaacggtgggttcattcatgaactatca

SEQ ID NO: 481477 - DNA, 60 bp, Artificial
  Synthetic oligonucleotide
ttgatagtagaattagccattatattcgctataaccgctttgggattgtccttctcgctg

SEQ ID NO: 481478 - DNA, 57 bp, Artificial
  Synthetic oligonucleotide
ttgatagtgccggtattggttctacagaagtactatcaggtattcaacatatggttc

SEQ ID NO: 481479 - DNA, 60 bp, Artificial
  Synthetic oligonucleotide
ttgatagttagacagtcggctgtgatgcgtggctctgacacgccatataccaccccaatc

SEQ ID NO: 481480 - DNA, 59 bp, Artificial
  Synthetic oligonucleotide
ttgatatacattatcatcggccctcgggcaagtaccagatgggggaactcctctactct

SEQ ID NO: 481481 - DNA, 60 bp, Artificial
  Synthetic oligonucleotide
ttgatatactcttcagtggcagatgcacaaggtgacaacaggatatacacatcagtgaaa

SEQ ID NO: 481482 - DNA, 60 bp, Artificial
  Synthetic oligonucleotide
ttgatatagtgccacttaatgagaactcgaactctactaacaactctagtggggagtata

SEQ ID NO: 481483 - DNA, 55 bp, Artificial
  Synthetic oligonucleotide
ttgatatagtggcttctacatgtaaatggcctgattttgtacgaatgactaaaga

SEQ ID NO: 481484 - DNA, 60 bp, Artificial
  Synthetic oligonucleotide
ttgatatgctccaacggggcaaaaacagcagcgatcgttatccgcaaggtgcctacgcaa

SEQ ID NO: 481485 - DNA, 50 bp, Artificial
  Synthetic oligonucleotide
ttgatattgaatcccttgaataatctgcgtatatagggactatcgtttat

SEQ ID NO: 481486 - DNA, 51 bp, Artificial
  Synthetic oligonucleotide
ttgatatttgacatcaccaagctactgctggccgtcttcggacccctttgg

SEQ ID NO: 481487 - DNA, 55 bp, Artificial
  Synthetic oligonucleotide
ttgatcaacgccggagtgatcctcatggtgctcggcgcggcagggttccgcgtcg

SEQ ID NO: 481488 - DNA, 60 bp, Artificial
  Synthetic oligonucleotide
ttgatcaagagatcgataaggttaatgtgatatatgacgcatactgtctcaaaattggtg

SEQ ID NO: 481489 - DNA, 60 bp, Artificial
  Synthetic oligonucleotide
ttgatcaatgaacgtggaattccaggtataagtaggagaataatttgtattgattctgac

SEQ ID NO: 481490 - DNA, 60 bp, Artificial
  Synthetic oligonucleotide
ttgatcacactgtgtaaccgcgtcagtgacgttacctacactagcgctcagctgtgtaga

SEQ ID NO: 481491 - DNA, 60 bp, Artificial
  Synthetic oligonucleotide
ttgatcacagacagagggaggttgatgcgtgtatccaacgacggggcatctattcaaagt

SEQ ID NO: 481492 - DNA, 60 bp, Artificial
  Synthetic oligonucleotide
ttgatcatacagaacaccacatgggaggaccactgtgtgttctcgaggccatcacccatg

SEQ ID NO: 481493 - DNA, 54 bp, Artificial
  Synthetic oligonucleotide
ttgatcatatatgcgtaggctccaaagacgtgagctatcttgcaatactcctct

SEQ ID NO: 481494 - DNA, 60 bp, Artificial
  Synthetic oligonucleotide
ttgatcatcgctgccagaaacattgtgaggagatcaacggtatcagcggatccactggca

SEQ ID NO: 481495 - DNA, 59 bp, Artificial
  Synthetic oligonucleotide
ttgatcatttgaagaaggccctagtattgataagggttctattggagcagtcaaccacc

SEQ ID NO: 481496 - DNA, 60 bp, Artificial
  Synthetic oligonucleotide
ttgatccagtacaacttgacagttggggatagaggaggtgaggttggcagacatcttatt

SEQ ID NO: 481497 - DNA, 56 bp, Artificial
  Synthetic oligonucleotide
ttgatccatcagtaagaagtaaaatctcaatgatccaccttggagcagtaaagatt

SEQ ID NO: 481498 - DNA, 59 bp, Artificial
  Synthetic oligonucleotide
ttgatccccaggaatacaatctcatccgctttgttgatccactcacgggtgccacgtta

SEQ ID NO: 481499 - DNA, 60 bp, Artificial
  Synthetic oligonucleotide
ttgatcccctcttcgagtgcgttgaagttgaatggagtgatgattccctgatgagtgtac

SEQ ID NO: 481500 - DNA, 59 bp, Artificial
  Synthetic oligonucleotide
ttgatccctgatcccattgcatacttgcgaccccggaaatcacaaaagtagacgaaata

SEQ ID NO: 481501 - DNA, 50 bp, Artificial
  Synthetic oligonucleotide
ttgatccgacagtaaatgtcgataatttactcaaaaccatgagccatgta

SEQ ID NO: 481502 - DNA, 60 bp, Artificial
  Synthetic oligonucleotide
ttgatccgcatgaaacgcgcggagacatactgccctaggcctctgctggctcttgacact

SEQ ID NO: 481503 - DNA, 56 bp, Artificial
  Synthetic oligonucleotide
ttgatccgtgataggaggcccaataaggatccattaacgtttagtcaggcctttac

SEQ ID NO: 481504 - DNA, 60 bp, Artificial
  Synthetic oligonucleotide
ttgatcctatagtaggtgagtcttttgcaccgaacgtcatatgtatgagattactaatca

SEQ ID NO: 481505 - DNA, 60 bp, Artificial
  Synthetic oligonucleotide
ttgatcctatggtgaatgttcgtttctccacaggtcggtggatgcgtcctgtgcctgaag

SEQ ID NO: 481506 - DNA, 52 bp, Artificial
  Synthetic oligonucleotide
ttgatcctgcagtgtataggagaaaagcaacactaagaatagttgggacgcg

SEQ ID NO: 481507 - DNA, 60 bp, Artificial
  Synthetic oligonucleotide
ttgatcgacacatgatgactgctgtaaatgtgtatgaaggatccagtcttttcgtgttag

SEQ ID NO: 481508 - DNA, 59 bp, Artificial
  Synthetic oligonucleotide
ttgatcggctaaaacagggcagcgcatattacgtctctgctgcggctgacaaggcagtc

SEQ ID NO: 481509 - DNA, 55 bp, Artificial
  Synthetic oligonucleotide
ttgatcgggaattatgaaaagttaagtccggatctacatgaaggtatggaacacc

SEQ ID NO: 481510 - DNA, 60 bp, Artificial
  Synthetic oligonucleotide
ttgatcgtgaacactagcaagtaccctaacatgtacgtgcctgttggtgcagtgactgaa

SEQ ID NO: 481511 - DNA, 60 bp, Artificial
  Synthetic oligonucleotide
ttgatcgtgggcaaccatgttaacagacatgttagacggacgtgcaccccaggcctgaga

SEQ ID NO: 481512 - DNA, 60 bp, Artificial
  Synthetic oligonucleotide
ttgatctcacaacatcctgaaaaaaactaacaccactccgttggtcctatcatcattatg

SEQ ID NO: 481513 - DNA, 60 bp, Artificial
  Synthetic oligonucleotide
ttgatctcatgcagatcccaccgcacacactggttggggcgttgctccggtccgcgacat

SEQ ID NO: 481514 - DNA, 60 bp, Artificial
  Synthetic oligonucleotide
ttgatctccatggtacgacacatctgtctaacaagcgttataattgttgggcatcgttca

SEQ ID NO: 481515 - DNA, 60 bp, Artificial
  Synthetic oligonucleotide
ttgatctcgaggcagtctattatcaacaaacccggaattcaggcatatttcatgggcaag

SEQ ID NO: 481516 - DNA, 59 bp, Artificial
  Synthetic oligonucleotide
ttgatctgaaatgtagcgcatgcgcagttagaggtgccccaaaggcggcggttagtatt

SEQ ID NO: 481517 - DNA, 53 bp, Artificial
  Synthetic oligonucleotide
ttgatctgctgataagaatgccattttgcattcaaggtttttttggagtgccg

SEQ ID NO: 481518 - DNA, 58 bp, Artificial
  Synthetic oligonucleotide
ttgatcttcacgtcgacggtaaataccatccccttctcgttagtatacttgattgtca

SEQ ID NO: 481519 - DNA, 55 bp, Artificial
  Synthetic oligonucleotide
ttgatgaaaggaggaacaaatacctggaagaacatcccagtgcggggaaggaccc

SEQ ID NO: 481520 - DNA, 60 bp, Artificial
  Synthetic oligonucleotide
ttgatgaagtacagtgctaattcagagctagacatgtcagaattagcggatctgatactt

SEQ ID NO: 481521 - DNA, 60 bp, Artificial
  Synthetic oligonucleotide
ttgatgacatatcagccgcagtattaaagacgaaattggataaatcaacacaaatctcgc

SEQ ID NO: 481522 - DNA, 58 bp, Artificial
  Synthetic oligonucleotide
ttgatgacccgctccttggacttctaccaccatgcgaccctgacctcccgttcgcacc

SEQ ID NO: 481523 - DNA, 55 bp, Artificial
  Synthetic oligonucleotide
ttgatgaccgaagtggtgcaaactaatggaatatacggagtgatgtctgtagttg

SEQ ID NO: 481524 - DNA, 58 bp, Artificial
  Synthetic oligonucleotide
ttgatgacgggaactgacaacccccttgcaaaaaggcgtcttgttccatgttgctgaa

SEQ ID NO: 481525 - DNA, 60 bp, Artificial
  Synthetic oligonucleotide
ttgatgacgtggagcttgacaagcttccaaatactgggcccctcaataatgaagatgcct

SEQ ID NO: 481526 - DNA, 60 bp, Artificial
  Synthetic oligonucleotide
ttgatgactttagctatgatgttgtctcgagcttttgtgaacttcttgtataataggaga

SEQ ID NO: 481527 - DNA, 55 bp, Artificial
  Synthetic oligonucleotide
ttgatgactttctagatcttgatatggctattacaggggctccaggcattgatgc

SEQ ID NO: 481528 - DNA, 60 bp, Artificial
  Synthetic oligonucleotide
ttgatgagcacttcggcaatagaggtctgttcactcggaaaacaattgattgggtgagtg

SEQ ID NO: 481529 - DNA, 55 bp, Artificial
  Synthetic oligonucleotide
ttgatgataggaattgcaatgtcattgtgactaaggaaacatgtaaccgcaaggc

SEQ ID NO: 481530 - DNA, 60 bp, Artificial
  Synthetic oligonucleotide
ttgatgatgcaccggtcgatgagaccgtctcagacgaagttcccgggtatatatttctcc

SEQ ID NO: 481531 - DNA, 60 bp, Artificial
  Synthetic oligonucleotide
ttgatgatggttttctagatgtttggacttacaatgccgaactgttggtcctattggaga

SEQ ID NO: 481532 - DNA, 60 bp, Artificial
  Synthetic oligonucleotide
ttgatgatgtgggaagctgtgtctgtaaaaactgaggtggtgggagtatctactcttgta

SEQ ID NO: 481533 - DNA, 60 bp, Artificial
  Synthetic oligonucleotide
ttgatgattgttgtgaaggttgattcttcaacttttattgtctcaagcatgttcccgcca

SEQ ID NO: 481534 - DNA, 60 bp, Artificial
  Synthetic oligonucleotide
ttgatgcaatttttcaagggccgtatgaaacatgcccctcatatgagtcatggctccaaa

SEQ ID NO: 481535 - DNA, 60 bp, Artificial
  Synthetic oligonucleotide
ttgatgcagacacctcgcttacccagtgtgatcatgctgctgtgaattttgcaaaatgtt

SEQ ID NO: 481536 - DNA, 60 bp, Artificial
  Synthetic oligonucleotide
ttgatgcagaggagattcccagatgtcctaattcaagcaagaccgtctcatttctggaag

SEQ ID NO: 481537 - DNA, 60 bp, Artificial
  Synthetic oligonucleotide
ttgatgcaggtctacttgctaaggcggggaaggagtatggcctgacaatgactcctgctg

SEQ ID NO: 481538 - DNA, 60 bp, Artificial
  Synthetic oligonucleotide
ttgatgcagtcagtataatggaagagattgtgtaccctgatcctggcacgacgctatctc

SEQ ID NO: 481539 - DNA, 60 bp, Artificial
  Synthetic oligonucleotide
ttgatgcatgactacatcatcctcacattgggacctgtcaagaagtaccaaagaatattc

SEQ ID NO: 481540 - DNA, 60 bp, Artificial
  Synthetic oligonucleotide
ttgatgcccatgtctgcaactgcacttgatgctatgaatgagggagccaagttcttgatg

SEQ ID NO: 481541 - DNA, 57 bp, Artificial
  Synthetic oligonucleotide
ttgatgccggtcctgtgcgtgtcacggtacacgcagtggtagagccagtaccaagca

SEQ ID NO: 481542 - DNA, 60 bp, Artificial
  Synthetic oligonucleotide
ttgatgccgtttgtggaactctttggatctgttaatgcatgcaggggaagtctgaaagtg

SEQ ID NO: 481543 - DNA, 55 bp, Artificial
  Synthetic oligonucleotide
ttgatgcgcttaagagtgcgatagagattgagcgtgatggaatgcaggaagaggc

SEQ ID NO: 481544 - DNA, 53 bp, Artificial
  Synthetic oligonucleotide
ttgatgcggagagaagcgattgtgtttatagagtgctaaacaaacttaagggc

SEQ ID NO: 481545 - DNA, 55 bp, Artificial
  Synthetic oligonucleotide
ttgatgcggtacatcaaacagaatgtctcctacggagaaagaattcagagactgg

SEQ ID NO: 481546 - DNA, 60 bp, Artificial
  Synthetic oligonucleotide
ttgatgctaacacggaatgcaacatagcgtatgacgccctcagattccaagtggactcca

SEQ ID NO: 481547 - DNA, 60 bp, Artificial
  Synthetic oligonucleotide
ttgatgctaagaacgatattggtcacatgggtaaggttatatgtttgtccgatgttacga

SEQ ID NO: 481548 - DNA, 60 bp, Artificial
  Synthetic oligonucleotide
ttgatgctagttcgatctgtacaaggattgaagtgtcttcctgcaatttcacatctatga

SEQ ID NO: 481549 - DNA, 60 bp, Artificial
  Synthetic oligonucleotide
ttgatgctgtacatgcacaagacttcaagaatgaaatggaggccaaggtttacgcttcaa

SEQ ID NO: 481550 - DNA, 60 bp, Artificial
  Synthetic oligonucleotide
ttgatggaaaccctgcaaatgttatgccatacacagtatggtcatatatatactatcaga

SEQ ID NO: 481551 - DNA, 54 bp, Artificial
  Synthetic oligonucleotide
ttgatggatccagcaattctaacttccttatcatcaaatctgaacgcagtcatg

SEQ ID NO: 481552 - DNA, 60 bp, Artificial
  Synthetic oligonucleotide
ttgatggattaactatcatcgatacgtcgattgtttggcctatattatgtcaatgtacgt

SEQ ID NO: 481553 - DNA, 57 bp, Artificial
  Synthetic oligonucleotide
ttgatggcctagaacctatagatgtaacaactagtgcaggttacccctatgttagtt

SEQ ID NO: 481554 - DNA, 55 bp, Artificial
  Synthetic oligonucleotide
ttgatggctatcctgattattctcgcaccccgggctactacggggtatctccagc

SEQ ID NO: 481555 - DNA, 59 bp, Artificial
  Synthetic oligonucleotide
ttgatgggagagatagtgtttgaatgaacgacagtaggtgttctttgggtatagaacac

SEQ ID NO: 481556 - DNA, 56 bp, Artificial
  Synthetic oligonucleotide
ttgatgggaggagttagtgtcgtttttgaattcagcgcttaaatagccgtgtttta

SEQ ID NO: 481557 - DNA, 60 bp, Artificial
  Synthetic oligonucleotide
ttgatgggagggactgcacactgatagatgctctattgggagacccccactgtgatgtgt

SEQ ID NO: 481558 - DNA, 53 bp, Artificial
  Synthetic oligonucleotide
ttgatgggatccctcctttaatttgaaccggctttccgtacttacaattgctt

SEQ ID NO: 481559 - DNA, 56 bp, Artificial
  Synthetic oligonucleotide
ttgatggtaatgggggtaggtgttttgaccacatcaaactgttgaacttacgcgtc

SEQ ID NO: 481560 - DNA, 56 bp, Artificial
  Synthetic oligonucleotide
ttgatggtatcccgcctttaatttgaaccggctttccatatttacagttggactgc

SEQ ID NO: 481561 - DNA, 60 bp, Artificial
  Synthetic oligonucleotide
ttgatggtccgtacggtggatgtggccctatctaaagattgtcacagtacagtgcgttgg

SEQ ID NO: 481562 - DNA, 52 bp, Artificial
  Synthetic oligonucleotide
ttgatggtctgagtagcctattaccacccagaataggtacgaggtctgctgt

SEQ ID NO: 481563 - DNA, 56 bp, Artificial
  Synthetic oligonucleotide
ttgatggtggcaacatgttggaaactttacaggttaaaccctcaatgtttagcacc

SEQ ID NO: 481564 - DNA, 60 bp, Artificial
  Synthetic oligonucleotide
ttgatggtggcatacatgttggagagagaactggtccgcaaaaccagattcctacctgta

SEQ ID NO: 481565 - DNA, 52 bp, Artificial
  Synthetic oligonucleotide
ttgatggtggccctattcatcttaagagtgaatctactgttcgtattgcgaa

SEQ ID NO: 481566 - DNA, 55 bp, Artificial
  Synthetic oligonucleotide
ttgatggtttggtgcattgagaatggtacctcaccaaacattaatggtgtatggg

SEQ ID NO: 481567 - DNA, 58 bp, Artificial
  Synthetic oligonucleotide
ttgatgtagtaccacttggtaacagtagtagagagtatagactaataagttgtaatac

SEQ ID NO: 481568 - DNA, 51 bp, Artificial
  Synthetic oligonucleotide
ttgatgtatttcttgttggttgggggtggatagttgttgtatctgggctag

SEQ ID NO: 481569 - DNA, 55 bp, Artificial
  Synthetic oligonucleotide
ttgatgtcacaatagcccgtatttcaatgttggacgttaaagatgcactaaagtg

SEQ ID NO: 481570 - DNA, 55 bp, Artificial
  Synthetic oligonucleotide
ttgatgtccttacgttcaacagtcggtgatctgtcttcccagtttgcgtcaacgt

SEQ ID NO: 481571 - DNA, 60 bp, Artificial
  Synthetic oligonucleotide
ttgatgtgaggatagttagcgaatttgtatagcagctgatccgaagaacacgaaacagca

SEQ ID NO: 481572 - DNA, 55 bp, Artificial
  Synthetic oligonucleotide
ttgatgtggacagcttatccatccttgacaccctggatggagctagcgtgaccag

SEQ ID NO: 481573 - DNA, 58 bp, Artificial
  Synthetic oligonucleotide
ttgatgtggacctcaaggttttcctttcccacggtccataatccacatgtgagaaatc

SEQ ID NO: 481574 - DNA, 58 bp, Artificial
  Synthetic oligonucleotide
ttgatgtgtataattgttgcggccgtagtcaccttgaaaagtgtcgtaaacgctttga

SEQ ID NO: 481575 - DNA, 55 bp, Artificial
  Synthetic oligonucleotide
ttgatgttaaaggttgcatccatccaatgcccaaggacttgcacttcagcatgga

SEQ ID NO: 481576 - DNA, 60 bp, Artificial
  Synthetic oligonucleotide
ttgatgttcccaaaatagaacaactcgccaattaccagcaggctgctctcaagtggagga

SEQ ID NO: 481577 - DNA, 55 bp, Artificial
  Synthetic oligonucleotide
ttgatgttccttatcaattaaaggaattcgtgaggatggaaccagaataccatag

SEQ ID NO: 481578 - DNA, 60 bp, Artificial
  Synthetic oligonucleotide
ttgatgtttatagtgatagagtggacgcagttgttatagggtcgccatttgaactggatg

SEQ ID NO: 481579 - DNA, 54 bp, Artificial
  Synthetic oligonucleotide
ttgatgtttcatacaatggccacgtgatcccggtgatattggactttactacga

SEQ ID NO: 481580 - DNA, 60 bp, Artificial
  Synthetic oligonucleotide
ttgattacatattcgccatttaaggcgttccaaaataccagtccagctgtgaatagcacc

SEQ ID NO: 481581 - DNA, 60 bp, Artificial
  Synthetic oligonucleotide
ttgattacggacactacgtcaatcgctacctactctcgatggcttaatgctcatcctacc

SEQ ID NO: 481582 - DNA, 51 bp, Artificial
  Synthetic oligonucleotide
ttgattactgaaatctttcagagatataggactgacgatagatcatctttt

SEQ ID NO: 481583 - DNA, 54 bp, Artificial
  Synthetic oligonucleotide
ttgattatcaatgtccaatccatggaaacctacccaacacgatgggtttgagtg

SEQ ID NO: 481584 - DNA, 60 bp, Artificial
  Synthetic oligonucleotide
ttgattcaccctactatgccaatgagggagatccatgagtccattcgatggaccaaggac

SEQ ID NO: 481585 - DNA, 55 bp, Artificial
  Synthetic oligonucleotide
ttgattcacttgccaactcagccaaagagatcaaatcgaacggtgtgcttgatca

SEQ ID NO: 481586 - DNA, 60 bp, Artificial
  Synthetic oligonucleotide
ttgattccaattatgtgtgctcaggacttgttggcgacacaccaagaaatgacgacagct

SEQ ID NO: 481587 - DNA, 60 bp, Artificial
  Synthetic oligonucleotide
ttgattccagaagggagattggacatcgcagaatatagcgtttgctgttgcccaattctt

SEQ ID NO: 481588 - DNA, 60 bp, Artificial
  Synthetic oligonucleotide
ttgattccagttatgtgtgctcaggacttgttggtgacacaccaaggaacgatgatagct

SEQ ID NO: 481589 - DNA, 60 bp, Artificial
  Synthetic oligonucleotide
ttgattcgaatgactgtttgatgacaacatctgtgaaggtttgcatgattgggacagttt

SEQ ID NO: 481590 - DNA, 60 bp, Artificial
  Synthetic oligonucleotide
ttgattcgattctgcgaggtgatgttgtcatgcgtgggtttattactggtaatgcgataa

SEQ ID NO: 481591 - DNA, 60 bp, Artificial
  Synthetic oligonucleotide
ttgattcgcgcgagttgatcaatccaacaacatacggcattgggatgacttatcattgct

SEQ ID NO: 481592 - DNA, 55 bp, Artificial
  Synthetic oligonucleotide
ttgattcggaccatgtggtcttcaatgagagatggttgattcatggcggtatgcc

SEQ ID NO: 481593 - DNA, 60 bp, Artificial
  Synthetic oligonucleotide
ttgattcgtccgtacaatcacaagatgttctacagggtctgttgaatacatgtaatacta

SEQ ID NO: 481594 - DNA, 59 bp, Artificial
  Synthetic oligonucleotide
ttgattctatgaccatggcacgtcctgtgaatcacaactgcgatgggatcatgattgaa

SEQ ID NO: 481595 - DNA, 59 bp, Artificial
  Synthetic oligonucleotide
ttgattcttctttaacaagtgtggctgtgtccttaaaaccgagtctagctctgcttcta

SEQ ID NO: 481596 - DNA, 56 bp, Artificial
  Synthetic oligonucleotide
ttgattcttgtcctcttgactacacgattttgtgtagaatgtactggggtccagct

SEQ ID NO: 481597 - DNA, 55 bp, Artificial
  Synthetic oligonucleotide
ttgattctttggtttactccgtgcttactagtaggaggtacgatgatactgcgac

SEQ ID NO: 481598 - DNA, 55 bp, Artificial
  Synthetic oligonucleotide
ttgattgaccaggaatttaatatttaaattccgtctgtgaggacttattaccacg

SEQ ID NO: 481599 - DNA, 60 bp, Artificial
  Synthetic oligonucleotide
ttgattgcagcaatgttaagtcaacgaaccatgtcgcttgattttgtaactactaactac

SEQ ID NO: 481600 - DNA, 60 bp, Artificial
  Synthetic oligonucleotide
ttgattgcattgggaccatacagagtacaggtggtttatgagagaacttactgtatgaca

SEQ ID NO: 481601 - DNA, 57 bp, Artificial
  Synthetic oligonucleotide
ttgattgcgcacctcgtgagtctaccttcggcggaaggcaagtcacgggggagggcg

SEQ ID NO: 481602 - DNA, 58 bp, Artificial
  Synthetic oligonucleotide
ttgattggattaactactcagctcaggttggtaaatctggtatgaccctgactccggg

SEQ ID NO: 481603 - DNA, 50 bp, Artificial
  Synthetic oligonucleotide
ttgattggcgtctttcaggatgtgaaccacttgcctccggggtttgtccc

SEQ ID NO: 481604 - DNA, 51 bp, Artificial
  Synthetic oligonucleotide
ttgatttagtaaaactgaaatctagtatgatgattcccctagttttaacca

SEQ ID NO: 481605 - DNA, 60 bp, Artificial
  Synthetic oligonucleotide
ttgatttatggtcatacaatgcagagctgttagttgcactggaaaaccaacacactatag

SEQ ID NO: 481606 - DNA, 60 bp, Artificial
  Synthetic oligonucleotide
ttgatttcggtgagagagtgtcacctgtactcgactcagacggtagatcaatcgtaatgg

SEQ ID NO: 481607 - DNA, 56 bp, Artificial
  Synthetic oligonucleotide
ttgatttcgtcggccggtggccaactgttctattcacgcccagtcgtctcagccaa

SEQ ID NO: 481608 - DNA, 60 bp, Artificial
  Synthetic oligonucleotide
ttgatttgtccaaattcgacaagtctcaaggtgaattccatctaatgattcaggaacaca

SEQ ID NO: 481609 - DNA, 55 bp, Artificial
  Synthetic oligonucleotide
ttgcaaaaacaactcgttggaagaattgtacgaaacagtggacgagccgaaattg

SEQ ID NO: 481610 - DNA, 60 bp, Artificial
  Synthetic oligonucleotide
ttgcaaaaatcgatctaatttctctgatcaagaatacgaacacacgtgtttgtagtgaat

SEQ ID NO: 481611 - DNA, 54 bp, Artificial
  Synthetic oligonucleotide
ttgcaaaaggggagaaagccaacgttttgatagggcaaggagacgttgtgttgg

SEQ ID NO: 481612 - DNA, 54 bp, Artificial
  Synthetic oligonucleotide
ttgcaaacaggtcagactgcacgcccacgtgcagtacgtgctaccaagcgccct

SEQ ID NO: 481613 - DNA, 54 bp, Artificial
  Synthetic oligonucleotide
ttgcaaacccaaggtccaataatccgagcgacgaccccctcccgttacctctgc

SEQ ID NO: 481614 - DNA, 55 bp, Artificial
  Synthetic oligonucleotide
ttgcaaaggaagatagtgggaatgccgcctttaatttgaattggcttcccgtact

SEQ ID NO: 481615 - DNA, 59 bp, Artificial
  Synthetic oligonucleotide
ttgcaaagttgcgtgcgtcgacccatacgcagtagaccccgtcggtaaagtgatcgcta

SEQ ID NO: 481616 - DNA, 55 bp, Artificial
  Synthetic oligonucleotide
ttgcaaataagtgaagtaatcagcagcttcgattttccgctttctgttgtacaag

SEQ ID NO: 481617 - DNA, 55 bp, Artificial
  Synthetic oligonucleotide
ttgcaaataccctgactacctaaagatggcctctgataaatatggggactcttgc

SEQ ID NO: 481618 - DNA, 55 bp, Artificial
  Synthetic oligonucleotide
ttgcaacacaaataggactcggggacatggagaacgcttaaaacgacgtctggca

SEQ ID NO: 481619 - DNA, 60 bp, Artificial
  Synthetic oligonucleotide
ttgcaacacatcaggactgttcaatagtatatacagtcctacatacaggcctaatgggac

SEQ ID NO: 481620 - DNA, 60 bp, Artificial
  Synthetic oligonucleotide
ttgcaacagctgacaaattagtgattactgacgttgtagatggcgtcaatcataaattga

SEQ ID NO: 481621 - DNA, 60 bp, Artificial
  Synthetic oligonucleotide
ttgcaacagggatatcgccagctgcagctgtagaaattgcaatacatccaccatgggtgg

SEQ ID NO: 481622 - DNA, 55 bp, Artificial
  Synthetic oligonucleotide
ttgcaacagttttatttggcctaaatcttttaatttgtcaaattgagctttcact

SEQ ID NO: 481623 - DNA, 55 bp, Artificial
  Synthetic oligonucleotide
ttgcaaccaagatacatcttaccccatcagcagtgaactaactagatgcttgcgt

SEQ ID NO: 481624 - DNA, 60 bp, Artificial
  Synthetic oligonucleotide
ttgcaaccacagcagagacaatgagaaccttgtaggttccaacacgctcggatttggcgc

SEQ ID NO: 481625 - DNA, 54 bp, Artificial
  Synthetic oligonucleotide
ttgcaacccagagatgataatgaggaactgctcttacaatatgaccacagaact

SEQ ID NO: 481626 - DNA, 60 bp, Artificial
  Synthetic oligonucleotide
ttgcaacgaacgttgcaggaatgtgaatgccagtctcatcatgtgccgttgtccagcccc

SEQ ID NO: 481627 - DNA, 58 bp, Artificial
  Synthetic oligonucleotide
ttgcaacgacacctgtatgccaatttgatgggaatacaatttcaggatataaacggat

SEQ ID NO: 481628 - DNA, 60 bp, Artificial
  Synthetic oligonucleotide
ttgcaacgactccctccagactgggttcattgccgcgttgttctacacacacaagttcaa

SEQ ID NO: 481629 - DNA, 60 bp, Artificial
  Synthetic oligonucleotide
ttgcaacgccggagctttcagagtgggtcacccacgcgcactgaccgaggtttggcaatg

SEQ ID NO: 481630 - DNA, 60 bp, Artificial
  Synthetic oligonucleotide
ttgcaacgcgtgatgtcgacgtatatttaggcgcttgttcagaatccgtatatcgcatat

SEQ ID NO: 481631 - DNA, 60 bp, Artificial
  Synthetic oligonucleotide
ttgcaacggatgatggccattgtggattacctgtcgttagtacaattgatggcaagataa

SEQ ID NO: 481632 - DNA, 55 bp, Artificial
  Synthetic oligonucleotide
ttgcaacgtaatggctctctcttataggcctgctgttgaagaggtgctcgcaaaa

SEQ ID NO: 481633 - DNA, 60 bp, Artificial
  Synthetic oligonucleotide
ttgcaactcacggtctggggcattaagcagctccagacaagagtcctggctatagaaaga

SEQ ID NO: 481634 - DNA, 51 bp, Artificial
  Synthetic oligonucleotide
ttgcaactgttcgatctaccctggacatttgacaggccatcgtatggcttg

SEQ ID NO: 481635 - DNA, 52 bp, Artificial
  Synthetic oligonucleotide
ttgcaagaccggatgttcaaatttgaactcacccgccgtctggatcatgact

SEQ ID NO: 481636 - DNA, 60 bp, Artificial
  Synthetic oligonucleotide
ttgcaagagagaggacaagttcatggggatgcgaagagtttggttgcctggctgtaagtg

SEQ ID NO: 481637 - DNA, 55 bp, Artificial
  Synthetic oligonucleotide
ttgcaagataaccgctcgccctatgagtgacacgctaccacttagtaagcgatag

SEQ ID NO: 481638 - DNA, 60 bp, Artificial
  Synthetic oligonucleotide
ttgcaagatctgtatcattcgatcaatttatcaaaggctgccaacgtgacaattcactcc

SEQ ID NO: 481639 - DNA, 58 bp, Artificial
  Synthetic oligonucleotide
ttgcaagcaggtttataactctcgaagattactacaccacgatgtcctcagctttgag

SEQ ID NO: 481640 - DNA, 60 bp, Artificial
  Synthetic oligonucleotide
ttgcaagcagtcttgtgttggcagcaatcattatgggattcatcttctgggcgtgtagca

SEQ ID NO: 481641 - DNA, 60 bp, Artificial
  Synthetic oligonucleotide
ttgcaagcatgagaaggaattacttcacagcagaggtgtctcattgcagagccacagaat

SEQ ID NO: 481642 - DNA, 60 bp, Artificial
  Synthetic oligonucleotide
ttgcaagcatgagaaggaattatttcacagcggaagtgtctcattgcagggcaacagagt

SEQ ID NO: 481643 - DNA, 51 bp, Artificial
  Synthetic oligonucleotide
ttgcaagcccagactgttgcaccgaaaacggtaaatttggctgcaccaagt

SEQ ID NO: 481644 - DNA, 55 bp, Artificial
  Synthetic oligonucleotide
ttgcaaggactaagagtgagggattgtcatggtctcttattgacattggtacgac

SEQ ID NO: 481645 - DNA, 55 bp, Artificial
  Synthetic oligonucleotide
ttgcaaggccgacccagctccccgggttatacaaccaagaagtccgcgctacaac

SEQ ID NO: 481646 - DNA, 55 bp, Artificial
  Synthetic oligonucleotide
ttgcaaggcgctcaacgcctcgtgtcgctaggagacaccgcgtgggactttggct

SEQ ID NO: 481647 - DNA, 55 bp, Artificial
  Synthetic oligonucleotide
ttgcaaggtgcaagaggtgaacaaggattacctggtcgcaatggtgcagatggcc

SEQ ID NO: 481648 - DNA, 60 bp, Artificial
  Synthetic oligonucleotide
ttgcaagtcaggctaggcagatggtgcaggcaatgaggactattggaactcaacctagct

SEQ ID NO: 481649 - DNA, 57 bp, Artificial
  Synthetic oligonucleotide
ttgcaagttcgcaatcgtcggagaggaaaagggcgcgaacggtacacctcaccttca

SEQ ID NO: 481650 - DNA, 60 bp, Artificial
  Synthetic oligonucleotide
ttgcaagttgagcttatcaacatagctaatgaatacagcagtagggttagcgaaagcctg

SEQ ID NO: 481651 - DNA, 60 bp, Artificial
  Synthetic oligonucleotide
ttgcaatacatcacaactgtttaatggcacatacaatggcacatatagtaatatcacaga

SEQ ID NO: 481652 - DNA, 59 bp, Artificial
  Synthetic oligonucleotide
ttgcaatacatcacaattgtttaatgacacactacccaagaatggaactatcactctac

SEQ ID NO: 481653 - DNA, 58 bp, Artificial
  Synthetic oligonucleotide
ttgcaatacatcagaactgtttagtgataatggtacaagtaatggtaccatcacactc

SEQ ID NO: 481654 - DNA, 57 bp, Artificial
  Synthetic oligonucleotide
ttgcaatacatcaggcctgtttaatgttaatagtagtacacttaaaaacagtacagg

SEQ ID NO: 481655 - DNA, 51 bp, Artificial
  Synthetic oligonucleotide
ttgcaatagatgttaaagcgtttagagggagccattttggtcaatgatcac

SEQ ID NO: 481656 - DNA, 55 bp, Artificial
  Synthetic oligonucleotide
ttgcaatgaatccctgaacaccggctttctcgcgtccctgttctacacccacgcg

SEQ ID NO: 481657 - DNA, 60 bp, Artificial
  Synthetic oligonucleotide
ttgcaatgacagtccttccagccttggcagtttttgctttggcacctgttgtttttgctg

SEQ ID NO: 481658 - DNA, 60 bp, Artificial
  Synthetic oligonucleotide
ttgcaatgagagttgacatcacctcacaacccttagctacaacattaataggtgagatag

SEQ ID NO: 481659 - DNA, 50 bp, Artificial
  Synthetic oligonucleotide
ttgcaatgcgcattaacaagaagcgtaatatgacattacgtgaactgtca

SEQ ID NO: 481660 - DNA, 58 bp, Artificial
  Synthetic oligonucleotide
ttgcaatggggggctgcgggaacatactttggagggctctccatcggcaccggttctg

SEQ ID NO: 481661 - DNA, 60 bp, Artificial
  Synthetic oligonucleotide
ttgcaatgttgcaatgtgtcaattgtgaataacttctcttacagttcgtgcgacaaatgt

SEQ ID NO: 481662 - DNA, 55 bp, Artificial
  Synthetic oligonucleotide
ttgcaattaacaggtataatggattaacattgcgtggagttacaatgagacccac

SEQ ID NO: 481663 - DNA, 60 bp, Artificial
  Synthetic oligonucleotide
ttgcaattccagatagtgtacaaatattggtgggatacatgacaatgtaatacatatgct

SEQ ID NO: 481664 - DNA, 55 bp, Artificial
  Synthetic oligonucleotide
ttgcaattgacttcagtcacatcgttgtgtatgcttattggaaatgcaaccgtca

SEQ ID NO: 481665 - DNA, 52 bp, Artificial
  Synthetic oligonucleotide
ttgcacaaaggttttatagaggaaagaaacggggaaatcgttatactgaaac

SEQ ID NO: 481666 - DNA, 56 bp, Artificial
  Synthetic oligonucleotide
ttgcacaaccccctggtcagggcttggaatgaccctaacctcccttcgcgatggag

SEQ ID NO: 481667 - DNA, 60 bp, Artificial
  Synthetic oligonucleotide
ttgcacacaatccagtgtgtatgcagtcgtaatgagcaattgtgggatggaaccgactac

SEQ ID NO: 481668 - DNA, 56 bp, Artificial
  Synthetic oligonucleotide
ttgcacacatggcattaagccaacagtaagtactcaactagtattaaatgggacac

SEQ ID NO: 481669 - DNA, 60 bp, Artificial
  Synthetic oligonucleotide
ttgcacacttgggccctcaactgaccgacatctatgctcgcacgaggaaggcgtacaaaa

SEQ ID NO: 481670 - DNA, 60 bp, Artificial
  Synthetic oligonucleotide
ttgcacagacgggatacgcgccagtcaattggggacatggtgaattgtcggactctacgt

SEQ ID NO: 481671 - DNA, 59 bp, Artificial
  Synthetic oligonucleotide
ttgcacagcacgattgaagggataccgcctttaatttgaactgactttccatatttaca

SEQ ID NO: 481672 - DNA, 56 bp, Artificial
  Synthetic oligonucleotide
ttgcacaggaagattgttggtatgccgcctttaatttgaactggcttcccgtactt

SEQ ID NO: 481673 - DNA, 60 bp, Artificial
  Synthetic oligonucleotide
ttgcacagtcttttgtactctagttggacctggagctagttgtgaggcatactcagagac

SEQ ID NO: 481674 - DNA, 58 bp, Artificial
  Synthetic oligonucleotide
ttgcacataccacctctaggccctatgtagggacagtcccgttagcagaccgggagtg

SEQ ID NO: 481675 - DNA, 55 bp, Artificial
  Synthetic oligonucleotide
ttgcacatccagttggccaatggccatacatgacaggtggagcagtgtcactaca

SEQ ID NO: 481676 - DNA, 55 bp, Artificial
  Synthetic oligonucleotide
ttgcaccaggcttcgctgtcgcggccctccgaggtgttggcccaggtgtacagac

SEQ ID NO: 481677 - DNA, 60 bp, Artificial
  Synthetic oligonucleotide
ttgcaccccccatccattaacaaccggggtgggcatactcatgtcactcgccagatgggc

SEQ ID NO: 481678 - DNA, 60 bp, Artificial
  Synthetic oligonucleotide
ttgcaccccttaaatattatgatctgtcgcctgatgtgatcaatgatctgaagattctca

SEQ ID NO: 481679 - DNA, 60 bp, Artificial
  Synthetic oligonucleotide
ttgcaccgacgagttggtggcacgttacacatcgctgcccggccgatgtgtgcgagctca

SEQ ID NO: 481680 - DNA, 58 bp, Artificial
  Synthetic oligonucleotide
ttgcacctataatgttctcgaataaaatggcaaggttggggaaaggatacatgttcga

SEQ ID NO: 481681 - DNA, 60 bp, Artificial
  Synthetic oligonucleotide
ttgcacctcagcatcagaggaaactccaactataaggcagtgtcctgtgacttcaataat

SEQ ID NO: 481682 - DNA, 60 bp, Artificial
  Synthetic oligonucleotide
ttgcacctgagagaagcttgctttcacagggagagagaggctaccagagggtatcctaac

SEQ ID NO: 481683 - DNA, 50 bp, Artificial
  Synthetic oligonucleotide
ttgcacctgggttcagtcggcgccagctcttggatcaggatagaaggtaa

SEQ ID NO: 481684 - DNA, 60 bp, Artificial
  Synthetic oligonucleotide
ttgcacgaagcggagaccggtatgctgtggctctccattccatttacgacgttccgtgcg

SEQ ID NO: 481685 - DNA, 56 bp, Artificial
  Synthetic oligonucleotide
ttgcacgagtggtactggagtttggcactagacccatttccctattctgggttctt

SEQ ID NO: 481686 - DNA, 53 bp, Artificial
  Synthetic oligonucleotide
ttgcacgagttgaatgtgaatcgcactaatctgtccatttcggactccttacg

SEQ ID NO: 481687 - DNA, 59 bp, Artificial
  Synthetic oligonucleotide
ttgcacgcattttcataagtacaccaccagtcttgtatcgtctttgatgatatacgttc

SEQ ID NO: 481688 - DNA, 60 bp, Artificial
  Synthetic oligonucleotide
ttgcacgcctttgtacactggcctcagagtcccatggattgcaaccccaccatgaacttg

SEQ ID NO: 481689 - DNA, 58 bp, Artificial
  Synthetic oligonucleotide
ttgcacgctctccccgttttcgtacaaagaaatagatgaagacatcgtaccagtctgt

SEQ ID NO: 481690 - DNA, 60 bp, Artificial
  Synthetic oligonucleotide
ttgcacggctgagggaaaaaccggactgggactcctgttggtggctctcatgacccagca

SEQ ID NO: 481691 - DNA, 60 bp, Artificial
  Synthetic oligonucleotide
ttgcacgtgcagtgataatatctgactcttcgttcagcgtaaactgaatcgagttaaacg

SEQ ID NO: 481692 - DNA, 60 bp, Artificial
  Synthetic oligonucleotide
ttgcacgtgttggttatggtactgacatgtcttatctcgggcgtatcagtcgtcaacgtc

SEQ ID NO: 481693 - DNA, 55 bp, Artificial
  Synthetic oligonucleotide
ttgcacgtttggatagttcacaccgtcaataaatgagtctaccgtcggcccacct

SEQ ID NO: 481694 - DNA, 58 bp, Artificial
  Synthetic oligonucleotide
ttgcactaatccaaacgcttccagttcactcaaatacctttttgtgtaagcaccactc

SEQ ID NO: 481695 - DNA, 54 bp, Artificial
  Synthetic oligonucleotide
ttgcactaccaaccatgactcccctgacgccgagcttatagaggctaacctcct

SEQ ID NO: 481696 - DNA, 60 bp, Artificial
  Synthetic oligonucleotide
ttgcactagggccttacagagtacaagtggtctatgaaagaacctactgcatgacagggg

SEQ ID NO: 481697 - DNA, 60 bp, Artificial
  Synthetic oligonucleotide
ttgcactatggggagatgcatggtggaaacccattcattagacacatttgcaagcagact

SEQ ID NO: 481698 - DNA, 60 bp, Artificial
  Synthetic oligonucleotide
ttgcactcactatgtatgcccactcctgatgcgccaatgtcaaatcatcaggcggccacc

SEQ ID NO: 481699 - DNA, 60 bp, Artificial
  Synthetic oligonucleotide
ttgcactccacacttacgctcgtgcactcgcgggaaccgatggactgtcgttcacccacc

SEQ ID NO: 481700 - DNA, 51 bp, Artificial
  Synthetic oligonucleotide
ttgcactcggatcaacgactcggtcaaccctttgatggtcgactgcaactt

SEQ ID NO: 481701 - DNA, 55 bp, Artificial
  Synthetic oligonucleotide
ttgcactcttcttcacactctatccgcgtgctgttgtaatgctcgttttctctgc

SEQ ID NO: 481702 - DNA, 55 bp, Artificial
  Synthetic oligonucleotide
ttgcactgcatccctggtggacccctttgcagcattctataaaggctcccttcct

SEQ ID NO: 481703 - DNA, 58 bp, Artificial
  Synthetic oligonucleotide
ttgcactggacaacttttgtctctcgcgtgtggaaagttacgatgcttgtttagatat

SEQ ID NO: 481704 - DNA, 55 bp, Artificial
  Synthetic oligonucleotide
ttgcacttacgagtcagcactcagatggtgggataaacaatcagtgacggctcga

SEQ ID NO: 481705 - DNA, 60 bp, Artificial
  Synthetic oligonucleotide
ttgcacttagctactcaaccggtgcacttgccagctgtatgggcctcatatacaccagaa

SEQ ID NO: 481706 - DNA, 50 bp, Artificial
  Synthetic oligonucleotide
ttgcacttccgcggacctagggctaatgaacgagtatgtatggttggttc

SEQ ID NO: 481707 - DNA, 50 bp, Artificial
  Synthetic oligonucleotide
ttgcacttgtcactgatgctctcaccgagctacaaccacccggagaactg

SEQ ID NO: 481708 - DNA, 60 bp, Artificial
  Synthetic oligonucleotide
ttgcactttgaacgaaatggacaagtaccattctgactatcagggacatacccaggctgt

SEQ ID NO: 481709 - DNA, 60 bp, Artificial
  Synthetic oligonucleotide
ttgcagaaacagattgggtctcgtttgagctgagagatgttcgacacgagcgcgatactg

SEQ ID NO: 481710 - DNA, 60 bp, Artificial
  Synthetic oligonucleotide
ttgcagaatcaactctagaggaaactgtggtatctgtggtatctacctgctccacttgac

SEQ ID NO: 481711 - DNA, 55 bp, Artificial
  Synthetic oligonucleotide
ttgcagaatcattgttagccaatcacgcaggtaaattaatgagagagaatggggt

SEQ ID NO: 481712 - DNA, 60 bp, Artificial
  Synthetic oligonucleotide
ttgcagaatgcgtgtagaaaaggatcatggacatagaatgaggatactgtacgtatgcaa

SEQ ID NO: 481713 - DNA, 60 bp, Artificial
  Synthetic oligonucleotide
ttgcagacacgaggcaatccatctggtcagttttcaacaacgatggataacaacatggtc

SEQ ID NO: 481714 - DNA, 55 bp, Artificial
  Synthetic oligonucleotide
ttgcagagggaagatagcggaatgccacctttaatttgaaccggctttccgtact

SEQ ID NO: 481715 - DNA, 60 bp, Artificial
  Synthetic oligonucleotide
ttgcagagggactgagagctctaaccacctcagatcatcacaactctgcctatggagatc

SEQ ID NO: 481716 - DNA, 60 bp, Artificial
  Synthetic oligonucleotide
ttgcagagttataaacatatgataaagaccgatgttaagccggttatcaatgacactctg

SEQ ID NO: 481717 - DNA, 60 bp, Artificial
  Synthetic oligonucleotide
ttgcagatagggaatataatctcgttatggataagccattcaattcagactagggacaaa

SEQ ID NO: 481718 - DNA, 55 bp, Artificial
  Synthetic oligonucleotide
ttgcagatatggcaactggagtagttagttcagttgattcaactatcaatgcagt

SEQ ID NO: 481719 - DNA, 58 bp, Artificial
  Synthetic oligonucleotide
ttgcagatggagactcaaagttagtttcagcaattcatagattacaaagtgacattga

SEQ ID NO: 481720 - DNA, 60 bp, Artificial
  Synthetic oligonucleotide
ttgcagatttatacccttcagccgttatcagatatgggcgtggcttacaacaatactggc

SEQ ID NO: 481721 - DNA, 60 bp, Artificial
  Synthetic oligonucleotide
ttgcagcaatcatcaactgcatccaagcagacgagatctgcattgggtacctgagcaaca

SEQ ID NO: 481722 - DNA, 55 bp, Artificial
  Synthetic oligonucleotide
ttgcagcaatccctaaccccgccgttattgaaacgcttgaagcgcggggcgaatc

SEQ ID NO: 481723 - DNA, 56 bp, Artificial
  Synthetic oligonucleotide
ttgcagcaatgctacttcactcttactttactgatacacaaggtgagatagttagt

SEQ ID NO: 481724 - DNA, 60 bp, Artificial
  Synthetic oligonucleotide
ttgcagcactgtgtacgtgtaaagcgcgacgtgaatgtttaacaccgtatgccctagccc

SEQ ID NO: 481725 - DNA, 60 bp, Artificial
  Synthetic oligonucleotide
ttgcagcatcccattatgcatcacaacttgaaacactagacatatccaaccagcaaatgt

SEQ ID NO: 481726 - DNA, 55 bp, Artificial
  Synthetic oligonucleotide
ttgcagccatgacagcgccgttaggtcacgtatatgctatgctgtctagatggag

SEQ ID NO: 481727 - DNA, 60 bp, Artificial
  Synthetic oligonucleotide
ttgcagccgccggctttacgcaggggtgaaccacttctccccggagctcatgatgtagac

SEQ ID NO: 481728 - DNA, 55 bp, Artificial
  Synthetic oligonucleotide
ttgcagcctgtgcccaagagccaaccaactgttcgtacttttggggaagagaaac

SEQ ID NO: 481729 - DNA, 60 bp, Artificial
  Synthetic oligonucleotide
ttgcagcgagagtagtggaacttctgggacgcagcagtctcaggggactgcagaaagggt

SEQ ID NO: 481730 - DNA, 57 bp, Artificial
  Synthetic oligonucleotide
ttgcaggaaaaagacattaagttatatttaatgtcactgggagtaccaaatattgac

SEQ ID NO: 481731 - DNA, 60 bp, Artificial
  Synthetic oligonucleotide
ttgcaggcttcatagaaggagggtggcctgggctaattaatggatggtatggtttccagc

SEQ ID NO: 481732 - DNA, 55 bp, Artificial
  Synthetic oligonucleotide
ttgcagggacacatctcattttatagtgggatgggtgattcaacgattggagaac

SEQ ID NO: 481733 - DNA, 51 bp, Artificial
  Synthetic oligonucleotide
ttgcagggataattggcatggatcaaataggccatgggtatctttcaatca

SEQ ID NO: 481734 - DNA, 60 bp, Artificial
  Synthetic oligonucleotide
ttgcagggcaacagagtacataatgaagggagtatacataaacacggctttgctcaatgc

SEQ ID NO: 481735 - DNA, 55 bp, Artificial
  Synthetic oligonucleotide
ttgcaggggaactgccgctcagcctctatccgcgccaagtggtcgaggagcagat

SEQ ID NO: 481736 - DNA, 60 bp, Artificial
  Synthetic oligonucleotide
ttgcaggtggccagcagatggccaatagaacatctacacacagacaatgggccgaacttt

SEQ ID NO: 481737 - DNA, 60 bp, Artificial
  Synthetic oligonucleotide
ttgcaggtgtcatggatgctgtcgcattgaatttatcaccgaaatagttctccacggaag

SEQ ID NO: 481738 - DNA, 55 bp, Artificial
  Synthetic oligonucleotide
ttgcagtaaaggaactgtttgtagtgtggagaaagggattcccttatggagcatg

SEQ ID NO: 481739 - DNA, 55 bp, Artificial
  Synthetic oligonucleotide
ttgcagtataacatgcctgtcaagtgctaggtcgtagctcgtagggccgattcgc

SEQ ID NO: 481740 - DNA, 60 bp, Artificial
  Synthetic oligonucleotide
ttgcagtatgggatccccataatgtctcgcaaatggttcttcattattagctgatcattt

SEQ ID NO: 481741 - DNA, 50 bp, Artificial
  Synthetic oligonucleotide
ttgcagtattagccgctcctccgcgcactacccctactctggctgccagt

SEQ ID NO: 481742 - DNA, 60 bp, Artificial
  Synthetic oligonucleotide
ttgcagtcgccaacagttgaagcctgtggatactcggatagaattattcaaataacaaga

SEQ ID NO: 481743 - DNA, 54 bp, Artificial
  Synthetic oligonucleotide
ttgcagtgagaacagtggaacttctgggacagagggggtgggagacccttaagt

SEQ ID NO: 481744 - DNA, 57 bp, Artificial
  Synthetic oligonucleotide
ttgcagtggaactcgttccaatagtgatgggggggattggtttggtgctagggttca

SEQ ID NO: 481745 - DNA, 60 bp, Artificial
  Synthetic oligonucleotide
ttgcagtgggcttaatcactaccgttcttgcagcactccttgtcttcttctggcgttgtt

SEQ ID NO: 481746 - DNA, 59 bp, Artificial
  Synthetic oligonucleotide
ttgcagtggggttttcggtgacaatccgcgtcccaaagatggaacaggcagctgtggtc

SEQ ID NO: 481747 - DNA, 52 bp, Artificial
  Synthetic oligonucleotide
ttgcagtggtggtgattacagtttcgcattaccagtaggcgcatatccagta

SEQ ID NO: 481748 - DNA, 53 bp, Artificial
  Synthetic oligonucleotide
ttgcagtgtcccgcttttgccgtctgtgcatttgtgtgcgtatatgtggctac

SEQ ID NO: 481749 - DNA, 50 bp, Artificial
  Synthetic oligonucleotide
ttgcagtgttagcttcaacgggagcttttatggaggaaacagaaacgttc

SEQ ID NO: 481750 - DNA, 56 bp, Artificial
  Synthetic oligonucleotide
ttgcagttattggttgaaaactatgtctttagttaagaccatcaaagttagaccca

SEQ ID NO: 481751 - DNA, 54 bp, Artificial
  Synthetic oligonucleotide
ttgcataaaagtagttctatttccatctaggcctcttccaagcttttctaagga

SEQ ID NO: 481752 - DNA, 50 bp, Artificial
  Synthetic oligonucleotide
ttgcatacaccaaacgcaatgtcctacccacaattactcagatgaatttg

SEQ ID NO: 481753 - DNA, 60 bp, Artificial
  Synthetic oligonucleotide
ttgcatacagtcaccatcacatacatgaagcatttctaggccctcaatattgggggtcgg

SEQ ID NO: 481754 - DNA, 57 bp, Artificial
  Synthetic oligonucleotide
ttgcatactaaggatgaacccctgggtttcaacttttgaccaagcatttgtggaagc

SEQ ID NO: 481755 - DNA, 57 bp, Artificial
  Synthetic oligonucleotide
ttgcatagtagactactatttttagagtttaacaatgcttttcctttagatgaggaa

SEQ ID NO: 481756 - DNA, 60 bp, Artificial
  Synthetic oligonucleotide
ttgcatatctatacggttggctgtacaacaggagctgcaaaaaatgcatatgttgtgggc

SEQ ID NO: 481757 - DNA, 60 bp, Artificial
  Synthetic oligonucleotide
ttgcatatgacgagactcgaatcatctacgttagcttgcagtcccaccctcgttttgcct

SEQ ID NO: 481758 - DNA, 60 bp, Artificial
  Synthetic oligonucleotide
ttgcatattttgtggctatattttggacctacagcagttgggttcgttctatcagaaaca

SEQ ID NO: 481759 - DNA, 59 bp, Artificial
  Synthetic oligonucleotide
ttgcatcaagaacctgagttcttaaacaatacagaacctctctgcaatgtatccgggtt

SEQ ID NO: 481760 - DNA, 55 bp, Artificial
  Synthetic oligonucleotide
ttgcatcactagttttaaataggtcacaaaggttcggatgaggaaaactctctcc

SEQ ID NO: 481761 - DNA, 60 bp, Artificial
  Synthetic oligonucleotide
ttgcatcactcaccaacgtgaagcaatggagtcagttgtggccacaggaccgttcatggt

SEQ ID NO: 481762 - DNA, 57 bp, Artificial
  Synthetic oligonucleotide
ttgcatcagttaatcggataacactgttgatgtctgacttcgcactgtccatagaag

SEQ ID NO: 481763 - DNA, 60 bp, Artificial
  Synthetic oligonucleotide
ttgcatcggggaatctctaactacaacgattatcgtgaatcaggttaagtatctggactg

SEQ ID NO: 481764 - DNA, 59 bp, Artificial
  Synthetic oligonucleotide
ttgcatcgtccggcccttacatctcgcaaaggtactgtacgctatagtaggttgggtca

SEQ ID NO: 481765 - DNA, 60 bp, Artificial
  Synthetic oligonucleotide
ttgcatctgactcagggaacgtgctgggagcaaatgtacaccccaggaggagaagttaga

SEQ ID NO: 481766 - DNA, 55 bp, Artificial
  Synthetic oligonucleotide
ttgcatctgatcggaaacgtccacgatgcctgtagagactcattgtccgtcattc

SEQ ID NO: 481767 - DNA, 57 bp, Artificial
  Synthetic oligonucleotide
ttgcatcttgtctttgggacctcgaaatgattttgtttcgagaggataagatgttgg

SEQ ID NO: 481768 - DNA, 60 bp, Artificial
  Synthetic oligonucleotide
ttgcatgaacaccggatcaaggtggcacttgctgtacgttaagaaaatgttccttgatct

SEQ ID NO: 481769 - DNA, 60 bp, Artificial
  Synthetic oligonucleotide
ttgcatgacagggaacgataatgatgcaagtgctcagataatatatgcagggaaaatgac

SEQ ID NO: 481770 - DNA, 55 bp, Artificial
  Synthetic oligonucleotide
ttgcatgagacccctgttttgctgatcctaaccgatttcggtcgcttctggcacc

SEQ ID NO: 481771 - DNA, 60 bp, Artificial
  Synthetic oligonucleotide
ttgcatgagtcatttatgagcttgtttggttttgatgtgtcattagcttatcgaggtcga

SEQ ID NO: 481772 - DNA, 51 bp, Artificial
  Synthetic oligonucleotide
ttgcatgagtccttataaagaataaacggagtcccggtttcaatctgtgat

SEQ ID NO: 481773 - DNA, 60 bp, Artificial
  Synthetic oligonucleotide
ttgcatgataacttcgaatccttatgggatactataactacatcaaactacatcttagct

SEQ ID NO: 481774 - DNA, 57 bp, Artificial
  Synthetic oligonucleotide
ttgcatgatttacgtgattttgaagttggagtatacatacgtggttaagccctttct

SEQ ID NO: 481775 - DNA, 57 bp, Artificial
  Synthetic oligonucleotide
ttgcatgcgtttaagaataggtacggcctaataggagttgacgtgggcgagacgccc

SEQ ID NO: 481776 - DNA, 59 bp, Artificial
  Synthetic oligonucleotide
ttgcatggttatctgtgggcctccaaacacaggaaaatctatgtttgtaatgagtttta

SEQ ID NO: 481777 - DNA, 60 bp, Artificial
  Synthetic oligonucleotide
ttgcatgtcagctggctatagtgaatacaatagtatatccagcatttggaatgcagcgaa

SEQ ID NO: 481778 - DNA, 55 bp, Artificial
  Synthetic oligonucleotide
ttgcatgtctgcggacgaatggcggttcggagccgaggcgcgactataaaggggc

SEQ ID NO: 481779 - DNA, 60 bp, Artificial
  Synthetic oligonucleotide
ttgcatgttcaggtgtccctctccaatacctcccctgtggacatccaagccctccttgac

SEQ ID NO: 481780 - DNA, 50 bp, Artificial
  Synthetic oligonucleotide
ttgcattcagctactcaaccggggcccttgccagttgtatgggtctcata

SEQ ID NO: 481781 - DNA, 57 bp, Artificial
  Synthetic oligonucleotide
ttgcattctttagtgcccagtcttttagtggtgcattcttttcctcgtctaggaact

SEQ ID NO: 481782 - DNA, 60 bp, Artificial
  Synthetic oligonucleotide
ttgcattgccagaacatgcctctgctgcaattcggaatgctcaggcatccggtgaggggc

SEQ ID NO: 481783 - DNA, 56 bp, Artificial
  Synthetic oligonucleotide
ttgcattgtcacaactgatcgatttagcaacactgccacttgacatgttttcaatg

SEQ ID NO: 481784 - DNA, 51 bp, Artificial
  Synthetic oligonucleotide
ttgcatttcatgctaagcaatggacgcctcgcgccttattcacggtgtttg

SEQ ID NO: 481785 - DNA, 59 bp, Artificial
  Synthetic oligonucleotide
ttgccaaagctcgaaaggctgctctagcagaattttcaccgcaaccattcgttttctta

SEQ ID NO: 481786 - DNA, 60 bp, Artificial
  Synthetic oligonucleotide
ttgccaaatggtgggaaagcagaacagtccgacctcagtacacccgcacgctcctctgga

SEQ ID NO: 481787 - DNA, 60 bp, Artificial
  Synthetic oligonucleotide
ttgccaacgagggttggaatgcttctgaggacgcgctgactgccgtaatcactgcggctt

SEQ ID NO: 481788 - DNA, 60 bp, Artificial
  Synthetic oligonucleotide
ttgccaactatgaacactcccgggagcacacagtttctcacgtccgacgactttcagtca

SEQ ID NO: 481789 - DNA, 55 bp, Artificial
  Synthetic oligonucleotide
ttgccaactatgattgggtgcctacttcaaccacaaaagtatataaacaagttcc

SEQ ID NO: 481790 - DNA, 55 bp, Artificial
  Synthetic oligonucleotide
ttgccaagtctataatgagatcaaatttatgccaggtcaccactagtgtgggacc

SEQ ID NO: 481791 - DNA, 60 bp, Artificial
  Synthetic oligonucleotide
ttgccaagtgtgtttcacaaccaaaggcttaggcatctcctatggcaggaagaagcggag

SEQ ID NO: 481792 - DNA, 54 bp, Artificial
  Synthetic oligonucleotide
ttgccaagtgtgtttcctacgaaaaggcttaggcatttactatggcaggaagaa

SEQ ID NO: 481793 - DNA, 60 bp, Artificial
  Synthetic oligonucleotide
ttgccaataatgtacacagtgaatttggtgagatttgatggaaccatgcatcctgcgata

SEQ ID NO: 481794 - DNA, 57 bp, Artificial
  Synthetic oligonucleotide
ttgccacccactcggacgacatgatagccaaaggaccgtggggggggggcatgacta

SEQ ID NO: 481795 - DNA, 55 bp, Artificial
  Synthetic oligonucleotide
ttgccaccggatgtcaggtaaacggtgctgtctgtaacctggccccaggtgactg

SEQ ID NO: 481796 - DNA, 55 bp, Artificial
  Synthetic oligonucleotide
ttgccacctgtcaaggcccctccgataccacctccacggaggaagaggacggttg

SEQ ID NO: 481797 - DNA, 58 bp, Artificial
  Synthetic oligonucleotide
ttgccacgatggcattagttggttgacaattggtatttccggaccagacaacggggca

SEQ ID NO: 481798 - DNA, 60 bp, Artificial
  Synthetic oligonucleotide
ttgccacgggtattatagctagagccattgctgacaaataccactccagcgtctactcgc

SEQ ID NO: 481799 - DNA, 60 bp, Artificial
  Synthetic oligonucleotide
ttgccacgtataatggttgatcacaagacgaaaactatgcatgtcgtagactcgtatggt

SEQ ID NO: 481800 - DNA, 55 bp, Artificial
  Synthetic oligonucleotide
ttgccactacttcccttgctttacagatagagccatccaacaggccatcagaggg

SEQ ID NO: 481801 - DNA, 60 bp, Artificial
  Synthetic oligonucleotide
ttgccactgcccaccgacttggcatgaagttggccggccctggagattatgacatcaaca

SEQ ID NO: 481802 - DNA, 55 bp, Artificial
  Synthetic oligonucleotide
ttgccagaagatcagattccggatctgaatgagagccgggccaggcacgagcact

SEQ ID NO: 481803 - DNA, 55 bp, Artificial
  Synthetic oligonucleotide
ttgccagcaaagtttaaagactgtttcttggagaaaggggagactgaattagccc

SEQ ID NO: 481804 - DNA, 60 bp, Artificial
  Synthetic oligonucleotide
ttgccagcgtcaccaaggatagccatggtaccctcaagtacaaacgcatgactcatgcga

SEQ ID NO: 481805 - DNA, 53 bp, Artificial
  Synthetic oligonucleotide
ttgccagcttgcagtagtaaatacgatcatgtatccagcttttggactacaaa

SEQ ID NO: 481806 - DNA, 50 bp, Artificial
  Synthetic oligonucleotide
ttgccaggatcgtgccctcagctacaatagctctgaagaacagagggcca

SEQ ID NO: 481807 - DNA, 60 bp, Artificial
  Synthetic oligonucleotide
ttgccaggtcacttaccaggagaaaactatgtgttacctcagtatggatacattacaaga

SEQ ID NO: 481808 - DNA, 57 bp, Artificial
  Synthetic oligonucleotide
ttgccaggttcagattgctcaaagctggttacacctagtttggtctttctgctatct

SEQ ID NO: 481809 - DNA, 60 bp, Artificial
  Synthetic oligonucleotide
ttgccagtatactatgtgcgagtacccaaataccatttgtaatcctaatctgggtaatca

SEQ ID NO: 481810 - DNA, 55 bp, Artificial
  Synthetic oligonucleotide
ttgccagtccctttgggcccccatgaactctttaaagtgttttagataatgcgga

SEQ ID NO: 481811 - DNA, 55 bp, Artificial
  Synthetic oligonucleotide
ttgccagtcttagattctgaccgttcttctcaggttgtctaggtcctacttgagg

SEQ ID NO: 481812 - DNA, 60 bp, Artificial
  Synthetic oligonucleotide
ttgccagtgacacactcgaatctgagatgaaaatgtacagagttggtggtgaggaaatgc

SEQ ID NO: 481813 - DNA, 60 bp, Artificial
  Synthetic oligonucleotide
ttgccagttgcatgggtctcatatacaacaggatgggaacggtgaccacagaggtggctt

SEQ ID NO: 481814 - DNA, 56 bp, Artificial
  Synthetic oligonucleotide
ttgccagttttttgaaacgtgtggtttgacgtctaaccattatggcagtgggtgga

SEQ ID NO: 481815 - DNA, 60 bp, Artificial
  Synthetic oligonucleotide
ttgccataaagaatcatgagattaaggttggacaaatcaatgacttaggtgtctactcaa

SEQ ID NO: 481816 - DNA, 60 bp, Artificial
  Synthetic oligonucleotide
ttgccatatcatgctttttgctttgtgctgtttggctgggattcataatgtgggcctgcc

SEQ ID NO: 481817 - DNA, 59 bp, Artificial
  Synthetic oligonucleotide
ttgccatatcatgctttttgctttgtgttgtcctactggggttcattatgtgggcctgc

SEQ ID NO: 481818 - DNA, 60 bp, Artificial
  Synthetic oligonucleotide
ttgccatatctcgtcatcgaaaatcatttcggtattataccgtagctcctcatgattgtg

SEQ ID NO: 481819 - DNA, 55 bp, Artificial
  Synthetic oligonucleotide
ttgccatcccaagaactctaatattggtggagagattgcttgaagaggagcgagt

SEQ ID NO: 481820 - DNA, 60 bp, Artificial
  Synthetic oligonucleotide
ttgccatctatcgtaggactgcattacagtggtgaaccaactactcttggaggcatcatc

SEQ ID NO: 481821 - DNA, 59 bp, Artificial
  Synthetic oligonucleotide
ttgccatgggtgacgattcagttgaggggtgggtcgagagtgctaaggacaagtacaag

SEQ ID NO: 481822 - DNA, 60 bp, Artificial
  Synthetic oligonucleotide
ttgccattaacaccagcaagttcccaaacatgtacattccagtcggacaagtgacagatt

SEQ ID NO: 481823 - DNA, 59 bp, Artificial
  Synthetic oligonucleotide
ttgccattcgagaactgtaatgccacatgccagactattgcaggagtcttaagaaccat

SEQ ID NO: 481824 - DNA, 60 bp, Artificial
  Synthetic oligonucleotide
ttgccattgtgttctcttgataagtatatgcacatggtgaagacgattgtgaagcctgtt

SEQ ID NO: 481825 - DNA, 60 bp, Artificial
  Synthetic oligonucleotide
ttgccatttatagtacggtatcgagcagtctagtcttggtagggctgatcatagcattgg

SEQ ID NO: 481826 - DNA, 60 bp, Artificial
  Synthetic oligonucleotide
ttgcccacatatctgtccccggtaaccacatatctgttagactcagtattgcaggttggg

SEQ ID NO: 481827 - DNA, 60 bp, Artificial
  Synthetic oligonucleotide
ttgcccaggctgacgcatgatgacgtttgtttacacccgatgggagctcttctaaaactc

SEQ ID NO: 481828 - DNA, 60 bp, Artificial
  Synthetic oligonucleotide
ttgcccattatacgcgcgtataatggactattgtgtgctgataaggagaacataagcgca

SEQ ID NO: 481829 - DNA, 53 bp, Artificial
  Synthetic oligonucleotide
ttgccccaattatgtcatgcttcggtcctctgtcacaacaaaagtggtacgga

SEQ ID NO: 481830 - DNA, 60 bp, Artificial
  Synthetic oligonucleotide
ttgccccaccgcaggtcttagctcagccggctttacaggcgcaggcagatcgagtgtatg

SEQ ID NO: 481831 - DNA, 56 bp, Artificial
  Synthetic oligonucleotide
ttgccccacctgctttatttaaagttgtctaggcccaatcattatgcgtttcccga

SEQ ID NO: 481832 - DNA, 60 bp, Artificial
  Synthetic oligonucleotide
ttgcccccgagacagccagcacgctatacctaattttgcactatgcaatcccccagtccc

SEQ ID NO: 481833 - DNA, 60 bp, Artificial
  Synthetic oligonucleotide
ttgccccctgcacgatcatctggcgggggactcattacgagctccagtctgacgggcaaa

SEQ ID NO: 481834 - DNA, 59 bp, Artificial
  Synthetic oligonucleotide
ttgcccctaagtgggataccaaggaacactgtaaacagtgcctcctgttagcgagatca

SEQ ID NO: 481835 - DNA, 58 bp, Artificial
  Synthetic oligonucleotide
ttgcccctataatgttctcaaacaaaatggcaagattaggaaaaggatacatgttcga

SEQ ID NO: 481836 - DNA, 60 bp, Artificial
  Synthetic oligonucleotide
ttgcccctatgagcgctgagtacaatggtttgcgtctagctggtcatcaaggcttaccaa

SEQ ID NO: 481837 - DNA, 60 bp, Artificial
  Synthetic oligonucleotide
ttgcccctcgaggttattttaagatgcgcactggaaaaagctcgataatgagatcagacg

SEQ ID NO: 481838 - DNA, 53 bp, Artificial
  Synthetic oligonucleotide
ttgcccctcggggatacttcaaaatacggagtgggaaaagctcaataatgggg

SEQ ID NO: 481839 - DNA, 56 bp, Artificial
  Synthetic oligonucleotide
ttgcccctgtcactagtttttcgccacctcctggagacggggccagtggagaggcc

SEQ ID NO: 481840 - DNA, 55 bp, Artificial
  Synthetic oligonucleotide
ttgccccttccttcttcggagaattcacacgacggtctttccgtctctcgacaag

SEQ ID NO: 481841 - DNA, 55 bp, Artificial
  Synthetic oligonucleotide
ttgcccgcgttcatctgacgcgcacgcgccatgcgcgattcgaactcgatcatcg

SEQ ID NO: 481842 - DNA, 57 bp, Artificial
  Synthetic oligonucleotide
ttgcccgggtcttcgaatattcttgttccaattggacatgtcagccgagctaacagt

SEQ ID NO: 481843 - DNA, 56 bp, Artificial
  Synthetic oligonucleotide
ttgcccgtaaatcctcaggtagtttgggatgttcctcggagctcgattgctaacct

SEQ ID NO: 481844 - DNA, 58 bp, Artificial
  Synthetic oligonucleotide
ttgcccgtccgactatcgccttcgattacgattgattttggtctcaaaggccgcgcac

SEQ ID NO: 481845 - DNA, 60 bp, Artificial
  Synthetic oligonucleotide
ttgcccgtctgctttacgtcgctgtgtctcgtgcccgtaagcgagtagtgttctatggca

SEQ ID NO: 481846 - DNA, 59 bp, Artificial
  Synthetic oligonucleotide
ttgccctaggacgttctcccctgaagaacttgcagcgacgtatcactctggtaagagaa

SEQ ID NO: 481847 - DNA, 57 bp, Artificial
  Synthetic oligonucleotide
ttgccctatgtttgactcttttggcaaacattgtgattatgatccgcgagactcgca

SEQ ID NO: 481848 - DNA, 57 bp, Artificial
  Synthetic oligonucleotide
ttgccctccaatcactggttgcttccgcgcagagggttcaaccacccgttatgtacg

SEQ ID NO: 481849 - DNA, 60 bp, Artificial
  Synthetic oligonucleotide
ttgccctgccaagttgattgccaagtgcatcatatcctgccaaccacacacctggcgcca

SEQ ID NO: 481850 - DNA, 58 bp, Artificial
  Synthetic oligonucleotide
ttgcccttgcaataatcagcgttgtcaaaggtgaccaaatctgcattggttatcatgc

SEQ ID NO: 481851 - DNA, 51 bp, Artificial
  Synthetic oligonucleotide
ttgccgaaacccgcgttaaacttcaagaccgccatctggagagtggcggcc

SEQ ID NO: 481852 - DNA, 56 bp, Artificial
  Synthetic oligonucleotide
ttgccgaaatttgattctaccgtgtgggccacagttcggaaagtaccttcatcatc

SEQ ID NO: 481853 - DNA, 53 bp, Artificial
  Synthetic oligonucleotide
ttgccgaacccaggagaggattacttagtacggtatttgttcagaggaatagg

SEQ ID NO: 481854 - DNA, 60 bp, Artificial
  Synthetic oligonucleotide
ttgccgaaggtagaagaggagcagctgagatgcttgtggttctcacggaactgcctgatt

SEQ ID NO: 481855 - DNA, 55 bp, Artificial
  Synthetic oligonucleotide
ttgccgacagaattgatttcgtcggctggaggtcaactgttttactcccgcccgg

SEQ ID NO: 481856 - DNA, 60 bp, Artificial
  Synthetic oligonucleotide
ttgccgacgcaagcgaaacaatgctagcaaacgtgacatctgttagacaagaatacgcaa

SEQ ID NO: 481857 - DNA, 55 bp, Artificial
  Synthetic oligonucleotide
ttgccgacggtaaggcacattttactgagacaattagacccgttcttgaccttac

SEQ ID NO: 481858 - DNA, 56 bp, Artificial
  Synthetic oligonucleotide
ttgccgactcccttacgggcatgtgagtgaagggagttgccacgtgatcgagtatc

SEQ ID NO: 481859 - DNA, 55 bp, Artificial
  Synthetic oligonucleotide
ttgccgaggaggctaccacaaactacacttctacggaaaacctactgggccacac

SEQ ID NO: 481860 - DNA, 60 bp, Artificial
  Synthetic oligonucleotide
ttgccgatcagactccaatgtccgttgacaatggtgccaaatccaaattggattcttctg

SEQ ID NO: 481861 - DNA, 60 bp, Artificial
  Synthetic oligonucleotide
ttgccgatcgttaaagccattgaatctgctacgtctgcgctggttcagcacggaaggggg

SEQ ID NO: 481862 - DNA, 60 bp, Artificial
  Synthetic oligonucleotide
ttgccgcaggaaaagattctgaagcggcgtattttcgcagcatgctaccctttcatatgg

SEQ ID NO: 481863 - DNA, 60 bp, Artificial
  Synthetic oligonucleotide
ttgccgctaaggacataattgtgcacctggaagttgaacacgtcaggcctgtgcttgacg

SEQ ID NO: 481864 - DNA, 58 bp, Artificial
  Synthetic oligonucleotide
ttgccgctcactgactgcaagggcaaatgggccctcccgtttaacatggagaaactac

SEQ ID NO: 481865 - DNA, 55 bp, Artificial
  Synthetic oligonucleotide
ttgccgctggtaccccattgtcggacctgtccctggagtggccgtatacgccaac

SEQ ID NO: 481866 - DNA, 60 bp, Artificial
  Synthetic oligonucleotide
ttgccggaagcacactacccagaagatcaggtacaactggtgttgcaatcaaaggaggtg

SEQ ID NO: 481867 - DNA, 60 bp, Artificial
  Synthetic oligonucleotide
ttgccggaagtatcactgtttggaaatgtcctgtaaagctgagcaatgtgcaattcccgg

SEQ ID NO: 481868 - DNA, 60 bp, Artificial
  Synthetic oligonucleotide
ttgccggagcaccagaccgatgtccacctacatgtttattcgttgcagggattgcagaac

SEQ ID NO: 481869 - DNA, 51 bp, Artificial
  Synthetic oligonucleotide
ttgccggcggatacatttagcaacgacgtcacatttgagaactggtgggct

SEQ ID NO: 481870 - DNA, 56 bp, Artificial
  Synthetic oligonucleotide
ttgccggcgtcgatgggactacctacacgacggggggggcacagggccgcactgtc

SEQ ID NO: 481871 - DNA, 55 bp, Artificial
  Synthetic oligonucleotide
ttgccggtccctgagcgatttatgggaacctacgtgcccaacaggctaccgcttt

SEQ ID NO: 481872 - DNA, 53 bp, Artificial
  Synthetic oligonucleotide
ttgccgtcatatcatgccattaaaaaatatacaacgacatttactactttcgc

SEQ ID NO: 481873 - DNA, 55 bp, Artificial
  Synthetic oligonucleotide
ttgccgtccgaagtgggtcccacaagctgctgtgacagaaacaggtttcctgtag

SEQ ID NO: 481874 - DNA, 56 bp, Artificial
  Synthetic oligonucleotide
ttgccgtcctcaattcacgacacgcgcggcggtgtgtacccctgggagggtagaaa

SEQ ID NO: 481875 - DNA, 60 bp, Artificial
  Synthetic oligonucleotide
ttgccgtctaactattggtatttaatcaatccatcaaatgatggcgtggtgttctcggta

SEQ ID NO: 481876 - DNA, 50 bp, Artificial
  Synthetic oligonucleotide
ttgccgtgacaaacgccggtatagtaccgctcaatctgcccaccgtgaat

SEQ ID NO: 481877 - DNA, 56 bp, Artificial
  Synthetic oligonucleotide
ttgccgtgagtcgtttattaaggtaaacacttggcagggtattacacttgggcagc

SEQ ID NO: 481878 - DNA, 54 bp, Artificial
  Synthetic oligonucleotide
ttgccgtgatgaaagatgaggtagcttcccccttattgggaggctgaaactaca

SEQ ID NO: 481879 - DNA, 50 bp, Artificial
  Synthetic oligonucleotide
ttgccgtggggtccttctgtccaggcgcagttcgtcacttttgatgcgcc

SEQ ID NO: 481880 - DNA, 55 bp, Artificial
  Synthetic oligonucleotide
ttgccgtgttacgacaggagcaagtcaccactccgcggttggctttgacttggcc

SEQ ID NO: 481881 - DNA, 60 bp, Artificial
  Synthetic oligonucleotide
ttgcctacctgcctgtgcgtatggacctgcagtatccagtgggtacgacttcgaaaaaga

SEQ ID NO: 481882 - DNA, 58 bp, Artificial
  Synthetic oligonucleotide
ttgcctacggggatgacattgtagttgcaagtgactacgatttggactttgaagctct

SEQ ID NO: 481883 - DNA, 57 bp, Artificial
  Synthetic oligonucleotide
ttgcctcaccacccccaggaggggacatagaaattacaacacatatgtttaattgtg

SEQ ID NO: 481884 - DNA, 52 bp, Artificial
  Synthetic oligonucleotide
ttgcctccaggggcaaccatgtctctcctacacactatgtgcccgagacgga

SEQ ID NO: 481885 - DNA, 60 bp, Artificial
  Synthetic oligonucleotide
ttgcctcgcattttagtggaccacgcaagccagacaatgcatgtcatcgattcttttgga

SEQ ID NO: 481886 - DNA, 52 bp, Artificial
  Synthetic oligonucleotide
ttgcctgacaacggatatgagcctggcacctcgaacgcaaacgcagcgtccg

SEQ ID NO: 481887 - DNA, 60 bp, Artificial
  Synthetic oligonucleotide
ttgcctgacaccgtacgcgttggcacccaacgctgcagttccaacgttgctggcagtctt

SEQ ID NO: 481888 - DNA, 60 bp, Artificial
  Synthetic oligonucleotide
ttgcctgacgttagactcggtgattggatttctgattcccctgaggatttgcaagatgcg

SEQ ID NO: 481889 - DNA, 55 bp, Artificial
  Synthetic oligonucleotide
ttgcctgactggtgaccgttctgctgctgaactatgtaacgtagttaactacatg

SEQ ID NO: 481890 - DNA, 55 bp, Artificial
  Synthetic oligonucleotide
ttgcctgcccgcttttgtacttataatgctcaatttgctgattgttatgtgtctg

SEQ ID NO: 481891 - DNA, 56 bp, Artificial
  Synthetic oligonucleotide
ttgcctgggattcccttcgtgtcctgccagcgtgggtacaagggggtctggcgagg

SEQ ID NO: 481892 - DNA, 60 bp, Artificial
  Synthetic oligonucleotide
ttgcctgtcatgactgcacaagttagcacaagtcttataagtaactgcacagtgcaacaa

SEQ ID NO: 481893 - DNA, 60 bp, Artificial
  Synthetic oligonucleotide
ttgccttcgaattgaataagcacatggagatgaggttccccatcttcgtgaagttctctg

SEQ ID NO: 481894 - DNA, 52 bp, Artificial
  Synthetic oligonucleotide
ttgccttcggagtgttgatgcgttgcgctcagcacactaacccgtgtgtagc

SEQ ID NO: 481895 - DNA, 60 bp, Artificial
  Synthetic oligonucleotide
ttgccttgaccttatttaatcttgctgacacacttcttggcggtctgccgacagaattga

SEQ ID NO: 481896 - DNA, 60 bp, Artificial
  Synthetic oligonucleotide
ttgccttggacatcatgctgtgtcaaacggaactaagataaacacactaactgagagagg

SEQ ID NO: 481897 - DNA, 60 bp, Artificial
  Synthetic oligonucleotide
ttgcctttagagtggccagtctttcgagagtaattgaggagacttctcttattatgctgt

SEQ ID NO: 481898 - DNA, 58 bp, Artificial
  Synthetic oligonucleotide
ttgcctttctttgatcgggtgtgaaagtggccagacacgacgtgttcgtatttggata

SEQ ID NO: 481899 - DNA, 55 bp, Artificial
  Synthetic oligonucleotide
ttgcgaaaagtcgcaaggcaaacaagatcctaacctatgatatgaaacgtgatcc

SEQ ID NO: 481900 - DNA, 55 bp, Artificial
  Synthetic oligonucleotide
ttgcgaaagtgcgagcggtgtcggtcgcttgtcgggtcgtcgcgcgtctctaggt

SEQ ID NO: 481901 - DNA, 58 bp, Artificial
  Synthetic oligonucleotide
ttgcgaaatgggtcctctgatgaacgttggtgtcggaaactctgtaatacagtttcca

SEQ ID NO: 481902 - DNA, 55 bp, Artificial
  Synthetic oligonucleotide
ttgcgaactagcaattacagcgtaactagtctaactctgcttaatattacatatg

SEQ ID NO: 481903 - DNA, 58 bp, Artificial
  Synthetic oligonucleotide
ttgcgaagactgtctcagatcttaagaagaaagttgtagttggtactatttacacaaa

SEQ ID NO: 481904 - DNA, 60 bp, Artificial
  Synthetic oligonucleotide
ttgcgaagatggcgtgtgcaatgaggaagagatcgctgctaaagaaattgcaaacgctta

SEQ ID NO: 481905 - DNA, 58 bp, Artificial
  Synthetic oligonucleotide
ttgcgaagctgttcagacgctagtgacactggtggcacaaatatcggagacccagtac

SEQ ID NO: 481906 - DNA, 60 bp, Artificial
  Synthetic oligonucleotide
ttgcgaagtgagcggaggaccagatttagagtttgcaggaccgacctgccccagctatgt

SEQ ID NO: 481907 - DNA, 60 bp, Artificial
  Synthetic oligonucleotide
ttgcgaattaacgctgcataccacaattgaagccagctgcccaattaaaagttcttgcac

SEQ ID NO: 481908 - DNA, 60 bp, Artificial
  Synthetic oligonucleotide
ttgcgacacatcacaactgtttaataacacaaaagtcaatgacactatcaccctcccgtg

SEQ ID NO: 481909 - DNA, 60 bp, Artificial
  Synthetic oligonucleotide
ttgcgacaccattaaagccatgtgcattgctagagagcttttaaacgacttaaacggtgc

SEQ ID NO: 481910 - DNA, 53 bp, Artificial
  Synthetic oligonucleotide
ttgcgacacgcgcggcggtgtgtacccctgggagggtaaaatagaggggtttc

SEQ ID NO: 481911 - DNA, 55 bp, Artificial
  Synthetic oligonucleotide
ttgcgacagcccatatccatacgccaactgggacgactgcgagtcggtgtcttcc

SEQ ID NO: 481912 - DNA, 56 bp, Artificial
  Synthetic oligonucleotide
ttgcgacatagccttaagagctatatataagatcagggaagaatcaatagtaaggt

SEQ ID NO: 481913 - DNA, 60 bp, Artificial
  Synthetic oligonucleotide
ttgcgaccgcaaatgcagacacactatgtataggttaccatgcaaataattcaactgaca

SEQ ID NO: 481914 - DNA, 55 bp, Artificial
  Synthetic oligonucleotide
ttgcgacggtaggcggtgcggtctgaattggtgctttcgagaccggagccttgag

SEQ ID NO: 481915 - DNA, 60 bp, Artificial
  Synthetic oligonucleotide
ttgcgactaatgatattgccgcctcaaccatgggtgcacttgcgaatactacgccgttag

SEQ ID NO: 481916 - DNA, 57 bp, Artificial
  Synthetic oligonucleotide
ttgcgactaccttgcctcatgggtttgagttgtacgtaccaacaattccccagagcg

SEQ ID NO: 481917 - DNA, 60 bp, Artificial
  Synthetic oligonucleotide
ttgcgagaatggccaactttgcaagacgtagccacagcgtgttatttgacatcaacgttc

SEQ ID NO: 481918 - DNA, 55 bp, Artificial
  Synthetic oligonucleotide
ttgcgagacagttatggagagcatcactgtagggtgcacaacaaggtgtgcgggc

SEQ ID NO: 481919 - DNA, 53 bp, Artificial
  Synthetic oligonucleotide
ttgcgagaggggtaagtcacagcgacaacgtgttgatcaggagacttcagtta

SEQ ID NO: 481920 - DNA, 60 bp, Artificial
  Synthetic oligonucleotide
ttgcgagataagcagagcaataaggctagtccgtccactatggagcctggtacatccagt

SEQ ID NO: 481921 - DNA, 57 bp, Artificial
  Synthetic oligonucleotide
ttgcgagcatattgtgaaggaacgagaagtgccggcttccgttgatcctttcgcaga

SEQ ID NO: 481922 - DNA, 60 bp, Artificial
  Synthetic oligonucleotide
ttgcgagccagagctgttttggcttgtcaccagctggccatggttcttcgccagctgtca

SEQ ID NO: 481923 - DNA, 59 bp, Artificial
  Synthetic oligonucleotide
ttgcgagcttggagacatcgggccagagctgttcgcgctaagttactgtcccagggggg

SEQ ID NO: 481924 - DNA, 51 bp, Artificial
  Synthetic oligonucleotide
ttgcgaggagcgatagaaatcgagtcagaaggtatgcaggaagaagcaata

SEQ ID NO: 481925 - DNA, 60 bp, Artificial
  Synthetic oligonucleotide
ttgcgaggcgacattatttcagtgaccagcaatactgcggttgtcgtgcgcttcaaccgt

SEQ ID NO: 481926 - DNA, 55 bp, Artificial
  Synthetic oligonucleotide
ttgcgagtgaaggttaaacgcgcggcccatatttatataggcgatgcgccgaccc

SEQ ID NO: 481927 - DNA, 60 bp, Artificial
  Synthetic oligonucleotide
ttgcgagtggtgttttatcgaaccaatgggatactagagtgcacgatagattaatgcgtg

SEQ ID NO: 481928 - DNA, 60 bp, Artificial
  Synthetic oligonucleotide
ttgcgatacatcaaacctgtttaataagacacgcagggataatgctaatgaaactatcac

SEQ ID NO: 481929 - DNA, 60 bp, Artificial
  Synthetic oligonucleotide
ttgcgatacatcagggctgtttaatagcacttgggataacattaccagtacaaatggcac

SEQ ID NO: 481930 - DNA, 54 bp, Artificial
  Synthetic oligonucleotide
ttgcgatatttgggaagagaagtcccaccaaaggctcaagaaagggtcttaccc

SEQ ID NO: 481931 - DNA, 60 bp, Artificial
  Synthetic oligonucleotide
ttgcgattggaagagcgggtttatttgcggaccctccagcatcaactggatctgtattcc

SEQ ID NO: 481932 - DNA, 59 bp, Artificial
  Synthetic oligonucleotide
ttgcgcaaactaattcaaaatttgcgctccaaggaccatgccaaagcggaactacgata

SEQ ID NO: 481933 - DNA, 60 bp, Artificial
  Synthetic oligonucleotide
ttgcgcaagattccacaggtacgcactacgccttttcgcacaagccgtcgcaaggtgcgt

SEQ ID NO: 481934 - DNA, 59 bp, Artificial
  Synthetic oligonucleotide
ttgcgcaccaacgtgctagtggaatagtacacatccgcgaaaaagcaaatgggacccga

SEQ ID NO: 481935 - DNA, 56 bp, Artificial
  Synthetic oligonucleotide
ttgcgcacgatactggtttgcggcaaggtgtactcagtcgtgccatagtcgaatgt

SEQ ID NO: 481936 - DNA, 58 bp, Artificial
  Synthetic oligonucleotide
ttgcgcacgccgaagattgagccaactatggttgcgactacattggagcacaggttcg

SEQ ID NO: 481937 - DNA, 60 bp, Artificial
  Synthetic oligonucleotide
ttgcgcactgtacgacacatgtccgaactgcacatctaaggtaatcaacgatgatggctc

SEQ ID NO: 481938 - DNA, 53 bp, Artificial
  Synthetic oligonucleotide
ttgcgcaggtttgtgttgacgttgtgtcccgtgtttatggggttagccccggg

SEQ ID NO: 481939 - DNA, 60 bp, Artificial
  Synthetic oligonucleotide
ttgcgcattatgcaaccttactaccacgcattgtactctttctatgaacatacaggtatg

SEQ ID NO: 481940 - DNA, 59 bp, Artificial
  Synthetic oligonucleotide
ttgcgcatttacaatggctcaaagtgggaaagatcaagtggagggaccccaaggatagc

SEQ ID NO: 481941 - DNA, 55 bp, Artificial
  Synthetic oligonucleotide
ttgcgccacaatgttctgagccgaacgtagttgtgtacaacgttctagtgagctc

SEQ ID NO: 481942 - DNA, 55 bp, Artificial
  Synthetic oligonucleotide
ttgcgccagggccgtcgtacaagacaactgttccactgatgtggccttggggtca

SEQ ID NO: 481943 - DNA, 56 bp, Artificial
  Synthetic oligonucleotide
ttgcgccagtccgtcctcaacattttgaccaccccgctgggtagccgtgtctaccg

SEQ ID NO: 481944 - DNA, 56 bp, Artificial
  Synthetic oligonucleotide
ttgcgccggcagtataatctgtctacgtccccgcttacgtcatccgttgctgcggg

SEQ ID NO: 481945 - DNA, 57 bp, Artificial
  Synthetic oligonucleotide
ttgcgccgtctgcttcggacacacgaaatgaaaatctaacccgctagctaaaaggct

SEQ ID NO: 481946 - DNA, 60 bp, Artificial
  Synthetic oligonucleotide
ttgcgcctatcacggcctactgtcaacagacgcggggcctacttggctgcatcattacta

SEQ ID NO: 481947 - DNA, 52 bp, Artificial
  Synthetic oligonucleotide
ttgcgcctggtgtctgtgatacgcacgggatgtcctacccatcgattggtgc

SEQ ID NO: 481948 - DNA, 55 bp, Artificial
  Synthetic oligonucleotide
ttgcgcgatatgagagaggcgaggaggattttatatttagtccagagtttaggtg

SEQ ID NO: 481949 - DNA, 55 bp, Artificial
  Synthetic oligonucleotide
ttgcgcgccctgcttgatactagctctatcctgagacagttccactgggttaagg

SEQ ID NO: 481950 - DNA, 55 bp, Artificial
  Synthetic oligonucleotide
ttgcgcggaaaggggatagccatttcatagtaggtgtaaccaaccaggaccttaa

SEQ ID NO: 481951 - DNA, 57 bp, Artificial
  Synthetic oligonucleotide
ttgcgcggaagttgtacttctatggtggaaccctgcgtctagatgttcaccccgacc

SEQ ID NO: 481952 - DNA, 55 bp, Artificial
  Synthetic oligonucleotide
ttgcgcgggacccgatggactttcgttcacccacttacagctggactcacgacac

SEQ ID NO: 481953 - DNA, 55 bp, Artificial
  Synthetic oligonucleotide
ttgcgctccaccacaaccccagtggtagctctgagagatggggctcgcagtcacc

SEQ ID NO: 481954 - DNA, 55 bp, Artificial
  Synthetic oligonucleotide
ttgcgctggctaaagattgggttgataggattgagcagtggctaagtgaaccttg

SEQ ID NO: 481955 - DNA, 60 bp, Artificial
  Synthetic oligonucleotide
ttgcgctgtatgatgttgcagtcggggcctcccgctactagcaacatctaccacaatctt

SEQ ID NO: 481956 - DNA, 60 bp, Artificial
  Synthetic oligonucleotide
ttgcgctgttacactatggtcatctcttctttactccagacgaactacgacgtacgtaca

SEQ ID NO: 481957 - DNA, 60 bp, Artificial
  Synthetic oligonucleotide
ttgcgcttccagttggtaattatccagttatgactgggggtgctgtgtcattgcattcag

SEQ ID NO: 481958 - DNA, 60 bp, Artificial
  Synthetic oligonucleotide
ttgcgcttgcaggaagatcctgcacagaagaagctttcaaaatcggactgcacactgagt

SEQ ID NO: 481959 - DNA, 59 bp, Artificial
  Synthetic oligonucleotide
ttgcggaaaaaacactcgagtgccgctgagctcgtacacttctgactgtatccagaacg

SEQ ID NO: 481960 - DNA, 55 bp, Artificial
  Synthetic oligonucleotide
ttgcggaagctctcaggaggtactacagtactccctatgaaggtgtgccagaaac

SEQ ID NO: 481961 - DNA, 55 bp, Artificial
  Synthetic oligonucleotide
ttgcggaggcaatggcgcaccatgggccggcacgtctgtatgctgtgctgcatct

SEQ ID NO: 481962 - DNA, 59 bp, Artificial
  Synthetic oligonucleotide
ttgcggagtgtttcgctcagcactgcccccgtgtagatcaggtcaatgagtcaccgcaa

SEQ ID NO: 481963 - DNA, 59 bp, Artificial
  Synthetic oligonucleotide
ttgcggatgcttcagagaccttattggcaaatgtgacatcggtgcgtcaagaatatgca

SEQ ID NO: 481964 - DNA, 60 bp, Artificial
  Synthetic oligonucleotide
ttgcggcacctctcttagagagcattgcccaacctctccgcgactctcttcaattatatc

SEQ ID NO: 481965 - DNA, 60 bp, Artificial
  Synthetic oligonucleotide
ttgcggcagtggatacacttacacgacttcgaacatgtatgctaacagatcggaattcat

SEQ ID NO: 481966 - DNA, 55 bp, Artificial
  Synthetic oligonucleotide
ttgcggcatgcaaccagccggtagccaggagcagtatgtcaaccctggttacact

SEQ ID NO: 481967 - DNA, 51 bp, Artificial
  Synthetic oligonucleotide
ttgcggccacccaaatcgagtttagtcaaacactgatttacgcctgtattg

SEQ ID NO: 481968 - DNA, 58 bp, Artificial
  Synthetic oligonucleotide
ttgcggcgaatgtggtcaatagaaaagttactaaacgtgtggaccgtgtgatagagta

SEQ ID NO: 481969 - DNA, 50 bp, Artificial
  Synthetic oligonucleotide
ttgcggctacaacgaagtggaatctccaacccgttgttctcgtagatggt

SEQ ID NO: 481970 - DNA, 57 bp, Artificial
  Synthetic oligonucleotide
ttgcggctattgagattcagtcccttgaagaattatttaccttaattagatgtaatt

SEQ ID NO: 481971 - DNA, 60 bp, Artificial
  Synthetic oligonucleotide
ttgcggctcctcagacctttacctggtcacgaggcatgccgacgtcattcccgtgcaccg

SEQ ID NO: 481972 - DNA, 58 bp, Artificial
  Synthetic oligonucleotide
ttgcggctgaccaccgtacaggaattctctcgcactagtcgggtttgaagcgcgggtg

SEQ ID NO: 481973 - DNA, 60 bp, Artificial
  Synthetic oligonucleotide
ttgcgggatgctgcttctgccctgtgtgaatggctagccgatgaaccagctattgtgtct

SEQ ID NO: 481974 - DNA, 60 bp, Artificial
  Synthetic oligonucleotide
ttgcgggctaggtatgttccgagtcggttaaatcaggcattagaagtatgtgatattatg

SEQ ID NO: 481975 - DNA, 60 bp, Artificial
  Synthetic oligonucleotide
ttgcggggcgccatcaatgacaacccaatcatagtcgcgtgcgattttaggcaggtctct

SEQ ID NO: 481976 - DNA, 56 bp, Artificial
  Synthetic oligonucleotide
ttgcgggtataaaaacatcagacggtacttttcgaagatgaattgcaacaccactt

SEQ ID NO: 481977 - DNA, 57 bp, Artificial
  Synthetic oligonucleotide
ttgcggtaaaggtcaaatcatcgatagctttgctgtgtacatacggactgataggct

SEQ ID NO: 481978 - DNA, 59 bp, Artificial
  Synthetic oligonucleotide
ttgcggtaagttcttgctgaaagttggtgataaatggaaattcgctccggatcctatga

SEQ ID NO: 481979 - DNA, 58 bp, Artificial
  Synthetic oligonucleotide
ttgcggtaccactaccctatcagtgctctttggttagaagaaggaggccagctaccac

SEQ ID NO: 481980 - DNA, 55 bp, Artificial
  Synthetic oligonucleotide
ttgcggtcgtccttttcgtgatccatcaacacctccttgttttcgttttattatg

SEQ ID NO: 481981 - DNA, 55 bp, Artificial
  Synthetic oligonucleotide
ttgcggttggagttctagctttgtactcagcttatcgtatgatgagtggacttat

SEQ ID NO: 481982 - DNA, 51 bp, Artificial
  Synthetic oligonucleotide
ttgcgtaaaagcgaacaatggcacataggagatgatgaggtaaaactattg

SEQ ID NO: 481983 - DNA, 60 bp, Artificial
  Synthetic oligonucleotide
ttgcgtaacagatggtattggaagctgaagaaagacactctaccagatggagattatgat

SEQ ID NO: 481984 - DNA, 60 bp, Artificial
  Synthetic oligonucleotide
ttgcgtacaaacaacagcgctacattggttttaccatatgtgaacgcaattccaatggat

SEQ ID NO: 481985 - DNA, 55 bp, Artificial
  Synthetic oligonucleotide
ttgcgtacacccattagctgaacaggttcttataatgactcataaagggagagcg

SEQ ID NO: 481986 - DNA, 60 bp, Artificial
  Synthetic oligonucleotide
ttgcgtacactgtctgttcaagtacatcccataaaacataattgaccgctctaattacat

SEQ ID NO: 481987 - DNA, 60 bp, Artificial
  Synthetic oligonucleotide
ttgcgtacagacggaggacgctgtcatacaattattctcacaccaacaggccaaggacca

SEQ ID NO: 481988 - DNA, 60 bp, Artificial
  Synthetic oligonucleotide
ttgcgtaccgcgatatgcaattggaaagagacgaaatgtatggctacgtgaatagagcta

SEQ ID NO: 481989 - DNA, 57 bp, Artificial
  Synthetic oligonucleotide
ttgcgtacggcctgtgaaaggccgcgcattccaggtcttcttgagaatcttgtagct

SEQ ID NO: 481990 - DNA, 60 bp, Artificial
  Synthetic oligonucleotide
ttgcgtacggtctctcactcctttaccatgtctgggattcttgatcggtgcacgtgtacc

SEQ ID NO: 481991 - DNA, 60 bp, Artificial
  Synthetic oligonucleotide
ttgcgtactggtctataagtcacagactcacacggctggcttagtgtacgctaaaggcat

SEQ ID NO: 481992 - DNA, 60 bp, Artificial
  Synthetic oligonucleotide
ttgcgtatacacggagcgcagtgcaattgtgatcaacagaaatagtgtgctggaagttga

SEQ ID NO: 481993 - DNA, 60 bp, Artificial
  Synthetic oligonucleotide
ttgcgtatcacgataggaagtggtgcttcgatggaccttcaataaatacagttctcgagg

SEQ ID NO: 481994 - DNA, 53 bp, Artificial
  Synthetic oligonucleotide
ttgcgtcctcaagttttcgcacccgtcgcccctctccaaggttccgttcggaa

SEQ ID NO: 481995 - DNA, 55 bp, Artificial
  Synthetic oligonucleotide
ttgcgtcctttgcattcctactattgatgccgactctcccgggtctagaatgggc

SEQ ID NO: 481996 - DNA, 60 bp, Artificial
  Synthetic oligonucleotide
ttgcgtcgtgcttcgtcgaatcctcggctcgatacgcgccggcgaatcgcagttgcacgc

SEQ ID NO: 481997 - DNA, 55 bp, Artificial
  Synthetic oligonucleotide
ttgcgtctactgaatctgacaccggaccagcgaccaccgtcccagattccacgtg

SEQ ID NO: 481998 - DNA, 57 bp, Artificial
  Synthetic oligonucleotide
ttgcgtctcccgattgacccccgcgcacaaaccaccacggccggggaatctgcagac

SEQ ID NO: 481999 - DNA, 58 bp, Artificial
  Synthetic oligonucleotide
ttgcgtctcttcgctttcctgtgctgtactttgattggtacctgagtacaggggtcct

SEQ ID NO: 482000 - DNA, 60 bp, Artificial
  Synthetic oligonucleotide
ttgcgtgagaatttcgacgtgttcgagaactcgttgaatttgtctcagcttgctagatcc

SEQ ID NO: 482001 - DNA, 60 bp, Artificial
  Synthetic oligonucleotide
ttgcgtgcactcatggaggccaatgtaactgccgatgacaggataaaggcattgcaagca

SEQ ID NO: 482002 - DNA, 59 bp, Artificial
  Synthetic oligonucleotide
ttgcgtgtttgcaaagacacattcggaccactttgggacgtctaagcgctgcatcccgt

SEQ ID NO: 482003 - DNA, 54 bp, Artificial
  Synthetic oligonucleotide
ttgcgttaatgtcccgtaggaacattggtggtacgtacattactggtacaagtg

SEQ ID NO: 482004 - DNA, 60 bp, Artificial
  Synthetic oligonucleotide
ttgcgttactggggggtctagacagatcagctaacttgctgcgcctagatgtagcttcta

SEQ ID NO: 482005 - DNA, 60 bp, Artificial
  Synthetic oligonucleotide
ttgcgttcctgtgcctgaaggaacgagagctgttactctcagtgctagtgctgttagcgt

SEQ ID NO: 482006 - DNA, 58 bp, Artificial
  Synthetic oligonucleotide
ttgcgttgagtgggatcccaacagtaggaattcgacggacaagtagcaagcgagtcgg

SEQ ID NO: 482007 - DNA, 50 bp, Artificial
  Synthetic oligonucleotide
ttgcgttgggccaaagagaacgtttctagcgaagttcgaacggtgcacgc

SEQ ID NO: 482008 - DNA, 54 bp, Artificial
  Synthetic oligonucleotide
ttgcgttgggccttcctggataaagttaaccaatcagtacacgtttgggtagtc

SEQ ID NO: 482009 - DNA, 60 bp, Artificial
  Synthetic oligonucleotide
ttgcgtttccatataggaccgcgagaacttcgagaaacatgggtcaagtgctggctacag

SEQ ID NO: 482010 - DNA, 57 bp, Artificial
  Synthetic oligonucleotide
ttgcgtttcgttggctcttgcatcggtgaatctgaaagagtttcttcttgaaaaaag

SEQ ID NO: 482011 - DNA, 57 bp, Artificial
  Synthetic oligonucleotide
ttgctaaattagatgaagacgtgaataaacttaggatgactttatcttctaaaggaa

SEQ ID NO: 482012 - DNA, 60 bp, Artificial
  Synthetic oligonucleotide
ttgctaacaaagcgaaaccagaagttaatcattaacgccacacccatgatgagtcatcac

SEQ ID NO: 482013 - DNA, 56 bp, Artificial
  Synthetic oligonucleotide
ttgctaacatgttctcgtattggcgtgcaactatgtgttataggattaccgtggtg

SEQ ID NO: 482014 - DNA, 52 bp, Artificial
  Synthetic oligonucleotide
ttgctaagataccacttttttgcaccgtcaaaaggtgctagcgggtcttgtg

SEQ ID NO: 482015 - DNA, 60 bp, Artificial
  Synthetic oligonucleotide
ttgctaaggacaacgttatcggtctgttcatgcaccgctctgcggtaggtactgttaagc

SEQ ID NO: 482016 - DNA, 52 bp, Artificial
  Synthetic oligonucleotide
ttgctaaggcagtgtcaatagtgaacacaggtaaggaatcagtttggaccct

SEQ ID NO: 482017 - DNA, 55 bp, Artificial
  Synthetic oligonucleotide
ttgctaagtttatgagctataaccacaaagtgcctcaatctgtcttaactgctgt

SEQ ID NO: 482018 - DNA, 55 bp, Artificial
  Synthetic oligonucleotide
ttgctacaaataggtatccgatgggaattgacataaagaaacataaacctttacc

SEQ ID NO: 482019 - DNA, 60 bp, Artificial
  Synthetic oligonucleotide
ttgctacaaggtcacttattctcgctggtcaagctaccgccctagacatccttgattacg

SEQ ID NO: 482020 - DNA, 60 bp, Artificial
  Synthetic oligonucleotide
ttgctacaatgtttgttgctgctagggaaggtgacctacagtgtcctactccataccgtg

SEQ ID NO: 482021 - DNA, 55 bp, Artificial
  Synthetic oligonucleotide
ttgctacacaccacctggtggatctagcccaacagataggatgcaagccatgcta

SEQ ID NO: 482022 - DNA, 51 bp, Artificial
  Synthetic oligonucleotide
ttgctacacctccgtttgtgcccagagccttgcaacaaggttcggttcgcc

SEQ ID NO: 482023 - DNA, 60 bp, Artificial
  Synthetic oligonucleotide
ttgctacagaggcgtgtagaacagtcagaaaggatgatcctgatgctccaccaacgagtg

SEQ ID NO: 482024 - DNA, 50 bp, Artificial
  Synthetic oligonucleotide
ttgctacagtgcgcagtgaattgctctgagaacagttcaacacgactccg

SEQ ID NO: 482025 - DNA, 60 bp, Artificial
  Synthetic oligonucleotide
ttgctacagtttcaaggctacgacccagtagtagcaggatacattatatacgcttggagc

SEQ ID NO: 482026 - DNA, 57 bp, Artificial
  Synthetic oligonucleotide
ttgctaccccccgtttgtccactacatctttccctacattacctagcatgtctacac

SEQ ID NO: 482027 - DNA, 52 bp, Artificial
  Synthetic oligonucleotide
ttgctaccgattccagacagagatcttctgctaatccggttaccgaaggacg

SEQ ID NO: 482028 - DNA, 55 bp, Artificial
  Synthetic oligonucleotide
ttgctacctccaaacttgatgctgaacaaatagaacgtgtacaaatcgagaccct

SEQ ID NO: 482029 - DNA, 56 bp, Artificial
  Synthetic oligonucleotide
ttgctacgagacgaggtgtcgttcagagtaggactacacgagtacccggtggggtc

SEQ ID NO: 482030 - DNA, 55 bp, Artificial
  Synthetic oligonucleotide
ttgctacgggcactaaccttgtactttatgctgccccgcttagtcctttactacc

SEQ ID NO: 482031 - DNA, 55 bp, Artificial
  Synthetic oligonucleotide
ttgctactaattgatttcctctgttacaacaatctacctcattgtccaactcccc

SEQ ID NO: 482032 - DNA, 60 bp, Artificial
  Synthetic oligonucleotide
ttgctactcaaatcagttttaatagctattggtcactcaaaagagattgaaacgactgtc

SEQ ID NO: 482033 - DNA, 60 bp, Artificial
  Synthetic oligonucleotide
ttgctactcgccaacagagttggacagctcgtggacttaactcgccttatgtgctataac

SEQ ID NO: 482034 - DNA, 58 bp, Artificial
  Synthetic oligonucleotide
ttgctactctatgacttcccggaggaacttcgacatgagcaaaggcttattggaaccg

SEQ ID NO: 482035 - DNA, 60 bp, Artificial
  Synthetic oligonucleotide
ttgctagacatattttgatggagtatcaagttatgactccttacttggctgatccagagt

SEQ ID NO: 482036 - DNA, 60 bp, Artificial
  Synthetic oligonucleotide
ttgctagactgttcactatgggtatggctggactgcacatcactactgagccatcttaca

SEQ ID NO: 482037 - DNA, 56 bp, Artificial
  Synthetic oligonucleotide
ttgctagcgctcattgcgctggtgagaccgtcaggtaaggtagtactgtgtggcga

SEQ ID NO: 482038 - DNA, 58 bp, Artificial
  Synthetic oligonucleotide
ttgctaggttgttaccgcgcaaatgcagacaaaccaattatgttttggattgtcccga

SEQ ID NO: 482039 - DNA, 52 bp, Artificial
  Synthetic oligonucleotide
ttgctagtagtcttgatcgcggtcatatacaacaatgtcggactgctgcggt

SEQ ID NO: 482040 - DNA, 55 bp, Artificial
  Synthetic oligonucleotide
ttgctagtctaaactggtcaggatgtttaaaataatcgaccaacgtcgtaaagga

SEQ ID NO: 482041 - DNA, 54 bp, Artificial
  Synthetic oligonucleotide
ttgctagtggggataggtaacttagcgttcaatgcagttattcatggtaaagtc

SEQ ID NO: 482042 - DNA, 59 bp, Artificial
  Synthetic oligonucleotide
ttgctataacatgggtggcaaatggtcaaaacgtagtaagaatgattgggctaatgtaa

SEQ ID NO: 482043 - DNA, 51 bp, Artificial
  Synthetic oligonucleotide
ttgctatcaaccgacacaattcaaacaaagaagcgtcgtgacgagcttata

SEQ ID NO: 482044 - DNA, 60 bp, Artificial
  Synthetic oligonucleotide
ttgctatcgaagtggccaatgtgtttagacagacatacctaaacagagacggtgctgact

SEQ ID NO: 482045 - DNA, 60 bp, Artificial
  Synthetic oligonucleotide
ttgctatgtactattcttgttgtaagcaagggtggtcagaggaggacattcaggaaagat

SEQ ID NO: 482046 - DNA, 60 bp, Artificial
  Synthetic oligonucleotide
ttgctattaggctatgtgatactaagaaccttagcatctacgaaaacagtgcacaacgat

SEQ ID NO: 482047 - DNA, 51 bp, Artificial
  Synthetic oligonucleotide
ttgctattagtggcactatgcaacaatactgtgtgtcgagccggccagtgt

SEQ ID NO: 482048 - DNA, 60 bp, Artificial
  Synthetic oligonucleotide
ttgctattgaaccgcatgtcaccccagtagatagacaatatatgatatttggtgaaagca

SEQ ID NO: 482049 - DNA, 58 bp, Artificial
  Synthetic oligonucleotide
ttgctattgagctgtgtgttccagggtttcatggctgggccacggctgcacttttgat

SEQ ID NO: 482050 - DNA, 60 bp, Artificial
  Synthetic oligonucleotide
ttgctcaaccaacagagaagttggctccagacgcaacaaggaatactaacgccagcggtg

SEQ ID NO: 482051 - DNA, 60 bp, Artificial
  Synthetic oligonucleotide
ttgctcaacctatatttatcaagatttgctcgttggcgcgaacagaggtgaatatgtgaa

SEQ ID NO: 482052 - DNA, 60 bp, Artificial
  Synthetic oligonucleotide
ttgctcaacgccctagccatagcagtagctgagggaactgataggattatagaagtatta

SEQ ID NO: 482053 - DNA, 59 bp, Artificial
  Synthetic oligonucleotide
ttgctcaactctgttacccggaacacggtcccaaggacaaatacatgtccgcacgcgca

SEQ ID NO: 482054 - DNA, 60 bp, Artificial
  Synthetic oligonucleotide
ttgctcaagaagataacttagaaagacttatgttagttgcatctgtgaagagaatggtgc

SEQ ID NO: 482055 - DNA, 60 bp, Artificial
  Synthetic oligonucleotide
ttgctcaatgcatcctgtgcggctatggatgactttcaactgattccaatgatcagcaag

SEQ ID NO: 482056 - DNA, 60 bp, Artificial
  Synthetic oligonucleotide
ttgctcacctcaccatactgcactcaggcaagcaattctatgctggggggaactaatgtc

SEQ ID NO: 482057 - DNA, 56 bp, Artificial
  Synthetic oligonucleotide
ttgctcagatcgccgaaggtaccccagtctgcgactggaagaagtccccaatttcg

SEQ ID NO: 482058 - DNA, 60 bp, Artificial
  Synthetic oligonucleotide
ttgctcagttggaattggcttccatcatgaagtcaatatgttactacttaccgagtaaat

SEQ ID NO: 482059 - DNA, 60 bp, Artificial
  Synthetic oligonucleotide
ttgctcattcttggtacgctgtacgagcaccgggaagatgtagtgattggcaccagtatc

SEQ ID NO: 482060 - DNA, 58 bp, Artificial
  Synthetic oligonucleotide
ttgctccaagttgccctacgaccacaggtggagtagtagtattagtccacgaccctga

SEQ ID NO: 482061 - DNA, 55 bp, Artificial
  Synthetic oligonucleotide
ttgctcccgtcgtggcaccgctgcctacccgcttttgggctcgggtatataccag

SEQ ID NO: 482062 - DNA, 56 bp, Artificial
  Synthetic oligonucleotide
ttgctccctcgtgagtggtctggtaaggtccccagaggggatacttctaatttcca

SEQ ID NO: 482063 - DNA, 52 bp, Artificial
  Synthetic oligonucleotide
ttgctccctggtagggaggaagattggctcctagagctacaagtgggaaaca

SEQ ID NO: 482064 - DNA, 57 bp, Artificial
  Synthetic oligonucleotide
ttgctccgactaacgcaggagtggtagttgaaggcacgaataatacaaataggtggt

SEQ ID NO: 482065 - DNA, 60 bp, Artificial
  Synthetic oligonucleotide
ttgctccgaggaggatgactccgtcgtgtgctgctccatgtcatactcctggaccggggc

SEQ ID NO: 482066 - DNA, 60 bp, Artificial
  Synthetic oligonucleotide
ttgctcgaagattgacggattagtatcacctccgtaaggatactgaccactggctgggct

SEQ ID NO: 482067 - DNA, 60 bp, Artificial
  Synthetic oligonucleotide
ttgctcgagaacgaaaggactctagatttccatgactctaatgtgaaaaatctgtacgaa

SEQ ID NO: 482068 - DNA, 57 bp, Artificial
  Synthetic oligonucleotide
ttgctcgaggattaccgcaaaagtgggatgatgaatgaagccgtgaaacaatctgcg

SEQ ID NO: 482069 - DNA, 60 bp, Artificial
  Synthetic oligonucleotide
ttgctcgattgcactcggccatttagacgagctagaaatatctatgctagaaggacaagt

SEQ ID NO: 482070 - DNA, 60 bp, Artificial
  Synthetic oligonucleotide
ttgctcgattgcctgtttcgatgttgttcacgagtaacttgctatcgatgaaatcaggag

SEQ ID NO: 482071 - DNA, 51 bp, Artificial
  Synthetic oligonucleotide
ttgctcgcaaagcgtctaaaaccaaacgtgctaacccgtctactcaagtac

SEQ ID NO: 482072 - DNA, 60 bp, Artificial
  Synthetic oligonucleotide
ttgctcgcgccgcttacgcatagtccactttgcacgggtgtgggttatgcgggtggtgtg

SEQ ID NO: 482073 - DNA, 60 bp, Artificial
  Synthetic oligonucleotide
ttgctcgctatcttgacacatgcggaattttggctattacagtaccggcagcaagcacgt

SEQ ID NO: 482074 - DNA, 58 bp, Artificial
  Synthetic oligonucleotide
ttgctcgtatgtaaacgccactaagcagtcttggagcccggaggacctgtaatgcctg

SEQ ID NO: 482075 - DNA, 55 bp, Artificial
  Synthetic oligonucleotide
ttgctcgtcgatcaccgttgacctctttcatgatcggggcgttgaagcactcagg

SEQ ID NO: 482076 - DNA, 60 bp, Artificial
  Synthetic oligonucleotide
ttgctctaactccagcatcgtttggcagctcgaaggcgcagtgctccatactcctggatg

SEQ ID NO: 482077 - DNA, 58 bp, Artificial
  Synthetic oligonucleotide
ttgctctaattacattgttaagacaaattacaccaagattatcttaaatacttcataa

SEQ ID NO: 482078 - DNA, 59 bp, Artificial
  Synthetic oligonucleotide
ttgctctatatgacgagtcatactctgagatgcctcgcgagggatttctaggagaaatc

SEQ ID NO: 482079 - DNA, 60 bp, Artificial
  Synthetic oligonucleotide
ttgctctcaacgaacattcagcatatagttgtgtctatatagatgacatcctagttttct

SEQ ID NO: 482080 - DNA, 60 bp, Artificial
  Synthetic oligonucleotide
ttgctctcagcggtcgaaatttctgctgatggatgctctgaagcttagcattgaagaccc

SEQ ID NO: 482081 - DNA, 60 bp, Artificial
  Synthetic oligonucleotide
ttgctctcatagtgaatgcaccaaaccatgaggggatacaagcaggtgtggacagattct

SEQ ID NO: 482082 - DNA, 60 bp, Artificial
  Synthetic oligonucleotide
ttgctctccaaatcgaggacttaattgaattgcgtgagttgagcagtctcgttgaataca

SEQ ID NO: 482083 - DNA, 60 bp, Artificial
  Synthetic oligonucleotide
ttgctctctatgtgccgatagggtggaacggttatggtgcgcatcccgcagcgataaata

SEQ ID NO: 482084 - DNA, 51 bp, Artificial
  Synthetic oligonucleotide
ttgctctgcagtaatatgtctaaggtgtcatacattagctaccctcctctc

SEQ ID NO: 482085 - DNA, 60 bp, Artificial
  Synthetic oligonucleotide
ttgctctgcttcactcaagtttcgagttgcgcgcccattgcttgctgcacgatctagatt

SEQ ID NO: 482086 - DNA, 60 bp, Artificial
  Synthetic oligonucleotide
ttgctctggaaaactcatttgcaccactaatgtgccttggaacgctagttggagtaataa

SEQ ID NO: 482087 - DNA, 58 bp, Artificial
  Synthetic oligonucleotide
ttgctctggctctcaaaactctcatgaattgggggtactgggggtacatttataccta

SEQ ID NO: 482088 - DNA, 50 bp, Artificial
  Synthetic oligonucleotide
ttgctctgggagcttaatagagcaaggccatccatgtgctcagtgcacaa

SEQ ID NO: 482089 - DNA, 60 bp, Artificial
  Synthetic oligonucleotide
ttgctctggttctagcatcaaacacccccattatctgatttgatttaagctaagttggta

SEQ ID NO: 482090 - DNA, 60 bp, Artificial
  Synthetic oligonucleotide
ttgctctggtttgtctagccagagtttaaatgaggaaccctctcctggattgcagaggaa

SEQ ID NO: 482091 - DNA, 50 bp, Artificial
  Synthetic oligonucleotide
ttgctcttccctgatcatctcctcaagtactactcggcttgctgggattt

SEQ ID NO: 482092 - DNA, 57 bp, Artificial
  Synthetic oligonucleotide
ttgctcttcctgtcacaggtaaatattcctgcacatactcagcagcctggcaagtcc

SEQ ID NO: 482093 - DNA, 55 bp, Artificial
  Synthetic oligonucleotide
ttgctcttttcggagtccatacaagagttgctaataccaactgtacttctggagg

SEQ ID NO: 482094 - DNA, 60 bp, Artificial
  Synthetic oligonucleotide
ttgctgaaagtcgcacatggtgatttcaccctaacagctccatggtgcaaaacaggatgc

SEQ ID NO: 482095 - DNA, 58 bp, Artificial
  Synthetic oligonucleotide
ttgctgaaataatccacaaaaaaccagaggaggttatgtcccttttgcctcatgtgct

SEQ ID NO: 482096 - DNA, 60 bp, Artificial
  Synthetic oligonucleotide
ttgctgaacaggctgtagcttcagtgacactagcgggcaattcatctctctgtcccatta

SEQ ID NO: 482097 - DNA, 55 bp, Artificial
  Synthetic oligonucleotide
ttgctgaacgtggcatttggggctgatcttaagggcaagattccgcagagtgaag

SEQ ID NO: 482098 - DNA, 55 bp, Artificial
  Synthetic oligonucleotide
ttgctgaactacccactcacatattcccattgagagggtcgatgagtattgtgga

SEQ ID NO: 482099 - DNA, 54 bp, Artificial
  Synthetic oligonucleotide
ttgctgaatggaagctatcatgagaatcgaacccagatatggcagaaacatagg

SEQ ID NO: 482100 - DNA, 60 bp, Artificial
  Synthetic oligonucleotide
ttgctgaatttttccaatcagttccctctggtgagccatctgggtcaaggttgtcacagt

SEQ ID NO: 482101 - DNA, 55 bp, Artificial
  Synthetic oligonucleotide
ttgctgacactgtggaactttccagcaaagactgctgacactgcggggactttcc

SEQ ID NO: 482102 - DNA, 56 bp, Artificial
  Synthetic oligonucleotide
ttgctgacatagaagggactttccgcctgggactttccactggggcgttccaggag

SEQ ID NO: 482103 - DNA, 55 bp, Artificial
  Synthetic oligonucleotide
ttgctgaccactgtgcacaagggtcttttaaaggccttggacttgtcaatggggc

SEQ ID NO: 482104 - DNA, 60 bp, Artificial
  Synthetic oligonucleotide
ttgctgacgctctttctatgattcctgtgttagccccatatgccaaggctacttctatgg

SEQ ID NO: 482105 - DNA, 55 bp, Artificial
  Synthetic oligonucleotide
ttgctgacggtgcaattattaaagaagtacatatcacctcgaacagggcggcagg

SEQ ID NO: 482106 - DNA, 60 bp, Artificial
  Synthetic oligonucleotide
ttgctgagcaatcaagagaatgcaacatcaacatatccactaccaactacccatgcaaag

SEQ ID NO: 482107 - DNA, 60 bp, Artificial
  Synthetic oligonucleotide
ttgctgaggaggaggctacttccggtcttgttatgctctgtattcatgggtcacctgtga

SEQ ID NO: 482108 - DNA, 50 bp, Artificial
  Synthetic oligonucleotide
ttgctgatactacgagccatcatccaaacagacgtcagctctgtgacact

SEQ ID NO: 482109 - DNA, 60 bp, Artificial
  Synthetic oligonucleotide
ttgctgatggatgccctgaaactgagcattgaagacccgagtcatgagggagaaggaata

SEQ ID NO: 482110 - DNA, 60 bp, Artificial
  Synthetic oligonucleotide
ttgctgatggatgctctgaaattaagcattgaggacccgagccatgagggggaggggata

SEQ ID NO: 482111 - DNA, 60 bp, Artificial
  Synthetic oligonucleotide
ttgctgcaacttctacgcttgaactaatgggcattcaatatgattataatgaagtgtata

SEQ ID NO: 482112 - DNA, 58 bp, Artificial
  Synthetic oligonucleotide
ttgctgcaaggcgctagggatggtttaaggaataaatcaattagcgcagaacccaaaa

SEQ ID NO: 482113 - DNA, 60 bp, Artificial
  Synthetic oligonucleotide
ttgctgcagagttttctgtgcaatagccacttcggggctttgtacagttagtgtattaac

SEQ ID NO: 482114 - DNA, 58 bp, Artificial
  Synthetic oligonucleotide
ttgctgccacttcaacattaggatttatgggaattcagtatgattacaatgagatatt

SEQ ID NO: 482115 - DNA, 58 bp, Artificial
  Synthetic oligonucleotide
ttgctgccgacctagttgaatggaaaactgttcgcctaccactttccactcttcgtga

SEQ ID NO: 482116 - DNA, 58 bp, Artificial
  Synthetic oligonucleotide
ttgctgccggctggcacgctcttcacccgtgttgactcggaaaactaaccgggtcatc

SEQ ID NO: 482117 - DNA, 54 bp, Artificial
  Synthetic oligonucleotide
ttgctgcgaacctcctcatgcccgaacgagtgatgcgcgagctagtgcgggatg

SEQ ID NO: 482118 - DNA, 55 bp, Artificial
  Synthetic oligonucleotide
ttgctgcgcacatgttcccgaactccaccatatatcctatggcactcctagaaag

SEQ ID NO: 482119 - DNA, 51 bp, Artificial
  Synthetic oligonucleotide
ttgctgcgcccattgtccgcgtcacaaaccaacaggcatggacaaacaggc

SEQ ID NO: 482120 - DNA, 60 bp, Artificial
  Synthetic oligonucleotide
ttgctgctacgtcatcgagacacgtggtgccagcagctgtaaacccggaagtcgctgaca

SEQ ID NO: 482121 - DNA, 60 bp, Artificial
  Synthetic oligonucleotide
ttgctgctctaggcttatgacatacctccgtggcattagttataaggtgacagttggcgc

SEQ ID NO: 482122 - DNA, 58 bp, Artificial
  Synthetic oligonucleotide
ttgctggaatgcaggggccctatacagggttgccaaatgccaaacctaaggtgcccac

SEQ ID NO: 482123 - DNA, 55 bp, Artificial
  Synthetic oligonucleotide
ttgctggacatcgttaaacagcgagtgtgcagtcgtgtacttcgtcgaacctgcg

SEQ ID NO: 482124 - DNA, 59 bp, Artificial
  Synthetic oligonucleotide
ttgctggacatgcaggatgtctaaggacaatttgccctttaccgttcctagtgtcaagg

SEQ ID NO: 482125 - DNA, 56 bp, Artificial
  Synthetic oligonucleotide
ttgctggacctatttcttgtgggggtgaacctatggcggcagaaaactgggttaga

SEQ ID NO: 482126 - DNA, 53 bp, Artificial
  Synthetic oligonucleotide
ttgctggaggtttggaagtccccgacgtacgaccctcccctcgtgtccggatg

SEQ ID NO: 482127 - DNA, 51 bp, Artificial
  Synthetic oligonucleotide
ttgctggcaaaaactgcaccgataacggtaagaacttttaatttttaaccg

SEQ ID NO: 482128 - DNA, 50 bp, Artificial
  Synthetic oligonucleotide
ttgctgggatcagttagctgcaggctatcaataactatcaggattttata

SEQ ID NO: 482129 - DNA, 55 bp, Artificial
  Synthetic oligonucleotide
ttgctggtacagtgaaggtgtgtcttactgaaaagcaagactcgcccgctgagtc

SEQ ID NO: 482130 - DNA, 60 bp, Artificial
  Synthetic oligonucleotide
ttgctggtatgccacccgacgcggccgtgttctccgctgagtcgtcgtatctggatgcgc

SEQ ID NO: 482131 - DNA, 51 bp, Artificial
  Synthetic oligonucleotide
ttgctggtctgcgtttaatgatcttgaacgggattcatgtaacggggttta

SEQ ID NO: 482132 - DNA, 60 bp, Artificial
  Synthetic oligonucleotide
ttgctgtaacgtcatagggtacctaccctactctgacgcatgctcatacagcaagcgtac

SEQ ID NO: 482133 - DNA, 56 bp, Artificial
  Synthetic oligonucleotide
ttgctgtatttgctctagggcttcctcttttgttagagaacattttgggaaagtta

SEQ ID NO: 482134 - DNA, 55 bp, Artificial
  Synthetic oligonucleotide
ttgctgtcatccactctcagtttgacatgaaggacatacccgtcatggtgtctgg

SEQ ID NO: 482135 - DNA, 55 bp, Artificial
  Synthetic oligonucleotide
ttgctgtcattaactcaatttcctaacttctcaagtgtggtcctaggcaatgcag

SEQ ID NO: 482136 - DNA, 60 bp, Artificial
  Synthetic oligonucleotide
ttgctgtcgggatcactatcttcaacagagttccggaatttgatatcgtgcatccagact

SEQ ID NO: 482137 - DNA, 60 bp, Artificial
  Synthetic oligonucleotide
ttgctgtctgaaatttgcctactgtgtcctgcttgcagacatggcagacaatagaggtac

SEQ ID NO: 482138 - DNA, 52 bp, Artificial
  Synthetic oligonucleotide
ttgctgtgcacccaagtggatggtggctatccctaagccaccggtgaagcta

SEQ ID NO: 482139 - DNA, 56 bp, Artificial
  Synthetic oligonucleotide
ttgctgtgctaccggagtgttcggcactgcctacctcgtacctcgtcatctctttg

SEQ ID NO: 482140 - DNA, 53 bp, Artificial
  Synthetic oligonucleotide
ttgctgtgctatctttagtaaatagggttaggcagggatactcacttacgtcg

SEQ ID NO: 482141 - DNA, 54 bp, Artificial
  Synthetic oligonucleotide
ttgctgtggaacttgtaccgatagtaatgggggggataggattggtgttggggt

SEQ ID NO: 482142 - DNA, 60 bp, Artificial
  Synthetic oligonucleotide
ttgctgtttgggtgacaatagtaaattgtatttcctgaatagcaatatcgggtcttgaca

SEQ ID NO: 482143 - DNA, 55 bp, Artificial
  Synthetic oligonucleotide
ttgcttaagccctcacaccttgacgtgggggacttcctggtggcagtacatgagg

SEQ ID NO: 482144 - DNA, 51 bp, Artificial
  Synthetic oligonucleotide
ttgcttacagttctgtttcaagaaagctactgggcttttccacttgggaca

SEQ ID NO: 482145 - DNA, 56 bp, Artificial
  Synthetic oligonucleotide
ttgcttatgtagttctaagcgcgtcaatccggtaatgtaagacgcaaagaacggat

SEQ ID NO: 482146 - DNA, 60 bp, Artificial
  Synthetic oligonucleotide
ttgcttcaactggcattgttgttgattgggtgactggcccaaatggtggcactgtgcatt

SEQ ID NO: 482147 - DNA, 60 bp, Artificial
  Synthetic oligonucleotide
ttgcttcaatcttcttcacaaatgtaatgactcatgcatggaaaccatcagaaatgggac

SEQ ID NO: 482148 - DNA, 60 bp, Artificial
  Synthetic oligonucleotide
ttgcttcacccactgtgagcctacagaagcagcattccaagcccactataaagtatgcca

SEQ ID NO: 482149 - DNA, 55 bp, Artificial
  Synthetic oligonucleotide
ttgcttcagtttccgaatgaggaagcctctcatttgggggttcgggacatttcct

SEQ ID NO: 482150 - DNA, 59 bp, Artificial
  Synthetic oligonucleotide
ttgcttccgcataagttgtaccattaactgcgcgagtcataataaattgaccggattta

SEQ ID NO: 482151 - DNA, 60 bp, Artificial
  Synthetic oligonucleotide
ttgcttcgagtcgaagcaacggtgatagataagtgttcgagaatcgaaaatggaggctat

SEQ ID NO: 482152 - DNA, 59 bp, Artificial
  Synthetic oligonucleotide
ttgcttcgtttgttcaataccccgtgcgaggaataaatggcgatggacgctctagagac

SEQ ID NO: 482153 - DNA, 60 bp, Artificial
  Synthetic oligonucleotide
ttgcttctactgttagaggggctgccgtgtcctcggcttgtcttagtgacatacccattc

SEQ ID NO: 482154 - DNA, 50 bp, Artificial
  Synthetic oligonucleotide
ttgcttctcgcatgaagtgtcgagacatgcacaagtatggtgggcgttat

SEQ ID NO: 482155 - DNA, 57 bp, Artificial
  Synthetic oligonucleotide
ttgcttgaagacttagaaagtgacgaattgctactaacaggttttagtcaaagcgaa

SEQ ID NO: 482156 - DNA, 60 bp, Artificial
  Synthetic oligonucleotide
ttgcttgacaccgtccgaggtaacaacaccttggtcaatgatcttgcaaagcgtcgcctg

SEQ ID NO: 482157 - DNA, 52 bp, Artificial
  Synthetic oligonucleotide
ttgcttgcaactggacgcgaggcgagcgttgcgatctggacgatagggacag

SEQ ID NO: 482158 - DNA, 55 bp, Artificial
  Synthetic oligonucleotide
ttgcttgcctagtgtcctcctgtctcagcgctgccatgtctgatatatcgccatg

SEQ ID NO: 482159 - DNA, 60 bp, Artificial
  Synthetic oligonucleotide
ttgcttgctagtgcacttgagcaggattacaaaacacacgacgcacgcgatgcattactc

SEQ ID NO: 482160 - DNA, 55 bp, Artificial
  Synthetic oligonucleotide
ttgcttgctggtggagatgtcagatatgagtctcttaccgcagaccacaggattg

SEQ ID NO: 482161 - DNA, 55 bp, Artificial
  Synthetic oligonucleotide
ttgcttggcgcgatgcactcctcagctccttcgtcaccgtcccaccagcagttgc

SEQ ID NO: 482162 - DNA, 60 bp, Artificial
  Synthetic oligonucleotide
ttgcttggcgcttatggtggtaatatttcttacactgagggcgctaagcctggtgcaata

SEQ ID NO: 482163 - DNA, 60 bp, Artificial
  Synthetic oligonucleotide
ttgcttggtcgagtagcagttgctttgacgggaaggagtggatgcatgtgtgcatgacag

SEQ ID NO: 482164 - DNA, 60 bp, Artificial
  Synthetic oligonucleotide
ttgcttggtcggcaagtgcttgtcatgatggcatcagttggttgacaattggaatttctg

SEQ ID NO: 482165 - DNA, 60 bp, Artificial
  Synthetic oligonucleotide
ttgcttggtcgtcacctgtgcagaattgcgaaccatggattccaccgtgaactttgtctc

SEQ ID NO: 482166 - DNA, 55 bp, Artificial
  Synthetic oligonucleotide
ttgcttgtaaacaccgttatttatttgcttggttcaaacataccgcaggctttaa

SEQ ID NO: 482167 - DNA, 58 bp, Artificial
  Synthetic oligonucleotide
ttgctttacataaccatgatcttcccgctttagtgtctttccaaccgacgtatgattg

SEQ ID NO: 482168 - DNA, 60 bp, Artificial
  Synthetic oligonucleotide
ttgctttacccattgtgaacctacagaagctgcatttcaagcccattacaaagtatgcca

SEQ ID NO: 482169 - DNA, 60 bp, Artificial
  Synthetic oligonucleotide
ttgctttagaagctgtcacaatagtattagtaacactgtatataggctatttcaagaatt

SEQ ID NO: 482170 - DNA, 60 bp, Artificial
  Synthetic oligonucleotide
ttgctttatatgatgaggctatatcagaaatccctagagagggattcctaggtgaggtga

SEQ ID NO: 482171 - DNA, 55 bp, Artificial
  Synthetic oligonucleotide
ttgctttcatacactggttttggttctttcctttgcacgaagctgctgagagtgc

SEQ ID NO: 482172 - DNA, 55 bp, Artificial
  Synthetic oligonucleotide
ttgctttccaccatgcgggagctagtgccgcacctgcgcctgactcactgctgtg

SEQ ID NO: 482173 - DNA, 55 bp, Artificial
  Synthetic oligonucleotide
ttgctttcgagattcctcggccgctcgctgggctgcctcggctagtgccttagct

SEQ ID NO: 482174 - DNA, 53 bp, Artificial
  Synthetic oligonucleotide
ttgctttgaatttgtgtgactatagcatcgtgtgtataggtaattggtattaa

SEQ ID NO: 482175 - DNA, 60 bp, Artificial
  Synthetic oligonucleotide
ttgctttgacatgaaagaaaaaggactagtcactgctgtccaatccatttggggcaaaga

SEQ ID NO: 482176 - DNA, 58 bp, Artificial
  Synthetic oligonucleotide
ttgctttggatagagtattaaggtcgaaagctagaacatttgtagacatttcttccac

SEQ ID NO: 482177 - DNA, 57 bp, Artificial
  Synthetic oligonucleotide
ttgctttgggagctattcgcagtgatgaagttggcccattatattctgaccttctta

SEQ ID NO: 482178 - DNA, 60 bp, Artificial
  Synthetic oligonucleotide
ttgctttgtagcgcaccatgaactttttctgaccttcgtcagtgtaacaatcatataagt

SEQ ID NO: 482179 - DNA, 54 bp, Artificial
  Synthetic oligonucleotide
ttgcttttcaagtacatttttgtacttactagccaatgcctgaaaggttttttg

SEQ ID NO: 482180 - DNA, 60 bp, Artificial
  Synthetic oligonucleotide
ttgcttttgaagccaagcgaacaaatgcttgatagcaccagtgcataaactatctggtct

SEQ ID NO: 482181 - DNA, 57 bp, Artificial
  Synthetic oligonucleotide
ttgcttttgaggccagtaaactcgattcagtgcagcacttggacccctactcctctg

SEQ ID NO: 482182 - DNA, 50 bp, Artificial
  Synthetic oligonucleotide
ttggaaaagaccaaatcagatctatcggctgtgctgtggagtgaacgtga

SEQ ID NO: 482183 - DNA, 60 bp, Artificial
  Synthetic oligonucleotide
ttggaaaagtcgctgtagaaggtggaagatattatgaacatgcaccaattgaattaatat

SEQ ID NO: 482184 - DNA, 59 bp, Artificial
  Synthetic oligonucleotide
ttggaaaagtgctcatgtatactatggcaattaaggcatcgaagaaaattaagggtaga

SEQ ID NO: 482185 - DNA, 54 bp, Artificial
  Synthetic oligonucleotide
ttggaaaatcccttccgtatagtcacgaaagtgaccacaacgggagggtggtca

SEQ ID NO: 482186 - DNA, 50 bp, Artificial
  Synthetic oligonucleotide
ttggaaaatgtttgaatttacccgagtatagtgtccttaggagacgttgg

SEQ ID NO: 482187 - DNA, 53 bp, Artificial
  Synthetic oligonucleotide
ttggaaacatgggatgtcataaatttcgagagcactggtaatttaattgcacc

SEQ ID NO: 482188 - DNA, 57 bp, Artificial
  Synthetic oligonucleotide
ttggaaagacaccggtggtgggaagtatgaagacgtgaaggagaatgctttactcta

SEQ ID NO: 482189 - DNA, 58 bp, Artificial
  Synthetic oligonucleotide
ttggaaagagtggagaaaaatagtagaacaacaaactgttagcaatctaaatattgca

SEQ ID NO: 482190 - DNA, 58 bp, Artificial
  Synthetic oligonucleotide
ttggaaaggtgcaaataggccagtaatcactataaacccaaaaacaatgactcataca

SEQ ID NO: 482191 - DNA, 51 bp, Artificial
  Synthetic oligonucleotide
ttggaaagtgtttgaacttacctgaatacagtgttcttagaagacgctggt

SEQ ID NO: 482192 - DNA, 51 bp, Artificial
  Synthetic oligonucleotide
ttggaaatcccgcctctgccggaacccactattgccgagccagtgctttcg

SEQ ID NO: 482193 - DNA, 56 bp, Artificial
  Synthetic oligonucleotide
ttggaaattgttaagacaagaacaagtgttgtattattatgcacgcaaaaaaggcg

SEQ ID NO: 482194 - DNA, 55 bp, Artificial
  Synthetic oligonucleotide
ttggaacaactctattaaatctagatgctaactacgtcgaaacggcccgcaacac

SEQ ID NO: 482195 - DNA, 57 bp, Artificial
  Synthetic oligonucleotide
ttggaacaataataacacgcagaacaacacggagccaaatgtcaatataactctccc

SEQ ID NO: 482196 - DNA, 57 bp, Artificial
  Synthetic oligonucleotide
ttggaacaatggtgatggaattgatccggatgatcaagcgagggatcaatgaccgga

SEQ ID NO: 482197 - DNA, 60 bp, Artificial
  Synthetic oligonucleotide
ttggaacacatagtgcttccacagacagttggtatggtgtgtgccctaataacctcatgg

SEQ ID NO: 482198 - DNA, 51 bp, Artificial
  Synthetic oligonucleotide
ttggaacacatgtcgtgtgggactttggcttacaatcctccattactctcg

SEQ ID NO: 482199 - DNA, 55 bp, Artificial
  Synthetic oligonucleotide
ttggaacaccagttcctctgactcagatactgctttctcccgagagagcccgtta

SEQ ID NO: 482200 - DNA, 59 bp, Artificial
  Synthetic oligonucleotide
ttggaacacgccttcacgaccgcgcgtcgacacggctgtacatcttcgcggccagaaac

SEQ ID NO: 482201 - DNA, 60 bp, Artificial
  Synthetic oligonucleotide
ttggaacactctcaaactcaacaactgtattatcccatgccctacccttgatctgtgatc

SEQ ID NO: 482202 - DNA, 52 bp, Artificial
  Synthetic oligonucleotide
ttggaacacttgctcgagtatgctccacagcaaattgatatctcaaatactc

SEQ ID NO: 482203 - DNA, 59 bp, Artificial
  Synthetic oligonucleotide
ttggaacagtggtcgtgatagcgataaagaggtcgctcgtgctcagaagcgtaaactct

SEQ ID NO: 482204 - DNA, 52 bp, Artificial
  Synthetic oligonucleotide
ttggaaccactcctaattttcgaagtaagtctgataagccaacgttcattat

SEQ ID NO: 482205 - DNA, 56 bp, Artificial
  Synthetic oligonucleotide
ttggaacccacagaccagaaatcaatgtcgttaaccgtgaattcctttgtctggat

SEQ ID NO: 482206 - DNA, 59 bp, Artificial
  Synthetic oligonucleotide
ttggaaccgacaattctgttgtcctctcgcggaaatacacctcctttccatggctgcta

SEQ ID NO: 482207 - DNA, 46 bp, Artificial
  Synthetic oligonucleotide
ttggaacctagaaatccctaaaaccttttagcccggggggaaaatt

SEQ ID NO: 482208 - DNA, 60 bp, Artificial
  Synthetic oligonucleotide
ttggaacctatgaatctgattctatcacagaatcagagggttacgatctttctgcaagaa

SEQ ID NO: 482209 - DNA, 52 bp, Artificial
  Synthetic oligonucleotide
ttggaacctcacgccgcagtacaaattctatcacaatacctagatttgaaac

SEQ ID NO: 482210 - DNA, 52 bp, Artificial
  Synthetic oligonucleotide
ttggaacctgcccctaaaccccttgatggtgtgtttggtaacctagcttggt

SEQ ID NO: 482211 - DNA, 55 bp, Artificial
  Synthetic oligonucleotide
ttggaacgaggcgtcgtacgtaatacaagtgaacgtagtcgatgggttagcacag

SEQ ID NO: 482212 - DNA, 57 bp, Artificial
  Synthetic oligonucleotide
ttggaacgcaggacaaactcgggctcaggaaagagcgagttgaagaaccaataacaa

SEQ ID NO: 482213 - DNA, 57 bp, Artificial
  Synthetic oligonucleotide
ttggaacggatttcggagattcaaggtctggtcagccaccaaatgaaccaacaaatc

SEQ ID NO: 482214 - DNA, 55 bp, Artificial
  Synthetic oligonucleotide
ttggaactacgcttttgaatttagatgccaattatgttgaaactgcgcgtaacac

SEQ ID NO: 482215 - DNA, 60 bp, Artificial
  Synthetic oligonucleotide
ttggaactactctaccggggctgtgagtgcatgcagtaagctcagaggacccgggctccc

SEQ ID NO: 482216 - DNA, 58 bp, Artificial
  Synthetic oligonucleotide
ttggaactagcgtgaagttcaatgtacacaataactctctagccaaccttcggcgcgg

SEQ ID NO: 482217 - DNA, 53 bp, Artificial
  Synthetic oligonucleotide
ttggaactcataaaatccttcgggtgggcttgagtttcgggtactatttgaaa

SEQ ID NO: 482218 - DNA, 58 bp, Artificial
  Synthetic oligonucleotide
ttggaactgggggattgcagcattgcaggttggctccttggaaacccggaatgtgacc

SEQ ID NO: 482219 - DNA, 55 bp, Artificial
  Synthetic oligonucleotide
ttggaagaaatatgttgacacagcttggatgcacactaaatttcccaattagtcc

SEQ ID NO: 482220 - DNA, 55 bp, Artificial
  Synthetic oligonucleotide
ttggaagaagacttgtacacttattacaaattcgatgatgcctctacagctttcc

SEQ ID NO: 482221 - DNA, 59 bp, Artificial
  Synthetic oligonucleotide
ttggaagacccagcatccgcttacagaccaccaaatgcccctatcttatcaacacttcc

SEQ ID NO: 482222 - DNA, 58 bp, Artificial
  Synthetic oligonucleotide
ttggaagacccagcatctagggaattagtagtcagttatgttaatgttaatatgggcc

SEQ ID NO: 482223 - DNA, 57 bp, Artificial
  Synthetic oligonucleotide
ttggaagaccctgcatccagggaattagtagtcgggtatgtcaacgttaatatgggc

SEQ ID NO: 482224 - DNA, 57 bp, Artificial
  Synthetic oligonucleotide
ttggaagacggcggcctcacaggagacggacacttggttcgccgactataaggtcac

SEQ ID NO: 482225 - DNA, 57 bp, Artificial
  Synthetic oligonucleotide
ttggaagagtgggtaccgccgcatgaagggttagaagaggctatgaacgaactagaa

SEQ ID NO: 482226 - DNA, 57 bp, Artificial
  Synthetic oligonucleotide
ttggaagatccagcatcatgcccctatcttatcaacacttccggaaactactgttgt

SEQ ID NO: 482227 - DNA, 60 bp, Artificial
  Synthetic oligonucleotide
ttggaagatccagcatccagggacctagtagtcagttatgttatcttatcaacaactccg

SEQ ID NO: 482228 - DNA, 60 bp, Artificial
  Synthetic oligonucleotide
ttggaagatccagcgtccagggacctggtagtcagttatgtcaatactaatatgggccta

SEQ ID NO: 482229 - DNA, 60 bp, Artificial
  Synthetic oligonucleotide
ttggaagatcctcgtcacacagattgcaacttgtggaccgaaatgccaaccatgcgggat

SEQ ID NO: 482230 - DNA, 58 bp, Artificial
  Synthetic oligonucleotide
ttggaagcacacagctacacgatttgcaatcaaacccatggaagattaacctttttcc

SEQ ID NO: 482231 - DNA, 55 bp, Artificial
  Synthetic oligonucleotide
ttggaagcatctgtctcattgtccagtactaagaagaaggcgagcgctgtaactg

SEQ ID NO: 482232 - DNA, 60 bp, Artificial
  Synthetic oligonucleotide
ttggaagcatttgagttcatcaaatagggacgtatattccagctcgagggtgtggataca

SEQ ID NO: 482233 - DNA, 56 bp, Artificial
  Synthetic oligonucleotide
ttggaagccttaacccagtagtcgttaagagtggagcagggtcttttgctaaggca

SEQ ID NO: 482234 - DNA, 58 bp, Artificial
  Synthetic oligonucleotide
ttggaagcctttacagatgtgataagtgcagtgttcctgtgtgtctgcaccagaggtt

SEQ ID NO: 482235 - DNA, 60 bp, Artificial
  Synthetic oligonucleotide
ttggaagcgctaactattcaatcagagactcaatttctaactggcataaattctcaggcc

SEQ ID NO: 482236 - DNA, 58 bp, Artificial
  Synthetic oligonucleotide
ttggaagcgtgcctgtatcttctgaccgcccacctcctgtcgctgtccacgatgcaag

SEQ ID NO: 482237 - DNA, 59 bp, Artificial
  Synthetic oligonucleotide
ttggaaggataagtgtgtagtaattggcaatgaactatccccatctgtggttaatgtta

SEQ ID NO: 482238 - DNA, 59 bp, Artificial
  Synthetic oligonucleotide
ttggaaggatcagaggacgagaggggatgaggtggtaaagagcattggaacatcgaggg

SEQ ID NO: 482239 - DNA, 55 bp, Artificial
  Synthetic oligonucleotide
ttggaaggcgagcattggactgtctccgtcacccctgggatgtccccttctttgc

SEQ ID NO: 482240 - DNA, 59 bp, Artificial
  Synthetic oligonucleotide
ttggaagggtgcaaatagaccagtaatcaccataaatccaaaaacgatgacccatatga

SEQ ID NO: 482241 - DNA, 58 bp, Artificial
  Synthetic oligonucleotide
ttggaaggtaccccattcaagggtatcaccatccttttcgatatatgctttgacatcg

SEQ ID NO: 482242 - DNA, 59 bp, Artificial
  Synthetic oligonucleotide
ttggaaggtcaacaactacgtcgtgtacaaccatcaggaagcagctaaatacgagaatc

SEQ ID NO: 482243 - DNA, 59 bp, Artificial
  Synthetic oligonucleotide
ttggaaggtcatgtaagccttgtggagacccaacgctctcctgaggttgtgattgaacc

SEQ ID NO: 482244 - DNA, 60 bp, Artificial
  Synthetic oligonucleotide
ttggaaggttttacatacagatgtgcactgaactcaaactcagtgattatgaagggaggc

SEQ ID NO: 482245 - DNA, 56 bp, Artificial
  Synthetic oligonucleotide
ttggaagtcgatggagggaacagcgcgggcctagaaggccccgtaatgccccctga

SEQ ID NO: 482246 - DNA, 55 bp, Artificial
  Synthetic oligonucleotide
ttggaagtgccttatgtcaatgtctgtcctacttcctcctggactcaacatgcca

SEQ ID NO: 482247 - DNA, 60 bp, Artificial
  Synthetic oligonucleotide
ttggaatagccagtttgatgttacaaattgggaacatgatctcaatatgggttagccatt

SEQ ID NO: 482248 - DNA, 60 bp, Artificial
  Synthetic oligonucleotide
ttggaatagctattaatagatataatgggctaactttgagatcagtaaccatgcggccaa

SEQ ID NO: 482249 - DNA, 59 bp, Artificial
  Synthetic oligonucleotide
ttggaatatcctggcgaggtcatatgcaaatcgggtattaggccgttttctagacgcac

SEQ ID NO: 482250 - DNA, 53 bp, Artificial
  Synthetic oligonucleotide
ttggaatccctcctttaatttgaatgggttttccgtatttcgtgttgctttgc

SEQ ID NO: 482251 - DNA, 59 bp, Artificial
  Synthetic oligonucleotide
ttggaatgaagccctgtgctgatagagacatactagtcattaggatgcctaaggatata

SEQ ID NO: 482252 - DNA, 55 bp, Artificial
  Synthetic oligonucleotide
ttggaatgatactacaggaaggttaaataccactgaagacatcacactcccatgc

SEQ ID NO: 482253 - DNA, 60 bp, Artificial
  Synthetic oligonucleotide
ttggaatgtcttacgtcaccagacaagaggctccttgtcaatattgagccactctccctc

SEQ ID NO: 482254 - DNA, 60 bp, Artificial
  Synthetic oligonucleotide
ttggaattcaccccggagggaaagcctgatgatatctcactccaatggcttctacgcaac

SEQ ID NO: 482255 - DNA, 60 bp, Artificial
  Synthetic oligonucleotide
ttggaattcgtactcagcaagaaattttgcttggtgaagtacagctgctgtgtccagagt

SEQ ID NO: 482256 - DNA, 58 bp, Artificial
  Synthetic oligonucleotide
ttggaattcgtccagcggcccgacgttcgggaggatatgttgcgcgagctagaggttc

SEQ ID NO: 482257 - DNA, 55 bp, Artificial
  Synthetic oligonucleotide
ttggaattgaggaagtctctgtgcttgcaacattctgtgttcccgtgtgatggct

SEQ ID NO: 482258 - DNA, 55 bp, Artificial
  Synthetic oligonucleotide
ttggaattggatgcttgacaactgatgctacaacttttgaagaagttgcgacagc

SEQ ID NO: 482259 - DNA, 53 bp, Artificial
  Synthetic oligonucleotide
ttggaatttagttcgctttcgattcgagaatgatgatgacgaagcaagaatac

SEQ ID NO: 482260 - DNA, 60 bp, Artificial
  Synthetic oligonucleotide
ttggaattttccttcgaactggatgagaacatgcaggtgaggattcccatcgttgtgtag

SEQ ID NO: 482261 - DNA, 56 bp, Artificial
  Synthetic oligonucleotide
ttggacaaagactctcaatgcagcagacaacctgtatgttctggccacagccaaca

SEQ ID NO: 482262 - DNA, 60 bp, Artificial
  Synthetic oligonucleotide
ttggacaacaatggtgaactacggcatctctttagtggagtgaactcttttagcagaaca

SEQ ID NO: 482263 - DNA, 59 bp, Artificial
  Synthetic oligonucleotide
ttggacaaggtgtgaagagccccgtgtgctcactttgagtcctccggcccctgaatgcg

SEQ ID NO: 482264 - DNA, 60 bp, Artificial
  Synthetic oligonucleotide
ttggacacagaatgtggtgagaaatacaattaggacaggtaaaataaacgtgatagatgc

SEQ ID NO: 482265 - DNA, 55 bp, Artificial
  Synthetic oligonucleotide
ttggacacctatctgtcatatattggtgcaatgtatgcttacgcaaggggttcgc

SEQ ID NO: 482266 - DNA, 60 bp, Artificial
  Synthetic oligonucleotide
ttggacacgtatcaccactaggtatgcatatattagtgacactttccacttcttcactag

SEQ ID NO: 482267 - DNA, 60 bp, Artificial
  Synthetic oligonucleotide
ttggacacgtcgctggcatcacatcataaaagaaggattcactgaatcaactggattaca

SEQ ID NO: 482268 - DNA, 55 bp, Artificial
  Synthetic oligonucleotide
ttggacactcagattccgcggtctgagtcccttctctgctgggctagactctagc

SEQ ID NO: 482269 - DNA, 60 bp, Artificial
  Synthetic oligonucleotide
ttggacactccctactgcaactacacaaaattctggtatgtcaaccacaccatcacagga

SEQ ID NO: 482270 - DNA, 58 bp, Artificial
  Synthetic oligonucleotide
ttggacactgagggggtgaacagcaacgtaagtgagtggggccagacttcgccataag

SEQ ID NO: 482271 - DNA, 60 bp, Artificial
  Synthetic oligonucleotide
ttggacactggagctgtgaatcagtaacgaaagtgagtggggccagacttcgccataagg

SEQ ID NO: 482272 - DNA, 58 bp, Artificial
  Synthetic oligonucleotide
ttggacaggatctttactgttggtgcccggaaggggatgtctactgagtgtttggctg

SEQ ID NO: 482273 - DNA, 60 bp, Artificial
  Synthetic oligonucleotide
ttggacaggcgctaagtgccccatccctgatagcggcgtcagtcaaggcctttgcaggag

SEQ ID NO: 482274 - DNA, 55 bp, Artificial
  Synthetic oligonucleotide
ttggacagggacttctttcattggtgatcttggagaccaggccactcatgccaac

SEQ ID NO: 482275 - DNA, 55 bp, Artificial
  Synthetic oligonucleotide
ttggacaggttgttcaaacaagctgtcaagttgttaagcgaaagtaaccctggta

SEQ ID NO: 482276 - DNA, 55 bp, Artificial
  Synthetic oligonucleotide
ttggacagtcacgaatgtttattcctcacattacgcttagcttcagtaacaaacg

SEQ ID NO: 482277 - DNA, 60 bp, Artificial
  Synthetic oligonucleotide
ttggacagtcatgcaagcaattgtgagagctggcatggagccaaactgattattcagctt

SEQ ID NO: 482278 - DNA, 56 bp, Artificial
  Synthetic oligonucleotide
ttggacagttggaacagcctgtggagttggtttgacaaaacaaagtggctatggta

SEQ ID NO: 482279 - DNA, 56 bp, Artificial
  Synthetic oligonucleotide
ttggacagttttctgttccaaataagaagggaactgtaacttgataggcatctcgt

SEQ ID NO: 482280 - DNA, 60 bp, Artificial
  Synthetic oligonucleotide
ttggacatcaggtgtgcagttcagatatacagatccagatacctacaccagtgctggatt

SEQ ID NO: 482281 - DNA, 60 bp, Artificial
  Synthetic oligonucleotide
ttggacatctactgtaaattcactattctcatctatggacgtgaaaggcatggacgcatc

SEQ ID NO: 482282 - DNA, 60 bp, Artificial
  Synthetic oligonucleotide
ttggacatgaccaaatacaccatggcattgaggcgctacggtcttcgcccaactcgtgct

SEQ ID NO: 482283 - DNA, 55 bp, Artificial
  Synthetic oligonucleotide
ttggacatgaccaagtacaccatggctctgaaacggtacggtctcctcccgactc

SEQ ID NO: 482284 - DNA, 55 bp, Artificial
  Synthetic oligonucleotide
ttggacatgatcgctggtgcccactggggagtcctagcgggcatagcgtatttct

SEQ ID NO: 482285 - DNA, 56 bp, Artificial
  Synthetic oligonucleotide
ttggacatggggagcacttactttgacattcggggcacgctggaccggggtccaag

SEQ ID NO: 482286 - DNA, 60 bp, Artificial
  Synthetic oligonucleotide
ttggacatgttagctaatatgactaatgacgctaaagttatccagacactaaacttatat

SEQ ID NO: 482287 - DNA, 60 bp, Artificial
  Synthetic oligonucleotide
ttggacattcacagtaccaaagaggacctgcgtgttgtacaacagctgcttatgggtgcg

SEQ ID NO: 482288 - DNA, 55 bp, Artificial
  Synthetic oligonucleotide
ttggacattgggtatgtgcctaacgaaattcctaagatcaacctagattggcacc

SEQ ID NO: 482289 - DNA, 60 bp, Artificial
  Synthetic oligonucleotide
ttggacattgtcgtgtctacactcctgcgtttgtcccagcaggtcgtgcactcgcacgtg

SEQ ID NO: 482290 - DNA, 54 bp, Artificial
  Synthetic oligonucleotide
ttggaccaaggacgcacgaaacacccaagatcatgtgcgttccctctgcttgct

SEQ ID NO: 482291 - DNA, 59 bp, Artificial
  Synthetic oligonucleotide
ttggaccacggctaattccaaatctcaggtaaataggcaagtcatagttgacaacaata

SEQ ID NO: 482292 - DNA, 60 bp, Artificial
  Synthetic oligonucleotide
ttggaccagagactccataacagaggtatggtcctacaatgctgaactcctagtggcgat

SEQ ID NO: 482293 - DNA, 58 bp, Artificial
  Synthetic oligonucleotide
ttggaccatggatagggttgtggagagctacactgggtcccagcgcactcgctatgct

SEQ ID NO: 482294 - DNA, 60 bp, Artificial
  Synthetic oligonucleotide
ttggaccccacattcgagcaacgattcgccacaatgctggaaacgctccctcctggcacc

SEQ ID NO: 482295 - DNA, 60 bp, Artificial
  Synthetic oligonucleotide
ttggacccgagacctcgcactcgattggttgcactgcgcacgtgttaactcccaatgaga

SEQ ID NO: 482296 - DNA, 60 bp, Artificial
  Synthetic oligonucleotide
ttggaccctatgatctatttgatgtgggctctctatttgtcaagccagttcgtgtgccca

SEQ ID NO: 482297 - DNA, 58 bp, Artificial
  Synthetic oligonucleotide
ttggaccgacgtcccatacgtcggaaagagggaagacatctggtgcggcagtttgatc

SEQ ID NO: 482298 - DNA, 60 bp, Artificial
  Synthetic oligonucleotide
ttggaccgaggatgtagaggctgcgttttctgaccccatccgtgacctagtgtaatcaga

SEQ ID NO: 482299 - DNA, 55 bp, Artificial
  Synthetic oligonucleotide
ttggaccggactaggtgtcgatcagccgtctgggcggtatctcccgcattcaccg

SEQ ID NO: 482300 - DNA, 56 bp, Artificial
  Synthetic oligonucleotide
ttggaccggccagatggacaagcacaaccagccacagctgattactacattgtaac

SEQ ID NO: 482301 - DNA, 51 bp, Artificial
  Synthetic oligonucleotide
ttggaccgggttgtgaacaagctattgtgggatcacccgatcattctaagg

SEQ ID NO: 482302 - DNA, 60 bp, Artificial
  Synthetic oligonucleotide
ttggacctcaacagcacctattttacctataacaagtttatatgtagaatgcagatacaa

SEQ ID NO: 482303 - DNA, 60 bp, Artificial
  Synthetic oligonucleotide
ttggacctcatgaattttgctcacagcacacattgcaaattgtcggacctgatggagatt

SEQ ID NO: 482304 - DNA, 56 bp, Artificial
  Synthetic oligonucleotide
ttggacctccaaaactactaactaacaaatggatgtttcaagaacaatttgccaca

SEQ ID NO: 482305 - DNA, 51 bp, Artificial
  Synthetic oligonucleotide
ttggacctgccacggtattcgtatgcatatgggcgttgatatggggtcatg

SEQ ID NO: 482306 - DNA, 60 bp, Artificial
  Synthetic oligonucleotide
ttggaccttcagatatgtttgtacatatggatgatctaatatacagaaatttacacctgt

SEQ ID NO: 482307 - DNA, 51 bp, Artificial
  Synthetic oligonucleotide
ttggacgcatctagacagtgtcatgaatgtcctgtgttgcagcagaaagtg

SEQ ID NO: 482308 - DNA, 55 bp, Artificial
  Synthetic oligonucleotide
ttggacgccggatccgtccgacgttctggtgtttgttccgtacgatcaagaacca

SEQ ID NO: 482309 - DNA, 55 bp, Artificial
  Synthetic oligonucleotide
ttggacgcctctgcaatggcttttaggagtctcattagtgtgttccacaaaactt

SEQ ID NO: 482310 - DNA, 54 bp, Artificial
  Synthetic oligonucleotide
ttggacgcgccactccccattcaaaagaccccggcttcatgtgcaagccgtgca

SEQ ID NO: 482311 - DNA, 56 bp, Artificial
  Synthetic oligonucleotide
ttggacggcgggtgattaggttttgcggccatcattccccgatccccagggcttca

SEQ ID NO: 482312 - DNA, 60 bp, Artificial
  Synthetic oligonucleotide
ttggacggtctctatatcacagctcataggggagtcatagctacagggaaggctatatgg

SEQ ID NO: 482313 - DNA, 60 bp, Artificial
  Synthetic oligonucleotide
ttggacgtgtgctttcgacagctgacgtcttggttgagggttcacgtgtggctggtgtcc

SEQ ID NO: 482314 - DNA, 58 bp, Artificial
  Synthetic oligonucleotide
ttggacgtgttcaaccactactcccccgtgatcaaacttgtacgctcgtagtgctgag

SEQ ID NO: 482315 - DNA, 59 bp, Artificial
  Synthetic oligonucleotide
ttggactactcaaagtgggactccactatgtcaccgtgtgttgttaggctggcaattga

SEQ ID NO: 482316 - DNA, 60 bp, Artificial
  Synthetic oligonucleotide
ttggactatggtgaatggatcggacaggaaggaatccatgaactcgaacggaatgtcatg

SEQ ID NO: 482317 - DNA, 59 bp, Artificial
  Synthetic oligonucleotide
ttggactccatcagggatatggtctttaattcacctgctacaggaacaccaattactta

SEQ ID NO: 482318 - DNA, 55 bp, Artificial
  Synthetic oligonucleotide
ttggactctaaatagcactacaggggcagatgacaatgacataatcatactccca

SEQ ID NO: 482319 - DNA, 59 bp, Artificial
  Synthetic oligonucleotide
ttggactgatttaatcactaactattcaccatctagagaggataatttacaacgtgtgt

SEQ ID NO: 482320 - DNA, 58 bp, Artificial
  Synthetic oligonucleotide
ttggactgccagtctctttgggcccccatgaattccttaaagtgctttagatagtgcg

SEQ ID NO: 482321 - DNA, 60 bp, Artificial
  Synthetic oligonucleotide
ttggactggaaccaacaggcctgtactagtcatctcgcctgatctctcttacagagttgg

SEQ ID NO: 482322 - DNA, 60 bp, Artificial
  Synthetic oligonucleotide
ttggactggagtcactcaaaatggaacaagctctgcttgcaaaaggagatctaataacag

SEQ ID NO: 482323 - DNA, 55 bp, Artificial
  Synthetic oligonucleotide
ttggactggatggaaaagtcggaaatgcgactgagaacacggagcgccacactgc

SEQ ID NO: 482324 - DNA, 55 bp, Artificial
  Synthetic oligonucleotide
ttggactggccctcctcctgggcatcgtggcctatttctggtccgtctggactcc

SEQ ID NO: 482325 - DNA, 55 bp, Artificial
  Synthetic oligonucleotide
ttggacttcaacgagcggcattggtcgctgttgggtatttccgccaccgccgggc

SEQ ID NO: 482326 - DNA, 58 bp, Artificial
  Synthetic oligonucleotide
ttggacttcgacgcgcagcctgagggatctaaaattccctcataccgattcaacgaag

SEQ ID NO: 482327 - DNA, 55 bp, Artificial
  Synthetic oligonucleotide
ttggactttgtccttgtgtccgtgccgaagaacgcttggtctgttttaggcgtcg

SEQ ID NO: 482328 - DNA, 51 bp, Artificial
  Synthetic oligonucleotide
ttggagaaatgcctggtggctaatgcgcagactgcaaaatggaaacatgga

SEQ ID NO: 482329 - DNA, 56 bp, Artificial
  Synthetic oligonucleotide
ttggagaagtttcacgagaatttatattggaacaggcatacgttaatggatatgat

SEQ ID NO: 482330 - DNA, 54 bp, Artificial
  Synthetic oligonucleotide
ttggagacaatatataggtgtctctaaatggcattctggtaataagttgaactt

SEQ ID NO: 482331 - DNA, 55 bp, Artificial
  Synthetic oligonucleotide
ttggagagaaaatggttggatgtggtgaggaataggattgctgaggacctctcct

SEQ ID NO: 482332 - DNA, 59 bp, Artificial
  Synthetic oligonucleotide
ttggagagagctccgggccgaatggtcgagtagcacacggagggagaaagccacacgga

SEQ ID NO: 482333 - DNA, 52 bp, Artificial
  Synthetic oligonucleotide
ttggagagtaagacatggaataggcaatccaaaggatggtggtggaaattgc

SEQ ID NO: 482334 - DNA, 60 bp, Artificial
  Synthetic oligonucleotide
ttggagatactatacacagtcgtatcaagagcaatcccaggactggttggtaatttactg

SEQ ID NO: 482335 - DNA, 56 bp, Artificial
  Synthetic oligonucleotide
ttggagatcgtggtacgacacgaaggcaatttgacttgggtgcccaacggtgcccc

SEQ ID NO: 482336 - DNA, 56 bp, Artificial
  Synthetic oligonucleotide
ttggagatgataatattttaacccgtatgctacgtaaactaccaggcgaagcccga

SEQ ID NO: 482337 - DNA, 59 bp, Artificial
  Synthetic oligonucleotide
ttggagatgcaaccaagattactatagaagtagagtttatcgggcagtctcgtacttat

SEQ ID NO: 482338 - DNA, 54 bp, Artificial
  Synthetic oligonucleotide
ttggagcaaaattagtaatggcacaaatttcagataaactcccagtagtcaaag

SEQ ID NO: 482339 - DNA, 55 bp, Artificial
  Synthetic oligonucleotide
ttggagcacacaagtagatacgtgtgcactggaattctcactgacaccagtcgac

SEQ ID NO: 482340 - DNA, 59 bp, Artificial
  Synthetic oligonucleotide
ttggagcagtgggccgttgtttgggctgggatcaagtgttttgacaacgcggtgatggc

SEQ ID NO: 482341 - DNA, 60 bp, Artificial
  Synthetic oligonucleotide
ttggagcattcttttcaatcttacaggacatgcggaataccattatggcatcaaagacag

SEQ ID NO: 482342 - DNA, 55 bp, Artificial
  Synthetic oligonucleotide
ttggagccttcctcggcacttccgcccatcaaacccttcaggcggccttaccacc

SEQ ID NO: 482343 - DNA, 60 bp, Artificial
  Synthetic oligonucleotide
ttggagcggagataggtgatctcggcgaatatgccgtgatcgtctattccaaggacgacg

SEQ ID NO: 482344 - DNA, 60 bp, Artificial
  Synthetic oligonucleotide
ttggagcgggtccgcatgccatgatggtaaagaatggacatatatcggagttgatggccc

SEQ ID NO: 482345 - DNA, 57 bp, Artificial
  Synthetic oligonucleotide
ttggagcggtacgccgctgtattcaagtagaggcgtggttggaatgcacgtcggttt

SEQ ID NO: 482346 - DNA, 55 bp, Artificial
  Synthetic oligonucleotide
ttggagcgtgtccaggccaactagttaccaaacatgtggttaagggtaagtgcac

SEQ ID NO: 482347 - DNA, 60 bp, Artificial
  Synthetic oligonucleotide
ttggagctaccacctcttgagagacttcatcttgattgctgcgaggactgtgggacttct

SEQ ID NO: 482348 - DNA, 59 bp, Artificial
  Synthetic oligonucleotide
ttggagctccacacgccgtgaaaatggacgtgtacaaccttggagaccagactggagtg

SEQ ID NO: 482349 - DNA, 55 bp, Artificial
  Synthetic oligonucleotide
ttggagctgttgccctagctacgtctgcacagataacagcggggattgctctctc

SEQ ID NO: 482350 - DNA, 60 bp, Artificial
  Synthetic oligonucleotide
ttggagcttaccggcgtcctgatgtacctcagagccgcttcctctcatagttacgcctac

SEQ ID NO: 482351 - DNA, 55 bp, Artificial
  Synthetic oligonucleotide
ttggaggaaatgggcgccagggcttttgtgcagccttgaagcggtgttacttcac

SEQ ID NO: 482352 - DNA, 55 bp, Artificial
  Synthetic oligonucleotide
ttggaggagaatgcgaccagtcttattgtgatactatccacaactcctcagtttg

SEQ ID NO: 482353 - DNA, 60 bp, Artificial
  Synthetic oligonucleotide
ttggaggagcaggtctgagcaagagaaatgctaaaatttcatgtgctacgctcctaggcc

SEQ ID NO: 482354 - DNA, 57 bp, Artificial
  Synthetic oligonucleotide
ttggaggagccggtcttagcaagagaaatgctaaaatttcacgcgctacacttttgg

SEQ ID NO: 482355 - DNA, 60 bp, Artificial
  Synthetic oligonucleotide
ttggaggaggtttagtgcttaatgagcgaaactctagtgagcaattgattcatacagaag

SEQ ID NO: 482356 - DNA, 53 bp, Artificial
  Synthetic oligonucleotide
ttggaggcacaccatgtaggggatttatctacatttcgcaataagatatcggc

SEQ ID NO: 482357 - DNA, 60 bp, Artificial
  Synthetic oligonucleotide
ttggaggcaccgtctcttgatctatctcccacgtattcagagcgtggtcgctccgatcct

SEQ ID NO: 482358 - DNA, 55 bp, Artificial
  Synthetic oligonucleotide
ttggaggcatgattttggtagatacttgtcacaagagtgtcgccaacgctgtcag

SEQ ID NO: 482359 - DNA, 54 bp, Artificial
  Synthetic oligonucleotide
ttggaggcccaatgggccgctaacacgtgggggcgcactcgctgatttaatatt

SEQ ID NO: 482360 - DNA, 50 bp, Artificial
  Synthetic oligonucleotide
ttggaggctgttgaccattatgccggacaattggccaccctagatatcag

SEQ ID NO: 482361 - DNA, 60 bp, Artificial
  Synthetic oligonucleotide
ttggagggatcaacactaataggagcttccacagtgtccataggaacacaataggagact

SEQ ID NO: 482362 - DNA, 60 bp, Artificial
  Synthetic oligonucleotide
ttggagggcatcgatcaggtgcacatgcaaaaacccagacagaatgggggctggcaatat

SEQ ID NO: 482363 - DNA, 59 bp, Artificial
  Synthetic oligonucleotide
ttggagggctatcagtggattatttagtcgcgtctacgcaaagataatagccaacggga

SEQ ID NO: 482364 - DNA, 59 bp, Artificial
  Synthetic oligonucleotide
ttggaggggtgtatactggtaatgtaaagataatgaattaccatcttatgactccagaa

SEQ ID NO: 482365 - DNA, 57 bp, Artificial
  Synthetic oligonucleotide
ttggagggtgatgaattttgcattcttgatggcccactgcttgagtgcagaattctt

SEQ ID NO: 482366 - DNA, 60 bp, Artificial
  Synthetic oligonucleotide
ttggaggtaaggcatgatgacttgtcgcctgcagagcttgtgcaagagggtctctgtgac

SEQ ID NO: 482367 - DNA, 60 bp, Artificial
  Synthetic oligonucleotide
ttggaggtatgagttgatctcacagacgaagaagactacatttcatgatggtaacccttg

SEQ ID NO: 482368 - DNA, 59 bp, Artificial
  Synthetic oligonucleotide
ttggaggtgcgttaacatctaacacggcaaaaaagatctacagcacaatagggaaagca

SEQ ID NO: 482369 - DNA, 55 bp, Artificial
  Synthetic oligonucleotide
ttggagtaaattttccgcatcctactagatgtgacgctttctacatgtgtgtcgg

SEQ ID NO: 482370 - DNA, 52 bp, Artificial
  Synthetic oligonucleotide
ttggagtaggttctatcgcatatgtacaagtttatactgatgttgtagcacg

SEQ ID NO: 482371 - DNA, 55 bp, Artificial
  Synthetic oligonucleotide
ttggagtcctgcctttacgcatggggcgctcctttcctggtcattacattaggga

SEQ ID NO: 482372 - DNA, 55 bp, Artificial
  Synthetic oligonucleotide
ttggagtcctttactctagagaggcccattacgctcccggcgcacactttaattt

SEQ ID NO: 482373 - DNA, 55 bp, Artificial
  Synthetic oligonucleotide
ttggagtctgctaatctctgtaagatttcctcctccgctctcgatgcagtcggtc

SEQ ID NO: 482374 - DNA, 52 bp, Artificial
  Synthetic oligonucleotide
ttggagtgatccatcagcagaacacgtatcgggcatcctactttcagtgcaa

SEQ ID NO: 482375 - DNA, 52 bp, Artificial
  Synthetic oligonucleotide
ttggagtgcgacaacgcccacgggaagtgacatttttcccgcggtttttacc

SEQ ID NO: 482376 - DNA, 54 bp, Artificial
  Synthetic oligonucleotide
ttggagttaaatatcactgagccttcaactcaggagttcctgacaaccaaacac

SEQ ID NO: 482377 - DNA, 57 bp, Artificial
  Synthetic oligonucleotide
ttggagttcatcactgaaggtttcaattgggcaggagtaactcaaaatgggggaagc

SEQ ID NO: 482378 - DNA, 60 bp, Artificial
  Synthetic oligonucleotide
ttggagttgatgtgcatgctttaggccactggtttgatggtcgtctcaatcttaagacat

SEQ ID NO: 482379 - DNA, 56 bp, Artificial
  Synthetic oligonucleotide
ttggagttgttctaccacccagacccgagctcgaacagggcctcctctacctgccc

SEQ ID NO: 482380 - DNA, 60 bp, Artificial
  Synthetic oligonucleotide
ttggagttttagcgacacctgaaataccttatacaatggaatcagcgaatgagattgcga

SEQ ID NO: 482381 - DNA, 58 bp, Artificial
  Synthetic oligonucleotide
ttggagttttctgttaacaacgtaaatatcgttcggatcagtgcaactcgacgatcga

SEQ ID NO: 482382 - DNA, 55 bp, Artificial
  Synthetic oligonucleotide
ttggataacatcaaacatccacccaagagattggtatccggacttagacccagcg

SEQ ID NO: 482383 - DNA, 60 bp, Artificial
  Synthetic oligonucleotide
ttggataagttaaaaattgtggcatatggtgatgatgtgatagcttcctacccagaagag

SEQ ID NO: 482384 - DNA, 60 bp, Artificial
  Synthetic oligonucleotide
ttggataatatgattcgcggagcattacttaacggcgaagtaaagcatcagacaagaata

SEQ ID NO: 482385 - DNA, 59 bp, Artificial
  Synthetic oligonucleotide
ttggataattccagacactcccacagaaattacagcctcccgtgacttcaacaagctta

SEQ ID NO: 482386 - DNA, 60 bp, Artificial
  Synthetic oligonucleotide
ttggatacaccattttcgaaacggcatcataaagctatgtttgcaatatccgacacagag

SEQ ID NO: 482387 - DNA, 59 bp, Artificial
  Synthetic oligonucleotide
ttggatacagcaatcgcgctgtaaatgttaaattgttgctaaccgctgtatctaagttc

SEQ ID NO: 482388 - DNA, 52 bp, Artificial
  Synthetic oligonucleotide
ttggatacccatcatgggctcatgttacaaccgtcattccaacggtatccaa

SEQ ID NO: 482389 - DNA, 53 bp, Artificial
  Synthetic oligonucleotide
ttggatactggttatgttgaagctctaattgcaatcgaaggaagtgcaatacg

SEQ ID NO: 482390 - DNA, 58 bp, Artificial
  Synthetic oligonucleotide
ttggatagaggacagaaatatgactctcctaaagccccaggaacgacaaagacgcaat

SEQ ID NO: 482391 - DNA, 56 bp, Artificial
  Synthetic oligonucleotide
ttggataggcttgatagcctaccaaagccaaagtggggactactggggcgtaggta

SEQ ID NO: 482392 - DNA, 58 bp, Artificial
  Synthetic oligonucleotide
ttggatataagggcgaagcatatagtcgattcgtttcaagtctagtgcaagttagaat

SEQ ID NO: 482393 - DNA, 60 bp, Artificial
  Synthetic oligonucleotide
ttggatatgactcaataacaagccagagaactaagttatatgattcaaccattcaggagc

SEQ ID NO: 482394 - DNA, 54 bp, Artificial
  Synthetic oligonucleotide
ttggatatgcgaactgtattcgtcttttcgacggacggaacgcaattgtcacag

SEQ ID NO: 482395 - DNA, 56 bp, Artificial
  Synthetic oligonucleotide
ttggatattaccctttaataatatgcggtgaaggcaccactgtaagaaactacaac

SEQ ID NO: 482396 - DNA, 60 bp, Artificial
  Synthetic oligonucleotide
ttggatatttagaggatgtgaaatttacctatccagaagatagtgactcagtatctgttc

SEQ ID NO: 482397 - DNA, 58 bp, Artificial
  Synthetic oligonucleotide
ttggatcaactaagctaaagaactcgcaaggtccacgcactactatattcgtcatgcc

SEQ ID NO: 482398 - DNA, 60 bp, Artificial
  Synthetic oligonucleotide
ttggatcacacttgtgcaaaattctccaattagtaatctattgagagttgctgcctggaa

SEQ ID NO: 482399 - DNA, 55 bp, Artificial
  Synthetic oligonucleotide
ttggatcaggtgaagacccaggtctcggctgtgttcaaggagggtctgaccccgg

SEQ ID NO: 482400 - DNA, 55 bp, Artificial
  Synthetic oligonucleotide
ttggatcagtatcctttgggacgcaagtttttgttacaaagtggatataggggac

SEQ ID NO: 482401 - DNA, 60 bp, Artificial
  Synthetic oligonucleotide
ttggatcataattgataaggatgttgggtctgttttccctgataagctggattctatatt

SEQ ID NO: 482402 - DNA, 58 bp, Artificial
  Synthetic oligonucleotide
ttggatcatcgttgataaggatgttgggtctgtttttcctaccaagttgtctactata

SEQ ID NO: 482403 - DNA, 60 bp, Artificial
  Synthetic oligonucleotide
ttggatcatttcatcttaaattcatagttcagatgctcaattggctttccatctgaactt

SEQ ID NO: 482404 - DNA, 51 bp, Artificial
  Synthetic oligonucleotide
ttggatccaaactcatttgcataccacgcccacccgatggtgtgtggccat

SEQ ID NO: 482405 - DNA, 55 bp, Artificial
  Synthetic oligonucleotide
ttggatccatctcctgcctacttctcctgcgataaataaggttgaagtaggacag

SEQ ID NO: 482406 - DNA, 51 bp, Artificial
  Synthetic oligonucleotide
ttggatcccatgccgaggggcggagaagatgggaggcgcccgtacctcgac

SEQ ID NO: 482407 - DNA, 60 bp, Artificial
  Synthetic oligonucleotide
ttggatcccatggtaagggctctgtatttccctgctggtggctccagttcagggacacag

SEQ ID NO: 482408 - DNA, 55 bp, Artificial
  Synthetic oligonucleotide
ttggatcccgggaaactggcagctgggcagcgtaagcacgggtgtgtgaacccca

SEQ ID NO: 482409 - DNA, 56 bp, Artificial
  Synthetic oligonucleotide
ttggatcctgaccctctgtgcaatggttgaggtgacccggattgaccctgacatcg

SEQ ID NO: 482410 - DNA, 56 bp, Artificial
  Synthetic oligonucleotide
ttggatcgactaagactcaaaacgttaccgttaatccaggaccattcgcgcaaaca

SEQ ID NO: 482411 - DNA, 60 bp, Artificial
  Synthetic oligonucleotide
ttggatcgcatataagttcgtgcccaggctcagtggtgctatggacggctctggaggagc

SEQ ID NO: 482412 - DNA, 60 bp, Artificial
  Synthetic oligonucleotide
ttggatcgcgtcaagttgaattcaatacagtcattaacgccgataggtgtcgtgctatgt

SEQ ID NO: 482413 - DNA, 60 bp, Artificial
  Synthetic oligonucleotide
ttggatctgacaattattatcacaggagccactgatgtagatggtatggcctggttcact

SEQ ID NO: 482414 - DNA, 60 bp, Artificial
  Synthetic oligonucleotide
ttggatctgcatcattagggcttgtattcctcaacgtcattctccatgtggtcagcatta

SEQ ID NO: 482415 - DNA, 60 bp, Artificial
  Synthetic oligonucleotide
ttggatctgcatgccccaacattgccgtctcacagacccctcttttacatccttgtatac

SEQ ID NO: 482416 - DNA, 55 bp, Artificial
  Synthetic oligonucleotide
ttggatctggttgaggctgggttaaagatagtagatcaggtatcgtttgagcaaa

SEQ ID NO: 482417 - DNA, 60 bp, Artificial
  Synthetic oligonucleotide
ttggatcttgggaaatccccaatgtgatctattactaggtgaccagagctggtcatacat

SEQ ID NO: 482418 - DNA, 57 bp, Artificial
  Synthetic oligonucleotide
ttggatgaaaattggcagaccttctggggtgagtaaggtcgaaaaatctagcatcct

SEQ ID NO: 482419 - DNA, 57 bp, Artificial
  Synthetic oligonucleotide
ttggatgaccaaggacatcgccccccggttgatttgcccccgcagcaagcggtacaa

SEQ ID NO: 482420 - DNA, 60 bp, Artificial
  Synthetic oligonucleotide
ttggatgatgtaagcaccatttcggacaccatgcttggggccatgattggacaaaccaag

SEQ ID NO: 482421 - DNA, 60 bp, Artificial
  Synthetic oligonucleotide
ttggatgcagaggaggagtggcaaaaagccgaaagtggagctaatcatacaggaatatat

SEQ ID NO: 482422 - DNA, 55 bp, Artificial
  Synthetic oligonucleotide
ttggatgcatcatgggcctaggatagcttggggacaggctatccatgtgacggcc

SEQ ID NO: 482423 - DNA, 56 bp, Artificial
  Synthetic oligonucleotide
ttggatgccctggcaagggagatgtctgctagagaagaggagaatgctaacttatt

SEQ ID NO: 482424 - DNA, 52 bp, Artificial
  Synthetic oligonucleotide
ttggatgcgtcctggcgagatctaagtttgttggaaaagtgctcacaaatgc

SEQ ID NO: 482425 - DNA, 50 bp, Artificial
  Synthetic oligonucleotide
ttggatgcgttaccacttgagcgggctaggttcatggtatttggcggtga

SEQ ID NO: 482426 - DNA, 53 bp, Artificial
  Synthetic oligonucleotide
ttggatggacaattaagggattgggacatgactttttgagggatccaagaatc

SEQ ID NO: 482427 - DNA, 57 bp, Artificial
  Synthetic oligonucleotide
ttggatggagactgggtaacttttagggaagttttagccgctgctaatagctttgca

SEQ ID NO: 482428 - DNA, 60 bp, Artificial
  Synthetic oligonucleotide
ttggatggatgagaatatcaagctcaagaaccacacgaacagtgttatgttctggttggt

SEQ ID NO: 482429 - DNA, 52 bp, Artificial
  Synthetic oligonucleotide
ttggatggattcaacacacttttccgaagagcacgtggtaacccagttcata

SEQ ID NO: 482430 - DNA, 52 bp, Artificial
  Synthetic oligonucleotide
ttggatggcgaaggaagtgctgtgatcgggggcgcatgtgctccgtcttagc

SEQ ID NO: 482431 - DNA, 60 bp, Artificial
  Synthetic oligonucleotide
ttggatgggatatgagctccatcctgacaaatggacggtacaacctatacagctgccaga

SEQ ID NO: 482432 - DNA, 60 bp, Artificial
  Synthetic oligonucleotide
ttggatgggatatgagctccatcctgacaagtggacagtccagcctataatgctgccaga

SEQ ID NO: 482433 - DNA, 60 bp, Artificial
  Synthetic oligonucleotide
ttggatggggtatgaactccatccggataaatggacagtgcagcctatacaactgccaaa

SEQ ID NO: 482434 - DNA, 58 bp, Artificial
  Synthetic oligonucleotide
ttggatggtaggtccaaggccttattaatagactgtattacgcatcatttgtcggtta

SEQ ID NO: 482435 - DNA, 55 bp, Artificial
  Synthetic oligonucleotide
ttggatggtatggacatgaatcaggccgccgggtatccttggaacacgatgggca

SEQ ID NO: 482436 - DNA, 54 bp, Artificial
  Synthetic oligonucleotide
ttggatggtctgaggtaagagaaagaataagacgagctaggccagcagcagaaa

SEQ ID NO: 482437 - DNA, 58 bp, Artificial
  Synthetic oligonucleotide
ttggatggtgtcaaatgggtcctaccttaacgagacacacttttcttctgacatagaa

SEQ ID NO: 482438 - DNA, 55 bp, Artificial
  Synthetic oligonucleotide
ttggatgtagcagggacttatctgctaacgttggtggttgcagcaactgctagcg

SEQ ID NO: 482439 - DNA, 59 bp, Artificial
  Synthetic oligonucleotide
ttggatgtcggtctcgaccaatggaaaccctccctcatcgcttaacaatcatgttgtcc

SEQ ID NO: 482440 - DNA, 59 bp, Artificial
  Synthetic oligonucleotide
ttggatgtgagtaagcttggtaagaagtggtacccgtacaagactagcactgactacac

SEQ ID NO: 482441 - DNA, 52 bp, Artificial
  Synthetic oligonucleotide
ttggatgtgctccccggtaggaacgaggtcttcgctgtttcacatgtcggtg

SEQ ID NO: 482442 - DNA, 55 bp, Artificial
  Synthetic oligonucleotide
ttggattacagacatcctcaattgaaggggcctggggttctggtgtaggctttac

SEQ ID NO: 482443 - DNA, 52 bp, Artificial
  Synthetic oligonucleotide
ttggattacattgctccaacctgtatgaagacgctccattctacacgtacgg

SEQ ID NO: 482444 - DNA, 56 bp, Artificial
  Synthetic oligonucleotide
ttggattaccgaccagcaagaaacgatggagtggtggtaccaaggttactggatat

SEQ ID NO: 482445 - DNA, 57 bp, Artificial
  Synthetic oligonucleotide
ttggattcaaagcgagttcaataaggcctgcgaactgacagactcaagttggataga

SEQ ID NO: 482446 - DNA, 60 bp, Artificial
  Synthetic oligonucleotide
ttggattcaaagtgaattcaataaagcatgtgaattgactgactcaagttggatagaact

SEQ ID NO: 482447 - DNA, 60 bp, Artificial
  Synthetic oligonucleotide
ttggattcaagcctgccaatcacgaatacgttgaagacagcgaataactctgtaatctac

SEQ ID NO: 482448 - DNA, 51 bp, Artificial
  Synthetic oligonucleotide
ttggattcactcgcacccggactcggagagctacaagggtgccgtgatccc

SEQ ID NO: 482449 - DNA, 55 bp, Artificial
  Synthetic oligonucleotide
ttggattcccacccaaaatggaatgcgctagtgactccctatctgaatgaattcc

SEQ ID NO: 482450 - DNA, 60 bp, Artificial
  Synthetic oligonucleotide
ttggattccgctctctgggctcccactattgaagcagactctcctgggtccagaacgctg

SEQ ID NO: 482451 - DNA, 54 bp, Artificial
  Synthetic oligonucleotide
ttggattcttggaaacccccaatgtgacatcttacttggggaccaaagttggtc

SEQ ID NO: 482452 - DNA, 60 bp, Artificial
  Synthetic oligonucleotide
ttggattgcacaagtttcaatgcgtttgggagaggagtctggagtaatatcgacatctta

SEQ ID NO: 482453 - DNA, 58 bp, Artificial
  Synthetic oligonucleotide
ttggattgcacgtggccggagtggctggtacgagtggtttctcagcccccctccatac

SEQ ID NO: 482454 - DNA, 57 bp, Artificial
  Synthetic oligonucleotide
ttggattggaaatcgaactatcggaaatcgattaccaatatcggaaatcgtattaca

SEQ ID NO: 482455 - DNA, 55 bp, Artificial
  Synthetic oligonucleotide
ttggattgtccttttgtggcttcactgttaatgaaaaccttgagcctgtgccaac

SEQ ID NO: 482456 - DNA, 53 bp, Artificial
  Synthetic oligonucleotide
ttggattgttttgacaatggtaggaatcttctcatcatctaggttcacagcac

SEQ ID NO: 482457 - DNA, 59 bp, Artificial
  Synthetic oligonucleotide
ttggatttaagaagatgctgggtgccgtacctaagggcactaaagcacccagcagtgac

SEQ ID NO: 482458 - DNA, 57 bp, Artificial
  Synthetic oligonucleotide
ttggatttataatccagacacagtattgtggggcccgttgaaacttaaagacagcac

SEQ ID NO: 482459 - DNA, 55 bp, Artificial
  Synthetic oligonucleotide
ttggatttggaggatgtggattagttttagcccgattacgttgcaccgtacgggc

SEQ ID NO: 482460 - DNA, 60 bp, Artificial
  Synthetic oligonucleotide
ttggatttgtctcgtacacgccagacgccgagagagtagctgtcgcagcgacagacttag

SEQ ID NO: 482461 - DNA, 60 bp, Artificial
  Synthetic oligonucleotide
ttggcaaagatttggcacacacttcgcccaatacagaaacgtgtgggatgtggactattc

SEQ ID NO: 482462 - DNA, 60 bp, Artificial
  Synthetic oligonucleotide
ttggcaacagcgtgcgtgactaattgaacctagtaattgcatagcattcgactgtaacct

SEQ ID NO: 482463 - DNA, 57 bp, Artificial
  Synthetic oligonucleotide
ttggcaaccccagtcgatgcaccctgttcataggggcctcttcctaccactccgacc

SEQ ID NO: 482464 - DNA, 55 bp, Artificial
  Synthetic oligonucleotide
ttggcaatagtgtagtatatgcgtaatacccacgggacatctatgcaaacgcaac

SEQ ID NO: 482465 - DNA, 54 bp, Artificial
  Synthetic oligonucleotide
ttggcaatcactaacctccaagcccagtacccgaagtcccgaccccgctcctgt

SEQ ID NO: 482466 - DNA, 60 bp, Artificial
  Synthetic oligonucleotide
ttggcaatgcgtctgtctcacttctgtcctcttttcgtgtttcactttgatcgccagtcc

SEQ ID NO: 482467 - DNA, 55 bp, Artificial
  Synthetic oligonucleotide
ttggcaattaacgatggaactctgacacttaatatgaaccctagattttgtcgcg

SEQ ID NO: 482468 - DNA, 60 bp, Artificial
  Synthetic oligonucleotide
ttggcaattacactatctcctgtgaaccactagagataaattgtcaggctccaccagtag

SEQ ID NO: 482469 - DNA, 59 bp, Artificial
  Synthetic oligonucleotide
ttggcaattgacagtttggttccccgacactttgagtgctgagctaccaaggatactag

SEQ ID NO: 482470 - DNA, 55 bp, Artificial
  Synthetic oligonucleotide
ttggcaattggatctctgatagtgcccttgagtctagagcgtgcgagatcagctc

SEQ ID NO: 482471 - DNA, 60 bp, Artificial
  Synthetic oligonucleotide
ttggcacaacaaacaatggcatttgatcttggaagcaatttacgcttgcaggggtcttcg

SEQ ID NO: 482472 - DNA, 54 bp, Artificial
  Synthetic oligonucleotide
ttggcacaacattactaaatcttgacgcaaattatgtagaaactgctagaacta

SEQ ID NO: 482473 - DNA, 60 bp, Artificial
  Synthetic oligonucleotide
ttggcacacacttcgcccagtacaaaaatgtgtgggacgtggactattcagcctttgatg

SEQ ID NO: 482474 - DNA, 55 bp, Artificial
  Synthetic oligonucleotide
ttggcacactctcggatttaacaagcattgctggacacttaccaaccgtaactgg

SEQ ID NO: 482475 - DNA, 60 bp, Artificial
  Synthetic oligonucleotide
ttggcacacttcactagaattctcgacgaatgcacggcacttggtctagacacccctcac

SEQ ID NO: 482476 - DNA, 60 bp, Artificial
  Synthetic oligonucleotide
ttggcacatcaatcggacggccttgaactgcaacgctagccttgacgccggctggatagc

SEQ ID NO: 482477 - DNA, 50 bp, Artificial
  Synthetic oligonucleotide
ttggcacctgcaatcggtgtaatggggtacaatatatacttgtaccccaa

SEQ ID NO: 482478 - DNA, 60 bp, Artificial
  Synthetic oligonucleotide
ttggcacgcccatggatttcggtcaggtgttcaacatgttcgacaacgagcccagtactg

SEQ ID NO: 482479 - DNA, 58 bp, Artificial
  Synthetic oligonucleotide
ttggcacgtatgcccggggctccggtgagggtgaacgccataccaacgagactctgac

SEQ ID NO: 482480 - DNA, 55 bp, Artificial
  Synthetic oligonucleotide
ttggcactccacaggattttggtcaggtgtttaacatgtacgataatgagccgag

SEQ ID NO: 482481 - DNA, 60 bp, Artificial
  Synthetic oligonucleotide
ttggcactcgtggggcatgatgctccttgggatgttaatgatctgtagtgctacagagca

SEQ ID NO: 482482 - DNA, 60 bp, Artificial
  Synthetic oligonucleotide
ttggcactggtgggtcatggagcgctcatacaagcctagtggcagtagccactatgatcc

SEQ ID NO: 482483 - DNA, 60 bp, Artificial
  Synthetic oligonucleotide
ttggcagaagctcgagtctttctgggctaaacacatgtggaacttcgttagcgggataca

SEQ ID NO: 482484 - DNA, 55 bp, Artificial
  Synthetic oligonucleotide
ttggcagaagctcttacaaaagttcaagtagtgcaatcaaaaggatcaggaccag

SEQ ID NO: 482485 - DNA, 60 bp, Artificial
  Synthetic oligonucleotide
ttggcagacatctcattgcttccctcgctcagattattggtgacaacaaagcagcctggg

SEQ ID NO: 482486 - DNA, 60 bp, Artificial
  Synthetic oligonucleotide
ttggcagactgttcatgtggactcaatcaggaagtctttcagtttttatgggtctcaaaa

SEQ ID NO: 482487 - DNA, 55 bp, Artificial
  Synthetic oligonucleotide
ttggcagaggacggtcgacggggaatggcatctgcccgatcccaagatgaccctc

SEQ ID NO: 482488 - DNA, 55 bp, Artificial
  Synthetic oligonucleotide
ttggcagaggagtatgggtgcatcgatgtcatttatcaccaatcgaaaggagctc

SEQ ID NO: 482489 - DNA, 52 bp, Artificial
  Synthetic oligonucleotide
ttggcagattgggaattgacgatgacgactgtgaattgtcagatgctatctc

SEQ ID NO: 482490 - DNA, 58 bp, Artificial
  Synthetic oligonucleotide
ttggcagccgatttaaattcggtaatgtgtacaggaggtgactatagttttgcgcttc

SEQ ID NO: 482491 - DNA, 51 bp, Artificial
  Synthetic oligonucleotide
ttggcagcgaaggtttctgtggccacaactctcgttcaacaattgcagttg

SEQ ID NO: 482492 - DNA, 57 bp, Artificial
  Synthetic oligonucleotide
ttggcaggaaaacgtccgttttataaagtactagcattgctaggatctacactctta

SEQ ID NO: 482493 - DNA, 57 bp, Artificial
  Synthetic oligonucleotide
ttggcaggcgtcctggattcctgagtgggaatttattagtacaccccctctcattaa

SEQ ID NO: 482494 - DNA, 60 bp, Artificial
  Synthetic oligonucleotide
ttggcagtgggggacgagtgatgaatgacggggtgcctgtactcaagtcgttctttatgc

SEQ ID NO: 482495 - DNA, 55 bp, Artificial
  Synthetic oligonucleotide
ttggcagtgtgtatacaactatgtttggaggagtctcatggatggtcagaatcct

SEQ ID NO: 482496 - DNA, 55 bp, Artificial
  Synthetic oligonucleotide
ttggcataatcctaatttcacttacagtctcaaggtcattaatcttgtgctcgtt

SEQ ID NO: 482497 - DNA, 60 bp, Artificial
  Synthetic oligonucleotide
ttggcatatcaaccgcactgccctgaattgcaatgactccctgaacaccggctttctcgc

SEQ ID NO: 482498 - DNA, 60 bp, Artificial
  Synthetic oligonucleotide
ttggcatatcaatagcacggccttgaactgcaatgatagccttaacaccggctttgtagc

SEQ ID NO: 482499 - DNA, 53 bp, Artificial
  Synthetic oligonucleotide
ttggcatatcctccagaattagcaaaccttggaccatctgatctctacgtaca

SEQ ID NO: 482500 - DNA, 50 bp, Artificial
  Synthetic oligonucleotide
ttggcatcatgggcgctcaggtatctagacaaaatgttgggactcactcc

SEQ ID NO: 482501 - DNA, 55 bp, Artificial
  Synthetic oligonucleotide
ttggcattaaagcgccgcgcaagtatcaaaagcaaacccacctttctgcatcgag

SEQ ID NO: 482502 - DNA, 52 bp, Artificial
  Synthetic oligonucleotide
ttggccaaagcatatagtgtgctacctaacgattctagtaagaccagcaatg

SEQ ID NO: 482503 - DNA, 60 bp, Artificial
  Synthetic oligonucleotide
ttggccaaatgaatccaataaactccatcccgagtagatcacatcaagggctagtcttct

SEQ ID NO: 482504 - DNA, 60 bp, Artificial
  Synthetic oligonucleotide
ttggccaatacaatagaagtgttcagattgaacggcctcacggccagtgaatctggaagg

SEQ ID NO: 482505 - DNA, 55 bp, Artificial
  Synthetic oligonucleotide
ttggccaatgcggctgatggcgtcgagtatacgtactacgacgacgttacttggg

SEQ ID NO: 482506 - DNA, 59 bp, Artificial
  Synthetic oligonucleotide
ttggccaattcaaaatcacacatgacatacgccgatacaattggtagcttccgtaaaag

SEQ ID NO: 482507 - DNA, 60 bp, Artificial
  Synthetic oligonucleotide
ttggccactccctctatgcgcactcgctcgctcggtggggcctggcgaccaaaggtcgcc

SEQ ID NO: 482508 - DNA, 60 bp, Artificial
  Synthetic oligonucleotide
ttggccactccctctatgcgcgctcgctcactcactcggccctggagaccaaaggtctcc

SEQ ID NO: 482509 - DNA, 60 bp, Artificial
  Synthetic oligonucleotide
ttggccagagtggattaacgaggttgcaaaagatctcggactgggagaggattatgacca

SEQ ID NO: 482510 - DNA, 60 bp, Artificial
  Synthetic oligonucleotide
ttggccagttacgaagccatctgtgtcggtgcgataatcaacaggggcgattcgtctgtg

SEQ ID NO: 482511 - DNA, 58 bp, Artificial
  Synthetic oligonucleotide
ttggcccaatcaacgttagtctgacacacctagataagtggaattactttgtcgctaa

SEQ ID NO: 482512 - DNA, 60 bp, Artificial
  Synthetic oligonucleotide
ttggcccaatttcacctgactatacgcaacatatggctactataggcgtgctggctacgc

SEQ ID NO: 482513 - DNA, 55 bp, Artificial
  Synthetic oligonucleotide
ttggcccctctatggcaatgagggttgcgggtgggcgggatggctccacccccgg

SEQ ID NO: 482514 - DNA, 57 bp, Artificial
  Synthetic oligonucleotide
ttggcccgtcaggttgaacactggaacctcctgcggagggaaaacgtgctaatgcac

SEQ ID NO: 482515 - DNA, 58 bp, Artificial
  Synthetic oligonucleotide
ttggccctactgaaggctctcttcctgcccaaaagacttagcataattcattgcccgg

SEQ ID NO: 482516 - DNA, 52 bp, Artificial
  Synthetic oligonucleotide
ttggccctgtttcacttgggaggaagaatccgttccgcttcccccccatccc

SEQ ID NO: 482517 - DNA, 55 bp, Artificial
  Synthetic oligonucleotide
ttggcccttgttcactcgtgcgttaacgtgagcacccgaacccacgtaggaagag

SEQ ID NO: 482518 - DNA, 55 bp, Artificial
  Synthetic oligonucleotide
ttggccgacgtaacatggctatagacgtcttgacatggtcgggcctcttcaccgt

SEQ ID NO: 482519 - DNA, 52 bp, Artificial
  Synthetic oligonucleotide
ttggccgagcatgttatgtacagttctagagcgtcaacatctgtgtttatcg

SEQ ID NO: 482520 - DNA, 58 bp, Artificial
  Synthetic oligonucleotide
ttggccgcgatgttcagcggtggtatactgcccccacccgtggccctgcggcaaactg

SEQ ID NO: 482521 - DNA, 56 bp, Artificial
  Synthetic oligonucleotide
ttggccgcgcagcggaactgggttcaacaataattgggttcaagaagacaataagt

SEQ ID NO: 482522 - DNA, 60 bp, Artificial
  Synthetic oligonucleotide
ttggccgctcacagctgctattgcacgcgccgcctatgtgtagtccacttagcacgggtg

SEQ ID NO: 482523 - DNA, 58 bp, Artificial
  Synthetic oligonucleotide
ttggccggccatcttgcgaaattgtttgatacacacttcatcccatcttgggttcatg

SEQ ID NO: 482524 - DNA, 55 bp, Artificial
  Synthetic oligonucleotide
ttggccgtatggttctcactgccgagggtcgttcggtccatgattcatcttcgga

SEQ ID NO: 482525 - DNA, 60 bp, Artificial
  Synthetic oligonucleotide
ttggccgtggaatacctatcattggccactctggcaattggacaatatgagggaatggtt

SEQ ID NO: 482526 - DNA, 56 bp, Artificial
  Synthetic oligonucleotide
ttggccgttcactaattaaacataactgttgtgttgtgacaactgataagggtaaa

SEQ ID NO: 482527 - DNA, 59 bp, Artificial
  Synthetic oligonucleotide
ttggccgttgttgcaacaatgataaatacagggtatcgcaaccccgttagtaatcagca

SEQ ID NO: 482528 - DNA, 59 bp, Artificial
  Synthetic oligonucleotide
ttggcctagtatgcgcaacctgtgaacagattgctgattcccagcatcagtctcacaga

SEQ ID NO: 482529 - DNA, 60 bp, Artificial
  Synthetic oligonucleotide
ttggcctagtatgcgccacatgcgagcaaattgctgattcccagcaccggtctcacagac

SEQ ID NO: 482530 - DNA, 59 bp, Artificial
  Synthetic oligonucleotide
ttggcctcaaaactgcgcatcgatcaagggttgggtttgccagacgcgttcttacggca

SEQ ID NO: 482531 - DNA, 60 bp, Artificial
  Synthetic oligonucleotide
ttggcctggtatgtgcaacatgtgaacagattgctgactcccagcacaggtctcataggc

SEQ ID NO: 482532 - DNA, 50 bp, Artificial
  Synthetic oligonucleotide
ttggccttcccgatgcaaatttctatgaccctacgaagcagcgcctggtg

SEQ ID NO: 482533 - DNA, 55 bp, Artificial
  Synthetic oligonucleotide
ttggccttgggtggcactgacaccctcgacaacattggggcggctcaccgcaagt

SEQ ID NO: 482534 - DNA, 55 bp, Artificial
  Synthetic oligonucleotide
ttggccttggtcaagtacacaacattacaggttcgcaattcctgcaactttcgct

SEQ ID NO: 482535 - DNA, 55 bp, Artificial
  Synthetic oligonucleotide
ttggccttgtgcagggggccttcctaaccttgaatgctaccaacccaggggccac

SEQ ID NO: 482536 - DNA, 57 bp, Artificial
  Synthetic oligonucleotide
ttggcgacctctccgagtggtacagcacaggctttggatgttctctgatgattgtag

SEQ ID NO: 482537 - DNA, 60 bp, Artificial
  Synthetic oligonucleotide
ttggcgagattatgtgcaagaagaagagccaagttatgacagtgtgctctggggaatatc

SEQ ID NO: 482538 - DNA, 58 bp, Artificial
  Synthetic oligonucleotide
ttggcgaggatgattgtaggaatgcttttcttggctaccttccgtctcttgccgtatt

SEQ ID NO: 482539 - DNA, 57 bp, Artificial
  Synthetic oligonucleotide
ttggcgaggatgattgtggggatgctcttccgggccaccttccgtcgcttcccgtac

SEQ ID NO: 482540 - DNA, 58 bp, Artificial
  Synthetic oligonucleotide
ttggcgatctactccacagtcgccagttccctagtattgttagtctccctgggggcaa

SEQ ID NO: 482541 - DNA, 60 bp, Artificial
  Synthetic oligonucleotide
ttggcgcactatctctcatctttcgacgtgtcgcgtcgaggagcgttcgctaacgcttat

SEQ ID NO: 482542 - DNA, 60 bp, Artificial
  Synthetic oligonucleotide
ttggcgcacttgtcgccaacgaaggttggaatgcctcggaggatgcgcttaccgctgtga

SEQ ID NO: 482543 - DNA, 60 bp, Artificial
  Synthetic oligonucleotide
ttggcgcagtaaatcgcgatgcgtagcttcgggcttttatcattgaagacgcccgccagt

SEQ ID NO: 482544 - DNA, 60 bp, Artificial
  Synthetic oligonucleotide
ttggcgcagtttatgtgtaggtagtatgagcatccacacttgaggtcgattcgtctacgc

SEQ ID NO: 482545 - DNA, 54 bp, Artificial
  Synthetic oligonucleotide
ttggcgcatttgcgtcgaggacagctcactaattcgcgttgggctccggtgtcg

SEQ ID NO: 482546 - DNA, 58 bp, Artificial
  Synthetic oligonucleotide
ttggcgcccgaacagggacttagagaagactgaaaagccttggaacacggctgagtga

SEQ ID NO: 482547 - DNA, 53 bp, Artificial
  Synthetic oligonucleotide
ttggcgccgaagttgttgaccgaccgttggaaatttaacatgtattggtttaa

SEQ ID NO: 482548 - DNA, 55 bp, Artificial
  Synthetic oligonucleotide
ttggcgccggacaagaccgctctgggcagttgatgcggcaggaggctgcccgttt

SEQ ID NO: 482549 - DNA, 52 bp, Artificial
  Synthetic oligonucleotide
ttggcgcgcgtcgcttttagactgccgatcgcaacagcacagctgtacccaa

SEQ ID NO: 482550 - DNA, 58 bp, Artificial
  Synthetic oligonucleotide
ttggcgcgtgggaaggtgatggctaaagtttaccacttgcgtggcaggaagccacgaa

SEQ ID NO: 482551 - DNA, 60 bp, Artificial
  Synthetic oligonucleotide
ttggcgctcctcggtcctaacttggcctggatagctactagaccacttcgcaacgatgct

SEQ ID NO: 482552 - DNA, 56 bp, Artificial
  Synthetic oligonucleotide
ttggcggccggaagacgggtacggcgagcacagtaccggcaacgctctcgacgtca

SEQ ID NO: 482553 - DNA, 60 bp, Artificial
  Synthetic oligonucleotide
ttggcggctgttcttagtgcttgcaccgtgaatatcgtcaaggattcaactgacgttcgt

SEQ ID NO: 482554 - DNA, 60 bp, Artificial
  Synthetic oligonucleotide
ttggcgggaaaaattatccgcaacatggtactcatacagagcaaaacgctctatcactca

SEQ ID NO: 482555 - DNA, 59 bp, Artificial
  Synthetic oligonucleotide
ttggcggggcagaaagctacgttggcgtctattcgcgctacgaattcgacaagttatga

SEQ ID NO: 482556 - DNA, 58 bp, Artificial
  Synthetic oligonucleotide
ttggcggggcctgtgttcgatgctcgaccacggacgaacttcaattcgaccacgtcga

SEQ ID NO: 482557 - DNA, 55 bp, Artificial
  Synthetic oligonucleotide
ttggcgggtactttattgagtcgtcaatagtaagaagcttagccgatggtgctta

SEQ ID NO: 482558 - DNA, 60 bp, Artificial
  Synthetic oligonucleotide
ttggcgggtatgagcgggggacaagcatgagcagcgttcagcttcttttcaccgctaccg

SEQ ID NO: 482559 - DNA, 56 bp, Artificial
  Synthetic oligonucleotide
ttggcggtaaccctacttctgaacaggttgttagagacccctgcactcagcccacc

SEQ ID NO: 482560 - DNA, 60 bp, Artificial
  Synthetic oligonucleotide
ttggcggtcagtatattagccaaaaataacgcaatcgtcgcaaatacgagagaagtgcag

SEQ ID NO: 482561 - DNA, 54 bp, Artificial
  Synthetic oligonucleotide
ttggcggtcattagaaggcttagaagtacccgaccctattgagtcagtagccgg

SEQ ID NO: 482562 - DNA, 56 bp, Artificial
  Synthetic oligonucleotide
ttggcgtacggacgcctccgctattgcgacgacatcacccttccccaggtccggga

SEQ ID NO: 482563 - DNA, 60 bp, Artificial
  Synthetic oligonucleotide
ttggcgtattacgtatcggataatgtgaatgttaacataccactgctgatgtatgtaatt

SEQ ID NO: 482564 - DNA, 60 bp, Artificial
  Synthetic oligonucleotide
ttggcgtcacgtctctcgacacgaggctctgtgtgcgacaacaccgtgtcaaatgcttac

SEQ ID NO: 482565 - DNA, 51 bp, Artificial
  Synthetic oligonucleotide
ttggcgtcggttcgaggccgggaggcacgagaccccgaaattggctgtgtg

SEQ ID NO: 482566 - DNA, 55 bp, Artificial
  Synthetic oligonucleotide
ttggcgtcgtctggtgctttgtcgttcgcacttcgatcagccggatgatgcttgg

SEQ ID NO: 482567 - DNA, 45 bp, Artificial
  Synthetic oligonucleotide
ttggcgtctggttctaatcctgcatggaagaatgcaaccctcccc

SEQ ID NO: 482568 - DNA, 52 bp, Artificial
  Synthetic oligonucleotide
ttggcgtgaactcgaaactaggttcattccagttgatcaacgtaaacttttt

SEQ ID NO: 482569 - DNA, 60 bp, Artificial
  Synthetic oligonucleotide
ttggcgtgtcaagacgtttgagcaagcgttgctagagcacacaaagataagggaaggatc

SEQ ID NO: 482570 - DNA, 55 bp, Artificial
  Synthetic oligonucleotide
ttggcgttaaaagtgggtcccacaatatccaaaggaagactaatggactgggtca

SEQ ID NO: 482571 - DNA, 57 bp, Artificial
  Synthetic oligonucleotide
ttggcgttcgtgagattcgtcagtggcacaaagagcagggctggttagacgtaggat

SEQ ID NO: 482572 - DNA, 56 bp, Artificial
  Synthetic oligonucleotide
ttggcgttgaagggaaaactcatagaaacaacattcaggttgaggagtcaagaaaa

SEQ ID NO: 482573 - DNA, 60 bp, Artificial
  Synthetic oligonucleotide
ttggctaagtcagtattcaatagtctgtatgcatcgccacaattagaaggattttcagct

SEQ ID NO: 482574 - DNA, 60 bp, Artificial
  Synthetic oligonucleotide
ttggctaatgtcacagctgttaggcaagaatatgccgttccagttggaccagtgtttcca

SEQ ID NO: 482575 - DNA, 59 bp, Artificial
  Synthetic oligonucleotide
ttggctaccaacaagtgggaggtggatcacgcttttctgactagactagtaaagaagca

SEQ ID NO: 482576 - DNA, 57 bp, Artificial
  Synthetic oligonucleotide
ttggctagtgctacccctgggagtaagtccaaggaatgtggtcatgcaaaaaaggtc

SEQ ID NO: 482577 - DNA, 55 bp, Artificial
  Synthetic oligonucleotide
ttggctatgacgacagctggcccggcctgagcgaccttctggacgacagcctgta

SEQ ID NO: 482578 - DNA, 60 bp, Artificial
  Synthetic oligonucleotide
ttggctatgttcccagccatatccctcctgggattcatgttgtgcagaaccaccagcaca

SEQ ID NO: 482579 - DNA, 60 bp, Artificial
  Synthetic oligonucleotide
ttggctcaagccagtcctggagagtttcgttgcagaggaggtctgggtcagaagttggat

SEQ ID NO: 482580 - DNA, 60 bp, Artificial
  Synthetic oligonucleotide
ttggctcaatgccattggtcaatgtggtgcagccatcacaggcggtatacccatacagca

SEQ ID NO: 482581 - DNA, 60 bp, Artificial
  Synthetic oligonucleotide
ttggctcacaaccagctcctgacgcaaaccaaaattcctaactcctacaaatcatggcta

SEQ ID NO: 482582 - DNA, 60 bp, Artificial
  Synthetic oligonucleotide
ttggctcagtgggaggtgtcatgacgtccattgggagagccatgtacaccgtcctgggag

SEQ ID NO: 482583 - DNA, 57 bp, Artificial
  Synthetic oligonucleotide
ttggctcctcttgctaaccacaggactgctgctctatgtcaccagaagttgctttgc

SEQ ID NO: 482584 - DNA, 54 bp, Artificial
  Synthetic oligonucleotide
ttggctcgactctttttagtaaccctacctcagtcgaattggattgggttatac

SEQ ID NO: 482585 - DNA, 60 bp, Artificial
  Synthetic oligonucleotide
ttggctctgtctctctcaccattgcaacagtatgcttcctcatgcagattgccatcctgg

SEQ ID NO: 482586 - DNA, 60 bp, Artificial
  Synthetic oligonucleotide
ttggctctgtttctctcactattgccacaatatgcttccttatgcaaattgccatcctgg

SEQ ID NO: 482587 - DNA, 60 bp, Artificial
  Synthetic oligonucleotide
ttggctgaaaaccatgactggacataatataagctcatggagacaatataaggaaagatt

SEQ ID NO: 482588 - DNA, 55 bp, Artificial
  Synthetic oligonucleotide
ttggctgaaaccactcaagctgacctatgtatcccctatgtttctgacacaaact

SEQ ID NO: 482589 - DNA, 50 bp, Artificial
  Synthetic oligonucleotide
ttggctgaaatggctaatcttaatcaaatccagaaagaagtctctgaaat

SEQ ID NO: 482590 - DNA, 60 bp, Artificial
  Synthetic oligonucleotide
ttggctgaagcaatgagccaagtaacaactcctccagctaacataatgatacagagaggc

SEQ ID NO: 482591 - DNA, 58 bp, Artificial
  Synthetic oligonucleotide
ttggctgagactctaaaacctggttgacgaggcatattggtgtccctctaaactctac

SEQ ID NO: 482592 - DNA, 60 bp, Artificial
  Synthetic oligonucleotide
ttggctgatgtttatactgtactgcgaccggagttcgatatacatggtgtaaatccaatg

SEQ ID NO: 482593 - DNA, 55 bp, Artificial
  Synthetic oligonucleotide
ttggctgccgtgccgaggtgccccgccttagggaggagtaaatggcgccgttaaa

SEQ ID NO: 482594 - DNA, 56 bp, Artificial
  Synthetic oligonucleotide
ttggctgcgtattgcctgtcaacgggctgcgtagtcatagtgggcagggttgtctt

SEQ ID NO: 482595 - DNA, 51 bp, Artificial
  Synthetic oligonucleotide
ttggctgcgttacaccgttctctgccgcgttccgatgattgatattctctc

SEQ ID NO: 482596 - DNA, 60 bp, Artificial
  Synthetic oligonucleotide
ttggctggagcttctacgttgagcagcgctctgctccgttcacaagagctcgccttacaa

SEQ ID NO: 482597 - DNA, 56 bp, Artificial
  Synthetic oligonucleotide
ttggctggttcgaacgaacgaaccctccaatgagactcaaggacagcaggactttt

SEQ ID NO: 482598 - DNA, 55 bp, Artificial
  Synthetic oligonucleotide
ttggctgttaatcaagttgatatccttcaacatgaggaagaaacatacggaaggt

SEQ ID NO: 482599 - DNA, 55 bp, Artificial
  Synthetic oligonucleotide
ttggctgttcccgatgtcaatttgcgacacgcgcggcggtgtgtacccctgggag

SEQ ID NO: 482600 - DNA, 58 bp, Artificial
  Synthetic oligonucleotide
ttggcttacaaagaaaggatcaaactacccagttgccaaaggatcatacaacaacaca

SEQ ID NO: 482601 - DNA, 50 bp, Artificial
  Synthetic oligonucleotide
ttggcttacgcggtctcaggaacaacgttccccaagatcgctacatcaat

SEQ ID NO: 482602 - DNA, 60 bp, Artificial
  Synthetic oligonucleotide
ttggcttcaatggtacaagggcagaaaataggacatatatgtattggcatagtaaagata

SEQ ID NO: 482603 - DNA, 60 bp, Artificial
  Synthetic oligonucleotide
ttggcttcacactgacatgtcaagtttccttaacagagtgtcctacttttctgacatcaa

SEQ ID NO: 482604 - DNA, 55 bp, Artificial
  Synthetic oligonucleotide
ttggcttccccgccgacacagtaggtaccgcggccattgatctggctcgcgccta

SEQ ID NO: 482605 - DNA, 52 bp, Artificial
  Synthetic oligonucleotide
ttggcttcccggacagagtagaggttatgccgcacattttgaccacagagat

SEQ ID NO: 482606 - DNA, 60 bp, Artificial
  Synthetic oligonucleotide
ttggcttcctggtgcacactttggttccatcttgctgacttctgatgcgcatgataaagg

SEQ ID NO: 482607 - DNA, 55 bp, Artificial
  Synthetic oligonucleotide
ttggcttctcggatgagcgcctcaagcaaatctaccagtttgagtatgagggtct

SEQ ID NO: 482608 - DNA, 58 bp, Artificial
  Synthetic oligonucleotide
ttggcttggtaaaagaggtggatatcaggatctcgtgcaaatttccaaagaaatctat

SEQ ID NO: 482609 - DNA, 50 bp, Artificial
  Synthetic oligonucleotide
ttggcttggttaagcgaattcgaaagctagcaccaccgttatcggcccca

SEQ ID NO: 482610 - DNA, 60 bp, Artificial
  Synthetic oligonucleotide
ttggcttgtcaccagctggccatggttcttcgccagctgtcacgtaaggcttctgtgaaa

SEQ ID NO: 482611 - DNA, 54 bp, Artificial
  Synthetic oligonucleotide
ttggcttttcctccaggaccctaagcagaaagtgcccccgtgctcttttccaat

SEQ ID NO: 482612 - DNA, 55 bp, Artificial
  Synthetic oligonucleotide
ttgggaaaaccgagcccagtcgatgtcggtcctacattaagcttaaacggctgcg

SEQ ID NO: 482613 - DNA, 55 bp, Artificial
  Synthetic oligonucleotide
ttgggaaaagcagggtatgttactgacagaggaaggcagaaaattgtctctctaa

SEQ ID NO: 482614 - DNA, 58 bp, Artificial
  Synthetic oligonucleotide
ttgggaaaagtaacatttacagaggcttatagattattaatgagggatctatctagcc

SEQ ID NO: 482615 - DNA, 60 bp, Artificial
  Synthetic oligonucleotide
ttgggaaagtatgcaggaccttactggcaaagtctgtattcaacagcctatacgcatctc

SEQ ID NO: 482616 - DNA, 55 bp, Artificial
  Synthetic oligonucleotide
ttgggaaagtttggacagcaatcaggcgccatatatgtgggcaactatagggtgg

SEQ ID NO: 482617 - DNA, 60 bp, Artificial
  Synthetic oligonucleotide
ttgggaacaagagctacagcataggaggttggtcacctcgacaaggcatggggacgaatc

SEQ ID NO: 482618 - DNA, 55 bp, Artificial
  Synthetic oligonucleotide
ttgggaacacgaattggcgtaactgggatcagcgattgtcatcatatgacttagc

SEQ ID NO: 482619 - DNA, 55 bp, Artificial
  Synthetic oligonucleotide
ttgggaactcggaacgcggccaacggacaccctttgacgttgctacagactagag

SEQ ID NO: 482620 - DNA, 55 bp, Artificial
  Synthetic oligonucleotide
ttgggaactctcactatggcaggaactgctttggccgacgacgatcaaagtactt

SEQ ID NO: 482621 - DNA, 57 bp, Artificial
  Synthetic oligonucleotide
ttgggaagacgttttctgtatcagacgggattaatgacaaatgggaatggtgttgta

SEQ ID NO: 482622 - DNA, 54 bp, Artificial
  Synthetic oligonucleotide
ttgggaagcctgagtaccaatcgttgttccgtcaaaacaaagcccccgcaggta

SEQ ID NO: 482623 - DNA, 57 bp, Artificial
  Synthetic oligonucleotide
ttgggaaggtcatgtgtattagtgacgttactcgtgggattgggctaactcataggg

SEQ ID NO: 482624 - DNA, 52 bp, Artificial
  Synthetic oligonucleotide
ttgggaatacgggtatagggacacggccagttgtaatataatagtacaaact

SEQ ID NO: 482625 - DNA, 55 bp, Artificial
  Synthetic oligonucleotide
ttgggaatatttcttggtggacttggtattggcacaggaacaggtactggtgggc

SEQ ID NO: 482626 - DNA, 58 bp, Artificial
  Synthetic oligonucleotide
ttgggaatccagagtgtgacctcctcttaagtgtaccggaatggtcctacatagtgga

SEQ ID NO: 482627 - DNA, 60 bp, Artificial
  Synthetic oligonucleotide
ttgggaattatgctggtgccaatcctaacacagcactttccctgtacagccgttggcttg

SEQ ID NO: 482628 - DNA, 57 bp, Artificial
  Synthetic oligonucleotide
ttgggacaagaaataaaggcgacgagaggagatggtggaacagtacccacgcggatc

SEQ ID NO: 482629 - DNA, 51 bp, Artificial
  Synthetic oligonucleotide
ttgggacaatgcaatattgacaaagcggggattcgaagtatcgagatgcgc

SEQ ID NO: 482630 - DNA, 54 bp, Artificial
  Synthetic oligonucleotide
ttgggacacaaagtaccgtgtcaccagagagcctaaagcgtggcaagtgacacg

SEQ ID NO: 482631 - DNA, 54 bp, Artificial
  Synthetic oligonucleotide
ttgggacacaccttttccgttcctgaccctttgcgcgaattacagcgtttagga

SEQ ID NO: 482632 - DNA, 60 bp, Artificial
  Synthetic oligonucleotide
ttgggacaccctctcattctagacacctgcaccatcgaaggactggtctatggcaaccct

SEQ ID NO: 482633 - DNA, 50 bp, Artificial
  Synthetic oligonucleotide
ttgggacactccactgtaccgactactacaagagtgcaaaacacagcgcc

SEQ ID NO: 482634 - DNA, 59 bp, Artificial
  Synthetic oligonucleotide
ttgggaccacacatatacggacaaaaccttttgtccaatcatagagcgtctgacgagct

SEQ ID NO: 482635 - DNA, 58 bp, Artificial
  Synthetic oligonucleotide
ttgggacccaccctagctccagtgccggtttgaaagatgatctccttgaaaatttgca

SEQ ID NO: 482636 - DNA, 57 bp, Artificial
  Synthetic oligonucleotide
ttgggaccggccgatagtcttgaaggacaggggtggcgactccttgcgcctatcacg

SEQ ID NO: 482637 - DNA, 55 bp, Artificial
  Synthetic oligonucleotide
ttgggacctcagattcaaaagaagcctgtaccttcgtgagaactgccgactcaat

SEQ ID NO: 482638 - DNA, 55 bp, Artificial
  Synthetic oligonucleotide
ttgggacctctctactcaaaggtgtcacccaccggagagaaaagaatgaatcacc

SEQ ID NO: 482639 - DNA, 57 bp, Artificial
  Synthetic oligonucleotide
ttgggacctggattgcagaggaagattgttgggatgccccctttaatttgaactggc

SEQ ID NO: 482640 - DNA, 54 bp, Artificial
  Synthetic oligonucleotide
ttgggacgcaagttcttatatcaggctggcttgcaaaatggtgctactcgctct

SEQ ID NO: 482641 - DNA, 55 bp, Artificial
  Synthetic oligonucleotide
ttgggactgactctagggttagggcccatagaatgttggtgcgtctcggaaagtg

SEQ ID NO: 482642 - DNA, 54 bp, Artificial
  Synthetic oligonucleotide
ttgggacttcaaccccaacaagggtcaatggccagcagcaaaccaggtaggagt

SEQ ID NO: 482643 - DNA, 54 bp, Artificial
  Synthetic oligonucleotide
ttgggacttcaaccccatcaaggaccactggccgcaagccaaccaggtaggagt

SEQ ID NO: 482644 - DNA, 60 bp, Artificial
  Synthetic oligonucleotide
ttgggacttgagtgactctactgggcaacatgtcccaggtggttactgtttggagcaatg

SEQ ID NO: 482645 - DNA, 60 bp, Artificial
  Synthetic oligonucleotide
ttgggagacacaagccaggtcacgctctgcgaatcggccacacggaaaagggattgagcg

SEQ ID NO: 482646 - DNA, 60 bp, Artificial
  Synthetic oligonucleotide
ttgggagagcgttcagagtcatcgtctaccatagaagcttttgaaagacgtttggagatg

SEQ ID NO: 482647 - DNA, 57 bp, Artificial
  Synthetic oligonucleotide
ttgggagatgctgcgtacgaaaagctgaaaaatgggttagttcaaacacggattgaa

SEQ ID NO: 482648 - DNA, 60 bp, Artificial
  Synthetic oligonucleotide
ttgggagcaatcagaagatcagctatcagagtggcatccatcagtattctatcccaatag

SEQ ID NO: 482649 - DNA, 59 bp, Artificial
  Synthetic oligonucleotide
ttgggagcacgatggcgcgtagacatgtaacgccttctatggttgaaaagctacctaaa

SEQ ID NO: 482650 - DNA, 60 bp, Artificial
  Synthetic oligonucleotide
ttgggagcgcgcctgtaaggcacacgcattccaaacataagtaccactgtatttgcccaa

SEQ ID NO: 482651 - DNA, 54 bp, Artificial
  Synthetic oligonucleotide
ttgggagtaggaggtttctgcgtctggcgattcgacgtgagggtaaacctgggg

SEQ ID NO: 482652 - DNA, 60 bp, Artificial
  Synthetic oligonucleotide
ttgggagttagagtcagctgacgagttttcaggtgatgacgaatttattgagtaaatcgc

SEQ ID NO: 482653 - DNA, 56 bp, Artificial
  Synthetic oligonucleotide
ttgggataagtgaggaaatagtttttgcaatagatgttaaagcgtttagagggagc

SEQ ID NO: 482654 - DNA, 60 bp, Artificial
  Synthetic oligonucleotide
ttgggatcaagaaggcaattgacacgatgattcgatggagtcttctccttcgaacaccaa

SEQ ID NO: 482655 - DNA, 60 bp, Artificial
  Synthetic oligonucleotide
ttgggatccgaatgggtggactgaaacggacagtagcttctcagtgaggcaagacatcgt

SEQ ID NO: 482656 - DNA, 55 bp, Artificial
  Synthetic oligonucleotide
ttgggatccgactgagcactcgttctggaggatcccggactaccgggccgatgtg

SEQ ID NO: 482657 - DNA, 59 bp, Artificial
  Synthetic oligonucleotide
ttgggatgtcattaatttattagttcagagtgttgataaagtaccgcaaatactgactc

SEQ ID NO: 482658 - DNA, 60 bp, Artificial
  Synthetic oligonucleotide
ttgggattacaatctagctgtgtcttatgtgtgccatggattagtcaaactcactatagg

SEQ ID NO: 482659 - DNA, 60 bp, Artificial
  Synthetic oligonucleotide
ttgggattcgacatcattccgcacccatctctgcctgctgagcaaactttgctgatcgaa

SEQ ID NO: 482660 - DNA, 54 bp, Artificial
  Synthetic oligonucleotide
ttgggattctttctgctagacaatccttattgtgcaggattaggaggatttaga

SEQ ID NO: 482661 - DNA, 51 bp, Artificial
  Synthetic oligonucleotide
ttgggcaaacccattttcatatagtgcacacgaagacactaatgacgtaca

SEQ ID NO: 482662 - DNA, 55 bp, Artificial
  Synthetic oligonucleotide
ttgggcaaattgcagggtatgccattgtatttaataagccaagtgtgcctaatgc

SEQ ID NO: 482663 - DNA, 56 bp, Artificial
  Synthetic oligonucleotide
ttgggcaaatttggcaaaaaagtcgggaacgcgttgacatcgaagacagcgcaaaa

SEQ ID NO: 482664 - DNA, 54 bp, Artificial
  Synthetic oligonucleotide
ttgggcaagtcccgaaacccagtcgaagtaggtcctatatcaagttgaaacgtc

SEQ ID NO: 482665 - DNA, 50 bp, Artificial
  Synthetic oligonucleotide
ttgggcaatttactgatattcccacaccagtttattaacttaaggagcaa

SEQ ID NO: 482666 - DNA, 59 bp, Artificial
  Synthetic oligonucleotide
ttgggcacctctagtgaaccaagttcacagagaatctttcctgttcaacagggaatcaa

SEQ ID NO: 482667 - DNA, 58 bp, Artificial
  Synthetic oligonucleotide
ttgggcacgagacatgctttttatgtacatccgtcatcttcccttaaccaagttttca

SEQ ID NO: 482668 - DNA, 53 bp, Artificial
  Synthetic oligonucleotide
ttgggcacgggggtagctccgcataaacggagtcccggaacttttccagatac

SEQ ID NO: 482669 - DNA, 60 bp, Artificial
  Synthetic oligonucleotide
ttgggcactccaccgacggtaagtaacagtgatttcatatgtgttgggtggtcgagcaca

SEQ ID NO: 482670 - DNA, 55 bp, Artificial
  Synthetic oligonucleotide
ttgggcaggggatatccgcatggagcaagaccttctgtgctttgttcggcccgtg

SEQ ID NO: 482671 - DNA, 59 bp, Artificial
  Synthetic oligonucleotide
ttgggcagtggataacagtcaaggagtatgaacgtcagggcgttcacctcaattgtcca

SEQ ID NO: 482672 - DNA, 55 bp, Artificial
  Synthetic oligonucleotide
ttgggcatatgcattttaggcaggcagcttttcctcgattgctattgtcgtgcgt

SEQ ID NO: 482673 - DNA, 59 bp, Artificial
  Synthetic oligonucleotide
ttgggcatcgagattgcggactactgcattcgtcaagaggatggaatgttcacagattg

SEQ ID NO: 482674 - DNA, 60 bp, Artificial
  Synthetic oligonucleotide
ttgggcatcgtcatgaacctacagatacaaccaataggcgatggcaataattcaagcagg

SEQ ID NO: 482675 - DNA, 55 bp, Artificial
  Synthetic oligonucleotide
ttgggccataagaaccagaagcggaggaaatactaatcaacagaaggcatccgca

SEQ ID NO: 482676 - DNA, 60 bp, Artificial
  Synthetic oligonucleotide
ttgggccatggacatcgttatatttgattgggccctttgtaacccgacttgtgatgctga

SEQ ID NO: 482677 - DNA, 58 bp, Artificial
  Synthetic oligonucleotide
ttgggcccatggaaggaggtggtataatctttaaacactggtgtacatctacctgtca

SEQ ID NO: 482678 - DNA, 59 bp, Artificial
  Synthetic oligonucleotide
ttgggcccccatgaattctttgaagtgcttgaggtaatgggggtcgacgtcatcaatga

SEQ ID NO: 482679 - DNA, 58 bp, Artificial
  Synthetic oligonucleotide
ttgggccctacaatcatgaatagtttaatccgtatacatgagtcatttactgttttac

SEQ ID NO: 482680 - DNA, 60 bp, Artificial
  Synthetic oligonucleotide
ttgggccgatgttgtgtgtgctgttagcgaagcacttttactcgtaacaccggagtgtca

SEQ ID NO: 482681 - DNA, 59 bp, Artificial
  Synthetic oligonucleotide
ttgggccgttcctatcgtacttctggaagcccatgattctccaggcccaagctcaattg

SEQ ID NO: 482682 - DNA, 57 bp, Artificial
  Synthetic oligonucleotide
ttgggcctaaaacctgtagcaacacgtggcacggaacattccccatcaacgcgtaca

SEQ ID NO: 482683 - DNA, 50 bp, Artificial
  Synthetic oligonucleotide
ttgggcctagaacctgtagcaatacgtggcatgggacatttcccatcaac

SEQ ID NO: 482684 - DNA, 58 bp, Artificial
  Synthetic oligonucleotide
ttgggcctcgaacttcagtgatgagggttttatgaccgacactttggcaacgtgcctg

SEQ ID NO: 482685 - DNA, 55 bp, Artificial
  Synthetic oligonucleotide
ttgggcctcgtcctccctgccttgaaggtgctcaccactggcttaccagtcccca

SEQ ID NO: 482686 - DNA, 52 bp, Artificial
  Synthetic oligonucleotide
ttgggcctgggcccaagttatcgatgtgacaggacgacgtctgctttaatag

SEQ ID NO: 482687 - DNA, 59 bp, Artificial
  Synthetic oligonucleotide
ttgggcgagagactgctatctctcggggggaacacccagccatgcgcgtattcccgtta

SEQ ID NO: 482688 - DNA, 59 bp, Artificial
  Synthetic oligonucleotide
ttgggcgcgtgtgttcggaacaataacttattacatgcgtgatattaaacacgagatac

SEQ ID NO: 482689 - DNA, 53 bp, Artificial
  Synthetic oligonucleotide
ttgggcgcgtttaagaagtacaccgccaattttaacgcctataaggagcttta

SEQ ID NO: 482690 - DNA, 55 bp, Artificial
  Synthetic oligonucleotide
ttgggcgtgcctacctacacctggggtagtaatgatacggacgtcttcgtcctta

SEQ ID NO: 482691 - DNA, 54 bp, Artificial
  Synthetic oligonucleotide
ttgggcgtgcttaacgccgaggttttttagaggggctctgctccgactctggtt

SEQ ID NO: 482692 - DNA, 55 bp, Artificial
  Synthetic oligonucleotide
ttgggcgttgttattgcgttacttttgtttgcgcaagtttattttgcgacgcgac

SEQ ID NO: 482693 - DNA, 52 bp, Artificial
  Synthetic oligonucleotide
ttgggctaagagtttggtccctatcctcgaaacagcggggataaaactaaac

SEQ ID NO: 482694 - DNA, 55 bp, Artificial
  Synthetic oligonucleotide
ttgggctactacactcccgacagtggtggatggaagaaggtggccctcaacattc

SEQ ID NO: 482695 - DNA, 57 bp, Artificial
  Synthetic oligonucleotide
ttgggctagtcaacgaagtctcttttgacactggtaaaactagtggtgagatttcac

SEQ ID NO: 482696 - DNA, 59 bp, Artificial
  Synthetic oligonucleotide
ttgggctatagcttttgcaaattatccgggacggattattcatcattacccctctgata

SEQ ID NO: 482697 - DNA, 55 bp, Artificial
  Synthetic oligonucleotide
ttgggctattgatccgtcgacgttgggcgttacggggcaagggtggactgcgacg

SEQ ID NO: 482698 - DNA, 60 bp, Artificial
  Synthetic oligonucleotide
ttgggctcaagccagtcctggacggtttcgttgcagaggaggtcaatgtctgtggattcg

SEQ ID NO: 482699 - DNA, 60 bp, Artificial
  Synthetic oligonucleotide
ttgggctccttactttttcatggatgcttctccacgagattgcgtttcgtctactgatta

SEQ ID NO: 482700 - DNA, 57 bp, Artificial
  Synthetic oligonucleotide
ttgggctgacggatcaacttgttgggcctaataatctgggtctttgttgggcctatc

SEQ ID NO: 482701 - DNA, 60 bp, Artificial
  Synthetic oligonucleotide
ttgggctgagatctagatgtccacacagataattgtgtggtcctaacgacctagcccaca

SEQ ID NO: 482702 - DNA, 55 bp, Artificial
  Synthetic oligonucleotide
ttgggctgagggggaatgctaccgagcgtgtttttacgtggagttaatacgcgga

SEQ ID NO: 482703 - DNA, 54 bp, Artificial
  Synthetic oligonucleotide
ttgggcttcatttcaaggtaggagacacaccggaaacaggaacccctagtacca

SEQ ID NO: 482704 - DNA, 58 bp, Artificial
  Synthetic oligonucleotide
ttgggctttgcctccgcgtgcaacgacttttcagtacgtttgttgcgcgatacaccat

SEQ ID NO: 482705 - DNA, 55 bp, Artificial
  Synthetic oligonucleotide
ttgggctttggatcgtatttgaattgggccttttagattatatgaagttgggcga

SEQ ID NO: 482706 - DNA, 55 bp, Artificial
  Synthetic oligonucleotide
ttgggcttttacacaaagccccttgctactgggcttaaattaaataaacatcata

SEQ ID NO: 482707 - DNA, 60 bp, Artificial
  Synthetic oligonucleotide
ttgggcttttgctggagagtctgcaaaagtcacaatatgcaaacgagccatggacattag

SEQ ID NO: 482708 - DNA, 56 bp, Artificial
  Synthetic oligonucleotide
ttggggaaaccaggtcgaagaatctgttattcgtgcagttgtatttgccttcgaat

SEQ ID NO: 482709 - DNA, 57 bp, Artificial
  Synthetic oligonucleotide
ttggggaagccgcggtattctttgcgggccttgcgccccttaggatgcatcccgatg

SEQ ID NO: 482710 - DNA, 55 bp, Artificial
  Synthetic oligonucleotide
ttggggaagttaccgatgaggtacgcaagattcttgaggacacgagtgcaggtgt

SEQ ID NO: 482711 - DNA, 56 bp, Artificial
  Synthetic oligonucleotide
ttggggacatggtgagttacccgactctacgttagttcaaccaacattagatggtc

SEQ ID NO: 482712 - DNA, 60 bp, Artificial
  Synthetic oligonucleotide
ttggggacctagtgaagtgaatgactcgactgtggtgcaacctgtattggatggaccgta

SEQ ID NO: 482713 - DNA, 55 bp, Artificial
  Synthetic oligonucleotide
ttggggagaagtacttgacggtgcgacatctgcttgcagagatgacaagggaacc

SEQ ID NO: 482714 - DNA, 55 bp, Artificial
  Synthetic oligonucleotide
ttggggagctattcgtaacataccgagaaggataagacagggactagaaagggct

SEQ ID NO: 482715 - DNA, 60 bp, Artificial
  Synthetic oligonucleotide
ttggggagttcatcactctggatcggctaacgagcagaccaaactctatggaagtggaaa

SEQ ID NO: 482716 - DNA, 57 bp, Artificial
  Synthetic oligonucleotide
ttggggataataagagccttgttagtaggaaatataagtataggattgcaagaatct

SEQ ID NO: 482717 - DNA, 55 bp, Artificial
  Synthetic oligonucleotide
ttggggatacaccaaggaatgaggatggttccagtagcagcaactgcagggatcc

SEQ ID NO: 482718 - DNA, 55 bp, Artificial
  Synthetic oligonucleotide
ttggggatagtagaggatcccatagacaggcttatcagagtagacaatagctttt

SEQ ID NO: 482719 - DNA, 55 bp, Artificial
  Synthetic oligonucleotide
ttggggatgcggagcagattgccttttcttcgcgagatgcctcatttgacatgcg

SEQ ID NO: 482720 - DNA, 53 bp, Artificial
  Synthetic oligonucleotide
ttggggattattgccctagtgggtcccacaaacgccggcaaagggaatcggta

SEQ ID NO: 482721 - DNA, 53 bp, Artificial
  Synthetic oligonucleotide
ttggggcaaccctattaccaacacctcaagacggccttaggcttaactgaaaa

SEQ ID NO: 482722 - DNA, 56 bp, Artificial
  Synthetic oligonucleotide
ttggggcactttaccccaggaacatattgtgttgaaactcaaacaatgtcttagga

SEQ ID NO: 482723 - DNA, 54 bp, Artificial
  Synthetic oligonucleotide
ttggggccaagggagacagcggacgacccattctggataaccagggacgggtgg

SEQ ID NO: 482724 - DNA, 59 bp, Artificial
  Synthetic oligonucleotide
ttggggccctttccttcaatattgtgagtgccgaagctttggatcctgaattgagtgcc

SEQ ID NO: 482725 - DNA, 55 bp, Artificial
  Synthetic oligonucleotide
ttggggccttatgtggtgtgtgccactgaggtacccaggggcatttaggtttttc

SEQ ID NO: 482726 - DNA, 55 bp, Artificial
  Synthetic oligonucleotide
ttggggcggcactaccgaacgagcacggcgacggatcaagcgcggacttaaaggg

SEQ ID NO: 482727 - DNA, 55 bp, Artificial
  Synthetic oligonucleotide
ttggggcggtcgtaactcaactgactatactagatatgtgtcagagttgcatacc

SEQ ID NO: 482728 - DNA, 59 bp, Artificial
  Synthetic oligonucleotide
ttggggctgactctgatggtttcaagcatattccccccgtctagtaaacttgcacctgc

SEQ ID NO: 482729 - DNA, 57 bp, Artificial
  Synthetic oligonucleotide
ttggggctgtaaccccggagattgccctggtgttggcacaggttgtactgcctgtgg

SEQ ID NO: 482730 - DNA, 53 bp, Artificial
  Synthetic oligonucleotide
ttgggggattcaattaaacaagcggtaatcttaaatgtggcgggaactttaga

SEQ ID NO: 482731 - DNA, 55 bp, Artificial
  Synthetic oligonucleotide
ttgggggccaagtctgtacaacatcttgagtccctttatacctctattaccaatt

SEQ ID NO: 482732 - DNA, 53 bp, Artificial
  Synthetic oligonucleotide
ttgggggcctacactggcacttacttgtttgaccaccttgctccgttgtcaga

SEQ ID NO: 482733 - DNA, 60 bp, Artificial
  Synthetic oligonucleotide
ttgggggcgacactccaccatagatcactcccctgtgaggaactactgtcttcacgcaga

SEQ ID NO: 482734 - DNA, 54 bp, Artificial
  Synthetic oligonucleotide
ttgggggctaactccctaattacactaagagcctccgacttacttccgctgtta

SEQ ID NO: 482735 - DNA, 51 bp, Artificial
  Synthetic oligonucleotide
ttggggggaaaaagagcccttccgtggcattttggtaaataagagtgttcc

SEQ ID NO: 482736 - DNA, 55 bp, Artificial
  Synthetic oligonucleotide
ttggggggatgggtagccgctcaactcgctcccccaagcgctgcttcggctttcg

SEQ ID NO: 482737 - DNA, 57 bp, Artificial
  Synthetic oligonucleotide
ttggggggctgtggtgtcgtggtttactcctgcactggtggcctctatttgtaccgc

SEQ ID NO: 482738 - DNA, 52 bp, Artificial
  Synthetic oligonucleotide
ttgggggtaaagtaccgggagtggtaggagaagggctgggttatggtatggc

SEQ ID NO: 482739 - DNA, 53 bp, Artificial
  Synthetic oligonucleotide
ttgggggtttcattttcggatgtcaaaatggaaatgttcgttgtactttctgt

SEQ ID NO: 482740 - DNA, 56 bp, Artificial
  Synthetic oligonucleotide
ttggggtactttaccgcaagaacatattgtattgaaactcaagcaatgttttcgaa

SEQ ID NO: 482741 - DNA, 60 bp, Artificial
  Synthetic oligonucleotide
ttggggtatcttgaaatataggggattgttgattgtccaggtatatacgccattctctgc

SEQ ID NO: 482742 - DNA, 57 bp, Artificial
  Synthetic oligonucleotide
ttggggtatggagtcttatatatactatagagaacttcatagcggcctttcgtttaa

SEQ ID NO: 482743 - DNA, 52 bp, Artificial
  Synthetic oligonucleotide
ttggggtcaggagctaaagaatagtgctattagcttgcttaataccactgca

SEQ ID NO: 482744 - DNA, 57 bp, Artificial
  Synthetic oligonucleotide
ttggggtcatggagagataaatgattcgactacagtagaaccaattttagacggtcc

SEQ ID NO: 482745 - DNA, 59 bp, Artificial
  Synthetic oligonucleotide
ttggggtcatgtaagtatgcacccgtgatggtcgttcaaacattgtccaaatggttgaa

SEQ ID NO: 482746 - DNA, 58 bp, Artificial
  Synthetic oligonucleotide
ttggggtggaaactggtgctacagcttgggtgtacacaatcgaagagacgattgttcg

SEQ ID NO: 482747 - DNA, 52 bp, Artificial
  Synthetic oligonucleotide
ttggggttacagcctgatagggtgctgcagaggcccacgaataggctagtat

SEQ ID NO: 482748 - DNA, 55 bp, Artificial
  Synthetic oligonucleotide
ttggggttgcaggtgggtcccactttacaggaaaaggataactggactggatcaa

SEQ ID NO: 482749 - DNA, 50 bp, Artificial
  Synthetic oligonucleotide
ttggggtttaaagtggaccccaagaaaaccgttaacaccagtgccccatc

SEQ ID NO: 482750 - DNA, 54 bp, Artificial
  Synthetic oligonucleotide
ttgggtaacgtcccaagcttgggacaatctacaaacgttcgccctgctaaacgc

SEQ ID NO: 482751 - DNA, 56 bp, Artificial
  Synthetic oligonucleotide
ttgggtaagagggtgtgtattaaatccatgggtattgatggtaaggtttggatgga

SEQ ID NO: 482752 - DNA, 57 bp, Artificial
  Synthetic oligonucleotide
ttgggtaaggtcatcgataccctaacgtgcggcttcgccgacctcatggggtacata

SEQ ID NO: 482753 - DNA, 56 bp, Artificial
  Synthetic oligonucleotide
ttgggtaatagcctgttttgcaggtgtacctcctgtggatgaatctgcaactcctc

SEQ ID NO: 482754 - DNA, 50 bp, Artificial
  Synthetic oligonucleotide
ttgggtaccgttataaagggatgtggcttgccatgttagatgaaggctcg

SEQ ID NO: 482755 - DNA, 58 bp, Artificial
  Synthetic oligonucleotide
ttgggtacttggaaggaactagaactctcttggcatcacggaatctccacacaaattc

SEQ ID NO: 482756 - DNA, 58 bp, Artificial
  Synthetic oligonucleotide
ttgggtagacctagattttcagaaactgctgacaatagaatacgtgtaagtagattag

SEQ ID NO: 482757 - DNA, 60 bp, Artificial
  Synthetic oligonucleotide
ttgggtatcatgtactaaaagctggcacagtgaatcagctcattcagttcgcatcaaatg

SEQ ID NO: 482758 - DNA, 60 bp, Artificial
  Synthetic oligonucleotide
ttgggtatggggtatggccacactacctaactccgcaggatgcaacggctatagacaagc

SEQ ID NO: 482759 - DNA, 54 bp, Artificial
  Synthetic oligonucleotide
ttgggtcacaactctgtggtccaggccgaaccggatccgaaatcggatgcagct

SEQ ID NO: 482760 - DNA, 52 bp, Artificial
  Synthetic oligonucleotide
ttgggtcaggttcggaggtgtattaagaaccgttcgagttaagttcttcgac

SEQ ID NO: 482761 - DNA, 58 bp, Artificial
  Synthetic oligonucleotide
ttgggtcagtatccttaggattggtagtccttaatattctcctacatatagttagcat

SEQ ID NO: 482762 - DNA, 57 bp, Artificial
  Synthetic oligonucleotide
ttgggtcatcaaaatataaccggagattcacacctgaaatagcggccagacctaaag

SEQ ID NO: 482763 - DNA, 57 bp, Artificial
  Synthetic oligonucleotide
ttgggtccacttgaagaaggtggcctagtcctcaaacaatggtgtacaacaacatgt

SEQ ID NO: 482764 - DNA, 60 bp, Artificial
  Synthetic oligonucleotide
ttgggtccgggcaatcgacgtcggctacatgtgtgaggacactatcacgtacgaatgtcc

SEQ ID NO: 482765 - DNA, 59 bp, Artificial
  Synthetic oligonucleotide
ttgggtcctggattgagcaatcgtctaatgggcttgggcttctcaacagaccaaaagtc

SEQ ID NO: 482766 - DNA, 57 bp, Artificial
  Synthetic oligonucleotide
ttgggtctagttcgcgtccttggagtgaacataagagtgctgttaaaaaggctgact

SEQ ID NO: 482767 - DNA, 60 bp, Artificial
  Synthetic oligonucleotide
ttgggtctcagtgatgagcattataatggatacgatctgtttagagagataggatctctg

SEQ ID NO: 482768 - DNA, 54 bp, Artificial
  Synthetic oligonucleotide
ttgggtgaccgtttgcccggtgctgaacagatgttcgcagatgctttgggtgta

SEQ ID NO: 482769 - DNA, 59 bp, Artificial
  Synthetic oligonucleotide
ttgggtgactccatctactgtccacggcatgtgttaggtaagtttagtggtgaccaatg

SEQ ID NO: 482770 - DNA, 58 bp, Artificial
  Synthetic oligonucleotide
ttgggtgatatgcaaacgcatacctacctttatactcctgatttttcagaactaagga

SEQ ID NO: 482771 - DNA, 60 bp, Artificial
  Synthetic oligonucleotide
ttgggtgcaactgggtgccttcatacgttcgacgaactattcggtgctaggatccacagc

SEQ ID NO: 482772 - DNA, 58 bp, Artificial
  Synthetic oligonucleotide
ttgggtgcccaacggcgcccccgtgtcagccctagagaatactagcaatcccactgcc

SEQ ID NO: 482773 - DNA, 53 bp, Artificial
  Synthetic oligonucleotide
ttgggtgcgatgagagatggggggttgagcctagccggcgatgttcctgttct

SEQ ID NO: 482774 - DNA, 55 bp, Artificial
  Synthetic oligonucleotide
ttgggtgcgcttaaatttggaattaaggttctgggtgacaaaattgatgtcccac

SEQ ID NO: 482775 - DNA, 58 bp, Artificial
  Synthetic oligonucleotide
ttgggtgctctagccacctccggtatgggacagcaattatttatgagcggggtgaact

SEQ ID NO: 482776 - DNA, 57 bp, Artificial
  Synthetic oligonucleotide
ttgggtggattaccacagtcttttgtcgcccacaaaacgctttggttatcatcgcta

SEQ ID NO: 482777 - DNA, 60 bp, Artificial
  Synthetic oligonucleotide
ttgggtggtgtcttcattgttgacatcactgctgttgcgggataccataagaagatgatt

SEQ ID NO: 482778 - DNA, 55 bp, Artificial
  Synthetic oligonucleotide
ttgggtggtgttgtgatttcgtcataacagtgactgcaaacttcaatcaggagac

SEQ ID NO: 482779 - DNA, 56 bp, Artificial
  Synthetic oligonucleotide
ttgggttaaaaaatgcggagacactctgagaagagtggagccctctttttggacca

SEQ ID NO: 482780 - DNA, 50 bp, Artificial
  Synthetic oligonucleotide
ttgggttaacaagcagggccacttgggcaaagaacatccaagcagcaata

SEQ ID NO: 482781 - DNA, 51 bp, Artificial
  Synthetic oligonucleotide
ttgggttagattgtggtccctacacccttgcggccctcagtatataatatt

SEQ ID NO: 482782 - DNA, 60 bp, Artificial
  Synthetic oligonucleotide
ttgggttggtcgctccctgcaaacccagcagtagacctggcagatgaggctggacattcc

SEQ ID NO: 482783 - DNA, 50 bp, Artificial
  Synthetic oligonucleotide
ttgggttggtgttaacacactcgcaggtcgcaatatgtcaagaccactcc

SEQ ID NO: 482784 - DNA, 55 bp, Artificial
  Synthetic oligonucleotide
ttgggttgtagaaccaatgatcaggagcgccagtgtctaggatggcaccttccca

SEQ ID NO: 482785 - DNA, 58 bp, Artificial
  Synthetic oligonucleotide
ttgggtttccgacatcctactcgggcctctcgaggccctgacaagtatttgtgcggca

SEQ ID NO: 482786 - DNA, 52 bp, Artificial
  Synthetic oligonucleotide
ttgggttttaagatgaggccaagttgcctcatattcctctctagtaaagata

SEQ ID NO: 482787 - DNA, 54 bp, Artificial
  Synthetic oligonucleotide
ttgggttttattgcaaaacacgtgcttatccaccggcggccacaactcgagtaa

SEQ ID NO: 482788 - DNA, 53 bp, Artificial
  Synthetic oligonucleotide
ttggtaaaaggtgcccaactcagaatgcctacaaggtgagaggcaacgcaacc

SEQ ID NO: 482789 - DNA, 59 bp, Artificial
  Synthetic oligonucleotide
ttggtaaacttggcagaaacattacagacgtaaacaacagagtagatgctattccacca

SEQ ID NO: 482790 - DNA, 51 bp, Artificial
  Synthetic oligonucleotide
ttggtaaagaatcgggaaatccgtgtttctagtgcagagaagacccagccc

SEQ ID NO: 482791 - DNA, 55 bp, Artificial
  Synthetic oligonucleotide
ttggtaaattacgacttttcatatcgtttatggcagtcaaggcgtggacttaccg

SEQ ID NO: 482792 - DNA, 51 bp, Artificial
  Synthetic oligonucleotide
ttggtaacactactgggactctataaagcatatctaatagatcatacgcgt

SEQ ID NO: 482793 - DNA, 57 bp, Artificial
  Synthetic oligonucleotide
ttggtaagaagactaaatgcagttctgctaccaaatgtccacacactgttcgatatg

SEQ ID NO: 482794 - DNA, 54 bp, Artificial
  Synthetic oligonucleotide
ttggtaagagaagcttttgccggtactgtttctcagaattacccaacgttacgc

SEQ ID NO: 482795 - DNA, 60 bp, Artificial
  Synthetic oligonucleotide
ttggtaagatttggatggatgagaacatcaagctgaagaaccacacgaacagtgtcatgt

SEQ ID NO: 482796 - DNA, 60 bp, Artificial
  Synthetic oligonucleotide
ttggtaataccattgtcaccatggctgaatttgcctggtgctacgacaccgaccaattcg

SEQ ID NO: 482797 - DNA, 56 bp, Artificial
  Synthetic oligonucleotide
ttggtaatcaattacctttacgtatctgtgttgacacactcagcggaggtttaacc

SEQ ID NO: 482798 - DNA, 60 bp, Artificial
  Synthetic oligonucleotide
ttggtaatcatcgctattatcgtagccataatatgtctaactggagccgctatatacctc

SEQ ID NO: 482799 - DNA, 56 bp, Artificial
  Synthetic oligonucleotide
ttggtaatgatagtattggtaattatagtacatacaggttaataaattgtaatacc

SEQ ID NO: 482800 - DNA, 60 bp, Artificial
  Synthetic oligonucleotide
ttggtacaagtgtttttaacaaacagcaacagtacagagcattttgatgcatgtaagtgg

SEQ ID NO: 482801 - DNA, 55 bp, Artificial
  Synthetic oligonucleotide
ttggtacaggaaggggttctggtggttcattaggatataggccattgggagaggg

SEQ ID NO: 482802 - DNA, 56 bp, Artificial
  Synthetic oligonucleotide
ttggtacatccgggaaaactcttagctgccatgaggtttgctgagtgtgacgattg

SEQ ID NO: 482803 - DNA, 51 bp, Artificial
  Synthetic oligonucleotide
ttggtacatggtagtcccggtacgggcaaatcagtggccactaatctgatc

SEQ ID NO: 482804 - DNA, 52 bp, Artificial
  Synthetic oligonucleotide
ttggtaccaaaaataactactagatccaaagtaaacgggcaaagtggaagaa

SEQ ID NO: 482805 - DNA, 59 bp, Artificial
  Synthetic oligonucleotide
ttggtacctagaacatgcaaagaccggcgaaactagtgtccccaagtgctggcttgtca

SEQ ID NO: 482806 - DNA, 60 bp, Artificial
  Synthetic oligonucleotide
ttggtacctccagcatagtaaatcaaatgagacaagcacgcctaagtgctggcttgtaag

SEQ ID NO: 482807 - DNA, 55 bp, Artificial
  Synthetic oligonucleotide
ttggtacgacaaccatacagcatgcggaggctaagcagaatattgtgacggcagc

SEQ ID NO: 482808 - DNA, 55 bp, Artificial
  Synthetic oligonucleotide
ttggtacgctgacatcaagatcgagacggccctcgtccggaaaggaggaccgttc

SEQ ID NO: 482809 - DNA, 59 bp, Artificial
  Synthetic oligonucleotide
ttggtacggcgcggagggctgccatttgttaactggcggctcagcacgaaatgccgtgg

SEQ ID NO: 482810 - DNA, 60 bp, Artificial
  Synthetic oligonucleotide
ttggtactattatacaagaggaggtgaaacatcggtgcgctggattaatctcatttctat

SEQ ID NO: 482811 - DNA, 57 bp, Artificial
  Synthetic oligonucleotide
ttggtagaagtatttgctacaggactgcagcacccacacctgttctaattgaaggtc

SEQ ID NO: 482812 - DNA, 60 bp, Artificial
  Synthetic oligonucleotide
ttggtagaatacctgaccagaagacgtgtatggatgccagagaacgcagttatcggaggc

SEQ ID NO: 482813 - DNA, 60 bp, Artificial
  Synthetic oligonucleotide
ttggtagagacacccgtgccacactatatgctggcaaatgctccttagatggctgtagat

SEQ ID NO: 482814 - DNA, 59 bp, Artificial
  Synthetic oligonucleotide
ttggtagaggccagccattgggcgttggcgttagtggacatcctttatataatagattg

SEQ ID NO: 482815 - DNA, 59 bp, Artificial
  Synthetic oligonucleotide
ttggtagagggctccaattaatgggtagcattaataaggtagtgcatgtgagttgtttc

SEQ ID NO: 482816 - DNA, 57 bp, Artificial
  Synthetic oligonucleotide
ttggtaggatttccagtgaaacctcaagtaccacttagaccaatgagttacaagcta

SEQ ID NO: 482817 - DNA, 54 bp, Artificial
  Synthetic oligonucleotide
ttggtaggctactgcaggactatgttccaggacgcagaggagaaaccacggaca

SEQ ID NO: 482818 - DNA, 58 bp, Artificial
  Synthetic oligonucleotide
ttggtagggaatataagcataggattacaagaatctttgtgggaactggcttcagaaa

SEQ ID NO: 482819 - DNA, 54 bp, Artificial
  Synthetic oligonucleotide
ttggtaggggtagacccttttaaactgcttcaaaccagtcaggtatacagccta

SEQ ID NO: 482820 - DNA, 60 bp, Artificial
  Synthetic oligonucleotide
ttggtaggtggttggaactacccactcctgaacaaagcttgcaagaacaatgcaagtgca

SEQ ID NO: 482821 - DNA, 57 bp, Artificial
  Synthetic oligonucleotide
ttggtagtattgctctaaactatctgaagtcactaaacgcttgtgcggtgaacgggt

SEQ ID NO: 482822 - DNA, 50 bp, Artificial
  Synthetic oligonucleotide
ttggtagtccttacgaaattgaagtacacgacgacggtgtagtacacgac

SEQ ID NO: 482823 - DNA, 52 bp, Artificial
  Synthetic oligonucleotide
ttggtataaacctggaacactgaatgaaaaactggaaagtgtgtcccgcctc

SEQ ID NO: 482824 - DNA, 60 bp, Artificial
  Synthetic oligonucleotide
ttggtataaatgcgagtgtgatgtgtccgcattgtatcggagaattaatcagtacctgat

SEQ ID NO: 482825 - DNA, 58 bp, Artificial
  Synthetic oligonucleotide
ttggtatacaattggagtttatgtgatagggcttacacttcctatcatccttaaagcc

SEQ ID NO: 482826 - DNA, 60 bp, Artificial
  Synthetic oligonucleotide
ttggtatccgcagacctgggacgttgattctgtgaacgatccagttctcagagccgactt

SEQ ID NO: 482827 - DNA, 57 bp, Artificial
  Synthetic oligonucleotide
ttggtatctagtgaagctacattatttaataggccgtactggttacagagagctcaa

SEQ ID NO: 482828 - DNA, 57 bp, Artificial
  Synthetic oligonucleotide
ttggtatgatttaccgtacatcttgagagttctgattaaggctggccttattttaat

SEQ ID NO: 482829 - DNA, 58 bp, Artificial
  Synthetic oligonucleotide
ttggtattggatgtctaataactaatccagacacgtttgaaacagttgcgacaacgga

SEQ ID NO: 482830 - DNA, 59 bp, Artificial
  Synthetic oligonucleotide
ttggtattttatggacccagcgatacaggcaaatcgctgttttgcatgagtttaataaa

SEQ ID NO: 482831 - DNA, 57 bp, Artificial
  Synthetic oligonucleotide
ttggtatttttattttcggacaccgaggttccttctgcgtgcgctatctgatagtct

SEQ ID NO: 482832 - DNA, 56 bp, Artificial
  Synthetic oligonucleotide
ttggtcaaaacaattcagagaggaggcaggtccaaattggaaaagtccatataagg

SEQ ID NO: 482833 - DNA, 57 bp, Artificial
  Synthetic oligonucleotide
ttggtcaagcacttctgtttccccggtatgcagggaataggccctccccagggctga

SEQ ID NO: 482834 - DNA, 58 bp, Artificial
  Synthetic oligonucleotide
ttggtcaatcgtaaccctaccctggttcagaggccttctggagagagctagagatttc

SEQ ID NO: 482835 - DNA, 58 bp, Artificial
  Synthetic oligonucleotide
ttggtcaatgggtacctaatgagagaatatgcctggtaatcttggtacccttatatac

SEQ ID NO: 482836 - DNA, 57 bp, Artificial
  Synthetic oligonucleotide
ttggtcacatgggtaaggttatttgtctttctgatgttactaggggtattgggctga

SEQ ID NO: 482837 - DNA, 57 bp, Artificial
  Synthetic oligonucleotide
ttggtcacgcacggttgaacccaaatcgtataatattagaactcttcgtgtcgaaga

SEQ ID NO: 482838 - DNA, 57 bp, Artificial
  Synthetic oligonucleotide
ttggtcactcaggtaatcagctgctctttatgtttaatgttagtttgttaagtttaa

SEQ ID NO: 482839 - DNA, 60 bp, Artificial
  Synthetic oligonucleotide
ttggtcacttgtatgagactttccacgcgaatcctgggacgataactggatcagccgtgg

SEQ ID NO: 482840 - DNA, 60 bp, Artificial
  Synthetic oligonucleotide
ttggtcagccacttacacaccacaacaagttatacatcgcaatattgtgaagttgagtca

SEQ ID NO: 482841 - DNA, 60 bp, Artificial
  Synthetic oligonucleotide
ttggtcaggatatagcggaagtttcgttcaacatcctgagctaacagggctagactgtat

SEQ ID NO: 482842 - DNA, 58 bp, Artificial
  Synthetic oligonucleotide
ttggtcaggttctcctagcgtgttagggtggaatcaaacaatccaattgatagaccaa

SEQ ID NO: 482843 - DNA, 55 bp, Artificial
  Synthetic oligonucleotide
ttggtcatcaaacaaaacttaggacgaaaggtcaatcaccatgtccgctcaaagg

SEQ ID NO: 482844 - DNA, 58 bp, Artificial
  Synthetic oligonucleotide
ttggtcattctggtactctgctttgtgtatccgatattacccgtggtaatgggcttac

SEQ ID NO: 482845 - DNA, 55 bp, Artificial
  Synthetic oligonucleotide
ttggtccaagttctaatcacaagggttcatcatccagcagagactcagctagttg

SEQ ID NO: 482846 - DNA, 60 bp, Artificial
  Synthetic oligonucleotide
ttggtccaatttcctatgttcgagtagacgaggatatgtggagtggggatgtgaaccagc

SEQ ID NO: 482847 - DNA, 56 bp, Artificial
  Synthetic oligonucleotide
ttggtccacgacaacatgctaccacacctaaacagcgttgggccccgcgtaagatt

SEQ ID NO: 482848 - DNA, 54 bp, Artificial
  Synthetic oligonucleotide
ttggtcccgtctactttcgaaatcaagttaaaatacgccgaagagttgacataa

SEQ ID NO: 482849 - DNA, 54 bp, Artificial
  Synthetic oligonucleotide
ttggtccctatcctcgaaacagcggggataaaactaaacgacaggcagtggtcc

SEQ ID NO: 482850 - DNA, 56 bp, Artificial
  Synthetic oligonucleotide
ttggtccgaaaaacaaggttcctcccagtggcaggcggaacaagcagtgtatacat

SEQ ID NO: 482851 - DNA, 55 bp, Artificial
  Synthetic oligonucleotide
ttggtccgctgacgtgtatgcgcctcactggtgagcccggcacgtacgacgacaa

SEQ ID NO: 482852 - DNA, 60 bp, Artificial
  Synthetic oligonucleotide
ttggtcgcacgtcaagggtcgagaattcgactcctctcacgtgtatcaccgccaggctac

SEQ ID NO: 482853 - DNA, 58 bp, Artificial
  Synthetic oligonucleotide
ttggtcgctccactaaaccccatagtagacctggcagatgaggctagaaataccccac

SEQ ID NO: 482854 - DNA, 60 bp, Artificial
  Synthetic oligonucleotide
ttggtcgctccgccattacccatggtagacctggcagatgaggctagaaattccccactg

SEQ ID NO: 482855 - DNA, 60 bp, Artificial
  Synthetic oligonucleotide
ttggtcggagcacatgagtgtcctattctaatgtgaatttggaagatgatattgactgtg

SEQ ID NO: 482856 - DNA, 60 bp, Artificial
  Synthetic oligonucleotide
ttggtcgtcagcgctgtcctgggcacgcctgttgggggctgtccgacgctctacggtctc

SEQ ID NO: 482857 - DNA, 57 bp, Artificial
  Synthetic oligonucleotide
ttggtcgttagcgctgtcctgggcactcctgttgggggccgttcgacactccacgga

SEQ ID NO: 482858 - DNA, 51 bp, Artificial
  Synthetic oligonucleotide
ttggtcgttatattatgttaatacacccagaccagctacatatgttgccct

SEQ ID NO: 482859 - DNA, 55 bp, Artificial
  Synthetic oligonucleotide
ttggtcgttgccaccagcacagcaacaaggaggagtgctgttaactctcccggaa

SEQ ID NO: 482860 - DNA, 52 bp, Artificial
  Synthetic oligonucleotide
ttggtcgttttggaatgaacaaacgagaagtatatttatatggtaactgcga

SEQ ID NO: 482861 - DNA, 54 bp, Artificial
  Synthetic oligonucleotide
ttggtctaaagttacgttggacggccgcccccttactaccatccagcagtactc

SEQ ID NO: 482862 - DNA, 56 bp, Artificial
  Synthetic oligonucleotide
ttggtctacatatacaacatgctctaatacattccataatacatgatcgactgctc

SEQ ID NO: 482863 - DNA, 57 bp, Artificial
  Synthetic oligonucleotide
ttggtctactggttgtgcctattagcccgttggacttcgaccaaggagcgacgccag

SEQ ID NO: 482864 - DNA, 58 bp, Artificial
  Synthetic oligonucleotide
ttggtctagctgttgttgtgtcaggttgcccatgtacacaccccctgtcaagggtctt

SEQ ID NO: 482865 - DNA, 59 bp, Artificial
  Synthetic oligonucleotide
ttggtctatgcagagtcaccagagattgaaaaggtcaagagggacttccctggccaacc

SEQ ID NO: 482866 - DNA, 50 bp, Artificial
  Synthetic oligonucleotide
ttggtctcagtaagtgatggacttatagttggatttcatggattgacttc

SEQ ID NO: 482867 - DNA, 55 bp, Artificial
  Synthetic oligonucleotide
ttggtctgaaaccgacccggaccgacaaaacggatgctgagataacgcctatccc

SEQ ID NO: 482868 - DNA, 60 bp, Artificial
  Synthetic oligonucleotide
ttggtctgaggaatgtgcctactagatcaagtagaggactatttggggccatagctggtt

SEQ ID NO: 482869 - DNA, 60 bp, Artificial
  Synthetic oligonucleotide
ttggtctgcaatcaacaatgtccatggttgttccctgggttagtgctagtcattttagaa

SEQ ID NO: 482870 - DNA, 55 bp, Artificial
  Synthetic oligonucleotide
ttggtctggctgacggaggcaaatggctcatacccaaatctgagcaggtcctatg

SEQ ID NO: 482871 - DNA, 60 bp, Artificial
  Synthetic oligonucleotide
ttggtctgtgatgaccctgtcgatcggggaagtcctcaccttggctcaggctaagacagc

SEQ ID NO: 482872 - DNA, 55 bp, Artificial
  Synthetic oligonucleotide
ttggtcttatgatgtatactatagaaggccccatgggaaatatcagatgagtgag

SEQ ID NO: 482873 - DNA, 57 bp, Artificial
  Synthetic oligonucleotide
ttggtcttgaggactacgcgaagttagtcaaagcagttgatttccacccagtggact

SEQ ID NO: 482874 - DNA, 57 bp, Artificial
  Synthetic oligonucleotide
ttggtgaaaacccctgtaaaattggcttgcagacatcctctattgaaggggcatggg

SEQ ID NO: 482875 - DNA, 52 bp, Artificial
  Synthetic oligonucleotide
ttggtgaaacggttgctacaggaacaaccccgtgtaattacttacgatcacg

SEQ ID NO: 482876 - DNA, 60 bp, Artificial
  Synthetic oligonucleotide
ttggtgaaattcagtccatggtgtagatatactgagaagatactttcaagttgtctacct

SEQ ID NO: 482877 - DNA, 57 bp, Artificial
  Synthetic oligonucleotide
ttggtgaacattcaggagacagcacaattattcagggtcccgtggaaagttcctttg

SEQ ID NO: 482878 - DNA, 60 bp, Artificial
  Synthetic oligonucleotide
ttggtgaagctccttctccctacaattcaaggttcgtgtcggttgcatggtcagcaagtg

SEQ ID NO: 482879 - DNA, 54 bp, Artificial
  Synthetic oligonucleotide
ttggtgacattctacgcagctacgcatataggaaagcaattgtattacacggaa

SEQ ID NO: 482880 - DNA, 60 bp, Artificial
  Synthetic oligonucleotide
ttggtgaccaaatgaacatttggagcctacgattgagtggcgaatgctacatctcacgtg

SEQ ID NO: 482881 - DNA, 60 bp, Artificial
  Synthetic oligonucleotide
ttggtgactagagaagtcaaaagtctacaacctcaagcatctatcgagtgtgactcttgt

SEQ ID NO: 482882 - DNA, 59 bp, Artificial
  Synthetic oligonucleotide
ttggtgactgtagccgagcagttccctgtaacgtatgtgagaaatttccgcgggctggc

SEQ ID NO: 482883 - DNA, 60 bp, Artificial
  Synthetic oligonucleotide
ttggtgaggctccctctccatacaattcaagattcgagtcggttgcttggtcggcaagtg

SEQ ID NO: 482884 - DNA, 60 bp, Artificial
  Synthetic oligonucleotide
ttggtgaggtgatagccatctcaaaccagttcctccgggagctatcagcgctgctgaagc

SEQ ID NO: 482885 - DNA, 55 bp, Artificial
  Synthetic oligonucleotide
ttggtgagttcgccgggcgtcaggccatgcgcgaaatgaccgagcagaacgttga

SEQ ID NO: 482886 - DNA, 60 bp, Artificial
  Synthetic oligonucleotide
ttggtgatccgagtaagttcacgactctcttcaacatggaagctaaggtgatggagcccg

SEQ ID NO: 482887 - DNA, 60 bp, Artificial
  Synthetic oligonucleotide
ttggtgatgacctgtcactccatactgaatcatatgtttgcagcgcagattgtaccatag

SEQ ID NO: 482888 - DNA, 50 bp, Artificial
  Synthetic oligonucleotide
ttggtgattctgactcactcaagaaattggttcctcgtgtgatctccgct

SEQ ID NO: 482889 - DNA, 60 bp, Artificial
  Synthetic oligonucleotide
ttggtgcaaggtgcctaactacagactcagcgggcatactcatacagtataacttgactg

SEQ ID NO: 482890 - DNA, 60 bp, Artificial
  Synthetic oligonucleotide
ttggtgcaatccgcaatgtaccccaattcgtgccagaccaatctatgacgaatgtagatg

SEQ ID NO: 482891 - DNA, 56 bp, Artificial
  Synthetic oligonucleotide
ttggtgcaattcgagctacaaccattgaagagctcctcgtgcgcatgaaacgtgct

SEQ ID NO: 482892 - DNA, 60 bp, Artificial
  Synthetic oligonucleotide
ttggtgcatggccagtgatgagtggaggtgcggtatctttgcattttgcaggagtcacct

SEQ ID NO: 482893 - DNA, 60 bp, Artificial
  Synthetic oligonucleotide
ttggtgcattgaacacagttattcaccaaggaatggacgccacagctgcttgtattggat

SEQ ID NO: 482894 - DNA, 60 bp, Artificial
  Synthetic oligonucleotide
ttggtgcgagcggtaatcacataagcagggcggtactacttaagtaagagacgattatgc

SEQ ID NO: 482895 - DNA, 55 bp, Artificial
  Synthetic oligonucleotide
ttggtgcggaaggtttagaagcacttgaccttactaccagtgctggatttcccta

SEQ ID NO: 482896 - DNA, 58 bp, Artificial
  Synthetic oligonucleotide
ttggtgctatggactttactacattacaggctaacaaaagtgaagttccactggatat

SEQ ID NO: 482897 - DNA, 55 bp, Artificial
  Synthetic oligonucleotide
ttggtgctcaagtggatcccacgagagttggggacgataaaagctcgatacatgg

SEQ ID NO: 482898 - DNA, 52 bp, Artificial
  Synthetic oligonucleotide
ttggtgctcccctgacgatgctgctgttttgcggtgtcgcctggactaccat

SEQ ID NO: 482899 - DNA, 55 bp, Artificial
  Synthetic oligonucleotide
ttggtggaaatacccttgaggatcttcatcaaatagtgctaactgtgaaggacag

SEQ ID NO: 482900 - DNA, 55 bp, Artificial
  Synthetic oligonucleotide
ttggtggaacatcctacaatattggaggcaggaaatacagagtagtgctgttagc

SEQ ID NO: 482901 - DNA, 58 bp, Artificial
  Synthetic oligonucleotide
ttggtggaatatgcactacctgggatctttcaagtttgcccctgtggtggtaatacaa

SEQ ID NO: 482902 - DNA, 60 bp, Artificial
  Synthetic oligonucleotide
ttggtggagtcgggattacagggcaatatgctcgcgagtcataccaccacgtgggtcatc

SEQ ID NO: 482903 - DNA, 60 bp, Artificial
  Synthetic oligonucleotide
ttggtggatccttttgcagcatttgtcaaggggtcactgccccaagtgaggaatggacta

SEQ ID NO: 482904 - DNA, 51 bp, Artificial
  Synthetic oligonucleotide
ttggtggccaatggctagcagaaaccggggacactctaccggtggacccac

SEQ ID NO: 482905 - DNA, 55 bp, Artificial
  Synthetic oligonucleotide
ttggtggcgaacgcactatccgcccaatggctggggatgccagtgctcagtcagc

SEQ ID NO: 482906 - DNA, 57 bp, Artificial
  Synthetic oligonucleotide
ttggtggctgagtttggggatcagggaaagttacttgctaaagttgagaatactaga

SEQ ID NO: 482907 - DNA, 60 bp, Artificial
  Synthetic oligonucleotide
ttggtgggagtcgtgacattgtacttgggagctatggtgcaggctgatagtggttgcgtt

SEQ ID NO: 482908 - DNA, 57 bp, Artificial
  Synthetic oligonucleotide
ttggtgggagtgctagcagggctagccttccaagacatggaaaactttttgggtcca

SEQ ID NO: 482909 - DNA, 54 bp, Artificial
  Synthetic oligonucleotide
ttggtgggccaaagttacaccaggaattgggaattcctacaatccccaaagtca

SEQ ID NO: 482910 - DNA, 55 bp, Artificial
  Synthetic oligonucleotide
ttggtggggaaagatagagcactcatttggggtaccctacaacccccagagccaa

SEQ ID NO: 482911 - DNA, 57 bp, Artificial
  Synthetic oligonucleotide
ttggtggggtttcccgacacgcgaaagcgcattttattgcttagacgagagcccatc

SEQ ID NO: 482912 - DNA, 51 bp, Artificial
  Synthetic oligonucleotide
ttggtggtagtctccaagctggcccttcaccagattgaggtctcatgttgc

SEQ ID NO: 482913 - DNA, 55 bp, Artificial
  Synthetic oligonucleotide
ttggtggtcgtctttgcctggaaagtgacgttcgaataccgttcctcattaagga

SEQ ID NO: 482914 - DNA, 59 bp, Artificial
  Synthetic oligonucleotide
ttggtggtcttattcaccaaccagcgtatggggaaatatatcaacaatgcaatcaaaat

SEQ ID NO: 482915 - DNA, 60 bp, Artificial
  Synthetic oligonucleotide
ttggtggtgttgacatgagggctggacgtattatagcgtgggatggtcaggctgcgctac

SEQ ID NO: 482916 - DNA, 60 bp, Artificial
  Synthetic oligonucleotide
ttggtggttggtccacacctaattccaaatcgcaggtcaatagacaagtcatagttgaca

SEQ ID NO: 482917 - DNA, 59 bp, Artificial
  Synthetic oligonucleotide
ttggtgtacgatgcgcagcctaccggcactgccccgaccgtccaagacatttttcctca

SEQ ID NO: 482918 - DNA, 55 bp, Artificial
  Synthetic oligonucleotide
ttggtgtcctcccctttagcccacggcccaggcccatgaatcgcatattgggccg

SEQ ID NO: 482919 - DNA, 54 bp, Artificial
  Synthetic oligonucleotide
ttggtgtcctctatccccggcccaggcccaaccgcattaatttgtatccgggac

SEQ ID NO: 482920 - DNA, 55 bp, Artificial
  Synthetic oligonucleotide
ttggtgtccttgtgggtcccacttgggaattgtgcagaataactgggcctgtttt

SEQ ID NO: 482921 - DNA, 59 bp, Artificial
  Synthetic oligonucleotide
ttggtgtcttttggagtgtggattcgcactcctccagcctacagaccaccaaatgcccc

SEQ ID NO: 482922 - DNA, 60 bp, Artificial
  Synthetic oligonucleotide
ttggtgtgaacctcgacttgggcggggtcatctgcagtgagtaccctgcaaatagtgctg

SEQ ID NO: 482923 - DNA, 56 bp, Artificial
  Synthetic oligonucleotide
ttggtgtgagtaatgaccggttctttagggttcgagatcagagaggggacgtactc

SEQ ID NO: 482924 - DNA, 58 bp, Artificial
  Synthetic oligonucleotide
ttggtgtgctttctacggtggggaatctcgttacctcgctggctggtgcgaacaacca

SEQ ID NO: 482925 - DNA, 58 bp, Artificial
  Synthetic oligonucleotide
ttggtgtggaacgttagtccaaatgaaccatttatgcttggatggaaagtcaagcaaa

SEQ ID NO: 482926 - DNA, 58 bp, Artificial
  Synthetic oligonucleotide
ttggtgtgggtagattcgattcatagatttgttgtttacaaacacgaaagatttgaca

SEQ ID NO: 482927 - DNA, 58 bp, Artificial
  Synthetic oligonucleotide
ttggtgttaatagtcgtctgatcggtttgggcctctcgacagaccaaaagtctacgca

SEQ ID NO: 482928 - DNA, 55 bp, Artificial
  Synthetic oligonucleotide
ttggtgttgccctacatgaacgctgtgcccatggactcggccataagacatagta

SEQ ID NO: 482929 - DNA, 50 bp, Artificial
  Synthetic oligonucleotide
ttggtgtttccgttcgaggtttacgggtacactaccttcgagatgatctc

SEQ ID NO: 482930 - DNA, 53 bp, Artificial
  Synthetic oligonucleotide
ttggttaaattccaattggcttaaccctaccacactcaccgaactagataacg

SEQ ID NO: 482931 - DNA, 60 bp, Artificial
  Synthetic oligonucleotide
ttggttaacacctaggtgcatagttgactatccatacaggctttggcactacccctgcac

SEQ ID NO: 482932 - DNA, 58 bp, Artificial
  Synthetic oligonucleotide
ttggttaacattagggatcactggcccagatgctactgctgtggcagtactgaaatac

SEQ ID NO: 482933 - DNA, 55 bp, Artificial
  Synthetic oligonucleotide
ttggttaagtacgctaccctcaggacatagagctacgacatttatcaactcggtc

SEQ ID NO: 482934 - DNA, 54 bp, Artificial
  Synthetic oligonucleotide
ttggttaatgtggactgtaaatggcgatttcgctaatcaactgtctctcatgta

SEQ ID NO: 482935 - DNA, 56 bp, Artificial
  Synthetic oligonucleotide
ttggttacaaagagcacagggtcacaataatggtatttgttggggtaatcaaatct

SEQ ID NO: 482936 - DNA, 59 bp, Artificial
  Synthetic oligonucleotide
ttggttacagacctaatcagcaaagtagctggaaaaagctcaatcgcacgcttgtcagc

SEQ ID NO: 482937 - DNA, 58 bp, Artificial
  Synthetic oligonucleotide
ttggttacaggaaatgctggaatcacacgattaaggaagtacataaacgtgtgttatg

SEQ ID NO: 482938 - DNA, 59 bp, Artificial
  Synthetic oligonucleotide
ttggttacatgtgtgaagataccatcacgtacgaatgtccgaagcttgccgtgggtaac

SEQ ID NO: 482939 - DNA, 53 bp, Artificial
  Synthetic oligonucleotide
ttggttaccaagacgccggttactactcctaagggcacatacccgattttgaa

SEQ ID NO: 482940 - DNA, 55 bp, Artificial
  Synthetic oligonucleotide
ttggttactcggggacgctgtagcgtcgtcgtaccaacatcttcaggactcccct

SEQ ID NO: 482941 - DNA, 51 bp, Artificial
  Synthetic oligonucleotide
ttggttacttaaactttcatggaaccgtgctacgactcacatattctggtc

SEQ ID NO: 482942 - DNA, 52 bp, Artificial
  Synthetic oligonucleotide
ttggttacttcgaacagtatctctgtcgagctatagagcctactaatcgtac

SEQ ID NO: 482943 - DNA, 60 bp, Artificial
  Synthetic oligonucleotide
ttggttagacgcactgatgggaaacgtcgtagaggcccatcaagcaaagcccatgatgag

SEQ ID NO: 482944 - DNA, 55 bp, Artificial
  Synthetic oligonucleotide
ttggttaggtgatcacctttctaataagggccgggatatccgacccaaagctgga

SEQ ID NO: 482945 - DNA, 59 bp, Artificial
  Synthetic oligonucleotide
ttggttagtcgtttattgtcattggtggcctgatggttcaacaacaatacatttatcaa

SEQ ID NO: 482946 - DNA, 60 bp, Artificial
  Synthetic oligonucleotide
ttggttatcacaagttggcagcaaatagagaagttatcgagtcaagtatgtcgtactaca

SEQ ID NO: 482947 - DNA, 55 bp, Artificial
  Synthetic oligonucleotide
ttggttatctctccagatttgtcttacagagtcgggtacttgtgtgcaggtctcc

SEQ ID NO: 482948 - DNA, 52 bp, Artificial
  Synthetic oligonucleotide
ttggttattaataatcagtagtgctgcagaagacttgtgggtcacagtctac

SEQ ID NO: 482949 - DNA, 57 bp, Artificial
  Synthetic oligonucleotide
ttggttattgcccccactggacacgtgacgagtttgttgcgtcttacagtgggccgc

SEQ ID NO: 482950 - DNA, 51 bp, Artificial
  Synthetic oligonucleotide
ttggttcaccaccctgatatccaccatcatgggtcccctaataatcctctt

SEQ ID NO: 482951 - DNA, 56 bp, Artificial
  Synthetic oligonucleotide
ttggttcagccccttcatactggatttacgacgttaagcagtactctgattttacg

SEQ ID NO: 482952 - DNA, 58 bp, Artificial
  Synthetic oligonucleotide
ttggttcagcccggtattgcctccgagttagtcatccctagtgagcgccttcactacc

SEQ ID NO: 482953 - DNA, 60 bp, Artificial
  Synthetic oligonucleotide
ttggttccaaaggaggcatttttgtcataagagaaccattcatttcatgctctcacttgg

SEQ ID NO: 482954 - DNA, 55 bp, Artificial
  Synthetic oligonucleotide
ttggttccattttgctgacttctgatgcgcatgacaaaggagggtgctacctgcg

SEQ ID NO: 482955 - DNA, 53 bp, Artificial
  Synthetic oligonucleotide
ttggttccccttagatctggaaacaccggtagaaccaccttacatataacagt

SEQ ID NO: 482956 - DNA, 55 bp, Artificial
  Synthetic oligonucleotide
ttggttccgcttggcgtgaccagtcccagcgcccctccgctgccccccgtcgtcg

SEQ ID NO: 482957 - DNA, 59 bp, Artificial
  Synthetic oligonucleotide
ttggttcctactcacgaggctctgacgagtgcaaccgtcacaccaacgagactgttacc

SEQ ID NO: 482958 - DNA, 60 bp, Artificial
  Synthetic oligonucleotide
ttggttcctcgtctttggcacagggcacttcttcaggtggagatgagcgtgtatcgcgtg

SEQ ID NO: 482959 - DNA, 55 bp, Artificial
  Synthetic oligonucleotide
ttggttcctggaaagcctgtcaaaccctggccttgatgcacgacgcagtcattct

SEQ ID NO: 482960 - DNA, 51 bp, Artificial
  Synthetic oligonucleotide
ttggttcggacaatgaaccgcacgtagtagtcatcaggccagcctggccag

SEQ ID NO: 482961 - DNA, 60 bp, Artificial
  Synthetic oligonucleotide
ttggttcgtgcactggaatttcccttcgaattgcagaagcacgtggagatgaggttgccc

SEQ ID NO: 482962 - DNA, 57 bp, Artificial
  Synthetic oligonucleotide
ttggttctcaaatgctctaggacatgactggcttatggaccctccaatgctatgtag

SEQ ID NO: 482963 - DNA, 57 bp, Artificial
  Synthetic oligonucleotide
ttggttctcgcgcctggctagttccgccttcagcggactgttcggcgcgcttctggc

SEQ ID NO: 482964 - DNA, 60 bp, Artificial
  Synthetic oligonucleotide
ttggttctgtttccctcaccattgcaacaatgtgcttcctcatgcagattgccatcctaa

SEQ ID NO: 482965 - DNA, 60 bp, Artificial
  Synthetic oligonucleotide
ttggttgaatagagtccggtcattcattggtttagttatgccatgtgactatgtccttgt

SEQ ID NO: 482966 - DNA, 60 bp, Artificial
  Synthetic oligonucleotide
ttggttgacaattggaatttctggtccagacaatggggctgtggctgtattgaagtacaa

SEQ ID NO: 482967 - DNA, 55 bp, Artificial
  Synthetic oligonucleotide
ttggttgacctaactagattgctagcatacaattacgaaactttgatggcgtgta

SEQ ID NO: 482968 - DNA, 60 bp, Artificial
  Synthetic oligonucleotide
ttggttgactaaatctggaagtgcttacccagtgttgaatgtgactatgccaaataatga

SEQ ID NO: 482969 - DNA, 52 bp, Artificial
  Synthetic oligonucleotide
ttggttgagtaataagtttatttattcgagtgaaaaacattcggaacaagta

SEQ ID NO: 482970 - DNA, 53 bp, Artificial
  Synthetic oligonucleotide
ttggttgatattgttattacgtctatgttttcacactgattatattgattcag

SEQ ID NO: 482971 - DNA, 50 bp, Artificial
  Synthetic oligonucleotide
ttggttgattattggcgtaataatccagataggaaacccgcttttgcaga

SEQ ID NO: 482972 - DNA, 55 bp, Artificial
  Synthetic oligonucleotide
ttggttgatttctaatgggtcttacttaaatgaaactcaatttagtagggacata

SEQ ID NO: 482973 - DNA, 58 bp, Artificial
  Synthetic oligonucleotide
ttggttgcgacaaatttgttggctcccaatcgtggactcgtagaagcttttctatcaa

SEQ ID NO: 482974 - DNA, 57 bp, Artificial
  Synthetic oligonucleotide
ttggttgggaacgcccattaaatctctgtataaatgtacccgcttctcgcattgtat

SEQ ID NO: 482975 - DNA, 58 bp, Artificial
  Synthetic oligonucleotide
ttggttgggtcagacaactatgcagcatccttccgggtaacgacttgccgataggggc

SEQ ID NO: 482976 - DNA, 57 bp, Artificial
  Synthetic oligonucleotide
ttggttgtacaaattagaatacaaatatccagcactgaacgtgactatgccaaacaa

SEQ ID NO: 482977 - DNA, 58 bp, Artificial
  Synthetic oligonucleotide
ttggttgtccgagtgcgactgcatggtctcttatatgcttgagtttaactcaaggaat

SEQ ID NO: 482978 - DNA, 57 bp, Artificial
  Synthetic oligonucleotide
ttggttgttgaaacgtggcacgttttgaaccattggataagattatagtgtatggcc

SEQ ID NO: 482979 - DNA, 58 bp, Artificial
  Synthetic oligonucleotide
ttggttgttgattgggtgcttcctcaacatggggggtgcgcgacggcaaccatcggtc

SEQ ID NO: 482980 - DNA, 55 bp, Artificial
  Synthetic oligonucleotide
ttggtttacttggaactacgcttttgaacttagacgctaactatgttgaaactgc

SEQ ID NO: 482981 - DNA, 58 bp, Artificial
  Synthetic oligonucleotide
ttggtttcgagtacgttcgggatctcatttccgtgttgaggtgcaaggattatgttca

SEQ ID NO: 482982 - DNA, 56 bp, Artificial
  Synthetic oligonucleotide
ttggtttgagttataaagaacaggtgggatctaaccgtgagttatatgtcggtgat

SEQ ID NO: 482983 - DNA, 55 bp, Artificial
  Synthetic oligonucleotide
ttggtttggtgtattttgttaactatggagttgatagtgtgggcagctagtgctg

SEQ ID NO: 482984 - DNA, 55 bp, Artificial
  Synthetic oligonucleotide
ttgtaaaacgcttgaaaactataacctttatcaggtcgtgtgtccactcgtggac

SEQ ID NO: 482985 - DNA, 55 bp, Artificial
  Synthetic oligonucleotide
ttgtaaactcctacgcactattatggtgaaggctagtcaatggggtagtgaaccc

SEQ ID NO: 482986 - DNA, 52 bp, Artificial
  Synthetic oligonucleotide
ttgtaaatatgtaccccacaaaatataaacgtgggtggtcgtctactaaccg

SEQ ID NO: 482987 - DNA, 60 bp, Artificial
  Synthetic oligonucleotide
ttgtaaccagatatattgagtgcactctcatcttttgttataatctgtagacaatcgtgt

SEQ ID NO: 482988 - DNA, 55 bp, Artificial
  Synthetic oligonucleotide
ttgtaacggctagataataccttttgtagcgcgttaactaccattggactgttag

SEQ ID NO: 482989 - DNA, 60 bp, Artificial
  Synthetic oligonucleotide
ttgtaacgtatctggtgactcaatctcctctatccttagccagcgtgtgaagaatcggga

SEQ ID NO: 482990 - DNA, 54 bp, Artificial
  Synthetic oligonucleotide
ttgtaactcacgcccatgatatcttctgtgactgcgactcaccacttcaacata

SEQ ID NO: 482991 - DNA, 54 bp, Artificial
  Synthetic oligonucleotide
ttgtaacttcagagattgcagttggagctatgtcaggtgctggaaatgtaaaat

SEQ ID NO: 482992 - DNA, 60 bp, Artificial
  Synthetic oligonucleotide
ttgtaacttgcctcgttgtcgaatacggctccgttgaggtccagatgtccgctgagatag

SEQ ID NO: 482993 - DNA, 57 bp, Artificial
  Synthetic oligonucleotide
ttgtaagaaacacgcggcactctatagatcgtatgttgaggactacaacacgtttgt

SEQ ID NO: 482994 - DNA, 55 bp, Artificial
  Synthetic oligonucleotide
ttgtaagaacgagaaagacagatattgtccttattggcctaccaatgttgatggt

SEQ ID NO: 482995 - DNA, 55 bp, Artificial
  Synthetic oligonucleotide
ttgtaagaagttgggaccaagagaaaatgtagcgattatacaagtcggtggctca

SEQ ID NO: 482996 - DNA, 60 bp, Artificial
  Synthetic oligonucleotide
ttgtaagatggtcttcaactctatcactggcattggatgtggtctctccgtcagtattaa

SEQ ID NO: 482997 - DNA, 54 bp, Artificial
  Synthetic oligonucleotide
ttgtaagattccccgtaccttcgaagtaaacgatgatagcaacgacacgctggg

SEQ ID NO: 482998 - DNA, 56 bp, Artificial
  Synthetic oligonucleotide
ttgtaagcttcccagcaaatcaacccgcttgcttttaaaccctccaccatgtctac

SEQ ID NO: 482999 - DNA, 60 bp, Artificial
  Synthetic oligonucleotide
ttgtaagcttcgcatgcatcgagccacgaccaagcggcttaacaacacgccttcgaaata

SEQ ID NO: 483000 - DNA, 53 bp, Artificial
  Synthetic oligonucleotide
ttgtaaggaacaagttccaattaggaaattctatcgtgttaacaattacgtgg

SEQ ID NO: 483001 - DNA, 57 bp, Artificial
  Synthetic oligonucleotide
ttgtaaggagcaaactttggtcaagaaattcattcgtcttaacactcatgttcttta

SEQ ID NO: 483002 - DNA, 55 bp, Artificial
  Synthetic oligonucleotide
ttgtaaggattgaatttgggaaagtgcttcttctttggttagagagcagtgtgga

SEQ ID NO: 483003 - DNA, 57 bp, Artificial
  Synthetic oligonucleotide
ttgtaagtatggagttttctcttacagacccgaggctggagccacacaaatgggaaa

SEQ ID NO: 483004 - DNA, 60 bp, Artificial
  Synthetic oligonucleotide
ttgtaagtgtagcagttaagtgcgatgacattcgtaatttaacagcacgctgtgccactc

SEQ ID NO: 483005 - DNA, 53 bp, Artificial
  Synthetic oligonucleotide
ttgtaagttcaccaaggtagatacttatttccttttccgaggggtgtatacta

SEQ ID NO: 483006 - DNA, 57 bp, Artificial
  Synthetic oligonucleotide
ttgtaatacacttcaatttggtagacagataacggaagggataattcatctacgatt

SEQ ID NO: 483007 - DNA, 56 bp, Artificial
  Synthetic oligonucleotide
ttgtaatgactgcaacacgtcaattacctgttaacggtacaacaattagacgaaaa

SEQ ID NO: 483008 - DNA, 60 bp, Artificial
  Synthetic oligonucleotide
ttgtaatgactgccaatcatcaggatgtggtttccatgaagttgatgaatgacccgttac

SEQ ID NO: 483009 - DNA, 60 bp, Artificial
  Synthetic oligonucleotide
ttgtaatgatatgaagctgttgaatggcattagagctggtaattataccttcatcccaac

SEQ ID NO: 483010 - DNA, 58 bp, Artificial
  Synthetic oligonucleotide
ttgtaatgggtacgattgcgttcttagcgtttgtgcaaaattatacagacataacatt

SEQ ID NO: 483011 - DNA, 55 bp, Artificial
  Synthetic oligonucleotide
ttgtaattgaaccggacttcgatgtggtagatcctggttctcgtgtacaacgggt

SEQ ID NO: 483012 - DNA, 55 bp, Artificial
  Synthetic oligonucleotide
ttgtaattgggaaagtgcctcttcttttgacagagagcactgtggataagtgagg

SEQ ID NO: 483013 - DNA, 50 bp, Artificial
  Synthetic oligonucleotide
ttgtaattgtgccagcgcgccgtcaatcagcgttgggtcttcggttagat

SEQ ID NO: 483014 - DNA, 59 bp, Artificial
  Synthetic oligonucleotide
ttgtacaaacgtcagcagaaagttgaacgctacgagaccacgccatatactacctatag

SEQ ID NO: 483015 - DNA, 53 bp, Artificial
  Synthetic oligonucleotide
ttgtacaagacccaacatcaatagaagaaaaggtttacgtataggaccgggga

SEQ ID NO: 483016 - DNA, 58 bp, Artificial
  Synthetic oligonucleotide
ttgtacacaaaatgcgagactttacaagatacggataatattataatttcgaaagcta

SEQ ID NO: 483017 - DNA, 60 bp, Artificial
  Synthetic oligonucleotide
ttgtacaccatgaacgacattatgaaggaatatccgggtgaagaaccgactgcacaactg

SEQ ID NO: 483018 - DNA, 54 bp, Artificial
  Synthetic oligonucleotide
ttgtacacgtggaacgggaccagctttgacaaggtgtggccgtcgtttgaaccg

SEQ ID NO: 483019 - DNA, 53 bp, Artificial
  Synthetic oligonucleotide
ttgtacactgagatcgtttacacaccaatctccacaccagatggtaccatagt

SEQ ID NO: 483020 - DNA, 57 bp, Artificial
  Synthetic oligonucleotide
ttgtacagagttggttgaatttttaggtcagagtagtggtagttgtggtctgaataa

SEQ ID NO: 483021 - DNA, 60 bp, Artificial
  Synthetic oligonucleotide
ttgtacagcacaagtgacatgagacacatactgaccaagatgtacttgatgctctgtgac

SEQ ID NO: 483022 - DNA, 57 bp, Artificial
  Synthetic oligonucleotide
ttgtacagcctgtggggtatacttagacaagctccgttcagttgggaaagcctataa

SEQ ID NO: 483023 - DNA, 57 bp, Artificial
  Synthetic oligonucleotide
ttgtacaggtgcctccgtcgttaggagatgatagctatttgactaatccgttattgt

SEQ ID NO: 483024 - DNA, 59 bp, Artificial
  Synthetic oligonucleotide
ttgtacatagtcgggaaagagcggtcaaattggcaaagtctatagctcgagggaccaca

SEQ ID NO: 483025 - DNA, 57 bp, Artificial
  Synthetic oligonucleotide
ttgtacatattcgtccaagtctatcgagattagttaaataaacatttgaagtttcaa

SEQ ID NO: 483026 - DNA, 55 bp, Artificial
  Synthetic oligonucleotide
ttgtacatcgcactatgtgggatccattgttaaacgagtttcccgaaaccgttca

SEQ ID NO: 483027 - DNA, 60 bp, Artificial
  Synthetic oligonucleotide
ttgtacatgatcttcaatatattatgtatcgcgtcctccaaattgttgaagttgaaaggt

SEQ ID NO: 483028 - DNA, 50 bp, Artificial
  Synthetic oligonucleotide
ttgtaccaaatgttactgtaaaaagtgttgctaccattgtccagtctgct

SEQ ID NO: 483029 - DNA, 60 bp, Artificial
  Synthetic oligonucleotide
ttgtaccaagcgtcgttactgtatacctttgggctgaggtccagatgcccacagagataa

SEQ ID NO: 483030 - DNA, 58 bp, Artificial
  Synthetic oligonucleotide
ttgtaccacgactctgtcaggctaggcctaggaactagggtgcgaactcccacaggtc

SEQ ID NO: 483031 - DNA, 57 bp, Artificial
  Synthetic oligonucleotide
ttgtaccacgcgtcgttgctgtaaaccttgggactcaagtctaggtgaccacataaa

SEQ ID NO: 483032 - DNA, 58 bp, Artificial
  Synthetic oligonucleotide
ttgtaccagaccctccaacaatacaagactaggtacacatataggaccaggacaagta

SEQ ID NO: 483033 - DNA, 60 bp, Artificial
  Synthetic oligonucleotide
ttgtaccaggcatcattactatacacttttggactcaaatcaagatgaccacacaggtaa

SEQ ID NO: 483034 - DNA, 59 bp, Artificial
  Synthetic oligonucleotide
ttgtaccaggcgtcattactgtagacctttgggctaaggtcgagatgtccacacaaata

SEQ ID NO: 483035 - DNA, 60 bp, Artificial
  Synthetic oligonucleotide
ttgtaccaggtgcgtatactttgtaccgccaaggtacatatattattcatcactctaatg

SEQ ID NO: 483036 - DNA, 55 bp, Artificial
  Synthetic oligonucleotide
ttgtaccatgaattaagaccatatgataaagttgtcgagtccctataataggggc

SEQ ID NO: 483037 - DNA, 59 bp, Artificial
  Synthetic oligonucleotide
ttgtaccatgcctcgttagagtatgttttgtcgtttagatccaaatggccgcaaagata

SEQ ID NO: 483038 - DNA, 55 bp, Artificial
  Synthetic oligonucleotide
ttgtaccgatttactgggatgggaacacatattcggtacggagtgcacgaccact

SEQ ID NO: 483039 - DNA, 60 bp, Artificial
  Synthetic oligonucleotide
ttgtaccgtcgcgacagtggtccgcatgccagagacgccacacgtcacgcctatcacttt

SEQ ID NO: 483040 - DNA, 60 bp, Artificial
  Synthetic oligonucleotide
ttgtacctgagtgagcactttccagcactattctccgatgtaccactagccggagcgaat

SEQ ID NO: 483041 - DNA, 60 bp, Artificial
  Synthetic oligonucleotide
ttgtaccttagctggcccaggagcaagttgtgaggcctattcagagaatgggatctttaa

SEQ ID NO: 483042 - DNA, 60 bp, Artificial
  Synthetic oligonucleotide
ttgtaccttgcacgtttgacaattacgacgaatattgtcagacaatcaaccacacctaga

SEQ ID NO: 483043 - DNA, 60 bp, Artificial
  Synthetic oligonucleotide
ttgtacctttcagcttcgacgacaactgtccaccgctggcccgtcagaacctactgctgc

SEQ ID NO: 483044 - DNA, 55 bp, Artificial
  Synthetic oligonucleotide
ttgtacgagagcttcctcctcacccatctagctgcgtctagagtgagacggaact

SEQ ID NO: 483045 - DNA, 55 bp, Artificial
  Synthetic oligonucleotide
ttgtacgattaggaactgtaaaaagctagggccaagagaaaacgtagcagttata

SEQ ID NO: 483046 - DNA, 50 bp, Artificial
  Synthetic oligonucleotide
ttgtacgccaggcacgttaacggtgctagtcccgggccagtcaagagcac

SEQ ID NO: 483047 - DNA, 59 bp, Artificial
  Synthetic oligonucleotide
ttgtacggcttcatcataaaagggagatcccacctgaggaatgataccgatgtggtaaa

SEQ ID NO: 483048 - DNA, 54 bp, Artificial
  Synthetic oligonucleotide
ttgtacgggaatggagtcatcttgggcaacggctcgtatgtcagtgccatcgtg

SEQ ID NO: 483049 - DNA, 57 bp, Artificial
  Synthetic oligonucleotide
ttgtacgtactgggatggatcccagaatgtgttctctgatgcaaggctcaacccttc

SEQ ID NO: 483050 - DNA, 53 bp, Artificial
  Synthetic oligonucleotide
ttgtactaaagagcactatttcgagtacggggaaatgtctacccaaggtaaac

SEQ ID NO: 483051 - DNA, 55 bp, Artificial
  Synthetic oligonucleotide
ttgtactaacaataggactgcctattaatatgcccaatacgcccactaccacaat

SEQ ID NO: 483052 - DNA, 60 bp, Artificial
  Synthetic oligonucleotide
ttgtactatccaactgaggctagaacagagatacacgataatgagtggatacgtacgtta

SEQ ID NO: 483053 - DNA, 55 bp, Artificial
  Synthetic oligonucleotide
ttgtactcttggtattgtaaacctccttacagattttttgaagcacggataactc

SEQ ID NO: 483054 - DNA, 56 bp, Artificial
  Synthetic oligonucleotide
ttgtactgattccttgatttccactaggaatatacgggtttgcgttggtattgacc

SEQ ID NO: 483055 - DNA, 60 bp, Artificial
  Synthetic oligonucleotide
ttgtactgggagcaccactacaccagcagccactacatccccgtagtggcacctgaacgc

SEQ ID NO: 483056 - DNA, 60 bp, Artificial
  Synthetic oligonucleotide
ttgtactgtcaaagcaatgaaagttaacatttcccatgtttatgatctcagcgtcaatat

SEQ ID NO: 483057 - DNA, 60 bp, Artificial
  Synthetic oligonucleotide
ttgtacttatgagtgatcgaatggacaattaaataccattaccatctacacatgaccctc

SEQ ID NO: 483058 - DNA, 54 bp, Artificial
  Synthetic oligonucleotide
ttgtacttattagtaccgctgttctaagtgacgtaagtggagtgtaggcccggg

SEQ ID NO: 483059 - DNA, 55 bp, Artificial
  Synthetic oligonucleotide
ttgtacttcaaggattaatcaaggtgactctctgacactctcagtgaggtgactt

SEQ ID NO: 483060 - DNA, 60 bp, Artificial
  Synthetic oligonucleotide
ttgtagaagatctgtcaggttgccatctggaacaccaaaaaaaatgtgtcgccaatgtac

SEQ ID NO: 483061 - DNA, 57 bp, Artificial
  Synthetic oligonucleotide
ttgtagaccagttctcccgttggcccccaattgatctcgtctgtcacactccacctt

SEQ ID NO: 483062 - DNA, 60 bp, Artificial
  Synthetic oligonucleotide
ttgtagaccggatgttccatcattcgcattcaagcacccgttgggtatgttttggcatgt

SEQ ID NO: 483063 - DNA, 56 bp, Artificial
  Synthetic oligonucleotide
ttgtagacgcggtacaaagtcatgttctgttaccgttggatttgaactgacaagac

SEQ ID NO: 483064 - DNA, 55 bp, Artificial
  Synthetic oligonucleotide
ttgtagacggcttcgacagacgtgacatacggttcaaatcgtttaccataaaagg

SEQ ID NO: 483065 - DNA, 60 bp, Artificial
  Synthetic oligonucleotide
ttgtagactcttgggcttagatcaagatgcccacacaagtaattgtgtgggcctagagac

SEQ ID NO: 483066 - DNA, 50 bp, Artificial
  Synthetic oligonucleotide
ttgtagagaagattctcataagggtttctattgcccggtctttcatctat

SEQ ID NO: 483067 - DNA, 55 bp, Artificial
  Synthetic oligonucleotide
ttgtagagcacacatagtgcatccaggtggagtaggaaatttagatggacgttgc

SEQ ID NO: 483068 - DNA, 60 bp, Artificial
  Synthetic oligonucleotide
ttgtagagcacatgttgaacacccagatatggacgggttttgtaagcttagaggcaagta

SEQ ID NO: 483069 - DNA, 58 bp, Artificial
  Synthetic oligonucleotide
ttgtagaggccagtgagtattacccggctagataccagtcgcacctcatgcttgcagt

SEQ ID NO: 483070 - DNA, 60 bp, Artificial
  Synthetic oligonucleotide
ttgtagatagtgtaagagagcatgtacaaagcataaacccaattaacaagattaattcca

SEQ ID NO: 483071 - DNA, 53 bp, Artificial
  Synthetic oligonucleotide
ttgtagcaacattgccacaactatagccaagagcatagagagagggtttgaca

SEQ ID NO: 483072 - DNA, 60 bp, Artificial
  Synthetic oligonucleotide
ttgtagcaatggtattctcacaagaagactgtatgataaaggctgtgagaggagatctga

SEQ ID NO: 483073 - DNA, 60 bp, Artificial
  Synthetic oligonucleotide
ttgtagcaatggtgttctcacaagaggactgtatgataaaagcagttcgaggtgatctga

SEQ ID NO: 483074 - DNA, 59 bp, Artificial
  Synthetic oligonucleotide
ttgtagcagattgcttaaaacctagtctacacatgtttttatgatcatacctacccacc

SEQ ID NO: 483075 - DNA, 60 bp, Artificial
  Synthetic oligonucleotide
ttgtagcattcaagatcatgagcggtgagaccccctccatggaggacatggtcaatctac

SEQ ID NO: 483076 - DNA, 55 bp, Artificial
  Synthetic oligonucleotide
ttgtagccaagctcggctagtaagatggggacaaaaaccggtggaatcttcttaa

SEQ ID NO: 483077 - DNA, 57 bp, Artificial
  Synthetic oligonucleotide
ttgtagccagaaagggcttgttatcctacctttagacaggtagaagattgtgggaga

SEQ ID NO: 483078 - DNA, 60 bp, Artificial
  Synthetic oligonucleotide
ttgtagccaggaattttgacacgattagattgtcatttcaactaatgcgaccgccaaaca

SEQ ID NO: 483079 - DNA, 60 bp, Artificial
  Synthetic oligonucleotide
ttgtagcccaggctggaaacccagtcatggactatgaagtaaacattgcaaagaacatgg

SEQ ID NO: 483080 - DNA, 56 bp, Artificial
  Synthetic oligonucleotide
ttgtagcgacgtcaatagtaacaatagtacagatagtaatagtagtgcaagcaaca

SEQ ID NO: 483081 - DNA, 60 bp, Artificial
  Synthetic oligonucleotide
ttgtagcgagagcggtggaaattctgggacagagcagtctcaagggactgcagagggggt

SEQ ID NO: 483082 - DNA, 58 bp, Artificial
  Synthetic oligonucleotide
ttgtaggacaacttactggtaaggcaccttctactgagtcttcagacactgtacaagg

SEQ ID NO: 483083 - DNA, 60 bp, Artificial
  Synthetic oligonucleotide
ttgtaggagatagatctaagatggggtatgcacagatagttacccttgatgattttagtg

SEQ ID NO: 483084 - DNA, 58 bp, Artificial
  Synthetic oligonucleotide
ttgtaggagtgggtctaagtaacgtgaagcgccgtagatgcttctaactgtgattaaa

SEQ ID NO: 483085 - DNA, 55 bp, Artificial
  Synthetic oligonucleotide
ttgtaggattagtgtggtgcctactactcacaatggagctaatagtctgggctgc

SEQ ID NO: 483086 - DNA, 50 bp, Artificial
  Synthetic oligonucleotide
ttgtaggctgcctggatacaaggatataattcttttcctttctcagcagt

SEQ ID NO: 483087 - DNA, 51 bp, Artificial
  Synthetic oligonucleotide
ttgtagggactcattccaggatcagcgacgacgctttcgttgctttgtatc

SEQ ID NO: 483088 - DNA, 56 bp, Artificial
  Synthetic oligonucleotide
ttgtaggggtaggccttttcctactccccgctcggtagagcggcacacattagcta

SEQ ID NO: 483089 - DNA, 60 bp, Artificial
  Synthetic oligonucleotide
ttgtaggtaatggttttagtagcaatgttaggctaagcaatatgcataatgatgctagtg

SEQ ID NO: 483090 - DNA, 60 bp, Artificial
  Synthetic oligonucleotide
ttgtaggtactgtatttgacttagtagataatatgagacccgtgccagatgtgccagctt

SEQ ID NO: 483091 - DNA, 55 bp, Artificial
  Synthetic oligonucleotide
ttgtaggtcactgccctgcggcgatacacccgtggtcatcgcgtacttgcgccct

SEQ ID NO: 483092 - DNA, 55 bp, Artificial
  Synthetic oligonucleotide
ttgtagtatcaaagaatgagggtgatttccctttcacctggaggaatggtttccc

SEQ ID NO: 483093 - DNA, 54 bp, Artificial
  Synthetic oligonucleotide
ttgtagtccgcgataaatctccaaagatttattccgctacccaacccttaatac

SEQ ID NO: 483094 - DNA, 51 bp, Artificial
  Synthetic oligonucleotide
ttgtagttactcacatccgttcacggaaaaaaaaacttgtagttcccaaaa

SEQ ID NO: 483095 - DNA, 60 bp, Artificial
  Synthetic oligonucleotide
ttgtagttgaccgaaaacctcatttaaagccatctggatgtctgcatacatttgatgagg

SEQ ID NO: 483096 - DNA, 55 bp, Artificial
  Synthetic oligonucleotide
ttgtataaaggcttgctcggcatttggaacggatcattgaaggcagagctccggt

SEQ ID NO: 483097 - DNA, 60 bp, Artificial
  Synthetic oligonucleotide
ttgtataatccaaatttcaaagtacagatcacacgtaattgtagtgaactgtctgttgac

SEQ ID NO: 483098 - DNA, 57 bp, Artificial
  Synthetic oligonucleotide
ttgtataatcctgagtctgaacgtttggtttggaggcttcgagggttggatattggc

SEQ ID NO: 483099 - DNA, 54 bp, Artificial
  Synthetic oligonucleotide
ttgtatacacggcggttacgacatgggttttaaaggtctttgtaaggccatgaa

SEQ ID NO: 483100 - DNA, 58 bp, Artificial
  Synthetic oligonucleotide
ttgtatacagatgtctcacaatgggattcatcacaacataatacacagccatttagga

SEQ ID NO: 483101 - DNA, 53 bp, Artificial
  Synthetic oligonucleotide
ttgtatagaccggggttggtttaagttagcagagcacactttaaaagtggagg

SEQ ID NO: 483102 - DNA, 56 bp, Artificial
  Synthetic oligonucleotide
ttgtatagcttgatgagcaaatccaagagggatgatcatatgaaagactcagagga

SEQ ID NO: 483103 - DNA, 60 bp, Artificial
  Synthetic oligonucleotide
ttgtatatgaagacttagttagtgcttgtcctgaccttttacttatgcttgaaggtcagc

SEQ ID NO: 483104 - DNA, 60 bp, Artificial
  Synthetic oligonucleotide
ttgtatatggcaggtacccatgcatccaatcccgtgtatgctacgttgaaaatacgtatc

SEQ ID NO: 483105 - DNA, 55 bp, Artificial
  Synthetic oligonucleotide
ttgtatatgggtaagtaacaacctgaacaaaaatcaagaaggactaggacttaga

SEQ ID NO: 483106 - DNA, 58 bp, Artificial
  Synthetic oligonucleotide
ttgtatattgatggaactagtcctcacgatgagaaaaaagttcatagtggtaaaatac

SEQ ID NO: 483107 - DNA, 50 bp, Artificial
  Synthetic oligonucleotide
ttgtatcacatgcgccggcagtcacatccgtttgagaattaagattagta

SEQ ID NO: 483108 - DNA, 55 bp, Artificial
  Synthetic oligonucleotide
ttgtatcacatgtcatgtcctcattcaacattgggagggaaattttggccatact

SEQ ID NO: 483109 - DNA, 60 bp, Artificial
  Synthetic oligonucleotide
ttgtatcaccccttatgcgttggcgcccaatgcgactgtgcccactatcatagccttatt

SEQ ID NO: 483110 - DNA, 55 bp, Artificial
  Synthetic oligonucleotide
ttgtatcagacgggcaataggcaaggcggcactaaaaggcccgcaccgaaaacgg

SEQ ID NO: 483111 - DNA, 55 bp, Artificial
  Synthetic oligonucleotide
ttgtatcagttgaactgcctatgaggactggttatgtagtacgatcgcttggtcc

SEQ ID NO: 483112 - DNA, 59 bp, Artificial
  Synthetic oligonucleotide
ttgtatcatcatgtttaacagaggttcctctactcgccgctcccttgttgggagcaggg

SEQ ID NO: 483113 - DNA, 55 bp, Artificial
  Synthetic oligonucleotide
ttgtatcctgtcggtgaaattaccctaaagccctttagacattggcgagtaagga

SEQ ID NO: 483114 - DNA, 52 bp, Artificial
  Synthetic oligonucleotide
ttgtatcggcatgcaatgatttctctgtgagattactaaaggacacgccatt

SEQ ID NO: 483115 - DNA, 56 bp, Artificial
  Synthetic oligonucleotide
ttgtatctagacgtggagatctagaaacacttggatattgtatgattagatggttg

SEQ ID NO: 483116 - DNA, 60 bp, Artificial
  Synthetic oligonucleotide
ttgtatcttctcctcgattataagatctcatctcatacgcgtcatgagagtatcttacaa

SEQ ID NO: 483117 - DNA, 58 bp, Artificial
  Synthetic oligonucleotide
ttgtatcttttcgagaaatgttgaggcgttatcattactttaactcgtattggcctgc

SEQ ID NO: 483118 - DNA, 56 bp, Artificial
  Synthetic oligonucleotide
ttgtatgcacccaattacactaaataaaagtgcacaagatctaggaaaaaattttc

SEQ ID NO: 483119 - DNA, 57 bp, Artificial
  Synthetic oligonucleotide
ttgtatggacggaaaaactagtatgtggtccaggaaactcagatggtctgttttgta

SEQ ID NO: 483120 - DNA, 60 bp, Artificial
  Synthetic oligonucleotide
ttgtatggcgaacccttttcaatatatggcagattcctattaacatctgtgggtgattgt

SEQ ID NO: 483121 - DNA, 57 bp, Artificial
  Synthetic oligonucleotide
ttgtatggggatgtcgtggccttgaagttagtagaggtctacctctgggtgttggat

SEQ ID NO: 483122 - DNA, 52 bp, Artificial
  Synthetic oligonucleotide
ttgtatgtgatcgtcatttgtgcatccttgggttgaatgtgatctatttatg

SEQ ID NO: 483123 - DNA, 60 bp, Artificial
  Synthetic oligonucleotide
ttgtattacagaccaacgtatcttgcatcttgttacagcgcaaggcacaaccccctcgat

SEQ ID NO: 483124 - DNA, 60 bp, Artificial
  Synthetic oligonucleotide
ttgtattcacatgggctatccatcacccacccacttctgacgagcaggtgaagctctaca

SEQ ID NO: 483125 - DNA, 60 bp, Artificial
  Synthetic oligonucleotide
ttgtattcagagccgtagatgctgcaggtaatcaaacattccatacagttacagtttcaa

SEQ ID NO: 483126 - DNA, 59 bp, Artificial
  Synthetic oligonucleotide
ttgtattccgtgtgatagctggttggaccgttaatcgatcggctggcatacggaatata

SEQ ID NO: 483127 - DNA, 60 bp, Artificial
  Synthetic oligonucleotide
ttgtattcgtactgagaggatatacgtatcctcccaagctattctagtgatgcgtcgcta

SEQ ID NO: 483128 - DNA, 60 bp, Artificial
  Synthetic oligonucleotide
ttgtattctgctagcagtcatgctagcaatcctgtgtatcagacactgcgttgcaggtct

SEQ ID NO: 483129 - DNA, 55 bp, Artificial
  Synthetic oligonucleotide
ttgtattggtggttgattacgaggaaggtccgattagggttgcgatacgtgttcg

SEQ ID NO: 483130 - DNA, 55 bp, Artificial
  Synthetic oligonucleotide
ttgtatttacatcaccaacagaagaggttaccacatgggaagaacgaattagggg

SEQ ID NO: 483131 - DNA, 57 bp, Artificial
  Synthetic oligonucleotide
ttgtattttccctcgaattggataagcacgtggagatgaggttccccattttcgtga

SEQ ID NO: 483132 - DNA, 56 bp, Artificial
  Synthetic oligonucleotide
ttgtcaaaagaccctaaatcatttgaggtccttaaataagctttcccatcacattc

SEQ ID NO: 483133 - DNA, 57 bp, Artificial
  Synthetic oligonucleotide
ttgtcaaagcatcatggggtagtccattgggtcgtaaagaacccaacgatcttcgga

SEQ ID NO: 483134 - DNA, 56 bp, Artificial
  Synthetic oligonucleotide
ttgtcaaaggaagaggtgcagagaaggctaaccgcaagaggccttttaaaaatggc

SEQ ID NO: 483135 - DNA, 60 bp, Artificial
  Synthetic oligonucleotide
ttgtcaaaggcaagtacatcatggctttcaacccaccttggggcgatatcaacaagtcag

SEQ ID NO: 483136 - DNA, 58 bp, Artificial
  Synthetic oligonucleotide
ttgtcaacacgtgggaggcagactgtgaaagaaaataagggaacaaggatcagattta

SEQ ID NO: 483137 - DNA, 60 bp, Artificial
  Synthetic oligonucleotide
ttgtcaacaggaatggagaggtgattggtctgtatggcaatggcattcttgtcggtgaca

SEQ ID NO: 483138 - DNA, 55 bp, Artificial
  Synthetic oligonucleotide
ttgtcaacatcccgcttcgccgcaggcctacgcggtaccctcaccgtgtgagttg

SEQ ID NO: 483139 - DNA, 55 bp, Artificial
  Synthetic oligonucleotide
ttgtcaacctttactgactcacaggggctttatccaaccgcatccaggtgcatcc

SEQ ID NO: 483140 - DNA, 60 bp, Artificial
  Synthetic oligonucleotide
ttgtcaacgatggtggatatggggcgtcttaggcttttggatgctaatgatgtatagtgt

SEQ ID NO: 483141 - DNA, 60 bp, Artificial
  Synthetic oligonucleotide
ttgtcaactcactgaattaactttctgtcacgggtgctcactagctcatgtatgtcagtg

SEQ ID NO: 483142 - DNA, 59 bp, Artificial
  Synthetic oligonucleotide
ttgtcaagacacaaggacctgacatggaatttgtcaataagctgttcaagcagagcatt

SEQ ID NO: 483143 - DNA, 60 bp, Artificial
  Synthetic oligonucleotide
ttgtcaagaggctcctcagctcaattgatgtgtatctgtgccgcaggggtgatgtgtctt

SEQ ID NO: 483144 - DNA, 52 bp, Artificial
  Synthetic oligonucleotide
ttgtcaagatgtgggatccactgttaaacgaattcccagactccgtccacgg

SEQ ID NO: 483145 - DNA, 60 bp, Artificial
  Synthetic oligonucleotide
ttgtcaagatttcttgggaacaatgatatatctaaaagcaaatgtcaatataagtataca

SEQ ID NO: 483146 - DNA, 54 bp, Artificial
  Synthetic oligonucleotide
ttgtcaaggtaatggcccaccacttaccattacccgggaccactacaactggag

SEQ ID NO: 483147 - DNA, 52 bp, Artificial
  Synthetic oligonucleotide
ttgtcaagtacttggtcaatgaggctcgtgccgagtttggtctacccaaagc

SEQ ID NO: 483148 - DNA, 59 bp, Artificial
  Synthetic oligonucleotide
ttgtcaagtcggaatcaacccatactccatggaatggactggtttggccaatagattat

SEQ ID NO: 483149 - DNA, 60 bp, Artificial
  Synthetic oligonucleotide
ttgtcaagtgtgctttatacgcaaaggcttaggcatctcctatggcaggaagaagcggag

SEQ ID NO: 483150 - DNA, 59 bp, Artificial
  Synthetic oligonucleotide
ttgtcaagtttgctttctgacaaaaggcttaggcatttcctatggcaggaagaagcgga

SEQ ID NO: 483151 - DNA, 60 bp, Artificial
  Synthetic oligonucleotide
ttgtcaatactgatgattatgttacacgcacaggcatatattattatgctggcagctcta

SEQ ID NO: 483152 - DNA, 60 bp, Artificial
  Synthetic oligonucleotide
ttgtcaatatacagttgcattgcaagcagtgttgtgctagtagggctcatacttgcattc

SEQ ID NO: 483153 - DNA, 60 bp, Artificial
  Synthetic oligonucleotide
ttgtcaatatacgaatttgacatattgcagaggatgcgccctataccatgtatgtcagtg

SEQ ID NO: 483154 - DNA, 60 bp, Artificial
  Synthetic oligonucleotide
ttgtcaatccgtgagagcttgtacgccatagggcatcgttcgtactggtttagctgtgaa

SEQ ID NO: 483155 - DNA, 52 bp, Artificial
  Synthetic oligonucleotide
ttgtcaatcctattcgttcagcaaacgccggttcgtacgcattccgggaata

SEQ ID NO: 483156 - DNA, 55 bp, Artificial
  Synthetic oligonucleotide
ttgtcaatctggtaatgggcattgaagtccctcacacccttaatcatgcaatgcc

SEQ ID NO: 483157 - DNA, 55 bp, Artificial
  Synthetic oligonucleotide
ttgtcaatgcccaatgcacaatctagtatgaaggcagatgagattacaccgggtc

SEQ ID NO: 483158 - DNA, 58 bp, Artificial
  Synthetic oligonucleotide
ttgtcaattgcaacgatggggcctgcctacgggttccaatactcgcccaaacagcgag

SEQ ID NO: 483159 - DNA, 51 bp, Artificial
  Synthetic oligonucleotide
ttgtcacacatagatacactgggaacggtgattactcccagctagtgacca

SEQ ID NO: 483160 - DNA, 60 bp, Artificial
  Synthetic oligonucleotide
ttgtcaccgcacaagagattgtgctcaccatccaacatttcttcagtaaaagtgatgctt

SEQ ID NO: 483161 - DNA, 60 bp, Artificial
  Synthetic oligonucleotide
ttgtcacgaacaagtgacattatatttcgcggcacggcagcttgtccacgtcagtttgca

SEQ ID NO: 483162 - DNA, 60 bp, Artificial
  Synthetic oligonucleotide
ttgtcacgctcaaacattcgaatgtaaggacccacattaatctgattggcgtctattata

SEQ ID NO: 483163 - DNA, 57 bp, Artificial
  Synthetic oligonucleotide
ttgtcacgttcgctattagccgaggttcgcgatacggtaatttgaacaaacgcacgc

SEQ ID NO: 483164 - DNA, 58 bp, Artificial
  Synthetic oligonucleotide
ttgtcactagacacgttaaagtatgcataattggcacagtctctaaattttcccaagg

SEQ ID NO: 483165 - DNA, 60 bp, Artificial
  Synthetic oligonucleotide
ttgtcactgaatcgtgtatgactttcaaacatgatggtggaaaatactggaagcactgga

SEQ ID NO: 483166 - DNA, 57 bp, Artificial
  Synthetic oligonucleotide
ttgtcactggtgctttacaacgaagggcttaggcatatcctatggcaggaagaagcg

SEQ ID NO: 483167 - DNA, 58 bp, Artificial
  Synthetic oligonucleotide
ttgtcacttacaggcgaaaaggaaagctatggagttattatgtcagtccagaaggaag

SEQ ID NO: 483168 - DNA, 55 bp, Artificial
  Synthetic oligonucleotide
ttgtcagaacgctttgtgtttgtaccgttagatatctttaaggaatgatcgcccg

SEQ ID NO: 483169 - DNA, 53 bp, Artificial
  Synthetic oligonucleotide
ttgtcagaatctgctataagaaacgccctattaggacgtatagttagtcctag

SEQ ID NO: 483170 - DNA, 60 bp, Artificial
  Synthetic oligonucleotide
ttgtcagacctagatgccaccgctgttgataagacaaccaaacccggtgtagcctgtgat

SEQ ID NO: 483171 - DNA, 55 bp, Artificial
  Synthetic oligonucleotide
ttgtcagagctcacgctctgctgaggatgtgcaccatggtgaggcacctcgcggg

SEQ ID NO: 483172 - DNA, 60 bp, Artificial
  Synthetic oligonucleotide
ttgtcagatgctgtgggaaacgacatgccaggagggtattgtttagaaaaatggatgctg

SEQ ID NO: 483173 - DNA, 55 bp, Artificial
  Synthetic oligonucleotide
ttgtcagattctgaaggcaatgaaaatccagggggttactgcttaaccagatgga

SEQ ID NO: 483174 - DNA, 60 bp, Artificial
  Synthetic oligonucleotide
ttgtcagggcaacaaccctcgtatccggcataattgcgacgcaaaaacttgcagcaatgt

SEQ ID NO: 483175 - DNA, 59 bp, Artificial
  Synthetic oligonucleotide
ttgtcaggggtggagagtttaaatgtactattggacaatcgctcaaaccattatgagga

SEQ ID NO: 483176 - DNA, 50 bp, Artificial
  Synthetic oligonucleotide
ttgtcagtgaactcttggcaatctcaaatgagggagccataacctgtata

SEQ ID NO: 483177 - DNA, 60 bp, Artificial
  Synthetic oligonucleotide
ttgtcagtgggctgtgttgtcatctgtggcaggataactctgactggcaagcctgctgtt

SEQ ID NO: 483178 - DNA, 60 bp, Artificial
  Synthetic oligonucleotide
ttgtcataagagaaccatttgtggcatgtgggcccacggaatgtaggacatttttcctga

SEQ ID NO: 483179 - DNA, 55 bp, Artificial
  Synthetic oligonucleotide
ttgtcatacaatggatgggtaactgtattccagcaaacagcactggttgtacccc

SEQ ID NO: 483180 - DNA, 55 bp, Artificial
  Synthetic oligonucleotide
ttgtcatatgtcacctgattgctcgtgtaatgtctggtttcgtgccaatgcgagg

SEQ ID NO: 483181 - DNA, 55 bp, Artificial
  Synthetic oligonucleotide
ttgtcatcgctatttcgtcctatcgatgttcagattgtgttcggcgaatgatggc

SEQ ID NO: 483182 - DNA, 60 bp, Artificial
  Synthetic oligonucleotide
ttgtcatctcagaaagccaggggactgaggaggacgagcggaacctgagagccttcacgg

SEQ ID NO: 483183 - DNA, 60 bp, Artificial
  Synthetic oligonucleotide
ttgtcatctgttaacagtcttccatccagagactagtaatgctgagttaccacggatact

SEQ ID NO: 483184 - DNA, 55 bp, Artificial
  Synthetic oligonucleotide
ttgtcatggatctccacaatcactgtccccgtcgcgttaattggaacctgctgcc

SEQ ID NO: 483185 - DNA, 55 bp, Artificial
  Synthetic oligonucleotide
ttgtcatggatctccacaattaccgacccagtcgcgtttatcggcacctgctgtc

SEQ ID NO: 483186 - DNA, 56 bp, Artificial
  Synthetic oligonucleotide
ttgtcatgggtaataacacggctatatctacgtttattacgtatccttcacttggt

SEQ ID NO: 483187 - DNA, 60 bp, Artificial
  Synthetic oligonucleotide
ttgtcattatccatatttcctaaagtgtgacaaacactctatcgtctgtgatacacttgg

SEQ ID NO: 483188 - DNA, 50 bp, Artificial
  Synthetic oligonucleotide
ttgtcattctagtcctcggactgtcaatggtgaaatctgacaagatttgt

SEQ ID NO: 483189 - DNA, 60 bp, Artificial
  Synthetic oligonucleotide
ttgtcattctgcagcatttgaagacctgagagtgtcaagcttcatcagaggaataaaagt

SEQ ID NO: 483190 - DNA, 60 bp, Artificial
  Synthetic oligonucleotide
ttgtcatttcgttcactcgtattgtgaattatcattcgttcctcattctttggcttacat

SEQ ID NO: 483191 - DNA, 54 bp, Artificial
  Synthetic oligonucleotide
ttgtcatttttccacaacgatccagcccttgtgaagaaaattcatgagccaacc

SEQ ID NO: 483192 - DNA, 55 bp, Artificial
  Synthetic oligonucleotide
ttgtccaaaatgccctaaatgggaacggagacccaaacaacatggacaaagcagt

SEQ ID NO: 483193 - DNA, 55 bp, Artificial
  Synthetic oligonucleotide
ttgtccaaaatgcccttaatgggaatggggatccgaacaacatggacagagcggt

SEQ ID NO: 483194 - DNA, 53 bp, Artificial
  Synthetic oligonucleotide
ttgtccaaatttaatgtagaatgtgaattgcgcttctatgtcgtattgcgcgt

SEQ ID NO: 483195 - DNA, 60 bp, Artificial
  Synthetic oligonucleotide
ttgtccaacagacaagagtggacaaactgacccaaggtcgccagacttatgattggacat

SEQ ID NO: 483196 - DNA, 58 bp, Artificial
  Synthetic oligonucleotide
ttgtccaacatggggctatttgggcaaaatatgcagtaccactaccttgggagagccg

SEQ ID NO: 483197 - DNA, 54 bp, Artificial
  Synthetic oligonucleotide
ttgtccaaggcacaaacaaacgacggtcatggacctaccggcccagttaccgaa

SEQ ID NO: 483198 - DNA, 60 bp, Artificial
  Synthetic oligonucleotide
ttgtccaagttcaaggaagatgttgagtcagctttgcacctgttcaagacaacagtgaat

SEQ ID NO: 483199 - DNA, 60 bp, Artificial
  Synthetic oligonucleotide
ttgtccatacatcaattgtcttttccaatacattgtccaatacatggtaaactgctcttg

SEQ ID NO: 483200 - DNA, 60 bp, Artificial
  Synthetic oligonucleotide
ttgtcccaagcatcagaaattgtacactctcgggctaagatccaggatgggccgcacaag

SEQ ID NO: 483201 - DNA, 58 bp, Artificial
  Synthetic oligonucleotide
ttgtcccacaccttgtcctcgtactcccttgaggcttccttggtcatttccacatcta

SEQ ID NO: 483202 - DNA, 55 bp, Artificial
  Synthetic oligonucleotide
ttgtcccacggaagtgaatctgagaactccttcaactcgctaccaaagagctccg

SEQ ID NO: 483203 - DNA, 60 bp, Artificial
  Synthetic oligonucleotide
ttgtcccagatcagagtgtagtcggcattgtcaagcacggtatctttgacattgcaagtg

SEQ ID NO: 483204 - DNA, 60 bp, Artificial
  Synthetic oligonucleotide
ttgtcccgccgatgtgtgtgagctcatacgtggggcctatcccaagattcagacgaccag

SEQ ID NO: 483205 - DNA, 60 bp, Artificial
  Synthetic oligonucleotide
ttgtcccggacagcagtgtcgcatctcgtagtgtgatccgttcaattatcaaggcaagtc

SEQ ID NO: 483206 - DNA, 60 bp, Artificial
  Synthetic oligonucleotide
ttgtcccggagattacgagcggtgtcaactccaggacactatcagcctggaggcgacgct

SEQ ID NO: 483207 - DNA, 55 bp, Artificial
  Synthetic oligonucleotide
ttgtcccgtgggtgaagccccttccccatacaactcaaggtttgagtctgttgct

SEQ ID NO: 483208 - DNA, 58 bp, Artificial
  Synthetic oligonucleotide
ttgtccctatttattctgcgcgtctgcctagagtcgccactcttgagtcgaagagagg

SEQ ID NO: 483209 - DNA, 59 bp, Artificial
  Synthetic oligonucleotide
ttgtccgccaggtttgcaaatatcgctgctcccgcagagagcgacgctgctcgagccat

SEQ ID NO: 483210 - DNA, 57 bp, Artificial
  Synthetic oligonucleotide
ttgtccgctggggtgcggtcggtgtacaacaacgttaccgccacgcaatctgtccaa

SEQ ID NO: 483211 - DNA, 51 bp, Artificial
  Synthetic oligonucleotide
ttgtccggtagcttaccttggaaccaaacattgcaaccggttaaatcgtac

SEQ ID NO: 483212 - DNA, 52 bp, Artificial
  Synthetic oligonucleotide
ttgtccgtggggaagggtcgctgcaagcgcggaccccgttttcaccccttcc

SEQ ID NO: 483213 - DNA, 55 bp, Artificial
  Synthetic oligonucleotide
ttgtccgttgtcaagtgtcagtccgtgggaagccagacaacgtccttaccgctgt

SEQ ID NO: 483214 - DNA, 56 bp, Artificial
  Synthetic oligonucleotide
ttgtcctaaacttgtgaaagaatttgaccaaacagggctcggaaacacagatactc

SEQ ID NO: 483215 - DNA, 57 bp, Artificial
  Synthetic oligonucleotide
ttgtcctaacaagctcgtttaattgggccatggacatcgttatatttgattgggccc

SEQ ID NO: 483216 - DNA, 52 bp, Artificial
  Synthetic oligonucleotide
ttgtcctatccaaatgcacagagaataattatgagatcactgaagactgcat

SEQ ID NO: 483217 - DNA, 55 bp, Artificial
  Synthetic oligonucleotide
ttgtcctccacgagcggatcttgcatcgatctgaaactctccccattcgagggtg

SEQ ID NO: 483218 - DNA, 52 bp, Artificial
  Synthetic oligonucleotide
ttgtcctcgacctcggttaattgtggatgacgtggagcattgtgagccattc

SEQ ID NO: 483219 - DNA, 60 bp, Artificial
  Synthetic oligonucleotide
ttgtcctctcgcggaaatacacctcctttccatggctgctagggtgtgctgccaactgga

SEQ ID NO: 483220 - DNA, 52 bp, Artificial
  Synthetic oligonucleotide
ttgtcctgaacgccatctccgctgcgggcacacatgggatctggtggtccct

SEQ ID NO: 483221 - DNA, 60 bp, Artificial
  Synthetic oligonucleotide
ttgtcctgaagcagccgcacatgcgtgaagcagatgggtctcagggaattcatgggatat

SEQ ID NO: 483222 - DNA, 55 bp, Artificial
  Synthetic oligonucleotide
ttgtccttacaagttcgtttaactgggctacggacatggttatgttcgactgggc

SEQ ID NO: 483223 - DNA, 60 bp, Artificial
  Synthetic oligonucleotide
ttgtccttgcaattggcactgtcatgaggagcgcccgccctggtactgatttaattacac

SEQ ID NO: 483224 - DNA, 58 bp, Artificial
  Synthetic oligonucleotide
ttgtccttgcgacgtaggcggaagtagtagatgcggttggacgacttgtgtccacgtc

SEQ ID NO: 483225 - DNA, 58 bp, Artificial
  Synthetic oligonucleotide
ttgtcgaaactatattggaagattccaatagcaaaactttatcagaggtttctgatag

SEQ ID NO: 483226 - DNA, 55 bp, Artificial
  Synthetic oligonucleotide
ttgtcgacggttaccagcgtcgcgatatacgcatgcgttccgtctctcttaaagg

SEQ ID NO: 483227 - DNA, 60 bp, Artificial
  Synthetic oligonucleotide
ttgtcgaggaggggctcccatccggctgcccttgcaccacacagctgaatagtttggctc

SEQ ID NO: 483228 - DNA, 60 bp, Artificial
  Synthetic oligonucleotide
ttgtcgagtacacacatgatgtcgcaacaaagacgtaccaattcgacttccaaacaggag

SEQ ID NO: 483229 - DNA, 55 bp, Artificial
  Synthetic oligonucleotide
ttgtcgagttcaccttcagttctgagcagcctgttgagcgctacttcgggatgga

SEQ ID NO: 483230 - DNA, 60 bp, Artificial
  Synthetic oligonucleotide
ttgtcgatatacagctgcattgcaagcagtattgtactagtaggactcatacttgcattt

SEQ ID NO: 483231 - DNA, 60 bp, Artificial
  Synthetic oligonucleotide
ttgtcgatgtacgtcttgacgtcggaagacgatttagctctctgaatgtttggatggaaa

SEQ ID NO: 483232 - DNA, 60 bp, Artificial
  Synthetic oligonucleotide
ttgtcgcagtcgtaccaaactcaagcggcaagagatactgttagacagcagttctctaac

SEQ ID NO: 483233 - DNA, 60 bp, Artificial
  Synthetic oligonucleotide
ttgtcgccaatgtcgaggaagcccatgatgttgattatgatgcgttaatggatctgatga

SEQ ID NO: 483234 - DNA, 53 bp, Artificial
  Synthetic oligonucleotide
ttgtcgcgtttagattgcgccacgcttatggccaacgcatttttcgccggcaa

SEQ ID NO: 483235 - DNA, 53 bp, Artificial
  Synthetic oligonucleotide
ttgtcgctggaccgccgggttacattccaacgtaatccgaaggttcctggaaa

SEQ ID NO: 483236 - DNA, 60 bp, Artificial
  Synthetic oligonucleotide
ttgtcggcagaaaacgacggatatcagcacagctagatgtaggacatgccagctgtaaaa

SEQ ID NO: 483237 - DNA, 59 bp, Artificial
  Synthetic oligonucleotide
ttgtcggctctgttaaatttacgtgatcttggcaagcaactacacgcacatttaacaac

SEQ ID NO: 483238 - DNA, 54 bp, Artificial
  Synthetic oligonucleotide
ttgtcgggcatttgaattttgtgttaccatttactaaaggtaacatagaaatgt

SEQ ID NO: 483239 - DNA, 60 bp, Artificial
  Synthetic oligonucleotide
ttgtcgggctagttatactggcactcattataattgtcattgcagtcgtaatagccagga

SEQ ID NO: 483240 - DNA, 60 bp, Artificial
  Synthetic oligonucleotide
ttgtcggggatgttccatgtatcatgtatgtcaatggtgtagtcagtatggtagatgctt

SEQ ID NO: 483241 - DNA, 58 bp, Artificial
  Synthetic oligonucleotide
ttgtcgggtaagttccagtctgtgcgaatgacgcactgggatgcgctttcacgttgcg

SEQ ID NO: 483242 - DNA, 57 bp, Artificial
  Synthetic oligonucleotide
ttgtcgggtctatggttctggctctaaccagctggtatagtccgatattaggacctg

SEQ ID NO: 483243 - DNA, 55 bp, Artificial
  Synthetic oligonucleotide
ttgtcgggtttattggccgctcgcttatcggtaagagcgaacgcgcgatgtttcc

SEQ ID NO: 483244 - DNA, 55 bp, Artificial
  Synthetic oligonucleotide
ttgtcggtattttatggtctgtttgaccatttggttttgatttcgaatggcgttg

SEQ ID NO: 483245 - DNA, 55 bp, Artificial
  Synthetic oligonucleotide
ttgtcggtcaactgtttaccttctcacccaggcgccactggatgaagcaagactg

SEQ ID NO: 483246 - DNA, 60 bp, Artificial
  Synthetic oligonucleotide
ttgtcgtatttgatgaatttaccagtgtggttgatcgtcaagtggcaaaagtgatgtcta

SEQ ID NO: 483247 - DNA, 59 bp, Artificial
  Synthetic oligonucleotide
ttgtcgtcatgtcaaccaactggggagacgcacccgtgtccctctccgggatggctcac

SEQ ID NO: 483248 - DNA, 57 bp, Artificial
  Synthetic oligonucleotide
ttgtcgtgacgtttgagacacgtgatgggggcgtgcctaaacccggaagcatccctg

SEQ ID NO: 483249 - DNA, 60 bp, Artificial
  Synthetic oligonucleotide
ttgtcgtggatctccactatcaccgacccagtcgcgttgatcggtacttgctgcctgtac

SEQ ID NO: 483250 - DNA, 57 bp, Artificial
  Synthetic oligonucleotide
ttgtcgtggcactttaactgccgaggaatgaagccacttagcctttgttatccccaa

SEQ ID NO: 483251 - DNA, 60 bp, Artificial
  Synthetic oligonucleotide
ttgtcgttacagccatcagctaagccaaagctgtatgagcgccaaaatgcgatcatgaag

SEQ ID NO: 483252 - DNA, 52 bp, Artificial
  Synthetic oligonucleotide
ttgtcgttagctacgactttttcttatttcaatgtaaaccctacctattagc

SEQ ID NO: 483253 - DNA, 57 bp, Artificial
  Synthetic oligonucleotide
ttgtcgttggagactatattataagtaagtggttaccaaattgcatgagtttaagat

SEQ ID NO: 483254 - DNA, 60 bp, Artificial
  Synthetic oligonucleotide
ttgtcgtttagatccaaatggccgcaaagataattatgaggacctatggcacgtgcccac

SEQ ID NO: 483255 - DNA, 60 bp, Artificial
  Synthetic oligonucleotide
ttgtctaaaatactgggcctgtcgttatttgtgtagcgcatggagctgctccgtccaata

SEQ ID NO: 483256 - DNA, 60 bp, Artificial
  Synthetic oligonucleotide
ttgtctacgggccggagcacctcgccacgcattttccattaaaccactacagcgtgctca

SEQ ID NO: 483257 - DNA, 53 bp, Artificial
  Synthetic oligonucleotide
ttgtctcaccttggtattatgttgaacggggtaagtaagttgggggaacgcaa

SEQ ID NO: 483258 - DNA, 59 bp, Artificial
  Synthetic oligonucleotide
ttgtctccaaaacttatcatggcatcaaccttatacagttggaagaacaaggaagtgaa

SEQ ID NO: 483259 - DNA, 60 bp, Artificial
  Synthetic oligonucleotide
ttgtctcctcccgtcgtgctctggaaagtctgcgaaaactcaccactcagagagaatgac

SEQ ID NO: 483260 - DNA, 60 bp, Artificial
  Synthetic oligonucleotide
ttgtctcctcttagggattgcatagccagagtccaccaaaagctcaagaatcttggatct

SEQ ID NO: 483261 - DNA, 60 bp, Artificial
  Synthetic oligonucleotide
ttgtctctgtaacgtttctcttgatccatcagatgttccacgtactccagaagagtgatg

SEQ ID NO: 483262 - DNA, 60 bp, Artificial
  Synthetic oligonucleotide
ttgtctctgtgtcatcttatgtggcacaatggaagagacacatacaagcagtttgaggac

SEQ ID NO: 483263 - DNA, 56 bp, Artificial
  Synthetic oligonucleotide
ttgtctgacttaactttacggatcctgggggtagtgactcaatggcatcaaagaag

SEQ ID NO: 483264 - DNA, 50 bp, Artificial
  Synthetic oligonucleotide
ttgtctgagaccttagctaggtgtcgagaagcgaactcgtgtaccggcga

SEQ ID NO: 483265 - DNA, 55 bp, Artificial
  Synthetic oligonucleotide
ttgtctgatgctaaaggtcaatttgttggcatgggtgaattgattagacagttcc

SEQ ID NO: 483266 - DNA, 60 bp, Artificial
  Synthetic oligonucleotide
ttgtctgcatacattcgacgagctgtttggatcaatcattcacagtcatggcaatcttag

SEQ ID NO: 483267 - DNA, 60 bp, Artificial
  Synthetic oligonucleotide
ttgtctgcccgcctgtgtctatggacctgccgtagccagtggctacgacttcgaaaaaga

SEQ ID NO: 483268 - DNA, 60 bp, Artificial
  Synthetic oligonucleotide
ttgtctgctgcaagcagtacgcataatcaaggttctctacagcagcagtaagtaacttca

SEQ ID NO: 483269 - DNA, 54 bp, Artificial
  Synthetic oligonucleotide
ttgtctggaccttccgcccaagatttaccagacggtgtttttcgagttatcgcc

SEQ ID NO: 483270 - DNA, 55 bp, Artificial
  Synthetic oligonucleotide
ttgtctggtatttgccgatcacacatccgaacaaatgcatcgtagcgatcgaggt

SEQ ID NO: 483271 - DNA, 58 bp, Artificial
  Synthetic oligonucleotide
ttgtctgtggagaaggatacgttaatggttgacgtggaagggtccactacgctctcta

SEQ ID NO: 483272 - DNA, 57 bp, Artificial
  Synthetic oligonucleotide
ttgtctgtggtttcgaacccacagaccagaaatcaatgtcgtttaatgtgaattcct

SEQ ID NO: 483273 - DNA, 55 bp, Artificial
  Synthetic oligonucleotide
ttgtctgttcaaaacatcgcgacgttcgttcttgttctcacgcgggcagggatcc

SEQ ID NO: 483274 - DNA, 55 bp, Artificial
  Synthetic oligonucleotide
ttgtcttaaaaccatcctaatggggtacagctcattcaggtttagccagttaaga

SEQ ID NO: 483275 - DNA, 55 bp, Artificial
  Synthetic oligonucleotide
ttgtcttcccaaatgaagtaggagctaggatactaacgtcggagtcacagctgac

SEQ ID NO: 483276 - DNA, 60 bp, Artificial
  Synthetic oligonucleotide
ttgtcttctccagtgctgcatcttacaagagaataagactatttgactattccaggtgga

SEQ ID NO: 483277 - DNA, 51 bp, Artificial
  Synthetic oligonucleotide
ttgtcttcttcgggggggcccgcggagtaaaaaaggatcgggcccatagta

SEQ ID NO: 483278 - DNA, 60 bp, Artificial
  Synthetic oligonucleotide
ttgtcttgccgcttcgcgaatcgccctcaatgacaatactaatcggtctatctggccgcg

SEQ ID NO: 483279 - DNA, 59 bp, Artificial
  Synthetic oligonucleotide
ttgtcttgctcaaggtccaccacagtattttcccatgctcttcccacaatcgaggtcct

SEQ ID NO: 483280 - DNA, 58 bp, Artificial
  Synthetic oligonucleotide
ttgtcttggattgtggagttaatccattcctccaaatttgggaggagacattggccaa

SEQ ID NO: 483281 - DNA, 55 bp, Artificial
  Synthetic oligonucleotide
ttgtcttgtaatcaagaccctcttctctcagagctttaagtgattcaagtcccaa

SEQ ID NO: 483282 - DNA, 60 bp, Artificial
  Synthetic oligonucleotide
ttgtcttgttactccatcagtgaaggtatgtatgattggtactgtatcaaagttacagcc

SEQ ID NO: 483283 - DNA, 60 bp, Artificial
  Synthetic oligonucleotide
ttgtctttaatctcagtcccattattgtagctctcttatctcaatctctgaacctctctc

SEQ ID NO: 483284 - DNA, 52 bp, Artificial
  Synthetic oligonucleotide
ttgtctttgtacatgcctatactttcctgagtaggcgttcgcattcatctgt

SEQ ID NO: 483285 - DNA, 55 bp, Artificial
  Synthetic oligonucleotide
ttgtgaaaggaagatgtccacactttgagcaatacctgatacaaactgaagaggc

SEQ ID NO: 483286 - DNA, 60 bp, Artificial
  Synthetic oligonucleotide
ttgtgaacaccaagccatgcgtgccccagtcaccaagctaaacgccagacatccagtgcg

SEQ ID NO: 483287 - DNA, 54 bp, Artificial
  Synthetic oligonucleotide
ttgtgaagagttttgggggtttagctggttagaatgtaatcagacagaaagtgc

SEQ ID NO: 483288 - DNA, 58 bp, Artificial
  Synthetic oligonucleotide
ttgtgaagctcgcagcatcctacgcctgtgctgcctatggccgtccttacaaggactg

SEQ ID NO: 483289 - DNA, 55 bp, Artificial
  Synthetic oligonucleotide
ttgtgaaggtcgactcttcaacccttatagtctcaagcatgtttccaccatccac

SEQ ID NO: 483290 - DNA, 50 bp, Artificial
  Synthetic oligonucleotide
ttgtgaatacgtgcagctgttagggaatgcagggtccgcggggtatatag

SEQ ID NO: 483291 - DNA, 60 bp, Artificial
  Synthetic oligonucleotide
ttgtgaatccccagtaccttcctgatgttgtgattgaatcttatctgtattgaaatgatg

SEQ ID NO: 483292 - DNA, 60 bp, Artificial
  Synthetic oligonucleotide
ttgtgaatctactggcccgcccgctggaagcccagtttatggcaccacattactcatacg

SEQ ID NO: 483293 - DNA, 54 bp, Artificial
  Synthetic oligonucleotide
ttgtgaatgctatgacgcggggtgtgcttggtatgagcttacaccggcagagac

SEQ ID NO: 483294 - DNA, 55 bp, Artificial
  Synthetic oligonucleotide
ttgtgaatgctcaggtttacggtgcgaggttgccttatatcaaagcatgtaaata

SEQ ID NO: 483295 - DNA, 60 bp, Artificial
  Synthetic oligonucleotide
ttgtgaattcgtgagtgattgtgacggacaagtcatagaaaccgatttctctaatctcga

SEQ ID NO: 483296 - DNA, 60 bp, Artificial
  Synthetic oligonucleotide
ttgtgaattctgcttgttttgtgtccccctccgtcaatctcatgtcgtgtatctctatca

SEQ ID NO: 483297 - DNA, 55 bp, Artificial
  Synthetic oligonucleotide
ttgtgacaactgattttgtaggctatgcacccttatattttatattgcaagctgt

SEQ ID NO: 483298 - DNA, 55 bp, Artificial
  Synthetic oligonucleotide
ttgtgacaatacatctgcgaagtacttcaagaaatgcgactgcggtgagaagtac

SEQ ID NO: 483299 - DNA, 60 bp, Artificial
  Synthetic oligonucleotide
ttgtgacacaattgcccgctgtaattgtcagacaggggtgtattactgcagttcaaggag

SEQ ID NO: 483300 - DNA, 55 bp, Artificial
  Synthetic oligonucleotide
ttgtgacacagtaaagtatacaaagaccattttgtcaaatcagggccccttcaag

SEQ ID NO: 483301 - DNA, 56 bp, Artificial
  Synthetic oligonucleotide
ttgtgaccatgatctcatcatgcttctttcccgatcagtacggcgcactcattgct

SEQ ID NO: 483302 - DNA, 55 bp, Artificial
  Synthetic oligonucleotide
ttgtgacgctaagaccgtcagtatcccacgagtgcaaatcagcagtgcctgttga

SEQ ID NO: 483303 - DNA, 55 bp, Artificial
  Synthetic oligonucleotide
ttgtgacggctcagcactccgcggcgcggccccacgaagaccagctcctcggagt

SEQ ID NO: 483304 - DNA, 57 bp, Artificial
  Synthetic oligonucleotide
ttgtgacttggacccccaagcccgcgtggccattaagtccctcactgagaggcttta

SEQ ID NO: 483305 - DNA, 58 bp, Artificial
  Synthetic oligonucleotide
ttgtgacttttcgcagaactaaatcgggtatttgcaccaacatattggttctagtcta

SEQ ID NO: 483306 - DNA, 53 bp, Artificial
  Synthetic oligonucleotide
ttgtgagaaattaactgacgatgttttgttacataatctaattcctctatacg

SEQ ID NO: 483307 - DNA, 55 bp, Artificial
  Synthetic oligonucleotide
ttgtgagatcaattgtcgtgttctcccatgctctccccacaactgacgttctaca

SEQ ID NO: 483308 - DNA, 55 bp, Artificial
  Synthetic oligonucleotide
ttgtgagcagttactaattcccaattcacccattcggagctatgagtgttttctc

SEQ ID NO: 483309 - DNA, 60 bp, Artificial
  Synthetic oligonucleotide
ttgtgatacatcaggactgtttaatagcagttggccaattaatagcagctggccaactaa

SEQ ID NO: 483310 - DNA, 60 bp, Artificial
  Synthetic oligonucleotide
ttgtgatacttggtttacctctcatgtccgttcacatatctctgatccttctggactgag

SEQ ID NO: 483311 - DNA, 57 bp, Artificial
  Synthetic oligonucleotide
ttgtgatagtttccaaaacaaggaatgggacctttttgtagaacgcagcacagctta

SEQ ID NO: 483312 - DNA, 60 bp, Artificial
  Synthetic oligonucleotide
ttgtgatcgatgaatgttataagatgccacgaggctacctggatttgtccattctagccg

SEQ ID NO: 483313 - DNA, 60 bp, Artificial
  Synthetic oligonucleotide
ttgtgatgcacccagtgcatccaacaggtgacgctacctgttattagagcgctatctatt

SEQ ID NO: 483314 - DNA, 60 bp, Artificial
  Synthetic oligonucleotide
ttgtgatgcagacgttactgtttctgaaaatcaatggaacgcttatggtttgtgtagctt

SEQ ID NO: 483315 - DNA, 60 bp, Artificial
  Synthetic oligonucleotide
ttgtgatgcggaataacctgggtctaatacgcttgggcccaattgatgaagttctctata

SEQ ID NO: 483316 - DNA, 60 bp, Artificial
  Synthetic oligonucleotide
ttgtgatgctgatggatcgcaattcgatagctcgctttccccgtacttaatcaatgctgt

SEQ ID NO: 483317 - DNA, 60 bp, Artificial
  Synthetic oligonucleotide
ttgtgatggcagtccaaacaagcaatatcatgttcggttcaattccagtcactctagtcg

SEQ ID NO: 483318 - DNA, 60 bp, Artificial
  Synthetic oligonucleotide
ttgtgattccaggggagcggccctcaggcatgttcgattcttcggtcctgtgtgagtgtt

SEQ ID NO: 483319 - DNA, 60 bp, Artificial
  Synthetic oligonucleotide
ttgtgattgtcgtaatgataatagacaagacttgaaggagtacgcggtgggagcttggag

SEQ ID NO: 483320 - DNA, 60 bp, Artificial
  Synthetic oligonucleotide
ttgtgcaaaattctccaattagtaatctattgagagttgctgcctggaagaagggttgtc

SEQ ID NO: 483321 - DNA, 60 bp, Artificial
  Synthetic oligonucleotide
ttgtgcaaacctacagacgccatgttcaaaaatcctgcagaaagacctcggaaattgcat

SEQ ID NO: 483322 - DNA, 60 bp, Artificial
  Synthetic oligonucleotide
ttgtgcaaatagtttaaagtgttttagatatcgctgttcacacaaacattcacatttata

SEQ ID NO: 483323 - DNA, 60 bp, Artificial
  Synthetic oligonucleotide
ttgtgcaaccaaaaatagagatacttggggaaccatacagtgcttaccagacaatgatga

SEQ ID NO: 483324 - DNA, 60 bp, Artificial
  Synthetic oligonucleotide
ttgtgcaagagctccaaatctggtgaaatacaaaccaatgactgacacaattgactgcac

SEQ ID NO: 483325 - DNA, 50 bp, Artificial
  Synthetic oligonucleotide
ttgtgcaagagttcaattacctatgttgaacacggacatgacctgtgaca

SEQ ID NO: 483326 - DNA, 60 bp, Artificial
  Synthetic oligonucleotide
ttgtgcaaggagttactggacgaaacgcacagatgtaaaggagctagctccaccagagtt

SEQ ID NO: 483327 - DNA, 55 bp, Artificial
  Synthetic oligonucleotide
ttgtgcaagggagacttgggaatgacgcaagattttattgccctacggggtcctt

SEQ ID NO: 483328 - DNA, 60 bp, Artificial
  Synthetic oligonucleotide
ttgtgcaccatcttgcccgattcacaccattcgatcatcagcgagatgaatttatagttt

SEQ ID NO: 483329 - DNA, 51 bp, Artificial
  Synthetic oligonucleotide
ttgtgcacccccggggaccctgataacgcgcgtgcgcacagactcagatgt

SEQ ID NO: 483330 - DNA, 55 bp, Artificial
  Synthetic oligonucleotide
ttgtgcactggtacttcccctcgaactggatgagcacgtgaagatgaggttcccc

SEQ ID NO: 483331 - DNA, 55 bp, Artificial
  Synthetic oligonucleotide
ttgtgcagacgaatttgccttcgaactgcaccaacaccatgaggtgaggttcccc

SEQ ID NO: 483332 - DNA, 58 bp, Artificial
  Synthetic oligonucleotide
ttgtgcagagggcggttgagtataccggtcgtttgaaagggaatcaactcactgcgga

SEQ ID NO: 483333 - DNA, 60 bp, Artificial
  Synthetic oligonucleotide
ttgtgcagccatggatgattttcagttgatcccaatgataagtaaatgcagaaccaaaga

SEQ ID NO: 483334 - DNA, 55 bp, Artificial
  Synthetic oligonucleotide
ttgtgcagtggaaggaagcgcagatacttcttgacaatataacaacactgcgggg

SEQ ID NO: 483335 - DNA, 51 bp, Artificial
  Synthetic oligonucleotide
ttgtgcatggatggtaagacattataaacgaggggaaatgcggcaaatgag

SEQ ID NO: 483336 - DNA, 60 bp, Artificial
  Synthetic oligonucleotide
ttgtgcattgtcgtatggccgccccgagccagcgcaaggccgtgctgtccacgcttgtgg

SEQ ID NO: 483337 - DNA, 59 bp, Artificial
  Synthetic oligonucleotide
ttgtgcccagttcagaccctgtcattgccacgctactaaggactccctgaataccgtgg

SEQ ID NO: 483338 - DNA, 55 bp, Artificial
  Synthetic oligonucleotide
ttgtgccgtctactccttgtatgcttttcctaggacgagaaggaacctctactgc

SEQ ID NO: 483339 - DNA, 60 bp, Artificial
  Synthetic oligonucleotide
ttgtgcctgtatcaattacgtcaagaaacatagtacacactaaagcgcaagctaacgaag

SEQ ID NO: 483340 - DNA, 59 bp, Artificial
  Synthetic oligonucleotide
ttgtgcgaagaaccggaggattgccttgaggtcctggtggcgaacgagcaagtgaccaa

SEQ ID NO: 483341 - DNA, 52 bp, Artificial
  Synthetic oligonucleotide
ttgtgcggaccccacaaagtctccaaatggcattttggtaatttccatttac

SEQ ID NO: 483342 - DNA, 59 bp, Artificial
  Synthetic oligonucleotide
ttgtgcggcaaaccaacattgacctccaaacacttttctgcagtacgcaaggcttaaca

SEQ ID NO: 483343 - DNA, 60 bp, Artificial
  Synthetic oligonucleotide
ttgtgcggtacagtcgcattggacaacgggggtctatgcacactcgcagcggaaagcaca

SEQ ID NO: 483344 - DNA, 60 bp, Artificial
  Synthetic oligonucleotide
ttgtgcgtactgggatggacccaagaatgtgctctctgatgcaaggatcaactctcccga

SEQ ID NO: 483345 - DNA, 50 bp, Artificial
  Synthetic oligonucleotide
ttgtgcgtggcttcagcttagttatgtgcacaaacagtctgattcatggc

SEQ ID NO: 483346 - DNA, 56 bp, Artificial
  Synthetic oligonucleotide
ttgtgctacccgagggtaactattcggaaaccatgactattgacttaatgaacaat

SEQ ID NO: 483347 - DNA, 60 bp, Artificial
  Synthetic oligonucleotide
ttgtgctaccgccaagatgcgtttctctgaagacgtaggatcctcacttaccaccgcaga

SEQ ID NO: 483348 - DNA, 60 bp, Artificial
  Synthetic oligonucleotide
ttgtgctccgaaaacaacactgcaaacttcaaacgctgcagcccactagtgtgtgggaaa

SEQ ID NO: 483349 - DNA, 60 bp, Artificial
  Synthetic oligonucleotide
ttgtgctctggggggtgcaccaccctccaactgccggtgagcagcaaagtctataccaga

SEQ ID NO: 483350 - DNA, 60 bp, Artificial
  Synthetic oligonucleotide
ttgtgctgactgagtgtgccgctaacgctaagtcagcgaatgatctgaggcagtacatcg

SEQ ID NO: 483351 - DNA, 60 bp, Artificial
  Synthetic oligonucleotide
ttgtgctgtgattacagtagttttgatgggttgctttccaagcaagtgatgaaagctatg

SEQ ID NO: 483352 - DNA, 55 bp, Artificial
  Synthetic oligonucleotide
ttgtgcttcccccggctaaactcaaccgtctctactaccgtatgaaggtcacttg

SEQ ID NO: 483353 - DNA, 55 bp, Artificial
  Synthetic oligonucleotide
ttgtgcttgccaccgctacccctccgggctccgtcactgtgccccatcctaacat

SEQ ID NO: 483354 - DNA, 53 bp, Artificial
  Synthetic oligonucleotide
ttgtggaacttctgggacgctgggtgtgggaagccctcaaatattggcggaac

SEQ ID NO: 483355 - DNA, 57 bp, Artificial
  Synthetic oligonucleotide
ttgtggaattccaagctaaaaacacgggccaagctagcttggaaaggattatcgcat

SEQ ID NO: 483356 - DNA, 60 bp, Artificial
  Synthetic oligonucleotide
ttgtggacagccggggcatcaagcaagaaactgtcccctaccacagactgacagtcagag

SEQ ID NO: 483357 - DNA, 60 bp, Artificial
  Synthetic oligonucleotide
ttgtggaccgtaaaccacatctcggttcatcaggtgctctgcataccttcgatgagctat

SEQ ID NO: 483358 - DNA, 55 bp, Artificial
  Synthetic oligonucleotide
ttgtggactgtttaccacggagctggcaacaagactctagccggctcacggggcc

SEQ ID NO: 483359 - DNA, 60 bp, Artificial
  Synthetic oligonucleotide
ttgtggagactgtcttaggagaccacttttatgtacgaaatgtgcttatgaccatgttat

SEQ ID NO: 483360 - DNA, 60 bp, Artificial
  Synthetic oligonucleotide
ttgtggaggagaatttttctattgtaatacatcaagcctgttcaatagtagctggagtag

SEQ ID NO: 483361 - DNA, 58 bp, Artificial
  Synthetic oligonucleotide
ttgtggaggagacacccctacggcgagtattcaacaacccactgagcggaaaagcatg

SEQ ID NO: 483362 - DNA, 59 bp, Artificial
  Synthetic oligonucleotide
ttgtggaggaggtttttcagtagatagatttactttacaatggttatatgatcaatgga

SEQ ID NO: 483363 - DNA, 56 bp, Artificial
  Synthetic oligonucleotide
ttgtggagggcctgagaaattactccatattaagggtttacttatatctctaggcc

SEQ ID NO: 483364 - DNA, 57 bp, Artificial
  Synthetic oligonucleotide
ttgtggaggggaatttttctactgtgagacaacacaactgtttaatagcacttggat

SEQ ID NO: 483365 - DNA, 60 bp, Artificial
  Synthetic oligonucleotide
ttgtggaggtggggcatcttgctccttgggacattgatgatctgtagtgctaaaaaattg

SEQ ID NO: 483366 - DNA, 53 bp, Artificial
  Synthetic oligonucleotide
ttgtggagtggtcattccttcctcacagtacagttaagacttttacattgtac

SEQ ID NO: 483367 - DNA, 60 bp, Artificial
  Synthetic oligonucleotide
ttgtggatatgttaggaacgtgttagcgttcctgtgtgagaactgacggttggatgagga

SEQ ID NO: 483368 - DNA, 60 bp, Artificial
  Synthetic oligonucleotide
ttgtggatccatgtgctttggtgtcgatggacaagtatcgacatatgatcaaaactcaat

SEQ ID NO: 483369 - DNA, 60 bp, Artificial
  Synthetic oligonucleotide
ttgtggatggggtatgagctccatccagacaaatggacagtacagcccatccaattacct

SEQ ID NO: 483370 - DNA, 55 bp, Artificial
  Synthetic oligonucleotide
ttgtggcacacgtaccggcgccccattgggttaggaacgaatgcagttgctacca

SEQ ID NO: 483371 - DNA, 59 bp, Artificial
  Synthetic oligonucleotide
ttgtggcaccaatgagaggaggtcgaccaattaggatgatttcttttcccgacactctg

SEQ ID NO: 483372 - DNA, 60 bp, Artificial
  Synthetic oligonucleotide
ttgtggccactcctgctattgctcctagtgttgcctcagcgggcgtacgctatggacaat

SEQ ID NO: 483373 - DNA, 56 bp, Artificial
  Synthetic oligonucleotide
ttgtggccaggtacattggtcaaccttccaatccacctggtacgggagcgaggtcg

SEQ ID NO: 483374 - DNA, 60 bp, Artificial
  Synthetic oligonucleotide
ttgtggcccagagctatcagtcgaaggctagggtgcttacatttggggagagtacaggcc

SEQ ID NO: 483375 - DNA, 54 bp, Artificial
  Synthetic oligonucleotide
ttgtggccccaggtttaggaaccctacctgatgttgttaggtttgctgggcgac

SEQ ID NO: 483376 - DNA, 55 bp, Artificial
  Synthetic oligonucleotide
ttgtggccctaacccgtcatacggagaaatgtgtggtcgttgatgccccgggact

SEQ ID NO: 483377 - DNA, 50 bp, Artificial
  Synthetic oligonucleotide
ttgtggccgagggacctccgacccgtggtgttctaaccctttttcgtacc

SEQ ID NO: 483378 - DNA, 60 bp, Artificial
  Synthetic oligonucleotide
ttgtggcctctgagcatctgctacaccaatcccttgttggtaagcagtctccattccaga

SEQ ID NO: 483379 - DNA, 60 bp, Artificial
  Synthetic oligonucleotide
ttgtggcgcactaatgacagcaaggtgtatttgccacctgcacctgtgtctcgaattgtg

SEQ ID NO: 483380 - DNA, 60 bp, Artificial
  Synthetic oligonucleotide
ttgtggcttcttgctatttcatctatgatagtaaagaagtgtacaataaacgaggatgtg

SEQ ID NO: 483381 - DNA, 60 bp, Artificial
  Synthetic oligonucleotide
ttgtggcttggagcatagggatcgcgcagaactgtcacccttgctcctctccactacaac

SEQ ID NO: 483382 - DNA, 60 bp, Artificial
  Synthetic oligonucleotide
ttgtgggacaagcgttcacctttagacctcgccaacacaagactgtgcagacgtgcaact

SEQ ID NO: 483383 - DNA, 57 bp, Artificial
  Synthetic oligonucleotide
ttgtgggcaacagtgtactatggagtacctgtgtggaaagatgcggagacaacactc

SEQ ID NO: 483384 - DNA, 55 bp, Artificial
  Synthetic oligonucleotide
ttgtgggcgcaggcttagctggcgccgctattggcagtgttggactggggaaggt

SEQ ID NO: 483385 - DNA, 52 bp, Artificial
  Synthetic oligonucleotide
ttgtgggctttgggtatttgaccatctcacggcttaaaagtgttcaagactc

SEQ ID NO: 483386 - DNA, 55 bp, Artificial
  Synthetic oligonucleotide
ttgtggggatggggcatgatgctccttggaatgttgatgacctgtagtattgcag

SEQ ID NO: 483387 - DNA, 56 bp, Artificial
  Synthetic oligonucleotide
ttgtggggcggctagaggtttcattttaaacggatttggcagattaatctggccta

SEQ ID NO: 483388 - DNA, 55 bp, Artificial
  Synthetic oligonucleotide
ttgtggggctccacctgcccgctaagagggccaccggtgtccaggcagctcttct

SEQ ID NO: 483389 - DNA, 60 bp, Artificial
  Synthetic oligonucleotide
ttgtgggtgaagcagattactgcatggacacgtttcagaaatgctcaaggcgagctgact

SEQ ID NO: 483390 - DNA, 57 bp, Artificial
  Synthetic oligonucleotide
ttgtgggttacagtttattaaggggttcctgtgtggagagatgcagataccacccta

SEQ ID NO: 483391 - DNA, 58 bp, Artificial
  Synthetic oligonucleotide
ttgtggtaaaattatagtgtttgacgactactccaagcttcctcaaggctacatcgag

SEQ ID NO: 483392 - DNA, 53 bp, Artificial
  Synthetic oligonucleotide
ttgtggtaacaaacacaactaccccgatgagctgaaccccttctcagagagcg

SEQ ID NO: 483393 - DNA, 56 bp, Artificial
  Synthetic oligonucleotide
ttgtggtaagattcactaaacgcaaaccgtattttagattcaaagatgataagttg

SEQ ID NO: 483394 - DNA, 54 bp, Artificial
  Synthetic oligonucleotide
ttgtggtatcaaagaatgagggcgacttccccttcacctgaagaaagggttttc

SEQ ID NO: 483395 - DNA, 51 bp, Artificial
  Synthetic oligonucleotide
ttgtggtatgagcaaagtgaatcctgagaacgctaaagtgaagacccgagg

SEQ ID NO: 483396 - DNA, 55 bp, Artificial
  Synthetic oligonucleotide
ttgtggtcaacatggttaacaccaaccccatggtcctaaactgtgatctgattga

SEQ ID NO: 483397 - DNA, 50 bp, Artificial
  Synthetic oligonucleotide
ttgtggtcaacctccttaatatcagttgagacatgtagtgtgacaatcgc

SEQ ID NO: 483398 - DNA, 60 bp, Artificial
  Synthetic oligonucleotide
ttgtggtcaatactgagttggttgccaacattactttggcagctgcaggagcgtttagtt

SEQ ID NO: 483399 - DNA, 50 bp, Artificial
  Synthetic oligonucleotide
ttgtggtcgcgtgaggtgttttcgcgccacgggtctgaggttgtgcgacg

SEQ ID NO: 483400 - DNA, 58 bp, Artificial
  Synthetic oligonucleotide
ttgtggtgacggagagacttgggttgaactgttcatccagatggtcaacacgaacccg

SEQ ID NO: 483401 - DNA, 59 bp, Artificial
  Synthetic oligonucleotide
ttgtggtgcgctggtacttgggtggactggcacaaaaggaaaattgtgcataccaccac

SEQ ID NO: 483402 - DNA, 55 bp, Artificial
  Synthetic oligonucleotide
ttgtggtgttcctcagagactatccgatacaataatactaaacgacaagccaaag

SEQ ID NO: 483403 - DNA, 58 bp, Artificial
  Synthetic oligonucleotide
ttgtggttgaacctgtactgcacgtggtatatcctgatgttcgtgtacagtggatcct

SEQ ID NO: 483404 - DNA, 55 bp, Artificial
  Synthetic oligonucleotide
ttgtggttgcggtgatccttctttccatcttgctctacttagccatcataatttt

SEQ ID NO: 483405 - DNA, 55 bp, Artificial
  Synthetic oligonucleotide
ttgtggttgttggttgggacacgggtgtgcttgtgatcgtacaaccattcaaagt

SEQ ID NO: 483406 - DNA, 59 bp, Artificial
  Synthetic oligonucleotide
ttgtgtaacaattggcttatttacaataagttagttgacgtctacgcattggtgactga

SEQ ID NO: 483407 - DNA, 59 bp, Artificial
  Synthetic oligonucleotide
ttgtgtaaggtccgtctgacccctgaagtaatggcctatttacatactatgaatgaatc

SEQ ID NO: 483408 - DNA, 55 bp, Artificial
  Synthetic oligonucleotide
ttgtgtacactcgcacttccaaagtgctcggagctcctctcaagctcgccgcccc

SEQ ID NO: 483409 - DNA, 56 bp, Artificial
  Synthetic oligonucleotide
ttgtgtacccaaccggggtgagcacacagacttgtcttcttataaagggtcgcacc

SEQ ID NO: 483410 - DNA, 54 bp, Artificial
  Synthetic oligonucleotide
ttgtgtacctaccgggatggtaataaaacctgagaagtgcgaacggacggaaga

SEQ ID NO: 483411 - DNA, 55 bp, Artificial
  Synthetic oligonucleotide
ttgtgtaggctcctcaggggagccaaaggattaacagatatagtaacactgactg

SEQ ID NO: 483412 - DNA, 59 bp, Artificial
  Synthetic oligonucleotide
ttgtgtagtcgttttgctcctcccgtataagccagccatatctcacggcaacccacaaa

SEQ ID NO: 483413 - DNA, 56 bp, Artificial
  Synthetic oligonucleotide
ttgtgtataacggtccacacgccggtatatacgatgactggggttgtacaaaggcg

SEQ ID NO: 483414 - DNA, 55 bp, Artificial
  Synthetic oligonucleotide
ttgtgtatacaatgtctccgacatctgttgaccgtgtaggtagctggtaccgacg

SEQ ID NO: 483415 - DNA, 50 bp, Artificial
  Synthetic oligonucleotide
ttgtgtatatgaatgaacttacggccgaaggccgtaagtaagaatatgcc

SEQ ID NO: 483416 - DNA, 58 bp, Artificial
  Synthetic oligonucleotide
ttgtgtattacgatcccctaaagttgatctcgaaacttggtgctaaacacatcaaaga

SEQ ID NO: 483417 - DNA, 60 bp, Artificial
  Synthetic oligonucleotide
ttgtgtcaaagttcgagtaaagcgcaagatcccgtcttccgcacatcgcgtatcttcgcc

SEQ ID NO: 483418 - DNA, 60 bp, Artificial
  Synthetic oligonucleotide
ttgtgtcacccgctgcactggaccgtgttggaaccatagcaaaggcgtatgcgttgtgga

SEQ ID NO: 483419 - DNA, 57 bp, Artificial
  Synthetic oligonucleotide
ttgtgtcacggaaacgagattcaagccgtaaatttgcggtaactgttagccgtcaca

SEQ ID NO: 483420 - DNA, 60 bp, Artificial
  Synthetic oligonucleotide
ttgtgtcagcatgtaatgactttagtgttaggttgctccgtgacacgacacacatatcgc

SEQ ID NO: 483421 - DNA, 53 bp, Artificial
  Synthetic oligonucleotide
ttgtgtcagtgggaagtcgtacgcattaccactgctgtgctaatgacttgagt

SEQ ID NO: 483422 - DNA, 60 bp, Artificial
  Synthetic oligonucleotide
ttgtgtcattccaagttctgcaatccatgtacaacgactgcctgagcatacttcctgata

SEQ ID NO: 483423 - DNA, 59 bp, Artificial
  Synthetic oligonucleotide
ttgtgtccactttccaccgaaaagacacagactcacgccaagcaaggagtgtacattcc

SEQ ID NO: 483424 - DNA, 55 bp, Artificial
  Synthetic oligonucleotide
ttgtgtcctcttgtctagttgtgactgtgtaaggtttcccatgtaggggcgagga

SEQ ID NO: 483425 - DNA, 55 bp, Artificial
  Synthetic oligonucleotide
ttgtgtcgaaacccgacacctgggaacacgccgcagctacgtgcgactatttcgc

SEQ ID NO: 483426 - DNA, 60 bp, Artificial
  Synthetic oligonucleotide
ttgtgtcggttaccgagcagtatgaatgcgctgacatccccgaagctcctcgcgcattcg

SEQ ID NO: 483427 - DNA, 55 bp, Artificial
  Synthetic oligonucleotide
ttgtgtctatcggggataatttccggtcttaccgggattacaggatactcgaaca

SEQ ID NO: 483428 - DNA, 55 bp, Artificial
  Synthetic oligonucleotide
ttgtgtctattgtctcacagagttggtgcggttccttgcacttaacgttgtgtaa

SEQ ID NO: 483429 - DNA, 60 bp, Artificial
  Synthetic oligonucleotide
ttgtgtctttctcatgcaccatcgtcctagttacgaggttcgcttgcgattctctgattt

SEQ ID NO: 483430 - DNA, 58 bp, Artificial
  Synthetic oligonucleotide
ttgtgtgaaacgctcgattgtctggactcctttccccgtacaggtctgaggcaagacc

SEQ ID NO: 483431 - DNA, 60 bp, Artificial
  Synthetic oligonucleotide
ttgtgtgaaccagaaaacctaaatgattcagtcctaatcagttactccagtgatcttgtc

SEQ ID NO: 483432 - DNA, 57 bp, Artificial
  Synthetic oligonucleotide
ttgtgtgaggggcgccccccgcaaggggcgagagcggcgactggtgagtacgccaat

SEQ ID NO: 483433 - DNA, 55 bp, Artificial
  Synthetic oligonucleotide
ttgtgtgcagtcaaaagatctcttgcaagacctttcagaacattgcaaggagttg

SEQ ID NO: 483434 - DNA, 60 bp, Artificial
  Synthetic oligonucleotide
ttgtgtgcatcaagggataggtgtaaaagacaccaaggaagctttagacaagatagagga

SEQ ID NO: 483435 - DNA, 60 bp, Artificial
  Synthetic oligonucleotide
ttgtgtgcctgccgtgacccgtaagcatgtgttgactgccgagtctgggtctattgtgtc

SEQ ID NO: 483436 - DNA, 56 bp, Artificial
  Synthetic oligonucleotide
ttgtgtgcctggtataagctataatgttaaagtcaaggattttatagttaacggtg

SEQ ID NO: 483437 - DNA, 60 bp, Artificial
  Synthetic oligonucleotide
ttgtgtgcctttgctgattgggcaacatatcgtgaatttcggtatctagaggatactaga

SEQ ID NO: 483438 - DNA, 60 bp, Artificial
  Synthetic oligonucleotide
ttgtgtgctaatgtaggcaacgcgcgtaagtctattgccatttacgaatctcatggggcc

SEQ ID NO: 483439 - DNA, 57 bp, Artificial
  Synthetic oligonucleotide
ttgtgtgctggtagaaatagtcaaaaggttttcaatgttttctcgtagtgttaagca

SEQ ID NO: 483440 - DNA, 56 bp, Artificial
  Synthetic oligonucleotide
ttgtgtggacctaacgatcgtgcccacattgtttttccggtacgactatcaccctc

SEQ ID NO: 483441 - DNA, 50 bp, Artificial
  Synthetic oligonucleotide
ttgtgtgggagtcgtcggcctcgattgacccatcgccgcgggtgcaaaaa

SEQ ID NO: 483442 - DNA, 58 bp, Artificial
  Synthetic oligonucleotide
ttgtgtgggcctagagacctggcccaaagtgtctttcctgtacgactctctccctcta

SEQ ID NO: 483443 - DNA, 55 bp, Artificial
  Synthetic oligonucleotide
ttgtgtgtagccagctcactgatggtatctccctgcatttgctaggtgacccatg

SEQ ID NO: 483444 - DNA, 60 bp, Artificial
  Synthetic oligonucleotide
ttgtgtgtatggacttgctgtggccagtggatacgactttgagagagaggggtactctct

SEQ ID NO: 483445 - DNA, 55 bp, Artificial
  Synthetic oligonucleotide
ttgtgtgtggtccttggaagctgcctggagatggaggatacataagcgaggtgac

SEQ ID NO: 483446 - DNA, 54 bp, Artificial
  Synthetic oligonucleotide
ttgtgttaagcccaacaaaaatgaaagtgggagttcaacaagtagacttcctag

SEQ ID NO: 483447 - DNA, 53 bp, Artificial
  Synthetic oligonucleotide
ttgtgttaagtccattttcattaccggaaagatttggatggacgaaaacatca

SEQ ID NO: 483448 - DNA, 60 bp, Artificial
  Synthetic oligonucleotide
ttgtgttaccggggatgatagaaatgcaactgctagtttcatttatggtggagtgcttgt

SEQ ID NO: 483449 - DNA, 50 bp, Artificial
  Synthetic oligonucleotide
ttgtgttacgggaatttgttgcattatcatctaaactaccctaagaaaag

SEQ ID NO: 483450 - DNA, 60 bp, Artificial
  Synthetic oligonucleotide
ttgtgttatgcaatggaaaattcagtgacgcaatcaaccatcattggttggtgacaacgc

SEQ ID NO: 483451 - DNA, 60 bp, Artificial
  Synthetic oligonucleotide
ttgtgttattcacgccggcattatgacgtacaagatcatcggtgtacctgggatgtgtcc

SEQ ID NO: 483452 - DNA, 60 bp, Artificial
  Synthetic oligonucleotide
ttgtgttccgacctgaagtcctctggaaccacccgatccagcgagtcatacacaatgagc

SEQ ID NO: 483453 - DNA, 53 bp, Artificial
  Synthetic oligonucleotide
ttgtgttcgttgaatttgacgcgaccgaagtcttttgcgagtttcgaaaaaaa

SEQ ID NO: 483454 - DNA, 60 bp, Artificial
  Synthetic oligonucleotide
ttgtgttgacaataggggccgcagctagtctctgtgggtgtgtttattcaacagtctata

SEQ ID NO: 483455 - DNA, 59 bp, Artificial
  Synthetic oligonucleotide
ttgtgttgacactactaaaagtaccaatttaaccattagcactgctgttactccatctg

SEQ ID NO: 483456 - DNA, 60 bp, Artificial
  Synthetic oligonucleotide
ttgtgttggatgatttgtacgcacctgttagcgtggtgtgcccttgtggtaggcctgcta

SEQ ID NO: 483457 - DNA, 60 bp, Artificial
  Synthetic oligonucleotide
ttgtgttggtatcgatcctttggtaactcgatggaccagagacggtgcgcaggaggccgc

SEQ ID NO: 483458 - DNA, 60 bp, Artificial
  Synthetic oligonucleotide
ttgtgtttaagattgcaggctctcgttcacaagcctgtgcttcagcgttgccatatacat

SEQ ID NO: 483459 - DNA, 51 bp, Artificial
  Synthetic oligonucleotide
ttgtgtttctattctgaagagtccccaacttatagatccactgtgtcatct

SEQ ID NO: 483460 - DNA, 59 bp, Artificial
  Synthetic oligonucleotide
ttgtgtttggcgacaagagatgggcagcaacatcacacgggtagagtccgaaacaaagg

SEQ ID NO: 483461 - DNA, 58 bp, Artificial
  Synthetic oligonucleotide
ttgttaaacgaggataatggataaggaggagtccatggcataggaggagttgtaaata

SEQ ID NO: 483462 - DNA, 60 bp, Artificial
  Synthetic oligonucleotide
ttgttaaccattctatggcagatgaagagcgctaaatcgctgccgcacaaccacacagcg

SEQ ID NO: 483463 - DNA, 60 bp, Artificial
  Synthetic oligonucleotide
ttgttaacgccatcataactgatcaagagcagttaattgatttcactcaatctgagaggg

SEQ ID NO: 483464 - DNA, 56 bp, Artificial
  Synthetic oligonucleotide
ttgttaacggtatatgcgattgcggaaactacgacgagactcgtatgataaacgtc

SEQ ID NO: 483465 - DNA, 54 bp, Artificial
  Synthetic oligonucleotide
ttgttaagaggaagtagcctaaccgcaggcttgcggttaagctaactaggccgt

SEQ ID NO: 483466 - DNA, 55 bp, Artificial
  Synthetic oligonucleotide
ttgttaagatgtggggtgtatgctgtagcgaggtcaaagttctgcgtgcacgtgg

SEQ ID NO: 483467 - DNA, 58 bp, Artificial
  Synthetic oligonucleotide
ttgttaagccgttatcaaaatatcctgcgtgaacaagcggcgagaacaactgccttta

SEQ ID NO: 483468 - DNA, 55 bp, Artificial
  Synthetic oligonucleotide
ttgttaatacattcatggaccgtagtccttacaagctcgtttaattgtgccaagg

SEQ ID NO: 483469 - DNA, 59 bp, Artificial
  Synthetic oligonucleotide
ttgttaatacgtattcggtgcgtttgctgtgtatgtaagtattgtctgtgacggtgaat

SEQ ID NO: 483470 - DNA, 57 bp, Artificial
  Synthetic oligonucleotide
ttgttaatgaatacggtcgtgggtagaaggacaatcaatgggagaagacgaccacga

SEQ ID NO: 483471 - DNA, 54 bp, Artificial
  Synthetic oligonucleotide
ttgttaattgtggggtgtaagccccctataggagagcactggaccaaaggtacc

SEQ ID NO: 483472 - DNA, 55 bp, Artificial
  Synthetic oligonucleotide
ttgttacaaatacccagaggaacgaagataggaagtagaggagaaccttataata

SEQ ID NO: 483473 - DNA, 53 bp, Artificial
  Synthetic oligonucleotide
ttgttacacgccggcctcggtaaagttctgtgtggccatcacgggtctcgctc

SEQ ID NO: 483474 - DNA, 58 bp, Artificial
  Synthetic oligonucleotide
ttgttacagcgtcgcttccccgatgtgttagtcgaagcgaggccaacgcatttttgga

SEQ ID NO: 483475 - DNA, 60 bp, Artificial
  Synthetic oligonucleotide
ttgttaccctagaagccacaccatggacaccatcacaatctgtttacgcttttcaagctg

SEQ ID NO: 483476 - DNA, 60 bp, Artificial
  Synthetic oligonucleotide
ttgttacgaagaagcttaaatggcagaatgtgccactatattgttttgatgagtcatcga

SEQ ID NO: 483477 - DNA, 55 bp, Artificial
  Synthetic oligonucleotide
ttgttacgagttgtatacctggctctagacttaaacctttagagcttgggacgaa

SEQ ID NO: 483478 - DNA, 50 bp, Artificial
  Synthetic oligonucleotide
ttgttacggggttagtttgcaagaaagagtgaaatgtacgcacggatacg

SEQ ID NO: 483479 - DNA, 59 bp, Artificial
  Synthetic oligonucleotide
ttgttactgcggcgcagtggctttggaatgcggcaatgagcgcgaacccgatcggcatt

SEQ ID NO: 483480 - DNA, 54 bp, Artificial
  Synthetic oligonucleotide
ttgttactggcactcagggaaccactcgtgtgactctggtgctagaactgggag

SEQ ID NO: 483481 - DNA, 60 bp, Artificial
  Synthetic oligonucleotide
ttgttagagctgggacaatgggtgatgcgttaccagagccttttgaagtgaagtctgatt

SEQ ID NO: 483482 - DNA, 60 bp, Artificial
  Synthetic oligonucleotide
ttgttagcaatcctcatggactggaccaacgacttgactggctttgttaccacacttgta

SEQ ID NO: 483483 - DNA, 56 bp, Artificial
  Synthetic oligonucleotide
ttgttagcgatggccgccgctacccttaaccgtgggcgattagcttaagcctttgc

SEQ ID NO: 483484 - DNA, 54 bp, Artificial
  Synthetic oligonucleotide
ttgttaggccattttcggaacgttcgttgaaacttttggacgatgtggtggtca

SEQ ID NO: 483485 - DNA, 60 bp, Artificial
  Synthetic oligonucleotide
ttgttaggctagtgagctctgtggatgtggatcttgtatatagcagagttcctaccaggt

SEQ ID NO: 483486 - DNA, 54 bp, Artificial
  Synthetic oligonucleotide
ttgttagtgaatggaacggggtcactaacaactggaatcaattgtttaaatacc

SEQ ID NO: 483487 - DNA, 51 bp, Artificial
  Synthetic oligonucleotide
ttgttagtggtgcagtctctgaggttagcgacacttcattaactgcgtcac

SEQ ID NO: 483488 - DNA, 56 bp, Artificial
  Synthetic oligonucleotide
ttgttatagaacacttggtgttttccgttataagagtcgttgctatgtgggcttag

SEQ ID NO: 483489 - DNA, 52 bp, Artificial
  Synthetic oligonucleotide
ttgttatagattgcactaaatacgtatgcggtagttctgagagatgcagacg

SEQ ID NO: 483490 - DNA, 58 bp, Artificial
  Synthetic oligonucleotide
ttgttatagtcagcggcaaacgttctattgtgatcgtaactaggaactcgggatggat

SEQ ID NO: 483491 - DNA, 57 bp, Artificial
  Synthetic oligonucleotide
ttgttatagttgtggatcgtaaacctcacaagggtccgagtggtagtcttcatacat

SEQ ID NO: 483492 - DNA, 60 bp, Artificial
  Synthetic oligonucleotide
ttgttatatacatttacatccacaaatgcagacacattatgtataggttatcatgcaaat

SEQ ID NO: 483493 - DNA, 60 bp, Artificial
  Synthetic oligonucleotide
ttgttatcatggaaggaagaagacaatatacgctaatgccgctgcatccttacagcagaa

SEQ ID NO: 483494 - DNA, 60 bp, Artificial
  Synthetic oligonucleotide
ttgttatcctgattctggcgaaatcacatgtgtttgcagggataattggcatggctcgaa

SEQ ID NO: 483495 - DNA, 59 bp, Artificial
  Synthetic oligonucleotide
ttgttatgacaaagcaacgttggcgcgagttctatttgggtgttatttctgcttctgtc

SEQ ID NO: 483496 - DNA, 60 bp, Artificial
  Synthetic oligonucleotide
ttgttattatactggtgatcgcttccttgaattgcaagttcagctctactggaaatagat

SEQ ID NO: 483497 - DNA, 57 bp, Artificial
  Synthetic oligonucleotide
ttgttattgatggagtgttaaatcaaacacttaacgataatattaggaatggacaag

SEQ ID NO: 483498 - DNA, 55 bp, Artificial
  Synthetic oligonucleotide
ttgttcaaattccatatctgagatctcacagcaaacatctgttgctgcttggtgc

SEQ ID NO: 483499 - DNA, 60 bp, Artificial
  Synthetic oligonucleotide
ttgttcaacaaacaagggtggacagactgacacaaggtcgtcagacctatgattggacac

SEQ ID NO: 483500 - DNA, 57 bp, Artificial
  Synthetic oligonucleotide
ttgttcaacatggaaatgatctaccagaccttaattttcctagatatgttcctttgg

SEQ ID NO: 483501 - DNA, 55 bp, Artificial
  Synthetic oligonucleotide
ttgttcaacgtaatgaatcctgtacaagtaaataaccagaaagtaatcagttttc

SEQ ID NO: 483502 - DNA, 57 bp, Artificial
  Synthetic oligonucleotide
ttgttcacacccatttgattgattcggccttttgtgacaagccccttggtgaaagga

SEQ ID NO: 483503 - DNA, 55 bp, Artificial
  Synthetic oligonucleotide
ttgttcacactcccacctcccgccagtacaaggacatgcggcgcttcatcggcgc

SEQ ID NO: 483504 - DNA, 54 bp, Artificial
  Synthetic oligonucleotide
ttgttcaccagtaacttcgtactggcttctactaactctaatactttaagtccc

SEQ ID NO: 483505 - DNA, 60 bp, Artificial
  Synthetic oligonucleotide
ttgttcagatataggactagcagcttctgcacctcacctagagagggtgactggcttcaa

SEQ ID NO: 483506 - DNA, 52 bp, Artificial
  Synthetic oligonucleotide
ttgttcaggaaagcctaaataaaaaccgggaaaggctttcgaagcctcagtc

SEQ ID NO: 483507 - DNA, 57 bp, Artificial
  Synthetic oligonucleotide
ttgttcaggaagaatgcaggggtgtcaggttggtgttacgtttatgataacaggtgg

SEQ ID NO: 483508 - DNA, 57 bp, Artificial
  Synthetic oligonucleotide
ttgttcaggtatgtcgacgaaccattcttcgactgggtctacagctcgcccgaaaac

SEQ ID NO: 483509 - DNA, 59 bp, Artificial
  Synthetic oligonucleotide
ttgttcatacgcacgatgattggcttcagggccgcatccggtgaacagaatccgcacct

SEQ ID NO: 483510 - DNA, 50 bp, Artificial
  Synthetic oligonucleotide
ttgttcatagcatgagtggctcatggaccttcagcctaagcaaggaggga

SEQ ID NO: 483511 - DNA, 55 bp, Artificial
  Synthetic oligonucleotide
ttgttcatcgatatttaggcggatcacaaaagtaacagacttctattattgaatc

SEQ ID NO: 483512 - DNA, 60 bp, Artificial
  Synthetic oligonucleotide
ttgttcatgatccttcatatccccaaaggattgtccatgctctgcttgaaactcacacat

SEQ ID NO: 483513 - DNA, 60 bp, Artificial
  Synthetic oligonucleotide
ttgttcattctggacacgcgttcaatggattatcttgggcgtgctcctgaacgtgccgca

SEQ ID NO: 483514 - DNA, 54 bp, Artificial
  Synthetic oligonucleotide
ttgttccaagggccagtgtataaagacctatctatagatataacaaccacacca

SEQ ID NO: 483515 - DNA, 60 bp, Artificial
  Synthetic oligonucleotide
ttgttccagagtttagtgcctcggcggctgcgtcgttagctgtttgctgaccgcctctag

SEQ ID NO: 483516 - DNA, 60 bp, Artificial
  Synthetic oligonucleotide
ttgttccagatgctcgggtcttcgtaatgatgctttctttgagtggtccggcctccagcc

SEQ ID NO: 483517 - DNA, 57 bp, Artificial
  Synthetic oligonucleotide
ttgttccagttgttggggcaagacctcaggtcaatggacaaagtgggcgaattgact

SEQ ID NO: 483518 - DNA, 59 bp, Artificial
  Synthetic oligonucleotide
ttgttcccaggatttgagacatttgtgaatcaattctattggataaatcccttagaatg

SEQ ID NO: 483519 - DNA, 56 bp, Artificial
  Synthetic oligonucleotide
ttgttccccaaggctgagaggtacgacaaaagcacatggctcaccaagacccgtaa

SEQ ID NO: 483520 - DNA, 58 bp, Artificial
  Synthetic oligonucleotide
ttgttccccgtgatcatgttgctttccgtgattacgagttcctgggtgtatcacccag

SEQ ID NO: 483521 - DNA, 55 bp, Artificial
  Synthetic oligonucleotide
ttgttcccgaaacttattggcctgctgaaactccatataatgcggattggtcagg

SEQ ID NO: 483522 - DNA, 60 bp, Artificial
  Synthetic oligonucleotide
ttgttccgagagagatttgatgagaaacaagtttctcctagtgtgatggcaaggctaatg

SEQ ID NO: 483523 - DNA, 55 bp, Artificial
  Synthetic oligonucleotide
ttgttccgagagctgcacatgaaatcttagaccatagcataaccggagcaagaga

SEQ ID NO: 483524 - DNA, 55 bp, Artificial
  Synthetic oligonucleotide
ttgttccggtaggagctccaaccccaaaatcacaagattcatatgagtggcagtc

SEQ ID NO: 483525 - DNA, 56 bp, Artificial
  Synthetic oligonucleotide
ttgttccggtcgttgagtggtcagagcctcgttcaaaatataaattttcgtatcaa

SEQ ID NO: 483526 - DNA, 55 bp, Artificial
  Synthetic oligonucleotide
ttgttccggtgcatctaatatagcgaatcttcctgctggcgaggatagctggttt

SEQ ID NO: 483527 - DNA, 55 bp, Artificial
  Synthetic oligonucleotide
ttgttccgttggggactttccaggagacgtggcctgagtgactaagccccgctgg

SEQ ID NO: 483528 - DNA, 50 bp, Artificial
  Synthetic oligonucleotide
ttgttccgtttaatcggaccgaagtgcggtgatgatggtctttcccgggc

SEQ ID NO: 483529 - DNA, 55 bp, Artificial
  Synthetic oligonucleotide
ttgttcctgttcaaggtttaggaattcaatgggggaattctagtgctccaaatcc

SEQ ID NO: 483530 - DNA, 59 bp, Artificial
  Synthetic oligonucleotide
ttgttccttccgttacgaatcaagctggaatccgcagaaatggatctgcggacggttgc

SEQ ID NO: 483531 - DNA, 59 bp, Artificial
  Synthetic oligonucleotide
ttgttccttcgtcaatgtgccattgagagagggattcacaacaaagaaaccgaattcta

SEQ ID NO: 483532 - DNA, 60 bp, Artificial
  Synthetic oligonucleotide
ttgttcgcaccttcggcccatccactgagaacacgcccatctccattggcaacctcctca

SEQ ID NO: 483533 - DNA, 60 bp, Artificial
  Synthetic oligonucleotide
ttgttcgcgcttaccttgcgtgtacgcgcaggaaacactgacgttcttgctgacgcagaa

SEQ ID NO: 483534 - DNA, 52 bp, Artificial
  Synthetic oligonucleotide
ttgttcggaggtagatacgataataagtttttgcttaacatgtcttcggctc

SEQ ID NO: 483535 - DNA, 55 bp, Artificial
  Synthetic oligonucleotide
ttgttcggattggatggtaacgtcggcacaacggtagagaacacggagaggcata

SEQ ID NO: 483536 - DNA, 59 bp, Artificial
  Synthetic oligonucleotide
ttgttcggccacttctactatggaatctaatatgcgttggtgggaaaaacagtcgcaca

SEQ ID NO: 483537 - DNA, 56 bp, Artificial
  Synthetic oligonucleotide
ttgttcgggcgtattaggatctggtgttcgtcggggagagaactcgacctgaattc

SEQ ID NO: 483538 - DNA, 56 bp, Artificial
  Synthetic oligonucleotide
ttgttcggggaatatgaatccgtgtatggcatgcctaggttgaaggaaaacgtccg

SEQ ID NO: 483539 - DNA, 60 bp, Artificial
  Synthetic oligonucleotide
ttgttcggttaacagcaactcccttggagatcatatcaagagcgtcacctcatgttttgg

SEQ ID NO: 483540 - DNA, 51 bp, Artificial
  Synthetic oligonucleotide
ttgttcgtctcttatcacccaaagttagagagttaattgtaccacgcggtt

SEQ ID NO: 483541 - DNA, 55 bp, Artificial
  Synthetic oligonucleotide
ttgttcgtggcatattgaatcgggtgctctacaaagctcataggaatggggtgct

SEQ ID NO: 483542 - DNA, 58 bp, Artificial
  Synthetic oligonucleotide
ttgttcgttgtgtgagtgatattactcgtggaactggtattacccacagagtgggtaa

SEQ ID NO: 483543 - DNA, 55 bp, Artificial
  Synthetic oligonucleotide
ttgttcgtttgagattaatttcaggaatcttactttgataagttccgtctgtaat

SEQ ID NO: 483544 - DNA, 55 bp, Artificial
  Synthetic oligonucleotide
ttgttctattgttgaattgctggagccgcatgagacattgacgtcttatggacgt

SEQ ID NO: 483545 - DNA, 54 bp, Artificial
  Synthetic oligonucleotide
ttgttctccagagcgccataccagtgagtgcccacccattgaacttattactag

SEQ ID NO: 483546 - DNA, 60 bp, Artificial
  Synthetic oligonucleotide
ttgttctctatcaaagagacacagtgtcaagtgctcttgagggtgacttagtgctccgtg

SEQ ID NO: 483547 - DNA, 58 bp, Artificial
  Synthetic oligonucleotide
ttgttctggcaaagtaacccccttatgtggattcattcacatgcatctccaaaaaggg

SEQ ID NO: 483548 - DNA, 55 bp, Artificial
  Synthetic oligonucleotide
ttgttctgttccggtgtgagtctaacaaacatcgctggtcgaagatcagaggtcc

SEQ ID NO: 483549 - DNA, 59 bp, Artificial
  Synthetic oligonucleotide
ttgttgaaacgatcgaatatgcaaatagtctattaacatcaacgaaagtggacctacca

SEQ ID NO: 483550 - DNA, 60 bp, Artificial
  Synthetic oligonucleotide
ttgttgaaatgatgaagacgacagttgatggtgactatgcggaatggggaacattgttat

SEQ ID NO: 483551 - DNA, 55 bp, Artificial
  Synthetic oligonucleotide
ttgttgaacgaatttggctttgagagaacagttgaacctcttagcgatccaattg

SEQ ID NO: 483552 - DNA, 55 bp, Artificial
  Synthetic oligonucleotide
ttgttgaaggatgtaacgagtaccttggtgatgcaagttttcgtctcgtgcaata

SEQ ID NO: 483553 - DNA, 57 bp, Artificial
  Synthetic oligonucleotide
ttgttgacaatacgcttatggttgtcattgctatgtattattcgtgctgtaagcaag

SEQ ID NO: 483554 - DNA, 57 bp, Artificial
  Synthetic oligonucleotide
ttgttgacacaacaaacaccgtgattaagatcgcactgactcggaggcctctcggca

SEQ ID NO: 483555 - DNA, 60 bp, Artificial
  Synthetic oligonucleotide
ttgttgacgtagttaagaccactgcaaatggaacatattcacaatatggaccattactat

SEQ ID NO: 483556 - DNA, 60 bp, Artificial
  Synthetic oligonucleotide
ttgttgactgtctcgaggattggcacagaattcgagacaagaaaagaaagcaacaggctc

SEQ ID NO: 483557 - DNA, 60 bp, Artificial
  Synthetic oligonucleotide
ttgttgagactgacacatctatagttgctgatactttgcccccagttgtctcagtacccc

SEQ ID NO: 483558 - DNA, 58 bp, Artificial
  Synthetic oligonucleotide
ttgttgagcccgactctaaactagcaatgactatactttctaacatccactctttaac

SEQ ID NO: 483559 - DNA, 55 bp, Artificial
  Synthetic oligonucleotide
ttgttgagccgaccgtgccagaacgtattcctagtccggtgacttctagagcacc

SEQ ID NO: 483560 - DNA, 60 bp, Artificial
  Synthetic oligonucleotide
ttgttgagtgccaagctcaagatgatccgggttgcaacacttagggacatcgcacttatg

SEQ ID NO: 483561 - DNA, 60 bp, Artificial
  Synthetic oligonucleotide
ttgttgatacgacattattatcattatgggtgctcaagtttcatcacagaaagttggcgc

SEQ ID NO: 483562 - DNA, 59 bp, Artificial
  Synthetic oligonucleotide
ttgttgatagcagtctggacacttaaaatagaaattgaacctatactattcaagaacga

SEQ ID NO: 483563 - DNA, 55 bp, Artificial
  Synthetic oligonucleotide
ttgttgatatggctggagattgtgtcgaactgatccgcatatggcccgatatcct

SEQ ID NO: 483564 - DNA, 55 bp, Artificial
  Synthetic oligonucleotide
ttgttgatcccattacaggacacacaatggatgaaaatcccagagttgacatacg

SEQ ID NO: 483565 - DNA, 56 bp, Artificial
  Synthetic oligonucleotide
ttgttgatgaacctcgggcctttcttggttccgatccagtgcgaatactcaaaaac

SEQ ID NO: 483566 - DNA, 53 bp, Artificial
  Synthetic oligonucleotide
ttgttgatggtaactccactacgatggagcatagaataccactagaggagcgt

SEQ ID NO: 483567 - DNA, 59 bp, Artificial
  Synthetic oligonucleotide
ttgttgattgtccaggtatatacgccactctcgcattgagttgcagtgagtaattcccc

SEQ ID NO: 483568 - DNA, 57 bp, Artificial
  Synthetic oligonucleotide
ttgttgatttaattatgttagcacaggtgaaacgattaatcaaggagtacaagtttg

SEQ ID NO: 483569 - DNA, 59 bp, Artificial
  Synthetic oligonucleotide
ttgttgcaattggactttcaaaatcctagggtatatggtcaagatgttggtatttatga

SEQ ID NO: 483570 - DNA, 60 bp, Artificial
  Synthetic oligonucleotide
ttgttgcagcgtgatgggttcctctgtgcgaaaatccctgattacattcatgatgaattg

SEQ ID NO: 483571 - DNA, 60 bp, Artificial
  Synthetic oligonucleotide
ttgttgcatgacatagacgcatttatagaaccacagcaccgcatttacggtgaggtgtct

SEQ ID NO: 483572 - DNA, 52 bp, Artificial
  Synthetic oligonucleotide
ttgttgccagcgggcacatccctggccgaatatcatacctcgacgaggctgg

SEQ ID NO: 483573 - DNA, 60 bp, Artificial
  Synthetic oligonucleotide
ttgttgccaggacacctgtttgcttaattagtaacaattgtatacctattgcatgtgatg

SEQ ID NO: 483574 - DNA, 60 bp, Artificial
  Synthetic oligonucleotide
ttgttgccaggatggaaattaacatatgtaggatataatggaagcgatactaggggacat

SEQ ID NO: 483575 - DNA, 50 bp, Artificial
  Synthetic oligonucleotide
ttgttgcccatactgtagacactgctctgctaataaagaaattcatcagc

SEQ ID NO: 483576 - DNA, 55 bp, Artificial
  Synthetic oligonucleotide
ttgttgccctactgcccccggggttggacccaacgcgtgtgcgtgatcctggagt

SEQ ID NO: 483577 - DNA, 59 bp, Artificial
  Synthetic oligonucleotide
ttgttgctagccgatttttcgataaatagtcaccgatgtggaaatatggtttacattga

SEQ ID NO: 483578 - DNA, 60 bp, Artificial
  Synthetic oligonucleotide
ttgttgctcaccatacacagatctgagcctaaaacacaatcgtttagcgatgttgctctg

SEQ ID NO: 483579 - DNA, 56 bp, Artificial
  Synthetic oligonucleotide
ttgttggacaaccataccgaaatgtgctcagagagggtactctacaccgcactatc

SEQ ID NO: 483580 - DNA, 59 bp, Artificial
  Synthetic oligonucleotide
ttgttggagatctcgtctttgaagtttctaagatgacttctccctacattaaatgtaca

SEQ ID NO: 483581 - DNA, 60 bp, Artificial
  Synthetic oligonucleotide
ttgttggcagccactttaacagcctctgagggcacaccattcacatcaacaaccccaaga

SEQ ID NO: 483582 - DNA, 59 bp, Artificial
  Synthetic oligonucleotide
ttgttggcccaaggtattgaagctaatcctggaccttctcatgttattcaacatgaggc

SEQ ID NO: 483583 - DNA, 57 bp, Artificial
  Synthetic oligonucleotide
ttgttgggagtgatagagttgccccagaacacagcagaatgattcaagagttaagag

SEQ ID NO: 483584 - DNA, 57 bp, Artificial
  Synthetic oligonucleotide
ttgttggggagaccaggtcgaagaatcgttgattttggcggcagtaattgccttcga

SEQ ID NO: 483585 - DNA, 58 bp, Artificial
  Synthetic oligonucleotide
ttgttgggtgaccgttgaactatatgtgggacccatttgttgtgaatagatatgggcc

SEQ ID NO: 483586 - DNA, 55 bp, Artificial
  Synthetic oligonucleotide
ttgttggtaccattgacggcgtacctgctacaattgaaggcggttatatcgctgg

SEQ ID NO: 483587 - DNA, 57 bp, Artificial
  Synthetic oligonucleotide
ttgttggtacgggcgacatgactagcggtacccaaatagacgcgttgacgcaagtat

SEQ ID NO: 483588 - DNA, 56 bp, Artificial
  Synthetic oligonucleotide
ttgttggtcgagtcataactgagggatctgaaagtgttgagggtgtggaaaggttt

SEQ ID NO: 483589 - DNA, 55 bp, Artificial
  Synthetic oligonucleotide
ttgttggtctcaacgaatattgtgaagaatcaggcagcaatggtcggcgaatcga

SEQ ID NO: 483590 - DNA, 54 bp, Artificial
  Synthetic oligonucleotide
ttgttggtgtttatctagtctaccttaaggtttcgacccacattcgtgaaattg

SEQ ID NO: 483591 - DNA, 55 bp, Artificial
  Synthetic oligonucleotide
ttgttggttgcaatgttcatggatttattgatgtaccaggagatggtagatgtgg

SEQ ID NO: 483592 - DNA, 50 bp, Artificial
  Synthetic oligonucleotide
ttgttgtagccctctagtgtggacttcatacctgttagtagcatacgtcc

SEQ ID NO: 483593 - DNA, 55 bp, Artificial
  Synthetic oligonucleotide
ttgttgtcaacgttagctgatgtatatactgtactgcgaccggagttcgctatcc

SEQ ID NO: 483594 - DNA, 55 bp, Artificial
  Synthetic oligonucleotide
ttgttgtccgtgaaccatgggcaatgcttgaagctggactagtgctcctcgctgc

SEQ ID NO: 483595 - DNA, 60 bp, Artificial
  Synthetic oligonucleotide
ttgttgtgttttctgatcatcattaagtgaccgtcatgggtgatatattaggcgcagttt

SEQ ID NO: 483596 - DNA, 55 bp, Artificial
  Synthetic oligonucleotide
ttgttgttaccatgtgtatgggtcaatgccatcaggatctccttgtacagctttg

SEQ ID NO: 483597 - DNA, 56 bp, Artificial
  Synthetic oligonucleotide
ttgttgttgactacaacaatcaccgtgtacggttattgtattggcaccgccaacgg

SEQ ID NO: 483598 - DNA, 55 bp, Artificial
  Synthetic oligonucleotide
ttgttgttgcccacttcttgacgtgagagactgtgcccgccatactgagcgtctc

SEQ ID NO: 483599 - DNA, 54 bp, Artificial
  Synthetic oligonucleotide
ttgttgttggtagtttagtttgtcattagggaaaacatgcaccggtctttgtgt

SEQ ID NO: 483600 - DNA, 51 bp, Artificial
  Synthetic oligonucleotide
ttgtttaaacggttgttcaacaaggttgggcggcgggtgattaggttttgc

SEQ ID NO: 483601 - DNA, 55 bp, Artificial
  Synthetic oligonucleotide
ttgtttaaccgttcaacctcaattaagagacatgatgggaaacgtcgaggaggtc

SEQ ID NO: 483602 - DNA, 54 bp, Artificial
  Synthetic oligonucleotide
ttgtttaataaaccatattggttacataaggcacagggtcataacaatggtatc

SEQ ID NO: 483603 - DNA, 55 bp, Artificial
  Synthetic oligonucleotide
ttgtttaatagtacttggagtagtactggagagtcaaataacaccaatggcacag

SEQ ID NO: 483604 - DNA, 55 bp, Artificial
  Synthetic oligonucleotide
ttgtttacggcggcagcgacggaaacaccacgcggacaaagcgcgtcaccacgtc

SEQ ID NO: 483605 - DNA, 56 bp, Artificial
  Synthetic oligonucleotide
ttgtttagccaagataatgattaaaccacgatgtatactttccgattctacctttg

SEQ ID NO: 483606 - DNA, 60 bp, Artificial
  Synthetic oligonucleotide
ttgtttatggcgatgacgtcatcttgtcacttgacagagaaatagatccagagaaactgc

SEQ ID NO: 483607 - DNA, 60 bp, Artificial
  Synthetic oligonucleotide
ttgtttcacagagttgatgtggctctttgcactttacattatgtagagcggcagagacaa

SEQ ID NO: 483608 - DNA, 50 bp, Artificial
  Synthetic oligonucleotide
ttgtttcacgccagattcattgacaattattagaattctcggtctttcgt

SEQ ID NO: 483609 - DNA, 58 bp, Artificial
  Synthetic oligonucleotide
ttgtttcatatatggattaccattaatagcgcagagtgttgtggtaagtgcgcttgga

SEQ ID NO: 483610 - DNA, 50 bp, Artificial
  Synthetic oligonucleotide
ttgtttccacacctttaactaagctcgcgtcgcagccgtcaaatgaagaa

SEQ ID NO: 483611 - DNA, 60 bp, Artificial
  Synthetic oligonucleotide
ttgtttccccctggatatatcgatctgtggttacttgtcatacgcagtgatgctttcatt

SEQ ID NO: 483612 - DNA, 54 bp, Artificial
  Synthetic oligonucleotide
ttgtttcctttgtaaatcctatggatgtagcaacctacttaggggatacaaaag

SEQ ID NO: 483613 - DNA, 55 bp, Artificial
  Synthetic oligonucleotide
ttgtttcgactattttgggtacacctattaaaatgtataatgagtctggacaacc

SEQ ID NO: 483614 - DNA, 56 bp, Artificial
  Synthetic oligonucleotide
ttgtttctgaatttcgaatttgaattcgcgtttgagtcggagagtgtaaactctat

SEQ ID NO: 483615 - DNA, 58 bp, Artificial
  Synthetic oligonucleotide
ttgtttcttacgaatcttttgatgatactgattggtttgctggtaacgaatgggccga

SEQ ID NO: 483616 - DNA, 59 bp, Artificial
  Synthetic oligonucleotide
ttgtttcttgctcttattattgggcttaactcaattcttgtgggttatctctctgatat

SEQ ID NO: 483617 - DNA, 60 bp, Artificial
  Synthetic oligonucleotide
ttgtttgaaatgctgaaaggtagcaaaaggagtcgtgaagtagatatcagtcgcattaaa

SEQ ID NO: 483618 - DNA, 58 bp, Artificial
  Synthetic oligonucleotide
ttgtttgacgctcgtcaaaccgaacctgtgatcttcaccatccctgacattcggaaaa

SEQ ID NO: 483619 - DNA, 60 bp, Artificial
  Synthetic oligonucleotide
ttgtttgatgctacagcagtagcagtagcggggtggacagatagggttatcgaagtagca

SEQ ID NO: 483620 - DNA, 54 bp, Artificial
  Synthetic oligonucleotide
ttgtttgcgtggtataaatgtacctttctcccacttggcgattggatttttcag

SEQ ID NO: 483621 - DNA, 54 bp, Artificial
  Synthetic oligonucleotide
ttgtttgcttttgttcccccagagaccttgtattgtccggattcacaataatca

SEQ ID NO: 483622 - DNA, 60 bp, Artificial
  Synthetic oligonucleotide
ttgtttggaatgaatgtaacaactagttatacttatatgttatctgatgagatatatgtg

SEQ ID NO: 483623 - DNA, 60 bp, Artificial
  Synthetic oligonucleotide
ttgtttggcattaggcgtattgcgctgctccgcgatgtacgggttaggtataatatgaag

SEQ ID NO: 483624 - DNA, 59 bp, Artificial
  Synthetic oligonucleotide
ttgtttgggtatccgcgataaaatgcgccacgcggaacgtttaatgaacatgcgcaaga

SEQ ID NO: 483625 - DNA, 55 bp, Artificial
  Synthetic oligonucleotide
ttgtttgggtatgcggtcgcaaggggtattcatcaggtggtaagtgtagtgggcc

SEQ ID NO: 483626 - DNA, 59 bp, Artificial
  Synthetic oligonucleotide
ttgtttgggtccataaacgcgagctatgcggatttgtctatacaagacccatataagga

SEQ ID NO: 483627 - DNA, 55 bp, Artificial
  Synthetic oligonucleotide
ttgtttgtcggagggatggctgagttaggtgccttcttttctatccttcaggata

SEQ ID NO: 483628 - DNA, 54 bp, Artificial
  Synthetic oligonucleotide
ttgtttgtggttccggaagcttgaagatactagtaaagaacccgactttcatcg

SEQ ID NO: 483629 - DNA, 58 bp, Artificial
  Synthetic oligonucleotide
ttgttttaactcaaatgaagccaaccactgtcagaaatatcctatgtctcgtaaacca

SEQ ID NO: 483630 - DNA, 60 bp, Artificial
  Synthetic oligonucleotide
ttgttttcacgtttactgaacactagtcgcgtatgagtattcaagctgtccacaatgtgt

SEQ ID NO: 483631 - DNA, 60 bp, Artificial
  Synthetic oligonucleotide
ttgttttccaacgtccaatactttgcacactactgcaggaagtatgctcccctctatgca

SEQ ID NO: 483632 - DNA, 55 bp, Artificial
  Synthetic oligonucleotide
ttgttttccagaagattaactcaaccctcggcacggttggatccaacgggagtga

SEQ ID NO: 483633 - DNA, 48 bp, Artificial
  Synthetic oligonucleotide
ttgttttttgaacaagggtagtaatttacgacccataccccttttagt

SEQ ID NO: 483634 - DNA, 51 bp, Artificial
  Synthetic oligonucleotide
tttaaaaagatcagatggaagatcaactaccattttcagtttccctagact

SEQ ID NO: 483635 - DNA, 58 bp, Artificial
  Synthetic oligonucleotide
tttaaaaataacacgccattccctaccaatgtggctgtcgaattatttgctaagcgca

SEQ ID NO: 483636 - DNA, 56 bp, Artificial
  Synthetic oligonucleotide
tttaaaacagcctgtgggttgttcccacccacagggcccactgggcgctagcacac

SEQ ID NO: 483637 - DNA, 55 bp, Artificial
  Synthetic oligonucleotide
tttaaaacagctctagggttgttcccaccctagaggcccacgtggcggctagcac

SEQ ID NO: 483638 - DNA, 53 bp, Artificial
  Synthetic oligonucleotide
tttaaaaccaacatcggagatcccagcaccataccctgccccttcgaacccgg

SEQ ID NO: 483639 - DNA, 55 bp, Artificial
  Synthetic oligonucleotide
tttaaaacgctttggtgatggcatactcgtaaataagagggtgtaccccgattga

SEQ ID NO: 483640 - DNA, 60 bp, Artificial
  Synthetic oligonucleotide
tttaaaactctaagagctgaacaatgtacacaagatgtaaagaattggatgacagacacc

SEQ ID NO: 483641 - DNA, 56 bp, Artificial
  Synthetic oligonucleotide
tttaaaagagagcctgcctcacttaccctagctgtcttcctggggttagggattgc

SEQ ID NO: 483642 - DNA, 50 bp, Artificial
  Synthetic oligonucleotide
tttaaaagctctcgacggcagtttgcatcacaatccgtggtcgttgacat

SEQ ID NO: 483643 - DNA, 54 bp, Artificial
  Synthetic oligonucleotide
tttaaaaggagtgttatacgatgcacggatgaagcttggtaggtctgtcctgcc

SEQ ID NO: 483644 - DNA, 60 bp, Artificial
  Synthetic oligonucleotide
tttaaaatctgtgtagctgtcacttggctgcatgcccagtgcacttacgcagtatatctt

SEQ ID NO: 483645 - DNA, 58 bp, Artificial
  Synthetic oligonucleotide
tttaaaatgaatccaaatcagaaaataataacaattggttctgtgtcattggcactag

SEQ ID NO: 483646 - DNA, 55 bp, Artificial
  Synthetic oligonucleotide
tttaaaatggtccccaccactaacaaatgtgctccacttagaacgctccctcaaa

SEQ ID NO: 483647 - DNA, 60 bp, Artificial
  Synthetic oligonucleotide
tttaaacacaactgaactgaatcttaaattggcgatgctccaagcgtctcctgccacatc

SEQ ID NO: 483648 - DNA, 60 bp, Artificial
  Synthetic oligonucleotide
tttaaacaccatgctaaacacagtagggggacatcaagcagccatgcaaatgttaaaaga

SEQ ID NO: 483649 - DNA, 53 bp, Artificial
  Synthetic oligonucleotide
tttaaacatcaggaagaaaggatagttagtttccaaccggattatcctattac

SEQ ID NO: 483650 - DNA, 53 bp, Artificial
  Synthetic oligonucleotide
tttaaaccatacaaaactggggatacattctttaccccgatgttggctggtta

SEQ ID NO: 483651 - DNA, 55 bp, Artificial
  Synthetic oligonucleotide
tttaaaccgtaatccgtggttgacacgtcttagttctacagaactatgagttgcc

SEQ ID NO: 483652 - DNA, 57 bp, Artificial
  Synthetic oligonucleotide
tttaaaccgtatattctgccccatcttccagttaatctatgggggcgtgatatatta

SEQ ID NO: 483653 - DNA, 50 bp, Artificial
  Synthetic oligonucleotide
tttaaacgctgtgaagatcgtctggatacgaacgcgtgtcatgactggat

SEQ ID NO: 483654 - DNA, 51 bp, Artificial
  Synthetic oligonucleotide
tttaaacggtagactgaatttaatgacgaatcccgttccgttatttttgta

SEQ ID NO: 483655 - DNA, 50 bp, Artificial
  Synthetic oligonucleotide
tttaaacgtctcttagattacacttacaagggcgaattcagtcacactgg

SEQ ID NO: 483656 - DNA, 53 bp, Artificial
  Synthetic oligonucleotide
tttaaactacttccctctcttgggaagctaagttggtagttatattactctaa

SEQ ID NO: 483657 - DNA, 55 bp, Artificial
  Synthetic oligonucleotide
tttaaactccacggtgtacctggacccctgcatgggccccgccctttgcaataga

SEQ ID NO: 483658 - DNA, 58 bp, Artificial
  Synthetic oligonucleotide
tttaaagcagagtgatgttgactggtatagggatccggataaatattttgaaccacac

SEQ ID NO: 483659 - DNA, 58 bp, Artificial
  Synthetic oligonucleotide
tttaaagccgtcttagagtctacaactgaggatggtactttcaaagccgctgattgga

SEQ ID NO: 483660 - DNA, 58 bp, Artificial
  Synthetic oligonucleotide
tttaaaggactgtcaactgatagaaagatggatgaagtctctcaagtaggaatttaat

SEQ ID NO: 483661 - DNA, 51 bp, Artificial
  Synthetic oligonucleotide
tttaaagggacatatatgccacactcaatgatcgaagcaatgtgcgttaac

SEQ ID NO: 483662 - DNA, 51 bp, Artificial
  Synthetic oligonucleotide
tttaaagtagaaaagttcccgcccactagggttaaaggtgttcacactata

SEQ ID NO: 483663 - DNA, 56 bp, Artificial
  Synthetic oligonucleotide
tttaaagtctatcccgacgctcccagtttcttggtagcgttcaccacaacggcagc

SEQ ID NO: 483664 - DNA, 55 bp, Artificial
  Synthetic oligonucleotide
tttaaagtgggccccttgatgtgatatgtcatctaatcaggacgctccctcaaag

SEQ ID NO: 483665 - DNA, 55 bp, Artificial
  Synthetic oligonucleotide
tttaaagtgggccctcgacgaatgataatgcgcgctcatcgcttatttagcttgt

SEQ ID NO: 483666 - DNA, 55 bp, Artificial
  Synthetic oligonucleotide
tttaaagtggtccccgcatgcgctcctgtccaatcctatccgctcctcaaagctt

SEQ ID NO: 483667 - DNA, 55 bp, Artificial
  Synthetic oligonucleotide
tttaaagtggtgggtccagaacgcacgacgatgcacactcaaagcttagataacg

SEQ ID NO: 483668 - DNA, 55 bp, Artificial
  Synthetic oligonucleotide
tttaaatacggtttgaaaggagggccttctacggaaggagtgcctgagtctatga

SEQ ID NO: 483669 - DNA, 60 bp, Artificial
  Synthetic oligonucleotide
tttaaatagcactcaataaacgcagcaaatggcttaatcgcacaatcgcattccgagtgg

SEQ ID NO: 483670 - DNA, 55 bp, Artificial
  Synthetic oligonucleotide
tttaaatcacacagatcatagtaagagatgcatgttgctcctagataatggcagg

SEQ ID NO: 483671 - DNA, 60 bp, Artificial
  Synthetic oligonucleotide
tttaaatcgtgccactgatcgtgttgatattaatttggttcagtccatttgtgactcgac

SEQ ID NO: 483672 - DNA, 51 bp, Artificial
  Synthetic oligonucleotide
tttaaatctctttggccctctggggaccttcgggacctattcggacgttat

SEQ ID NO: 483673 - DNA, 56 bp, Artificial
  Synthetic oligonucleotide
tttaaatgaggacttaacctgtggaaatattttgatgtgggaagctgttactgtta

SEQ ID NO: 483674 - DNA, 55 bp, Artificial
  Synthetic oligonucleotide
tttaaatgtggtcccacaagccagccttttgactgaccaatcgcgttgcgtctga

SEQ ID NO: 483675 - DNA, 50 bp, Artificial
  Synthetic oligonucleotide
tttaaatgtgttacccccccgaaaaaatgtggatggcccaaacctgccct

SEQ ID NO: 483676 - DNA, 54 bp, Artificial
  Synthetic oligonucleotide
tttaaattactccaaaacagtcaagtgttcagcctgataagaccaaatgaaaac

SEQ ID NO: 483677 - DNA, 55 bp, Artificial
  Synthetic oligonucleotide
tttaaattctaggcctacaacactcacttagtggtgtatgtttatataagtttac

SEQ ID NO: 483678 - DNA, 60 bp, Artificial
  Synthetic oligonucleotide
tttaaattcttgtatggatgtattgcgctatctaagtccgagtccgcatctaaatgagat

SEQ ID NO: 483679 - DNA, 50 bp, Artificial
  Synthetic oligonucleotide
tttaaattgtacaaatgctagtgatagtactgatcataataaaactgtta

SEQ ID NO: 483680 - DNA, 55 bp, Artificial
  Synthetic oligonucleotide
tttaacaatgtcttatggttggaacaaatgtctcaaaagtttgcaccactttatg

SEQ ID NO: 483681 - DNA, 60 bp, Artificial
  Synthetic oligonucleotide
tttaacacgcgcaggcagccgctcttcgctcacatacgtaagcgaggggagtcacgggct

SEQ ID NO: 483682 - DNA, 54 bp, Artificial
  Synthetic oligonucleotide
tttaacagataacatacctgtggaaaggtttaccacaggaacccaaccactggc

SEQ ID NO: 483683 - DNA, 60 bp, Artificial
  Synthetic oligonucleotide
tttaacataatcacatttatcaaaccatcttgcgtgttgtatccaaggatcatcgtctgt

SEQ ID NO: 483684 - DNA, 60 bp, Artificial
  Synthetic oligonucleotide
tttaacatagcatagttcttaacctgccatacgtgttttgagttaggctgtctcatagag

SEQ ID NO: 483685 - DNA, 60 bp, Artificial
  Synthetic oligonucleotide
tttaacatagcggaagcctataccacattggtgccttactatcaaatgatcggtaagcaa

SEQ ID NO: 483686 - DNA, 60 bp, Artificial
  Synthetic oligonucleotide
tttaacatgctgagcacagttctaggagtctcgatcttgaatcttgggcaaaaaagatac

SEQ ID NO: 483687 - DNA, 60 bp, Artificial
  Synthetic oligonucleotide
tttaacatgtttgacaatgaaccgagcacagcaacggtgaagaacatgcatcgtgatcgt

SEQ ID NO: 483688 - DNA, 55 bp, Artificial
  Synthetic oligonucleotide
tttaacattacaagctatgtttgttccggtaggagctccaaccccaaaatcacaa

SEQ ID NO: 483689 - DNA, 56 bp, Artificial
  Synthetic oligonucleotide
tttaaccaaggggccttccactaaccgtgattatctgagtcaaagacagggagcac

SEQ ID NO: 483690 - DNA, 60 bp, Artificial
  Synthetic oligonucleotide
tttaaccagagtttcagcggaacaatggggtcgtctctagacgatttctgcaatgatagc

SEQ ID NO: 483691 - DNA, 55 bp, Artificial
  Synthetic oligonucleotide
tttaacccaaaatttttaaacattcaagcatggaaatcaggcgctagcgttggaa

SEQ ID NO: 483692 - DNA, 55 bp, Artificial
  Synthetic oligonucleotide
tttaacccagcctgatgacgtctccatcatgcttcgaaacgcgtgagggcggatg

SEQ ID NO: 483693 - DNA, 50 bp, Artificial
  Synthetic oligonucleotide
tttaacccctactaacacaactacgcgggtcacaaaggcttggacgtttt

SEQ ID NO: 483694 - DNA, 60 bp, Artificial
  Synthetic oligonucleotide
tttaacctgtaaccaaacacattgccaaccaacagtctatctgattgcaccagtatctac

SEQ ID NO: 483695 - DNA, 54 bp, Artificial
  Synthetic oligonucleotide
tttaacgcctcagctgcagcgtcattagccgtatgctgacctcctctagcactt

SEQ ID NO: 483696 - DNA, 58 bp, Artificial
  Synthetic oligonucleotide
tttaacggcggtggggtgatgtagatgttacgagtattcggagctactgatacagact

SEQ ID NO: 483697 - DNA, 56 bp, Artificial
  Synthetic oligonucleotide
tttaacggtgttacgttgtgcacttttaagccttcttctcattttaccacatgtga

SEQ ID NO: 483698 - DNA, 58 bp, Artificial
  Synthetic oligonucleotide
tttaacgtgggaggagacaacatcacccgctttctcggcgacagagcaagcgacgacc

SEQ ID NO: 483699 - DNA, 58 bp, Artificial
  Synthetic oligonucleotide
tttaactaccagcgcgggatacccgtatgttgcgttgggcatcaaaaagagagacata

SEQ ID NO: 483700 - DNA, 60 bp, Artificial
  Synthetic oligonucleotide
tttaactagcggaatgcctagacagagaaaaacagtttggtcacactctcatacaactga

SEQ ID NO: 483701 - DNA, 55 bp, Artificial
  Synthetic oligonucleotide
tttaactcgcatcactccaacagcgtccagagtatgatcttcgaagtactctgcg

SEQ ID NO: 483702 - DNA, 55 bp, Artificial
  Synthetic oligonucleotide
tttaactgacgatgaagttaatgagcttgtgtttagattcaggctggctgtagcc

SEQ ID NO: 483703 - DNA, 56 bp, Artificial
  Synthetic oligonucleotide
tttaacttcccctgcatcctacagaagtgtacaccgttgaccacgttagtgtcgtc

SEQ ID NO: 483704 - DNA, 54 bp, Artificial
  Synthetic oligonucleotide
tttaacttcggaatttcacgggtctcttcacaactcggagttaactagtagtgc

SEQ ID NO: 483705 - DNA, 58 bp, Artificial
  Synthetic oligonucleotide
tttaacttgtatggcgaacccttttcaatatatggcagattcctattaacatctgtgg

SEQ ID NO: 483706 - DNA, 54 bp, Artificial
  Synthetic oligonucleotide
tttaagaaagaccaaccgagaggtggcatgtgggaagcccctccgaacacaact

SEQ ID NO: 483707 - DNA, 51 bp, Artificial
  Synthetic oligonucleotide
tttaagaagatttgcaagcgtcgcgttaaacatcgcaacgtcaaatttcca

SEQ ID NO: 483708 - DNA, 59 bp, Artificial
  Synthetic oligonucleotide
tttaagacgcacactttataatagaagattaacacagcaggttgcagtagaagatccct

SEQ ID NO: 483709 - DNA, 53 bp, Artificial
  Synthetic oligonucleotide
tttaagactcgcatttggtggaacggtgatgttggaggtagtaaagtaggggt

SEQ ID NO: 483710 - DNA, 57 bp, Artificial
  Synthetic oligonucleotide
tttaagagtacaagatctcctaagattggttgagataatacataagttaaccataac

SEQ ID NO: 483711 - DNA, 51 bp, Artificial
  Synthetic oligonucleotide
tttaagagttagggatcaacgggggaacgtactattgtcacccgaagaagt

SEQ ID NO: 483712 - DNA, 60 bp, Artificial
  Synthetic oligonucleotide
tttaagcattcagtaccgcgattcttctgccctgagcatggcactatgttcacactcgca

SEQ ID NO: 483713 - DNA, 60 bp, Artificial
  Synthetic oligonucleotide
tttaagccattaaaataatggcctgtgttactttggatcgagatcaacagagctatgctc

SEQ ID NO: 483714 - DNA, 52 bp, Artificial
  Synthetic oligonucleotide
tttaagcgaaccggtgataaatgtttcctcgtacagccagggtaggaagggt

SEQ ID NO: 483715 - DNA, 60 bp, Artificial
  Synthetic oligonucleotide
tttaagcgaagaatggcagatgctgtgtccaggaaaaagatggatactaagcctactgac

SEQ ID NO: 483716 - DNA, 55 bp, Artificial
  Synthetic oligonucleotide
tttaagcgggctcattgggagaaggcacgcggcagtgatgaggacaatgagaagt

SEQ ID NO: 483717 - DNA, 58 bp, Artificial
  Synthetic oligonucleotide
tttaagcgtcttgctttagaaactgagaggaccgctggagagcagactaaggaattag

SEQ ID NO: 483718 - DNA, 59 bp, Artificial
  Synthetic oligonucleotide
tttaagctcgaattcggaaactccaggatcaatgagttcaccatctgaagggaagacga

SEQ ID NO: 483719 - DNA, 50 bp, Artificial
  Synthetic oligonucleotide
tttaagctgaacacgccacacactcgggttcaaggctgaactgaatgggt

SEQ ID NO: 483720 - DNA, 56 bp, Artificial
  Synthetic oligonucleotide
tttaagctgccaaccaaattgtttgattgtaaaccagaacaattctttgccgagcc

SEQ ID NO: 483721 - DNA, 55 bp, Artificial
  Synthetic oligonucleotide
tttaagcttggctttcaataaacaagaccgtgggagtttcacttgtcggtgtcta

SEQ ID NO: 483722 - DNA, 56 bp, Artificial
  Synthetic oligonucleotide
tttaaggaagtagaggttggtgttagttggaacttgagtcatcaaggtgaagagag

SEQ ID NO: 483723 - DNA, 56 bp, Artificial
  Synthetic oligonucleotide
tttaaggactggtctagttgtgagccacgtgtattcatgataaagtctctgatgtg

SEQ ID NO: 483724 - DNA, 52 bp, Artificial
  Synthetic oligonucleotide
tttaaggatgatacatcatttgaggacattaatggaataaggagaccaaaac

SEQ ID NO: 483725 - DNA, 53 bp, Artificial
  Synthetic oligonucleotide
tttaaggcgttccaaaataccagtccaactgtgaaaagcaccagttagccggg

SEQ ID NO: 483726 - DNA, 59 bp, Artificial
  Synthetic oligonucleotide
tttaaggctagtcaaaacgtgtctaactatccagtgataggtgtagagttaatgcctca

SEQ ID NO: 483727 - DNA, 51 bp, Artificial
  Synthetic oligonucleotide
tttaagggtcataagttgggagtaagttagtccagccgagaagcctgcaga

SEQ ID NO: 483728 - DNA, 50 bp, Artificial
  Synthetic oligonucleotide
tttaagggttagggaccaacggggaaatgtattattgtctcccgaggaag

SEQ ID NO: 483729 - DNA, 60 bp, Artificial
  Synthetic oligonucleotide
tttaagtaagagccattgcgcataagccaacattgaggcaaactatgtttgcctgtgatg

SEQ ID NO: 483730 - DNA, 50 bp, Artificial
  Synthetic oligonucleotide
tttaagtatacaccacgttaacaacctcataaataaagtggataacgtcg

SEQ ID NO: 483731 - DNA, 60 bp, Artificial
  Synthetic oligonucleotide
tttaagtattgcaagagcttctggcttactgcctgagttaattgctttggcgtaagcgtc

SEQ ID NO: 483732 - DNA, 59 bp, Artificial
  Synthetic oligonucleotide
tttaagtattgggggttgacgtcatcaatgacgttataccaagcactgttgctatacac

SEQ ID NO: 483733 - DNA, 56 bp, Artificial
  Synthetic oligonucleotide
tttaagtccaattgctgttgcacagcttagtccgcgacttcagtgtatttcactat

SEQ ID NO: 483734 - DNA, 60 bp, Artificial
  Synthetic oligonucleotide
tttaagtggggcagggtgacgatgcaatgacctgaaagctttgggacgctgcattggaaa

SEQ ID NO: 483735 - DNA, 55 bp, Artificial
  Synthetic oligonucleotide
tttaagttccactagcaaccctggatacgtaactgtcatggtcccttatggttta

SEQ ID NO: 483736 - DNA, 51 bp, Artificial
  Synthetic oligonucleotide
tttaagttgatagggtacggtgccctcatcagagagtaataactaatgaag

SEQ ID NO: 483737 - DNA, 60 bp, Artificial
  Synthetic oligonucleotide
tttaagttggatcagttcgcgaaccatatgagcatatcgcggcgatcacatcagataaga

SEQ ID NO: 483738 - DNA, 57 bp, Artificial
  Synthetic oligonucleotide
tttaataaagtgaagtggtatttgggtgcccgctgccacatcgagaaagcgaaagga

SEQ ID NO: 483739 - DNA, 56 bp, Artificial
  Synthetic oligonucleotide
tttaataaggtggctatcttaatttgtgaagcgcttaattcgattaaagttacaca

SEQ ID NO: 483740 - DNA, 55 bp, Artificial
  Synthetic oligonucleotide
tttaataagtgttgtgcagattaatctgcacagcactagccacaaagttcagtgg

SEQ ID NO: 483741 - DNA, 58 bp, Artificial
  Synthetic oligonucleotide
tttaataccacttggtacaacaatggttcagacacttggtacaatggtacaaatagca

SEQ ID NO: 483742 - DNA, 53 bp, Artificial
  Synthetic oligonucleotide
tttaatagtacttggccgtttaatagtactgaaaataaggctaacgagtcagg

SEQ ID NO: 483743 - DNA, 58 bp, Artificial
  Synthetic oligonucleotide
tttaatccgcagcggtgactttgtctactccgtatccttcgagtcccgtgatgcctta

SEQ ID NO: 483744 - DNA, 50 bp, Artificial
  Synthetic oligonucleotide
tttaatcgtctcaatggaccttgcgagcttcagagaacaaatgcgaggta

SEQ ID NO: 483745 - DNA, 55 bp, Artificial
  Synthetic oligonucleotide
tttaatcgtctgttgcgctacagtaacctcgtcaatcagatacccaatgtcaccc

SEQ ID NO: 483746 - DNA, 60 bp, Artificial
  Synthetic oligonucleotide
tttaatcttagctcatggtgcggagattaacgtagcgtggttgaaccatgcgctacgtga

SEQ ID NO: 483747 - DNA, 60 bp, Artificial
  Synthetic oligonucleotide
tttaatgaatccataacaatatgtgataaactcacacaagactgtgatgtaccatatccg

SEQ ID NO: 483748 - DNA, 57 bp, Artificial
  Synthetic oligonucleotide
tttaatgcgtcatacttaggtgaactatattctttcgttgtaaaatatatgtggtcg

SEQ ID NO: 483749 - DNA, 59 bp, Artificial
  Synthetic oligonucleotide
tttaatgcgtttagtaacccaacagtagcatctactatattgtcaaatgtagctcctgt

SEQ ID NO: 483750 - DNA, 55 bp, Artificial
  Synthetic oligonucleotide
tttaatgctgacgctcttgacgaggtggtcaatgcagggtctcgtttggtgagag

SEQ ID NO: 483751 - DNA, 60 bp, Artificial
  Synthetic oligonucleotide
tttaatggattgtaaggtaggatttatggatgatgcaacctatgtatgctggacatacat

SEQ ID NO: 483752 - DNA, 55 bp, Artificial
  Synthetic oligonucleotide
tttaatggcacatacaatggcacatatagtaatatcacagacctcatcaccctcc

SEQ ID NO: 483753 - DNA, 56 bp, Artificial
  Synthetic oligonucleotide
tttaatggcccgggagcgcgtgctttgcgatcgtataacgagaccgcccttaatgt

SEQ ID NO: 483754 - DNA, 58 bp, Artificial
  Synthetic oligonucleotide
tttaatgttaatcatataatgtaaagtgttcatgattaaggttgacggtgactattca

SEQ ID NO: 483755 - DNA, 57 bp, Artificial
  Synthetic oligonucleotide
tttaatgttgacccacgtgctggtatactgtctatgcgatatcctgacacaggtcgt

SEQ ID NO: 483756 - DNA, 51 bp, Artificial
  Synthetic oligonucleotide
tttaattaagcgagcaaggtaatttatctcgtgacatcaaagctttcagga

SEQ ID NO: 483757 - DNA, 55 bp, Artificial
  Synthetic oligonucleotide
tttaattaggaggatatgtctgttgaccttatcgtcaaaaccagaggtagacccc

SEQ ID NO: 483758 - DNA, 54 bp, Artificial
  Synthetic oligonucleotide
tttaattatgttgatctagtcccccaagcccacggttcgaaagtcctcaacctg

SEQ ID NO: 483759 - DNA, 60 bp, Artificial
  Synthetic oligonucleotide
tttaattattgctgctagaaatattgttaggagagcaacagtatcagcagacccgttggc

SEQ ID NO: 483760 - DNA, 55 bp, Artificial
  Synthetic oligonucleotide
tttaattcaaaatgcctaagcgggatgccccatggcgtttaatggcggggacctc

SEQ ID NO: 483761 - DNA, 55 bp, Artificial
  Synthetic oligonucleotide
tttaattcaaaatgcctaagcgtgatgctcaatggcgccacatggcaggtacgtc

SEQ ID NO: 483762 - DNA, 59 bp, Artificial
  Synthetic oligonucleotide
tttaattccgagaggtgctctagagagttcggcttctggatctggagtgtttgaaatta

SEQ ID NO: 483763 - DNA, 53 bp, Artificial
  Synthetic oligonucleotide
tttaattccgggcagaggttgattcctgctcttgagagcgcattgaaaattaa

SEQ ID NO: 483764 - DNA, 57 bp, Artificial
  Synthetic oligonucleotide
tttaattcgttatcgattcaagaatgggtataacggagtgagaatagaaagcgctta

SEQ ID NO: 483765 - DNA, 57 bp, Artificial
  Synthetic oligonucleotide
tttaattggataattcggtatcgttgaggtacaaccaaattatagcaatcatggcat

SEQ ID NO: 483766 - DNA, 55 bp, Artificial
  Synthetic oligonucleotide
tttaattggatctattgaacccttaccgcgtgaaaaagaggatttgtgcgtgtcc

SEQ ID NO: 483767 - DNA, 56 bp, Artificial
  Synthetic oligonucleotide
tttaattgtagaggagaattcttctattgtaatacatcagagctgtttaatagtag

SEQ ID NO: 483768 - DNA, 56 bp, Artificial
  Synthetic oligonucleotide
tttaatttggcgctccaaagtatttatagtacgactaagagttgttaaatgctcga

SEQ ID NO: 483769 - DNA, 54 bp, Artificial
  Synthetic oligonucleotide
tttacaaaacttacaaacacaaatagtttccttggaataactatggacaacaca

SEQ ID NO: 483770 - DNA, 58 bp, Artificial
  Synthetic oligonucleotide
tttacaaacataaaggtgcggtggaccactacagcctctttcgaatcatcaggaagaa

SEQ ID NO: 483771 - DNA, 55 bp, Artificial
  Synthetic oligonucleotide
tttacaaactccctagcgggtacctagacctctccatcctctctgaccccgccat

SEQ ID NO: 483772 - DNA, 60 bp, Artificial
  Synthetic oligonucleotide
tttacaaagatggtgcgagatgtgatcgtgccaaaacttggaacatggccgagtatgatg

SEQ ID NO: 483773 - DNA, 60 bp, Artificial
  Synthetic oligonucleotide
tttacaacaagggagagatagatatcatcccaagagtcaatatcagggatgcaacccaaa

SEQ ID NO: 483774 - DNA, 59 bp, Artificial
  Synthetic oligonucleotide
tttacaacgcgcctacgcacttcattgatggacgtgaaataatcgacgccgacggctta

SEQ ID NO: 483775 - DNA, 60 bp, Artificial
  Synthetic oligonucleotide
tttacaacggaagcggcgaatgagattgctcgcgtgacaggggagacttcaacatgggga

SEQ ID NO: 483776 - DNA, 56 bp, Artificial
  Synthetic oligonucleotide
tttacaacggcgccttcaactgtaactccgatagacaacacaccatgagggattta

SEQ ID NO: 483777 - DNA, 59 bp, Artificial
  Synthetic oligonucleotide
tttacaacgtgtgtttacagtagcttccattagaagcatgcttgttaaatgaggaccga

SEQ ID NO: 483778 - DNA, 51 bp, Artificial
  Synthetic oligonucleotide
tttacaactcggcagacctcgtgagatcgccaaagacgcatctcacgattt

SEQ ID NO: 483779 - DNA, 59 bp, Artificial
  Synthetic oligonucleotide
tttacaactgccggttaatcagtaacttctggcaaaccagatgatggagttggccacat

SEQ ID NO: 483780 - DNA, 60 bp, Artificial
  Synthetic oligonucleotide
tttacaagaagcaagaattgtgttagaagctaatgtgatggagatcttgggtattgcgat

SEQ ID NO: 483781 - DNA, 55 bp, Artificial
  Synthetic oligonucleotide
tttacaagaataaacctgtttgatacagaaagaacaccaggcatgcgggttgtac

SEQ ID NO: 483782 - DNA, 59 bp, Artificial
  Synthetic oligonucleotide
tttacaatatatctccaacgctgctggtttcaggatttcacgagaaacttcacgcgaaa

SEQ ID NO: 483783 - DNA, 52 bp, Artificial
  Synthetic oligonucleotide
tttacaatcccagtcgtgtacttttgaaacgtgggttttattaagccaacac

SEQ ID NO: 483784 - DNA, 58 bp, Artificial
  Synthetic oligonucleotide
tttacaatggacgtaactatgtgctcgatatcaacccgcctgttgtgaagaacaatac

SEQ ID NO: 483785 - DNA, 55 bp, Artificial
  Synthetic oligonucleotide
tttacaatgttgggtatctacgacaggtgggccgtgttaccacgccacgctaaac

SEQ ID NO: 483786 - DNA, 60 bp, Artificial
  Synthetic oligonucleotide
tttacacaacgtggtccacttttatcggatactaagttatatgctgtgatgaagcatgga

SEQ ID NO: 483787 - DNA, 55 bp, Artificial
  Synthetic oligonucleotide
tttacacacaccaagtttgacatacccgcaggtacagctcaagtgtacgctggcg

SEQ ID NO: 483788 - DNA, 55 bp, Artificial
  Synthetic oligonucleotide
tttacacagtatatggatgtatagtgagggttaggcagggatatgttcctctatc

SEQ ID NO: 483789 - DNA, 52 bp, Artificial
  Synthetic oligonucleotide
tttacaccagaccttgaattgtctgaatcttcaaccataacagtgaacgcta

SEQ ID NO: 483790 - DNA, 58 bp, Artificial
  Synthetic oligonucleotide
tttacacctagtaccaaggtattgctcttgaaaagtctgtctgtgttaatgcccgctc

SEQ ID NO: 483791 - DNA, 59 bp, Artificial
  Synthetic oligonucleotide
tttacacgcagattggtaagcctggcaccgactggataagtggtgactacgtcaacatt

SEQ ID NO: 483792 - DNA, 58 bp, Artificial
  Synthetic oligonucleotide
tttacacggcggtcctcaactattgctcgacagttcgtcagtcttaccaggctacgac

SEQ ID NO: 483793 - DNA, 56 bp, Artificial
  Synthetic oligonucleotide
tttacactcgcggacgaaaaacctcatgttattgtcgatcctgaggtgtaacaggg

SEQ ID NO: 483794 - DNA, 57 bp, Artificial
  Synthetic oligonucleotide
tttacagacgtggttataagactccgtataggagtccgtatgtcgctcgtgtaacac

SEQ ID NO: 483795 - DNA, 55 bp, Artificial
  Synthetic oligonucleotide
tttacagagtctttcgaaactctagaatttattggtgactctgttctaggcttcg

SEQ ID NO: 483796 - DNA, 60 bp, Artificial
  Synthetic oligonucleotide
tttacagattaggttaatatagaactaacatgcagacatatagagtgtatttagagatca

SEQ ID NO: 483797 - DNA, 56 bp, Artificial
  Synthetic oligonucleotide
tttacagattttgcactctgaatgtttgggtggaacccgttgatatcaaagaacct

SEQ ID NO: 483798 - DNA, 59 bp, Artificial
  Synthetic oligonucleotide
tttacagcaagtcgcagtttcgaactcaggttgacgaaagagtaaagcggcgtcatgtg

SEQ ID NO: 483799 - DNA, 60 bp, Artificial
  Synthetic oligonucleotide
tttacagcatgggtccagttggatagacctcttctgagggattgagtccaacggaatgag

SEQ ID NO: 483800 - DNA, 55 bp, Artificial
  Synthetic oligonucleotide
tttacagctaggccaaggcgaggtggtactgatagggaacttaattacccacacg

SEQ ID NO: 483801 - DNA, 60 bp, Artificial
  Synthetic oligonucleotide
tttacaggaaacactgaaggcagaacttcagacatgagaactgagatcatacggatgatg

SEQ ID NO: 483802 - DNA, 56 bp, Artificial
  Synthetic oligonucleotide
tttacagggctaaagcaaatagacggccattttctatcccagactaagcaatcggg

SEQ ID NO: 483803 - DNA, 55 bp, Artificial
  Synthetic oligonucleotide
tttacagggctaacccaaattgacggtcatttcctatcccagaccaaacaatcag

SEQ ID NO: 483804 - DNA, 56 bp, Artificial
  Synthetic oligonucleotide
tttacaggggtttgtatattgagtaattgttctagtgcctcttctttagagatagg

SEQ ID NO: 483805 - DNA, 60 bp, Artificial
  Synthetic oligonucleotide
tttacagtagcttccattagaagcatgttgattaagtgaggaccagactaaccatctggt

SEQ ID NO: 483806 - DNA, 58 bp, Artificial
  Synthetic oligonucleotide
tttacagtgggcagcgtggtaatcgtcgggagggtcgttatatctggccaacctgctg

SEQ ID NO: 483807 - DNA, 55 bp, Artificial
  Synthetic oligonucleotide
tttacagttggtgcccggaaaggaatatccactgaatgtttcgccgtagacagtt

SEQ ID NO: 483808 - DNA, 55 bp, Artificial
  Synthetic oligonucleotide
tttacagttttatcagatttgtggatcctctcaccggtcacacattggacgagag

SEQ ID NO: 483809 - DNA, 55 bp, Artificial
  Synthetic oligonucleotide
tttacataaggtaactcaacgaatgtgtcgactaacaattgttgcgccaaaggcg

SEQ ID NO: 483810 - DNA, 57 bp, Artificial
  Synthetic oligonucleotide
tttacataccatcgcatcaacggagcattaatccaatttgcgttttcgttacccgcc

SEQ ID NO: 483811 - DNA, 58 bp, Artificial
  Synthetic oligonucleotide
tttacatcctgatataagtaactgcacttccgaatggctgagttttccacgcccgtcc

SEQ ID NO: 483812 - DNA, 60 bp, Artificial
  Synthetic oligonucleotide
tttacatcgtttccgcaatgactcaatccgtgtcttacaatgcgtatgacacctctgatc

SEQ ID NO: 483813 - DNA, 59 bp, Artificial
  Synthetic oligonucleotide
tttacatgaggatgaagcacgtcagggcgtggatacctcgcccaatgcgtaaccaaaac

SEQ ID NO: 483814 - DNA, 52 bp, Artificial
  Synthetic oligonucleotide
tttacatgcgcatgactctaaaggtactaactctaagcgacgatctgggggt

SEQ ID NO: 483815 - DNA, 55 bp, Artificial
  Synthetic oligonucleotide
tttacatgtcgacaatctgcttcggttcagttgaatgcaaattaccgtactcacc

SEQ ID NO: 483816 - DNA, 60 bp, Artificial
  Synthetic oligonucleotide
tttacatgtcgcgcgatctcatttgaatcttgaataattgtctcgcggttcatgactacg

SEQ ID NO: 483817 - DNA, 58 bp, Artificial
  Synthetic oligonucleotide
tttacatgtctaaggcccatgggattgatcctaacatcaggaccggggtgagaacaat

SEQ ID NO: 483818 - DNA, 55 bp, Artificial
  Synthetic oligonucleotide
tttacattaccgtcatgaattgagattgcttctagaagcgccagatagactgctc

SEQ ID NO: 483819 - DNA, 58 bp, Artificial
  Synthetic oligonucleotide
tttacattacctaggaaaaataatgcagggccagggaggagatatgtatggtgcagtt

SEQ ID NO: 483820 - DNA, 55 bp, Artificial
  Synthetic oligonucleotide
tttacattatgtagtgctgcggacacaaattttgttaagaggggaacctcttctc

SEQ ID NO: 483821 - DNA, 59 bp, Artificial
  Synthetic oligonucleotide
tttacatttcataaaccgaacattttcccttattcagcgtcattcacactgaacagatc

SEQ ID NO: 483822 - DNA, 55 bp, Artificial
  Synthetic oligonucleotide
tttaccaatcgagaactgtgatgcctcatgccagaccattgcaggagtcctaagg

SEQ ID NO: 483823 - DNA, 52 bp, Artificial
  Synthetic oligonucleotide
tttaccaatgcccgtttccgtgcgggttccggggcaccttgtccgagtggga

SEQ ID NO: 483824 - DNA, 51 bp, Artificial
  Synthetic oligonucleotide
tttaccacacaaccaacaaaaccacaccacctattaatttaggagtgtggt

SEQ ID NO: 483825 - DNA, 60 bp, Artificial
  Synthetic oligonucleotide
tttaccacagcttctacaattgcctcctcttttagtttcacaccagaagctgtgtacaca

SEQ ID NO: 483826 - DNA, 55 bp, Artificial
  Synthetic oligonucleotide
tttaccaccagaagctggtggggatcgtttacttgttaatggaaatatgttgccg

SEQ ID NO: 483827 - DNA, 59 bp, Artificial
  Synthetic oligonucleotide
tttaccacgacgggtgtcaacaccgatgccgttcgcttcaacttccagcatgaaagtca

SEQ ID NO: 483828 - DNA, 60 bp, Artificial
  Synthetic oligonucleotide
tttaccacgtcaccaatgattgccctaactcgagtattgtgtacgagacggctgatacca

SEQ ID NO: 483829 - DNA, 55 bp, Artificial
  Synthetic oligonucleotide
tttaccactgtatcgcacctggtattcccatggttcaaagtctgtgagcgcgact

SEQ ID NO: 483830 - DNA, 56 bp, Artificial
  Synthetic oligonucleotide
tttaccagaaaagactcccagaaatccgttaggactgtgtcttattgggtctgcac

SEQ ID NO: 483831 - DNA, 55 bp, Artificial
  Synthetic oligonucleotide
tttaccagcgtgttacatacaaccatcaggaagatgctaaatatgagaaccacac

SEQ ID NO: 483832 - DNA, 60 bp, Artificial
  Synthetic oligonucleotide
tttaccagtcgaggattgtggtaggattgccgcattgatgacacacagcattctgccgtg

SEQ ID NO: 483833 - DNA, 58 bp, Artificial
  Synthetic oligonucleotide
tttaccagtcttatctgcgacggactcagtcaatgggaatccaacttgaccaaagaat

SEQ ID NO: 483834 - DNA, 57 bp, Artificial
  Synthetic oligonucleotide
tttaccatcaattactgaggaggtaactgacgttattccagctcgtaatttagcagg

SEQ ID NO: 483835 - DNA, 52 bp, Artificial
  Synthetic oligonucleotide
tttaccatcccttgtatccaaaccggtttacctacactctatctttgggttg

SEQ ID NO: 483836 - DNA, 60 bp, Artificial
  Synthetic oligonucleotide
tttaccattggtgtcagtggacgatgggcatatagtagggttccatgggctagcatctaa

SEQ ID NO: 483837 - DNA, 55 bp, Artificial
  Synthetic oligonucleotide
tttacccaaaccaagaagattcggcttacgcaagaatgggtaatgtatgcggaaa

SEQ ID NO: 483838 - DNA, 59 bp, Artificial
  Synthetic oligonucleotide
tttacccaaggaccgggctacagcaatgctgggcacacatgttatctgggactttgggc

SEQ ID NO: 483839 - DNA, 57 bp, Artificial
  Synthetic oligonucleotide
tttacccactccggcataaaactgttttcatagtcacaacgaccatccactattgga

SEQ ID NO: 483840 - DNA, 58 bp, Artificial
  Synthetic oligonucleotide
tttaccccacgtcggtgacaacattcacagcttaccacacggaggagcttacagagac

SEQ ID NO: 483841 - DNA, 58 bp, Artificial
  Synthetic oligonucleotide
tttacccccggtgcgatttctttagctgcgtgttctttagcagctgcccacactgtcc

SEQ ID NO: 483842 - DNA, 56 bp, Artificial
  Synthetic oligonucleotide
tttaccccgctagacggtgcaggaaccggatcgagcgcagcgaggaggttcccggc

SEQ ID NO: 483843 - DNA, 52 bp, Artificial
  Synthetic oligonucleotide
tttacccctggacgccggatccgtctgacgttttggtgtttgtcccgtacga

SEQ ID NO: 483844 - DNA, 58 bp, Artificial
  Synthetic oligonucleotide
tttacccgaagtccatccgtggatcgacgcctggtaccgagggccaatgccagatcac

SEQ ID NO: 483845 - DNA, 54 bp, Artificial
  Synthetic oligonucleotide
tttacccgtacctccgtaactatgaacaaacaccttgtgcgttctattcagtcc

SEQ ID NO: 483846 - DNA, 57 bp, Artificial
  Synthetic oligonucleotide
tttaccgataacgggatcaatggatacgaactatcaaaacgtgtctaatcctgagcc

SEQ ID NO: 483847 - DNA, 55 bp, Artificial
  Synthetic oligonucleotide
tttaccgctttatgtgatgtctttagatttctagagtgggcttcccacctttaaa

SEQ ID NO: 483848 - DNA, 49 bp, Artificial
  Synthetic oligonucleotide
tttaccggcccctttccctcgttctcgacgtaacaccctttatacgtct

SEQ ID NO: 483849 - DNA, 59 bp, Artificial
  Synthetic oligonucleotide
tttaccgggcaaggtcggtgccagaaagctcagagcgtctcttgaacacggtcacacga

SEQ ID NO: 483850 - DNA, 60 bp, Artificial
  Synthetic oligonucleotide
tttaccgtccagatatatacgccactctctgattgagttgcagtgagtagttccccggtg

SEQ ID NO: 483851 - DNA, 53 bp, Artificial
  Synthetic oligonucleotide
tttacctaagggagctgtccagctgaagctatgctcgtttgaacaagcaacgg

SEQ ID NO: 483852 - DNA, 55 bp, Artificial
  Synthetic oligonucleotide
tttacctcagtataggaatggcaagatgtttactcagtccatagataagaagacc

SEQ ID NO: 483853 - DNA, 60 bp, Artificial
  Synthetic oligonucleotide
tttacctctgatggtgtaagcatgaaagtattagctttaagacacagtgtggctcaggta

SEQ ID NO: 483854 - DNA, 57 bp, Artificial
  Synthetic oligonucleotide
tttacctctggccacggaactggcaatagacggtgagctggacgttacgagtccaag

SEQ ID NO: 483855 - DNA, 60 bp, Artificial
  Synthetic oligonucleotide
tttacctgcctagaagacctgtcctgcgcgcctgctgaagcaagtaagtgcaagtgtccc

SEQ ID NO: 483856 - DNA, 53 bp, Artificial
  Synthetic oligonucleotide
tttaccttggtgggttgggcattggcacaggctctggcaccggtggcaggact

SEQ ID NO: 483857 - DNA, 60 bp, Artificial
  Synthetic oligonucleotide
tttacctttgaattggaccaaagcatggatgtgcagagacccatcttggtgtttctcctg

SEQ ID NO: 483858 - DNA, 54 bp, Artificial
  Synthetic oligonucleotide
tttacgaacggtaatcagccgattatggtacgaactgtcggtccgttcacaagt

SEQ ID NO: 483859 - DNA, 57 bp, Artificial
  Synthetic oligonucleotide
tttacgaatgaacggttactggtttcactcctcgagtataaatcagacattccgaga

SEQ ID NO: 483860 - DNA, 57 bp, Artificial
  Synthetic oligonucleotide
tttacgacccggagtggtaactgctacgaatgttccccactcagccgtgttgacatc

SEQ ID NO: 483861 - DNA, 54 bp, Artificial
  Synthetic oligonucleotide
tttacgacgggttactttcgtgagagttgcggtgctcatttctttaaaggcgcc

SEQ ID NO: 483862 - DNA, 57 bp, Artificial
  Synthetic oligonucleotide
tttacgacgtcgtccgccaaattcgatttggagcccacggaccgcatcttgaggtgc

SEQ ID NO: 483863 - DNA, 59 bp, Artificial
  Synthetic oligonucleotide
tttacgacttcatgaatggtgaggcgaaagaggaggaagtagttcaggaacaatactca

SEQ ID NO: 483864 - DNA, 56 bp, Artificial
  Synthetic oligonucleotide
tttacgataaacagtttggggaaatcggtcggttcatctatcgtccagaaatgaca

SEQ ID NO: 483865 - DNA, 60 bp, Artificial
  Synthetic oligonucleotide
tttacgatacatccttatatattcatagcactgaatacctgcagatgtcgactatccagc

SEQ ID NO: 483866 - DNA, 58 bp, Artificial
  Synthetic oligonucleotide
tttacgatctgttgacatcaacttgtcagatatcaactcggtagctcaacctttcatt

SEQ ID NO: 483867 - DNA, 60 bp, Artificial
  Synthetic oligonucleotide
tttacgatgggtgggccagattcgacaagcagggaacatatggcatcagtacactaaata

SEQ ID NO: 483868 - DNA, 60 bp, Artificial
  Synthetic oligonucleotide
tttacgcagtaaccagatcgacactcccaacagtcggagactcttcacattcactaccac

SEQ ID NO: 483869 - DNA, 57 bp, Artificial
  Synthetic oligonucleotide
tttacgcataataaccctttggtcgatggagataccttcttgtcgtcgctcaaggcc

SEQ ID NO: 483870 - DNA, 55 bp, Artificial
  Synthetic oligonucleotide
tttacgccctggctcgcgtggcatgtggccaagaacacagcagggccaatcgacc

SEQ ID NO: 483871 - DNA, 53 bp, Artificial
  Synthetic oligonucleotide
tttacgcgctcttcgtagggttatccagtcttaccacaagggtaaatggaaac

SEQ ID NO: 483872 - DNA, 58 bp, Artificial
  Synthetic oligonucleotide
tttacggagaccacaattatagccacggctgacgccaggggtcttatccagtcatccc

SEQ ID NO: 483873 - DNA, 59 bp, Artificial
  Synthetic oligonucleotide
tttacggagactcaacgtactatggtcataagtcaggcgctgtccctttaggcactaga

SEQ ID NO: 483874 - DNA, 57 bp, Artificial
  Synthetic oligonucleotide
tttacggatcagatctacttgtcggccttcacaggcatcgaccgatccgagctcaag

SEQ ID NO: 483875 - DNA, 55 bp, Artificial
  Synthetic oligonucleotide
tttacgggtctcacccatatagatgcccacttcctatcccagacaaaacagagcg

SEQ ID NO: 483876 - DNA, 52 bp, Artificial
  Synthetic oligonucleotide
tttacgggtctcttttcggtgcaggtcggtggcactcccggtgtagagtcct

SEQ ID NO: 483877 - DNA, 51 bp, Artificial
  Synthetic oligonucleotide
tttacgggtggggccgggaagaggtgacacacatcctcttaaccaaccccc

SEQ ID NO: 483878 - DNA, 50 bp, Artificial
  Synthetic oligonucleotide
tttacggttagtaagaggatttttaggacttgggctaagtcggtctttag

SEQ ID NO: 483879 - DNA, 58 bp, Artificial
  Synthetic oligonucleotide
tttacgtaaatgcagttcttggcggcacatttatttggtgccctactgcaatgaacct

SEQ ID NO: 483880 - DNA, 58 bp, Artificial
  Synthetic oligonucleotide
tttacgtagcaattcgcaacctaaacatgtaaaagactgtgcaagtatggtgaagttg

SEQ ID NO: 483881 - DNA, 60 bp, Artificial
  Synthetic oligonucleotide
tttacgtcaactgtcactggaggtcaatatgcgagcaaggaacaagccctggtcaagaag

SEQ ID NO: 483882 - DNA, 51 bp, Artificial
  Synthetic oligonucleotide
tttacgtcattaaggtctcctatcttcatcccgttatacttcaatattaga

SEQ ID NO: 483883 - DNA, 56 bp, Artificial
  Synthetic oligonucleotide
tttacgtcgtctttgctgttgttccttgtgactgtacctttggtatgtaccattgt

SEQ ID NO: 483884 - DNA, 56 bp, Artificial
  Synthetic oligonucleotide
tttacgtcttcgcagtggaagttaccgacccgtgagcagtatgaagcattgcagcg

SEQ ID NO: 483885 - DNA, 54 bp, Artificial
  Synthetic oligonucleotide
tttacgtgactacctcgaaattgatggtagtttgggtttagtattcattacgcg

SEQ ID NO: 483886 - DNA, 52 bp, Artificial
  Synthetic oligonucleotide
tttacgtgatcggttgcgttgttggggtatcgacctgaatgatcagacgata

SEQ ID NO: 483887 - DNA, 58 bp, Artificial
  Synthetic oligonucleotide
tttacgtgcgggtcatacaggagttcacgtttgcagaccagtgtacgatattaaagac

SEQ ID NO: 483888 - DNA, 52 bp, Artificial
  Synthetic oligonucleotide
tttacgttaaatcattttggtgtacatacggcagatgctcgtttacaacgta

SEQ ID NO: 483889 - DNA, 52 bp, Artificial
  Synthetic oligonucleotide
tttacgtttcggaggaaagagtaaagttggggttctgacactcatagggaag

SEQ ID NO: 483890 - DNA, 58 bp, Artificial
  Synthetic oligonucleotide
tttactaacactatattagatgtaggaccaattaccatggcaggtcttattaatttga

SEQ ID NO: 483891 - DNA, 53 bp, Artificial
  Synthetic oligonucleotide
tttactaacgtggagttccgcgttaagtgttggacggaagacaatgacggtaa

SEQ ID NO: 483892 - DNA, 53 bp, Artificial
  Synthetic oligonucleotide
tttactaataaatgtagacagtgcacatgcggtcagtttgaagatgttgctgg

SEQ ID NO: 483893 - DNA, 60 bp, Artificial
  Synthetic oligonucleotide
tttactaatcgtaaggtagctactaagttgattattgcactacagcttggtcaatgacca

SEQ ID NO: 483894 - DNA, 55 bp, Artificial
  Synthetic oligonucleotide
tttactacctgtcctaaggatgaattgagacctctggacaaagtgttggaatcta

SEQ ID NO: 483895 - DNA, 59 bp, Artificial
  Synthetic oligonucleotide
tttactagacagtgtaaaagaattctaccatctggaggctaagaaattacatgacgaga

SEQ ID NO: 483896 - DNA, 51 bp, Artificial
  Synthetic oligonucleotide
tttactagcaattttgttcttgcgtcaactaattcaaacacacttagccct

SEQ ID NO: 483897 - DNA, 60 bp, Artificial
  Synthetic oligonucleotide
tttactaggcatatagtaaaaataccaatacagggacactgggagatgcaaattagatgc

SEQ ID NO: 483898 - DNA, 50 bp, Artificial
  Synthetic oligonucleotide
tttactatagagtataggtatagctttggttagaattgtatgatgtgacc

SEQ ID NO: 483899 - DNA, 59 bp, Artificial
  Synthetic oligonucleotide
tttactatgtggaaattgacgtatctggatcacaaactaatgcctattttggatcaaaa

SEQ ID NO: 483900 - DNA, 52 bp, Artificial
  Synthetic oligonucleotide
tttactcaaaagccgaatctgacgcaataaggacaattgctcttggtgggaa

SEQ ID NO: 483901 - DNA, 58 bp, Artificial
  Synthetic oligonucleotide
tttactccctggcatgttggggggaaaggattcgatctgttcggtgagaccagatcga

SEQ ID NO: 483902 - DNA, 60 bp, Artificial
  Synthetic oligonucleotide
tttactccgcgtagcggtatgtttagtgaggataggattgtctatgtatatgcgtgacgt

SEQ ID NO: 483903 - DNA, 60 bp, Artificial
  Synthetic oligonucleotide
tttactcctgtctatcggtgaatggtgacgcatatatactagagctactaatagcccata

SEQ ID NO: 483904 - DNA, 53 bp, Artificial
  Synthetic oligonucleotide
tttactccttgaacccttcggaagaactctttggagttcgtaccagtacctca

SEQ ID NO: 483905 - DNA, 56 bp, Artificial
  Synthetic oligonucleotide
tttactcgggagacttatgcgaaattaccaggatagttcgagacctgaaagccaac

SEQ ID NO: 483906 - DNA, 55 bp, Artificial
  Synthetic oligonucleotide
tttactcgttcctcctagtgaagtagcctaacgacaataacattctaaaatccca

SEQ ID NO: 483907 - DNA, 55 bp, Artificial
  Synthetic oligonucleotide
tttactctcagcaaagacaagatatccttgacctgtgggtctataacacacaagg

SEQ ID NO: 483908 - DNA, 55 bp, Artificial
  Synthetic oligonucleotide
tttactgacatggtgcgaagacttgcatgtgcttggttgagagtcctccggcccc

SEQ ID NO: 483909 - DNA, 59 bp, Artificial
  Synthetic oligonucleotide
tttactgcactgcaagaaattcagttgactctaattgaaaaagactccacaaatttaga

SEQ ID NO: 483910 - DNA, 58 bp, Artificial
  Synthetic oligonucleotide
tttactgcgaaaaccactttaaggtgacactgatactggtactcgaccactggtgaca

SEQ ID NO: 483911 - DNA, 59 bp, Artificial
  Synthetic oligonucleotide
tttactgctcaacatggattggccagacgaagagtcagatccaccggattctccaagcc

SEQ ID NO: 483912 - DNA, 55 bp, Artificial
  Synthetic oligonucleotide
tttactggagatgcttctcttacagctccgaaagcttaagttaaaccaatagcag

SEQ ID NO: 483913 - DNA, 59 bp, Artificial
  Synthetic oligonucleotide
tttactggtatttgatgcacccaggggagtcaatcagtttcgaaagcaatggaggatta

SEQ ID NO: 483914 - DNA, 60 bp, Artificial
  Synthetic oligonucleotide
tttactgtgcaatagacatcggtatggactgtggcgctgagaagaaaccagtgtggatcg

SEQ ID NO: 483915 - DNA, 60 bp, Artificial
  Synthetic oligonucleotide
tttactgtttgatgggctcaggacaattgctatgggacactgtcacaggcgttgatatgg

SEQ ID NO: 483916 - DNA, 59 bp, Artificial
  Synthetic oligonucleotide
tttacttaatcgcaattgtcaaacgttcgcgacagatattagaaattatcttgcgagtg

SEQ ID NO: 483917 - DNA, 52 bp, Artificial
  Synthetic oligonucleotide
tttacttagagactcagaattgctttccctttcactaattctcacgtcttct

SEQ ID NO: 483918 - DNA, 60 bp, Artificial
  Synthetic oligonucleotide
tttacttaggtgccactcactatgaagtctcctatgcacagttgaaacgaaatgcattga

SEQ ID NO: 483919 - DNA, 55 bp, Artificial
  Synthetic oligonucleotide
tttacttagttgctaactatgattgggtaccaacttcaacaacaaaagtgtataa

SEQ ID NO: 483920 - DNA, 58 bp, Artificial
  Synthetic oligonucleotide
tttacttgcatggtgataaaactaaacctatgatacttaccattacacttaatggcac

SEQ ID NO: 483921 - DNA, 55 bp, Artificial
  Synthetic oligonucleotide
tttacttggtttaaagaacccttttgttggagtgagatcttgatggattactcta

SEQ ID NO: 483922 - DNA, 57 bp, Artificial
  Synthetic oligonucleotide
tttactttgctacacctagtggttctttagtgagtagtgatgcccaaatatttaata

SEQ ID NO: 483923 - DNA, 51 bp, Artificial
  Synthetic oligonucleotide
tttactttgctagcccaaggtcgagctttacgtctatccatcgatactacg

SEQ ID NO: 483924 - DNA, 60 bp, Artificial
  Synthetic oligonucleotide
tttagaaacagcagaaggatgtcaacaaatactagaacagttacagtcaactctcaagac

SEQ ID NO: 483925 - DNA, 54 bp, Artificial
  Synthetic oligonucleotide
tttagaaataccacacctgacacatactcattagctgggtttataacatgttgg

SEQ ID NO: 483926 - DNA, 57 bp, Artificial
  Synthetic oligonucleotide
tttagaacatcgtgttaccatggtggctaatagtaaggttccaacacctcgtatagc

SEQ ID NO: 483927 - DNA, 54 bp, Artificial
  Synthetic oligonucleotide
tttagaaccaagagccaagattgccgggaaagcaaagacagtttttattcccga

SEQ ID NO: 483928 - DNA, 55 bp, Artificial
  Synthetic oligonucleotide
tttagaacgtacttggtaaattacgacttttcatatcgtttatggcagtcaaggc

SEQ ID NO: 483929 - DNA, 59 bp, Artificial
  Synthetic oligonucleotide
tttagaagattgtattgctttgatcagacgtctattacctaacatacaacagtcaacct

SEQ ID NO: 483930 - DNA, 60 bp, Artificial
  Synthetic oligonucleotide
tttagaagcgtctgcggaatcactatatcgctccatttccagcatgtctactaccgtttc

SEQ ID NO: 483931 - DNA, 60 bp, Artificial
  Synthetic oligonucleotide
tttagaagtgccctcctctgatcgagctgctgtgaacttaggtttcccatgtagacacct

SEQ ID NO: 483932 - DNA, 60 bp, Artificial
  Synthetic oligonucleotide
tttagaatggatgtaaccacgagttatacatatatgttatcagacgaaatctatgtagca

SEQ ID NO: 483933 - DNA, 60 bp, Artificial
  Synthetic oligonucleotide
tttagacacaatattgcttgacggtgattcgcaatggggaatttcaaaagtcatgagtat

SEQ ID NO: 483934 - DNA, 60 bp, Artificial
  Synthetic oligonucleotide
tttagacatagttgcattacataggcctgctttaacatctcgcagaggcactattagatt

SEQ ID NO: 483935 - DNA, 60 bp, Artificial
  Synthetic oligonucleotide
tttagacatgatgttatcagcagccgggataaatgttggaccaatatcaccggattacac

SEQ ID NO: 483936 - DNA, 53 bp, Artificial
  Synthetic oligonucleotide
tttagacattgacggtgcggtgaggcttcctcacatttaccatgaaggagttt

SEQ ID NO: 483937 - DNA, 60 bp, Artificial
  Synthetic oligonucleotide
tttagaccaattcaggatgattgcttacggggacgatgtgatcgcttcatacccgtggcc

SEQ ID NO: 483938 - DNA, 50 bp, Artificial
  Synthetic oligonucleotide
tttagacctaaagggaaaccttgccccaaggaaattcccaaagaatcaaa

SEQ ID NO: 483939 - DNA, 56 bp, Artificial
  Synthetic oligonucleotide
tttagacctgaaaccaacaaccgaaattgaccttacatgttacgagtcattggaca

SEQ ID NO: 483940 - DNA, 51 bp, Artificial
  Synthetic oligonucleotide
tttagacgattaattggttatgcgaacactccttgcaaaatcctgatagcc

SEQ ID NO: 483941 - DNA, 58 bp, Artificial
  Synthetic oligonucleotide
tttagactaagtgaagagaagcggaaacattttagacatctactaagccagtgcgact

SEQ ID NO: 483942 - DNA, 57 bp, Artificial
  Synthetic oligonucleotide
tttagactacagaaaaaacatagccagatctcctggtcagggttgtttaatcctcta

SEQ ID NO: 483943 - DNA, 51 bp, Artificial
  Synthetic oligonucleotide
tttagactacccatccaaaaggaaacatgggagacacggtggacagactac

SEQ ID NO: 483944 - DNA, 55 bp, Artificial
  Synthetic oligonucleotide
tttagactctctgtagaagaaccatcgttttccattacgagaactagagttagtg

SEQ ID NO: 483945 - DNA, 55 bp, Artificial
  Synthetic oligonucleotide
tttagactttatggcatcctatcgagctgcacgacttaatgctgagcatggtatt

SEQ ID NO: 483946 - DNA, 55 bp, Artificial
  Synthetic oligonucleotide
tttagagaccagactcactctgggagggctgccctgaaggcatcccgagatcagg

SEQ ID NO: 483947 - DNA, 60 bp, Artificial
  Synthetic oligonucleotide
tttagagacctgggaagagtgatggttatggtgggcgctaccatgacggatgacataggt

SEQ ID NO: 483948 - DNA, 58 bp, Artificial
  Synthetic oligonucleotide
tttagagcacgtgggtggtcctctaatacgtgggcactatggagtctcgctcgaagct

SEQ ID NO: 483949 - DNA, 51 bp, Artificial
  Synthetic oligonucleotide
tttagagcctattaattcaacctcgagacaatcaccaagtatcaaagggtc

SEQ ID NO: 483950 - DNA, 60 bp, Artificial
  Synthetic oligonucleotide
tttagagcctttgcggctgtgtcgttagcgctctgctgacctcctctagcacttctgccg

SEQ ID NO: 483951 - DNA, 58 bp, Artificial
  Synthetic oligonucleotide
tttagaggaccttcagactttgaggcggagcttgacaggttgctcaacaacaagaacg

SEQ ID NO: 483952 - DNA, 57 bp, Artificial
  Synthetic oligonucleotide
tttagaggagatggtcctcccaggataccttattctatggttgggccctgttgtgtc

SEQ ID NO: 483953 - DNA, 56 bp, Artificial
  Synthetic oligonucleotide
tttagaggaggtgttactaaatattcacaaccaatggggcacctgtgtggagaaac

SEQ ID NO: 483954 - DNA, 55 bp, Artificial
  Synthetic oligonucleotide
tttagaggggctctgtaccgcctctggttttgagagcccatttcccattctcggg

SEQ ID NO: 483955 - DNA, 60 bp, Artificial
  Synthetic oligonucleotide
tttagaggtcaacaatgtacccacgaatgccactagcttaatggagagactgcgcttccc

SEQ ID NO: 483956 - DNA, 58 bp, Artificial
  Synthetic oligonucleotide
tttagagtatgtgttagggccatactatgacctacgcctacagttattcggcgacgcc

SEQ ID NO: 483957 - DNA, 60 bp, Artificial
  Synthetic oligonucleotide
tttagagtgccaagaaactttgacaaacagccaatggcatctacaagcaacttgccaaga

SEQ ID NO: 483958 - DNA, 55 bp, Artificial
  Synthetic oligonucleotide
tttagataacggtttatgcggattagaatataacgtcacgtgtgaaagccgaaag

SEQ ID NO: 483959 - DNA, 60 bp, Artificial
  Synthetic oligonucleotide
tttagataagtatatgcacatgataaagaccaccttgaagccagtggaagaggataacct

SEQ ID NO: 483960 - DNA, 59 bp, Artificial
  Synthetic oligonucleotide
tttagatacagatgcgaggatgctggagcctttggtgttaaacatattgactacctgga

SEQ ID NO: 483961 - DNA, 53 bp, Artificial
  Synthetic oligonucleotide
tttagatataatcctgaagaagacacaggccagggcaatgtagtatggctaac

SEQ ID NO: 483962 - DNA, 56 bp, Artificial
  Synthetic oligonucleotide
tttagatatccccatgatatctaaaataccagaggatatagctggagccctaagat

SEQ ID NO: 483963 - DNA, 60 bp, Artificial
  Synthetic oligonucleotide
tttagatatgatggtgtcagcagcgggaataaatgtcggaccaatctcacccgattatac

SEQ ID NO: 483964 - DNA, 53 bp, Artificial
  Synthetic oligonucleotide
tttagatcagaagtagaaactttacaagcagcagtagctctagctacatttgc

SEQ ID NO: 483965 - DNA, 57 bp, Artificial
  Synthetic oligonucleotide
tttagatcagtttccactgggtcgcaaatttttattacaggcaggatatagggcacg

SEQ ID NO: 483966 - DNA, 55 bp, Artificial
  Synthetic oligonucleotide
tttagatccatgacggatgtggtagattccataccatcgctcttaaatgagcgta

SEQ ID NO: 483967 - DNA, 57 bp, Artificial
  Synthetic oligonucleotide
tttagatgagtgtggcacgtggtttaattcccgcaactggagtgataaaagtcgcca

SEQ ID NO: 483968 - DNA, 55 bp, Artificial
  Synthetic oligonucleotide
tttagatgatggaactccagcgacaagtgagttgaaaactcctaccaagaatcac

SEQ ID NO: 483969 - DNA, 60 bp, Artificial
  Synthetic oligonucleotide
tttagatgctgctgaaacaggacacactagtcaagttcaaccagaggatgtgatagaaac

SEQ ID NO: 483970 - DNA, 55 bp, Artificial
  Synthetic oligonucleotide
tttagatgggtgattgacttggtcaggagcactttatccaagctcaagaccagac

SEQ ID NO: 483971 - DNA, 59 bp, Artificial
  Synthetic oligonucleotide
tttagatggtccttatcaacccactacattcaaaccacccaatgattattggctgctta

SEQ ID NO: 483972 - DNA, 60 bp, Artificial
  Synthetic oligonucleotide
tttagatgtaacgaccgcaggtgtcgacaatgctacgaatcagatacccgcgacattagt

SEQ ID NO: 483973 - DNA, 55 bp, Artificial
  Synthetic oligonucleotide
tttagattcctgtcagcatccttttctccgctttaattgcggcacattcagtgag

SEQ ID NO: 483974 - DNA, 60 bp, Artificial
  Synthetic oligonucleotide
tttagattgtatagacaatgcaccagcattatttgtttcatggacatcgaaacatggttt

SEQ ID NO: 483975 - DNA, 56 bp, Artificial
  Synthetic oligonucleotide
tttagatttatctggtttcgtgataacatgaaccgtgggaccactcccacagttct

SEQ ID NO: 483976 - DNA, 52 bp, Artificial
  Synthetic oligonucleotide
tttagatttgaatcttgggttaaccccttttacacacttgcccccatgggaa

SEQ ID NO: 483977 - DNA, 59 bp, Artificial
  Synthetic oligonucleotide
tttagcaactgttacccgtatgatgtgccggagtatacctcccttagatcactaattgc

SEQ ID NO: 483978 - DNA, 57 bp, Artificial
  Synthetic oligonucleotide
tttagcaattaacacatgcttcactaggaaaagcttccccttctattctaagttcaa

SEQ ID NO: 483979 - DNA, 59 bp, Artificial
  Synthetic oligonucleotide
tttagcaattgggaaagtgcctcttctttggtgagggagcagcctggataagtgataaa

SEQ ID NO: 483980 - DNA, 60 bp, Artificial
  Synthetic oligonucleotide
tttagcacgagcacgtatcgctttgcaaggtgaatcgattaagagagaagatctgacact

SEQ ID NO: 483981 - DNA, 55 bp, Artificial
  Synthetic oligonucleotide
tttagcactcctattcaaggggtcctggccgttcaacaacttgacaccgtaggga

SEQ ID NO: 483982 - DNA, 60 bp, Artificial
  Synthetic oligonucleotide
tttagcacttggtgtgcttcggacatctgcaacagggagggtattcttttctactctgcg

SEQ ID NO: 483983 - DNA, 60 bp, Artificial
  Synthetic oligonucleotide
tttagcagataggcatttgcgtttagtcgctttgagcagacataagtcgaagttaatcat

SEQ ID NO: 483984 - DNA, 55 bp, Artificial
  Synthetic oligonucleotide
tttagcagcttcgatcatagtaagcccacccgtgaatgggacttacaaaattcga

SEQ ID NO: 483985 - DNA, 55 bp, Artificial
  Synthetic oligonucleotide
tttagcaggtctggattgtggactgttaaatataaaaaccgtgaaatttcctcta

SEQ ID NO: 483986 - DNA, 54 bp, Artificial
  Synthetic oligonucleotide
tttagccaggtcaaagcactattcattgggttcagatctgaggatgtggctaac

SEQ ID NO: 483987 - DNA, 60 bp, Artificial
  Synthetic oligonucleotide
tttagccatcctcactggagattctaaacagagtttccatcatgaatccaatgaggatgc

SEQ ID NO: 483988 - DNA, 55 bp, Artificial
  Synthetic oligonucleotide
tttagccctacgaataacacgcctcagccttacgctatctttgttggaccctcag

SEQ ID NO: 483989 - DNA, 51 bp, Artificial
  Synthetic oligonucleotide
tttagccgacgggtccgacctgccaccaagagcgccagggaaggcggtgga

SEQ ID NO: 483990 - DNA, 55 bp, Artificial
  Synthetic oligonucleotide
tttagcctcaaagatgttatttcgggatctgctcatgtcgaaatacgacgacttg

SEQ ID NO: 483991 - DNA, 59 bp, Artificial
  Synthetic oligonucleotide
tttagcctcatccagggagcttttcaagctcttaactccacgactccagaggctacctc

SEQ ID NO: 483992 - DNA, 60 bp, Artificial
  Synthetic oligonucleotide
tttagcgaccgttctaatgataacgatgtgcgacgtattaaagcgagctatatgggcaaa

SEQ ID NO: 483993 - DNA, 51 bp, Artificial
  Synthetic oligonucleotide
tttagctacctgcctacgggcggcacttgcacggaatctgacgctccagcg

SEQ ID NO: 483994 - DNA, 60 bp, Artificial
  Synthetic oligonucleotide
tttagctagtatctcaaaagagatagtggaatatccaggcgataatgataaacaaaaaga

SEQ ID NO: 483995 - DNA, 59 bp, Artificial
  Synthetic oligonucleotide
tttagctcacgttgaaacacgattcacgagtttatctaaattattgactactcatatgg

SEQ ID NO: 483996 - DNA, 59 bp, Artificial
  Synthetic oligonucleotide
tttagctccctgaatgttcggatggaaatgtgctgacctggttggggataccaggtcga

SEQ ID NO: 483997 - DNA, 59 bp, Artificial
  Synthetic oligonucleotide
tttagctccctgaatgtttggatggaaatgtgctgacttggaaggggatacgaggtcga

SEQ ID NO: 483998 - DNA, 60 bp, Artificial
  Synthetic oligonucleotide
tttagctgcgccgtctttagcagctgcccacactgtcctataagttgctctccggagtgc

SEQ ID NO: 483999 - DNA, 58 bp, Artificial
  Synthetic oligonucleotide
tttagctggactgtgcggacgaacgtcgcttgcgcatctcgcgtgaccgactagtact

SEQ ID NO: 484000 - DNA, 55 bp, Artificial
  Synthetic oligonucleotide
tttagctgggccttcaaccaatgaaatccacgctacatggcttctttactgcgtg

SEQ ID NO: 484001 - DNA, 60 bp, Artificial
  Synthetic oligonucleotide
tttagcttctattccgcttctcatctagccctcgtagcaagtctcgaagcgtagcaagat

SEQ ID NO: 484002 - DNA, 60 bp, Artificial
  Synthetic oligonucleotide
tttagcttgtatacatgggtgaaaatcactaacaggcctgcaccatattaacataagtaa

SEQ ID NO: 484003 - DNA, 57 bp, Artificial
  Synthetic oligonucleotide
tttaggaaaattgctaggcccattatatgggaagacatcgcctaccggagagataag

SEQ ID NO: 484004 - DNA, 57 bp, Artificial
  Synthetic oligonucleotide
tttaggaaaggattgttgaagtacaatgagccagttcgagttgggtcagtgaatttc

SEQ ID NO: 484005 - DNA, 54 bp, Artificial
  Synthetic oligonucleotide
tttaggacacttgatttggttggttctgtgaacatccctagttccctccttaaa

SEQ ID NO: 484006 - DNA, 52 bp, Artificial
  Synthetic oligonucleotide
tttaggacatggacattgacccgaataaagaattcggagcttctacggagtt

SEQ ID NO: 484007 - DNA, 58 bp, Artificial
  Synthetic oligonucleotide
tttaggagatgctaaactagtagtaagaacatattgggggctgcatacaggagaaaaa

SEQ ID NO: 484008 - DNA, 60 bp, Artificial
  Synthetic oligonucleotide
tttaggagatgtcaaatacaaaacatttgctgacagtgttgatataactgcagaagggtc

SEQ ID NO: 484009 - DNA, 52 bp, Artificial
  Synthetic oligonucleotide
tttaggagtacgctcactatttgtacgtgagtggaagtgcttagactttaga

SEQ ID NO: 484010 - DNA, 55 bp, Artificial
  Synthetic oligonucleotide
tttaggattacagccaaatccaagagctacagctaggaaggtggataagtttctg

SEQ ID NO: 484011 - DNA, 60 bp, Artificial
  Synthetic oligonucleotide
tttaggcggcagatacagcgagtcagtcatgtcatcttacgaatggagtaagcaacgtgt

SEQ ID NO: 484012 - DNA, 50 bp, Artificial
  Synthetic oligonucleotide
tttagggcatggacatcgacccatataaagaatttggagcctcagcgcag

SEQ ID NO: 484013 - DNA, 60 bp, Artificial
  Synthetic oligonucleotide
tttagggcgatgccgattaacgatctcttatttgacgaggttccagaattgcgtgacagc

SEQ ID NO: 484014 - DNA, 56 bp, Artificial
  Synthetic oligonucleotide
tttagggcggcggactttggtaaactcacactaccaaaatcaccgcatgacttaga

SEQ ID NO: 484015 - DNA, 55 bp, Artificial
  Synthetic oligonucleotide
tttagggggagatgttgtaggggaaaatattccattggacacttttaatgagcca

SEQ ID NO: 484016 - DNA, 55 bp, Artificial
  Synthetic oligonucleotide
tttagggtcagcaaactattttacagtacctagtggctctctgattaacagtgag

SEQ ID NO: 484017 - DNA, 57 bp, Artificial
  Synthetic oligonucleotide
tttagggttcgactcgtataaaggtgtttcagtccaatatcttgatggcagactagg

SEQ ID NO: 484018 - DNA, 53 bp, Artificial
  Synthetic oligonucleotide
tttaggtaacggtgtaggttcgttcccacaatcttctgttcaagcccaagcat

SEQ ID NO: 484019 - DNA, 52 bp, Artificial
  Synthetic oligonucleotide
tttaggtagcaatttaggtggcgtccctatgtcctccaccctttttggttgt

SEQ ID NO: 484020 - DNA, 60 bp, Artificial
  Synthetic oligonucleotide
tttaggtagtgcggatctacgtcatcaatgacgttgaaccaggcatcattgctgtacact

SEQ ID NO: 484021 - DNA, 60 bp, Artificial
  Synthetic oligonucleotide
tttaggtagtggggatcgacgtcatcaatcacgttgtaccaagcatcattactgtagacc

SEQ ID NO: 484022 - DNA, 53 bp, Artificial
  Synthetic oligonucleotide
tttaggtcacatccgcccgtaggtcccccaaggtcggtgggaatctgtcccca

SEQ ID NO: 484023 - DNA, 57 bp, Artificial
  Synthetic oligonucleotide
tttaggtctagattaccaatgccctaatcccagtttgcacaacgcattggtagcggt

SEQ ID NO: 484024 - DNA, 59 bp, Artificial
  Synthetic oligonucleotide
tttaggtgagatagttcaatattacacccattggtcaggttcactcagaatttctctaa

SEQ ID NO: 484025 - DNA, 58 bp, Artificial
  Synthetic oligonucleotide
tttaggtgcggcgcaggaagctaaagggcgtaccttgaacgaagcatatcgcgaattc

SEQ ID NO: 484026 - DNA, 60 bp, Artificial
  Synthetic oligonucleotide
tttaggtggccagccaaccagggtagatcaaaaaatgcgtggcagtgtggcagtgcctgg

SEQ ID NO: 484027 - DNA, 55 bp, Artificial
  Synthetic oligonucleotide
tttaggtgggccctcaacgaatgaaatggacgctacattgcttatatagtgcggg

SEQ ID NO: 484028 - DNA, 55 bp, Artificial
  Synthetic oligonucleotide
tttaggtgtgaacacaaggtctcctcataattgaacactcatccccaagtgaggg

SEQ ID NO: 484029 - DNA, 60 bp, Artificial
  Synthetic oligonucleotide
tttaggttaactgtgagtgaaccttcattctccatatcacgaactagattaagtggcatc

SEQ ID NO: 484030 - DNA, 60 bp, Artificial
  Synthetic oligonucleotide
tttagtaaaacaccatatctatgtttcaaagagagctcaaggatggtggtatagacatca

SEQ ID NO: 484031 - DNA, 56 bp, Artificial
  Synthetic oligonucleotide
tttagtaaaacatcatatgtatatttcaaggaaagctaagggatggttttatagac

SEQ ID NO: 484032 - DNA, 57 bp, Artificial
  Synthetic oligonucleotide
tttagtaagagtttaatagaactcagaaaatggaagaggttgtatgtgatcccagac

SEQ ID NO: 484033 - DNA, 52 bp, Artificial
  Synthetic oligonucleotide
tttagtaagtggggatgtcagccaataggagcctacccagacccagacttag

SEQ ID NO: 484034 - DNA, 50 bp, Artificial
  Synthetic oligonucleotide
tttagtaattatgtcgcataaaatgcgaaaaagtgagggtgagttagatg

SEQ ID NO: 484035 - DNA, 51 bp, Artificial
  Synthetic oligonucleotide
tttagtacctccttaccggaaatccctctcgagggtcccaatcggtaagta

SEQ ID NO: 484036 - DNA, 60 bp, Artificial
  Synthetic oligonucleotide
tttagtactcctatgtaagtaggatagcacctgccgccacgaatgctggcgcgaacgtag

SEQ ID NO: 484037 - DNA, 60 bp, Artificial
  Synthetic oligonucleotide
tttagtactgaaatgttgcaggatcaatggctgaagctcttgcagcttggagttgctggt

SEQ ID NO: 484038 - DNA, 51 bp, Artificial
  Synthetic oligonucleotide
tttagtagcaactacaatagcacaagacggattaaatgcagcaatggcagc

SEQ ID NO: 484039 - DNA, 56 bp, Artificial
  Synthetic oligonucleotide
tttagtagttacgaatcaagttgaggatctaaaaaagcgtcgatcctcttctggac

SEQ ID NO: 484040 - DNA, 60 bp, Artificial
  Synthetic oligonucleotide
tttagtatcttcacgtcctcagacagagcgcattgtttcaggtagcacgctaataccgac

SEQ ID NO: 484041 - DNA, 60 bp, Artificial
  Synthetic oligonucleotide
tttagtcaatttcgatggcacagtacaccccaagatcgatgtgctgttacgtccttataa

SEQ ID NO: 484042 - DNA, 58 bp, Artificial
  Synthetic oligonucleotide
tttagtccagtgccctccttacaagcgtccgaacatggcgcgaaagaagccattggga

SEQ ID NO: 484043 - DNA, 60 bp, Artificial
  Synthetic oligonucleotide
tttagtgacaccatctgtgaaagtatgcattataggaactgtctcaaagctccagccttc

SEQ ID NO: 484044 - DNA, 58 bp, Artificial
  Synthetic oligonucleotide
tttagtgacttaggcttgaattatgatttctcgtctcgcacaagagataaaaaggagt

SEQ ID NO: 484045 - DNA, 56 bp, Artificial
  Synthetic oligonucleotide
tttagtgcagaaaagtcgcgatcaagtcagctttactttaaccaaactccgcaacg

SEQ ID NO: 484046 - DNA, 58 bp, Artificial
  Synthetic oligonucleotide
tttagtgccggaacactggaacttaatcttcctagcctatcagtggaataagtgtcag

SEQ ID NO: 484047 - DNA, 55 bp, Artificial
  Synthetic oligonucleotide
tttagtgcgctaggtccagatttcatagaaaagcaagatggggatgatgatctta

SEQ ID NO: 484048 - DNA, 57 bp, Artificial
  Synthetic oligonucleotide
tttagtggtagattgtatacgtacaatggtgagacaccgaacgcaactactggttat

SEQ ID NO: 484049 - DNA, 50 bp, Artificial
  Synthetic oligonucleotide
tttagttaaattatggtatcagctagagaaggaacccatagtaggagcag

SEQ ID NO: 484050 - DNA, 59 bp, Artificial
  Synthetic oligonucleotide
tttagttaaccaggagtatgttgcatctcacatgtacccgacgttcttaaggcttgtca

SEQ ID NO: 484051 - DNA, 60 bp, Artificial
  Synthetic oligonucleotide
tttagttcaacacaatcagaaagccagcttgacatggcatccagtaccttggatatcaca

SEQ ID NO: 484052 - DNA, 53 bp, Artificial
  Synthetic oligonucleotide
tttagttcggcaattagaaatagaaattggatgaccgattctcggactgtggc

SEQ ID NO: 484053 - DNA, 54 bp, Artificial
  Synthetic oligonucleotide
tttagttcgtgataggagaccatttgggactccacaggattttggtcaggtttt

SEQ ID NO: 484054 - DNA, 50 bp, Artificial
  Synthetic oligonucleotide
tttagttgaaccaactttggatggaccatatcaaccaactactttcaatc

SEQ ID NO: 484055 - DNA, 58 bp, Artificial
  Synthetic oligonucleotide
tttagttttccgagagtaattaattcagctgatggagcgactacatggtatttcaacc

SEQ ID NO: 484056 - DNA, 55 bp, Artificial
  Synthetic oligonucleotide
tttataaagcacaactggtacaggttaattcgcctcccgcaaacagtccgctgtt

SEQ ID NO: 484057 - DNA, 52 bp, Artificial
  Synthetic oligonucleotide
tttataaaggattcgggtacttaaaatttcgatggtatcctacccagtacca

SEQ ID NO: 484058 - DNA, 55 bp, Artificial
  Synthetic oligonucleotide
tttataacgcttctcttgatcgggcttctaattttgaaaggagtcttctcaaggg

SEQ ID NO: 484059 - DNA, 56 bp, Artificial
  Synthetic oligonucleotide
tttataacggttgtgattccggcgaaggcccgcaaagtgtgcgcggctactttgac

SEQ ID NO: 484060 - DNA, 59 bp, Artificial
  Synthetic oligonucleotide
tttataactgactccctccccaggattgcagagcacgattgatgggattccacctttaa

SEQ ID NO: 484061 - DNA, 55 bp, Artificial
  Synthetic oligonucleotide
tttataagcttgatatagtaccacttgggaaggggaagaagtatagattaataag

SEQ ID NO: 484062 - DNA, 60 bp, Artificial
  Synthetic oligonucleotide
tttataatcatagacgatatacctcaactagctccatcacctctattacctctagtgtct

SEQ ID NO: 484063 - DNA, 60 bp, Artificial
  Synthetic oligonucleotide
tttataatcatcaagagcaggcgaagtatgaaaaccatactgagaatgcgttgttgttgt

SEQ ID NO: 484064 - DNA, 54 bp, Artificial
  Synthetic oligonucleotide
tttatacaaacagacacaaattaatcttatggattcatacgtacaaatacctga

SEQ ID NO: 484065 - DNA, 56 bp, Artificial
  Synthetic oligonucleotide
tttatacagcacacataagaggagatataagacaagcccattgtaacattagtaga

SEQ ID NO: 484066 - DNA, 58 bp, Artificial
  Synthetic oligonucleotide
tttatacagtagctacaactcagctgtgttaaatgttgtccctagaaacggacaagtg

SEQ ID NO: 484067 - DNA, 55 bp, Artificial
  Synthetic oligonucleotide
tttatacatccgttgcttgggctacctagtatccagcgtcctacgggcgttgtgg

SEQ ID NO: 484068 - DNA, 60 bp, Artificial
  Synthetic oligonucleotide
tttataccgtcttatcgcgacattgtgtgcgcgataagacgacaacgatgtagatcgaat

SEQ ID NO: 484069 - DNA, 60 bp, Artificial
  Synthetic oligonucleotide
tttatacgaatgtagaagatataatccagcagactaatgaattgattagaactctgaatg

SEQ ID NO: 484070 - DNA, 52 bp, Artificial
  Synthetic oligonucleotide
tttatacgtaggttgatcgtaattctcaggtgccgtaattatgacgaagcga

SEQ ID NO: 484071 - DNA, 57 bp, Artificial
  Synthetic oligonucleotide
tttatactaagacctgcttacatttgggtcttaaggacaatgattttctgcaattcc

SEQ ID NO: 484072 - DNA, 58 bp, Artificial
  Synthetic oligonucleotide
tttatactaggaacttgcggttgcctctttagtgtgatttgcaagccgactattcttg

SEQ ID NO: 484073 - DNA, 55 bp, Artificial
  Synthetic oligonucleotide
tttatactgggctttctactaaggcccaagtatgattggactctaggcccatttt

SEQ ID NO: 484074 - DNA, 60 bp, Artificial
  Synthetic oligonucleotide
tttatactgtaggcatttagctaactgtagcactgaaagctcacataatagttattttga

SEQ ID NO: 484075 - DNA, 51 bp, Artificial
  Synthetic oligonucleotide
tttatagaataacatttgtaattgtagtattatcagtattatcgaatgcac

SEQ ID NO: 484076 - DNA, 59 bp, Artificial
  Synthetic oligonucleotide
tttatagagaatggctggcaaggcctaatcgatggttggtatgggtttaggcaccagaa

SEQ ID NO: 484077 - DNA, 60 bp, Artificial
  Synthetic oligonucleotide
tttatagcataggtttgtagactaatagcatcccgatgatgtcagttgaccatttcaaat

SEQ ID NO: 484078 - DNA, 56 bp, Artificial
  Synthetic oligonucleotide
tttataggagttaaatttaatagtataccgtatgaatatgatgttaaaattccgca

SEQ ID NO: 484079 - DNA, 55 bp, Artificial
  Synthetic oligonucleotide
tttatagtacggtatcgagcagtctagttttggtgggactgatcgttgccatggg

SEQ ID NO: 484080 - DNA, 60 bp, Artificial
  Synthetic oligonucleotide
tttatagtgagggtagccctccgtgcttttagtatcattcgagttctctgagtctccata

SEQ ID NO: 484081 - DNA, 55 bp, Artificial
  Synthetic oligonucleotide
tttatagttgtgttagtgatttgtgtgttgtgcccttgtgagctatatccagtat

SEQ ID NO: 484082 - DNA, 58 bp, Artificial
  Synthetic oligonucleotide
tttatatacacaaatcagatcgtttagggactacaagtgtggtaaaatatgcgttgaa

SEQ ID NO: 484083 - DNA, 54 bp, Artificial
  Synthetic oligonucleotide
tttatatataaacggtcacgattgcgccacgtgtttcaatattggccatggata

SEQ ID NO: 484084 - DNA, 60 bp, Artificial
  Synthetic oligonucleotide
tttatatcatcgattataaggtttcagtctcaaatgagagtagcgtaataacatatgaca

SEQ ID NO: 484085 - DNA, 55 bp, Artificial
  Synthetic oligonucleotide
tttatatgcaactgtattcttatgcaggcccgtcgggacggatggagagtgcatt

SEQ ID NO: 484086 - DNA, 60 bp, Artificial
  Synthetic oligonucleotide
tttatatgccaccgaatctggaatataatgacatacagtcgaccgcgaatctcgtgtgga

SEQ ID NO: 484087 - DNA, 50 bp, Artificial
  Synthetic oligonucleotide
tttatatgttatcctttgcaggtcgatcttaatgataatgttgaggtcgg

SEQ ID NO: 484088 - DNA, 50 bp, Artificial
  Synthetic oligonucleotide
tttatcaagtactctacaggatggcacacggtgagccatactacagttct

SEQ ID NO: 484089 - DNA, 58 bp, Artificial
  Synthetic oligonucleotide
tttatcaatcatacctcaggcggacacagtcaatgggaatccaactggatcagaggat

SEQ ID NO: 484090 - DNA, 60 bp, Artificial
  Synthetic oligonucleotide
tttatcacgttgaccatgattgggagccgcttaagcaatacaaccatccagatgttcttt

SEQ ID NO: 484091 - DNA, 57 bp, Artificial
  Synthetic oligonucleotide
tttatcactgaaggcttcacttggaccggggtgactcaaaatggagggagtggtgct

SEQ ID NO: 484092 - DNA, 60 bp, Artificial
  Synthetic oligonucleotide
tttatcagtatgctgcatctggggtccaagctaacaacaaactgttgtatgatctttcgg

SEQ ID NO: 484093 - DNA, 60 bp, Artificial
  Synthetic oligonucleotide
tttatcagttcaaatcgctagaattcgatatgtcccacttaaacctgacaatgcccaatg

SEQ ID NO: 484094 - DNA, 57 bp, Artificial
  Synthetic oligonucleotide
tttatcatctgtgggaaaatctttgagaggggcgcgattccaatatttaccgccgaa

SEQ ID NO: 484095 - DNA, 60 bp, Artificial
  Synthetic oligonucleotide
tttatcatgcgtgtacgtggtgactggttggttgtcttagtcacaattgccacttatata

SEQ ID NO: 484096 - DNA, 55 bp, Artificial
  Synthetic oligonucleotide
tttatccaatgtagcggcggtacagaacgacccctttattgatgcaatgcactgg

SEQ ID NO: 484097 - DNA, 53 bp, Artificial
  Synthetic oligonucleotide
tttatccagatcccctaaaattaatcggtaaattaggggcaaagaacatcacg

SEQ ID NO: 484098 - DNA, 58 bp, Artificial
  Synthetic oligonucleotide
tttatccattatataatctcagggtggtttaggatgtcaccttaagtgactatttctg

SEQ ID NO: 484099 - DNA, 59 bp, Artificial
  Synthetic oligonucleotide
tttatcccgcctacaaacagagatactaattaatctgatgcagccccggcagcttgttt

SEQ ID NO: 484100 - DNA, 55 bp, Artificial
  Synthetic oligonucleotide
tttatccgattcagataatgcacatctgtcggatactcaaccgtcatcaagtggc

SEQ ID NO: 484101 - DNA, 59 bp, Artificial
  Synthetic oligonucleotide
tttatccgggtcgtcaagcatcagcattccggtaaagccgtcatccatgtacccgccgc

SEQ ID NO: 484102 - DNA, 60 bp, Artificial
  Synthetic oligonucleotide
tttatccgtctgtagtaatgcatgtaagtgcatatttccatcacgatgtgcctctcgggc

SEQ ID NO: 484103 - DNA, 55 bp, Artificial
  Synthetic oligonucleotide
tttatccgtgattagttggcgtgcaaaagtatcgacgtctacgaccctgtagtgg

SEQ ID NO: 484104 - DNA, 60 bp, Artificial
  Synthetic oligonucleotide
tttatccttgaggatagtccactgaaacgctctttattagagataacttatatgattgaa

SEQ ID NO: 484105 - DNA, 60 bp, Artificial
  Synthetic oligonucleotide
tttatcgcagcatgtcccatgctcgaccccgctatttactcctgtgcctactcctactat

SEQ ID NO: 484106 - DNA, 55 bp, Artificial
  Synthetic oligonucleotide
tttatcgcatatgaggagtccgaagattgaacccactatcatcgccacgacattg

SEQ ID NO: 484107 - DNA, 60 bp, Artificial
  Synthetic oligonucleotide
tttatcggaatcgtgaactcagcttgttttgtgtctccctctgtcaatcgcatgtcgtga

SEQ ID NO: 484108 - DNA, 56 bp, Artificial
  Synthetic oligonucleotide
tttatcggagaattgttgggggtgcccccaaggctgccaactcaaatcgttgcacc

SEQ ID NO: 484109 - DNA, 60 bp, Artificial
  Synthetic oligonucleotide
tttatcggcactatatacgtcgatgtctgtcagcgaggctgcctctctcgcaatggagga

SEQ ID NO: 484110 - DNA, 57 bp, Artificial
  Synthetic oligonucleotide
tttatcgtaggaatgtacggtacatcatcaataggttttctaaaacaacacaagctg

SEQ ID NO: 484111 - DNA, 60 bp, Artificial
  Synthetic oligonucleotide
tttatcgtcacgccactacccgagtataacaacatgaatttattcattgatatgatgttt

SEQ ID NO: 484112 - DNA, 60 bp, Artificial
  Synthetic oligonucleotide
tttatcgtcgtacgaacattctggcccatttcacatggtgctgtgtcagatgttctatct

SEQ ID NO: 484113 - DNA, 49 bp, Artificial
  Synthetic oligonucleotide
tttatcgtttcagacccttaccccgaacccagggggacccgacaggccc

SEQ ID NO: 484114 - DNA, 60 bp, Artificial
  Synthetic oligonucleotide
tttatctacctcaagctaacactacactcaatgcacacagcactttagctgtatgagggt

SEQ ID NO: 484115 - DNA, 55 bp, Artificial
  Synthetic oligonucleotide
tttatctagctacaacgattggcctccgagaaaacggaacatacgaacaacacgc

SEQ ID NO: 484116 - DNA, 60 bp, Artificial
  Synthetic oligonucleotide
tttatctcatactcctgttcacagcagtgaggggggaccagatatgcattggataccatg

SEQ ID NO: 484117 - DNA, 59 bp, Artificial
  Synthetic oligonucleotide
tttatgaaacgagacggtgattcagatgtgttgtttccaacgtctgtatacttagatac

SEQ ID NO: 484118 - DNA, 59 bp, Artificial
  Synthetic oligonucleotide
tttatgaaactttaggggtatgcgttgcaattattgaggtctctctgctataaataaca

SEQ ID NO: 484119 - DNA, 58 bp, Artificial
  Synthetic oligonucleotide
tttatgaagggaccctttggcgccctcatgatcagaaatgttggctaattcgcttaac

SEQ ID NO: 484120 - DNA, 60 bp, Artificial
  Synthetic oligonucleotide
tttatgaattggatttgcacagcaggacatgtaactcgtggttcagaatttgccaccatt

SEQ ID NO: 484121 - DNA, 60 bp, Artificial
  Synthetic oligonucleotide
tttatgacaagcatcatggccactccaacacaatccaaactgagaatcctgtggtccaac

SEQ ID NO: 484122 - DNA, 60 bp, Artificial
  Synthetic oligonucleotide
tttatgacattagtaatgttcacagacatgattattgatgttagaactaagttaaaattc

SEQ ID NO: 484123 - DNA, 54 bp, Artificial
  Synthetic oligonucleotide
tttatgaccaccttactccactgcgggactgggcccacacgggcctacgggacc

SEQ ID NO: 484124 - DNA, 50 bp, Artificial
  Synthetic oligonucleotide
tttatgactggacttttctaccaacagattttgaaacgaatagatcgata

SEQ ID NO: 484125 - DNA, 60 bp, Artificial
  Synthetic oligonucleotide
tttatgagagtgtgcgggggcgccgaggggctatgcgagatatgaccctacagcagtgag

SEQ ID NO: 484126 - DNA, 60 bp, Artificial
  Synthetic oligonucleotide
tttatgatcccaggactgctggtagcaaatctagatttgatgacttagtaaaaatctcac

SEQ ID NO: 484127 - DNA, 60 bp, Artificial
  Synthetic oligonucleotide
tttatgatcctgacaaggaacgtctagtgtgggcctgcaggggtatagaaattggcagag

SEQ ID NO: 484128 - DNA, 60 bp, Artificial
  Synthetic oligonucleotide
tttatgatgccagcaactggacttataaacttctggatgggaggaggttgtgacagtgga

SEQ ID NO: 484129 - DNA, 60 bp, Artificial
  Synthetic oligonucleotide
tttatgcatagagttatatctacaacaggtccaacgatatcatttttggtattagtaata

SEQ ID NO: 484130 - DNA, 60 bp, Artificial
  Synthetic oligonucleotide
tttatgcatatggagatgtgtcgaggtggacgataagacaacttcgaggccatggattta

SEQ ID NO: 484131 - DNA, 60 bp, Artificial
  Synthetic oligonucleotide
tttatgcccagaatgagatgcttcagtataatcaacgtgagtcgcaggcacgcgttgcgt

SEQ ID NO: 484132 - DNA, 55 bp, Artificial
  Synthetic oligonucleotide
tttatgcgaaagtcaccggtggacaatacgctagcaacgaacaagccctggtccg

SEQ ID NO: 484133 - DNA, 60 bp, Artificial
  Synthetic oligonucleotide
tttatgcgaatataagcaaaaacgccattttggtatattattgttggatgtccgatgcta

SEQ ID NO: 484134 - DNA, 60 bp, Artificial
  Synthetic oligonucleotide
tttatgcgagctctatgttttcctaacacattggttcctatggactctgatataaataat

SEQ ID NO: 484135 - DNA, 60 bp, Artificial
  Synthetic oligonucleotide
tttatgcgccgattgtctggaatagcatgcttgtgcgtaaccaaccaccgtctgattggc

SEQ ID NO: 484136 - DNA, 60 bp, Artificial
  Synthetic oligonucleotide
tttatgctaacagaggaaccagttctactctgtgcatgcaggaagcctgcaattcagtta

SEQ ID NO: 484137 - DNA, 60 bp, Artificial
  Synthetic oligonucleotide
tttatgctgaaccgtgaccttctgattgtgcgtcgaatcgtaatgcttgagatggatata

SEQ ID NO: 484138 - DNA, 52 bp, Artificial
  Synthetic oligonucleotide
tttatgctgcaggctggtatacagcgacgtcctaagttaggcaccaaacgtc

SEQ ID NO: 484139 - DNA, 55 bp, Artificial
  Synthetic oligonucleotide
tttatggaaagaggggtggcggaaaaagtctgacttcaattgctttggccacaaa

SEQ ID NO: 484140 - DNA, 55 bp, Artificial
  Synthetic oligonucleotide
tttatggaaagcagcccattggtgtcctgtgcaatagagtccctgtcctcaccag

SEQ ID NO: 484141 - DNA, 52 bp, Artificial
  Synthetic oligonucleotide
tttatggaagcgaaggctgtgggtgggcaggttggctcctgtccccccgcgg

SEQ ID NO: 484142 - DNA, 55 bp, Artificial
  Synthetic oligonucleotide
tttatggaatgccagaaataccgccgctatatgtggagtatgcggagattgggac

SEQ ID NO: 484143 - DNA, 60 bp, Artificial
  Synthetic oligonucleotide
tttatggaattatgtgatcgcgaagcttctagtgtacagttgtatggatgtagagcgtac

SEQ ID NO: 484144 - DNA, 58 bp, Artificial
  Synthetic oligonucleotide
tttatggacattaatgatgtgggatcgaactaaacaagagatgaacattaatgggaag

SEQ ID NO: 484145 - DNA, 56 bp, Artificial
  Synthetic oligonucleotide
tttatggagtatcgcggttacccgttgacggtggacactaccctcaaatcaactga

SEQ ID NO: 484146 - DNA, 55 bp, Artificial
  Synthetic oligonucleotide
tttatggcaagattaagaagaggcttctctggggctcggatttggcgaccatgat

SEQ ID NO: 484147 - DNA, 60 bp, Artificial
  Synthetic oligonucleotide
tttatggcatgtacccatgcgtcaaatccagtatatgcgagtcttaaaatacgaatgtat

SEQ ID NO: 484148 - DNA, 60 bp, Artificial
  Synthetic oligonucleotide
tttatggggaaattgcgcaatttggttcagaatcagttggccaacgagctatcagcaata

SEQ ID NO: 484149 - DNA, 57 bp, Artificial
  Synthetic oligonucleotide
tttatggtgcccgcaaggttactgaccccctgaaaacgctggcttcaatcttgctag

SEQ ID NO: 484150 - DNA, 52 bp, Artificial
  Synthetic oligonucleotide
tttatggtttaccgcgctccaaagacggtttgcccaaagacggtttgccaac

SEQ ID NO: 484151 - DNA, 58 bp, Artificial
  Synthetic oligonucleotide
tttatgtactcttgtgatggagatgagcggcctctattggtgaaggggaccctgatag

SEQ ID NO: 484152 - DNA, 53 bp, Artificial
  Synthetic oligonucleotide
tttatgtcacgtatagtctataagcactacagaagcttaatatcagaggtgac

SEQ ID NO: 484153 - DNA, 60 bp, Artificial
  Synthetic oligonucleotide
tttatgtcattccgcctgttatgtggctgaaccccactgcactcatagtctatgaaatat

SEQ ID NO: 484154 - DNA, 60 bp, Artificial
  Synthetic oligonucleotide
tttatgtcccatcaaggaatactaattgagaatcagtatgttccaaagcttgagcccgag

SEQ ID NO: 484155 - DNA, 52 bp, Artificial
  Synthetic oligonucleotide
tttatgtccgccccgctcacattgtcccccacctcgcaaaaccgcacaacac

SEQ ID NO: 484156 - DNA, 58 bp, Artificial
  Synthetic oligonucleotide
tttatgtctggacacccctttctatgccaacgggaataacaacacaggtggatgtgac

SEQ ID NO: 484157 - DNA, 55 bp, Artificial
  Synthetic oligonucleotide
tttatgtgagacatgtcaatgaacagaacctgggcgtttccactagcaccgtgcg

SEQ ID NO: 484158 - DNA, 57 bp, Artificial
  Synthetic oligonucleotide
tttatgtgattccaaagaccaaaggtgcgagttatttgacatttactcaaaccgaga

SEQ ID NO: 484159 - DNA, 55 bp, Artificial
  Synthetic oligonucleotide
tttatgtgggaccccgaccaatgaaattcgacctacatgacttctttaatgcatg

SEQ ID NO: 484160 - DNA, 55 bp, Artificial
  Synthetic oligonucleotide
tttatgtgggaccgcgaccaatgaaattcaagcttcgtggcttatgtaatgcatg

SEQ ID NO: 484161 - DNA, 55 bp, Artificial
  Synthetic oligonucleotide
tttatgtgggaccgcgacgaatgaaattcaagctacatggcttctttaatgcgta

SEQ ID NO: 484162 - DNA, 54 bp, Artificial
  Synthetic oligonucleotide
tttatgttaattgggctaaagtattaacatgaaagaagcccatgaaaaacgtta

SEQ ID NO: 484163 - DNA, 58 bp, Artificial
  Synthetic oligonucleotide
tttatgttcaccggatcattcatggccacgggtaaaatgcttatagcttatacacccc

SEQ ID NO: 484164 - DNA, 54 bp, Artificial
  Synthetic oligonucleotide
tttatgttcgaaacttgggatccacttgacactccgtattcatcaatacaccat

SEQ ID NO: 484165 - DNA, 55 bp, Artificial
  Synthetic oligonucleotide
tttatgttgggaggaagtcggctctcaatcgcccaatttagtctggcgattacgg

SEQ ID NO: 484166 - DNA, 60 bp, Artificial
  Synthetic oligonucleotide
tttattaaggcattgactgctttgttgatcaattgtatactcatttgggcttctgtcttt

SEQ ID NO: 484167 - DNA, 60 bp, Artificial
  Synthetic oligonucleotide
tttattactcatgggtatcggatactgtgtctaaagcatccacttatgtatcgtatgacc

SEQ ID NO: 484168 - DNA, 53 bp, Artificial
  Synthetic oligonucleotide
tttattactgagagtgacctttggggttctagggatgcagttcttgaggcact

SEQ ID NO: 484169 - DNA, 51 bp, Artificial
  Synthetic oligonucleotide
tttattagacgctgctacataataggatgcctacctctcgttttctgtggc

SEQ ID NO: 484170 - DNA, 60 bp, Artificial
  Synthetic oligonucleotide
tttattagcaagagtagattgtagagtaggagtaggagcattagcagcagcactaatctt

SEQ ID NO: 484171 - DNA, 57 bp, Artificial
  Synthetic oligonucleotide
tttattaggaccttaatcagtggggattcgcgatttagggcatacacaggtggcgta

SEQ ID NO: 484172 - DNA, 56 bp, Artificial
  Synthetic oligonucleotide
tttattatactttctccatacctggtacaataatatgactttccttctacccgatg

SEQ ID NO: 484173 - DNA, 55 bp, Artificial
  Synthetic oligonucleotide
tttattattacggacgagtggacttagattctgtgagtaaggttacctcagggta

SEQ ID NO: 484174 - DNA, 60 bp, Artificial
  Synthetic oligonucleotide
tttattattcatgggtctctgatactgtgtctaaagcatccagttatgtatcgttcgacc

SEQ ID NO: 484175 - DNA, 60 bp, Artificial
  Synthetic oligonucleotide
tttattcataacagagttcacctcttacaagctgagcaagctgacaaatctgtgcaagtg

SEQ ID NO: 484176 - DNA, 55 bp, Artificial
  Synthetic oligonucleotide
tttattccagatacggtacactagacactaaggctcaattaagattcgtaggggc

SEQ ID NO: 484177 - DNA, 55 bp, Artificial
  Synthetic oligonucleotide
tttattcctgatgagcgggaggggcatagggaagatgaccctgggaatgtgttgc

SEQ ID NO: 484178 - DNA, 60 bp, Artificial
  Synthetic oligonucleotide
tttattccttgtctgccacgatgcctttgcttagcttgtaagcaaggatcgcagtgcgtg

SEQ ID NO: 484179 - DNA, 56 bp, Artificial
  Synthetic oligonucleotide
tttattcctttaaatagtttggcaataaaatgtatgttgacagcaaaagtagataa

SEQ ID NO: 484180 - DNA, 56 bp, Artificial
  Synthetic oligonucleotide
tttattcgaaaccgtatgatgaacggtggcgtgtatgtatatatgccggaaacttt

SEQ ID NO: 484181 - DNA, 57 bp, Artificial
  Synthetic oligonucleotide
tttattcgaaggtgtatttatagcgaggagctgctctaaggcgtcttctttggttac

SEQ ID NO: 484182 - DNA, 60 bp, Artificial
  Synthetic oligonucleotide
tttattcgtcatcaatgatgtgggagattaatggtcccgaatcagtgttggtcaatactt

SEQ ID NO: 484183 - DNA, 55 bp, Artificial
  Synthetic oligonucleotide
tttattctaaaacgctttgctggagccatcttggtcaatgtacaccgattgactg

SEQ ID NO: 484184 - DNA, 58 bp, Artificial
  Synthetic oligonucleotide
tttattgacagccgcgtatggttctcagtctacggagggctgaaacccaattcaccca

SEQ ID NO: 484185 - DNA, 60 bp, Artificial
  Synthetic oligonucleotide
tttattgcattgaatgcgtcaaggatgagcgcttaccaatcagaaaagtgttgcatgagc

SEQ ID NO: 484186 - DNA, 56 bp, Artificial
  Synthetic oligonucleotide
tttattgccgagtgaggtccgccgatcgagtttgtatgccagggatacgttgcatc

SEQ ID NO: 484187 - DNA, 60 bp, Artificial
  Synthetic oligonucleotide
tttattgctttgatatcataagttctaagtttgcgcatcacgtgatagcgataacccgcg

SEQ ID NO: 484188 - DNA, 52 bp, Artificial
  Synthetic oligonucleotide
tttattgtttgcgctatcaagaattttttaccggaagttttgagttcaactt

SEQ ID NO: 484189 - DNA, 59 bp, Artificial
  Synthetic oligonucleotide
tttattgtttgcttgagcatagagatctttagttagctctcttgtgtttttggttatat

SEQ ID NO: 484190 - DNA, 57 bp, Artificial
  Synthetic oligonucleotide
tttatttacctcaagaatccaggggcctacttcaattgcccagctgtcgtctttgac

SEQ ID NO: 484191 - DNA, 55 bp, Artificial
  Synthetic oligonucleotide
tttatttaggacatatcagggcccattcaggattgcctggacctttatctcaagg

SEQ ID NO: 484192 - DNA, 57 bp, Artificial
  Synthetic oligonucleotide
tttatttcaaccactgttcaggtgatgcgtccgacgggtgcggaagcgttagtgtcc

SEQ ID NO: 484193 - DNA, 59 bp, Artificial
  Synthetic oligonucleotide
tttatttctagaacgagtagagacgacaagcgtgttgaatacggctataaatatagctg

SEQ ID NO: 484194 - DNA, 60 bp, Artificial
  Synthetic oligonucleotide
tttatttctgggatgtgcaccatcctcccgacaccaatgagcaaaatactctgtatggct

SEQ ID NO: 484195 - DNA, 55 bp, Artificial
  Synthetic oligonucleotide
tttatttgaataccgatatccatagtggagagatcatgcgcaacgtggtgacaac

SEQ ID NO: 484196 - DNA, 51 bp, Artificial
  Synthetic oligonucleotide
tttcaaaaacatacccacaacaggatactttcctaaacccaacacccgtta

SEQ ID NO: 484197 - DNA, 59 bp, Artificial
  Synthetic oligonucleotide
tttcaaaactgggggattgaacccattgacaatgtcatgggtatgattggaatattgcc

SEQ ID NO: 484198 - DNA, 60 bp, Artificial
  Synthetic oligonucleotide
tttcaaaatcggactgcacactgagtttcagactgtgtccttctcaatggtgggcctcct

SEQ ID NO: 484199 - DNA, 51 bp, Artificial
  Synthetic oligonucleotide
tttcaaaatctgcaattaccatcttgctacacaggaagaccttcaaaatgc

SEQ ID NO: 484200 - DNA, 54 bp, Artificial
  Synthetic oligonucleotide
tttcaaacccgtctcattctgatatatgatcgtcattttagatgtgcaataact

SEQ ID NO: 484201 - DNA, 55 bp, Artificial
  Synthetic oligonucleotide
tttcaaagagagctaagggatggttctacagacatcattttgaaagtagacaccc

SEQ ID NO: 484202 - DNA, 60 bp, Artificial
  Synthetic oligonucleotide
tttcaaagattaaggcctgcttgtctggtgcatccacgttggtgtcaggaataatcgcta

SEQ ID NO: 484203 - DNA, 59 bp, Artificial
  Synthetic oligonucleotide
tttcaaagcgaagcccaacaactataagttgcatggtcccgctacaattatggtaatgc

SEQ ID NO: 484204 - DNA, 60 bp, Artificial
  Synthetic oligonucleotide
tttcaaagctttgcaggaagacagatctagtgtcagtttagatttagtggacactttcag

SEQ ID NO: 484205 - DNA, 50 bp, Artificial
  Synthetic oligonucleotide
tttcaaagggggccctggggtctttgtcgcggatgttcttgggggttttg

SEQ ID NO: 484206 - DNA, 57 bp, Artificial
  Synthetic oligonucleotide
tttcaaagtataatgccgtctctatctgcgctgtttaatacccctttcatccagggg

SEQ ID NO: 484207 - DNA, 55 bp, Artificial
  Synthetic oligonucleotide
tttcaaagtcccatgtgcagtcagctagacgtgtcatgcttaatgctctatcagg

SEQ ID NO: 484208 - DNA, 59 bp, Artificial
  Synthetic oligonucleotide
tttcaaagttattggtggttggtccacagctaactccaaatcgcagatcaatagacagg

SEQ ID NO: 484209 - DNA, 59 bp, Artificial
  Synthetic oligonucleotide
tttcaaagttggcaacgatgtatggttgggcaggacagtgtcaactagtggtaggtcag

SEQ ID NO: 484210 - DNA, 60 bp, Artificial
  Synthetic oligonucleotide
tttcaaatatcccaactgcaatgagcacgatagcattgcatctccactcaaggtccggtt

SEQ ID NO: 484211 - DNA, 60 bp, Artificial
  Synthetic oligonucleotide
tttcaaatatgtgaagatcaaaggaaccttcaatccttctgatctcataatatctttggc

SEQ ID NO: 484212 - DNA, 54 bp, Artificial
  Synthetic oligonucleotide
tttcaaatgcatttaccgtcgctttaaatacggtgtgaaaagagggccttctac

SEQ ID NO: 484213 - DNA, 55 bp, Artificial
  Synthetic oligonucleotide
tttcaaatgtattcatcgtcgccttgaatacggtttgaaaagagggccttctacg

SEQ ID NO: 484214 - DNA, 59 bp, Artificial
  Synthetic oligonucleotide
tttcaacaaacgctacatcatggagtgtagtatctatcgttaaagttgtaaattatagc

SEQ ID NO: 484215 - DNA, 60 bp, Artificial
  Synthetic oligonucleotide
tttcaacaagccaagagcacgcattcttggcgtgcccttttctcaacggaggcgtgatcg

SEQ ID NO: 484216 - DNA, 57 bp, Artificial
  Synthetic oligonucleotide
tttcaacgcccgcgtcgaaagtacgtcggcgtctgaacttcggcagcccatacacca

SEQ ID NO: 484217 - DNA, 57 bp, Artificial
  Synthetic oligonucleotide
tttcaacgcgtggatacgttcatcgaagataggtgctggtttttcaaccggtcagac

SEQ ID NO: 484218 - DNA, 59 bp, Artificial
  Synthetic oligonucleotide
tttcaacggagtttctcgttctagtgctaagcgtcgagctaagtacttggatcgctgta

SEQ ID NO: 484219 - DNA, 54 bp, Artificial
  Synthetic oligonucleotide
tttcaacgtggcgataggttcgggggcttgtccttccgattgggttgttcaggc

SEQ ID NO: 484220 - DNA, 58 bp, Artificial
  Synthetic oligonucleotide
tttcaactccgaagagggctcaagtgcctcttcgagcagttagtcagaacccaacagg

SEQ ID NO: 484221 - DNA, 60 bp, Artificial
  Synthetic oligonucleotide
tttcaagaactatgatgcatagtgctcttctgaaggagtctagcgctaggacgttattat

SEQ ID NO: 484222 - DNA, 60 bp, Artificial
  Synthetic oligonucleotide
tttcaagacccatatcccgagatgtgacatggagggagtgagggcgcattgggcacacaa

SEQ ID NO: 484223 - DNA, 60 bp, Artificial
  Synthetic oligonucleotide
tttcaagacggctgtccagtttatgcacaggacattcgttcccgtcactctcagaagtgc

SEQ ID NO: 484224 - DNA, 55 bp, Artificial
  Synthetic oligonucleotide
tttcaagagacccagaaactgtctcaaggttccccagatgaccggggatcaaccc

SEQ ID NO: 484225 - DNA, 59 bp, Artificial
  Synthetic oligonucleotide
tttcaagagcaagtaattgggaaagtgcctcttctttggagagagagcatttaggataa

SEQ ID NO: 484226 - DNA, 54 bp, Artificial
  Synthetic oligonucleotide
tttcaagagtagtttctgttagacatttggaaaatttggtattaagaaaagaga

SEQ ID NO: 484227 - DNA, 52 bp, Artificial
  Synthetic oligonucleotide
tttcaagatcacaggaatcagcatgcactgagtatataaacaacggactgcc

SEQ ID NO: 484228 - DNA, 54 bp, Artificial
  Synthetic oligonucleotide
tttcaagcatagttaaggttggacctttttctgactccaacgttgttgaatttg

SEQ ID NO: 484229 - DNA, 57 bp, Artificial
  Synthetic oligonucleotide
tttcaagccaaacataggaccaaggccattcgtaagaggacaacaggggagaatgga

SEQ ID NO: 484230 - DNA, 55 bp, Artificial
  Synthetic oligonucleotide
tttcaagccaaacctacgcccagaaaagaccgtgaggctgatagactttccaacg

SEQ ID NO: 484231 - DNA, 60 bp, Artificial
  Synthetic oligonucleotide
tttcaagccctcaggcaacatgcaaaggatgctggatgtacactggttgaacatattgag

SEQ ID NO: 484232 - DNA, 60 bp, Artificial
  Synthetic oligonucleotide
tttcaagcgtaatgataataaacgacgatcatttcaaactgcgaaaacagttgatgagtc

SEQ ID NO: 484233 - DNA, 51 bp, Artificial
  Synthetic oligonucleotide
tttcaaggaggatgggtcgcctggcttctgtttaagtgaccagagttgggc

SEQ ID NO: 484234 - DNA, 60 bp, Artificial
  Synthetic oligonucleotide
tttcaaggatgctgcttcaagcggcgcatcaaaattggagttctcacaagacccaagtaa

SEQ ID NO: 484235 - DNA, 59 bp, Artificial
  Synthetic oligonucleotide
tttcaagtaggcttctctactggtgcagactttgtagttacacctgagggtcttgttga

SEQ ID NO: 484236 - DNA, 60 bp, Artificial
  Synthetic oligonucleotide
tttcaagttgactgtatactgttcaaagaagtggcagctgagtgcatgaagaggtacatt

SEQ ID NO: 484237 - DNA, 60 bp, Artificial
  Synthetic oligonucleotide
tttcaatccctgacctcggactcagaggagtgctacagcctcctgttccgggagcacgca

SEQ ID NO: 484238 - DNA, 57 bp, Artificial
  Synthetic oligonucleotide
tttcaatctatgatgaggttagtacaaaatttccatgggaagattttggtactttga

SEQ ID NO: 484239 - DNA, 55 bp, Artificial
  Synthetic oligonucleotide
tttcaatctggcatcgtatggaactgattatccaagtctagtgccagaagagggc

SEQ ID NO: 484240 - DNA, 57 bp, Artificial
  Synthetic oligonucleotide
tttcaatgcgctattcttctcctcgtccaaaaactctttatagctggaattgggccc

SEQ ID NO: 484241 - DNA, 60 bp, Artificial
  Synthetic oligonucleotide
tttcaatgcgctttcgcagttgcgacaaataagaaagtcagtgcaaagtcagcggcatac

SEQ ID NO: 484242 - DNA, 60 bp, Artificial
  Synthetic oligonucleotide
tttcaatgctaaaggactacatgagaagcaccatgtcatggtggatctagcaaagactat

SEQ ID NO: 484243 - DNA, 60 bp, Artificial
  Synthetic oligonucleotide
tttcaatggaacaagctgtgtatggaatggatggccttgagccattggacctgagtacta

SEQ ID NO: 484244 - DNA, 51 bp, Artificial
  Synthetic oligonucleotide
tttcaatggaacaccgtgaagcagaacggaaaatccggggcctgcaagaga

SEQ ID NO: 484245 - DNA, 55 bp, Artificial
  Synthetic oligonucleotide
tttcaattaaagtaaagtgattgtctgtggcccaatcatattgggcctgtcgagc

SEQ ID NO: 484246 - DNA, 53 bp, Artificial
  Synthetic oligonucleotide
tttcaatttaacgattattggacgacgattttaggccttcaggtaggtgctca

SEQ ID NO: 484247 - DNA, 60 bp, Artificial
  Synthetic oligonucleotide
tttcacaaagatgatacgcgatacaatcgtgcctatgttgggaacatggccaagtatgat

SEQ ID NO: 484248 - DNA, 55 bp, Artificial
  Synthetic oligonucleotide
tttcacaaccaaggggatgtagacagtccgagaacgttgcactccctgtcgctga

SEQ ID NO: 484249 - DNA, 60 bp, Artificial
  Synthetic oligonucleotide
tttcacaagaggattgcatgataaaagcagttagaggtgacctgaatttcgtcaacagag

SEQ ID NO: 484250 - DNA, 59 bp, Artificial
  Synthetic oligonucleotide
tttcacaaggacaatgcaatacgattgggtgagaataaagacgtaatagtcacaaggga

SEQ ID NO: 484251 - DNA, 59 bp, Artificial
  Synthetic oligonucleotide
tttcacaagggattaagagacaaagaatgacagttgagtccatggggtgggccttgagc

SEQ ID NO: 484252 - DNA, 60 bp, Artificial
  Synthetic oligonucleotide
tttcacaatcgcaggtccgcaatatgatggagtacgtatcacaacgacttggtcagtcta

SEQ ID NO: 484253 - DNA, 55 bp, Artificial
  Synthetic oligonucleotide
tttcacacagaggcatcggaataaacaggatttgtggtttatgtcgcatcgaggt

SEQ ID NO: 484254 - DNA, 55 bp, Artificial
  Synthetic oligonucleotide
tttcacagaaggagggtacatatccatgttttaccagaccaagatagtcgtcccc

SEQ ID NO: 484255 - DNA, 60 bp, Artificial
  Synthetic oligonucleotide
tttcacagatgagcgaattgagtggaaagacccagatgggatgcttcgtgatcacatcaa

SEQ ID NO: 484256 - DNA, 60 bp, Artificial
  Synthetic oligonucleotide
tttcacagcagaagtgtcccattgcagggccactgagtacataatgaagggagtatacat

SEQ ID NO: 484257 - DNA, 55 bp, Artificial
  Synthetic oligonucleotide
tttcacagcatgacccagactatctaaagcagaatgggtccggcaaagttggata

SEQ ID NO: 484258 - DNA, 58 bp, Artificial
  Synthetic oligonucleotide
tttcacaggtggatttcttaggagccaccattggacagtccaaaatcagactacagcc

SEQ ID NO: 484259 - DNA, 55 bp, Artificial
  Synthetic oligonucleotide
tttcaccacaaacatatggttaaaactgcgtgactcctacacccaagtgtgtgac

SEQ ID NO: 484260 - DNA, 57 bp, Artificial
  Synthetic oligonucleotide
tttcaccacgtaagcagtatagttgttgggatgagggtgttggtggttggattgaac

SEQ ID NO: 484261 - DNA, 60 bp, Artificial
  Synthetic oligonucleotide
tttcaccactaacttcataaagtatgatggtagcatgcacccagagatccacagattgct

SEQ ID NO: 484262 - DNA, 53 bp, Artificial
  Synthetic oligonucleotide
tttcaccagacgtaaaaggggaaattacggtttactcagcggatgtcaccaaa

SEQ ID NO: 484263 - DNA, 60 bp, Artificial
  Synthetic oligonucleotide
tttcaccagattgcttgaaacccagcacgtctaccacgcaatacattttagattcaacta

SEQ ID NO: 484264 - DNA, 55 bp, Artificial
  Synthetic oligonucleotide
tttcaccagcgctgcagtcaaggcagcctgttggtgggcagggatccagcaggaa

SEQ ID NO: 484265 - DNA, 55 bp, Artificial
  Synthetic oligonucleotide
tttcaccagcgctgcagttaaggccgcatgttggtgggcaggtgttaagcaggaa

SEQ ID NO: 484266 - DNA, 50 bp, Artificial
  Synthetic oligonucleotide
tttcacccactaaggcaaagagtcgcaatgactgtagaaaggtacacaca

SEQ ID NO: 484267 - DNA, 58 bp, Artificial
  Synthetic oligonucleotide
tttcaccccggcgactcaaagaagaagcaggatgcggatgatacccataaagagtttg

SEQ ID NO: 484268 - DNA, 60 bp, Artificial
  Synthetic oligonucleotide
tttcaccctcagagctgcatataagcagctgcttcacgcttgtactgggtctctgtgaca

SEQ ID NO: 484269 - DNA, 55 bp, Artificial
  Synthetic oligonucleotide
tttcaccgaaggttcccgattatataccaccacggcgatacattccttcgagtgg

SEQ ID NO: 484270 - DNA, 60 bp, Artificial
  Synthetic oligonucleotide
tttcaccggagagacttgcgcctcatggccaacgcaatctgctcagccgttccggtagac

SEQ ID NO: 484271 - DNA, 53 bp, Artificial
  Synthetic oligonucleotide
tttcaccgtggcctatcgtcgcttgtgtcttactctgtctaaacgttattcaa

SEQ ID NO: 484272 - DNA, 60 bp, Artificial
  Synthetic oligonucleotide
tttcacctcgacgatcatgtgcccagccacaaacaatgaccacgagcctcacggtttgtc

SEQ ID NO: 484273 - DNA, 56 bp, Artificial
  Synthetic oligonucleotide
tttcacgaatcccggcttcgaccgtagcctcgactcacccggttacagcggcattc

SEQ ID NO: 484274 - DNA, 58 bp, Artificial
  Synthetic oligonucleotide
tttcacgccaatgagaagttcgggtttgagttggtcttcacagctcctacccatgcgg

SEQ ID NO: 484275 - DNA, 57 bp, Artificial
  Synthetic oligonucleotide
tttcacgcccagccctgtggtggtcgggacgactgactacgcagggaaccccacata

SEQ ID NO: 484276 - DNA, 55 bp, Artificial
  Synthetic oligonucleotide
tttcacggcaaaacccaaaacataagtaagatgggcctaactagccctgtggaga

SEQ ID NO: 484277 - DNA, 56 bp, Artificial
  Synthetic oligonucleotide
tttcacgtcctatgtggacgaaggtggtcttccgtccgtcctaccggatactatga

SEQ ID NO: 484278 - DNA, 58 bp, Artificial
  Synthetic oligonucleotide
tttcactacttataccgttcagggttctgcatccacgttcaatgtaacgctagcaaat

SEQ ID NO: 484279 - DNA, 60 bp, Artificial
  Synthetic oligonucleotide
tttcactagggcttgtgatgtaatgattgtaatccacagattcggtagaatctggcgcca

SEQ ID NO: 484280 - DNA, 60 bp, Artificial
  Synthetic oligonucleotide
tttcactagtgattatgtcctggccagcactaatttgtttcagctcacgccaccaacagt

SEQ ID NO: 484281 - DNA, 56 bp, Artificial
  Synthetic oligonucleotide
tttcactatgtacgactcctctcttttacgcctcataatgtgggaaataaccccta

SEQ ID NO: 484282 - DNA, 60 bp, Artificial
  Synthetic oligonucleotide
tttcactccaagagagttactgcacatggagacacaccacaattagacttgaaggccaga

SEQ ID NO: 484283 - DNA, 60 bp, Artificial
  Synthetic oligonucleotide
tttcactcctcgagtataaatcagacattccgagagtaagtgtcacctcgcagtatccag

SEQ ID NO: 484284 - DNA, 60 bp, Artificial
  Synthetic oligonucleotide
tttcactcgattgtggaggctattattgctagttatgaacagagacctatgacttggaat

SEQ ID NO: 484285 - DNA, 60 bp, Artificial
  Synthetic oligonucleotide
tttcactggacactggtgcgaccgggcgataacatcactttctcacacaatgggggtcta

SEQ ID NO: 484286 - DNA, 60 bp, Artificial
  Synthetic oligonucleotide
tttcactggtcttatgccagctgttcagggccagcctatggacaatggactaagtacaca

SEQ ID NO: 484287 - DNA, 55 bp, Artificial
  Synthetic oligonucleotide
tttcactgttaccaggggttgcacattctattgctattgagctgtgtgttccagg

SEQ ID NO: 484288 - DNA, 53 bp, Artificial
  Synthetic oligonucleotide
tttcacttattctcgaatcatccatcaatctgccatgatcaaaccggaaattt

SEQ ID NO: 484289 - DNA, 53 bp, Artificial
  Synthetic oligonucleotide
tttcacttttctcgccaacttacaaggcctttctgggtaaacaatccttgaac

SEQ ID NO: 484290 - DNA, 56 bp, Artificial
  Synthetic oligonucleotide
tttcagaagcgtttaggtccacaacgatcaggactgttctttattcactccggtta

SEQ ID NO: 484291 - DNA, 55 bp, Artificial
  Synthetic oligonucleotide
tttcagaagtgaaacttgaaaccggaagcaaagcgacatccttcacactagcgcc

SEQ ID NO: 484292 - DNA, 55 bp, Artificial
  Synthetic oligonucleotide
tttcagaattgggtgccaacatagcaggataggaatttccccacaaagaaggagg

SEQ ID NO: 484293 - DNA, 55 bp, Artificial
  Synthetic oligonucleotide
tttcagacacccggacgtagacttcatagtacaaatacacaccagtcctcccttc

SEQ ID NO: 484294 - DNA, 52 bp, Artificial
  Synthetic oligonucleotide
tttcagaccgggaagcccgcttggcagtaaatcagctgtatccaagcgatga

SEQ ID NO: 484295 - DNA, 52 bp, Artificial
  Synthetic oligonucleotide
tttcagactaaagttgccagaccctaatcgatttgcattagctgacatgtct

SEQ ID NO: 484296 - DNA, 52 bp, Artificial
  Synthetic oligonucleotide
tttcagactcaaaatcttgaccatagtgggcgtttctaagttgaagcatagc

SEQ ID NO: 484297 - DNA, 60 bp, Artificial
  Synthetic oligonucleotide
tttcagagaaggcagagatcaactctggaagggacctggtgagctattgtggaaagggga

SEQ ID NO: 484298 - DNA, 58 bp, Artificial
  Synthetic oligonucleotide
tttcagagcactatgacaaaaatattagaaccatttaggaagaacaatccagaactag

SEQ ID NO: 484299 - DNA, 55 bp, Artificial
  Synthetic oligonucleotide
tttcagcaaacaccaggcaagacgcccgcgagccaatcccggccgcgggttattc

SEQ ID NO: 484300 - DNA, 59 bp, Artificial
  Synthetic oligonucleotide
tttcagcaattgttacccctatgatgtgccagatcgcgcctccctcaggtcactggttg

SEQ ID NO: 484301 - DNA, 60 bp, Artificial
  Synthetic oligonucleotide
tttcagcactagtgatagttgttaggagtgattatgacctagtcaccttgactgcaactc

SEQ ID NO: 484302 - DNA, 59 bp, Artificial
  Synthetic oligonucleotide
tttcagcagttgggttgatgtttgccattgtgggaggtttagccgagttggacatcgaa

SEQ ID NO: 484303 - DNA, 59 bp, Artificial
  Synthetic oligonucleotide
tttcagcccactcgcgcgcccgcaatacaagccccctggcacacaggtctactcccgtg

SEQ ID NO: 484304 - DNA, 53 bp, Artificial
  Synthetic oligonucleotide
tttcagccctgaggtagtaccaatgtttcaggctctatcagaaggagccttac

SEQ ID NO: 484305 - DNA, 55 bp, Artificial
  Synthetic oligonucleotide
tttcagcctcttcatggtccagttctctaggacaatcaaccccagaaacagaggg

SEQ ID NO: 484306 - DNA, 55 bp, Artificial
  Synthetic oligonucleotide
tttcagccttgactatgacagtagttctgcttcaggggccatttcagcctttatg

SEQ ID NO: 484307 - DNA, 59 bp, Artificial
  Synthetic oligonucleotide
tttcagcggctgtaatggcgagagaccccagttataggtctaggtcgcagtctgtcgtt

SEQ ID NO: 484308 - DNA, 55 bp, Artificial
  Synthetic oligonucleotide
tttcagcgggcctattgggcctaccgctccgaaagtctcctgagaccagttagca

SEQ ID NO: 484309 - DNA, 60 bp, Artificial
  Synthetic oligonucleotide
tttcagcgtcggatttagcggagagataacgcatgtgaacgttgcgagcgtgattgctaa

SEQ ID NO: 484310 - DNA, 52 bp, Artificial
  Synthetic oligonucleotide
tttcagctacatatgtgtgtgggaaggctttggaaaaatcagccatgctcac

SEQ ID NO: 484311 - DNA, 60 bp, Artificial
  Synthetic oligonucleotide
tttcagctatgtgttgtaaaccttactgcagaggtcatgacatacatacatggcatggac

SEQ ID NO: 484312 - DNA, 59 bp, Artificial
  Synthetic oligonucleotide
tttcagctcatactactggctctataaggccggcgtgactccagaaaccttcccgactg

SEQ ID NO: 484313 - DNA, 55 bp, Artificial
  Synthetic oligonucleotide
tttcagctcggaggatccggtcgctcctcctttactacccgccaagcctacctaa

SEQ ID NO: 484314 - DNA, 60 bp, Artificial
  Synthetic oligonucleotide
tttcagctttagatattggggcgtgatatcatcaatgacgttatactccacatcgtttga

SEQ ID NO: 484315 - DNA, 60 bp, Artificial
  Synthetic oligonucleotide
tttcaggaggcattcaatatgtttgagaatgagcctagcacagctactgttaaacaggaa

SEQ ID NO: 484316 - DNA, 60 bp, Artificial
  Synthetic oligonucleotide
tttcaggaggtagtgctatatgggaagatatgtgagaccttcttaaggtgctgcacggaa

SEQ ID NO: 484317 - DNA, 59 bp, Artificial
  Synthetic oligonucleotide
tttcaggaggttcgtcgtagcacccatgatggctagatgactaaggcctccgggtagag

SEQ ID NO: 484318 - DNA, 60 bp, Artificial
  Synthetic oligonucleotide
tttcaggcgaatacgctaaaatatattattatgcgggcatgcattttagggatccatcaa

SEQ ID NO: 484319 - DNA, 52 bp, Artificial
  Synthetic oligonucleotide
tttcaggcgtctgagccattttagaaagctggtgcccggtctggggaaggca

SEQ ID NO: 484320 - DNA, 57 bp, Artificial
  Synthetic oligonucleotide
tttcagggagaagaacgaggaagaatagtagtgcaggttcacgttacatgtaatcgg

SEQ ID NO: 484321 - DNA, 60 bp, Artificial
  Synthetic oligonucleotide
tttcaggtgggtgtcaagctgacagcaggtctcggagagcctgcgtggcctgttgagtgc

SEQ ID NO: 484322 - DNA, 60 bp, Artificial
  Synthetic oligonucleotide
tttcaggttttgtgtaatgatgaaggataagaatttgaagatagacatgcgtgaaacgat

SEQ ID NO: 484323 - DNA, 60 bp, Artificial
  Synthetic oligonucleotide
tttcagtatgagaattgggacctcttcatagaaagaagcagcgctttcagcaattgctac

SEQ ID NO: 484324 - DNA, 58 bp, Artificial
  Synthetic oligonucleotide
tttcagtcacatattagacgtgttcgaagacagctattccccgaaaaaactatggata

SEQ ID NO: 484325 - DNA, 60 bp, Artificial
  Synthetic oligonucleotide
tttcagtccaggaccgttctggtactgttcctgatactgcttctctcacaggtatcagag

SEQ ID NO: 484326 - DNA, 54 bp, Artificial
  Synthetic oligonucleotide
tttcagtccccgacccactacgtgaaatccagcggttaggtaccaagaagatac

SEQ ID NO: 484327 - DNA, 55 bp, Artificial
  Synthetic oligonucleotide
tttcagtcgagcaggactagtgagtattattaccatgcccaccacaggtacccga

SEQ ID NO: 484328 - DNA, 60 bp, Artificial
  Synthetic oligonucleotide
tttcagtctctggtccctaaggcagccagaggtcagtacagtggattcgtaaggacactg

SEQ ID NO: 484329 - DNA, 60 bp, Artificial
  Synthetic oligonucleotide
tttcagtgaccaacgccgttgtgaggcagtcacccaagcagcgcactctcgccaagctca

SEQ ID NO: 484330 - DNA, 59 bp, Artificial
  Synthetic oligonucleotide
tttcagtggatgtctattacagcgctaattagcgcaggtggagtttgggcaacgtttaa

SEQ ID NO: 484331 - DNA, 55 bp, Artificial
  Synthetic oligonucleotide
tttcagtggggaggccacggaaccgaaagattcaaaacaaccattggagatccca

SEQ ID NO: 484332 - DNA, 55 bp, Artificial
  Synthetic oligonucleotide
tttcagtggggcggacacgggacagaacaattcaaaaccagcgtcggagacccca

SEQ ID NO: 484333 - DNA, 55 bp, Artificial
  Synthetic oligonucleotide
tttcagtggtcacgttcccggcatatccggatacaagtgtccatgctcgcatgaa

SEQ ID NO: 484334 - DNA, 58 bp, Artificial
  Synthetic oligonucleotide
tttcagtgtattagcacagcttttacatgggtggcggatgcgggtccacaattaggaa

SEQ ID NO: 484335 - DNA, 56 bp, Artificial
  Synthetic oligonucleotide
tttcagtgttaagagagtacctgggaaatcatcatctatagtaaaatgtactaagt

SEQ ID NO: 484336 - DNA, 59 bp, Artificial
  Synthetic oligonucleotide
tttcagtgttgttatggaagagtagaaagctattgagtaaactccatagactacggcga

SEQ ID NO: 484337 - DNA, 55 bp, Artificial
  Synthetic oligonucleotide
tttcagttacacgctagtcacagatcatacataactagcgccacttcttggtcta

SEQ ID NO: 484338 - DNA, 57 bp, Artificial
  Synthetic oligonucleotide
tttcagttcaactgataatactaaacgttatctaggcacttactcgagcgctgatga

SEQ ID NO: 484339 - DNA, 60 bp, Artificial
  Synthetic oligonucleotide
tttcagttggtgtgtcgtgtggttctgagatacatgaggacagggaaaatagagtgcgat

SEQ ID NO: 484340 - DNA, 53 bp, Artificial
  Synthetic oligonucleotide
tttcataaaacttgttaagagtttcactgtaatgttccatagcaacacttcct

SEQ ID NO: 484341 - DNA, 60 bp, Artificial
  Synthetic oligonucleotide
tttcataatcgattatatatttgagaggcatgatcaactgcgtgatgcaaaggaggcgag

SEQ ID NO: 484342 - DNA, 54 bp, Artificial
  Synthetic oligonucleotide
tttcatacaacccagaagtgactcacgtatatagtaacttcactaaccgacacg

SEQ ID NO: 484343 - DNA, 51 bp, Artificial
  Synthetic oligonucleotide
tttcatacagctacgactaagtcttgctgttaattgcgctgctgttgaggg

SEQ ID NO: 484344 - DNA, 51 bp, Artificial
  Synthetic oligonucleotide
tttcatacatcaaagtgctcctagatttgctaaaacaaagtctgcaatcct

SEQ ID NO: 484345 - DNA, 55 bp, Artificial
  Synthetic oligonucleotide
tttcatcaccatacgttgggatggttccactcactgaagggtcagggcgtttcac

SEQ ID NO: 484346 - DNA, 58 bp, Artificial
  Synthetic oligonucleotide
tttcatcactagtttccggcaactggcttagtacgacaagttggaattggcaaccatc

SEQ ID NO: 484347 - DNA, 57 bp, Artificial
  Synthetic oligonucleotide
tttcatcatgaggtttcctgaaacagtggaaatagtagccacttgtaggttggaaaa

SEQ ID NO: 484348 - DNA, 59 bp, Artificial
  Synthetic oligonucleotide
tttcatccgatagcggcaagtgataaccacgcatttgtcgttcggcgtcccggctccac

SEQ ID NO: 484349 - DNA, 55 bp, Artificial
  Synthetic oligonucleotide
tttcatcgactatgaagaactgagagagcaactaagctcagtgtcatcattcgaa

SEQ ID NO: 484350 - DNA, 57 bp, Artificial
  Synthetic oligonucleotide
tttcatcgtactatttgtgtgcaaacaattgtggcggattgtatatgtccaaaacgt

SEQ ID NO: 484351 - DNA, 60 bp, Artificial
  Synthetic oligonucleotide
tttcatcgtcggcactcactccgcaggtggcaatggagtcggatactgctcgtgcgtttc

SEQ ID NO: 484352 - DNA, 60 bp, Artificial
  Synthetic oligonucleotide
tttcatctcaaaaagtgggtgctcatgagaacaccaacattgctactggcgggtcaactg

SEQ ID NO: 484353 - DNA, 60 bp, Artificial
  Synthetic oligonucleotide
tttcatctgaaagtgagaaagattcagtatatgcttctgccttggttgctgcaactaagt

SEQ ID NO: 484354 - DNA, 54 bp, Artificial
  Synthetic oligonucleotide
tttcatctggggaccaagcaagtgtgcatagcatggtccagctcaagttgtcac

SEQ ID NO: 484355 - DNA, 58 bp, Artificial
  Synthetic oligonucleotide
tttcatctttctatagtaatcggtgtctggggtcttatttatacatagacactaaatg

SEQ ID NO: 484356 - DNA, 60 bp, Artificial
  Synthetic oligonucleotide
tttcatgaggtacatttgtatgaccatgaggcaacacaagtagcagttccaccagcgata

SEQ ID NO: 484357 - DNA, 60 bp, Artificial
  Synthetic oligonucleotide
tttcatgcttgcttcaatcagcatatgtcttgtgtgcgattcttacatagaacgatacta

SEQ ID NO: 484358 - DNA, 60 bp, Artificial
  Synthetic oligonucleotide
tttcatggagtcgctgtggccccgtatgaatgtcgacggggctattcaagcacaattgcg

SEQ ID NO: 484359 - DNA, 60 bp, Artificial
  Synthetic oligonucleotide
tttcatggatcaaacaatggcttgaactggaagaagcaaacgaagctgtccaattcgaaa

SEQ ID NO: 484360 - DNA, 57 bp, Artificial
  Synthetic oligonucleotide
tttcatgtgacaggttctatacactagaatctatttattggaacaaaactgggttta

SEQ ID NO: 484361 - DNA, 60 bp, Artificial
  Synthetic oligonucleotide
tttcatgttgcgagacattaaaagactatgcggtgaaattccgactgtcccgagtgttga

SEQ ID NO: 484362 - DNA, 60 bp, Artificial
  Synthetic oligonucleotide
tttcattatagaatatggaacaactgacgatgaagtatatatacaaagagcatttatgtc

SEQ ID NO: 484363 - DNA, 54 bp, Artificial
  Synthetic oligonucleotide
tttcattccccgtcttaatgttcaatgggaagttgaaactggtgaggaaaagaa

SEQ ID NO: 484364 - DNA, 52 bp, Artificial
  Synthetic oligonucleotide
tttcattcgaagggccaggtttagtggaagtccaagagagtgaatactaccc

SEQ ID NO: 484365 - DNA, 60 bp, Artificial
  Synthetic oligonucleotide
tttcattcgccatatcatgcttcttaatttgcgttgttctattgggtttcattatgtggg

SEQ ID NO: 484366 - DNA, 51 bp, Artificial
  Synthetic oligonucleotide
tttcattcttgatccgatgtggcagcgaattccgcccaacttacacgagca

SEQ ID NO: 484367 - DNA, 53 bp, Artificial
  Synthetic oligonucleotide
tttcattgcgggaatcggcttatcgctgttagtcgctgattgactgtttggat

SEQ ID NO: 484368 - DNA, 60 bp, Artificial
  Synthetic oligonucleotide
tttcattggacaaagaaattgaaccagagaaactgcaaagtatcatggcagattcatttg

SEQ ID NO: 484369 - DNA, 60 bp, Artificial
  Synthetic oligonucleotide
tttcattggatgatccaggcctttctaactctatcagcgtggctgtgatgtttgagaacc

SEQ ID NO: 484370 - DNA, 57 bp, Artificial
  Synthetic oligonucleotide
tttccaaaggctgaacggtatgacaaaagcacatggcttaccaagacccggaacata

SEQ ID NO: 484371 - DNA, 59 bp, Artificial
  Synthetic oligonucleotide
tttccaaatgctcaaccattcgttcatcatgctacggttgggttaactcttcgaattga

SEQ ID NO: 484372 - DNA, 54 bp, Artificial
  Synthetic oligonucleotide
tttccaacgaggattgccatatactattgctccggtaaagggtggaacgacgat

SEQ ID NO: 484373 - DNA, 60 bp, Artificial
  Synthetic oligonucleotide
tttccaactacttgcaggccgcctcaagctcacctccaaagaagtctcgcacaagcaaat

SEQ ID NO: 484374 - DNA, 56 bp, Artificial
  Synthetic oligonucleotide
tttccaactcgctcacagaaatcttcatagaatgaatccggaaagagtgactcttc

SEQ ID NO: 484375 - DNA, 57 bp, Artificial
  Synthetic oligonucleotide
tttccaacttacaagccttgcagcttcctcaggtacatcaaagaaatccctatttaa

SEQ ID NO: 484376 - DNA, 57 bp, Artificial
  Synthetic oligonucleotide
tttccaatctcccagcgggagttcaaaaatgaagccccttatgatgggcaattggaa

SEQ ID NO: 484377 - DNA, 55 bp, Artificial
  Synthetic oligonucleotide
tttccacagtaacagaggctcgtcggtttccccaaccgattgcggtgatggaggg

SEQ ID NO: 484378 - DNA, 55 bp, Artificial
  Synthetic oligonucleotide
tttccaccaacgagagcttgcactctagaagtggagccagtttgggttgaccttc

SEQ ID NO: 484379 - DNA, 60 bp, Artificial
  Synthetic oligonucleotide
tttccaccccgggagatggttcatgcgtgccgctcaagcagtaactgcggtagtgtgtgg

SEQ ID NO: 484380 - DNA, 54 bp, Artificial
  Synthetic oligonucleotide
tttccacccgacggatcgggctcccaagccgagtctgggaagggtacctctatc

SEQ ID NO: 484381 - DNA, 55 bp, Artificial
  Synthetic oligonucleotide
tttccaccttggagatgacatggatcctgagttgagaacactagcacagagtctg

SEQ ID NO: 484382 - DNA, 55 bp, Artificial
  Synthetic oligonucleotide
tttccacgcaactcgcaatggcaggcatggatggttcgtgggctacggtagcgtc

SEQ ID NO: 484383 - DNA, 55 bp, Artificial
  Synthetic oligonucleotide
tttccacgtttatcagctatccaaaccagggtaagactgaaccgaaccggagcag

SEQ ID NO: 484384 - DNA, 55 bp, Artificial
  Synthetic oligonucleotide
tttccactacacgctccaaagcaaaagtaaagtaatcaatggtccccacgcacta

SEQ ID NO: 484385 - DNA, 59 bp, Artificial
  Synthetic oligonucleotide
tttccactgacctttggatggtgcttcaagttagtaccagttgacccacagcaggtaga

SEQ ID NO: 484386 - DNA, 52 bp, Artificial
  Synthetic oligonucleotide
tttccactgcaaccagggtactcgagtgtttttagtcggacgctcctaggag

SEQ ID NO: 484387 - DNA, 50 bp, Artificial
  Synthetic oligonucleotide
tttccactggaccggggagtggccagccctcagatgctgcatataagcag

SEQ ID NO: 484388 - DNA, 55 bp, Artificial
  Synthetic oligonucleotide
tttccactggggcgttccaggaggagtggtctgggcgggactgggagtggtcaac

SEQ ID NO: 484389 - DNA, 56 bp, Artificial
  Synthetic oligonucleotide
tttccagaatgtacacccagttactatcggagaatgccctaagtacgttaggagta

SEQ ID NO: 484390 - DNA, 60 bp, Artificial
  Synthetic oligonucleotide
tttccagacacaatctggaatgtgtcttacagtgggacaagcaaagcatgttcagattca

SEQ ID NO: 484391 - DNA, 53 bp, Artificial
  Synthetic oligonucleotide
tttccagacagaatgtaggaactcactctactcaaaatacagttgctaatggg

SEQ ID NO: 484392 - DNA, 59 bp, Artificial
  Synthetic oligonucleotide
tttccagatgttttaatccaagcgagaccatctcatttctggaaggcggttctaaatga

SEQ ID NO: 484393 - DNA, 50 bp, Artificial
  Synthetic oligonucleotide
tttccaggcagcgggggcgtacttaatctctatagtggcctccaaactag

SEQ ID NO: 484394 - DNA, 60 bp, Artificial
  Synthetic oligonucleotide
tttccaggctgacgcatgatgacgtaggtgtacacccgatgggagctctctcaaaactcc

SEQ ID NO: 484395 - DNA, 58 bp, Artificial
  Synthetic oligonucleotide
tttccagggcccctatgaggcgagcgcaacaaaacctgcaaagccaaataggcaatcc

SEQ ID NO: 484396 - DNA, 57 bp, Artificial
  Synthetic oligonucleotide
tttccagtaagaccaagagtgccgctaagacaaatgacctataaattagcggtggac

SEQ ID NO: 484397 - DNA, 51 bp, Artificial
  Synthetic oligonucleotide
tttccagtcaaacctcaagtacctttaagacctatgacttacaaaggagct

SEQ ID NO: 484398 - DNA, 56 bp, Artificial
  Synthetic oligonucleotide
tttccagtcagaccccaggtacctttaaggccaatgacttataaggcagctctcga

SEQ ID NO: 484399 - DNA, 60 bp, Artificial
  Synthetic oligonucleotide
tttccagtggtgaaacatcatacttgcacataagagtatcgccagagtatatgaatttgc

SEQ ID NO: 484400 - DNA, 57 bp, Artificial
  Synthetic oligonucleotide
tttccagttcttgttgggccgaggatgtagaggctaagctttcttgtacctgtattg

SEQ ID NO: 484401 - DNA, 55 bp, Artificial
  Synthetic oligonucleotide
tttccataggctagagccgctacacgcccaccgcccaccgtcaacggccaatcca

SEQ ID NO: 484402 - DNA, 60 bp, Artificial
  Synthetic oligonucleotide
tttccatctctatgagcctctcgggcacatatgatgtacagaggattccaacgacctacg

SEQ ID NO: 484403 - DNA, 53 bp, Artificial
  Synthetic oligonucleotide
tttccatctgggttcaaaacccgctagtcggaccccacaccgcccctgcgtcg

SEQ ID NO: 484404 - DNA, 57 bp, Artificial
  Synthetic oligonucleotide
tttccatgactccaatgtaaggaatctgtacgaaaaggtcaaatcacaactgaggaa

SEQ ID NO: 484405 - DNA, 55 bp, Artificial
  Synthetic oligonucleotide
tttccattatgatagtaatgtaccaacttttctttcagggaccctatgaggctag

SEQ ID NO: 484406 - DNA, 57 bp, Artificial
  Synthetic oligonucleotide
tttccattctcttggcagaacgggatacacaatacatgttcagtgtaatgctacaaa

SEQ ID NO: 484407 - DNA, 52 bp, Artificial
  Synthetic oligonucleotide
tttcccaaacgccggtggagcatcggggaacaaggaaacaggagagggaacg

SEQ ID NO: 484408 - DNA, 57 bp, Artificial
  Synthetic oligonucleotide
tttcccaatcaatcgctggatgggaaagttatctttcccacaagggcctgcacgtgt

SEQ ID NO: 484409 - DNA, 55 bp, Artificial
  Synthetic oligonucleotide
tttcccacaatgctgctcatgagggttggaggatgatcaaaggtgtgaacagtcc

SEQ ID NO: 484410 - DNA, 55 bp, Artificial
  Synthetic oligonucleotide
tttcccacaccgacggagctcgtgtggacgctgggaatttattcccaagattaag

SEQ ID NO: 484411 - DNA, 60 bp, Artificial
  Synthetic oligonucleotide
tttcccacccatcattggatcggatgggatgcctgtcctgcgaaaattttcagagattta

SEQ ID NO: 484412 - DNA, 55 bp, Artificial
  Synthetic oligonucleotide
tttcccactcatcctgaccgttgttgcgtaatcattgcacgccgtcatccacccg

SEQ ID NO: 484413 - DNA, 57 bp, Artificial
  Synthetic oligonucleotide
tttcccagtctcacgaggactgaacccaataggtccaggtcgtacatcaagttacga

SEQ ID NO: 484414 - DNA, 54 bp, Artificial
  Synthetic oligonucleotide
tttcccatatcaaagatggtagggctgctgaatgatttacagttgggtttccaa

SEQ ID NO: 484415 - DNA, 55 bp, Artificial
  Synthetic oligonucleotide
tttcccattttccgtagtccacatgggaaaagtcgacatctttgaaggtgaactg

SEQ ID NO: 484416 - DNA, 58 bp, Artificial
  Synthetic oligonucleotide
tttccccataccgtacacggtcttcgatgtatgcttgcgataaagtacgtgcaattgg

SEQ ID NO: 484417 - DNA, 53 bp, Artificial
  Synthetic oligonucleotide
tttccccatgacgccggagacatctcggaaggggaaagacggaaggtggaaaa

SEQ ID NO: 484418 - DNA, 55 bp, Artificial
  Synthetic oligonucleotide
tttccccatgatcttgggagctggcctttatctatgaagcttcttaaacggaaag

SEQ ID NO: 484419 - DNA, 60 bp, Artificial
  Synthetic oligonucleotide
tttccccattgacctacaagagagattactttcatatctatatggaagtgagatctcaag

SEQ ID NO: 484420 - DNA, 60 bp, Artificial
  Synthetic oligonucleotide
tttcccccactgcttggctttcagctatatggatgatgtggtattgggggccaagtctgt

SEQ ID NO: 484421 - DNA, 54 bp, Artificial
  Synthetic oligonucleotide
tttccccggggcgatgatatagactgtgcccacggtcgaaagtcgtcaaaccgt

SEQ ID NO: 484422 - DNA, 53 bp, Artificial
  Synthetic oligonucleotide
tttccccggtgaacttgtatagactgtacccacggtcgaaaacgagtgatccg

SEQ ID NO: 484423 - DNA, 54 bp, Artificial
  Synthetic oligonucleotide
tttccccggtgaagccacataaactgtacccacggttgaaagtggcagatccgt

SEQ ID NO: 484424 - DNA, 59 bp, Artificial
  Synthetic oligonucleotide
tttccccggtgacattgcatagactgctcacgcggttgaaagtgatcgatccgttaccc

SEQ ID NO: 484425 - DNA, 54 bp, Artificial
  Synthetic oligonucleotide
tttccccggtgacattgtatagactgtacccacggttgaaaacaatagatccgt

SEQ ID NO: 484426 - DNA, 51 bp, Artificial
  Synthetic oligonucleotide
tttccccggtgatatcacatagactgtacccacggtcaaaagtgattgatc

SEQ ID NO: 484427 - DNA, 60 bp, Artificial
  Synthetic oligonucleotide
tttccccggtgatctcgcataagctgtgcccacggctgaaggcaagtgatccgttatccg

SEQ ID NO: 484428 - DNA, 54 bp, Artificial
  Synthetic oligonucleotide
tttccccggtgatgtcgtatagactgtaaccacggttgaaaacgattgatccgt

SEQ ID NO: 484429 - DNA, 60 bp, Artificial
  Synthetic oligonucleotide
tttccccggtgatgttgcatagactgctcacgcggttgaaagcgactgatccgttatccg

SEQ ID NO: 484430 - DNA, 56 bp, Artificial
  Synthetic oligonucleotide
tttccccggtgattttacataagctgtacccacggctgaaagtgaatgatccgtta

SEQ ID NO: 484431 - DNA, 55 bp, Artificial
  Synthetic oligonucleotide
tttccccgtctcagtgggcggcaataggcgtgctggggagtctgctgtttgggct

SEQ ID NO: 484432 - DNA, 55 bp, Artificial
  Synthetic oligonucleotide
tttcccctcttagtgatatgttaaagaagaaaccaccggcatggggaaaatgtca

SEQ ID NO: 484433 - DNA, 59 bp, Artificial
  Synthetic oligonucleotide
tttccccttagccctcaccatggacgcacctgcctggatcgctgtactacaaatcccta

SEQ ID NO: 484434 - DNA, 58 bp, Artificial
  Synthetic oligonucleotide
tttcccgagtatcttacagaagtgcaccccattcacgacatttgtgttctctactcgg

SEQ ID NO: 484435 - DNA, 60 bp, Artificial
  Synthetic oligonucleotide
tttcccggacggaattgtgtgcagcagtgatgcttcgggctgggacatgtccgttagtcg

SEQ ID NO: 484436 - DNA, 56 bp, Artificial
  Synthetic oligonucleotide
tttcccggtggaaaggagcgatggaacgttcacggaagaagaatcgatacacactc

SEQ ID NO: 484437 - DNA, 58 bp, Artificial
  Synthetic oligonucleotide
tttcccgtgttaatcgcctgggcatatgcatcgtttgccgtttgttgaccaccacgct

SEQ ID NO: 484438 - DNA, 60 bp, Artificial
  Synthetic oligonucleotide
tttccctatgcctatatttatcaatcatggcgggtttctagaatgtattggcattaagcc

SEQ ID NO: 484439 - DNA, 53 bp, Artificial
  Synthetic oligonucleotide
tttccctgtgtgcgagcaacggaaagtgtacacatttggtgaatctactggtt

SEQ ID NO: 484440 - DNA, 54 bp, Artificial
  Synthetic oligonucleotide
tttcccttcccccgcgactcttcttcgactcggaccggctcatttcggctagag

SEQ ID NO: 484441 - DNA, 60 bp, Artificial
  Synthetic oligonucleotide
tttcccttgcacaatgcggtggaaacaatgcgcttgctcttttctggagtgtcaacaatt

SEQ ID NO: 484442 - DNA, 52 bp, Artificial
  Synthetic oligonucleotide
tttccgaaatagtcataatcacgaacttttaagtctttacgacgatacgttt

SEQ ID NO: 484443 - DNA, 60 bp, Artificial
  Synthetic oligonucleotide
tttccgaacacgtcaggcccaagttgatgcacttaatttgcctgatatctcagcactgag

SEQ ID NO: 484444 - DNA, 55 bp, Artificial
  Synthetic oligonucleotide
tttccgaagagcacgtggtaacccagttcatatctcctggaggaaccatcatcct

SEQ ID NO: 484445 - DNA, 55 bp, Artificial
  Synthetic oligonucleotide
tttccgacactattgacaagcgccgcattgctatggccggcaattccacggcgtc

SEQ ID NO: 484446 - DNA, 60 bp, Artificial
  Synthetic oligonucleotide
tttccgacatcaaaatgcccaaggcactggtcaggctgcggattacaaaagtactcaggc

SEQ ID NO: 484447 - DNA, 50 bp, Artificial
  Synthetic oligonucleotide
tttccgactcccgactagaattttggttaatcggccagtaaaggttaaat

SEQ ID NO: 484448 - DNA, 57 bp, Artificial
  Synthetic oligonucleotide
tttccgacttacagactgagatcccggatcgggcctggaactctgggtacgaatgga

SEQ ID NO: 484449 - DNA, 52 bp, Artificial
  Synthetic oligonucleotide
tttccgagaaaaaagtacccgccacagacttcgccacgtttagggtcgtaga

SEQ ID NO: 484450 - DNA, 59 bp, Artificial
  Synthetic oligonucleotide
tttccgatctacttgcccatgattcgttcggaccaatcgcaagatgtgggacgcgtaac

SEQ ID NO: 484451 - DNA, 58 bp, Artificial
  Synthetic oligonucleotide
tttccgatctatttgcccacgattcgttcggaccgattgcaaaatgtgggacgcgcaa

SEQ ID NO: 484452 - DNA, 57 bp, Artificial
  Synthetic oligonucleotide
tttccgattctacagatttgggtcgcaaagtcacattttcgctcccagttcaactgg

SEQ ID NO: 484453 - DNA, 55 bp, Artificial
  Synthetic oligonucleotide
tttccgccaggactatcgtcgtgacgaaatcaccgaccgccacatcatagtgatg

SEQ ID NO: 484454 - DNA, 55 bp, Artificial
  Synthetic oligonucleotide
tttccgcctcatcctgtccgttgttttgtaatcattacacgccgctatccgtccg

SEQ ID NO: 484455 - DNA, 54 bp, Artificial
  Synthetic oligonucleotide
tttccgctggggactttccagggaggtgtggcctgggcgggacaggggagtggc

SEQ ID NO: 484456 - DNA, 55 bp, Artificial
  Synthetic oligonucleotide
tttccgctgtgaggttttacctcgaaggttgctagtctggttttcagtcggagac

SEQ ID NO: 484457 - DNA, 60 bp, Artificial
  Synthetic oligonucleotide
tttccgcttacgaagtgcgcaacatgtccggggtataccatgtcacgaacgactgctcca

SEQ ID NO: 484458 - DNA, 50 bp, Artificial
  Synthetic oligonucleotide
tttccgcttccggtcccgcgaaaattacgtatttccgcttccgggacacg

SEQ ID NO: 484459 - DNA, 53 bp, Artificial
  Synthetic oligonucleotide
tttccgctttaattcaaaacttagacgcggagtgccctaattgtctaacgagt

SEQ ID NO: 484460 - DNA, 59 bp, Artificial
  Synthetic oligonucleotide
tttccggaagattgatcatgaatccaataactatctactactgctttacccgaagatgt

SEQ ID NO: 484461 - DNA, 54 bp, Artificial
  Synthetic oligonucleotide
tttccggacaaattaaatgcgtcccgaacggcataataaaaaatcgcgcggctc

SEQ ID NO: 484462 - DNA, 55 bp, Artificial
  Synthetic oligonucleotide
tttccggagccattcgctgcttccagtgtaagcaagtcttgggacctgcaggacc

SEQ ID NO: 484463 - DNA, 51 bp, Artificial
  Synthetic oligonucleotide
tttccggcccctacgaatttggggattattgccctagtgggtcccataaac

SEQ ID NO: 484464 - DNA, 51 bp, Artificial
  Synthetic oligonucleotide
tttccggcgtcgacgggactacccacacgacgggggggacagcggctttta

SEQ ID NO: 484465 - DNA, 60 bp, Artificial
  Synthetic oligonucleotide
tttccgggccagacaatggggcagttgcggtattgaaatacaatggcataataacagaca

SEQ ID NO: 484466 - DNA, 53 bp, Artificial
  Synthetic oligonucleotide
tttccggtccacacatgctgtgcttggatattagggcgggggccgaagtgagg

SEQ ID NO: 484467 - DNA, 56 bp, Artificial
  Synthetic oligonucleotide
tttccggtccatttgaatttggggaatactgtcctgctggttctcacaaacgccga

SEQ ID NO: 484468 - DNA, 53 bp, Artificial
  Synthetic oligonucleotide
tttccggtccttacgaatttggggattattgccctggtggttcgcacaaacgc

SEQ ID NO: 484469 - DNA, 60 bp, Artificial
  Synthetic oligonucleotide
tttccggtgtatgctcgccgtgaaataccttcagctggttgaatgtacttattctcctga

SEQ ID NO: 484470 - DNA, 58 bp, Artificial
  Synthetic oligonucleotide
tttccggttgtctaggaccagcaactggtttccttgtcagatcaatacttgtgttgtc

SEQ ID NO: 484471 - DNA, 55 bp, Artificial
  Synthetic oligonucleotide
tttccgtaatgtggtccactttgactggccaatcacatttgagcttcaaagctta

SEQ ID NO: 484472 - DNA, 56 bp, Artificial
  Synthetic oligonucleotide
tttccgtacccggatacttgaaccccacaccgcgtagcttcatgatggcacggtcc

SEQ ID NO: 484473 - DNA, 56 bp, Artificial
  Synthetic oligonucleotide
tttccgtcgatgtatgaggtcgccgagagtgtaaaatctcggtttattgttaagag

SEQ ID NO: 484474 - DNA, 52 bp, Artificial
  Synthetic oligonucleotide
tttccgtcgcacacgacggaaccggaaaaagggtctactacctgacccgtga

SEQ ID NO: 484475 - DNA, 57 bp, Artificial
  Synthetic oligonucleotide
tttccgtcggttcgggatctcctagacaccgcatctgctttgtatcgggaagcctta

SEQ ID NO: 484476 - DNA, 55 bp, Artificial
  Synthetic oligonucleotide
tttccgtctggctgttgggccacgttcactgacttcttaagttatgattacctcg

SEQ ID NO: 484477 - DNA, 51 bp, Artificial
  Synthetic oligonucleotide
tttccgtcttccccgaagacaacgcagaggcccatggcttaggccttcgcc

SEQ ID NO: 484478 - DNA, 58 bp, Artificial
  Synthetic oligonucleotide
tttccgtggcccacgacaacaatggacagagatattactacctcacaagagacccaac

SEQ ID NO: 484479 - DNA, 56 bp, Artificial
  Synthetic oligonucleotide
tttccgtggtgtcgtaaccctactggatatgtcatgccttgggggaacaaggaatg

SEQ ID NO: 484480 - DNA, 55 bp, Artificial
  Synthetic oligonucleotide
tttcctaaaatacccccgcttttgtgtctaagaggcgcgtcggagtgcgccgata

SEQ ID NO: 484481 - DNA, 58 bp, Artificial
  Synthetic oligonucleotide
tttcctaaagaaggttgcgggcaaattctgctgtttcatgcggtggctagggcaggag

SEQ ID NO: 484482 - DNA, 51 bp, Artificial
  Synthetic oligonucleotide
tttcctaccgttctatcaagtggatggtccggaactgacagggtcataccg

SEQ ID NO: 484483 - DNA, 59 bp, Artificial
  Synthetic oligonucleotide
tttcctacgtcacctagctggacacgtgaccgaggacgtcgcgatggctgccatggtat

SEQ ID NO: 484484 - DNA, 58 bp, Artificial
  Synthetic oligonucleotide
tttcctatgtctgagatttacgagtccattcgttggacccgcaacccacaacagacta

SEQ ID NO: 484485 - DNA, 55 bp, Artificial
  Synthetic oligonucleotide
tttcctcacgcacgaggtctttgatttaacgactgacttgcctggggtgcaaccg

SEQ ID NO: 484486 - DNA, 60 bp, Artificial
  Synthetic oligonucleotide
tttcctcatgcagattgccatcctagcaaccaatgtgacactgcatttcaggcaaaacga

SEQ ID NO: 484487 - DNA, 60 bp, Artificial
  Synthetic oligonucleotide
tttcctcatgcagattgccatcctagcaacgactgtgacactgcacttcaagcaagatga

SEQ ID NO: 484488 - DNA, 59 bp, Artificial
  Synthetic oligonucleotide
tttcctccagtgcccccagaaaatttagagggctgcagtcaacacttttatgagatgta

SEQ ID NO: 484489 - DNA, 60 bp, Artificial
  Synthetic oligonucleotide
tttcctccccaacgcccacactgagggagatctcatgtatcacgctttgcgttacttgag

SEQ ID NO: 484490 - DNA, 58 bp, Artificial
  Synthetic oligonucleotide
tttcctccttgactgtgaatgtgagaggatcgggaatgagaatacttgtaagaggcaa

SEQ ID NO: 484491 - DNA, 60 bp, Artificial
  Synthetic oligonucleotide
tttcctcggatctaatcaactacgcacaccatgtcaattcatcatcccttactacctctc

SEQ ID NO: 484492 - DNA, 57 bp, Artificial
  Synthetic oligonucleotide
tttcctctgaatctaataccactaccggaggtgagctccgaggtcgaccaacctctg

SEQ ID NO: 484493 - DNA, 52 bp, Artificial
  Synthetic oligonucleotide
tttcctctggacatacgcttcttacggtaaaccgtacgtacatccttttcgt

SEQ ID NO: 484494 - DNA, 60 bp, Artificial
  Synthetic oligonucleotide
tttcctgaaaagattacatattttcgacgtggctagagttccagatgatcaaatgtatag

SEQ ID NO: 484495 - DNA, 55 bp, Artificial
  Synthetic oligonucleotide
tttcctgacagtatggggacccgaacatactgacgaccctgacgtcttacgttta

SEQ ID NO: 484496 - DNA, 56 bp, Artificial
  Synthetic oligonucleotide
tttcctgactagagcagaggcgctactgcacgtgtgggtcccccccctcaacgtcc

SEQ ID NO: 484497 - DNA, 50 bp, Artificial
  Synthetic oligonucleotide
tttcctgagttgaagcctggagagtccagacacacatcagatcatatgtc

SEQ ID NO: 484498 - DNA, 59 bp, Artificial
  Synthetic oligonucleotide
tttcctgatgtaccatatagaaagaataggtaggcgcgctgataagtaaggccataggt

SEQ ID NO: 484499 - DNA, 56 bp, Artificial
  Synthetic oligonucleotide
tttcctgcaagtacaatacctggaccaaaagtgttgaaccaacatgggcaaacgtg

SEQ ID NO: 484500 - DNA, 60 bp, Artificial
  Synthetic oligonucleotide
tttcctgccccgagtgcggattaccaggcccgcgactgccagacagtccgagtctgccgc

SEQ ID NO: 484501 - DNA, 56 bp, Artificial
  Synthetic oligonucleotide
tttcctgctcatcacaatcgtgctccaatatggctacccatctaggagcatgtttg

SEQ ID NO: 484502 - DNA, 54 bp, Artificial
  Synthetic oligonucleotide
tttcctggggtcaatgtcgtcgtctaaagaaaattatgtgttaaccagaacgag

SEQ ID NO: 484503 - DNA, 52 bp, Artificial
  Synthetic oligonucleotide
tttcctggtcgggagattcgattcagttcttcggctccttcgtcccacagct

SEQ ID NO: 484504 - DNA, 57 bp, Artificial
  Synthetic oligonucleotide
tttcctgtactccgtgacctttgtggtcccttgtttgcgcacgtatcgtgatgtttg

SEQ ID NO: 484505 - DNA, 56 bp, Artificial
  Synthetic oligonucleotide
tttcctgtctaaggtacagacgttctttaagccttcgtgaggtggtattgcctctg

SEQ ID NO: 484506 - DNA, 54 bp, Artificial
  Synthetic oligonucleotide
tttcctgtcttactttcggaagagaaactgttcttgagtatttggtgtcctttg

SEQ ID NO: 484507 - DNA, 54 bp, Artificial
  Synthetic oligonucleotide
tttcctgtggatcaaaaactaccattggtcaacagggatcctcccccaaaacca

SEQ ID NO: 484508 - DNA, 59 bp, Artificial
  Synthetic oligonucleotide
tttcctgttctgctttccccttcaatcactatactaatcggtctacttggccgcgcagc

SEQ ID NO: 484509 - DNA, 55 bp, Artificial
  Synthetic oligonucleotide
tttccttagctccgagttctttagctcgtgagatattgggcgtgtgtttcgggtt

SEQ ID NO: 484510 - DNA, 59 bp, Artificial
  Synthetic oligonucleotide
tttccttcggtacgagatcttctagataccgccacagctctgtatcgggaagccttaga

SEQ ID NO: 484511 - DNA, 53 bp, Artificial
  Synthetic oligonucleotide
tttccttctctgtaggactatcgtcttacgcagttggatcacaactcccgtgc

SEQ ID NO: 484512 - DNA, 52 bp, Artificial
  Synthetic oligonucleotide
tttccttgatataaagaaaccacgtaatctgtgggtcactatggtgttcccc

SEQ ID NO: 484513 - DNA, 59 bp, Artificial
  Synthetic oligonucleotide
tttccttggaacactctcaataatgagactttctggtgaaggtcccacatttgacgcta

SEQ ID NO: 484514 - DNA, 58 bp, Artificial
  Synthetic oligonucleotide
tttcctttccgcaaggtacagatgttacgctacgtagaatgccacttgctataggtgg

SEQ ID NO: 484515 - DNA, 56 bp, Artificial
  Synthetic oligonucleotide
tttcctttccgcgtccaaagcgcaggcggaggttttccgctcctatattgtcaaca

SEQ ID NO: 484516 - DNA, 60 bp, Artificial
  Synthetic oligonucleotide
tttcctttctaacaacgctatggtattgtacacagatgtatctcaatgggattcatctca

SEQ ID NO: 484517 - DNA, 50 bp, Artificial
  Synthetic oligonucleotide
tttcgaaaaagttgaaagattgaaacacggaacctttggccccgttcatt

SEQ ID NO: 484518 - DNA, 60 bp, Artificial
  Synthetic oligonucleotide
tttcgaaaaatcgccactgcattgtggagcgcacgactatggctgttaagtaaggcggcc

SEQ ID NO: 484519 - DNA, 54 bp, Artificial
  Synthetic oligonucleotide
tttcgaaaaggtacttgggcattggtgagcttaataaattcggtaggacgacga

SEQ ID NO: 484520 - DNA, 55 bp, Artificial
  Synthetic oligonucleotide
tttcgaaaagtgagaaattctccatcatcgacacaagatagtgttgcacgtatgg

SEQ ID NO: 484521 - DNA, 60 bp, Artificial
  Synthetic oligonucleotide
tttcgaaacatgcaattatgtcactgatgagaacgacatattcgaagctcttaacatgaa

SEQ ID NO: 484522 - DNA, 56 bp, Artificial
  Synthetic oligonucleotide
tttcgaaacgcatgacttaaacttgggaaggataaaagctgatatttttgagcttg

SEQ ID NO: 484523 - DNA, 55 bp, Artificial
  Synthetic oligonucleotide
tttcgaacgcagtgccgagtcctacatggtccacatttgcagaggtttgtagcct

SEQ ID NO: 484524 - DNA, 55 bp, Artificial
  Synthetic oligonucleotide
tttcgaaggtccctgggagtttggcaagcctggggcagtcggacagcgaaaggga

SEQ ID NO: 484525 - DNA, 60 bp, Artificial
  Synthetic oligonucleotide
tttcgaatctcgaatagccacattagagcgtacagcggtcactagcgcagcggcacctct

SEQ ID NO: 484526 - DNA, 56 bp, Artificial
  Synthetic oligonucleotide
tttcgacacgcctgttatagttagacccaacgggtactttgacagagaagtctatg

SEQ ID NO: 484527 - DNA, 54 bp, Artificial
  Synthetic oligonucleotide
tttcgacacgctcggcggtgtgtacccctgggagggtaggtaccactacgctac

SEQ ID NO: 484528 - DNA, 58 bp, Artificial
  Synthetic oligonucleotide
tttcgacagagctctcagttacgagcacgatcgttgttgcctccgagctagtgatgcc

SEQ ID NO: 484529 - DNA, 60 bp, Artificial
  Synthetic oligonucleotide
tttcgacagcccctattctcgacgtgctgctgtccccactgtccgcgtcaccaaaagaca

SEQ ID NO: 484530 - DNA, 59 bp, Artificial
  Synthetic oligonucleotide
tttcgacataaagatgagacgcggttcaacagagttacatggatttgtattgacccgat

SEQ ID NO: 484531 - DNA, 57 bp, Artificial
  Synthetic oligonucleotide
tttcgaccaacgggaagacccagccaaagcaactcacgaactcacccagaagatggc

SEQ ID NO: 484532 - DNA, 50 bp, Artificial
  Synthetic oligonucleotide
tttcgaccaataacaatcgagccaatgatttgcaatcttttgacaatctc

SEQ ID NO: 484533 - DNA, 60 bp, Artificial
  Synthetic oligonucleotide
tttcgaccatgtcctcttgtcggaattcaccaatatgagaatccttgtacatcaacttca

SEQ ID NO: 484534 - DNA, 50 bp, Artificial
  Synthetic oligonucleotide
tttcgacgcaggaactcacaaccctcctatcttatctcggaaaaggctat

SEQ ID NO: 484535 - DNA, 55 bp, Artificial
  Synthetic oligonucleotide
tttcgacttaatgatacaaacgttataaatgcaggcaatcgagactaacgcgcga

SEQ ID NO: 484536 - DNA, 56 bp, Artificial
  Synthetic oligonucleotide
tttcgagagcaccagtggattaacctggtctacagcccctactacttaagtaggga

SEQ ID NO: 484537 - DNA, 52 bp, Artificial
  Synthetic oligonucleotide
tttcgagaggaagaccgacctaccctccagaggttccgcgaaaagttttcac

SEQ ID NO: 484538 - DNA, 55 bp, Artificial
  Synthetic oligonucleotide
tttcgagattatgtcagattgatctctaagcctgtggcagataggaatactgacg

SEQ ID NO: 484539 - DNA, 55 bp, Artificial
  Synthetic oligonucleotide
tttcgagccactgttctagacatatgtcgatcacgcaaaatgtgcctgtgcgacc

SEQ ID NO: 484540 - DNA, 60 bp, Artificial
  Synthetic oligonucleotide
tttcgagcctcgatccagtctagaatggggggtaatggtgtatgactattcggagctcga

SEQ ID NO: 484541 - DNA, 55 bp, Artificial
  Synthetic oligonucleotide
tttcgaggaacccttctataagatcggtcggatcatctatatcagcatggacaga

SEQ ID NO: 484542 - DNA, 60 bp, Artificial
  Synthetic oligonucleotide
tttcgaggaccactgtaaaagaatccatcataagagagcataatacctggattctgcgga

SEQ ID NO: 484543 - DNA, 57 bp, Artificial
  Synthetic oligonucleotide
tttcgaggtcttccagatcttttcttgcttcgacccactttgagaggacatcctccc

SEQ ID NO: 484544 - DNA, 60 bp, Artificial
  Synthetic oligonucleotide
tttcgatccagaccctgattttgttgaacctgctcctgtattagctatcgtaccacatcg

SEQ ID NO: 484545 - DNA, 58 bp, Artificial
  Synthetic oligonucleotide
tttcgcaaacatccggaagccacttactctcgatgtggctccggaccctggcttacgc

SEQ ID NO: 484546 - DNA, 50 bp, Artificial
  Synthetic oligonucleotide
tttcgcaacaagatcgtcgtattcgtctttccccatcgtcaaagcgtggt

SEQ ID NO: 484547 - DNA, 58 bp, Artificial
  Synthetic oligonucleotide
tttcgcacgtcgttcgttgacggggcggtcttagagaccaatggcccagagcgccaca

SEQ ID NO: 484548 - DNA, 57 bp, Artificial
  Synthetic oligonucleotide
tttcgcactaggagatccgtgccagagtgattacgattcagaaaaggaccgttccgt

SEQ ID NO: 484549 - DNA, 51 bp, Artificial
  Synthetic oligonucleotide
tttcgcactgcagtatgtgggctataccctgcacagataaaggcagggaac

SEQ ID NO: 484550 - DNA, 60 bp, Artificial
  Synthetic oligonucleotide
tttcgcagcgttgactcgtccgctgcgtgtatttttctctagtgttgttcgcgtgctgtt

SEQ ID NO: 484551 - DNA, 56 bp, Artificial
  Synthetic oligonucleotide
tttcgcaggtttatggtgttagccccggtttagtacataacctgattgggatgctc

SEQ ID NO: 484552 - DNA, 56 bp, Artificial
  Synthetic oligonucleotide
tttcgcataacggcggattaatagcacctagtagagtgagtaaactaaagggaaga

SEQ ID NO: 484553 - DNA, 57 bp, Artificial
  Synthetic oligonucleotide
tttcgcatacttaacagcctaccaggctacagtgtgcgctagggccaaagccccccc

SEQ ID NO: 484554 - DNA, 60 bp, Artificial
  Synthetic oligonucleotide
tttcgcatatgcttggcatacccatcctaactatattgaatgggttgacacatatcggat

SEQ ID NO: 484555 - DNA, 54 bp, Artificial
  Synthetic oligonucleotide
tttcgccaacttacaaggcctttctatgtcaacaatacatgaacctttaccccg

SEQ ID NO: 484556 - DNA, 57 bp, Artificial
  Synthetic oligonucleotide
tttcgccactgccctatggtaccgcttgctcccttcccgcttgtaccgattacctgc

SEQ ID NO: 484557 - DNA, 59 bp, Artificial
  Synthetic oligonucleotide
tttcgccagatcccgcccccgcgcgtcactgccggagtcgctcaggagtggcgcatgac

SEQ ID NO: 484558 - DNA, 57 bp, Artificial
  Synthetic oligonucleotide
tttcgcccatcttcaaactgcaacgtgaggctttcggggtgcggtcctccgcagccg

SEQ ID NO: 484559 - DNA, 56 bp, Artificial
  Synthetic oligonucleotide
tttcgccgacaatttcgtacatacgaataatactttgtggagttacacgtgaatag

SEQ ID NO: 484560 - DNA, 55 bp, Artificial
  Synthetic oligonucleotide
tttcgcctggttgtagtaacatgggcctttgtcgttgtaaaccgtctgggccgca

SEQ ID NO: 484561 - DNA, 55 bp, Artificial
  Synthetic oligonucleotide
tttcgcgactactcaatcaacataatgtccaagccttccaacgcttcgcctacgc

SEQ ID NO: 484562 - DNA, 60 bp, Artificial
  Synthetic oligonucleotide
tttcgcgaggctacccgcccccatgtacacactgctccgtcacaacacgaagcagcgatt

SEQ ID NO: 484563 - DNA, 50 bp, Artificial
  Synthetic oligonucleotide
tttcgctacacagtaatggcgcttggtccagtgaactgatattcgaagcg

SEQ ID NO: 484564 - DNA, 58 bp, Artificial
  Synthetic oligonucleotide
tttcgctcaccattaccaactgactgtcggtagaagaacctgaccccacacggcgaca

SEQ ID NO: 484565 - DNA, 60 bp, Artificial
  Synthetic oligonucleotide
tttcgctcgtattgagcatgatgaagcagcacgcaaggaagaagctgttttcctcgaggg

SEQ ID NO: 484566 - DNA, 59 bp, Artificial
  Synthetic oligonucleotide
tttcgctctctagtcctgttctgagtataacaatccaggtttttgccaagaatgtcaaa

SEQ ID NO: 484567 - DNA, 60 bp, Artificial
  Synthetic oligonucleotide
tttcgctgcctgcatgaagaccttggagttctcacctcaatgtttggaatggtgtttgag

SEQ ID NO: 484568 - DNA, 50 bp, Artificial
  Synthetic oligonucleotide
tttcgctgggagtaacgcctgtaaaactactgtgcaggcgggagcattac

SEQ ID NO: 484569 - DNA, 55 bp, Artificial
  Synthetic oligonucleotide
tttcgcttcccgtacttaggattgacggagaagtctcgctgagctccgacgaagc

SEQ ID NO: 484570 - DNA, 57 bp, Artificial
  Synthetic oligonucleotide
tttcggaaatgactaattcattatcagacgcagcatcatcagcatcaagaagcgttt

SEQ ID NO: 484571 - DNA, 59 bp, Artificial
  Synthetic oligonucleotide
tttcggaagggtatgttagagggtatccgtgaagcaatgagatattataaagatctgag

SEQ ID NO: 484572 - DNA, 58 bp, Artificial
  Synthetic oligonucleotide
tttcggagccatcgcaggtttcatcgaagggggatggactggaatggtagatgggtgg

SEQ ID NO: 484573 - DNA, 56 bp, Artificial
  Synthetic oligonucleotide
tttcggatggagggccaaacttatacaatatccggaatctccacattccggaagtc

SEQ ID NO: 484574 - DNA, 55 bp, Artificial
  Synthetic oligonucleotide
tttcggcaattcaatttcggcacgtaaaacggcattctcaaaggattcgtaagcg

SEQ ID NO: 484575 - DNA, 60 bp, Artificial
  Synthetic oligonucleotide
tttcggcatgcacaacagatttgcacgggtgacacctcaaggccttgtagcagccatcaa

SEQ ID NO: 484576 - DNA, 54 bp, Artificial
  Synthetic oligonucleotide
tttcggccaagactcaacacaagggttcggcaaagaatcacaacttataccctt

SEQ ID NO: 484577 - DNA, 55 bp, Artificial
  Synthetic oligonucleotide
tttcggccaagcaatttccgtcttctggacggtcgcactcaaaccgattgaaggg

SEQ ID NO: 484578 - DNA, 52 bp, Artificial
  Synthetic oligonucleotide
tttcggcccctacccccaaggttgctcagccggtccccacctgcgaaattac

SEQ ID NO: 484579 - DNA, 59 bp, Artificial
  Synthetic oligonucleotide
tttcggctactgtttcaaatttatgcaaggtgctaaaggatgtctatggtgccgaccca

SEQ ID NO: 484580 - DNA, 58 bp, Artificial
  Synthetic oligonucleotide
tttcggctcgacagcttcccgaaacttggttatggcgaatatgtgttcaaggctcggc

SEQ ID NO: 484581 - DNA, 60 bp, Artificial
  Synthetic oligonucleotide
tttcggctctatttgcctctgccttgacggcttatatttctacacgcgtacgtcatgaac

SEQ ID NO: 484582 - DNA, 57 bp, Artificial
  Synthetic oligonucleotide
tttcggctcttttaacgtttgcgtgcaatgtcctgtgggaaagaggctacgaagaca

SEQ ID NO: 484583 - DNA, 51 bp, Artificial
  Synthetic oligonucleotide
tttcgggaaattccctatttacacgataccagacacacttggtccctggag

SEQ ID NO: 484584 - DNA, 60 bp, Artificial
  Synthetic oligonucleotide
tttcgggaactgatgaggatgtggtagtacttgatagtcaaatagagcagggcaattccc

SEQ ID NO: 484585 - DNA, 60 bp, Artificial
  Synthetic oligonucleotide
tttcgggaatcgtggtctagcgacgaatcgtactcaactgtcatcactactatcgagctc

SEQ ID NO: 484586 - DNA, 54 bp, Artificial
  Synthetic oligonucleotide
tttcgggccaggattcaccccaccacacggaggtattttggggtggagccctca

SEQ ID NO: 484587 - DNA, 59 bp, Artificial
  Synthetic oligonucleotide
tttcgggctacaccgcttttacatctacatctatagttcgtgatgtttcttcgtgtcaa

SEQ ID NO: 484588 - DNA, 48 bp, Artificial
  Synthetic oligonucleotide
tttcggggatagggggggtttgtgtacgggggcccgcccggtaattca

SEQ ID NO: 484589 - DNA, 53 bp, Artificial
  Synthetic oligonucleotide
tttcggggctccggtcctgttggcaggtttggtcaaggtcgcctcgagtttct

SEQ ID NO: 484590 - DNA, 59 bp, Artificial
  Synthetic oligonucleotide
tttcggtacgaagtaccgtctgtggattctcgatgggtcccatgtcctcctgctgcttg

SEQ ID NO: 484591 - DNA, 55 bp, Artificial
  Synthetic oligonucleotide
tttcggtgattcccacgtctggggacgtcgtggtatgcgccacggacgccctcat

SEQ ID NO: 484592 - DNA, 55 bp, Artificial
  Synthetic oligonucleotide
tttcgtaacctggcctagtcgatgcgctgcacacgcgccagaacgcctggctcct

SEQ ID NO: 484593 - DNA, 57 bp, Artificial
  Synthetic oligonucleotide
tttcgtacgcaaacaactccttgccatcgcgactaaatcgaaaaatgaagtctgtgg

SEQ ID NO: 484594 - DNA, 59 bp, Artificial
  Synthetic oligonucleotide
tttcgtagtcattttcgacttaatgatacaaacgttataaatgcaggcaatcgagacta

SEQ ID NO: 484595 - DNA, 55 bp, Artificial
  Synthetic oligonucleotide
tttcgtagtggtgcgtgtgccaaaacacgtgtggtccaaactaggagtgaaagcg

SEQ ID NO: 484596 - DNA, 50 bp, Artificial
  Synthetic oligonucleotide
tttcgtagttcccgtgcataataagctcgtcatggataccatcgcggcta

SEQ ID NO: 484597 - DNA, 60 bp, Artificial
  Synthetic oligonucleotide
tttcgtccgaacccatgcgcctccatcgagataacgtcatgctgtctacggaaccagact

SEQ ID NO: 484598 - DNA, 55 bp, Artificial
  Synthetic oligonucleotide
tttcgtcctccgtgatggactgtctatttcgctcacttgagctatcgcgccccga

SEQ ID NO: 484599 - DNA, 58 bp, Artificial
  Synthetic oligonucleotide
tttcgtcttactccttactgcagcccctgagccgtctccaatgccttatgtcccgtac

SEQ ID NO: 484600 - DNA, 55 bp, Artificial
  Synthetic oligonucleotide
tttcgtgacctgaggatggcagcgttcaaaggagatgattcagtggtcctctgca

SEQ ID NO: 484601 - DNA, 56 bp, Artificial
  Synthetic oligonucleotide
tttcgtgcctcccgagagtggcacaaaatttgggctaccactattccccagattta

SEQ ID NO: 484602 - DNA, 55 bp, Artificial
  Synthetic oligonucleotide
tttcgtggcccggcctgagtccaaaagccctgatcgttttggactttttggcgca

SEQ ID NO: 484603 - DNA, 55 bp, Artificial
  Synthetic oligonucleotide
tttcgtgtacagtgatgtggatcaagttcaatcaggtgattccgacttagatgct

SEQ ID NO: 484604 - DNA, 60 bp, Artificial
  Synthetic oligonucleotide
tttcgtgtctccttccgtcaatctcatgtcgtgtatctctatcacgacatgaccaacagc

SEQ ID NO: 484605 - DNA, 55 bp, Artificial
  Synthetic oligonucleotide
tttcgttacacttgggagtgagaatggctggacccaagggaagcgccaacacgca

SEQ ID NO: 484606 - DNA, 53 bp, Artificial
  Synthetic oligonucleotide
tttcgttaggagcgctgtgcatgcggtgacacgtgccgaacactgtgggctac

SEQ ID NO: 484607 - DNA, 50 bp, Artificial
  Synthetic oligonucleotide
tttcgttccaagggttatcggtggttccgttaaatccttgacgaagttcg

SEQ ID NO: 484608 - DNA, 53 bp, Artificial
  Synthetic oligonucleotide
tttcgttccgagaaaacagctttcagttaccaaaacagctttcggctacaaaa

SEQ ID NO: 484609 - DNA, 55 bp, Artificial
  Synthetic oligonucleotide
tttcgttgctagtgcagcagcctgcaagtattccagtattggcactggcgtggtg

SEQ ID NO: 484610 - DNA, 57 bp, Artificial
  Synthetic oligonucleotide
tttcgttgtcatgggaggaatattcggcaatcctaatcaagctattaacaagttaac

SEQ ID NO: 484611 - DNA, 57 bp, Artificial
  Synthetic oligonucleotide
tttcgtttagatatggcaatggtgtttggataggaagaactaaaagtattagctcta

SEQ ID NO: 484612 - DNA, 58 bp, Artificial
  Synthetic oligonucleotide
tttctaaagttgcttatattcataaagaggttaatcaaaatactctcagtaccattga

SEQ ID NO: 484613 - DNA, 53 bp, Artificial
  Synthetic oligonucleotide
tttctaactgacgacgccagattggtacgattcgatgattatcggaacagacc

SEQ ID NO: 484614 - DNA, 59 bp, Artificial
  Synthetic oligonucleotide
tttctaaggcagaaaagccaatagagatactgtttgccaatcgacttaaggagatacta

SEQ ID NO: 484615 - DNA, 54 bp, Artificial
  Synthetic oligonucleotide
tttctaagttttcacaaggtgatacactattgtttttcgggccacttgaaggcg

SEQ ID NO: 484616 - DNA, 55 bp, Artificial
  Synthetic oligonucleotide
tttctaataagggtagagttaagtctgttggcagaattgttcatcgtaaagatgg

SEQ ID NO: 484617 - DNA, 55 bp, Artificial
  Synthetic oligonucleotide
tttctacaacgctgttggaattccccaaagacaaagacctgaatttgaagaagct

SEQ ID NO: 484618 - DNA, 55 bp, Artificial
  Synthetic oligonucleotide
tttctacatcaggattatggtaaaacttaatccgcagtgcttacttatgtcgccg

SEQ ID NO: 484619 - DNA, 60 bp, Artificial
  Synthetic oligonucleotide
tttctacccaagaatatgaagtcatctatgaatgtcggggaagagagaggatacaagtat

SEQ ID NO: 484620 - DNA, 55 bp, Artificial
  Synthetic oligonucleotide
tttctacccttgagaacggcattcaactccctaatttccctcttgattgtgttca

SEQ ID NO: 484621 - DNA, 58 bp, Artificial
  Synthetic oligonucleotide
tttctacgaaggcacaaccgatcgtaaatggcaaccggcacccgaagatggcgcagag

SEQ ID NO: 484622 - DNA, 53 bp, Artificial
  Synthetic oligonucleotide
tttctacgcgtgattgcatgaaatggcctgatatatttggcaacgagaataat

SEQ ID NO: 484623 - DNA, 52 bp, Artificial
  Synthetic oligonucleotide
tttctacggctacccagaccttcttaggtacaacagtggggggggttatgtg

SEQ ID NO: 484624 - DNA, 55 bp, Artificial
  Synthetic oligonucleotide
tttctactgtaatacaacgaagctgtttactggtactttgaatagcactgggact

SEQ ID NO: 484625 - DNA, 60 bp, Artificial
  Synthetic oligonucleotide
tttctagattgtacgggagctcttcactactcgctgcgtcgagagtgtacgagactctcc

SEQ ID NO: 484626 - DNA, 56 bp, Artificial
  Synthetic oligonucleotide
tttctagcagtatcgaccagttgtttcttaaggtacaacaagtggtgtatactagg

SEQ ID NO: 484627 - DNA, 56 bp, Artificial
  Synthetic oligonucleotide
tttctagggcccgaattgacgcgcgaattgacttcgaatctggacggattaagaag

SEQ ID NO: 484628 - DNA, 55 bp, Artificial
  Synthetic oligonucleotide
tttctagtccggctaaggagaagtgcaagctactagatgcaagcgtctacggtaa

SEQ ID NO: 484629 - DNA, 60 bp, Artificial
  Synthetic oligonucleotide
tttctagtctgctttccgtcaacgcaaagagactattactaggcatgtgtataataccac

SEQ ID NO: 484630 - DNA, 56 bp, Artificial
  Synthetic oligonucleotide
tttctagtggtgctaatattggttctcgttcgcagagtttgactcgtggtcgtagt

SEQ ID NO: 484631 - DNA, 55 bp, Artificial
  Synthetic oligonucleotide
tttctatctcaccaacgcctgcgcgcagggaatgctcaacggcacgggtctcgcc

SEQ ID NO: 484632 - DNA, 50 bp, Artificial
  Synthetic oligonucleotide
tttctatctggagctgtataccaagcacaaaggtctgtgttatgacgcct

SEQ ID NO: 484633 - DNA, 55 bp, Artificial
  Synthetic oligonucleotide
tttctatgatctcaaaaccgatgcgaatgtactacaagccgtgttcaccgcaatg

SEQ ID NO: 484634 - DNA, 60 bp, Artificial
  Synthetic oligonucleotide
tttctatgggattgcgcaatcaaattcaacggagagcacgtactatcatgccattaaata

SEQ ID NO: 484635 - DNA, 60 bp, Artificial
  Synthetic oligonucleotide
tttctatgggccggcgagcacagggaaaaccaatctcgctaaggccatctgccacgcagt

SEQ ID NO: 484636 - DNA, 60 bp, Artificial
  Synthetic oligonucleotide
tttctatgttgaattgatcagaggcaggccaaaagagagtagtgtattgtggacgtccaa

SEQ ID NO: 484637 - DNA, 56 bp, Artificial
  Synthetic oligonucleotide
tttctattgacggatgagttgggtaacacattctccgtccccgatcctttacgtga

SEQ ID NO: 484638 - DNA, 58 bp, Artificial
  Synthetic oligonucleotide
tttctatttccgagtccacatctgattgggccgttcctatcgtacttctggaagccca

SEQ ID NO: 484639 - DNA, 56 bp, Artificial
  Synthetic oligonucleotide
tttctatttgtctcataattctgtaactacggttgccgtccacccagtcttttaca

SEQ ID NO: 484640 - DNA, 57 bp, Artificial
  Synthetic oligonucleotide
tttctcaaagccgttgaaaattggctcaatagtaccgcgggtctggactgtttatga

SEQ ID NO: 484641 - DNA, 55 bp, Artificial
  Synthetic oligonucleotide
tttctcaacgcgccgctaatgaacgcagcatcgctgccactaaggtcgccggctc

SEQ ID NO: 484642 - DNA, 55 bp, Artificial
  Synthetic oligonucleotide
tttctcaataaaccggtccgcttagttgtcggagaaagagagcataacggcaaaa

SEQ ID NO: 484643 - DNA, 59 bp, Artificial
  Synthetic oligonucleotide
tttctcaccctttgcttgagtgacaattcgcttaacagtgcgtgactgtaaacgtagta

SEQ ID NO: 484644 - DNA, 59 bp, Artificial
  Synthetic oligonucleotide
tttctcacgactgacaatgaggtctcagtgcccatactgcccgggtttcaaccaacgcc

SEQ ID NO: 484645 - DNA, 57 bp, Artificial
  Synthetic oligonucleotide
tttctcacgatacgtcacatccgattaacttacaacgtcattttcccacggtcacac

SEQ ID NO: 484646 - DNA, 57 bp, Artificial
  Synthetic oligonucleotide
tttctcacggtacgtgatatcccactaacttgcaacgtcattttcccacggtcgcac

SEQ ID NO: 484647 - DNA, 55 bp, Artificial
  Synthetic oligonucleotide
tttctcactcgacaacgggctcaggccagctcctccgctcccctaccagccaaga

SEQ ID NO: 484648 - DNA, 55 bp, Artificial
  Synthetic oligonucleotide
tttctcagaactgctaacatacgttgactatgaatggcagagggcagcgatcggc

SEQ ID NO: 484649 - DNA, 59 bp, Artificial
  Synthetic oligonucleotide
tttctcagaattacccaacgttacgcttgcaaaattatgcgcactcaattgtaaagctc

SEQ ID NO: 484650 - DNA, 56 bp, Artificial
  Synthetic oligonucleotide
tttctcagatgtcaaaagaggtaacggccagaattgagccctttcttaaaacaaca

SEQ ID NO: 484651 - DNA, 58 bp, Artificial
  Synthetic oligonucleotide
tttctcaggcactggtgtgaaacgttcctcgaagatctaccaaactgcccaactcgcg

SEQ ID NO: 484652 - DNA, 60 bp, Artificial
  Synthetic oligonucleotide
tttctcaggtcatatgacatatcaactagatagatatgttgatattttacgtatgaaccc

SEQ ID NO: 484653 - DNA, 60 bp, Artificial
  Synthetic oligonucleotide
tttctcatctacagcgtatggaccatggatgttctacggctagacagggtgtttgcgata

SEQ ID NO: 484654 - DNA, 55 bp, Artificial
  Synthetic oligonucleotide
tttctcattcaccggagaggagatggccactaaagcagattacacccttgatgag

SEQ ID NO: 484655 - DNA, 57 bp, Artificial
  Synthetic oligonucleotide
tttctccaaccgatccttcactaactgtcgccactcctaattaatgtccaatggctt

SEQ ID NO: 484656 - DNA, 58 bp, Artificial
  Synthetic oligonucleotide
tttctccaaggacaactcagtccggctctcggctggtgggagcatttgggtaacaaga

SEQ ID NO: 484657 - DNA, 51 bp, Artificial
  Synthetic oligonucleotide
tttctccagaacaggccagagccaacagccccactcgtggagcaagagccg

SEQ ID NO: 484658 - DNA, 57 bp, Artificial
  Synthetic oligonucleotide
tttctcccagtacttcgacagagtggtttcaaatcaaacctcagtgacgagtgggaa

SEQ ID NO: 484659 - DNA, 60 bp, Artificial
  Synthetic oligonucleotide
tttctcccttaatatagacaaggccgatgatttagagcctgagttgattgcctcggcata

SEQ ID NO: 484660 - DNA, 60 bp, Artificial
  Synthetic oligonucleotide
tttctcccttaatatattgagggccgcatctttggaccctgaattgattgcctcggcata

SEQ ID NO: 484661 - DNA, 60 bp, Artificial
  Synthetic oligonucleotide
tttctcccttaatatattgagtgccgatgacttagatcctgagttgattgcctcggcata

SEQ ID NO: 484662 - DNA, 52 bp, Artificial
  Synthetic oligonucleotide
tttctcccttattattgctaaagctgcttcagccgaacccgcatttaaggcc

SEQ ID NO: 484663 - DNA, 54 bp, Artificial
  Synthetic oligonucleotide
tttctccgaaactgaagacgtcacgccactggttggtaagcttaattccacggt

SEQ ID NO: 484664 - DNA, 55 bp, Artificial
  Synthetic oligonucleotide
tttctccgttaaggagagttggatccgccacgtgaaactggcgggagagccttgc

SEQ ID NO: 484665 - DNA, 50 bp, Artificial
  Synthetic oligonucleotide
tttctcgcacgagaaaagaagccaaggttgtgcaccagggaagagtttaa

SEQ ID NO: 484666 - DNA, 58 bp, Artificial
  Synthetic oligonucleotide
tttctcgcgataggtcttacgtttctaagtctggctttaatcgtgctgtacgatctaa

SEQ ID NO: 484667 - DNA, 52 bp, Artificial
  Synthetic oligonucleotide
tttctcggaaagtaacgatgggttgcccctaaggggtccgtcgagttgcgat

SEQ ID NO: 484668 - DNA, 54 bp, Artificial
  Synthetic oligonucleotide
tttctcggctccgtacttggttgtcaactcctgaaaagtaccgaggccgtgatg

SEQ ID NO: 484669 - DNA, 54 bp, Artificial
  Synthetic oligonucleotide
tttctcgggttcttgggagcagccggaagcactatgggcgcggcgtcaatggcg

SEQ ID NO: 484670 - DNA, 60 bp, Artificial
  Synthetic oligonucleotide
tttctcgtgtttatggggtttctcctgggctcgttcataacctgattggcatgctacaga

SEQ ID NO: 484671 - DNA, 51 bp, Artificial
  Synthetic oligonucleotide
tttctcgtttaagcggttcgagtcaagttgattggacacctgaactagcga

SEQ ID NO: 484672 - DNA, 60 bp, Artificial
  Synthetic oligonucleotide
tttctctcaaacggtgaatgagagaacgataattgatatatttacgatttgcagataccg

SEQ ID NO: 484673 - DNA, 59 bp, Artificial
  Synthetic oligonucleotide
tttctctcgtctgcaagattgggttgttgttccggctggtccgatggctgacttctccc

SEQ ID NO: 484674 - DNA, 58 bp, Artificial
  Synthetic oligonucleotide
tttctctctggcctttaggtcgttatactaacattgctggtctcgtcaccccctatga

SEQ ID NO: 484675 - DNA, 60 bp, Artificial
  Synthetic oligonucleotide
tttctctgagtatatacccgttagcactcaatggcaactcatgttttggacctagtgtct

SEQ ID NO: 484676 - DNA, 57 bp, Artificial
  Synthetic oligonucleotide
tttctcttattgttgttggcaacaatcatctattccgtttgtaacatgaaccgggag

SEQ ID NO: 484677 - DNA, 60 bp, Artificial
  Synthetic oligonucleotide
tttctcttgtgtcatgtggcgcagagaattcagggacggccgtggtacgaattactggga

SEQ ID NO: 484678 - DNA, 52 bp, Artificial
  Synthetic oligonucleotide
tttctctttccaagattcttttactagacataatttttgtccttaaaaccag

SEQ ID NO: 484679 - DNA, 59 bp, Artificial
  Synthetic oligonucleotide
tttctgaatgcatcactccaaatggaagcattcccaatgataaaccctttcaaaacgta

SEQ ID NO: 484680 - DNA, 54 bp, Artificial
  Synthetic oligonucleotide
tttctgaattgtgctttacccttgaattggatgagggcgtggagatgcagagac

SEQ ID NO: 484681 - DNA, 60 bp, Artificial
  Synthetic oligonucleotide
tttctgaccagttgctgatgagaaatcacctaagagacctgatgggggtaccatactgca

SEQ ID NO: 484682 - DNA, 52 bp, Artificial
  Synthetic oligonucleotide
tttctgaccttgagctcaacataagtgaacccacaagtcatggctcctttac

SEQ ID NO: 484683 - DNA, 56 bp, Artificial
  Synthetic oligonucleotide
tttctgagggatggctcgtgtgcgtgaagttttctcatccatcaccgactcctcgc

SEQ ID NO: 484684 - DNA, 60 bp, Artificial
  Synthetic oligonucleotide
tttctgatacaccctatcgagtgaataggtacacgaagtcagcacatcaaaaaggcgagt

SEQ ID NO: 484685 - DNA, 60 bp, Artificial
  Synthetic oligonucleotide
tttctgatgatgatagcacatggagatttcactttgacagcaccatggtgcacatctgac

SEQ ID NO: 484686 - DNA, 56 bp, Artificial
  Synthetic oligonucleotide
tttctgcacactgcaaggaccatactcaggagaacctaaacctaagaccaggatgc

SEQ ID NO: 484687 - DNA, 60 bp, Artificial
  Synthetic oligonucleotide
tttctgcattcatgttcagtgcaatgcgagcaagttccatcagggtactctacttgttgt

SEQ ID NO: 484688 - DNA, 60 bp, Artificial
  Synthetic oligonucleotide
tttctgccaacaatacggtgggagatcaacctcttgccacgtaccaggtcacactgtcat

SEQ ID NO: 484689 - DNA, 60 bp, Artificial
  Synthetic oligonucleotide
tttctgccctttgcaccttttgcctcagtttgtctagatcgctagagagctccataagtt

SEQ ID NO: 484690 - DNA, 60 bp, Artificial
  Synthetic oligonucleotide
tttctgccgacccatgagactttatgtcaatcagtggaagcatgtgctgcaagcgtactt

SEQ ID NO: 484691 - DNA, 60 bp, Artificial
  Synthetic oligonucleotide
tttctgcctctcgcaaaggacttgttagctccaatggccagaaagttttatgataactca

SEQ ID NO: 484692 - DNA, 53 bp, Artificial
  Synthetic oligonucleotide
tttctgctcttttttaggtctgcaggagcaagcctctgaaaagcctccgaaaa

SEQ ID NO: 484693 - DNA, 55 bp, Artificial
  Synthetic oligonucleotide
tttctgctggtggggacatttgggtaacaagggaaccttatgtgtcatgcgaccc

SEQ ID NO: 484694 - DNA, 55 bp, Artificial
  Synthetic oligonucleotide
tttctggacattgttcgtttacataggcctgccttaacctcgcgtaaaggaacag

SEQ ID NO: 484695 - DNA, 60 bp, Artificial
  Synthetic oligonucleotide
tttctggatgtgctccaatggatcattgcaatgcaggatttgcatttaaacttgtgagtt

SEQ ID NO: 484696 - DNA, 55 bp, Artificial
  Synthetic oligonucleotide
tttctggatgtgttctaatgggtcattgcaatgcagagtgtgcatttaaggctgg

SEQ ID NO: 484697 - DNA, 57 bp, Artificial
  Synthetic oligonucleotide
tttctggccccgtcaaagtccatgagggggtcgtcacccaagtcagtctgggcttga

SEQ ID NO: 484698 - DNA, 55 bp, Artificial
  Synthetic oligonucleotide
tttctggcccctttgaatttggggattattgccctagtggttctcatagacgccg

SEQ ID NO: 484699 - DNA, 59 bp, Artificial
  Synthetic oligonucleotide
tttctggcgcctacacaggccttcctatcgataaattcagagctctcggtcttaacacc

SEQ ID NO: 484700 - DNA, 60 bp, Artificial
  Synthetic oligonucleotide
tttctgggacatttgctgttcgtaaatctgacttgatgaccgaagtcgtgcaaacaaatg

SEQ ID NO: 484701 - DNA, 55 bp, Artificial
  Synthetic oligonucleotide
tttctgggtgatcctcaatctattcttaagcaaaccactcccgtgttgagagacc

SEQ ID NO: 484702 - DNA, 60 bp, Artificial
  Synthetic oligonucleotide
tttctggtaacgacatagtaacagcagcacatgtcgttggtaacaacacttttgtgagtg

SEQ ID NO: 484703 - DNA, 59 bp, Artificial
  Synthetic oligonucleotide
tttctggtcacggaacttcggaagtcgcgaggggctcttcatagtgggtcatcatatta

SEQ ID NO: 484704 - DNA, 54 bp, Artificial
  Synthetic oligonucleotide
tttctggtcctttcgaatttggggattattgccctagtgggtcccacagacgcc

SEQ ID NO: 484705 - DNA, 60 bp, Artificial
  Synthetic oligonucleotide
tttctggtctatccctgattatggttccaacttggctgaagcatcacagcttgccccagt

SEQ ID NO: 484706 - DNA, 55 bp, Artificial
  Synthetic oligonucleotide
tttctgtagcaggcatatacctagtctaccttaagatctcagcccacgttcgcgc

SEQ ID NO: 484707 - DNA, 60 bp, Artificial
  Synthetic oligonucleotide
tttctgtccttcgtgctaatgatgtgctatggctttcacttacagcagctgagtatgatc

SEQ ID NO: 484708 - DNA, 55 bp, Artificial
  Synthetic oligonucleotide
tttctgtggattagacaatgaacctggatcgggaaattggccggatggttctaac

SEQ ID NO: 484709 - DNA, 56 bp, Artificial
  Synthetic oligonucleotide
tttctgtgggctaacaatagtgaagtcaaaaaccgggacatatgttggtgtcccaa

SEQ ID NO: 484710 - DNA, 58 bp, Artificial
  Synthetic oligonucleotide
tttctgtgttaagtctgtttacattttaggcaaagtatggatggacgacaacatcaag

SEQ ID NO: 484711 - DNA, 55 bp, Artificial
  Synthetic oligonucleotide
tttctgttggggcgtaacgcattgatgtggttcttccgatggtggaccttgtggc

SEQ ID NO: 484712 - DNA, 55 bp, Artificial
  Synthetic oligonucleotide
tttctgtttgtgagtggcaaacttcagaaggctcatataacggaacttgtggtat

SEQ ID NO: 484713 - DNA, 58 bp, Artificial
  Synthetic oligonucleotide
tttcttaaacagaagggagtgcttggagcgcctgaattgtttccagagcggctgcttt

SEQ ID NO: 484714 - DNA, 55 bp, Artificial
  Synthetic oligonucleotide
tttcttaacctatccatgacccccacctatagaacacttgtgtataattacccta

SEQ ID NO: 484715 - DNA, 60 bp, Artificial
  Synthetic oligonucleotide
tttcttagacacgcacctcaccgcggccagcatacacccgggcattatgatgctcagcaa

SEQ ID NO: 484716 - DNA, 57 bp, Artificial
  Synthetic oligonucleotide
tttcttaggcacgttatgaatttacgcgatgtcaaacgcatatgcgatctgaatgtg

SEQ ID NO: 484717 - DNA, 55 bp, Artificial
  Synthetic oligonucleotide
tttcttagtgatggaggtgttcttggcctcaatactgaacgttctgatcagtacg

SEQ ID NO: 484718 - DNA, 58 bp, Artificial
  Synthetic oligonucleotide
tttcttagttagtgagcttaagagaggccgcaatacggcaggtgggagctccacgtat

SEQ ID NO: 484719 - DNA, 55 bp, Artificial
  Synthetic oligonucleotide
tttcttcaacgcatgctgtagtgccgggtcgcggatatcaaatgccctcagaacg

SEQ ID NO: 484720 - DNA, 60 bp, Artificial
  Synthetic oligonucleotide
tttcttcacatcgtcacgtatgggcccgattgtcgtacatggcaatgccggaattggtcg

SEQ ID NO: 484721 - DNA, 60 bp, Artificial
  Synthetic oligonucleotide
tttcttcagatcgcagaaagcagcttttgagctgtcagtctctgagaagttcggccatag

SEQ ID NO: 484722 - DNA, 59 bp, Artificial
  Synthetic oligonucleotide
tttcttcagtagattgaactggttgactaagtcaggaaacgcatatcctgtattgaacg

SEQ ID NO: 484723 - DNA, 50 bp, Artificial
  Synthetic oligonucleotide
tttcttccccccattagaggaacaataaactgtatctcgaatatcacagg

SEQ ID NO: 484724 - DNA, 50 bp, Artificial
  Synthetic oligonucleotide
tttcttcgcgagtcgctagtcgcatgcgaactagctataataaatactat

SEQ ID NO: 484725 - DNA, 60 bp, Artificial
  Synthetic oligonucleotide
tttcttcgtgaatcattagttgcatgtgaactagctataataaatactatcgtttatcca

SEQ ID NO: 484726 - DNA, 60 bp, Artificial
  Synthetic oligonucleotide
tttcttctcaactacaaaccagctcaacaagatatatctaatacacgagcaaccagagct

SEQ ID NO: 484727 - DNA, 60 bp, Artificial
  Synthetic oligonucleotide
tttcttctcaagagtgtttataagcctgacttgttagagaggatcatagagcatgaacca

SEQ ID NO: 484728 - DNA, 59 bp, Artificial
  Synthetic oligonucleotide
tttcttctgataaaccacctcttagtgcacgttatgttaagtacgtagattctagtgca

SEQ ID NO: 484729 - DNA, 52 bp, Artificial
  Synthetic oligonucleotide
tttcttctgtgaaagtcaaactaactgagccagagaagcttattatggaatg

SEQ ID NO: 484730 - DNA, 60 bp, Artificial
  Synthetic oligonucleotide
tttcttcttgcacatgcttatcataatttaaaggatgtgagatatcaggcattacaggca

SEQ ID NO: 484731 - DNA, 57 bp, Artificial
  Synthetic oligonucleotide
tttcttgaaacggaggaaacgtatcagcccggtcgttggtttatgcgagctgcgcag

SEQ ID NO: 484732 - DNA, 55 bp, Artificial
  Synthetic oligonucleotide
tttcttgcttcgacccactttgagaggacatcctcccgtcctccccttcgttctc

SEQ ID NO: 484733 - DNA, 52 bp, Artificial
  Synthetic oligonucleotide
tttcttggacggtccctctcgaatgggggaagaatctttccaccgtaaatcc

SEQ ID NO: 484734 - DNA, 57 bp, Artificial
  Synthetic oligonucleotide
tttcttgggaagcccaacttcatttatagcgctgacgcttttaatgggtctctcaag

SEQ ID NO: 484735 - DNA, 55 bp, Artificial
  Synthetic oligonucleotide
tttcttggtgcgtgatcgtcgacctacgggtgcgcctctagatttcggcgatgtg

SEQ ID NO: 484736 - DNA, 55 bp, Artificial
  Synthetic oligonucleotide
tttcttgtgaacaaacacgcaattgagaccgttgaagaacgattctcggttgcag

SEQ ID NO: 484737 - DNA, 52 bp, Artificial
  Synthetic oligonucleotide
tttcttgtgtgtgatcagtttaatggagctggttactttagaaatggcagtc

SEQ ID NO: 484738 - DNA, 52 bp, Artificial
  Synthetic oligonucleotide
tttctttagccggtttggcacgacactgcgtaaccaagacggcaatttccaa

SEQ ID NO: 484739 - DNA, 58 bp, Artificial
  Synthetic oligonucleotide
tttctttggaaggggcgttcaaggcttctgcggcagcgtcgttagctgtctggcaacc

SEQ ID NO: 484740 - DNA, 58 bp, Artificial
  Synthetic oligonucleotide
tttctttggcgagactctgtgtcgcttaaattctccgcgggtaataacattctgatcc

SEQ ID NO: 484741 - DNA, 55 bp, Artificial
  Synthetic oligonucleotide
tttctttggtgggtttgcaagaaaaatgaggcgactcgacaagaataaagtcgtc

SEQ ID NO: 484742 - DNA, 60 bp, Artificial
  Synthetic oligonucleotide
tttctttttcccagtaccagccccacatgaagctagtgcaagatcaacactggctagaat

SEQ ID NO: 484743 - DNA, 60 bp, Artificial
  Synthetic oligonucleotide
tttgaaaacaccaagctatctgctgttgaacaagagcctatgcaatgttgaagggtgggt

SEQ ID NO: 484744 - DNA, 53 bp, Artificial
  Synthetic oligonucleotide
tttgaaaacgtttgttaaggcggagaagattaacaccactaggaagcctgacc

SEQ ID NO: 484745 - DNA, 55 bp, Artificial
  Synthetic oligonucleotide
tttgaaaactcatgtattgaaacgatggaggttgttcagcaaacacgtgtagaca

SEQ ID NO: 484746 - DNA, 58 bp, Artificial
  Synthetic oligonucleotide
tttgaaaagattacgaatttttgatgtaccacgagtaccagatgaccaaatgtacaga

SEQ ID NO: 484747 - DNA, 59 bp, Artificial
  Synthetic oligonucleotide
tttgaaacagagagtttgataagagatcattttgacacacacgtggcaatggcggtcta

SEQ ID NO: 484748 - DNA, 60 bp, Artificial
  Synthetic oligonucleotide
tttgaaacagtggccaatgcagagaaattagctataactgatgttgtcgatggagtcaat

SEQ ID NO: 484749 - DNA, 55 bp, Artificial
  Synthetic oligonucleotide
tttgaaacatctgatagaatgaggatacacaggcagtctggattctgccctgggt

SEQ ID NO: 484750 - DNA, 55 bp, Artificial
  Synthetic oligonucleotide
tttgaaagacgcagtccgtactctcacacaaaacatgaatactatccagtcggat

SEQ ID NO: 484751 - DNA, 50 bp, Artificial
  Synthetic oligonucleotide
tttgaaagaggcctccggggtatccggaggtcctttttcgacccaaccca

SEQ ID NO: 484752 - DNA, 60 bp, Artificial
  Synthetic oligonucleotide
tttgaaagccgggtgcatgcatggccattttccagcacaggttcagctggtatggcatgc

SEQ ID NO: 484753 - DNA, 54 bp, Artificial
  Synthetic oligonucleotide
tttgaaaggggtctcctagagagcttggccgtcgggccttataccccgacttgc

SEQ ID NO: 484754 - DNA, 53 bp, Artificial
  Synthetic oligonucleotide
tttgaaagtcatattgagagcagaaagccatacaaggaattaaggcttgaagt

SEQ ID NO: 484755 - DNA, 52 bp, Artificial
  Synthetic oligonucleotide
tttgaaatggggggctgggccctgatgcccagtccttcctttccccttccgg

SEQ ID NO: 484756 - DNA, 60 bp, Artificial
  Synthetic oligonucleotide
tttgaacaatgtgctcgtatagctgatgttaaccgacaacaaggcatacagacctcttat

SEQ ID NO: 484757 - DNA, 60 bp, Artificial
  Synthetic oligonucleotide
tttgaacactacttgtgctgacctaatcttctgttgagtaccacttgaaccatgaaagtg

SEQ ID NO: 484758 - DNA, 60 bp, Artificial
  Synthetic oligonucleotide
tttgaacccacgcatagaaatgagatgctcgagattgctccgctaatcgaatccgtttat

SEQ ID NO: 484759 - DNA, 53 bp, Artificial
  Synthetic oligonucleotide
tttgaacgcgccccgtccggacatgttagggtaggtaggctgggtgtccgtgg

SEQ ID NO: 484760 - DNA, 60 bp, Artificial
  Synthetic oligonucleotide
tttgaactgttcagctagtacttcatctgtaccaaaccttgtcatgtctagttctgatag

SEQ ID NO: 484761 - DNA, 60 bp, Artificial
  Synthetic oligonucleotide
tttgaagaggttgcaaccactgagaagttggtgattactgatgtcgttgatggagtcaat

SEQ ID NO: 484762 - DNA, 55 bp, Artificial
  Synthetic oligonucleotide
tttgaagagttgcgtgacttgtgtcataatgcgagttatgaaaaggtgcgtgacc

SEQ ID NO: 484763 - DNA, 60 bp, Artificial
  Synthetic oligonucleotide
tttgaagataagtggtacagccaaacagatatctgcgacgttattcttgcaacagtgtat

SEQ ID NO: 484764 - DNA, 57 bp, Artificial
  Synthetic oligonucleotide
tttgaagatttagctcacggaaaggcgcaggcaggaggaaagtcttttctcgagttg

SEQ ID NO: 484765 - DNA, 52 bp, Artificial
  Synthetic oligonucleotide
tttgaagcagtacaaacaattggaaaccccttgagattaatataccacctat

SEQ ID NO: 484766 - DNA, 53 bp, Artificial
  Synthetic oligonucleotide
tttgaagcctgttttaactacgggcagtgggtcaaaaagactagggacgacta

SEQ ID NO: 484767 - DNA, 51 bp, Artificial
  Synthetic oligonucleotide
tttgaaggagcgtcccctcttttgccccaggtcccgtcgcgtcgtgtcccc

SEQ ID NO: 484768 - DNA, 56 bp, Artificial
  Synthetic oligonucleotide
tttgaagggtcaggtatgatagcaaagatcgacggcacgtacttcatgtataacag

SEQ ID NO: 484769 - DNA, 52 bp, Artificial
  Synthetic oligonucleotide
tttgaagggtgtaagttccgctcctagcaatttagtaacaaagcacgttgtt

SEQ ID NO: 484770 - DNA, 60 bp, Artificial
  Synthetic oligonucleotide
tttgaaggtgatacaccctgctgcgtgtgtacattggatcctctacttggagtatcttga

SEQ ID NO: 484771 - DNA, 60 bp, Artificial
  Synthetic oligonucleotide
tttgaagtgattaaggcaaaatttttcaacatacctgctgagatcatcgagggctacatc

SEQ ID NO: 484772 - DNA, 58 bp, Artificial
  Synthetic oligonucleotide
tttgaagtgtggtcccggtattaattcataatgcattcgttaccgttgctttatcata

SEQ ID NO: 484773 - DNA, 59 bp, Artificial
  Synthetic oligonucleotide
tttgaataacgtccttgtgtggttgaagaccctcacctttgagccatcaaccatcgctc

SEQ ID NO: 484774 - DNA, 58 bp, Artificial
  Synthetic oligonucleotide
tttgaataccctttatcacggtcctgctactcgtgaggcttcctctggatggaacaat

SEQ ID NO: 484775 - DNA, 60 bp, Artificial
  Synthetic oligonucleotide
tttgaatagttggattgcacaagtttcgatgcgtttgggagaggagtcaggagtaatatc

SEQ ID NO: 484776 - DNA, 60 bp, Artificial
  Synthetic oligonucleotide
tttgaatctcgacacgatattgttcacatgggtaaggtaatctgtatatcggatgttacg

SEQ ID NO: 484777 - DNA, 58 bp, Artificial
  Synthetic oligonucleotide
tttgaatctttgtgggatacgataacaacttcaaactatattttagcaagatcagtag

SEQ ID NO: 484778 - DNA, 52 bp, Artificial
  Synthetic oligonucleotide
tttgaatgacagagtgcggtgcttacaccccgacgctgactatgactttatt

SEQ ID NO: 484779 - DNA, 53 bp, Artificial
  Synthetic oligonucleotide
tttgaatggtatagcaacattttcaaccaagatgtcaacactcacaatgctcg

SEQ ID NO: 484780 - DNA, 60 bp, Artificial
  Synthetic oligonucleotide
tttgaattcactagctttttttatcgatatggatttgtggctaattttagcatggagctg

SEQ ID NO: 484781 - DNA, 55 bp, Artificial
  Synthetic oligonucleotide
tttgaattcgtctcgataagacgcatgcaatgagctctcacacatgtctaaattc

SEQ ID NO: 484782 - DNA, 59 bp, Artificial
  Synthetic oligonucleotide
tttgaattggcgttttaatctgagtgtgtaaattctattggttgagaatcggcgtctgc

SEQ ID NO: 484783 - DNA, 56 bp, Artificial
  Synthetic oligonucleotide
tttgaatttcccagataaacaccccattccctgtttgagccgcagcgatgggttcc

SEQ ID NO: 484784 - DNA, 59 bp, Artificial
  Synthetic oligonucleotide
tttgaatttgccttcgaactgtataagcacgtggagatgaggttccccatcttcgtgaa

SEQ ID NO: 484785 - DNA, 57 bp, Artificial
  Synthetic oligonucleotide
tttgacaaattgtatgtctggggagttcaccacccgagcacaaaccaagagcaaacc

SEQ ID NO: 484786 - DNA, 59 bp, Artificial
  Synthetic oligonucleotide
tttgacaaccgcctagcatttcatcacatggcccgcgaaccgcatccggagttttacaa

SEQ ID NO: 484787 - DNA, 56 bp, Artificial
  Synthetic oligonucleotide
tttgacaatggggtcttagacgttactggttcagacctcctttctgagaaattcaa

SEQ ID NO: 484788 - DNA, 51 bp, Artificial
  Synthetic oligonucleotide
tttgacaattgacacatcatcaagtaaagagttcttgatcagaggagccgt

SEQ ID NO: 484789 - DNA, 58 bp, Artificial
  Synthetic oligonucleotide
tttgacagaccttcttcgcttgagtcgagacttacgtccgtaagatcttcgctttgtg

SEQ ID NO: 484790 - DNA, 60 bp, Artificial
  Synthetic oligonucleotide
tttgacagagctcaaactcctcgctagatactctaacgagtgtcttgaggactctcctat

SEQ ID NO: 484791 - DNA, 55 bp, Artificial
  Synthetic oligonucleotide
tttgacagccaaccaactgtttccagcaaggacaaaatttgaaagggatatcatc

SEQ ID NO: 484792 - DNA, 60 bp, Artificial
  Synthetic oligonucleotide
tttgacagccgcctagcatttcatcacatggcccgagaggtgcatccggagtactacaaa

SEQ ID NO: 484793 - DNA, 58 bp, Artificial
  Synthetic oligonucleotide
tttgacagctcgctcactccgtacctcttgaacgctgttcttgagatgcgcttgagat

SEQ ID NO: 484794 - DNA, 60 bp, Artificial
  Synthetic oligonucleotide
tttgacagtctgtgtccagttggataggcctcttctgagagcttgagtccaacgaaacgc

SEQ ID NO: 484795 - DNA, 60 bp, Artificial
  Synthetic oligonucleotide
tttgacagtgccctagcacgaagacacatagcccgagaacgatatccagattactataaa

SEQ ID NO: 484796 - DNA, 53 bp, Artificial
  Synthetic oligonucleotide
tttgacatatcccttcaaaaatggaaattcatactgtttgaatgtccattgta

SEQ ID NO: 484797 - DNA, 55 bp, Artificial
  Synthetic oligonucleotide
tttgacatcatgaggctctctgtaacagtgaacatagtttccactgtcaggttgg

SEQ ID NO: 484798 - DNA, 56 bp, Artificial
  Synthetic oligonucleotide
tttgacatgaacatcgaggttgtttccatgtatagccagaacggcaagattaacat

SEQ ID NO: 484799 - DNA, 60 bp, Artificial
  Synthetic oligonucleotide
tttgacatgctttatggtctggcagttaaaggacaatctcatctgaggggagatactgat

SEQ ID NO: 484800 - DNA, 60 bp, Artificial
  Synthetic oligonucleotide
tttgacatggatctcccagacatcgatatgctgataggatgtaacttcatcaaagccatg

SEQ ID NO: 484801 - DNA, 55 bp, Artificial
  Synthetic oligonucleotide
tttgaccagggctggggccctatcagccatgccaacgtaagcagccccgaccaac

SEQ ID NO: 484802 - DNA, 50 bp, Artificial
  Synthetic oligonucleotide
tttgaccatgagactcgctgttgaactgtccaagtcacaaaaccgcgttt

SEQ ID NO: 484803 - DNA, 55 bp, Artificial
  Synthetic oligonucleotide
tttgaccattcaaaaggtagatcaggtctcgtgaggggtaactggttgcagggaa

SEQ ID NO: 484804 - DNA, 60 bp, Artificial
  Synthetic oligonucleotide
tttgacccaggagccatgaactacacaaaattgatactgagtgagagggaccgtcttggc

SEQ ID NO: 484805 - DNA, 55 bp, Artificial
  Synthetic oligonucleotide
tttgaccgcaatctaatgtcgtgcgtggaggcacatccgtgcgcgtttaacggcg

SEQ ID NO: 484806 - DNA, 59 bp, Artificial
  Synthetic oligonucleotide
tttgaccgcccagctgactacgcgttcttcatgaagattcgtgataaccaacctgaaaa

SEQ ID NO: 484807 - DNA, 60 bp, Artificial
  Synthetic oligonucleotide
tttgacctaatgcatgtacaaaaagtgctatcggcaagcacagtgtgtaagttgcagagt

SEQ ID NO: 484808 - DNA, 60 bp, Artificial
  Synthetic oligonucleotide
tttgacctatgtgtaagattgtggtaataatcgtccagttaatcatctctataggtagtg

SEQ ID NO: 484809 - DNA, 56 bp, Artificial
  Synthetic oligonucleotide
tttgacctgtagtaggtgtactgacattacgaataacacaagacagtgacatgtgg

SEQ ID NO: 484810 - DNA, 59 bp, Artificial
  Synthetic oligonucleotide
tttgacggcacctggaatggcaccaagtcaaatatcacttgggaaagcattaacgacac

SEQ ID NO: 484811 - DNA, 55 bp, Artificial
  Synthetic oligonucleotide
tttgacgtccatgatttacgtcgggacagccggaaaagacctgagcttaccgacc

SEQ ID NO: 484812 - DNA, 60 bp, Artificial
  Synthetic oligonucleotide
tttgacgtcggagctggatttagctccctgtatgttcggatggaaatgtgttgacctgct

SEQ ID NO: 484813 - DNA, 56 bp, Artificial
  Synthetic oligonucleotide
tttgacgtctttgagtacgtaacgaatcctgccgctattcaaccactggaggggct

SEQ ID NO: 484814 - DNA, 55 bp, Artificial
  Synthetic oligonucleotide
tttgacgtggttggaattaacatcaattccgacgaaagtgctatcatgcctcccc

SEQ ID NO: 484815 - DNA, 55 bp, Artificial
  Synthetic oligonucleotide
tttgactcaagggacctgctgggaacaaatgtacactccagggggggaggtgagg

SEQ ID NO: 484816 - DNA, 60 bp, Artificial
  Synthetic oligonucleotide
tttgactcagtgatcgactgtaatacatgtgtcacccagacagtcgacttcagcttggac

SEQ ID NO: 484817 - DNA, 58 bp, Artificial
  Synthetic oligonucleotide
tttgactctggtataatccctggcgaaaacacatactcaggttctaccttactgacta

SEQ ID NO: 484818 - DNA, 54 bp, Artificial
  Synthetic oligonucleotide
tttgactggccatgagtggtgggcaacagtgtactatggagtacctgtatggaa

SEQ ID NO: 484819 - DNA, 58 bp, Artificial
  Synthetic oligonucleotide
tttgactggccgtatatgttggcgggtttggtagctaattcttattctagattgctaa

SEQ ID NO: 484820 - DNA, 55 bp, Artificial
  Synthetic oligonucleotide
tttgactggtagtcgagtctctcgttgtttttgttcttacctcctactatattta

SEQ ID NO: 484821 - DNA, 59 bp, Artificial
  Synthetic oligonucleotide
tttgacttggagcttactttcgttatcacgagcacacaacagccgtccactacgcaaaa

SEQ ID NO: 484822 - DNA, 60 bp, Artificial
  Synthetic oligonucleotide
tttgagaaacactccagatataaatatcattatgatgctgattactcccggtgggactca

SEQ ID NO: 484823 - DNA, 57 bp, Artificial
  Synthetic oligonucleotide
tttgagaacgaaagaccatctgtcaaccaagcaagttgtccattccgaaatttctaa

SEQ ID NO: 484824 - DNA, 60 bp, Artificial
  Synthetic oligonucleotide
tttgagaacgcgatggaatatttagctatgcaagtgactcctcctctaatttggccctgt

SEQ ID NO: 484825 - DNA, 60 bp, Artificial
  Synthetic oligonucleotide
tttgagaatggcaagcgccgtatcatctggaacacgtccttgacccactacgtcgcccag

SEQ ID NO: 484826 - DNA, 58 bp, Artificial
  Synthetic oligonucleotide
tttgagacgtaggcatagcataccgaactcttccactattctccgaacccacagggac

SEQ ID NO: 484827 - DNA, 55 bp, Artificial
  Synthetic oligonucleotide
tttgagactctgtccctcaacggtctacattcgaaactacttaaagaacgcatcg

SEQ ID NO: 484828 - DNA, 60 bp, Artificial
  Synthetic oligonucleotide
tttgagactgcattgataagtgcagatgacaataaagatctgttgtaacctaatttctcg

SEQ ID NO: 484829 - DNA, 58 bp, Artificial
  Synthetic oligonucleotide
tttgagagaaacaatggtaccctaaaaatccagacgcaccatggtgaatttgtcatac

SEQ ID NO: 484830 - DNA, 50 bp, Artificial
  Synthetic oligonucleotide
tttgagagacttgatgggagtgccgtactgtaattactcaaaattctggt

SEQ ID NO: 484831 - DNA, 60 bp, Artificial
  Synthetic oligonucleotide
tttgagagagcaaccattatggcggcatttacaggaaacactgaaggcagaacttcagac

SEQ ID NO: 484832 - DNA, 54 bp, Artificial
  Synthetic oligonucleotide
tttgagagcgaacatgagcttctgttaactttggcacgaagcccgagttcaccc

SEQ ID NO: 484833 - DNA, 55 bp, Artificial
  Synthetic oligonucleotide
tttgagagctttcgggagaagttagagacgtttaaccgatggcatttttgtaata

SEQ ID NO: 484834 - DNA, 60 bp, Artificial
  Synthetic oligonucleotide
tttgagagggagccaagcaactgctgggtgagatgtgagtctgtagccccaaaatttata

SEQ ID NO: 484835 - DNA, 50 bp, Artificial
  Synthetic oligonucleotide
tttgagagtactgggaactttatagctcccgaatatgcatacaagattat

SEQ ID NO: 484836 - DNA, 55 bp, Artificial
  Synthetic oligonucleotide
tttgagagtatcactgcaaggaacgagtttgagcattaagcaaactccctcaagc

SEQ ID NO: 484837 - DNA, 60 bp, Artificial
  Synthetic oligonucleotide
tttgagagtcccaactctcaaagtgcagagcaagcgcttcccgtccatggaactgccggc

SEQ ID NO: 484838 - DNA, 60 bp, Artificial
  Synthetic oligonucleotide
tttgagataacaccgttctacacaagccaagtggtgagatatgacggctccatgcaccca

SEQ ID NO: 484839 - DNA, 55 bp, Artificial
  Synthetic oligonucleotide
tttgagatcaccttcgtagggaaccaaaacgcggtccactcgcttgcgggtgggc

SEQ ID NO: 484840 - DNA, 60 bp, Artificial
  Synthetic oligonucleotide
tttgagatcatatatggctactgattcgcttgtaaagagcaagaagataagttcacaggt

SEQ ID NO: 484841 - DNA, 57 bp, Artificial
  Synthetic oligonucleotide
tttgagatgatccttggtcccaccaccaacgtggaccaagcgccctaccagggcagg

SEQ ID NO: 484842 - DNA, 55 bp, Artificial
  Synthetic oligonucleotide
tttgagatggggagcacaatatgtaggagaagattcactgacatatcggttgggg

SEQ ID NO: 484843 - DNA, 60 bp, Artificial
  Synthetic oligonucleotide
tttgagccaatgtaacgtcagagaacgttacaaatgcgtcagactgtgcgccttcaatag

SEQ ID NO: 484844 - DNA, 58 bp, Artificial
  Synthetic oligonucleotide
tttgagccattccaagccctggttcctaaggcagcccgaggccagtacagcggctttg

SEQ ID NO: 484845 - DNA, 57 bp, Artificial
  Synthetic oligonucleotide
tttgagcgcagaacatataagagctttgagtcacctgaaggcgctacaagtgcgcct

SEQ ID NO: 484846 - DNA, 60 bp, Artificial
  Synthetic oligonucleotide
tttgagcgtaggagtcttgttgcttgtaacaatcactacctttgcatgaactgcctgaca

SEQ ID NO: 484847 - DNA, 60 bp, Artificial
  Synthetic oligonucleotide
tttgagctaactcctttctttaccactcatttaatccgtcatgatggcagtatgcaccca

SEQ ID NO: 484848 - DNA, 59 bp, Artificial
  Synthetic oligonucleotide
tttgagctacattttctgtctggctttcggccaagacctcccaagaaacgacaacagca

SEQ ID NO: 484849 - DNA, 60 bp, Artificial
  Synthetic oligonucleotide
tttgaggaaattgagctgcaagctcttgatggctctgacgcccctgttcctcggtctagt

SEQ ID NO: 484850 - DNA, 60 bp, Artificial
  Synthetic oligonucleotide
tttgaggaagccgggtatgaaataccctgccatgagcgcctcaatgaggagtggcgtgaa

SEQ ID NO: 484851 - DNA, 60 bp, Artificial
  Synthetic oligonucleotide
tttgaggaatgccctggacggtaaccctgtatgtatagatgcgaagcacaaggctccata

SEQ ID NO: 484852 - DNA, 55 bp, Artificial
  Synthetic oligonucleotide
tttgaggagagcgcggagcaagtacaaaagttaaaacgaaagtatttcagtccta

SEQ ID NO: 484853 - DNA, 59 bp, Artificial
  Synthetic oligonucleotide
tttgaggagggtcagggaacagggcatttgcactgtattggaattgctgtaggcgtacc

SEQ ID NO: 484854 - DNA, 60 bp, Artificial
  Synthetic oligonucleotide
tttgaggatgtcaatggaattcggaaacctaaacatctttatgtgtcaatgcctaatgcc

SEQ ID NO: 484855 - DNA, 60 bp, Artificial
  Synthetic oligonucleotide
tttgaggcatgtagaggaatatgaggtatctttgatattccagctatgcaaggtgcctct

SEQ ID NO: 484856 - DNA, 51 bp, Artificial
  Synthetic oligonucleotide
tttgaggcccccataggttcggttctgcactacagaccagggacagtgtaa

SEQ ID NO: 484857 - DNA, 54 bp, Artificial
  Synthetic oligonucleotide
tttgaggccccgtgaggaaaaggaattcctgattaagctctccaccttcgttac

SEQ ID NO: 484858 - DNA, 60 bp, Artificial
  Synthetic oligonucleotide
tttgaggcgactgctaaacgaactcgacactcgattcgcagccctcacgacggcattgac

SEQ ID NO: 484859 - DNA, 58 bp, Artificial
  Synthetic oligonucleotide
tttgagggcgttagcgtgacgccactggctacccgggtacaacataatggtgtgatgg

SEQ ID NO: 484860 - DNA, 59 bp, Artificial
  Synthetic oligonucleotide
tttgagggtccaggccttgtggaggttcaagaaagtgaatactatccaaagagatatca

SEQ ID NO: 484861 - DNA, 58 bp, Artificial
  Synthetic oligonucleotide
tttgagggtgttagtgtgacaccaatggctactagggtacaacataacggtgtgatgg

SEQ ID NO: 484862 - DNA, 54 bp, Artificial
  Synthetic oligonucleotide
tttgagggttaccatagagactactctgttcaaacggtccccgtggaatactta

SEQ ID NO: 484863 - DNA, 55 bp, Artificial
  Synthetic oligonucleotide
tttgagggttcgagatcaacggggaaacgtactattgtctcccgaagaagtcagc

SEQ ID NO: 484864 - DNA, 60 bp, Artificial
  Synthetic oligonucleotide
tttgagtacaggaattcatatattttgcaacgtgctaatccacaattcggaaatgttatg

SEQ ID NO: 484865 - DNA, 58 bp, Artificial
  Synthetic oligonucleotide
tttgagtaccgatccgttatttgagtaccgatatatcggtactcaattggtgcccata

SEQ ID NO: 484866 - DNA, 60 bp, Artificial
  Synthetic oligonucleotide
tttgagtagagaacacggttatattgtatcagatacagcattggagggagcggcgaaacc

SEQ ID NO: 484867 - DNA, 60 bp, Artificial
  Synthetic oligonucleotide
tttgagtatgacgattttaagccttgctcgattggagagttggggatccatgcatcgaca

SEQ ID NO: 484868 - DNA, 60 bp, Artificial
  Synthetic oligonucleotide
tttgagtatgatgacatcgctgataccattgctctacgtttgacttactttatccaggat

SEQ ID NO: 484869 - DNA, 60 bp, Artificial
  Synthetic oligonucleotide
tttgagtccaaaagcagttgcacagctcagtccgcgcctcgagtcgatatcaataagtcc

SEQ ID NO: 484870 - DNA, 58 bp, Artificial
  Synthetic oligonucleotide
tttgagtccaagattgtggacggcggctgctttgccccatgggacctcgaggccaccg

SEQ ID NO: 484871 - DNA, 60 bp, Artificial
  Synthetic oligonucleotide
tttgagtccacatgcaatgatactaagaataaggtacagggatattacatctgcattgta

SEQ ID NO: 484872 - DNA, 60 bp, Artificial
  Synthetic oligonucleotide
tttgagtccagacacgatgtagtccatataggcaaggtcatgtgtattagtgatgtcact

SEQ ID NO: 484873 - DNA, 60 bp, Artificial
  Synthetic oligonucleotide
tttgagtctgttgcttggtcggcaagtgcttgtcatgacggcactagttggttgacaatt

SEQ ID NO: 484874 - DNA, 53 bp, Artificial
  Synthetic oligonucleotide
tttgagtgatgaaaagaacacctctgagactacacaattgcacgaattaataa

SEQ ID NO: 484875 - DNA, 58 bp, Artificial
  Synthetic oligonucleotide
tttgagtggaagcaaagtcgtactgccggtaccgaatccattgaaactcctcatacgc

SEQ ID NO: 484876 - DNA, 56 bp, Artificial
  Synthetic oligonucleotide
tttgagtgtctcgcttccagcacaagcggacgtttatggatcaacgatacagactc

SEQ ID NO: 484877 - DNA, 55 bp, Artificial
  Synthetic oligonucleotide
tttgagtgtgcattaagggcaacttgtaggcaacacgatgttctgccttaggctc

SEQ ID NO: 484878 - DNA, 56 bp, Artificial
  Synthetic oligonucleotide
tttgagtgttgtgtatgccattggaggaatcacgcttatgcgtcgagacatccgag

SEQ ID NO: 484879 - DNA, 60 bp, Artificial
  Synthetic oligonucleotide
tttgataacatgcgcatcatgaacgaactgtaaacgccaaccccactgtggagatatgac

SEQ ID NO: 484880 - DNA, 59 bp, Artificial
  Synthetic oligonucleotide
tttgataccaccccattcatgtacaagaatatggcaggtgcgtacccgacttataacac

SEQ ID NO: 484881 - DNA, 60 bp, Artificial
  Synthetic oligonucleotide
tttgatacgtgatcttatactcgttgttcgtgcgaagaattatgtcgaggcgacctgcag

SEQ ID NO: 484882 - DNA, 60 bp, Artificial
  Synthetic oligonucleotide
tttgatagaagttaaaaagataggggacttgcattatcgcgtaatatcaactgcgcatta

SEQ ID NO: 484883 - DNA, 55 bp, Artificial
  Synthetic oligonucleotide
tttgatagcaacctggcatttagacacaaagctcatgagctgtatccggagttct

SEQ ID NO: 484884 - DNA, 60 bp, Artificial
  Synthetic oligonucleotide
tttgatagctcgttgactccttatttgattaacgctgttgcacagatcaggttagcattc

SEQ ID NO: 484885 - DNA, 55 bp, Artificial
  Synthetic oligonucleotide
tttgataggggctgagctttcagcatcagtaaaacagcatgtgaaacccaaccac

SEQ ID NO: 484886 - DNA, 60 bp, Artificial
  Synthetic oligonucleotide
tttgatatattgaacaaggcagtgaactcatatgacaaaatcctagcggaggaagatacg

SEQ ID NO: 484887 - DNA, 60 bp, Artificial
  Synthetic oligonucleotide
tttgatcagactctcgaatctgactcacaccatgatgaggcgatattcgtaacagaatcg

SEQ ID NO: 484888 - DNA, 60 bp, Artificial
  Synthetic oligonucleotide
tttgatcagtatttttctacacttaatcaagataccaactcatagacacattgtaggtgg

SEQ ID NO: 484889 - DNA, 54 bp, Artificial
  Synthetic oligonucleotide
tttgatcagtttgtggctcctttcgtacattggggtagtcaatcagactaatac

SEQ ID NO: 484890 - DNA, 53 bp, Artificial
  Synthetic oligonucleotide
tttgatcatgcgcgagaacagactcatcccaatgcacgatctcaacagtgcga

SEQ ID NO: 484891 - DNA, 59 bp, Artificial
  Synthetic oligonucleotide
tttgatccaacaaaaataagtcacgttatactagcgtcattatgcttaagcatacaaac

SEQ ID NO: 484892 - DNA, 60 bp, Artificial
  Synthetic oligonucleotide
tttgatccgcctcaaacccactcttcatggcccgacacccctgctatacagactgggcgc

SEQ ID NO: 484893 - DNA, 60 bp, Artificial
  Synthetic oligonucleotide
tttgatcgatataaggaaagacaagcctaagaatctgaatacacctgaaggcgctattga

SEQ ID NO: 484894 - DNA, 58 bp, Artificial
  Synthetic oligonucleotide
tttgatctaccatctacaacagggatgagtgttagaccacatctactaaggtctttag

SEQ ID NO: 484895 - DNA, 60 bp, Artificial
  Synthetic oligonucleotide
tttgatctcaatctcctttggtttgtaagtctcagcagtccttggcaaattcttaacata

SEQ ID NO: 484896 - DNA, 55 bp, Artificial
  Synthetic oligonucleotide
tttgatgaatgaagtctgtggagttatgagagaacacgttgctgattcctccacc

SEQ ID NO: 484897 - DNA, 60 bp, Artificial
  Synthetic oligonucleotide
tttgatgaatgttatcagttgcttatctctaaccttggtattgatatgttagacgttctc

SEQ ID NO: 484898 - DNA, 55 bp, Artificial
  Synthetic oligonucleotide
tttgatgacctccgcctgttccggtgcctgttcgggcgcaacaaacttcatgcgg

SEQ ID NO: 484899 - DNA, 59 bp, Artificial
  Synthetic oligonucleotide
tttgatgagatgctgagagagcttatgctctttcctaatgaggcatacactcggtcttt

SEQ ID NO: 484900 - DNA, 55 bp, Artificial
  Synthetic oligonucleotide
tttgatgagctctttggagcaaggatacatagccatggtaacttggccataacct

SEQ ID NO: 484901 - DNA, 58 bp, Artificial
  Synthetic oligonucleotide
tttgatgaggccctgcactcagacctggccgatttcagggtaaggtacccggctctag

SEQ ID NO: 484902 - DNA, 60 bp, Artificial
  Synthetic oligonucleotide
tttgatgaggtatttggtgcacggattcacagtcatggtacgttagccattactccgtca

SEQ ID NO: 484903 - DNA, 59 bp, Artificial
  Synthetic oligonucleotide
tttgatgagtcaatatgaaaagaattgtgaaccttgtatattctgtctgctcgatgtaa

SEQ ID NO: 484904 - DNA, 60 bp, Artificial
  Synthetic oligonucleotide
tttgatgatgctgccatttgcgacccaaatgttagggctgtcttgttaactagagctcgt

SEQ ID NO: 484905 - DNA, 60 bp, Artificial
  Synthetic oligonucleotide
tttgatgatggtgtgcttaataaatacagtggtaatggtaacccattgattgttgcaaat

SEQ ID NO: 484906 - DNA, 60 bp, Artificial
  Synthetic oligonucleotide
tttgatgatgtcagcaaacacatctggcttaacatagattgtttccaacatgtttccccc

SEQ ID NO: 484907 - DNA, 59 bp, Artificial
  Synthetic oligonucleotide
tttgatgcactatgtatttggaaatgcccaattggaggggtttagtgccgagtctagga

SEQ ID NO: 484908 - DNA, 60 bp, Artificial
  Synthetic oligonucleotide
tttgatgcactggagcagagcatggcagtgccatgtcccgtctaagtgtgtctctcggac

SEQ ID NO: 484909 - DNA, 60 bp, Artificial
  Synthetic oligonucleotide
tttgatgcattacgattactctccgcttgtgacgattatgacggttacactagacttaag

SEQ ID NO: 484910 - DNA, 60 bp, Artificial
  Synthetic oligonucleotide
tttgatgcctataaccggattactagcagcatttctactactgctagtcctgcgtatact

SEQ ID NO: 484911 - DNA, 54 bp, Artificial
  Synthetic oligonucleotide
tttgatgcgactaagggtgagtggacgttggatatggtcttctccgacgcagga

SEQ ID NO: 484912 - DNA, 58 bp, Artificial
  Synthetic oligonucleotide
tttgatgcggagttcacttttgttgcgtgcactcctactggtggggttgtcccacaat

SEQ ID NO: 484913 - DNA, 55 bp, Artificial
  Synthetic oligonucleotide
tttgatggcgaaatgcgtatacctgacgtgcctttgaagatgtatggcgatctcc

SEQ ID NO: 484914 - DNA, 60 bp, Artificial
  Synthetic oligonucleotide
tttgatgtaccacgagtgccagatgaccaaatgtacagattgagagacagacttagatta

SEQ ID NO: 484915 - DNA, 60 bp, Artificial
  Synthetic oligonucleotide
tttgatgtactcatggaaccccttggttaggaggatttgtctgctcaccttatcaagtga

SEQ ID NO: 484916 - DNA, 60 bp, Artificial
  Synthetic oligonucleotide
tttgatgtcacaccagagatacacatccctggtgaggtgaaaaacatgatggagttggca

SEQ ID NO: 484917 - DNA, 55 bp, Artificial
  Synthetic oligonucleotide
tttgatgtgcaagcctattgcacctcgcctgatctgccctcgctccaagaggtac

SEQ ID NO: 484918 - DNA, 60 bp, Artificial
  Synthetic oligonucleotide
tttgatgtgccagattatcaaagcctacggagcatcttggcaaacaacgggaaatttgag

SEQ ID NO: 484919 - DNA, 58 bp, Artificial
  Synthetic oligonucleotide
tttgatgttggagcagtaaccggacaattccctcctcaaagattgtgtccacaagaag

SEQ ID NO: 484920 - DNA, 57 bp, Artificial
  Synthetic oligonucleotide
tttgattaacaacgcttttgaaggtcgtctctcaatttttagcgcacaggagggatg

SEQ ID NO: 484921 - DNA, 55 bp, Artificial
  Synthetic oligonucleotide
tttgattcatccggccatgaaaatgacagacattcatgaatccattcgttggacc

SEQ ID NO: 484922 - DNA, 56 bp, Artificial
  Synthetic oligonucleotide
tttgattcctcctggagtatagcttggtggacatgttactatgatagagctttgag

SEQ ID NO: 484923 - DNA, 57 bp, Artificial
  Synthetic oligonucleotide
tttgattcggctgatgacacgtttacggtggatccggtgaacaggggttatgcgcgt

SEQ ID NO: 484924 - DNA, 60 bp, Artificial
  Synthetic oligonucleotide
tttgattctcatcttgcacgcaaacacatggcccgcgagctacatccggagtattacaag

SEQ ID NO: 484925 - DNA, 58 bp, Artificial
  Synthetic oligonucleotide
tttgattgcccggttcacaaagaactggcttgcagctggtatccgaacttcgaggaat

SEQ ID NO: 484926 - DNA, 58 bp, Artificial
  Synthetic oligonucleotide
tttgattgggcccgttgtaacccggcttgtgatgctgaatctcctgggtctaggacgc

SEQ ID NO: 484927 - DNA, 57 bp, Artificial
  Synthetic oligonucleotide
tttgattggtaccggagtagagcggttgggtgagaaagacgaatgttgcattcttta

SEQ ID NO: 484928 - DNA, 55 bp, Artificial
  Synthetic oligonucleotide
tttgatttccctgacaggcttaagactctcggagtggacaaggttgaaggtcgtt

SEQ ID NO: 484929 - DNA, 57 bp, Artificial
  Synthetic oligonucleotide
tttgatttttaatgaggaccttgactatgaggtgggttatttatgtgctggaattcc

SEQ ID NO: 484930 - DNA, 52 bp, Artificial
  Synthetic oligonucleotide
tttgcaaacacaagtggttttcaccatgtccacaagaaaggggagataacac

SEQ ID NO: 484931 - DNA, 54 bp, Artificial
  Synthetic oligonucleotide
tttgcaaagagtctccgaacgaagttgttcgtcacagatggaatctcggtaaaa

SEQ ID NO: 484932 - DNA, 50 bp, Artificial
  Synthetic oligonucleotide
tttgcaacaccacaggggtcgagaagcctaagttcctcccggatctgtat

SEQ ID NO: 484933 - DNA, 57 bp, Artificial
  Synthetic oligonucleotide
tttgcaacaggagagtcgttgggtccactcactggggggctgacctcgcagtcaccc

SEQ ID NO: 484934 - DNA, 60 bp, Artificial
  Synthetic oligonucleotide
tttgcaagcacaggcagatcgagtgtacgactgcgatgattatccatttctagcgcgtga

SEQ ID NO: 484935 - DNA, 59 bp, Artificial
  Synthetic oligonucleotide
tttgcaaggcaaatgggctcattctcagccctacaaaatacaagatcggagtaaaggta

SEQ ID NO: 484936 - DNA, 60 bp, Artificial
  Synthetic oligonucleotide
tttgcaataagagtggatattgcttcacagcccttagcaaccacattaataggagaaatt

SEQ ID NO: 484937 - DNA, 60 bp, Artificial
  Synthetic oligonucleotide
tttgcaatagtcagtctcgtcaaaagtgaccaaatttgcattggttaccatgcaaacaac

SEQ ID NO: 484938 - DNA, 60 bp, Artificial
  Synthetic oligonucleotide
tttgcaattaaggtggatatcgcatcacatccactggccacaaccttaattggagagatt

SEQ ID NO: 484939 - DNA, 55 bp, Artificial
  Synthetic oligonucleotide
tttgcaccgcttgcgttgacaatatcacatcctgtaatctacgagcgattacgcc

SEQ ID NO: 484940 - DNA, 58 bp, Artificial
  Synthetic oligonucleotide
tttgcacgacgaggcgtttccgctcagttcgaagtgtttcctctcgggagagagctat

SEQ ID NO: 484941 - DNA, 58 bp, Artificial
  Synthetic oligonucleotide
tttgcacgccacttcccttaaagataattcgatccagaaacttcgagtattcacggca

SEQ ID NO: 484942 - DNA, 53 bp, Artificial
  Synthetic oligonucleotide
tttgcactgcacatatgagaggtttacgaaagagagtggactttcggtgtgat

SEQ ID NO: 484943 - DNA, 56 bp, Artificial
  Synthetic oligonucleotide
tttgcactggcactacaggattcaggaccacaagtcaatatcatagtagattcaca

SEQ ID NO: 484944 - DNA, 55 bp, Artificial
  Synthetic oligonucleotide
tttgcagaacaacagatacatgacctcctacgtaacatatccctcgaaaactaga

SEQ ID NO: 484945 - DNA, 60 bp, Artificial
  Synthetic oligonucleotide
tttgcagaagcgttctaaggatttagcggttcaagctactatggaagcgcgttctcatga

SEQ ID NO: 484946 - DNA, 60 bp, Artificial
  Synthetic oligonucleotide
tttgcagatctgtacaatcggtactacgagagtggaaatacaatcttccacgagctggca

SEQ ID NO: 484947 - DNA, 53 bp, Artificial
  Synthetic oligonucleotide
tttgcagattgcatcaggcgccgtgtatgtatcggggccagacggagaagcta

SEQ ID NO: 484948 - DNA, 54 bp, Artificial
  Synthetic oligonucleotide
tttgcagcaagtagaaatagtagatccaacatttatgtccacccctcaacgttt

SEQ ID NO: 484949 - DNA, 60 bp, Artificial
  Synthetic oligonucleotide
tttgcagccacggtctctacctgaaaacgaggagtatgagaccgatcaaatactccctga

SEQ ID NO: 484950 - DNA, 58 bp, Artificial
  Synthetic oligonucleotide
tttgcagccgacagtgtcggatgaaagtactgggatcccccagccgcgtggatggacg

SEQ ID NO: 484951 - DNA, 55 bp, Artificial
  Synthetic oligonucleotide
tttgcaggagaccccgtcgcagccggcaacaatatggccctacaggtctggagag

SEQ ID NO: 484952 - DNA, 60 bp, Artificial
  Synthetic oligonucleotide
tttgcaggttatgtatgacattgcttttcctggcaattcggttattgagacgtatttcga

SEQ ID NO: 484953 - DNA, 60 bp, Artificial
  Synthetic oligonucleotide
tttgcagtacctgaggggcaagctgcgatagaagcatggactcagtttactcgtttcgaa

SEQ ID NO: 484954 - DNA, 56 bp, Artificial
  Synthetic oligonucleotide
tttgcagtccccttaacgagcgttttctgagctcgtctcgtaggcgtattgttaaa

SEQ ID NO: 484955 - DNA, 55 bp, Artificial
  Synthetic oligonucleotide
tttgcagttacgttaaaggaaccagttcccgacccaccagtcccagatatatcac

SEQ ID NO: 484956 - DNA, 55 bp, Artificial
  Synthetic oligonucleotide
tttgcataatgagtctgtattgttttggcagtttcctgcagacatctttgcccaa

SEQ ID NO: 484957 - DNA, 60 bp, Artificial
  Synthetic oligonucleotide
tttgcataatgggcctactccattttcatctagcagcactgtagttaaagtattgctgaa

SEQ ID NO: 484958 - DNA, 60 bp, Artificial
  Synthetic oligonucleotide
tttgcatatatcgttgcgccctttcttaaaacgatatactcaaacagctctcaatatcac

SEQ ID NO: 484959 - DNA, 50 bp, Artificial
  Synthetic oligonucleotide
tttgcatatcgagttgaaacattcgaggaggtacctttcgatgtgcaaaa

SEQ ID NO: 484960 - DNA, 60 bp, Artificial
  Synthetic oligonucleotide
tttgcatatgctatacatggtctgaaataatttacgtgttcattcctctttcatatgttt

SEQ ID NO: 484961 - DNA, 60 bp, Artificial
  Synthetic oligonucleotide
tttgcatcaacaggaaagaccttagcaattgaagtctttgatgactgcatgaaattgatt

SEQ ID NO: 484962 - DNA, 58 bp, Artificial
  Synthetic oligonucleotide
tttgcatcattaaggacacttgatttggttggttctgtgaacatccctagttccctcc

SEQ ID NO: 484963 - DNA, 60 bp, Artificial
  Synthetic oligonucleotide
tttgcatccctgttaggcaaggccttactttctcatggatgcttctccgcgagttagcgt

SEQ ID NO: 484964 - DNA, 58 bp, Artificial
  Synthetic oligonucleotide
tttgcatcgttgttttctcaaaccggttggccgtgatgttcagcggtggtacactgcc

SEQ ID NO: 484965 - DNA, 59 bp, Artificial
  Synthetic oligonucleotide
tttgcatctgccagaggcagcccgtaagcttggaccaaagggtgggaggcaatttttgc

SEQ ID NO: 484966 - DNA, 60 bp, Artificial
  Synthetic oligonucleotide
tttgcatgacgaggctttctcagagataccaagagaaggatttttgggagagataaggtg

SEQ ID NO: 484967 - DNA, 56 bp, Artificial
  Synthetic oligonucleotide
tttgcatggtgcggtgaaattgatagccggggcggtgtaggtgctgtttggtgcga

SEQ ID NO: 484968 - DNA, 60 bp, Artificial
  Synthetic oligonucleotide
tttgcatgtgtattatgtcgtgacggcaaagaaaggggcgttggtggtgatctattatcg

SEQ ID NO: 484969 - DNA, 60 bp, Artificial
  Synthetic oligonucleotide
tttgcattccaccacttggtatctaatggaccccatttgattctgtctcaacctggctac

SEQ ID NO: 484970 - DNA, 54 bp, Artificial
  Synthetic oligonucleotide
tttgcattcttagacgggggaaattcctggttggggagaaccataagcaaagac

SEQ ID NO: 484971 - DNA, 59 bp, Artificial
  Synthetic oligonucleotide
tttgcattgtaacatatgttttttctgtagtatgttgactgaacaaataactaacacat

SEQ ID NO: 484972 - DNA, 50 bp, Artificial
  Synthetic oligonucleotide
tttgccaagacttgtctataaggatagaaaaatgtaccgccactatggtg

SEQ ID NO: 484973 - DNA, 58 bp, Artificial
  Synthetic oligonucleotide
tttgccacatccgaagaaaattaataacatgttaagagcggcgtattcgtggtatgta

SEQ ID NO: 484974 - DNA, 60 bp, Artificial
  Synthetic oligonucleotide
tttgccacggctgtgttgccaaagcactttaactcagcttcaatcagcatccacctggtc

SEQ ID NO: 484975 - DNA, 57 bp, Artificial
  Synthetic oligonucleotide
tttgccacgtggtcgccactcgcttcaccgctgttaggattgccgttaccgtcgtag

SEQ ID NO: 484976 - DNA, 57 bp, Artificial
  Synthetic oligonucleotide
tttgccactggtgagaactttcggacacgcatggcagccacacttgaaagaatcgct

SEQ ID NO: 484977 - DNA, 52 bp, Artificial
  Synthetic oligonucleotide
tttgccagagaacaaccagaatatcctgcaaggccttcggaagggacattaa

SEQ ID NO: 484978 - DNA, 58 bp, Artificial
  Synthetic oligonucleotide
tttgccagagggttgatatggatattacggtgtactgtaacgggctgaagaaagtgat

SEQ ID NO: 484979 - DNA, 60 bp, Artificial
  Synthetic oligonucleotide
tttgccaggagttgtagcgatgctgtgtgtgtgtgcggatttcccctcatggcaacatga

SEQ ID NO: 484980 - DNA, 52 bp, Artificial
  Synthetic oligonucleotide
tttgccagtttgtttctacccaaacttgtcgttggggagaaagcgtgtctgg

SEQ ID NO: 484981 - DNA, 55 bp, Artificial
  Synthetic oligonucleotide
tttgccatattcaggtgacaatattcaccagtttccacacggagggcattatagg

SEQ ID NO: 484982 - DNA, 60 bp, Artificial
  Synthetic oligonucleotide
tttgccatcaacagctagatatataagacctaacctcctacaggatagactaaatttaca

SEQ ID NO: 484983 - DNA, 60 bp, Artificial
  Synthetic oligonucleotide
tttgccatcaacagctagatatataaggcctaacctactacaagacagactgaacttaca

SEQ ID NO: 484984 - DNA, 53 bp, Artificial
  Synthetic oligonucleotide
tttgccatctaccaaggcccccccaataccacctccacggaggaagaggacgg

SEQ ID NO: 484985 - DNA, 55 bp, Artificial
  Synthetic oligonucleotide
tttgccatgtatcagcagtatggtactcatccattactactggaatgtgtgcagt

SEQ ID NO: 484986 - DNA, 58 bp, Artificial
  Synthetic oligonucleotide
tttgcccactacaatctagtggaactgagtcaagtacaatccctattactatttctat

SEQ ID NO: 484987 - DNA, 60 bp, Artificial
  Synthetic oligonucleotide
tttgcccacttgctgcatataagcagctgctctccgcttgttcgggagtccttgctctgg

SEQ ID NO: 484988 - DNA, 55 bp, Artificial
  Synthetic oligonucleotide
tttgcccagggctggggccctattagtcatgccaacggaagtggccccgaccaac

SEQ ID NO: 484989 - DNA, 55 bp, Artificial
  Synthetic oligonucleotide
tttgcccatgctgaatagtcgtccgacttatcttctcgcaagcgcaattctttgc

SEQ ID NO: 484990 - DNA, 55 bp, Artificial
  Synthetic oligonucleotide
tttgccccactgctgtgccttggaattctagttggagtaataaaactcaggagga

SEQ ID NO: 484991 - DNA, 56 bp, Artificial
  Synthetic oligonucleotide
tttgccccgttctctaatgggacttgcccgaactcagtgatactgacccctgggcc

SEQ ID NO: 484992 - DNA, 60 bp, Artificial
  Synthetic oligonucleotide
tttgcccctgactggcaatcaggtttcatgccctctccgtgcacatatggcgaccctacc

SEQ ID NO: 484993 - DNA, 54 bp, Artificial
  Synthetic oligonucleotide
tttgcccgcctccatccgtgtcttagggaaccaaatcctcgtggttggccgccg

SEQ ID NO: 484994 - DNA, 58 bp, Artificial
  Synthetic oligonucleotide
tttgccgaaatttgattctaccgtgtgggtgacagtccgcaaagtacctgcctcatcg

SEQ ID NO: 484995 - DNA, 55 bp, Artificial
  Synthetic oligonucleotide
tttgccgaagggttgcgaattaccaaacatacaaagctgtgctaatctgatgtgg

SEQ ID NO: 484996 - DNA, 54 bp, Artificial
  Synthetic oligonucleotide
tttgccgcctcaagcggctttacagttaaagcccaccaaaaggtggaggagtta

SEQ ID NO: 484997 - DNA, 50 bp, Artificial
  Synthetic oligonucleotide
tttgccgctcacatgtttaaaggtcgtgactacgttcattgttgcatgcc

SEQ ID NO: 484998 - DNA, 57 bp, Artificial
  Synthetic oligonucleotide
tttgccggatgtcctcccccccctcgttgagtatgccaagttgtgtaaagcactcca

SEQ ID NO: 484999 - DNA, 60 bp, Artificial
  Synthetic oligonucleotide
tttgccgtcacgatgactgggtgcggtcctctcaagctcaatgattataccgtcgtcatg

SEQ ID NO: 485000 - DNA, 59 bp, Artificial
  Synthetic oligonucleotide
tttgccgttacgcatcctaatgtagaactcattgtgctaacgggggacaacaagcagag

SEQ ID NO: 485001 - DNA, 59 bp, Artificial
  Synthetic oligonucleotide
tttgcctaacattctgaccttcgtttgttctaatgacgaagggaattggagcatgatag

SEQ ID NO: 485002 - DNA, 57 bp, Artificial
  Synthetic oligonucleotide
tttgcctactaaatgtgatcttattgccagaaagaaaccagcttgtttagttagagg

SEQ ID NO: 485003 - DNA, 60 bp, Artificial
  Synthetic oligonucleotide
tttgcctcatgaagttgtcaactgcatcactagtactcacaactctttcttcaaccatgg

SEQ ID NO: 485004 - DNA, 50 bp, Artificial
  Synthetic oligonucleotide
tttgcctcgtctttgaaggttactgctctatctttgttcgcagcattcat

SEQ ID NO: 485005 - DNA, 60 bp, Artificial
  Synthetic oligonucleotide
tttgcctcttcgtgttaggaagtgttctcttcgcagtctcttggctggtgaaggccctga

SEQ ID NO: 485006 - DNA, 51 bp, Artificial
  Synthetic oligonucleotide
tttgcctgacttagctagctttcattgtaaaaagttagctcttgtttatag

SEQ ID NO: 485007 - DNA, 56 bp, Artificial
  Synthetic oligonucleotide
tttgcctgccaaacacgacaagccgatagcgaacacctacaacaattaaaaagaaa

SEQ ID NO: 485008 - DNA, 60 bp, Artificial
  Synthetic oligonucleotide
tttgcctgcgctttctcacctctgtagaaaaagctctctttgatgcttaccctttgcaat

SEQ ID NO: 485009 - DNA, 60 bp, Artificial
  Synthetic oligonucleotide
tttgcctgtgcacctgatagatgccctcctacatgcatttacattgctgggatggcagag

SEQ ID NO: 485010 - DNA, 60 bp, Artificial
  Synthetic oligonucleotide
tttgcctgtgttccatgtcctactgttcaagcctccaagctgtgccttggatggctttgg

SEQ ID NO: 485011 - DNA, 54 bp, Artificial
  Synthetic oligonucleotide
tttgcctgtttacgtctttcttgattgaacccggaaaaagggagtgtgattcaa

SEQ ID NO: 485012 - DNA, 60 bp, Artificial
  Synthetic oligonucleotide
tttgccttaacttacacattcggagctatgtgcccgtgcacacacccctgtatgccttct

SEQ ID NO: 485013 - DNA, 60 bp, Artificial
  Synthetic oligonucleotide
tttgcgaagccagcgctcaatccagatcaagccgtgcttaagtggaacgatggtgccaga

SEQ ID NO: 485014 - DNA, 55 bp, Artificial
  Synthetic oligonucleotide
tttgcgacaccacgtggccatttagggtatatatggccgagtgagcgagcaggat

SEQ ID NO: 485015 - DNA, 55 bp, Artificial
  Synthetic oligonucleotide
tttgcgacacgcgcggcagtaccaacacggaggtgggcaaaccactacgctacgc

SEQ ID NO: 485016 - DNA, 60 bp, Artificial
  Synthetic oligonucleotide
tttgcgacggaaatttaattggagtgtacgccatgcggcagacaaagcgctagagaataa

SEQ ID NO: 485017 - DNA, 56 bp, Artificial
  Synthetic oligonucleotide
tttgcgagaacagtgccacaggtaaatcctgtgaaatagatagcaccccaattaaa

SEQ ID NO: 485018 - DNA, 60 bp, Artificial
  Synthetic oligonucleotide
tttgcgaggagtattccaaggaacgttggcaacatttcatcagagtgctaatgaactgtg

SEQ ID NO: 485019 - DNA, 54 bp, Artificial
  Synthetic oligonucleotide
tttgcgaggcgtacgatactggttgtgcgtggtacgaactaacaccttcagaga

SEQ ID NO: 485020 - DNA, 55 bp, Artificial
  Synthetic oligonucleotide
tttgcgagtattgggagtttgaccaattactcactgctgtactggtagctatcag

SEQ ID NO: 485021 - DNA, 60 bp, Artificial
  Synthetic oligonucleotide
tttgcgagtgaggcacaagttgtatttgccacccctcggctatttcctgaagtcaatctg

SEQ ID NO: 485022 - DNA, 55 bp, Artificial
  Synthetic oligonucleotide
tttgcgatagtgacatggaaatagcaaatgacaggagacaagcatttgtttcgag

SEQ ID NO: 485023 - DNA, 60 bp, Artificial
  Synthetic oligonucleotide
tttgcgattcttaggtgccggaatggtgatgactgcgactggagttgctgtcgacatata

SEQ ID NO: 485024 - DNA, 55 bp, Artificial
  Synthetic oligonucleotide
tttgcgccaacaatcacctacccctcgaaggagaaacctgatgtcagactctgac

SEQ ID NO: 485025 - DNA, 52 bp, Artificial
  Synthetic oligonucleotide
tttgcgcctaggtttagcggctgaacgtggacttatcacccactggcgcaac

SEQ ID NO: 485026 - DNA, 60 bp, Artificial
  Synthetic oligonucleotide
tttgcgcctgtactagcaactgtggctcaatgggttggtacggcaattggtttctttgca

SEQ ID NO: 485027 - DNA, 53 bp, Artificial
  Synthetic oligonucleotide
tttgcgcggtctactgaaggtgcagtcaattgcaaccgatgagaatttcaacc

SEQ ID NO: 485028 - DNA, 55 bp, Artificial
  Synthetic oligonucleotide
tttgcgcggttaccagtcgctatccaggcggccagcgtatcactcgaccggtgtg

SEQ ID NO: 485029 - DNA, 54 bp, Artificial
  Synthetic oligonucleotide
tttgcgctgccctacactgcgccacacagatgtctggcaacatcctacaacggt

SEQ ID NO: 485030 - DNA, 59 bp, Artificial
  Synthetic oligonucleotide
tttgcgggatcaccaggtgattggcacatagtccccaattctcttcttgctaacgaact

SEQ ID NO: 485031 - DNA, 55 bp, Artificial
  Synthetic oligonucleotide
tttgcgggtctatcaacaacctgtataataataactggagttttacttccctgct

SEQ ID NO: 485032 - DNA, 54 bp, Artificial
  Synthetic oligonucleotide
tttgcggtacagcgtgtactactttaaaactgttaatagcctatacaccccctg

SEQ ID NO: 485033 - DNA, 53 bp, Artificial
  Synthetic oligonucleotide
tttgcggtgttttgttagctttccgaagtttgtgttgaatgttcgaaggtagg

SEQ ID NO: 485034 - DNA, 55 bp, Artificial
  Synthetic oligonucleotide
tttgcgtactgattatccgactatcaccacaaccagtagggtgctgcggtctgtt

SEQ ID NO: 485035 - DNA, 54 bp, Artificial
  Synthetic oligonucleotide
tttgcgtatctgaggcagtttggcctgaaaccgacccggaccgacaaaaccgac

SEQ ID NO: 485036 - DNA, 55 bp, Artificial
  Synthetic oligonucleotide
tttgcgtcgttgtgggtcccacctgatagatctgcagagttaatgggcctgtaaa

SEQ ID NO: 485037 - DNA, 54 bp, Artificial
  Synthetic oligonucleotide
tttgcgtggtacctgaagggtaagtgggtgcccggagcggtctacgccttctac

SEQ ID NO: 485038 - DNA, 58 bp, Artificial
  Synthetic oligonucleotide
tttgcgttaagtcagtatacgttttgggtaagatctggatggatgagaacataaagac

SEQ ID NO: 485039 - DNA, 60 bp, Artificial
  Synthetic oligonucleotide
tttgcgttacctgtaggcaatcatccagtgatgagtggtggcgcagtgaccttaacatct

SEQ ID NO: 485040 - DNA, 54 bp, Artificial
  Synthetic oligonucleotide
tttgcgttcaacctgagaaggggggtcttaagccaacttgtctcttcttgtccc

SEQ ID NO: 485041 - DNA, 60 bp, Artificial
  Synthetic oligonucleotide
tttgcgtttcaatgaagctggcacacccgcaaatctcattcagaggggcgttaaatcttc

SEQ ID NO: 485042 - DNA, 54 bp, Artificial
  Synthetic oligonucleotide
tttgctaaatacttaaccttgaaggaaggttggtggtatacagctggagggaaa

SEQ ID NO: 485043 - DNA, 55 bp, Artificial
  Synthetic oligonucleotide
tttgctaaccataaaagtcacttttggcttcaaccgttagctgactgcaagtttg

SEQ ID NO: 485044 - DNA, 60 bp, Artificial
  Synthetic oligonucleotide
tttgctaatgctcaggtggtacgcccctacctgtcgcactctcaagcctctctccttgtt

SEQ ID NO: 485045 - DNA, 59 bp, Artificial
  Synthetic oligonucleotide
tttgctaattcatgctccggacgaacagtattcggatctgactattttcactacccgtc

SEQ ID NO: 485046 - DNA, 57 bp, Artificial
  Synthetic oligonucleotide
tttgctaattggcgaaggtccctgtgaacctggagattgtggaggtaaactactatg

SEQ ID NO: 485047 - DNA, 60 bp, Artificial
  Synthetic oligonucleotide
tttgctagagagtgaaacagtgcgagaacaagctagccattcagcatggatgtatgcggc

SEQ ID NO: 485048 - DNA, 57 bp, Artificial
  Synthetic oligonucleotide
tttgctagaggaaactaatgactctagctacctaggtaagtgtaaatttagaagatc

SEQ ID NO: 485049 - DNA, 58 bp, Artificial
  Synthetic oligonucleotide
tttgctagccccgcaggaggggatctagaaatcacaacacatagttttaattgtggag

SEQ ID NO: 485050 - DNA, 55 bp, Artificial
  Synthetic oligonucleotide
tttgctaggaagggtaatcaaatgttactcctacatttccagcaagggtgctatc

SEQ ID NO: 485051 - DNA, 58 bp, Artificial
  Synthetic oligonucleotide
tttgctataagatgggtggcaagtggtcaaaactgggtgggtggactactgtgaggga

SEQ ID NO: 485052 - DNA, 60 bp, Artificial
  Synthetic oligonucleotide
tttgctataagatgggtggcaagtggtcaaagcgtgtgaaagaatgggctactgtcaggg

SEQ ID NO: 485053 - DNA, 58 bp, Artificial
  Synthetic oligonucleotide
tttgctataagatgggtggcaagttgtcaaaacgtatgagggaatgggctactgtaag

SEQ ID NO: 485054 - DNA, 57 bp, Artificial
  Synthetic oligonucleotide
tttgctatattaggcacaatagagcacttgaatcgcacagtatcgcctactcaagat

SEQ ID NO: 485055 - DNA, 60 bp, Artificial
  Synthetic oligonucleotide
tttgctcaaacaggttatgcgccagtagaatggacgcatggcgatataacaactgatgaa

SEQ ID NO: 485056 - DNA, 59 bp, Artificial
  Synthetic oligonucleotide
tttgctcacccctctgcctccccaacgtcactactatcctgacatcaccctttcgccca

SEQ ID NO: 485057 - DNA, 55 bp, Artificial
  Synthetic oligonucleotide
tttgctcagaaccctagttctgggagcttggcttcaacctgaccccgtaccctcc

SEQ ID NO: 485058 - DNA, 60 bp, Artificial
  Synthetic oligonucleotide
tttgctcatatcttggcatcccatacacaataagacagagtgattcttggctcaagaagt

SEQ ID NO: 485059 - DNA, 58 bp, Artificial
  Synthetic oligonucleotide
tttgctcccttttccaaggacaattcaatccgactctctgctggtggagacatttggg

SEQ ID NO: 485060 - DNA, 55 bp, Artificial
  Synthetic oligonucleotide
tttgctcctcccgtataagccagccatatctcacggcaacccacaaacgtccctg

SEQ ID NO: 485061 - DNA, 60 bp, Artificial
  Synthetic oligonucleotide
tttgctcggaaagcgggcacaacgcgacctgttgactggtgcagaagagaaccacttcat

SEQ ID NO: 485062 - DNA, 55 bp, Artificial
  Synthetic oligonucleotide
tttgctcgtgtaggccctcctactttactggagttgtaccagcgtaggctttacc

SEQ ID NO: 485063 - DNA, 60 bp, Artificial
  Synthetic oligonucleotide
tttgctctcatagtgaatgcaccgaatcatgaggggatacaagcaggagtagatagattc

SEQ ID NO: 485064 - DNA, 60 bp, Artificial
  Synthetic oligonucleotide
tttgctctgagccaaggcacaacactcagagggcgacatgcgaatgggaccatacatgat

SEQ ID NO: 485065 - DNA, 60 bp, Artificial
  Synthetic oligonucleotide
tttgctgaatactttagccatagcagtagctgagggaacagataggattatagaagcagt

SEQ ID NO: 485066 - DNA, 60 bp, Artificial
  Synthetic oligonucleotide
tttgctgagagtgagatcggatcagccgcgatcgatgggctagttcaaggcagtgtgcac

SEQ ID NO: 485067 - DNA, 60 bp, Artificial
  Synthetic oligonucleotide
tttgctgagttatttggaccttattctgctgcatatgctaatatgcacctcttggattct

SEQ ID NO: 485068 - DNA, 56 bp, Artificial
  Synthetic oligonucleotide
tttgctgccggtgttaggcagcgtgatccctccggacatggaaaccttcgtggacg

SEQ ID NO: 485069 - DNA, 60 bp, Artificial
  Synthetic oligonucleotide
tttgctgcttgagtagtctctgaatgaaatgttaaaatcccagacagcaggtgaaatccc

SEQ ID NO: 485070 - DNA, 60 bp, Artificial
  Synthetic oligonucleotide
tttgctggaggactggcaattaggcttcgtgccaactcctgacaatcctattcatgacac

SEQ ID NO: 485071 - DNA, 60 bp, Artificial
  Synthetic oligonucleotide
tttgctggcctcataaacctcagtagcgtgcccaccaatcgcatgatacgctatgagtac

SEQ ID NO: 485072 - DNA, 56 bp, Artificial
  Synthetic oligonucleotide
tttgctggcgtcgatgcggtaacccataccaccggggggagtgccgctcggaccgc

SEQ ID NO: 485073 - DNA, 55 bp, Artificial
  Synthetic oligonucleotide
tttgctggctaccgctctacacctcttccgatataccagtctctcagtacccgac

SEQ ID NO: 485074 - DNA, 60 bp, Artificial
  Synthetic oligonucleotide
tttgctgggacgccttgattgcgacatggtgtgaagacccgcgtgtgcttaactgtgagt

SEQ ID NO: 485075 - DNA, 53 bp, Artificial
  Synthetic oligonucleotide
tttgctggggggacctaataactctaagtacctgggtgggtgctaatttggaa

SEQ ID NO: 485076 - DNA, 60 bp, Artificial
  Synthetic oligonucleotide
tttgctggtgatgattcgctagctatcagttcgtctccgattgtcgggtgttcagattac

SEQ ID NO: 485077 - DNA, 56 bp, Artificial
  Synthetic oligonucleotide
tttgctgtaaaatgggtggcaagtggtcaaaaactagtataattggatggcctaag

SEQ ID NO: 485078 - DNA, 55 bp, Artificial
  Synthetic oligonucleotide
tttgctgtcgccaacagatgttccttggttaacacagcaaccacttcagttaaca

SEQ ID NO: 485079 - DNA, 56 bp, Artificial
  Synthetic oligonucleotide
tttgctgttgtcaaaagcgctccgcctgcgggcgttgcatttttgacagccgataa

SEQ ID NO: 485080 - DNA, 59 bp, Artificial
  Synthetic oligonucleotide
tttgcttaagcataccagatgtacccaccttcccaatcggcctgtggaagaatccgaca

SEQ ID NO: 485081 - DNA, 55 bp, Artificial
  Synthetic oligonucleotide
tttgcttcgttagtaagcaaaggtaacgaatataaatgaccccacattgctttat

SEQ ID NO: 485082 - DNA, 54 bp, Artificial
  Synthetic oligonucleotide
tttgcttgatacggtggttttaatgcaccgggcggcccggctcgccggcccttg

SEQ ID NO: 485083 - DNA, 52 bp, Artificial
  Synthetic oligonucleotide
tttgcttgctgaatacgagggcgtagaagtacattacacccgtacagacgac

SEQ ID NO: 485084 - DNA, 60 bp, Artificial
  Synthetic oligonucleotide
tttgcttgtcatacgcagtgatgctttcatttcacttgccggtgatccatgtcagagcac

SEQ ID NO: 485085 - DNA, 55 bp, Artificial
  Synthetic oligonucleotide
tttgctttatacacagatgtcaacgccgctaccgacgctcccgtcgcccgattta

SEQ ID NO: 485086 - DNA, 60 bp, Artificial
  Synthetic oligonucleotide
tttggaaaagatcagagaccctcaagtacagtcaagcatatgcgaagcagcataccaaca

SEQ ID NO: 485087 - DNA, 58 bp, Artificial
  Synthetic oligonucleotide
tttggaaaagatcagggacccacaagtacaatctagcatttgtgaagccgcttaccaa

SEQ ID NO: 485088 - DNA, 55 bp, Artificial
  Synthetic oligonucleotide
tttggaaacactggataacaactaaggaagggcattgtggtttgccaattgtgtc

SEQ ID NO: 485089 - DNA, 54 bp, Artificial
  Synthetic oligonucleotide
tttggaaaccgccggctgtaggggatcaagcggtgggagtccacctcgtggagg

SEQ ID NO: 485090 - DNA, 53 bp, Artificial
  Synthetic oligonucleotide
tttggaaaccgcctccaaacacaccgttcccaccaggttgacattcaccagtt

SEQ ID NO: 485091 - DNA, 59 bp, Artificial
  Synthetic oligonucleotide
tttggaaaccttatatccttcaggaattattgatcaggctaaaaacatggtgcttgata

SEQ ID NO: 485092 - DNA, 57 bp, Artificial
  Synthetic oligonucleotide
tttggaaagcactccggcccgaagggttgagtagcttccagagggagacatccacac

SEQ ID NO: 485093 - DNA, 55 bp, Artificial
  Synthetic oligonucleotide
tttggaaagcattccgggccgaagggttgagtagcacccagagggaggaatccac

SEQ ID NO: 485094 - DNA, 52 bp, Artificial
  Synthetic oligonucleotide
tttggaaaggaaagctaaccctaaaagcaaaacttagacctaatgctacttg

SEQ ID NO: 485095 - DNA, 56 bp, Artificial
  Synthetic oligonucleotide
tttggaaatcctagacgcagcacaacttcagtgactgtaccgcgatttgaaactcc

SEQ ID NO: 485096 - DNA, 58 bp, Artificial
  Synthetic oligonucleotide
tttggaacctcccagataaaaacggaattctctgcctgacgcgcagtgatgttctccc

SEQ ID NO: 485097 - DNA, 60 bp, Artificial
  Synthetic oligonucleotide
tttggaacctggcatgctaccaatcaagacacaggaaataatgcctggtttgttcgtggc

SEQ ID NO: 485098 - DNA, 50 bp, Artificial
  Synthetic oligonucleotide
tttggaacgcgcacttaacctctggctcgctaaggactttgggccgggca

SEQ ID NO: 485099 - DNA, 60 bp, Artificial
  Synthetic oligonucleotide
tttggaagacttaagagcacatgtgccaccagcgtttcgtatacactgtcaacgcagcca

SEQ ID NO: 485100 - DNA, 55 bp, Artificial
  Synthetic oligonucleotide
tttggaagatgtgctagaggacgtgctagaaacctggtttgattgcgcaccctcg

SEQ ID NO: 485101 - DNA, 56 bp, Artificial
  Synthetic oligonucleotide
tttggaaggcggtaatggaggtgtctccggaaccggtacgagcaattatggatcta

SEQ ID NO: 485102 - DNA, 60 bp, Artificial
  Synthetic oligonucleotide
tttggaagggttccaacgggtgaatttccattacatcagatgatgctgataagacgcgat

SEQ ID NO: 485103 - DNA, 60 bp, Artificial
  Synthetic oligonucleotide
tttggaaggtgcgttcaaggcttctgcggcagcatcgttagctgtctggcaaccgcctct

SEQ ID NO: 485104 - DNA, 57 bp, Artificial
  Synthetic oligonucleotide
tttggaatgataccgttccctcaacaaagccaaatccgaatcaaggttgctcttcat

SEQ ID NO: 485105 - DNA, 60 bp, Artificial
  Synthetic oligonucleotide
tttggaatgggatagaagtagagaattttcacataggcttgatgccatatgtgcagcaat

SEQ ID NO: 485106 - DNA, 51 bp, Artificial
  Synthetic oligonucleotide
tttggacaacaatccggggccatttacgtgggtaactttagagtggttaac

SEQ ID NO: 485107 - DNA, 53 bp, Artificial
  Synthetic oligonucleotide
tttggacaatattaaaaccgaacgattcaatcttttttgagagtactgggaac

SEQ ID NO: 485108 - DNA, 58 bp, Artificial
  Synthetic oligonucleotide
tttggaccaaaggacccaaccatcagaacccttttgagacactcccaggacatgctca

SEQ ID NO: 485109 - DNA, 51 bp, Artificial
  Synthetic oligonucleotide
tttggaccaagcctctgacttgtaaactgctctatgcttttcaacgaattc

SEQ ID NO: 485110 - DNA, 55 bp, Artificial
  Synthetic oligonucleotide
tttggacccctccggtaggaaccatcagtcccggagagctcctcctgcccaacaa

SEQ ID NO: 485111 - DNA, 60 bp, Artificial
  Synthetic oligonucleotide
tttggaccctgaattgattgcctcggcatatgcgtcgttggcagactgccaacctcctct

SEQ ID NO: 485112 - DNA, 60 bp, Artificial
  Synthetic oligonucleotide
tttggacctattgatcacgtacgattgtttaatgatctgaagctatatcaaggttattat

SEQ ID NO: 485113 - DNA, 55 bp, Artificial
  Synthetic oligonucleotide
tttggacctctagtagctccacggtattttgtggtgtttcaagtgaggtcccagg

SEQ ID NO: 485114 - DNA, 60 bp, Artificial
  Synthetic oligonucleotide
tttggacctctgaagatcaggtcatgtggcaagatgttgtggacagttttcaagtcaggg

SEQ ID NO: 485115 - DNA, 60 bp, Artificial
  Synthetic oligonucleotide
tttggacctctggtcctgcaacttgaggtagtcaagatgcataataaataacggattgtg

SEQ ID NO: 485116 - DNA, 60 bp, Artificial
  Synthetic oligonucleotide
tttggacctgcttagagccagagactacggcagtgatgtgaagaataagagaattggtgc

SEQ ID NO: 485117 - DNA, 59 bp, Artificial
  Synthetic oligonucleotide
tttggactaagatccaggtgtccacacaagtagttgtgtggtcccagagagcgggccca

SEQ ID NO: 485118 - DNA, 57 bp, Artificial
  Synthetic oligonucleotide
tttggactcatcagaagtagcaaattgttacttctacgatcttaagcgttgggtcgg

SEQ ID NO: 485119 - DNA, 60 bp, Artificial
  Synthetic oligonucleotide
tttggacttaaatctaaatggccacacagataattatgtggtcccaatgatctagcccac

SEQ ID NO: 485120 - DNA, 53 bp, Artificial
  Synthetic oligonucleotide
tttggacttacccgcttgagcagcgctctgatgattctcgccgaaacatcgcc

SEQ ID NO: 485121 - DNA, 57 bp, Artificial
  Synthetic oligonucleotide
tttggacttgtgtacccggaaacgccccaggcattaagcgccacacatgtgtgttta

SEQ ID NO: 485122 - DNA, 60 bp, Artificial
  Synthetic oligonucleotide
tttggagaccagtgtatacaccacagtatctcatctccccggacactctcaggaaactgc

SEQ ID NO: 485123 - DNA, 58 bp, Artificial
  Synthetic oligonucleotide
tttggagagcactccgggccgaagggttgagtagcatccagagcgaggaacccacacg

SEQ ID NO: 485124 - DNA, 54 bp, Artificial
  Synthetic oligonucleotide
tttggagagtgatctcgtagagtgtcaaggtaatggacccgtttcagacggagt

SEQ ID NO: 485125 - DNA, 58 bp, Artificial
  Synthetic oligonucleotide
tttggagatcctggagacataatgtcaacaacgagtgggatgagatgtcctgagcata

SEQ ID NO: 485126 - DNA, 55 bp, Artificial
  Synthetic oligonucleotide
tttggagcctctcctttgaccgagggatacgtggttctgttgggcggcgaggggc

SEQ ID NO: 485127 - DNA, 50 bp, Artificial
  Synthetic oligonucleotide
tttggagctaccaccgattgagagacttcgccttgattgcaaagagggct

SEQ ID NO: 485128 - DNA, 60 bp, Artificial
  Synthetic oligonucleotide
tttggagctcgagctttgtttacaaggcatcttgatagagcttttcgagctcgaattaga

SEQ ID NO: 485129 - DNA, 57 bp, Artificial
  Synthetic oligonucleotide
tttggaggagcaatggcaaggattaggattgttggaacgattgtctttaataaagcg

SEQ ID NO: 485130 - DNA, 55 bp, Artificial
  Synthetic oligonucleotide
tttggaggaggtatgtaccacgtcccgggatagtgttagttcaagaccgtctgtg

SEQ ID NO: 485131 - DNA, 60 bp, Artificial
  Synthetic oligonucleotide
tttggaggcggatcgagaacttctctatgccacagggtaattcacagcgcacgttagctg

SEQ ID NO: 485132 - DNA, 60 bp, Artificial
  Synthetic oligonucleotide
tttggagtaagctacagtgagctcacgcgcgcgtttaagagccataagacatgcaatccc

SEQ ID NO: 485133 - DNA, 54 bp, Artificial
  Synthetic oligonucleotide
tttggagtcatccggcccgtaggggagaatagaacaccggggggtgatccacca

SEQ ID NO: 485134 - DNA, 54 bp, Artificial
  Synthetic oligonucleotide
tttggagtggtcctcatatgcgctcggcacgtgtaggtattcctggtacttata

SEQ ID NO: 485135 - DNA, 60 bp, Artificial
  Synthetic oligonucleotide
tttggagtgtatgctgattcttatgatcatctgtcccctgacttcattctaaaaacagct

SEQ ID NO: 485136 - DNA, 60 bp, Artificial
  Synthetic oligonucleotide
tttggagtgtggattcgcactcctccagcatacagaccaccaaatgcccctatcttatcc

SEQ ID NO: 485137 - DNA, 55 bp, Artificial
  Synthetic oligonucleotide
tttggatatttaggagttgggagaggcagtcctctttagataaagaacagcgtgg

SEQ ID NO: 485138 - DNA, 58 bp, Artificial
  Synthetic oligonucleotide
tttggatccgtaattggcaagtggccaatctaggacatttgacccacaattccggata

SEQ ID NO: 485139 - DNA, 60 bp, Artificial
  Synthetic oligonucleotide
tttggatcctggaaggcttgtcagacgctggctctcatgcatgattatgtcgttcttttc

SEQ ID NO: 485140 - DNA, 55 bp, Artificial
  Synthetic oligonucleotide
tttggatcgcttaaagggtttagctgatggaatggtgggtaacccgcagggtcag

SEQ ID NO: 485141 - DNA, 57 bp, Artificial
  Synthetic oligonucleotide
tttggatctgcgtaaaaggaaatcaagtgaccatccggaccttgtatggaataacac

SEQ ID NO: 485142 - DNA, 58 bp, Artificial
  Synthetic oligonucleotide
tttggatctggtgactgagttcaagggggtgctgcaggccaaaaacggaaatggactc

SEQ ID NO: 485143 - DNA, 60 bp, Artificial
  Synthetic oligonucleotide
tttggatgattatgttatgccaggaccggacagtattacaaagcaagagggagagtattc

SEQ ID NO: 485144 - DNA, 60 bp, Artificial
  Synthetic oligonucleotide
tttggatgctgctgcgcgcatagcgagtgttaagcttgtctatcgcgctggcaaacttat

SEQ ID NO: 485145 - DNA, 60 bp, Artificial
  Synthetic oligonucleotide
tttggatggaaatgtgctgacctggttggggaggccagatcgaagaatctgttattcttg

SEQ ID NO: 485146 - DNA, 55 bp, Artificial
  Synthetic oligonucleotide
tttggatggtgcttcaagctagtaccagttgacccaagtgaagtagaggagaaca

SEQ ID NO: 485147 - DNA, 55 bp, Artificial
  Synthetic oligonucleotide
tttggatgtgtagtagttgggctaggcagtcctctttagatagagaacagcgtgg

SEQ ID NO: 485148 - DNA, 60 bp, Artificial
  Synthetic oligonucleotide
tttggattaaatgtagacagttatgtaacaagaatagtacgcatcgagaggacacgtata

SEQ ID NO: 485149 - DNA, 59 bp, Artificial
  Synthetic oligonucleotide
tttggattacgatgcttcggctaatattgttacgcttagcccgaactatcgtatcagaa

SEQ ID NO: 485150 - DNA, 53 bp, Artificial
  Synthetic oligonucleotide
tttggattacttggaacaactctactaaacttagacgctaactacgtcgaaac

SEQ ID NO: 485151 - DNA, 58 bp, Artificial
  Synthetic oligonucleotide
tttggatttgtttccaaagtctaactcttctttcacgtacctcagcaggactatgtca

SEQ ID NO: 485152 - DNA, 56 bp, Artificial
  Synthetic oligonucleotide
tttggcaatggactctctatccgcaccagtttttaaatcttagaactaatacgacg

SEQ ID NO: 485153 - DNA, 57 bp, Artificial
  Synthetic oligonucleotide
tttggcacaacctacgttctggaacttcccacagatcataagggtatctacggacaa

SEQ ID NO: 485154 - DNA, 59 bp, Artificial
  Synthetic oligonucleotide
tttggcacagtctaacctgtctacgcagcgatctgtccgtaagcgtgcacgttccccgt

SEQ ID NO: 485155 - DNA, 55 bp, Artificial
  Synthetic oligonucleotide
tttggcagaacaccctgttctacgctggcaagggcggtggcggtggcgtgatgct

SEQ ID NO: 485156 - DNA, 60 bp, Artificial
  Synthetic oligonucleotide
tttggcagacaagtaactgaaggagtaacacatctacggtttacaaatgacatcatgaca

SEQ ID NO: 485157 - DNA, 60 bp, Artificial
  Synthetic oligonucleotide
tttggcagacctgagagctgtaaatttcgaggttaatacatccaggtcagaggtgtctgc

SEQ ID NO: 485158 - DNA, 55 bp, Artificial
  Synthetic oligonucleotide
tttggcagtcttgctaacaacaaaatcatggctgagtgcctagtaccggtaacgg

SEQ ID NO: 485159 - DNA, 58 bp, Artificial
  Synthetic oligonucleotide
tttggccagacgacgcgcgtactttcttatccataccgttcgagtcacctatggtgat

SEQ ID NO: 485160 - DNA, 60 bp, Artificial
  Synthetic oligonucleotide
tttggccatacacttaatatccaactacaagctcatcaagtgtttcgagaatagttctaa

SEQ ID NO: 485161 - DNA, 58 bp, Artificial
  Synthetic oligonucleotide
tttggcccaaccactatgctagagagtttagccactttggttagttcgtggtcgagca

SEQ ID NO: 485162 - DNA, 58 bp, Artificial
  Synthetic oligonucleotide
tttggcccactctcaagaaaatgcttcatctccgtttcaagatcgaacggacctccca

SEQ ID NO: 485163 - DNA, 55 bp, Artificial
  Synthetic oligonucleotide
tttggccctaccgttcaagcccctcccgtcgcgccagtgtctgttcctggtgcgt

SEQ ID NO: 485164 - DNA, 60 bp, Artificial
  Synthetic oligonucleotide
tttggccctcatgcatgatgctgttgtccttatcctgggccccgtcaagaagtaccagag

SEQ ID NO: 485165 - DNA, 60 bp, Artificial
  Synthetic oligonucleotide
tttggcctattagttgtgcctattagcccactagactatgaccagggagcgacgccagta

SEQ ID NO: 485166 - DNA, 60 bp, Artificial
  Synthetic oligonucleotide
tttggcctcccggctgcccatgctacacaacctgcgcatgacaggttcaaatgtaaccat

SEQ ID NO: 485167 - DNA, 51 bp, Artificial
  Synthetic oligonucleotide
tttggcctgctctaggcttaagcagctaggttcaaggagcatgtatgcttt

SEQ ID NO: 485168 - DNA, 55 bp, Artificial
  Synthetic oligonucleotide
tttggcctgggctcttcgccgacacctcacactggctggacagtttcaagccatc

SEQ ID NO: 485169 - DNA, 60 bp, Artificial
  Synthetic oligonucleotide
tttggcgactcaccaggcgcgctcagcacatcaccgagctttcgcatcaatccgccggtg

SEQ ID NO: 485170 - DNA, 55 bp, Artificial
  Synthetic oligonucleotide
tttggcgatgcgggctacaccggcgtggacaagcgcgaggagatgaagggcaaga

SEQ ID NO: 485171 - DNA, 60 bp, Artificial
  Synthetic oligonucleotide
tttggcgcacgaagtcgagctatgccagcgtgtggggtgctgatgagtctagagtggttc

SEQ ID NO: 485172 - DNA, 60 bp, Artificial
  Synthetic oligonucleotide
tttggcgccaagcgaacaatggagaagacgcaactgctggtctcactcacttgatgatct

SEQ ID NO: 485173 - DNA, 60 bp, Artificial
  Synthetic oligonucleotide
tttggcgtcaagcgaacaatggagaggacgcaactgctggtcttacccatctgatgatat

SEQ ID NO: 485174 - DNA, 52 bp, Artificial
  Synthetic oligonucleotide
tttggcgtctggtaaatctgcaatccgattcgagcgacgattggccgatcca

SEQ ID NO: 485175 - DNA, 56 bp, Artificial
  Synthetic oligonucleotide
tttggcgtgatcaaccaacgtaggttatacgataataaccggtgcttttatgttca

SEQ ID NO: 485176 - DNA, 56 bp, Artificial
  Synthetic oligonucleotide
tttggcgttaacttatagtagactcgggggtcaggacttacattatatctttgcac

SEQ ID NO: 485177 - DNA, 50 bp, Artificial
  Synthetic oligonucleotide
tttggctaatgctggtgactttgttgatgtcagttcaatctgtacaagga

SEQ ID NO: 485178 - DNA, 50 bp, Artificial
  Synthetic oligonucleotide
tttggctagcaactatttttaaaggtcactatgacaaacctactgtaaca

SEQ ID NO: 485179 - DNA, 55 bp, Artificial
  Synthetic oligonucleotide
tttggctagttcttgcactacaaacgatctgagtttaccatcgtacactctgtct

SEQ ID NO: 485180 - DNA, 58 bp, Artificial
  Synthetic oligonucleotide
tttggctcaagctcttaggcttgaggaattaatgtggactcgggataagtttgaggac

SEQ ID NO: 485181 - DNA, 50 bp, Artificial
  Synthetic oligonucleotide
tttggctcacgaaaatcacgctacaagaaagccaggagagttgtggatat

SEQ ID NO: 485182 - DNA, 55 bp, Artificial
  Synthetic oligonucleotide
tttggctcgtgaccgaatagtcatattcgcactgaataaattgtacacaacagtt

SEQ ID NO: 485183 - DNA, 55 bp, Artificial
  Synthetic oligonucleotide
tttggctgacaatgaaaggatcaaattacccggttgccaaagggtcgtataacaa

SEQ ID NO: 485184 - DNA, 57 bp, Artificial
  Synthetic oligonucleotide
tttggctgcctgaatgtttgggtgaaaacaggcagaccttctggggtgagtaaggtc

SEQ ID NO: 485185 - DNA, 55 bp, Artificial
  Synthetic oligonucleotide
tttggctggggctctgcgcatagcggagcattatgattgtctttcaagctttccc

SEQ ID NO: 485186 - DNA, 60 bp, Artificial
  Synthetic oligonucleotide
tttggcttcagacaaggtaatagtgtgtgggcaggaagaacagtcagcatttcgtcccga

SEQ ID NO: 485187 - DNA, 60 bp, Artificial
  Synthetic oligonucleotide
tttggcttcgcttacacatggacagctatagcactgatgataggcacatattacatgttg

SEQ ID NO: 485188 - DNA, 55 bp, Artificial
  Synthetic oligonucleotide
tttggcttgttctggatcagtagttgcaacagctcgagacctagatctttcgggg

SEQ ID NO: 485189 - DNA, 51 bp, Artificial
  Synthetic oligonucleotide
tttgggaaaggggtacaagttcgtcagcgctgttccgtactgtatacctat

SEQ ID NO: 485190 - DNA, 58 bp, Artificial
  Synthetic oligonucleotide
tttgggaacaatggtggcaggagtactggcaggtaacatggatccctgattgggaatt

SEQ ID NO: 485191 - DNA, 50 bp, Artificial
  Synthetic oligonucleotide
tttgggaacagggaatttaccagaagaccatctgtcacgcaggccaacca

SEQ ID NO: 485192 - DNA, 60 bp, Artificial
  Synthetic oligonucleotide
tttgggaaccagacaagtatgtatagcatggtctagttcaagttgtcacgatgggaaagc

SEQ ID NO: 485193 - DNA, 54 bp, Artificial
  Synthetic oligonucleotide
tttgggacgcacactcaggacggtgacgagatattctgtgaccttggaggtgag

SEQ ID NO: 485194 - DNA, 51 bp, Artificial
  Synthetic oligonucleotide
tttgggactctaccgtccccttcttcatttgccgttccggccaaccacggg

SEQ ID NO: 485195 - DNA, 58 bp, Artificial
  Synthetic oligonucleotide
tttgggactgaagatgaagtgtataacttatggcgagtctacaggacttaacttccaa

SEQ ID NO: 485196 - DNA, 58 bp, Artificial
  Synthetic oligonucleotide
tttgggactggttgtaactgcattgtctcggtttttccagaagctgtgttcctatgtg

SEQ ID NO: 485197 - DNA, 59 bp, Artificial
  Synthetic oligonucleotide
tttgggagaccggaactgtatgtcagttgactgctttgcagtcgatagctttagtttcc

SEQ ID NO: 485198 - DNA, 55 bp, Artificial
  Synthetic oligonucleotide
tttgggaggttattcgatgggctcggagtaatgttggacgccaggctcttgagac

SEQ ID NO: 485199 - DNA, 55 bp, Artificial
  Synthetic oligonucleotide
tttgggagttgcgatattccaaagcatgtagccgagtccatcactaaggttgcca

SEQ ID NO: 485200 - DNA, 55 bp, Artificial
  Synthetic oligonucleotide
tttgggatcatgccgagggggactacacccagagccccggtgaggttccctacga

SEQ ID NO: 485201 - DNA, 59 bp, Artificial
  Synthetic oligonucleotide
tttgggatgaagcagaattagcctatcaatatgcatgtttagcagatgtggaaccaaat

SEQ ID NO: 485202 - DNA, 59 bp, Artificial
  Synthetic oligonucleotide
tttgggattcaacatatcgcacgaagttaaatactagacatatatcgcaccctgatata

SEQ ID NO: 485203 - DNA, 55 bp, Artificial
  Synthetic oligonucleotide
tttgggattcgctgctccctttacacagtgtgggtaccctgccttaatgcccttg

SEQ ID NO: 485204 - DNA, 51 bp, Artificial
  Synthetic oligonucleotide
tttgggcacgcccggactacaaccccccgttgctggaggtgtggaaaaaac

SEQ ID NO: 485205 - DNA, 55 bp, Artificial
  Synthetic oligonucleotide
tttgggcacggccggactataatcccccgttggtagagacgtggaagaagcctga

SEQ ID NO: 485206 - DNA, 60 bp, Artificial
  Synthetic oligonucleotide
tttgggcatagcgacgcagcgtgctggggcttccccaccgacaccgtgatgagtgtgttc

SEQ ID NO: 485207 - DNA, 57 bp, Artificial
  Synthetic oligonucleotide
tttgggccaaaattccacacacggatggacactttcacccgtctcctctcattggcg

SEQ ID NO: 485208 - DNA, 55 bp, Artificial
  Synthetic oligonucleotide
tttgggccatattaattggatttaatgtgatttggcctttgaaagtggcctgttg

SEQ ID NO: 485209 - DNA, 56 bp, Artificial
  Synthetic oligonucleotide
tttgggcccaggattgcataaaaagatggtggggataccacctttaatgtgagtgg

SEQ ID NO: 485210 - DNA, 51 bp, Artificial
  Synthetic oligonucleotide
tttgggcccatatcgttcgttagagtagatgaagacatgtggagcggtgac

SEQ ID NO: 485211 - DNA, 59 bp, Artificial
  Synthetic oligonucleotide
tttgggccccaagcaattctttccagtgctttaactttagatagtgcggtgcgatgtca

SEQ ID NO: 485212 - DNA, 56 bp, Artificial
  Synthetic oligonucleotide
tttgggcccccatgaactccttaaagtgctttaggtaatggggatcgacgtcatca

SEQ ID NO: 485213 - DNA, 58 bp, Artificial
  Synthetic oligonucleotide
tttgggcccccatgaattccttgaaatgttttacatagtgaggatcaacatcgtctat

SEQ ID NO: 485214 - DNA, 53 bp, Artificial
  Synthetic oligonucleotide
tttgggccttcccactattctagggcgaccacccctattcttggaaaaatgcc

SEQ ID NO: 485215 - DNA, 52 bp, Artificial
  Synthetic oligonucleotide
tttgggcgaccgcagtcgttacttctccatgtggaaccaggccgtagacagc

SEQ ID NO: 485216 - DNA, 56 bp, Artificial
  Synthetic oligonucleotide
tttgggcgcggccagactacaaccccccgctgatagagacgtggaaaaagcctgac

SEQ ID NO: 485217 - DNA, 54 bp, Artificial
  Synthetic oligonucleotide
tttgggctacttgcgcttcctaaccaagggggagcgccaggcaaacctgaactt

SEQ ID NO: 485218 - DNA, 60 bp, Artificial
  Synthetic oligonucleotide
tttgggctgagcaacgttcatgcgatcaccttccgatccactttgctgacccccgctacc

SEQ ID NO: 485219 - DNA, 60 bp, Artificial
  Synthetic oligonucleotide
tttgggcttaggtccagatgtccgcacaggtaattgtgttggcccagagatctagcccac

SEQ ID NO: 485220 - DNA, 55 bp, Artificial
  Synthetic oligonucleotide
tttggggaccctggtgacatcatgtcgacaacaagtgggatgagatgccctgagc

SEQ ID NO: 485221 - DNA, 60 bp, Artificial
  Synthetic oligonucleotide
tttggggacgtgccacaagaacagttggacaatcagattagagatcttcagagtgaagtt

SEQ ID NO: 485222 - DNA, 57 bp, Artificial
  Synthetic oligonucleotide
tttggggacgtgccggttcaacgtcccagcaggtacaacgctgcaattccctgcacc

SEQ ID NO: 485223 - DNA, 56 bp, Artificial
  Synthetic oligonucleotide
tttggggactaccggctagtcttgctcgacgaacactcgcagggggtaattctgag

SEQ ID NO: 485224 - DNA, 56 bp, Artificial
  Synthetic oligonucleotide
tttggggatagtggggcacgattttgggtaacccctatgagctctcccatggcacc

SEQ ID NO: 485225 - DNA, 56 bp, Artificial
  Synthetic oligonucleotide
tttggggcacagtatacctggggttccttctctggtgggctccctagagatctcgt

SEQ ID NO: 485226 - DNA, 53 bp, Artificial
  Synthetic oligonucleotide
tttggggcccaggttgtctaggagttcttctcgagaggcgggcagtgggtgcc

SEQ ID NO: 485227 - DNA, 56 bp, Artificial
  Synthetic oligonucleotide
tttggggggcactctcgggccgaagggttgagtagcactcagagggagaaaccaca

SEQ ID NO: 485228 - DNA, 59 bp, Artificial
  Synthetic oligonucleotide
tttggggggtgcaccatcccaatgatgagaaagaacaaagaacattgtaccagaatgtg

SEQ ID NO: 485229 - DNA, 51 bp, Artificial
  Synthetic oligonucleotide
tttggggggttcaccacccgagcacggaaaaagaacaaaccaacctatatg

SEQ ID NO: 485230 - DNA, 55 bp, Artificial
  Synthetic oligonucleotide
tttggggttaccagagatcgtggtacgtagtggagctacacctaggaagagtcgt

SEQ ID NO: 485231 - DNA, 50 bp, Artificial
  Synthetic oligonucleotide
tttgggtaaagtggaatgtgtttgccgagataattggaacggaatgaata

SEQ ID NO: 485232 - DNA, 60 bp, Artificial
  Synthetic oligonucleotide
tttgggtaacaagagaaccttatgtgtcatgcagccccgataaatgttatcagtttgcac

SEQ ID NO: 485233 - DNA, 60 bp, Artificial
  Synthetic oligonucleotide
tttgggtaacaagagagccatatgtgtcatgcagccccgataaatgttatcaattcgcac

SEQ ID NO: 485234 - DNA, 55 bp, Artificial
  Synthetic oligonucleotide
tttgggtaatatgagaccaatccctgacgtgccagcctacgtagcacttgttggt

SEQ ID NO: 485235 - DNA, 58 bp, Artificial
  Synthetic oligonucleotide
tttgggtatgggacctccgcagtgaagatcaggtaaactgatcacagttagcatctcg

SEQ ID NO: 485236 - DNA, 55 bp, Artificial
  Synthetic oligonucleotide
tttgggtcatctgataagacccagtttcccgctgtcggatttgatacccctccgg

SEQ ID NO: 485237 - DNA, 60 bp, Artificial
  Synthetic oligonucleotide
tttgggtctacaatcaagttgcaccatggttgcaccatggatctcaagcacatacttccg

SEQ ID NO: 485238 - DNA, 53 bp, Artificial
  Synthetic oligonucleotide
tttgggtctccgtgaggatggcacgctggcgtgcgatgtgatgggtgtgacct

SEQ ID NO: 485239 - DNA, 55 bp, Artificial
  Synthetic oligonucleotide
tttgggtctgaggaggcgtttgaatcccctgctaacaaaccatttcctggcaccg

SEQ ID NO: 485240 - DNA, 57 bp, Artificial
  Synthetic oligonucleotide
tttgggtcttttgatcctagagaaggctttgcgaagcacggacctggtgccgtttca

SEQ ID NO: 485241 - DNA, 60 bp, Artificial
  Synthetic oligonucleotide
tttgggtgacaagagagccttatgtgtcatgcggctccggtaaatgttatcaatttgcac

SEQ ID NO: 485242 - DNA, 60 bp, Artificial
  Synthetic oligonucleotide
tttgggtgacgagagaaccttatgtgtcatgcgatcctggtaagtgctaccaattcgcac

SEQ ID NO: 485243 - DNA, 60 bp, Artificial
  Synthetic oligonucleotide
tttgggtgcgtatccttgacgaggtgttgcgcactggcagtactactgttcgttacagca

SEQ ID NO: 485244 - DNA, 58 bp, Artificial
  Synthetic oligonucleotide
tttgggtgtgatgtacttgtgaaccccgtgcgcgcggaaaactgcgctgtgggttcaa

SEQ ID NO: 485245 - DNA, 52 bp, Artificial
  Synthetic oligonucleotide
tttgggttacgataaatctcttacgttaaagacgcggggtgatgttcgtcgt

SEQ ID NO: 485246 - DNA, 59 bp, Artificial
  Synthetic oligonucleotide
tttgggttcactgaatttgccatcgtactcgccgatggtgaatgataaggaccagggaa

SEQ ID NO: 485247 - DNA, 56 bp, Artificial
  Synthetic oligonucleotide
tttggtaaacacggttgattgtgtgttacgttttgagtctgaacttacagtgtgga

SEQ ID NO: 485248 - DNA, 59 bp, Artificial
  Synthetic oligonucleotide
tttggtaacactttagtgacaatggctttattctcctggtgttatgacactgatcagtt

SEQ ID NO: 485249 - DNA, 55 bp, Artificial
  Synthetic oligonucleotide
tttggtaagtgtggtatcgctgaccttgcgataattcatgaggacggagtgcatc

SEQ ID NO: 485250 - DNA, 55 bp, Artificial
  Synthetic oligonucleotide
tttggtaatgcaaggcgtagtactactacatacacagttcctcgatttgagtctc

SEQ ID NO: 485251 - DNA, 59 bp, Artificial
  Synthetic oligonucleotide
tttggtacttcccagataaaaacggaattctctgcctgatccacagtgatgctctcccc

SEQ ID NO: 485252 - DNA, 50 bp, Artificial
  Synthetic oligonucleotide
tttggtagagctattctcaacatacctagaagaatcaggcagggcttaga

SEQ ID NO: 485253 - DNA, 54 bp, Artificial
  Synthetic oligonucleotide
tttggtagctcctgtgtggactttaagttggaacattagagaaacccgtcaagg

SEQ ID NO: 485254 - DNA, 59 bp, Artificial
  Synthetic oligonucleotide
tttggtaggagaaccatcagactggagatcaaaaatgaaggtctctagaagacagtatt

SEQ ID NO: 485255 - DNA, 55 bp, Artificial
  Synthetic oligonucleotide
tttggtaggagcgacgcccacttctctcgcattgggagttgctctggccgccctc

SEQ ID NO: 485256 - DNA, 55 bp, Artificial
  Synthetic oligonucleotide
tttggtataagaaaggattgacaaatgcatgtgtagtgacaggtgagatgccacc

SEQ ID NO: 485257 - DNA, 56 bp, Artificial
  Synthetic oligonucleotide
tttggtatgggtcgaagcgaaaccaaattcgcaacgatcaatccggaagatgtcta

SEQ ID NO: 485258 - DNA, 57 bp, Artificial
  Synthetic oligonucleotide
tttggtcaaactccattcaggggttgacgtgttctacaaacccacagagcaagtgga

SEQ ID NO: 485259 - DNA, 57 bp, Artificial
  Synthetic oligonucleotide
tttggtcagagttgaatattggaacaggaacctcagcttatacttcacttaatgttt

SEQ ID NO: 485260 - DNA, 55 bp, Artificial
  Synthetic oligonucleotide
tttggtcattgtcactacctggaactccccactgaacacaaaggcgtgtacggca

SEQ ID NO: 485261 - DNA, 52 bp, Artificial
  Synthetic oligonucleotide
tttggtccccagggttgatggtggtaactatttaaaacccgtgctcaatacg

SEQ ID NO: 485262 - DNA, 53 bp, Artificial
  Synthetic oligonucleotide
tttggtcccgaaatcggcttaacattgaacgctccgtccgtgtctaggtaagg

SEQ ID NO: 485263 - DNA, 55 bp, Artificial
  Synthetic oligonucleotide
tttggtcctgcacactttaaagagtcaagcgaactatcactagtatctcaccctc

SEQ ID NO: 485264 - DNA, 60 bp, Artificial
  Synthetic oligonucleotide
tttggtcggtattctgtcgatcataccggtgactatgagtctgtggttaaatcatgcaag

SEQ ID NO: 485265 - DNA, 60 bp, Artificial
  Synthetic oligonucleotide
tttggtctagtgtgtgccacttgtgagcagattgcagattcacagcatcggtctcacaga

SEQ ID NO: 485266 - DNA, 60 bp, Artificial
  Synthetic oligonucleotide
tttggtctgttctgaactacaccatctactgctgtgaagaatgccctggaggcaagctgg

SEQ ID NO: 485267 - DNA, 58 bp, Artificial
  Synthetic oligonucleotide
tttggtgacccaggagacatcatgagcccaagagacaaaggttttttatgccctgagt

SEQ ID NO: 485268 - DNA, 55 bp, Artificial
  Synthetic oligonucleotide
tttggtgcccgctccctctcacgcgcgctcccctggtgtggtgctaccacgcgcc

SEQ ID NO: 485269 - DNA, 60 bp, Artificial
  Synthetic oligonucleotide
tttggtgcggccgcccgaatctactatcacgttcgtcagtgaaaacgtgccagcgcagac

SEQ ID NO: 485270 - DNA, 59 bp, Artificial
  Synthetic oligonucleotide
tttggtgcttgccacgcagcagccgaactacctcgacacctatctgcgtggattggtcg

SEQ ID NO: 485271 - DNA, 55 bp, Artificial
  Synthetic oligonucleotide
tttggtggacgcgtggacgttggcgcagtggtgggtcctacggaaagcgtagtgc

SEQ ID NO: 485272 - DNA, 53 bp, Artificial
  Synthetic oligonucleotide
tttggtgggcttatgtgattgcggaaacgtttcatttgaacccgcgcgaggta

SEQ ID NO: 485273 - DNA, 60 bp, Artificial
  Synthetic oligonucleotide
tttggtggtgctcctcatatgtttcctgatagattagtactgtatacatccgaacgagga

SEQ ID NO: 485274 - DNA, 59 bp, Artificial
  Synthetic oligonucleotide
tttggtgtctcaaaatatggtcaagttgttggtaagaatctgatcttaccaattacaga

SEQ ID NO: 485275 - DNA, 52 bp, Artificial
  Synthetic oligonucleotide
tttggtgttattcactttagtttattcaaggagcacgttaccacaagttggg

SEQ ID NO: 485276 - DNA, 57 bp, Artificial
  Synthetic oligonucleotide
tttggtgttgcatggcgaacattaaagccacaggctataggcatgcggacacgtcag

SEQ ID NO: 485277 - DNA, 56 bp, Artificial
  Synthetic oligonucleotide
tttggttacgaagggcacaaggccacaacaatggaatattgtgggggaatcaaatg

SEQ ID NO: 485278 - DNA, 54 bp, Artificial
  Synthetic oligonucleotide
tttggttaggtgacactgttacttgtcctagacatgtcatagcaccatcaacca

SEQ ID NO: 485279 - DNA, 56 bp, Artificial
  Synthetic oligonucleotide
tttggttgagacgggtacaattactgttaatacattcttgaactgtcgtcctaaca

SEQ ID NO: 485280 - DNA, 51 bp, Artificial
  Synthetic oligonucleotide
tttggttggtgcgtgatcgtcgtccctatggaacacctatggactttggac

SEQ ID NO: 485281 - DNA, 59 bp, Artificial
  Synthetic oligonucleotide
tttggtttagcttcggggcgtcatgtttcatacttctggccattgcaatgggccttgtc

SEQ ID NO: 485282 - DNA, 57 bp, Artificial
  Synthetic oligonucleotide
tttggtttccacccaaacgctgagtggatcctgaagactctcgtgaacacggaacac

SEQ ID NO: 485283 - DNA, 54 bp, Artificial
  Synthetic oligonucleotide
tttgtaaaagtacaggagcgcagtgcagtgttctccgattggatgaagatctca

SEQ ID NO: 485284 - DNA, 50 bp, Artificial
  Synthetic oligonucleotide
tttgtaaagctttcaaatgaagtctcgttagaatcgagatatgggttata

SEQ ID NO: 485285 - DNA, 59 bp, Artificial
  Synthetic oligonucleotide
tttgtaaataaaaggttgtactccgaatgagctctcgcaaaactcgctctgcaattgga

SEQ ID NO: 485286 - DNA, 57 bp, Artificial
  Synthetic oligonucleotide
tttgtaactagtccaccggtgcaaagttcgcgtcacgtacgcttgaaacatacacaa

SEQ ID NO: 485287 - DNA, 54 bp, Artificial
  Synthetic oligonucleotide
tttgtaagaacccaatccaacaaacccgagcacaaatgggtcactccaaaagcc

SEQ ID NO: 485288 - DNA, 55 bp, Artificial
  Synthetic oligonucleotide
tttgtaagaccagagtttaaaaccttgtgttcaaatgactttcttgtgtgtacaa

SEQ ID NO: 485289 - DNA, 55 bp, Artificial
  Synthetic oligonucleotide
tttgtaaggcagcttctttacttcctgagtttaaggcctctgctgctgcgtcatt

SEQ ID NO: 485290 - DNA, 55 bp, Artificial
  Synthetic oligonucleotide
tttgtaagggcccatgccctgctacgagtgtgtgccctggtgagacaccttgcag

SEQ ID NO: 485291 - DNA, 59 bp, Artificial
  Synthetic oligonucleotide
tttgtaataagaggggtgtacaccgattgagctcctctcaaacttgctgattgtattgg

SEQ ID NO: 485292 - DNA, 50 bp, Artificial
  Synthetic oligonucleotide
tttgtaatcacaagtagacaactacctgggactagcatagcacaagatat

SEQ ID NO: 485293 - DNA, 51 bp, Artificial
  Synthetic oligonucleotide
tttgtacagagataaacactactttgtgaggggtggtatgccatcggggtg

SEQ ID NO: 485294 - DNA, 54 bp, Artificial
  Synthetic oligonucleotide
tttgtacaggttcaaccgttgtgttcagcggcactcccttattgggggtttgtg

SEQ ID NO: 485295 - DNA, 60 bp, Artificial
  Synthetic oligonucleotide
tttgtacattatcccatccatctacagaagagcctgttgattgtggtgtatagttatgtt

SEQ ID NO: 485296 - DNA, 60 bp, Artificial
  Synthetic oligonucleotide
tttgtacattttgaagacttggcgaggcattggcacatattggggagtgtgcaggaagcg

SEQ ID NO: 485297 - DNA, 55 bp, Artificial
  Synthetic oligonucleotide
tttgtacattttgtctcgcatttagagacgccgctttttcttttgggggccatct

SEQ ID NO: 485298 - DNA, 55 bp, Artificial
  Synthetic oligonucleotide
tttgtaccaatttatcagtctgcgggaacttacagcattggttcagtccgcagag

SEQ ID NO: 485299 - DNA, 59 bp, Artificial
  Synthetic oligonucleotide
tttgtacccatagtgattaccaagacaatgtatggttggaattcttgacattcttctgt

SEQ ID NO: 485300 - DNA, 60 bp, Artificial
  Synthetic oligonucleotide
tttgtaccggtggataatgaagaggaggcttacatgcttgtgttcccatatgacggttgc

SEQ ID NO: 485301 - DNA, 60 bp, Artificial
  Synthetic oligonucleotide
tttgtacctcgtgaaggtgatgactttgctccgagtggccctattgactacctcgctgct

SEQ ID NO: 485302 - DNA, 56 bp, Artificial
  Synthetic oligonucleotide
tttgtacgcaaacgcatcgcgtttgatagccttcgaaaatcaccttaaagacgaac

SEQ ID NO: 485303 - DNA, 60 bp, Artificial
  Synthetic oligonucleotide
tttgtactcgttgatggcgttccaggatgtggaaagagtgcagagataatcgaaagatgt

SEQ ID NO: 485304 - DNA, 55 bp, Artificial
  Synthetic oligonucleotide
tttgtagaaaggatcttaccgagtatactatgatggatctgtgttacgctttacg

SEQ ID NO: 485305 - DNA, 59 bp, Artificial
  Synthetic oligonucleotide
tttgtagaccaacctgtgatgcggaatcacctgggtctaatacgcttgggcccaattga

SEQ ID NO: 485306 - DNA, 55 bp, Artificial
  Synthetic oligonucleotide
tttgtagatccatttgtgggtggtgaaatagttggcagtgaagcagtgtatgaag

SEQ ID NO: 485307 - DNA, 52 bp, Artificial
  Synthetic oligonucleotide
tttgtaggagtgtttagggtttttaattgggaaagtgcttcttctttcgata

SEQ ID NO: 485308 - DNA, 57 bp, Artificial
  Synthetic oligonucleotide
tttgtaggtagtctgtcgtaggggtgactacgattccaccatctcccaaatctatta

SEQ ID NO: 485309 - DNA, 60 bp, Artificial
  Synthetic oligonucleotide
tttgtaggtgatcaagttgagactacaagctctgaagaactagctggtctcgagtttagt

SEQ ID NO: 485310 - DNA, 54 bp, Artificial
  Synthetic oligonucleotide
tttgtaggttttggatttgggaaagtgcctcttctttagttagagagcatttgg

SEQ ID NO: 485311 - DNA, 55 bp, Artificial
  Synthetic oligonucleotide
tttgtagtacctgaccgaactccctaacaaatctgaatctatagaccctgttggt

SEQ ID NO: 485312 - DNA, 56 bp, Artificial
  Synthetic oligonucleotide
tttgtagtcgaacacacggcgaaatttgatttcgccacaatcgattgtacgtttgg

SEQ ID NO: 485313 - DNA, 55 bp, Artificial
  Synthetic oligonucleotide
tttgtagtgaccgagcgttactattcctccaattctggacacgcactgaatcaag

SEQ ID NO: 485314 - DNA, 51 bp, Artificial
  Synthetic oligonucleotide
tttgtagtgctacagaacaattgtgggtcacaatctactatggggtgcctg

SEQ ID NO: 485315 - DNA, 56 bp, Artificial
  Synthetic oligonucleotide
tttgtagtgttggattgttgacacaaataggtacactctttcctccagtttgaaaa

SEQ ID NO: 485316 - DNA, 56 bp, Artificial
  Synthetic oligonucleotide
tttgtataaacggctcgtgttttactataatgaccgacggcccaagcaatgggcaa

SEQ ID NO: 485317 - DNA, 57 bp, Artificial
  Synthetic oligonucleotide
tttgtatcagagcattcaatgtcttgtaagccatttgtacaaatagaaacatcctat

SEQ ID NO: 485318 - DNA, 60 bp, Artificial
  Synthetic oligonucleotide
tttgtatccctcgctaaaaactggacagagcgggttgaggaatggcttgatctcccatgc

SEQ ID NO: 485319 - DNA, 60 bp, Artificial
  Synthetic oligonucleotide
tttgtatctacatattggtgttccccaataaccattatatgctgaatactcaacatatac

SEQ ID NO: 485320 - DNA, 57 bp, Artificial
  Synthetic oligonucleotide
tttgtatcttattggttcagaattgaacgcacgacgcacgtaaagggagggcgaaga

SEQ ID NO: 485321 - DNA, 53 bp, Artificial
  Synthetic oligonucleotide
tttgtatgcaaggtcctatccccctactcccttgaggtgttgcggaaggttga

SEQ ID NO: 485322 - DNA, 58 bp, Artificial
  Synthetic oligonucleotide
tttgtatggacggtgacaccatgcctggactcttcgcctaccgcgcagggaccaaggt

SEQ ID NO: 485323 - DNA, 60 bp, Artificial
  Synthetic oligonucleotide
tttgtatgtgatcgtcatcgttcttgtttcgatgttctcttcctgggatgtcgatttata

SEQ ID NO: 485324 - DNA, 57 bp, Artificial
  Synthetic oligonucleotide
tttgtattaagtccgtttatgtgttgggtaagatttggatggatgagaatatcaaga

SEQ ID NO: 485325 - DNA, 58 bp, Artificial
  Synthetic oligonucleotide
tttgtattgcaacgctctcggcatcaaacgtattcggaggttgtgatgggctcgtgtg

SEQ ID NO: 485326 - DNA, 56 bp, Artificial
  Synthetic oligonucleotide
tttgtcaaatcaacacttgtgttgtcccaagatcttccaagaatctgtgatctcga

SEQ ID NO: 485327 - DNA, 60 bp, Artificial
  Synthetic oligonucleotide
tttgtcaagcaattggctggggcgaccctatcactcattggagccacggacaaaatcagt

SEQ ID NO: 485328 - DNA, 50 bp, Artificial
  Synthetic oligonucleotide
tttgtcaagcatgggaaccttttgaagggtgagtctaagaagaaattcat

SEQ ID NO: 485329 - DNA, 60 bp, Artificial
  Synthetic oligonucleotide
tttgtcaagctctaatgccctgttgtcgcataacatgcactgtctgtgccaccactaacg

SEQ ID NO: 485330 - DNA, 58 bp, Artificial
  Synthetic oligonucleotide
tttgtcaattcaataccattgtgaataaaggtgtgtattatattatcaataaggtgtt

SEQ ID NO: 485331 - DNA, 59 bp, Artificial
  Synthetic oligonucleotide
tttgtcagaatggtccacctcctaaccgaagtcaatctaagcgagtttgtgacattcca

SEQ ID NO: 485332 - DNA, 50 bp, Artificial
  Synthetic oligonucleotide
tttgtcagacacctgtttaacagagctggcacaatgggtgacagtgtccc

SEQ ID NO: 485333 - DNA, 50 bp, Artificial
  Synthetic oligonucleotide
tttgtcagacacgaaactgcaagctgcaatgaaatacggtgcaaggctat

SEQ ID NO: 485334 - DNA, 55 bp, Artificial
  Synthetic oligonucleotide
tttgtcagatagggacaggtccgagcttagtccgctgctactgtctacaacagag

SEQ ID NO: 485335 - DNA, 60 bp, Artificial
  Synthetic oligonucleotide
tttgtcagctagtgatgagtgggggtatactatcgagttgtgtgttcatagtagtgtaca

SEQ ID NO: 485336 - DNA, 59 bp, Artificial
  Synthetic oligonucleotide
tttgtcagtcataaggaaattgagtccgtaaacaatgctgtagtaatgccagcccatgg

SEQ ID NO: 485337 - DNA, 55 bp, Artificial
  Synthetic oligonucleotide
tttgtcataagagaaccattcatttcatgctctcacttggagtgcagaacctttt

SEQ ID NO: 485338 - DNA, 59 bp, Artificial
  Synthetic oligonucleotide
tttgtcatcaacgctacctccgaactcaagctatctctaaaggtatgcgccggctagag

SEQ ID NO: 485339 - DNA, 57 bp, Artificial
  Synthetic oligonucleotide
tttgtcatcacacgtgtatacaacaacctaggaaattacctagagtgcggtgtaaac

SEQ ID NO: 485340 - DNA, 54 bp, Artificial
  Synthetic oligonucleotide
tttgtcattcgtctataactcacaatctgctgtgcaaataccaatttattactc

SEQ ID NO: 485341 - DNA, 55 bp, Artificial
  Synthetic oligonucleotide
tttgtccaaaatgccctaaatgggaatggagacccaaacaatatggatagggcag

SEQ ID NO: 485342 - DNA, 56 bp, Artificial
  Synthetic oligonucleotide
tttgtccaagcgaaagtaccctctgtgggctactttcaaagaccctgatcaaggga

SEQ ID NO: 485343 - DNA, 60 bp, Artificial
  Synthetic oligonucleotide
tttgtccattggatacatcagcgaacggaataggatgcattcctgcgagtttagatacat

SEQ ID NO: 485344 - DNA, 59 bp, Artificial
  Synthetic oligonucleotide
tttgtcccaatgagttctcgaggaacgtcaacaagccggccacagtcatcggctcaaac

SEQ ID NO: 485345 - DNA, 54 bp, Artificial
  Synthetic oligonucleotide
tttgtcccttatgatcaagaaccgctcaacggagattggaaggcaaaggttcag

SEQ ID NO: 485346 - DNA, 58 bp, Artificial
  Synthetic oligonucleotide
tttgtcccttcacccagatttacacaaaatatcccagatgcacattactcactttccg

SEQ ID NO: 485347 - DNA, 60 bp, Artificial
  Synthetic oligonucleotide
tttgtcctacgtctatatctagcaaccaaatatccactactgaaactgctgacatacaga

SEQ ID NO: 485348 - DNA, 60 bp, Artificial
  Synthetic oligonucleotide
tttgtcctgcatctgtatctagtaacgaagtatccactactgaaactgttgtccacctat

SEQ ID NO: 485349 - DNA, 57 bp, Artificial
  Synthetic oligonucleotide
tttgtcgaaagtgttctatcccgaaaatactgacatgaaagccgcgaaagcatacgt

SEQ ID NO: 485350 - DNA, 50 bp, Artificial
  Synthetic oligonucleotide
tttgtcgagggttctgagggtcgtcttgttcgctcagctgatttagagtt

SEQ ID NO: 485351 - DNA, 60 bp, Artificial
  Synthetic oligonucleotide
tttgtcgcatataaaggtaaaatgagaattatggacattacgcaatcgctcaaaatgggc

SEQ ID NO: 485352 - DNA, 53 bp, Artificial
  Synthetic oligonucleotide
tttgtcgggttttcttggtaacctattcatgcctctaccgaagaaggtacagg

SEQ ID NO: 485353 - DNA, 53 bp, Artificial
  Synthetic oligonucleotide
tttgtcggtgaatgcgccccctaatgccgatcttgaggataaatacaggtaca

SEQ ID NO: 485354 - DNA, 58 bp, Artificial
  Synthetic oligonucleotide
tttgtcggttggcttgttgtgattgtcctaagataccattattgattaatattggtac

SEQ ID NO: 485355 - DNA, 59 bp, Artificial
  Synthetic oligonucleotide
tttgtcgtctacctgacgtagttactagggcggctgttacgatgtatcttaatgcagcg

SEQ ID NO: 485356 - DNA, 51 bp, Artificial
  Synthetic oligonucleotide
tttgtcgttccagacccacctcccaaactcgaggggacccgacaggcccag

SEQ ID NO: 485357 - DNA, 53 bp, Artificial
  Synthetic oligonucleotide
tttgtcgttccagacccatatccagatcccagggggtctcgacaggcccgaaa

SEQ ID NO: 485358 - DNA, 55 bp, Artificial
  Synthetic oligonucleotide
tttgtcgttccagacccctaccccaaaccaacaggatctcgacaggcccagagga

SEQ ID NO: 485359 - DNA, 53 bp, Artificial
  Synthetic oligonucleotide
tttgtcgttccagacccctttcccagtccggagggacccagacaggccagaag

SEQ ID NO: 485360 - DNA, 54 bp, Artificial
  Synthetic oligonucleotide
tttgtcgttccagacccttacccatcaccagcgggaacccgacaggctcggaaa

SEQ ID NO: 485361 - DNA, 50 bp, Artificial
  Synthetic oligonucleotide
tttgtcgttccagacccttaccccaaacccgaggggactcgacaggctcg

SEQ ID NO: 485362 - DNA, 54 bp, Artificial
  Synthetic oligonucleotide
tttgtcgttgcagacccttatcccaaacccaacggaagccgacaggcccggaga

SEQ ID NO: 485363 - DNA, 53 bp, Artificial
  Synthetic oligonucleotide
tttgtcgtttcagaccctccccccaaaccagaggggtccagacaggctcgaaa

SEQ ID NO: 485364 - DNA, 60 bp, Artificial
  Synthetic oligonucleotide
tttgtctaataagccagcactttgcactggcagcactccaggaggcatgaggacccggaa

SEQ ID NO: 485365 - DNA, 53 bp, Artificial
  Synthetic oligonucleotide
tttgtctacctgcgacctttagtagaccaccatcctcccatcatagatccata

SEQ ID NO: 485366 - DNA, 53 bp, Artificial
  Synthetic oligonucleotide
tttgtctacgtcccgtcggcactgaatcccgcggacgacccgtctcggggccg

SEQ ID NO: 485367 - DNA, 60 bp, Artificial
  Synthetic oligonucleotide
tttgtctcaaagtactcacaattcgattcctttcttatgtatgatctaggcggaggtaca

SEQ ID NO: 485368 - DNA, 55 bp, Artificial
  Synthetic oligonucleotide
tttgtctcaccaaatgcggctcacacgtcctcgggaccgtgtccctgcagccgct

SEQ ID NO: 485369 - DNA, 60 bp, Artificial
  Synthetic oligonucleotide
tttgtctctaaggacatgagcttaatcatattgccggtcggcgtttaggcgcttgtgatc

SEQ ID NO: 485370 - DNA, 60 bp, Artificial
  Synthetic oligonucleotide
tttgtctcttgctcagctccactctattggatctaccatgaacagatctgatattacaga

SEQ ID NO: 485371 - DNA, 59 bp, Artificial
  Synthetic oligonucleotide
tttgtctgttgcaaagcgaactgctctaattacattgttaatcgaaattacacctgaac

SEQ ID NO: 485372 - DNA, 50 bp, Artificial
  Synthetic oligonucleotide
tttgtcttcaaataagacctcatcatggcattgacaactgggtggggtac

SEQ ID NO: 485373 - DNA, 50 bp, Artificial
  Synthetic oligonucleotide
tttgtctttatatacttggtctccaagtttattgtcatataatatgtggg

SEQ ID NO: 485374 - DNA, 57 bp, Artificial
  Synthetic oligonucleotide
tttgtcttttcgtctcctttgataaaactgtatatcatacactggtaatctggtaaa

SEQ ID NO: 485375 - DNA, 55 bp, Artificial
  Synthetic oligonucleotide
tttgtgaaaattggaaccactaaccccacacatgtcatcgacctcatgcaaaccc

SEQ ID NO: 485376 - DNA, 60 bp, Artificial
  Synthetic oligonucleotide
tttgtgaaggtccaagtgtcgggcaaccaacacacactggacgttatgcaggcacacaag

SEQ ID NO: 485377 - DNA, 55 bp, Artificial
  Synthetic oligonucleotide
tttgtgaaggttccaccggaagacctcgtacacttcgatgccctcgtggtacgga

SEQ ID NO: 485378 - DNA, 59 bp, Artificial
  Synthetic oligonucleotide
tttgtgaatccccagctccttccgcaggttgtgattgaatcgaacctggactgttatta

SEQ ID NO: 485379 - DNA, 56 bp, Artificial
  Synthetic oligonucleotide
tttgtgacaaaaggccaaggtacccgataggagacggtcttgagaattggcagtgg

SEQ ID NO: 485380 - DNA, 59 bp, Artificial
  Synthetic oligonucleotide
tttgtgacaacaatgcactccccttaacctggagaggtttaatagatctcacaggctat

SEQ ID NO: 485381 - DNA, 60 bp, Artificial
  Synthetic oligonucleotide
tttgtgacggaagtcatcaatatccatattcccaacatccctgggatgctggaacgatgc

SEQ ID NO: 485382 - DNA, 60 bp, Artificial
  Synthetic oligonucleotide
tttgtgactaccaactacatgtcgctaatttcaggtatgtggttactaactgtagtgcca

SEQ ID NO: 485383 - DNA, 59 bp, Artificial
  Synthetic oligonucleotide
tttgtgactccaggcacatttcccaaagcatgggcccacaatgtcccatcacccgggac

SEQ ID NO: 485384 - DNA, 60 bp, Artificial
  Synthetic oligonucleotide
tttgtgactgcttagtcatgcaggccatggtaaggctgggcattgttccaaagtgattgt

SEQ ID NO: 485385 - DNA, 60 bp, Artificial
  Synthetic oligonucleotide
tttgtgagcatagtccagatgtttgtcgctttagctaatatggttcggccttacaatcta

SEQ ID NO: 485386 - DNA, 56 bp, Artificial
  Synthetic oligonucleotide
tttgtgagccgaaaaagccgaatacggtgttccttgtgaccttatatgtcactacg

SEQ ID NO: 485387 - DNA, 56 bp, Artificial
  Synthetic oligonucleotide
tttgtgagcgcgtactcaatacgttctgactgaacgtaccctcccacggacaaacc

SEQ ID NO: 485388 - DNA, 60 bp, Artificial
  Synthetic oligonucleotide
tttgtgagtctgtactcgccgatgcaagtgaaactctattagcaaatgtaacatccgtta

SEQ ID NO: 485389 - DNA, 60 bp, Artificial
  Synthetic oligonucleotide
tttgtgatactcgcagataactgtacacttaaagaacatgagtatatggcaaacagttgt

SEQ ID NO: 485390 - DNA, 60 bp, Artificial
  Synthetic oligonucleotide
tttgtgatgtcaggaagtttaactagtgatgcctgtgcaatactccaattgaagaacagg

SEQ ID NO: 485391 - DNA, 55 bp, Artificial
  Synthetic oligonucleotide
tttgtgccctctttgcactgctattgacaccactcatgacggttcgttcactttg

SEQ ID NO: 485392 - DNA, 55 bp, Artificial
  Synthetic oligonucleotide
tttgtgccgaaattcctcagctcgacacctacaagtacaagatggagctagccag

SEQ ID NO: 485393 - DNA, 58 bp, Artificial
  Synthetic oligonucleotide
tttgtgcctctcctaatctcttcgttgtgcctcgggaaattccccatctacacaatac

SEQ ID NO: 485394 - DNA, 55 bp, Artificial
  Synthetic oligonucleotide
tttgtgcgaacgagcacccgccttccatactcaggactcccgcttcgggcctagc

SEQ ID NO: 485395 - DNA, 60 bp, Artificial
  Synthetic oligonucleotide
tttgtgcgatcccatccgattattcgtgaaaggtgaaccgcataaacaagcgaagctcga

SEQ ID NO: 485396 - DNA, 60 bp, Artificial
  Synthetic oligonucleotide
tttgtgcggtagtaatgatgctattcacaatgcttgctcctgctcgcaacgagtttctaa

SEQ ID NO: 485397 - DNA, 55 bp, Artificial
  Synthetic oligonucleotide
tttgtgcgtacgctagtgggaaattcggtgttgtcaagtctaccatcgacgccga

SEQ ID NO: 485398 - DNA, 60 bp, Artificial
  Synthetic oligonucleotide
tttgtgctacgtcactaaccacgtgacgcccacaggccaaccgaatgctatgtcgtgcac

SEQ ID NO: 485399 - DNA, 60 bp, Artificial
  Synthetic oligonucleotide
tttgtgctcctatattggagtgtgcctggactagctgtacaggaatggtcgaacgtggac

SEQ ID NO: 485400 - DNA, 55 bp, Artificial
  Synthetic oligonucleotide
tttgtgctgatagtggttttaaagctactggtaagccgttaaaacgtcacccagc

SEQ ID NO: 485401 - DNA, 50 bp, Artificial
  Synthetic oligonucleotide
tttgtggaaaaagacaagagtaaactagttcctgactgaagtacaataac

SEQ ID NO: 485402 - DNA, 59 bp, Artificial
  Synthetic oligonucleotide
tttgtggaccctctcactggccatacattggacgaaagcacccatacagacatatcgtt

SEQ ID NO: 485403 - DNA, 56 bp, Artificial
  Synthetic oligonucleotide
tttgtggactacgttcaaggaccctgatcagggtaactgcggtggaaattataaga

SEQ ID NO: 485404 - DNA, 57 bp, Artificial
  Synthetic oligonucleotide
tttgtggagggtaagatcggtggaataactgtgctaaagccgggccttgtcatcagg

SEQ ID NO: 485405 - DNA, 54 bp, Artificial
  Synthetic oligonucleotide
tttgtggagtatctgaggacaggagacctccctgtctggatatcgtacaaggtc

SEQ ID NO: 485406 - DNA, 56 bp, Artificial
  Synthetic oligonucleotide
tttgtggataataaatactacgtaaatgtagtagtactgttactactatggttgcc

SEQ ID NO: 485407 - DNA, 60 bp, Artificial
  Synthetic oligonucleotide
tttgtggatggagactaactccatatgggattgtgaaggagcctgaattagcctataatc

SEQ ID NO: 485408 - DNA, 60 bp, Artificial
  Synthetic oligonucleotide
tttgtggcaccgggagagcgcccttccggcatgtttgactcgtccgtcctctgtgagtgc

SEQ ID NO: 485409 - DNA, 59 bp, Artificial
  Synthetic oligonucleotide
tttgtggcagtcaaggaaaccgaaatgatgagacccgtcctatgtatgattgggaagga

SEQ ID NO: 485410 - DNA, 59 bp, Artificial
  Synthetic oligonucleotide
tttgtggcccccgcaacgcatttacatgtggaccaatgaaattggctcctcgtggctta

SEQ ID NO: 485411 - DNA, 51 bp, Artificial
  Synthetic oligonucleotide
tttgtggcctaaggacgaatggtttagggacgcccaacaaggtccctaccc

SEQ ID NO: 485412 - DNA, 52 bp, Artificial
  Synthetic oligonucleotide
tttgtggcggttcttgaatcactgcaatccttggctgaaaacgccatatcac

SEQ ID NO: 485413 - DNA, 56 bp, Artificial
  Synthetic oligonucleotide
tttgtgggatcctttgcagaacccattacctgagactttatacggtctacggtgta

SEQ ID NO: 485414 - DNA, 55 bp, Artificial
  Synthetic oligonucleotide
tttgtgggcccctcaacgcactaactgacaaggacatgctaaccaatcacatgac

SEQ ID NO: 485415 - DNA, 53 bp, Artificial
  Synthetic oligonucleotide
tttgtggggctgtgttactcggttgcgtcttgatggttgggtcctatttcaag

SEQ ID NO: 485416 - DNA, 59 bp, Artificial
  Synthetic oligonucleotide
tttgtgggtcaccatattcgtgggaacaagagctacagcatgggaggttggtcctccaa

SEQ ID NO: 485417 - DNA, 60 bp, Artificial
  Synthetic oligonucleotide
tttgtgggtcaccatattcttgggaacaagagctacagcaccaaacctcgacaaggcatg

SEQ ID NO: 485418 - DNA, 60 bp, Artificial
  Synthetic oligonucleotide
tttgtgggtcaccatattcttgggaacaagagctacagcatacaaggcatggggacgaat

SEQ ID NO: 485419 - DNA, 56 bp, Artificial
  Synthetic oligonucleotide
tttgtggtaggcgttgggcccggtgggcgacacgactcgcacgttgcgagcggccg

SEQ ID NO: 485420 - DNA, 56 bp, Artificial
  Synthetic oligonucleotide
tttgtggtcgcgttacgtattttgtacggaacgttttgttgatgatccacagttga

SEQ ID NO: 485421 - DNA, 57 bp, Artificial
  Synthetic oligonucleotide
tttgtggtctctggccgccttctttctaagccggcagctgattttaactttgtctat

SEQ ID NO: 485422 - DNA, 57 bp, Artificial
  Synthetic oligonucleotide
tttgtggtctctggtcgccttctttctaagccggcggctgatttcaactttgtgtac

SEQ ID NO: 485423 - DNA, 59 bp, Artificial
  Synthetic oligonucleotide
tttgtgtagatgcaacgccttcctcaggttgtggttgaaccgtatttggatgtggtata

SEQ ID NO: 485424 - DNA, 60 bp, Artificial
  Synthetic oligonucleotide
tttgtgtaggatggtccagtaccagttgccatgacggtattggacggatgaccatttgtg

SEQ ID NO: 485425 - DNA, 57 bp, Artificial
  Synthetic oligonucleotide
tttgtgtataggcgcggtcctaaagtacgtgttaatcagtctgtcccaaagtcacag

SEQ ID NO: 485426 - DNA, 59 bp, Artificial
  Synthetic oligonucleotide
tttgtgtatccccaacgctttcctcaggttgtagttgaattggacttgtactgtgatga

SEQ ID NO: 485427 - DNA, 59 bp, Artificial
  Synthetic oligonucleotide
tttgtgtatccccaacgctttcctcaggttgtggttgaactggatttgcaatgtgatta

SEQ ID NO: 485428 - DNA, 50 bp, Artificial
  Synthetic oligonucleotide
tttgtgtattcgggggatactcgtcgcgtcgttaatcctgataagtatga

SEQ ID NO: 485429 - DNA, 60 bp, Artificial
  Synthetic oligonucleotide
tttgtgtcactgggcatgataaaaatgcaactgctagcttcatttacgatgggaggcttg

SEQ ID NO: 485430 - DNA, 60 bp, Artificial
  Synthetic oligonucleotide
tttgtgtcactggggatgatagaaatgcaactgctagctttatttataacgggaggcttg

SEQ ID NO: 485431 - DNA, 60 bp, Artificial
  Synthetic oligonucleotide
tttgtgtcactggggatgataggaatgcaactgccagcttcatttatgatgggatgcttg

SEQ ID NO: 485432 - DNA, 57 bp, Artificial
  Synthetic oligonucleotide
tttgtgtcatacaaaaataattctttaaggttgtatacattccaacctgatgctttg

SEQ ID NO: 485433 - DNA, 60 bp, Artificial
  Synthetic oligonucleotide
tttgtgtccagtagcgtccgaaggacgattggtaattcaatcagctatgacacgaggttg

SEQ ID NO: 485434 - DNA, 57 bp, Artificial
  Synthetic oligonucleotide
tttgtgtcctttgcactagtgaagtcaaatcacatgggtgacttgtgggagaatggt

SEQ ID NO: 485435 - DNA, 53 bp, Artificial
  Synthetic oligonucleotide
tttgtgtgataagatacgattcatcggcttaggtattaaataagccacggtaa

SEQ ID NO: 485436 - DNA, 55 bp, Artificial
  Synthetic oligonucleotide
tttgtgtgccatatccctatgctttactacgatgtgaggaatggtgttggtaccc

SEQ ID NO: 485437 - DNA, 55 bp, Artificial
  Synthetic oligonucleotide
tttgtgtgcgcgtgggaaccgtttaactttcgttcacccacctacagctggactc

SEQ ID NO: 485438 - DNA, 57 bp, Artificial
  Synthetic oligonucleotide
tttgtgtggtcaccacgattgtcatgtacggattcaccggatggtttcgaatgtaac

SEQ ID NO: 485439 - DNA, 55 bp, Artificial
  Synthetic oligonucleotide
tttgtgtgtaatggcttgaaggaggtggcttcagtcatcgtgccctaccgtgcgc

SEQ ID NO: 485440 - DNA, 60 bp, Artificial
  Synthetic oligonucleotide
tttgtgttggactgccccgaggtacctggtgtgaactgccgctcttgtgattaccatcgc

SEQ ID NO: 485441 - DNA, 55 bp, Artificial
  Synthetic oligonucleotide
tttgtgttggattgccagtccctttgggcccccatgaactctttaaagtgtttga

SEQ ID NO: 485442 - DNA, 60 bp, Artificial
  Synthetic oligonucleotide
tttgttaatctgcagctgtgttatgttccgctgtgcgccacaacggaggtggggcgagtg

SEQ ID NO: 485443 - DNA, 52 bp, Artificial
  Synthetic oligonucleotide
tttgttaccaacctttttcggcgcattaatcatgggctatgcagttggcttt

SEQ ID NO: 485444 - DNA, 60 bp, Artificial
  Synthetic oligonucleotide
tttgttacgaatcaagtttcaggccatagagtattcacagctcaacgccacgtcgcacct

SEQ ID NO: 485445 - DNA, 58 bp, Artificial
  Synthetic oligonucleotide
tttgttactccagaagtcgtccgtaagcgaaatatatacccggatctgtctgctctta

SEQ ID NO: 485446 - DNA, 60 bp, Artificial
  Synthetic oligonucleotide
tttgttagatcaacacttgtgttgtcccaagatctcccgagaatttgtgatctagaacca

SEQ ID NO: 485447 - DNA, 55 bp, Artificial
  Synthetic oligonucleotide
tttgttaggcatttgtttaacagagcaggtaaattaggggaggatgtacctacag

SEQ ID NO: 485448 - DNA, 54 bp, Artificial
  Synthetic oligonucleotide
tttgttatcgaattacctcaaggagataatagacaacaagttttaggtaagggc

SEQ ID NO: 485449 - DNA, 60 bp, Artificial
  Synthetic oligonucleotide
tttgttcacgatttcacctttggccacttagctgacaagactgacagactcttaatgcgt

SEQ ID NO: 485450 - DNA, 58 bp, Artificial
  Synthetic oligonucleotide
tttgttcagggagcggttgtgggtagtgtccctctgtccaatcatcgcaaactttctg

SEQ ID NO: 485451 - DNA, 53 bp, Artificial
  Synthetic oligonucleotide
tttgttcagtggtacaaatagtgcctcctgatggaacggttgtacaaacggat

SEQ ID NO: 485452 - DNA, 60 bp, Artificial
  Synthetic oligonucleotide
tttgttccgctccttgtcatttctgcgtgtgtgatggaattgagtattatgcctgcattt

SEQ ID NO: 485453 - DNA, 54 bp, Artificial
  Synthetic oligonucleotide
tttgttcgcaagattgtgaactatggaatcctgcttgtacaaaagcaatgacca

SEQ ID NO: 485454 - DNA, 60 bp, Artificial
  Synthetic oligonucleotide
tttgttctaaaggcgcgcacgattgcatgttttcgcaacacgtgtcctcttatgattact

SEQ ID NO: 485455 - DNA, 55 bp, Artificial
  Synthetic oligonucleotide
tttgttctacgcgtacaaattcaactcttcggggtgcccagagcgtctgtcctct

SEQ ID NO: 485456 - DNA, 60 bp, Artificial
  Synthetic oligonucleotide
tttgttctcatactcccgtgccagtcagatgggcagataacaccagtagttacatggcag

SEQ ID NO: 485457 - DNA, 60 bp, Artificial
  Synthetic oligonucleotide
tttgttctcatggttgcccgcgatagcgtccaactttgatcagtactcgttcaacagcgt

SEQ ID NO: 485458 - DNA, 54 bp, Artificial
  Synthetic oligonucleotide
tttgttgaagaaaaaatggaagttgacacaattgattggaaatctagatatgaa

SEQ ID NO: 485459 - DNA, 55 bp, Artificial
  Synthetic oligonucleotide
tttgttgacttaagtggcttcagcaaacattacctccgtgtttggaaaataacaa

SEQ ID NO: 485460 - DNA, 57 bp, Artificial
  Synthetic oligonucleotide
tttgttgaggggtgactcacgacacaatatttctgaacttgagtggctgtcggacga

SEQ ID NO: 485461 - DNA, 60 bp, Artificial
  Synthetic oligonucleotide
tttgttggaaaaattgccagatggttggatatactgcgacgccgatggatcacagttcga

SEQ ID NO: 485462 - DNA, 50 bp, Artificial
  Synthetic oligonucleotide
tttgttggaatggacaaaaaggcgggttagaggggttgaggcaaaaaggg

SEQ ID NO: 485463 - DNA, 58 bp, Artificial
  Synthetic oligonucleotide
tttgttggcaaaacttatgaggtattgtgttaacatgggggtgtctgtacaggagata

SEQ ID NO: 485464 - DNA, 56 bp, Artificial
  Synthetic oligonucleotide
tttgttgggtatgggtccaccgcagtaaagactaggtaaactggtcacagttagca

SEQ ID NO: 485465 - DNA, 60 bp, Artificial
  Synthetic oligonucleotide
tttgttggtaaaccattgcacaaattttttaccaagagagcctgcaatgatgatatcatt

SEQ ID NO: 485466 - DNA, 60 bp, Artificial
  Synthetic oligonucleotide
tttgttggtgaagacggagatcatttacgatatgtttcaagagttacgctcacaagcgag

SEQ ID NO: 485467 - DNA, 52 bp, Artificial
  Synthetic oligonucleotide
tttgttggttggaattttacatatggtgaaagagatagaaccgttgaacctt

SEQ ID NO: 485468 - DNA, 55 bp, Artificial
  Synthetic oligonucleotide
tttgttgtgactccaagggttggcttgaaactctatcttataaccggcgtggaga

SEQ ID NO: 485469 - DNA, 54 bp, Artificial
  Synthetic oligonucleotide
tttgtttaccgatgtttcggtaatacggttgatagtattatagaccttggagga

SEQ ID NO: 485470 - DNA, 58 bp, Artificial
  Synthetic oligonucleotide
tttgtttagatatgaaacacagggcgccatgtcaaataaggtttccaccattaatgct

SEQ ID NO: 485471 - DNA, 60 bp, Artificial
  Synthetic oligonucleotide
tttgtttcacaacagggtacgggtgcaaattgtgatatgttggatgtttgtgataatata

SEQ ID NO: 485472 - DNA, 55 bp, Artificial
  Synthetic oligonucleotide
tttgtttctccgtgagcttgaacaagtcgtcgtcttttttcaccaccgtgtaatg

SEQ ID NO: 485473 - DNA, 55 bp, Artificial
  Synthetic oligonucleotide
tttgtttggggatctcaatccccatcttgagaaacaacgagctcgtcggaccgac

SEQ ID NO: 485474 - DNA, 60 bp, Artificial
  Synthetic oligonucleotide
tttgtttgtattatcctgttgaggcatcaaacgaaatagctgatactgaatggaaagatc

SEQ ID NO: 485475 - DNA, 57 bp, Artificial
  Synthetic oligonucleotide
tttgttttcggaaacgcttttattatcgatgagcatttgagtagactttcaaagaca

SEQ ID NO: 485476 - DNA, 60 bp, Artificial
  Synthetic oligonucleotide
ttttaaaatattgagggccgatgttgtatcgcctgaattgattgcttcggcatatgcgtc

SEQ ID NO: 485477 - DNA, 53 bp, Artificial
  Synthetic oligonucleotide
ttttaaacctatacaagtttgtctcgtttctactgatgaacctcaagttaatt

SEQ ID NO: 485478 - DNA, 51 bp, Artificial
  Synthetic oligonucleotide
ttttaaacggttccctcgcacccaccgccaagacgcccccacctataagtg

SEQ ID NO: 485479 - DNA, 58 bp, Artificial
  Synthetic oligonucleotide
ttttaaactgggctttacccttgaattggatgagagcatggaggtgcaaagacccatc

SEQ ID NO: 485480 - DNA, 53 bp, Artificial
  Synthetic oligonucleotide
ttttaaagaatcgcttaaaaccgcacttcttaccctctattaaggtctgctgg

SEQ ID NO: 485481 - DNA, 49 bp, Artificial
  Synthetic oligonucleotide
ttttaaagacgaaccaaaagtaaattttaaaaatatttatgattggacg

SEQ ID NO: 485482 - DNA, 53 bp, Artificial
  Synthetic oligonucleotide
ttttaaagctagtttttgtggtgatgattcgctgatctaccttcctaagggtt

SEQ ID NO: 485483 - DNA, 54 bp, Artificial
  Synthetic oligonucleotide
ttttaaaggtttcgccctttcactctccagtgttgagttcttcgcaagaagttc

SEQ ID NO: 485484 - DNA, 55 bp, Artificial
  Synthetic oligonucleotide
ttttaaagtggtccccatgtgcgcgttcgtccaataatatgcgctcctcaaagct

SEQ ID NO: 485485 - DNA, 54 bp, Artificial
  Synthetic oligonucleotide
ttttaaagtggtccccggggacaggtgtatccaatcctgtccgctcctcaaagc

SEQ ID NO: 485486 - DNA, 51 bp, Artificial
  Synthetic oligonucleotide
ttttaaagtggtccccttgatgtgatgtctcatccaatcagaacgctgtct

SEQ ID NO: 485487 - DNA, 50 bp, Artificial
  Synthetic oligonucleotide
ttttaaatcgggggttttctgctttttccaagacattaccccaacagctg

SEQ ID NO: 485488 - DNA, 53 bp, Artificial
  Synthetic oligonucleotide
ttttaaatcttgatgctaattacgttgagactgccagaactacaattgagtat

SEQ ID NO: 485489 - DNA, 53 bp, Artificial
  Synthetic oligonucleotide
ttttaaatggggaggggcacaacctccattacaaaatatttgtgaccctcatt

SEQ ID NO: 485490 - DNA, 60 bp, Artificial
  Synthetic oligonucleotide
ttttaaattgagacttatgaaagacacacaaacaatatcccaaacagaagctctcacaga

SEQ ID NO: 485491 - DNA, 55 bp, Artificial
  Synthetic oligonucleotide
ttttaacccattcgattaaatcgccggactcgattagcggtgcatcagttatttc

SEQ ID NO: 485492 - DNA, 53 bp, Artificial
  Synthetic oligonucleotide
ttttaacgaccaccatgtcatccgatgcgttgccgcgatgacagcacacaggt

SEQ ID NO: 485493 - DNA, 50 bp, Artificial
  Synthetic oligonucleotide
ttttaacgggaaacaactggagattcaatacaccttcgatccctcgaaaa

SEQ ID NO: 485494 - DNA, 51 bp, Artificial
  Synthetic oligonucleotide
ttttaactacttgggctcgaagtagttatcgttataaattaaagaggcttt

SEQ ID NO: 485495 - DNA, 60 bp, Artificial
  Synthetic oligonucleotide
ttttaactggggattaagaggactctgtataatgagagataatatgaaattaggagctca

SEQ ID NO: 485496 - DNA, 50 bp, Artificial
  Synthetic oligonucleotide
ttttaactgtggttgatactacccgtagtactaacatgactttgtgtgcc

SEQ ID NO: 485497 - DNA, 60 bp, Artificial
  Synthetic oligonucleotide
ttttaacttacccaggtatatctgcggaggatgtaatgcaatcatactcgcgccacggtc

SEQ ID NO: 485498 - DNA, 60 bp, Artificial
  Synthetic oligonucleotide
ttttaagaaaggctcgaatgcttccgctatcattgaaactgtcgcgcagatgtttccgga

SEQ ID NO: 485499 - DNA, 50 bp, Artificial
  Synthetic oligonucleotide
ttttaagcaatggtgtactacaacatgtcaattcggtgatccaggggata

SEQ ID NO: 485500 - DNA, 59 bp, Artificial
  Synthetic oligonucleotide
ttttaagctattatcctccttggtctcaagagtcttatggaggcatcacctcgatcccc

SEQ ID NO: 485501 - DNA, 59 bp, Artificial
  Synthetic oligonucleotide
ttttaaggcacttcaagatagtagatcagatgtcagtttagacatcgtcaatgaaactt

SEQ ID NO: 485502 - DNA, 50 bp, Artificial
  Synthetic oligonucleotide
ttttaaggcccattcatttgggccgtttcttttgggccttgacctttatt

SEQ ID NO: 485503 - DNA, 53 bp, Artificial
  Synthetic oligonucleotide
ttttaagtgggtcctacgcactaatgttggttgtccaatagaaacgcttcctc

SEQ ID NO: 485504 - DNA, 60 bp, Artificial
  Synthetic oligonucleotide
ttttaagtgttagccagaatattttgtgctgtgactataagtcatttgatggccttctga

SEQ ID NO: 485505 - DNA, 55 bp, Artificial
  Synthetic oligonucleotide
ttttaataaacgggtggatcgagaaagaaggattgtcgcagattataaaggagga

SEQ ID NO: 485506 - DNA, 55 bp, Artificial
  Synthetic oligonucleotide
ttttaatagctgttgtccctgccgtaggtaagggaactccaggatccacgcgaat

SEQ ID NO: 485507 - DNA, 60 bp, Artificial
  Synthetic oligonucleotide
ttttaatatcgtcaaggcagattcaattgattctgcgttcaatgcctttgcatatgagtc

SEQ ID NO: 485508 - DNA, 55 bp, Artificial
  Synthetic oligonucleotide
ttttaatcccgacaggcgcggctatcccggtacccgatttccaggctctaagtga

SEQ ID NO: 485509 - DNA, 52 bp, Artificial
  Synthetic oligonucleotide
ttttaatcctagaacagtcgccatttggatggaaaaggctcgagaaggaata

SEQ ID NO: 485510 - DNA, 60 bp, Artificial
  Synthetic oligonucleotide
ttttaatcgttcgttgagcgattagcagagaactgaccagaacatgtctggtcgtaaagc

SEQ ID NO: 485511 - DNA, 59 bp, Artificial
  Synthetic oligonucleotide
ttttaatctgctaccgtatataaagacattacatcctaacgacaaatggttgcttgatc

SEQ ID NO: 485512 - DNA, 55 bp, Artificial
  Synthetic oligonucleotide
ttttaatcttcaaggaggcccgcagacaccaccggacgacccgcctgagggtgcg

SEQ ID NO: 485513 - DNA, 56 bp, Artificial
  Synthetic oligonucleotide
ttttaatgcatccaggggaatcaataacctttgaaagcaatggagggttgttggcc

SEQ ID NO: 485514 - DNA, 60 bp, Artificial
  Synthetic oligonucleotide
ttttaatggacgtacagactggatatcatatctaaagcggatagcatcaggggtggtggt

SEQ ID NO: 485515 - DNA, 56 bp, Artificial
  Synthetic oligonucleotide
ttttaatgggttctgaataacctgtccgccaggaacaagccatcctcggcgcagag

SEQ ID NO: 485516 - DNA, 55 bp, Artificial
  Synthetic oligonucleotide
ttttaattactgacttagtcgtatgcccaaccgttgaaaatcgcgattctattcg

SEQ ID NO: 485517 - DNA, 54 bp, Artificial
  Synthetic oligonucleotide
ttttaattcaacagcaaagcaccatcagacagctacctaagggagctgttcagt

SEQ ID NO: 485518 - DNA, 58 bp, Artificial
  Synthetic oligonucleotide
ttttaattgagtttgaatgagattatagcttggttggagagctaagttatatttcaaa

SEQ ID NO: 485519 - DNA, 56 bp, Artificial
  Synthetic oligonucleotide
ttttaattggtgtttgttgttagttttggaattaattgtgtgggctgctagtgctg

SEQ ID NO: 485520 - DNA, 55 bp, Artificial
  Synthetic oligonucleotide
ttttaatttaccgagcatcttacagaaatgaactccattcactacgttcgtgttt

SEQ ID NO: 485521 - DNA, 53 bp, Artificial
  Synthetic oligonucleotide
ttttacaaccaatggaggtattgtcgggaatttgttacaactcaacccgctta

SEQ ID NO: 485522 - DNA, 56 bp, Artificial
  Synthetic oligonucleotide
ttttacaacgctgccaagataccatacggtttcaaacatcccaccattagtaccat

SEQ ID NO: 485523 - DNA, 55 bp, Artificial
  Synthetic oligonucleotide
ttttacaagaactgctgacacagaagggacttgccgcccgggactttccactggg

SEQ ID NO: 485524 - DNA, 60 bp, Artificial
  Synthetic oligonucleotide
ttttacacaatgtggctatcctgccttgatgccgttatatgcatgtatacaatctaggca

SEQ ID NO: 485525 - DNA, 60 bp, Artificial
  Synthetic oligonucleotide
ttttacacatggctgtgcagaattcatgtcgttacataattgtcctgacgtcgattgtgg

SEQ ID NO: 485526 - DNA, 54 bp, Artificial
  Synthetic oligonucleotide
ttttacacctcatacagcggcccgtgttactattggccgccgtgtcgtgattga

SEQ ID NO: 485527 - DNA, 59 bp, Artificial
  Synthetic oligonucleotide
ttttacactgtctatctcgtttctaggccggccatgtaaatgcagtttgcactaattac

SEQ ID NO: 485528 - DNA, 52 bp, Artificial
  Synthetic oligonucleotide
ttttacagggaccttagcaccattaacacagaggaccctattgaacttcaat

SEQ ID NO: 485529 - DNA, 52 bp, Artificial
  Synthetic oligonucleotide
ttttacaggtgtgggccgacattgacatccagcctgcaaggtcgtggggcac

SEQ ID NO: 485530 - DNA, 60 bp, Artificial
  Synthetic oligonucleotide
ttttacatacagatgtgcactgaactcaaactcagcgactatgagggaaggctgatccag

SEQ ID NO: 485531 - DNA, 54 bp, Artificial
  Synthetic oligonucleotide
ttttacatcgctcttggacacatcacagcggaagcgatcaaacctcggtctttc

SEQ ID NO: 485532 - DNA, 60 bp, Artificial
  Synthetic oligonucleotide
ttttacattgacgtcgaagtatgagatgaggcttccgtgtggccatagcactggacgagg

SEQ ID NO: 485533 - DNA, 55 bp, Artificial
  Synthetic oligonucleotide
ttttaccaacaaggtaactggtcattagcccaacaagaaacacacccatactcac

SEQ ID NO: 485534 - DNA, 53 bp, Artificial
  Synthetic oligonucleotide
ttttaccacgaccgagacaagagttaatagagaggcttgaacaaattcgagag

SEQ ID NO: 485535 - DNA, 54 bp, Artificial
  Synthetic oligonucleotide
ttttaccagggttgaataaggccctagttatggatgccaattttaaggtcgtga

SEQ ID NO: 485536 - DNA, 58 bp, Artificial
  Synthetic oligonucleotide
ttttaccatacgtcaattcactagctatcgactgtatggctaaacataacaattgggg

SEQ ID NO: 485537 - DNA, 54 bp, Artificial
  Synthetic oligonucleotide
ttttaccatccccccccaattcatctacaacaactctgccaggcggtatgtaat

SEQ ID NO: 485538 - DNA, 55 bp, Artificial
  Synthetic oligonucleotide
ttttaccatggaccccacaacgcacgtgctgacaaagacatgtggaccaataaaa

SEQ ID NO: 485539 - DNA, 59 bp, Artificial
  Synthetic oligonucleotide
ttttacccagatatggagggcattaatgacggcatggagaacctcaacttggagcacgg

SEQ ID NO: 485540 - DNA, 51 bp, Artificial
  Synthetic oligonucleotide
ttttaccccaactgtacctgtacagccttctggtcctatatatatatatgg

SEQ ID NO: 485541 - DNA, 51 bp, Artificial
  Synthetic oligonucleotide
ttttaccctctcagagaacgtatccaagagagcatttcaaaggcagtcatc

SEQ ID NO: 485542 - DNA, 56 bp, Artificial
  Synthetic oligonucleotide
ttttaccgagtctataaaaccagtgctcgacttgacaaattcaatcttgtgtcggg

SEQ ID NO: 485543 - DNA, 50 bp, Artificial
  Synthetic oligonucleotide
ttttaccgtcgttcccgacgttaaaaggatgtaaccacaagcgcaaaacc

SEQ ID NO: 485544 - DNA, 51 bp, Artificial
  Synthetic oligonucleotide
ttttaccgtcgttcccgacgttaaagggagacaactacaagcttagagtcg

SEQ ID NO: 485545 - DNA, 50 bp, Artificial
  Synthetic oligonucleotide
ttttaccgtcgttcccgacgttaaagggatgaaaccacaagcttggaacc

SEQ ID NO: 485546 - DNA, 49 bp, Artificial
  Synthetic oligonucleotide
ttttaccgtcgttcccgacgttacagggacgtaaccacaaacttgaaac

SEQ ID NO: 485547 - DNA, 51 bp, Artificial
  Synthetic oligonucleotide
ttttacctaatgggagcaacacttggcctacttaatgctacctagataaac

SEQ ID NO: 485548 - DNA, 50 bp, Artificial
  Synthetic oligonucleotide
ttttacgacaactatatgagaccctctgtcgttgaaactcttgtcactgc

SEQ ID NO: 485549 - DNA, 59 bp, Artificial
  Synthetic oligonucleotide
ttttacgacagcttagatgctaaggtatggctggccttagtaaaatgcaacggcatggt

SEQ ID NO: 485550 - DNA, 55 bp, Artificial
  Synthetic oligonucleotide
ttttacgcgagtcccacactccgtatgagaggtaccacaagttatggagcatcac

SEQ ID NO: 485551 - DNA, 51 bp, Artificial
  Synthetic oligonucleotide
ttttacggcaaggctatcccccttgaggcaatcaagggggggagacatctc

SEQ ID NO: 485552 - DNA, 54 bp, Artificial
  Synthetic oligonucleotide
ttttacggccataacgaatttgggcgaactaccatctctttttagcaacataac

SEQ ID NO: 485553 - DNA, 55 bp, Artificial
  Synthetic oligonucleotide
ttttacgggaggaggctgtgactggactcagtggagtttacagaacttataccat

SEQ ID NO: 485554 - DNA, 57 bp, Artificial
  Synthetic oligonucleotide
ttttacggggtactattatgttcgacggtgctatgctgtttgacaacgaaggcatgt

SEQ ID NO: 485555 - DNA, 52 bp, Artificial
  Synthetic oligonucleotide
ttttacgtcgacccgtcagcgcccgacacgcaaggggacttgacggcggttt

SEQ ID NO: 485556 - DNA, 60 bp, Artificial
  Synthetic oligonucleotide
ttttacgtgcccagacatgaagccatgttccgctggatgcggttctcagacctcagcacg

SEQ ID NO: 485557 - DNA, 55 bp, Artificial
  Synthetic oligonucleotide
ttttactactagaggtcgcagcgccactttttctagggggtataccgcgtctcca

SEQ ID NO: 485558 - DNA, 60 bp, Artificial
  Synthetic oligonucleotide
ttttactccaagacaccttataaagtgactgcagctgataagagtgagcagattgactgg

SEQ ID NO: 485559 - DNA, 59 bp, Artificial
  Synthetic oligonucleotide
ttttactcccgccctgttgtctcagccaatggcgagccgactgtaaagttatacacatc

SEQ ID NO: 485560 - DNA, 51 bp, Artificial
  Synthetic oligonucleotide
ttttactgacggtaaatcagccgttcttacttatcaacacgttcagaccgg

SEQ ID NO: 485561 - DNA, 56 bp, Artificial
  Synthetic oligonucleotide
ttttactgcctgggtgaccgaggatggactattcgactggcgccgagtttgctatc

SEQ ID NO: 485562 - DNA, 50 bp, Artificial
  Synthetic oligonucleotide
ttttactggagctccaatcgatttgttgctaggagggaagatattagtgg

SEQ ID NO: 485563 - DNA, 54 bp, Artificial
  Synthetic oligonucleotide
ttttactggccttatgggttgtttaggccctaattgtggtgccaccacctatag

SEQ ID NO: 485564 - DNA, 53 bp, Artificial
  Synthetic oligonucleotide
ttttactggctgatacaagaacctgtagaatctttgcttttcatggctggaac

SEQ ID NO: 485565 - DNA, 51 bp, Artificial
  Synthetic oligonucleotide
ttttactggtcttagagcagggagactagtcaatccggaggggattaaaca

SEQ ID NO: 485566 - DNA, 57 bp, Artificial
  Synthetic oligonucleotide
ttttactgtcttcttcctttctgcgaccgctcccgatctggttcctctcttcgagaa

SEQ ID NO: 485567 - DNA, 54 bp, Artificial
  Synthetic oligonucleotide
ttttactgtgcccaatatccccttgcaaaccttatccaattctaggtttccttc

SEQ ID NO: 485568 - DNA, 53 bp, Artificial
  Synthetic oligonucleotide
ttttactgtttgatgaatgctaccttccaattgacgaatggagagctcttgac

SEQ ID NO: 485569 - DNA, 55 bp, Artificial
  Synthetic oligonucleotide
ttttacttggaatacgggagaccctgaagtcagcaatttctggtttaattgtcaa

SEQ ID NO: 485570 - DNA, 60 bp, Artificial
  Synthetic oligonucleotide
ttttagacatgaatggagatcatatgtaataacttgggatcaggatataccttgtaaacc

SEQ ID NO: 485571 - DNA, 53 bp, Artificial
  Synthetic oligonucleotide
ttttagacattatagctttgcataggcctgcattaacctctcgacgaggtact

SEQ ID NO: 485572 - DNA, 57 bp, Artificial
  Synthetic oligonucleotide
ttttagaccccttacacatagtggtgatacagtacagtgcttcttacagaaatttaa

SEQ ID NO: 485573 - DNA, 60 bp, Artificial
  Synthetic oligonucleotide
ttttagagacagcagacggctgtaaacaaataatagcacagctacaaccatcccttcaga

SEQ ID NO: 485574 - DNA, 60 bp, Artificial
  Synthetic oligonucleotide
ttttagagacagcggaaggctgtagacgaatactgggacagctacagccatcccttcaga

SEQ ID NO: 485575 - DNA, 58 bp, Artificial
  Synthetic oligonucleotide
ttttagatgacgaacttaatgtcagatgggaaaccactggcgcacaccccctgtggac

SEQ ID NO: 485576 - DNA, 55 bp, Artificial
  Synthetic oligonucleotide
ttttagcacctaagacatatgcttgcagagctacctgctcaataagcttggaacg

SEQ ID NO: 485577 - DNA, 59 bp, Artificial
  Synthetic oligonucleotide
ttttagcagtcgcaggctattgcgtgtttgcaaagacacattcggaccactttgggacg

SEQ ID NO: 485578 - DNA, 55 bp, Artificial
  Synthetic oligonucleotide
ttttagcatcacggatcccaccggttgtcatacgaccttgaaccgcactcaacat

SEQ ID NO: 485579 - DNA, 56 bp, Artificial
  Synthetic oligonucleotide
ttttagcgtccctcccgcggccgactcgcctacgtgaacgctagctcttcacccga

SEQ ID NO: 485580 - DNA, 55 bp, Artificial
  Synthetic oligonucleotide
ttttagctcgtggagctggcacaaaccactgggcttcggcttctgcaccaagcgg

SEQ ID NO: 485581 - DNA, 51 bp, Artificial
  Synthetic oligonucleotide
ttttagctggattgtgcggacgaacaccgcttgcgcaactcgcgtgaccgg

SEQ ID NO: 485582 - DNA, 51 bp, Artificial
  Synthetic oligonucleotide
ttttaggaaccaaagaaagattgttaagtgttttaattgtggcaaggaagg

SEQ ID NO: 485583 - DNA, 54 bp, Artificial
  Synthetic oligonucleotide
ttttaggaatacgatatgcgatgggcgtgtctacgcaagtcctacacgggcatt

SEQ ID NO: 485584 - DNA, 55 bp, Artificial
  Synthetic oligonucleotide
ttttaggactcataaaccctgccttaacactgtaagcgttgtgggctcctccctc

SEQ ID NO: 485585 - DNA, 60 bp, Artificial
  Synthetic oligonucleotide
ttttaggattaatagtcatgtaacttataatcatcaggaggcagctaagtatgagaacca

SEQ ID NO: 485586 - DNA, 55 bp, Artificial
  Synthetic oligonucleotide
ttttaggcattggggtcatccattcatatcttactttgaggggctgcaaaagctc

SEQ ID NO: 485587 - DNA, 54 bp, Artificial
  Synthetic oligonucleotide
ttttaggcgtcggtgtggctcgtttggaattgctcaaacgccgaaccgtcgtaa

SEQ ID NO: 485588 - DNA, 50 bp, Artificial
  Synthetic oligonucleotide
ttttaggctagtcatgtttgtgttaggaatactaaggagagttaggcagg

SEQ ID NO: 485589 - DNA, 53 bp, Artificial
  Synthetic oligonucleotide
ttttagggagtcattcagaacctttaattgttccgagtttggaggacatacgg

SEQ ID NO: 485590 - DNA, 53 bp, Artificial
  Synthetic oligonucleotide
ttttaggtggcactaaacgatttatatacgagtcgttggtagactgtttaaaa

SEQ ID NO: 485591 - DNA, 55 bp, Artificial
  Synthetic oligonucleotide
ttttaggtgggacctctaccaatgaaattcgcgctacatggcttctttaatgcat

SEQ ID NO: 485592 - DNA, 51 bp, Artificial
  Synthetic oligonucleotide
ttttaggttgctaaaggtcctacggggcttagtaaaccgtcgttctcacaa

SEQ ID NO: 485593 - DNA, 52 bp, Artificial
  Synthetic oligonucleotide
ttttagtaaagttgatcccaacctaacagggacggctgagtgtgtgctgtgt

SEQ ID NO: 485594 - DNA, 51 bp, Artificial
  Synthetic oligonucleotide
ttttagtaacatgtgcaatcgccgtcattccctttatgccctcaccacgac

SEQ ID NO: 485595 - DNA, 59 bp, Artificial
  Synthetic oligonucleotide
ttttagtaggaggcattggactccgatgacgtggcttagcatattaacatatctattgg

SEQ ID NO: 485596 - DNA, 59 bp, Artificial
  Synthetic oligonucleotide
ttttagtcaagtgcgtttggaaataagcacttctgcaagaagtagaactagtatagtca

SEQ ID NO: 485597 - DNA, 55 bp, Artificial
  Synthetic oligonucleotide
ttttagtggtattttatcttcggcccccgaggtaatgcagtcggccattgacgag

SEQ ID NO: 485598 - DNA, 56 bp, Artificial
  Synthetic oligonucleotide
ttttagtgtttgtgcgttagcatctggtattactcatcagacagtaaaaccaggtc

SEQ ID NO: 485599 - DNA, 54 bp, Artificial
  Synthetic oligonucleotide
ttttagttcgcgatcgacgacctgttgacaaacctcaggattttggtgaggtat

SEQ ID NO: 485600 - DNA, 57 bp, Artificial
  Synthetic oligonucleotide
ttttagttgcactcgagaatcagcacactatagatgtgactgattcagagatgaaca

SEQ ID NO: 485601 - DNA, 60 bp, Artificial
  Synthetic oligonucleotide
ttttagttgcactggaaaaccaacacaccatagatgtgactgactcagagatgaacaaac

SEQ ID NO: 485602 - DNA, 54 bp, Artificial
  Synthetic oligonucleotide
ttttagtttgtgaggagtgactacactcgggcttttgtcccgtgtgtggttatg

SEQ ID NO: 485603 - DNA, 60 bp, Artificial
  Synthetic oligonucleotide
ttttataatcagtctgccaaatcctggcacaccaatagttggcttgatgaagacagaagg

SEQ ID NO: 485604 - DNA, 55 bp, Artificial
  Synthetic oligonucleotide
ttttatagacctgatttagtaccacttaaggagaactctagtccgaagaactctg

SEQ ID NO: 485605 - DNA, 52 bp, Artificial
  Synthetic oligonucleotide
ttttatagtgggctgtttaaatctaatgtccgttgaatgtttggcagcggac

SEQ ID NO: 485606 - DNA, 52 bp, Artificial
  Synthetic oligonucleotide
ttttatatacgtcagccctaatttgaacggtgtgagatgtgggatcctttac

SEQ ID NO: 485607 - DNA, 52 bp, Artificial
  Synthetic oligonucleotide
ttttatattgggcctaatggacctttaggatgtcggtctcgaccaatggaaa

SEQ ID NO: 485608 - DNA, 52 bp, Artificial
  Synthetic oligonucleotide
ttttatattggttaattaaccttatgaggaagctgcgccccacaagcgaagt

SEQ ID NO: 485609 - DNA, 56 bp, Artificial
  Synthetic oligonucleotide
ttttatccaactggaacaaggtgaggtgttctttcatttacacgtcctgctggaaa

SEQ ID NO: 485610 - DNA, 55 bp, Artificial
  Synthetic oligonucleotide
ttttatccacaatgatgttgaagcgtgggtcgaccggtacaaatttatgcctgaa

SEQ ID NO: 485611 - DNA, 54 bp, Artificial
  Synthetic oligonucleotide
ttttatcccaaagactgatagtctacaatggcctagacacacattcacaacgtt

SEQ ID NO: 485612 - DNA, 55 bp, Artificial
  Synthetic oligonucleotide
ttttatcgaaatgtctgcaaatctgttagtatcttgcactcgacgtgtgatctcc

SEQ ID NO: 485613 - DNA, 52 bp, Artificial
  Synthetic oligonucleotide
ttttatctaacacagatcctcgtcttgaggtttctggcgtgacagattatga

SEQ ID NO: 485614 - DNA, 50 bp, Artificial
  Synthetic oligonucleotide
ttttatctagtgcaggcaaaacacctctacctagctcagtttatgttggt

SEQ ID NO: 485615 - DNA, 54 bp, Artificial
  Synthetic oligonucleotide
ttttatcttcgtacgtgtgtgatctaaagcccgttgttggggtgatggaaaaaa

SEQ ID NO: 485616 - DNA, 51 bp, Artificial
  Synthetic oligonucleotide
ttttatgcagacgcgccctgaaaaggagctcgccgactttaccgtactgat

SEQ ID NO: 485617 - DNA, 55 bp, Artificial
  Synthetic oligonucleotide
ttttatgcagatctcagcagtaacatgactctcaacaacctgatagatgttgacc

SEQ ID NO: 485618 - DNA, 54 bp, Artificial
  Synthetic oligonucleotide
ttttatgcaggctacgggagcggcaatcagagcgttttccgatatggtaaatga

SEQ ID NO: 485619 - DNA, 52 bp, Artificial
  Synthetic oligonucleotide
ttttatgcagtataaggcaccttaaaggcatgcagcggagttatgaacgtct

SEQ ID NO: 485620 - DNA, 58 bp, Artificial
  Synthetic oligonucleotide
ttttatgcggtggttagggcaggagtgcacctgcttcttggagccagccgagggttta

SEQ ID NO: 485621 - DNA, 55 bp, Artificial
  Synthetic oligonucleotide
ttttatgcttgcgtgtcctaagcgttcttgtatctctttatagggaacatcagca

SEQ ID NO: 485622 - DNA, 58 bp, Artificial
  Synthetic oligonucleotide
ttttatgctttgtccaatcagatttggtctggcgagtctaggtattcgtgttcaaact

SEQ ID NO: 485623 - DNA, 54 bp, Artificial
  Synthetic oligonucleotide
ttttatggaccttggattatttctgggacttatccggtcgtgagtcttatctgc

SEQ ID NO: 485624 - DNA, 53 bp, Artificial
  Synthetic oligonucleotide
ttttatggatgctgtctttgactactcagtggactgtgatggggccatactag

SEQ ID NO: 485625 - DNA, 51 bp, Artificial
  Synthetic oligonucleotide
ttttatggatgggctatgagctgcatccagataaatggacagtacaaccca

SEQ ID NO: 485626 - DNA, 60 bp, Artificial
  Synthetic oligonucleotide
ttttatggcaagcagccatgcttcaagccaatgtaaaaaacatggcttataagctccacg

SEQ ID NO: 485627 - DNA, 57 bp, Artificial
  Synthetic oligonucleotide
ttttatggggtaatcaaatgtttatcacagttgctgataatacacggaacacaaact

SEQ ID NO: 485628 - DNA, 59 bp, Artificial
  Synthetic oligonucleotide
ttttatgggtggctaccttattgcgagatgctccgcctctgcgaccgttacccacataa

SEQ ID NO: 485629 - DNA, 60 bp, Artificial
  Synthetic oligonucleotide
ttttatgtctttatcatcccaatcatcatctattgctgacgaaattgcttcctctcaagt

SEQ ID NO: 485630 - DNA, 53 bp, Artificial
  Synthetic oligonucleotide
ttttatgtggtccccacgaggatttcacagacgtcactgtcaaccaatcaaat

SEQ ID NO: 485631 - DNA, 52 bp, Artificial
  Synthetic oligonucleotide
ttttattaaatgagcaacaataccacaatttataggcggtgagtaataatgg

SEQ ID NO: 485632 - DNA, 58 bp, Artificial
  Synthetic oligonucleotide
ttttattccgcgaagcggtatgtttagtgaggataggattgtaattgtgtatgcgtaa

SEQ ID NO: 485633 - DNA, 58 bp, Artificial
  Synthetic oligonucleotide
ttttattctcccacaagcctgtaatagacttctcaggcataagggacaagtatataaa

SEQ ID NO: 485634 - DNA, 60 bp, Artificial
  Synthetic oligonucleotide
ttttattgaggggggatggacaggattgatagatggatggtatggttaccatcatcagaa

SEQ ID NO: 485635 - DNA, 55 bp, Artificial
  Synthetic oligonucleotide
ttttatttgaattggcttcccgtacttcgtgttgctttgccagtccctttgtgcc

SEQ ID NO: 485636 - DNA, 60 bp, Artificial
  Synthetic oligonucleotide
ttttcaaaaattctgatatagaaccatgactacctctgcggtacatgattctcactcttt

SEQ ID NO: 485637 - DNA, 53 bp, Artificial
  Synthetic oligonucleotide
ttttcaaaacgcctagtaaagttcctgtatgttttgcacaattttcaaagaaa

SEQ ID NO: 485638 - DNA, 57 bp, Artificial
  Synthetic oligonucleotide
ttttcaaacagaccattattccaaccaataaggacgtagatgagaaatacatctact

SEQ ID NO: 485639 - DNA, 52 bp, Artificial
  Synthetic oligonucleotide
ttttcaaactggaggaattggtaatttacctgttaggaattggacttttgat

SEQ ID NO: 485640 - DNA, 52 bp, Artificial
  Synthetic oligonucleotide
ttttcaaagcagcactcatacattgtgtcaacgacagagctttactaaggga

SEQ ID NO: 485641 - DNA, 54 bp, Artificial
  Synthetic oligonucleotide
ttttcaacaacagtttctactgagcagaatgttcctgatccccaagttggcata

SEQ ID NO: 485642 - DNA, 53 bp, Artificial
  Synthetic oligonucleotide
ttttcaacatacctgctgagatcatcgagggctacatctacatcaaactcaac

SEQ ID NO: 485643 - DNA, 51 bp, Artificial
  Synthetic oligonucleotide
ttttcaaccaccctcgggaggggacccagaaattacaacacacacctttaa

SEQ ID NO: 485644 - DNA, 60 bp, Artificial
  Synthetic oligonucleotide
ttttcaactgcttgtatgcgtctccacaattagaaggattctcagctgaatcaaggaaat

SEQ ID NO: 485645 - DNA, 59 bp, Artificial
  Synthetic oligonucleotide
ttttcaactggtccggagaagtgctcattacgggcaactcgcgagcataatagtttatg

SEQ ID NO: 485646 - DNA, 57 bp, Artificial
  Synthetic oligonucleotide
ttttcaaggacacccattactatgtgtccggaggaatgccatcagggtgctcaggga

SEQ ID NO: 485647 - DNA, 60 bp, Artificial
  Synthetic oligonucleotide
ttttcaatgaagctacaggagagttagtggatgttgacaccgaccatgatgctacccagg

SEQ ID NO: 485648 - DNA, 59 bp, Artificial
  Synthetic oligonucleotide
ttttcaatgtcgaagaaagctgttccaccaatcgttaaggctcaatatgagctttataa

SEQ ID NO: 485649 - DNA, 58 bp, Artificial
  Synthetic oligonucleotide
ttttcaatgtcgtctgagccttgtgctgtcaacaccattccttcaggtagggccctga

SEQ ID NO: 485650 - DNA, 55 bp, Artificial
  Synthetic oligonucleotide
ttttcacaacctagcctttgatggcacgtttattcttgactggctattgaagcac

SEQ ID NO: 485651 - DNA, 51 bp, Artificial
  Synthetic oligonucleotide
ttttcacacgagcaggtacagtaggggataaaatgcctaatgcaacagagc

SEQ ID NO: 485652 - DNA, 60 bp, Artificial
  Synthetic oligonucleotide
ttttcacataagcctgtgatcgacttctcaggcattagggataaatacattaacctacat

SEQ ID NO: 485653 - DNA, 55 bp, Artificial
  Synthetic oligonucleotide
ttttcaccgccaggtggctaccagcggtggcgctctcgcgcaagcgagtgtgtct

SEQ ID NO: 485654 - DNA, 55 bp, Artificial
  Synthetic oligonucleotide
ttttcaccggtcgataagaggcagattccgttatgacttatccagtcacgaggac

SEQ ID NO: 485655 - DNA, 52 bp, Artificial
  Synthetic oligonucleotide
ttttcacctgatcttcgatctcaggtcttaatgtggtcaatagaggggctcc

SEQ ID NO: 485656 - DNA, 59 bp, Artificial
  Synthetic oligonucleotide
ttttcacggctccagaaacgtgccgccgcacgactggtacgtgacgcaaaatgttctgc

SEQ ID NO: 485657 - DNA, 60 bp, Artificial
  Synthetic oligonucleotide
ttttcactgagtttctctgaattggatgagaaagtgagtctatatgaggagtatgagcga

SEQ ID NO: 485658 - DNA, 50 bp, Artificial
  Synthetic oligonucleotide
ttttcagaattggggaactgaacccattgacaatgtgatgggaatgatcg

SEQ ID NO: 485659 - DNA, 60 bp, Artificial
  Synthetic oligonucleotide
ttttcagagacttattgatctaataggccatatgactcttagtgatttcacaaggttccc

SEQ ID NO: 485660 - DNA, 60 bp, Artificial
  Synthetic oligonucleotide
ttttcagataactccggatacagtcagacgacatggagagtttatctaaggtcccatgac

SEQ ID NO: 485661 - DNA, 59 bp, Artificial
  Synthetic oligonucleotide
ttttcagatcgaatggtctaacagccaatgagtcaggaaggttaatagatttcctcaaa

SEQ ID NO: 485662 - DNA, 58 bp, Artificial
  Synthetic oligonucleotide
ttttcagattaatgtaccaccatggtactcagacctgaacgtagttgacgctaggatt

SEQ ID NO: 485663 - DNA, 52 bp, Artificial
  Synthetic oligonucleotide
ttttcagcaggccgcaagagacccagaagggacacagaagtgtatcagtccg

SEQ ID NO: 485664 - DNA, 55 bp, Artificial
  Synthetic oligonucleotide
ttttcagccgaacgctcctgggtgagatcctcaattactacacccactggtcggg

SEQ ID NO: 485665 - DNA, 51 bp, Artificial
  Synthetic oligonucleotide
ttttcaggttggataggtcacttcgtgactccagttgtgactggagtaatg

SEQ ID NO: 485666 - DNA, 51 bp, Artificial
  Synthetic oligonucleotide
ttttcagtcccggatcccttgcgtgagatccaaaggttaggttctaagaaa

SEQ ID NO: 485667 - DNA, 51 bp, Artificial
  Synthetic oligonucleotide
ttttcagttcatttgtgcacagcggaaacttgcatagtttaattggtggac

SEQ ID NO: 485668 - DNA, 53 bp, Artificial
  Synthetic oligonucleotide
ttttcatacccggggaggtcactaacctactgcagatagcacaagtcgaatcc

SEQ ID NO: 485669 - DNA, 59 bp, Artificial
  Synthetic oligonucleotide
ttttcatcctgctcggatacagtgtagggcttggtatttagaggctctacaacatttaa

SEQ ID NO: 485670 - DNA, 52 bp, Artificial
  Synthetic oligonucleotide
ttttcatcgcttcgatttgttcatgtccaaaatcatggctttcgttatcgcc

SEQ ID NO: 485671 - DNA, 54 bp, Artificial
  Synthetic oligonucleotide
ttttcatgaagtacacatctggaatccttcagaataatagacatgctgagctga

SEQ ID NO: 485672 - DNA, 60 bp, Artificial
  Synthetic oligonucleotide
ttttcatgccaacgtggatataagggagtctggcggggagacggaatcatgcataccacc

SEQ ID NO: 485673 - DNA, 52 bp, Artificial
  Synthetic oligonucleotide
ttttcatggcgtgtcttgttgataagaaacctttcgttccagatggggtcag

SEQ ID NO: 485674 - DNA, 60 bp, Artificial
  Synthetic oligonucleotide
ttttcatgtggggcataaatcacccacccaccgatactgcacagacaaatctgtatacaa

SEQ ID NO: 485675 - DNA, 60 bp, Artificial
  Synthetic oligonucleotide
ttttcattctcactggagactcgcggcaaagtgtatatcatgagtccaacaatgaagcat

SEQ ID NO: 485676 - DNA, 60 bp, Artificial
  Synthetic oligonucleotide
ttttcattgaacgaagcaaggctttcagcaactgttacccgtatgatgtgccggagtata

SEQ ID NO: 485677 - DNA, 57 bp, Artificial
  Synthetic oligonucleotide
ttttcattgtactttacgaacactaccactggtagaaggcacagactagcttatgcc

SEQ ID NO: 485678 - DNA, 51 bp, Artificial
  Synthetic oligonucleotide
ttttcatttgctgctggctctcagcgtggcactgttgcaggcggtgttaat

SEQ ID NO: 485679 - DNA, 51 bp, Artificial
  Synthetic oligonucleotide
ttttcatttgttacagaccctgataacacagcactgaacatcaggcaatca

SEQ ID NO: 485680 - DNA, 55 bp, Artificial
  Synthetic oligonucleotide
ttttccaaaagcttatacgcttgtgctctcgatcgcttcgcaatctcttttgcct

SEQ ID NO: 485681 - DNA, 52 bp, Artificial
  Synthetic oligonucleotide
ttttccaaatgacaaacacaaaccctgaccaaaaatgtataactgctttggc

SEQ ID NO: 485682 - DNA, 56 bp, Artificial
  Synthetic oligonucleotide
ttttccaagtcttcgaatcactattttctccagttctattccgtgattaccataaa

SEQ ID NO: 485683 - DNA, 60 bp, Artificial
  Synthetic oligonucleotide
ttttccaatctaactctaaagatcctgatctaacactcgaagcacaccactcctccgaca

SEQ ID NO: 485684 - DNA, 51 bp, Artificial
  Synthetic oligonucleotide
ttttccacacaacccgggctgacaagtgctgtcatagaggcacttccccgc

SEQ ID NO: 485685 - DNA, 52 bp, Artificial
  Synthetic oligonucleotide
ttttccacacaggatcttgagagtttgctacactatttggagcagggatatg

SEQ ID NO: 485686 - DNA, 50 bp, Artificial
  Synthetic oligonucleotide
ttttccacataggccttgacgtctgacgagctcttagctctctgaatgtt

SEQ ID NO: 485687 - DNA, 52 bp, Artificial
  Synthetic oligonucleotide
ttttccacgttgacgatctttcgtctgtaaagcttgacccacctatggaagc

SEQ ID NO: 485688 - DNA, 60 bp, Artificial
  Synthetic oligonucleotide
ttttccactataccgagacagataaaagagacctggacactctgggagctgcctacgatg

SEQ ID NO: 485689 - DNA, 57 bp, Artificial
  Synthetic oligonucleotide
ttttccagccacaccggaccaaccccacaccaattcagactctggtcatggcactaa

SEQ ID NO: 485690 - DNA, 60 bp, Artificial
  Synthetic oligonucleotide
ttttccagctatacgctggcattccgtgatcaggtgctgcatgcagagcacaaccggcat

SEQ ID NO: 485691 - DNA, 53 bp, Artificial
  Synthetic oligonucleotide
ttttccaggatattgttggtggcacccaggaggtcttctacacaatcactggt

SEQ ID NO: 485692 - DNA, 53 bp, Artificial
  Synthetic oligonucleotide
ttttccaggggataagttcggtgctacagctacggctgtatccttcgcgatgc

SEQ ID NO: 485693 - DNA, 60 bp, Artificial
  Synthetic oligonucleotide
ttttccagtgcattgattaaacataggataccaaattcaagagacgagtatcactgcatt

SEQ ID NO: 485694 - DNA, 51 bp, Artificial
  Synthetic oligonucleotide
ttttccatatgtgaataaacgtttatcgttttaaaggtttcgcccttttca

SEQ ID NO: 485695 - DNA, 56 bp, Artificial
  Synthetic oligonucleotide
ttttccatgtaggtcttaacgtccgacgagcttttagctccctgaatgttcggatg

SEQ ID NO: 485696 - DNA, 60 bp, Artificial
  Synthetic oligonucleotide
ttttcccaaaagcaaactcatggccaaatcatgagacaaccaaaggtattacagctgcat

SEQ ID NO: 485697 - DNA, 55 bp, Artificial
  Synthetic oligonucleotide
ttttcccacatctgttccagaacccaaattcggttattcaatctcccatctgggc

SEQ ID NO: 485698 - DNA, 55 bp, Artificial
  Synthetic oligonucleotide
ttttccccaatggagaccaagcttatcacgtggggagcagacaccgctgcgtgcg

SEQ ID NO: 485699 - DNA, 51 bp, Artificial
  Synthetic oligonucleotide
ttttccccggaaattgctgggtcaaattaaacgtcggcgcgggtcaaatta

SEQ ID NO: 485700 - DNA, 53 bp, Artificial
  Synthetic oligonucleotide
ttttccctagtagttcatataggagaccggtaggaatttctagcatggtggag

SEQ ID NO: 485701 - DNA, 50 bp, Artificial
  Synthetic oligonucleotide
ttttccctcctcttaaatcgaagggcttccttacgcggtttctaccgaac

SEQ ID NO: 485702 - DNA, 60 bp, Artificial
  Synthetic oligonucleotide
ttttcccttattcagcatcattcacactaaacagatcgcaaccagctcatgacaacctga

SEQ ID NO: 485703 - DNA, 56 bp, Artificial
  Synthetic oligonucleotide
ttttccgaaattacactttttcaacgcaattagcaaaattgtccaatatggatcta

SEQ ID NO: 485704 - DNA, 55 bp, Artificial
  Synthetic oligonucleotide
ttttccgaaatttaggacaattcaataatgagttagttggaattcttcattatcc

SEQ ID NO: 485705 - DNA, 55 bp, Artificial
  Synthetic oligonucleotide
ttttccgacgaggaggattctccgcagacccgtgcgtgtccgcagaaccagcgtc

SEQ ID NO: 485706 - DNA, 50 bp, Artificial
  Synthetic oligonucleotide
ttttccgattccaaggtcgtcctttcgaggattaagtttaaaacggagct

SEQ ID NO: 485707 - DNA, 58 bp, Artificial
  Synthetic oligonucleotide
ttttccgcgaagtacttggttgcgaagacgagcccaatgatgacggatatacaccgac

SEQ ID NO: 485708 - DNA, 54 bp, Artificial
  Synthetic oligonucleotide
ttttccgctagctccattgtcgacggtatattgtgatgattcgtgtttccatcc

SEQ ID NO: 485709 - DNA, 55 bp, Artificial
  Synthetic oligonucleotide
ttttccgtcgcgtatctcttccgcctcagatttacccaattggagtgctgattag

SEQ ID NO: 485710 - DNA, 50 bp, Artificial
  Synthetic oligonucleotide
ttttcctaaaccccttcaaaatggcgggcgggacacaaaatggcggaggg

SEQ ID NO: 485711 - DNA, 52 bp, Artificial
  Synthetic oligonucleotide
ttttcctaatacattctgcagattggttaacaacacatgctttgtttcatga

SEQ ID NO: 485712 - DNA, 59 bp, Artificial
  Synthetic oligonucleotide
ttttcctaccacgagccacaggaaggatggaattcacactgcacaacggtgagagaaaa

SEQ ID NO: 485713 - DNA, 55 bp, Artificial
  Synthetic oligonucleotide
ttttcctagccaccctctaaggcccttcttcaagccccttagagcttatctcaaa

SEQ ID NO: 485714 - DNA, 60 bp, Artificial
  Synthetic oligonucleotide
ttttcctaggacatggctccatagcttagggcaatatatctatgcaacttatggggatac

SEQ ID NO: 485715 - DNA, 60 bp, Artificial
  Synthetic oligonucleotide
ttttcctaggccatggctccatagcttaggacaacatatctataacacctatggggatac

SEQ ID NO: 485716 - DNA, 50 bp, Artificial
  Synthetic oligonucleotide
ttttcctaggccctggctccatggcttaggacagtacatctataacaatt

SEQ ID NO: 485717 - DNA, 57 bp, Artificial
  Synthetic oligonucleotide
ttttcctattgagggtggaaaaatttcacaagttactgtgaatgggcagccgatgga

SEQ ID NO: 485718 - DNA, 56 bp, Artificial
  Synthetic oligonucleotide
ttttcctattgcaatacaacaaaactgtttaacagaacaatgctggagaacgaaac

SEQ ID NO: 485719 - DNA, 59 bp, Artificial
  Synthetic oligonucleotide
ttttcctcactctcaaataactatgaatatgtctagacagggtattttccagactgttg

SEQ ID NO: 485720 - DNA, 56 bp, Artificial
  Synthetic oligonucleotide
ttttcctcattcttaaacaataatgaacatgtccaaacaaggaattttccagactg

SEQ ID NO: 485721 - DNA, 52 bp, Artificial
  Synthetic oligonucleotide
ttttcctccaggcatgaattggacggaactcatcactaactattcgccatca

SEQ ID NO: 485722 - DNA, 59 bp, Artificial
  Synthetic oligonucleotide
ttttcctcgccactactcttgtaaattggatagagtgagtatatgcgtgagtacgtaaa

SEQ ID NO: 485723 - DNA, 51 bp, Artificial
  Synthetic oligonucleotide
ttttcctcgctcgaattttctgagctgaagcaaaccgctttcgagcggaaa

SEQ ID NO: 485724 - DNA, 59 bp, Artificial
  Synthetic oligonucleotide
ttttcctgcttgtctaggaattctttatagctggccccctctcctggattgcaaagcac

SEQ ID NO: 485725 - DNA, 53 bp, Artificial
  Synthetic oligonucleotide
ttttcctgggcgacccatctaccctggagacctgtatgagcccgatccatggg

SEQ ID NO: 485726 - DNA, 52 bp, Artificial
  Synthetic oligonucleotide
ttttccttgagactgaggaggtttatcaacctggaagatggtttatgcgagc

SEQ ID NO: 485727 - DNA, 55 bp, Artificial
  Synthetic oligonucleotide
ttttccttgttagagatcgacgtcctagtggtacacctatggattttcaacaagt

SEQ ID NO: 485728 - DNA, 54 bp, Artificial
  Synthetic oligonucleotide
ttttcgaaaagttacagaagccactagatctaagcgaggacgagggtgacccca

SEQ ID NO: 485729 - DNA, 51 bp, Artificial
  Synthetic oligonucleotide
ttttcgaacgcacaagggaactcaatgcagacgcaggctggcgtagtagtg

SEQ ID NO: 485730 - DNA, 52 bp, Artificial
  Synthetic oligonucleotide
ttttcgaagtcacgctgggtcggagaatcgcagattgcgttgtggtagctct

SEQ ID NO: 485731 - DNA, 53 bp, Artificial
  Synthetic oligonucleotide
ttttcgaatgacgttatatatcttgagaggccctccatacggaggagacctca

SEQ ID NO: 485732 - DNA, 58 bp, Artificial
  Synthetic oligonucleotide
ttttcgacatggcagatcctaataaaggtattaattctcttgaattaaatgaggggca

SEQ ID NO: 485733 - DNA, 55 bp, Artificial
  Synthetic oligonucleotide
ttttcgacgccacaccaaactccctgcccgacgctgttgcctcgctctctgccca

SEQ ID NO: 485734 - DNA, 55 bp, Artificial
  Synthetic oligonucleotide
ttttcgacggtatcagtgaaatagcatttggtggtttattgttgtgtttaggaaa

SEQ ID NO: 485735 - DNA, 53 bp, Artificial
  Synthetic oligonucleotide
ttttcgacttaacgtctgacccgcccggagtacaaccgtttatggacatgtat

SEQ ID NO: 485736 - DNA, 50 bp, Artificial
  Synthetic oligonucleotide
ttttcgagactctatggcgacagcggattttacatgcaccccggcgatgg

SEQ ID NO: 485737 - DNA, 55 bp, Artificial
  Synthetic oligonucleotide
ttttcgagagtggtctatgcggatcgtgcggaggctattatccactagagacgtg

SEQ ID NO: 485738 - DNA, 52 bp, Artificial
  Synthetic oligonucleotide
ttttcgaggtagctctgcatctcaatcctccgcttccggcgggtccgtcccg

SEQ ID NO: 485739 - DNA, 60 bp, Artificial
  Synthetic oligonucleotide
ttttcgatagctcgcgctaccgcgcgtcatgtgccttcccgtcgcaatcctaaggagaag

SEQ ID NO: 485740 - DNA, 54 bp, Artificial
  Synthetic oligonucleotide
ttttcgattgctcaagagctatagactgcgtgactcagaggtaatcttaaacaa

SEQ ID NO: 485741 - DNA, 54 bp, Artificial
  Synthetic oligonucleotide
ttttcgcaaggtaaatgcagagagtttattggattcgtcccgtgcttcatctga

SEQ ID NO: 485742 - DNA, 55 bp, Artificial
  Synthetic oligonucleotide
ttttcgcaattccgtttacgatacatagtctactcttgtgcagaatgaattctcg

SEQ ID NO: 485743 - DNA, 51 bp, Artificial
  Synthetic oligonucleotide
ttttcgcacttaatttgaaaggtctaggagcagccatcaaaacgctcgttt

SEQ ID NO: 485744 - DNA, 53 bp, Artificial
  Synthetic oligonucleotide
ttttcgcagttggggtttctagggttcgcagttgggaaagtgcgtcctcctta

SEQ ID NO: 485745 - DNA, 55 bp, Artificial
  Synthetic oligonucleotide
ttttcgccggagaactattcaactgtattttgcaaaaggcaagcgctggcacttg

SEQ ID NO: 485746 - DNA, 60 bp, Artificial
  Synthetic oligonucleotide
ttttcgcgctggtgactggccgcaagatcgaaggagcctgacccatgcccgagtacgcac

SEQ ID NO: 485747 - DNA, 60 bp, Artificial
  Synthetic oligonucleotide
ttttcgcttctcgtgtctagcggaggagtttcagacagatgcaaacagggcaatgtatca

SEQ ID NO: 485748 - DNA, 52 bp, Artificial
  Synthetic oligonucleotide
ttttcggaaatcgatagcgagctgtcgtcactaaacgagcctgcgaggcacg

SEQ ID NO: 485749 - DNA, 58 bp, Artificial
  Synthetic oligonucleotide
ttttcggaaggaggtagaagaataccagataatgtcatcccgttcaagcatttgcgag

SEQ ID NO: 485750 - DNA, 60 bp, Artificial
  Synthetic oligonucleotide
ttttcggactttagaagctccaagatgacatacttaactctcatcacttatcagtctcat

SEQ ID NO: 485751 - DNA, 52 bp, Artificial
  Synthetic oligonucleotide
ttttcggcagagtgacttattacgatatcagagtcgagggttgcagctcgca

SEQ ID NO: 485752 - DNA, 54 bp, Artificial
  Synthetic oligonucleotide
ttttcggctctaagagatatctgtatcaggataacgagcgagtggcacatatcc

SEQ ID NO: 485753 - DNA, 53 bp, Artificial
  Synthetic oligonucleotide
ttttcggctggaaagagcccaacattgtcaaaccacatgagaaaggtataaac

SEQ ID NO: 485754 - DNA, 50 bp, Artificial
  Synthetic oligonucleotide
ttttcgggatagcgagcctgcatcattgctttgtagcgcaccatgaactt

SEQ ID NO: 485755 - DNA, 51 bp, Artificial
  Synthetic oligonucleotide
ttttcgggcgataagttcgtccaaatctctctgcatggttcttgtcaacgc

SEQ ID NO: 485756 - DNA, 58 bp, Artificial
  Synthetic oligonucleotide
ttttcgggctctcagacgagaaggcaacgaacccgatcgtgccctcttttgatatgag

SEQ ID NO: 485757 - DNA, 51 bp, Artificial
  Synthetic oligonucleotide
ttttcggtacgcgtgatcaagcaacaggtcaaattaacgaaattgaaactc

SEQ ID NO: 485758 - DNA, 57 bp, Artificial
  Synthetic oligonucleotide
ttttcggtgtatgctcgcaataaagtatttgcaaggcgttgaagcaacctacgcccc

SEQ ID NO: 485759 - DNA, 54 bp, Artificial
  Synthetic oligonucleotide
ttttcgtactttgacaatccgtttgctaaacccgacgctagcgatggtcaagcg

SEQ ID NO: 485760 - DNA, 51 bp, Artificial
  Synthetic oligonucleotide
ttttcgtagcggtaagcacgccccaagccgactcactccgaatatattcgc

SEQ ID NO: 485761 - DNA, 60 bp, Artificial
  Synthetic oligonucleotide
ttttcgtccaagtactctttatatgatgatgttggtcccggattgcagaggaagatagtg

SEQ ID NO: 485762 - DNA, 50 bp, Artificial
  Synthetic oligonucleotide
ttttcgtgagtttcacgcacgcttttgtcggtagtcgcggccattgttaa

SEQ ID NO: 485763 - DNA, 60 bp, Artificial
  Synthetic oligonucleotide
ttttcgttcctgtgttgacatgcatacagtcacgaggctattgtatgtacatcaacagcg

SEQ ID NO: 485764 - DNA, 54 bp, Artificial
  Synthetic oligonucleotide
ttttctaaatcagccgcaagagacatcagctcgtcagcactcaacctacccacc

SEQ ID NO: 485765 - DNA, 50 bp, Artificial
  Synthetic oligonucleotide
ttttctaacagctctctaagtactgtttgacttttctcacgctaacgcct

SEQ ID NO: 485766 - DNA, 57 bp, Artificial
  Synthetic oligonucleotide
ttttctacacgatactagggagtttacttcactggtccccgatgaggcagacaataa

SEQ ID NO: 485767 - DNA, 56 bp, Artificial
  Synthetic oligonucleotide
ttttctaccacctgaggcagtcgttagtacccatccccccgctgaccgacctcata

SEQ ID NO: 485768 - DNA, 55 bp, Artificial
  Synthetic oligonucleotide
ttttctaccgttttatcgggtggatggttcggaactgctagagatgtaccaccac

SEQ ID NO: 485769 - DNA, 49 bp, Artificial
  Synthetic oligonucleotide
ttttctacgtcgagggacccaatgggctccaagacccccctaaacccgt

SEQ ID NO: 485770 - DNA, 52 bp, Artificial
  Synthetic oligonucleotide
ttttctactcttgattgggttctgtatagccacacgaatgtgtagcctgtgt

SEQ ID NO: 485771 - DNA, 55 bp, Artificial
  Synthetic oligonucleotide
ttttctagattatccatctataaagcagttttcaaatggaccctatttagttaaa

SEQ ID NO: 485772 - DNA, 50 bp, Artificial
  Synthetic oligonucleotide
ttttctagcactaatggtgttggcgagatcggccgcgggatagcccttac

SEQ ID NO: 485773 - DNA, 60 bp, Artificial
  Synthetic oligonucleotide
ttttctaggttgcactgccaatattgtgtgctttcaaatctccaccaagacacacctaat

SEQ ID NO: 485774 - DNA, 60 bp, Artificial
  Synthetic oligonucleotide
ttttctataacaccgtcccatgccggctctttttgtctcactgatgacgtgacgactgag

SEQ ID NO: 485775 - DNA, 60 bp, Artificial
  Synthetic oligonucleotide
ttttctatctaataactctatggtactgtatacagacgtatcccagtgggactcatctca

SEQ ID NO: 485776 - DNA, 60 bp, Artificial
  Synthetic oligonucleotide
ttttctatctgataccgaacgagcaatcgctttgtcaagacatcaagttcctcacgttct

SEQ ID NO: 485777 - DNA, 60 bp, Artificial
  Synthetic oligonucleotide
ttttctatgtaattggtgtctggagtcccatatataggtaagacaccatatggcagaatt

SEQ ID NO: 485778 - DNA, 51 bp, Artificial
  Synthetic oligonucleotide
ttttctattccgggttctgattgggcttatacactcaatctatccgatgtg

SEQ ID NO: 485779 - DNA, 54 bp, Artificial
  Synthetic oligonucleotide
ttttctattgagaaaaattaaagagagaatgaccacatctcttccaattgctag

SEQ ID NO: 485780 - DNA, 55 bp, Artificial
  Synthetic oligonucleotide
ttttctattgtaatacatcaggcctgtttagtagcacttggagttggaatgacac

SEQ ID NO: 485781 - DNA, 51 bp, Artificial
  Synthetic oligonucleotide
ttttctcctatcatacctctatcaactggtcaacagtggagtcccaaggta

SEQ ID NO: 485782 - DNA, 51 bp, Artificial
  Synthetic oligonucleotide
ttttctcgtctgttcgtgatcttctcgacaccgcttcagctttgtaccggg

SEQ ID NO: 485783 - DNA, 54 bp, Artificial
  Synthetic oligonucleotide
ttttctcgtgtcaacgtgggtataggggaatctggcgaggagatggcatcatgc

SEQ ID NO: 485784 - DNA, 51 bp, Artificial
  Synthetic oligonucleotide
ttttctctatggttgcaagggagtatgctaccagagtgtttacaacaatag

SEQ ID NO: 485785 - DNA, 50 bp, Artificial
  Synthetic oligonucleotide
ttttctctcggaagagaccgctgaagtggcttacgggtatgacgctgaat

SEQ ID NO: 485786 - DNA, 54 bp, Artificial
  Synthetic oligonucleotide
ttttctgaaattccgagggaaggatttctcggagagataagatgctcctcagag

SEQ ID NO: 485787 - DNA, 55 bp, Artificial
  Synthetic oligonucleotide
ttttctgaaggtaggttcgtcaagccggctgatttgaaaaagaagacacgtgtct

SEQ ID NO: 485788 - DNA, 60 bp, Artificial
  Synthetic oligonucleotide
ttttctgacgatgtgtaaactgcgtcacataactccttgtacatctcaggacgaagtacg

SEQ ID NO: 485789 - DNA, 51 bp, Artificial
  Synthetic oligonucleotide
ttttctgatagagaagaaccaaggaataagaatttaatcacaaatcaagct

SEQ ID NO: 485790 - DNA, 55 bp, Artificial
  Synthetic oligonucleotide
ttttctgatgtggctgaggcgtacatagagatgcgtaacaagagtgaaccataca

SEQ ID NO: 485791 - DNA, 51 bp, Artificial
  Synthetic oligonucleotide
ttttctgccgaatgatgcctaacgctttagctagactatcctcaagttttc

SEQ ID NO: 485792 - DNA, 51 bp, Artificial
  Synthetic oligonucleotide
ttttctgctaccaccgcttgagagtcttaaccttgattgtagcgaggattg

SEQ ID NO: 485793 - DNA, 60 bp, Artificial
  Synthetic oligonucleotide
ttttctgctcgaacatcgacggaaacattaatttgacctctgcagcatcgtttgtgagcg

SEQ ID NO: 485794 - DNA, 55 bp, Artificial
  Synthetic oligonucleotide
ttttctggagctcgtgcaagaagtcaaggtttaccagtcatgatcacgccaggct

SEQ ID NO: 485795 - DNA, 52 bp, Artificial
  Synthetic oligonucleotide
ttttctggcgcgaaagcaggtgattcatccgagcacgtattttcgaaagtcg

SEQ ID NO: 485796 - DNA, 54 bp, Artificial
  Synthetic oligonucleotide
ttttctggtttgtacaccaagagcttgtcgttcgacagtaataagtacccaaag

SEQ ID NO: 485797 - DNA, 54 bp, Artificial
  Synthetic oligonucleotide
ttttctgtactttctatagtgaatagagctaggcaaggatactcaccgttgtca

SEQ ID NO: 485798 - DNA, 52 bp, Artificial
  Synthetic oligonucleotide
ttttctgtcgttggagccggtcttttccctagcaaccttggttggcttaacg

SEQ ID NO: 485799 - DNA, 55 bp, Artificial
  Synthetic oligonucleotide
ttttctgtgtggtttcccaatgcgaagtccaaagtagtcattcctcttttcgaaa

SEQ ID NO: 485800 - DNA, 53 bp, Artificial
  Synthetic oligonucleotide
ttttcttaactgctacgtggcgaaatcgtgtacgttgcctcgcgctttccatt

SEQ ID NO: 485801 - DNA, 51 bp, Artificial
  Synthetic oligonucleotide
ttttcttacccttatgacttggacatgaaagaattagcagatgaggggtct

SEQ ID NO: 485802 - DNA, 55 bp, Artificial
  Synthetic oligonucleotide
ttttcttaccgagaaagctgtggcttcagtaacattagcgggcaattcacctctt

SEQ ID NO: 485803 - DNA, 60 bp, Artificial
  Synthetic oligonucleotide
ttttcttcatgccttatgctcatacacagagaggtgcgatacaagatatcgttataaact

SEQ ID NO: 485804 - DNA, 50 bp, Artificial
  Synthetic oligonucleotide
ttttcttccagggtgtggcgaaccttttgcaccgcatgaaaactgcctat

SEQ ID NO: 485805 - DNA, 60 bp, Artificial
  Synthetic oligonucleotide
ttttcttcgattcggaccggctcatctcgacaagaggcggcagtcctcagtgctcttact

SEQ ID NO: 485806 - DNA, 56 bp, Artificial
  Synthetic oligonucleotide
ttttcttgggatcgacgtcgtcttccaaagataattatgtagtgacgagaacacgg

SEQ ID NO: 485807 - DNA, 53 bp, Artificial
  Synthetic oligonucleotide
ttttctttccctggttacgcgtaccgaaccttacacagtgtggcggctgtggg

SEQ ID NO: 485808 - DNA, 55 bp, Artificial
  Synthetic oligonucleotide
ttttgaaaccaggggaaaccttgaatgtggagtccaatggaaatctaatcgctcc

SEQ ID NO: 485809 - DNA, 60 bp, Artificial
  Synthetic oligonucleotide
ttttgaaactgttagtataatacagaggcactgataagcacataactcgaacactattaa

SEQ ID NO: 485810 - DNA, 55 bp, Artificial
  Synthetic oligonucleotide
ttttgaaatgatttgggacccaaatgggtggaccgaaacagacagtagcttctcg

SEQ ID NO: 485811 - DNA, 52 bp, Artificial
  Synthetic oligonucleotide
ttttgaacaagggactttccgctggggactttccaggggaggcgtggtctgg

SEQ ID NO: 485812 - DNA, 60 bp, Artificial
  Synthetic oligonucleotide
ttttgaacaatcttaagaaatgcactcaaaccattgattacagcaatgcgaagaattcca

SEQ ID NO: 485813 - DNA, 50 bp, Artificial
  Synthetic oligonucleotide
ttttgaacaccactcttcagccagagttgctccagagaaactagtgagtg

SEQ ID NO: 485814 - DNA, 55 bp, Artificial
  Synthetic oligonucleotide
ttttgaacatcaccatagcaagcagggtactggagcagagactcactgactccgc

SEQ ID NO: 485815 - DNA, 60 bp, Artificial
  Synthetic oligonucleotide
ttttgaaccaacagaatacacgcctgaggcgtttcagtagcgcgcctgagtacaccagac

SEQ ID NO: 485816 - DNA, 56 bp, Artificial
  Synthetic oligonucleotide
ttttgaacgacatgggaaaggtgaggaaagacattccgcagtgggaaccatctaag

SEQ ID NO: 485817 - DNA, 57 bp, Artificial
  Synthetic oligonucleotide
ttttgaacgagttgaggttaataacgcgttagatgtgacattccgagtgtttcagtc

SEQ ID NO: 485818 - DNA, 54 bp, Artificial
  Synthetic oligonucleotide
ttttgaacttccagacagcgggtatggcaatactgaagtggaaacgcagcagat

SEQ ID NO: 485819 - DNA, 60 bp, Artificial
  Synthetic oligonucleotide
ttttgaagaatgttcctgttacccgagcgggacagatgttgaatgtgtctgcagggacaa

SEQ ID NO: 485820 - DNA, 53 bp, Artificial
  Synthetic oligonucleotide
ttttgaagacaacaccacgtcctctcagattaccggatgggccttattgctct

SEQ ID NO: 485821 - DNA, 60 bp, Artificial
  Synthetic oligonucleotide
ttttgaagaggtcaatggcatccgaaagcccaagcatttgtatgtatccatgccaacagc

SEQ ID NO: 485822 - DNA, 60 bp, Artificial
  Synthetic oligonucleotide
ttttgaaggggacgctcatctcgccaacttgcttaagatgcaactggtgaatcatggcgt

SEQ ID NO: 485823 - DNA, 51 bp, Artificial
  Synthetic oligonucleotide
ttttgaatgaccctacacctgtggaagtaacggttcaagccaggcccatga

SEQ ID NO: 485824 - DNA, 53 bp, Artificial
  Synthetic oligonucleotide
ttttgaattgttagttgaaacggctgttgattcaagtaaactggatccagaag

SEQ ID NO: 485825 - DNA, 55 bp, Artificial
  Synthetic oligonucleotide
ttttgacaaactatacatttggggggttcaccacccgagctcggaccaagagcaa

SEQ ID NO: 485826 - DNA, 59 bp, Artificial
  Synthetic oligonucleotide
ttttgacaggaccaaaggatctcacaccacgggacgttctagaacagctcgccgcagga

SEQ ID NO: 485827 - DNA, 60 bp, Artificial
  Synthetic oligonucleotide
ttttgacatcaaccctttgtttgtattatcctgttgaggcatcaaacgaaatagctgata

SEQ ID NO: 485828 - DNA, 60 bp, Artificial
  Synthetic oligonucleotide
ttttgacatcgaccctttgcctatattatccaaccgaagcatcaaacgagatcgctgata

SEQ ID NO: 485829 - DNA, 53 bp, Artificial
  Synthetic oligonucleotide
ttttgacatcgacgctgtgtctatattatccagcagaagctgagacagagatt

SEQ ID NO: 485830 - DNA, 53 bp, Artificial
  Synthetic oligonucleotide
ttttgaccacctcacccgacatagattatgggcacgactctgttagctaccaa

SEQ ID NO: 485831 - DNA, 55 bp, Artificial
  Synthetic oligonucleotide
ttttgaccagggctggggccctatcagtcataccaacgggagcggccccgaccaa

SEQ ID NO: 485832 - DNA, 52 bp, Artificial
  Synthetic oligonucleotide
ttttgaccagtaccagagaggctttaacaagtggagccacactaacaaggac

SEQ ID NO: 485833 - DNA, 52 bp, Artificial
  Synthetic oligonucleotide
ttttgaccgcttgtacgaaatgctggacacagaccaagtttctgacaaacct

SEQ ID NO: 485834 - DNA, 54 bp, Artificial
  Synthetic oligonucleotide
ttttgaccgggctacttacaccctgcgatttgtaactgagcgaccgtgcaccgt

SEQ ID NO: 485835 - DNA, 55 bp, Artificial
  Synthetic oligonucleotide
ttttgacctgcacactagcacagcaacccagcaatcattcacaaggtggacatgg

SEQ ID NO: 485836 - DNA, 53 bp, Artificial
  Synthetic oligonucleotide
ttttgacgaagggtgaacgacaaatgaaccttaactttagtgctgcattcaac

SEQ ID NO: 485837 - DNA, 60 bp, Artificial
  Synthetic oligonucleotide
ttttgacgacgaacgagtacgatttctatctatatgatggtatgaattggtatgtgacta

SEQ ID NO: 485838 - DNA, 51 bp, Artificial
  Synthetic oligonucleotide
ttttgacgactatactaagctgccacccggttacattgaagcttatctgtt

SEQ ID NO: 485839 - DNA, 50 bp, Artificial
  Synthetic oligonucleotide
ttttgacgcaaacttttacaaaaaaggtgcatataattttggtgtaaaat

SEQ ID NO: 485840 - DNA, 60 bp, Artificial
  Synthetic oligonucleotide
ttttgacgttctctcagtagacaacaatgacccaatgagcgatgcaatttgctcattttc

SEQ ID NO: 485841 - DNA, 54 bp, Artificial
  Synthetic oligonucleotide
ttttgacgttcttattgaccctgacccttatttcgcaggtgcttaccctgccct

SEQ ID NO: 485842 - DNA, 54 bp, Artificial
  Synthetic oligonucleotide
ttttgactaatgccattttaggtaggtcaagtcagtttctgtttcgtagtgagg

SEQ ID NO: 485843 - DNA, 60 bp, Artificial
  Synthetic oligonucleotide
ttttgactagcggaggctagaaggagagagatgggtgcgagagcttcagtattaagcggg

SEQ ID NO: 485844 - DNA, 57 bp, Artificial
  Synthetic oligonucleotide
ttttgactgaggtcaagatgaccgcacaaataattatgtgggcctaaggaacgggcc

SEQ ID NO: 485845 - DNA, 53 bp, Artificial
  Synthetic oligonucleotide
ttttgactggtggcataggaagtataccccaggatatcatacacctgaggata

SEQ ID NO: 485846 - DNA, 58 bp, Artificial
  Synthetic oligonucleotide
ttttgacttcaaggagcccgatgggctcccacactaccccataggcaagtgtatccta

SEQ ID NO: 485847 - DNA, 55 bp, Artificial
  Synthetic oligonucleotide
ttttgacttgcgcaactaactgaacttgtttgttgccccgaaatggggcagctgg

SEQ ID NO: 485848 - DNA, 52 bp, Artificial
  Synthetic oligonucleotide
ttttgactttgtctcaaggtctaaagaagtactacggtaagatacaaaaaac

SEQ ID NO: 485849 - DNA, 57 bp, Artificial
  Synthetic oligonucleotide
ttttgacttttggggaatccacaggatcaacttttcaagaaattgtcattctcataa

SEQ ID NO: 485850 - DNA, 51 bp, Artificial
  Synthetic oligonucleotide
ttttgagaaaattcggataattcctaggagttcttggtccaatcatgatgc

SEQ ID NO: 485851 - DNA, 59 bp, Artificial
  Synthetic oligonucleotide
ttttgagaaggaatatggactgaagtgggcaggaagtgctccggcgacctcctctggag

SEQ ID NO: 485852 - DNA, 50 bp, Artificial
  Synthetic oligonucleotide
ttttgagagagcaaccattatggcagcattcactgggaacacagagggga

SEQ ID NO: 485853 - DNA, 50 bp, Artificial
  Synthetic oligonucleotide
ttttgagagttaacacgcagatcagtggcgtagcgtacatgcctccaacc

SEQ ID NO: 485854 - DNA, 60 bp, Artificial
  Synthetic oligonucleotide
ttttgagagttgacagcactgcatttcactatgatactttggatacttatggtgctgtcg

SEQ ID NO: 485855 - DNA, 52 bp, Artificial
  Synthetic oligonucleotide
ttttgagccttttgtcacagagaactaggagctcttacatctcaagaagact

SEQ ID NO: 485856 - DNA, 54 bp, Artificial
  Synthetic oligonucleotide
ttttgagctcacatcagacatgaatgggagcagctggtcctcaaagattttggg

SEQ ID NO: 485857 - DNA, 54 bp, Artificial
  Synthetic oligonucleotide
ttttgaggatgtaaacggaattcggaagccaaagcatctctatgtgtccctgcc

SEQ ID NO: 485858 - DNA, 53 bp, Artificial
  Synthetic oligonucleotide
ttttgaggcaggttcggagagtaacttggaactggagggttaggagtcgttta

SEQ ID NO: 485859 - DNA, 51 bp, Artificial
  Synthetic oligonucleotide
ttttgaggcccatgactcacccggctttaattcgattgggccttgtagtcc

SEQ ID NO: 485860 - DNA, 55 bp, Artificial
  Synthetic oligonucleotide
ttttgaggggcctggaatccagtggattggggaaaatgagtactatcccgcccgc

SEQ ID NO: 485861 - DNA, 56 bp, Artificial
  Synthetic oligonucleotide
ttttgagtaccatagcggagatgggggtgtctttgaggagggagccccagcgtacc

SEQ ID NO: 485862 - DNA, 51 bp, Artificial
  Synthetic oligonucleotide
ttttgagtcgagatcgcaagaataaggttggaatttgggccgaagtgggac

SEQ ID NO: 485863 - DNA, 54 bp, Artificial
  Synthetic oligonucleotide
ttttgagtcgagccaatatcgtaagctacctcgttcaaccgtcattagaatttt

SEQ ID NO: 485864 - DNA, 53 bp, Artificial
  Synthetic oligonucleotide
ttttgagtgcgacgtggaaccagccgtcctgtccaaattcgacagacggctcg

SEQ ID NO: 485865 - DNA, 58 bp, Artificial
  Synthetic oligonucleotide
ttttgatatccttagagggtttgttagttactgcaatgagggagcgcggttctcgcaa

SEQ ID NO: 485866 - DNA, 59 bp, Artificial
  Synthetic oligonucleotide
ttttgatccgatctcctttcgaataagccactggcagcgtttataaaatcttgacactc

SEQ ID NO: 485867 - DNA, 55 bp, Artificial
  Synthetic oligonucleotide
ttttgatcgatatccgtgtaaagtacctgtgaaaggagcctatgttgaatttgtg

SEQ ID NO: 485868 - DNA, 55 bp, Artificial
  Synthetic oligonucleotide
ttttgatctaagctctaaatgctctaacctcctatgttcttttggattctatcca

SEQ ID NO: 485869 - DNA, 60 bp, Artificial
  Synthetic oligonucleotide
ttttgatctacagggcttgcgtgattgtatcagcagtgtggcttcttacataccacttca

SEQ ID NO: 485870 - DNA, 58 bp, Artificial
  Synthetic oligonucleotide
ttttgatcttgtgcgcccgagcgggtttcttgcctcggacgctgtggactctttcttc

SEQ ID NO: 485871 - DNA, 57 bp, Artificial
  Synthetic oligonucleotide
ttttgatgagggtgtccaattgggacccatgatttttacttgtaattcgcgtggcgc

SEQ ID NO: 485872 - DNA, 51 bp, Artificial
  Synthetic oligonucleotide
ttttgatgcgctcacatttcctaacgcgcatcgttttctctaccgtcagaa

SEQ ID NO: 485873 - DNA, 55 bp, Artificial
  Synthetic oligonucleotide
ttttgatgggaacatgggcgtttggaatgggtccttaaaggctgagttgcggcca

SEQ ID NO: 485874 - DNA, 52 bp, Artificial
  Synthetic oligonucleotide
ttttgatgggtacacaacgacccgtataccaagttggatcgcccctcaacag

SEQ ID NO: 485875 - DNA, 60 bp, Artificial
  Synthetic oligonucleotide
ttttgatgtactcatggaatccggtagttagaaggatctgcttaatggtgctgtcacagt

SEQ ID NO: 485876 - DNA, 60 bp, Artificial
  Synthetic oligonucleotide
ttttgattgccactcattttgtggatcttattgaagacttttggcagactacacagggta

SEQ ID NO: 485877 - DNA, 60 bp, Artificial
  Synthetic oligonucleotide
ttttgatttgcaaggactacgcgactgcatcagtagcgtggcctcttatatcccacttca

SEQ ID NO: 485878 - DNA, 60 bp, Artificial
  Synthetic oligonucleotide
ttttgattttaagcgtggatctgctttgtttgattttgctaaagcagccatctttgagaa

SEQ ID NO: 485879 - DNA, 60 bp, Artificial
  Synthetic oligonucleotide
ttttgcaacacctagtgggtcacttgtatccagcgatgcacaaatttttaataggccata

SEQ ID NO: 485880 - DNA, 53 bp, Artificial
  Synthetic oligonucleotide
ttttgcaagtcgacgaggttcaacgttagggaaacgttgaaactactgtcaac

SEQ ID NO: 485881 - DNA, 53 bp, Artificial
  Synthetic oligonucleotide
ttttgcacgtgagtgctctcgtttcaggcaacgtgagtggcgctttgttggta

SEQ ID NO: 485882 - DNA, 54 bp, Artificial
  Synthetic oligonucleotide
ttttgcactgaaatttgccttcgaactggataagaacgtggatatgcggagacc

SEQ ID NO: 485883 - DNA, 53 bp, Artificial
  Synthetic oligonucleotide
ttttgcactgggactttccttcgaactggatgagcacatgcaagtgaggagtc

SEQ ID NO: 485884 - DNA, 55 bp, Artificial
  Synthetic oligonucleotide
ttttgcactgggctttctactgaggcccatctaggattggactcaaggcccatat

SEQ ID NO: 485885 - DNA, 50 bp, Artificial
  Synthetic oligonucleotide
ttttgcagaccaatcagatgatccggatgaaccaggtggagatggtaaaa

SEQ ID NO: 485886 - DNA, 59 bp, Artificial
  Synthetic oligonucleotide
ttttgcaggagtttggtggtgggcaaaccctcgccagacttgtgcggaacagcgcgatc

SEQ ID NO: 485887 - DNA, 59 bp, Artificial
  Synthetic oligonucleotide
ttttgcatagccagccgtacttgtcccaaactttatcctcatattctcgtgaagcttcc

SEQ ID NO: 485888 - DNA, 58 bp, Artificial
  Synthetic oligonucleotide
ttttgcatatagcgcagacggtaaagatagattcacgacagtttatccgaattttaat

SEQ ID NO: 485889 - DNA, 59 bp, Artificial
  Synthetic oligonucleotide
ttttgcatgaataaagccgaggagtgtaaagtccaagccgactgggctatttgtataca

SEQ ID NO: 485890 - DNA, 54 bp, Artificial
  Synthetic oligonucleotide
ttttgcatttaccctccctcagcccaacaaccatggccccggggctcggtattc

SEQ ID NO: 485891 - DNA, 55 bp, Artificial
  Synthetic oligonucleotide
ttttgcatttgactactcagggtatgatgctagtctcagtcctgtatggtttagg

SEQ ID NO: 485892 - DNA, 57 bp, Artificial
  Synthetic oligonucleotide
ttttgccaaacccagcctgtgttcgatggtaaccagtacataatggtgcgaaagcct

SEQ ID NO: 485893 - DNA, 60 bp, Artificial
  Synthetic oligonucleotide
ttttgccatcagaaatctattgctgttgccaggaacatataattatgaatggtactttag

SEQ ID NO: 485894 - DNA, 60 bp, Artificial
  Synthetic oligonucleotide
ttttgccgatgacatcctgagcttgccctggatcctgcagaaatggaccccattgatgac

SEQ ID NO: 485895 - DNA, 59 bp, Artificial
  Synthetic oligonucleotide
ttttgccgtgtctcactttatacatccgttgcttgggctacctagtatccagcgtccta

SEQ ID NO: 485896 - DNA, 55 bp, Artificial
  Synthetic oligonucleotide
ttttgcctccattaactatacgcgaggcgagcggtgtgcgtactctgagctttgg

SEQ ID NO: 485897 - DNA, 55 bp, Artificial
  Synthetic oligonucleotide
ttttgcctgctgacttctttccttcggtacgagatcttctagataccgccacagc

SEQ ID NO: 485898 - DNA, 53 bp, Artificial
  Synthetic oligonucleotide
ttttgccttgacagcctctcgtcctgttctatgtagtttagacacaactctct

SEQ ID NO: 485899 - DNA, 51 bp, Artificial
  Synthetic oligonucleotide
ttttgcgaagtgtgtcatctgatgaacatttgaatcacaaaccttataata

SEQ ID NO: 485900 - DNA, 51 bp, Artificial
  Synthetic oligonucleotide
ttttgcgacctcttgatcctttcgccccaagagcttcgaacatcctacttt

SEQ ID NO: 485901 - DNA, 51 bp, Artificial
  Synthetic oligonucleotide
ttttgcgagtcctttccatcccgccaacagcagggattctgaaaagatggg

SEQ ID NO: 485902 - DNA, 60 bp, Artificial
  Synthetic oligonucleotide
ttttgcgatttttacataataccacgcacagaagaagcaacatgtactgaatacattaat

SEQ ID NO: 485903 - DNA, 51 bp, Artificial
  Synthetic oligonucleotide
ttttgcgcacccatgttataacaggcaaaataaaggtgacagctaccacca

SEQ ID NO: 485904 - DNA, 53 bp, Artificial
  Synthetic oligonucleotide
ttttgcgcgccaggaaatggtgcaatctaggagagtgtataaggagagctttt

SEQ ID NO: 485905 - DNA, 58 bp, Artificial
  Synthetic oligonucleotide
ttttgcgggaccggccttgtcctggtgtcttggcctgcccttcgtgagtatgattcta

SEQ ID NO: 485906 - DNA, 54 bp, Artificial
  Synthetic oligonucleotide
ttttgcgtacacagcacgtgacggtagcctgggactgggtgcccaagcgcaaaa

SEQ ID NO: 485907 - DNA, 60 bp, Artificial
  Synthetic oligonucleotide
ttttgcgtctgtcattctgcattacaacggctccacagcagagcagaagctcctcgctga

SEQ ID NO: 485908 - DNA, 59 bp, Artificial
  Synthetic oligonucleotide
ttttgcgtgctggctgcttttagcgggtgcagacaggggtaggggtgtattagatcagg

SEQ ID NO: 485909 - DNA, 52 bp, Artificial
  Synthetic oligonucleotide
ttttgcgttaacggagaagtcaaggtgtgcggtccaaacggttattcgttta

SEQ ID NO: 485910 - DNA, 60 bp, Artificial
  Synthetic oligonucleotide
ttttgcgttaagtctgtgtacatactaggcaagatttggatggacgagaacataaagctc

SEQ ID NO: 485911 - DNA, 55 bp, Artificial
  Synthetic oligonucleotide
ttttgcgtttgactactcgggatatgatgctagtcttagcccagtgtggttcaga

SEQ ID NO: 485912 - DNA, 60 bp, Artificial
  Synthetic oligonucleotide
ttttgctataacatgggaggcaagtggtcaaaaagtagcatagtgggatggcctcaggtc

SEQ ID NO: 485913 - DNA, 50 bp, Artificial
  Synthetic oligonucleotide
ttttgctcaattgacgggaaagcaccgataagtcttggtgactgctcctt

SEQ ID NO: 485914 - DNA, 53 bp, Artificial
  Synthetic oligonucleotide
ttttgctcagtaagcatggcaatgtgttgttaatagagcccaccagacccctc

SEQ ID NO: 485915 - DNA, 54 bp, Artificial
  Synthetic oligonucleotide
ttttgctcggtccaaagacatatacgcctcaaaatctttaggcatggcgattga

SEQ ID NO: 485916 - DNA, 55 bp, Artificial
  Synthetic oligonucleotide
ttttgctgagacgttgatagttgccagcattccatacgtacattagggacaattg

SEQ ID NO: 485917 - DNA, 51 bp, Artificial
  Synthetic oligonucleotide
ttttgctgatactagtggttttcgtcacatgcacaagagaggggagattac

SEQ ID NO: 485918 - DNA, 51 bp, Artificial
  Synthetic oligonucleotide
ttttgctgctaggctgccttcgcttttgaggaaggcagatgaagccacatc

SEQ ID NO: 485919 - DNA, 54 bp, Artificial
  Synthetic oligonucleotide
ttttgctggagtagacgaatgcctcaccaacatttgtcactccataatggtgtt

SEQ ID NO: 485920 - DNA, 59 bp, Artificial
  Synthetic oligonucleotide
ttttgctggcgttacattatcaactcaattcacggattttgtgtctttgaactcactac

SEQ ID NO: 485921 - DNA, 53 bp, Artificial
  Synthetic oligonucleotide
ttttgctgtgctggcaatacattgatgcctcctttcttagagccacaaagctt

SEQ ID NO: 485922 - DNA, 55 bp, Artificial
  Synthetic oligonucleotide
ttttgctgtgtataaaagcccaaggtcagtaagtccttggacaacatcgtttaag

SEQ ID NO: 485923 - DNA, 50 bp, Artificial
  Synthetic oligonucleotide
ttttgcttaagattggccagagatactaacttacacatgcaggaaggtgt

SEQ ID NO: 485924 - DNA, 51 bp, Artificial
  Synthetic oligonucleotide
ttttgcttacgtggcctgtgggccatatgtcccgagttagtgcgccacgtg

SEQ ID NO: 485925 - DNA, 50 bp, Artificial
  Synthetic oligonucleotide
ttttggaaaaggcgctactcctagtaaaccttcaccttatacaggtggag

SEQ ID NO: 485926 - DNA, 60 bp, Artificial
  Synthetic oligonucleotide
ttttggaaacagcagagggatgtagacaaatactgagacagctacaaccatcccttcaga

SEQ ID NO: 485927 - DNA, 55 bp, Artificial
  Synthetic oligonucleotide
ttttggaagcaatccgccaagaatttgacaaggacgaattgcggggcaacacggt

SEQ ID NO: 485928 - DNA, 53 bp, Artificial
  Synthetic oligonucleotide
ttttggacccgctagaccactacatggtcgcggaagaccctttcttaggaccc

SEQ ID NO: 485929 - DNA, 58 bp, Artificial
  Synthetic oligonucleotide
ttttggaccgaatgactcagtcttgtatcgatcagctttccctctttttcgagttgaa

SEQ ID NO: 485930 - DNA, 52 bp, Artificial
  Synthetic oligonucleotide
ttttggagacaaatggcacacattgccccttacacagtgctttgacatccca

SEQ ID NO: 485931 - DNA, 56 bp, Artificial
  Synthetic oligonucleotide
ttttggagatcccttacgtgattagacaaggggatagttggctgaaaaagttcaca

SEQ ID NO: 485932 - DNA, 60 bp, Artificial
  Synthetic oligonucleotide
ttttggagattcagccttatggatagctgagacttgcatggcgacactaacattttctaa

SEQ ID NO: 485933 - DNA, 60 bp, Artificial
  Synthetic oligonucleotide
ttttggagattcagctttgtggattgcagagacgtgtatggcgacattaacattttccaa

SEQ ID NO: 485934 - DNA, 56 bp, Artificial
  Synthetic oligonucleotide
ttttggagattcgtgaatgcggacgttaccgtattcaagatgggacggatgtttta

SEQ ID NO: 485935 - DNA, 50 bp, Artificial
  Synthetic oligonucleotide
ttttggaggcactaatttgcaaatagtcatggtaccaggaagacgctttt

SEQ ID NO: 485936 - DNA, 50 bp, Artificial
  Synthetic oligonucleotide
ttttggagtcctttactctggagaggcccatttcgctaccggcccacact

SEQ ID NO: 485937 - DNA, 53 bp, Artificial
  Synthetic oligonucleotide
ttttggagtttgaggccctgggttttctcaatgaagaccattgggcgtcgcga

SEQ ID NO: 485938 - DNA, 50 bp, Artificial
  Synthetic oligonucleotide
ttttggatacatttgtattcagagaatggcggcacaggaaagtccatggc

SEQ ID NO: 485939 - DNA, 59 bp, Artificial
  Synthetic oligonucleotide
ttttggatgggaaagatccattaggatgagggatgcttatgatgggaagggtttgcact

SEQ ID NO: 485940 - DNA, 53 bp, Artificial
  Synthetic oligonucleotide
ttttggatgtcgtgacgttagttataagtatcacctagcgctagcgcctagct

SEQ ID NO: 485941 - DNA, 53 bp, Artificial
  Synthetic oligonucleotide
ttttggatgtgctctaatggatcattgcagtgcagaatctgcatctagtattg

SEQ ID NO: 485942 - DNA, 54 bp, Artificial
  Synthetic oligonucleotide
ttttggatttgactataccgcttatgatgccagcctgtccccacttatgtttga

SEQ ID NO: 485943 - DNA, 53 bp, Artificial
  Synthetic oligonucleotide
ttttggatttgggccgtatttatattgggctttggaccgtatttgaattgggc

SEQ ID NO: 485944 - DNA, 60 bp, Artificial
  Synthetic oligonucleotide
ttttggcacttgaatttgccttcgaactggatgaggacatgcaggtaaggagacccatct

SEQ ID NO: 485945 - DNA, 60 bp, Artificial
  Synthetic oligonucleotide
ttttggcatttgaactttccttcgaattggatgaggatatgcaggtgaggagtcccatct

SEQ ID NO: 485946 - DNA, 59 bp, Artificial
  Synthetic oligonucleotide
ttttggccccccactctgcgctagccctgcttgaggataccatggactaccctgcccgc

SEQ ID NO: 485947 - DNA, 51 bp, Artificial
  Synthetic oligonucleotide
ttttggcgaacgcataagtccaaatttatgctcagaagataggtgcatttt

SEQ ID NO: 485948 - DNA, 55 bp, Artificial
  Synthetic oligonucleotide
ttttggcgatcgggcgtatctgatgaccggtggcaacccctctggctgtgttgga

SEQ ID NO: 485949 - DNA, 60 bp, Artificial
  Synthetic oligonucleotide
ttttggcgatctattcaactatcgccagctcattagtactgttagtctccctgggggcaa

SEQ ID NO: 485950 - DNA, 53 bp, Artificial
  Synthetic oligonucleotide
ttttggcgcgaaagcgacgggtggtcccgcgtgtggtttgtggctcggggacc

SEQ ID NO: 485951 - DNA, 58 bp, Artificial
  Synthetic oligonucleotide
ttttggcgggaagtatatgaggagtcatatagggtggacagatggccagggaaaaaca

SEQ ID NO: 485952 - DNA, 60 bp, Artificial
  Synthetic oligonucleotide
ttttggcgtggagtccagatctgatcaacgcatgactaaagatgttgctgaagactcatc

SEQ ID NO: 485953 - DNA, 60 bp, Artificial
  Synthetic oligonucleotide
ttttggctacagcctttagcagatgcaaaactggctttattagatgatgctacagaagtt

SEQ ID NO: 485954 - DNA, 60 bp, Artificial
  Synthetic oligonucleotide
ttttggctcaccaatttctgagacaacaaaccccattgttagatcatctaacatcatcgc

SEQ ID NO: 485955 - DNA, 60 bp, Artificial
  Synthetic oligonucleotide
ttttggctgtctccactttcagaatgtaaaatagggctgttggatgatgctaccgatcct

SEQ ID NO: 485956 - DNA, 54 bp, Artificial
  Synthetic oligonucleotide
ttttgggaaatcagatagcctgcgagagttgttgcctgcatgcattacgcacaa

SEQ ID NO: 485957 - DNA, 53 bp, Artificial
  Synthetic oligonucleotide
ttttgggatcaccaagacaagcccgcatatggacaatcacgctactttgcggc

SEQ ID NO: 485958 - DNA, 60 bp, Artificial
  Synthetic oligonucleotide
ttttgggcggcatttggtgaagattgtgatgttgcggtgtgtccactagatacaacaatg

SEQ ID NO: 485959 - DNA, 53 bp, Artificial
  Synthetic oligonucleotide
ttttgggcttatattcccgacccgcctatgattcaatccttaggatgggatag

SEQ ID NO: 485960 - DNA, 53 bp, Artificial
  Synthetic oligonucleotide
ttttggggtcgcagtgggtcccacttgaaagaaagtctgtaattgggcctgtt

SEQ ID NO: 485961 - DNA, 54 bp, Artificial
  Synthetic oligonucleotide
ttttggggtgcttcaggcgttggataggtgggatttaaactcagcaaggggaga

SEQ ID NO: 485962 - DNA, 55 bp, Artificial
  Synthetic oligonucleotide
ttttggggtgtgcaccatcctactgacacaactgagcaaaacattctgtatggtt

SEQ ID NO: 485963 - DNA, 52 bp, Artificial
  Synthetic oligonucleotide
ttttgggtaatcccaagagtatattgagtgtaacgacacccgtgttgaaaga

SEQ ID NO: 485964 - DNA, 57 bp, Artificial
  Synthetic oligonucleotide
ttttgggtccgtctgcctcgtcaaagcaggctttctaagggagaatgtatgtgggat

SEQ ID NO: 485965 - DNA, 55 bp, Artificial
  Synthetic oligonucleotide
ttttgggtctgctcaaacaaggccccaaaagtattccaaaggaggtcagcatcca

SEQ ID NO: 485966 - DNA, 53 bp, Artificial
  Synthetic oligonucleotide
ttttgggtgacgtaaccgtaaccatgccggacaccgggcagcgcattacggcg

SEQ ID NO: 485967 - DNA, 58 bp, Artificial
  Synthetic oligonucleotide
ttttggtaccaccttctcaaccatcagtagttatagcgatggtgttatgaaagttcta

SEQ ID NO: 485968 - DNA, 59 bp, Artificial
  Synthetic oligonucleotide
ttttggtacttgaacgacacgaggtcaggcgccacttcgctgccaagatgttggttgat

SEQ ID NO: 485969 - DNA, 58 bp, Artificial
  Synthetic oligonucleotide
ttttggtaggggctgtgctgcctcggctgggggaagacactagtgtgcggtttgacaa

SEQ ID NO: 485970 - DNA, 54 bp, Artificial
  Synthetic oligonucleotide
ttttggtatgtgggttaaacctggcaaggtgatttgtagagatagtatagttgg

SEQ ID NO: 485971 - DNA, 54 bp, Artificial
  Synthetic oligonucleotide
ttttggtcacacggagcttgtttcgttgattaagacggggatctatttggcgtc

SEQ ID NO: 485972 - DNA, 60 bp, Artificial
  Synthetic oligonucleotide
ttttggtcaccagtttaagcaaatctgcgtatgcagcagaaacctggacattacaagact

SEQ ID NO: 485973 - DNA, 60 bp, Artificial
  Synthetic oligonucleotide
ttttggtcacctcttcaacatgttcgataatgagcctagtaccgccactgtgaagaacga

SEQ ID NO: 485974 - DNA, 50 bp, Artificial
  Synthetic oligonucleotide
ttttggtcgatttggatcccaatgagtttcctgagcgagagtgccctcgt

SEQ ID NO: 485975 - DNA, 52 bp, Artificial
  Synthetic oligonucleotide
ttttggtcgtaactcactatttcagtagaattgtctgtggacgattgttgcc

SEQ ID NO: 485976 - DNA, 60 bp, Artificial
  Synthetic oligonucleotide
ttttggtctactggtcatcccggtggtaccattggatttcaatacaggcgctacatctga

SEQ ID NO: 485977 - DNA, 51 bp, Artificial
  Synthetic oligonucleotide
ttttggtcttccgactgaccaaaaatcaacacattcaggtgtgaaatcctt

SEQ ID NO: 485978 - DNA, 53 bp, Artificial
  Synthetic oligonucleotide
ttttggtgaaggtaacggcggctatcacaaataaccacgctaccgaagcggtg

SEQ ID NO: 485979 - DNA, 53 bp, Artificial
  Synthetic oligonucleotide
ttttggtgacattccggtgtgtgacaaacaagtgcattgcggtttccgttgct

SEQ ID NO: 485980 - DNA, 54 bp, Artificial
  Synthetic oligonucleotide
ttttggtgatggtgaagggccaataaggacatggagtgtgttgacaaaaccaga

SEQ ID NO: 485981 - DNA, 55 bp, Artificial
  Synthetic oligonucleotide
ttttggtgctgggtagaaatcccgacgacattaaggtggatgagtataacattcg

SEQ ID NO: 485982 - DNA, 60 bp, Artificial
  Synthetic oligonucleotide
ttttggtggacgatgagtccgactatttctggctgtacttactgctgctcctagtttctg

SEQ ID NO: 485983 - DNA, 54 bp, Artificial
  Synthetic oligonucleotide
ttttggtgggccagacgcaagagatggtggagaggccgccgcaggcccttctac

SEQ ID NO: 485984 - DNA, 54 bp, Artificial
  Synthetic oligonucleotide
ttttggtggtccctctaccaatcagatgacgcgctcaaagcttaaataactctc

SEQ ID NO: 485985 - DNA, 51 bp, Artificial
  Synthetic oligonucleotide
ttttggtgtccgcctctttagcccacggcccaggcccatgttaagcaaatt

SEQ ID NO: 485986 - DNA, 54 bp, Artificial
  Synthetic oligonucleotide
ttttggtgtcttagcaggaaggaggttgcattttgctccgaaacacaggtctga

SEQ ID NO: 485987 - DNA, 52 bp, Artificial
  Synthetic oligonucleotide
ttttggttcaggctggattgcgtcgcaagcccaccgtaggccctcgtaaacg

SEQ ID NO: 485988 - DNA, 53 bp, Artificial
  Synthetic oligonucleotide
ttttggttggagtctcaaatacgcgtaattctgcgctattagctaacagtgtc

SEQ ID NO: 485989 - DNA, 55 bp, Artificial
  Synthetic oligonucleotide
ttttggttggggagctcaagggacaacatgtatgaactcatatggcgttttgatg

SEQ ID NO: 485990 - DNA, 53 bp, Artificial
  Synthetic oligonucleotide
ttttggtttcgagatcacctctagtgtacaagggaatttaacttttggtggct

SEQ ID NO: 485991 - DNA, 53 bp, Artificial
  Synthetic oligonucleotide
ttttgtaacactctggtacacaagcgaatcccagcgtgcagaatttctcaatg

SEQ ID NO: 485992 - DNA, 60 bp, Artificial
  Synthetic oligonucleotide
ttttgtaagaatgctgagatacaacggcacattttacgtggacctttatctatgcagcgc

SEQ ID NO: 485993 - DNA, 50 bp, Artificial
  Synthetic oligonucleotide
ttttgtacaaccttttgcggaaggtagaaccgttctctcgtaaagaggag

SEQ ID NO: 485994 - DNA, 54 bp, Artificial
  Synthetic oligonucleotide
ttttgtacaagtttgaaattgaaggggacaacatggtttttatgccagatgggg

SEQ ID NO: 485995 - DNA, 55 bp, Artificial
  Synthetic oligonucleotide
ttttgtacagctacttatctttatcgccacgcttgtggtttacgggaacgccatg

SEQ ID NO: 485996 - DNA, 57 bp, Artificial
  Synthetic oligonucleotide
ttttgtagaaaggaacaaggcatggttaactgtggtttcagcagtaactagtgccat

SEQ ID NO: 485997 - DNA, 55 bp, Artificial
  Synthetic oligonucleotide
ttttgtagagaggattcgcagtgttagcgctggacgtgcactgtacattcctccc

SEQ ID NO: 485998 - DNA, 54 bp, Artificial
  Synthetic oligonucleotide
ttttgtagtatagcaccggtcttgttctccaacaaaatagccagattgggaaaa

SEQ ID NO: 485999 - DNA, 54 bp, Artificial
  Synthetic oligonucleotide
ttttgtagtcgcaatacgcgcaatgcatcccgtccaaaaccgcgtccacagccg

SEQ ID NO: 486000 - DNA, 55 bp, Artificial
  Synthetic oligonucleotide
ttttgtatatgtacccgccatagtgagtttctttgttcaacaaagtagcgttacg

SEQ ID NO: 486001 - DNA, 60 bp, Artificial
  Synthetic oligonucleotide
ttttgtatgggtagatcttatgcagaaggattcaaagaaccaatgactcatacttactta

SEQ ID NO: 486002 - DNA, 55 bp, Artificial
  Synthetic oligonucleotide
ttttgtatgtgctagaacaactaaatgctgatacctataaaattcctacacaggc

SEQ ID NO: 486003 - DNA, 58 bp, Artificial
  Synthetic oligonucleotide
ttttgtcaacaaccacacaggatgcatacaggtttcaaagcttagacacctccaaaac

SEQ ID NO: 486004 - DNA, 60 bp, Artificial
  Synthetic oligonucleotide
ttttgtcagaagtatacatgctcttcagccagcccaagtgccaaatgttttgtggctcct

SEQ ID NO: 486005 - DNA, 52 bp, Artificial
  Synthetic oligonucleotide
ttttgtcataagggagcccttcgtctcctgttcgcccatagaatgcagaact

SEQ ID NO: 486006 - DNA, 52 bp, Artificial
  Synthetic oligonucleotide
ttttgtcatcattagcaactcaaagcacaagcacttcggatccctgcaggac

SEQ ID NO: 486007 - DNA, 56 bp, Artificial
  Synthetic oligonucleotide
ttttgtccaacaagactgaggatcaagttgattaccagggcattttcgaagggccc

SEQ ID NO: 486008 - DNA, 54 bp, Artificial
  Synthetic oligonucleotide
ttttgtcccgtacgatcaagaaccacttaatggaggttggaagacgaaggttca

SEQ ID NO: 486009 - DNA, 50 bp, Artificial
  Synthetic oligonucleotide
ttttgtccgcggcgttgccgaaaacacttctagtctctgcctgtcaaacg

SEQ ID NO: 486010 - DNA, 59 bp, Artificial
  Synthetic oligonucleotide
ttttgtccttaagttagcaggaagatggccagtaaagactatacacacagacaatgggc

SEQ ID NO: 486011 - DNA, 55 bp, Artificial
  Synthetic oligonucleotide
ttttgtcgcacctagaagcacaacaaagcagaacttcattgactttatcgaaagc

SEQ ID NO: 486012 - DNA, 55 bp, Artificial
  Synthetic oligonucleotide
ttttgtcgcccacaaaacgctttggttatcatcgctactgcattcatcatctacg

SEQ ID NO: 486013 - DNA, 60 bp, Artificial
  Synthetic oligonucleotide
ttttgtcgtggatctccactatcacactcccggtggcgttgatcggtacctgctgcctgt

SEQ ID NO: 486014 - DNA, 51 bp, Artificial
  Synthetic oligonucleotide
ttttgtctaagcaccattctcaaggggaagtaagcagaaagatttagccaa

SEQ ID NO: 486015 - DNA, 54 bp, Artificial
  Synthetic oligonucleotide
ttttgtctaagccccttcttcgtaggcagtaaacctaatactgcctctaagttc

SEQ ID NO: 486016 - DNA, 55 bp, Artificial
  Synthetic oligonucleotide
ttttgtctataaatagacgcgtcgggagacgggagacgccgctctgtaagtaaca

SEQ ID NO: 486017 - DNA, 56 bp, Artificial
  Synthetic oligonucleotide
ttttgtctctccagacccttttccatcatcagagggaacccgacaggcccgaaaga

SEQ ID NO: 486018 - DNA, 58 bp, Artificial
  Synthetic oligonucleotide
ttttgtctgtcacgaatgcaacagctctaattacattgttaactgaaataacccctaa

SEQ ID NO: 486019 - DNA, 53 bp, Artificial
  Synthetic oligonucleotide
ttttgtctttacggcaagtacactttcaactcctctgctaatggcagttcgca

SEQ ID NO: 486020 - DNA, 59 bp, Artificial
  Synthetic oligonucleotide
ttttgtgaaagtgtcccaaatctggacaaatttgtgttccagatggctagtgccaccga

SEQ ID NO: 486021 - DNA, 50 bp, Artificial
  Synthetic oligonucleotide
ttttgtgacggaggacaattaggagctcgtatttatagttccggaagtga

SEQ ID NO: 486022 - DNA, 60 bp, Artificial
  Synthetic oligonucleotide
ttttgtgcagaattatagtgacgatagatgggtaaaggtgtcaggccacgtctcacacga

SEQ ID NO: 486023 - DNA, 52 bp, Artificial
  Synthetic oligonucleotide
ttttgtgcaggactcaagagaagctactttgctagtgaacaaggggagatcc

SEQ ID NO: 486024 - DNA, 54 bp, Artificial
  Synthetic oligonucleotide
ttttgtgcctactaaagatggaaagtcaggtgaaagagttactttatcagcggg

SEQ ID NO: 486025 - DNA, 60 bp, Artificial
  Synthetic oligonucleotide
ttttgtgcgttccctggatcagtcagtcacactacagaatggtgcagcatgacccgtaca

SEQ ID NO: 486026 - DNA, 51 bp, Artificial
  Synthetic oligonucleotide
ttttgtggatgggatatgaactccatccagataaatggacagtccagacaa

SEQ ID NO: 486027 - DNA, 54 bp, Artificial
  Synthetic oligonucleotide
ttttgtgggccccactggtttgctttaatcatttaaagcgcgtcattgacgagc

SEQ ID NO: 486028 - DNA, 55 bp, Artificial
  Synthetic oligonucleotide
ttttgtgggccccataaagcactaactgacaacgactagtggaccaatcacatga

SEQ ID NO: 486029 - DNA, 55 bp, Artificial
  Synthetic oligonucleotide
ttttgtgggcccctccactaactcctgtctgccaatcaaatgacgcgctcaaagc

SEQ ID NO: 486030 - DNA, 50 bp, Artificial
  Synthetic oligonucleotide
ttttgtggggacaacgggaataccatgcaaagcgattcttcacaaagttt

SEQ ID NO: 486031 - DNA, 50 bp, Artificial
  Synthetic oligonucleotide
ttttgtggtataggatatagaggcatgaatccacatgaaccgggtttaac

SEQ ID NO: 486032 - DNA, 51 bp, Artificial
  Synthetic oligonucleotide
ttttgtgtcatacgtgttatcaggcaaatccacggatatgtggatagagag

SEQ ID NO: 486033 - DNA, 58 bp, Artificial
  Synthetic oligonucleotide
ttttgtgtctaagaggcgcgtcggagtgcgcctataaagttaacattctctctcctct

SEQ ID NO: 486034 - DNA, 50 bp, Artificial
  Synthetic oligonucleotide
ttttgtgtcttaatcgaattatggcccagagtgacttaccatcaacccga

SEQ ID NO: 486035 - DNA, 56 bp, Artificial
  Synthetic oligonucleotide
ttttgtgtgaaatctgtttatgttttgggaaaaatatggatggacgaaaatatcaa

SEQ ID NO: 486036 - DNA, 60 bp, Artificial
  Synthetic oligonucleotide
ttttgtgttaagtctgtatatattttaggcaagatatggatggacgagaatatcaagttg

SEQ ID NO: 486037 - DNA, 60 bp, Artificial
  Synthetic oligonucleotide
ttttgttcccaccatttccatgagttgacgatgaaggatggcagggtcataatcgtccca

SEQ ID NO: 486038 - DNA, 54 bp, Artificial
  Synthetic oligonucleotide
ttttgttcgaagaacaagtctgttttatcatgtcaaaagtgaacggttactaac

SEQ ID NO: 486039 - DNA, 53 bp, Artificial
  Synthetic oligonucleotide
ttttgttcgaggtcccaagtgctctcaatgcaagtttgacgaactgacaaagg

SEQ ID NO: 486040 - DNA, 60 bp, Artificial
  Synthetic oligonucleotide
ttttgttcgctaaaaaatgaagatgtactactgcttctgaattgtattggaattgataca

SEQ ID NO: 486041 - DNA, 52 bp, Artificial
  Synthetic oligonucleotide
ttttgttggatacgttgaaaacgtctgcgatcacatgatgcagggttgccac

SEQ ID NO: 486042 - DNA, 59 bp, Artificial
  Synthetic oligonucleotide
ttttgttggcaatccaccttgattgtacactgaacagaaagcagcttttatggccttat

SEQ ID NO: 486043 - DNA, 58 bp, Artificial
  Synthetic oligonucleotide
ttttgttggcgttacgctcaacacactaccccgtgtgtagttttggctgatgagtcac

SEQ ID NO: 486044 - DNA, 55 bp, Artificial
  Synthetic oligonucleotide
ttttgttgggaccaatgtaactgcctatttggtcagatttaaaggaacagccatc

SEQ ID NO: 486045 - DNA, 51 bp, Artificial
  Synthetic oligonucleotide
ttttgtttagggcgcatgcttggcatctatagtgattactttctacgttct

SEQ ID NO: 486046 - DNA, 55 bp, Artificial
  Synthetic oligonucleotide
ttttgtttcaggttgtaaagatttttgtctgagaatggcacgggacacaaaccta

SEQ ID NO: 486047 - DNA, 50 bp, Artificial
  Synthetic oligonucleotide
ttttgtttgacgtgcaaagcgaggagcgttcgtattcagtggtttacgtc

SEQ ID NO: 486048 - DNA, 56 bp, Artificial
  Synthetic oligonucleotide
tttttaaacaatacagaacctctctgcaatgtatccgggtttgcaatagtttccaa

SEQ ID NO: 486049 - DNA, 56 bp, Artificial
  Synthetic oligonucleotide
tttttaacaccctttgtgaagttccttgacaacctggactgcaatgtcttaatcag

SEQ ID NO: 486050 - DNA, 53 bp, Artificial
  Synthetic oligonucleotide
tttttaactcattccttcatagcaccgactttacctcccgattgttccgttgg

SEQ ID NO: 486051 - DNA, 57 bp, Artificial
  Synthetic oligonucleotide
tttttaagagtaagagaccagcaagggaacgtgctattgtctcccgaagaggtcagc

SEQ ID NO: 486052 - DNA, 52 bp, Artificial
  Synthetic oligonucleotide
tttttaagggttcgggatcaacgggggaatgtactactatcacctgaggagg

SEQ ID NO: 486053 - DNA, 60 bp, Artificial
  Synthetic oligonucleotide
tttttaatgccaacgatattgaacgccgtgttatcaacattgttcatgcttcggcttctg

SEQ ID NO: 486054 - DNA, 52 bp, Artificial
  Synthetic oligonucleotide
tttttaattgaatacgtacggttcgtttacacccattcccaatatctctggg

SEQ ID NO: 486055 - DNA, 60 bp, Artificial
  Synthetic oligonucleotide
tttttacatagctgctaatggagactttgctttggattatggattctctgtgatgggtaa

SEQ ID NO: 486056 - DNA, 58 bp, Artificial
  Synthetic oligonucleotide
tttttaccagacagcgggtatggcaatactgaagtggaaacgcagccgttgtcacagg

SEQ ID NO: 486057 - DNA, 57 bp, Artificial
  Synthetic oligonucleotide
tttttacccgtaatgagcatcggtgcccacactgtgagcgcgtacgaacacgtaaca

SEQ ID NO: 486058 - DNA, 56 bp, Artificial
  Synthetic oligonucleotide
tttttacctcagtggttactttctgtccaatgagcggcgattcggactcttttcaa

SEQ ID NO: 486059 - DNA, 60 bp, Artificial
  Synthetic oligonucleotide
tttttagaccgattcaacattgggatggagtgcatcttgtcgcctagaagcgcgtatagt

SEQ ID NO: 486060 - DNA, 55 bp, Artificial
  Synthetic oligonucleotide
tttttagatccttcctccccaacgtgaaaaaggcattgtcgtggccacttggata

SEQ ID NO: 486061 - DNA, 59 bp, Artificial
  Synthetic oligonucleotide
tttttaggtgccattagtgagccagcgcgagaaataatcaacgaattacacaaggcgag

SEQ ID NO: 486062 - DNA, 56 bp, Artificial
  Synthetic oligonucleotide
tttttagtgcttgggtcgaagtgggaaattggaatgaggttctgagaaggttgatg

SEQ ID NO: 486063 - DNA, 57 bp, Artificial
  Synthetic oligonucleotide
tttttataggcagaagttgacgatcttcacgatacttaaacgttattatccaataga

SEQ ID NO: 486064 - DNA, 57 bp, Artificial
  Synthetic oligonucleotide
tttttatcagtcatacctccggagaactcaatcgatgggaatacaactggaccaaag

SEQ ID NO: 486065 - DNA, 60 bp, Artificial
  Synthetic oligonucleotide
tttttatcatgattggtaaagaggtcaccgtgcaagatattattctggagctcagtgagg

SEQ ID NO: 486066 - DNA, 52 bp, Artificial
  Synthetic oligonucleotide
tttttatcggaatctgttatggataacaaagaagggaacttcctaccctaaa

SEQ ID NO: 486067 - DNA, 52 bp, Artificial
  Synthetic oligonucleotide
tttttcaacaggcgtcgtgtcaaaaagaccccgattggaaacccagtaccac

SEQ ID NO: 486068 - DNA, 55 bp, Artificial
  Synthetic oligonucleotide
tttttcaacatgttgcaaccctctttgggcggttggataactaagaatcttctta

SEQ ID NO: 486069 - DNA, 60 bp, Artificial
  Synthetic oligonucleotide
tttttcacctctgcctaatcatctcatgttcatgtcctactgttcaagcctccaagctgt

SEQ ID NO: 486070 - DNA, 57 bp, Artificial
  Synthetic oligonucleotide
tttttcccgtggcctacttcaggagataagattgacatgactccgagagccggagtc

SEQ ID NO: 486071 - DNA, 54 bp, Artificial
  Synthetic oligonucleotide
tttttcccttacgtatttggagttaccatatgctttccctttacatccatatcc

SEQ ID NO: 486072 - DNA, 57 bp, Artificial
  Synthetic oligonucleotide
tttttccgcagttatgctgtccgcgggcgtgaaaggtaggcagaacgcagaagcgtt

SEQ ID NO: 486073 - DNA, 60 bp, Artificial
  Synthetic oligonucleotide
tttttcctaatggtgatcttagcaccattagaggctcgtcagtttccaagactgactgcg

SEQ ID NO: 486074 - DNA, 60 bp, Artificial
  Synthetic oligonucleotide
tttttcctgtaagcccataggtgtaggatgatatagagcgtgcaggatcagcaacgcagt

SEQ ID NO: 486075 - DNA, 58 bp, Artificial
  Synthetic oligonucleotide
tttttccttcgaactggataagcacatggagatgaggttccccattatcgtgcctttc

SEQ ID NO: 486076 - DNA, 54 bp, Artificial
  Synthetic oligonucleotide
tttttccttgttagggatcgacggcccgttgataagcctcaagattttggtgag

SEQ ID NO: 486077 - DNA, 60 bp, Artificial
  Synthetic oligonucleotide
tttttcgccgctagacggtgcggagcacaacgagcacagcgaggagagacctcgcagcag

SEQ ID NO: 486078 - DNA, 55 bp, Artificial
  Synthetic oligonucleotide
tttttcgggatgaggtctcgttctgcgttgggcttaattcatttgtcgtcgggtc

SEQ ID NO: 486079 - DNA, 56 bp, Artificial
  Synthetic oligonucleotide
tttttcgtttataaaaacgatcttcgttcaatttgtccacactgtcctatgcgcac

SEQ ID NO: 486080 - DNA, 60 bp, Artificial
  Synthetic oligonucleotide
tttttctgtgctccgtgctaatgatgtgctttggctttcacttacggccgctgagtatga

SEQ ID NO: 486081 - DNA, 59 bp, Artificial
  Synthetic oligonucleotide
tttttgaatcgggcgtacctaacaaacaagggcaacgcaatgatctgcaatctctggtg

SEQ ID NO: 486082 - DNA, 60 bp, Artificial
  Synthetic oligonucleotide
tttttgacttatcactctgttgcgactctgcagccattgtcaaaggagccaacagtggcc

SEQ ID NO: 486083 - DNA, 56 bp, Artificial
  Synthetic oligonucleotide
tttttgatactcatggtgacttagacatgggcctcgttgaggatgcattgtctaag

SEQ ID NO: 486084 - DNA, 59 bp, Artificial
  Synthetic oligonucleotide
tttttgatcgacatgtccataggttttcctctgtagtagtgttctttcaacattgaaca

SEQ ID NO: 486085 - DNA, 60 bp, Artificial
  Synthetic oligonucleotide
tttttgatgtaccgcgagtgcccgatgatcaaatgtatagactaagggatagacttagat

SEQ ID NO: 486086 - DNA, 57 bp, Artificial
  Synthetic oligonucleotide
tttttgattttggtgtgtcgttgctaaagaagaacatcaggacagttaaaacaagca

SEQ ID NO: 486087 - DNA, 60 bp, Artificial
  Synthetic oligonucleotide
tttttgccatcacaagaccttctggactagagtagcgcctagccagcaaaaactgtgaac

SEQ ID NO: 486088 - DNA, 54 bp, Artificial
  Synthetic oligonucleotide
tttttgccatcgccgatcggtacacacggccccccctcgcacgtaattcgaaac

SEQ ID NO: 486089 - DNA, 60 bp, Artificial
  Synthetic oligonucleotide
tttttgcggcggattcatcttgtgcgacacggtgactggaaccgcctgtagggtggctga

SEQ ID NO: 486090 - DNA, 57 bp, Artificial
  Synthetic oligonucleotide
tttttgctgcaccaaacggtgaagaactaataacaaatatacccctaggacaatgca

SEQ ID NO: 486091 - DNA, 56 bp, Artificial
  Synthetic oligonucleotide
tttttggaaagcggtaatggaggtatctccggaaccggtacgtgcaatcatggatc

SEQ ID NO: 486092 - DNA, 60 bp, Artificial
  Synthetic oligonucleotide
tttttggaaggtcaacaatcatgtggtttacaatcatcaagaggctggcaagtatgagaa

SEQ ID NO: 486093 - DNA, 54 bp, Artificial
  Synthetic oligonucleotide
tttttggagcgattgctggattcatagagaatggatgggaaggtctcatcgatg

SEQ ID NO: 486094 - DNA, 56 bp, Artificial
  Synthetic oligonucleotide
tttttggattgagatcgagatgaccacataggtaattgtgaggaccgagactccgg

SEQ ID NO: 486095 - DNA, 54 bp, Artificial
  Synthetic oligonucleotide
tttttgggccttctcattatagggaagttaccaatctagctatggtgtctcacc

SEQ ID NO: 486096 - DNA, 58 bp, Artificial
  Synthetic oligonucleotide
tttttgggtttgacctcattcaaggaccgcatctaatgaatgtagaatttgttccaga

SEQ ID NO: 486097 - DNA, 59 bp, Artificial
  Synthetic oligonucleotide
tttttgtaagcaaccacgcagatcaaactaaatggcaaccaatagacaacccagataca

SEQ ID NO: 486098 - DNA, 58 bp, Artificial
  Synthetic oligonucleotide
tttttgtaatgtggtaaacgtcctaccggattgcggaatctcatagattacagacata

SEQ ID NO: 486099 - DNA, 57 bp, Artificial
  Synthetic oligonucleotide
tttttgtagacatggtgtgaagacctgcatgtgcttgattgtgagtcctccggcccc

SEQ ID NO: 486100 - DNA, 60 bp, Artificial
  Synthetic oligonucleotide
tttttgtggttggcacctgtgccccgacggcatatataagaagccgcaacttgtgctaga

SEQ ID NO: 486101 - DNA, 55 bp, Artificial
  Synthetic oligonucleotide
ttttttaaacacgactcacttggcaataatcaatggcgcaccgacgctcacaact

SEQ ID NO: 486102 - DNA, 54 bp, Artificial
  Synthetic oligonucleotide
ttttttacaccgtagtagattatgttaaccaaataatacaagctatgtctaaaa

SEQ ID NO: 486103 - DNA, 57 bp, Artificial
  Synthetic oligonucleotide
ttttttactaacaatactgctttgctactaacactatggttcgcgcacgtagaacca

SEQ ID NO: 486104 - DNA, 59 bp, Artificial
  Synthetic oligonucleotide
ttttttagaaatctaccacgatcgcgaccgtgatacaattcgaccattttgcgcacatc

SEQ ID NO: 486105 - DNA, 54 bp, Artificial
  Synthetic oligonucleotide
ttttttaggccttggtccatggggaaagaagccccgcaatttccccatggctca

SEQ ID NO: 486106 - DNA, 55 bp, Artificial
  Synthetic oligonucleotide
ttttttcctcccagcccacgacccttctcttaaggagatcatggtttcagaccaa

SEQ ID NO: 486107 - DNA, 56 bp, Artificial
  Synthetic oligonucleotide
ttttttctccgatcctctcacataaattgtacgagccttcttcagaattttacgga

SEQ ID NO: 486108 - DNA, 54 bp, Artificial
  Synthetic oligonucleotide
ttttttcttccctgttccagctccaaaaaccacaccacgctcggaaagtcgtgc

SEQ ID NO: 486109 - DNA, 53 bp, Artificial
  Synthetic oligonucleotide
ttttttgaccggtgaaggtcacttcaatgaagtcttacagtttaaaacaccaa

SEQ ID NO: 486110 - DNA, 60 bp, Artificial
  Synthetic oligonucleotide
ttttttgagggctgtgcagtgtcaatcccgttcatcaagatactattagggtcattatcg

SEQ ID NO: 486111 - DNA, 53 bp, Artificial
  Synthetic oligonucleotide
ttttttgcaatcctacaggatatgcgaaataccatcatggcatctaaaaccgt

SEQ ID NO: 486112 - DNA, 60 bp, Artificial
  Synthetic oligonucleotide
ttttttgcagatgttgactgatgaccggcgtacgatcatacgagggcagactggagagcc

SEQ ID NO: 486113 - DNA, 51 bp, Artificial
  Synthetic oligonucleotide
ttttttgtaatcttaagctaaagggacagtggactccaaaaactatagggg

SEQ ID NO: 486114 - DNA, 48 bp, Artificial
  Synthetic oligonucleotide
tttttttaacaccaaaggttatatagcgaccgttacagttaaaccggg

SEQ ID NO: 486115 - DNA, 53 bp, Artificial
  Synthetic oligonucleotide
tttttttgccgttttagaaccttcggtggtcgtgcataaacacgattcggcaa

SEQ ID NO: 486116 - DNA, 52 bp, Artificial
  Synthetic oligonucleotide
tttttttgggtggcccccccacgtggagatgtaccctctcataaggcgccct

SEQ ID NO: 486117 - DNA, 50 bp, Artificial
  Synthetic oligonucleotide
ttttttttggtccgtgaccgtcgtcctacaggatccccccaagattttgg

SEQ ID NO: 486118 - DNA, 48 bp, Artificial; identical to SEQ ID NO: 20212
  Synthetic oligonucleotide

SEQ ID NO: 486119 - DNA, 52 bp, Artificial; identical to SEQ ID NO: 13288
  Synthetic oligonucleotide

SEQ ID NO: 486120 - DNA, 59 bp, Artificial; identical to SEQ ID NO: 15870
  Synthetic oligonucleotide

SEQ ID NO: 486121 - DNA, 55 bp, Artificial; identical to SEQ ID NO: 14329
  Synthetic oligonucleotide

SEQ ID NO: 486122 - DNA, 56 bp, Artificial; identical to SEQ ID NO: 18364
  Synthetic oligonucleotide

SEQ ID NO: 486123 - DNA, 52 bp, Artificial; identical to SEQ ID NO: 8156
  Synthetic oligonucleotide

SEQ ID NO: 486124 - DNA, 51 bp, Artificial; identical to SEQ ID NO: 9426
  Synthetic oligonucleotide

SEQ ID NO: 486125 - DNA, 60 bp, Artificial; identical to SEQ ID NO: 7114
  Synthetic oligonucleotide

SEQ ID NO: 486126 - DNA, 56 bp, Artificial; identical to SEQ ID NO: 18394
  Synthetic oligonucleotide

SEQ ID NO: 486127 - DNA, 55 bp, Artificial; identical to SEQ ID NO: 13027
  Synthetic oligonucleotide

SEQ ID NO: 486128 - DNA, 60 bp, Artificial; identical to SEQ ID NO: 15279
  Synthetic oligonucleotide

SEQ ID NO: 486129 - DNA, 57 bp, Artificial; identical to SEQ ID NO: 17864
  Synthetic oligonucleotide

SEQ ID NO: 486130 - DNA, 56 bp, Artificial; identical to SEQ ID NO: 20379
  Synthetic oligonucleotide

SEQ ID NO: 486131 - DNA, 60 bp, Artificial; identical to SEQ ID NO: 55800
  Synthetic oligonucleotide

SEQ ID NO: 486132 - DNA, 51 bp, Artificial; identical to SEQ ID NO: 7960
  Synthetic oligonucleotide

SEQ ID NO: 486133 - DNA, 60 bp, Artificial; identical to SEQ ID NO: 12658
  Synthetic oligonucleotide

SEQ ID NO: 486134 - DNA, 59 bp, Artificial; identical to SEQ ID NO: 16836
  Synthetic oligonucleotide

SEQ ID NO: 486135 - DNA, 52 bp, Artificial; identical to SEQ ID NO: 10441
  Synthetic oligonucleotide

SEQ ID NO: 486136 - DNA, 56 bp, Artificial; identical to SEQ ID NO: 16572
  Synthetic oligonucleotide

SEQ ID NO: 486137 - DNA, 55 bp, Artificial; identical to SEQ ID NO: 5954
  Synthetic oligonucleotide

SEQ ID NO: 486138 - DNA, 50 bp, Artificial; identical to SEQ ID NO: 5875
  Synthetic oligonucleotide

SEQ ID NO: 486139 - DNA, 55 bp, Artificial; identical to SEQ ID NO: 20537
  Synthetic oligonucleotide

SEQ ID NO: 486140 - DNA, 51 bp, Artificial; identical to SEQ ID NO: 6844
  Synthetic oligonucleotide

SEQ ID NO: 486141 - DNA, 55 bp, Artificial; identical to SEQ ID NO: 11645
  Synthetic oligonucleotide

SEQ ID NO: 486142 - DNA, 60 bp, Artificial; identical to SEQ ID NO: 7690
  Synthetic oligonucleotide

SEQ ID NO: 486143 - DNA, 59 bp, Artificial; identical to SEQ ID NO: 18615
  Synthetic oligonucleotide

SEQ ID NO: 486144 - DNA, 58 bp, Artificial; identical to SEQ ID NO: 16223
  Synthetic oligonucleotide

SEQ ID NO: 486145 - DNA, 57 bp, Artificial; identical to SEQ ID NO: 19932
  Synthetic oligonucleotide

SEQ ID NO: 486146 - DNA, 58 bp, Artificial; identical to SEQ ID NO: 19053
  Synthetic oligonucleotide

SEQ ID NO: 486147 - DNA, 60 bp, Artificial; identical to SEQ ID NO: 10632
  Synthetic oligonucleotide

SEQ ID NO: 486148 - DNA, 60 bp, Artificial; identical to SEQ ID NO: 5798
  Synthetic oligonucleotide

SEQ ID NO: 486149 - DNA, 56 bp, Artificial; identical to SEQ ID NO: 16074
  Synthetic oligonucleotide

SEQ ID NO: 486150 - DNA, 51 bp, Artificial; identical to SEQ ID NO: 20097
  Synthetic oligonucleotide

SEQ ID NO: 486151 - DNA, 56 bp, Artificial; identical to SEQ ID NO: 18178
  Synthetic oligonucleotide

SEQ ID NO: 486152 - DNA, 51 bp, Artificial; identical to SEQ ID NO: 20587
  Synthetic oligonucleotide

SEQ ID NO: 486153 - DNA, 58 bp, Artificial; identical to SEQ ID NO: 8453
  Synthetic oligonucleotide

SEQ ID NO: 486154 - DNA, 59 bp, Artificial; identical to SEQ ID NO: 19108
  Synthetic oligonucleotide

SEQ ID NO: 486155 - DNA, 60 bp, Artificial; identical to SEQ ID NO: 56839
  Synthetic oligonucleotide

SEQ ID NO: 486156 - DNA, 60 bp, Artificial; identical to SEQ ID NO: 6794
  Synthetic oligonucleotide

SEQ ID NO: 486157 - DNA, 60 bp, Artificial; identical to SEQ ID NO: 8087
  Synthetic oligonucleotide

SEQ ID NO: 486158 - DNA, 59 bp, Artificial; identical to SEQ ID NO: 17152
  Synthetic oligonucleotide

SEQ ID NO: 486159 - DNA, 51 bp, Artificial; identical to SEQ ID NO: 20334
  Synthetic oligonucleotide

SEQ ID NO: 486160 - DNA, 56 bp, Artificial; identical to SEQ ID NO: 7124
  Synthetic oligonucleotide

SEQ ID NO: 486161 - DNA, 59 bp, Artificial; identical to SEQ ID NO: 16222
  Synthetic oligonucleotide

SEQ ID NO: 486162 - DNA, 58 bp, Artificial; identical to SEQ ID NO: 19383
  Synthetic oligonucleotide

SEQ ID NO: 486163 - DNA, 60 bp, Artificial; identical to SEQ ID NO: 13482
  Synthetic oligonucleotide

SEQ ID NO: 486164 - DNA, 57 bp, Artificial; identical to SEQ ID NO: 5741
  Synthetic oligonucleotide

SEQ ID NO: 486165 - DNA, 58 bp, Artificial; identical to SEQ ID NO: 16298
  Synthetic oligonucleotide

SEQ ID NO: 486166 - DNA, 57 bp, Artificial; identical to SEQ ID NO: 12249
  Synthetic oligonucleotide

SEQ ID NO: 486167 - DNA, 57 bp, Artificial; identical to SEQ ID NO: 16033
  Synthetic oligonucleotide

SEQ ID NO: 486168 - DNA, 56 bp, Artificial; identical to SEQ ID NO: 15905
  Synthetic oligonucleotide

SEQ ID NO: 486169 - DNA, 58 bp, Artificial; identical to SEQ ID NO: 16486
  Synthetic oligonucleotide

SEQ ID NO: 486170 - DNA, 56 bp, Artificial; identical to SEQ ID NO: 20457
  Synthetic oligonucleotide

SEQ ID NO: 486171 - DNA, 60 bp, Artificial; identical to SEQ ID NO: 7800
  Synthetic oligonucleotide

SEQ ID NO: 486172 - DNA, 54 bp, Artificial; identical to SEQ ID NO: 19824
  Synthetic oligonucleotide

SEQ ID NO: 486173 - DNA, 56 bp, Artificial; identical to SEQ ID NO: 19289
  Synthetic oligonucleotide

SEQ ID NO: 486174 - DNA, 57 bp, Artificial; identical to SEQ ID NO: 6742
  Synthetic oligonucleotide

SEQ ID NO: 486175 - DNA, 60 bp, Artificial; identical to SEQ ID NO: 10612
  Synthetic oligonucleotide

SEQ ID NO: 486176 - DNA, 59 bp, Artificial; identical to SEQ ID NO: 18962
  Synthetic oligonucleotide

SEQ ID NO: 486177 - DNA, 54 bp, Artificial; identical to SEQ ID NO: 11940
  Synthetic oligonucleotide

SEQ ID NO: 486178 - DNA, 59 bp, Artificial; identical to SEQ ID NO: 18952
  Synthetic oligonucleotide

SEQ ID NO: 486179 - DNA, 51 bp, Artificial; identical to SEQ ID NO: 15955
  Synthetic oligonucleotide

SEQ ID NO: 486180 - DNA, 56 bp, Artificial; identical to SEQ ID NO: 20247
  Synthetic oligonucleotide

SEQ ID NO: 486181 - DNA, 60 bp, Artificial; identical to SEQ ID NO: 12448
  Synthetic oligonucleotide

SEQ ID NO: 486182 - DNA, 50 bp, Artificial; identical to SEQ ID NO: 16083
  Synthetic oligonucleotide

SEQ ID NO: 486183 - DNA, 56 bp, Artificial; identical to SEQ ID NO: 17707
  Synthetic oligonucleotide

SEQ ID NO: 486184 - DNA, 52 bp, Artificial; identical to SEQ ID NO: 11222
  Synthetic oligonucleotide

SEQ ID NO: 486185 - DNA, 54 bp, Artificial; identical to SEQ ID NO: 16482
  Synthetic oligonucleotide

SEQ ID NO: 486186 - DNA, 55 bp, Artificial; identical to SEQ ID NO: 12589
  Synthetic oligonucleotide

SEQ ID NO: 486187 - DNA, 60 bp, Artificial; identical to SEQ ID NO: 184
  Synthetic oligonucleotide

SEQ ID NO: 486188 - DNA, 60 bp, Artificial; identical to SEQ ID NO: 14109
  Synthetic oligonucleotide

SEQ ID NO: 486189 - DNA, 60 bp, Artificial; identical to SEQ ID NO: 9901
  Synthetic oligonucleotide

SEQ ID NO: 486190 - DNA, 60 bp, Artificial; identical to SEQ ID NO: 14947
  Synthetic oligonucleotide

SEQ ID NO: 486191 - DNA, 56 bp, Artificial; identical to SEQ ID NO: 20505
  Synthetic oligonucleotide

SEQ ID NO: 486192 - DNA, 60 bp, Artificial; identical to SEQ ID NO: 10176
  Synthetic oligonucleotide

SEQ ID NO: 486193 - DNA, 60 bp, Artificial; identical to SEQ ID NO: 13717
  Synthetic oligonucleotide

SEQ ID NO: 486194 - DNA, 60 bp, Artificial; identical to SEQ ID NO: 7808
  Synthetic oligonucleotide

SEQ ID NO: 486195 - DNA, 55 bp, Artificial; identical to SEQ ID NO: 7186
  Synthetic oligonucleotide

SEQ ID NO: 486196 - DNA, 60 bp, Artificial; identical to SEQ ID NO: 7293
  Synthetic oligonucleotide

SEQ ID NO: 486197 - DNA, 60 bp, Artificial; identical to SEQ ID NO: 11487
  Synthetic oligonucleotide

SEQ ID NO: 486198 - DNA, 56 bp, Artificial; identical to SEQ ID NO: 16766
  Synthetic oligonucleotide

SEQ ID NO: 486199 - DNA, 58 bp, Artificial; identical to SEQ ID NO: 14316
  Synthetic oligonucleotide

SEQ ID NO: 486200 - DNA, 51 bp, Artificial; identical to SEQ ID NO: 10873
  Synthetic oligonucleotide

SEQ ID NO: 486201 - DNA, 49 bp, Artificial; identical to SEQ ID NO: 17912
  Synthetic oligonucleotide

SEQ ID NO: 486202 - DNA, 60 bp, Artificial; identical to SEQ ID NO: 11959
  Synthetic oligonucleotide

SEQ ID NO: 486203 - DNA, 50 bp, Artificial; identical to SEQ ID NO: 17769
  Synthetic oligonucleotide

SEQ ID NO: 486204 - DNA, 54 bp, Artificial; identical to SEQ ID NO: 7810
  Synthetic oligonucleotide

SEQ ID NO: 486205 - DNA, 53 bp, Artificial; identical to SEQ ID NO: 6815
  Synthetic oligonucleotide

SEQ ID NO: 486206 - DNA, 58 bp, Artificial; identical to SEQ ID NO: 13251
  Synthetic oligonucleotide

SEQ ID NO: 486207 - DNA, 60 bp, Artificial; identical to SEQ ID NO: 12233
  Synthetic oligonucleotide

SEQ ID NO: 486208 - DNA, 60 bp, Artificial; identical to SEQ ID NO: 81023
  Synthetic oligonucleotide

SEQ ID NO: 486209 - DNA, 56 bp, Artificial; identical to SEQ ID NO: 16995
  Synthetic oligonucleotide

SEQ ID NO: 486210 - DNA, 52 bp, Artificial; identical to SEQ ID NO: 18784
  Synthetic oligonucleotide

SEQ ID NO: 486211 - DNA, 60 bp, Artificial; identical to SEQ ID NO: 14812
  Synthetic oligonucleotide

SEQ ID NO: 486212 - DNA, 51 bp, Artificial; identical to SEQ ID NO: 6401
  Synthetic oligonucleotide

SEQ ID NO: 486213 - DNA, 60 bp, Artificial; identical to SEQ ID NO: 14358
  Synthetic oligonucleotide

SEQ ID NO: 486214 - DNA, 55 bp, Artificial; identical to SEQ ID NO: 18246
  Synthetic oligonucleotide

SEQ ID NO: 486215 - DNA, 60 bp, Artificial; identical to SEQ ID NO: 105834
  Synthetic oligonucleotide

SEQ ID NO: 486216 - DNA, 50 bp, Artificial; identical to SEQ ID NO: 13864
  Synthetic oligonucleotide

SEQ ID NO: 486217 - DNA, 58 bp, Artificial; identical to SEQ ID NO: 17479
  Synthetic oligonucleotide

SEQ ID NO: 486218 - DNA, 59 bp, Artificial; identical to SEQ ID NO: 17552
  Synthetic oligonucleotide

SEQ ID NO: 486219 - DNA, 56 bp, Artificial; identical to SEQ ID NO: 18053
  Synthetic oligonucleotide

SEQ ID NO: 486220 - DNA, 57 bp, Artificial; identical to SEQ ID NO: 19453
  Synthetic oligonucleotide

SEQ ID NO: 486221 - DNA, 49 bp, Artificial; identical to SEQ ID NO: 17052
  Synthetic oligonucleotide

SEQ ID NO: 486222 - DNA, 50 bp, Artificial; identical to SEQ ID NO: 12962
  Synthetic oligonucleotide

SEQ ID NO: 486223 - DNA, 60 bp, Artificial; identical to SEQ ID NO: 13022
  Synthetic oligonucleotide

SEQ ID NO: 486224 - DNA, 60 bp, Artificial; identical to SEQ ID NO: 12320
  Synthetic oligonucleotide

SEQ ID NO: 486225 - DNA, 60 bp, Artificial; identical to SEQ ID NO: 5835
  Synthetic oligonucleotide

SEQ ID NO: 486226 - DNA, 60 bp, Artificial; identical to SEQ ID NO: 15716
  Synthetic oligonucleotide

SEQ ID NO: 486227 - DNA, 55 bp, Artificial; identical to SEQ ID NO: 16382
  Synthetic oligonucleotide

SEQ ID NO: 486228 - DNA, 58 bp, Artificial; identical to SEQ ID NO: 12739
  Synthetic oligonucleotide

SEQ ID NO: 486229 - DNA, 58 bp, Artificial; identical to SEQ ID NO: 17146
  Synthetic oligonucleotide

SEQ ID NO: 486230 - DNA, 51 bp, Artificial; identical to SEQ ID NO: 17733
  Synthetic oligonucleotide

SEQ ID NO: 486231 - DNA, 53 bp, Artificial; identical to SEQ ID NO: 19059
  Synthetic oligonucleotide

SEQ ID NO: 486232 - DNA, 59 bp, Artificial; identical to SEQ ID NO: 16749
  Synthetic oligonucleotide

SEQ ID NO: 486233 - DNA, 59 bp, Artificial; identical to SEQ ID NO: 17497
  Synthetic oligonucleotide

SEQ ID NO: 486234 - DNA, 57 bp, Artificial; identical to SEQ ID NO: 18953
  Synthetic oligonucleotide

SEQ ID NO: 486235 - DNA, 58 bp, Artificial; identical to SEQ ID NO: 17525
  Synthetic oligonucleotide

SEQ ID NO: 486236 - DNA, 56 bp, Artificial; identical to SEQ ID NO: 11027
  Synthetic oligonucleotide

SEQ ID NO: 486237 - DNA, 50 bp, Artificial; identical to SEQ ID NO: 13000
  Synthetic oligonucleotide

SEQ ID NO: 486238 - DNA, 55 bp, Artificial; identical to SEQ ID NO: 13943
  Synthetic oligonucleotide

SEQ ID NO: 486239 - DNA, 59 bp, Artificial; identical to SEQ ID NO: 18708
  Synthetic oligonucleotide

SEQ ID NO: 486240 - DNA, 54 bp, Artificial; identical to SEQ ID NO: 14952
  Synthetic oligonucleotide

SEQ ID NO: 486241 - DNA, 60 bp, Artificial; identical to SEQ ID NO: 10687
  Synthetic oligonucleotide

SEQ ID NO: 486242 - DNA, 52 bp, Artificial; identical to SEQ ID NO: 16543
  Synthetic oligonucleotide

SEQ ID NO: 486243 - DNA, 54 bp, Artificial; identical to SEQ ID NO: 11094
  Synthetic oligonucleotide

SEQ ID NO: 486244 - DNA, 53 bp, Artificial; identical to SEQ ID NO: 18765
  Synthetic oligonucleotide

SEQ ID NO: 486245 - DNA, 57 bp, Artificial; identical to SEQ ID NO: 10305
  Synthetic oligonucleotide

SEQ ID NO: 486246 - DNA, 57 bp, Artificial; identical to SEQ ID NO: 16097
  Synthetic oligonucleotide

SEQ ID NO: 486247 - DNA, 55 bp, Artificial; identical to SEQ ID NO: 5991
  Synthetic oligonucleotide

SEQ ID NO: 486248 - DNA, 60 bp, Artificial; identical to SEQ ID NO: 11337
  Synthetic oligonucleotide

SEQ ID NO: 486249 - DNA, 55 bp, Artificial; identical to SEQ ID NO: 10000
  Synthetic oligonucleotide

SEQ ID NO: 486250 - DNA, 60 bp, Artificial; identical to SEQ ID NO: 6302
  Synthetic oligonucleotide

SEQ ID NO: 486251 - DNA, 55 bp, Artificial; identical to SEQ ID NO: 15003
  Synthetic oligonucleotide

SEQ ID NO: 486252 - DNA, 56 bp, Artificial; identical to SEQ ID NO: 19078
  Synthetic oligonucleotide

SEQ ID NO: 486253 - DNA, 60 bp, Artificial; identical to SEQ ID NO: 6689
  Synthetic oligonucleotide

SEQ ID NO: 486254 - DNA, 52 bp, Artificial; identical to SEQ ID NO: 11261
  Synthetic oligonucleotide

SEQ ID NO: 486255 - DNA, 53 bp, Artificial; identical to SEQ ID NO: 159
  Synthetic oligonucleotide

SEQ ID NO: 486256 - DNA, 56 bp, Artificial; identical to SEQ ID NO: 14851
  Synthetic oligonucleotide

SEQ ID NO: 486257 - DNA, 58 bp, Artificial; identical to SEQ ID NO: 18742
  Synthetic oligonucleotide

SEQ ID NO: 486258 - DNA, 60 bp, Artificial; identical to SEQ ID NO: 9546
  Synthetic oligonucleotide

SEQ ID NO: 486259 - DNA, 57 bp, Artificial; identical to SEQ ID NO: 17939
  Synthetic oligonucleotide

SEQ ID NO: 486260 - DNA, 60 bp, Artificial; identical to SEQ ID NO: 12633
  Synthetic oligonucleotide

SEQ ID NO: 486261 - DNA, 60 bp, Artificial; identical to SEQ ID NO: 7612
  Synthetic oligonucleotide

SEQ ID NO: 486262 - DNA, 57 bp, Artificial; identical to SEQ ID NO: 16118
  Synthetic oligonucleotide

SEQ ID NO: 486263 - DNA, 60 bp, Artificial; identical to SEQ ID NO: 11107
  Synthetic oligonucleotide

SEQ ID NO: 486264 - DNA, 58 bp, Artificial; identical to SEQ ID NO: 18141
  Synthetic oligonucleotide

SEQ ID NO: 486265 - DNA, 60 bp, Artificial; identical to SEQ ID NO: 14497
  Synthetic oligonucleotide

SEQ ID NO: 486266 - DNA, 53 bp, Artificial; identical to SEQ ID NO: 17130
  Synthetic oligonucleotide

SEQ ID NO: 486267 - DNA, 54 bp, Artificial; identical to SEQ ID NO: 10813
  Synthetic oligonucleotide

SEQ ID NO: 486268 - DNA, 60 bp, Artificial; identical to SEQ ID NO: 10783
  Synthetic oligonucleotide

SEQ ID NO: 486269 - DNA, 57 bp, Artificial; identical to SEQ ID NO: 18332
  Synthetic oligonucleotide

SEQ ID NO: 486270 - DNA, 59 bp, Artificial; identical to SEQ ID NO: 17500
  Synthetic oligonucleotide

SEQ ID NO: 486271 - DNA, 60 bp, Artificial; identical to SEQ ID NO: 15787
  Synthetic oligonucleotide

SEQ ID NO: 486272 - DNA, 60 bp, Artificial; identical to SEQ ID NO: 11457
  Synthetic oligonucleotide

SEQ ID NO: 486273 - DNA, 55 bp, Artificial; identical to SEQ ID NO: 16904
  Synthetic oligonucleotide

SEQ ID NO: 486274 - DNA, 56 bp, Artificial; identical to SEQ ID NO: 7112
  Synthetic oligonucleotide

SEQ ID NO: 486275 - DNA, 60 bp, Artificial; identical to SEQ ID NO: 7168
  Synthetic oligonucleotide

SEQ ID NO: 486276 - DNA, 59 bp, Artificial; identical to SEQ ID NO: 17601
  Synthetic oligonucleotide

SEQ ID NO: 486277 - DNA, 51 bp, Artificial; identical to SEQ ID NO: 8012
  Synthetic oligonucleotide

SEQ ID NO: 486278 - DNA, 50 bp, Artificial; identical to SEQ ID NO: 6014
  Synthetic oligonucleotide

SEQ ID NO: 486279 - DNA, 58 bp, Artificial; identical to SEQ ID NO: 20241
  Synthetic oligonucleotide

SEQ ID NO: 486280 - DNA, 59 bp, Artificial; identical to SEQ ID NO: 18344
  Synthetic oligonucleotide

SEQ ID NO: 486281 - DNA, 60 bp, Artificial; identical to SEQ ID NO: 6047
  Synthetic oligonucleotide

SEQ ID NO: 486282 - DNA, 59 bp, Artificial; identical to SEQ ID NO: 15699
  Synthetic oligonucleotide

SEQ ID NO: 486283 - DNA, 56 bp, Artificial; identical to SEQ ID NO: 17349
  Synthetic oligonucleotide

SEQ ID NO: 486284 - DNA, 55 bp, Artificial; identical to SEQ ID NO: 13537
  Synthetic oligonucleotide

SEQ ID NO: 486285 - DNA, 53 bp, Artificial; identical to SEQ ID NO: 17544
  Synthetic oligonucleotide

SEQ ID NO: 486286 - DNA, 60 bp, Artificial; identical to SEQ ID NO: 12841
  Synthetic oligonucleotide

SEQ ID NO: 486287 - DNA, 60 bp, Artificial; identical to SEQ ID NO: 10207
  Synthetic oligonucleotide

SEQ ID NO: 486288 - DNA, 60 bp, Artificial; identical to SEQ ID NO: 9353
  Synthetic oligonucleotide

SEQ ID NO: 486289 - DNA, 60 bp, Artificial; identical to SEQ ID NO: 6463
  Synthetic oligonucleotide

SEQ ID NO: 486290 - DNA, 55 bp, Artificial; identical to SEQ ID NO: 12911
  Synthetic oligonucleotide

SEQ ID NO: 486291 - DNA, 59 bp, Artificial; identical to SEQ ID NO: 20184
  Synthetic oligonucleotide

SEQ ID NO: 486292 - DNA, 57 bp, Artificial; identical to SEQ ID NO: 19698
  Synthetic oligonucleotide

SEQ ID NO: 486293 - DNA, 53 bp, Artificial; identical to SEQ ID NO: 7406
  Synthetic oligonucleotide

SEQ ID NO: 486294 - DNA, 60 bp, Artificial; identical to SEQ ID NO: 7904
  Synthetic oligonucleotide

SEQ ID NO: 486295 - DNA, 60 bp, Artificial; identical to SEQ ID NO: 12036
  Synthetic oligonucleotide

SEQ ID NO: 486296 - DNA, 55 bp, Artificial; identical to SEQ ID NO: 16115
  Synthetic oligonucleotide

SEQ ID NO: 486297 - DNA, 57 bp, Artificial; identical to SEQ ID NO: 18915
  Synthetic oligonucleotide

SEQ ID NO: 486298 - DNA, 60 bp, Artificial; identical to SEQ ID NO: 10323
  Synthetic oligonucleotide

SEQ ID NO: 486299 - DNA, 50 bp, Artificial; identical to SEQ ID NO: 12421
  Synthetic oligonucleotide

SEQ ID NO: 486300 - DNA, 51 bp, Artificial; identical to SEQ ID NO: 7825
  Synthetic oligonucleotide

SEQ ID NO: 486301 - DNA, 60 bp, Artificial; identical to SEQ ID NO: 14082
  Synthetic oligonucleotide

SEQ ID NO: 486302 - DNA, 55 bp, Artificial; identical to SEQ ID NO: 6861
  Synthetic oligonucleotide

SEQ ID NO: 486303 - DNA, 60 bp, Artificial; identical to SEQ ID NO: 8050
  Synthetic oligonucleotide

SEQ ID NO: 486304 - DNA, 54 bp, Artificial; identical to SEQ ID NO: 18051
  Synthetic oligonucleotide

SEQ ID NO: 486305 - DNA, 60 bp, Artificial; identical to SEQ ID NO: 10427
  Synthetic oligonucleotide

SEQ ID NO: 486306 - DNA, 52 bp, Artificial; identical to SEQ ID NO: 18148
  Synthetic oligonucleotide

SEQ ID NO: 486307 - DNA, 51 bp, Artificial; identical to SEQ ID NO: 20378
  Synthetic oligonucleotide

SEQ ID NO: 486308 - DNA, 51 bp, Artificial; identical to SEQ ID NO: 14432
  Synthetic oligonucleotide

SEQ ID NO: 486309 - DNA, 55 bp, Artificial; identical to SEQ ID NO: 8388
  Synthetic oligonucleotide

SEQ ID NO: 486310 - DNA, 54 bp, Artificial; identical to SEQ ID NO: 10285
  Synthetic oligonucleotide

SEQ ID NO: 486311 - DNA, 60 bp, Artificial; identical to SEQ ID NO: 10936
  Synthetic oligonucleotide

SEQ ID NO: 486312 - DNA, 60 bp, Artificial; identical to SEQ ID NO: 10701
  Synthetic oligonucleotide

SEQ ID NO: 486313 - DNA, 60 bp, Artificial; identical to SEQ ID NO: 14684
  Synthetic oligonucleotide

SEQ ID NO: 486314 - DNA, 55 bp, Artificial; identical to SEQ ID NO: 11169
  Synthetic oligonucleotide

SEQ ID NO: 486315 - DNA, 56 bp, Artificial; identical to SEQ ID NO: 18414
  Synthetic oligonucleotide

SEQ ID NO: 486316 - DNA, 60 bp, Artificial; identical to SEQ ID NO: 14484
  Synthetic oligonucleotide

SEQ ID NO: 486317 - DNA, 54 bp, Artificial; identical to SEQ ID NO: 18170
  Synthetic oligonucleotide

SEQ ID NO: 486318 - DNA, 59 bp, Artificial; identical to SEQ ID NO: 19301
  Synthetic oligonucleotide

SEQ ID NO: 486319 - DNA, 54 bp, Artificial; identical to SEQ ID NO: 18975
  Synthetic oligonucleotide

SEQ ID NO: 486320 - DNA, 60 bp, Artificial; identical to SEQ ID NO: 10927
  Synthetic oligonucleotide

SEQ ID NO: 486321 - DNA, 53 bp, Artificial; identical to SEQ ID NO: 12637
  Synthetic oligonucleotide

SEQ ID NO: 486322 - DNA, 56 bp, Artificial; identical to SEQ ID NO: 16831
  Synthetic oligonucleotide

SEQ ID NO: 486323 - DNA, 60 bp, Artificial; identical to SEQ ID NO: 15467
  Synthetic oligonucleotide

SEQ ID NO: 486324 - DNA, 56 bp, Artificial; identical to SEQ ID NO: 6995
  Synthetic oligonucleotide

SEQ ID NO: 486325 - DNA, 55 bp, Artificial; identical to SEQ ID NO: 11344
  Synthetic oligonucleotide

SEQ ID NO: 486326 - DNA, 55 bp, Artificial; identical to SEQ ID NO: 19706
  Synthetic oligonucleotide

SEQ ID NO: 486327 - DNA, 58 bp, Artificial; identical to SEQ ID NO: 18375
  Synthetic oligonucleotide

SEQ ID NO: 486328 - DNA, 58 bp, Artificial; identical to SEQ ID NO: 7576
  Synthetic oligonucleotide

SEQ ID NO: 486329 - DNA, 57 bp, Artificial; identical to SEQ ID NO: 187
  Synthetic oligonucleotide

SEQ ID NO: 486330 - DNA, 57 bp, Artificial; identical to SEQ ID NO: 19355
  Synthetic oligonucleotide

SEQ ID NO: 486331 - DNA, 55 bp, Artificial; identical to SEQ ID NO: 8429
  Synthetic oligonucleotide

SEQ ID NO: 486332 - DNA, 60 bp, Artificial; identical to SEQ ID NO: 29276
  Synthetic oligonucleotide

SEQ ID NO: 486333 - DNA, 56 bp, Artificial; identical to SEQ ID NO: 19242
  Synthetic oligonucleotide

SEQ ID NO: 486334 - DNA, 60 bp, Artificial; identical to SEQ ID NO: 10449
  Synthetic oligonucleotide

SEQ ID NO: 486335 - DNA, 59 bp, Artificial; identical to SEQ ID NO: 12973
  Synthetic oligonucleotide

SEQ ID NO: 486336 - DNA, 55 bp, Artificial; identical to SEQ ID NO: 10124
  Synthetic oligonucleotide

SEQ ID NO: 486337 - DNA, 60 bp, Artificial; identical to SEQ ID NO: 12966
  Synthetic oligonucleotide

SEQ ID NO: 486338 - DNA, 56 bp, Artificial; identical to SEQ ID NO: 14935
  Synthetic oligonucleotide

SEQ ID NO: 486339 - DNA, 51 bp, Artificial; identical to SEQ ID NO: 14338
  Synthetic oligonucleotide

SEQ ID NO: 486340 - DNA, 58 bp, Artificial; identical to SEQ ID NO: 13015
  Synthetic oligonucleotide

SEQ ID NO: 486341 - DNA, 56 bp, Artificial; identical to SEQ ID NO: 14823
  Synthetic oligonucleotide

SEQ ID NO: 486342 - DNA, 56 bp, Artificial; identical to SEQ ID NO: 7264
  Synthetic oligonucleotide

SEQ ID NO: 486343 - DNA, 59 bp, Artificial; identical to SEQ ID NO: 19538
  Synthetic oligonucleotide

SEQ ID NO: 486344 - DNA, 52 bp, Artificial; identical to SEQ ID NO: 20506
  Synthetic oligonucleotide

SEQ ID NO: 486345 - DNA, 58 bp, Artificial; identical to SEQ ID NO: 14450
  Synthetic oligonucleotide

SEQ ID NO: 486346 - DNA, 60 bp, Artificial; identical to SEQ ID NO: 13970
  Synthetic oligonucleotide

SEQ ID NO: 486347 - DNA, 58 bp, Artificial; identical to SEQ ID NO: 19451
  Synthetic oligonucleotide

SEQ ID NO: 486348 - DNA, 60 bp, Artificial; identical to SEQ ID NO: 11369
  Synthetic oligonucleotide

SEQ ID NO: 486349 - DNA, 56 bp, Artificial; identical to SEQ ID NO: 20513
  Synthetic oligonucleotide

SEQ ID NO: 486350 - DNA, 55 bp, Artificial; identical to SEQ ID NO: 8529
  Synthetic oligonucleotide

SEQ ID NO: 486351 - DNA, 60 bp, Artificial; identical to SEQ ID NO: 13472
  Synthetic oligonucleotide

SEQ ID NO: 486352 - DNA, 60 bp, Artificial; identical to SEQ ID NO: 5793
  Synthetic oligonucleotide

SEQ ID NO: 486353 - DNA, 60 bp, Artificial; identical to SEQ ID NO: 62738
  Synthetic oligonucleotide

SEQ ID NO: 486354 - DNA, 58 bp, Artificial; identical to SEQ ID NO: 20384
  Synthetic oligonucleotide

SEQ ID NO: 486355 - DNA, 52 bp, Artificial; identical to SEQ ID NO: 10540
  Synthetic oligonucleotide

SEQ ID NO: 486356 - DNA, 56 bp, Artificial; identical to SEQ ID NO: 15689
  Synthetic oligonucleotide

SEQ ID NO: 486357 - DNA, 60 bp, Artificial; identical to SEQ ID NO: 6810
  Synthetic oligonucleotide

SEQ ID NO: 486358 - DNA, 59 bp, Artificial; identical to SEQ ID NO: 19963
  Synthetic oligonucleotide

SEQ ID NO: 486359 - DNA, 60 bp, Artificial; identical to SEQ ID NO: 12882
  Synthetic oligonucleotide

SEQ ID NO: 486360 - DNA, 60 bp, Artificial; identical to SEQ ID NO: 13247
  Synthetic oligonucleotide

SEQ ID NO: 486361 - DNA, 60 bp, Artificial; identical to SEQ ID NO: 6955
  Synthetic oligonucleotide

SEQ ID NO: 486362 - DNA, 57 bp, Artificial; identical to SEQ ID NO: 16587
  Synthetic oligonucleotide

SEQ ID NO: 486363 - DNA, 54 bp, Artificial; identical to SEQ ID NO: 18245
  Synthetic oligonucleotide

SEQ ID NO: 486364 - DNA, 59 bp, Artificial; identical to SEQ ID NO: 19297
  Synthetic oligonucleotide

SEQ ID NO: 486365 - DNA, 60 bp, Artificial; identical to SEQ ID NO: 5847
  Synthetic oligonucleotide

SEQ ID NO: 486366 - DNA, 60 bp, Artificial; identical to SEQ ID NO: 12790
  Synthetic oligonucleotide

SEQ ID NO: 486367 - DNA, 58 bp, Artificial; identical to SEQ ID NO: 17153
  Synthetic oligonucleotide

SEQ ID NO: 486368 - DNA, 59 bp, Artificial; identical to SEQ ID NO: 11478
  Synthetic oligonucleotide

SEQ ID NO: 486369 - DNA, 60 bp, Artificial; identical to SEQ ID NO: 54292
  Synthetic oligonucleotide

SEQ ID NO: 486370 - DNA, 60 bp, Artificial; identical to SEQ ID NO: 8141
  Synthetic oligonucleotide

SEQ ID NO: 486371 - DNA, 59 bp, Artificial; identical to SEQ ID NO: 19842
  Synthetic oligonucleotide

SEQ ID NO: 486372 - DNA, 60 bp, Artificial; identical to SEQ ID NO: 7166
  Synthetic oligonucleotide

SEQ ID NO: 486373 - DNA, 60 bp, Artificial; identical to SEQ ID NO: 10271
  Synthetic oligonucleotide

SEQ ID NO: 486374 - DNA, 50 bp, Artificial; identical to SEQ ID NO: 19477
  Synthetic oligonucleotide

SEQ ID NO: 486375 - DNA, 56 bp, Artificial; identical to SEQ ID NO: 17509
  Synthetic oligonucleotide

SEQ ID NO: 486376 - DNA, 57 bp, Artificial; identical to SEQ ID NO: 14468
  Synthetic oligonucleotide

SEQ ID NO: 486377 - DNA, 54 bp, Artificial; identical to SEQ ID NO: 19521
  Synthetic oligonucleotide

SEQ ID NO: 486378 - DNA, 60 bp, Artificial; identical to SEQ ID NO: 113979
  Synthetic oligonucleotide

SEQ ID NO: 486379 - DNA, 60 bp, Artificial; identical to SEQ ID NO: 11516
  Synthetic oligonucleotide

SEQ ID NO: 486380 - DNA, 58 bp, Artificial; identical to SEQ ID NO: 19470
  Synthetic oligonucleotide

SEQ ID NO: 486381 - DNA, 54 bp, Artificial; identical to SEQ ID NO: 19402
  Synthetic oligonucleotide

SEQ ID NO: 486382 - DNA, 52 bp, Artificial; identical to SEQ ID NO: 14383
  Synthetic oligonucleotide

SEQ ID NO: 486383 - DNA, 60 bp, Artificial; identical to SEQ ID NO: 15318
  Synthetic oligonucleotide

SEQ ID NO: 486384 - DNA, 58 bp, Artificial; identical to SEQ ID NO: 17617
  Synthetic oligonucleotide

SEQ ID NO: 486385 - DNA, 60 bp, Artificial; identical to SEQ ID NO: 8299
  Synthetic oligonucleotide

SEQ ID NO: 486386 - DNA, 56 bp, Artificial; identical to SEQ ID NO: 10270
  Synthetic oligonucleotide

SEQ ID NO: 486387 - DNA, 56 bp, Artificial; identical to SEQ ID NO: 20147
  Synthetic oligonucleotide

SEQ ID NO: 486388 - DNA, 60 bp, Artificial; identical to SEQ ID NO: 57319
  Synthetic oligonucleotide

SEQ ID NO: 486389 - DNA, 58 bp, Artificial; identical to SEQ ID NO: 16617
  Synthetic oligonucleotide

SEQ ID NO: 486390 - DNA, 57 bp, Artificial; identical to SEQ ID NO: 18961
  Synthetic oligonucleotide

SEQ ID NO: 486391 - DNA, 60 bp, Artificial; identical to SEQ ID NO: 14191
  Synthetic oligonucleotide

SEQ ID NO: 486392 - DNA, 54 bp, Artificial; identical to SEQ ID NO: 20350
  Synthetic oligonucleotide

SEQ ID NO: 486393 - DNA, 60 bp, Artificial; identical to SEQ ID NO: 12216
  Synthetic oligonucleotide

SEQ ID NO: 486394 - DNA, 60 bp, Artificial; identical to SEQ ID NO: 13077
  Synthetic oligonucleotide

SEQ ID NO: 486395 - DNA, 60 bp, Artificial; identical to SEQ ID NO: 15009
  Synthetic oligonucleotide

SEQ ID NO: 486396 - DNA, 57 bp, Artificial; identical to SEQ ID NO: 19339
  Synthetic oligonucleotide

SEQ ID NO: 486397 - DNA, 60 bp, Artificial; identical to SEQ ID NO: 11950
  Synthetic oligonucleotide

SEQ ID NO: 486398 - DNA, 60 bp, Artificial; identical to SEQ ID NO: 13787
  Synthetic oligonucleotide

SEQ ID NO: 486399 - DNA, 59 bp, Artificial; identical to SEQ ID NO: 17762
  Synthetic oligonucleotide

SEQ ID NO: 486400 - DNA, 51 bp, Artificial; identical to SEQ ID NO: 14726
  Synthetic oligonucleotide

SEQ ID NO: 486401 - DNA, 60 bp, Artificial; identical to SEQ ID NO: 10033
  Synthetic oligonucleotide

SEQ ID NO: 486402 - DNA, 60 bp, Artificial; identical to SEQ ID NO: 7737
  Synthetic oligonucleotide

SEQ ID NO: 486403 - DNA, 58 bp, Artificial; identical to SEQ ID NO: 17148
  Synthetic oligonucleotide

SEQ ID NO: 486404 - DNA, 57 bp, Artificial; identical to SEQ ID NO: 10737
  Synthetic oligonucleotide

SEQ ID NO: 486405 - DNA, 53 bp, Artificial; identical to SEQ ID NO: 19354
  Synthetic oligonucleotide

SEQ ID NO: 486406 - DNA, 56 bp, Artificial; identical to SEQ ID NO: 17199
  Synthetic oligonucleotide

SEQ ID NO: 486407 - DNA, 60 bp, Artificial; identical to SEQ ID NO: 9782
  Synthetic oligonucleotide

SEQ ID NO: 486408 - DNA, 58 bp, Artificial; identical to SEQ ID NO: 18027
  Synthetic oligonucleotide

SEQ ID NO: 486409 - DNA, 57 bp, Artificial; identical to SEQ ID NO: 15907
  Synthetic oligonucleotide

SEQ ID NO: 486410 - DNA, 54 bp, Artificial; identical to SEQ ID NO: 10049
  Synthetic oligonucleotide

SEQ ID NO: 486411 - DNA, 60 bp, Artificial; identical to SEQ ID NO: 5957
  Synthetic oligonucleotide

SEQ ID NO: 486412 - DNA, 60 bp, Artificial; identical to SEQ ID NO: 10358
  Synthetic oligonucleotide

SEQ ID NO: 486413 - DNA, 52 bp, Artificial; identical to SEQ ID NO: 10724
  Synthetic oligonucleotide

SEQ ID NO: 486414 - DNA, 60 bp, Artificial; identical to SEQ ID NO: 10825
  Synthetic oligonucleotide

SEQ ID NO: 486415 - DNA, 60 bp, Artificial; identical to SEQ ID NO: 11143
  Synthetic oligonucleotide

SEQ ID NO: 486416 - DNA, 60 bp, Artificial; identical to SEQ ID NO: 5775
  Synthetic oligonucleotide

SEQ ID NO: 486417 - DNA, 60 bp, Artificial; identical to SEQ ID NO: 6482
  Synthetic oligonucleotide

SEQ ID NO: 486418 - DNA, 60 bp, Artificial; identical to SEQ ID NO: 12197
  Synthetic oligonucleotide

SEQ ID NO: 486419 - DNA, 55 bp, Artificial; identical to SEQ ID NO: 6630
  Synthetic oligonucleotide

SEQ ID NO: 486420 - DNA, 52 bp, Artificial; identical to SEQ ID NO: 12515
  Synthetic oligonucleotide

SEQ ID NO: 486421 - DNA, 60 bp, Artificial; identical to SEQ ID NO: 8140
  Synthetic oligonucleotide

SEQ ID NO: 486422 - DNA, 55 bp, Artificial; identical to SEQ ID NO: 16217
  Synthetic oligonucleotide

SEQ ID NO: 486423 - DNA, 54 bp, Artificial; identical to SEQ ID NO: 20166
  Synthetic oligonucleotide

SEQ ID NO: 486424 - DNA, 50 bp, Artificial; identical to SEQ ID NO: 15161
  Synthetic oligonucleotide

SEQ ID NO: 486425 - DNA, 58 bp, Artificial; identical to SEQ ID NO: 16157
  Synthetic oligonucleotide

SEQ ID NO: 486426 - DNA, 56 bp, Artificial; identical to SEQ ID NO: 16495
  Synthetic oligonucleotide

SEQ ID NO: 486427 - DNA, 60 bp, Artificial; identical to SEQ ID NO: 14249
  Synthetic oligonucleotide

SEQ ID NO: 486428 - DNA, 60 bp, Artificial; identical to SEQ ID NO: 11577
  Synthetic oligonucleotide

SEQ ID NO: 486429 - DNA, 54 bp, Artificial; identical to SEQ ID NO: 16894
  Synthetic oligonucleotide

SEQ ID NO: 486430 - DNA, 60 bp, Artificial; identical to SEQ ID NO: 8187
  Synthetic oligonucleotide

SEQ ID NO: 486431 - DNA, 54 bp, Artificial; identical to SEQ ID NO: 11892
  Synthetic oligonucleotide

SEQ ID NO: 486432 - DNA, 57 bp, Artificial; identical to SEQ ID NO: 16492
  Synthetic oligonucleotide

SEQ ID NO: 486433 - DNA, 57 bp, Artificial; identical to SEQ ID NO: 18593
  Synthetic oligonucleotide

SEQ ID NO: 486434 - DNA, 60 bp, Artificial; identical to SEQ ID NO: 10807
  Synthetic oligonucleotide

SEQ ID NO: 486435 - DNA, 59 bp, Artificial; identical to SEQ ID NO: 16156
  Synthetic oligonucleotide

SEQ ID NO: 486436 - DNA, 55 bp, Artificial; identical to SEQ ID NO: 15894
  Synthetic oligonucleotide

SEQ ID NO: 486437 - DNA, 60 bp, Artificial; identical to SEQ ID NO: 6447
  Synthetic oligonucleotide

SEQ ID NO: 486438 - DNA, 53 bp, Artificial; identical to SEQ ID NO: 19835
  Synthetic oligonucleotide

SEQ ID NO: 486439 - DNA, 57 bp, Artificial; identical to SEQ ID NO: 17535
  Synthetic oligonucleotide

SEQ ID NO: 486440 - DNA, 53 bp, Artificial; identical to SEQ ID NO: 7872
  Synthetic oligonucleotide

SEQ ID NO: 486441 - DNA, 60 bp, Artificial; identical to SEQ ID NO: 14507
  Synthetic oligonucleotide

SEQ ID NO: 486442 - DNA, 59 bp, Artificial; identical to SEQ ID NO: 11141
  Synthetic oligonucleotide

SEQ ID NO: 486443 - DNA, 50 bp, Artificial; identical to SEQ ID NO: 15582
  Synthetic oligonucleotide

SEQ ID NO: 486444 - DNA, 56 bp, Artificial; identical to SEQ ID NO: 17464
  Synthetic oligonucleotide

SEQ ID NO: 486445 - DNA, 58 bp, Artificial; identical to SEQ ID NO: 7407
  Synthetic oligonucleotide

SEQ ID NO: 486446 - DNA, 56 bp, Artificial; identical to SEQ ID NO: 16283
  Synthetic oligonucleotide

SEQ ID NO: 486447 - DNA, 51 bp, Artificial; identical to SEQ ID NO: 11406
  Synthetic oligonucleotide

SEQ ID NO: 486448 - DNA, 56 bp, Artificial; identical to SEQ ID NO: 6174
  Synthetic oligonucleotide

SEQ ID NO: 486449 - DNA, 60 bp, Artificial; identical to SEQ ID NO: 8659
  Synthetic oligonucleotide

SEQ ID NO: 486450 - DNA, 51 bp, Artificial; identical to SEQ ID NO: 12061
  Synthetic oligonucleotide

SEQ ID NO: 486451 - DNA, 55 bp, Artificial; identical to SEQ ID NO: 11722
  Synthetic oligonucleotide

SEQ ID NO: 486452 - DNA, 52 bp, Artificial; identical to SEQ ID NO: 8755
  Synthetic oligonucleotide

SEQ ID NO: 486453 - DNA, 60 bp, Artificial; identical to SEQ ID NO: 8412
  Synthetic oligonucleotide

SEQ ID NO: 486454 - DNA, 56 bp, Artificial; identical to SEQ ID NO: 15097
  Synthetic oligonucleotide

SEQ ID NO: 486455 - DNA, 60 bp, Artificial; identical to SEQ ID NO: 15861
  Synthetic oligonucleotide

SEQ ID NO: 486456 - DNA, 60 bp, Artificial; identical to SEQ ID NO: 14874
  Synthetic oligonucleotide

SEQ ID NO: 486457 - DNA, 56 bp, Artificial; identical to SEQ ID NO: 18456
  Synthetic oligonucleotide

SEQ ID NO: 486458 - DNA, 58 bp, Artificial; identical to SEQ ID NO: 16798
  Synthetic oligonucleotide

SEQ ID NO: 486459 - DNA, 59 bp, Artificial; identical to SEQ ID NO: 18719
  Synthetic oligonucleotide

SEQ ID NO: 486460 - DNA, 60 bp, Artificial; identical to SEQ ID NO: 15683
  Synthetic oligonucleotide

SEQ ID NO: 486461 - DNA, 58 bp, Artificial; identical to SEQ ID NO: 17943
  Synthetic oligonucleotide

SEQ ID NO: 486462 - DNA, 60 bp, Artificial; identical to SEQ ID NO: 14624
  Synthetic oligonucleotide

SEQ ID NO: 486463 - DNA, 60 bp, Artificial; identical to SEQ ID NO: 15383
  Synthetic oligonucleotide

SEQ ID NO: 486464 - DNA, 55 bp, Artificial; identical to SEQ ID NO: 18884
  Synthetic oligonucleotide

SEQ ID NO: 486465 - DNA, 60 bp, Artificial; identical to SEQ ID NO: 10852
  Synthetic oligonucleotide

SEQ ID NO: 486466 - DNA, 57 bp, Artificial; identical to SEQ ID NO: 17100
  Synthetic oligonucleotide

SEQ ID NO: 486467 - DNA, 55 bp, Artificial; identical to SEQ ID NO: 20453
  Synthetic oligonucleotide

SEQ ID NO: 486468 - DNA, 60 bp, Artificial; identical to SEQ ID NO: 15288
  Synthetic oligonucleotide

SEQ ID NO: 486469 - DNA, 60 bp, Artificial; identical to SEQ ID NO: 105664
  Synthetic oligonucleotide

SEQ ID NO: 486470 - DNA, 60 bp, Artificial; identical to SEQ ID NO: 6915
  Synthetic oligonucleotide

SEQ ID NO: 486471 - DNA, 59 bp, Artificial; identical to SEQ ID NO: 19033
  Synthetic oligonucleotide

SEQ ID NO: 486472 - DNA, 60 bp, Artificial; identical to SEQ ID NO: 12792
  Synthetic oligonucleotide

SEQ ID NO: 486473 - DNA, 60 bp, Artificial; identical to SEQ ID NO: 12292
  Synthetic oligonucleotide

SEQ ID NO: 486474 - DNA, 60 bp, Artificial; identical to SEQ ID NO: 6830
  Synthetic oligonucleotide

SEQ ID NO: 486475 - DNA, 60 bp, Artificial; identical to SEQ ID NO: 8474
  Synthetic oligonucleotide

SEQ ID NO: 486476 - DNA, 60 bp, Artificial; identical to SEQ ID NO: 12020
  Synthetic oligonucleotide

SEQ ID NO: 486477 - DNA, 60 bp, Artificial; identical to SEQ ID NO: 14850
  Synthetic oligonucleotide

SEQ ID NO: 486478 - DNA, 56 bp, Artificial; identical to SEQ ID NO: 16374
  Synthetic oligonucleotide

SEQ ID NO: 486479 - DNA, 58 bp, Artificial; identical to SEQ ID NO: 18667
  Synthetic oligonucleotide

SEQ ID NO: 486480 - DNA, 60 bp, Artificial; identical to SEQ ID NO: 7945
  Synthetic oligonucleotide

SEQ ID NO: 486481 - DNA, 60 bp, Artificial; identical to SEQ ID NO: 15052
  Synthetic oligonucleotide

SEQ ID NO: 486482 - DNA, 57 bp, Artificial; identical to SEQ ID NO: 18046
  Synthetic oligonucleotide

SEQ ID NO: 486483 - DNA, 60 bp, Artificial; identical to SEQ ID NO: 6816
  Synthetic oligonucleotide

SEQ ID NO: 486484 - DNA, 60 bp, Artificial; identical to SEQ ID NO: 12777
  Synthetic oligonucleotide

SEQ ID NO: 486485 - DNA, 59 bp, Artificial; identical to SEQ ID NO: 12028
  Synthetic oligonucleotide

SEQ ID NO: 486486 - DNA, 59 bp, Artificial; identical to SEQ ID NO: 5824
  Synthetic oligonucleotide

SEQ ID NO: 486487 - DNA, 54 bp, Artificial; identical to SEQ ID NO: 9571
  Synthetic oligonucleotide

SEQ ID NO: 486488 - DNA, 57 bp, Artificial; identical to SEQ ID NO: 17819
  Synthetic oligonucleotide

SEQ ID NO: 486489 - DNA, 59 bp, Artificial; identical to SEQ ID NO: 13751
  Synthetic oligonucleotide

SEQ ID NO: 486490 - DNA, 53 bp, Artificial; identical to SEQ ID NO: 17961
  Synthetic oligonucleotide

SEQ ID NO: 486491 - DNA, 56 bp, Artificial; identical to SEQ ID NO: 16129
  Synthetic oligonucleotide

SEQ ID NO: 486492 - DNA, 60 bp, Artificial; identical to SEQ ID NO: 11565
  Synthetic oligonucleotide

SEQ ID NO: 486493 - DNA, 56 bp, Artificial; identical to SEQ ID NO: 18325
  Synthetic oligonucleotide

SEQ ID NO: 486494 - DNA, 60 bp, Artificial; identical to SEQ ID NO: 13991
  Synthetic oligonucleotide

SEQ ID NO: 486495 - DNA, 60 bp, Artificial; identical to SEQ ID NO: 11885
  Synthetic oligonucleotide

SEQ ID NO: 486496 - DNA, 59 bp, Artificial; identical to SEQ ID NO: 12443
  Synthetic oligonucleotide

SEQ ID NO: 486497 - DNA, 60 bp, Artificial; identical to SEQ ID NO: 6453
  Synthetic oligonucleotide

SEQ ID NO: 486498 - DNA, 50 bp, Artificial; identical to SEQ ID NO: 14758
  Synthetic oligonucleotide

SEQ ID NO: 486499 - DNA, 60 bp, Artificial; identical to SEQ ID NO: 7276
  Synthetic oligonucleotide

SEQ ID NO: 486500 - DNA, 58 bp, Artificial; identical to SEQ ID NO: 17488
  Synthetic oligonucleotide

SEQ ID NO: 486501 - DNA, 60 bp, Artificial; identical to SEQ ID NO: 7735
  Synthetic oligonucleotide

SEQ ID NO: 486502 - DNA, 60 bp, Artificial; identical to SEQ ID NO: 7718
  Synthetic oligonucleotide

SEQ ID NO: 486503 - DNA, 60 bp, Artificial; identical to SEQ ID NO: 7701
  Synthetic oligonucleotide

SEQ ID NO: 486504 - DNA, 60 bp, Artificial; identical to SEQ ID NO: 9846
  Synthetic oligonucleotide

SEQ ID NO: 486505 - DNA, 56 bp, Artificial; identical to SEQ ID NO: 18050
  Synthetic oligonucleotide

SEQ ID NO: 486506 - DNA, 60 bp, Artificial; identical to SEQ ID NO: 12619
  Synthetic oligonucleotide

SEQ ID NO: 486507 - DNA, 56 bp, Artificial; identical to SEQ ID NO: 18137
  Synthetic oligonucleotide

SEQ ID NO: 486508 - DNA, 58 bp, Artificial; identical to SEQ ID NO: 15983
  Synthetic oligonucleotide

SEQ ID NO: 486509 - DNA, 53 bp, Artificial; identical to SEQ ID NO: 10607
  Synthetic oligonucleotide

SEQ ID NO: 486510 - DNA, 56 bp, Artificial; identical to SEQ ID NO: 82
  Synthetic oligonucleotide

SEQ ID NO: 486511 - DNA, 53 bp, Artificial; identical to SEQ ID NO: 20279
  Synthetic oligonucleotide

SEQ ID NO: 486512 - DNA, 57 bp, Artificial; identical to SEQ ID NO: 6140
  Synthetic oligonucleotide

SEQ ID NO: 486513 - DNA, 58 bp, Artificial; identical to SEQ ID NO: 16335
  Synthetic oligonucleotide

SEQ ID NO: 486514 - DNA, 54 bp, Artificial; identical to SEQ ID NO: 11303
  Synthetic oligonucleotide

SEQ ID NO: 486515 - DNA, 60 bp, Artificial; identical to SEQ ID NO: 6515
  Synthetic oligonucleotide

SEQ ID NO: 486516 - DNA, 50 bp, Artificial; identical to SEQ ID NO: 10639
  Synthetic oligonucleotide

SEQ ID NO: 486517 - DNA, 57 bp, Artificial; identical to SEQ ID NO: 20527
  Synthetic oligonucleotide

SEQ ID NO: 486518 - DNA, 57 bp, Artificial; identical to SEQ ID NO: 16350
  Synthetic oligonucleotide

SEQ ID NO: 486519 - DNA, 55 bp, Artificial; identical to SEQ ID NO: 16537
  Synthetic oligonucleotide

SEQ ID NO: 486520 - DNA, 55 bp, Artificial; identical to SEQ ID NO: 18853
  Synthetic oligonucleotide

SEQ ID NO: 486521 - DNA, 55 bp, Artificial; identical to SEQ ID NO: 198
  Synthetic oligonucleotide

SEQ ID NO: 486522 - DNA, 53 bp, Artificial; identical to SEQ ID NO: 7135
  Synthetic oligonucleotide

SEQ ID NO: 486523 - DNA, 54 bp, Artificial; identical to SEQ ID NO: 18579
  Synthetic oligonucleotide

SEQ ID NO: 486524 - DNA, 60 bp, Artificial; identical to SEQ ID NO: 8254
  Synthetic oligonucleotide

SEQ ID NO: 486525 - DNA, 60 bp, Artificial; identical to SEQ ID NO: 114870
  Synthetic oligonucleotide

SEQ ID NO: 486526 - DNA, 60 bp, Artificial; identical to SEQ ID NO: 13933
  Synthetic oligonucleotide

SEQ ID NO: 486527 - DNA, 50 bp, Artificial; identical to SEQ ID NO: 11744
  Synthetic oligonucleotide

SEQ ID NO: 486528 - DNA, 59 bp, Artificial; identical to SEQ ID NO: 16553
  Synthetic oligonucleotide

SEQ ID NO: 486529 - DNA, 60 bp, Artificial; identical to SEQ ID NO: 6011
  Synthetic oligonucleotide

SEQ ID NO: 486530 - DNA, 59 bp, Artificial; identical to SEQ ID NO: 18616
  Synthetic oligonucleotide

SEQ ID NO: 486531 - DNA, 55 bp, Artificial; identical to SEQ ID NO: 11057
  Synthetic oligonucleotide

SEQ ID NO: 486532 - DNA, 54 bp, Artificial; identical to SEQ ID NO: 19071
  Synthetic oligonucleotide

SEQ ID NO: 486533 - DNA, 60 bp, Artificial; identical to SEQ ID NO: 8468
  Synthetic oligonucleotide

SEQ ID NO: 486534 - DNA, 54 bp, Artificial; identical to SEQ ID NO: 16075
  Synthetic oligonucleotide

SEQ ID NO: 486535 - DNA, 54 bp, Artificial; identical to SEQ ID NO: 17451
  Synthetic oligonucleotide

SEQ ID NO: 486536 - DNA, 52 bp, Artificial; identical to SEQ ID NO: 15522
  Synthetic oligonucleotide

SEQ ID NO: 486537 - DNA, 56 bp, Artificial; identical to SEQ ID NO: 14675
  Synthetic oligonucleotide

SEQ ID NO: 486538 - DNA, 60 bp, Artificial; identical to SEQ ID NO: 11999
  Synthetic oligonucleotide

SEQ ID NO: 486539 - DNA, 52 bp, Artificial; identical to SEQ ID NO: 20186
  Synthetic oligonucleotide

SEQ ID NO: 486540 - DNA, 56 bp, Artificial; identical to SEQ ID NO: 18506
  Synthetic oligonucleotide

SEQ ID NO: 486541 - DNA, 57 bp, Artificial; identical to SEQ ID NO: 18044
  Synthetic oligonucleotide

SEQ ID NO: 486542 - DNA, 59 bp, Artificial; identical to SEQ ID NO: 6926
  Synthetic oligonucleotide

SEQ ID NO: 486543 - DNA, 53 bp, Artificial; identical to SEQ ID NO: 20392
  Synthetic oligonucleotide

SEQ ID NO: 486544 - DNA, 53 bp, Artificial; identical to SEQ ID NO: 17449
  Synthetic oligonucleotide

SEQ ID NO: 486545 - DNA, 55 bp, Artificial; identical to SEQ ID NO: 16196
  Synthetic oligonucleotide

SEQ ID NO: 486546 - DNA, 60 bp, Artificial; identical to SEQ ID NO: 40770
  Synthetic oligonucleotide

SEQ ID NO: 486547 - DNA, 58 bp, Artificial; identical to SEQ ID NO: 17587
  Synthetic oligonucleotide

SEQ ID NO: 486548 - DNA, 60 bp, Artificial; identical to SEQ ID NO: 11315
  Synthetic oligonucleotide

SEQ ID NO: 486549 - DNA, 58 bp, Artificial; identical to SEQ ID NO: 15946
  Synthetic oligonucleotide

SEQ ID NO: 486550 - DNA, 57 bp, Artificial; identical to SEQ ID NO: 16888
  Synthetic oligonucleotide

SEQ ID NO: 486551 - DNA, 60 bp, Artificial; identical to SEQ ID NO: 49896
  Synthetic oligonucleotide

SEQ ID NO: 486552 - DNA, 56 bp, Artificial; identical to SEQ ID NO: 17724
  Synthetic oligonucleotide

SEQ ID NO: 486553 - DNA, 57 bp, Artificial; identical to SEQ ID NO: 20163
  Synthetic oligonucleotide

SEQ ID NO: 486554 - DNA, 54 bp, Artificial; identical to SEQ ID NO: 10876
  Synthetic oligonucleotide

SEQ ID NO: 486555 - DNA, 60 bp, Artificial; identical to SEQ ID NO: 15697
  Synthetic oligonucleotide

SEQ ID NO: 486556 - DNA, 58 bp, Artificial; identical to SEQ ID NO: 16152
  Synthetic oligonucleotide

SEQ ID NO: 486557 - DNA, 57 bp, Artificial; identical to SEQ ID NO: 15908
  Synthetic oligonucleotide

SEQ ID NO: 486558 - DNA, 54 bp, Artificial; identical to SEQ ID NO: 18329
  Synthetic oligonucleotide

SEQ ID NO: 486559 - DNA, 50 bp, Artificial; identical to SEQ ID NO: 16875
  Synthetic oligonucleotide

SEQ ID NO: 486560 - DNA, 60 bp, Artificial; identical to SEQ ID NO: 12912
  Synthetic oligonucleotide

SEQ ID NO: 486561 - DNA, 49 bp, Artificial; identical to SEQ ID NO: 18212
  Synthetic oligonucleotide

SEQ ID NO: 486562 - DNA, 59 bp, Artificial; identical to SEQ ID NO: 9329
  Synthetic oligonucleotide

SEQ ID NO: 486563 - DNA, 52 bp, Artificial; identical to SEQ ID NO: 17868
  Synthetic oligonucleotide

SEQ ID NO: 486564 - DNA, 52 bp, Artificial; identical to SEQ ID NO: 20542
  Synthetic oligonucleotide

SEQ ID NO: 486565 - DNA, 55 bp, Artificial; identical to SEQ ID NO: 6833
  Synthetic oligonucleotide

SEQ ID NO: 486566 - DNA, 54 bp, Artificial; identical to SEQ ID NO: 17792
  Synthetic oligonucleotide

SEQ ID NO: 486567 - DNA, 55 bp, Artificial; identical to SEQ ID NO: 16679
  Synthetic oligonucleotide

SEQ ID NO: 486568 - DNA, 51 bp, Artificial; identical to SEQ ID NO: 15739
  Synthetic oligonucleotide

SEQ ID NO: 486569 - DNA, 54 bp, Artificial; identical to SEQ ID NO: 17817
  Synthetic oligonucleotide

SEQ ID NO: 486570 - DNA, 55 bp, Artificial; identical to SEQ ID NO: 7418
  Synthetic oligonucleotide

SEQ ID NO: 486571 - DNA, 58 bp, Artificial; identical to SEQ ID NO: 18890
  Synthetic oligonucleotide

SEQ ID NO: 486572 - DNA, 58 bp, Artificial; identical to SEQ ID NO: 8657
  Synthetic oligonucleotide

SEQ ID NO: 486573 - DNA, 56 bp, Artificial; identical to SEQ ID NO: 17403
  Synthetic oligonucleotide

SEQ ID NO: 486574 - DNA, 55 bp, Artificial; identical to SEQ ID NO: 6353
  Synthetic oligonucleotide

SEQ ID NO: 486575 - DNA, 51 bp, Artificial; identical to SEQ ID NO: 16203
  Synthetic oligonucleotide

SEQ ID NO: 486576 - DNA, 56 bp, Artificial; identical to SEQ ID NO: 18791
  Synthetic oligonucleotide

SEQ ID NO: 486577 - DNA, 50 bp, Artificial; identical to SEQ ID NO: 9370
  Synthetic oligonucleotide

SEQ ID NO: 486578 - DNA, 53 bp, Artificial; identical to SEQ ID NO: 8204
  Synthetic oligonucleotide

SEQ ID NO: 486579 - DNA, 56 bp, Artificial; identical to SEQ ID NO: 14878
  Synthetic oligonucleotide

SEQ ID NO: 486580 - DNA, 56 bp, Artificial; identical to SEQ ID NO: 15864
  Synthetic oligonucleotide

SEQ ID NO: 486581 - DNA, 53 bp, Artificial; identical to SEQ ID NO: 16206
  Synthetic oligonucleotide

SEQ ID NO: 486582 - DNA, 58 bp, Artificial; identical to SEQ ID NO: 7283
  Synthetic oligonucleotide

SEQ ID NO: 486583 - DNA, 55 bp, Artificial; identical to SEQ ID NO: 17055
  Synthetic oligonucleotide

SEQ ID NO: 486584 - DNA, 52 bp, Artificial; identical to SEQ ID NO: 11914
  Synthetic oligonucleotide

SEQ ID NO: 486585 - DNA, 55 bp, Artificial; identical to SEQ ID NO: 19923
  Synthetic oligonucleotide

SEQ ID NO: 486586 - DNA, 58 bp, Artificial; identical to SEQ ID NO: 11234
  Synthetic oligonucleotide

SEQ ID NO: 486587 - DNA, 57 bp, Artificial; identical to SEQ ID NO: 13726
  Synthetic oligonucleotide

SEQ ID NO: 486588 - DNA, 57 bp, Artificial; identical to SEQ ID NO: 18005
  Synthetic oligonucleotide

SEQ ID NO: 486589 - DNA, 55 bp, Artificial; identical to SEQ ID NO: 19244
  Synthetic oligonucleotide

SEQ ID NO: 486590 - DNA, 51 bp, Artificial; identical to SEQ ID NO: 19719
  Synthetic oligonucleotide

SEQ ID NO: 486591 - DNA, 54 bp, Artificial; identical to SEQ ID NO: 19741
  Synthetic oligonucleotide

SEQ ID NO: 486592 - DNA, 59 bp, Artificial; identical to SEQ ID NO: 17168
  Synthetic oligonucleotide

SEQ ID NO: 486593 - DNA, 60 bp, Artificial; identical to SEQ ID NO: 6074
  Synthetic oligonucleotide

SEQ ID NO: 486594 - DNA, 55 bp, Artificial; identical to SEQ ID NO: 12353
  Synthetic oligonucleotide

SEQ ID NO: 486595 - DNA, 59 bp, Artificial; identical to SEQ ID NO: 19305
  Synthetic oligonucleotide

SEQ ID NO: 486596 - DNA, 57 bp, Artificial; identical to SEQ ID NO: 19548
  Synthetic oligonucleotide

SEQ ID NO: 486597 - DNA, 57 bp, Artificial; identical to SEQ ID NO: 16941
  Synthetic oligonucleotide

SEQ ID NO: 486598 - DNA, 57 bp, Artificial; identical to SEQ ID NO: 19220
  Synthetic oligonucleotide

SEQ ID NO: 486599 - DNA, 60 bp, Artificial; identical to SEQ ID NO: 49057
  Synthetic oligonucleotide

SEQ ID NO: 486600 - DNA, 58 bp, Artificial; identical to SEQ ID NO: 19102
  Synthetic oligonucleotide

SEQ ID NO: 486601 - DNA, 50 bp, Artificial; identical to SEQ ID NO: 6831
  Synthetic oligonucleotide

SEQ ID NO: 486602 - DNA, 54 bp, Artificial; identical to SEQ ID NO: 19763
  Synthetic oligonucleotide

SEQ ID NO: 486603 - DNA, 55 bp, Artificial; identical to SEQ ID NO: 15958
  Synthetic oligonucleotide

SEQ ID NO: 486604 - DNA, 57 bp, Artificial; identical to SEQ ID NO: 14750
  Synthetic oligonucleotide

SEQ ID NO: 486605 - DNA, 59 bp, Artificial; identical to SEQ ID NO: 18603
  Synthetic oligonucleotide

SEQ ID NO: 486606 - DNA, 56 bp, Artificial; identical to SEQ ID NO: 17159
  Synthetic oligonucleotide

SEQ ID NO: 486607 - DNA, 60 bp, Artificial; identical to SEQ ID NO: 13940
  Synthetic oligonucleotide

SEQ ID NO: 486608 - DNA, 55 bp, Artificial; identical to SEQ ID NO: 5843
  Synthetic oligonucleotide

SEQ ID NO: 486609 - DNA, 60 bp, Artificial; identical to SEQ ID NO: 8980
  Synthetic oligonucleotide

SEQ ID NO: 486610 - DNA, 60 bp, Artificial; identical to SEQ ID NO: 11726
  Synthetic oligonucleotide

SEQ ID NO: 486611 - DNA, 60 bp, Artificial; identical to SEQ ID NO: 14517
  Synthetic oligonucleotide

SEQ ID NO: 486612 - DNA, 54 bp, Artificial; identical to SEQ ID NO: 11244
  Synthetic oligonucleotide

SEQ ID NO: 486613 - DNA, 60 bp, Artificial; identical to SEQ ID NO: 10924
  Synthetic oligonucleotide

SEQ ID NO: 486614 - DNA, 59 bp, Artificial; identical to SEQ ID NO: 19292
  Synthetic oligonucleotide

SEQ ID NO: 486615 - DNA, 58 bp, Artificial; identical to SEQ ID NO: 10231
  Synthetic oligonucleotide

SEQ ID NO: 486616 - DNA, 60 bp, Artificial; identical to SEQ ID NO: 12545
  Synthetic oligonucleotide

SEQ ID NO: 486617 - DNA, 55 bp, Artificial; identical to SEQ ID NO: 13302
  Synthetic oligonucleotide

SEQ ID NO: 486618 - DNA, 57 bp, Artificial; identical to SEQ ID NO: 13200
  Synthetic oligonucleotide

SEQ ID NO: 486619 - DNA, 60 bp, Artificial; identical to SEQ ID NO: 12014
  Synthetic oligonucleotide

SEQ ID NO: 486620 - DNA, 57 bp, Artificial; identical to SEQ ID NO: 8071
  Synthetic oligonucleotide

SEQ ID NO: 486621 - DNA, 60 bp, Artificial; identical to SEQ ID NO: 11150
  Synthetic oligonucleotide

SEQ ID NO: 486622 - DNA, 55 bp, Artificial; identical to SEQ ID NO: 9594
  Synthetic oligonucleotide

SEQ ID NO: 486623 - DNA, 59 bp, Artificial; identical to SEQ ID NO: 17586
  Synthetic oligonucleotide

SEQ ID NO: 486624 - DNA, 55 bp, Artificial; identical to SEQ ID NO: 12186
  Synthetic oligonucleotide

SEQ ID NO: 486625 - DNA, 60 bp, Artificial; identical to SEQ ID NO: 12851
  Synthetic oligonucleotide

SEQ ID NO: 486626 - DNA, 58 bp, Artificial; identical to SEQ ID NO: 16254
  Synthetic oligonucleotide

SEQ ID NO: 486627 - DNA, 50 bp, Artificial; identical to SEQ ID NO: 10979
  Synthetic oligonucleotide

SEQ ID NO: 486628 - DNA, 60 bp, Artificial; identical to SEQ ID NO: 10496
  Synthetic oligonucleotide

SEQ ID NO: 486629 - DNA, 60 bp, Artificial; identical to SEQ ID NO: 14456
  Synthetic oligonucleotide

SEQ ID NO: 486630 - DNA, 57 bp, Artificial; identical to SEQ ID NO: 17499
  Synthetic oligonucleotide

SEQ ID NO: 486631 - DNA, 60 bp, Artificial; identical to SEQ ID NO: 8679
  Synthetic oligonucleotide

SEQ ID NO: 486632 - DNA, 60 bp, Artificial; identical to SEQ ID NO: 8668
  Synthetic oligonucleotide

SEQ ID NO: 486633 - DNA, 60 bp, Artificial; identical to SEQ ID NO: 15776
  Synthetic oligonucleotide

SEQ ID NO: 486634 - DNA, 55 bp, Artificial; identical to SEQ ID NO: 16091
  Synthetic oligonucleotide

SEQ ID NO: 486635 - DNA, 52 bp, Artificial; identical to SEQ ID NO: 17950
  Synthetic oligonucleotide

SEQ ID NO: 486636 - DNA, 51 bp, Artificial; identical to SEQ ID NO: 13715
  Synthetic oligonucleotide

SEQ ID NO: 486637 - DNA, 60 bp, Artificial; identical to SEQ ID NO: 112633
  Synthetic oligonucleotide

SEQ ID NO: 486638 - DNA, 57 bp, Artificial; identical to SEQ ID NO: 16767
  Synthetic oligonucleotide

SEQ ID NO: 486639 - DNA, 52 bp, Artificial; identical to SEQ ID NO: 19463
  Synthetic oligonucleotide

SEQ ID NO: 486640 - DNA, 53 bp, Artificial; identical to SEQ ID NO: 19353
  Synthetic oligonucleotide

SEQ ID NO: 486641 - DNA, 53 bp, Artificial; identical to SEQ ID NO: 14526
  Synthetic oligonucleotide

SEQ ID NO: 486642 - DNA, 57 bp, Artificial; identical to SEQ ID NO: 16882
  Synthetic oligonucleotide

SEQ ID NO: 486643 - DNA, 60 bp, Artificial; identical to SEQ ID NO: 10531
  Synthetic oligonucleotide

SEQ ID NO: 486644 - DNA, 56 bp, Artificial; identical to SEQ ID NO: 18116
  Synthetic oligonucleotide

SEQ ID NO: 486645 - DNA, 58 bp, Artificial; identical to SEQ ID NO: 14439
  Synthetic oligonucleotide

SEQ ID NO: 486646 - DNA, 60 bp, Artificial; identical to SEQ ID NO: 13670
  Synthetic oligonucleotide

SEQ ID NO: 486647 - DNA, 60 bp, Artificial; identical to SEQ ID NO: 5906
  Synthetic oligonucleotide

SEQ ID NO: 486648 - DNA, 60 bp, Artificial; identical to SEQ ID NO: 8381
  Synthetic oligonucleotide

SEQ ID NO: 486649 - DNA, 58 bp, Artificial; identical to SEQ ID NO: 16510
  Synthetic oligonucleotide

SEQ ID NO: 486650 - DNA, 54 bp, Artificial; identical to SEQ ID NO: 19303
  Synthetic oligonucleotide

SEQ ID NO: 486651 - DNA, 51 bp, Artificial; identical to SEQ ID NO: 12346
  Synthetic oligonucleotide

SEQ ID NO: 486652 - DNA, 58 bp, Artificial; identical to SEQ ID NO: 18516
  Synthetic oligonucleotide

SEQ ID NO: 486653 - DNA, 55 bp, Artificial; identical to SEQ ID NO: 10412
  Synthetic oligonucleotide

SEQ ID NO: 486654 - DNA, 57 bp, Artificial; identical to SEQ ID NO: 20275
  Synthetic oligonucleotide

SEQ ID NO: 486655 - DNA, 58 bp, Artificial; identical to SEQ ID NO: 19405
  Synthetic oligonucleotide

SEQ ID NO: 486656 - DNA, 59 bp, Artificial; identical to SEQ ID NO: 16816
  Synthetic oligonucleotide

SEQ ID NO: 486657 - DNA, 54 bp, Artificial; identical to SEQ ID NO: 19387
  Synthetic oligonucleotide

SEQ ID NO: 486658 - DNA, 55 bp, Artificial; identical to SEQ ID NO: 15976
  Synthetic oligonucleotide

SEQ ID NO: 486659 - DNA, 55 bp, Artificial; identical to SEQ ID NO: 19001
  Synthetic oligonucleotide

SEQ ID NO: 486660 - DNA, 55 bp, Artificial; identical to SEQ ID NO: 20586
  Synthetic oligonucleotide

SEQ ID NO: 486661 - DNA, 55 bp, Artificial; identical to SEQ ID NO: 5738
  Synthetic oligonucleotide

SEQ ID NO: 486662 - DNA, 51 bp, Artificial; identical to SEQ ID NO: 11376
  Synthetic oligonucleotide

SEQ ID NO: 486663 - DNA, 58 bp, Artificial; identical to SEQ ID NO: 18328
  Synthetic oligonucleotide

SEQ ID NO: 486664 - DNA, 55 bp, Artificial; identical to SEQ ID NO: 19757
  Synthetic oligonucleotide

SEQ ID NO: 486665 - DNA, 60 bp, Artificial; identical to SEQ ID NO: 6903
  Synthetic oligonucleotide

SEQ ID NO: 486666 - DNA, 56 bp, Artificial; identical to SEQ ID NO: 18062
  Synthetic oligonucleotide

SEQ ID NO: 486667 - DNA, 59 bp, Artificial; identical to SEQ ID NO: 19464
  Synthetic oligonucleotide

SEQ ID NO: 486668 - DNA, 56 bp, Artificial; identical to SEQ ID NO: 19266
  Synthetic oligonucleotide

SEQ ID NO: 486669 - DNA, 57 bp, Artificial; identical to SEQ ID NO: 18423
  Synthetic oligonucleotide

SEQ ID NO: 486670 - DNA, 57 bp, Artificial; identical to SEQ ID NO: 13483
  Synthetic oligonucleotide

SEQ ID NO: 486671 - DNA, 60 bp, Artificial; identical to SEQ ID NO: 32534
  Synthetic oligonucleotide

SEQ ID NO: 486672 - DNA, 60 bp, Artificial; identical to SEQ ID NO: 7408
  Synthetic oligonucleotide

SEQ ID NO: 486673 - DNA, 60 bp, Artificial; identical to SEQ ID NO: 124077
  Synthetic oligonucleotide

SEQ ID NO: 486674 - DNA, 55 bp, Artificial; identical to SEQ ID NO: 18000
  Synthetic oligonucleotide

SEQ ID NO: 486675 - DNA, 59 bp, Artificial; identical to SEQ ID NO: 11695
  Synthetic oligonucleotide

SEQ ID NO: 486676 - DNA, 57 bp, Artificial; identical to SEQ ID NO: 11741
  Synthetic oligonucleotide

SEQ ID NO: 486677 - DNA, 60 bp, Artificial; identical to SEQ ID NO: 10551
  Synthetic oligonucleotide

SEQ ID NO: 486678 - DNA, 57 bp, Artificial; identical to SEQ ID NO: 10598
  Synthetic oligonucleotide

SEQ ID NO: 486679 - DNA, 60 bp, Artificial; identical to SEQ ID NO: 11866
  Synthetic oligonucleotide

SEQ ID NO: 486680 - DNA, 56 bp, Artificial; identical to SEQ ID NO: 19500
  Synthetic oligonucleotide

SEQ ID NO: 486681 - DNA, 57 bp, Artificial; identical to SEQ ID NO: 10460
  Synthetic oligonucleotide

SEQ ID NO: 486682 - DNA, 54 bp, Artificial; identical to SEQ ID NO: 10684
  Synthetic oligonucleotide

SEQ ID NO: 486683 - DNA, 52 bp, Artificial; identical to SEQ ID NO: 18514
  Synthetic oligonucleotide

SEQ ID NO: 486684 - DNA, 60 bp, Artificial; identical to SEQ ID NO: 8353
  Synthetic oligonucleotide

SEQ ID NO: 486685 - DNA, 60 bp, Artificial; identical to SEQ ID NO: 11114
  Synthetic oligonucleotide

SEQ ID NO: 486686 - DNA, 55 bp, Artificial; identical to SEQ ID NO: 17591
  Synthetic oligonucleotide

SEQ ID NO: 486687 - DNA, 60 bp, Artificial; identical to SEQ ID NO: 9253
  Synthetic oligonucleotide

SEQ ID NO: 486688 - DNA, 55 bp, Artificial; identical to SEQ ID NO: 6782
  Synthetic oligonucleotide

SEQ ID NO: 486689 - DNA, 58 bp, Artificial; identical to SEQ ID NO: 10361
  Synthetic oligonucleotide

SEQ ID NO: 486690 - DNA, 53 bp, Artificial; identical to SEQ ID NO: 16384
  Synthetic oligonucleotide

SEQ ID NO: 486691 - DNA, 57 bp, Artificial; identical to SEQ ID NO: 7051
  Synthetic oligonucleotide

SEQ ID NO: 486692 - DNA, 54 bp, Artificial; identical to SEQ ID NO: 8072
  Synthetic oligonucleotide

SEQ ID NO: 486693 - DNA, 50 bp, Artificial; identical to SEQ ID NO: 15286
  Synthetic oligonucleotide

SEQ ID NO: 486694 - DNA, 59 bp, Artificial; identical to SEQ ID NO: 18345
  Synthetic oligonucleotide

SEQ ID NO: 486695 - DNA, 59 bp, Artificial; identical to SEQ ID NO: 20237
  Synthetic oligonucleotide

SEQ ID NO: 486696 - DNA, 50 bp, Artificial; identical to SEQ ID NO: 11025
  Synthetic oligonucleotide

SEQ ID NO: 486697 - DNA, 55 bp, Artificial; identical to SEQ ID NO: 12661
  Synthetic oligonucleotide

SEQ ID NO: 486698 - DNA, 58 bp, Artificial; identical to SEQ ID NO: 19478
  Synthetic oligonucleotide

SEQ ID NO: 486699 - DNA, 51 bp, Artificial; identical to SEQ ID NO: 12103
  Synthetic oligonucleotide

SEQ ID NO: 486700 - DNA, 60 bp, Artificial; identical to SEQ ID NO: 8212
  Synthetic oligonucleotide

SEQ ID NO: 486701 - DNA, 60 bp, Artificial; identical to SEQ ID NO: 21843
  Synthetic oligonucleotide

SEQ ID NO: 486702 - DNA, 59 bp, Artificial; identical to SEQ ID NO: 18636
  Synthetic oligonucleotide

SEQ ID NO: 486703 - DNA, 60 bp, Artificial; identical to SEQ ID NO: 8349
  Synthetic oligonucleotide

SEQ ID NO: 486704 - DNA, 60 bp, Artificial; identical to SEQ ID NO: 15836
  Synthetic oligonucleotide

SEQ ID NO: 486705 - DNA, 58 bp, Artificial; identical to SEQ ID NO: 7067
  Synthetic oligonucleotide

SEQ ID NO: 486706 - DNA, 60 bp, Artificial; identical to SEQ ID NO: 7081
  Synthetic oligonucleotide

SEQ ID NO: 486707 - DNA, 59 bp, Artificial; identical to SEQ ID NO: 19416
  Synthetic oligonucleotide

SEQ ID NO: 486708 - DNA, 56 bp, Artificial; identical to SEQ ID NO: 19954
  Synthetic oligonucleotide

SEQ ID NO: 486709 - DNA, 55 bp, Artificial; identical to SEQ ID NO: 7736
  Synthetic oligonucleotide

SEQ ID NO: 486710 - DNA, 60 bp, Artificial; identical to SEQ ID NO: 15549
  Synthetic oligonucleotide

SEQ ID NO: 486711 - DNA, 56 bp, Artificial; identical to SEQ ID NO: 18557
  Synthetic oligonucleotide

SEQ ID NO: 486712 - DNA, 58 bp, Artificial; identical to SEQ ID NO: 19481
  Synthetic oligonucleotide

SEQ ID NO: 486713 - DNA, 55 bp, Artificial; identical to SEQ ID NO: 18134
  Synthetic oligonucleotide

SEQ ID NO: 486714 - DNA, 57 bp, Artificial; identical to SEQ ID NO: 18566
  Synthetic oligonucleotide

SEQ ID NO: 486715 - DNA, 58 bp, Artificial; identical to SEQ ID NO: 17191
  Synthetic oligonucleotide

SEQ ID NO: 486716 - DNA, 58 bp, Artificial; identical to SEQ ID NO: 17814
  Synthetic oligonucleotide

SEQ ID NO: 486717 - DNA, 60 bp, Artificial; identical to SEQ ID NO: 6898
  Synthetic oligonucleotide

SEQ ID NO: 486718 - DNA, 53 bp, Artificial; identical to SEQ ID NO: 19385
  Synthetic oligonucleotide

SEQ ID NO: 486719 - DNA, 53 bp, Artificial; identical to SEQ ID NO: 17958
  Synthetic oligonucleotide

SEQ ID NO: 486720 - DNA, 60 bp, Artificial; identical to SEQ ID NO: 10693
  Synthetic oligonucleotide

SEQ ID NO: 486721 - DNA, 60 bp, Artificial; identical to SEQ ID NO: 11649
  Synthetic oligonucleotide

SEQ ID NO: 486722 - DNA, 58 bp, Artificial; identical to SEQ ID NO: 18374
  Synthetic oligonucleotide

SEQ ID NO: 486723 - DNA, 53 bp, Artificial; identical to SEQ ID NO: 18037
  Synthetic oligonucleotide

SEQ ID NO: 486724 - DNA, 53 bp, Artificial; identical to SEQ ID NO: 6374
  Synthetic oligonucleotide

SEQ ID NO: 486725 - DNA, 60 bp, Artificial; identical to SEQ ID NO: 15673
  Synthetic oligonucleotide

SEQ ID NO: 486726 - DNA, 52 bp, Artificial; identical to SEQ ID NO: 9677
  Synthetic oligonucleotide

SEQ ID NO: 486727 - DNA, 58 bp, Artificial; identical to SEQ ID NO: 16776
  Synthetic oligonucleotide

SEQ ID NO: 486728 - DNA, 53 bp, Artificial; identical to SEQ ID NO: 16232
  Synthetic oligonucleotide

SEQ ID NO: 486729 - DNA, 57 bp, Artificial; identical to SEQ ID NO: 16620
  Synthetic oligonucleotide

SEQ ID NO: 486730 - DNA, 54 bp, Artificial; identical to SEQ ID NO: 17344
  Synthetic oligonucleotide

SEQ ID NO: 486731 - DNA, 59 bp, Artificial; identical to SEQ ID NO: 17652
  Synthetic oligonucleotide

SEQ ID NO: 486732 - DNA, 55 bp, Artificial; identical to SEQ ID NO: 16735
  Synthetic oligonucleotide

SEQ ID NO: 486733 - DNA, 59 bp, Artificial; identical to SEQ ID NO: 18237
  Synthetic oligonucleotide

SEQ ID NO: 486734 - DNA, 55 bp, Artificial; identical to SEQ ID NO: 18730
  Synthetic oligonucleotide

SEQ ID NO: 486735 - DNA, 58 bp, Artificial; identical to SEQ ID NO: 8324
  Synthetic oligonucleotide

SEQ ID NO: 486736 - DNA, 55 bp, Artificial; identical to SEQ ID NO: 11076
  Synthetic oligonucleotide

SEQ ID NO: 486737 - DNA, 60 bp, Artificial; identical to SEQ ID NO: 38292
  Synthetic oligonucleotide

SEQ ID NO: 486738 - DNA, 58 bp, Artificial; identical to SEQ ID NO: 19860
  Synthetic oligonucleotide

SEQ ID NO: 486739 - DNA, 60 bp, Artificial; identical to SEQ ID NO: 120465
  Synthetic oligonucleotide

SEQ ID NO: 486740 - DNA, 59 bp, Artificial; identical to SEQ ID NO: 17338
  Synthetic oligonucleotide

SEQ ID NO: 486741 - DNA, 55 bp, Artificial; identical to SEQ ID NO: 19813
  Synthetic oligonucleotide

SEQ ID NO: 486742 - DNA, 58 bp, Artificial; identical to SEQ ID NO: 15460
  Synthetic oligonucleotide

SEQ ID NO: 486743 - DNA, 55 bp, Artificial; identical to SEQ ID NO: 19460
  Synthetic oligonucleotide

SEQ ID NO: 486744 - DNA, 60 bp, Artificial; identical to SEQ ID NO: 11064
  Synthetic oligonucleotide

SEQ ID NO: 486745 - DNA, 60 bp, Artificial; identical to SEQ ID NO: 10953
  Synthetic oligonucleotide

SEQ ID NO: 486746 - DNA, 53 bp, Artificial; identical to SEQ ID NO: 10229
  Synthetic oligonucleotide

SEQ ID NO: 486747 - DNA, 57 bp, Artificial; identical to SEQ ID NO: 19838
  Synthetic oligonucleotide

SEQ ID NO: 486748 - DNA, 52 bp, Artificial; identical to SEQ ID NO: 12791
  Synthetic oligonucleotide

SEQ ID NO: 486749 - DNA, 53 bp, Artificial; identical to SEQ ID NO: 20561
  Synthetic oligonucleotide

SEQ ID NO: 486750 - DNA, 60 bp, Artificial; identical to SEQ ID NO: 12713
  Synthetic oligonucleotide

SEQ ID NO: 486751 - DNA, 60 bp, Artificial; identical to SEQ ID NO: 9712
  Synthetic oligonucleotide

SEQ ID NO: 486752 - DNA, 59 bp, Artificial; identical to SEQ ID NO: 17804
  Synthetic oligonucleotide

SEQ ID NO: 486753 - DNA, 53 bp, Artificial; identical to SEQ ID NO: 19869
  Synthetic oligonucleotide

SEQ ID NO: 486754 - DNA, 51 bp, Artificial; identical to SEQ ID NO: 7044
  Synthetic oligonucleotide

SEQ ID NO: 486755 - DNA, 60 bp, Artificial; identical to SEQ ID NO: 15343
  Synthetic oligonucleotide

SEQ ID NO: 486756 - DNA, 60 bp, Artificial; identical to SEQ ID NO: 122147
  Synthetic oligonucleotide

SEQ ID NO: 486757 - DNA, 52 bp, Artificial; identical to SEQ ID NO: 8218
  Synthetic oligonucleotide

SEQ ID NO: 486758 - DNA, 54 bp, Artificial; identical to SEQ ID NO: 16980
  Synthetic oligonucleotide

SEQ ID NO: 486759 - DNA, 56 bp, Artificial; identical to SEQ ID NO: 17117
  Synthetic oligonucleotide

SEQ ID NO: 486760 - DNA, 57 bp, Artificial; identical to SEQ ID NO: 16951
  Synthetic oligonucleotide

SEQ ID NO: 486761 - DNA, 60 bp, Artificial; identical to SEQ ID NO: 9437
  Synthetic oligonucleotide

SEQ ID NO: 486762 - DNA, 55 bp, Artificial; identical to SEQ ID NO: 14153
  Synthetic oligonucleotide

SEQ ID NO: 486763 - DNA, 56 bp, Artificial; identical to SEQ ID NO: 11603
  Synthetic oligonucleotide

SEQ ID NO: 486764 - DNA, 60 bp, Artificial; identical to SEQ ID NO: 10878
  Synthetic oligonucleotide

SEQ ID NO: 486765 - DNA, 53 bp, Artificial; identical to SEQ ID NO: 18127
  Synthetic oligonucleotide

SEQ ID NO: 486766 - DNA, 60 bp, Artificial; identical to SEQ ID NO: 116055
  Synthetic oligonucleotide

SEQ ID NO: 486767 - DNA, 53 bp, Artificial; identical to SEQ ID NO: 19211
  Synthetic oligonucleotide

SEQ ID NO: 486768 - DNA, 60 bp, Artificial; identical to SEQ ID NO: 8164
  Synthetic oligonucleotide

SEQ ID NO: 486769 - DNA, 54 bp, Artificial; identical to SEQ ID NO: 9421
  Synthetic oligonucleotide

SEQ ID NO: 486770 - DNA, 55 bp, Artificial; identical to SEQ ID NO: 19900
  Synthetic oligonucleotide

SEQ ID NO: 486771 - DNA, 55 bp, Artificial; identical to SEQ ID NO: 20202
  Synthetic oligonucleotide

SEQ ID NO: 486772 - DNA, 55 bp, Artificial; identical to SEQ ID NO: 11436
  Synthetic oligonucleotide

SEQ ID NO: 486773 - DNA, 60 bp, Artificial; identical to SEQ ID NO: 12222
  Synthetic oligonucleotide

SEQ ID NO: 486774 - DNA, 60 bp, Artificial; identical to SEQ ID NO: 9271
  Synthetic oligonucleotide

SEQ ID NO: 486775 - DNA, 57 bp, Artificial; identical to SEQ ID NO: 17951
  Synthetic oligonucleotide

SEQ ID NO: 486776 - DNA, 60 bp, Artificial; identical to SEQ ID NO: 6031
  Synthetic oligonucleotide

SEQ ID NO: 486777 - DNA, 60 bp, Artificial; identical to SEQ ID NO: 10620
  Synthetic oligonucleotide

SEQ ID NO: 486778 - DNA, 60 bp, Artificial; identical to SEQ ID NO: 15764
  Synthetic oligonucleotide

SEQ ID NO: 486779 - DNA, 58 bp, Artificial; identical to SEQ ID NO: 7852
  Synthetic oligonucleotide

SEQ ID NO: 486780 - DNA, 60 bp, Artificial; identical to SEQ ID NO: 14654
  Synthetic oligonucleotide

SEQ ID NO: 486781 - DNA, 59 bp, Artificial; identical to SEQ ID NO: 16153
  Synthetic oligonucleotide

SEQ ID NO: 486782 - DNA, 57 bp, Artificial; identical to SEQ ID NO: 13643
  Synthetic oligonucleotide

SEQ ID NO: 486783 - DNA, 58 bp, Artificial; identical to SEQ ID NO: 18462
  Synthetic oligonucleotide

SEQ ID NO: 486784 - DNA, 60 bp, Artificial; identical to SEQ ID NO: 8086
  Synthetic oligonucleotide

SEQ ID NO: 486785 - DNA, 55 bp, Artificial; identical to SEQ ID NO: 18222
  Synthetic oligonucleotide

SEQ ID NO: 486786 - DNA, 60 bp, Artificial; identical to SEQ ID NO: 13042
  Synthetic oligonucleotide

SEQ ID NO: 486787 - DNA, 60 bp, Artificial; identical to SEQ ID NO: 14903
  Synthetic oligonucleotide

SEQ ID NO: 486788 - DNA, 52 bp, Artificial; identical to SEQ ID NO: 17753
  Synthetic oligonucleotide

SEQ ID NO: 486789 - DNA, 60 bp, Artificial; identical to SEQ ID NO: 54935
  Synthetic oligonucleotide

SEQ ID NO: 486790 - DNA, 60 bp, Artificial; identical to SEQ ID NO: 10826
  Synthetic oligonucleotide

SEQ ID NO: 486791 - DNA, 58 bp, Artificial; identical to SEQ ID NO: 17513
  Synthetic oligonucleotide

SEQ ID NO: 486792 - DNA, 60 bp, Artificial; identical to SEQ ID NO: 5866
  Synthetic oligonucleotide

SEQ ID NO: 486793 - DNA, 60 bp, Artificial; identical to SEQ ID NO: 97370
  Synthetic oligonucleotide

SEQ ID NO: 486794 - DNA, 60 bp, Artificial; identical to SEQ ID NO: 9545
  Synthetic oligonucleotide

SEQ ID NO: 486795 - DNA, 60 bp, Artificial; identical to SEQ ID NO: 13706
  Synthetic oligonucleotide

SEQ ID NO: 486796 - DNA, 60 bp, Artificial; identical to SEQ ID NO: 34576
  Synthetic oligonucleotide

SEQ ID NO: 486797 - DNA, 60 bp, Artificial; identical to SEQ ID NO: 12057
  Synthetic oligonucleotide

SEQ ID NO: 486798 - DNA, 58 bp, Artificial; identical to SEQ ID NO: 18330
  Synthetic oligonucleotide

SEQ ID NO: 486799 - DNA, 57 bp, Artificial; identical to SEQ ID NO: 10453
  Synthetic oligonucleotide

SEQ ID NO: 486800 - DNA, 60 bp, Artificial; identical to SEQ ID NO: 14473
  Synthetic oligonucleotide

SEQ ID NO: 486801 - DNA, 55 bp, Artificial; identical to SEQ ID NO: 18606
  Synthetic oligonucleotide

SEQ ID NO: 486802 - DNA, 55 bp, Artificial; identical to SEQ ID NO: 17566
  Synthetic oligonucleotide

SEQ ID NO: 486803 - DNA, 57 bp, Artificial; identical to SEQ ID NO: 18373
  Synthetic oligonucleotide

SEQ ID NO: 486804 - DNA, 58 bp, Artificial; identical to SEQ ID NO: 18981
  Synthetic oligonucleotide

SEQ ID NO: 486805 - DNA, 56 bp, Artificial; identical to SEQ ID NO: 17054
  Synthetic oligonucleotide

SEQ ID NO: 486806 - DNA, 58 bp, Artificial; identical to SEQ ID NO: 9730
  Synthetic oligonucleotide

SEQ ID NO: 486807 - DNA, 59 bp, Artificial; identical to SEQ ID NO: 19040
  Synthetic oligonucleotide

SEQ ID NO: 486808 - DNA, 59 bp, Artificial; identical to SEQ ID NO: 20475
  Synthetic oligonucleotide

SEQ ID NO: 486809 - DNA, 60 bp, Artificial; identical to SEQ ID NO: 6973
  Synthetic oligonucleotide

SEQ ID NO: 486810 - DNA, 60 bp, Artificial; identical to SEQ ID NO: 9647
  Synthetic oligonucleotide

SEQ ID NO: 486811 - DNA, 60 bp, Artificial; identical to SEQ ID NO: 110729
  Synthetic oligonucleotide

SEQ ID NO: 486812 - DNA, 58 bp, Artificial; identical to SEQ ID NO: 17051
  Synthetic oligonucleotide

SEQ ID NO: 486813 - DNA, 54 bp, Artificial; identical to SEQ ID NO: 17284
  Synthetic oligonucleotide

SEQ ID NO: 486814 - DNA, 60 bp, Artificial; identical to SEQ ID NO: 10585
  Synthetic oligonucleotide

SEQ ID NO: 486815 - DNA, 55 bp, Artificial; identical to SEQ ID NO: 6496
  Synthetic oligonucleotide

SEQ ID NO: 486816 - DNA, 53 bp, Artificial; identical to SEQ ID NO: 12425
  Synthetic oligonucleotide

SEQ ID NO: 486817 - DNA, 52 bp, Artificial; identical to SEQ ID NO: 15167
  Synthetic oligonucleotide

SEQ ID NO: 486818 - DNA, 60 bp, Artificial; identical to SEQ ID NO: 6918
  Synthetic oligonucleotide

SEQ ID NO: 486819 - DNA, 60 bp, Artificial; identical to SEQ ID NO: 54399
  Synthetic oligonucleotide

SEQ ID NO: 486820 - DNA, 60 bp, Artificial; identical to SEQ ID NO: 76617
  Synthetic oligonucleotide

SEQ ID NO: 486821 - DNA, 60 bp, Artificial; identical to SEQ ID NO: 80935
  Synthetic oligonucleotide

SEQ ID NO: 486822 - DNA, 60 bp, Artificial; identical to SEQ ID NO: 82824
  Synthetic oligonucleotide

SEQ ID NO: 486823 - DNA, 60 bp, Artificial; identical to SEQ ID NO: 66593
  Synthetic oligonucleotide

SEQ ID NO: 486824 - DNA, 60 bp, Artificial; identical to SEQ ID NO: 104676
  Synthetic oligonucleotide

SEQ ID NO: 486825 - DNA, 60 bp, Artificial; identical to SEQ ID NO: 10567
  Synthetic oligonucleotide

SEQ ID NO: 486826 - DNA, 59 bp, Artificial; identical to SEQ ID NO: 16103
  Synthetic oligonucleotide

SEQ ID NO: 486827 - DNA, 59 bp, Artificial; identical to SEQ ID NO: 365
  Synthetic oligonucleotide

SEQ ID NO: 486828 - DNA, 57 bp, Artificial; identical to SEQ ID NO: 7305
  Synthetic oligonucleotide

SEQ ID NO: 486829 - DNA, 56 bp, Artificial; identical to SEQ ID NO: 20456
  Synthetic oligonucleotide

SEQ ID NO: 486830 - DNA, 55 bp, Artificial; identical to SEQ ID NO: 10723
  Synthetic oligonucleotide

SEQ ID NO: 486831 - DNA, 57 bp, Artificial; identical to SEQ ID NO: 18018
  Synthetic oligonucleotide

SEQ ID NO: 486832 - DNA, 53 bp, Artificial; identical to SEQ ID NO: 10666
  Synthetic oligonucleotide

SEQ ID NO: 486833 - DNA, 59 bp, Artificial; identical to SEQ ID NO: 10659
  Synthetic oligonucleotide

SEQ ID NO: 486834 - DNA, 60 bp, Artificial; identical to SEQ ID NO: 10406
  Synthetic oligonucleotide

SEQ ID NO: 486835 - DNA, 60 bp, Artificial; identical to SEQ ID NO: 13569
  Synthetic oligonucleotide

SEQ ID NO: 486836 - DNA, 53 bp, Artificial; identical to SEQ ID NO: 17956
  Synthetic oligonucleotide

SEQ ID NO: 486837 - DNA, 60 bp, Artificial; identical to SEQ ID NO: 10793
  Synthetic oligonucleotide

SEQ ID NO: 486838 - DNA, 60 bp, Artificial; identical to SEQ ID NO: 7779
  Synthetic oligonucleotide

SEQ ID NO: 486839 - DNA, 60 bp, Artificial; identical to SEQ ID NO: 14081
  Synthetic oligonucleotide

SEQ ID NO: 486840 - DNA, 56 bp, Artificial; identical to SEQ ID NO: 19910
  Synthetic oligonucleotide

SEQ ID NO: 486841 - DNA, 60 bp, Artificial; identical to SEQ ID NO: 13160
  Synthetic oligonucleotide

SEQ ID NO: 486842 - DNA, 55 bp, Artificial; identical to SEQ ID NO: 12431
  Synthetic oligonucleotide

SEQ ID NO: 486843 - DNA, 60 bp, Artificial; identical to SEQ ID NO: 7510
  Synthetic oligonucleotide

SEQ ID NO: 486844 - DNA, 58 bp, Artificial; identical to SEQ ID NO: 16631
  Synthetic oligonucleotide

SEQ ID NO: 486845 - DNA, 58 bp, Artificial; identical to SEQ ID NO: 19590
  Synthetic oligonucleotide

SEQ ID NO: 486846 - DNA, 51 bp, Artificial; identical to SEQ ID NO: 65
  Synthetic oligonucleotide

SEQ ID NO: 486847 - DNA, 57 bp, Artificial; identical to SEQ ID NO: 17487
  Synthetic oligonucleotide

SEQ ID NO: 486848 - DNA, 59 bp, Artificial; identical to SEQ ID NO: 74
  Synthetic oligonucleotide

SEQ ID NO: 486849 - DNA, 57 bp, Artificial; identical to SEQ ID NO: 17696
  Synthetic oligonucleotide

SEQ ID NO: 486850 - DNA, 60 bp, Artificial; identical to SEQ ID NO: 12395
  Synthetic oligonucleotide

SEQ ID NO: 486851 - DNA, 58 bp, Artificial; identical to SEQ ID NO: 20399
  Synthetic oligonucleotide

SEQ ID NO: 486852 - DNA, 55 bp, Artificial; identical to SEQ ID NO: 11554
  Synthetic oligonucleotide

SEQ ID NO: 486853 - DNA, 58 bp, Artificial; identical to SEQ ID NO: 17655
  Synthetic oligonucleotide

SEQ ID NO: 486854 - DNA, 60 bp, Artificial; identical to SEQ ID NO: 8475
  Synthetic oligonucleotide

SEQ ID NO: 486855 - DNA, 60 bp, Artificial; identical to SEQ ID NO: 8460
  Synthetic oligonucleotide

SEQ ID NO: 486856 - DNA, 60 bp, Artificial; identical to SEQ ID NO: 10576
  Synthetic oligonucleotide

SEQ ID NO: 486857 - DNA, 60 bp, Artificial; identical to SEQ ID NO: 15477
  Synthetic oligonucleotide

SEQ ID NO: 486858 - DNA, 60 bp, Artificial; identical to SEQ ID NO: 51531
  Synthetic oligonucleotide

SEQ ID NO: 486859 - DNA, 59 bp, Artificial; identical to SEQ ID NO: 19448
  Synthetic oligonucleotide

SEQ ID NO: 486860 - DNA, 58 bp, Artificial; identical to SEQ ID NO: 10549
  Synthetic oligonucleotide

SEQ ID NO: 486861 - DNA, 60 bp, Artificial; identical to SEQ ID NO: 12124
  Synthetic oligonucleotide

SEQ ID NO: 486862 - DNA, 60 bp, Artificial; identical to SEQ ID NO: 120083
  Synthetic oligonucleotide

SEQ ID NO: 486863 - DNA, 60 bp, Artificial; identical to SEQ ID NO: 12894
  Synthetic oligonucleotide

SEQ ID NO: 486864 - DNA, 60 bp, Artificial; identical to SEQ ID NO: 7269
  Synthetic oligonucleotide

SEQ ID NO: 486865 - DNA, 55 bp, Artificial; identical to SEQ ID NO: 6168
  Synthetic oligonucleotide

SEQ ID NO: 486866 - DNA, 54 bp, Artificial; identical to SEQ ID NO: 18030
  Synthetic oligonucleotide

SEQ ID NO: 486867 - DNA, 53 bp, Artificial; identical to SEQ ID NO: 11986
  Synthetic oligonucleotide

SEQ ID NO: 486868 - DNA, 52 bp, Artificial; identical to SEQ ID NO: 15949
  Synthetic oligonucleotide

SEQ ID NO: 486869 - DNA, 60 bp, Artificial; identical to SEQ ID NO: 13026
  Synthetic oligonucleotide

SEQ ID NO: 486870 - DNA, 60 bp, Artificial; identical to SEQ ID NO: 8625
  Synthetic oligonucleotide

SEQ ID NO: 486871 - DNA, 60 bp, Artificial; identical to SEQ ID NO: 12828
  Synthetic oligonucleotide

SEQ ID NO: 486872 - DNA, 60 bp, Artificial; identical to SEQ ID NO: 12896
  Synthetic oligonucleotide

SEQ ID NO: 486873 - DNA, 60 bp, Artificial; identical to SEQ ID NO: 9778
  Synthetic oligonucleotide

SEQ ID NO: 486874 - DNA, 56 bp, Artificial; identical to SEQ ID NO: 7085
  Synthetic oligonucleotide

SEQ ID NO: 486875 - DNA, 60 bp, Artificial; identical to SEQ ID NO: 12285
  Synthetic oligonucleotide

SEQ ID NO: 486876 - DNA, 60 bp, Artificial; identical to SEQ ID NO: 8019
  Synthetic oligonucleotide

SEQ ID NO: 486877 - DNA, 52 bp, Artificial; identical to SEQ ID NO: 17089
  Synthetic oligonucleotide

SEQ ID NO: 486878 - DNA, 60 bp, Artificial; identical to SEQ ID NO: 10345
  Synthetic oligonucleotide

SEQ ID NO: 486879 - DNA, 59 bp, Artificial; identical to SEQ ID NO: 18586
  Synthetic oligonucleotide

SEQ ID NO: 486880 - DNA, 52 bp, Artificial; identical to SEQ ID NO: 16238
  Synthetic oligonucleotide

SEQ ID NO: 486881 - DNA, 58 bp, Artificial; identical to SEQ ID NO: 16886
  Synthetic oligonucleotide

SEQ ID NO: 486882 - DNA, 60 bp, Artificial; identical to SEQ ID NO: 11642
  Synthetic oligonucleotide

SEQ ID NO: 486883 - DNA, 55 bp, Artificial; identical to SEQ ID NO: 12115
  Synthetic oligonucleotide

SEQ ID NO: 486884 - DNA, 58 bp, Artificial; identical to SEQ ID NO: 20517
  Synthetic oligonucleotide

SEQ ID NO: 486885 - DNA, 52 bp, Artificial; identical to SEQ ID NO: 18386
  Synthetic oligonucleotide

SEQ ID NO: 486886 - DNA, 58 bp, Artificial; identical to SEQ ID NO: 8280
  Synthetic oligonucleotide

SEQ ID NO: 486887 - DNA, 57 bp, Artificial; identical to SEQ ID NO: 19873
  Synthetic oligonucleotide

SEQ ID NO: 486888 - DNA, 59 bp, Artificial; identical to SEQ ID NO: 19012
  Synthetic oligonucleotide

SEQ ID NO: 486889 - DNA, 52 bp, Artificial; identical to SEQ ID NO: 12244
  Synthetic oligonucleotide

SEQ ID NO: 486890 - DNA, 58 bp, Artificial; identical to SEQ ID NO: 16842
  Synthetic oligonucleotide

SEQ ID NO: 486891 - DNA, 55 bp, Artificial; identical to SEQ ID NO: 17648
  Synthetic oligonucleotide

SEQ ID NO: 486892 - DNA, 54 bp, Artificial; identical to SEQ ID NO: 19691
  Synthetic oligonucleotide

SEQ ID NO: 486893 - DNA, 60 bp, Artificial; identical to SEQ ID NO: 116554
  Synthetic oligonucleotide

SEQ ID NO: 486894 - DNA, 54 bp, Artificial; identical to SEQ ID NO: 18934
  Synthetic oligonucleotide

SEQ ID NO: 486895 - DNA, 53 bp, Artificial; identical to SEQ ID NO: 17149
  Synthetic oligonucleotide

SEQ ID NO: 486896 - DNA, 57 bp, Artificial; identical to SEQ ID NO: 19935
  Synthetic oligonucleotide

SEQ ID NO: 486897 - DNA, 55 bp, Artificial; identical to SEQ ID NO: 17483
  Synthetic oligonucleotide

SEQ ID NO: 486898 - DNA, 57 bp, Artificial; identical to SEQ ID NO: 18624
  Synthetic oligonucleotide

SEQ ID NO: 486899 - DNA, 60 bp, Artificial; identical to SEQ ID NO: 6296
  Synthetic oligonucleotide

SEQ ID NO: 486900 - DNA, 55 bp, Artificial; identical to SEQ ID NO: 18948
  Synthetic oligonucleotide

SEQ ID NO: 486901 - DNA, 55 bp, Artificial; identical to SEQ ID NO: 14900
  Synthetic oligonucleotide

SEQ ID NO: 486902 - DNA, 59 bp, Artificial; identical to SEQ ID NO: 7565
  Synthetic oligonucleotide

SEQ ID NO: 486903 - DNA, 55 bp, Artificial; identical to SEQ ID NO: 14677
  Synthetic oligonucleotide

SEQ ID NO: 486904 - DNA, 55 bp, Artificial; identical to SEQ ID NO: 6057
  Synthetic oligonucleotide

SEQ ID NO: 486905 - DNA, 56 bp, Artificial; identical to SEQ ID NO: 225
  Synthetic oligonucleotide

SEQ ID NO: 486906 - DNA, 55 bp, Artificial; identical to SEQ ID NO: 16057
  Synthetic oligonucleotide

SEQ ID NO: 486907 - DNA, 60 bp, Artificial; identical to SEQ ID NO: 14630
  Synthetic oligonucleotide

SEQ ID NO: 486908 - DNA, 60 bp, Artificial; identical to SEQ ID NO: 23812
  Synthetic oligonucleotide

SEQ ID NO: 486909 - DNA, 60 bp, Artificial; identical to SEQ ID NO: 8364
  Synthetic oligonucleotide

SEQ ID NO: 486910 - DNA, 51 bp, Artificial; identical to SEQ ID NO: 11992
  Synthetic oligonucleotide

SEQ ID NO: 486911 - DNA, 56 bp, Artificial; identical to SEQ ID NO: 19076
  Synthetic oligonucleotide

SEQ ID NO: 486912 - DNA, 60 bp, Artificial; identical to SEQ ID NO: 6062
  Synthetic oligonucleotide

SEQ ID NO: 486913 - DNA, 58 bp, Artificial; identical to SEQ ID NO: 18129
  Synthetic oligonucleotide

SEQ ID NO: 486914 - DNA, 58 bp, Artificial; identical to SEQ ID NO: 16595
  Synthetic oligonucleotide

SEQ ID NO: 486915 - DNA, 58 bp, Artificial; identical to SEQ ID NO: 10760
  Synthetic oligonucleotide

SEQ ID NO: 486916 - DNA, 55 bp, Artificial; identical to SEQ ID NO: 8150
  Synthetic oligonucleotide

SEQ ID NO: 486917 - DNA, 56 bp, Artificial; identical to SEQ ID NO: 10978
  Synthetic oligonucleotide

SEQ ID NO: 486918 - DNA, 51 bp, Artificial; identical to SEQ ID NO: 12099
  Synthetic oligonucleotide

SEQ ID NO: 486919 - DNA, 60 bp, Artificial; identical to SEQ ID NO: 7370
  Synthetic oligonucleotide

SEQ ID NO: 486920 - DNA, 55 bp, Artificial; identical to SEQ ID NO: 11578
  Synthetic oligonucleotide

SEQ ID NO: 486921 - DNA, 58 bp, Artificial; identical to SEQ ID NO: 19314
  Synthetic oligonucleotide

SEQ ID NO: 486922 - DNA, 56 bp, Artificial; identical to SEQ ID NO: 18287
  Synthetic oligonucleotide

SEQ ID NO: 486923 - DNA, 55 bp, Artificial; identical to SEQ ID NO: 16018
  Synthetic oligonucleotide

SEQ ID NO: 486924 - DNA, 58 bp, Artificial; identical to SEQ ID NO: 20344
  Synthetic oligonucleotide

SEQ ID NO: 486925 - DNA, 55 bp, Artificial; identical to SEQ ID NO: 18033
  Synthetic oligonucleotide

SEQ ID NO: 486926 - DNA, 59 bp, Artificial; identical to SEQ ID NO: 10809
  Synthetic oligonucleotide

SEQ ID NO: 486927 - DNA, 55 bp, Artificial; identical to SEQ ID NO: 8005
  Synthetic oligonucleotide

SEQ ID NO: 486928 - DNA, 57 bp, Artificial; identical to SEQ ID NO: 16520
  Synthetic oligonucleotide

SEQ ID NO: 486929 - DNA, 59 bp, Artificial; identical to SEQ ID NO: 16148
  Synthetic oligonucleotide

SEQ ID NO: 486930 - DNA, 55 bp, Artificial; identical to SEQ ID NO: 6405
  Synthetic oligonucleotide

SEQ ID NO: 486931 - DNA, 58 bp, Artificial; identical to SEQ ID NO: 18904
  Synthetic oligonucleotide

SEQ ID NO: 486932 - DNA, 59 bp, Artificial; identical to SEQ ID NO: 18993
  Synthetic oligonucleotide

SEQ ID NO: 486933 - DNA, 60 bp, Artificial; identical to SEQ ID NO: 14825
  Synthetic oligonucleotide

SEQ ID NO: 486934 - DNA, 50 bp, Artificial; identical to SEQ ID NO: 16960
  Synthetic oligonucleotide

SEQ ID NO: 486935 - DNA, 60 bp, Artificial; identical to SEQ ID NO: 11129
  Synthetic oligonucleotide

SEQ ID NO: 486936 - DNA, 54 bp, Artificial; identical to SEQ ID NO: 12250
  Synthetic oligonucleotide

SEQ ID NO: 486937 - DNA, 55 bp, Artificial; identical to SEQ ID NO: 16437
  Synthetic oligonucleotide

SEQ ID NO: 486938 - DNA, 56 bp, Artificial; identical to SEQ ID NO: 18052
  Synthetic oligonucleotide

SEQ ID NO: 486939 - DNA, 59 bp, Artificial; identical to SEQ ID NO: 20533
  Synthetic oligonucleotide

SEQ ID NO: 486940 - DNA, 55 bp, Artificial; identical to SEQ ID NO: 9159
  Synthetic oligonucleotide

SEQ ID NO: 486941 - DNA, 60 bp, Artificial; identical to SEQ ID NO: 6954
  Synthetic oligonucleotide

SEQ ID NO: 486942 - DNA, 55 bp, Artificial; identical to SEQ ID NO: 13899
  Synthetic oligonucleotide

SEQ ID NO: 486943 - DNA, 52 bp, Artificial; identical to SEQ ID NO: 8069
  Synthetic oligonucleotide

SEQ ID NO: 486944 - DNA, 60 bp, Artificial; identical to SEQ ID NO: 7703
  Synthetic oligonucleotide

SEQ ID NO: 486945 - DNA, 60 bp, Artificial; identical to SEQ ID NO: 9824
  Synthetic oligonucleotide

SEQ ID NO: 486946 - DNA, 54 bp, Artificial; identical to SEQ ID NO: 19605
  Synthetic oligonucleotide

SEQ ID NO: 486947 - DNA, 56 bp, Artificial; identical to SEQ ID NO: 18422
  Synthetic oligonucleotide

SEQ ID NO: 486948 - DNA, 55 bp, Artificial; identical to SEQ ID NO: 15431
  Synthetic oligonucleotide

SEQ ID NO: 486949 - DNA, 57 bp, Artificial; identical to SEQ ID NO: 16026
  Synthetic oligonucleotide

SEQ ID NO: 486950 - DNA, 58 bp, Artificial; identical to SEQ ID NO: 19123
  Synthetic oligonucleotide

SEQ ID NO: 486951 - DNA, 54 bp, Artificial; identical to SEQ ID NO: 17207
  Synthetic oligonucleotide

SEQ ID NO: 486952 - DNA, 59 bp, Artificial; identical to SEQ ID NO: 11453
  Synthetic oligonucleotide

SEQ ID NO: 486953 - DNA, 52 bp, Artificial; identical to SEQ ID NO: 13298
  Synthetic oligonucleotide

SEQ ID NO: 486954 - DNA, 52 bp, Artificial; identical to SEQ ID NO: 17980
  Synthetic oligonucleotide

SEQ ID NO: 486955 - DNA, 60 bp, Artificial; identical to SEQ ID NO: 6274
  Synthetic oligonucleotide

SEQ ID NO: 486956 - DNA, 56 bp, Artificial; identical to SEQ ID NO: 18286
  Synthetic oligonucleotide

SEQ ID NO: 486957 - DNA, 57 bp, Artificial; identical to SEQ ID NO: 16440
  Synthetic oligonucleotide

SEQ ID NO: 486958 - DNA, 59 bp, Artificial; identical to SEQ ID NO: 20575
  Synthetic oligonucleotide

SEQ ID NO: 486959 - DNA, 57 bp, Artificial; identical to SEQ ID NO: 16176
  Synthetic oligonucleotide

SEQ ID NO: 486960 - DNA, 60 bp, Artificial; identical to SEQ ID NO: 11995
  Synthetic oligonucleotide

SEQ ID NO: 486961 - DNA, 57 bp, Artificial; identical to SEQ ID NO: 16406
  Synthetic oligonucleotide

SEQ ID NO: 486962 - DNA, 60 bp, Artificial; identical to SEQ ID NO: 6161
  Synthetic oligonucleotide

SEQ ID NO: 486963 - DNA, 58 bp, Artificial; identical to SEQ ID NO: 19090
  Synthetic oligonucleotide

SEQ ID NO: 486964 - DNA, 54 bp, Artificial; identical to SEQ ID NO: 6718
  Synthetic oligonucleotide

SEQ ID NO: 486965 - DNA, 59 bp, Artificial; identical to SEQ ID NO: 17749
  Synthetic oligonucleotide

SEQ ID NO: 486966 - DNA, 60 bp, Artificial; identical to SEQ ID NO: 13871
  Synthetic oligonucleotide

SEQ ID NO: 486967 - DNA, 58 bp, Artificial; identical to SEQ ID NO: 12835
  Synthetic oligonucleotide

SEQ ID NO: 486968 - DNA, 60 bp, Artificial; identical to SEQ ID NO: 107550
  Synthetic oligonucleotide

SEQ ID NO: 486969 - DNA, 55 bp, Artificial; identical to SEQ ID NO: 15429
  Synthetic oligonucleotide

SEQ ID NO: 486970 - DNA, 55 bp, Artificial; identical to SEQ ID NO: 20282
  Synthetic oligonucleotide

SEQ ID NO: 486971 - DNA, 55 bp, Artificial; identical to SEQ ID NO: 148
  Synthetic oligonucleotide

SEQ ID NO: 486972 - DNA, 60 bp, Artificial; identical to SEQ ID NO: 15402
  Synthetic oligonucleotide

SEQ ID NO: 486973 - DNA, 60 bp, Artificial; identical to SEQ ID NO: 9787
  Synthetic oligonucleotide

SEQ ID NO: 486974 - DNA, 56 bp, Artificial; identical to SEQ ID NO: 16648
  Synthetic oligonucleotide

SEQ ID NO: 486975 - DNA, 58 bp, Artificial; identical to SEQ ID NO: 11535
  Synthetic oligonucleotide

SEQ ID NO: 486976 - DNA, 58 bp, Artificial; identical to SEQ ID NO: 13104
  Synthetic oligonucleotide

SEQ ID NO: 486977 - DNA, 60 bp, Artificial; identical to SEQ ID NO: 9642
  Synthetic oligonucleotide

SEQ ID NO: 486978 - DNA, 57 bp, Artificial; identical to SEQ ID NO: 17779
  Synthetic oligonucleotide

SEQ ID NO: 486979 - DNA, 60 bp, Artificial; identical to SEQ ID NO: 6261
  Synthetic oligonucleotide

SEQ ID NO: 486980 - DNA, 58 bp, Artificial; identical to SEQ ID NO: 15465
  Synthetic oligonucleotide

SEQ ID NO: 486981 - DNA, 56 bp, Artificial; identical to SEQ ID NO: 19599
  Synthetic oligonucleotide

SEQ ID NO: 486982 - DNA, 56 bp, Artificial; identical to SEQ ID NO: 18357
  Synthetic oligonucleotide

SEQ ID NO: 486983 - DNA, 60 bp, Artificial; identical to SEQ ID NO: 6336
  Synthetic oligonucleotide

SEQ ID NO: 486984 - DNA, 55 bp, Artificial; identical to SEQ ID NO: 7489
  Synthetic oligonucleotide

SEQ ID NO: 486985 - DNA, 52 bp, Artificial; identical to SEQ ID NO: 13145
  Synthetic oligonucleotide

SEQ ID NO: 486986 - DNA, 53 bp, Artificial; identical to SEQ ID NO: 6173
  Synthetic oligonucleotide

SEQ ID NO: 486987 - DNA, 59 bp, Artificial; identical to SEQ ID NO: 19236
  Synthetic oligonucleotide

SEQ ID NO: 486988 - DNA, 55 bp, Artificial; identical to SEQ ID NO: 17465
  Synthetic oligonucleotide

SEQ ID NO: 486989 - DNA, 56 bp, Artificial; identical to SEQ ID NO: 19045
  Synthetic oligonucleotide

SEQ ID NO: 486990 - DNA, 58 bp, Artificial; identical to SEQ ID NO: 12332
  Synthetic oligonucleotide

SEQ ID NO: 486991 - DNA, 55 bp, Artificial; identical to SEQ ID NO: 8139
  Synthetic oligonucleotide

SEQ ID NO: 486992 - DNA, 60 bp, Artificial; identical to SEQ ID NO: 13884
  Synthetic oligonucleotide

SEQ ID NO: 486993 - DNA, 60 bp, Artificial; identical to SEQ ID NO: 11089
  Synthetic oligonucleotide

SEQ ID NO: 486994 - DNA, 55 bp, Artificial; identical to SEQ ID NO: 10911
  Synthetic oligonucleotide

SEQ ID NO: 486995 - DNA, 60 bp, Artificial; identical to SEQ ID NO: 6383
  Synthetic oligonucleotide

SEQ ID NO: 486996 - DNA, 54 bp, Artificial; identical to SEQ ID NO: 6620
  Synthetic oligonucleotide

SEQ ID NO: 486997 - DNA, 56 bp, Artificial; identical to SEQ ID NO: 18705
  Synthetic oligonucleotide

SEQ ID NO: 486998 - DNA, 60 bp, Artificial; identical to SEQ ID NO: 10773
  Synthetic oligonucleotide

SEQ ID NO: 486999 - DNA, 56 bp, Artificial; identical to SEQ ID NO: 13621
  Synthetic oligonucleotide

SEQ ID NO: 487000 - DNA, 60 bp, Artificial; identical to SEQ ID NO: 10635
  Synthetic oligonucleotide

SEQ ID NO: 487001 - DNA, 60 bp, Artificial; identical to SEQ ID NO: 180
  Synthetic oligonucleotide

SEQ ID NO: 487002 - DNA, 56 bp, Artificial; identical to SEQ ID NO: 7474
  Synthetic oligonucleotide

SEQ ID NO: 487003 - DNA, 59 bp, Artificial; identical to SEQ ID NO: 16325
  Synthetic oligonucleotide

SEQ ID NO: 487004 - DNA, 59 bp, Artificial; identical to SEQ ID NO: 19670
  Synthetic oligonucleotide

SEQ ID NO: 487005 - DNA, 59 bp, Artificial; identical to SEQ ID NO: 15154
  Synthetic oligonucleotide

SEQ ID NO: 487006 - DNA, 60 bp, Artificial; identical to SEQ ID NO: 14891
  Synthetic oligonucleotide

SEQ ID NO: 487007 - DNA, 60 bp, Artificial; identical to SEQ ID NO: 15817
  Synthetic oligonucleotide

SEQ ID NO: 487008 - DNA, 58 bp, Artificial; identical to SEQ ID NO: 16212
  Synthetic oligonucleotide

SEQ ID NO: 487009 - DNA, 60 bp, Artificial; identical to SEQ ID NO: 14113
  Synthetic oligonucleotide

SEQ ID NO: 487010 - DNA, 60 bp, Artificial; identical to SEQ ID NO: 10280
  Synthetic oligonucleotide

SEQ ID NO: 487011 - DNA, 60 bp, Artificial; identical to SEQ ID NO: 82916
  Synthetic oligonucleotide

SEQ ID NO: 487012 - DNA, 58 bp, Artificial; identical to SEQ ID NO: 14457
  Synthetic oligonucleotide

SEQ ID NO: 487013 - DNA, 57 bp, Artificial; identical to SEQ ID NO: 18706
  Synthetic oligonucleotide

SEQ ID NO: 487014 - DNA, 60 bp, Artificial; identical to SEQ ID NO: 15532
  Synthetic oligonucleotide

SEQ ID NO: 487015 - DNA, 60 bp, Artificial; identical to SEQ ID NO: 6709
  Synthetic oligonucleotide

SEQ ID NO: 487016 - DNA, 60 bp, Artificial; identical to SEQ ID NO: 11328
  Synthetic oligonucleotide

SEQ ID NO: 487017 - DNA, 57 bp, Artificial; identical to SEQ ID NO: 18693
  Synthetic oligonucleotide

SEQ ID NO: 487018 - DNA, 60 bp, Artificial; identical to SEQ ID NO: 13870
  Synthetic oligonucleotide

SEQ ID NO: 487019 - DNA, 58 bp, Artificial; identical to SEQ ID NO: 19730
  Synthetic oligonucleotide

SEQ ID NO: 487020 - DNA, 52 bp, Artificial; identical to SEQ ID NO: 20093
  Synthetic oligonucleotide

SEQ ID NO: 487021 - DNA, 50 bp, Artificial; identical to SEQ ID NO: 18070
  Synthetic oligonucleotide

SEQ ID NO: 487022 - DNA, 55 bp, Artificial; identical to SEQ ID NO: 19874
  Synthetic oligonucleotide

SEQ ID NO: 487023 - DNA, 60 bp, Artificial; identical to SEQ ID NO: 15008
  Synthetic oligonucleotide

SEQ ID NO: 487024 - DNA, 60 bp, Artificial; identical to SEQ ID NO: 11034
  Synthetic oligonucleotide

SEQ ID NO: 487025 - DNA, 60 bp, Artificial; identical to SEQ ID NO: 10554
  Synthetic oligonucleotide

SEQ ID NO: 487026 - DNA, 58 bp, Artificial; identical to SEQ ID NO: 13078
  Synthetic oligonucleotide

SEQ ID NO: 487027 - DNA, 60 bp, Artificial; identical to SEQ ID NO: 112555
  Synthetic oligonucleotide

SEQ ID NO: 487028 - DNA, 55 bp, Artificial; identical to SEQ ID NO: 16190
  Synthetic oligonucleotide

SEQ ID NO: 487029 - DNA, 56 bp, Artificial; identical to SEQ ID NO: 17183
  Synthetic oligonucleotide

SEQ ID NO: 487030 - DNA, 60 bp, Artificial; identical to SEQ ID NO: 7123
  Synthetic oligonucleotide

SEQ ID NO: 487031 - DNA, 58 bp, Artificial; identical to SEQ ID NO: 18507
  Synthetic oligonucleotide

SEQ ID NO: 487032 - DNA, 59 bp, Artificial; identical to SEQ ID NO: 18717
  Synthetic oligonucleotide

SEQ ID NO: 487033 - DNA, 60 bp, Artificial; identical to SEQ ID NO: 12184
  Synthetic oligonucleotide

SEQ ID NO: 487034 - DNA, 52 bp, Artificial; identical to SEQ ID NO: 20295
  Synthetic oligonucleotide

SEQ ID NO: 487035 - DNA, 58 bp, Artificial; identical to SEQ ID NO: 12074
  Synthetic oligonucleotide

SEQ ID NO: 487036 - DNA, 54 bp, Artificial; identical to SEQ ID NO: 17742
  Synthetic oligonucleotide

SEQ ID NO: 487037 - DNA, 60 bp, Artificial; identical to SEQ ID NO: 6118
  Synthetic oligonucleotide

SEQ ID NO: 487038 - DNA, 59 bp, Artificial; identical to SEQ ID NO: 20248
  Synthetic oligonucleotide

SEQ ID NO: 487039 - DNA, 55 bp, Artificial; identical to SEQ ID NO: 126067
  Synthetic oligonucleotide

SEQ ID NO: 487040 - DNA, 53 bp, Artificial; identical to SEQ ID NO: 15948
  Synthetic oligonucleotide

SEQ ID NO: 487041 - DNA, 52 bp, Artificial; identical to SEQ ID NO: 10472
  Synthetic oligonucleotide

SEQ ID NO: 487042 - DNA, 60 bp, Artificial; identical to SEQ ID NO: 13705
  Synthetic oligonucleotide

SEQ ID NO: 487043 - DNA, 59 bp, Artificial; identical to SEQ ID NO: 19208
  Synthetic oligonucleotide

SEQ ID NO: 487044 - DNA, 50 bp, Artificial; identical to SEQ ID NO: 15851
  Synthetic oligonucleotide

SEQ ID NO: 487045 - DNA, 60 bp, Artificial; identical to SEQ ID NO: 7813
  Synthetic oligonucleotide

SEQ ID NO: 487046 - DNA, 53 bp, Artificial; identical to SEQ ID NO: 9624
  Synthetic oligonucleotide

SEQ ID NO: 487047 - DNA, 60 bp, Artificial; identical to SEQ ID NO: 11156
  Synthetic oligonucleotide

SEQ ID NO: 487048 - DNA, 57 bp, Artificial; identical to SEQ ID NO: 19493
  Synthetic oligonucleotide

SEQ ID NO: 487049 - DNA, 57 bp, Artificial; identical to SEQ ID NO: 19085
  Synthetic oligonucleotide

SEQ ID NO: 487050 - DNA, 59 bp, Artificial; identical to SEQ ID NO: 17927
  Synthetic oligonucleotide

SEQ ID NO: 487051 - DNA, 60 bp, Artificial; identical to SEQ ID NO: 23943
  Synthetic oligonucleotide

SEQ ID NO: 487052 - DNA, 58 bp, Artificial; identical to SEQ ID NO: 16141
  Synthetic oligonucleotide

SEQ ID NO: 487053 - DNA, 60 bp, Artificial; identical to SEQ ID NO: 6893
  Synthetic oligonucleotide

SEQ ID NO: 487054 - DNA, 59 bp, Artificial; identical to SEQ ID NO: 10543
  Synthetic oligonucleotide

SEQ ID NO: 487055 - DNA, 60 bp, Artificial; identical to SEQ ID NO: 14266
  Synthetic oligonucleotide

SEQ ID NO: 487056 - DNA, 54 bp, Artificial; identical to SEQ ID NO: 14659
  Synthetic oligonucleotide

SEQ ID NO: 487057 - DNA, 55 bp, Artificial; identical to SEQ ID NO: 15980
  Synthetic oligonucleotide

SEQ ID NO: 487058 - DNA, 60 bp, Artificial; identical to SEQ ID NO: 5759
  Synthetic oligonucleotide

SEQ ID NO: 487059 - DNA, 56 bp, Artificial; identical to SEQ ID NO: 13844
  Synthetic oligonucleotide

SEQ ID NO: 487060 - DNA, 58 bp, Artificial; identical to SEQ ID NO: 17766
  Synthetic oligonucleotide

SEQ ID NO: 487061 - DNA, 54 bp, Artificial; identical to SEQ ID NO: 17218
  Synthetic oligonucleotide

SEQ ID NO: 487062 - DNA, 60 bp, Artificial; identical to SEQ ID NO: 75306
  Synthetic oligonucleotide

SEQ ID NO: 487063 - DNA, 58 bp, Artificial; identical to SEQ ID NO: 18815
  Synthetic oligonucleotide

SEQ ID NO: 487064 - DNA, 59 bp, Artificial; identical to SEQ ID NO: 12712
  Synthetic oligonucleotide

SEQ ID NO: 487065 - DNA, 54 bp, Artificial; identical to SEQ ID NO: 7754
  Synthetic oligonucleotide

SEQ ID NO: 487066 - DNA, 55 bp, Artificial; identical to SEQ ID NO: 14178
  Synthetic oligonucleotide

SEQ ID NO: 487067 - DNA, 60 bp, Artificial; identical to SEQ ID NO: 7222
  Synthetic oligonucleotide

SEQ ID NO: 487068 - DNA, 60 bp, Artificial; identical to SEQ ID NO: 14262
  Synthetic oligonucleotide

SEQ ID NO: 487069 - DNA, 60 bp, Artificial; identical to SEQ ID NO: 7533
  Synthetic oligonucleotide

SEQ ID NO: 487070 - DNA, 60 bp, Artificial; identical to SEQ ID NO: 7448
  Synthetic oligonucleotide

SEQ ID NO: 487071 - DNA, 59 bp, Artificial; identical to SEQ ID NO: 19119
  Synthetic oligonucleotide

SEQ ID NO: 487072 - DNA, 60 bp, Artificial; identical to SEQ ID NO: 37493
  Synthetic oligonucleotide

SEQ ID NO: 487073 - DNA, 58 bp, Artificial; identical to SEQ ID NO: 16900
  Synthetic oligonucleotide

SEQ ID NO: 487074 - DNA, 54 bp, Artificial; identical to SEQ ID NO: 7471
  Synthetic oligonucleotide

SEQ ID NO: 487075 - DNA, 55 bp, Artificial; identical to SEQ ID NO: 17481
  Synthetic oligonucleotide

SEQ ID NO: 487076 - DNA, 58 bp, Artificial; identical to SEQ ID NO: 16405
  Synthetic oligonucleotide

SEQ ID NO: 487077 - DNA, 57 bp, Artificial; identical to SEQ ID NO: 18855
  Synthetic oligonucleotide

SEQ ID NO: 487078 - DNA, 56 bp, Artificial; identical to SEQ ID NO: 18371
  Synthetic oligonucleotide

SEQ ID NO: 487079 - DNA, 57 bp, Artificial; identical to SEQ ID NO: 16674
  Synthetic oligonucleotide

SEQ ID NO: 487080 - DNA, 60 bp, Artificial; identical to SEQ ID NO: 43987
  Synthetic oligonucleotide

SEQ ID NO: 487081 - DNA, 55 bp, Artificial; identical to SEQ ID NO: 16003
  Synthetic oligonucleotide

SEQ ID NO: 487082 - DNA, 57 bp, Artificial; identical to SEQ ID NO: 18410
  Synthetic oligonucleotide

SEQ ID NO: 487083 - DNA, 56 bp, Artificial; identical to SEQ ID NO: 10849
  Synthetic oligonucleotide

SEQ ID NO: 487084 - DNA, 60 bp, Artificial; identical to SEQ ID NO: 15651
  Synthetic oligonucleotide

SEQ ID NO: 487085 - DNA, 60 bp, Artificial; identical to SEQ ID NO: 12362
  Synthetic oligonucleotide

SEQ ID NO: 487086 - DNA, 60 bp, Artificial; identical to SEQ ID NO: 10976
  Synthetic oligonucleotide

SEQ ID NO: 487087 - DNA, 60 bp, Artificial; identical to SEQ ID NO: 8695
  Synthetic oligonucleotide

SEQ ID NO: 487088 - DNA, 55 bp, Artificial; identical to SEQ ID NO: 14770
  Synthetic oligonucleotide

SEQ ID NO: 487089 - DNA, 51 bp, Artificial; identical to SEQ ID NO: 14985
  Synthetic oligonucleotide

SEQ ID NO: 487090 - DNA, 59 bp, Artificial; identical to SEQ ID NO: 14268
  Synthetic oligonucleotide

SEQ ID NO: 487091 - DNA, 54 bp, Artificial; identical to SEQ ID NO: 8128
  Synthetic oligonucleotide

SEQ ID NO: 487092 - DNA, 60 bp, Artificial; identical to SEQ ID NO: 6389
  Synthetic oligonucleotide

SEQ ID NO: 487093 - DNA, 60 bp, Artificial; identical to SEQ ID NO: 14198
  Synthetic oligonucleotide

SEQ ID NO: 487094 - DNA, 60 bp, Artificial; identical to SEQ ID NO: 14248
  Synthetic oligonucleotide

SEQ ID NO: 487095 - DNA, 54 bp, Artificial; identical to SEQ ID NO: 5956
  Synthetic oligonucleotide

SEQ ID NO: 487096 - DNA, 60 bp, Artificial; identical to SEQ ID NO: 11005
  Synthetic oligonucleotide

SEQ ID NO: 487097 - DNA, 55 bp, Artificial; identical to SEQ ID NO: 16268
  Synthetic oligonucleotide

SEQ ID NO: 487098 - DNA, 59 bp, Artificial; identical to SEQ ID NO: 16746
  Synthetic oligonucleotide

SEQ ID NO: 487099 - DNA, 60 bp, Artificial; identical to SEQ ID NO: 7695
  Synthetic oligonucleotide

SEQ ID NO: 487100 - DNA, 54 bp, Artificial; identical to SEQ ID NO: 7860
  Synthetic oligonucleotide

SEQ ID NO: 487101 - DNA, 60 bp, Artificial; identical to SEQ ID NO: 38632
  Synthetic oligonucleotide

SEQ ID NO: 487102 - DNA, 55 bp, Artificial; identical to SEQ ID NO: 20328
  Synthetic oligonucleotide

SEQ ID NO: 487103 - DNA, 55 bp, Artificial; identical to SEQ ID NO: 15261
  Synthetic oligonucleotide

SEQ ID NO: 487104 - DNA, 52 bp, Artificial; identical to SEQ ID NO: 15021
  Synthetic oligonucleotide

SEQ ID NO: 487105 - DNA, 59 bp, Artificial; identical to SEQ ID NO: 17578
  Synthetic oligonucleotide

SEQ ID NO: 487106 - DNA, 56 bp, Artificial; identical to SEQ ID NO: 18430
  Synthetic oligonucleotide

SEQ ID NO: 487107 - DNA, 58 bp, Artificial; identical to SEQ ID NO: 16840
  Synthetic oligonucleotide

SEQ ID NO: 487108 - DNA, 56 bp, Artificial; identical to SEQ ID NO: 10962
  Synthetic oligonucleotide

SEQ ID NO: 487109 - DNA, 60 bp, Artificial; identical to SEQ ID NO: 11380
  Synthetic oligonucleotide

SEQ ID NO: 487110 - DNA, 60 bp, Artificial; identical to SEQ ID NO: 14499
  Synthetic oligonucleotide

SEQ ID NO: 487111 - DNA, 58 bp, Artificial; identical to SEQ ID NO: 16239
  Synthetic oligonucleotide

SEQ ID NO: 487112 - DNA, 59 bp, Artificial; identical to SEQ ID NO: 18086
  Synthetic oligonucleotide

SEQ ID NO: 487113 - DNA, 60 bp, Artificial; identical to SEQ ID NO: 11763
  Synthetic oligonucleotide

SEQ ID NO: 487114 - DNA, 55 bp, Artificial; identical to SEQ ID NO: 13226
  Synthetic oligonucleotide

SEQ ID NO: 487115 - DNA, 60 bp, Artificial; identical to SEQ ID NO: 6606
  Synthetic oligonucleotide

SEQ ID NO: 487116 - DNA, 60 bp, Artificial; identical to SEQ ID NO: 7229
  Synthetic oligonucleotide

SEQ ID NO: 487117 - DNA, 57 bp, Artificial; identical to SEQ ID NO: 10925
  Synthetic oligonucleotide

SEQ ID NO: 487118 - DNA, 59 bp, Artificial; identical to SEQ ID NO: 14653
  Synthetic oligonucleotide

SEQ ID NO: 487119 - DNA, 60 bp, Artificial; identical to SEQ ID NO: 14545
  Synthetic oligonucleotide

SEQ ID NO: 487120 - DNA, 59 bp, Artificial; identical to SEQ ID NO: 10874
  Synthetic oligonucleotide

SEQ ID NO: 487121 - DNA, 52 bp, Artificial; identical to SEQ ID NO: 9033
  Synthetic oligonucleotide

SEQ ID NO: 487122 - DNA, 51 bp, Artificial; identical to SEQ ID NO: 6533
  Synthetic oligonucleotide

SEQ ID NO: 487123 - DNA, 60 bp, Artificial; identical to SEQ ID NO: 12511
  Synthetic oligonucleotide

SEQ ID NO: 487124 - DNA, 60 bp, Artificial; identical to SEQ ID NO: 10791
  Synthetic oligonucleotide

SEQ ID NO: 487125 - DNA, 58 bp, Artificial; identical to SEQ ID NO: 10477
  Synthetic oligonucleotide

SEQ ID NO: 487126 - DNA, 57 bp, Artificial; identical to SEQ ID NO: 19981
  Synthetic oligonucleotide

SEQ ID NO: 487127 - DNA, 60 bp, Artificial; identical to SEQ ID NO: 7145
  Synthetic oligonucleotide

SEQ ID NO: 487128 - DNA, 59 bp, Artificial; identical to SEQ ID NO: 15661
  Synthetic oligonucleotide

SEQ ID NO: 487129 - DNA, 60 bp, Artificial; identical to SEQ ID NO: 13749
  Synthetic oligonucleotide

SEQ ID NO: 487130 - DNA, 57 bp, Artificial; identical to SEQ ID NO: 16989
  Synthetic oligonucleotide

SEQ ID NO: 487131 - DNA, 59 bp, Artificial; identical to SEQ ID NO: 327
  Synthetic oligonucleotide

SEQ ID NO: 487132 - DNA, 59 bp, Artificial; identical to SEQ ID NO: 19039
  Synthetic oligonucleotide

SEQ ID NO: 487133 - DNA, 60 bp, Artificial; identical to SEQ ID NO: 12245
  Synthetic oligonucleotide

SEQ ID NO: 487134 - DNA, 60 bp, Artificial; identical to SEQ ID NO: 146
  Synthetic oligonucleotide

SEQ ID NO: 487135 - DNA, 60 bp, Artificial; identical to SEQ ID NO: 12401
  Synthetic oligonucleotide

SEQ ID NO: 487136 - DNA, 59 bp, Artificial; identical to SEQ ID NO: 16202
  Synthetic oligonucleotide

SEQ ID NO: 487137 - DNA, 53 bp, Artificial; identical to SEQ ID NO: 14687
  Synthetic oligonucleotide

SEQ ID NO: 487138 - DNA, 60 bp, Artificial; identical to SEQ ID NO: 10750
  Synthetic oligonucleotide

SEQ ID NO: 487139 - DNA, 60 bp, Artificial; identical to SEQ ID NO: 14028
  Synthetic oligonucleotide

SEQ ID NO: 487140 - DNA, 60 bp, Artificial; identical to SEQ ID NO: 9100
  Synthetic oligonucleotide

SEQ ID NO: 487141 - DNA, 60 bp, Artificial; identical to SEQ ID NO: 5940
  Synthetic oligonucleotide

SEQ ID NO: 487142 - DNA, 60 bp, Artificial; identical to SEQ ID NO: 7359
  Synthetic oligonucleotide

SEQ ID NO: 487143 - DNA, 59 bp, Artificial; identical to SEQ ID NO: 17590
  Synthetic oligonucleotide

SEQ ID NO: 487144 - DNA, 60 bp, Artificial; identical to SEQ ID NO: 12688
  Synthetic oligonucleotide

SEQ ID NO: 487145 - DNA, 53 bp, Artificial; identical to SEQ ID NO: 11176
  Synthetic oligonucleotide

SEQ ID NO: 487146 - DNA, 50 bp, Artificial; identical to SEQ ID NO: 12268
  Synthetic oligonucleotide

SEQ ID NO: 487147 - DNA, 60 bp, Artificial; identical to SEQ ID NO: 11637
  Synthetic oligonucleotide

SEQ ID NO: 487148 - DNA, 58 bp, Artificial; identical to SEQ ID NO: 16497
  Synthetic oligonucleotide

SEQ ID NO: 487149 - DNA, 58 bp, Artificial; identical to SEQ ID NO: 20357
  Synthetic oligonucleotide

SEQ ID NO: 487150 - DNA, 52 bp, Artificial; identical to SEQ ID NO: 11213
  Synthetic oligonucleotide

SEQ ID NO: 487151 - DNA, 58 bp, Artificial; identical to SEQ ID NO: 18273
  Synthetic oligonucleotide

SEQ ID NO: 487152 - DNA, 60 bp, Artificial; identical to SEQ ID NO: 6091
  Synthetic oligonucleotide

SEQ ID NO: 487153 - DNA, 60 bp, Artificial; identical to SEQ ID NO: 11966
  Synthetic oligonucleotide

SEQ ID NO: 487154 - DNA, 60 bp, Artificial; identical to SEQ ID NO: 6088
  Synthetic oligonucleotide

SEQ ID NO: 487155 - DNA, 60 bp, Artificial; identical to SEQ ID NO: 11622
  Synthetic oligonucleotide

SEQ ID NO: 487156 - DNA, 60 bp, Artificial; identical to SEQ ID NO: 14504
  Synthetic oligonucleotide

SEQ ID NO: 487157 - DNA, 60 bp, Artificial; identical to SEQ ID NO: 15367
  Synthetic oligonucleotide

SEQ ID NO: 487158 - DNA, 60 bp, Artificial; identical to SEQ ID NO: 7029
  Synthetic oligonucleotide

SEQ ID NO: 487159 - DNA, 60 bp, Artificial; identical to SEQ ID NO: 14664
  Synthetic oligonucleotide

SEQ ID NO: 487160 - DNA, 53 bp, Artificial; identical to SEQ ID NO: 6436
  Synthetic oligonucleotide

SEQ ID NO: 487161 - DNA, 60 bp, Artificial; identical to SEQ ID NO: 14283
  Synthetic oligonucleotide

SEQ ID NO: 487162 - DNA, 60 bp, Artificial; identical to SEQ ID NO: 7855
  Synthetic oligonucleotide

SEQ ID NO: 487163 - DNA, 56 bp, Artificial; identical to SEQ ID NO: 20551
  Synthetic oligonucleotide

SEQ ID NO: 487164 - DNA, 57 bp, Artificial; identical to SEQ ID NO: 15923
  Synthetic oligonucleotide

SEQ ID NO: 487165 - DNA, 60 bp, Artificial; identical to SEQ ID NO: 13153
  Synthetic oligonucleotide

SEQ ID NO: 487166 - DNA, 58 bp, Artificial; identical to SEQ ID NO: 14297
  Synthetic oligonucleotide

SEQ ID NO: 487167 - DNA, 58 bp, Artificial; identical to SEQ ID NO: 19633
  Synthetic oligonucleotide

SEQ ID NO: 487168 - DNA, 60 bp, Artificial; identical to SEQ ID NO: 15646
  Synthetic oligonucleotide

SEQ ID NO: 487169 - DNA, 50 bp, Artificial; identical to SEQ ID NO: 11787
  Synthetic oligonucleotide

SEQ ID NO: 487170 - DNA, 60 bp, Artificial; identical to SEQ ID NO: 120592
  Synthetic oligonucleotide

SEQ ID NO: 487171 - DNA, 60 bp, Artificial; identical to SEQ ID NO: 9349
  Synthetic oligonucleotide

SEQ ID NO: 487172 - DNA, 60 bp, Artificial; identical to SEQ ID NO: 13358
  Synthetic oligonucleotide

SEQ ID NO: 487173 - DNA, 55 bp, Artificial; identical to SEQ ID NO: 18835
  Synthetic oligonucleotide

SEQ ID NO: 487174 - DNA, 55 bp, Artificial; identical to SEQ ID NO: 18117
  Synthetic oligonucleotide

SEQ ID NO: 487175 - DNA, 60 bp, Artificial; identical to SEQ ID NO: 45261
  Synthetic oligonucleotide

SEQ ID NO: 487176 - DNA, 54 bp, Artificial; identical to SEQ ID NO: 10712
  Synthetic oligonucleotide

SEQ ID NO: 487177 - DNA, 55 bp, Artificial; identical to SEQ ID NO: 12878
  Synthetic oligonucleotide

SEQ ID NO: 487178 - DNA, 59 bp, Artificial; identical to SEQ ID NO: 10866
  Synthetic oligonucleotide

SEQ ID NO: 487179 - DNA, 58 bp, Artificial; identical to SEQ ID NO: 9485
  Synthetic oligonucleotide

SEQ ID NO: 487180 - DNA, 55 bp, Artificial; identical to SEQ ID NO: 19483
  Synthetic oligonucleotide

SEQ ID NO: 487181 - DNA, 57 bp, Artificial; identical to SEQ ID NO: 16555
  Synthetic oligonucleotide

SEQ ID NO: 487182 - DNA, 57 bp, Artificial; identical to SEQ ID NO: 19705
  Synthetic oligonucleotide

SEQ ID NO: 487183 - DNA, 53 bp, Artificial; identical to SEQ ID NO: 16343
  Synthetic oligonucleotide

SEQ ID NO: 487184 - DNA, 60 bp, Artificial; identical to SEQ ID NO: 11197
  Synthetic oligonucleotide

SEQ ID NO: 487185 - DNA, 60 bp, Artificial; identical to SEQ ID NO: 78774
  Synthetic oligonucleotide

SEQ ID NO: 487186 - DNA, 59 bp, Artificial; identical to SEQ ID NO: 17033
  Synthetic oligonucleotide

SEQ ID NO: 487187 - DNA, 60 bp, Artificial; identical to SEQ ID NO: 28046
  Synthetic oligonucleotide

SEQ ID NO: 487188 - DNA, 56 bp, Artificial; identical to SEQ ID NO: 16521
  Synthetic oligonucleotide

SEQ ID NO: 487189 - DNA, 60 bp, Artificial; identical to SEQ ID NO: 6565
  Synthetic oligonucleotide

SEQ ID NO: 487190 - DNA, 60 bp, Artificial; identical to SEQ ID NO: 10897
  Synthetic oligonucleotide

SEQ ID NO: 487191 - DNA, 60 bp, Artificial; identical to SEQ ID NO: 10631
  Synthetic oligonucleotide

SEQ ID NO: 487192 - DNA, 60 bp, Artificial; identical to SEQ ID NO: 22248
  Synthetic oligonucleotide

SEQ ID NO: 487193 - DNA, 53 bp, Artificial; identical to SEQ ID NO: 18429
  Synthetic oligonucleotide

SEQ ID NO: 487194 - DNA, 60 bp, Artificial; identical to SEQ ID NO: 10213
  Synthetic oligonucleotide

SEQ ID NO: 487195 - DNA, 60 bp, Artificial; identical to SEQ ID NO: 9402
  Synthetic oligonucleotide

SEQ ID NO: 487196 - DNA, 60 bp, Artificial; identical to SEQ ID NO: 12809
  Synthetic oligonucleotide

SEQ ID NO: 487197 - DNA, 60 bp, Artificial; identical to SEQ ID NO: 12264
  Synthetic oligonucleotide

SEQ ID NO: 487198 - DNA, 56 bp, Artificial; identical to SEQ ID NO: 18391
  Synthetic oligonucleotide

SEQ ID NO: 487199 - DNA, 60 bp, Artificial; identical to SEQ ID NO: 13427
  Synthetic oligonucleotide

SEQ ID NO: 487200 - DNA, 56 bp, Artificial; identical to SEQ ID NO: 12286
  Synthetic oligonucleotide

SEQ ID NO: 487201 - DNA, 50 bp, Artificial; identical to SEQ ID NO: 6698
  Synthetic oligonucleotide

SEQ ID NO: 487202 - DNA, 54 bp, Artificial; identical to SEQ ID NO: 20151
  Synthetic oligonucleotide

SEQ ID NO: 487203 - DNA, 60 bp, Artificial; identical to SEQ ID NO: 10966
  Synthetic oligonucleotide

SEQ ID NO: 487204 - DNA, 51 bp, Artificial; identical to SEQ ID NO: 7329
  Synthetic oligonucleotide

SEQ ID NO: 487205 - DNA, 60 bp, Artificial; identical to SEQ ID NO: 12938
  Synthetic oligonucleotide

SEQ ID NO: 487206 - DNA, 60 bp, Artificial; identical to SEQ ID NO: 15768
  Synthetic oligonucleotide

SEQ ID NO: 487207 - DNA, 56 bp, Artificial; identical to SEQ ID NO: 15783
  Synthetic oligonucleotide

SEQ ID NO: 487208 - DNA, 60 bp, Artificial; identical to SEQ ID NO: 13005
  Synthetic oligonucleotide

SEQ ID NO: 487209 - DNA, 60 bp, Artificial; identical to SEQ ID NO: 6703
  Synthetic oligonucleotide

SEQ ID NO: 487210 - DNA, 60 bp, Artificial; identical to SEQ ID NO: 10959
  Synthetic oligonucleotide

SEQ ID NO: 487211 - DNA, 60 bp, Artificial; identical to SEQ ID NO: 11851
  Synthetic oligonucleotide

SEQ ID NO: 487212 - DNA, 51 bp, Artificial; identical to SEQ ID NO: 14102
  Synthetic oligonucleotide

SEQ ID NO: 487213 - DNA, 60 bp, Artificial; identical to SEQ ID NO: 123351
  Synthetic oligonucleotide

SEQ ID NO: 487214 - DNA, 56 bp, Artificial; identical to SEQ ID NO: 17651
  Synthetic oligonucleotide

SEQ ID NO: 487215 - DNA, 60 bp, Artificial; identical to SEQ ID NO: 14169
  Synthetic oligonucleotide

SEQ ID NO: 487216 - DNA, 60 bp, Artificial; identical to SEQ ID NO: 15746
  Synthetic oligonucleotide

SEQ ID NO: 487217 - DNA, 54 bp, Artificial; identical to SEQ ID NO: 8748
  Synthetic oligonucleotide

SEQ ID NO: 487218 - DNA, 57 bp, Artificial; identical to SEQ ID NO: 19485
  Synthetic oligonucleotide

SEQ ID NO: 487219 - DNA, 59 bp, Artificial; identical to SEQ ID NO: 18107
  Synthetic oligonucleotide

SEQ ID NO: 487220 - DNA, 50 bp, Artificial; identical to SEQ ID NO: 13243
  Synthetic oligonucleotide

SEQ ID NO: 487221 - DNA, 57 bp, Artificial; identical to SEQ ID NO: 19944
  Synthetic oligonucleotide

SEQ ID NO: 487222 - DNA, 55 bp, Artificial; identical to SEQ ID NO: 11969
  Synthetic oligonucleotide

SEQ ID NO: 487223 - DNA, 60 bp, Artificial; identical to SEQ ID NO: 12632
  Synthetic oligonucleotide

SEQ ID NO: 487224 - DNA, 60 bp, Artificial; identical to SEQ ID NO: 24420
  Synthetic oligonucleotide

SEQ ID NO: 487225 - DNA, 60 bp, Artificial; identical to SEQ ID NO: 7838
  Synthetic oligonucleotide

SEQ ID NO: 487226 - DNA, 56 bp, Artificial; identical to SEQ ID NO: 10998
  Synthetic oligonucleotide

SEQ ID NO: 487227 - DNA, 55 bp, Artificial; identical to SEQ ID NO: 136
  Synthetic oligonucleotide

SEQ ID NO: 487228 - DNA, 53 bp, Artificial; identical to SEQ ID NO: 20179
  Synthetic oligonucleotide

SEQ ID NO: 487229 - DNA, 54 bp, Artificial; identical to SEQ ID NO: 17288
  Synthetic oligonucleotide

SEQ ID NO: 487230 - DNA, 60 bp, Artificial; identical to SEQ ID NO: 12478
  Synthetic oligonucleotide

SEQ ID NO: 487231 - DNA, 56 bp, Artificial; identical to SEQ ID NO: 19925
  Synthetic oligonucleotide

SEQ ID NO: 487232 - DNA, 59 bp, Artificial; identical to SEQ ID NO: 17370
  Synthetic oligonucleotide

SEQ ID NO: 487233 - DNA, 59 bp, Artificial; identical to SEQ ID NO: 19188
  Synthetic oligonucleotide

SEQ ID NO: 487234 - DNA, 50 bp, Artificial; identical to SEQ ID NO: 9565
  Synthetic oligonucleotide

SEQ ID NO: 487235 - DNA, 60 bp, Artificial; identical to SEQ ID NO: 7542
  Synthetic oligonucleotide

SEQ ID NO: 487236 - DNA, 60 bp, Artificial; identical to SEQ ID NO: 6734
  Synthetic oligonucleotide

SEQ ID NO: 487237 - DNA, 60 bp, Artificial; identical to SEQ ID NO: 11856
  Synthetic oligonucleotide

SEQ ID NO: 487238 - DNA, 60 bp, Artificial; identical to SEQ ID NO: 7394
  Synthetic oligonucleotide

SEQ ID NO: 487239 - DNA, 60 bp, Artificial; identical to SEQ ID NO: 6300
  Synthetic oligonucleotide

SEQ ID NO: 487240 - DNA, 59 bp, Artificial; identical to SEQ ID NO: 19015
  Synthetic oligonucleotide

SEQ ID NO: 487241 - DNA, 60 bp, Artificial; identical to SEQ ID NO: 7094
  Synthetic oligonucleotide

SEQ ID NO: 487242 - DNA, 60 bp, Artificial; identical to SEQ ID NO: 7138
  Synthetic oligonucleotide

SEQ ID NO: 487243 - DNA, 57 bp, Artificial; identical to SEQ ID NO: 6769
  Synthetic oligonucleotide

SEQ ID NO: 487244 - DNA, 60 bp, Artificial; identical to SEQ ID NO: 10457
  Synthetic oligonucleotide

SEQ ID NO: 487245 - DNA, 60 bp, Artificial; identical to SEQ ID NO: 15381
  Synthetic oligonucleotide

SEQ ID NO: 487246 - DNA, 60 bp, Artificial; identical to SEQ ID NO: 13136
  Synthetic oligonucleotide

SEQ ID NO: 487247 - DNA, 60 bp, Artificial; identical to SEQ ID NO: 7185
  Synthetic oligonucleotide

SEQ ID NO: 487248 - DNA, 60 bp, Artificial; identical to SEQ ID NO: 13122
  Synthetic oligonucleotide

SEQ ID NO: 487249 - DNA, 55 bp, Artificial; identical to SEQ ID NO: 16167
  Synthetic oligonucleotide

SEQ ID NO: 487250 - DNA, 58 bp, Artificial; identical to SEQ ID NO: 19163
  Synthetic oligonucleotide

SEQ ID NO: 487251 - DNA, 60 bp, Artificial; identical to SEQ ID NO: 15618
  Synthetic oligonucleotide

SEQ ID NO: 487252 - DNA, 57 bp, Artificial; identical to SEQ ID NO: 11220
  Synthetic oligonucleotide

SEQ ID NO: 487253 - DNA, 60 bp, Artificial; identical to SEQ ID NO: 8033
  Synthetic oligonucleotide

SEQ ID NO: 487254 - DNA, 60 bp, Artificial; identical to SEQ ID NO: 91580
  Synthetic oligonucleotide

SEQ ID NO: 487255 - DNA, 60 bp, Artificial; identical to SEQ ID NO: 6806
  Synthetic oligonucleotide

SEQ ID NO: 487256 - DNA, 51 bp, Artificial; identical to SEQ ID NO: 12338
  Synthetic oligonucleotide

SEQ ID NO: 487257 - DNA, 57 bp, Artificial; identical to SEQ ID NO: 18417
  Synthetic oligonucleotide

SEQ ID NO: 487258 - DNA, 60 bp, Artificial; identical to SEQ ID NO: 14828
  Synthetic oligonucleotide

SEQ ID NO: 487259 - DNA, 60 bp, Artificial; identical to SEQ ID NO: 15574
  Synthetic oligonucleotide

SEQ ID NO: 487260 - DNA, 60 bp, Artificial; identical to SEQ ID NO: 55057
  Synthetic oligonucleotide

SEQ ID NO: 487261 - DNA, 53 bp, Artificial; identical to SEQ ID NO: 11334
  Synthetic oligonucleotide

SEQ ID NO: 487262 - DNA, 60 bp, Artificial; identical to SEQ ID NO: 102152
  Synthetic oligonucleotide

SEQ ID NO: 487263 - DNA, 59 bp, Artificial; identical to SEQ ID NO: 19449
  Synthetic oligonucleotide

SEQ ID NO: 487264 - DNA, 58 bp, Artificial; identical to SEQ ID NO: 6316
  Synthetic oligonucleotide

SEQ ID NO: 487265 - DNA, 57 bp, Artificial; identical to SEQ ID NO: 18227
  Synthetic oligonucleotide

SEQ ID NO: 487266 - DNA, 50 bp, Artificial; identical to SEQ ID NO: 14286
  Synthetic oligonucleotide

SEQ ID NO: 487267 - DNA, 55 bp, Artificial; identical to SEQ ID NO: 10138
  Synthetic oligonucleotide

SEQ ID NO: 487268 - DNA, 57 bp, Artificial; identical to SEQ ID NO: 17274
  Synthetic oligonucleotide

SEQ ID NO: 487269 - DNA, 60 bp, Artificial; identical to SEQ ID NO: 35230
  Synthetic oligonucleotide

SEQ ID NO: 487270 - DNA, 59 bp, Artificial; identical to SEQ ID NO: 18358
  Synthetic oligonucleotide

SEQ ID NO: 487271 - DNA, 60 bp, Artificial; identical to SEQ ID NO: 9154
  Synthetic oligonucleotide

SEQ ID NO: 487272 - DNA, 60 bp, Artificial; identical to SEQ ID NO: 15620
  Synthetic oligonucleotide

SEQ ID NO: 487273 - DNA, 53 bp, Artificial; identical to SEQ ID NO: 13925
  Synthetic oligonucleotide

SEQ ID NO: 487274 - DNA, 54 bp, Artificial; identical to SEQ ID NO: 20559
  Synthetic oligonucleotide

SEQ ID NO: 487275 - DNA, 55 bp, Artificial; identical to SEQ ID NO: 13642
  Synthetic oligonucleotide

SEQ ID NO: 487276 - DNA, 60 bp, Artificial; identical to SEQ ID NO: 12204
  Synthetic oligonucleotide

SEQ ID NO: 487277 - DNA, 60 bp, Artificial; identical to SEQ ID NO: 11882
  Synthetic oligonucleotide

SEQ ID NO: 487278 - DNA, 60 bp, Artificial; identical to SEQ ID NO: 10419
  Synthetic oligonucleotide

SEQ ID NO: 487279 - DNA, 58 bp, Artificial; identical to SEQ ID NO: 18722
  Synthetic oligonucleotide

SEQ ID NO: 487280 - DNA, 54 bp, Artificial; identical to SEQ ID NO: 10565
  Synthetic oligonucleotide

SEQ ID NO: 487281 - DNA, 55 bp, Artificial; identical to SEQ ID NO: 14058
  Synthetic oligonucleotide

SEQ ID NO: 487282 - DNA, 60 bp, Artificial; identical to SEQ ID NO: 9280
  Synthetic oligonucleotide

SEQ ID NO: 487283 - DNA, 56 bp, Artificial; identical to SEQ ID NO: 10814
  Synthetic oligonucleotide

SEQ ID NO: 487284 - DNA, 58 bp, Artificial; identical to SEQ ID NO: 19057
  Synthetic oligonucleotide

SEQ ID NO: 487285 - DNA, 60 bp, Artificial; identical to SEQ ID NO: 8716
  Synthetic oligonucleotide

SEQ ID NO: 487286 - DNA, 54 bp, Artificial; identical to SEQ ID NO: 347
  Synthetic oligonucleotide

SEQ ID NO: 487287 - DNA, 57 bp, Artificial; identical to SEQ ID NO: 20195
  Synthetic oligonucleotide

SEQ ID NO: 487288 - DNA, 59 bp, Artificial; identical to SEQ ID NO: 19034
  Synthetic oligonucleotide

SEQ ID NO: 487289 - DNA, 55 bp, Artificial; identical to SEQ ID NO: 19143
  Synthetic oligonucleotide

SEQ ID NO: 487290 - DNA, 60 bp, Artificial; identical to SEQ ID NO: 83871
  Synthetic oligonucleotide

SEQ ID NO: 487291 - DNA, 59 bp, Artificial; identical to SEQ ID NO: 18537
  Synthetic oligonucleotide

SEQ ID NO: 487292 - DNA, 60 bp, Artificial; identical to SEQ ID NO: 15822
  Synthetic oligonucleotide

SEQ ID NO: 487293 - DNA, 60 bp, Artificial; identical to SEQ ID NO: 6454
  Synthetic oligonucleotide

SEQ ID NO: 487294 - DNA, 56 bp, Artificial; identical to SEQ ID NO: 19853
  Synthetic oligonucleotide

SEQ ID NO: 487295 - DNA, 57 bp, Artificial; identical to SEQ ID NO: 11272
  Synthetic oligonucleotide

SEQ ID NO: 487296 - DNA, 56 bp, Artificial; identical to SEQ ID NO: 15369
  Synthetic oligonucleotide

SEQ ID NO: 487297 - DNA, 56 bp, Artificial; identical to SEQ ID NO: 19855
  Synthetic oligonucleotide

SEQ ID NO: 487298 - DNA, 52 bp, Artificial; identical to SEQ ID NO: 9113
  Synthetic oligonucleotide

SEQ ID NO: 487299 - DNA, 60 bp, Artificial; identical to SEQ ID NO: 11985
  Synthetic oligonucleotide

SEQ ID NO: 487300 - DNA, 60 bp, Artificial; identical to SEQ ID NO: 10434
  Synthetic oligonucleotide

SEQ ID NO: 487301 - DNA, 58 bp, Artificial; identical to SEQ ID NO: 18861
  Synthetic oligonucleotide

SEQ ID NO: 487302 - DNA, 58 bp, Artificial; identical to SEQ ID NO: 17136
  Synthetic oligonucleotide

SEQ ID NO: 487303 - DNA, 59 bp, Artificial; identical to SEQ ID NO: 19095
  Synthetic oligonucleotide

SEQ ID NO: 487304 - DNA, 55 bp, Artificial; identical to SEQ ID NO: 8643
  Synthetic oligonucleotide

SEQ ID NO: 487305 - DNA, 58 bp, Artificial; identical to SEQ ID NO: 9213
  Synthetic oligonucleotide

SEQ ID NO: 487306 - DNA, 60 bp, Artificial; identical to SEQ ID NO: 106920
  Synthetic oligonucleotide

SEQ ID NO: 487307 - DNA, 60 bp, Artificial; identical to SEQ ID NO: 13927
  Synthetic oligonucleotide

SEQ ID NO: 487308 - DNA, 60 bp, Artificial; identical to SEQ ID NO: 9419
  Synthetic oligonucleotide

SEQ ID NO: 487309 - DNA, 57 bp, Artificial; identical to SEQ ID NO: 20441
  Synthetic oligonucleotide

SEQ ID NO: 487310 - DNA, 60 bp, Artificial; identical to SEQ ID NO: 9489
  Synthetic oligonucleotide

SEQ ID NO: 487311 - DNA, 58 bp, Artificial; identical to SEQ ID NO: 16098
  Synthetic oligonucleotide

SEQ ID NO: 487312 - DNA, 58 bp, Artificial; identical to SEQ ID NO: 16154
  Synthetic oligonucleotide

SEQ ID NO: 487313 - DNA, 51 bp, Artificial; identical to SEQ ID NO: 12199
  Synthetic oligonucleotide

SEQ ID NO: 487314 - DNA, 58 bp, Artificial; identical to SEQ ID NO: 16146
  Synthetic oligonucleotide

SEQ ID NO: 487315 - DNA, 60 bp, Artificial; identical to SEQ ID NO: 10451
  Synthetic oligonucleotide

SEQ ID NO: 487316 - DNA, 59 bp, Artificial; identical to SEQ ID NO: 15231
  Synthetic oligonucleotide

SEQ ID NO: 487317 - DNA, 54 bp, Artificial; identical to SEQ ID NO: 19819
  Synthetic oligonucleotide

SEQ ID NO: 487318 - DNA, 59 bp, Artificial; identical to SEQ ID NO: 17852
  Synthetic oligonucleotide

SEQ ID NO: 487319 - DNA, 60 bp, Artificial; identical to SEQ ID NO: 7556
  Synthetic oligonucleotide

SEQ ID NO: 487320 - DNA, 60 bp, Artificial; identical to SEQ ID NO: 10992
  Synthetic oligonucleotide

SEQ ID NO: 487321 - DNA, 60 bp, Artificial; identical to SEQ ID NO: 7419
  Synthetic oligonucleotide

SEQ ID NO: 487322 - DNA, 60 bp, Artificial; identical to SEQ ID NO: 60952
  Synthetic oligonucleotide

SEQ ID NO: 487323 - DNA, 56 bp, Artificial; identical to SEQ ID NO: 18097
  Synthetic oligonucleotide

SEQ ID NO: 487324 - DNA, 59 bp, Artificial; identical to SEQ ID NO: 19827
  Synthetic oligonucleotide

SEQ ID NO: 487325 - DNA, 60 bp, Artificial; identical to SEQ ID NO: 7769
  Synthetic oligonucleotide

SEQ ID NO: 487326 - DNA, 60 bp, Artificial; identical to SEQ ID NO: 6288
  Synthetic oligonucleotide

SEQ ID NO: 487327 - DNA, 60 bp, Artificial; identical to SEQ ID NO: 14389
  Synthetic oligonucleotide

SEQ ID NO: 487328 - DNA, 53 bp, Artificial; identical to SEQ ID NO: 18474
  Synthetic oligonucleotide

SEQ ID NO: 487329 - DNA, 53 bp, Artificial; identical to SEQ ID NO: 7216
  Synthetic oligonucleotide

SEQ ID NO: 487330 - DNA, 56 bp, Artificial; identical to SEQ ID NO: 16314
  Synthetic oligonucleotide

SEQ ID NO: 487331 - DNA, 60 bp, Artificial; identical to SEQ ID NO: 6543
  Synthetic oligonucleotide

SEQ ID NO: 487332 - DNA, 60 bp, Artificial; identical to SEQ ID NO: 6598
  Synthetic oligonucleotide

SEQ ID NO: 487333 - DNA, 59 bp, Artificial; identical to SEQ ID NO: 16425
  Synthetic oligonucleotide

SEQ ID NO: 487334 - DNA, 60 bp, Artificial; identical to SEQ ID NO: 10577
  Synthetic oligonucleotide

SEQ ID NO: 487335 - DNA, 53 bp, Artificial; identical to SEQ ID NO: 18001
  Synthetic oligonucleotide

SEQ ID NO: 487336 - DNA, 55 bp, Artificial; identical to SEQ ID NO: 13154
  Synthetic oligonucleotide

SEQ ID NO: 487337 - DNA, 60 bp, Artificial; identical to SEQ ID NO: 119
  Synthetic oligonucleotide

SEQ ID NO: 487338 - DNA, 50 bp, Artificial; identical to SEQ ID NO: 16460
  Synthetic oligonucleotide

SEQ ID NO: 487339 - DNA, 53 bp, Artificial; identical to SEQ ID NO: 18073
  Synthetic oligonucleotide

SEQ ID NO: 487340 - DNA, 60 bp, Artificial; identical to SEQ ID NO: 11644
  Synthetic oligonucleotide

SEQ ID NO: 487341 - DNA, 51 bp, Artificial; identical to SEQ ID NO: 18099
  Synthetic oligonucleotide

SEQ ID NO: 487342 - DNA, 60 bp, Artificial; identical to SEQ ID NO: 105741
  Synthetic oligonucleotide

SEQ ID NO: 487343 - DNA, 60 bp, Artificial; identical to SEQ ID NO: 113068
  Synthetic oligonucleotide

SEQ ID NO: 487344 - DNA, 60 bp, Artificial; identical to SEQ ID NO: 64961
  Synthetic oligonucleotide

SEQ ID NO: 487345 - DNA, 60 bp, Artificial; identical to SEQ ID NO: 11962
  Synthetic oligonucleotide

SEQ ID NO: 487346 - DNA, 60 bp, Artificial; identical to SEQ ID NO: 14827
  Synthetic oligonucleotide

SEQ ID NO: 487347 - DNA, 53 bp, Artificial; identical to SEQ ID NO: 11055
  Synthetic oligonucleotide

SEQ ID NO: 487348 - DNA, 57 bp, Artificial; identical to SEQ ID NO: 11183
  Synthetic oligonucleotide

SEQ ID NO: 487349 - DNA, 59 bp, Artificial; identical to SEQ ID NO: 16094
  Synthetic oligonucleotide

SEQ ID NO: 487350 - DNA, 56 bp, Artificial; identical to SEQ ID NO: 19573
  Synthetic oligonucleotide

SEQ ID NO: 487351 - DNA, 60 bp, Artificial; identical to SEQ ID NO: 6713
  Synthetic oligonucleotide

SEQ ID NO: 487352 - DNA, 59 bp, Artificial; identical to SEQ ID NO: 18495
  Synthetic oligonucleotide

SEQ ID NO: 487353 - DNA, 60 bp, Artificial; identical to SEQ ID NO: 5797
  Synthetic oligonucleotide

SEQ ID NO: 487354 - DNA, 60 bp, Artificial; identical to SEQ ID NO: 6764
  Synthetic oligonucleotide

SEQ ID NO: 487355 - DNA, 60 bp, Artificial; identical to SEQ ID NO: 12234
  Synthetic oligonucleotide

SEQ ID NO: 487356 - DNA, 54 bp, Artificial; identical to SEQ ID NO: 19248
  Synthetic oligonucleotide

SEQ ID NO: 487357 - DNA, 60 bp, Artificial; identical to SEQ ID NO: 10029
  Synthetic oligonucleotide

SEQ ID NO: 487358 - DNA, 57 bp, Artificial; identical to SEQ ID NO: 16151
  Synthetic oligonucleotide

SEQ ID NO: 487359 - DNA, 59 bp, Artificial; identical to SEQ ID NO: 19542
  Synthetic oligonucleotide

SEQ ID NO: 487360 - DNA, 59 bp, Artificial; identical to SEQ ID NO: 17881
  Synthetic oligonucleotide

SEQ ID NO: 487361 - DNA, 56 bp, Artificial; identical to SEQ ID NO: 17037
  Synthetic oligonucleotide

SEQ ID NO: 487362 - DNA, 54 bp, Artificial; identical to SEQ ID NO: 15930
  Synthetic oligonucleotide

SEQ ID NO: 487363 - DNA, 54 bp, Artificial; identical to SEQ ID NO: 10165
  Synthetic oligonucleotide

SEQ ID NO: 487364 - DNA, 54 bp, Artificial; identical to SEQ ID NO: 17496
  Synthetic oligonucleotide

SEQ ID NO: 487365 - DNA, 60 bp, Artificial; identical to SEQ ID NO: 11345
  Synthetic oligonucleotide

SEQ ID NO: 487366 - DNA, 56 bp, Artificial; identical to SEQ ID NO: 14992
  Synthetic oligonucleotide

SEQ ID NO: 487367 - DNA, 54 bp, Artificial; identical to SEQ ID NO: 16231
  Synthetic oligonucleotide

SEQ ID NO: 487368 - DNA, 59 bp, Artificial; identical to SEQ ID NO: 20589
  Synthetic oligonucleotide

SEQ ID NO: 487369 - DNA, 52 bp, Artificial; identical to SEQ ID NO: 10160
  Synthetic oligonucleotide

SEQ ID NO: 487370 - DNA, 60 bp, Artificial; identical to SEQ ID NO: 5852
  Synthetic oligonucleotide

SEQ ID NO: 487371 - DNA, 56 bp, Artificial; identical to SEQ ID NO: 19226
  Synthetic oligonucleotide

SEQ ID NO: 487372 - DNA, 54 bp, Artificial; identical to SEQ ID NO: 203
  Synthetic oligonucleotide

SEQ ID NO: 487373 - DNA, 57 bp, Artificial; identical to SEQ ID NO: 5792
  Synthetic oligonucleotide

SEQ ID NO: 487374 - DNA, 50 bp, Artificial; identical to SEQ ID NO: 12670
  Synthetic oligonucleotide

SEQ ID NO: 487375 - DNA, 51 bp, Artificial; identical to SEQ ID NO: 16694
  Synthetic oligonucleotide

SEQ ID NO: 487376 - DNA, 59 bp, Artificial; identical to SEQ ID NO: 6433
  Synthetic oligonucleotide

SEQ ID NO: 487377 - DNA, 51 bp, Artificial; identical to SEQ ID NO: 7803
  Synthetic oligonucleotide

SEQ ID NO: 487378 - DNA, 60 bp, Artificial; identical to SEQ ID NO: 11465
  Synthetic oligonucleotide

SEQ ID NO: 487379 - DNA, 60 bp, Artificial; identical to SEQ ID NO: 15242
  Synthetic oligonucleotide

SEQ ID NO: 487380 - DNA, 55 bp, Artificial; identical to SEQ ID NO: 16658
  Synthetic oligonucleotide

SEQ ID NO: 487381 - DNA, 60 bp, Artificial; identical to SEQ ID NO: 10330
  Synthetic oligonucleotide

SEQ ID NO: 487382 - DNA, 55 bp, Artificial; identical to SEQ ID NO: 18400
  Synthetic oligonucleotide

SEQ ID NO: 487383 - DNA, 56 bp, Artificial; identical to SEQ ID NO: 6368
  Synthetic oligonucleotide

SEQ ID NO: 487384 - DNA, 60 bp, Artificial; identical to SEQ ID NO: 13058
  Synthetic oligonucleotide

SEQ ID NO: 487385 - DNA, 56 bp, Artificial; identical to SEQ ID NO: 7218
  Synthetic oligonucleotide

SEQ ID NO: 487386 - DNA, 51 bp, Artificial; identical to SEQ ID NO: 8535
  Synthetic oligonucleotide

SEQ ID NO: 487387 - DNA, 55 bp, Artificial; identical to SEQ ID NO: 14083
  Synthetic oligonucleotide

SEQ ID NO: 487388 - DNA, 60 bp, Artificial; identical to SEQ ID NO: 12588
  Synthetic oligonucleotide

SEQ ID NO: 487389 - DNA, 55 bp, Artificial; identical to SEQ ID NO: 10721
  Synthetic oligonucleotide

SEQ ID NO: 487390 - DNA, 55 bp, Artificial; identical to SEQ ID NO: 7749
  Synthetic oligonucleotide

SEQ ID NO: 487391 - DNA, 60 bp, Artificial; identical to SEQ ID NO: 117521
  Synthetic oligonucleotide

SEQ ID NO: 487392 - DNA, 55 bp, Artificial; identical to SEQ ID NO: 8369
  Synthetic oligonucleotide

SEQ ID NO: 487393 - DNA, 60 bp, Artificial; identical to SEQ ID NO: 11926
  Synthetic oligonucleotide

SEQ ID NO: 487394 - DNA, 60 bp, Artificial; identical to SEQ ID NO: 12472
  Synthetic oligonucleotide

SEQ ID NO: 487395 - DNA, 53 bp, Artificial; identical to SEQ ID NO: 14834
  Synthetic oligonucleotide

SEQ ID NO: 487396 - DNA, 60 bp, Artificial; identical to SEQ ID NO: 121145
  Synthetic oligonucleotide

SEQ ID NO: 487397 - DNA, 55 bp, Artificial; identical to SEQ ID NO: 6866
  Synthetic oligonucleotide

SEQ ID NO: 487398 - DNA, 55 bp, Artificial; identical to SEQ ID NO: 6589
  Synthetic oligonucleotide

SEQ ID NO: 487399 - DNA, 54 bp, Artificial; identical to SEQ ID NO: 16994
  Synthetic oligonucleotide

SEQ ID NO: 487400 - DNA, 55 bp, Artificial; identical to SEQ ID NO: 10522
  Synthetic oligonucleotide

SEQ ID NO: 487401 - DNA, 60 bp, Artificial; identical to SEQ ID NO: 9414
  Synthetic oligonucleotide

SEQ ID NO: 487402 - DNA, 57 bp, Artificial; identical to SEQ ID NO: 16255
  Synthetic oligonucleotide

SEQ ID NO: 487403 - DNA, 60 bp, Artificial; identical to SEQ ID NO: 11887
  Synthetic oligonucleotide

SEQ ID NO: 487404 - DNA, 58 bp, Artificial; identical to SEQ ID NO: 18797
  Synthetic oligonucleotide

SEQ ID NO: 487405 - DNA, 60 bp, Artificial; identical to SEQ ID NO: 12331
  Synthetic oligonucleotide

SEQ ID NO: 487406 - DNA, 60 bp, Artificial; identical to SEQ ID NO: 9665
  Synthetic oligonucleotide

SEQ ID NO: 487407 - DNA, 56 bp, Artificial; identical to SEQ ID NO: 18024
  Synthetic oligonucleotide

SEQ ID NO: 487408 - DNA, 58 bp, Artificial; identical to SEQ ID NO: 20257
  Synthetic oligonucleotide

SEQ ID NO: 487409 - DNA, 58 bp, Artificial; identical to SEQ ID NO: 15328
  Synthetic oligonucleotide

SEQ ID NO: 487410 - DNA, 55 bp, Artificial; identical to SEQ ID NO: 6083
  Synthetic oligonucleotide

SEQ ID NO: 487411 - DNA, 51 bp, Artificial; identical to SEQ ID NO: 6147
  Synthetic oligonucleotide

SEQ ID NO: 487412 - DNA, 59 bp, Artificial; identical to SEQ ID NO: 19677
  Synthetic oligonucleotide

SEQ ID NO: 487413 - DNA, 59 bp, Artificial; identical to SEQ ID NO: 17827
  Synthetic oligonucleotide

SEQ ID NO: 487414 - DNA, 60 bp, Artificial; identical to SEQ ID NO: 8419
  Synthetic oligonucleotide

SEQ ID NO: 487415 - DNA, 55 bp, Artificial; identical to SEQ ID NO: 6510
  Synthetic oligonucleotide

SEQ ID NO: 487416 - DNA, 55 bp, Artificial; identical to SEQ ID NO: 8455
  Synthetic oligonucleotide

SEQ ID NO: 487417 - DNA, 60 bp, Artificial; identical to SEQ ID NO: 10834
  Synthetic oligonucleotide

SEQ ID NO: 487418 - DNA, 52 bp, Artificial; identical to SEQ ID NO: 17045
  Synthetic oligonucleotide

SEQ ID NO: 487419 - DNA, 56 bp, Artificial; identical to SEQ ID NO: 11375
  Synthetic oligonucleotide

SEQ ID NO: 487420 - DNA, 51 bp, Artificial; identical to SEQ ID NO: 6032
  Synthetic oligonucleotide

SEQ ID NO: 487421 - DNA, 59 bp, Artificial; identical to SEQ ID NO: 17809
  Synthetic oligonucleotide

SEQ ID NO: 487422 - DNA, 60 bp, Artificial; identical to SEQ ID NO: 50086
  Synthetic oligonucleotide

SEQ ID NO: 487423 - DNA, 57 bp, Artificial; identical to SEQ ID NO: 11316
  Synthetic oligonucleotide

SEQ ID NO: 487424 - DNA, 52 bp, Artificial; identical to SEQ ID NO: 7866
  Synthetic oligonucleotide

SEQ ID NO: 487425 - DNA, 60 bp, Artificial; identical to SEQ ID NO: 8044
  Synthetic oligonucleotide

SEQ ID NO: 487426 - DNA, 60 bp, Artificial; identical to SEQ ID NO: 7069
  Synthetic oligonucleotide

SEQ ID NO: 487427 - DNA, 60 bp, Artificial; identical to SEQ ID NO: 7332
  Synthetic oligonucleotide

SEQ ID NO: 487428 - DNA, 56 bp, Artificial; identical to SEQ ID NO: 17326
  Synthetic oligonucleotide

SEQ ID NO: 487429 - DNA, 54 bp, Artificial; identical to SEQ ID NO: 161
  Synthetic oligonucleotide

SEQ ID NO: 487430 - DNA, 60 bp, Artificial; identical to SEQ ID NO: 12203
  Synthetic oligonucleotide

SEQ ID NO: 487431 - DNA, 55 bp, Artificial; identical to SEQ ID NO: 12152
  Synthetic oligonucleotide

SEQ ID NO: 487432 - DNA, 60 bp, Artificial; identical to SEQ ID NO: 11735
  Synthetic oligonucleotide

SEQ ID NO: 487433 - DNA, 57 bp, Artificial; identical to SEQ ID NO: 18796
  Synthetic oligonucleotide

SEQ ID NO: 487434 - DNA, 60 bp, Artificial; identical to SEQ ID NO: 7373
  Synthetic oligonucleotide

SEQ ID NO: 487435 - DNA, 60 bp, Artificial; identical to SEQ ID NO: 104660
  Synthetic oligonucleotide

SEQ ID NO: 487436 - DNA, 57 bp, Artificial; identical to SEQ ID NO: 6652
  Synthetic oligonucleotide

SEQ ID NO: 487437 - DNA, 53 bp, Artificial; identical to SEQ ID NO: 16516
  Synthetic oligonucleotide

SEQ ID NO: 487438 - DNA, 55 bp, Artificial; identical to SEQ ID NO: 20460
  Synthetic oligonucleotide

SEQ ID NO: 487439 - DNA, 60 bp, Artificial; identical to SEQ ID NO: 7034
  Synthetic oligonucleotide

SEQ ID NO: 487440 - DNA, 53 bp, Artificial; identical to SEQ ID NO: 11540
  Synthetic oligonucleotide

SEQ ID NO: 487441 - DNA, 55 bp, Artificial; identical to SEQ ID NO: 7182
  Synthetic oligonucleotide

SEQ ID NO: 487442 - DNA, 60 bp, Artificial; identical to SEQ ID NO: 120724
  Synthetic oligonucleotide

SEQ ID NO: 487443 - DNA, 60 bp, Artificial; identical to SEQ ID NO: 14231
  Synthetic oligonucleotide

SEQ ID NO: 487444 - DNA, 59 bp, Artificial; identical to SEQ ID NO: 14875
  Synthetic oligonucleotide

SEQ ID NO: 487445 - DNA, 55 bp, Artificial; identical to SEQ ID NO: 16752
  Synthetic oligonucleotide

SEQ ID NO: 487446 - DNA, 60 bp, Artificial; identical to SEQ ID NO: 10240
  Synthetic oligonucleotide

SEQ ID NO: 487447 - DNA, 57 bp, Artificial; identical to SEQ ID NO: 16777
  Synthetic oligonucleotide

SEQ ID NO: 487448 - DNA, 57 bp, Artificial; identical to SEQ ID NO: 16046
  Synthetic oligonucleotide

SEQ ID NO: 487449 - DNA, 55 bp, Artificial; identical to SEQ ID NO: 5848
  Synthetic oligonucleotide

SEQ ID NO: 487450 - DNA, 57 bp, Artificial; identical to SEQ ID NO: 18654
  Synthetic oligonucleotide

SEQ ID NO: 487451 - DNA, 60 bp, Artificial; identical to SEQ ID NO: 11495
  Synthetic oligonucleotide

SEQ ID NO: 487452 - DNA, 55 bp, Artificial; identical to SEQ ID NO: 17165
  Synthetic oligonucleotide

SEQ ID NO: 487453 - DNA, 55 bp, Artificial; identical to SEQ ID NO: 6987
  Synthetic oligonucleotide

SEQ ID NO: 487454 - DNA, 60 bp, Artificial; identical to SEQ ID NO: 6937
  Synthetic oligonucleotide

SEQ ID NO: 487455 - DNA, 60 bp, Artificial; identical to SEQ ID NO: 9236
  Synthetic oligonucleotide

SEQ ID NO: 487456 - DNA, 59 bp, Artificial; identical to SEQ ID NO: 17861
  Synthetic oligonucleotide

SEQ ID NO: 487457 - DNA, 56 bp, Artificial; identical to SEQ ID NO: 11595
  Synthetic oligonucleotide

SEQ ID NO: 487458 - DNA, 54 bp, Artificial; identical to SEQ ID NO: 11381
  Synthetic oligonucleotide

SEQ ID NO: 487459 - DNA, 60 bp, Artificial; identical to SEQ ID NO: 117535
  Synthetic oligonucleotide

SEQ ID NO: 487460 - DNA, 60 bp, Artificial; identical to SEQ ID NO: 14426
  Synthetic oligonucleotide

SEQ ID NO: 487461 - DNA, 55 bp, Artificial; identical to SEQ ID NO: 12921
  Synthetic oligonucleotide

SEQ ID NO: 487462 - DNA, 50 bp, Artificial; identical to SEQ ID NO: 15202
  Synthetic oligonucleotide

SEQ ID NO: 487463 - DNA, 60 bp, Artificial; identical to SEQ ID NO: 8746
  Synthetic oligonucleotide

SEQ ID NO: 487464 - DNA, 60 bp, Artificial; identical to SEQ ID NO: 10726
  Synthetic oligonucleotide

SEQ ID NO: 487465 - DNA, 52 bp, Artificial; identical to SEQ ID NO: 15740
  Synthetic oligonucleotide

SEQ ID NO: 487466 - DNA, 59 bp, Artificial; identical to SEQ ID NO: 11191
  Synthetic oligonucleotide

SEQ ID NO: 487467 - DNA, 51 bp, Artificial; identical to SEQ ID NO: 12930
  Synthetic oligonucleotide

SEQ ID NO: 487468 - DNA, 58 bp, Artificial; identical to SEQ ID NO: 18814
  Synthetic oligonucleotide

SEQ ID NO: 487469 - DNA, 55 bp, Artificial; identical to SEQ ID NO: 20553
  Synthetic oligonucleotide

SEQ ID NO: 487470 - DNA, 60 bp, Artificial; identical to SEQ ID NO: 10521
  Synthetic oligonucleotide

SEQ ID NO: 487471 - DNA, 58 bp, Artificial; identical to SEQ ID NO: 7375
  Synthetic oligonucleotide

SEQ ID NO: 487472 - DNA, 59 bp, Artificial; identical to SEQ ID NO: 17719
  Synthetic oligonucleotide

SEQ ID NO: 487473 - DNA, 54 bp, Artificial; identical to SEQ ID NO: 7023
  Synthetic oligonucleotide

SEQ ID NO: 487474 - DNA, 60 bp, Artificial; identical to SEQ ID NO: 10526
  Synthetic oligonucleotide

SEQ ID NO: 487475 - DNA, 60 bp, Artificial; identical to SEQ ID NO: 7611
  Synthetic oligonucleotide

SEQ ID NO: 487476 - DNA, 60 bp, Artificial; identical to SEQ ID NO: 9541
  Synthetic oligonucleotide

SEQ ID NO: 487477 - DNA, 51 bp, Artificial; identical to SEQ ID NO: 14688
  Synthetic oligonucleotide

SEQ ID NO: 487478 - DNA, 60 bp, Artificial; identical to SEQ ID NO: 49264
  Synthetic oligonucleotide

SEQ ID NO: 487479 - DNA, 57 bp, Artificial; identical to SEQ ID NO: 10829
  Synthetic oligonucleotide

SEQ ID NO: 487480 - DNA, 60 bp, Artificial; identical to SEQ ID NO: 13372
  Synthetic oligonucleotide

SEQ ID NO: 487481 - DNA, 60 bp, Artificial; identical to SEQ ID NO: 15035
  Synthetic oligonucleotide

SEQ ID NO: 487482 - DNA, 60 bp, Artificial; identical to SEQ ID NO: 106125
  Synthetic oligonucleotide

SEQ ID NO: 487483 - DNA, 60 bp, Artificial; identical to SEQ ID NO: 39407
  Synthetic oligonucleotide

SEQ ID NO: 487484 - DNA, 60 bp, Artificial; identical to SEQ ID NO: 9140
  Synthetic oligonucleotide

SEQ ID NO: 487485 - DNA, 60 bp, Artificial; identical to SEQ ID NO: 9237
  Synthetic oligonucleotide

SEQ ID NO: 487486 - DNA, 57 bp, Artificial; identical to SEQ ID NO: 17646
  Synthetic oligonucleotide

SEQ ID NO: 487487 - DNA, 51 bp, Artificial; identical to SEQ ID NO: 9781
  Synthetic oligonucleotide

SEQ ID NO: 487488 - DNA, 60 bp, Artificial; identical to SEQ ID NO: 29042
  Synthetic oligonucleotide

SEQ ID NO: 487489 - DNA, 60 bp, Artificial; identical to SEQ ID NO: 13378
  Synthetic oligonucleotide

SEQ ID NO: 487490 - DNA, 58 bp, Artificial; identical to SEQ ID NO: 16940
  Synthetic oligonucleotide

SEQ ID NO: 487491 - DNA, 59 bp, Artificial; identical to SEQ ID NO: 16745
  Synthetic oligonucleotide

SEQ ID NO: 487492 - DNA, 60 bp, Artificial; identical to SEQ ID NO: 15593
  Synthetic oligonucleotide

SEQ ID NO: 487493 - DNA, 55 bp, Artificial; identical to SEQ ID NO: 8013
  Synthetic oligonucleotide

SEQ ID NO: 487494 - DNA, 59 bp, Artificial; identical to SEQ ID NO: 18729
  Synthetic oligonucleotide

SEQ ID NO: 487495 - DNA, 60 bp, Artificial; identical to SEQ ID NO: 9065
  Synthetic oligonucleotide

SEQ ID NO: 487496 - DNA, 58 bp, Artificial; identical to SEQ ID NO: 15982
  Synthetic oligonucleotide

SEQ ID NO: 487497 - DNA, 60 bp, Artificial; identical to SEQ ID NO: 112944
  Synthetic oligonucleotide

SEQ ID NO: 487498 - DNA, 53 bp, Artificial; identical to SEQ ID NO: 19074
  Synthetic oligonucleotide

SEQ ID NO: 487499 - DNA, 57 bp, Artificial; identical to SEQ ID NO: 18664
  Synthetic oligonucleotide

SEQ ID NO: 487500 - DNA, 54 bp, Artificial; identical to SEQ ID NO: 16023
  Synthetic oligonucleotide

SEQ ID NO: 487501 - DNA, 56 bp, Artificial; identical to SEQ ID NO: 16596
  Synthetic oligonucleotide

SEQ ID NO: 487502 - DNA, 58 bp, Artificial; identical to SEQ ID NO: 19973
  Synthetic oligonucleotide

SEQ ID NO: 487503 - DNA, 53 bp, Artificial; identical to SEQ ID NO: 15649
  Synthetic oligonucleotide

SEQ ID NO: 487504 - DNA, 60 bp, Artificial; identical to SEQ ID NO: 7928
  Synthetic oligonucleotide

SEQ ID NO: 487505 - DNA, 53 bp, Artificial; identical to SEQ ID NO: 20529
  Synthetic oligonucleotide

SEQ ID NO: 487506 - DNA, 54 bp, Artificial; identical to SEQ ID NO: 16272
  Synthetic oligonucleotide

SEQ ID NO: 487507 - DNA, 55 bp, Artificial; identical to SEQ ID NO: 8904
  Synthetic oligonucleotide

SEQ ID NO: 487508 - DNA, 56 bp, Artificial; identical to SEQ ID NO: 19867
  Synthetic oligonucleotide

SEQ ID NO: 487509 - DNA, 57 bp, Artificial; identical to SEQ ID NO: 13071
  Synthetic oligonucleotide

SEQ ID NO: 487510 - DNA, 60 bp, Artificial; identical to SEQ ID NO: 10593
  Synthetic oligonucleotide

SEQ ID NO: 487511 - DNA, 55 bp, Artificial; identical to SEQ ID NO: 8840
  Synthetic oligonucleotide

SEQ ID NO: 487512 - DNA, 53 bp, Artificial; identical to SEQ ID NO: 14774
  Synthetic oligonucleotide

SEQ ID NO: 487513 - DNA, 57 bp, Artificial; identical to SEQ ID NO: 20228
  Synthetic oligonucleotide

SEQ ID NO: 487514 - DNA, 60 bp, Artificial; identical to SEQ ID NO: 11201
  Synthetic oligonucleotide

SEQ ID NO: 487515 - DNA, 58 bp, Artificial; identical to SEQ ID NO: 18986
  Synthetic oligonucleotide

SEQ ID NO: 487516 - DNA, 56 bp, Artificial; identical to SEQ ID NO: 19495
  Synthetic oligonucleotide

SEQ ID NO: 487517 - DNA, 57 bp, Artificial; identical to SEQ ID NO: 11769
  Synthetic oligonucleotide

SEQ ID NO: 487518 - DNA, 60 bp, Artificial; identical to SEQ ID NO: 106631
  Synthetic oligonucleotide

SEQ ID NO: 487519 - DNA, 60 bp, Artificial; identical to SEQ ID NO: 8300
  Synthetic oligonucleotide

SEQ ID NO: 487520 - DNA, 55 bp, Artificial; identical to SEQ ID NO: 13744
  Synthetic oligonucleotide

SEQ ID NO: 487521 - DNA, 55 bp, Artificial; identical to SEQ ID NO: 13711
  Synthetic oligonucleotide

SEQ ID NO: 487522 - DNA, 56 bp, Artificial; identical to SEQ ID NO: 7745
  Synthetic oligonucleotide

SEQ ID NO: 487523 - DNA, 60 bp, Artificial; identical to SEQ ID NO: 8199
  Synthetic oligonucleotide

SEQ ID NO: 487524 - DNA, 58 bp, Artificial; identical to SEQ ID NO: 20283
  Synthetic oligonucleotide

SEQ ID NO: 487525 - DNA, 60 bp, Artificial; identical to SEQ ID NO: 10524
  Synthetic oligonucleotide

SEQ ID NO: 487526 - DNA, 53 bp, Artificial; identical to SEQ ID NO: 16588
  Synthetic oligonucleotide

SEQ ID NO: 487527 - DNA, 54 bp, Artificial; identical to SEQ ID NO: 19560
  Synthetic oligonucleotide

SEQ ID NO: 487528 - DNA, 60 bp, Artificial; identical to SEQ ID NO: 7707
  Synthetic oligonucleotide

SEQ ID NO: 487529 - DNA, 59 bp, Artificial; identical to SEQ ID NO: 17477
  Synthetic oligonucleotide

SEQ ID NO: 487530 - DNA, 57 bp, Artificial; identical to SEQ ID NO: 17750
  Synthetic oligonucleotide

SEQ ID NO: 487531 - DNA, 52 bp, Artificial; identical to SEQ ID NO: 16453
  Synthetic oligonucleotide

SEQ ID NO: 487532 - DNA, 57 bp, Artificial; identical to SEQ ID NO: 17955
  Synthetic oligonucleotide

SEQ ID NO: 487533 - DNA, 58 bp, Artificial; identical to SEQ ID NO: 16500
  Synthetic oligonucleotide

SEQ ID NO: 487534 - DNA, 59 bp, Artificial; identical to SEQ ID NO: 11045
  Synthetic oligonucleotide

SEQ ID NO: 487535 - DNA, 60 bp, Artificial; identical to SEQ ID NO: 14803
  Synthetic oligonucleotide

SEQ ID NO: 487536 - DNA, 60 bp, Artificial; identical to SEQ ID NO: 10990
  Synthetic oligonucleotide

SEQ ID NO: 487537 - DNA, 60 bp, Artificial; identical to SEQ ID NO: 12955
  Synthetic oligonucleotide

SEQ ID NO: 487538 - DNA, 56 bp, Artificial; identical to SEQ ID NO: 17611
  Synthetic oligonucleotide

SEQ ID NO: 487539 - DNA, 60 bp, Artificial; identical to SEQ ID NO: 6263
  Synthetic oligonucleotide

SEQ ID NO: 487540 - DNA, 55 bp, Artificial; identical to SEQ ID NO: 12219
  Synthetic oligonucleotide

SEQ ID NO: 487541 - DNA, 55 bp, Artificial; identical to SEQ ID NO: 11612
  Synthetic oligonucleotide

SEQ ID NO: 487542 - DNA, 60 bp, Artificial; identical to SEQ ID NO: 15811
  Synthetic oligonucleotide

SEQ ID NO: 487543 - DNA, 60 bp, Artificial; identical to SEQ ID NO: 14251
  Synthetic oligonucleotide

SEQ ID NO: 487544 - DNA, 59 bp, Artificial; identical to SEQ ID NO: 18949
  Synthetic oligonucleotide

SEQ ID NO: 487545 - DNA, 60 bp, Artificial; identical to SEQ ID NO: 8302
  Synthetic oligonucleotide

SEQ ID NO: 487546 - DNA, 53 bp, Artificial; identical to SEQ ID NO: 10267
  Synthetic oligonucleotide

SEQ ID NO: 487547 - DNA, 58 bp, Artificial; identical to SEQ ID NO: 11877
  Synthetic oligonucleotide

SEQ ID NO: 487548 - DNA, 55 bp, Artificial; identical to SEQ ID NO: 13020
  Synthetic oligonucleotide

SEQ ID NO: 487549 - DNA, 57 bp, Artificial; identical to SEQ ID NO: 17698
  Synthetic oligonucleotide

SEQ ID NO: 487550 - DNA, 60 bp, Artificial; identical to SEQ ID NO: 13926
  Synthetic oligonucleotide

SEQ ID NO: 487551 - DNA, 60 bp, Artificial; identical to SEQ ID NO: 76310
  Synthetic oligonucleotide

SEQ ID NO: 487552 - DNA, 60 bp, Artificial; identical to SEQ ID NO: 33440
  Synthetic oligonucleotide

SEQ ID NO: 487553 - DNA, 60 bp, Artificial; identical to SEQ ID NO: 12394
  Synthetic oligonucleotide

SEQ ID NO: 487554 - DNA, 57 bp, Artificial; identical to SEQ ID NO: 14811
  Synthetic oligonucleotide

SEQ ID NO: 487555 - DNA, 55 bp, Artificial; identical to SEQ ID NO: 15919
  Synthetic oligonucleotide

SEQ ID NO: 487556 - DNA, 60 bp, Artificial; identical to SEQ ID NO: 15096
  Synthetic oligonucleotide

SEQ ID NO: 487557 - DNA, 53 bp, Artificial; identical to SEQ ID NO: 14511
  Synthetic oligonucleotide

SEQ ID NO: 487558 - DNA, 55 bp, Artificial; identical to SEQ ID NO: 7203
  Synthetic oligonucleotide

SEQ ID NO: 487559 - DNA, 55 bp, Artificial; identical to SEQ ID NO: 14966
  Synthetic oligonucleotide

SEQ ID NO: 487560 - DNA, 54 bp, Artificial; identical to SEQ ID NO: 15483
  Synthetic oligonucleotide

SEQ ID NO: 487561 - DNA, 59 bp, Artificial; identical to SEQ ID NO: 17543
  Synthetic oligonucleotide

SEQ ID NO: 487562 - DNA, 60 bp, Artificial; identical to SEQ ID NO: 12309
  Synthetic oligonucleotide

SEQ ID NO: 487563 - DNA, 56 bp, Artificial; identical to SEQ ID NO: 20082
  Synthetic oligonucleotide

SEQ ID NO: 487564 - DNA, 50 bp, Artificial; identical to SEQ ID NO: 15403
  Synthetic oligonucleotide

SEQ ID NO: 487565 - DNA, 60 bp, Artificial; identical to SEQ ID NO: 9717
  Synthetic oligonucleotide

SEQ ID NO: 487566 - DNA, 60 bp, Artificial; identical to SEQ ID NO: 15361
  Synthetic oligonucleotide

SEQ ID NO: 487567 - DNA, 60 bp, Artificial; identical to SEQ ID NO: 88581
  Synthetic oligonucleotide

SEQ ID NO: 487568 - DNA, 60 bp, Artificial; identical to SEQ ID NO: 10376
  Synthetic oligonucleotide

SEQ ID NO: 487569 - DNA, 60 bp, Artificial; identical to SEQ ID NO: 11398
  Synthetic oligonucleotide

SEQ ID NO: 487570 - DNA, 55 bp, Artificial; identical to SEQ ID NO: 20443
  Synthetic oligonucleotide

SEQ ID NO: 487571 - DNA, 60 bp, Artificial; identical to SEQ ID NO: 15636
  Synthetic oligonucleotide

SEQ ID NO: 487572 - DNA, 59 bp, Artificial; identical to SEQ ID NO: 17895
  Synthetic oligonucleotide

SEQ ID NO: 487573 - DNA, 58 bp, Artificial; identical to SEQ ID NO: 19777
  Synthetic oligonucleotide

SEQ ID NO: 487574 - DNA, 60 bp, Artificial; identical to SEQ ID NO: 7929
  Synthetic oligonucleotide

SEQ ID NO: 487575 - DNA, 60 bp, Artificial; identical to SEQ ID NO: 11548
  Synthetic oligonucleotide

SEQ ID NO: 487576 - DNA, 57 bp, Artificial; identical to SEQ ID NO: 16830
  Synthetic oligonucleotide

SEQ ID NO: 487577 - DNA, 55 bp, Artificial; identical to SEQ ID NO: 14722
  Synthetic oligonucleotide

SEQ ID NO: 487578 - DNA, 60 bp, Artificial; identical to SEQ ID NO: 7364
  Synthetic oligonucleotide

SEQ ID NO: 487579 - DNA, 60 bp, Artificial; identical to SEQ ID NO: 15677
  Synthetic oligonucleotide

SEQ ID NO: 487580 - DNA, 60 bp, Artificial; identical to SEQ ID NO: 409
  Synthetic oligonucleotide

SEQ ID NO: 487581 - DNA, 55 bp, Artificial; identical to SEQ ID NO: 10643
  Synthetic oligonucleotide

SEQ ID NO: 487582 - DNA, 58 bp, Artificial; identical to SEQ ID NO: 20030
  Synthetic oligonucleotide

SEQ ID NO: 487583 - DNA, 60 bp, Artificial; identical to SEQ ID NO: 9126
  Synthetic oligonucleotide

SEQ ID NO: 487584 - DNA, 60 bp, Artificial; identical to SEQ ID NO: 72407
  Synthetic oligonucleotide

SEQ ID NO: 487585 - DNA, 59 bp, Artificial; identical to SEQ ID NO: 130
  Synthetic oligonucleotide

SEQ ID NO: 487586 - DNA, 51 bp, Artificial; identical to SEQ ID NO: 14572
  Synthetic oligonucleotide

SEQ ID NO: 487587 - DNA, 60 bp, Artificial; identical to SEQ ID NO: 76600
  Synthetic oligonucleotide

SEQ ID NO: 487588 - DNA, 55 bp, Artificial; identical to SEQ ID NO: 12520
  Synthetic oligonucleotide

SEQ ID NO: 487589 - DNA, 59 bp, Artificial; identical to SEQ ID NO: 8209
  Synthetic oligonucleotide

SEQ ID NO: 487590 - DNA, 60 bp, Artificial; identical to SEQ ID NO: 12707
  Synthetic oligonucleotide

SEQ ID NO: 487591 - DNA, 50 bp, Artificial; identical to SEQ ID NO: 14939
  Synthetic oligonucleotide

SEQ ID NO: 487592 - DNA, 50 bp, Artificial; identical to SEQ ID NO: 14938
  Synthetic oligonucleotide

SEQ ID NO: 487593 - DNA, 60 bp, Artificial; identical to SEQ ID NO: 11245
  Synthetic oligonucleotide

SEQ ID NO: 487594 - DNA, 60 bp, Artificial; identical to SEQ ID NO: 12830
  Synthetic oligonucleotide

SEQ ID NO: 487595 - DNA, 58 bp, Artificial; identical to SEQ ID NO: 18164
  Synthetic oligonucleotide

SEQ ID NO: 487596 - DNA, 55 bp, Artificial; identical to SEQ ID NO: 9176
  Synthetic oligonucleotide

SEQ ID NO: 487597 - DNA, 55 bp, Artificial; identical to SEQ ID NO: 15024
  Synthetic oligonucleotide

SEQ ID NO: 487598 - DNA, 59 bp, Artificial; identical to SEQ ID NO: 19575
  Synthetic oligonucleotide

SEQ ID NO: 487599 - DNA, 57 bp, Artificial; identical to SEQ ID NO: 18045
  Synthetic oligonucleotide

SEQ ID NO: 487600 - DNA, 58 bp, Artificial; identical to SEQ ID NO: 13008
  Synthetic oligonucleotide

SEQ ID NO: 487601 - DNA, 55 bp, Artificial; identical to SEQ ID NO: 7282
  Synthetic oligonucleotide

SEQ ID NO: 487602 - DNA, 58 bp, Artificial; identical to SEQ ID NO: 20583
  Synthetic oligonucleotide

SEQ ID NO: 487603 - DNA, 54 bp, Artificial; identical to SEQ ID NO: 16519
  Synthetic oligonucleotide

SEQ ID NO: 487604 - DNA, 60 bp, Artificial; identical to SEQ ID NO: 10832
  Synthetic oligonucleotide

SEQ ID NO: 487605 - DNA, 58 bp, Artificial; identical to SEQ ID NO: 18090
  Synthetic oligonucleotide

SEQ ID NO: 487606 - DNA, 60 bp, Artificial; identical to SEQ ID NO: 10887
  Synthetic oligonucleotide

SEQ ID NO: 487607 - DNA, 60 bp, Artificial; identical to SEQ ID NO: 11123
  Synthetic oligonucleotide

SEQ ID NO: 487608 - DNA, 60 bp, Artificial; identical to SEQ ID NO: 7099
  Synthetic oligonucleotide

SEQ ID NO: 487609 - DNA, 60 bp, Artificial; identical to SEQ ID NO: 111256
  Synthetic oligonucleotide

SEQ ID NO: 487610 - DNA, 60 bp, Artificial; identical to SEQ ID NO: 8647
  Synthetic oligonucleotide

SEQ ID NO: 487611 - DNA, 53 bp, Artificial; identical to SEQ ID NO: 9227
  Synthetic oligonucleotide

SEQ ID NO: 487612 - DNA, 56 bp, Artificial; identical to SEQ ID NO: 12856
  Synthetic oligonucleotide

SEQ ID NO: 487613 - DNA, 59 bp, Artificial; identical to SEQ ID NO: 17851
  Synthetic oligonucleotide

SEQ ID NO: 487614 - DNA, 55 bp, Artificial; identical to SEQ ID NO: 15852
  Synthetic oligonucleotide

SEQ ID NO: 487615 - DNA, 58 bp, Artificial; identical to SEQ ID NO: 12054
  Synthetic oligonucleotide

SEQ ID NO: 487616 - DNA, 60 bp, Artificial; identical to SEQ ID NO: 5958
  Synthetic oligonucleotide

SEQ ID NO: 487617 - DNA, 56 bp, Artificial; identical to SEQ ID NO: 16792
  Synthetic oligonucleotide

SEQ ID NO: 487618 - DNA, 60 bp, Artificial; identical to SEQ ID NO: 12517
  Synthetic oligonucleotide

SEQ ID NO: 487619 - DNA, 60 bp, Artificial; identical to SEQ ID NO: 8313
  Synthetic oligonucleotide

SEQ ID NO: 487620 - DNA, 55 bp, Artificial; identical to SEQ ID NO: 14707
  Synthetic oligonucleotide

SEQ ID NO: 487621 - DNA, 60 bp, Artificial; identical to SEQ ID NO: 8222
  Synthetic oligonucleotide

SEQ ID NO: 487622 - DNA, 60 bp, Artificial; identical to SEQ ID NO: 7898
  Synthetic oligonucleotide

SEQ ID NO: 487623 - DNA, 55 bp, Artificial; identical to SEQ ID NO: 10523
  Synthetic oligonucleotide

SEQ ID NO: 487624 - DNA, 60 bp, Artificial; identical to SEQ ID NO: 9218
  Synthetic oligonucleotide

SEQ ID NO: 487625 - DNA, 57 bp, Artificial; identical to SEQ ID NO: 19168
  Synthetic oligonucleotide

SEQ ID NO: 487626 - DNA, 55 bp, Artificial; identical to SEQ ID NO: 10153
  Synthetic oligonucleotide

SEQ ID NO: 487627 - DNA, 55 bp, Artificial; identical to SEQ ID NO: 12497
  Synthetic oligonucleotide

SEQ ID NO: 487628 - DNA, 60 bp, Artificial; identical to SEQ ID NO: 31382
  Synthetic oligonucleotide

SEQ ID NO: 487629 - DNA, 56 bp, Artificial; identical to SEQ ID NO: 15485
  Synthetic oligonucleotide

SEQ ID NO: 487630 - DNA, 60 bp, Artificial; identical to SEQ ID NO: 14549
  Synthetic oligonucleotide

SEQ ID NO: 487631 - DNA, 60 bp, Artificial; identical to SEQ ID NO: 15386
  Synthetic oligonucleotide

SEQ ID NO: 487632 - DNA, 55 bp, Artificial; identical to SEQ ID NO: 18427
  Synthetic oligonucleotide

SEQ ID NO: 487633 - DNA, 60 bp, Artificial; identical to SEQ ID NO: 7038
  Synthetic oligonucleotide

SEQ ID NO: 487634 - DNA, 55 bp, Artificial; identical to SEQ ID NO: 9850
  Synthetic oligonucleotide

SEQ ID NO: 487635 - DNA, 57 bp, Artificial; identical to SEQ ID NO: 20035
  Synthetic oligonucleotide

SEQ ID NO: 487636 - DNA, 53 bp, Artificial; identical to SEQ ID NO: 6662
  Synthetic oligonucleotide

SEQ ID NO: 487637 - DNA, 57 bp, Artificial; identical to SEQ ID NO: 16515
  Synthetic oligonucleotide

SEQ ID NO: 487638 - DNA, 52 bp, Artificial; identical to SEQ ID NO: 11537
  Synthetic oligonucleotide

SEQ ID NO: 487639 - DNA, 60 bp, Artificial; identical to SEQ ID NO: 13140
  Synthetic oligonucleotide

SEQ ID NO: 487640 - DNA, 58 bp, Artificial; identical to SEQ ID NO: 15859
  Synthetic oligonucleotide

SEQ ID NO: 487641 - DNA, 60 bp, Artificial; identical to SEQ ID NO: 119444
  Synthetic oligonucleotide

SEQ ID NO: 487642 - DNA, 57 bp, Artificial; identical to SEQ ID NO: 18850
  Synthetic oligonucleotide

SEQ ID NO: 487643 - DNA, 56 bp, Artificial; identical to SEQ ID NO: 16100
  Synthetic oligonucleotide

SEQ ID NO: 487644 - DNA, 58 bp, Artificial; identical to SEQ ID NO: 19586
  Synthetic oligonucleotide

SEQ ID NO: 487645 - DNA, 53 bp, Artificial; identical to SEQ ID NO: 18946
  Synthetic oligonucleotide

SEQ ID NO: 487646 - DNA, 59 bp, Artificial; identical to SEQ ID NO: 16458
  Synthetic oligonucleotide

SEQ ID NO: 487647 - DNA, 60 bp, Artificial; identical to SEQ ID NO: 10255
  Synthetic oligonucleotide

SEQ ID NO: 487648 - DNA, 57 bp, Artificial; identical to SEQ ID NO: 18511
  Synthetic oligonucleotide

SEQ ID NO: 487649 - DNA, 59 bp, Artificial; identical to SEQ ID NO: 16455
  Synthetic oligonucleotide

SEQ ID NO: 487650 - DNA, 60 bp, Artificial; identical to SEQ ID NO: 13391
  Synthetic oligonucleotide

SEQ ID NO: 487651 - DNA, 50 bp, Artificial; identical to SEQ ID NO: 10828
  Synthetic oligonucleotide

SEQ ID NO: 487652 - DNA, 54 bp, Artificial; identical to SEQ ID NO: 18173
  Synthetic oligonucleotide

SEQ ID NO: 487653 - DNA, 60 bp, Artificial; identical to SEQ ID NO: 12194
  Synthetic oligonucleotide

SEQ ID NO: 487654 - DNA, 55 bp, Artificial; identical to SEQ ID NO: 16908
  Synthetic oligonucleotide

SEQ ID NO: 487655 - DNA, 55 bp, Artificial; identical to SEQ ID NO: 11250
  Synthetic oligonucleotide

SEQ ID NO: 487656 - DNA, 59 bp, Artificial; identical to SEQ ID NO: 18342
  Synthetic oligonucleotide

SEQ ID NO: 487657 - DNA, 60 bp, Artificial; identical to SEQ ID NO: 11906
  Synthetic oligonucleotide

SEQ ID NO: 487658 - DNA, 60 bp, Artificial; identical to SEQ ID NO: 11343
  Synthetic oligonucleotide

SEQ ID NO: 487659 - DNA, 59 bp, Artificial; identical to SEQ ID NO: 16292
  Synthetic oligonucleotide

SEQ ID NO: 487660 - DNA, 57 bp, Artificial; identical to SEQ ID NO: 18022
  Synthetic oligonucleotide

SEQ ID NO: 487661 - DNA, 55 bp, Artificial; identical to SEQ ID NO: 6387
  Synthetic oligonucleotide

SEQ ID NO: 487662 - DNA, 60 bp, Artificial; identical to SEQ ID NO: 8061
  Synthetic oligonucleotide

SEQ ID NO: 487663 - DNA, 59 bp, Artificial; identical to SEQ ID NO: 18561
  Synthetic oligonucleotide

SEQ ID NO: 487664 - DNA, 60 bp, Artificial; identical to SEQ ID NO: 14789
  Synthetic oligonucleotide

SEQ ID NO: 487665 - DNA, 58 bp, Artificial; identical to SEQ ID NO: 20524
  Synthetic oligonucleotide

SEQ ID NO: 487666 - DNA, 60 bp, Artificial; identical to SEQ ID NO: 10051
  Synthetic oligonucleotide

SEQ ID NO: 487667 - DNA, 55 bp, Artificial; identical to SEQ ID NO: 5966
  Synthetic oligonucleotide

SEQ ID NO: 487668 - DNA, 55 bp, Artificial; identical to SEQ ID NO: 16580
  Synthetic oligonucleotide

SEQ ID NO: 487669 - DNA, 58 bp, Artificial; identical to SEQ ID NO: 17269
  Synthetic oligonucleotide

SEQ ID NO: 487670 - DNA, 55 bp, Artificial; identical to SEQ ID NO: 10411
  Synthetic oligonucleotide

SEQ ID NO: 487671 - DNA, 58 bp, Artificial; identical to SEQ ID NO: 17584
  Synthetic oligonucleotide

SEQ ID NO: 487672 - DNA, 60 bp, Artificial; identical to SEQ ID NO: 14975
  Synthetic oligonucleotide

SEQ ID NO: 487673 - DNA, 57 bp, Artificial; identical to SEQ ID NO: 18786
  Synthetic oligonucleotide

SEQ ID NO: 487674 - DNA, 60 bp, Artificial; identical to SEQ ID NO: 10208
  Synthetic oligonucleotide

SEQ ID NO: 487675 - DNA, 55 bp, Artificial; identical to SEQ ID NO: 12214
  Synthetic oligonucleotide

SEQ ID NO: 487676 - DNA, 55 bp, Artificial; identical to SEQ ID NO: 11212
  Synthetic oligonucleotide

SEQ ID NO: 487677 - DNA, 60 bp, Artificial; identical to SEQ ID NO: 12635
  Synthetic oligonucleotide

SEQ ID NO: 487678 - DNA, 56 bp, Artificial; identical to SEQ ID NO: 20356
  Synthetic oligonucleotide

SEQ ID NO: 487679 - DNA, 60 bp, Artificial; identical to SEQ ID NO: 11912
  Synthetic oligonucleotide

SEQ ID NO: 487680 - DNA, 54 bp, Artificial; identical to SEQ ID NO: 19394
  Synthetic oligonucleotide

SEQ ID NO: 487681 - DNA, 60 bp, Artificial; identical to SEQ ID NO: 8275
  Synthetic oligonucleotide

SEQ ID NO: 487682 - DNA, 59 bp, Artificial; identical to SEQ ID NO: 18426
  Synthetic oligonucleotide

SEQ ID NO: 487683 - DNA, 60 bp, Artificial; identical to SEQ ID NO: 10824
  Synthetic oligonucleotide

SEQ ID NO: 487684 - DNA, 55 bp, Artificial; identical to SEQ ID NO: 10518
  Synthetic oligonucleotide

SEQ ID NO: 487685 - DNA, 60 bp, Artificial; identical to SEQ ID NO: 117515
  Synthetic oligonucleotide

SEQ ID NO: 487686 - DNA, 57 bp, Artificial; identical to SEQ ID NO: 12019
  Synthetic oligonucleotide

SEQ ID NO: 487687 - DNA, 60 bp, Artificial; identical to SEQ ID NO: 13632
  Synthetic oligonucleotide

SEQ ID NO: 487688 - DNA, 56 bp, Artificial; identical to SEQ ID NO: 10519
  Synthetic oligonucleotide

SEQ ID NO: 487689 - DNA, 54 bp, Artificial; identical to SEQ ID NO: 11646
  Synthetic oligonucleotide

SEQ ID NO: 487690 - DNA, 56 bp, Artificial; identical to SEQ ID NO: 16276
  Synthetic oligonucleotide

SEQ ID NO: 487691 - DNA, 60 bp, Artificial; identical to SEQ ID NO: 6065
  Synthetic oligonucleotide

SEQ ID NO: 487692 - DNA, 60 bp, Artificial; identical to SEQ ID NO: 9763
  Synthetic oligonucleotide

SEQ ID NO: 487693 - DNA, 60 bp, Artificial; identical to SEQ ID NO: 8423
  Synthetic oligonucleotide

SEQ ID NO: 487694 - DNA, 60 bp, Artificial; identical to SEQ ID NO: 112693
  Synthetic oligonucleotide

SEQ ID NO: 487695 - DNA, 60 bp, Artificial; identical to SEQ ID NO: 9270
  Synthetic oligonucleotide

SEQ ID NO: 487696 - DNA, 60 bp, Artificial; identical to SEQ ID NO: 15062
  Synthetic oligonucleotide

SEQ ID NO: 487697 - DNA, 55 bp, Artificial; identical to SEQ ID NO: 7095
  Synthetic oligonucleotide

SEQ ID NO: 487698 - DNA, 60 bp, Artificial; identical to SEQ ID NO: 9251
  Synthetic oligonucleotide

SEQ ID NO: 487699 - DNA, 60 bp, Artificial; identical to SEQ ID NO: 10934
  Synthetic oligonucleotide

SEQ ID NO: 487700 - DNA, 59 bp, Artificial; identical to SEQ ID NO: 16818
  Synthetic oligonucleotide

SEQ ID NO: 487701 - DNA, 60 bp, Artificial; identical to SEQ ID NO: 10545
  Synthetic oligonucleotide

SEQ ID NO: 487702 - DNA, 59 bp, Artificial; identical to SEQ ID NO: 19202
  Synthetic oligonucleotide

SEQ ID NO: 487703 - DNA, 56 bp, Artificial; identical to SEQ ID NO: 20501
  Synthetic oligonucleotide

SEQ ID NO: 487704 - DNA, 60 bp, Artificial; identical to SEQ ID NO: 105179
  Synthetic oligonucleotide

SEQ ID NO: 487705 - DNA, 57 bp, Artificial; identical to SEQ ID NO: 20380
  Synthetic oligonucleotide

SEQ ID NO: 487706 - DNA, 55 bp, Artificial; identical to SEQ ID NO: 7017
  Synthetic oligonucleotide

SEQ ID NO: 487707 - DNA, 60 bp, Artificial; identical to SEQ ID NO: 117233
  Synthetic oligonucleotide

SEQ ID NO: 487708 - DNA, 56 bp, Artificial; identical to SEQ ID NO: 20590
  Synthetic oligonucleotide

SEQ ID NO: 487709 - DNA, 50 bp, Artificial; identical to SEQ ID NO: 9185
  Synthetic oligonucleotide

SEQ ID NO: 487710 - DNA, 60 bp, Artificial; identical to SEQ ID NO: 6133
  Synthetic oligonucleotide

SEQ ID NO: 487711 - DNA, 60 bp, Artificial; identical to SEQ ID NO: 131721
  Synthetic oligonucleotide

SEQ ID NO: 487712 - DNA, 52 bp, Artificial; identical to SEQ ID NO: 11306
  Synthetic oligonucleotide

SEQ ID NO: 487713 - DNA, 57 bp, Artificial; identical to SEQ ID NO: 7568
  Synthetic oligonucleotide

SEQ ID NO: 487714 - DNA, 60 bp, Artificial; identical to SEQ ID NO: 8637
  Synthetic oligonucleotide

SEQ ID NO: 487715 - DNA, 56 bp, Artificial; identical to SEQ ID NO: 15765
  Synthetic oligonucleotide

SEQ ID NO: 487716 - DNA, 60 bp, Artificial; identical to SEQ ID NO: 15554
  Synthetic oligonucleotide

SEQ ID NO: 487717 - DNA, 58 bp, Artificial; identical to SEQ ID NO: 20550
  Synthetic oligonucleotide

SEQ ID NO: 487718 - DNA, 55 bp, Artificial; identical to SEQ ID NO: 14779
  Synthetic oligonucleotide

SEQ ID NO: 487719 - DNA, 60 bp, Artificial; identical to SEQ ID NO: 37806
  Synthetic oligonucleotide

SEQ ID NO: 487720 - DNA, 57 bp, Artificial; identical to SEQ ID NO: 17548
  Synthetic oligonucleotide

SEQ ID NO: 487721 - DNA, 60 bp, Artificial; identical to SEQ ID NO: 15222
  Synthetic oligonucleotide

SEQ ID NO: 487722 - DNA, 58 bp, Artificial; identical to SEQ ID NO: 7404
  Synthetic oligonucleotide

SEQ ID NO: 487723 - DNA, 60 bp, Artificial; identical to SEQ ID NO: 7925
  Synthetic oligonucleotide

SEQ ID NO: 487724 - DNA, 60 bp, Artificial; identical to SEQ ID NO: 8175
  Synthetic oligonucleotide

SEQ ID NO: 487725 - DNA, 58 bp, Artificial; identical to SEQ ID NO: 11830
  Synthetic oligonucleotide

SEQ ID NO: 487726 - DNA, 60 bp, Artificial; identical to SEQ ID NO: 8366
  Synthetic oligonucleotide

SEQ ID NO: 487727 - DNA, 59 bp, Artificial; identical to SEQ ID NO: 20085
  Synthetic oligonucleotide

SEQ ID NO: 487728 - DNA, 59 bp, Artificial; identical to SEQ ID NO: 16051
  Synthetic oligonucleotide

SEQ ID NO: 487729 - DNA, 55 bp, Artificial; identical to SEQ ID NO: 18242
  Synthetic oligonucleotide

SEQ ID NO: 487730 - DNA, 55 bp, Artificial; identical to SEQ ID NO: 13132
  Synthetic oligonucleotide

SEQ ID NO: 487731 - DNA, 60 bp, Artificial; identical to SEQ ID NO: 123298
  Synthetic oligonucleotide

SEQ ID NO: 487732 - DNA, 57 bp, Artificial; identical to SEQ ID NO: 18165
  Synthetic oligonucleotide

SEQ ID NO: 487733 - DNA, 60 bp, Artificial; identical to SEQ ID NO: 31109
  Synthetic oligonucleotide

SEQ ID NO: 487734 - DNA, 60 bp, Artificial; identical to SEQ ID NO: 76128
  Synthetic oligonucleotide

SEQ ID NO: 487735 - DNA, 51 bp, Artificial; identical to SEQ ID NO: 6033
  Synthetic oligonucleotide

SEQ ID NO: 487736 - DNA, 55 bp, Artificial; identical to SEQ ID NO: 10991
  Synthetic oligonucleotide

SEQ ID NO: 487737 - DNA, 58 bp, Artificial; identical to SEQ ID NO: 13368
  Synthetic oligonucleotide

SEQ ID NO: 487738 - DNA, 55 bp, Artificial; identical to SEQ ID NO: 10225
  Synthetic oligonucleotide

SEQ ID NO: 487739 - DNA, 55 bp, Artificial; identical to SEQ ID NO: 13742
  Synthetic oligonucleotide

SEQ ID NO: 487740 - DNA, 60 bp, Artificial; identical to SEQ ID NO: 13072
  Synthetic oligonucleotide

SEQ ID NO: 487741 - DNA, 53 bp, Artificial; identical to SEQ ID NO: 11237
  Synthetic oligonucleotide

SEQ ID NO: 487742 - DNA, 60 bp, Artificial; identical to SEQ ID NO: 7742
  Synthetic oligonucleotide

SEQ ID NO: 487743 - DNA, 60 bp, Artificial; identical to SEQ ID NO: 7484
  Synthetic oligonucleotide

SEQ ID NO: 487744 - DNA, 52 bp, Artificial; identical to SEQ ID NO: 7137
  Synthetic oligonucleotide

SEQ ID NO: 487745 - DNA, 59 bp, Artificial; identical to SEQ ID NO: 6155
  Synthetic oligonucleotide

SEQ ID NO: 487746 - DNA, 59 bp, Artificial; identical to SEQ ID NO: 18592
  Synthetic oligonucleotide

SEQ ID NO: 487747 - DNA, 60 bp, Artificial; identical to SEQ ID NO: 15473
  Synthetic oligonucleotide

SEQ ID NO: 487748 - DNA, 57 bp, Artificial; identical to SEQ ID NO: 16552
  Synthetic oligonucleotide

SEQ ID NO: 487749 - DNA, 53 bp, Artificial; identical to SEQ ID NO: 20276
  Synthetic oligonucleotide

SEQ ID NO: 487750 - DNA, 55 bp, Artificial; identical to SEQ ID NO: 7093
  Synthetic oligonucleotide

SEQ ID NO: 487751 - DNA, 56 bp, Artificial; identical to SEQ ID NO: 6532
  Synthetic oligonucleotide

SEQ ID NO: 487752 - DNA, 60 bp, Artificial; identical to SEQ ID NO: 10256
  Synthetic oligonucleotide

SEQ ID NO: 487753 - DNA, 58 bp, Artificial; identical to SEQ ID NO: 18160
  Synthetic oligonucleotide

SEQ ID NO: 487754 - DNA, 51 bp, Artificial; identical to SEQ ID NO: 8439
  Synthetic oligonucleotide

SEQ ID NO: 487755 - DNA, 53 bp, Artificial; identical to SEQ ID NO: 15985
  Synthetic oligonucleotide

SEQ ID NO: 487756 - DNA, 58 bp, Artificial; identical to SEQ ID NO: 18482
  Synthetic oligonucleotide

SEQ ID NO: 487757 - DNA, 56 bp, Artificial; identical to SEQ ID NO: 11699
  Synthetic oligonucleotide

SEQ ID NO: 487758 - DNA, 55 bp, Artificial; identical to SEQ ID NO: 20063
  Synthetic oligonucleotide

SEQ ID NO: 487759 - DNA, 60 bp, Artificial; identical to SEQ ID NO: 14047
  Synthetic oligonucleotide

SEQ ID NO: 487760 - DNA, 60 bp, Artificial; identical to SEQ ID NO: 14831
  Synthetic oligonucleotide

SEQ ID NO: 487761 - DNA, 60 bp, Artificial; identical to SEQ ID NO: 56402
  Synthetic oligonucleotide

SEQ ID NO: 487762 - DNA, 60 bp, Artificial; identical to SEQ ID NO: 11341
  Synthetic oligonucleotide

SEQ ID NO: 487763 - DNA, 55 bp, Artificial; identical to SEQ ID NO: 11686
  Synthetic oligonucleotide

SEQ ID NO: 487764 - DNA, 60 bp, Artificial; identical to SEQ ID NO: 14717
  Synthetic oligonucleotide

SEQ ID NO: 487765 - DNA, 59 bp, Artificial; identical to SEQ ID NO: 6519
  Synthetic oligonucleotide

SEQ ID NO: 487766 - DNA, 58 bp, Artificial; identical to SEQ ID NO: 16402
  Synthetic oligonucleotide

SEQ ID NO: 487767 - DNA, 60 bp, Artificial; identical to SEQ ID NO: 8951
  Synthetic oligonucleotide

SEQ ID NO: 487768 - DNA, 55 bp, Artificial; identical to SEQ ID NO: 18661
  Synthetic oligonucleotide

SEQ ID NO: 487769 - DNA, 60 bp, Artificial; identical to SEQ ID NO: 7066
  Synthetic oligonucleotide

SEQ ID NO: 487770 - DNA, 58 bp, Artificial; identical to SEQ ID NO: 15165
  Synthetic oligonucleotide

SEQ ID NO: 487771 - DNA, 56 bp, Artificial; identical to SEQ ID NO: 11233
  Synthetic oligonucleotide

SEQ ID NO: 487772 - DNA, 55 bp, Artificial; identical to SEQ ID NO: 12796
  Synthetic oligonucleotide

SEQ ID NO: 487773 - DNA, 57 bp, Artificial; identical to SEQ ID NO: 18768
  Synthetic oligonucleotide

SEQ ID NO: 487774 - DNA, 60 bp, Artificial; identical to SEQ ID NO: 7104
  Synthetic oligonucleotide

SEQ ID NO: 487775 - DNA, 56 bp, Artificial; identical to SEQ ID NO: 16657
  Synthetic oligonucleotide

SEQ ID NO: 487776 - DNA, 60 bp, Artificial; identical to SEQ ID NO: 8396
  Synthetic oligonucleotide

SEQ ID NO: 487777 - DNA, 55 bp, Artificial; identical to SEQ ID NO: 11477
  Synthetic oligonucleotide

SEQ ID NO: 487778 - DNA, 58 bp, Artificial; identical to SEQ ID NO: 19318
  Synthetic oligonucleotide

SEQ ID NO: 487779 - DNA, 50 bp, Artificial; identical to SEQ ID NO: 8230
  Synthetic oligonucleotide

SEQ ID NO: 487780 - DNA, 58 bp, Artificial; identical to SEQ ID NO: 18458
  Synthetic oligonucleotide

SEQ ID NO: 487781 - DNA, 60 bp, Artificial; identical to SEQ ID NO: 10703
  Synthetic oligonucleotide

SEQ ID NO: 487782 - DNA, 57 bp, Artificial; identical to SEQ ID NO: 18229
  Synthetic oligonucleotide

SEQ ID NO: 487783 - DNA, 55 bp, Artificial; identical to SEQ ID NO: 13062
  Synthetic oligonucleotide

SEQ ID NO: 487784 - DNA, 51 bp, Artificial; identical to SEQ ID NO: 20051
  Synthetic oligonucleotide

SEQ ID NO: 487785 - DNA, 60 bp, Artificial; identical to SEQ ID NO: 12483
  Synthetic oligonucleotide

SEQ ID NO: 487786 - DNA, 55 bp, Artificial; identical to SEQ ID NO: 7578
  Synthetic oligonucleotide

SEQ ID NO: 487787 - DNA, 60 bp, Artificial; identical to SEQ ID NO: 121200
  Synthetic oligonucleotide

SEQ ID NO: 487788 - DNA, 60 bp, Artificial; identical to SEQ ID NO: 12341
  Synthetic oligonucleotide

SEQ ID NO: 487789 - DNA, 60 bp, Artificial; identical to SEQ ID NO: 6554
  Synthetic oligonucleotide

SEQ ID NO: 487790 - DNA, 54 bp, Artificial; identical to SEQ ID NO: 15866
  Synthetic oligonucleotide

SEQ ID NO: 487791 - DNA, 57 bp, Artificial; identical to SEQ ID NO: 9434
  Synthetic oligonucleotide

SEQ ID NO: 487792 - DNA, 53 bp, Artificial; identical to SEQ ID NO: 15512
  Synthetic oligonucleotide

SEQ ID NO: 487793 - DNA, 55 bp, Artificial; identical to SEQ ID NO: 14116
  Synthetic oligonucleotide

SEQ ID NO: 487794 - DNA, 58 bp, Artificial; identical to SEQ ID NO: 16728
  Synthetic oligonucleotide

SEQ ID NO: 487795 - DNA, 60 bp, Artificial; identical to SEQ ID NO: 106883
  Synthetic oligonucleotide

SEQ ID NO: 487796 - DNA, 60 bp, Artificial; identical to SEQ ID NO: 6646
  Synthetic oligonucleotide

SEQ ID NO: 487797 - DNA, 60 bp, Artificial; identical to SEQ ID NO: 12316
  Synthetic oligonucleotide

SEQ ID NO: 487798 - DNA, 60 bp, Artificial; identical to SEQ ID NO: 5990
  Synthetic oligonucleotide

SEQ ID NO: 487799 - DNA, 60 bp, Artificial; identical to SEQ ID NO: 6037
  Synthetic oligonucleotide

SEQ ID NO: 487800 - DNA, 60 bp, Artificial; identical to SEQ ID NO: 5842
  Synthetic oligonucleotide

SEQ ID NO: 487801 - DNA, 60 bp, Artificial; identical to SEQ ID NO: 13969
  Synthetic oligonucleotide

SEQ ID NO: 487802 - DNA, 60 bp, Artificial; identical to SEQ ID NO: 11395
  Synthetic oligonucleotide

SEQ ID NO: 487803 - DNA, 60 bp, Artificial; identical to SEQ ID NO: 15344
  Synthetic oligonucleotide

SEQ ID NO: 487804 - DNA, 58 bp, Artificial; identical to SEQ ID NO: 20338
  Synthetic oligonucleotide

SEQ ID NO: 487805 - DNA, 60 bp, Artificial; identical to SEQ ID NO: 7477
  Synthetic oligonucleotide

SEQ ID NO: 487806 - DNA, 60 bp, Artificial; identical to SEQ ID NO: 9016
  Synthetic oligonucleotide

SEQ ID NO: 487807 - DNA, 60 bp, Artificial; identical to SEQ ID NO: 35265
  Synthetic oligonucleotide

SEQ ID NO: 487808 - DNA, 60 bp, Artificial; identical to SEQ ID NO: 15659
  Synthetic oligonucleotide

SEQ ID NO: 487809 - DNA, 55 bp, Artificial; identical to SEQ ID NO: 9616
  Synthetic oligonucleotide

SEQ ID NO: 487810 - DNA, 53 bp, Artificial; identical to SEQ ID NO: 17942
  Synthetic oligonucleotide

SEQ ID NO: 487811 - DNA, 55 bp, Artificial; identical to SEQ ID NO: 8593
  Synthetic oligonucleotide

SEQ ID NO: 487812 - DNA, 52 bp, Artificial; identical to SEQ ID NO: 10260
  Synthetic oligonucleotide

SEQ ID NO: 487813 - DNA, 55 bp, Artificial; identical to SEQ ID NO: 16373
  Synthetic oligonucleotide

SEQ ID NO: 487814 - DNA, 56 bp, Artificial; identical to SEQ ID NO: 17027
  Synthetic oligonucleotide

SEQ ID NO: 487815 - DNA, 58 bp, Artificial; identical to SEQ ID NO: 14066
  Synthetic oligonucleotide

SEQ ID NO: 487816 - DNA, 52 bp, Artificial; identical to SEQ ID NO: 7496
  Synthetic oligonucleotide

SEQ ID NO: 487817 - DNA, 60 bp, Artificial; identical to SEQ ID NO: 116177
  Synthetic oligonucleotide

SEQ ID NO: 487818 - DNA, 60 bp, Artificial; identical to SEQ ID NO: 15246
  Synthetic oligonucleotide

SEQ ID NO: 487819 - DNA, 59 bp, Artificial; identical to SEQ ID NO: 18326
  Synthetic oligonucleotide

SEQ ID NO: 487820 - DNA, 60 bp, Artificial; identical to SEQ ID NO: 93810
  Synthetic oligonucleotide

SEQ ID NO: 487821 - DNA, 58 bp, Artificial; identical to SEQ ID NO: 16245
  Synthetic oligonucleotide

SEQ ID NO: 487822 - DNA, 60 bp, Artificial; identical to SEQ ID NO: 9972
  Synthetic oligonucleotide

SEQ ID NO: 487823 - DNA, 60 bp, Artificial; identical to SEQ ID NO: 14848
  Synthetic oligonucleotide

SEQ ID NO: 487824 - DNA, 58 bp, Artificial; identical to SEQ ID NO: 18303
  Synthetic oligonucleotide

SEQ ID NO: 487825 - DNA, 59 bp, Artificial; identical to SEQ ID NO: 12217
  Synthetic oligonucleotide

SEQ ID NO: 487826 - DNA, 60 bp, Artificial; identical to SEQ ID NO: 14446
  Synthetic oligonucleotide

SEQ ID NO: 487827 - DNA, 60 bp, Artificial; identical to SEQ ID NO: 15666
  Synthetic oligonucleotide

SEQ ID NO: 487828 - DNA, 53 bp, Artificial; identical to SEQ ID NO: 11276
  Synthetic oligonucleotide

SEQ ID NO: 487829 - DNA, 60 bp, Artificial; identical to SEQ ID NO: 10333
  Synthetic oligonucleotide

SEQ ID NO: 487830 - DNA, 55 bp, Artificial; identical to SEQ ID NO: 76896
  Synthetic oligonucleotide

SEQ ID NO: 487831 - DNA, 56 bp, Artificial; identical to SEQ ID NO: 20522
  Synthetic oligonucleotide

SEQ ID NO: 487832 - DNA, 60 bp, Artificial; identical to SEQ ID NO: 10390
  Synthetic oligonucleotide

SEQ ID NO: 487833 - DNA, 60 bp, Artificial; identical to SEQ ID NO: 14202
  Synthetic oligonucleotide

SEQ ID NO: 487834 - DNA, 60 bp, Artificial; identical to SEQ ID NO: 15398
  Synthetic oligonucleotide

SEQ ID NO: 487835 - DNA, 55 bp, Artificial; identical to SEQ ID NO: 10356
  Synthetic oligonucleotide

SEQ ID NO: 487836 - DNA, 60 bp, Artificial; identical to SEQ ID NO: 15489
  Synthetic oligonucleotide

SEQ ID NO: 487837 - DNA, 55 bp, Artificial; identical to SEQ ID NO: 11772
  Synthetic oligonucleotide

SEQ ID NO: 487838 - DNA, 58 bp, Artificial; identical to SEQ ID NO: 17142
  Synthetic oligonucleotide

SEQ ID NO: 487839 - DNA, 60 bp, Artificial; identical to SEQ ID NO: 7352
  Synthetic oligonucleotide

SEQ ID NO: 487840 - DNA, 60 bp, Artificial; identical to SEQ ID NO: 15436
  Synthetic oligonucleotide

SEQ ID NO: 487841 - DNA, 55 bp, Artificial; identical to SEQ ID NO: 11501
  Synthetic oligonucleotide

SEQ ID NO: 487842 - DNA, 51 bp, Artificial; identical to SEQ ID NO: 8384
  Synthetic oligonucleotide

SEQ ID NO: 487843 - DNA, 60 bp, Artificial; identical to SEQ ID NO: 7472
  Synthetic oligonucleotide

SEQ ID NO: 487844 - DNA, 60 bp, Artificial; identical to SEQ ID NO: 14712
  Synthetic oligonucleotide

SEQ ID NO: 487845 - DNA, 53 bp, Artificial; identical to SEQ ID NO: 17295
  Synthetic oligonucleotide

SEQ ID NO: 487846 - DNA, 60 bp, Artificial; identical to SEQ ID NO: 11729
  Synthetic oligonucleotide

SEQ ID NO: 487847 - DNA, 60 bp, Artificial; identical to SEQ ID NO: 7985
  Synthetic oligonucleotide

SEQ ID NO: 487848 - DNA, 59 bp, Artificial; identical to SEQ ID NO: 19881
  Synthetic oligonucleotide

SEQ ID NO: 487849 - DNA, 59 bp, Artificial; identical to SEQ ID NO: 16184
  Synthetic oligonucleotide

SEQ ID NO: 487850 - DNA, 60 bp, Artificial; identical to SEQ ID NO: 7397
  Synthetic oligonucleotide

SEQ ID NO: 487851 - DNA, 55 bp, Artificial; identical to SEQ ID NO: 18663
  Synthetic oligonucleotide

SEQ ID NO: 487852 - DNA, 55 bp, Artificial; identical to SEQ ID NO: 6004
  Synthetic oligonucleotide

SEQ ID NO: 487853 - DNA, 56 bp, Artificial; identical to SEQ ID NO: 11725
  Synthetic oligonucleotide

SEQ ID NO: 487854 - DNA, 57 bp, Artificial; identical to SEQ ID NO: 19708
  Synthetic oligonucleotide

SEQ ID NO: 487855 - DNA, 60 bp, Artificial; identical to SEQ ID NO: 238
  Synthetic oligonucleotide

SEQ ID NO: 487856 - DNA, 60 bp, Artificial; identical to SEQ ID NO: 22239
  Synthetic oligonucleotide

SEQ ID NO: 487857 - DNA, 56 bp, Artificial; identical to SEQ ID NO: 16389
  Synthetic oligonucleotide

SEQ ID NO: 487858 - DNA, 60 bp, Artificial; identical to SEQ ID NO: 7007
  Synthetic oligonucleotide

SEQ ID NO: 487859 - DNA, 53 bp, Artificial; identical to SEQ ID NO: 7977
  Synthetic oligonucleotide

SEQ ID NO: 487860 - DNA, 60 bp, Artificial; identical to SEQ ID NO: 15756
  Synthetic oligonucleotide

SEQ ID NO: 487861 - DNA, 60 bp, Artificial; identical to SEQ ID NO: 12317
  Synthetic oligonucleotide

SEQ ID NO: 487862 - DNA, 57 bp, Artificial; identical to SEQ ID NO: 18351
  Synthetic oligonucleotide

SEQ ID NO: 487863 - DNA, 58 bp, Artificial; identical to SEQ ID NO: 20402
  Synthetic oligonucleotide

SEQ ID NO: 487864 - DNA, 55 bp, Artificial; identical to SEQ ID NO: 12881
  Synthetic oligonucleotide

SEQ ID NO: 487865 - DNA, 60 bp, Artificial; identical to SEQ ID NO: 13500
  Synthetic oligonucleotide

SEQ ID NO: 487866 - DNA, 57 bp, Artificial; identical to SEQ ID NO: 16484
  Synthetic oligonucleotide

SEQ ID NO: 487867 - DNA, 58 bp, Artificial; identical to SEQ ID NO: 11463
  Synthetic oligonucleotide

SEQ ID NO: 487868 - DNA, 60 bp, Artificial; identical to SEQ ID NO: 6527
  Synthetic oligonucleotide

SEQ ID NO: 487869 - DNA, 60 bp, Artificial; identical to SEQ ID NO: 10466
  Synthetic oligonucleotide

SEQ ID NO: 487870 - DNA, 60 bp, Artificial; identical to SEQ ID NO: 15815
  Synthetic oligonucleotide

SEQ ID NO: 487871 - DNA, 51 bp, Artificial; identical to SEQ ID NO: 7988
  Synthetic oligonucleotide

SEQ ID NO: 487872 - DNA, 60 bp, Artificial; identical to SEQ ID NO: 10294
  Synthetic oligonucleotide

SEQ ID NO: 487873 - DNA, 50 bp, Artificial; identical to SEQ ID NO: 11750
  Synthetic oligonucleotide

SEQ ID NO: 487874 - DNA, 60 bp, Artificial; identical to SEQ ID NO: 14880
  Synthetic oligonucleotide

SEQ ID NO: 487875 - DNA, 60 bp, Artificial; identical to SEQ ID NO: 21857
  Synthetic oligonucleotide

SEQ ID NO: 487876 - DNA, 55 bp, Artificial; identical to SEQ ID NO: 10366
  Synthetic oligonucleotide

SEQ ID NO: 487877 - DNA, 54 bp, Artificial; identical to SEQ ID NO: 11391
  Synthetic oligonucleotide

SEQ ID NO: 487878 - DNA, 50 bp, Artificial; identical to SEQ ID NO: 6290
  Synthetic oligonucleotide

SEQ ID NO: 487879 - DNA, 60 bp, Artificial; identical to SEQ ID NO: 9311
  Synthetic oligonucleotide

SEQ ID NO: 487880 - DNA, 55 bp, Artificial; identical to SEQ ID NO: 14417
  Synthetic oligonucleotide

SEQ ID NO: 487881 - DNA, 60 bp, Artificial; identical to SEQ ID NO: 29011
  Synthetic oligonucleotide

SEQ ID NO: 487882 - DNA, 60 bp, Artificial; identical to SEQ ID NO: 55269
  Synthetic oligonucleotide

SEQ ID NO: 487883 - DNA, 52 bp, Artificial; identical to SEQ ID NO: 19582
  Synthetic oligonucleotide

SEQ ID NO: 487884 - DNA, 60 bp, Artificial; identical to SEQ ID NO: 8309
  Synthetic oligonucleotide

SEQ ID NO: 487885 - DNA, 55 bp, Artificial; identical to SEQ ID NO: 17537
  Synthetic oligonucleotide

SEQ ID NO: 487886 - DNA, 56 bp, Artificial; identical to SEQ ID NO: 7132
  Synthetic oligonucleotide

SEQ ID NO: 487887 - DNA, 60 bp, Artificial; identical to SEQ ID NO: 6478
  Synthetic oligonucleotide

SEQ ID NO: 487888 - DNA, 53 bp, Artificial; identical to SEQ ID NO: 16508
  Synthetic oligonucleotide

SEQ ID NO: 487889 - DNA, 56 bp, Artificial; identical to SEQ ID NO: 16786
  Synthetic oligonucleotide

SEQ ID NO: 487890 - DNA, 51 bp, Artificial; identical to SEQ ID NO: 16142
  Synthetic oligonucleotide

SEQ ID NO: 487891 - DNA, 56 bp, Artificial; identical to SEQ ID NO: 18548
  Synthetic oligonucleotide

SEQ ID NO: 487892 - DNA, 56 bp, Artificial; identical to SEQ ID NO: 18682
  Synthetic oligonucleotide

SEQ ID NO: 487893 - DNA, 60 bp, Artificial; identical to SEQ ID NO: 11697
  Synthetic oligonucleotide

SEQ ID NO: 487894 - DNA, 60 bp, Artificial; identical to SEQ ID NO: 14359
  Synthetic oligonucleotide

SEQ ID NO: 487895 - DNA, 56 bp, Artificial; identical to SEQ ID NO: 17190
  Synthetic oligonucleotide

SEQ ID NO: 487896 - DNA, 51 bp, Artificial; identical to SEQ ID NO: 10698
  Synthetic oligonucleotide

SEQ ID NO: 487897 - DNA, 55 bp, Artificial; identical to SEQ ID NO: 12447
  Synthetic oligonucleotide

SEQ ID NO: 487898 - DNA, 55 bp, Artificial; identical to SEQ ID NO: 13236
  Synthetic oligonucleotide

SEQ ID NO: 487899 - DNA, 60 bp, Artificial; identical to SEQ ID NO: 106435
  Synthetic oligonucleotide

SEQ ID NO: 487900 - DNA, 58 bp, Artificial; identical to SEQ ID NO: 16855
  Synthetic oligonucleotide

SEQ ID NO: 487901 - DNA, 60 bp, Artificial; identical to SEQ ID NO: 15545
  Synthetic oligonucleotide

SEQ ID NO: 487902 - DNA, 57 bp, Artificial; identical to SEQ ID NO: 19930
  Synthetic oligonucleotide

SEQ ID NO: 487903 - DNA, 54 bp, Artificial; identical to SEQ ID NO: 16479
  Synthetic oligonucleotide

SEQ ID NO: 487904 - DNA, 60 bp, Artificial; identical to SEQ ID NO: 6847
  Synthetic oligonucleotide

SEQ ID NO: 487905 - DNA, 55 bp, Artificial; identical to SEQ ID NO: 13872
  Synthetic oligonucleotide

SEQ ID NO: 487906 - DNA, 55 bp, Artificial; identical to SEQ ID NO: 10448
  Synthetic oligonucleotide

SEQ ID NO: 487907 - DNA, 57 bp, Artificial; identical to SEQ ID NO: 16853
  Synthetic oligonucleotide

SEQ ID NO: 487908 - DNA, 60 bp, Artificial; identical to SEQ ID NO: 9682
  Synthetic oligonucleotide

SEQ ID NO: 487909 - DNA, 55 bp, Artificial; identical to SEQ ID NO: 14406
  Synthetic oligonucleotide

SEQ ID NO: 487910 - DNA, 57 bp, Artificial; identical to SEQ ID NO: 18684
  Synthetic oligonucleotide

SEQ ID NO: 487911 - DNA, 59 bp, Artificial; identical to SEQ ID NO: 18927
  Synthetic oligonucleotide

SEQ ID NO: 487912 - DNA, 56 bp, Artificial; identical to SEQ ID NO: 16601
  Synthetic oligonucleotide

SEQ ID NO: 487913 - DNA, 58 bp, Artificial; identical to SEQ ID NO: 20523
  Synthetic oligonucleotide

SEQ ID NO: 487914 - DNA, 60 bp, Artificial; identical to SEQ ID NO: 8312
  Synthetic oligonucleotide

SEQ ID NO: 487915 - DNA, 59 bp, Artificial; identical to SEQ ID NO: 18626
  Synthetic oligonucleotide

SEQ ID NO: 487916 - DNA, 60 bp, Artificial; identical to SEQ ID NO: 11392
  Synthetic oligonucleotide

SEQ ID NO: 487917 - DNA, 55 bp, Artificial; identical to SEQ ID NO: 17079
  Synthetic oligonucleotide

SEQ ID NO: 487918 - DNA, 56 bp, Artificial; identical to SEQ ID NO: 17940
  Synthetic oligonucleotide

SEQ ID NO: 487919 - DNA, 54 bp, Artificial; identical to SEQ ID NO: 6530
  Synthetic oligonucleotide

SEQ ID NO: 487920 - DNA, 55 bp, Artificial; identical to SEQ ID NO: 18204
  Synthetic oligonucleotide

SEQ ID NO: 487921 - DNA, 55 bp, Artificial; identical to SEQ ID NO: 18883
  Synthetic oligonucleotide

SEQ ID NO: 487922 - DNA, 58 bp, Artificial; identical to SEQ ID NO: 15935
  Synthetic oligonucleotide

SEQ ID NO: 487923 - DNA, 53 bp, Artificial; identical to SEQ ID NO: 19062
  Synthetic oligonucleotide

SEQ ID NO: 487924 - DNA, 53 bp, Artificial; identical to SEQ ID NO: 17527
  Synthetic oligonucleotide

SEQ ID NO: 487925 - DNA, 57 bp, Artificial; identical to SEQ ID NO: 16750
  Synthetic oligonucleotide

SEQ ID NO: 487926 - DNA, 55 bp, Artificial; identical to SEQ ID NO: 43225
  Synthetic oligonucleotide

SEQ ID NO: 487927 - DNA, 54 bp, Artificial; identical to SEQ ID NO: 19918
  Synthetic oligonucleotide

SEQ ID NO: 487928 - DNA, 50 bp, Artificial; identical to SEQ ID NO: 7724
  Synthetic oligonucleotide

SEQ ID NO: 487929 - DNA, 60 bp, Artificial; identical to SEQ ID NO: 14713
  Synthetic oligonucleotide

SEQ ID NO: 487930 - DNA, 57 bp, Artificial; identical to SEQ ID NO: 20300
  Synthetic oligonucleotide

SEQ ID NO: 487931 - DNA, 56 bp, Artificial; identical to SEQ ID NO: 17555
  Synthetic oligonucleotide

SEQ ID NO: 487932 - DNA, 53 bp, Artificial; identical to SEQ ID NO: 18447
  Synthetic oligonucleotide

SEQ ID NO: 487933 - DNA, 60 bp, Artificial; identical to SEQ ID NO: 7380
  Synthetic oligonucleotide

SEQ ID NO: 487934 - DNA, 60 bp, Artificial; identical to SEQ ID NO: 8184
  Synthetic oligonucleotide

SEQ ID NO: 487935 - DNA, 60 bp, Artificial; identical to SEQ ID NO: 7303
  Synthetic oligonucleotide

SEQ ID NO: 487936 - DNA, 55 bp, Artificial; identical to SEQ ID NO: 15827
  Synthetic oligonucleotide

SEQ ID NO: 487937 - DNA, 60 bp, Artificial; identical to SEQ ID NO: 12544
  Synthetic oligonucleotide

SEQ ID NO: 487938 - DNA, 58 bp, Artificial; identical to SEQ ID NO: 15829
  Synthetic oligonucleotide

SEQ ID NO: 487939 - DNA, 54 bp, Artificial; identical to SEQ ID NO: 14729
  Synthetic oligonucleotide

SEQ ID NO: 487940 - DNA, 59 bp, Artificial; identical to SEQ ID NO: 18337
  Synthetic oligonucleotide

SEQ ID NO: 487941 - DNA, 54 bp, Artificial; identical to SEQ ID NO: 16916
  Synthetic oligonucleotide

SEQ ID NO: 487942 - DNA, 60 bp, Artificial; identical to SEQ ID NO: 6119
  Synthetic oligonucleotide

SEQ ID NO: 487943 - DNA, 56 bp, Artificial; identical to SEQ ID NO: 19701
  Synthetic oligonucleotide

SEQ ID NO: 487944 - DNA, 55 bp, Artificial; identical to SEQ ID NO: 16912
  Synthetic oligonucleotide

SEQ ID NO: 487945 - DNA, 57 bp, Artificial; identical to SEQ ID NO: 10613
  Synthetic oligonucleotide

SEQ ID NO: 487946 - DNA, 55 bp, Artificial; identical to SEQ ID NO: 20563
  Synthetic oligonucleotide

SEQ ID NO: 487947 - DNA, 58 bp, Artificial; identical to SEQ ID NO: 19911
  Synthetic oligonucleotide

SEQ ID NO: 487948 - DNA, 54 bp, Artificial; identical to SEQ ID NO: 18782
  Synthetic oligonucleotide

SEQ ID NO: 487949 - DNA, 57 bp, Artificial; identical to SEQ ID NO: 19249
  Synthetic oligonucleotide

SEQ ID NO: 487950 - DNA, 56 bp, Artificial; identical to SEQ ID NO: 19510
  Synthetic oligonucleotide

SEQ ID NO: 487951 - DNA, 56 bp, Artificial; identical to SEQ ID NO: 19896
  Synthetic oligonucleotide

SEQ ID NO: 487952 - DNA, 60 bp, Artificial; identical to SEQ ID NO: 37598
  Synthetic oligonucleotide

SEQ ID NO: 487953 - DNA, 54 bp, Artificial; identical to SEQ ID NO: 11692
  Synthetic oligonucleotide

SEQ ID NO: 487954 - DNA, 60 bp, Artificial; identical to SEQ ID NO: 13183
  Synthetic oligonucleotide

SEQ ID NO: 487955 - DNA, 55 bp, Artificial; identical to SEQ ID NO: 14723
  Synthetic oligonucleotide

SEQ ID NO: 487956 - DNA, 55 bp, Artificial; identical to SEQ ID NO: 7227
  Synthetic oligonucleotide

SEQ ID NO: 487957 - DNA, 55 bp, Artificial; identical to SEQ ID NO: 15524
  Synthetic oligonucleotide

SEQ ID NO: 487958 - DNA, 56 bp, Artificial; identical to SEQ ID NO: 19684
  Synthetic oligonucleotide

SEQ ID NO: 487959 - DNA, 58 bp, Artificial; identical to SEQ ID NO: 16906
  Synthetic oligonucleotide

SEQ ID NO: 487960 - DNA, 59 bp, Artificial; identical to SEQ ID NO: 11606
  Synthetic oligonucleotide

SEQ ID NO: 487961 - DNA, 53 bp, Artificial; identical to SEQ ID NO: 18082
  Synthetic oligonucleotide

SEQ ID NO: 487962 - DNA, 52 bp, Artificial; identical to SEQ ID NO: 7368
  Synthetic oligonucleotide

SEQ ID NO: 487963 - DNA, 55 bp, Artificial; identical to SEQ ID NO: 15530
  Synthetic oligonucleotide

SEQ ID NO: 487964 - DNA, 54 bp, Artificial; identical to SEQ ID NO: 13841
  Synthetic oligonucleotide

SEQ ID NO: 487965 - DNA, 60 bp, Artificial; identical to SEQ ID NO: 6043
  Synthetic oligonucleotide

SEQ ID NO: 487966 - DNA, 60 bp, Artificial; identical to SEQ ID NO: 7239
  Synthetic oligonucleotide

SEQ ID NO: 487967 - DNA, 57 bp, Artificial; identical to SEQ ID NO: 15616
  Synthetic oligonucleotide

SEQ ID NO: 487968 - DNA, 58 bp, Artificial; identical to SEQ ID NO: 20281
  Synthetic oligonucleotide

SEQ ID NO: 487969 - DNA, 57 bp, Artificial; identical to SEQ ID NO: 20012
  Synthetic oligonucleotide

SEQ ID NO: 487970 - DNA, 51 bp, Artificial; identical to SEQ ID NO: 6633
  Synthetic oligonucleotide

SEQ ID NO: 487971 - DNA, 60 bp, Artificial; identical to SEQ ID NO: 14632
  Synthetic oligonucleotide

SEQ ID NO: 487972 - DNA, 60 bp, Artificial; identical to SEQ ID NO: 8504
  Synthetic oligonucleotide

SEQ ID NO: 487973 - DNA, 60 bp, Artificial; identical to SEQ ID NO: 14784
  Synthetic oligonucleotide

SEQ ID NO: 487974 - DNA, 58 bp, Artificial; identical to SEQ ID NO: 15103
  Synthetic oligonucleotide

SEQ ID NO: 487975 - DNA, 58 bp, Artificial; identical to SEQ ID NO: 7907
  Synthetic oligonucleotide

SEQ ID NO: 487976 - DNA, 60 bp, Artificial; identical to SEQ ID NO: 126958
  Synthetic oligonucleotide

SEQ ID NO: 487977 - DNA, 53 bp, Artificial; identical to SEQ ID NO: 20272
  Synthetic oligonucleotide

SEQ ID NO: 487978 - DNA, 50 bp, Artificial; identical to SEQ ID NO: 15591
  Synthetic oligonucleotide

SEQ ID NO: 487979 - DNA, 57 bp, Artificial; identical to SEQ ID NO: 17139
  Synthetic oligonucleotide

SEQ ID NO: 487980 - DNA, 54 bp, Artificial; identical to SEQ ID NO: 20545
  Synthetic oligonucleotide

SEQ ID NO: 487981 - DNA, 54 bp, Artificial; identical to SEQ ID NO: 19628
  Synthetic oligonucleotide

SEQ ID NO: 487982 - DNA, 58 bp, Artificial; identical to SEQ ID NO: 8417
  Synthetic oligonucleotide

SEQ ID NO: 487983 - DNA, 60 bp, Artificial; identical to SEQ ID NO: 13823
  Synthetic oligonucleotide

SEQ ID NO: 487984 - DNA, 59 bp, Artificial; identical to SEQ ID NO: 18335
  Synthetic oligonucleotide

SEQ ID NO: 487985 - DNA, 56 bp, Artificial; identical to SEQ ID NO: 19865
  Synthetic oligonucleotide

SEQ ID NO: 487986 - DNA, 60 bp, Artificial; identical to SEQ ID NO: 15018
  Synthetic oligonucleotide

SEQ ID NO: 487987 - DNA, 60 bp, Artificial; identical to SEQ ID NO: 10484
  Synthetic oligonucleotide

SEQ ID NO: 487988 - DNA, 57 bp, Artificial; identical to SEQ ID NO: 16135
  Synthetic oligonucleotide

SEQ ID NO: 487989 - DNA, 60 bp, Artificial; identical to SEQ ID NO: 12956
  Synthetic oligonucleotide

SEQ ID NO: 487990 - DNA, 59 bp, Artificial; identical to SEQ ID NO: 16511
  Synthetic oligonucleotide

SEQ ID NO: 487991 - DNA, 57 bp, Artificial; identical to SEQ ID NO: 19382
  Synthetic oligonucleotide

SEQ ID NO: 487992 - DNA, 60 bp, Artificial; identical to SEQ ID NO: 108175
  Synthetic oligonucleotide

SEQ ID NO: 487993 - DNA, 55 bp, Artificial; identical to SEQ ID NO: 13399
  Synthetic oligonucleotide

SEQ ID NO: 487994 - DNA, 55 bp, Artificial; identical to SEQ ID NO: 11026
  Synthetic oligonucleotide

SEQ ID NO: 487995 - DNA, 56 bp, Artificial; identical to SEQ ID NO: 20323
  Synthetic oligonucleotide

SEQ ID NO: 487996 - DNA, 60 bp, Artificial; identical to SEQ ID NO: 11900
  Synthetic oligonucleotide

SEQ ID NO: 487997 - DNA, 56 bp, Artificial; identical to SEQ ID NO: 18631
  Synthetic oligonucleotide

SEQ ID NO: 487998 - DNA, 55 bp, Artificial; identical to SEQ ID NO: 13284
  Synthetic oligonucleotide

SEQ ID NO: 487999 - DNA, 56 bp, Artificial; identical to SEQ ID NO: 18996
  Synthetic oligonucleotide

SEQ ID NO: 488000 - DNA, 60 bp, Artificial; identical to SEQ ID NO: 11627
  Synthetic oligonucleotide

SEQ ID NO: 488001 - DNA, 60 bp, Artificial; identical to SEQ ID NO: 15782
  Synthetic oligonucleotide

SEQ ID NO: 488002 - DNA, 60 bp, Artificial; identical to SEQ ID NO: 12528
  Synthetic oligonucleotide

SEQ ID NO: 488003 - DNA, 56 bp, Artificial; identical to SEQ ID NO: 17245
  Synthetic oligonucleotide

SEQ ID NO: 488004 - DNA, 55 bp, Artificial; identical to SEQ ID NO: 8185
  Synthetic oligonucleotide

SEQ ID NO: 488005 - DNA, 55 bp, Artificial; identical to SEQ ID NO: 13488
  Synthetic oligonucleotide

SEQ ID NO: 488006 - DNA, 58 bp, Artificial; identical to SEQ ID NO: 18959
  Synthetic oligonucleotide

SEQ ID NO: 488007 - DNA, 57 bp, Artificial; identical to SEQ ID NO: 16717
  Synthetic oligonucleotide

SEQ ID NO: 488008 - DNA, 53 bp, Artificial; identical to SEQ ID NO: 7532
  Synthetic oligonucleotide

SEQ ID NO: 488009 - DNA, 54 bp, Artificial; identical to SEQ ID NO: 17053
  Synthetic oligonucleotide

SEQ ID NO: 488010 - DNA, 58 bp, Artificial; identical to SEQ ID NO: 18650
  Synthetic oligonucleotide

SEQ ID NO: 488011 - DNA, 60 bp, Artificial; identical to SEQ ID NO: 5794
  Synthetic oligonucleotide

SEQ ID NO: 488012 - DNA, 56 bp, Artificial; identical to SEQ ID NO: 17877
  Synthetic oligonucleotide

SEQ ID NO: 488013 - DNA, 57 bp, Artificial; identical to SEQ ID NO: 19553
  Synthetic oligonucleotide

SEQ ID NO: 488014 - DNA, 55 bp, Artificial; identical to SEQ ID NO: 16914
  Synthetic oligonucleotide

SEQ ID NO: 488015 - DNA, 60 bp, Artificial; identical to SEQ ID NO: 13244
  Synthetic oligonucleotide

SEQ ID NO: 488016 - DNA, 57 bp, Artificial; identical to SEQ ID NO: 19122
  Synthetic oligonucleotide

SEQ ID NO: 488017 - DNA, 60 bp, Artificial; identical to SEQ ID NO: 10890
  Synthetic oligonucleotide

SEQ ID NO: 488018 - DNA, 54 bp, Artificial; identical to SEQ ID NO: 19534
  Synthetic oligonucleotide

SEQ ID NO: 488019 - DNA, 59 bp, Artificial; identical to SEQ ID NO: 16851
  Synthetic oligonucleotide

SEQ ID NO: 488020 - DNA, 54 bp, Artificial; identical to SEQ ID NO: 12800
  Synthetic oligonucleotide

SEQ ID NO: 488021 - DNA, 60 bp, Artificial; identical to SEQ ID NO: 15607
  Synthetic oligonucleotide

SEQ ID NO: 488022 - DNA, 55 bp, Artificial; identical to SEQ ID NO: 18032
  Synthetic oligonucleotide

SEQ ID NO: 488023 - DNA, 59 bp, Artificial; identical to SEQ ID NO: 17434
  Synthetic oligonucleotide

SEQ ID NO: 488024 - DNA, 60 bp, Artificial; identical to SEQ ID NO: 8368
  Synthetic oligonucleotide

SEQ ID NO: 488025 - DNA, 56 bp, Artificial; identical to SEQ ID NO: 18442
  Synthetic oligonucleotide

SEQ ID NO: 488026 - DNA, 55 bp, Artificial; identical to SEQ ID NO: 12886
  Synthetic oligonucleotide

SEQ ID NO: 488027 - DNA, 55 bp, Artificial; identical to SEQ ID NO: 13346
  Synthetic oligonucleotide

SEQ ID NO: 488028 - DNA, 58 bp, Artificial; identical to SEQ ID NO: 18377
  Synthetic oligonucleotide

SEQ ID NO: 488029 - DNA, 58 bp, Artificial; identical to SEQ ID NO: 18481
  Synthetic oligonucleotide

SEQ ID NO: 488030 - DNA, 54 bp, Artificial; identical to SEQ ID NO: 19494
  Synthetic oligonucleotide

SEQ ID NO: 488031 - DNA, 60 bp, Artificial; identical to SEQ ID NO: 109893
  Synthetic oligonucleotide

SEQ ID NO: 488032 - DNA, 52 bp, Artificial; identical to SEQ ID NO: 7609
  Synthetic oligonucleotide

SEQ ID NO: 488033 - DNA, 57 bp, Artificial; identical to SEQ ID NO: 19541
  Synthetic oligonucleotide

SEQ ID NO: 488034 - DNA, 60 bp, Artificial; identical to SEQ ID NO: 8271
  Synthetic oligonucleotide

SEQ ID NO: 488035 - DNA, 54 bp, Artificial; identical to SEQ ID NO: 7730
  Synthetic oligonucleotide

SEQ ID NO: 488036 - DNA, 55 bp, Artificial; identical to SEQ ID NO: 17498
  Synthetic oligonucleotide

SEQ ID NO: 488037 - DNA, 60 bp, Artificial; identical to SEQ ID NO: 12749
  Synthetic oligonucleotide

SEQ ID NO: 488038 - DNA, 60 bp, Artificial; identical to SEQ ID NO: 6803
  Synthetic oligonucleotide

SEQ ID NO: 488039 - DNA, 56 bp, Artificial; identical to SEQ ID NO: 18249
  Synthetic oligonucleotide

SEQ ID NO: 488040 - DNA, 55 bp, Artificial; identical to SEQ ID NO: 9078
  Synthetic oligonucleotide

SEQ ID NO: 488041 - DNA, 57 bp, Artificial; identical to SEQ ID NO: 16076
  Synthetic oligonucleotide

SEQ ID NO: 488042 - DNA, 55 bp, Artificial; identical to SEQ ID NO: 12944
  Synthetic oligonucleotide

SEQ ID NO: 488043 - DNA, 56 bp, Artificial; identical to SEQ ID NO: 16370
  Synthetic oligonucleotide

SEQ ID NO: 488044 - DNA, 56 bp, Artificial; identical to SEQ ID NO: 18259
  Synthetic oligonucleotide

SEQ ID NO: 488045 - DNA, 60 bp, Artificial; identical to SEQ ID NO: 15730
  Synthetic oligonucleotide

SEQ ID NO: 488046 - DNA, 56 bp, Artificial; identical to SEQ ID NO: 15898
  Synthetic oligonucleotide

SEQ ID NO: 488047 - DNA, 59 bp, Artificial; identical to SEQ ID NO: 18880
  Synthetic oligonucleotide

SEQ ID NO: 488048 - DNA, 52 bp, Artificial; identical to SEQ ID NO: 16044
  Synthetic oligonucleotide

SEQ ID NO: 488049 - DNA, 54 bp, Artificial; identical to SEQ ID NO: 16171
  Synthetic oligonucleotide

SEQ ID NO: 488050 - DNA, 60 bp, Artificial; identical to SEQ ID NO: 10538
  Synthetic oligonucleotide

SEQ ID NO: 488051 - DNA, 54 bp, Artificial; identical to SEQ ID NO: 17621
  Synthetic oligonucleotide

SEQ ID NO: 488052 - DNA, 60 bp, Artificial; identical to SEQ ID NO: 7019
  Synthetic oligonucleotide

SEQ ID NO: 488053 - DNA, 60 bp, Artificial; identical to SEQ ID NO: 6485
  Synthetic oligonucleotide

SEQ ID NO: 488054 - DNA, 52 bp, Artificial; identical to SEQ ID NO: 11571
  Synthetic oligonucleotide

SEQ ID NO: 488055 - DNA, 60 bp, Artificial; identical to SEQ ID NO: 8201
  Synthetic oligonucleotide

SEQ ID NO: 488056 - DNA, 54 bp, Artificial; identical to SEQ ID NO: 16356
  Synthetic oligonucleotide

SEQ ID NO: 488057 - DNA, 55 bp, Artificial; identical to SEQ ID NO: 15562
  Synthetic oligonucleotide

SEQ ID NO: 488058 - DNA, 52 bp, Artificial; identical to SEQ ID NO: 20106
  Synthetic oligonucleotide

SEQ ID NO: 488059 - DNA, 54 bp, Artificial; identical to SEQ ID NO: 41404
  Synthetic oligonucleotide

SEQ ID NO: 488060 - DNA, 54 bp, Artificial; identical to SEQ ID NO: 20315
  Synthetic oligonucleotide

SEQ ID NO: 488061 - DNA, 55 bp, Artificial; identical to SEQ ID NO: 20306
  Synthetic oligonucleotide

SEQ ID NO: 488062 - DNA, 59 bp, Artificial; identical to SEQ ID NO: 16240
  Synthetic oligonucleotide

SEQ ID NO: 488063 - DNA, 56 bp, Artificial; identical to SEQ ID NO: 9502
  Synthetic oligonucleotide

SEQ ID NO: 488064 - DNA, 58 bp, Artificial; identical to SEQ ID NO: 17874
  Synthetic oligonucleotide

SEQ ID NO: 488065 - DNA, 59 bp, Artificial; identical to SEQ ID NO: 16753
  Synthetic oligonucleotide

SEQ ID NO: 488066 - DNA, 60 bp, Artificial; identical to SEQ ID NO: 15423
  Synthetic oligonucleotide

SEQ ID NO: 488067 - DNA, 55 bp, Artificial; identical to SEQ ID NO: 15869
  Synthetic oligonucleotide

SEQ ID NO: 488068 - DNA, 60 bp, Artificial; identical to SEQ ID NO: 14133
  Synthetic oligonucleotide

SEQ ID NO: 488069 - DNA, 60 bp, Artificial; identical to SEQ ID NO: 15010
  Synthetic oligonucleotide

SEQ ID NO: 488070 - DNA, 53 bp, Artificial; identical to SEQ ID NO: 17078
  Synthetic oligonucleotide

SEQ ID NO: 488071 - DNA, 56 bp, Artificial; identical to SEQ ID NO: 20530
  Synthetic oligonucleotide

SEQ ID NO: 488072 - DNA, 60 bp, Artificial; identical to SEQ ID NO: 10115
  Synthetic oligonucleotide

SEQ ID NO: 488073 - DNA, 60 bp, Artificial; identical to SEQ ID NO: 14846
  Synthetic oligonucleotide

SEQ ID NO: 488074 - DNA, 59 bp, Artificial; identical to SEQ ID NO: 6280
  Synthetic oligonucleotide

SEQ ID NO: 488075 - DNA, 55 bp, Artificial; identical to SEQ ID NO: 8154
  Synthetic oligonucleotide

SEQ ID NO: 488076 - DNA, 60 bp, Artificial; identical to SEQ ID NO: 58491
  Synthetic oligonucleotide

SEQ ID NO: 488077 - DNA, 54 bp, Artificial; identical to SEQ ID NO: 16955
  Synthetic oligonucleotide

SEQ ID NO: 488078 - DNA, 53 bp, Artificial; identical to SEQ ID NO: 19984
  Synthetic oligonucleotide

SEQ ID NO: 488079 - DNA, 59 bp, Artificial; identical to SEQ ID NO: 18995
  Synthetic oligonucleotide

SEQ ID NO: 488080 - DNA, 60 bp, Artificial; identical to SEQ ID NO: 15685
  Synthetic oligonucleotide

SEQ ID NO: 488081 - DNA, 57 bp, Artificial; identical to SEQ ID NO: 15893
  Synthetic oligonucleotide

SEQ ID NO: 488082 - DNA, 57 bp, Artificial; identical to SEQ ID NO: 17933
  Synthetic oligonucleotide

SEQ ID NO: 488083 - DNA, 53 bp, Artificial; identical to SEQ ID NO: 18805
  Synthetic oligonucleotide

SEQ ID NO: 488084 - DNA, 55 bp, Artificial; identical to SEQ ID NO: 15641
  Synthetic oligonucleotide

SEQ ID NO: 488085 - DNA, 60 bp, Artificial; identical to SEQ ID NO: 10811
  Synthetic oligonucleotide

SEQ ID NO: 488086 - DNA, 59 bp, Artificial; identical to SEQ ID NO: 16999
  Synthetic oligonucleotide

SEQ ID NO: 488087 - DNA, 60 bp, Artificial; identical to SEQ ID NO: 30182
  Synthetic oligonucleotide

SEQ ID NO: 488088 - DNA, 55 bp, Artificial; identical to SEQ ID NO: 14261
  Synthetic oligonucleotide

SEQ ID NO: 488089 - DNA, 60 bp, Artificial; identical to SEQ ID NO: 11666
  Synthetic oligonucleotide

SEQ ID NO: 488090 - DNA, 60 bp, Artificial; identical to SEQ ID NO: 15428
  Synthetic oligonucleotide

SEQ ID NO: 488091 - DNA, 56 bp, Artificial; identical to SEQ ID NO: 16020
  Synthetic oligonucleotide

SEQ ID NO: 488092 - DNA, 57 bp, Artificial; identical to SEQ ID NO: 17173
  Synthetic oligonucleotide

SEQ ID NO: 488093 - DNA, 54 bp, Artificial; identical to SEQ ID NO: 10321
  Synthetic oligonucleotide

SEQ ID NO: 488094 - DNA, 60 bp, Artificial; identical to SEQ ID NO: 7801
  Synthetic oligonucleotide

SEQ ID NO: 488095 - DNA, 58 bp, Artificial; identical to SEQ ID NO: 16623
  Synthetic oligonucleotide

SEQ ID NO: 488096 - DNA, 50 bp, Artificial; identical to SEQ ID NO: 18827
  Synthetic oligonucleotide

SEQ ID NO: 488097 - DNA, 55 bp, Artificial; identical to SEQ ID NO: 12059
  Synthetic oligonucleotide

SEQ ID NO: 488098 - DNA, 56 bp, Artificial; identical to SEQ ID NO: 15703
  Synthetic oligonucleotide

SEQ ID NO: 488099 - DNA, 60 bp, Artificial; identical to SEQ ID NO: 34006
  Synthetic oligonucleotide

SEQ ID NO: 488100 - DNA, 60 bp, Artificial; identical to SEQ ID NO: 9856
  Synthetic oligonucleotide

SEQ ID NO: 488101 - DNA, 55 bp, Artificial; identical to SEQ ID NO: 10433
  Synthetic oligonucleotide

SEQ ID NO: 488102 - DNA, 57 bp, Artificial; identical to SEQ ID NO: 19518
  Synthetic oligonucleotide

SEQ ID NO: 488103 - DNA, 60 bp, Artificial; identical to SEQ ID NO: 11202
  Synthetic oligonucleotide

SEQ ID NO: 488104 - DNA, 58 bp, Artificial; identical to SEQ ID NO: 19949
  Synthetic oligonucleotide

SEQ ID NO: 488105 - DNA, 60 bp, Artificial; identical to SEQ ID NO: 15455
  Synthetic oligonucleotide

SEQ ID NO: 488106 - DNA, 55 bp, Artificial; identical to SEQ ID NO: 17247
  Synthetic oligonucleotide

SEQ ID NO: 488107 - DNA, 54 bp, Artificial; identical to SEQ ID NO: 17047
  Synthetic oligonucleotide

SEQ ID NO: 488108 - DNA, 59 bp, Artificial; identical to SEQ ID NO: 18489
  Synthetic oligonucleotide

SEQ ID NO: 488109 - DNA, 60 bp, Artificial; identical to SEQ ID NO: 8618
  Synthetic oligonucleotide

SEQ ID NO: 488110 - DNA, 59 bp, Artificial; identical to SEQ ID NO: 16664
  Synthetic oligonucleotide

SEQ ID NO: 488111 - DNA, 60 bp, Artificial; identical to SEQ ID NO: 9738
  Synthetic oligonucleotide

SEQ ID NO: 488112 - DNA, 60 bp, Artificial; identical to SEQ ID NO: 15020
  Synthetic oligonucleotide

SEQ ID NO: 488113 - DNA, 56 bp, Artificial; identical to SEQ ID NO: 8276
  Synthetic oligonucleotide

SEQ ID NO: 488114 - DNA, 58 bp, Artificial; identical to SEQ ID NO: 7097
  Synthetic oligonucleotide

SEQ ID NO: 488115 - DNA, 55 bp, Artificial; identical to SEQ ID NO: 10421
  Synthetic oligonucleotide

SEQ ID NO: 488116 - DNA, 55 bp, Artificial; identical to SEQ ID NO: 15255
  Synthetic oligonucleotide

SEQ ID NO: 488117 - DNA, 54 bp, Artificial; identical to SEQ ID NO: 16280
  Synthetic oligonucleotide

SEQ ID NO: 488118 - DNA, 54 bp, Artificial; identical to SEQ ID NO: 10672
  Synthetic oligonucleotide

SEQ ID NO: 488119 - DNA, 58 bp, Artificial; identical to SEQ ID NO: 18366
  Synthetic oligonucleotide

SEQ ID NO: 488120 - DNA, 56 bp, Artificial; identical to SEQ ID NO: 10485
  Synthetic oligonucleotide

SEQ ID NO: 488121 - DNA, 58 bp, Artificial; identical to SEQ ID NO: 15128
  Synthetic oligonucleotide

SEQ ID NO: 488122 - DNA, 57 bp, Artificial; identical to SEQ ID NO: 16159
  Synthetic oligonucleotide

SEQ ID NO: 488123 - DNA, 59 bp, Artificial; identical to SEQ ID NO: 6098
  Synthetic oligonucleotide

SEQ ID NO: 488124 - DNA, 60 bp, Artificial; identical to SEQ ID NO: 15002
  Synthetic oligonucleotide

SEQ ID NO: 488125 - DNA, 55 bp, Artificial; identical to SEQ ID NO: 6798
  Synthetic oligonucleotide

SEQ ID NO: 488126 - DNA, 57 bp, Artificial; identical to SEQ ID NO: 6952
  Synthetic oligonucleotide

SEQ ID NO: 488127 - DNA, 60 bp, Artificial; identical to SEQ ID NO: 6583
  Synthetic oligonucleotide

SEQ ID NO: 488128 - DNA, 55 bp, Artificial; identical to SEQ ID NO: 11955
  Synthetic oligonucleotide

SEQ ID NO: 488129 - DNA, 54 bp, Artificial; identical to SEQ ID NO: 18339
  Synthetic oligonucleotide

SEQ ID NO: 488130 - DNA, 55 bp, Artificial; identical to SEQ ID NO: 16655
  Synthetic oligonucleotide

SEQ ID NO: 488131 - DNA, 58 bp, Artificial; identical to SEQ ID NO: 18512
  Synthetic oligonucleotide

SEQ ID NO: 488132 - DNA, 60 bp, Artificial; identical to SEQ ID NO: 7252
  Synthetic oligonucleotide

SEQ ID NO: 488133 - DNA, 58 bp, Artificial; identical to SEQ ID NO: 18905
  Synthetic oligonucleotide

SEQ ID NO: 488134 - DNA, 60 bp, Artificial; identical to SEQ ID NO: 5998
  Synthetic oligonucleotide

SEQ ID NO: 488135 - DNA, 60 bp, Artificial; identical to SEQ ID NO: 7336
  Synthetic oligonucleotide

SEQ ID NO: 488136 - DNA, 55 bp, Artificial; identical to SEQ ID NO: 7830
  Synthetic oligonucleotide

SEQ ID NO: 488137 - DNA, 58 bp, Artificial; identical to SEQ ID NO: 16147
  Synthetic oligonucleotide

SEQ ID NO: 488138 - DNA, 60 bp, Artificial; identical to SEQ ID NO: 116964
  Synthetic oligonucleotide

SEQ ID NO: 488139 - DNA, 60 bp, Artificial; identical to SEQ ID NO: 29895
  Synthetic oligonucleotide

SEQ ID NO: 488140 - DNA, 59 bp, Artificial; identical to SEQ ID NO: 19875
  Synthetic oligonucleotide

SEQ ID NO: 488141 - DNA, 60 bp, Artificial; identical to SEQ ID NO: 12410
  Synthetic oligonucleotide

SEQ ID NO: 488142 - DNA, 55 bp, Artificial; identical to SEQ ID NO: 11643
  Synthetic oligonucleotide

SEQ ID NO: 488143 - DNA, 57 bp, Artificial; identical to SEQ ID NO: 19883
  Synthetic oligonucleotide

SEQ ID NO: 488144 - DNA, 59 bp, Artificial; identical to SEQ ID NO: 16892
  Synthetic oligonucleotide

SEQ ID NO: 488145 - DNA, 60 bp, Artificial; identical to SEQ ID NO: 10847
  Synthetic oligonucleotide

SEQ ID NO: 488146 - DNA, 55 bp, Artificial; identical to SEQ ID NO: 12768
  Synthetic oligonucleotide

SEQ ID NO: 488147 - DNA, 60 bp, Artificial; identical to SEQ ID NO: 10293
  Synthetic oligonucleotide

SEQ ID NO: 488148 - DNA, 57 bp, Artificial; identical to SEQ ID NO: 17532
  Synthetic oligonucleotide

SEQ ID NO: 488149 - DNA, 55 bp, Artificial; identical to SEQ ID NO: 12490
  Synthetic oligonucleotide

SEQ ID NO: 488150 - DNA, 59 bp, Artificial; identical to SEQ ID NO: 17416
  Synthetic oligonucleotide

SEQ ID NO: 488151 - DNA, 60 bp, Artificial; identical to SEQ ID NO: 11327
  Synthetic oligonucleotide

SEQ ID NO: 488152 - DNA, 56 bp, Artificial; identical to SEQ ID NO: 18299
  Synthetic oligonucleotide

SEQ ID NO: 488153 - DNA, 56 bp, Artificial; identical to SEQ ID NO: 14263
  Synthetic oligonucleotide

SEQ ID NO: 488154 - DNA, 60 bp, Artificial; identical to SEQ ID NO: 12594
  Synthetic oligonucleotide

SEQ ID NO: 488155 - DNA, 60 bp, Artificial; identical to SEQ ID NO: 129248
  Synthetic oligonucleotide

SEQ ID NO: 488156 - DNA, 60 bp, Artificial; identical to SEQ ID NO: 6832
  Synthetic oligonucleotide

SEQ ID NO: 488157 - DNA, 58 bp, Artificial; identical to SEQ ID NO: 19125
  Synthetic oligonucleotide

SEQ ID NO: 488158 - DNA, 59 bp, Artificial; identical to SEQ ID NO: 19271
  Synthetic oligonucleotide

SEQ ID NO: 488159 - DNA, 57 bp, Artificial; identical to SEQ ID NO: 20016
  Synthetic oligonucleotide

SEQ ID NO: 488160 - DNA, 58 bp, Artificial; identical to SEQ ID NO: 18179
  Synthetic oligonucleotide

SEQ ID NO: 488161 - DNA, 55 bp, Artificial; identical to SEQ ID NO: 8188
  Synthetic oligonucleotide

SEQ ID NO: 488162 - DNA, 59 bp, Artificial; identical to SEQ ID NO: 15658
  Synthetic oligonucleotide

SEQ ID NO: 488163 - DNA, 60 bp, Artificial; identical to SEQ ID NO: 119860
  Synthetic oligonucleotide

SEQ ID NO: 488164 - DNA, 51 bp, Artificial; identical to SEQ ID NO: 10094
  Synthetic oligonucleotide

SEQ ID NO: 488165 - DNA, 60 bp, Artificial; identical to SEQ ID NO: 15784
  Synthetic oligonucleotide

SEQ ID NO: 488166 - DNA, 55 bp, Artificial; identical to SEQ ID NO: 6470
  Synthetic oligonucleotide

SEQ ID NO: 488167 - DNA, 60 bp, Artificial; identical to SEQ ID NO: 14743
  Synthetic oligonucleotide

SEQ ID NO: 488168 - DNA, 52 bp, Artificial; identical to SEQ ID NO: 15877
  Synthetic oligonucleotide

SEQ ID NO: 488169 - DNA, 51 bp, Artificial; identical to SEQ ID NO: 16703
  Synthetic oligonucleotide

SEQ ID NO: 488170 - DNA, 50 bp, Artificial; identical to SEQ ID NO: 15243
  Synthetic oligonucleotide

SEQ ID NO: 488171 - DNA, 57 bp, Artificial; identical to SEQ ID NO: 13894
  Synthetic oligonucleotide

SEQ ID NO: 488172 - DNA, 60 bp, Artificial; identical to SEQ ID NO: 6344
  Synthetic oligonucleotide

SEQ ID NO: 488173 - DNA, 58 bp, Artificial; identical to SEQ ID NO: 18065
  Synthetic oligonucleotide

SEQ ID NO: 488174 - DNA, 53 bp, Artificial; identical to SEQ ID NO: 16797
  Synthetic oligonucleotide

SEQ ID NO: 488175 - DNA, 60 bp, Artificial; identical to SEQ ID NO: 10892
  Synthetic oligonucleotide

SEQ ID NO: 488176 - DNA, 60 bp, Artificial; identical to SEQ ID NO: 13967
  Synthetic oligonucleotide

SEQ ID NO: 488177 - DNA, 57 bp, Artificial; identical to SEQ ID NO: 20289
  Synthetic oligonucleotide

SEQ ID NO: 488178 - DNA, 60 bp, Artificial; identical to SEQ ID NO: 5800
  Synthetic oligonucleotide

SEQ ID NO: 488179 - DNA, 58 bp, Artificial; identical to SEQ ID NO: 16400
  Synthetic oligonucleotide

SEQ ID NO: 488180 - DNA, 53 bp, Artificial; identical to SEQ ID NO: 19685
  Synthetic oligonucleotide

SEQ ID NO: 488181 - DNA, 60 bp, Artificial; identical to SEQ ID NO: 13873
  Synthetic oligonucleotide

SEQ ID NO: 488182 - DNA, 55 bp, Artificial; identical to SEQ ID NO: 6049
  Synthetic oligonucleotide

SEQ ID NO: 488183 - DNA, 55 bp, Artificial; identical to SEQ ID NO: 13981
  Synthetic oligonucleotide

SEQ ID NO: 488184 - DNA, 53 bp, Artificial; identical to SEQ ID NO: 19927
  Synthetic oligonucleotide

SEQ ID NO: 488185 - DNA, 55 bp, Artificial; identical to SEQ ID NO: 13258
  Synthetic oligonucleotide

SEQ ID NO: 488186 - DNA, 58 bp, Artificial; identical to SEQ ID NO: 15164
  Synthetic oligonucleotide

SEQ ID NO: 488187 - DNA, 54 bp, Artificial; identical to SEQ ID NO: 20368
  Synthetic oligonucleotide

SEQ ID NO: 488188 - DNA, 56 bp, Artificial; identical to SEQ ID NO: 17082
  Synthetic oligonucleotide

SEQ ID NO: 488189 - DNA, 57 bp, Artificial; identical to SEQ ID NO: 20547
  Synthetic oligonucleotide

SEQ ID NO: 488190 - DNA, 60 bp, Artificial; identical to SEQ ID NO: 112763
  Synthetic oligonucleotide

SEQ ID NO: 488191 - DNA, 55 bp, Artificial; identical to SEQ ID NO: 12383
  Synthetic oligonucleotide

SEQ ID NO: 488192 - DNA, 58 bp, Artificial; identical to SEQ ID NO: 17811
  Synthetic oligonucleotide

SEQ ID NO: 488193 - DNA, 56 bp, Artificial; identical to SEQ ID NO: 19847
  Synthetic oligonucleotide

SEQ ID NO: 488194 - DNA, 60 bp, Artificial; identical to SEQ ID NO: 10808
  Synthetic oligonucleotide

SEQ ID NO: 488195 - DNA, 60 bp, Artificial; identical to SEQ ID NO: 66086
  Synthetic oligonucleotide

SEQ ID NO: 488196 - DNA, 60 bp, Artificial; identical to SEQ ID NO: 79246
  Synthetic oligonucleotide

SEQ ID NO: 488197 - DNA, 60 bp, Artificial; identical to SEQ ID NO: 13227
  Synthetic oligonucleotide

SEQ ID NO: 488198 - DNA, 59 bp, Artificial; identical to SEQ ID NO: 19162
  Synthetic oligonucleotide

SEQ ID NO: 488199 - DNA, 57 bp, Artificial; identical to SEQ ID NO: 18929
  Synthetic oligonucleotide

SEQ ID NO: 488200 - DNA, 60 bp, Artificial; identical to SEQ ID NO: 13152
  Synthetic oligonucleotide

SEQ ID NO: 488201 - DNA, 60 bp, Artificial; identical to SEQ ID NO: 13191
  Synthetic oligonucleotide

SEQ ID NO: 488202 - DNA, 52 bp, Artificial; identical to SEQ ID NO: 12954
  Synthetic oligonucleotide

SEQ ID NO: 488203 - DNA, 60 bp, Artificial; identical to SEQ ID NO: 14965
  Synthetic oligonucleotide

SEQ ID NO: 488204 - DNA, 60 bp, Artificial; identical to SEQ ID NO: 10241
  Synthetic oligonucleotide

SEQ ID NO: 488205 - DNA, 60 bp, Artificial; identical to SEQ ID NO: 124498
  Synthetic oligonucleotide

SEQ ID NO: 488206 - DNA, 56 bp, Artificial; identical to SEQ ID NO: 19400
  Synthetic oligonucleotide

SEQ ID NO: 488207 - DNA, 58 bp, Artificial; identical to SEQ ID NO: 16347
  Synthetic oligonucleotide

SEQ ID NO: 488208 - DNA, 59 bp, Artificial; identical to SEQ ID NO: 18475
  Synthetic oligonucleotide

SEQ ID NO: 488209 - DNA, 57 bp, Artificial; identical to SEQ ID NO: 14339
  Synthetic oligonucleotide

SEQ ID NO: 488210 - DNA, 60 bp, Artificial; identical to SEQ ID NO: 12657
  Synthetic oligonucleotide

SEQ ID NO: 488211 - DNA, 54 bp, Artificial; identical to SEQ ID NO: 10397
  Synthetic oligonucleotide

SEQ ID NO: 488212 - DNA, 53 bp, Artificial; identical to SEQ ID NO: 15694
  Synthetic oligonucleotide

SEQ ID NO: 488213 - DNA, 53 bp, Artificial; identical to SEQ ID NO: 17541
  Synthetic oligonucleotide

SEQ ID NO: 488214 - DNA, 59 bp, Artificial; identical to SEQ ID NO: 19165
  Synthetic oligonucleotide

SEQ ID NO: 488215 - DNA, 59 bp, Artificial; identical to SEQ ID NO: 19230
  Synthetic oligonucleotide

SEQ ID NO: 488216 - DNA, 57 bp, Artificial; identical to SEQ ID NO: 11012
  Synthetic oligonucleotide

SEQ ID NO: 488217 - DNA, 55 bp, Artificial; identical to SEQ ID NO: 19519
  Synthetic oligonucleotide

SEQ ID NO: 488218 - DNA, 60 bp, Artificial; identical to SEQ ID NO: 6097
  Synthetic oligonucleotide

SEQ ID NO: 488219 - DNA, 56 bp, Artificial; identical to SEQ ID NO: 16143
  Synthetic oligonucleotide

SEQ ID NO: 488220 - DNA, 60 bp, Artificial; identical to SEQ ID NO: 7465
  Synthetic oligonucleotide

SEQ ID NO: 488221 - DNA, 57 bp, Artificial; identical to SEQ ID NO: 19602
  Synthetic oligonucleotide

SEQ ID NO: 488222 - DNA, 60 bp, Artificial; identical to SEQ ID NO: 14126
  Synthetic oligonucleotide

SEQ ID NO: 488223 - DNA, 55 bp, Artificial; identical to SEQ ID NO: 20114
  Synthetic oligonucleotide

SEQ ID NO: 488224 - DNA, 54 bp, Artificial; identical to SEQ ID NO: 12005
  Synthetic oligonucleotide

SEQ ID NO: 488225 - DNA, 60 bp, Artificial; identical to SEQ ID NO: 8395
  Synthetic oligonucleotide

SEQ ID NO: 488226 - DNA, 55 bp, Artificial; identical to SEQ ID NO: 12451
  Synthetic oligonucleotide

SEQ ID NO: 488227 - DNA, 55 bp, Artificial; identical to SEQ ID NO: 18651
  Synthetic oligonucleotide

SEQ ID NO: 488228 - DNA, 57 bp, Artificial; identical to SEQ ID NO: 8495
  Synthetic oligonucleotide

SEQ ID NO: 488229 - DNA, 58 bp, Artificial; identical to SEQ ID NO: 18469
  Synthetic oligonucleotide

SEQ ID NO: 488230 - DNA, 60 bp, Artificial; identical to SEQ ID NO: 9184
  Synthetic oligonucleotide

SEQ ID NO: 488231 - DNA, 59 bp, Artificial; identical to SEQ ID NO: 19420
  Synthetic oligonucleotide

SEQ ID NO: 488232 - DNA, 55 bp, Artificial; identical to SEQ ID NO: 7082
  Synthetic oligonucleotide

SEQ ID NO: 488233 - DNA, 54 bp, Artificial; identical to SEQ ID NO: 7652
  Synthetic oligonucleotide

SEQ ID NO: 488234 - DNA, 55 bp, Artificial; identical to SEQ ID NO: 17490
  Synthetic oligonucleotide

SEQ ID NO: 488235 - DNA, 55 bp, Artificial; identical to SEQ ID NO: 13982
  Synthetic oligonucleotide

SEQ ID NO: 488236 - DNA, 59 bp, Artificial; identical to SEQ ID NO: 18088
  Synthetic oligonucleotide

SEQ ID NO: 488237 - DNA, 57 bp, Artificial; identical to SEQ ID NO: 17175
  Synthetic oligonucleotide

SEQ ID NO: 488238 - DNA, 60 bp, Artificial; identical to SEQ ID NO: 13562
  Synthetic oligonucleotide

SEQ ID NO: 488239 - DNA, 54 bp, Artificial; identical to SEQ ID NO: 18040
  Synthetic oligonucleotide

SEQ ID NO: 488240 - DNA, 60 bp, Artificial; identical to SEQ ID NO: 5743
  Synthetic oligonucleotide

SEQ ID NO: 488241 - DNA, 55 bp, Artificial; identical to SEQ ID NO: 7423
  Synthetic oligonucleotide

SEQ ID NO: 488242 - DNA, 60 bp, Artificial; identical to SEQ ID NO: 9611
  Synthetic oligonucleotide

SEQ ID NO: 488243 - DNA, 51 bp, Artificial; identical to SEQ ID NO: 309
  Synthetic oligonucleotide

SEQ ID NO: 488244 - DNA, 60 bp, Artificial; identical to SEQ ID NO: 7993
  Synthetic oligonucleotide

SEQ ID NO: 488245 - DNA, 57 bp, Artificial; identical to SEQ ID NO: 16671
  Synthetic oligonucleotide

SEQ ID NO: 488246 - DNA, 57 bp, Artificial; identical to SEQ ID NO: 19232
  Synthetic oligonucleotide

SEQ ID NO: 488247 - DNA, 55 bp, Artificial; identical to SEQ ID NO: 8893
  Synthetic oligonucleotide

SEQ ID NO: 488248 - DNA, 57 bp, Artificial; identical to SEQ ID NO: 18214
  Synthetic oligonucleotide

SEQ ID NO: 488249 - DNA, 60 bp, Artificial; identical to SEQ ID NO: 15816
  Synthetic oligonucleotide

SEQ ID NO: 488250 - DNA, 54 bp, Artificial; identical to SEQ ID NO: 15899
  Synthetic oligonucleotide

SEQ ID NO: 488251 - DNA, 60 bp, Artificial; identical to SEQ ID NO: 12855
  Synthetic oligonucleotide

SEQ ID NO: 488252 - DNA, 53 bp, Artificial; identical to SEQ ID NO: 14409
  Synthetic oligonucleotide

SEQ ID NO: 488253 - DNA, 60 bp, Artificial; identical to SEQ ID NO: 10989
  Synthetic oligonucleotide

SEQ ID NO: 488254 - DNA, 55 bp, Artificial; identical to SEQ ID NO: 12971
  Synthetic oligonucleotide

SEQ ID NO: 488255 - DNA, 60 bp, Artificial; identical to SEQ ID NO: 10487
  Synthetic oligonucleotide

SEQ ID NO: 488256 - DNA, 60 bp, Artificial; identical to SEQ ID NO: 11002
  Synthetic oligonucleotide

SEQ ID NO: 488257 - DNA, 60 bp, Artificial; identical to SEQ ID NO: 6444
  Synthetic oligonucleotide

SEQ ID NO: 488258 - DNA, 55 bp, Artificial; identical to SEQ ID NO: 13392
  Synthetic oligonucleotide

SEQ ID NO: 488259 - DNA, 55 bp, Artificial; identical to SEQ ID NO: 8804
  Synthetic oligonucleotide

SEQ ID NO: 488260 - DNA, 53 bp, Artificial; identical to SEQ ID NO: 19501
  Synthetic oligonucleotide

SEQ ID NO: 488261 - DNA, 55 bp, Artificial; identical to SEQ ID NO: 12799
  Synthetic oligonucleotide

SEQ ID NO: 488262 - DNA, 55 bp, Artificial; identical to SEQ ID NO: 12537
  Synthetic oligonucleotide

SEQ ID NO: 488263 - DNA, 55 bp, Artificial; identical to SEQ ID NO: 8920
  Synthetic oligonucleotide

SEQ ID NO: 488264 - DNA, 55 bp, Artificial; identical to SEQ ID NO: 13273
  Synthetic oligonucleotide

SEQ ID NO: 488265 - DNA, 60 bp, Artificial; identical to SEQ ID NO: 13851
  Synthetic oligonucleotide

SEQ ID NO: 488266 - DNA, 54 bp, Artificial; identical to SEQ ID NO: 12734
  Synthetic oligonucleotide

SEQ ID NO: 488267 - DNA, 60 bp, Artificial; identical to SEQ ID NO: 11852
  Synthetic oligonucleotide

SEQ ID NO: 488268 - DNA, 55 bp, Artificial; identical to SEQ ID NO: 12810
  Synthetic oligonucleotide

SEQ ID NO: 488269 - DNA, 53 bp, Artificial; identical to SEQ ID NO: 12456
  Synthetic oligonucleotide

SEQ ID NO: 488270 - DNA, 59 bp, Artificial; identical to SEQ ID NO: 19215
  Synthetic oligonucleotide

SEQ ID NO: 488271 - DNA, 55 bp, Artificial; identical to SEQ ID NO: 8925
  Synthetic oligonucleotide

SEQ ID NO: 488272 - DNA, 55 bp, Artificial; identical to SEQ ID NO: 7646
  Synthetic oligonucleotide

SEQ ID NO: 488273 - DNA, 59 bp, Artificial; identical to SEQ ID NO: 18121
  Synthetic oligonucleotide

SEQ ID NO: 488274 - DNA, 59 bp, Artificial; identical to SEQ ID NO: 16073
  Synthetic oligonucleotide

SEQ ID NO: 488275 - DNA, 56 bp, Artificial; identical to SEQ ID NO: 12908
  Synthetic oligonucleotide

SEQ ID NO: 488276 - DNA, 59 bp, Artificial; identical to SEQ ID NO: 18496
  Synthetic oligonucleotide

SEQ ID NO: 488277 - DNA, 60 bp, Artificial; identical to SEQ ID NO: 35513
  Synthetic oligonucleotide

SEQ ID NO: 488278 - DNA, 53 bp, Artificial; identical to SEQ ID NO: 10202
  Synthetic oligonucleotide

SEQ ID NO: 488279 - DNA, 53 bp, Artificial; identical to SEQ ID NO: 17536
  Synthetic oligonucleotide

SEQ ID NO: 488280 - DNA, 56 bp, Artificial; identical to SEQ ID NO: 18106
  Synthetic oligonucleotide

SEQ ID NO: 488281 - DNA, 55 bp, Artificial; identical to SEQ ID NO: 11115
  Synthetic oligonucleotide

SEQ ID NO: 488282 - DNA, 54 bp, Artificial; identical to SEQ ID NO: 20080
  Synthetic oligonucleotide

SEQ ID NO: 488283 - DNA, 60 bp, Artificial; identical to SEQ ID NO: 11131
  Synthetic oligonucleotide

SEQ ID NO: 488284 - DNA, 60 bp, Artificial; identical to SEQ ID NO: 12883
  Synthetic oligonucleotide

SEQ ID NO: 488285 - DNA, 53 bp, Artificial; identical to SEQ ID NO: 15906
  Synthetic oligonucleotide

SEQ ID NO: 488286 - DNA, 60 bp, Artificial; identical to SEQ ID NO: 15484
  Synthetic oligonucleotide

SEQ ID NO: 488287 - DNA, 59 bp, Artificial; identical to SEQ ID NO: 16716
  Synthetic oligonucleotide

SEQ ID NO: 488288 - DNA, 60 bp, Artificial; identical to SEQ ID NO: 10310
  Synthetic oligonucleotide

SEQ ID NO: 488289 - DNA, 51 bp, Artificial; identical to SEQ ID NO: 18928
  Synthetic oligonucleotide

SEQ ID NO: 488290 - DNA, 55 bp, Artificial; identical to SEQ ID NO: 16943
  Synthetic oligonucleotide

SEQ ID NO: 488291 - DNA, 57 bp, Artificial; identical to SEQ ID NO: 16591
  Synthetic oligonucleotide

SEQ ID NO: 488292 - DNA, 54 bp, Artificial; identical to SEQ ID NO: 17105
  Synthetic oligonucleotide

SEQ ID NO: 488293 - DNA, 56 bp, Artificial; identical to SEQ ID NO: 17825
  Synthetic oligonucleotide

SEQ ID NO: 488294 - DNA, 57 bp, Artificial; identical to SEQ ID NO: 17897
  Synthetic oligonucleotide

SEQ ID NO: 488295 - DNA, 58 bp, Artificial; identical to SEQ ID NO: 16733
  Synthetic oligonucleotide

SEQ ID NO: 488296 - DNA, 53 bp, Artificial; identical to SEQ ID NO: 15991
  Synthetic oligonucleotide

SEQ ID NO: 488297 - DNA, 58 bp, Artificial; identical to SEQ ID NO: 20531
  Synthetic oligonucleotide

SEQ ID NO: 488298 - DNA, 54 bp, Artificial; identical to SEQ ID NO: 16604
  Synthetic oligonucleotide

SEQ ID NO: 488299 - DNA, 57 bp, Artificial; identical to SEQ ID NO: 13901
  Synthetic oligonucleotide

SEQ ID NO: 488300 - DNA, 60 bp, Artificial; identical to SEQ ID NO: 106762
  Synthetic oligonucleotide

SEQ ID NO: 488301 - DNA, 60 bp, Artificial; identical to SEQ ID NO: 123855
  Synthetic oligonucleotide

SEQ ID NO: 488302 - DNA, 60 bp, Artificial; identical to SEQ ID NO: 12252
  Synthetic oligonucleotide

SEQ ID NO: 488303 - DNA, 58 bp, Artificial; identical to SEQ ID NO: 16920
  Synthetic oligonucleotide

SEQ ID NO: 488304 - DNA, 60 bp, Artificial; identical to SEQ ID NO: 11708
  Synthetic oligonucleotide

SEQ ID NO: 488305 - DNA, 58 bp, Artificial; identical to SEQ ID NO: 10839
  Synthetic oligonucleotide

SEQ ID NO: 488306 - DNA, 60 bp, Artificial; identical to SEQ ID NO: 8405
  Synthetic oligonucleotide

SEQ ID NO: 488307 - DNA, 56 bp, Artificial; identical to SEQ ID NO: 13727
  Synthetic oligonucleotide

SEQ ID NO: 488308 - DNA, 50 bp, Artificial; identical to SEQ ID NO: 111070
  Synthetic oligonucleotide

SEQ ID NO: 488309 - DNA, 58 bp, Artificial; identical to SEQ ID NO: 16781
  Synthetic oligonucleotide

SEQ ID NO: 488310 - DNA, 60 bp, Artificial; identical to SEQ ID NO: 13714
  Synthetic oligonucleotide

SEQ ID NO: 488311 - DNA, 60 bp, Artificial; identical to SEQ ID NO: 12489
  Synthetic oligonucleotide

SEQ ID NO: 488312 - DNA, 55 bp, Artificial; identical to SEQ ID NO: 7657
  Synthetic oligonucleotide

SEQ ID NO: 488313 - DNA, 58 bp, Artificial; identical to SEQ ID NO: 20160
  Synthetic oligonucleotide

SEQ ID NO: 488314 - DNA, 56 bp, Artificial; identical to SEQ ID NO: 17631
  Synthetic oligonucleotide

SEQ ID NO: 488315 - DNA, 56 bp, Artificial; identical to SEQ ID NO: 20424
  Synthetic oligonucleotide

SEQ ID NO: 488316 - DNA, 55 bp, Artificial; identical to SEQ ID NO: 13176
  Synthetic oligonucleotide

SEQ ID NO: 488317 - DNA, 58 bp, Artificial; identical to SEQ ID NO: 17355
  Synthetic oligonucleotide

SEQ ID NO: 488318 - DNA, 60 bp, Artificial; identical to SEQ ID NO: 10398
  Synthetic oligonucleotide

SEQ ID NO: 488319 - DNA, 60 bp, Artificial; identical to SEQ ID NO: 15660
  Synthetic oligonucleotide

SEQ ID NO: 488320 - DNA, 60 bp, Artificial; identical to SEQ ID NO: 15357
  Synthetic oligonucleotide

SEQ ID NO: 488321 - DNA, 58 bp, Artificial; identical to SEQ ID NO: 19195
  Synthetic oligonucleotide

SEQ ID NO: 488322 - DNA, 51 bp, Artificial; identical to SEQ ID NO: 16509
  Synthetic oligonucleotide

SEQ ID NO: 488323 - DNA, 60 bp, Artificial; identical to SEQ ID NO: 10933
  Synthetic oligonucleotide

SEQ ID NO: 488324 - DNA, 52 bp, Artificial; identical to SEQ ID NO: 18074
  Synthetic oligonucleotide

SEQ ID NO: 488325 - DNA, 60 bp, Artificial; identical to SEQ ID NO: 11363
  Synthetic oligonucleotide

SEQ ID NO: 488326 - DNA, 58 bp, Artificial; identical to SEQ ID NO: 19991
  Synthetic oligonucleotide

SEQ ID NO: 488327 - DNA, 58 bp, Artificial; identical to SEQ ID NO: 19414
  Synthetic oligonucleotide

SEQ ID NO: 488328 - DNA, 52 bp, Artificial; identical to SEQ ID NO: 6409
  Synthetic oligonucleotide

SEQ ID NO: 488329 - DNA, 60 bp, Artificial; identical to SEQ ID NO: 11913
  Synthetic oligonucleotide

SEQ ID NO: 488330 - DNA, 56 bp, Artificial; identical to SEQ ID NO: 10952
  Synthetic oligonucleotide

SEQ ID NO: 488331 - DNA, 53 bp, Artificial; identical to SEQ ID NO: 10360
  Synthetic oligonucleotide

SEQ ID NO: 488332 - DNA, 57 bp, Artificial; identical to SEQ ID NO: 16355
  Synthetic oligonucleotide

SEQ ID NO: 488333 - DNA, 59 bp, Artificial; identical to SEQ ID NO: 18715
  Synthetic oligonucleotide

SEQ ID NO: 488334 - DNA, 51 bp, Artificial; identical to SEQ ID NO: 6073
  Synthetic oligonucleotide

SEQ ID NO: 488335 - DNA, 59 bp, Artificial; identical to SEQ ID NO: 6856
  Synthetic oligonucleotide

SEQ ID NO: 488336 - DNA, 60 bp, Artificial; identical to SEQ ID NO: 32143
  Synthetic oligonucleotide

SEQ ID NO: 488337 - DNA, 56 bp, Artificial; identical to SEQ ID NO: 15918
  Synthetic oligonucleotide

SEQ ID NO: 488338 - DNA, 52 bp, Artificial; identical to SEQ ID NO: 16677
  Synthetic oligonucleotide

SEQ ID NO: 488339 - DNA, 56 bp, Artificial; identical to SEQ ID NO: 19296
  Synthetic oligonucleotide

SEQ ID NO: 488340 - DNA, 56 bp, Artificial; identical to SEQ ID NO: 19139
  Synthetic oligonucleotide

SEQ ID NO: 488341 - DNA, 59 bp, Artificial; identical to SEQ ID NO: 170
  Synthetic oligonucleotide

SEQ ID NO: 488342 - DNA, 50 bp, Artificial; identical to SEQ ID NO: 20161
  Synthetic oligonucleotide

SEQ ID NO: 488343 - DNA, 60 bp, Artificial; identical to SEQ ID NO: 14382
  Synthetic oligonucleotide

SEQ ID NO: 488344 - DNA, 59 bp, Artificial; identical to SEQ ID NO: 18048
  Synthetic oligonucleotide

SEQ ID NO: 488345 - DNA, 55 bp, Artificial; identical to SEQ ID NO: 12837
  Synthetic oligonucleotide

SEQ ID NO: 488346 - DNA, 55 bp, Artificial; identical to SEQ ID NO: 9155
  Synthetic oligonucleotide

SEQ ID NO: 488347 - DNA, 56 bp, Artificial; identical to SEQ ID NO: 12764
  Synthetic oligonucleotide

SEQ ID NO: 488348 - DNA, 56 bp, Artificial; identical to SEQ ID NO: 16545
  Synthetic oligonucleotide

SEQ ID NO: 488349 - DNA, 60 bp, Artificial; identical to SEQ ID NO: 9615
  Synthetic oligonucleotide

SEQ ID NO: 488350 - DNA, 60 bp, Artificial; identical to SEQ ID NO: 9093
  Synthetic oligonucleotide

SEQ ID NO: 488351 - DNA, 60 bp, Artificial; identical to SEQ ID NO: 10728
  Synthetic oligonucleotide

SEQ ID NO: 488352 - DNA, 57 bp, Artificial; identical to SEQ ID NO: 19325
  Synthetic oligonucleotide

SEQ ID NO: 488353 - DNA, 60 bp, Artificial; identical to SEQ ID NO: 5737
  Synthetic oligonucleotide

SEQ ID NO: 488354 - DNA, 52 bp, Artificial; identical to SEQ ID NO: 5726
  Synthetic oligonucleotide

SEQ ID NO: 488355 - DNA, 57 bp, Artificial; identical to SEQ ID NO: 12573
  Synthetic oligonucleotide

SEQ ID NO: 488356 - DNA, 54 bp, Artificial; identical to SEQ ID NO: 20406
  Synthetic oligonucleotide

SEQ ID NO: 488357 - DNA, 60 bp, Artificial; identical to SEQ ID NO: 10059
  Synthetic oligonucleotide

SEQ ID NO: 488358 - DNA, 59 bp, Artificial; identical to SEQ ID NO: 13778
  Synthetic oligonucleotide

SEQ ID NO: 488359 - DNA, 60 bp, Artificial; identical to SEQ ID NO: 12347
  Synthetic oligonucleotide

SEQ ID NO: 488360 - DNA, 60 bp, Artificial; identical to SEQ ID NO: 13174
  Synthetic oligonucleotide

SEQ ID NO: 488361 - DNA, 60 bp, Artificial; identical to SEQ ID NO: 7894
  Synthetic oligonucleotide

SEQ ID NO: 488362 - DNA, 54 bp, Artificial; identical to SEQ ID NO: 19529
  Synthetic oligonucleotide

SEQ ID NO: 488363 - DNA, 57 bp, Artificial; identical to SEQ ID NO: 13157
  Synthetic oligonucleotide

SEQ ID NO: 488364 - DNA, 60 bp, Artificial; identical to SEQ ID NO: 13053
  Synthetic oligonucleotide

SEQ ID NO: 488365 - DNA, 55 bp, Artificial; identical to SEQ ID NO: 19256
  Synthetic oligonucleotide

SEQ ID NO: 488366 - DNA, 55 bp, Artificial; identical to SEQ ID NO: 14671
  Synthetic oligonucleotide

SEQ ID NO: 488367 - DNA, 60 bp, Artificial; identical to SEQ ID NO: 12967
  Synthetic oligonucleotide

SEQ ID NO: 488368 - DNA, 60 bp, Artificial; identical to SEQ ID NO: 10720
  Synthetic oligonucleotide

SEQ ID NO: 488369 - DNA, 56 bp, Artificial; identical to SEQ ID NO: 20365
  Synthetic oligonucleotide

SEQ ID NO: 488370 - DNA, 56 bp, Artificial; identical to SEQ ID NO: 20391
  Synthetic oligonucleotide

SEQ ID NO: 488371 - DNA, 55 bp, Artificial; identical to SEQ ID NO: 12459
  Synthetic oligonucleotide

SEQ ID NO: 488372 - DNA, 54 bp, Artificial; identical to SEQ ID NO: 19401
  Synthetic oligonucleotide

SEQ ID NO: 488373 - DNA, 59 bp, Artificial; identical to SEQ ID NO: 20447
  Synthetic oligonucleotide

SEQ ID NO: 488374 - DNA, 60 bp, Artificial; identical to SEQ ID NO: 119462
  Synthetic oligonucleotide

SEQ ID NO: 488375 - DNA, 60 bp, Artificial; identical to SEQ ID NO: 15625
  Synthetic oligonucleotide

SEQ ID NO: 488376 - DNA, 58 bp, Artificial; identical to SEQ ID NO: 18895
  Synthetic oligonucleotide

SEQ ID NO: 488377 - DNA, 53 bp, Artificial; identical to SEQ ID NO: 18036
  Synthetic oligonucleotide

SEQ ID NO: 488378 - DNA, 55 bp, Artificial; identical to SEQ ID NO: 9306
  Synthetic oligonucleotide

SEQ ID NO: 488379 - DNA, 55 bp, Artificial; identical to SEQ ID NO: 15438
  Synthetic oligonucleotide

SEQ ID NO: 488380 - DNA, 58 bp, Artificial; identical to SEQ ID NO: 20292
  Synthetic oligonucleotide

SEQ ID NO: 488381 - DNA, 57 bp, Artificial; identical to SEQ ID NO: 15925
  Synthetic oligonucleotide

SEQ ID NO: 488382 - DNA, 51 bp, Artificial; identical to SEQ ID NO: 8672
  Synthetic oligonucleotide

SEQ ID NO: 488383 - DNA, 55 bp, Artificial; identical to SEQ ID NO: 12226
  Synthetic oligonucleotide

SEQ ID NO: 488384 - DNA, 59 bp, Artificial; identical to SEQ ID NO: 17347
  Synthetic oligonucleotide

SEQ ID NO: 488385 - DNA, 60 bp, Artificial; identical to SEQ ID NO: 15674
  Synthetic oligonucleotide

SEQ ID NO: 488386 - DNA, 60 bp, Artificial; identical to SEQ ID NO: 7445
  Synthetic oligonucleotide

SEQ ID NO: 488387 - DNA, 60 bp, Artificial; identical to SEQ ID NO: 8459
  Synthetic oligonucleotide

SEQ ID NO: 488388 - DNA, 60 bp, Artificial; identical to SEQ ID NO: 9224
  Synthetic oligonucleotide

SEQ ID NO: 488389 - DNA, 60 bp, Artificial; identical to SEQ ID NO: 7881
  Synthetic oligonucleotide

SEQ ID NO: 488390 - DNA, 58 bp, Artificial; identical to SEQ ID NO: 13997
  Synthetic oligonucleotide

SEQ ID NO: 488391 - DNA, 55 bp, Artificial; identical to SEQ ID NO: 18378
  Synthetic oligonucleotide

SEQ ID NO: 488392 - DNA, 60 bp, Artificial; identical to SEQ ID NO: 11957
  Synthetic oligonucleotide

SEQ ID NO: 488393 - DNA, 55 bp, Artificial; identical to SEQ ID NO: 12457
  Synthetic oligonucleotide

SEQ ID NO: 488394 - DNA, 60 bp, Artificial; identical to SEQ ID NO: 8265
  Synthetic oligonucleotide

SEQ ID NO: 488395 - DNA, 56 bp, Artificial; identical to SEQ ID NO: 19854
  Synthetic oligonucleotide

SEQ ID NO: 488396 - DNA, 51 bp, Artificial; identical to SEQ ID NO: 14857
  Synthetic oligonucleotide

SEQ ID NO: 488397 - DNA, 55 bp, Artificial; identical to SEQ ID NO: 8611
  Synthetic oligonucleotide

SEQ ID NO: 488398 - DNA, 58 bp, Artificial; identical to SEQ ID NO: 19804
  Synthetic oligonucleotide

SEQ ID NO: 488399 - DNA, 55 bp, Artificial; identical to SEQ ID NO: 7333
  Synthetic oligonucleotide

SEQ ID NO: 488400 - DNA, 60 bp, Artificial; identical to SEQ ID NO: 8200
  Synthetic oligonucleotide

SEQ ID NO: 488401 - DNA, 57 bp, Artificial; identical to SEQ ID NO: 13852
  Synthetic oligonucleotide

SEQ ID NO: 488402 - DNA, 55 bp, Artificial; identical to SEQ ID NO: 5884
  Synthetic oligonucleotide

SEQ ID NO: 488403 - DNA, 50 bp, Artificial; identical to SEQ ID NO: 15026
  Synthetic oligonucleotide

SEQ ID NO: 488404 - DNA, 55 bp, Artificial; identical to SEQ ID NO: 9252
  Synthetic oligonucleotide

SEQ ID NO: 488405 - DNA, 53 bp, Artificial; identical to SEQ ID NO: 15463
  Synthetic oligonucleotide

SEQ ID NO: 488406 - DNA, 55 bp, Artificial; identical to SEQ ID NO: 6069
  Synthetic oligonucleotide

SEQ ID NO: 488407 - DNA, 60 bp, Artificial; identical to SEQ ID NO: 11474
  Synthetic oligonucleotide

SEQ ID NO: 488408 - DNA, 58 bp, Artificial; identical to SEQ ID NO: 18674
  Synthetic oligonucleotide

SEQ ID NO: 488409 - DNA, 54 bp, Artificial; identical to SEQ ID NO: 19629
  Synthetic oligonucleotide

SEQ ID NO: 488410 - DNA, 59 bp, Artificial; identical to SEQ ID NO: 17359
  Synthetic oligonucleotide

SEQ ID NO: 488411 - DNA, 57 bp, Artificial; identical to SEQ ID NO: 18142
  Synthetic oligonucleotide

SEQ ID NO: 488412 - DNA, 55 bp, Artificial; identical to SEQ ID NO: 7294
  Synthetic oligonucleotide

SEQ ID NO: 488413 - DNA, 55 bp, Artificial; identical to SEQ ID NO: 12153
  Synthetic oligonucleotide

SEQ ID NO: 488414 - DNA, 53 bp, Artificial; identical to SEQ ID NO: 15744
  Synthetic oligonucleotide

SEQ ID NO: 488415 - DNA, 60 bp, Artificial; identical to SEQ ID NO: 11481
  Synthetic oligonucleotide

SEQ ID NO: 488416 - DNA, 59 bp, Artificial; identical to SEQ ID NO: 18652
  Synthetic oligonucleotide

SEQ ID NO: 488417 - DNA, 55 bp, Artificial; identical to SEQ ID NO: 7697
  Synthetic oligonucleotide

SEQ ID NO: 488418 - DNA, 58 bp, Artificial; identical to SEQ ID NO: 14199
  Synthetic oligonucleotide

SEQ ID NO: 488419 - DNA, 55 bp, Artificial; identical to SEQ ID NO: 18239
  Synthetic oligonucleotide

SEQ ID NO: 488420 - DNA, 54 bp, Artificial; identical to SEQ ID NO: 17856
  Synthetic oligonucleotide

SEQ ID NO: 488421 - DNA, 55 bp, Artificial; identical to SEQ ID NO: 8787
  Synthetic oligonucleotide

SEQ ID NO: 488422 - DNA, 57 bp, Artificial; identical to SEQ ID NO: 18982
  Synthetic oligonucleotide

SEQ ID NO: 488423 - DNA, 58 bp, Artificial; identical to SEQ ID NO: 20342
  Synthetic oligonucleotide

SEQ ID NO: 488424 - DNA, 58 bp, Artificial; identical to SEQ ID NO: 19026
  Synthetic oligonucleotide

SEQ ID NO: 488425 - DNA, 54 bp, Artificial; identical to SEQ ID NO: 16764
  Synthetic oligonucleotide

SEQ ID NO: 488426 - DNA, 55 bp, Artificial; identical to SEQ ID NO: 19439
  Synthetic oligonucleotide

SEQ ID NO: 488427 - DNA, 53 bp, Artificial; identical to SEQ ID NO: 15507
  Synthetic oligonucleotide

SEQ ID NO: 488428 - DNA, 55 bp, Artificial; identical to SEQ ID NO: 15173
  Synthetic oligonucleotide

SEQ ID NO: 488429 - DNA, 54 bp, Artificial; identical to SEQ ID NO: 18075
  Synthetic oligonucleotide

SEQ ID NO: 488430 - DNA, 59 bp, Artificial; identical to SEQ ID NO: 19338
  Synthetic oligonucleotide

SEQ ID NO: 488431 - DNA, 52 bp, Artificial; identical to SEQ ID NO: 10842
  Synthetic oligonucleotide

SEQ ID NO: 488432 - DNA, 56 bp, Artificial; identical to SEQ ID NO: 11757
  Synthetic oligonucleotide

SEQ ID NO: 488433 - DNA, 58 bp, Artificial; identical to SEQ ID NO: 17166
  Synthetic oligonucleotide

SEQ ID NO: 488434 - DNA, 52 bp, Artificial; identical to SEQ ID NO: 8515
  Synthetic oligonucleotide

SEQ ID NO: 488435 - DNA, 59 bp, Artificial; identical to SEQ ID NO: 19540
  Synthetic oligonucleotide

SEQ ID NO: 488436 - DNA, 52 bp, Artificial; identical to SEQ ID NO: 10744
  Synthetic oligonucleotide

SEQ ID NO: 488437 - DNA, 57 bp, Artificial; identical to SEQ ID NO: 18232
  Synthetic oligonucleotide

SEQ ID NO: 488438 - DNA, 54 bp, Artificial; identical to SEQ ID NO: 19267
  Synthetic oligonucleotide

SEQ ID NO: 488439 - DNA, 55 bp, Artificial; identical to SEQ ID NO: 6999
  Synthetic oligonucleotide

SEQ ID NO: 488440 - DNA, 60 bp, Artificial; identical to SEQ ID NO: 12135
  Synthetic oligonucleotide

SEQ ID NO: 488441 - DNA, 60 bp, Artificial; identical to SEQ ID NO: 13416
  Synthetic oligonucleotide

SEQ ID NO: 488442 - DNA, 60 bp, Artificial; identical to SEQ ID NO: 8524
  Synthetic oligonucleotide

SEQ ID NO: 488443 - DNA, 59 bp, Artificial; identical to SEQ ID NO: 7304
  Synthetic oligonucleotide

SEQ ID NO: 488444 - DNA, 55 bp, Artificial; identical to SEQ ID NO: 11127
  Synthetic oligonucleotide

SEQ ID NO: 488445 - DNA, 55 bp, Artificial; identical to SEQ ID NO: 14254
  Synthetic oligonucleotide

SEQ ID NO: 488446 - DNA, 57 bp, Artificial; identical to SEQ ID NO: 9823
  Synthetic oligonucleotide

SEQ ID NO: 488447 - DNA, 55 bp, Artificial; identical to SEQ ID NO: 14558
  Synthetic oligonucleotide

SEQ ID NO: 488448 - DNA, 55 bp, Artificial; identical to SEQ ID NO: 15803
  Synthetic oligonucleotide

SEQ ID NO: 488449 - DNA, 55 bp, Artificial; identical to SEQ ID NO: 17609
  Synthetic oligonucleotide

SEQ ID NO: 488450 - DNA, 60 bp, Artificial; identical to SEQ ID NO: 7787
  Synthetic oligonucleotide

SEQ ID NO: 488451 - DNA, 58 bp, Artificial; identical to SEQ ID NO: 6230
  Synthetic oligonucleotide

SEQ ID NO: 488452 - DNA, 60 bp, Artificial; identical to SEQ ID NO: 72979
  Synthetic oligonucleotide

SEQ ID NO: 488453 - DNA, 60 bp, Artificial; identical to SEQ ID NO: 11050
  Synthetic oligonucleotide

SEQ ID NO: 488454 - DNA, 60 bp, Artificial; identical to SEQ ID NO: 7804
  Synthetic oligonucleotide

SEQ ID NO: 488455 - DNA, 55 bp, Artificial; identical to SEQ ID NO: 7020
  Synthetic oligonucleotide

SEQ ID NO: 488456 - DNA, 56 bp, Artificial; identical to SEQ ID NO: 16286
  Synthetic oligonucleotide

SEQ ID NO: 488457 - DNA, 60 bp, Artificial; identical to SEQ ID NO: 11301
  Synthetic oligonucleotide

SEQ ID NO: 488458 - DNA, 60 bp, Artificial; identical to SEQ ID NO: 10137
  Synthetic oligonucleotide

SEQ ID NO: 488459 - DNA, 50 bp, Artificial; identical to SEQ ID NO: 17192
  Synthetic oligonucleotide

SEQ ID NO: 488460 - DNA, 57 bp, Artificial; identical to SEQ ID NO: 16568
  Synthetic oligonucleotide

SEQ ID NO: 488461 - DNA, 55 bp, Artificial; identical to SEQ ID NO: 11090
  Synthetic oligonucleotide

SEQ ID NO: 488462 - DNA, 60 bp, Artificial; identical to SEQ ID NO: 6462
  Synthetic oligonucleotide

SEQ ID NO: 488463 - DNA, 57 bp, Artificial; identical to SEQ ID NO: 20385
  Synthetic oligonucleotide

SEQ ID NO: 488464 - DNA, 60 bp, Artificial; identical to SEQ ID NO: 10329
  Synthetic oligonucleotide

SEQ ID NO: 488465 - DNA, 60 bp, Artificial; identical to SEQ ID NO: 11731
  Synthetic oligonucleotide

SEQ ID NO: 488466 - DNA, 60 bp, Artificial; identical to SEQ ID NO: 10914
  Synthetic oligonucleotide

SEQ ID NO: 488467 - DNA, 60 bp, Artificial; identical to SEQ ID NO: 12700
  Synthetic oligonucleotide

SEQ ID NO: 488468 - DNA, 55 bp, Artificial; identical to SEQ ID NO: 8498
  Synthetic oligonucleotide

SEQ ID NO: 488469 - DNA, 60 bp, Artificial; identical to SEQ ID NO: 7106
  Synthetic oligonucleotide

SEQ ID NO: 488470 - DNA, 60 bp, Artificial; identical to SEQ ID NO: 25319
  Synthetic oligonucleotide

SEQ ID NO: 488471 - DNA, 50 bp, Artificial; identical to SEQ ID NO: 10727
  Synthetic oligonucleotide

SEQ ID NO: 488472 - DNA, 51 bp, Artificial; identical to SEQ ID NO: 17008
  Synthetic oligonucleotide

SEQ ID NO: 488473 - DNA, 57 bp, Artificial; identical to SEQ ID NO: 17969
  Synthetic oligonucleotide

SEQ ID NO: 488474 - DNA, 60 bp, Artificial; identical to SEQ ID NO: 12993
  Synthetic oligonucleotide

SEQ ID NO: 488475 - DNA, 59 bp, Artificial; identical to SEQ ID NO: 11099
  Synthetic oligonucleotide

SEQ ID NO: 488476 - DNA, 60 bp, Artificial; identical to SEQ ID NO: 15324
  Synthetic oligonucleotide

SEQ ID NO: 488477 - DNA, 55 bp, Artificial; identical to SEQ ID NO: 14011
  Synthetic oligonucleotide

SEQ ID NO: 488478 - DNA, 58 bp, Artificial; identical to SEQ ID NO: 17345
  Synthetic oligonucleotide

SEQ ID NO: 488479 - DNA, 56 bp, Artificial; identical to SEQ ID NO: 16173
  Synthetic oligonucleotide

SEQ ID NO: 488480 - DNA, 52 bp, Artificial; identical to SEQ ID NO: 14320
  Synthetic oligonucleotide

SEQ ID NO: 488481 - DNA, 60 bp, Artificial; identical to SEQ ID NO: 11302
  Synthetic oligonucleotide

SEQ ID NO: 488482 - DNA, 55 bp, Artificial; identical to SEQ ID NO: 5892
  Synthetic oligonucleotide

SEQ ID NO: 488483 - DNA, 60 bp, Artificial; identical to SEQ ID NO: 65548
  Synthetic oligonucleotide

SEQ ID NO: 488484 - DNA, 59 bp, Artificial; identical to SEQ ID NO: 10492
  Synthetic oligonucleotide

SEQ ID NO: 488485 - DNA, 60 bp, Artificial; identical to SEQ ID NO: 11758
  Synthetic oligonucleotide

SEQ ID NO: 488486 - DNA, 60 bp, Artificial; identical to SEQ ID NO: 7725
  Synthetic oligonucleotide

SEQ ID NO: 488487 - DNA, 54 bp, Artificial; identical to SEQ ID NO: 11791
  Synthetic oligonucleotide

SEQ ID NO: 488488 - DNA, 60 bp, Artificial; identical to SEQ ID NO: 13625
  Synthetic oligonucleotide

SEQ ID NO: 488489 - DNA, 56 bp, Artificial; identical to SEQ ID NO: 18873
  Synthetic oligonucleotide

SEQ ID NO: 488490 - DNA, 60 bp, Artificial; identical to SEQ ID NO: 15561
  Synthetic oligonucleotide

SEQ ID NO: 488491 - DNA, 59 bp, Artificial; identical to SEQ ID NO: 18611
  Synthetic oligonucleotide

SEQ ID NO: 488492 - DNA, 60 bp, Artificial; identical to SEQ ID NO: 6563
  Synthetic oligonucleotide

SEQ ID NO: 488493 - DNA, 60 bp, Artificial; identical to SEQ ID NO: 14711
  Synthetic oligonucleotide

SEQ ID NO: 488494 - DNA, 59 bp, Artificial; identical to SEQ ID NO: 15988
  Synthetic oligonucleotide

SEQ ID NO: 488495 - DNA, 59 bp, Artificial; identical to SEQ ID NO: 18965
  Synthetic oligonucleotide

SEQ ID NO: 488496 - DNA, 55 bp, Artificial; identical to SEQ ID NO: 16850
  Synthetic oligonucleotide

SEQ ID NO: 488497 - DNA, 60 bp, Artificial; identical to SEQ ID NO: 15537
  Synthetic oligonucleotide

SEQ ID NO: 488498 - DNA, 60 bp, Artificial; identical to SEQ ID NO: 6476
  Synthetic oligonucleotide

SEQ ID NO: 488499 - DNA, 60 bp, Artificial; identical to SEQ ID NO: 8367
  Synthetic oligonucleotide

SEQ ID NO: 488500 - DNA, 55 bp, Artificial; identical to SEQ ID NO: 11928
  Synthetic oligonucleotide

SEQ ID NO: 488501 - DNA, 60 bp, Artificial; identical to SEQ ID NO: 8871
  Synthetic oligonucleotide

SEQ ID NO: 488502 - DNA, 59 bp, Artificial; identical to SEQ ID NO: 18149
  Synthetic oligonucleotide

SEQ ID NO: 488503 - DNA, 57 bp, Artificial; identical to SEQ ID NO: 19782
  Synthetic oligonucleotide

SEQ ID NO: 488504 - DNA, 60 bp, Artificial; identical to SEQ ID NO: 10896
  Synthetic oligonucleotide

SEQ ID NO: 488505 - DNA, 59 bp, Artificial; identical to SEQ ID NO: 7758
  Synthetic oligonucleotide

SEQ ID NO: 488506 - DNA, 60 bp, Artificial; identical to SEQ ID NO: 11929
  Synthetic oligonucleotide

SEQ ID NO: 488507 - DNA, 56 bp, Artificial; identical to SEQ ID NO: 16414
  Synthetic oligonucleotide

SEQ ID NO: 488508 - DNA, 54 bp, Artificial; identical to SEQ ID NO: 11290
  Synthetic oligonucleotide

SEQ ID NO: 488509 - DNA, 55 bp, Artificial; identical to SEQ ID NO: 12354
  Synthetic oligonucleotide

SEQ ID NO: 488510 - DNA, 60 bp, Artificial; identical to SEQ ID NO: 8000
  Synthetic oligonucleotide

SEQ ID NO: 488511 - DNA, 57 bp, Artificial; identical to SEQ ID NO: 15269
  Synthetic oligonucleotide

SEQ ID NO: 488512 - DNA, 55 bp, Artificial; identical to SEQ ID NO: 5915
  Synthetic oligonucleotide

SEQ ID NO: 488513 - DNA, 60 bp, Artificial; identical to SEQ ID NO: 6680
  Synthetic oligonucleotide

SEQ ID NO: 488514 - DNA, 60 bp, Artificial; identical to SEQ ID NO: 10823
  Synthetic oligonucleotide

SEQ ID NO: 488515 - DNA, 60 bp, Artificial; identical to SEQ ID NO: 11346
  Synthetic oligonucleotide

SEQ ID NO: 488516 - DNA, 60 bp, Artificial; identical to SEQ ID NO: 14543
  Synthetic oligonucleotide

SEQ ID NO: 488517 - DNA, 60 bp, Artificial; identical to SEQ ID NO: 8174
  Synthetic oligonucleotide

SEQ ID NO: 488518 - DNA, 60 bp, Artificial; identical to SEQ ID NO: 12261
  Synthetic oligonucleotide

SEQ ID NO: 488519 - DNA, 58 bp, Artificial; identical to SEQ ID NO: 20121
  Synthetic oligonucleotide

SEQ ID NO: 488520 - DNA, 56 bp, Artificial; identical to SEQ ID NO: 20133
  Synthetic oligonucleotide

SEQ ID NO: 488521 - DNA, 55 bp, Artificial; identical to SEQ ID NO: 17489
  Synthetic oligonucleotide

SEQ ID NO: 488522 - DNA, 58 bp, Artificial; identical to SEQ ID NO: 17221
  Synthetic oligonucleotide

SEQ ID NO: 488523 - DNA, 57 bp, Artificial; identical to SEQ ID NO: 20064
  Synthetic oligonucleotide

SEQ ID NO: 488524 - DNA, 60 bp, Artificial; identical to SEQ ID NO: 10820
  Synthetic oligonucleotide

SEQ ID NO: 488525 - DNA, 60 bp, Artificial; identical to SEQ ID NO: 10489
  Synthetic oligonucleotide

SEQ ID NO: 488526 - DNA, 60 bp, Artificial; identical to SEQ ID NO: 6587
  Synthetic oligonucleotide

SEQ ID NO: 488527 - DNA, 60 bp, Artificial; identical to SEQ ID NO: 125943
  Synthetic oligonucleotide

SEQ ID NO: 488528 - DNA, 60 bp, Artificial; identical to SEQ ID NO: 12793
  Synthetic oligonucleotide

SEQ ID NO: 488529 - DNA, 55 bp, Artificial; identical to SEQ ID NO: 18061
  Synthetic oligonucleotide

SEQ ID NO: 488530 - DNA, 60 bp, Artificial; identical to SEQ ID NO: 11171
  Synthetic oligonucleotide

SEQ ID NO: 488531 - DNA, 55 bp, Artificial; identical to SEQ ID NO: 18041
  Synthetic oligonucleotide

SEQ ID NO: 488532 - DNA, 60 bp, Artificial; identical to SEQ ID NO: 6826
  Synthetic oligonucleotide

SEQ ID NO: 488533 - DNA, 59 bp, Artificial; identical to SEQ ID NO: 15039
  Synthetic oligonucleotide

SEQ ID NO: 488534 - DNA, 60 bp, Artificial; identical to SEQ ID NO: 312
  Synthetic oligonucleotide

SEQ ID NO: 488535 - DNA, 55 bp, Artificial; identical to SEQ ID NO: 13638
  Synthetic oligonucleotide

SEQ ID NO: 488536 - DNA, 56 bp, Artificial; identical to SEQ ID NO: 18909
  Synthetic oligonucleotide

SEQ ID NO: 488537 - DNA, 60 bp, Artificial; identical to SEQ ID NO: 11112
  Synthetic oligonucleotide

SEQ ID NO: 488538 - DNA, 55 bp, Artificial; identical to SEQ ID NO: 19006
  Synthetic oligonucleotide

SEQ ID NO: 488539 - DNA, 60 bp, Artificial; identical to SEQ ID NO: 15335
  Synthetic oligonucleotide

SEQ ID NO: 488540 - DNA, 60 bp, Artificial; identical to SEQ ID NO: 67869
  Synthetic oligonucleotide

SEQ ID NO: 488541 - DNA, 58 bp, Artificial; identical to SEQ ID NO: 18638
  Synthetic oligonucleotide

SEQ ID NO: 488542 - DNA, 60 bp, Artificial; identical to SEQ ID NO: 10066
  Synthetic oligonucleotide

SEQ ID NO: 488543 - DNA, 55 bp, Artificial; identical to SEQ ID NO: 12348
  Synthetic oligonucleotide

SEQ ID NO: 488544 - DNA, 58 bp, Artificial; identical to SEQ ID NO: 13450
  Synthetic oligonucleotide

SEQ ID NO: 488545 - DNA, 55 bp, Artificial; identical to SEQ ID NO: 6289
  Synthetic oligonucleotide

SEQ ID NO: 488546 - DNA, 56 bp, Artificial; identical to SEQ ID NO: 14815
  Synthetic oligonucleotide

SEQ ID NO: 488547 - DNA, 56 bp, Artificial; identical to SEQ ID NO: 10926
  Synthetic oligonucleotide

SEQ ID NO: 488548 - DNA, 60 bp, Artificial; identical to SEQ ID NO: 7396
  Synthetic oligonucleotide

SEQ ID NO: 488549 - DNA, 54 bp, Artificial; identical to SEQ ID NO: 7877
  Synthetic oligonucleotide

SEQ ID NO: 488550 - DNA, 59 bp, Artificial; identical to SEQ ID NO: 8155
  Synthetic oligonucleotide

SEQ ID NO: 488551 - DNA, 60 bp, Artificial; identical to SEQ ID NO: 13223
  Synthetic oligonucleotide

SEQ ID NO: 488552 - DNA, 56 bp, Artificial; identical to SEQ ID NO: 8970
  Synthetic oligonucleotide

SEQ ID NO: 488553 - DNA, 60 bp, Artificial; identical to SEQ ID NO: 10230
  Synthetic oligonucleotide

SEQ ID NO: 488554 - DNA, 54 bp, Artificial; identical to SEQ ID NO: 19486
  Synthetic oligonucleotide

SEQ ID NO: 488555 - DNA, 60 bp, Artificial; identical to SEQ ID NO: 7759
  Synthetic oligonucleotide

SEQ ID NO: 488556 - DNA, 55 bp, Artificial; identical to SEQ ID NO: 5867
  Synthetic oligonucleotide

SEQ ID NO: 488557 - DNA, 60 bp, Artificial; identical to SEQ ID NO: 10756
  Synthetic oligonucleotide

SEQ ID NO: 488558 - DNA, 60 bp, Artificial; identical to SEQ ID NO: 11219
  Synthetic oligonucleotide

SEQ ID NO: 488559 - DNA, 58 bp, Artificial; identical to SEQ ID NO: 7432
  Synthetic oligonucleotide

SEQ ID NO: 488560 - DNA, 60 bp, Artificial; identical to SEQ ID NO: 11631
  Synthetic oligonucleotide

SEQ ID NO: 488561 - DNA, 56 bp, Artificial; identical to SEQ ID NO: 6120
  Synthetic oligonucleotide

SEQ ID NO: 488562 - DNA, 51 bp, Artificial; identical to SEQ ID NO: 108398
  Synthetic oligonucleotide

SEQ ID NO: 488563 - DNA, 60 bp, Artificial; identical to SEQ ID NO: 9551
  Synthetic oligonucleotide

SEQ ID NO: 488564 - DNA, 57 bp, Artificial; identical to SEQ ID NO: 8067
  Synthetic oligonucleotide

SEQ ID NO: 488565 - DNA, 60 bp, Artificial; identical to SEQ ID NO: 14307
  Synthetic oligonucleotide

SEQ ID NO: 488566 - DNA, 60 bp, Artificial; identical to SEQ ID NO: 67618
  Synthetic oligonucleotide

SEQ ID NO: 488567 - DNA, 59 bp, Artificial; identical to SEQ ID NO: 18629
  Synthetic oligonucleotide

SEQ ID NO: 488568 - DNA, 60 bp, Artificial; identical to SEQ ID NO: 13696
  Synthetic oligonucleotide

SEQ ID NO: 488569 - DNA, 55 bp, Artificial; identical to SEQ ID NO: 10422
  Synthetic oligonucleotide

SEQ ID NO: 488570 - DNA, 54 bp, Artificial; identical to SEQ ID NO: 17296
  Synthetic oligonucleotide

SEQ ID NO: 488571 - DNA, 60 bp, Artificial; identical to SEQ ID NO: 5935
  Synthetic oligonucleotide

SEQ ID NO: 488572 - DNA, 55 bp, Artificial; identical to SEQ ID NO: 13579
  Synthetic oligonucleotide

SEQ ID NO: 488573 - DNA, 60 bp, Artificial; identical to SEQ ID NO: 45165
  Synthetic oligonucleotide

SEQ ID NO: 488574 - DNA, 54 bp, Artificial; identical to SEQ ID NO: 17722
  Synthetic oligonucleotide

SEQ ID NO: 488575 - DNA, 60 bp, Artificial; identical to SEQ ID NO: 7356
  Synthetic oligonucleotide

SEQ ID NO: 488576 - DNA, 60 bp, Artificial; identical to SEQ ID NO: 10880
  Synthetic oligonucleotide

SEQ ID NO: 488577 - DNA, 60 bp, Artificial; identical to SEQ ID NO: 9125
  Synthetic oligonucleotide

SEQ ID NO: 488578 - DNA, 58 bp, Artificial; identical to SEQ ID NO: 20525
  Synthetic oligonucleotide

SEQ ID NO: 488579 - DNA, 58 bp, Artificial; identical to SEQ ID NO: 16182
  Synthetic oligonucleotide

SEQ ID NO: 488580 - DNA, 60 bp, Artificial; identical to SEQ ID NO: 10539
  Synthetic oligonucleotide

SEQ ID NO: 488581 - DNA, 58 bp, Artificial; identical to SEQ ID NO: 15896
  Synthetic oligonucleotide

SEQ ID NO: 488582 - DNA, 54 bp, Artificial; identical to SEQ ID NO: 13630
  Synthetic oligonucleotide

SEQ ID NO: 488583 - DNA, 53 bp, Artificial; identical to SEQ ID NO: 10696
  Synthetic oligonucleotide

SEQ ID NO: 488584 - DNA, 59 bp, Artificial; identical to SEQ ID NO: 16754
  Synthetic oligonucleotide

SEQ ID NO: 488585 - DNA, 60 bp, Artificial; identical to SEQ ID NO: 6172
  Synthetic oligonucleotide

SEQ ID NO: 488586 - DNA, 56 bp, Artificial; identical to SEQ ID NO: 15635
  Synthetic oligonucleotide

SEQ ID NO: 488587 - DNA, 60 bp, Artificial; identical to SEQ ID NO: 7126
  Synthetic oligonucleotide

SEQ ID NO: 488588 - DNA, 59 bp, Artificial; identical to SEQ ID NO: 13466
  Synthetic oligonucleotide

SEQ ID NO: 488589 - DNA, 51 bp, Artificial; identical to SEQ ID NO: 17318
  Synthetic oligonucleotide

SEQ ID NO: 488590 - DNA, 56 bp, Artificial; identical to SEQ ID NO: 18035
  Synthetic oligonucleotide

SEQ ID NO: 488591 - DNA, 51 bp, Artificial; identical to SEQ ID NO: 18591
  Synthetic oligonucleotide

SEQ ID NO: 488592 - DNA, 52 bp, Artificial; identical to SEQ ID NO: 11077
  Synthetic oligonucleotide

SEQ ID NO: 488593 - DNA, 55 bp, Artificial; identical to SEQ ID NO: 19856
  Synthetic oligonucleotide

SEQ ID NO: 488594 - DNA, 55 bp, Artificial; identical to SEQ ID NO: 10736
  Synthetic oligonucleotide

SEQ ID NO: 488595 - DNA, 59 bp, Artificial; identical to SEQ ID NO: 18950
  Synthetic oligonucleotide

SEQ ID NO: 488596 - DNA, 59 bp, Artificial; identical to SEQ ID NO: 19857
  Synthetic oligonucleotide

SEQ ID NO: 488597 - DNA, 60 bp, Artificial; identical to SEQ ID NO: 14229
  Synthetic oligonucleotide

SEQ ID NO: 488598 - DNA, 55 bp, Artificial; identical to SEQ ID NO: 12964
  Synthetic oligonucleotide

SEQ ID NO: 488599 - DNA, 60 bp, Artificial; identical to SEQ ID NO: 9234
  Synthetic oligonucleotide

SEQ ID NO: 488600 - DNA, 51 bp, Artificial; identical to SEQ ID NO: 18816
  Synthetic oligonucleotide

SEQ ID NO: 488601 - DNA, 60 bp, Artificial; identical to SEQ ID NO: 40269
  Synthetic oligonucleotide

SEQ ID NO: 488602 - DNA, 60 bp, Artificial; identical to SEQ ID NO: 14151
  Synthetic oligonucleotide

SEQ ID NO: 488603 - DNA, 56 bp, Artificial; identical to SEQ ID NO: 15397
  Synthetic oligonucleotide

SEQ ID NO: 488604 - DNA, 59 bp, Artificial; identical to SEQ ID NO: 17085
  Synthetic oligonucleotide

SEQ ID NO: 488605 - DNA, 60 bp, Artificial; identical to SEQ ID NO: 10471
  Synthetic oligonucleotide

SEQ ID NO: 488606 - DNA, 60 bp, Artificial; identical to SEQ ID NO: 12064
  Synthetic oligonucleotide

SEQ ID NO: 488607 - DNA, 52 bp, Artificial; identical to SEQ ID NO: 18234
  Synthetic oligonucleotide

SEQ ID NO: 488608 - DNA, 58 bp, Artificial; identical to SEQ ID NO: 17602
  Synthetic oligonucleotide

SEQ ID NO: 488609 - DNA, 60 bp, Artificial; identical to SEQ ID NO: 7119
  Synthetic oligonucleotide

SEQ ID NO: 488610 - DNA, 60 bp, Artificial; identical to SEQ ID NO: 15679
  Synthetic oligonucleotide

SEQ ID NO: 488611 - DNA, 54 bp, Artificial; identical to SEQ ID NO: 14599
  Synthetic oligonucleotide

SEQ ID NO: 488612 - DNA, 57 bp, Artificial; identical to SEQ ID NO: 16822
  Synthetic oligonucleotide

SEQ ID NO: 488613 - DNA, 53 bp, Artificial; identical to SEQ ID NO: 11639
  Synthetic oligonucleotide

SEQ ID NO: 488614 - DNA, 55 bp, Artificial; identical to SEQ ID NO: 14731
  Synthetic oligonucleotide

SEQ ID NO: 488615 - DNA, 55 bp, Artificial; identical to SEQ ID NO: 7189
  Synthetic oligonucleotide

SEQ ID NO: 488616 - DNA, 60 bp, Artificial; identical to SEQ ID NO: 11207
  Synthetic oligonucleotide

SEQ ID NO: 488617 - DNA, 54 bp, Artificial; identical to SEQ ID NO: 8321
  Synthetic oligonucleotide

SEQ ID NO: 488618 - DNA, 53 bp, Artificial; identical to SEQ ID NO: 15668
  Synthetic oligonucleotide

SEQ ID NO: 488619 - DNA, 60 bp, Artificial; identical to SEQ ID NO: 15692
  Synthetic oligonucleotide

SEQ ID NO: 488620 - DNA, 57 bp, Artificial; identical to SEQ ID NO: 6641
  Synthetic oligonucleotide

SEQ ID NO: 488621 - DNA, 58 bp, Artificial; identical to SEQ ID NO: 17863
  Synthetic oligonucleotide

SEQ ID NO: 488622 - DNA, 53 bp, Artificial; identical to SEQ ID NO: 16927
  Synthetic oligonucleotide

SEQ ID NO: 488623 - DNA, 60 bp, Artificial; identical to SEQ ID NO: 124071
  Synthetic oligonucleotide

SEQ ID NO: 488624 - DNA, 57 bp, Artificial; identical to SEQ ID NO: 9955
  Synthetic oligonucleotide

SEQ ID NO: 488625 - DNA, 60 bp, Artificial; identical to SEQ ID NO: 11039
  Synthetic oligonucleotide

SEQ ID NO: 488626 - DNA, 60 bp, Artificial; identical to SEQ ID NO: 7798
  Synthetic oligonucleotide

SEQ ID NO: 488627 - DNA, 58 bp, Artificial; identical to SEQ ID NO: 20562
  Synthetic oligonucleotide

SEQ ID NO: 488628 - DNA, 51 bp, Artificial; identical to SEQ ID NO: 15513
  Synthetic oligonucleotide

SEQ ID NO: 488629 - DNA, 55 bp, Artificial; identical to SEQ ID NO: 13040
  Synthetic oligonucleotide

SEQ ID NO: 488630 - DNA, 58 bp, Artificial; identical to SEQ ID NO: 17198
  Synthetic oligonucleotide

SEQ ID NO: 488631 - DNA, 60 bp, Artificial; identical to SEQ ID NO: 6305
  Synthetic oligonucleotide

SEQ ID NO: 488632 - DNA, 60 bp, Artificial; identical to SEQ ID NO: 71408
  Synthetic oligonucleotide

SEQ ID NO: 488633 - DNA, 58 bp, Artificial; identical to SEQ ID NO: 18877
  Synthetic oligonucleotide

SEQ ID NO: 488634 - DNA, 59 bp, Artificial; identical to SEQ ID NO: 18327
  Synthetic oligonucleotide

SEQ ID NO: 488635 - DNA, 60 bp, Artificial; identical to SEQ ID NO: 6899
  Synthetic oligonucleotide

SEQ ID NO: 488636 - DNA, 60 bp, Artificial; identical to SEQ ID NO: 8501
  Synthetic oligonucleotide

SEQ ID NO: 488637 - DNA, 60 bp, Artificial; identical to SEQ ID NO: 6809
  Synthetic oligonucleotide

SEQ ID NO: 488638 - DNA, 55 bp, Artificial; identical to SEQ ID NO: 14636
  Synthetic oligonucleotide

SEQ ID NO: 488639 - DNA, 59 bp, Artificial; identical to SEQ ID NO: 16539
  Synthetic oligonucleotide

SEQ ID NO: 488640 - DNA, 51 bp, Artificial; identical to SEQ ID NO: 15074
  Synthetic oligonucleotide

SEQ ID NO: 488641 - DNA, 55 bp, Artificial; identical to SEQ ID NO: 7181
  Synthetic oligonucleotide

SEQ ID NO: 488642 - DNA, 60 bp, Artificial; identical to SEQ ID NO: 11264
  Synthetic oligonucleotide

SEQ ID NO: 488643 - DNA, 53 bp, Artificial; identical to SEQ ID NO: 17044
  Synthetic oligonucleotide

SEQ ID NO: 488644 - DNA, 57 bp, Artificial; identical to SEQ ID NO: 18881
  Synthetic oligonucleotide

SEQ ID NO: 488645 - DNA, 60 bp, Artificial; identical to SEQ ID NO: 12171
  Synthetic oligonucleotide

SEQ ID NO: 488646 - DNA, 60 bp, Artificial; identical to SEQ ID NO: 111042
  Synthetic oligonucleotide

SEQ ID NO: 488647 - DNA, 52 bp, Artificial; identical to SEQ ID NO: 16387
  Synthetic oligonucleotide

SEQ ID NO: 488648 - DNA, 59 bp, Artificial; identical to SEQ ID NO: 16893
  Synthetic oligonucleotide

SEQ ID NO: 488649 - DNA, 60 bp, Artificial; identical to SEQ ID NO: 7857
  Synthetic oligonucleotide

SEQ ID NO: 488650 - DNA, 55 bp, Artificial; identical to SEQ ID NO: 5932
  Synthetic oligonucleotide

SEQ ID NO: 488651 - DNA, 58 bp, Artificial; identical to SEQ ID NO: 13281
  Synthetic oligonucleotide

SEQ ID NO: 488652 - DNA, 60 bp, Artificial; identical to SEQ ID NO: 15238
  Synthetic oligonucleotide

SEQ ID NO: 488653 - DNA, 58 bp, Artificial; identical to SEQ ID NO: 16415
  Synthetic oligonucleotide

SEQ ID NO: 488654 - DNA, 55 bp, Artificial; identical to SEQ ID NO: 12430
  Synthetic oligonucleotide

SEQ ID NO: 488655 - DNA, 60 bp, Artificial; identical to SEQ ID NO: 6386
  Synthetic oligonucleotide

SEQ ID NO: 488656 - DNA, 54 bp, Artificial; identical to SEQ ID NO: 16731
  Synthetic oligonucleotide

SEQ ID NO: 488657 - DNA, 57 bp, Artificial; identical to SEQ ID NO: 20061
  Synthetic oligonucleotide

SEQ ID NO: 488658 - DNA, 54 bp, Artificial; identical to SEQ ID NO: 19877
  Synthetic oligonucleotide

SEQ ID NO: 488659 - DNA, 60 bp, Artificial; identical to SEQ ID NO: 87257
  Synthetic oligonucleotide

SEQ ID NO: 488660 - DNA, 56 bp, Artificial; identical to SEQ ID NO: 14720
  Synthetic oligonucleotide

SEQ ID NO: 488661 - DNA, 60 bp, Artificial; identical to SEQ ID NO: 9428
  Synthetic oligonucleotide

SEQ ID NO: 488662 - DNA, 55 bp, Artificial; identical to SEQ ID NO: 9206
  Synthetic oligonucleotide

SEQ ID NO: 488663 - DNA, 58 bp, Artificial; identical to SEQ ID NO: 18205
  Synthetic oligonucleotide

SEQ ID NO: 488664 - DNA, 56 bp, Artificial; identical to SEQ ID NO: 20209
  Synthetic oligonucleotide

SEQ ID NO: 488665 - DNA, 55 bp, Artificial; identical to SEQ ID NO: 15276
  Synthetic oligonucleotide

SEQ ID NO: 488666 - DNA, 53 bp, Artificial; identical to SEQ ID NO: 7728
  Synthetic oligonucleotide

SEQ ID NO: 488667 - DNA, 58 bp, Artificial; identical to SEQ ID NO: 18302
  Synthetic oligonucleotide

SEQ ID NO: 488668 - DNA, 56 bp, Artificial; identical to SEQ ID NO: 8977
  Synthetic oligonucleotide

SEQ ID NO: 488669 - DNA, 59 bp, Artificial; identical to SEQ ID NO: 17140
  Synthetic oligonucleotide

SEQ ID NO: 488670 - DNA, 58 bp, Artificial; identical to SEQ ID NO: 16319
  Synthetic oligonucleotide

SEQ ID NO: 488671 - DNA, 53 bp, Artificial; identical to SEQ ID NO: 19772
  Synthetic oligonucleotide

SEQ ID NO: 488672 - DNA, 57 bp, Artificial; identical to SEQ ID NO: 16621
  Synthetic oligonucleotide

SEQ ID NO: 488673 - DNA, 58 bp, Artificial; identical to SEQ ID NO: 18135
  Synthetic oligonucleotide

SEQ ID NO: 488674 - DNA, 59 bp, Artificial; identical to SEQ ID NO: 241
  Synthetic oligonucleotide

SEQ ID NO: 488675 - DNA, 60 bp, Artificial; identical to SEQ ID NO: 10393
  Synthetic oligonucleotide

SEQ ID NO: 488676 - DNA, 55 bp, Artificial; identical to SEQ ID NO: 6919
  Synthetic oligonucleotide

SEQ ID NO: 488677 - DNA, 59 bp, Artificial; identical to SEQ ID NO: 19253
  Synthetic oligonucleotide

SEQ ID NO: 488678 - DNA, 60 bp, Artificial; identical to SEQ ID NO: 15639
  Synthetic oligonucleotide

SEQ ID NO: 488679 - DNA, 57 bp, Artificial; identical to SEQ ID NO: 18871
  Synthetic oligonucleotide

SEQ ID NO: 488680 - DNA, 60 bp, Artificial; identical to SEQ ID NO: 15212
  Synthetic oligonucleotide

SEQ ID NO: 488681 - DNA, 60 bp, Artificial; identical to SEQ ID NO: 122541
  Synthetic oligonucleotide

SEQ ID NO: 488682 - DNA, 57 bp, Artificial; identical to SEQ ID NO: 19595
  Synthetic oligonucleotide

SEQ ID NO: 488683 - DNA, 59 bp, Artificial; identical to SEQ ID NO: 16723
  Synthetic oligonucleotide

SEQ ID NO: 488684 - DNA, 59 bp, Artificial; identical to SEQ ID NO: 10818
  Synthetic oligonucleotide

SEQ ID NO: 488685 - DNA, 53 bp, Artificial; identical to SEQ ID NO: 19995
  Synthetic oligonucleotide

SEQ ID NO: 488686 - DNA, 60 bp, Artificial; identical to SEQ ID NO: 13648
  Synthetic oligonucleotide

SEQ ID NO: 488687 - DNA, 60 bp, Artificial; identical to SEQ ID NO: 7088
  Synthetic oligonucleotide

SEQ ID NO: 488688 - DNA, 59 bp, Artificial; identical to SEQ ID NO: 10228
  Synthetic oligonucleotide

SEQ ID NO: 488689 - DNA, 60 bp, Artificial; identical to SEQ ID NO: 11497
  Synthetic oligonucleotide

SEQ ID NO: 488690 - DNA, 51 bp, Artificial; identical to SEQ ID NO: 17837
  Synthetic oligonucleotide

SEQ ID NO: 488691 - DNA, 58 bp, Artificial; identical to SEQ ID NO: 17430
  Synthetic oligonucleotide

SEQ ID NO: 488692 - DNA, 50 bp, Artificial; identical to SEQ ID NO: 6257
  Synthetic oligonucleotide

SEQ ID NO: 488693 - DNA, 53 bp, Artificial; identical to SEQ ID NO: 19537
  Synthetic oligonucleotide

SEQ ID NO: 488694 - DNA, 58 bp, Artificial; identical to SEQ ID NO: 18139
  Synthetic oligonucleotide

SEQ ID NO: 488695 - DNA, 55 bp, Artificial; identical to SEQ ID NO: 11240
  Synthetic oligonucleotide

SEQ ID NO: 488696 - DNA, 55 bp, Artificial; identical to SEQ ID NO: 18555
  Synthetic oligonucleotide

SEQ ID NO: 488697 - DNA, 58 bp, Artificial; identical to SEQ ID NO: 18642
  Synthetic oligonucleotide

SEQ ID NO: 488698 - DNA, 60 bp, Artificial; identical to SEQ ID NO: 14753
  Synthetic oligonucleotide

SEQ ID NO: 488699 - DNA, 57 bp, Artificial; identical to SEQ ID NO: 6821
  Synthetic oligonucleotide

SEQ ID NO: 488700 - DNA, 57 bp, Artificial; identical to SEQ ID NO: 18921
  Synthetic oligonucleotide

SEQ ID NO: 488701 - DNA, 60 bp, Artificial; identical to SEQ ID NO: 129573
  Synthetic oligonucleotide

SEQ ID NO: 488702 - DNA, 60 bp, Artificial; identical to SEQ ID NO: 15772
  Synthetic oligonucleotide

SEQ ID NO: 488703 - DNA, 54 bp, Artificial; identical to SEQ ID NO: 20336
  Synthetic oligonucleotide

SEQ ID NO: 488704 - DNA, 60 bp, Artificial; identical to SEQ ID NO: 7199
  Synthetic oligonucleotide

SEQ ID NO: 488705 - DNA, 58 bp, Artificial; identical to SEQ ID NO: 20461
  Synthetic oligonucleotide

SEQ ID NO: 488706 - DNA, 60 bp, Artificial; identical to SEQ ID NO: 51431
  Synthetic oligonucleotide

SEQ ID NO: 488707 - DNA, 53 bp, Artificial; identical to SEQ ID NO: 11270
  Synthetic oligonucleotide

SEQ ID NO: 488708 - DNA, 60 bp, Artificial; identical to SEQ ID NO: 10494
  Synthetic oligonucleotide

SEQ ID NO: 488709 - DNA, 60 bp, Artificial; identical to SEQ ID NO: 23930
  Synthetic oligonucleotide

SEQ ID NO: 488710 - DNA, 56 bp, Artificial; identical to SEQ ID NO: 14277
  Synthetic oligonucleotide

SEQ ID NO: 488711 - DNA, 58 bp, Artificial; identical to SEQ ID NO: 19776
  Synthetic oligonucleotide

SEQ ID NO: 488712 - DNA, 60 bp, Artificial; identical to SEQ ID NO: 14877
  Synthetic oligonucleotide

SEQ ID NO: 488713 - DNA, 58 bp, Artificial; identical to SEQ ID NO: 12324
  Synthetic oligonucleotide

SEQ ID NO: 488714 - DNA, 60 bp, Artificial; identical to SEQ ID NO: 13499
  Synthetic oligonucleotide

SEQ ID NO: 488715 - DNA, 51 bp, Artificial; identical to SEQ ID NO: 11228
  Synthetic oligonucleotide

SEQ ID NO: 488716 - DNA, 59 bp, Artificial; identical to SEQ ID NO: 20170
  Synthetic oligonucleotide

SEQ ID NO: 488717 - DNA, 55 bp, Artificial; identical to SEQ ID NO: 14611
  Synthetic oligonucleotide

SEQ ID NO: 488718 - DNA, 58 bp, Artificial; identical to SEQ ID NO: 10903
  Synthetic oligonucleotide

SEQ ID NO: 488719 - DNA, 55 bp, Artificial; identical to SEQ ID NO: 20058
  Synthetic oligonucleotide

SEQ ID NO: 488720 - DNA, 58 bp, Artificial; identical to SEQ ID NO: 16126
  Synthetic oligonucleotide

SEQ ID NO: 488721 - DNA, 54 bp, Artificial; identical to SEQ ID NO: 9690
  Synthetic oligonucleotide

SEQ ID NO: 488722 - DNA, 54 bp, Artificial; identical to SEQ ID NO: 16726
  Synthetic oligonucleotide

SEQ ID NO: 488723 - DNA, 57 bp, Artificial; identical to SEQ ID NO: 17635
  Synthetic oligonucleotide

SEQ ID NO: 488724 - DNA, 54 bp, Artificial; identical to SEQ ID NO: 17629
  Synthetic oligonucleotide

SEQ ID NO: 488725 - DNA, 60 bp, Artificial; identical to SEQ ID NO: 9688
  Synthetic oligonucleotide

SEQ ID NO: 488726 - DNA, 55 bp, Artificial; identical to SEQ ID NO: 16104
  Synthetic oligonucleotide

SEQ ID NO: 488727 - DNA, 53 bp, Artificial; identical to SEQ ID NO: 16485
  Synthetic oligonucleotide

SEQ ID NO: 488728 - DNA, 57 bp, Artificial; identical to SEQ ID NO: 17214
  Synthetic oligonucleotide

SEQ ID NO: 488729 - DNA, 54 bp, Artificial; identical to SEQ ID NO: 6867
  Synthetic oligonucleotide

SEQ ID NO: 488730 - DNA, 58 bp, Artificial; identical to SEQ ID NO: 16868
  Synthetic oligonucleotide

SEQ ID NO: 488731 - DNA, 60 bp, Artificial; identical to SEQ ID NO: 13677
  Synthetic oligonucleotide

SEQ ID NO: 488732 - DNA, 55 bp, Artificial; identical to SEQ ID NO: 9301
  Synthetic oligonucleotide

SEQ ID NO: 488733 - DNA, 58 bp, Artificial; identical to SEQ ID NO: 20148
  Synthetic oligonucleotide

SEQ ID NO: 488734 - DNA, 59 bp, Artificial; identical to SEQ ID NO: 17896
  Synthetic oligonucleotide

SEQ ID NO: 488735 - DNA, 51 bp, Artificial; identical to SEQ ID NO: 10354
  Synthetic oligonucleotide

SEQ ID NO: 488736 - DNA, 57 bp, Artificial; identical to SEQ ID NO: 20155
  Synthetic oligonucleotide

SEQ ID NO: 488737 - DNA, 60 bp, Artificial; identical to SEQ ID NO: 7956
  Synthetic oligonucleotide

SEQ ID NO: 488738 - DNA, 60 bp, Artificial; identical to SEQ ID NO: 12246
  Synthetic oligonucleotide

SEQ ID NO: 488739 - DNA, 58 bp, Artificial; identical to SEQ ID NO: 17032
  Synthetic oligonucleotide

SEQ ID NO: 488740 - DNA, 53 bp, Artificial; identical to SEQ ID NO: 18723
  Synthetic oligonucleotide

SEQ ID NO: 488741 - DNA, 59 bp, Artificial; identical to SEQ ID NO: 18428
  Synthetic oligonucleotide

SEQ ID NO: 488742 - DNA, 55 bp, Artificial; identical to SEQ ID NO: 11011
  Synthetic oligonucleotide

SEQ ID NO: 488743 - DNA, 57 bp, Artificial; identical to SEQ ID NO: 16593
  Synthetic oligonucleotide

SEQ ID NO: 488744 - DNA, 57 bp, Artificial; identical to SEQ ID NO: 13712
  Synthetic oligonucleotide

SEQ ID NO: 488745 - DNA, 57 bp, Artificial; identical to SEQ ID NO: 18331
  Synthetic oligonucleotide

SEQ ID NO: 488746 - DNA, 55 bp, Artificial; identical to SEQ ID NO: 19457
  Synthetic oligonucleotide

SEQ ID NO: 488747 - DNA, 58 bp, Artificial; identical to SEQ ID NO: 20011
  Synthetic oligonucleotide

SEQ ID NO: 488748 - DNA, 56 bp, Artificial; identical to SEQ ID NO: 20001
  Synthetic oligonucleotide

SEQ ID NO: 488749 - DNA, 56 bp, Artificial; identical to SEQ ID NO: 16359
  Synthetic oligonucleotide

SEQ ID NO: 488750 - DNA, 55 bp, Artificial; identical to SEQ ID NO: 14570
  Synthetic oligonucleotide

SEQ ID NO: 488751 - DNA, 57 bp, Artificial; identical to SEQ ID NO: 18441
  Synthetic oligonucleotide

SEQ ID NO: 488752 - DNA, 60 bp, Artificial; identical to SEQ ID NO: 13198
  Synthetic oligonucleotide

SEQ ID NO: 488753 - DNA, 57 bp, Artificial; identical to SEQ ID NO: 16589
  Synthetic oligonucleotide

SEQ ID NO: 488754 - DNA, 60 bp, Artificial; identical to SEQ ID NO: 8933
  Synthetic oligonucleotide

SEQ ID NO: 488755 - DNA, 59 bp, Artificial; identical to SEQ ID NO: 7856
  Synthetic oligonucleotide

SEQ ID NO: 488756 - DNA, 59 bp, Artificial; identical to SEQ ID NO: 19140
  Synthetic oligonucleotide

SEQ ID NO: 488757 - DNA, 58 bp, Artificial; identical to SEQ ID NO: 18503
  Synthetic oligonucleotide

SEQ ID NO: 488758 - DNA, 55 bp, Artificial; identical to SEQ ID NO: 17197
  Synthetic oligonucleotide

SEQ ID NO: 488759 - DNA, 60 bp, Artificial; identical to SEQ ID NO: 6087
  Synthetic oligonucleotide

SEQ ID NO: 488760 - DNA, 60 bp, Artificial; identical to SEQ ID NO: 6770
  Synthetic oligonucleotide

SEQ ID NO: 488761 - DNA, 53 bp, Artificial; identical to SEQ ID NO: 7858
  Synthetic oligonucleotide

SEQ ID NO: 488762 - DNA, 60 bp, Artificial; identical to SEQ ID NO: 11033
  Synthetic oligonucleotide

SEQ ID NO: 488763 - DNA, 56 bp, Artificial; identical to SEQ ID NO: 18216
  Synthetic oligonucleotide

SEQ ID NO: 488764 - DNA, 55 bp, Artificial; identical to SEQ ID NO: 17460
  Synthetic oligonucleotide

SEQ ID NO: 488765 - DNA, 50 bp, Artificial; identical to SEQ ID NO: 14703
  Synthetic oligonucleotide

SEQ ID NO: 488766 - DNA, 52 bp, Artificial; identical to SEQ ID NO: 18438
  Synthetic oligonucleotide

SEQ ID NO: 488767 - DNA, 58 bp, Artificial; identical to SEQ ID NO: 10641
  Synthetic oligonucleotide

SEQ ID NO: 488768 - DNA, 60 bp, Artificial; identical to SEQ ID NO: 10898
  Synthetic oligonucleotide

SEQ ID NO: 488769 - DNA, 55 bp, Artificial; identical to SEQ ID NO: 6635
  Synthetic oligonucleotide

SEQ ID NO: 488770 - DNA, 60 bp, Artificial; identical to SEQ ID NO: 9231
  Synthetic oligonucleotide

SEQ ID NO: 488771 - DNA, 56 bp, Artificial; identical to SEQ ID NO: 10001
  Synthetic oligonucleotide

SEQ ID NO: 488772 - DNA, 54 bp, Artificial; identical to SEQ ID NO: 16523
  Synthetic oligonucleotide

SEQ ID NO: 488773 - DNA, 56 bp, Artificial; identical to SEQ ID NO: 18491
  Synthetic oligonucleotide

SEQ ID NO: 488774 - DNA, 60 bp, Artificial; identical to SEQ ID NO: 8256
  Synthetic oligonucleotide

SEQ ID NO: 488775 - DNA, 60 bp, Artificial; identical to SEQ ID NO: 7287
  Synthetic oligonucleotide

SEQ ID NO: 488776 - DNA, 58 bp, Artificial; identical to SEQ ID NO: 14699
  Synthetic oligonucleotide

SEQ ID NO: 488777 - DNA, 57 bp, Artificial; identical to SEQ ID NO: 20028
  Synthetic oligonucleotide

SEQ ID NO: 488778 - DNA, 58 bp, Artificial; identical to SEQ ID NO: 16411
  Synthetic oligonucleotide

SEQ ID NO: 488779 - DNA, 53 bp, Artificial; identical to SEQ ID NO: 19344
  Synthetic oligonucleotide

SEQ ID NO: 488780 - DNA, 60 bp, Artificial; identical to SEQ ID NO: 120822
  Synthetic oligonucleotide

SEQ ID NO: 488781 - DNA, 55 bp, Artificial; identical to SEQ ID NO: 17700
  Synthetic oligonucleotide

SEQ ID NO: 488782 - DNA, 59 bp, Artificial; identical to SEQ ID NO: 16662
  Synthetic oligonucleotide

SEQ ID NO: 488783 - DNA, 60 bp, Artificial; identical to SEQ ID NO: 10143
  Synthetic oligonucleotide

SEQ ID NO: 488784 - DNA, 59 bp, Artificial; identical to SEQ ID NO: 16038
  Synthetic oligonucleotide

SEQ ID NO: 488785 - DNA, 59 bp, Artificial; identical to SEQ ID NO: 17378
  Synthetic oligonucleotide

SEQ ID NO: 488786 - DNA, 50 bp, Artificial; identical to SEQ ID NO: 7058
  Synthetic oligonucleotide

SEQ ID NO: 488787 - DNA, 60 bp, Artificial; identical to SEQ ID NO: 9586
  Synthetic oligonucleotide

SEQ ID NO: 488788 - DNA, 59 bp, Artificial; identical to SEQ ID NO: 17787
  Synthetic oligonucleotide

SEQ ID NO: 488789 - DNA, 55 bp, Artificial; identical to SEQ ID NO: 9631
  Synthetic oligonucleotide

SEQ ID NO: 488790 - DNA, 60 bp, Artificial; identical to SEQ ID NO: 15715
  Synthetic oligonucleotide

SEQ ID NO: 488791 - DNA, 58 bp, Artificial; identical to SEQ ID NO: 7503
  Synthetic oligonucleotide

SEQ ID NO: 488792 - DNA, 50 bp, Artificial; identical to SEQ ID NO: 13436
  Synthetic oligonucleotide

SEQ ID NO: 488793 - DNA, 55 bp, Artificial; identical to SEQ ID NO: 6198
  Synthetic oligonucleotide

SEQ ID NO: 488794 - DNA, 59 bp, Artificial; identical to SEQ ID NO: 16959
  Synthetic oligonucleotide

SEQ ID NO: 488795 - DNA, 58 bp, Artificial; identical to SEQ ID NO: 18333
  Synthetic oligonucleotide

SEQ ID NO: 488796 - DNA, 54 bp, Artificial; identical to SEQ ID NO: 19000
  Synthetic oligonucleotide

SEQ ID NO: 488797 - DNA, 56 bp, Artificial; identical to SEQ ID NO: 17107
  Synthetic oligonucleotide

SEQ ID NO: 488798 - DNA, 60 bp, Artificial; identical to SEQ ID NO: 113772
  Synthetic oligonucleotide

SEQ ID NO: 488799 - DNA, 58 bp, Artificial; identical to SEQ ID NO: 14597
  Synthetic oligonucleotide

SEQ ID NO: 488800 - DNA, 60 bp, Artificial; identical to SEQ ID NO: 12161
  Synthetic oligonucleotide

SEQ ID NO: 488801 - DNA, 60 bp, Artificial; identical to SEQ ID NO: 10480
  Synthetic oligonucleotide

SEQ ID NO: 488802 - DNA, 59 bp, Artificial; identical to SEQ ID NO: 20387
  Synthetic oligonucleotide

SEQ ID NO: 488803 - DNA, 60 bp, Artificial; identical to SEQ ID NO: 11359
  Synthetic oligonucleotide

SEQ ID NO: 488804 - DNA, 60 bp, Artificial; identical to SEQ ID NO: 12910
  Synthetic oligonucleotide

SEQ ID NO: 488805 - DNA, 54 bp, Artificial; identical to SEQ ID NO: 16362
  Synthetic oligonucleotide

SEQ ID NO: 488806 - DNA, 54 bp, Artificial; identical to SEQ ID NO: 15151
  Synthetic oligonucleotide

SEQ ID NO: 488807 - DNA, 60 bp, Artificial; identical to SEQ ID NO: 113461
  Synthetic oligonucleotide

SEQ ID NO: 488808 - DNA, 59 bp, Artificial; identical to SEQ ID NO: 15932
  Synthetic oligonucleotide

SEQ ID NO: 488809 - DNA, 60 bp, Artificial; identical to SEQ ID NO: 10134
  Synthetic oligonucleotide

SEQ ID NO: 488810 - DNA, 60 bp, Artificial; identical to SEQ ID NO: 12725
  Synthetic oligonucleotide

SEQ ID NO: 488811 - DNA, 59 bp, Artificial; identical to SEQ ID NO: 16012
  Synthetic oligonucleotide

SEQ ID NO: 488812 - DNA, 51 bp, Artificial; identical to SEQ ID NO: 9567
  Synthetic oligonucleotide

SEQ ID NO: 488813 - DNA, 60 bp, Artificial; identical to SEQ ID NO: 6704
  Synthetic oligonucleotide

SEQ ID NO: 488814 - DNA, 60 bp, Artificial; identical to SEQ ID NO: 7513
  Synthetic oligonucleotide

SEQ ID NO: 488815 - DNA, 58 bp, Artificial; identical to SEQ ID NO: 13299
  Synthetic oligonucleotide

SEQ ID NO: 488816 - DNA, 60 bp, Artificial; identical to SEQ ID NO: 7583
  Synthetic oligonucleotide

SEQ ID NO: 488817 - DNA, 60 bp, Artificial; identical to SEQ ID NO: 14869
  Synthetic oligonucleotide

SEQ ID NO: 488818 - DNA, 55 bp, Artificial; identical to SEQ ID NO: 15520
  Synthetic oligonucleotide

SEQ ID NO: 488819 - DNA, 54 bp, Artificial; identical to SEQ ID NO: 9589
  Synthetic oligonucleotide

SEQ ID NO: 488820 - DNA, 58 bp, Artificial; identical to SEQ ID NO: 19175
  Synthetic oligonucleotide

SEQ ID NO: 488821 - DNA, 59 bp, Artificial; identical to SEQ ID NO: 19332
  Synthetic oligonucleotide

SEQ ID NO: 488822 - DNA, 54 bp, Artificial; identical to SEQ ID NO: 19285
  Synthetic oligonucleotide

SEQ ID NO: 488823 - DNA, 60 bp, Artificial; identical to SEQ ID NO: 9724
  Synthetic oligonucleotide

SEQ ID NO: 488824 - DNA, 54 bp, Artificial; identical to SEQ ID NO: 15830
  Synthetic oligonucleotide

SEQ ID NO: 488825 - DNA, 60 bp, Artificial; identical to SEQ ID NO: 6825
  Synthetic oligonucleotide

SEQ ID NO: 488826 - DNA, 58 bp, Artificial; identical to SEQ ID NO: 20370
  Synthetic oligonucleotide

SEQ ID NO: 488827 - DNA, 50 bp, Artificial; identical to SEQ ID NO: 7449
  Synthetic oligonucleotide

SEQ ID NO: 488828 - DNA, 58 bp, Artificial; identical to SEQ ID NO: 19524
  Synthetic oligonucleotide

SEQ ID NO: 488829 - DNA, 59 bp, Artificial; identical to SEQ ID NO: 17737
  Synthetic oligonucleotide

SEQ ID NO: 488830 - DNA, 57 bp, Artificial; identical to SEQ ID NO: 19046
  Synthetic oligonucleotide

SEQ ID NO: 488831 - DNA, 60 bp, Artificial; identical to SEQ ID NO: 75520
  Synthetic oligonucleotide

SEQ ID NO: 488832 - DNA, 60 bp, Artificial; identical to SEQ ID NO: 11958
  Synthetic oligonucleotide

SEQ ID NO: 488833 - DNA, 57 bp, Artificial; identical to SEQ ID NO: 18544
  Synthetic oligonucleotide

SEQ ID NO: 488834 - DNA, 51 bp, Artificial; identical to SEQ ID NO: 6417
  Synthetic oligonucleotide

SEQ ID NO: 488835 - DNA, 50 bp, Artificial; identical to SEQ ID NO: 10169
  Synthetic oligonucleotide

SEQ ID NO: 488836 - DNA, 60 bp, Artificial; identical to SEQ ID NO: 8105
  Synthetic oligonucleotide

SEQ ID NO: 488837 - DNA, 58 bp, Artificial; identical to SEQ ID NO: 18683
  Synthetic oligonucleotide

SEQ ID NO: 488838 - DNA, 60 bp, Artificial; identical to SEQ ID NO: 11990
  Synthetic oligonucleotide

SEQ ID NO: 488839 - DNA, 60 bp, Artificial; identical to SEQ ID NO: 65310
  Synthetic oligonucleotide

SEQ ID NO: 488840 - DNA, 58 bp, Artificial; identical to SEQ ID NO: 17788
  Synthetic oligonucleotide

SEQ ID NO: 488841 - DNA, 53 bp, Artificial; identical to SEQ ID NO: 13646
  Synthetic oligonucleotide

SEQ ID NO: 488842 - DNA, 60 bp, Artificial; identical to SEQ ID NO: 15813
  Synthetic oligonucleotide

SEQ ID NO: 488843 - DNA, 60 bp, Artificial; identical to SEQ ID NO: 9790
  Synthetic oligonucleotide

SEQ ID NO: 488844 - DNA, 57 bp, Artificial; identical to SEQ ID NO: 14196
  Synthetic oligonucleotide

SEQ ID NO: 488845 - DNA, 60 bp, Artificial; identical to SEQ ID NO: 39584
  Synthetic oligonucleotide

SEQ ID NO: 488846 - DNA, 55 bp, Artificial; identical to SEQ ID NO: 17761
  Synthetic oligonucleotide

SEQ ID NO: 488847 - DNA, 60 bp, Artificial; identical to SEQ ID NO: 6100
  Synthetic oligonucleotide

SEQ ID NO: 488848 - DNA, 54 bp, Artificial; identical to SEQ ID NO: 17662
  Synthetic oligonucleotide

SEQ ID NO: 488849 - DNA, 59 bp, Artificial; identical to SEQ ID NO: 19421
  Synthetic oligonucleotide

SEQ ID NO: 488850 - DNA, 55 bp, Artificial; identical to SEQ ID NO: 18416
  Synthetic oligonucleotide

SEQ ID NO: 488851 - DNA, 52 bp, Artificial; identical to SEQ ID NO: 16427
  Synthetic oligonucleotide

SEQ ID NO: 488852 - DNA, 59 bp, Artificial; identical to SEQ ID NO: 20426
  Synthetic oligonucleotide

SEQ ID NO: 488853 - DNA, 58 bp, Artificial; identical to SEQ ID NO: 20014
  Synthetic oligonucleotide

SEQ ID NO: 488854 - DNA, 59 bp, Artificial; identical to SEQ ID NO: 20010
  Synthetic oligonucleotide

SEQ ID NO: 488855 - DNA, 60 bp, Artificial; identical to SEQ ID NO: 8228
  Synthetic oligonucleotide

SEQ ID NO: 488856 - DNA, 52 bp, Artificial; identical to SEQ ID NO: 11723
  Synthetic oligonucleotide

SEQ ID NO: 488857 - DNA, 56 bp, Artificial; identical to SEQ ID NO: 6044
  Synthetic oligonucleotide

SEQ ID NO: 488858 - DNA, 60 bp, Artificial; identical to SEQ ID NO: 113635
  Synthetic oligonucleotide

SEQ ID NO: 488859 - DNA, 55 bp, Artificial; identical to SEQ ID NO: 11349
  Synthetic oligonucleotide

SEQ ID NO: 488860 - DNA, 60 bp, Artificial; identical to SEQ ID NO: 9096
  Synthetic oligonucleotide

SEQ ID NO: 488861 - DNA, 60 bp, Artificial; identical to SEQ ID NO: 7908
  Synthetic oligonucleotide

SEQ ID NO: 488862 - DNA, 55 bp, Artificial; identical to SEQ ID NO: 11618
  Synthetic oligonucleotide

SEQ ID NO: 488863 - DNA, 55 bp, Artificial; identical to SEQ ID NO: 13589
  Synthetic oligonucleotide

SEQ ID NO: 488864 - DNA, 60 bp, Artificial; identical to SEQ ID NO: 15421
  Synthetic oligonucleotide

SEQ ID NO: 488865 - DNA, 55 bp, Artificial; identical to SEQ ID NO: 11514
  Synthetic oligonucleotide

SEQ ID NO: 488866 - DNA, 60 bp, Artificial; identical to SEQ ID NO: 10714
  Synthetic oligonucleotide

SEQ ID NO: 488867 - DNA, 56 bp, Artificial; identical to SEQ ID NO: 20518
  Synthetic oligonucleotide

SEQ ID NO: 488868 - DNA, 55 bp, Artificial; identical to SEQ ID NO: 10309
  Synthetic oligonucleotide

SEQ ID NO: 488869 - DNA, 60 bp, Artificial; identical to SEQ ID NO: 90645
  Synthetic oligonucleotide

SEQ ID NO: 488870 - DNA, 60 bp, Artificial; identical to SEQ ID NO: 12651
  Synthetic oligonucleotide

SEQ ID NO: 488871 - DNA, 60 bp, Artificial; identical to SEQ ID NO: 15626
  Synthetic oligonucleotide

SEQ ID NO: 488872 - DNA, 59 bp, Artificial; identical to SEQ ID NO: 15488
  Synthetic oligonucleotide

SEQ ID NO: 488873 - DNA, 58 bp, Artificial; identical to SEQ ID NO: 14964
  Synthetic oligonucleotide

SEQ ID NO: 488874 - DNA, 60 bp, Artificial; identical to SEQ ID NO: 11073
  Synthetic oligonucleotide

SEQ ID NO: 488875 - DNA, 51 bp, Artificial; identical to SEQ ID NO: 15446
  Synthetic oligonucleotide

SEQ ID NO: 488876 - DNA, 58 bp, Artificial; identical to SEQ ID NO: 20178
  Synthetic oligonucleotide

SEQ ID NO: 488877 - DNA, 57 bp, Artificial; identical to SEQ ID NO: 6943
  Synthetic oligonucleotide

SEQ ID NO: 488878 - DNA, 55 bp, Artificial; identical to SEQ ID NO: 17997
  Synthetic oligonucleotide

SEQ ID NO: 488879 - DNA, 60 bp, Artificial; identical to SEQ ID NO: 14135
  Synthetic oligonucleotide

SEQ ID NO: 488880 - DNA, 56 bp, Artificial; identical to SEQ ID NO: 16505
  Synthetic oligonucleotide

SEQ ID NO: 488881 - DNA, 60 bp, Artificial; identical to SEQ ID NO: 13089
  Synthetic oligonucleotide

SEQ ID NO: 488882 - DNA, 60 bp, Artificial; identical to SEQ ID NO: 11823
  Synthetic oligonucleotide

SEQ ID NO: 488883 - DNA, 55 bp, Artificial; identical to SEQ ID NO: 15301
  Synthetic oligonucleotide

SEQ ID NO: 488884 - DNA, 55 bp, Artificial; identical to SEQ ID NO: 7585
  Synthetic oligonucleotide

SEQ ID NO: 488885 - DNA, 55 bp, Artificial; identical to SEQ ID NO: 12905
  Synthetic oligonucleotide

SEQ ID NO: 488886 - DNA, 57 bp, Artificial; identical to SEQ ID NO: 17235
  Synthetic oligonucleotide

SEQ ID NO: 488887 - DNA, 60 bp, Artificial; identical to SEQ ID NO: 12507
  Synthetic oligonucleotide

SEQ ID NO: 488888 - DNA, 51 bp, Artificial; identical to SEQ ID NO: 16028
  Synthetic oligonucleotide

SEQ ID NO: 488889 - DNA, 55 bp, Artificial; identical to SEQ ID NO: 12596
  Synthetic oligonucleotide

SEQ ID NO: 488890 - DNA, 60 bp, Artificial; identical to SEQ ID NO: 116974
  Synthetic oligonucleotide

SEQ ID NO: 488891 - DNA, 60 bp, Artificial; identical to SEQ ID NO: 107288
  Synthetic oligonucleotide

SEQ ID NO: 488892 - DNA, 56 bp, Artificial; identical to SEQ ID NO: 12420
  Synthetic oligonucleotide

SEQ ID NO: 488893 - DNA, 60 bp, Artificial; identical to SEQ ID NO: 113339
  Synthetic oligonucleotide

SEQ ID NO: 488894 - DNA, 55 bp, Artificial; identical to SEQ ID NO: 11753
  Synthetic oligonucleotide

SEQ ID NO: 488895 - DNA, 53 bp, Artificial; identical to SEQ ID NO: 11282
  Synthetic oligonucleotide

SEQ ID NO: 488896 - DNA, 60 bp, Artificial; identical to SEQ ID NO: 5761
  Synthetic oligonucleotide

SEQ ID NO: 488897 - DNA, 59 bp, Artificial; identical to SEQ ID NO: 20486
  Synthetic oligonucleotide

SEQ ID NO: 488898 - DNA, 55 bp, Artificial; identical to SEQ ID NO: 16513
  Synthetic oligonucleotide

SEQ ID NO: 488899 - DNA, 55 bp, Artificial; identical to SEQ ID NO: 13607
  Synthetic oligonucleotide

SEQ ID NO: 488900 - DNA, 60 bp, Artificial; identical to SEQ ID NO: 7831
  Synthetic oligonucleotide

SEQ ID NO: 488901 - DNA, 60 bp, Artificial; identical to SEQ ID NO: 11683
  Synthetic oligonucleotide

SEQ ID NO: 488902 - DNA, 55 bp, Artificial; identical to SEQ ID NO: 12012
  Synthetic oligonucleotide

SEQ ID NO: 488903 - DNA, 59 bp, Artificial; identical to SEQ ID NO: 7504
  Synthetic oligonucleotide

SEQ ID NO: 488904 - DNA, 58 bp, Artificial; identical to SEQ ID NO: 18228
  Synthetic oligonucleotide

SEQ ID NO: 488905 - DNA, 56 bp, Artificial; identical to SEQ ID NO: 18146
  Synthetic oligonucleotide

SEQ ID NO: 488906 - DNA, 50 bp, Artificial; identical to SEQ ID NO: 19840
  Synthetic oligonucleotide

SEQ ID NO: 488907 - DNA, 58 bp, Artificial; identical to SEQ ID NO: 17794
  Synthetic oligonucleotide

SEQ ID NO: 488908 - DNA, 55 bp, Artificial; identical to SEQ ID NO: 13202
  Synthetic oligonucleotide

SEQ ID NO: 488909 - DNA, 60 bp, Artificial; identical to SEQ ID NO: 15133
  Synthetic oligonucleotide

SEQ ID NO: 488910 - DNA, 59 bp, Artificial; identical to SEQ ID NO: 20496
  Synthetic oligonucleotide

SEQ ID NO: 488911 - DNA, 59 bp, Artificial; identical to SEQ ID NO: 18539
  Synthetic oligonucleotide

SEQ ID NO: 488912 - DNA, 58 bp, Artificial; identical to SEQ ID NO: 16606
  Synthetic oligonucleotide

SEQ ID NO: 488913 - DNA, 50 bp, Artificial; identical to SEQ ID NO: 6434
  Synthetic oligonucleotide

SEQ ID NO: 488914 - DNA, 51 bp, Artificial; identical to SEQ ID NO: 11062
  Synthetic oligonucleotide

SEQ ID NO: 488915 - DNA, 58 bp, Artificial; identical to SEQ ID NO: 19783
  Synthetic oligonucleotide

SEQ ID NO: 488916 - DNA, 51 bp, Artificial; identical to SEQ ID NO: 10802
  Synthetic oligonucleotide

SEQ ID NO: 488917 - DNA, 55 bp, Artificial; identical to SEQ ID NO: 8430
  Synthetic oligonucleotide

SEQ ID NO: 488918 - DNA, 60 bp, Artificial; identical to SEQ ID NO: 9618
  Synthetic oligonucleotide

SEQ ID NO: 488919 - DNA, 56 bp, Artificial; identical to SEQ ID NO: 19313
  Synthetic oligonucleotide

SEQ ID NO: 488920 - DNA, 60 bp, Artificial; identical to SEQ ID NO: 11167
  Synthetic oligonucleotide

SEQ ID NO: 488921 - DNA, 55 bp, Artificial; identical to SEQ ID NO: 18197
  Synthetic oligonucleotide

SEQ ID NO: 488922 - DNA, 58 bp, Artificial; identical to SEQ ID NO: 19836
  Synthetic oligonucleotide

SEQ ID NO: 488923 - DNA, 59 bp, Artificial; identical to SEQ ID NO: 19126
  Synthetic oligonucleotide

SEQ ID NO: 488924 - DNA, 60 bp, Artificial; identical to SEQ ID NO: 6415
  Synthetic oligonucleotide

SEQ ID NO: 488925 - DNA, 60 bp, Artificial; identical to SEQ ID NO: 11356
  Synthetic oligonucleotide

SEQ ID NO: 488926 - DNA, 60 bp, Artificial; identical to SEQ ID NO: 13794
  Synthetic oligonucleotide

SEQ ID NO: 488927 - DNA, 60 bp, Artificial; identical to SEQ ID NO: 13860
  Synthetic oligonucleotide

SEQ ID NO: 488928 - DNA, 58 bp, Artificial; identical to SEQ ID NO: 19322
  Synthetic oligonucleotide

SEQ ID NO: 488929 - DNA, 55 bp, Artificial; identical to SEQ ID NO: 19474
  Synthetic oligonucleotide

SEQ ID NO: 488930 - DNA, 51 bp, Artificial; identical to SEQ ID NO: 13431
  Synthetic oligonucleotide

SEQ ID NO: 488931 - DNA, 55 bp, Artificial; identical to SEQ ID NO: 20413
  Synthetic oligonucleotide

SEQ ID NO: 488932 - DNA, 60 bp, Artificial; identical to SEQ ID NO: 7195
  Synthetic oligonucleotide

SEQ ID NO: 488933 - DNA, 60 bp, Artificial; identical to SEQ ID NO: 7026
  Synthetic oligonucleotide

SEQ ID NO: 488934 - DNA, 55 bp, Artificial; identical to SEQ ID NO: 8772
  Synthetic oligonucleotide

SEQ ID NO: 488935 - DNA, 55 bp, Artificial; identical to SEQ ID NO: 12473
  Synthetic oligonucleotide

SEQ ID NO: 488936 - DNA, 60 bp, Artificial; identical to SEQ ID NO: 13565
  Synthetic oligonucleotide

SEQ ID NO: 488937 - DNA, 58 bp, Artificial; identical to SEQ ID NO: 19648
  Synthetic oligonucleotide

SEQ ID NO: 488938 - DNA, 56 bp, Artificial; identical to SEQ ID NO: 17476
  Synthetic oligonucleotide

SEQ ID NO: 488939 - DNA, 60 bp, Artificial; identical to SEQ ID NO: 27072
  Synthetic oligonucleotide

SEQ ID NO: 488940 - DNA, 58 bp, Artificial; identical to SEQ ID NO: 7530
  Synthetic oligonucleotide

SEQ ID NO: 488941 - DNA, 60 bp, Artificial; identical to SEQ ID NO: 8163
  Synthetic oligonucleotide

SEQ ID NO: 488942 - DNA, 51 bp, Artificial; identical to SEQ ID NO: 15372
  Synthetic oligonucleotide

SEQ ID NO: 488943 - DNA, 53 bp, Artificial; identical to SEQ ID NO: 18091
  Synthetic oligonucleotide

SEQ ID NO: 488944 - DNA, 55 bp, Artificial; identical to SEQ ID NO: 5732
  Synthetic oligonucleotide

SEQ ID NO: 488945 - DNA, 60 bp, Artificial; identical to SEQ ID NO: 32705
  Synthetic oligonucleotide

SEQ ID NO: 488946 - DNA, 60 bp, Artificial; identical to SEQ ID NO: 12909
  Synthetic oligonucleotide

SEQ ID NO: 488947 - DNA, 54 bp, Artificial; identical to SEQ ID NO: 20167
  Synthetic oligonucleotide

SEQ ID NO: 488948 - DNA, 60 bp, Artificial; identical to SEQ ID NO: 53215
  Synthetic oligonucleotide

SEQ ID NO: 488949 - DNA, 56 bp, Artificial; identical to SEQ ID NO: 19587
  Synthetic oligonucleotide

SEQ ID NO: 488950 - DNA, 60 bp, Artificial; identical to SEQ ID NO: 6313
  Synthetic oligonucleotide

SEQ ID NO: 488951 - DNA, 58 bp, Artificial; identical to SEQ ID NO: 6019
  Synthetic oligonucleotide

SEQ ID NO: 488952 - DNA, 55 bp, Artificial; identical to SEQ ID NO: 13029
  Synthetic oligonucleotide

SEQ ID NO: 488953 - DNA, 59 bp, Artificial; identical to SEQ ID NO: 17880
  Synthetic oligonucleotide

SEQ ID NO: 488954 - DNA, 58 bp, Artificial; identical to SEQ ID NO: 10387
  Synthetic oligonucleotide

SEQ ID NO: 488955 - DNA, 56 bp, Artificial; identical to SEQ ID NO: 16459
  Synthetic oligonucleotide

SEQ ID NO: 488956 - DNA, 50 bp, Artificial; identical to SEQ ID NO: 17899
  Synthetic oligonucleotide

SEQ ID NO: 488957 - DNA, 60 bp, Artificial; identical to SEQ ID NO: 6426
  Synthetic oligonucleotide

SEQ ID NO: 488958 - DNA, 60 bp, Artificial; identical to SEQ ID NO: 103756
  Synthetic oligonucleotide

SEQ ID NO: 488959 - DNA, 60 bp, Artificial; identical to SEQ ID NO: 14960
  Synthetic oligonucleotide

SEQ ID NO: 488960 - DNA, 60 bp, Artificial; identical to SEQ ID NO: 7473
  Synthetic oligonucleotide

SEQ ID NO: 488961 - DNA, 60 bp, Artificial; identical to SEQ ID NO: 13955
  Synthetic oligonucleotide

SEQ ID NO: 488962 - DNA, 54 bp, Artificial; identical to SEQ ID NO: 18574
  Synthetic oligonucleotide

SEQ ID NO: 488963 - DNA, 58 bp, Artificial; identical to SEQ ID NO: 20103
  Synthetic oligonucleotide

SEQ ID NO: 488964 - DNA, 58 bp, Artificial; identical to SEQ ID NO: 9760
  Synthetic oligonucleotide

SEQ ID NO: 488965 - DNA, 55 bp, Artificial; identical to SEQ ID NO: 11934
  Synthetic oligonucleotide

SEQ ID NO: 488966 - DNA, 60 bp, Artificial; identical to SEQ ID NO: 11789
  Synthetic oligonucleotide

SEQ ID NO: 488967 - DNA, 60 bp, Artificial; identical to SEQ ID NO: 11636
  Synthetic oligonucleotide

SEQ ID NO: 488968 - DNA, 60 bp, Artificial; identical to SEQ ID NO: 124046
  Synthetic oligonucleotide

SEQ ID NO: 488969 - DNA, 55 bp, Artificial; identical to SEQ ID NO: 9989
  Synthetic oligonucleotide

SEQ ID NO: 488970 - DNA, 53 bp, Artificial; identical to SEQ ID NO: 12098
  Synthetic oligonucleotide

SEQ ID NO: 488971 - DNA, 60 bp, Artificial; identical to SEQ ID NO: 75708
  Synthetic oligonucleotide

SEQ ID NO: 488972 - DNA, 55 bp, Artificial; identical to SEQ ID NO: 7950
  Synthetic oligonucleotide

SEQ ID NO: 488973 - DNA, 60 bp, Artificial; identical to SEQ ID NO: 14911
  Synthetic oligonucleotide

SEQ ID NO: 488974 - DNA, 60 bp, Artificial; identical to SEQ ID NO: 8431
  Synthetic oligonucleotide

SEQ ID NO: 488975 - DNA, 52 bp, Artificial; identical to SEQ ID NO: 10525
  Synthetic oligonucleotide

SEQ ID NO: 488976 - DNA, 60 bp, Artificial; identical to SEQ ID NO: 131263
  Synthetic oligonucleotide

SEQ ID NO: 488977 - DNA, 53 bp, Artificial; identical to SEQ ID NO: 17637
  Synthetic oligonucleotide

SEQ ID NO: 488978 - DNA, 60 bp, Artificial; identical to SEQ ID NO: 14757
  Synthetic oligonucleotide

SEQ ID NO: 488979 - DNA, 60 bp, Artificial; identical to SEQ ID NO: 14616
  Synthetic oligonucleotide

SEQ ID NO: 488980 - DNA, 60 bp, Artificial; identical to SEQ ID NO: 13232
  Synthetic oligonucleotide

SEQ ID NO: 488981 - DNA, 60 bp, Artificial; identical to SEQ ID NO: 10963
  Synthetic oligonucleotide

SEQ ID NO: 488982 - DNA, 55 bp, Artificial; identical to SEQ ID NO: 9973
  Synthetic oligonucleotide

SEQ ID NO: 488983 - DNA, 58 bp, Artificial; identical to SEQ ID NO: 19559
  Synthetic oligonucleotide

SEQ ID NO: 488984 - DNA, 55 bp, Artificial; identical to SEQ ID NO: 6012
  Synthetic oligonucleotide

SEQ ID NO: 488985 - DNA, 60 bp, Artificial; identical to SEQ ID NO: 12409
  Synthetic oligonucleotide

SEQ ID NO: 488986 - DNA, 60 bp, Artificial; identical to SEQ ID NO: 12397
  Synthetic oligonucleotide

SEQ ID NO: 488987 - DNA, 55 bp, Artificial; identical to SEQ ID NO: 15377
  Synthetic oligonucleotide

SEQ ID NO: 488988 - DNA, 59 bp, Artificial; identical to SEQ ID NO: 15207
  Synthetic oligonucleotide

SEQ ID NO: 488989 - DNA, 60 bp, Artificial; identical to SEQ ID NO: 11676
  Synthetic oligonucleotide

SEQ ID NO: 488990 - DNA, 55 bp, Artificial; identical to SEQ ID NO: 12046
  Synthetic oligonucleotide

SEQ ID NO: 488991 - DNA, 60 bp, Artificial; identical to SEQ ID NO: 12215
  Synthetic oligonucleotide

SEQ ID NO: 488992 - DNA, 57 bp, Artificial; identical to SEQ ID NO: 19093
  Synthetic oligonucleotide

SEQ ID NO: 488993 - DNA, 60 bp, Artificial; identical to SEQ ID NO: 10162
  Synthetic oligonucleotide

SEQ ID NO: 488994 - DNA, 56 bp, Artificial; identical to SEQ ID NO: 10340
  Synthetic oligonucleotide

SEQ ID NO: 488995 - DNA, 60 bp, Artificial; identical to SEQ ID NO: 6291
  Synthetic oligonucleotide

SEQ ID NO: 488996 - DNA, 60 bp, Artificial; identical to SEQ ID NO: 5895
  Synthetic oligonucleotide

SEQ ID NO: 488997 - DNA, 60 bp, Artificial; identical to SEQ ID NO: 8952
  Synthetic oligonucleotide

SEQ ID NO: 488998 - DNA, 58 bp, Artificial; identical to SEQ ID NO: 14967
  Synthetic oligonucleotide

SEQ ID NO: 488999 - DNA, 60 bp, Artificial; identical to SEQ ID NO: 6135
  Synthetic oligonucleotide

SEQ ID NO: 489000 - DNA, 50 bp, Artificial; identical to SEQ ID NO: 10563
  Synthetic oligonucleotide

SEQ ID NO: 489001 - DNA, 55 bp, Artificial; identical to SEQ ID NO: 10200
  Synthetic oligonucleotide

SEQ ID NO: 489002 - DNA, 52 bp, Artificial; identical to SEQ ID NO: 7296
  Synthetic oligonucleotide

SEQ ID NO: 489003 - DNA, 60 bp, Artificial; identical to SEQ ID NO: 108458
  Synthetic oligonucleotide

SEQ ID NO: 489004 - DNA, 60 bp, Artificial; identical to SEQ ID NO: 9248
  Synthetic oligonucleotide

SEQ ID NO: 489005 - DNA, 60 bp, Artificial; identical to SEQ ID NO: 7859
  Synthetic oligonucleotide

SEQ ID NO: 489006 - DNA, 59 bp, Artificial; identical to SEQ ID NO: 19528
  Synthetic oligonucleotide

SEQ ID NO: 489007 - DNA, 60 bp, Artificial; identical to SEQ ID NO: 15597
  Synthetic oligonucleotide

SEQ ID NO: 489008 - DNA, 58 bp, Artificial; identical to SEQ ID NO: 16659
  Synthetic oligonucleotide

SEQ ID NO: 489009 - DNA, 60 bp, Artificial; identical to SEQ ID NO: 13639
  Synthetic oligonucleotide

SEQ ID NO: 489010 - DNA, 60 bp, Artificial; identical to SEQ ID NO: 11743
  Synthetic oligonucleotide

SEQ ID NO: 489011 - DNA, 59 bp, Artificial; identical to SEQ ID NO: 18779
  Synthetic oligonucleotide

SEQ ID NO: 489012 - DNA, 60 bp, Artificial; identical to SEQ ID NO: 111221
  Synthetic oligonucleotide

SEQ ID NO: 489013 - DNA, 58 bp, Artificial; identical to SEQ ID NO: 17507
  Synthetic oligonucleotide

SEQ ID NO: 489014 - DNA, 60 bp, Artificial; identical to SEQ ID NO: 49893
  Synthetic oligonucleotide

SEQ ID NO: 489015 - DNA, 51 bp, Artificial; identical to SEQ ID NO: 6817
  Synthetic oligonucleotide

SEQ ID NO: 489016 - DNA, 60 bp, Artificial; identical to SEQ ID NO: 8422
  Synthetic oligonucleotide

SEQ ID NO: 489017 - DNA, 60 bp, Artificial; identical to SEQ ID NO: 8171
  Synthetic oligonucleotide

SEQ ID NO: 489018 - DNA, 53 bp, Artificial; identical to SEQ ID NO: 6000
  Synthetic oligonucleotide

SEQ ID NO: 489019 - DNA, 60 bp, Artificial; identical to SEQ ID NO: 7902
  Synthetic oligonucleotide

SEQ ID NO: 489020 - DNA, 56 bp, Artificial; identical to SEQ ID NO: 19452
  Synthetic oligonucleotide

SEQ ID NO: 489021 - DNA, 58 bp, Artificial; identical to SEQ ID NO: 18111
  Synthetic oligonucleotide

SEQ ID NO: 489022 - DNA, 56 bp, Artificial; identical to SEQ ID NO: 17194
  Synthetic oligonucleotide

SEQ ID NO: 489023 - DNA, 58 bp, Artificial; identical to SEQ ID NO: 15690
  Synthetic oligonucleotide

SEQ ID NO: 489024 - DNA, 58 bp, Artificial; identical to SEQ ID NO: 17994
  Synthetic oligonucleotide

SEQ ID NO: 489025 - DNA, 60 bp, Artificial; identical to SEQ ID NO: 11897
  Synthetic oligonucleotide

SEQ ID NO: 489026 - DNA, 58 bp, Artificial; identical to SEQ ID NO: 20557
  Synthetic oligonucleotide

SEQ ID NO: 489027 - DNA, 55 bp, Artificial; identical to SEQ ID NO: 14993
  Synthetic oligonucleotide

SEQ ID NO: 489028 - DNA, 55 bp, Artificial; identical to SEQ ID NO: 7027
  Synthetic oligonucleotide

SEQ ID NO: 489029 - DNA, 55 bp, Artificial; identical to SEQ ID NO: 17571
  Synthetic oligonucleotide

SEQ ID NO: 489030 - DNA, 59 bp, Artificial; identical to SEQ ID NO: 19526
  Synthetic oligonucleotide

SEQ ID NO: 489031 - DNA, 60 bp, Artificial; identical to SEQ ID NO: 104708
  Synthetic oligonucleotide

SEQ ID NO: 489032 - DNA, 59 bp, Artificial; identical to SEQ ID NO: 16338
  Synthetic oligonucleotide

SEQ ID NO: 489033 - DNA, 58 bp, Artificial; identical to SEQ ID NO: 18549
  Synthetic oligonucleotide

SEQ ID NO: 489034 - DNA, 53 bp, Artificial; identical to SEQ ID NO: 19679
  Synthetic oligonucleotide

SEQ ID NO: 489035 - DNA, 60 bp, Artificial; identical to SEQ ID NO: 11984
  Synthetic oligonucleotide

SEQ ID NO: 489036 - DNA, 57 bp, Artificial; identical to SEQ ID NO: 16404
  Synthetic oligonucleotide

SEQ ID NO: 489037 - DNA, 60 bp, Artificial; identical to SEQ ID NO: 5851
  Synthetic oligonucleotide

SEQ ID NO: 489038 - DNA, 57 bp, Artificial; identical to SEQ ID NO: 8873
  Synthetic oligonucleotide

SEQ ID NO: 489039 - DNA, 60 bp, Artificial; identical to SEQ ID NO: 12563
  Synthetic oligonucleotide

SEQ ID NO: 489040 - DNA, 58 bp, Artificial; identical to SEQ ID NO: 18225
  Synthetic oligonucleotide

SEQ ID NO: 489041 - DNA, 55 bp, Artificial; identical to SEQ ID NO: 14998
  Synthetic oligonucleotide

SEQ ID NO: 489042 - DNA, 59 bp, Artificial; identical to SEQ ID NO: 17892
  Synthetic oligonucleotide

SEQ ID NO: 489043 - DNA, 59 bp, Artificial; identical to SEQ ID NO: 19299
  Synthetic oligonucleotide

SEQ ID NO: 489044 - DNA, 59 bp, Artificial; identical to SEQ ID NO: 18632
  Synthetic oligonucleotide

SEQ ID NO: 489045 - DNA, 55 bp, Artificial; identical to SEQ ID NO: 8879
  Synthetic oligonucleotide

SEQ ID NO: 489046 - DNA, 60 bp, Artificial; identical to SEQ ID NO: 6522
  Synthetic oligonucleotide

SEQ ID NO: 489047 - DNA, 51 bp, Artificial; identical to SEQ ID NO: 10608
  Synthetic oligonucleotide

SEQ ID NO: 489048 - DNA, 56 bp, Artificial; identical to SEQ ID NO: 14353
  Synthetic oligonucleotide

SEQ ID NO: 489049 - DNA, 55 bp, Artificial; identical to SEQ ID NO: 9056
  Synthetic oligonucleotide

SEQ ID NO: 489050 - DNA, 58 bp, Artificial; identical to SEQ ID NO: 8765
  Synthetic oligonucleotide

SEQ ID NO: 489051 - DNA, 60 bp, Artificial; identical to SEQ ID NO: 7746
  Synthetic oligonucleotide

SEQ ID NO: 489052 - DNA, 55 bp, Artificial; identical to SEQ ID NO: 15745
  Synthetic oligonucleotide

SEQ ID NO: 489053 - DNA, 52 bp, Artificial; identical to SEQ ID NO: 8090
  Synthetic oligonucleotide

SEQ ID NO: 489054 - DNA, 60 bp, Artificial; identical to SEQ ID NO: 6545
  Synthetic oligonucleotide

SEQ ID NO: 489055 - DNA, 60 bp, Artificial; identical to SEQ ID NO: 7209
  Synthetic oligonucleotide

SEQ ID NO: 489056 - DNA, 60 bp, Artificial; identical to SEQ ID NO: 112053
  Synthetic oligonucleotide

SEQ ID NO: 489057 - DNA, 60 bp, Artificial; identical to SEQ ID NO: 104205
  Synthetic oligonucleotide

SEQ ID NO: 489058 - DNA, 58 bp, Artificial; identical to SEQ ID NO: 20397
  Synthetic oligonucleotide

SEQ ID NO: 489059 - DNA, 60 bp, Artificial; identical to SEQ ID NO: 7110
  Synthetic oligonucleotide

SEQ ID NO: 489060 - DNA, 55 bp, Artificial; identical to SEQ ID NO: 7383
  Synthetic oligonucleotide

SEQ ID NO: 489061 - DNA, 56 bp, Artificial; identical to SEQ ID NO: 17593
  Synthetic oligonucleotide

SEQ ID NO: 489062 - DNA, 59 bp, Artificial; identical to SEQ ID NO: 7833
  Synthetic oligonucleotide

SEQ ID NO: 489063 - DNA, 60 bp, Artificial; identical to SEQ ID NO: 106260
  Synthetic oligonucleotide

SEQ ID NO: 489064 - DNA, 56 bp, Artificial; identical to SEQ ID NO: 18031
  Synthetic oligonucleotide

SEQ ID NO: 489065 - DNA, 56 bp, Artificial; identical to SEQ ID NO: 18280
  Synthetic oligonucleotide

SEQ ID NO: 489066 - DNA, 60 bp, Artificial; identical to SEQ ID NO: 8983
  Synthetic oligonucleotide

SEQ ID NO: 489067 - DNA, 59 bp, Artificial; identical to SEQ ID NO: 16354
  Synthetic oligonucleotide

SEQ ID NO: 489068 - DNA, 53 bp, Artificial; identical to SEQ ID NO: 20027
  Synthetic oligonucleotide

SEQ ID NO: 489069 - DNA, 54 bp, Artificial; identical to SEQ ID NO: 19399
  Synthetic oligonucleotide

SEQ ID NO: 489070 - DNA, 60 bp, Artificial; identical to SEQ ID NO: 14357
  Synthetic oligonucleotide

SEQ ID NO: 489071 - DNA, 60 bp, Artificial; identical to SEQ ID NO: 14091
  Synthetic oligonucleotide

SEQ ID NO: 489072 - DNA, 60 bp, Artificial; identical to SEQ ID NO: 14495
  Synthetic oligonucleotide

SEQ ID NO: 489073 - DNA, 53 bp, Artificial; identical to SEQ ID NO: 19369
  Synthetic oligonucleotide

SEQ ID NO: 489074 - DNA, 60 bp, Artificial; identical to SEQ ID NO: 6992
  Synthetic oligonucleotide

SEQ ID NO: 489075 - DNA, 60 bp, Artificial; identical to SEQ ID NO: 6333
  Synthetic oligonucleotide

SEQ ID NO: 489076 - DNA, 60 bp, Artificial; identical to SEQ ID NO: 75682
  Synthetic oligonucleotide

SEQ ID NO: 489077 - DNA, 54 bp, Artificial; identical to SEQ ID NO: 13761
  Synthetic oligonucleotide

SEQ ID NO: 489078 - DNA, 54 bp, Artificial; identical to SEQ ID NO: 18788
  Synthetic oligonucleotide

SEQ ID NO: 489079 - DNA, 53 bp, Artificial; identical to SEQ ID NO: 6783
  Synthetic oligonucleotide

SEQ ID NO: 489080 - DNA, 56 bp, Artificial; identical to SEQ ID NO: 15952
  Synthetic oligonucleotide

SEQ ID NO: 489081 - DNA, 57 bp, Artificial; identical to SEQ ID NO: 20348
  Synthetic oligonucleotide

SEQ ID NO: 489082 - DNA, 52 bp, Artificial; identical to SEQ ID NO: 6886
  Synthetic oligonucleotide

SEQ ID NO: 489083 - DNA, 52 bp, Artificial; identical to SEQ ID NO: 7571
  Synthetic oligonucleotide

SEQ ID NO: 489084 - DNA, 60 bp, Artificial; identical to SEQ ID NO: 9002
  Synthetic oligonucleotide

SEQ ID NO: 489085 - DNA, 60 bp, Artificial; identical to SEQ ID NO: 12436
  Synthetic oligonucleotide

SEQ ID NO: 489086 - DNA, 60 bp, Artificial; identical to SEQ ID NO: 15748
  Synthetic oligonucleotide

SEQ ID NO: 489087 - DNA, 60 bp, Artificial; identical to SEQ ID NO: 5977
  Synthetic oligonucleotide

SEQ ID NO: 489088 - DNA, 60 bp, Artificial; identical to SEQ ID NO: 9170
  Synthetic oligonucleotide

SEQ ID NO: 489089 - DNA, 60 bp, Artificial; identical to SEQ ID NO: 13304
  Synthetic oligonucleotide

SEQ ID NO: 489090 - DNA, 60 bp, Artificial; identical to SEQ ID NO: 13878
  Synthetic oligonucleotide

SEQ ID NO: 489091 - DNA, 50 bp, Artificial; identical to SEQ ID NO: 12750
  Synthetic oligonucleotide

SEQ ID NO: 489092 - DNA, 60 bp, Artificial; identical to SEQ ID NO: 14040
  Synthetic oligonucleotide

SEQ ID NO: 489093 - DNA, 57 bp, Artificial; identical to SEQ ID NO: 16765
  Synthetic oligonucleotide

SEQ ID NO: 489094 - DNA, 60 bp, Artificial; identical to SEQ ID NO: 13718
  Synthetic oligonucleotide

SEQ ID NO: 489095 - DNA, 60 bp, Artificial; identical to SEQ ID NO: 11468
  Synthetic oligonucleotide

SEQ ID NO: 489096 - DNA, 60 bp, Artificial; identical to SEQ ID NO: 12360
  Synthetic oligonucleotide

SEQ ID NO: 489097 - DNA, 60 bp, Artificial; identical to SEQ ID NO: 7991
  Synthetic oligonucleotide

SEQ ID NO: 489098 - DNA, 57 bp, Artificial; identical to SEQ ID NO: 14242
  Synthetic oligonucleotide

SEQ ID NO: 489099 - DNA, 59 bp, Artificial; identical to SEQ ID NO: 19116
  Synthetic oligonucleotide

SEQ ID NO: 489100 - DNA, 60 bp, Artificial; identical to SEQ ID NO: 13462
  Synthetic oligonucleotide

SEQ ID NO: 489101 - DNA, 59 bp, Artificial; identical to SEQ ID NO: 19613
  Synthetic oligonucleotide

SEQ ID NO: 489102 - DNA, 60 bp, Artificial; identical to SEQ ID NO: 12389
  Synthetic oligonucleotide

SEQ ID NO: 489103 - DNA, 60 bp, Artificial; identical to SEQ ID NO: 118956
  Synthetic oligonucleotide

SEQ ID NO: 489104 - DNA, 60 bp, Artificial; identical to SEQ ID NO: 75317
  Synthetic oligonucleotide

SEQ ID NO: 489105 - DNA, 55 bp, Artificial; identical to SEQ ID NO: 10161
  Synthetic oligonucleotide

SEQ ID NO: 489106 - DNA, 55 bp, Artificial; identical to SEQ ID NO: 14973
  Synthetic oligonucleotide

SEQ ID NO: 489107 - DNA, 60 bp, Artificial; identical to SEQ ID NO: 124685
  Synthetic oligonucleotide

SEQ ID NO: 489108 - DNA, 60 bp, Artificial; identical to SEQ ID NO: 11918
  Synthetic oligonucleotide

SEQ ID NO: 489109 - DNA, 60 bp, Artificial; identical to SEQ ID NO: 11661
  Synthetic oligonucleotide

SEQ ID NO: 489110 - DNA, 55 bp, Artificial; identical to SEQ ID NO: 12402
  Synthetic oligonucleotide

SEQ ID NO: 489111 - DNA, 60 bp, Artificial; identical to SEQ ID NO: 8544
  Synthetic oligonucleotide

SEQ ID NO: 489112 - DNA, 60 bp, Artificial; identical to SEQ ID NO: 9708
  Synthetic oligonucleotide

SEQ ID NO: 489113 - DNA, 60 bp, Artificial; identical to SEQ ID NO: 9328
  Synthetic oligonucleotide

SEQ ID NO: 489114 - DNA, 60 bp, Artificial; identical to SEQ ID NO: 120184
  Synthetic oligonucleotide

SEQ ID NO: 489115 - DNA, 55 bp, Artificial; identical to SEQ ID NO: 12363
  Synthetic oligonucleotide

SEQ ID NO: 489116 - DNA, 60 bp, Artificial; identical to SEQ ID NO: 9463
  Synthetic oligonucleotide

SEQ ID NO: 489117 - DNA, 55 bp, Artificial; identical to SEQ ID NO: 14294
  Synthetic oligonucleotide

SEQ ID NO: 489118 - DNA, 60 bp, Artificial; identical to SEQ ID NO: 14101
  Synthetic oligonucleotide

SEQ ID NO: 489119 - DNA, 60 bp, Artificial; identical to SEQ ID NO: 6650
  Synthetic oligonucleotide

SEQ ID NO: 489120 - DNA, 60 bp, Artificial; identical to SEQ ID NO: 9990
  Synthetic oligonucleotide

SEQ ID NO: 489121 - DNA, 55 bp, Artificial; identical to SEQ ID NO: 7238
  Synthetic oligonucleotide

SEQ ID NO: 489122 - DNA, 60 bp, Artificial; identical to SEQ ID NO: 9001
  Synthetic oligonucleotide

SEQ ID NO: 489123 - DNA, 60 bp, Artificial; identical to SEQ ID NO: 117140
  Synthetic oligonucleotide

SEQ ID NO: 489124 - DNA, 58 bp, Artificial; identical to SEQ ID NO: 19454
  Synthetic oligonucleotide

SEQ ID NO: 489125 - DNA, 56 bp, Artificial; identical to SEQ ID NO: 17038
  Synthetic oligonucleotide

SEQ ID NO: 489126 - DNA, 60 bp, Artificial; identical to SEQ ID NO: 117206
  Synthetic oligonucleotide

SEQ ID NO: 489127 - DNA, 60 bp, Artificial; identical to SEQ ID NO: 11614
  Synthetic oligonucleotide

SEQ ID NO: 489128 - DNA, 55 bp, Artificial; identical to SEQ ID NO: 9941
  Synthetic oligonucleotide

SEQ ID NO: 489129 - DNA, 60 bp, Artificial; identical to SEQ ID NO: 75165
  Synthetic oligonucleotide

SEQ ID NO: 489130 - DNA, 55 bp, Artificial; identical to SEQ ID NO: 332
  Synthetic oligonucleotide

SEQ ID NO: 489131 - DNA, 55 bp, Artificial; identical to SEQ ID NO: 17411
  Synthetic oligonucleotide

SEQ ID NO: 489132 - DNA, 60 bp, Artificial; identical to SEQ ID NO: 13127
  Synthetic oligonucleotide

SEQ ID NO: 489133 - DNA, 55 bp, Artificial; identical to SEQ ID NO: 13310
  Synthetic oligonucleotide

SEQ ID NO: 489134 - DNA, 57 bp, Artificial; identical to SEQ ID NO: 18277
  Synthetic oligonucleotide

SEQ ID NO: 489135 - DNA, 60 bp, Artificial; identical to SEQ ID NO: 8173
  Synthetic oligonucleotide

SEQ ID NO: 489136 - DNA, 60 bp, Artificial; identical to SEQ ID NO: 11531
  Synthetic oligonucleotide

SEQ ID NO: 489137 - DNA, 60 bp, Artificial; identical to SEQ ID NO: 7042
  Synthetic oligonucleotide

SEQ ID NO: 489138 - DNA, 57 bp, Artificial; identical to SEQ ID NO: 19640
  Synthetic oligonucleotide

SEQ ID NO: 489139 - DNA, 59 bp, Artificial; identical to SEQ ID NO: 19209
  Synthetic oligonucleotide

SEQ ID NO: 489140 - DNA, 51 bp, Artificial; identical to SEQ ID NO: 11508
  Synthetic oligonucleotide

SEQ ID NO: 489141 - DNA, 60 bp, Artificial; identical to SEQ ID NO: 123324
  Synthetic oligonucleotide

SEQ ID NO: 489142 - DNA, 58 bp, Artificial; identical to SEQ ID NO: 20504
  Synthetic oligonucleotide

SEQ ID NO: 489143 - DNA, 60 bp, Artificial; identical to SEQ ID NO: 10987
  Synthetic oligonucleotide

SEQ ID NO: 489144 - DNA, 60 bp, Artificial; identical to SEQ ID NO: 15793
  Synthetic oligonucleotide

SEQ ID NO: 489145 - DNA, 55 bp, Artificial; identical to SEQ ID NO: 9964
  Synthetic oligonucleotide

SEQ ID NO: 489146 - DNA, 60 bp, Artificial; identical to SEQ ID NO: 13861
  Synthetic oligonucleotide

SEQ ID NO: 489147 - DNA, 60 bp, Artificial; identical to SEQ ID NO: 9268
  Synthetic oligonucleotide

SEQ ID NO: 489148 - DNA, 55 bp, Artificial; identical to SEQ ID NO: 13486
  Synthetic oligonucleotide

SEQ ID NO: 489149 - DNA, 59 bp, Artificial; identical to SEQ ID NO: 16419
  Synthetic oligonucleotide

SEQ ID NO: 489150 - DNA, 58 bp, Artificial; identical to SEQ ID NO: 11289
  Synthetic oligonucleotide

SEQ ID NO: 489151 - DNA, 60 bp, Artificial; identical to SEQ ID NO: 11942
  Synthetic oligonucleotide

SEQ ID NO: 489152 - DNA, 54 bp, Artificial; identical to SEQ ID NO: 18937
  Synthetic oligonucleotide

SEQ ID NO: 489153 - DNA, 54 bp, Artificial; identical to SEQ ID NO: 8437
  Synthetic oligonucleotide

SEQ ID NO: 489154 - DNA, 60 bp, Artificial; identical to SEQ ID NO: 8958
  Synthetic oligonucleotide

SEQ ID NO: 489155 - DNA, 60 bp, Artificial; identical to SEQ ID NO: 10296
  Synthetic oligonucleotide

SEQ ID NO: 489156 - DNA, 60 bp, Artificial; identical to SEQ ID NO: 10085
  Synthetic oligonucleotide

SEQ ID NO: 489157 - DNA, 55 bp, Artificial; identical to SEQ ID NO: 15752
  Synthetic oligonucleotide

SEQ ID NO: 489158 - DNA, 55 bp, Artificial; identical to SEQ ID NO: 9239
  Synthetic oligonucleotide

SEQ ID NO: 489159 - DNA, 55 bp, Artificial; identical to SEQ ID NO: 6096
  Synthetic oligonucleotide

SEQ ID NO: 489160 - DNA, 60 bp, Artificial; identical to SEQ ID NO: 11927
  Synthetic oligonucleotide

SEQ ID NO: 489161 - DNA, 58 bp, Artificial; identical to SEQ ID NO: 16964
  Synthetic oligonucleotide

SEQ ID NO: 489162 - DNA, 60 bp, Artificial; identical to SEQ ID NO: 15533
  Synthetic oligonucleotide

SEQ ID NO: 489163 - DNA, 60 bp, Artificial; identical to SEQ ID NO: 6934
  Synthetic oligonucleotide

SEQ ID NO: 489164 - DNA, 58 bp, Artificial; identical to SEQ ID NO: 20171
  Synthetic oligonucleotide

SEQ ID NO: 489165 - DNA, 57 bp, Artificial; identical to SEQ ID NO: 20224
  Synthetic oligonucleotide

SEQ ID NO: 489166 - DNA, 60 bp, Artificial; identical to SEQ ID NO: 11881
  Synthetic oligonucleotide

SEQ ID NO: 489167 - DNA, 60 bp, Artificial; identical to SEQ ID NO: 7488
  Synthetic oligonucleotide

SEQ ID NO: 489168 - DNA, 59 bp, Artificial; identical to SEQ ID NO: 15406
  Synthetic oligonucleotide

SEQ ID NO: 489169 - DNA, 59 bp, Artificial; identical to SEQ ID NO: 18828
  Synthetic oligonucleotide

SEQ ID NO: 489170 - DNA, 59 bp, Artificial; identical to SEQ ID NO: 20188
  Synthetic oligonucleotide

SEQ ID NO: 489171 - DNA, 50 bp, Artificial; identical to SEQ ID NO: 14390
  Synthetic oligonucleotide

SEQ ID NO: 489172 - DNA, 56 bp, Artificial; identical to SEQ ID NO: 17533
  Synthetic oligonucleotide

SEQ ID NO: 489173 - DNA, 60 bp, Artificial; identical to SEQ ID NO: 5972
  Synthetic oligonucleotide

SEQ ID NO: 489174 - DNA, 60 bp, Artificial; identical to SEQ ID NO: 11186
  Synthetic oligonucleotide

SEQ ID NO: 489175 - DNA, 53 bp, Artificial; identical to SEQ ID NO: 6402
  Synthetic oligonucleotide

SEQ ID NO: 489176 - DNA, 53 bp, Artificial; identical to SEQ ID NO: 17445
  Synthetic oligonucleotide

SEQ ID NO: 489177 - DNA, 56 bp, Artificial; identical to SEQ ID NO: 8288
  Synthetic oligonucleotide

SEQ ID NO: 489178 - DNA, 60 bp, Artificial; identical to SEQ ID NO: 13914
  Synthetic oligonucleotide

SEQ ID NO: 489179 - DNA, 56 bp, Artificial; identical to SEQ ID NO: 11656
  Synthetic oligonucleotide

SEQ ID NO: 489180 - DNA, 56 bp, Artificial; identical to SEQ ID NO: 8458
  Synthetic oligonucleotide

SEQ ID NO: 489181 - DNA, 59 bp, Artificial; identical to SEQ ID NO: 18876
  Synthetic oligonucleotide

SEQ ID NO: 489182 - DNA, 57 bp, Artificial; identical to SEQ ID NO: 9394
  Synthetic oligonucleotide

SEQ ID NO: 489183 - DNA, 56 bp, Artificial; identical to SEQ ID NO: 16574
  Synthetic oligonucleotide

SEQ ID NO: 489184 - DNA, 60 bp, Artificial; identical to SEQ ID NO: 13710
  Synthetic oligonucleotide

SEQ ID NO: 489185 - DNA, 60 bp, Artificial; identical to SEQ ID NO: 6672
  Synthetic oligonucleotide

SEQ ID NO: 489186 - DNA, 60 bp, Artificial; identical to SEQ ID NO: 9152
  Synthetic oligonucleotide

SEQ ID NO: 489187 - DNA, 60 bp, Artificial; identical to SEQ ID NO: 11382
  Synthetic oligonucleotide

SEQ ID NO: 489188 - DNA, 60 bp, Artificial; identical to SEQ ID NO: 100420
  Synthetic oligonucleotide

SEQ ID NO: 489189 - DNA, 60 bp, Artificial; identical to SEQ ID NO: 10493
  Synthetic oligonucleotide

SEQ ID NO: 489190 - DNA, 53 bp, Artificial; identical to SEQ ID NO: 15424
  Synthetic oligonucleotide

SEQ ID NO: 489191 - DNA, 59 bp, Artificial; identical to SEQ ID NO: 10004
  Synthetic oligonucleotide

SEQ ID NO: 489192 - DNA, 58 bp, Artificial; identical to SEQ ID NO: 18321
  Synthetic oligonucleotide

SEQ ID NO: 489193 - DNA, 59 bp, Artificial; identical to SEQ ID NO: 20393
  Synthetic oligonucleotide

SEQ ID NO: 489194 - DNA, 58 bp, Artificial; identical to SEQ ID NO: 14075
  Synthetic oligonucleotide

SEQ ID NO: 489195 - DNA, 50 bp, Artificial; identical to SEQ ID NO: 12067
  Synthetic oligonucleotide

SEQ ID NO: 489196 - DNA, 60 bp, Artificial; identical to SEQ ID NO: 9070
  Synthetic oligonucleotide

SEQ ID NO: 489197 - DNA, 60 bp, Artificial; identical to SEQ ID NO: 9584
  Synthetic oligonucleotide

SEQ ID NO: 489198 - DNA, 60 bp, Artificial; identical to SEQ ID NO: 8089
  Synthetic oligonucleotide

SEQ ID NO: 489199 - DNA, 60 bp, Artificial; identical to SEQ ID NO: 86704
  Synthetic oligonucleotide

SEQ ID NO: 489200 - DNA, 59 bp, Artificial; identical to SEQ ID NO: 16676
  Synthetic oligonucleotide

SEQ ID NO: 489201 - DNA, 57 bp, Artificial; identical to SEQ ID NO: 10442
  Synthetic oligonucleotide

SEQ ID NO: 489202 - DNA, 60 bp, Artificial; identical to SEQ ID NO: 8662
  Synthetic oligonucleotide

SEQ ID NO: 489203 - DNA, 55 bp, Artificial; identical to SEQ ID NO: 11797
  Synthetic oligonucleotide

SEQ ID NO: 489204 - DNA, 60 bp, Artificial; identical to SEQ ID NO: 6558
  Synthetic oligonucleotide

SEQ ID NO: 489205 - DNA, 60 bp, Artificial; identical to SEQ ID NO: 6676
  Synthetic oligonucleotide

SEQ ID NO: 489206 - DNA, 60 bp, Artificial; identical to SEQ ID NO: 7175
  Synthetic oligonucleotide

SEQ ID NO: 489207 - DNA, 53 bp, Artificial; identical to SEQ ID NO: 18764
  Synthetic oligonucleotide

SEQ ID NO: 489208 - DNA, 55 bp, Artificial; identical to SEQ ID NO: 12322
  Synthetic oligonucleotide

SEQ ID NO: 489209 - DNA, 60 bp, Artificial; identical to SEQ ID NO: 9839
  Synthetic oligonucleotide

SEQ ID NO: 489210 - DNA, 60 bp, Artificial; identical to SEQ ID NO: 6858
  Synthetic oligonucleotide

SEQ ID NO: 489211 - DNA, 60 bp, Artificial; identical to SEQ ID NO: 11379
  Synthetic oligonucleotide

SEQ ID NO: 489212 - DNA, 58 bp, Artificial; identical to SEQ ID NO: 19759
  Synthetic oligonucleotide

SEQ ID NO: 489213 - DNA, 60 bp, Artificial; identical to SEQ ID NO: 10882
  Synthetic oligonucleotide

SEQ ID NO: 489214 - DNA, 60 bp, Artificial; identical to SEQ ID NO: 68017
  Synthetic oligonucleotide

SEQ ID NO: 489215 - DNA, 60 bp, Artificial; identical to SEQ ID NO: 114201
  Synthetic oligonucleotide

SEQ ID NO: 489216 - DNA, 60 bp, Artificial; identical to SEQ ID NO: 6730
  Synthetic oligonucleotide

SEQ ID NO: 489217 - DNA, 60 bp, Artificial; identical to SEQ ID NO: 5953
  Synthetic oligonucleotide

SEQ ID NO: 489218 - DNA, 58 bp, Artificial; identical to SEQ ID NO: 13054
  Synthetic oligonucleotide

SEQ ID NO: 489219 - DNA, 60 bp, Artificial; identical to SEQ ID NO: 15011
  Synthetic oligonucleotide

SEQ ID NO: 489220 - DNA, 55 bp, Artificial; identical to SEQ ID NO: 7297
  Synthetic oligonucleotide

SEQ ID NO: 489221 - DNA, 60 bp, Artificial; identical to SEQ ID NO: 14693
  Synthetic oligonucleotide

SEQ ID NO: 489222 - DNA, 59 bp, Artificial; identical to SEQ ID NO: 17643
  Synthetic oligonucleotide

SEQ ID NO: 489223 - DNA, 60 bp, Artificial; identical to SEQ ID NO: 11036
  Synthetic oligonucleotide

SEQ ID NO: 489224 - DNA, 56 bp, Artificial; identical to SEQ ID NO: 12211
  Synthetic oligonucleotide

SEQ ID NO: 489225 - DNA, 60 bp, Artificial; identical to SEQ ID NO: 13068
  Synthetic oligonucleotide

SEQ ID NO: 489226 - DNA, 59 bp, Artificial; identical to SEQ ID NO: 10498
  Synthetic oligonucleotide

SEQ ID NO: 489227 - DNA, 58 bp, Artificial; identical to SEQ ID NO: 17405
  Synthetic oligonucleotide

SEQ ID NO: 489228 - DNA, 60 bp, Artificial; identical to SEQ ID NO: 14562
  Synthetic oligonucleotide

SEQ ID NO: 489229 - DNA, 52 bp, Artificial; identical to SEQ ID NO: 10326
  Synthetic oligonucleotide

SEQ ID NO: 489230 - DNA, 51 bp, Artificial; identical to SEQ ID NO: 14894
  Synthetic oligonucleotide

SEQ ID NO: 489231 - DNA, 60 bp, Artificial; identical to SEQ ID NO: 5803
  Synthetic oligonucleotide

SEQ ID NO: 489232 - DNA, 59 bp, Artificial; identical to SEQ ID NO: 16391
  Synthetic oligonucleotide

SEQ ID NO: 489233 - DNA, 60 bp, Artificial; identical to SEQ ID NO: 10122
  Synthetic oligonucleotide

SEQ ID NO: 489234 - DNA, 55 bp, Artificial; identical to SEQ ID NO: 6528
  Synthetic oligonucleotide

SEQ ID NO: 489235 - DNA, 60 bp, Artificial; identical to SEQ ID NO: 10252
  Synthetic oligonucleotide

SEQ ID NO: 489236 - DNA, 60 bp, Artificial; identical to SEQ ID NO: 6905
  Synthetic oligonucleotide

SEQ ID NO: 489237 - DNA, 60 bp, Artificial; identical to SEQ ID NO: 8135
  Synthetic oligonucleotide

SEQ ID NO: 489238 - DNA, 57 bp, Artificial; identical to SEQ ID NO: 19600
  Synthetic oligonucleotide

SEQ ID NO: 489239 - DNA, 60 bp, Artificial; identical to SEQ ID NO: 7001
  Synthetic oligonucleotide

SEQ ID NO: 489240 - DNA, 60 bp, Artificial; identical to SEQ ID NO: 13698
  Synthetic oligonucleotide

SEQ ID NO: 489241 - DNA, 60 bp, Artificial; identical to SEQ ID NO: 14718
  Synthetic oligonucleotide

SEQ ID NO: 489242 - DNA, 59 bp, Artificial; identical to SEQ ID NO: 17385
  Synthetic oligonucleotide

SEQ ID NO: 489243 - DNA, 60 bp, Artificial; identical to SEQ ID NO: 14557
  Synthetic oligonucleotide

SEQ ID NO: 489244 - DNA, 56 bp, Artificial; identical to SEQ ID NO: 18465
  Synthetic oligonucleotide

SEQ ID NO: 489245 - DNA, 55 bp, Artificial; identical to SEQ ID NO: 12205
  Synthetic oligonucleotide

SEQ ID NO: 489246 - DNA, 53 bp, Artificial; identical to SEQ ID NO: 11309
  Synthetic oligonucleotide

SEQ ID NO: 489247 - DNA, 59 bp, Artificial; identical to SEQ ID NO: 14319
  Synthetic oligonucleotide

SEQ ID NO: 489248 - DNA, 60 bp, Artificial; identical to SEQ ID NO: 12370
  Synthetic oligonucleotide

SEQ ID NO: 489249 - DNA, 53 bp, Artificial; identical to SEQ ID NO: 10145
  Synthetic oligonucleotide

SEQ ID NO: 489250 - DNA, 60 bp, Artificial; identical to SEQ ID NO: 53120
  Synthetic oligonucleotide

SEQ ID NO: 489251 - DNA, 60 bp, Artificial; identical to SEQ ID NO: 7979
  Synthetic oligonucleotide

SEQ ID NO: 489252 - DNA, 59 bp, Artificial; identical to SEQ ID NO: 8559
  Synthetic oligonucleotide

SEQ ID NO: 489253 - DNA, 55 bp, Artificial; identical to SEQ ID NO: 13406
  Synthetic oligonucleotide

SEQ ID NO: 489254 - DNA, 57 bp, Artificial; identical to SEQ ID NO: 9071
  Synthetic oligonucleotide

SEQ ID NO: 489255 - DNA, 60 bp, Artificial; identical to SEQ ID NO: 13654
  Synthetic oligonucleotide

SEQ ID NO: 489256 - DNA, 58 bp, Artificial; identical to SEQ ID NO: 8963
  Synthetic oligonucleotide

SEQ ID NO: 489257 - DNA, 59 bp, Artificial; identical to SEQ ID NO: 11458
  Synthetic oligonucleotide

SEQ ID NO: 489258 - DNA, 58 bp, Artificial; identical to SEQ ID NO: 16376
  Synthetic oligonucleotide

SEQ ID NO: 489259 - DNA, 52 bp, Artificial; identical to SEQ ID NO: 10671
  Synthetic oligonucleotide

SEQ ID NO: 489260 - DNA, 55 bp, Artificial; identical to SEQ ID NO: 17850
  Synthetic oligonucleotide

SEQ ID NO: 489261 - DNA, 56 bp, Artificial; identical to SEQ ID NO: 20311
  Synthetic oligonucleotide

SEQ ID NO: 489262 - DNA, 60 bp, Artificial; identical to SEQ ID NO: 12506
  Synthetic oligonucleotide

SEQ ID NO: 489263 - DNA, 60 bp, Artificial; identical to SEQ ID NO: 6024
  Synthetic oligonucleotide

SEQ ID NO: 489264 - DNA, 60 bp, Artificial; identical to SEQ ID NO: 11805
  Synthetic oligonucleotide

SEQ ID NO: 489265 - DNA, 56 bp, Artificial; identical to SEQ ID NO: 20000
  Synthetic oligonucleotide

SEQ ID NO: 489266 - DNA, 55 bp, Artificial; identical to SEQ ID NO: 13612
  Synthetic oligonucleotide

SEQ ID NO: 489267 - DNA, 59 bp, Artificial; identical to SEQ ID NO: 7291
  Synthetic oligonucleotide

SEQ ID NO: 489268 - DNA, 58 bp, Artificial; identical to SEQ ID NO: 18042
  Synthetic oligonucleotide

SEQ ID NO: 489269 - DNA, 55 bp, Artificial; identical to SEQ ID NO: 12863
  Synthetic oligonucleotide

SEQ ID NO: 489270 - DNA, 60 bp, Artificial; identical to SEQ ID NO: 10702
  Synthetic oligonucleotide

SEQ ID NO: 489271 - DNA, 55 bp, Artificial; identical to SEQ ID NO: 11953
  Synthetic oligonucleotide

SEQ ID NO: 489272 - DNA, 60 bp, Artificial; identical to SEQ ID NO: 12602
  Synthetic oligonucleotide

SEQ ID NO: 489273 - DNA, 57 bp, Artificial; identical to SEQ ID NO: 20321
  Synthetic oligonucleotide

SEQ ID NO: 489274 - DNA, 59 bp, Artificial; identical to SEQ ID NO: 19931
  Synthetic oligonucleotide

SEQ ID NO: 489275 - DNA, 52 bp, Artificial; identical to SEQ ID NO: 6009
  Synthetic oligonucleotide

SEQ ID NO: 489276 - DNA, 54 bp, Artificial; identical to SEQ ID NO: 6885
  Synthetic oligonucleotide

SEQ ID NO: 489277 - DNA, 60 bp, Artificial; identical to SEQ ID NO: 99763
  Synthetic oligonucleotide

SEQ ID NO: 489278 - DNA, 55 bp, Artificial; identical to SEQ ID NO: 8931
  Synthetic oligonucleotide

SEQ ID NO: 489279 - DNA, 60 bp, Artificial; identical to SEQ ID NO: 7564
  Synthetic oligonucleotide

SEQ ID NO: 489280 - DNA, 60 bp, Artificial; identical to SEQ ID NO: 15546
  Synthetic oligonucleotide

SEQ ID NO: 489281 - DNA, 60 bp, Artificial; identical to SEQ ID NO: 123929
  Synthetic oligonucleotide

SEQ ID NO: 489282 - DNA, 55 bp, Artificial; identical to SEQ ID NO: 9331
  Synthetic oligonucleotide

SEQ ID NO: 489283 - DNA, 55 bp, Artificial; identical to SEQ ID NO: 17084
  Synthetic oligonucleotide

SEQ ID NO: 489284 - DNA, 60 bp, Artificial; identical to SEQ ID NO: 9714
  Synthetic oligonucleotide

SEQ ID NO: 489285 - DNA, 60 bp, Artificial; identical to SEQ ID NO: 22275
  Synthetic oligonucleotide

SEQ ID NO: 489286 - DNA, 59 bp, Artificial; identical to SEQ ID NO: 12091
  Synthetic oligonucleotide

SEQ ID NO: 489287 - DNA, 60 bp, Artificial; identical to SEQ ID NO: 33789
  Synthetic oligonucleotide

SEQ ID NO: 489288 - DNA, 55 bp, Artificial; identical to SEQ ID NO: 14868
  Synthetic oligonucleotide

SEQ ID NO: 489289 - DNA, 52 bp, Artificial; identical to SEQ ID NO: 8037
  Synthetic oligonucleotide

SEQ ID NO: 489290 - DNA, 60 bp, Artificial; identical to SEQ ID NO: 8428
  Synthetic oligonucleotide

SEQ ID NO: 489291 - DNA, 59 bp, Artificial; identical to SEQ ID NO: 19872
  Synthetic oligonucleotide

SEQ ID NO: 489292 - DNA, 57 bp, Artificial; identical to SEQ ID NO: 16642
  Synthetic oligonucleotide

SEQ ID NO: 489293 - DNA, 58 bp, Artificial; identical to SEQ ID NO: 18681
  Synthetic oligonucleotide

SEQ ID NO: 489294 - DNA, 56 bp, Artificial; identical to SEQ ID NO: 17319
  Synthetic oligonucleotide

SEQ ID NO: 489295 - DNA, 58 bp, Artificial; identical to SEQ ID NO: 19823
  Synthetic oligonucleotide

SEQ ID NO: 489296 - DNA, 60 bp, Artificial; identical to SEQ ID NO: 14218
  Synthetic oligonucleotide

SEQ ID NO: 489297 - DNA, 55 bp, Artificial; identical to SEQ ID NO: 17364
  Synthetic oligonucleotide

SEQ ID NO: 489298 - DNA, 58 bp, Artificial; identical to SEQ ID NO: 18211
  Synthetic oligonucleotide

SEQ ID NO: 489299 - DNA, 60 bp, Artificial; identical to SEQ ID NO: 10664
  Synthetic oligonucleotide

SEQ ID NO: 489300 - DNA, 60 bp, Artificial; identical to SEQ ID NO: 15809
  Synthetic oligonucleotide

SEQ ID NO: 489301 - DNA, 59 bp, Artificial; identical to SEQ ID NO: 20519
  Synthetic oligonucleotide

SEQ ID NO: 489302 - DNA, 55 bp, Artificial; identical to SEQ ID NO: 8452
  Synthetic oligonucleotide

SEQ ID NO: 489303 - DNA, 55 bp, Artificial; identical to SEQ ID NO: 6786
  Synthetic oligonucleotide

SEQ ID NO: 489304 - DNA, 57 bp, Artificial; identical to SEQ ID NO: 14783
  Synthetic oligonucleotide

SEQ ID NO: 489305 - DNA, 55 bp, Artificial; identical to SEQ ID NO: 9407
  Synthetic oligonucleotide

SEQ ID NO: 489306 - DNA, 60 bp, Artificial; identical to SEQ ID NO: 7905
  Synthetic oligonucleotide

SEQ ID NO: 489307 - DNA, 60 bp, Artificial; identical to SEQ ID NO: 14005
  Synthetic oligonucleotide

SEQ ID NO: 489308 - DNA, 50 bp, Artificial; identical to SEQ ID NO: 6079
  Synthetic oligonucleotide

SEQ ID NO: 489309 - DNA, 57 bp, Artificial; identical to SEQ ID NO: 17538
  Synthetic oligonucleotide

SEQ ID NO: 489310 - DNA, 60 bp, Artificial; identical to SEQ ID NO: 12697
  Synthetic oligonucleotide

SEQ ID NO: 489311 - DNA, 59 bp, Artificial; identical to SEQ ID NO: 18362
  Synthetic oligonucleotide

SEQ ID NO: 489312 - DNA, 55 bp, Artificial; identical to SEQ ID NO: 7444
  Synthetic oligonucleotide

SEQ ID NO: 489313 - DNA, 55 bp, Artificial; identical to SEQ ID NO: 8988
  Synthetic oligonucleotide

SEQ ID NO: 489314 - DNA, 60 bp, Artificial; identical to SEQ ID NO: 45306
  Synthetic oligonucleotide

SEQ ID NO: 489315 - DNA, 55 bp, Artificial; identical to SEQ ID NO: 8930
  Synthetic oligonucleotide

SEQ ID NO: 489316 - DNA, 57 bp, Artificial; identical to SEQ ID NO: 17143
  Synthetic oligonucleotide

SEQ ID NO: 489317 - DNA, 54 bp, Artificial; identical to SEQ ID NO: 16550
  Synthetic oligonucleotide

SEQ ID NO: 489318 - DNA, 60 bp, Artificial; identical to SEQ ID NO: 9892
  Synthetic oligonucleotide

SEQ ID NO: 489319 - DNA, 58 bp, Artificial; identical to SEQ ID NO: 16246
  Synthetic oligonucleotide

SEQ ID NO: 489320 - DNA, 57 bp, Artificial; identical to SEQ ID NO: 17414
  Synthetic oligonucleotide

SEQ ID NO: 489321 - DNA, 58 bp, Artificial; identical to SEQ ID NO: 18258
  Synthetic oligonucleotide

SEQ ID NO: 489322 - DNA, 57 bp, Artificial; identical to SEQ ID NO: 12015
  Synthetic oligonucleotide

SEQ ID NO: 489323 - DNA, 60 bp, Artificial; identical to SEQ ID NO: 24312
  Synthetic oligonucleotide

SEQ ID NO: 489324 - DNA, 59 bp, Artificial; identical to SEQ ID NO: 16449
  Synthetic oligonucleotide

SEQ ID NO: 489325 - DNA, 59 bp, Artificial; identical to SEQ ID NO: 18049
  Synthetic oligonucleotide

SEQ ID NO: 489326 - DNA, 57 bp, Artificial; identical to SEQ ID NO: 18168
  Synthetic oligonucleotide

SEQ ID NO: 489327 - DNA, 60 bp, Artificial; identical to SEQ ID NO: 75753
  Synthetic oligonucleotide

SEQ ID NO: 489328 - DNA, 57 bp, Artificial; identical to SEQ ID NO: 7442
  Synthetic oligonucleotide

SEQ ID NO: 489329 - DNA, 55 bp, Artificial; identical to SEQ ID NO: 8522
  Synthetic oligonucleotide

SEQ ID NO: 489330 - DNA, 59 bp, Artificial; identical to SEQ ID NO: 16357
  Synthetic oligonucleotide

SEQ ID NO: 489331 - DNA, 60 bp, Artificial; identical to SEQ ID NO: 10275
  Synthetic oligonucleotide

SEQ ID NO: 489332 - DNA, 60 bp, Artificial; identical to SEQ ID NO: 11698
  Synthetic oligonucleotide

SEQ ID NO: 489333 - DNA, 55 bp, Artificial; identical to SEQ ID NO: 11702
  Synthetic oligonucleotide

SEQ ID NO: 489334 - DNA, 60 bp, Artificial; identical to SEQ ID NO: 15686
  Synthetic oligonucleotide

SEQ ID NO: 489335 - DNA, 59 bp, Artificial; identical to SEQ ID NO: 15913
  Synthetic oligonucleotide

SEQ ID NO: 489336 - DNA, 59 bp, Artificial; identical to SEQ ID NO: 19345
  Synthetic oligonucleotide

SEQ ID NO: 489337 - DNA, 55 bp, Artificial; identical to SEQ ID NO: 12440
  Synthetic oligonucleotide

SEQ ID NO: 489338 - DNA, 55 bp, Artificial; identical to SEQ ID NO: 11798
  Synthetic oligonucleotide

SEQ ID NO: 489339 - DNA, 55 bp, Artificial; identical to SEQ ID NO: 12794
  Synthetic oligonucleotide

SEQ ID NO: 489340 - DNA, 60 bp, Artificial; identical to SEQ ID NO: 11479
  Synthetic oligonucleotide

SEQ ID NO: 489341 - DNA, 60 bp, Artificial; identical to SEQ ID NO: 57234
  Synthetic oligonucleotide

SEQ ID NO: 489342 - DNA, 60 bp, Artificial; identical to SEQ ID NO: 14614
  Synthetic oligonucleotide

SEQ ID NO: 489343 - DNA, 60 bp, Artificial; identical to SEQ ID NO: 7882
  Synthetic oligonucleotide

SEQ ID NO: 489344 - DNA, 60 bp, Artificial; identical to SEQ ID NO: 12539
  Synthetic oligonucleotide

SEQ ID NO: 489345 - DNA, 60 bp, Artificial; identical to SEQ ID NO: 12767
  Synthetic oligonucleotide

SEQ ID NO: 489346 - DNA, 55 bp, Artificial; identical to SEQ ID NO: 12766
  Synthetic oligonucleotide

SEQ ID NO: 489347 - DNA, 59 bp, Artificial; identical to SEQ ID NO: 16820
  Synthetic oligonucleotide

SEQ ID NO: 489348 - DNA, 60 bp, Artificial; identical to SEQ ID NO: 7955
  Synthetic oligonucleotide

SEQ ID NO: 489349 - DNA, 60 bp, Artificial; identical to SEQ ID NO: 13246
  Synthetic oligonucleotide

SEQ ID NO: 489350 - DNA, 55 bp, Artificial; identical to SEQ ID NO: 9452
  Synthetic oligonucleotide

SEQ ID NO: 489351 - DNA, 58 bp, Artificial; identical to SEQ ID NO: 17989
  Synthetic oligonucleotide

SEQ ID NO: 489352 - DNA, 60 bp, Artificial; identical to SEQ ID NO: 11902
  Synthetic oligonucleotide

SEQ ID NO: 489353 - DNA, 60 bp, Artificial; identical to SEQ ID NO: 7257
  Synthetic oligonucleotide

SEQ ID NO: 489354 - DNA, 60 bp, Artificial; identical to SEQ ID NO: 12735
  Synthetic oligonucleotide

SEQ ID NO: 489355 - DNA, 60 bp, Artificial; identical to SEQ ID NO: 13828
  Synthetic oligonucleotide

SEQ ID NO: 489356 - DNA, 60 bp, Artificial; identical to SEQ ID NO: 13888
  Synthetic oligonucleotide

SEQ ID NO: 489357 - DNA, 60 bp, Artificial; identical to SEQ ID NO: 10446
  Synthetic oligonucleotide

SEQ ID NO: 489358 - DNA, 60 bp, Artificial; identical to SEQ ID NO: 11688
  Synthetic oligonucleotide

SEQ ID NO: 489359 - DNA, 51 bp, Artificial; identical to SEQ ID NO: 13212
  Synthetic oligonucleotide

SEQ ID NO: 489360 - DNA, 56 bp, Artificial; identical to SEQ ID NO: 15706
  Synthetic oligonucleotide

SEQ ID NO: 489361 - DNA, 60 bp, Artificial; identical to SEQ ID NO: 9968
  Synthetic oligonucleotide

SEQ ID NO: 489362 - DNA, 52 bp, Artificial; identical to SEQ ID NO: 7579
  Synthetic oligonucleotide

SEQ ID NO: 489363 - DNA, 60 bp, Artificial; identical to SEQ ID NO: 7385
  Synthetic oligonucleotide

SEQ ID NO: 489364 - DNA, 59 bp, Artificial; identical to SEQ ID NO: 19864
  Synthetic oligonucleotide

SEQ ID NO: 489365 - DNA, 60 bp, Artificial; identical to SEQ ID NO: 7764
  Synthetic oligonucleotide

SEQ ID NO: 489366 - DNA, 60 bp, Artificial; identical to SEQ ID NO: 8673
  Synthetic oligonucleotide

SEQ ID NO: 489367 - DNA, 60 bp, Artificial; identical to SEQ ID NO: 11080
  Synthetic oligonucleotide

SEQ ID NO: 489368 - DNA, 54 bp, Artificial; identical to SEQ ID NO: 18746
  Synthetic oligonucleotide

SEQ ID NO: 489369 - DNA, 60 bp, Artificial; identical to SEQ ID NO: 12744
  Synthetic oligonucleotide

SEQ ID NO: 489370 - DNA, 56 bp, Artificial; identical to SEQ ID NO: 18859
  Synthetic oligonucleotide

SEQ ID NO: 489371 - DNA, 57 bp, Artificial; identical to SEQ ID NO: 17563
  Synthetic oligonucleotide

SEQ ID NO: 489372 - DNA, 55 bp, Artificial; identical to SEQ ID NO: 13418
  Synthetic oligonucleotide

SEQ ID NO: 489373 - DNA, 60 bp, Artificial; identical to SEQ ID NO: 74182
  Synthetic oligonucleotide

SEQ ID NO: 489374 - DNA, 60 bp, Artificial; identical to SEQ ID NO: 13411
  Synthetic oligonucleotide

SEQ ID NO: 489375 - DNA, 60 bp, Artificial; identical to SEQ ID NO: 14412
  Synthetic oligonucleotide

SEQ ID NO: 489376 - DNA, 54 bp, Artificial; identical to SEQ ID NO: 16675
  Synthetic oligonucleotide

SEQ ID NO: 489377 - DNA, 55 bp, Artificial; identical to SEQ ID NO: 8889
  Synthetic oligonucleotide

SEQ ID NO: 489378 - DNA, 55 bp, Artificial; identical to SEQ ID NO: 11790
  Synthetic oligonucleotide

SEQ ID NO: 489379 - DNA, 58 bp, Artificial; identical to SEQ ID NO: 19966
  Synthetic oligonucleotide

SEQ ID NO: 489380 - DNA, 60 bp, Artificial; identical to SEQ ID NO: 13859
  Synthetic oligonucleotide

SEQ ID NO: 489381 - DNA, 58 bp, Artificial; identical to SEQ ID NO: 17294
  Synthetic oligonucleotide

SEQ ID NO: 489382 - DNA, 53 bp, Artificial; identical to SEQ ID NO: 8503
  Synthetic oligonucleotide

SEQ ID NO: 489383 - DNA, 54 bp, Artificial; identical to SEQ ID NO: 17423
  Synthetic oligonucleotide

SEQ ID NO: 489384 - DNA, 53 bp, Artificial; identical to SEQ ID NO: 16237
  Synthetic oligonucleotide

SEQ ID NO: 489385 - DNA, 60 bp, Artificial; identical to SEQ ID NO: 10862
  Synthetic oligonucleotide

SEQ ID NO: 489386 - DNA, 56 bp, Artificial; identical to SEQ ID NO: 17113
  Synthetic oligonucleotide

SEQ ID NO: 489387 - DNA, 58 bp, Artificial; identical to SEQ ID NO: 19302
  Synthetic oligonucleotide

SEQ ID NO: 489388 - DNA, 59 bp, Artificial; identical to SEQ ID NO: 17401
  Synthetic oligonucleotide

SEQ ID NO: 489389 - DNA, 52 bp, Artificial; identical to SEQ ID NO: 17473
  Synthetic oligonucleotide

SEQ ID NO: 489390 - DNA, 54 bp, Artificial; identical to SEQ ID NO: 19707
  Synthetic oligonucleotide

SEQ ID NO: 489391 - DNA, 52 bp, Artificial; identical to SEQ ID NO: 19641
  Synthetic oligonucleotide

SEQ ID NO: 489392 - DNA, 59 bp, Artificial; identical to SEQ ID NO: 19556
  Synthetic oligonucleotide

SEQ ID NO: 489393 - DNA, 55 bp, Artificial; identical to SEQ ID NO: 13090
  Synthetic oligonucleotide

SEQ ID NO: 489394 - DNA, 60 bp, Artificial; identical to SEQ ID NO: 98525
  Synthetic oligonucleotide

SEQ ID NO: 489395 - DNA, 55 bp, Artificial; identical to SEQ ID NO: 12925
  Synthetic oligonucleotide

SEQ ID NO: 489396 - DNA, 60 bp, Artificial; identical to SEQ ID NO: 14538
  Synthetic oligonucleotide

SEQ ID NO: 489397 - DNA, 60 bp, Artificial; identical to SEQ ID NO: 103638
  Synthetic oligonucleotide

SEQ ID NO: 489398 - DNA, 58 bp, Artificial; identical to SEQ ID NO: 10515
  Synthetic oligonucleotide

SEQ ID NO: 489399 - DNA, 59 bp, Artificial; identical to SEQ ID NO: 18003
  Synthetic oligonucleotide

SEQ ID NO: 489400 - DNA, 55 bp, Artificial; identical to SEQ ID NO: 8343
  Synthetic oligonucleotide

SEQ ID NO: 489401 - DNA, 58 bp, Artificial; identical to SEQ ID NO: 19702
  Synthetic oligonucleotide

SEQ ID NO: 489402 - DNA, 60 bp, Artificial; identical to SEQ ID NO: 11583
  Synthetic oligonucleotide

SEQ ID NO: 489403 - DNA, 60 bp, Artificial; identical to SEQ ID NO: 12728
  Synthetic oligonucleotide

SEQ ID NO: 489404 - DNA, 55 bp, Artificial; identical to SEQ ID NO: 15956
  Synthetic oligonucleotide

SEQ ID NO: 489405 - DNA, 60 bp, Artificial; identical to SEQ ID NO: 14550
  Synthetic oligonucleotide

SEQ ID NO: 489406 - DNA, 58 bp, Artificial; identical to SEQ ID NO: 16531
  Synthetic oligonucleotide

SEQ ID NO: 489407 - DNA, 52 bp, Artificial; identical to SEQ ID NO: 19386
  Synthetic oligonucleotide

SEQ ID NO: 489408 - DNA, 60 bp, Artificial; identical to SEQ ID NO: 14024
  Synthetic oligonucleotide

SEQ ID NO: 489409 - DNA, 57 bp, Artificial; identical to SEQ ID NO: 19591
  Synthetic oligonucleotide

SEQ ID NO: 489410 - DNA, 60 bp, Artificial; identical to SEQ ID NO: 14610
  Synthetic oligonucleotide

SEQ ID NO: 489411 - DNA, 55 bp, Artificial; identical to SEQ ID NO: 10491
  Synthetic oligonucleotide

SEQ ID NO: 489412 - DNA, 60 bp, Artificial; identical to SEQ ID NO: 105430
  Synthetic oligonucleotide

SEQ ID NO: 489413 - DNA, 54 bp, Artificial; identical to SEQ ID NO: 18635
  Synthetic oligonucleotide

SEQ ID NO: 489414 - DNA, 58 bp, Artificial; identical to SEQ ID NO: 13093
  Synthetic oligonucleotide

SEQ ID NO: 489415 - DNA, 55 bp, Artificial; identical to SEQ ID NO: 11607
  Synthetic oligonucleotide

SEQ ID NO: 489416 - DNA, 60 bp, Artificial; identical to SEQ ID NO: 25619
  Synthetic oligonucleotide

SEQ ID NO: 489417 - DNA, 53 bp, Artificial; identical to SEQ ID NO: 12814
  Synthetic oligonucleotide

SEQ ID NO: 489418 - DNA, 60 bp, Artificial; identical to SEQ ID NO: 107543
  Synthetic oligonucleotide

SEQ ID NO: 489419 - DNA, 60 bp, Artificial; identical to SEQ ID NO: 15447
  Synthetic oligonucleotide

SEQ ID NO: 489420 - DNA, 60 bp, Artificial; identical to SEQ ID NO: 13458
  Synthetic oligonucleotide

SEQ ID NO: 489421 - DNA, 60 bp, Artificial; identical to SEQ ID NO: 6991
  Synthetic oligonucleotide

SEQ ID NO: 489422 - DNA, 60 bp, Artificial; identical to SEQ ID NO: 11715
  Synthetic oligonucleotide

SEQ ID NO: 489423 - DNA, 56 bp, Artificial; identical to SEQ ID NO: 20049
  Synthetic oligonucleotide

SEQ ID NO: 489424 - DNA, 59 bp, Artificial; identical to SEQ ID NO: 18534
  Synthetic oligonucleotide

SEQ ID NO: 489425 - DNA, 60 bp, Artificial; identical to SEQ ID NO: 8456
  Synthetic oligonucleotide

SEQ ID NO: 489426 - DNA, 57 bp, Artificial; identical to SEQ ID NO: 12567
  Synthetic oligonucleotide

SEQ ID NO: 489427 - DNA, 55 bp, Artificial; identical to SEQ ID NO: 11626
  Synthetic oligonucleotide

SEQ ID NO: 489428 - DNA, 56 bp, Artificial; identical to SEQ ID NO: 19088
  Synthetic oligonucleotide

SEQ ID NO: 489429 - DNA, 58 bp, Artificial; identical to SEQ ID NO: 20451
  Synthetic oligonucleotide

SEQ ID NO: 489430 - DNA, 60 bp, Artificial; identical to SEQ ID NO: 10653
  Synthetic oligonucleotide

SEQ ID NO: 489431 - DNA, 59 bp, Artificial; identical to SEQ ID NO: 19035
  Synthetic oligonucleotide

SEQ ID NO: 489432 - DNA, 53 bp, Artificial; identical to SEQ ID NO: 18787
  Synthetic oligonucleotide

SEQ ID NO: 489433 - DNA, 60 bp, Artificial; identical to SEQ ID NO: 15857
  Synthetic oligonucleotide

SEQ ID NO: 489434 - DNA, 55 bp, Artificial; identical to SEQ ID NO: 14041
  Synthetic oligonucleotide

SEQ ID NO: 489435 - DNA, 56 bp, Artificial; identical to SEQ ID NO: 16042
  Synthetic oligonucleotide

SEQ ID NO: 489436 - DNA, 58 bp, Artificial; identical to SEQ ID NO: 17193
  Synthetic oligonucleotide

SEQ ID NO: 489437 - DNA, 60 bp, Artificial; identical to SEQ ID NO: 11884
  Synthetic oligonucleotide

SEQ ID NO: 489438 - DNA, 56 bp, Artificial; identical to SEQ ID NO: 8709
  Synthetic oligonucleotide

SEQ ID NO: 489439 - DNA, 60 bp, Artificial; identical to SEQ ID NO: 27408
  Synthetic oligonucleotide

SEQ ID NO: 489440 - DNA, 60 bp, Artificial; identical to SEQ ID NO: 9574
  Synthetic oligonucleotide

SEQ ID NO: 489441 - DNA, 60 bp, Artificial; identical to SEQ ID NO: 11182
  Synthetic oligonucleotide

SEQ ID NO: 489442 - DNA, 59 bp, Artificial; identical to SEQ ID NO: 19357
  Synthetic oligonucleotide

SEQ ID NO: 489443 - DNA, 56 bp, Artificial; identical to SEQ ID NO: 8555
  Synthetic oligonucleotide

SEQ ID NO: 489444 - DNA, 59 bp, Artificial; identical to SEQ ID NO: 19084
  Synthetic oligonucleotide

SEQ ID NO: 489445 - DNA, 60 bp, Artificial; identical to SEQ ID NO: 13676
  Synthetic oligonucleotide

SEQ ID NO: 489446 - DNA, 60 bp, Artificial; identical to SEQ ID NO: 111100
  Synthetic oligonucleotide

SEQ ID NO: 489447 - DNA, 60 bp, Artificial; identical to SEQ ID NO: 113977
  Synthetic oligonucleotide

SEQ ID NO: 489448 - DNA, 60 bp, Artificial; identical to SEQ ID NO: 111914
  Synthetic oligonucleotide

SEQ ID NO: 489449 - DNA, 59 bp, Artificial; identical to SEQ ID NO: 11118
  Synthetic oligonucleotide

SEQ ID NO: 489450 - DNA, 58 bp, Artificial; identical to SEQ ID NO: 18653
  Synthetic oligonucleotide

SEQ ID NO: 489451 - DNA, 60 bp, Artificial; identical to SEQ ID NO: 11609
  Synthetic oligonucleotide

SEQ ID NO: 489452 - DNA, 58 bp, Artificial; identical to SEQ ID NO: 17829
  Synthetic oligonucleotide

SEQ ID NO: 489453 - DNA, 59 bp, Artificial; identical to SEQ ID NO: 15270
  Synthetic oligonucleotide

SEQ ID NO: 489454 - DNA, 59 bp, Artificial; identical to SEQ ID NO: 17253
  Synthetic oligonucleotide

SEQ ID NO: 489455 - DNA, 51 bp, Artificial; identical to SEQ ID NO: 15379
  Synthetic oligonucleotide

SEQ ID NO: 489456 - DNA, 60 bp, Artificial; identical to SEQ ID NO: 9668
  Synthetic oligonucleotide

SEQ ID NO: 489457 - DNA, 60 bp, Artificial; identical to SEQ ID NO: 5724
  Synthetic oligonucleotide

SEQ ID NO: 489458 - DNA, 58 bp, Artificial; identical to SEQ ID NO: 102159
  Synthetic oligonucleotide

SEQ ID NO: 489459 - DNA, 53 bp, Artificial; identical to SEQ ID NO: 17970
  Synthetic oligonucleotide

SEQ ID NO: 489460 - DNA, 55 bp, Artificial; identical to SEQ ID NO: 12384
  Synthetic oligonucleotide

SEQ ID NO: 489461 - DNA, 57 bp, Artificial; identical to SEQ ID NO: 13156
  Synthetic oligonucleotide

SEQ ID NO: 489462 - DNA, 60 bp, Artificial; identical to SEQ ID NO: 14660
  Synthetic oligonucleotide

SEQ ID NO: 489463 - DNA, 59 bp, Artificial; identical to SEQ ID NO: 17358
  Synthetic oligonucleotide

SEQ ID NO: 489464 - DNA, 60 bp, Artificial; identical to SEQ ID NO: 6309
  Synthetic oligonucleotide

SEQ ID NO: 489465 - DNA, 58 bp, Artificial; identical to SEQ ID NO: 6516
  Synthetic oligonucleotide

SEQ ID NO: 489466 - DNA, 60 bp, Artificial; identical to SEQ ID NO: 13133
  Synthetic oligonucleotide

SEQ ID NO: 489467 - DNA, 58 bp, Artificial; identical to SEQ ID NO: 16732
  Synthetic oligonucleotide

SEQ ID NO: 489468 - DNA, 60 bp, Artificial; identical to SEQ ID NO: 14454
  Synthetic oligonucleotide

SEQ ID NO: 489469 - DNA, 59 bp, Artificial; identical to SEQ ID NO: 16213
  Synthetic oligonucleotide

SEQ ID NO: 489470 - DNA, 60 bp, Artificial; identical to SEQ ID NO: 9484
  Synthetic oligonucleotide

SEQ ID NO: 489471 - DNA, 60 bp, Artificial; identical to SEQ ID NO: 8130
  Synthetic oligonucleotide

SEQ ID NO: 489472 - DNA, 60 bp, Artificial; identical to SEQ ID NO: 6695
  Synthetic oligonucleotide

SEQ ID NO: 489473 - DNA, 60 bp, Artificial; identical to SEQ ID NO: 103541
  Synthetic oligonucleotide

SEQ ID NO: 489474 - DNA, 60 bp, Artificial; identical to SEQ ID NO: 82893
  Synthetic oligonucleotide

SEQ ID NO: 489475 - DNA, 59 bp, Artificial; identical to SEQ ID NO: 17813
  Synthetic oligonucleotide

SEQ ID NO: 489476 - DNA, 55 bp, Artificial; identical to SEQ ID NO: 7896
  Synthetic oligonucleotide

SEQ ID NO: 489477 - DNA, 60 bp, Artificial; identical to SEQ ID NO: 124063
  Synthetic oligonucleotide

SEQ ID NO: 489478 - DNA, 60 bp, Artificial; identical to SEQ ID NO: 13913
  Synthetic oligonucleotide

SEQ ID NO: 489479 - DNA, 60 bp, Artificial; identical to SEQ ID NO: 9277
  Synthetic oligonucleotide

SEQ ID NO: 489480 - DNA, 60 bp, Artificial; identical to SEQ ID NO: 11374
  Synthetic oligonucleotide

SEQ ID NO: 489481 - DNA, 55 bp, Artificial; identical to SEQ ID NO: 10007
  Synthetic oligonucleotide

SEQ ID NO: 489482 - DNA, 60 bp, Artificial; identical to SEQ ID NO: 129969
  Synthetic oligonucleotide

SEQ ID NO: 489483 - DNA, 60 bp, Artificial; identical to SEQ ID NO: 14676
  Synthetic oligonucleotide

SEQ ID NO: 489484 - DNA, 60 bp, Artificial; identical to SEQ ID NO: 54981
  Synthetic oligonucleotide

SEQ ID NO: 489485 - DNA, 60 bp, Artificial; identical to SEQ ID NO: 6574
  Synthetic oligonucleotide

SEQ ID NO: 489486 - DNA, 60 bp, Artificial; identical to SEQ ID NO: 13012
  Synthetic oligonucleotide

SEQ ID NO: 489487 - DNA, 55 bp, Artificial; identical to SEQ ID NO: 8472
  Synthetic oligonucleotide

SEQ ID NO: 489488 - DNA, 60 bp, Artificial; identical to SEQ ID NO: 7967
  Synthetic oligonucleotide

SEQ ID NO: 489489 - DNA, 55 bp, Artificial; identical to SEQ ID NO: 10656
  Synthetic oligonucleotide

SEQ ID NO: 489490 - DNA, 60 bp, Artificial; identical to SEQ ID NO: 5772
  Synthetic oligonucleotide

SEQ ID NO: 489491 - DNA, 55 bp, Artificial; identical to SEQ ID NO: 15090
  Synthetic oligonucleotide

SEQ ID NO: 489492 - DNA, 54 bp, Artificial; identical to SEQ ID NO: 18838
  Synthetic oligonucleotide

SEQ ID NO: 489493 - DNA, 60 bp, Artificial; identical to SEQ ID NO: 6472
  Synthetic oligonucleotide

SEQ ID NO: 489494 - DNA, 55 bp, Artificial; identical to SEQ ID NO: 13430
  Synthetic oligonucleotide

SEQ ID NO: 489495 - DNA, 60 bp, Artificial; identical to SEQ ID NO: 8026
  Synthetic oligonucleotide

SEQ ID NO: 489496 - DNA, 60 bp, Artificial; identical to SEQ ID NO: 11945
  Synthetic oligonucleotide

SEQ ID NO: 489497 - DNA, 55 bp, Artificial; identical to SEQ ID NO: 9264
  Synthetic oligonucleotide

SEQ ID NO: 489498 - DNA, 56 bp, Artificial; identical to SEQ ID NO: 6642
  Synthetic oligonucleotide

SEQ ID NO: 489499 - DNA, 59 bp, Artificial; identical to SEQ ID NO: 17339
  Synthetic oligonucleotide

SEQ ID NO: 489500 - DNA, 60 bp, Artificial; identical to SEQ ID NO: 6459
  Synthetic oligonucleotide

SEQ ID NO: 489501 - DNA, 56 bp, Artificial; identical to SEQ ID NO: 17396
  Synthetic oligonucleotide

SEQ ID NO: 489502 - DNA, 60 bp, Artificial; identical to SEQ ID NO: 59997
  Synthetic oligonucleotide

SEQ ID NO: 489503 - DNA, 60 bp, Artificial; identical to SEQ ID NO: 71132
  Synthetic oligonucleotide

SEQ ID NO: 489504 - DNA, 53 bp, Artificial; identical to SEQ ID NO: 9625
  Synthetic oligonucleotide

SEQ ID NO: 489505 - DNA, 59 bp, Artificial; identical to SEQ ID NO: 8215
  Synthetic oligonucleotide

SEQ ID NO: 489506 - DNA, 60 bp, Artificial; identical to SEQ ID NO: 123537
  Synthetic oligonucleotide

SEQ ID NO: 489507 - DNA, 53 bp, Artificial; identical to SEQ ID NO: 7447
  Synthetic oligonucleotide

SEQ ID NO: 489508 - DNA, 60 bp, Artificial; identical to SEQ ID NO: 15254
  Synthetic oligonucleotide

SEQ ID NO: 489509 - DNA, 60 bp, Artificial; identical to SEQ ID NO: 8168
  Synthetic oligonucleotide

SEQ ID NO: 489510 - DNA, 55 bp, Artificial; identical to SEQ ID NO: 11496
  Synthetic oligonucleotide

SEQ ID NO: 489511 - DNA, 60 bp, Artificial; identical to SEQ ID NO: 11419
  Synthetic oligonucleotide

SEQ ID NO: 489512 - DNA, 60 bp, Artificial; identical to SEQ ID NO: 6942
  Synthetic oligonucleotide

SEQ ID NO: 489513 - DNA, 57 bp, Artificial; identical to SEQ ID NO: 19243
  Synthetic oligonucleotide

SEQ ID NO: 489514 - DNA, 60 bp, Artificial; identical to SEQ ID NO: 82351
  Synthetic oligonucleotide

SEQ ID NO: 489515 - DNA, 60 bp, Artificial; identical to SEQ ID NO: 110166
  Synthetic oligonucleotide

SEQ ID NO: 489516 - DNA, 56 bp, Artificial; identical to SEQ ID NO: 16263
  Synthetic oligonucleotide

SEQ ID NO: 489517 - DNA, 59 bp, Artificial; identical to SEQ ID NO: 19862
  Synthetic oligonucleotide

SEQ ID NO: 489518 - DNA, 55 bp, Artificial; identical to SEQ ID NO: 15910
  Synthetic oligonucleotide

SEQ ID NO: 489519 - DNA, 52 bp, Artificial; identical to SEQ ID NO: 14785
  Synthetic oligonucleotide

SEQ ID NO: 489520 - DNA, 58 bp, Artificial; identical to SEQ ID NO: 19695
  Synthetic oligonucleotide

SEQ ID NO: 489521 - DNA, 60 bp, Artificial; identical to SEQ ID NO: 75973
  Synthetic oligonucleotide

SEQ ID NO: 489522 - DNA, 55 bp, Artificial; identical to SEQ ID NO: 18464
  Synthetic oligonucleotide

SEQ ID NO: 489523 - DNA, 51 bp, Artificial; identical to SEQ ID NO: 10079
  Synthetic oligonucleotide

SEQ ID NO: 489524 - DNA, 60 bp, Artificial; identical to SEQ ID NO: 11534
  Synthetic oligonucleotide

SEQ ID NO: 489525 - DNA, 60 bp, Artificial; identical to SEQ ID NO: 7501
  Synthetic oligonucleotide

SEQ ID NO: 489526 - DNA, 58 bp, Artificial; identical to SEQ ID NO: 19968
  Synthetic oligonucleotide

SEQ ID NO: 489527 - DNA, 56 bp, Artificial; identical to SEQ ID NO: 18741
  Synthetic oligonucleotide

SEQ ID NO: 489528 - DNA, 58 bp, Artificial; identical to SEQ ID NO: 20076
  Synthetic oligonucleotide

SEQ ID NO: 489529 - DNA, 55 bp, Artificial; identical to SEQ ID NO: 6747
  Synthetic oligonucleotide

SEQ ID NO: 489530 - DNA, 56 bp, Artificial; identical to SEQ ID NO: 16727
  Synthetic oligonucleotide

SEQ ID NO: 489531 - DNA, 53 bp, Artificial; identical to SEQ ID NO: 150
  Synthetic oligonucleotide

SEQ ID NO: 489532 - DNA, 58 bp, Artificial; identical to SEQ ID NO: 17242
  Synthetic oligonucleotide

SEQ ID NO: 489533 - DNA, 51 bp, Artificial; identical to SEQ ID NO: 5999
  Synthetic oligonucleotide

SEQ ID NO: 489534 - DNA, 59 bp, Artificial; identical to SEQ ID NO: 16651
  Synthetic oligonucleotide

SEQ ID NO: 489535 - DNA, 59 bp, Artificial; identical to SEQ ID NO: 17160
  Synthetic oligonucleotide

SEQ ID NO: 489536 - DNA, 60 bp, Artificial; identical to SEQ ID NO: 9117
  Synthetic oligonucleotide

SEQ ID NO: 489537 - DNA, 52 bp, Artificial; identical to SEQ ID NO: 6622
  Synthetic oligonucleotide

SEQ ID NO: 489538 - DNA, 58 bp, Artificial; identical to SEQ ID NO: 19645
  Synthetic oligonucleotide

SEQ ID NO: 489539 - DNA, 60 bp, Artificial; identical to SEQ ID NO: 11933
  Synthetic oligonucleotide

SEQ ID NO: 489540 - DNA, 55 bp, Artificial; identical to SEQ ID NO: 15187
  Synthetic oligonucleotide

SEQ ID NO: 489541 - DNA, 59 bp, Artificial; identical to SEQ ID NO: 6708
  Synthetic oligonucleotide

SEQ ID NO: 489542 - DNA, 60 bp, Artificial; identical to SEQ ID NO: 6627
  Synthetic oligonucleotide

SEQ ID NO: 489543 - DNA, 59 bp, Artificial; identical to SEQ ID NO: 20459
  Synthetic oligonucleotide

SEQ ID NO: 489544 - DNA, 60 bp, Artificial; identical to SEQ ID NO: 7016
  Synthetic oligonucleotide

SEQ ID NO: 489545 - DNA, 60 bp, Artificial; identical to SEQ ID NO: 14466
  Synthetic oligonucleotide

SEQ ID NO: 489546 - DNA, 60 bp, Artificial; identical to SEQ ID NO: 14070
  Synthetic oligonucleotide

SEQ ID NO: 489547 - DNA, 55 bp, Artificial; identical to SEQ ID NO: 9493
  Synthetic oligonucleotide

SEQ ID NO: 489548 - DNA, 55 bp, Artificial; identical to SEQ ID NO: 17890
  Synthetic oligonucleotide

SEQ ID NO: 489549 - DNA, 59 bp, Artificial; identical to SEQ ID NO: 18306
  Synthetic oligonucleotide

SEQ ID NO: 489550 - DNA, 56 bp, Artificial; identical to SEQ ID NO: 16336
  Synthetic oligonucleotide

SEQ ID NO: 489551 - DNA, 60 bp, Artificial; identical to SEQ ID NO: 11545
  Synthetic oligonucleotide

SEQ ID NO: 489552 - DNA, 60 bp, Artificial; identical to SEQ ID NO: 288
  Synthetic oligonucleotide

SEQ ID NO: 489553 - DNA, 58 bp, Artificial; identical to SEQ ID NO: 6568
  Synthetic oligonucleotide

SEQ ID NO: 489554 - DNA, 60 bp, Artificial; identical to SEQ ID NO: 107588
  Synthetic oligonucleotide

SEQ ID NO: 489555 - DNA, 56 bp, Artificial; identical to SEQ ID NO: 16512
  Synthetic oligonucleotide

SEQ ID NO: 489556 - DNA, 60 bp, Artificial; identical to SEQ ID NO: 15210
  Synthetic oligonucleotide

SEQ ID NO: 489557 - DNA, 58 bp, Artificial; identical to SEQ ID NO: 20301
  Synthetic oligonucleotide

SEQ ID NO: 489558 - DNA, 55 bp, Artificial; identical to SEQ ID NO: 5899
  Synthetic oligonucleotide

SEQ ID NO: 489559 - DNA, 60 bp, Artificial; identical to SEQ ID NO: 8588
  Synthetic oligonucleotide

SEQ ID NO: 489560 - DNA, 60 bp, Artificial; identical to SEQ ID NO: 13549
  Synthetic oligonucleotide

SEQ ID NO: 489561 - DNA, 60 bp, Artificial; identical to SEQ ID NO: 12586
  Synthetic oligonucleotide

SEQ ID NO: 489562 - DNA, 60 bp, Artificial; identical to SEQ ID NO: 11539
  Synthetic oligonucleotide

SEQ ID NO: 489563 - DNA, 56 bp, Artificial; identical to SEQ ID NO: 19362
  Synthetic oligonucleotide

SEQ ID NO: 489564 - DNA, 60 bp, Artificial; identical to SEQ ID NO: 6884
  Synthetic oligonucleotide

SEQ ID NO: 489565 - DNA, 60 bp, Artificial; identical to SEQ ID NO: 10678
  Synthetic oligonucleotide

SEQ ID NO: 489566 - DNA, 59 bp, Artificial; identical to SEQ ID NO: 12035
  Synthetic oligonucleotide

SEQ ID NO: 489567 - DNA, 52 bp, Artificial; identical to SEQ ID NO: 18933
  Synthetic oligonucleotide

SEQ ID NO: 489568 - DNA, 59 bp, Artificial; identical to SEQ ID NO: 19861
  Synthetic oligonucleotide

SEQ ID NO: 489569 - DNA, 58 bp, Artificial; identical to SEQ ID NO: 19272
  Synthetic oligonucleotide

SEQ ID NO: 489570 - DNA, 55 bp, Artificial; identical to SEQ ID NO: 17151
  Synthetic oligonucleotide

SEQ ID NO: 489571 - DNA, 56 bp, Artificial; identical to SEQ ID NO: 12055
  Synthetic oligonucleotide

SEQ ID NO: 489572 - DNA, 60 bp, Artificial; identical to SEQ ID NO: 12862
  Synthetic oligonucleotide

SEQ ID NO: 489573 - DNA, 59 bp, Artificial; identical to SEQ ID NO: 19788
  Synthetic oligonucleotide

SEQ ID NO: 489574 - DNA, 57 bp, Artificial; identical to SEQ ID NO: 16814
  Synthetic oligonucleotide

SEQ ID NO: 489575 - DNA, 60 bp, Artificial; identical to SEQ ID NO: 10513
  Synthetic oligonucleotide

SEQ ID NO: 489576 - DNA, 55 bp, Artificial; identical to SEQ ID NO: 9903
  Synthetic oligonucleotide

SEQ ID NO: 489577 - DNA, 56 bp, Artificial; identical to SEQ ID NO: 19774
  Synthetic oligonucleotide

SEQ ID NO: 489578 - DNA, 55 bp, Artificial; identical to SEQ ID NO: 16225
  Synthetic oligonucleotide

SEQ ID NO: 489579 - DNA, 60 bp, Artificial; identical to SEQ ID NO: 8683
  Synthetic oligonucleotide

SEQ ID NO: 489580 - DNA, 60 bp, Artificial; identical to SEQ ID NO: 7215
  Synthetic oligonucleotide

SEQ ID NO: 489581 - DNA, 58 bp, Artificial; identical to SEQ ID NO: 20346
  Synthetic oligonucleotide

SEQ ID NO: 489582 - DNA, 57 bp, Artificial; identical to SEQ ID NO: 17745
  Synthetic oligonucleotide

SEQ ID NO: 489583 - DNA, 60 bp, Artificial; identical to SEQ ID NO: 10900
  Synthetic oligonucleotide

SEQ ID NO: 489584 - DNA, 56 bp, Artificial; identical to SEQ ID NO: 12666
  Synthetic oligonucleotide

SEQ ID NO: 489585 - DNA, 53 bp, Artificial; identical to SEQ ID NO: 9076
  Synthetic oligonucleotide

SEQ ID NO: 489586 - DNA, 60 bp, Artificial; identical to SEQ ID NO: 14751
  Synthetic oligonucleotide

SEQ ID NO: 489587 - DNA, 60 bp, Artificial; identical to SEQ ID NO: 36940
  Synthetic oligonucleotide

SEQ ID NO: 489588 - DNA, 60 bp, Artificial; identical to SEQ ID NO: 97838
  Synthetic oligonucleotide

SEQ ID NO: 489589 - DNA, 50 bp, Artificial; identical to SEQ ID NO: 9568
  Synthetic oligonucleotide

SEQ ID NO: 489590 - DNA, 60 bp, Artificial; identical to SEQ ID NO: 14246
  Synthetic oligonucleotide

SEQ ID NO: 489591 - DNA, 54 bp, Artificial; identical to SEQ ID NO: 15448
  Synthetic oligonucleotide

SEQ ID NO: 489592 - DNA, 58 bp, Artificial; identical to SEQ ID NO: 16821
  Synthetic oligonucleotide

SEQ ID NO: 489593 - DNA, 58 bp, Artificial; identical to SEQ ID NO: 16839
  Synthetic oligonucleotide

SEQ ID NO: 489594 - DNA, 60 bp, Artificial; identical to SEQ ID NO: 7361
  Synthetic oligonucleotide

SEQ ID NO: 489595 - DNA, 60 bp, Artificial; identical to SEQ ID NO: 13417
  Synthetic oligonucleotide

SEQ ID NO: 489596 - DNA, 51 bp, Artificial; identical to SEQ ID NO: 17883
  Synthetic oligonucleotide

SEQ ID NO: 489597 - DNA, 60 bp, Artificial; identical to SEQ ID NO: 12196
  Synthetic oligonucleotide

SEQ ID NO: 489598 - DNA, 57 bp, Artificial; identical to SEQ ID NO: 15176
  Synthetic oligonucleotide

SEQ ID NO: 489599 - DNA, 53 bp, Artificial; identical to SEQ ID NO: 7853
  Synthetic oligonucleotide

SEQ ID NO: 489600 - DNA, 56 bp, Artificial; identical to SEQ ID NO: 18470
  Synthetic oligonucleotide

SEQ ID NO: 489601 - DNA, 60 bp, Artificial; identical to SEQ ID NO: 8595
  Synthetic oligonucleotide

SEQ ID NO: 489602 - DNA, 55 bp, Artificial; identical to SEQ ID NO: 8950
  Synthetic oligonucleotide

SEQ ID NO: 489603 - DNA, 59 bp, Artificial; identical to SEQ ID NO: 20419
  Synthetic oligonucleotide

SEQ ID NO: 489604 - DNA, 58 bp, Artificial; identical to SEQ ID NO: 19792
  Synthetic oligonucleotide

SEQ ID NO: 489605 - DNA, 58 bp, Artificial; identical to SEQ ID NO: 16138
  Synthetic oligonucleotide

SEQ ID NO: 489606 - DNA, 60 bp, Artificial; identical to SEQ ID NO: 15174
  Synthetic oligonucleotide

SEQ ID NO: 489607 - DNA, 60 bp, Artificial; identical to SEQ ID NO: 7395
  Synthetic oligonucleotide

SEQ ID NO: 489608 - DNA, 55 bp, Artificial; identical to SEQ ID NO: 9949
  Synthetic oligonucleotide

SEQ ID NO: 489609 - DNA, 55 bp, Artificial; identical to SEQ ID NO: 6410
  Synthetic oligonucleotide

SEQ ID NO: 489610 - DNA, 56 bp, Artificial; identical to SEQ ID NO: 14097
  Synthetic oligonucleotide

SEQ ID NO: 489611 - DNA, 55 bp, Artificial; identical to SEQ ID NO: 13387
  Synthetic oligonucleotide

SEQ ID NO: 489612 - DNA, 58 bp, Artificial; identical to SEQ ID NO: 19185
  Synthetic oligonucleotide

SEQ ID NO: 489613 - DNA, 58 bp, Artificial; identical to SEQ ID NO: 19121
  Synthetic oligonucleotide

SEQ ID NO: 489614 - DNA, 60 bp, Artificial; identical to SEQ ID NO: 7353
  Synthetic oligonucleotide

SEQ ID NO: 489615 - DNA, 53 bp, Artificial; identical to SEQ ID NO: 11775
  Synthetic oligonucleotide

SEQ ID NO: 489616 - DNA, 60 bp, Artificial; identical to SEQ ID NO: 105350
  Synthetic oligonucleotide

SEQ ID NO: 489617 - DNA, 60 bp, Artificial; identical to SEQ ID NO: 6870
  Synthetic oligonucleotide

SEQ ID NO: 489618 - DNA, 60 bp, Artificial; identical to SEQ ID NO: 14705
  Synthetic oligonucleotide

SEQ ID NO: 489619 - DNA, 53 bp, Artificial; identical to SEQ ID NO: 119751
  Synthetic oligonucleotide

SEQ ID NO: 489620 - DNA, 55 bp, Artificial; identical to SEQ ID NO: 19690
  Synthetic oligonucleotide

SEQ ID NO: 489621 - DNA, 60 bp, Artificial; identical to SEQ ID NO: 14577
  Synthetic oligonucleotide

SEQ ID NO: 489622 - DNA, 57 bp, Artificial; identical to SEQ ID NO: 5907
  Synthetic oligonucleotide

SEQ ID NO: 489623 - DNA, 55 bp, Artificial; identical to SEQ ID NO: 12677
  Synthetic oligonucleotide

SEQ ID NO: 489624 - DNA, 60 bp, Artificial; identical to SEQ ID NO: 40912
  Synthetic oligonucleotide

SEQ ID NO: 489625 - DNA, 60 bp, Artificial; identical to SEQ ID NO: 15684
  Synthetic oligonucleotide

SEQ ID NO: 489626 - DNA, 58 bp, Artificial; identical to SEQ ID NO: 19551
  Synthetic oligonucleotide

SEQ ID NO: 489627 - DNA, 60 bp, Artificial; identical to SEQ ID NO: 80200
  Synthetic oligonucleotide

SEQ ID NO: 489628 - DNA, 60 bp, Artificial; identical to SEQ ID NO: 6663
  Synthetic oligonucleotide

SEQ ID NO: 489629 - DNA, 60 bp, Artificial; identical to SEQ ID NO: 10947
  Synthetic oligonucleotide

SEQ ID NO: 489630 - DNA, 55 bp, Artificial; identical to SEQ ID NO: 13134
  Synthetic oligonucleotide

SEQ ID NO: 489631 - DNA, 59 bp, Artificial; identical to SEQ ID NO: 16957
  Synthetic oligonucleotide

SEQ ID NO: 489632 - DNA, 60 bp, Artificial; identical to SEQ ID NO: 10359
  Synthetic oligonucleotide

SEQ ID NO: 489633 - DNA, 60 bp, Artificial; identical to SEQ ID NO: 15153
  Synthetic oligonucleotide

SEQ ID NO: 489634 - DNA, 60 bp, Artificial; identical to SEQ ID NO: 126842
  Synthetic oligonucleotide

SEQ ID NO: 489635 - DNA, 58 bp, Artificial; identical to SEQ ID NO: 10226
  Synthetic oligonucleotide

SEQ ID NO: 489636 - DNA, 59 bp, Artificial; identical to SEQ ID NO: 12598
  Synthetic oligonucleotide

SEQ ID NO: 489637 - DNA, 60 bp, Artificial; identical to SEQ ID NO: 26463
  Synthetic oligonucleotide

SEQ ID NO: 489638 - DNA, 51 bp, Artificial; identical to SEQ ID NO: 8097
  Synthetic oligonucleotide

SEQ ID NO: 489639 - DNA, 53 bp, Artificial; identical to SEQ ID NO: 18008
  Synthetic oligonucleotide

SEQ ID NO: 489640 - DNA, 54 bp, Artificial; identical to SEQ ID NO: 17220
  Synthetic oligonucleotide

SEQ ID NO: 489641 - DNA, 56 bp, Artificial; identical to SEQ ID NO: 17960
  Synthetic oligonucleotide

SEQ ID NO: 489642 - DNA, 56 bp, Artificial; identical to SEQ ID NO: 18897
  Synthetic oligonucleotide

SEQ ID NO: 489643 - DNA, 58 bp, Artificial; identical to SEQ ID NO: 15732
  Synthetic oligonucleotide

SEQ ID NO: 489644 - DNA, 56 bp, Artificial; identical to SEQ ID NO: 6609
  Synthetic oligonucleotide

SEQ ID NO: 489645 - DNA, 60 bp, Artificial; identical to SEQ ID NO: 10529
  Synthetic oligonucleotide

SEQ ID NO: 489646 - DNA, 55 bp, Artificial; identical to SEQ ID NO: 10214
  Synthetic oligonucleotide

SEQ ID NO: 489647 - DNA, 60 bp, Artificial; identical to SEQ ID NO: 15637
  Synthetic oligonucleotide

SEQ ID NO: 489648 - DNA, 55 bp, Artificial; identical to SEQ ID NO: 10550
  Synthetic oligonucleotide

SEQ ID NO: 489649 - DNA, 58 bp, Artificial; identical to SEQ ID NO: 17886
  Synthetic oligonucleotide

SEQ ID NO: 489650 - DNA, 60 bp, Artificial; identical to SEQ ID NO: 9050
  Synthetic oligonucleotide

SEQ ID NO: 489651 - DNA, 60 bp, Artificial; identical to SEQ ID NO: 12224
  Synthetic oligonucleotide

SEQ ID NO: 489652 - DNA, 60 bp, Artificial; identical to SEQ ID NO: 228
  Synthetic oligonucleotide

SEQ ID NO: 489653 - DNA, 60 bp, Artificial; identical to SEQ ID NO: 8017
  Synthetic oligonucleotide

SEQ ID NO: 489654 - DNA, 60 bp, Artificial; identical to SEQ ID NO: 8678
  Synthetic oligonucleotide

SEQ ID NO: 489655 - DNA, 60 bp, Artificial; identical to SEQ ID NO: 13995
  Synthetic oligonucleotide

SEQ ID NO: 489656 - DNA, 55 bp, Artificial; identical to SEQ ID NO: 12504
  Synthetic oligonucleotide

SEQ ID NO: 489657 - DNA, 55 bp, Artificial; identical to SEQ ID NO: 12774
  Synthetic oligonucleotide

SEQ ID NO: 489658 - DNA, 60 bp, Artificial; identical to SEQ ID NO: 166
  Synthetic oligonucleotide

SEQ ID NO: 489659 - DNA, 60 bp, Artificial; identical to SEQ ID NO: 10629
  Synthetic oligonucleotide

SEQ ID NO: 489660 - DNA, 60 bp, Artificial; identical to SEQ ID NO: 9057
  Synthetic oligonucleotide

SEQ ID NO: 489661 - DNA, 60 bp, Artificial; identical to SEQ ID NO: 8876
  Synthetic oligonucleotide

SEQ ID NO: 489662 - DNA, 56 bp, Artificial; identical to SEQ ID NO: 18131
  Synthetic oligonucleotide

SEQ ID NO: 489663 - DNA, 60 bp, Artificial; identical to SEQ ID NO: 14416
  Synthetic oligonucleotide

SEQ ID NO: 489664 - DNA, 57 bp, Artificial; identical to SEQ ID NO: 18198
  Synthetic oligonucleotide

SEQ ID NO: 489665 - DNA, 56 bp, Artificial; identical to SEQ ID NO: 17098
  Synthetic oligonucleotide

SEQ ID NO: 489666 - DNA, 56 bp, Artificial; identical to SEQ ID NO: 19458
  Synthetic oligonucleotide

SEQ ID NO: 489667 - DNA, 59 bp, Artificial; identical to SEQ ID NO: 19672
  Synthetic oligonucleotide

SEQ ID NO: 489668 - DNA, 57 bp, Artificial; identical to SEQ ID NO: 17048
  Synthetic oligonucleotide

SEQ ID NO: 489669 - DNA, 57 bp, Artificial; identical to SEQ ID NO: 8196
  Synthetic oligonucleotide

SEQ ID NO: 489670 - DNA, 60 bp, Artificial; identical to SEQ ID NO: 7751
  Synthetic oligonucleotide

SEQ ID NO: 489671 - DNA, 60 bp, Artificial; identical to SEQ ID NO: 6467
  Synthetic oligonucleotide

SEQ ID NO: 489672 - DNA, 55 bp, Artificial; identical to SEQ ID NO: 7399
  Synthetic oligonucleotide

SEQ ID NO: 489673 - DNA, 60 bp, Artificial; identical to SEQ ID NO: 15572
  Synthetic oligonucleotide

SEQ ID NO: 489674 - DNA, 60 bp, Artificial; identical to SEQ ID NO: 6507
  Synthetic oligonucleotide

SEQ ID NO: 489675 - DNA, 60 bp, Artificial; identical to SEQ ID NO: 12382
  Synthetic oligonucleotide

SEQ ID NO: 489676 - DNA, 52 bp, Artificial; identical to SEQ ID NO: 16481
  Synthetic oligonucleotide

SEQ ID NO: 489677 - DNA, 59 bp, Artificial; identical to SEQ ID NO: 20445
  Synthetic oligonucleotide

SEQ ID NO: 489678 - DNA, 60 bp, Artificial; identical to SEQ ID NO: 15753
  Synthetic oligonucleotide

SEQ ID NO: 489679 - DNA, 60 bp, Artificial; identical to SEQ ID NO: 8226
  Synthetic oligonucleotide

SEQ ID NO: 489680 - DNA, 57 bp, Artificial; identical to SEQ ID NO: 18630
  Synthetic oligonucleotide

SEQ ID NO: 489681 - DNA, 54 bp, Artificial; identical to SEQ ID NO: 17354
  Synthetic oligonucleotide

SEQ ID NO: 489682 - DNA, 60 bp, Artificial; identical to SEQ ID NO: 6615
  Synthetic oligonucleotide

SEQ ID NO: 489683 - DNA, 54 bp, Artificial; identical to SEQ ID NO: 16079
  Synthetic oligonucleotide

SEQ ID NO: 489684 - DNA, 54 bp, Artificial; identical to SEQ ID NO: 20019
  Synthetic oligonucleotide

SEQ ID NO: 489685 - DNA, 60 bp, Artificial; identical to SEQ ID NO: 10569
  Synthetic oligonucleotide

SEQ ID NO: 489686 - DNA, 57 bp, Artificial; identical to SEQ ID NO: 15498
  Synthetic oligonucleotide

SEQ ID NO: 489687 - DNA, 60 bp, Artificial; identical to SEQ ID NO: 12487
  Synthetic oligonucleotide

SEQ ID NO: 489688 - DNA, 60 bp, Artificial; identical to SEQ ID NO: 116335
  Synthetic oligonucleotide

SEQ ID NO: 489689 - DNA, 60 bp, Artificial; identical to SEQ ID NO: 105380
  Synthetic oligonucleotide

SEQ ID NO: 489690 - DNA, 60 bp, Artificial; identical to SEQ ID NO: 10069
  Synthetic oligonucleotide

SEQ ID NO: 489691 - DNA, 60 bp, Artificial; identical to SEQ ID NO: 8443
  Synthetic oligonucleotide

SEQ ID NO: 489692 - DNA, 57 bp, Artificial; identical to SEQ ID NO: 16308
  Synthetic oligonucleotide

SEQ ID NO: 489693 - DNA, 56 bp, Artificial; identical to SEQ ID NO: 18671
  Synthetic oligonucleotide

SEQ ID NO: 489694 - DNA, 58 bp, Artificial; identical to SEQ ID NO: 17822
  Synthetic oligonucleotide

SEQ ID NO: 489695 - DNA, 58 bp, Artificial; identical to SEQ ID NO: 17546
  Synthetic oligonucleotide

SEQ ID NO: 489696 - DNA, 56 bp, Artificial; identical to SEQ ID NO: 19269
  Synthetic oligonucleotide

SEQ ID NO: 489697 - DNA, 60 bp, Artificial; identical to SEQ ID NO: 112717
  Synthetic oligonucleotide

SEQ ID NO: 489698 - DNA, 55 bp, Artificial; identical to SEQ ID NO: 16326
  Synthetic oligonucleotide

SEQ ID NO: 489699 - DNA, 55 bp, Artificial; identical to SEQ ID NO: 9424
  Synthetic oligonucleotide

SEQ ID NO: 489700 - DNA, 55 bp, Artificial; identical to SEQ ID NO: 19491
  Synthetic oligonucleotide

SEQ ID NO: 489701 - DNA, 60 bp, Artificial; identical to SEQ ID NO: 8120
  Synthetic oligonucleotide

SEQ ID NO: 489702 - DNA, 55 bp, Artificial; identical to SEQ ID NO: 5850
  Synthetic oligonucleotide

SEQ ID NO: 489703 - DNA, 58 bp, Artificial; identical to SEQ ID NO: 11640
  Synthetic oligonucleotide

SEQ ID NO: 489704 - DNA, 55 bp, Artificial; identical to SEQ ID NO: 20360
  Synthetic oligonucleotide

SEQ ID NO: 489705 - DNA, 60 bp, Artificial; identical to SEQ ID NO: 15252
  Synthetic oligonucleotide

SEQ ID NO: 489706 - DNA, 52 bp, Artificial; identical to SEQ ID NO: 15747
  Synthetic oligonucleotide

SEQ ID NO: 489707 - DNA, 60 bp, Artificial; identical to SEQ ID NO: 9455
  Synthetic oligonucleotide

SEQ ID NO: 489708 - DNA, 50 bp, Artificial; identical to SEQ ID NO: 10156
  Synthetic oligonucleotide

SEQ ID NO: 489709 - DNA, 60 bp, Artificial; identical to SEQ ID NO: 10785
  Synthetic oligonucleotide

SEQ ID NO: 489710 - DNA, 59 bp, Artificial; identical to SEQ ID NO: 20420
  Synthetic oligonucleotide

SEQ ID NO: 489711 - DNA, 60 bp, Artificial; identical to SEQ ID NO: 52234
  Synthetic oligonucleotide

SEQ ID NO: 489712 - DNA, 58 bp, Artificial; identical to SEQ ID NO: 20407
  Synthetic oligonucleotide

SEQ ID NO: 489713 - DNA, 55 bp, Artificial; identical to SEQ ID NO: 18421
  Synthetic oligonucleotide

SEQ ID NO: 489714 - DNA, 55 bp, Artificial; identical to SEQ ID NO: 6343
  Synthetic oligonucleotide

SEQ ID NO: 489715 - DNA, 60 bp, Artificial; identical to SEQ ID NO: 5993
  Synthetic oligonucleotide

SEQ ID NO: 489716 - DNA, 56 bp, Artificial; identical to SEQ ID NO: 16071
  Synthetic oligonucleotide

SEQ ID NO: 489717 - DNA, 55 bp, Artificial; identical to SEQ ID NO: 17012
  Synthetic oligonucleotide

SEQ ID NO: 489718 - DNA, 59 bp, Artificial; identical to SEQ ID NO: 15865
  Synthetic oligonucleotide

SEQ ID NO: 489719 - DNA, 60 bp, Artificial; identical to SEQ ID NO: 8425
  Synthetic oligonucleotide

SEQ ID NO: 489720 - DNA, 60 bp, Artificial; identical to SEQ ID NO: 15420
  Synthetic oligonucleotide

SEQ ID NO: 489721 - DNA, 54 bp, Artificial; identical to SEQ ID NO: 17015
  Synthetic oligonucleotide

SEQ ID NO: 489722 - DNA, 55 bp, Artificial; identical to SEQ ID NO: 14296
  Synthetic oligonucleotide

SEQ ID NO: 489723 - DNA, 59 bp, Artificial; identical to SEQ ID NO: 7461
  Synthetic oligonucleotide

SEQ ID NO: 489724 - DNA, 60 bp, Artificial; identical to SEQ ID NO: 12342
  Synthetic oligonucleotide

SEQ ID NO: 489725 - DNA, 59 bp, Artificial; identical to SEQ ID NO: 19625
  Synthetic oligonucleotide

SEQ ID NO: 489726 - DNA, 60 bp, Artificial; identical to SEQ ID NO: 14489
  Synthetic oligonucleotide

SEQ ID NO: 489727 - DNA, 57 bp, Artificial; identical to SEQ ID NO: 14056
  Synthetic oligonucleotide

SEQ ID NO: 489728 - DNA, 59 bp, Artificial; identical to SEQ ID NO: 16569
  Synthetic oligonucleotide

SEQ ID NO: 489729 - DNA, 57 bp, Artificial; identical to SEQ ID NO: 8328
  Synthetic oligonucleotide

SEQ ID NO: 489730 - DNA, 58 bp, Artificial; identical to SEQ ID NO: 20405
  Synthetic oligonucleotide

SEQ ID NO: 489731 - DNA, 56 bp, Artificial; identical to SEQ ID NO: 16209
  Synthetic oligonucleotide

SEQ ID NO: 489732 - DNA, 60 bp, Artificial; identical to SEQ ID NO: 15717
  Synthetic oligonucleotide

SEQ ID NO: 489733 - DNA, 60 bp, Artificial; identical to SEQ ID NO: 8376
  Synthetic oligonucleotide

SEQ ID NO: 489734 - DNA, 54 bp, Artificial; identical to SEQ ID NO: 18406
  Synthetic oligonucleotide

SEQ ID NO: 489735 - DNA, 59 bp, Artificial; identical to SEQ ID NO: 18673
  Synthetic oligonucleotide

SEQ ID NO: 489736 - DNA, 60 bp, Artificial; identical to SEQ ID NO: 104674
  Synthetic oligonucleotide

SEQ ID NO: 489737 - DNA, 60 bp, Artificial; identical to SEQ ID NO: 127495
  Synthetic oligonucleotide

SEQ ID NO: 489738 - DNA, 53 bp, Artificial; identical to SEQ ID NO: 5796
  Synthetic oligonucleotide

SEQ ID NO: 489739 - DNA, 55 bp, Artificial; identical to SEQ ID NO: 11662
  Synthetic oligonucleotide

SEQ ID NO: 489740 - DNA, 57 bp, Artificial; identical to SEQ ID NO: 7795
  Synthetic oligonucleotide

SEQ ID NO: 489741 - DNA, 57 bp, Artificial; identical to SEQ ID NO: 18069
  Synthetic oligonucleotide

SEQ ID NO: 489742 - DNA, 55 bp, Artificial; identical to SEQ ID NO: 18370
  Synthetic oligonucleotide

SEQ ID NO: 489743 - DNA, 52 bp, Artificial; identical to SEQ ID NO: 10278
  Synthetic oligonucleotide

SEQ ID NO: 489744 - DNA, 60 bp, Artificial; identical to SEQ ID NO: 9053
  Synthetic oligonucleotide

SEQ ID NO: 489745 - DNA, 60 bp, Artificial; identical to SEQ ID NO: 73882
  Synthetic oligonucleotide

SEQ ID NO: 489746 - DNA, 51 bp, Artificial; identical to SEQ ID NO: 7120
  Synthetic oligonucleotide

SEQ ID NO: 489747 - DNA, 58 bp, Artificial; identical to SEQ ID NO: 20483
  Synthetic oligonucleotide

SEQ ID NO: 489748 - DNA, 60 bp, Artificial; identical to SEQ ID NO: 9035
  Synthetic oligonucleotide

SEQ ID NO: 489749 - DNA, 58 bp, Artificial; identical to SEQ ID NO: 121587
  Synthetic oligonucleotide

SEQ ID NO: 489750 - DNA, 60 bp, Artificial; identical to SEQ ID NO: 7144
  Synthetic oligonucleotide

SEQ ID NO: 489751 - DNA, 52 bp, Artificial; identical to SEQ ID NO: 17957
  Synthetic oligonucleotide

SEQ ID NO: 489752 - DNA, 55 bp, Artificial; identical to SEQ ID NO: 10930
  Synthetic oligonucleotide

SEQ ID NO: 489753 - DNA, 58 bp, Artificial; identical to SEQ ID NO: 19129
  Synthetic oligonucleotide

SEQ ID NO: 489754 - DNA, 60 bp, Artificial; identical to SEQ ID NO: 115123
  Synthetic oligonucleotide

SEQ ID NO: 489755 - DNA, 54 bp, Artificial; identical to SEQ ID NO: 20124
  Synthetic oligonucleotide

SEQ ID NO: 489756 - DNA, 56 bp, Artificial; identical to SEQ ID NO: 18124
  Synthetic oligonucleotide

SEQ ID NO: 489757 - DNA, 60 bp, Artificial; identical to SEQ ID NO: 11078
  Synthetic oligonucleotide

SEQ ID NO: 489758 - DNA, 60 bp, Artificial; identical to SEQ ID NO: 6483
  Synthetic oligonucleotide

SEQ ID NO: 489759 - DNA, 60 bp, Artificial; identical to SEQ ID NO: 8242
  Synthetic oligonucleotide

SEQ ID NO: 489760 - DNA, 55 bp, Artificial; identical to SEQ ID NO: 7100
  Synthetic oligonucleotide

SEQ ID NO: 489761 - DNA, 52 bp, Artificial; identical to SEQ ID NO: 17893
  Synthetic oligonucleotide

SEQ ID NO: 489762 - DNA, 57 bp, Artificial; identical to SEQ ID NO: 15891
  Synthetic oligonucleotide

SEQ ID NO: 489763 - DNA, 60 bp, Artificial; identical to SEQ ID NO: 8059
  Synthetic oligonucleotide

SEQ ID NO: 489764 - DNA, 59 bp, Artificial; identical to SEQ ID NO: 16340
  Synthetic oligonucleotide

SEQ ID NO: 489765 - DNA, 53 bp, Artificial; identical to SEQ ID NO: 19432
  Synthetic oligonucleotide

SEQ ID NO: 489766 - DNA, 55 bp, Artificial; identical to SEQ ID NO: 11799
  Synthetic oligonucleotide

SEQ ID NO: 489767 - DNA, 56 bp, Artificial; identical to SEQ ID NO: 16434
  Synthetic oligonucleotide

SEQ ID NO: 489768 - DNA, 55 bp, Artificial; identical to SEQ ID NO: 19511
  Synthetic oligonucleotide

SEQ ID NO: 489769 - DNA, 54 bp, Artificial; identical to SEQ ID NO: 16720
  Synthetic oligonucleotide

SEQ ID NO: 489770 - DNA, 55 bp, Artificial; identical to SEQ ID NO: 6110
  Synthetic oligonucleotide

SEQ ID NO: 489771 - DNA, 50 bp, Artificial; identical to SEQ ID NO: 18842
  Synthetic oligonucleotide

SEQ ID NO: 489772 - DNA, 55 bp, Artificial; identical to SEQ ID NO: 18751
  Synthetic oligonucleotide

SEQ ID NO: 489773 - DNA, 51 bp, Artificial; identical to SEQ ID NO: 7923
  Synthetic oligonucleotide

SEQ ID NO: 489774 - DNA, 54 bp, Artificial; identical to SEQ ID NO: 12873
  Synthetic oligonucleotide

SEQ ID NO: 489775 - DNA, 55 bp, Artificial; identical to SEQ ID NO: 14449
  Synthetic oligonucleotide

SEQ ID NO: 489776 - DNA, 57 bp, Artificial; identical to SEQ ID NO: 17208
  Synthetic oligonucleotide

SEQ ID NO: 489777 - DNA, 59 bp, Artificial; identical to SEQ ID NO: 8039
  Synthetic oligonucleotide

SEQ ID NO: 489778 - DNA, 55 bp, Artificial; identical to SEQ ID NO: 13069
  Synthetic oligonucleotide

SEQ ID NO: 489779 - DNA, 53 bp, Artificial; identical to SEQ ID NO: 16923
  Synthetic oligonucleotide

SEQ ID NO: 489780 - DNA, 57 bp, Artificial; identical to SEQ ID NO: 10912
  Synthetic oligonucleotide

SEQ ID NO: 489781 - DNA, 60 bp, Artificial; identical to SEQ ID NO: 9344
  Synthetic oligonucleotide

SEQ ID NO: 489782 - DNA, 56 bp, Artificial; identical to SEQ ID NO: 17727
  Synthetic oligonucleotide

SEQ ID NO: 489783 - DNA, 55 bp, Artificial; identical to SEQ ID NO: 13517
  Synthetic oligonucleotide

SEQ ID NO: 489784 - DNA, 60 bp, Artificial; identical to SEQ ID NO: 10623
  Synthetic oligonucleotide

SEQ ID NO: 489785 - DNA, 58 bp, Artificial; identical to SEQ ID NO: 16177
  Synthetic oligonucleotide

SEQ ID NO: 489786 - DNA, 60 bp, Artificial; identical to SEQ ID NO: 48076
  Synthetic oligonucleotide

SEQ ID NO: 489787 - DNA, 59 bp, Artificial; identical to SEQ ID NO: 17979
  Synthetic oligonucleotide

SEQ ID NO: 489788 - DNA, 55 bp, Artificial; identical to SEQ ID NO: 18104
  Synthetic oligonucleotide

SEQ ID NO: 489789 - DNA, 56 bp, Artificial; identical to SEQ ID NO: 10234
  Synthetic oligonucleotide

SEQ ID NO: 489790 - DNA, 60 bp, Artificial; identical to SEQ ID NO: 13282
  Synthetic oligonucleotide

SEQ ID NO: 489791 - DNA, 60 bp, Artificial; identical to SEQ ID NO: 9441
  Synthetic oligonucleotide

SEQ ID NO: 489792 - DNA, 60 bp, Artificial; identical to SEQ ID NO: 11998
  Synthetic oligonucleotide

SEQ ID NO: 489793 - DNA, 57 bp, Artificial; identical to SEQ ID NO: 19132
  Synthetic oligonucleotide

SEQ ID NO: 489794 - DNA, 49 bp, Artificial; identical to SEQ ID NO: 18128
  Synthetic oligonucleotide

SEQ ID NO: 489795 - DNA, 55 bp, Artificial; identical to SEQ ID NO: 8117
  Synthetic oligonucleotide

SEQ ID NO: 489796 - DNA, 60 bp, Artificial; identical to SEQ ID NO: 7710
  Synthetic oligonucleotide

SEQ ID NO: 489797 - DNA, 50 bp, Artificial; identical to SEQ ID NO: 9089
  Synthetic oligonucleotide

SEQ ID NO: 489798 - DNA, 55 bp, Artificial; identical to SEQ ID NO: 16123
  Synthetic oligonucleotide

SEQ ID NO: 489799 - DNA, 52 bp, Artificial; identical to SEQ ID NO: 19360
  Synthetic oligonucleotide

SEQ ID NO: 489800 - DNA, 58 bp, Artificial; identical to SEQ ID NO: 20444
  Synthetic oligonucleotide

SEQ ID NO: 489801 - DNA, 56 bp, Artificial; identical to SEQ ID NO: 6951
  Synthetic oligonucleotide

SEQ ID NO: 489802 - DNA, 56 bp, Artificial; identical to SEQ ID NO: 20442
  Synthetic oligonucleotide

SEQ ID NO: 489803 - DNA, 53 bp, Artificial; identical to SEQ ID NO: 19003
  Synthetic oligonucleotide

SEQ ID NO: 489804 - DNA, 55 bp, Artificial; identical to SEQ ID NO: 8993
  Synthetic oligonucleotide

SEQ ID NO: 489805 - DNA, 60 bp, Artificial; identical to SEQ ID NO: 113327
  Synthetic oligonucleotide

SEQ ID NO: 489806 - DNA, 56 bp, Artificial; identical to SEQ ID NO: 17467
  Synthetic oligonucleotide

SEQ ID NO: 489807 - DNA, 58 bp, Artificial; identical to SEQ ID NO: 20299
  Synthetic oligonucleotide

SEQ ID NO: 489808 - DNA, 55 bp, Artificial; identical to SEQ ID NO: 10504
  Synthetic oligonucleotide

SEQ ID NO: 489809 - DNA, 60 bp, Artificial; identical to SEQ ID NO: 123860
  Synthetic oligonucleotide

SEQ ID NO: 489810 - DNA, 57 bp, Artificial; identical to SEQ ID NO: 20364
  Synthetic oligonucleotide

SEQ ID NO: 489811 - DNA, 55 bp, Artificial; identical to SEQ ID NO: 17580
  Synthetic oligonucleotide

SEQ ID NO: 489812 - DNA, 60 bp, Artificial; identical to SEQ ID NO: 8362
  Synthetic oligonucleotide

SEQ ID NO: 489813 - DNA, 60 bp, Artificial; identical to SEQ ID NO: 8342
  Synthetic oligonucleotide

SEQ ID NO: 489814 - DNA, 55 bp, Artificial; identical to SEQ ID NO: 13709
  Synthetic oligonucleotide

SEQ ID NO: 489815 - DNA, 55 bp, Artificial; identical to SEQ ID NO: 14603
  Synthetic oligonucleotide

SEQ ID NO: 489816 - DNA, 60 bp, Artificial; identical to SEQ ID NO: 8409
  Synthetic oligonucleotide

SEQ ID NO: 489817 - DNA, 55 bp, Artificial; identical to SEQ ID NO: 11629
  Synthetic oligonucleotide

SEQ ID NO: 489818 - DNA, 59 bp, Artificial; identical to SEQ ID NO: 19947
  Synthetic oligonucleotide

SEQ ID NO: 489819 - DNA, 51 bp, Artificial; identical to SEQ ID NO: 13386
  Synthetic oligonucleotide

SEQ ID NO: 489820 - DNA, 58 bp, Artificial; identical to SEQ ID NO: 17289
  Synthetic oligonucleotide

SEQ ID NO: 489821 - DNA, 58 bp, Artificial; identical to SEQ ID NO: 19863
  Synthetic oligonucleotide

SEQ ID NO: 489822 - DNA, 57 bp, Artificial; identical to SEQ ID NO: 16991
  Synthetic oligonucleotide

SEQ ID NO: 489823 - DNA, 60 bp, Artificial; identical to SEQ ID NO: 10971
  Synthetic oligonucleotide

SEQ ID NO: 489824 - DNA, 60 bp, Artificial; identical to SEQ ID NO: 86512
  Synthetic oligonucleotide

SEQ ID NO: 489825 - DNA, 60 bp, Artificial; identical to SEQ ID NO: 14862
  Synthetic oligonucleotide

SEQ ID NO: 489826 - DNA, 57 bp, Artificial; identical to SEQ ID NO: 18906
  Synthetic oligonucleotide

SEQ ID NO: 489827 - DNA, 60 bp, Artificial; identical to SEQ ID NO: 115096
  Synthetic oligonucleotide

SEQ ID NO: 489828 - DNA, 54 bp, Artificial; identical to SEQ ID NO: 14214
  Synthetic oligonucleotide

SEQ ID NO: 489829 - DNA, 60 bp, Artificial; identical to SEQ ID NO: 117268
  Synthetic oligonucleotide

SEQ ID NO: 489830 - DNA, 60 bp, Artificial; identical to SEQ ID NO: 110347
  Synthetic oligonucleotide

SEQ ID NO: 489831 - DNA, 55 bp, Artificial; identical to SEQ ID NO: 9207
  Synthetic oligonucleotide

SEQ ID NO: 489832 - DNA, 60 bp, Artificial; identical to SEQ ID NO: 10106
  Synthetic oligonucleotide

SEQ ID NO: 489833 - DNA, 59 bp, Artificial; identical to SEQ ID NO: 19704
  Synthetic oligonucleotide

SEQ ID NO: 489834 - DNA, 60 bp, Artificial; identical to SEQ ID NO: 7191
  Synthetic oligonucleotide

SEQ ID NO: 489835 - DNA, 55 bp, Artificial; identical to SEQ ID NO: 9722
  Synthetic oligonucleotide

SEQ ID NO: 489836 - DNA, 55 bp, Artificial; identical to SEQ ID NO: 10152
  Synthetic oligonucleotide

SEQ ID NO: 489837 - DNA, 55 bp, Artificial; identical to SEQ ID NO: 13228
  Synthetic oligonucleotide

SEQ ID NO: 489838 - DNA, 60 bp, Artificial; identical to SEQ ID NO: 64100
  Synthetic oligonucleotide

SEQ ID NO: 489839 - DNA, 59 bp, Artificial; identical to SEQ ID NO: 17150
  Synthetic oligonucleotide

SEQ ID NO: 489840 - DNA, 58 bp, Artificial; identical to SEQ ID NO: 12052
  Synthetic oligonucleotide

SEQ ID NO: 489841 - DNA, 55 bp, Artificial; identical to SEQ ID NO: 13785
  Synthetic oligonucleotide

SEQ ID NO: 489842 - DNA, 60 bp, Artificial; identical to SEQ ID NO: 8818
  Synthetic oligonucleotide

SEQ ID NO: 489843 - DNA, 55 bp, Artificial; identical to SEQ ID NO: 10929
  Synthetic oligonucleotide

SEQ ID NO: 489844 - DNA, 56 bp, Artificial; identical to SEQ ID NO: 6956
  Synthetic oligonucleotide

SEQ ID NO: 489845 - DNA, 55 bp, Artificial; identical to SEQ ID NO: 20469
  Synthetic oligonucleotide

SEQ ID NO: 489846 - DNA, 60 bp, Artificial; identical to SEQ ID NO: 15410
  Synthetic oligonucleotide

SEQ ID NO: 489847 - DNA, 58 bp, Artificial; identical to SEQ ID NO: 20482
  Synthetic oligonucleotide

SEQ ID NO: 489848 - DNA, 60 bp, Artificial; identical to SEQ ID NO: 14586
  Synthetic oligonucleotide

SEQ ID NO: 489849 - DNA, 58 bp, Artificial; identical to SEQ ID NO: 9516
  Synthetic oligonucleotide

SEQ ID NO: 489850 - DNA, 56 bp, Artificial; identical to SEQ ID NO: 18059
  Synthetic oligonucleotide

SEQ ID NO: 489851 - DNA, 54 bp, Artificial; identical to SEQ ID NO: 19943
  Synthetic oligonucleotide

SEQ ID NO: 489852 - DNA, 60 bp, Artificial; identical to SEQ ID NO: 6790
  Synthetic oligonucleotide

SEQ ID NO: 489853 - DNA, 56 bp, Artificial; identical to SEQ ID NO: 16102
  Synthetic oligonucleotide

SEQ ID NO: 489854 - DNA, 60 bp, Artificial; identical to SEQ ID NO: 90553
  Synthetic oligonucleotide

SEQ ID NO: 489855 - DNA, 52 bp, Artificial; identical to SEQ ID NO: 18696
  Synthetic oligonucleotide

SEQ ID NO: 489856 - DNA, 60 bp, Artificial; identical to SEQ ID NO: 8372
  Synthetic oligonucleotide

SEQ ID NO: 489857 - DNA, 58 bp, Artificial; identical to SEQ ID NO: 18415
  Synthetic oligonucleotide

SEQ ID NO: 489858 - DNA, 55 bp, Artificial; identical to SEQ ID NO: 15566
  Synthetic oligonucleotide

SEQ ID NO: 489859 - DNA, 55 bp, Artificial; identical to SEQ ID NO: 10755
  Synthetic oligonucleotide

SEQ ID NO: 489860 - DNA, 60 bp, Artificial; identical to SEQ ID NO: 6045
  Synthetic oligonucleotide

SEQ ID NO: 489861 - DNA, 60 bp, Artificial; identical to SEQ ID NO: 13532
  Synthetic oligonucleotide

SEQ ID NO: 489862 - DNA, 55 bp, Artificial; identical to SEQ ID NO: 11690
  Synthetic oligonucleotide

SEQ ID NO: 489863 - DNA, 54 bp, Artificial; identical to SEQ ID NO: 16307
  Synthetic oligonucleotide

SEQ ID NO: 489864 - DNA, 59 bp, Artificial; identical to SEQ ID NO: 18704
  Synthetic oligonucleotide

SEQ ID NO: 489865 - DNA, 60 bp, Artificial; identical to SEQ ID NO: 12032
  Synthetic oligonucleotide

SEQ ID NO: 489866 - DNA, 56 bp, Artificial; identical to SEQ ID NO: 10355
  Synthetic oligonucleotide

SEQ ID NO: 489867 - DNA, 56 bp, Artificial; identical to SEQ ID NO: 10277
  Synthetic oligonucleotide

SEQ ID NO: 489868 - DNA, 57 bp, Artificial; identical to SEQ ID NO: 17018
  Synthetic oligonucleotide

SEQ ID NO: 489869 - DNA, 53 bp, Artificial; identical to SEQ ID NO: 10846
  Synthetic oligonucleotide

SEQ ID NO: 489870 - DNA, 59 bp, Artificial; identical to SEQ ID NO: 16112
  Synthetic oligonucleotide

SEQ ID NO: 489871 - DNA, 55 bp, Artificial; identical to SEQ ID NO: 8708
  Synthetic oligonucleotide

SEQ ID NO: 489872 - DNA, 60 bp, Artificial; identical to SEQ ID NO: 31431
  Synthetic oligonucleotide

SEQ ID NO: 489873 - DNA, 60 bp, Artificial; identical to SEQ ID NO: 11875
  Synthetic oligonucleotide

SEQ ID NO: 489874 - DNA, 55 bp, Artificial; identical to SEQ ID NO: 16383
  Synthetic oligonucleotide

SEQ ID NO: 489875 - DNA, 57 bp, Artificial; identical to SEQ ID NO: 20588
  Synthetic oligonucleotide

SEQ ID NO: 489876 - DNA, 55 bp, Artificial; identical to SEQ ID NO: 10420
  Synthetic oligonucleotide

SEQ ID NO: 489877 - DNA, 57 bp, Artificial; identical to SEQ ID NO: 246
  Synthetic oligonucleotide

SEQ ID NO: 489878 - DNA, 55 bp, Artificial; identical to SEQ ID NO: 17776
  Synthetic oligonucleotide

SEQ ID NO: 489879 - DNA, 54 bp, Artificial; identical to SEQ ID NO: 20252
  Synthetic oligonucleotide

SEQ ID NO: 489880 - DNA, 56 bp, Artificial; identical to SEQ ID NO: 6215
  Synthetic oligonucleotide

SEQ ID NO: 489881 - DNA, 59 bp, Artificial; identical to SEQ ID NO: 16261
  Synthetic oligonucleotide

SEQ ID NO: 489882 - DNA, 59 bp, Artificial; identical to SEQ ID NO: 7786
  Synthetic oligonucleotide

SEQ ID NO: 489883 - DNA, 52 bp, Artificial; identical to SEQ ID NO: 16557
  Synthetic oligonucleotide

SEQ ID NO: 489884 - DNA, 59 bp, Artificial; identical to SEQ ID NO: 11319
  Synthetic oligonucleotide

SEQ ID NO: 489885 - DNA, 60 bp, Artificial; identical to SEQ ID NO: 10700
  Synthetic oligonucleotide

SEQ ID NO: 489886 - DNA, 56 bp, Artificial; identical to SEQ ID NO: 7171
  Synthetic oligonucleotide

SEQ ID NO: 489887 - DNA, 59 bp, Artificial; identical to SEQ ID NO: 19488
  Synthetic oligonucleotide

SEQ ID NO: 489888 - DNA, 50 bp, Artificial; identical to SEQ ID NO: 9981
  Synthetic oligonucleotide

SEQ ID NO: 489889 - DNA, 60 bp, Artificial; identical to SEQ ID NO: 14154
  Synthetic oligonucleotide

SEQ ID NO: 489890 - DNA, 60 bp, Artificial; identical to SEQ ID NO: 6649
  Synthetic oligonucleotide

SEQ ID NO: 489891 - DNA, 59 bp, Artificial; identical to SEQ ID NO: 7450
  Synthetic oligonucleotide

SEQ ID NO: 489892 - DNA, 57 bp, Artificial; identical to SEQ ID NO: 17115
  Synthetic oligonucleotide

SEQ ID NO: 489893 - DNA, 58 bp, Artificial; identical to SEQ ID NO: 16230
  Synthetic oligonucleotide

SEQ ID NO: 489894 - DNA, 55 bp, Artificial; identical to SEQ ID NO: 11484
  Synthetic oligonucleotide

SEQ ID NO: 489895 - DNA, 58 bp, Artificial; identical to SEQ ID NO: 7201
  Synthetic oligonucleotide

SEQ ID NO: 489896 - DNA, 60 bp, Artificial; identical to SEQ ID NO: 13221
  Synthetic oligonucleotide

SEQ ID NO: 489897 - DNA, 55 bp, Artificial; identical to SEQ ID NO: 6855
  Synthetic oligonucleotide

SEQ ID NO: 489898 - DNA, 53 bp, Artificial; identical to SEQ ID NO: 11861
  Synthetic oligonucleotide

SEQ ID NO: 489899 - DNA, 51 bp, Artificial; identical to SEQ ID NO: 7651
  Synthetic oligonucleotide

SEQ ID NO: 489900 - DNA, 60 bp, Artificial; identical to SEQ ID NO: 7869
  Synthetic oligonucleotide

SEQ ID NO: 489901 - DNA, 51 bp, Artificial; identical to SEQ ID NO: 8903
  Synthetic oligonucleotide

SEQ ID NO: 489902 - DNA, 60 bp, Artificial; identical to SEQ ID NO: 30579
  Synthetic oligonucleotide

SEQ ID NO: 489903 - DNA, 57 bp, Artificial; identical to SEQ ID NO: 19959
  Synthetic oligonucleotide

SEQ ID NO: 489904 - DNA, 60 bp, Artificial; identical to SEQ ID NO: 12313
  Synthetic oligonucleotide

SEQ ID NO: 489905 - DNA, 58 bp, Artificial; identical to SEQ ID NO: 16017
  Synthetic oligonucleotide

SEQ ID NO: 489906 - DNA, 56 bp, Artificial; identical to SEQ ID NO: 18182
  Synthetic oligonucleotide

SEQ ID NO: 489907 - DNA, 60 bp, Artificial; identical to SEQ ID NO: 14274
  Synthetic oligonucleotide

SEQ ID NO: 489908 - DNA, 60 bp, Artificial; identical to SEQ ID NO: 14100
  Synthetic oligonucleotide

SEQ ID NO: 489909 - DNA, 56 bp, Artificial; identical to SEQ ID NO: 18688
  Synthetic oligonucleotide

SEQ ID NO: 489910 - DNA, 50 bp, Artificial; identical to SEQ ID NO: 223
  Synthetic oligonucleotide

SEQ ID NO: 489911 - DNA, 60 bp, Artificial; identical to SEQ ID NO: 9490
  Synthetic oligonucleotide

SEQ ID NO: 489912 - DNA, 55 bp, Artificial; identical to SEQ ID NO: 10552
  Synthetic oligonucleotide

SEQ ID NO: 489913 - DNA, 60 bp, Artificial; identical to SEQ ID NO: 6392
  Synthetic oligonucleotide

SEQ ID NO: 489914 - DNA, 55 bp, Artificial; identical to SEQ ID NO: 14159
  Synthetic oligonucleotide

SEQ ID NO: 489915 - DNA, 60 bp, Artificial; identical to SEQ ID NO: 7915
  Synthetic oligonucleotide

SEQ ID NO: 489916 - DNA, 55 bp, Artificial; identical to SEQ ID NO: 9420
  Synthetic oligonucleotide

SEQ ID NO: 489917 - DNA, 60 bp, Artificial; identical to SEQ ID NO: 64345
  Synthetic oligonucleotide

SEQ ID NO: 489918 - DNA, 55 bp, Artificial; identical to SEQ ID NO: 19530
  Synthetic oligonucleotide

SEQ ID NO: 489919 - DNA, 60 bp, Artificial; identical to SEQ ID NO: 106779
  Synthetic oligonucleotide

SEQ ID NO: 489920 - DNA, 59 bp, Artificial; identical to SEQ ID NO: 19905
  Synthetic oligonucleotide

SEQ ID NO: 489921 - DNA, 60 bp, Artificial; identical to SEQ ID NO: 14795
  Synthetic oligonucleotide

SEQ ID NO: 489922 - DNA, 56 bp, Artificial; identical to SEQ ID NO: 10415
  Synthetic oligonucleotide

SEQ ID NO: 489923 - DNA, 60 bp, Artificial; identical to SEQ ID NO: 7360
  Synthetic oligonucleotide

SEQ ID NO: 489924 - DNA, 60 bp, Artificial; identical to SEQ ID NO: 15780
  Synthetic oligonucleotide

SEQ ID NO: 489925 - DNA, 60 bp, Artificial; identical to SEQ ID NO: 6418
  Synthetic oligonucleotide

SEQ ID NO: 489926 - DNA, 54 bp, Artificial; identical to SEQ ID NO: 16081
  Synthetic oligonucleotide

SEQ ID NO: 489927 - DNA, 60 bp, Artificial; identical to SEQ ID NO: 11917
  Synthetic oligonucleotide

SEQ ID NO: 489928 - DNA, 55 bp, Artificial; identical to SEQ ID NO: 16197
  Synthetic oligonucleotide

SEQ ID NO: 489929 - DNA, 54 bp, Artificial; identical to SEQ ID NO: 11949
  Synthetic oligonucleotide

SEQ ID NO: 489930 - DNA, 60 bp, Artificial; identical to SEQ ID NO: 10840
  Synthetic oligonucleotide

SEQ ID NO: 489931 - DNA, 60 bp, Artificial; identical to SEQ ID NO: 114327
  Synthetic oligonucleotide

SEQ ID NO: 489932 - DNA, 52 bp, Artificial; identical to SEQ ID NO: 6072
  Synthetic oligonucleotide

SEQ ID NO: 489933 - DNA, 57 bp, Artificial; identical to SEQ ID NO: 13935
  Synthetic oligonucleotide

SEQ ID NO: 489934 - DNA, 58 bp, Artificial; identical to SEQ ID NO: 19616
  Synthetic oligonucleotide

SEQ ID NO: 489935 - DNA, 60 bp, Artificial; identical to SEQ ID NO: 13019
  Synthetic oligonucleotide

SEQ ID NO: 489936 - DNA, 56 bp, Artificial; identical to SEQ ID NO: 19153
  Synthetic oligonucleotide

SEQ ID NO: 489937 - DNA, 55 bp, Artificial; identical to SEQ ID NO: 7785
  Synthetic oligonucleotide

SEQ ID NO: 489938 - DNA, 55 bp, Artificial; identical to SEQ ID NO: 16564
  Synthetic oligonucleotide

SEQ ID NO: 489939 - DNA, 59 bp, Artificial; identical to SEQ ID NO: 16910
  Synthetic oligonucleotide

SEQ ID NO: 489940 - DNA, 55 bp, Artificial; identical to SEQ ID NO: 11299
  Synthetic oligonucleotide

SEQ ID NO: 489941 - DNA, 55 bp, Artificial; identical to SEQ ID NO: 13953
  Synthetic oligonucleotide

SEQ ID NO: 489942 - DNA, 59 bp, Artificial; identical to SEQ ID NO: 19323
  Synthetic oligonucleotide

SEQ ID NO: 489943 - DNA, 55 bp, Artificial; identical to SEQ ID NO: 18703
  Synthetic oligonucleotide

SEQ ID NO: 489944 - DNA, 60 bp, Artificial; identical to SEQ ID NO: 10948
  Synthetic oligonucleotide

SEQ ID NO: 489945 - DNA, 56 bp, Artificial; identical to SEQ ID NO: 17805
  Synthetic oligonucleotide

SEQ ID NO: 489946 - DNA, 60 bp, Artificial; identical to SEQ ID NO: 7770
  Synthetic oligonucleotide

SEQ ID NO: 489947 - DNA, 57 bp, Artificial; identical to SEQ ID NO: 16815
  Synthetic oligonucleotide

SEQ ID NO: 489948 - DNA, 55 bp, Artificial; identical to SEQ ID NO: 13075
  Synthetic oligonucleotide

SEQ ID NO: 489949 - DNA, 60 bp, Artificial; identical to SEQ ID NO: 7696
  Synthetic oligonucleotide

SEQ ID NO: 489950 - DNA, 55 bp, Artificial; identical to SEQ ID NO: 16643
  Synthetic oligonucleotide

SEQ ID NO: 489951 - DNA, 53 bp, Artificial; identical to SEQ ID NO: 48126
  Synthetic oligonucleotide

SEQ ID NO: 489952 - DNA, 60 bp, Artificial; identical to SEQ ID NO: 11200
  Synthetic oligonucleotide

SEQ ID NO: 489953 - DNA, 55 bp, Artificial; identical to SEQ ID NO: 18530
  Synthetic oligonucleotide

SEQ ID NO: 489954 - DNA, 60 bp, Artificial; identical to SEQ ID NO: 12429
  Synthetic oligonucleotide

SEQ ID NO: 489955 - DNA, 60 bp, Artificial; identical to SEQ ID NO: 10452
  Synthetic oligonucleotide

SEQ ID NO: 489956 - DNA, 55 bp, Artificial; identical to SEQ ID NO: 19508
  Synthetic oligonucleotide

SEQ ID NO: 489957 - DNA, 59 bp, Artificial; identical to SEQ ID NO: 20189
  Synthetic oligonucleotide

SEQ ID NO: 489958 - DNA, 60 bp, Artificial; identical to SEQ ID NO: 14176
  Synthetic oligonucleotide

SEQ ID NO: 489959 - DNA, 54 bp, Artificial; identical to SEQ ID NO: 18153
  Synthetic oligonucleotide

SEQ ID NO: 489960 - DNA, 60 bp, Artificial; identical to SEQ ID NO: 13635
  Synthetic oligonucleotide

SEQ ID NO: 489961 - DNA, 55 bp, Artificial; identical to SEQ ID NO: 11568
  Synthetic oligonucleotide

SEQ ID NO: 489962 - DNA, 59 bp, Artificial; identical to SEQ ID NO: 18209
  Synthetic oligonucleotide

SEQ ID NO: 489963 - DNA, 53 bp, Artificial; identical to SEQ ID NO: 18783
  Synthetic oligonucleotide

SEQ ID NO: 489964 - DNA, 60 bp, Artificial; identical to SEQ ID NO: 8341
  Synthetic oligonucleotide

SEQ ID NO: 489965 - DNA, 60 bp, Artificial; identical to SEQ ID NO: 9492
  Synthetic oligonucleotide

SEQ ID NO: 489966 - DNA, 60 bp, Artificial; identical to SEQ ID NO: 11178
  Synthetic oligonucleotide

SEQ ID NO: 489967 - DNA, 59 bp, Artificial; identical to SEQ ID NO: 19044
  Synthetic oligonucleotide

SEQ ID NO: 489968 - DNA, 60 bp, Artificial; identical to SEQ ID NO: 15718
  Synthetic oligonucleotide

SEQ ID NO: 489969 - DNA, 59 bp, Artificial; identical to SEQ ID NO: 18177
  Synthetic oligonucleotide

SEQ ID NO: 489970 - DNA, 60 bp, Artificial; identical to SEQ ID NO: 13728
  Synthetic oligonucleotide

SEQ ID NO: 489971 - DNA, 60 bp, Artificial; identical to SEQ ID NO: 113671
  Synthetic oligonucleotide

SEQ ID NO: 489972 - DNA, 60 bp, Artificial; identical to SEQ ID NO: 12593
  Synthetic oligonucleotide

SEQ ID NO: 489973 - DNA, 60 bp, Artificial; identical to SEQ ID NO: 10182
  Synthetic oligonucleotide

SEQ ID NO: 489974 - DNA, 60 bp, Artificial; identical to SEQ ID NO: 10705
  Synthetic oligonucleotide

SEQ ID NO: 489975 - DNA, 60 bp, Artificial; identical to SEQ ID NO: 7846
  Synthetic oligonucleotide

SEQ ID NO: 489976 - DNA, 53 bp, Artificial; identical to SEQ ID NO: 11703
  Synthetic oligonucleotide

SEQ ID NO: 489977 - DNA, 56 bp, Artificial; identical to SEQ ID NO: 18159
  Synthetic oligonucleotide

SEQ ID NO: 489978 - DNA, 60 bp, Artificial; identical to SEQ ID NO: 14243
  Synthetic oligonucleotide

SEQ ID NO: 489979 - DNA, 55 bp, Artificial; identical to SEQ ID NO: 6779
  Synthetic oligonucleotide

SEQ ID NO: 489980 - DNA, 59 bp, Artificial; identical to SEQ ID NO: 16214
  Synthetic oligonucleotide

SEQ ID NO: 489981 - DNA, 55 bp, Artificial; identical to SEQ ID NO: 19734
  Synthetic oligonucleotide

SEQ ID NO: 489982 - DNA, 59 bp, Artificial; identical to SEQ ID NO: 19017
  Synthetic oligonucleotide

SEQ ID NO: 489983 - DNA, 58 bp, Artificial; identical to SEQ ID NO: 19562
  Synthetic oligonucleotide

SEQ ID NO: 489984 - DNA, 59 bp, Artificial; identical to SEQ ID NO: 17562
  Synthetic oligonucleotide

SEQ ID NO: 489985 - DNA, 60 bp, Artificial; identical to SEQ ID NO: 6170
  Synthetic oligonucleotide

SEQ ID NO: 489986 - DNA, 60 bp, Artificial; identical to SEQ ID NO: 14384
  Synthetic oligonucleotide

SEQ ID NO: 489987 - DNA, 60 bp, Artificial; identical to SEQ ID NO: 14794
  Synthetic oligonucleotide

SEQ ID NO: 489988 - DNA, 57 bp, Artificial; identical to SEQ ID NO: 19091
  Synthetic oligonucleotide

SEQ ID NO: 489989 - DNA, 52 bp, Artificial; identical to SEQ ID NO: 19364
  Synthetic oligonucleotide

SEQ ID NO: 489990 - DNA, 56 bp, Artificial; identical to SEQ ID NO: 19083
  Synthetic oligonucleotide

SEQ ID NO: 489991 - DNA, 53 bp, Artificial; identical to SEQ ID NO: 7952
  Synthetic oligonucleotide

SEQ ID NO: 489992 - DNA, 60 bp, Artificial; identical to SEQ ID NO: 10859
  Synthetic oligonucleotide

SEQ ID NO: 489993 - DNA, 60 bp, Artificial; identical to SEQ ID NO: 7096
  Synthetic oligonucleotide

SEQ ID NO: 489994 - DNA, 53 bp, Artificial; identical to SEQ ID NO: 13425
  Synthetic oligonucleotide

SEQ ID NO: 489995 - DNA, 60 bp, Artificial; identical to SEQ ID NO: 12760
  Synthetic oligonucleotide

SEQ ID NO: 489996 - DNA, 57 bp, Artificial; identical to SEQ ID NO: 16678
  Synthetic oligonucleotide

SEQ ID NO: 489997 - DNA, 60 bp, Artificial; identical to SEQ ID NO: 12231
  Synthetic oligonucleotide

SEQ ID NO: 489998 - DNA, 60 bp, Artificial; identical to SEQ ID NO: 6406
  Synthetic oligonucleotide

SEQ ID NO: 489999 - DNA, 60 bp, Artificial; identical to SEQ ID NO: 12850
  Synthetic oligonucleotide

SEQ ID NO: 490000 - DNA, 57 bp, Artificial; identical to SEQ ID NO: 8111
  Synthetic oligonucleotide

SEQ ID NO: 490001 - DNA, 60 bp, Artificial; identical to SEQ ID NO: 7912
  Synthetic oligonucleotide

SEQ ID NO: 490002 - DNA, 60 bp, Artificial; identical to SEQ ID NO: 73925
  Synthetic oligonucleotide

SEQ ID NO: 490003 - DNA, 54 bp, Artificial; identical to SEQ ID NO: 20107
  Synthetic oligonucleotide

SEQ ID NO: 490004 - DNA, 60 bp, Artificial; identical to SEQ ID NO: 15391
  Synthetic oligonucleotide

SEQ ID NO: 490005 - DNA, 55 bp, Artificial; identical to SEQ ID NO: 16009
  Synthetic oligonucleotide

SEQ ID NO: 490006 - DNA, 60 bp, Artificial; identical to SEQ ID NO: 7964
  Synthetic oligonucleotide

SEQ ID NO: 490007 - DNA, 57 bp, Artificial; identical to SEQ ID NO: 19533
  Synthetic oligonucleotide

SEQ ID NO: 490008 - DNA, 57 bp, Artificial; identical to SEQ ID NO: 19146
  Synthetic oligonucleotide

SEQ ID NO: 490009 - DNA, 60 bp, Artificial; identical to SEQ ID NO: 7676
  Synthetic oligonucleotide

SEQ ID NO: 490010 - DNA, 60 bp, Artificial; identical to SEQ ID NO: 13080
  Synthetic oligonucleotide

SEQ ID NO: 490011 - DNA, 55 bp, Artificial; identical to SEQ ID NO: 12782
  Synthetic oligonucleotide

SEQ ID NO: 490012 - DNA, 60 bp, Artificial; identical to SEQ ID NO: 13041
  Synthetic oligonucleotide

SEQ ID NO: 490013 - DNA, 60 bp, Artificial; identical to SEQ ID NO: 7778
  Synthetic oligonucleotide

SEQ ID NO: 490014 - DNA, 56 bp, Artificial; identical to SEQ ID NO: 16566
  Synthetic oligonucleotide

SEQ ID NO: 490015 - DNA, 54 bp, Artificial; identical to SEQ ID NO: 10970
  Synthetic oligonucleotide

SEQ ID NO: 490016 - DNA, 54 bp, Artificial; identical to SEQ ID NO: 8311
  Synthetic oligonucleotide

SEQ ID NO: 490017 - DNA, 59 bp, Artificial; identical to SEQ ID NO: 16185
  Synthetic oligonucleotide

SEQ ID NO: 490018 - DNA, 55 bp, Artificial; identical to SEQ ID NO: 14114
  Synthetic oligonucleotide

SEQ ID NO: 490019 - DNA, 60 bp, Artificial; identical to SEQ ID NO: 14670
  Synthetic oligonucleotide

SEQ ID NO: 490020 - DNA, 58 bp, Artificial; identical to SEQ ID NO: 16729
  Synthetic oligonucleotide

SEQ ID NO: 490021 - DNA, 51 bp, Artificial; identical to SEQ ID NO: 17973
  Synthetic oligonucleotide

SEQ ID NO: 490022 - DNA, 60 bp, Artificial; identical to SEQ ID NO: 6128
  Synthetic oligonucleotide

SEQ ID NO: 490023 - DNA, 60 bp, Artificial; identical to SEQ ID NO: 13438
  Synthetic oligonucleotide

SEQ ID NO: 490024 - DNA, 59 bp, Artificial; identical to SEQ ID NO: 17184
  Synthetic oligonucleotide

SEQ ID NO: 490025 - DNA, 58 bp, Artificial; identical to SEQ ID NO: 17371
  Synthetic oligonucleotide

SEQ ID NO: 490026 - DNA, 52 bp, Artificial; identical to SEQ ID NO: 12173
  Synthetic oligonucleotide

SEQ ID NO: 490027 - DNA, 60 bp, Artificial; identical to SEQ ID NO: 9111
  Synthetic oligonucleotide

SEQ ID NO: 490028 - DNA, 59 bp, Artificial; identical to SEQ ID NO: 9977
  Synthetic oligonucleotide

SEQ ID NO: 490029 - DNA, 60 bp, Artificial; identical to SEQ ID NO: 7599
  Synthetic oligonucleotide

SEQ ID NO: 490030 - DNA, 54 bp, Artificial; identical to SEQ ID NO: 14513
  Synthetic oligonucleotide

SEQ ID NO: 490031 - DNA, 54 bp, Artificial; identical to SEQ ID NO: 7475
  Synthetic oligonucleotide

SEQ ID NO: 490032 - DNA, 55 bp, Artificial; identical to SEQ ID NO: 12577
  Synthetic oligonucleotide

SEQ ID NO: 490033 - DNA, 55 bp, Artificial; identical to SEQ ID NO: 12283
  Synthetic oligonucleotide

SEQ ID NO: 490034 - DNA, 60 bp, Artificial; identical to SEQ ID NO: 9144
  Synthetic oligonucleotide

SEQ ID NO: 490035 - DNA, 55 bp, Artificial; identical to SEQ ID NO: 14025
  Synthetic oligonucleotide

SEQ ID NO: 490036 - DNA, 55 bp, Artificial; identical to SEQ ID NO: 16861
  Synthetic oligonucleotide

SEQ ID NO: 490037 - DNA, 55 bp, Artificial; identical to SEQ ID NO: 18452
  Synthetic oligonucleotide

SEQ ID NO: 490038 - DNA, 52 bp, Artificial; identical to SEQ ID NO: 13583
  Synthetic oligonucleotide

SEQ ID NO: 490039 - DNA, 60 bp, Artificial; identical to SEQ ID NO: 6678
  Synthetic oligonucleotide

SEQ ID NO: 490040 - DNA, 52 bp, Artificial; identical to SEQ ID NO: 8116
  Synthetic oligonucleotide

SEQ ID NO: 490041 - DNA, 58 bp, Artificial; identical to SEQ ID NO: 16811
  Synthetic oligonucleotide

SEQ ID NO: 490042 - DNA, 56 bp, Artificial; identical to SEQ ID NO: 19333
  Synthetic oligonucleotide

SEQ ID NO: 490043 - DNA, 60 bp, Artificial; identical to SEQ ID NO: 8982
  Synthetic oligonucleotide

SEQ ID NO: 490044 - DNA, 53 bp, Artificial; identical to SEQ ID NO: 17518
  Synthetic oligonucleotide

SEQ ID NO: 490045 - DNA, 60 bp, Artificial; identical to SEQ ID NO: 12676
  Synthetic oligonucleotide

SEQ ID NO: 490046 - DNA, 56 bp, Artificial; identical to SEQ ID NO: 19440
  Synthetic oligonucleotide

SEQ ID NO: 490047 - DNA, 59 bp, Artificial; identical to SEQ ID NO: 17517
  Synthetic oligonucleotide

SEQ ID NO: 490048 - DNA, 60 bp, Artificial; identical to SEQ ID NO: 12213
  Synthetic oligonucleotide

SEQ ID NO: 490049 - DNA, 50 bp, Artificial; identical to SEQ ID NO: 18013
  Synthetic oligonucleotide

SEQ ID NO: 490050 - DNA, 54 bp, Artificial; identical to SEQ ID NO: 18067
  Synthetic oligonucleotide

SEQ ID NO: 490051 - DNA, 60 bp, Artificial; identical to SEQ ID NO: 7761
  Synthetic oligonucleotide

SEQ ID NO: 490052 - DNA, 54 bp, Artificial; identical to SEQ ID NO: 16956
  Synthetic oligonucleotide

SEQ ID NO: 490053 - DNA, 58 bp, Artificial; identical to SEQ ID NO: 17138
  Synthetic oligonucleotide

SEQ ID NO: 490054 - DNA, 58 bp, Artificial; identical to SEQ ID NO: 17387
  Synthetic oligonucleotide

SEQ ID NO: 490055 - DNA, 59 bp, Artificial; identical to SEQ ID NO: 20495
  Synthetic oligonucleotide

SEQ ID NO: 490056 - DNA, 51 bp, Artificial; identical to SEQ ID NO: 5979
  Synthetic oligonucleotide

SEQ ID NO: 490057 - DNA, 60 bp, Artificial; identical to SEQ ID NO: 6588
  Synthetic oligonucleotide

SEQ ID NO: 490058 - DNA, 60 bp, Artificial; identical to SEQ ID NO: 13320
  Synthetic oligonucleotide

SEQ ID NO: 490059 - DNA, 60 bp, Artificial; identical to SEQ ID NO: 10562
  Synthetic oligonucleotide

SEQ ID NO: 490060 - DNA, 53 bp, Artificial; identical to SEQ ID NO: 7992
  Synthetic oligonucleotide

SEQ ID NO: 490061 - DNA, 56 bp, Artificial; identical to SEQ ID NO: 17200
  Synthetic oligonucleotide

SEQ ID NO: 490062 - DNA, 55 bp, Artificial; identical to SEQ ID NO: 9165
  Synthetic oligonucleotide

SEQ ID NO: 490063 - DNA, 60 bp, Artificial; identical to SEQ ID NO: 6095
  Synthetic oligonucleotide

SEQ ID NO: 490064 - DNA, 59 bp, Artificial; identical to SEQ ID NO: 18608
  Synthetic oligonucleotide

SEQ ID NO: 490065 - DNA, 55 bp, Artificial; identical to SEQ ID NO: 6335
  Synthetic oligonucleotide

SEQ ID NO: 490066 - DNA, 60 bp, Artificial; identical to SEQ ID NO: 6109
  Synthetic oligonucleotide

SEQ ID NO: 490067 - DNA, 60 bp, Artificial; identical to SEQ ID NO: 49263
  Synthetic oligonucleotide

SEQ ID NO: 490068 - DNA, 55 bp, Artificial; identical to SEQ ID NO: 15200
  Synthetic oligonucleotide

SEQ ID NO: 490069 - DNA, 55 bp, Artificial; identical to SEQ ID NO: 11836
  Synthetic oligonucleotide

SEQ ID NO: 490070 - DNA, 55 bp, Artificial; identical to SEQ ID NO: 39349
  Synthetic oligonucleotide

SEQ ID NO: 490071 - DNA, 60 bp, Artificial; identical to SEQ ID NO: 6331
  Synthetic oligonucleotide

SEQ ID NO: 490072 - DNA, 60 bp, Artificial; identical to SEQ ID NO: 7134
  Synthetic oligonucleotide

SEQ ID NO: 490073 - DNA, 60 bp, Artificial; identical to SEQ ID NO: 10662
  Synthetic oligonucleotide

SEQ ID NO: 490074 - DNA, 60 bp, Artificial; identical to SEQ ID NO: 51574
  Synthetic oligonucleotide

SEQ ID NO: 490075 - DNA, 60 bp, Artificial; identical to SEQ ID NO: 13827
  Synthetic oligonucleotide

SEQ ID NO: 490076 - DNA, 59 bp, Artificial; identical to SEQ ID NO: 19197
  Synthetic oligonucleotide

SEQ ID NO: 490077 - DNA, 60 bp, Artificial; identical to SEQ ID NO: 10334
  Synthetic oligonucleotide

SEQ ID NO: 490078 - DNA, 57 bp, Artificial; identical to SEQ ID NO: 17129
  Synthetic oligonucleotide

SEQ ID NO: 490079 - DNA, 54 bp, Artificial; identical to SEQ ID NO: 14498
  Synthetic oligonucleotide

SEQ ID NO: 490080 - DNA, 58 bp, Artificial; identical to SEQ ID NO: 16464
  Synthetic oligonucleotide

SEQ ID NO: 490081 - DNA, 55 bp, Artificial; identical to SEQ ID NO: 14814
  Synthetic oligonucleotide

SEQ ID NO: 490082 - DNA, 55 bp, Artificial; identical to SEQ ID NO: 17972
  Synthetic oligonucleotide

SEQ ID NO: 490083 - DNA, 58 bp, Artificial; identical to SEQ ID NO: 19274
  Synthetic oligonucleotide

SEQ ID NO: 490084 - DNA, 60 bp, Artificial; identical to SEQ ID NO: 11721
  Synthetic oligonucleotide

SEQ ID NO: 490085 - DNA, 60 bp, Artificial; identical to SEQ ID NO: 10076
  Synthetic oligonucleotide

SEQ ID NO: 490086 - DNA, 60 bp, Artificial; identical to SEQ ID NO: 14376
  Synthetic oligonucleotide

SEQ ID NO: 490087 - DNA, 60 bp, Artificial; identical to SEQ ID NO: 8691
  Synthetic oligonucleotide

SEQ ID NO: 490088 - DNA, 60 bp, Artificial; identical to SEQ ID NO: 70371
  Synthetic oligonucleotide

SEQ ID NO: 490089 - DNA, 60 bp, Artificial; identical to SEQ ID NO: 12630
  Synthetic oligonucleotide

SEQ ID NO: 490090 - DNA, 59 bp, Artificial; identical to SEQ ID NO: 6022
  Synthetic oligonucleotide

SEQ ID NO: 490091 - DNA, 60 bp, Artificial; identical to SEQ ID NO: 13422
  Synthetic oligonucleotide

SEQ ID NO: 490092 - DNA, 55 bp, Artificial; identical to SEQ ID NO: 11018
  Synthetic oligonucleotide

SEQ ID NO: 490093 - DNA, 60 bp, Artificial; identical to SEQ ID NO: 13283
  Synthetic oligonucleotide

SEQ ID NO: 490094 - DNA, 54 bp, Artificial; identical to SEQ ID NO: 19593
  Synthetic oligonucleotide

SEQ ID NO: 490095 - DNA, 60 bp, Artificial; identical to SEQ ID NO: 14951
  Synthetic oligonucleotide

SEQ ID NO: 490096 - DNA, 59 bp, Artificial; identical to SEQ ID NO: 19081
  Synthetic oligonucleotide

SEQ ID NO: 490097 - DNA, 60 bp, Artificial; identical to SEQ ID NO: 10003
  Synthetic oligonucleotide

SEQ ID NO: 490098 - DNA, 55 bp, Artificial; identical to SEQ ID NO: 6379
  Synthetic oligonucleotide

SEQ ID NO: 490099 - DNA, 55 bp, Artificial; identical to SEQ ID NO: 6990
  Synthetic oligonucleotide

SEQ ID NO: 490100 - DNA, 55 bp, Artificial; identical to SEQ ID NO: 8441
  Synthetic oligonucleotide

SEQ ID NO: 490101 - DNA, 58 bp, Artificial; identical to SEQ ID NO: 19063
  Synthetic oligonucleotide

SEQ ID NO: 490102 - DNA, 55 bp, Artificial; identical to SEQ ID NO: 14186
  Synthetic oligonucleotide

SEQ ID NO: 490103 - DNA, 60 bp, Artificial; identical to SEQ ID NO: 10454
  Synthetic oligonucleotide

SEQ ID NO: 490104 - DNA, 60 bp, Artificial; identical to SEQ ID NO: 12553
  Synthetic oligonucleotide

SEQ ID NO: 490105 - DNA, 50 bp, Artificial; identical to SEQ ID NO: 6891
  Synthetic oligonucleotide

SEQ ID NO: 490106 - DNA, 53 bp, Artificial; identical to SEQ ID NO: 16187
  Synthetic oligonucleotide

SEQ ID NO: 490107 - DNA, 60 bp, Artificial; identical to SEQ ID NO: 15645
  Synthetic oligonucleotide

SEQ ID NO: 490108 - DNA, 58 bp, Artificial; identical to SEQ ID NO: 18122
  Synthetic oligonucleotide

SEQ ID NO: 490109 - DNA, 53 bp, Artificial; identical to SEQ ID NO: 14400
  Synthetic oligonucleotide

SEQ ID NO: 490110 - DNA, 60 bp, Artificial; identical to SEQ ID NO: 14529
  Synthetic oligonucleotide

SEQ ID NO: 490111 - DNA, 60 bp, Artificial; identical to SEQ ID NO: 14276
  Synthetic oligonucleotide

SEQ ID NO: 490112 - DNA, 60 bp, Artificial; identical to SEQ ID NO: 31824
  Synthetic oligonucleotide

SEQ ID NO: 490113 - DNA, 52 bp, Artificial; identical to SEQ ID NO: 10262
  Synthetic oligonucleotide

SEQ ID NO: 490114 - DNA, 56 bp, Artificial; identical to SEQ ID NO: 16536
  Synthetic oligonucleotide

SEQ ID NO: 490115 - DNA, 60 bp, Artificial; identical to SEQ ID NO: 15475
  Synthetic oligonucleotide

SEQ ID NO: 490116 - DNA, 60 bp, Artificial; identical to SEQ ID NO: 14608
  Synthetic oligonucleotide

SEQ ID NO: 490117 - DNA, 53 bp, Artificial; identical to SEQ ID NO: 8971
  Synthetic oligonucleotide

SEQ ID NO: 490118 - DNA, 54 bp, Artificial; identical to SEQ ID NO: 7367
  Synthetic oligonucleotide

SEQ ID NO: 490119 - DNA, 60 bp, Artificial; identical to SEQ ID NO: 11274
  Synthetic oligonucleotide

SEQ ID NO: 490120 - DNA, 56 bp, Artificial; identical to SEQ ID NO: 13510
  Synthetic oligonucleotide

SEQ ID NO: 490121 - DNA, 60 bp, Artificial; identical to SEQ ID NO: 8159
  Synthetic oligonucleotide

SEQ ID NO: 490122 - DNA, 60 bp, Artificial; identical to SEQ ID NO: 7409
  Synthetic oligonucleotide

SEQ ID NO: 490123 - DNA, 60 bp, Artificial; identical to SEQ ID NO: 14380
  Synthetic oligonucleotide

SEQ ID NO: 490124 - DNA, 60 bp, Artificial; identical to SEQ ID NO: 59571
  Synthetic oligonucleotide

SEQ ID NO: 490125 - DNA, 58 bp, Artificial; identical to SEQ ID NO: 17528
  Synthetic oligonucleotide

SEQ ID NO: 490126 - DNA, 60 bp, Artificial; identical to SEQ ID NO: 6768
  Synthetic oligonucleotide

SEQ ID NO: 490127 - DNA, 60 bp, Artificial; identical to SEQ ID NO: 12385
  Synthetic oligonucleotide

SEQ ID NO: 490128 - DNA, 54 bp, Artificial; identical to SEQ ID NO: 17400
  Synthetic oligonucleotide

SEQ ID NO: 490129 - DNA, 60 bp, Artificial; identical to SEQ ID NO: 6539
  Synthetic oligonucleotide

SEQ ID NO: 490130 - DNA, 56 bp, Artificial; identical to SEQ ID NO: 18071
  Synthetic oligonucleotide

SEQ ID NO: 490131 - DNA, 56 bp, Artificial; identical to SEQ ID NO: 18186
  Synthetic oligonucleotide

SEQ ID NO: 490132 - DNA, 55 bp, Artificial; identical to SEQ ID NO: 9822
  Synthetic oligonucleotide

SEQ ID NO: 490133 - DNA, 55 bp, Artificial; identical to SEQ ID NO: 18409
  Synthetic oligonucleotide

SEQ ID NO: 490134 - DNA, 60 bp, Artificial; identical to SEQ ID NO: 13876
  Synthetic oligonucleotide

SEQ ID NO: 490135 - DNA, 55 bp, Artificial; identical to SEQ ID NO: 8445
  Synthetic oligonucleotide

SEQ ID NO: 490136 - DNA, 53 bp, Artificial; identical to SEQ ID NO: 20439
  Synthetic oligonucleotide

SEQ ID NO: 490137 - DNA, 53 bp, Artificial; identical to SEQ ID NO: 7586
  Synthetic oligonucleotide

SEQ ID NO: 490138 - DNA, 59 bp, Artificial; identical to SEQ ID NO: 15938
  Synthetic oligonucleotide

SEQ ID NO: 490139 - DNA, 59 bp, Artificial; identical to SEQ ID NO: 7403
  Synthetic oligonucleotide

SEQ ID NO: 490140 - DNA, 57 bp, Artificial; identical to SEQ ID NO: 17001
  Synthetic oligonucleotide

SEQ ID NO: 490141 - DNA, 57 bp, Artificial; identical to SEQ ID NO: 17710
  Synthetic oligonucleotide

SEQ ID NO: 490142 - DNA, 60 bp, Artificial; identical to SEQ ID NO: 12043
  Synthetic oligonucleotide

SEQ ID NO: 490143 - DNA, 60 bp, Artificial; identical to SEQ ID NO: 12033
  Synthetic oligonucleotide

SEQ ID NO: 490144 - DNA, 60 bp, Artificial; identical to SEQ ID NO: 6584
  Synthetic oligonucleotide

SEQ ID NO: 490145 - DNA, 60 bp, Artificial; identical to SEQ ID NO: 7313
  Synthetic oligonucleotide

SEQ ID NO: 490146 - DNA, 54 bp, Artificial; identical to SEQ ID NO: 16865
  Synthetic oligonucleotide

SEQ ID NO: 490147 - DNA, 60 bp, Artificial; identical to SEQ ID NO: 11471
  Synthetic oligonucleotide

SEQ ID NO: 490148 - DNA, 60 bp, Artificial; identical to SEQ ID NO: 13471
  Synthetic oligonucleotide

SEQ ID NO: 490149 - DNA, 58 bp, Artificial; identical to SEQ ID NO: 18955
  Synthetic oligonucleotide

SEQ ID NO: 490150 - DNA, 60 bp, Artificial; identical to SEQ ID NO: 113586
  Synthetic oligonucleotide

SEQ ID NO: 490151 - DNA, 51 bp, Artificial; identical to SEQ ID NO: 6151
  Synthetic oligonucleotide

SEQ ID NO: 490152 - DNA, 60 bp, Artificial; identical to SEQ ID NO: 7226
  Synthetic oligonucleotide

SEQ ID NO: 490153 - DNA, 54 bp, Artificial; identical to SEQ ID NO: 6041
  Synthetic oligonucleotide

SEQ ID NO: 490154 - DNA, 60 bp, Artificial; identical to SEQ ID NO: 12086
  Synthetic oligonucleotide

SEQ ID NO: 490155 - DNA, 59 bp, Artificial; identical to SEQ ID NO: 10380
  Synthetic oligonucleotide

SEQ ID NO: 490156 - DNA, 55 bp, Artificial; identical to SEQ ID NO: 18387
  Synthetic oligonucleotide

SEQ ID NO: 490157 - DNA, 60 bp, Artificial; identical to SEQ ID NO: 6020
  Synthetic oligonucleotide

SEQ ID NO: 490158 - DNA, 60 bp, Artificial; identical to SEQ ID NO: 36294
  Synthetic oligonucleotide

SEQ ID NO: 490159 - DNA, 52 bp, Artificial; identical to SEQ ID NO: 12772
  Synthetic oligonucleotide

SEQ ID NO: 490160 - DNA, 60 bp, Artificial; identical to SEQ ID NO: 6654
  Synthetic oligonucleotide

SEQ ID NO: 490161 - DNA, 58 bp, Artificial; identical to SEQ ID NO: 19262
  Synthetic oligonucleotide

SEQ ID NO: 490162 - DNA, 50 bp, Artificial; identical to SEQ ID NO: 13186
  Synthetic oligonucleotide

SEQ ID NO: 490163 - DNA, 55 bp, Artificial; identical to SEQ ID NO: 11096
  Synthetic oligonucleotide

SEQ ID NO: 490164 - DNA, 60 bp, Artificial; identical to SEQ ID NO: 10269
  Synthetic oligonucleotide

SEQ ID NO: 490165 - DNA, 60 bp, Artificial; identical to SEQ ID NO: 8295
  Synthetic oligonucleotide

SEQ ID NO: 490166 - DNA, 60 bp, Artificial; identical to SEQ ID NO: 7102
  Synthetic oligonucleotide

SEQ ID NO: 490167 - DNA, 58 bp, Artificial; identical to SEQ ID NO: 18095
  Synthetic oligonucleotide

SEQ ID NO: 490168 - DNA, 60 bp, Artificial; identical to SEQ ID NO: 8122
  Synthetic oligonucleotide

SEQ ID NO: 490169 - DNA, 60 bp, Artificial; identical to SEQ ID NO: 11652
  Synthetic oligonucleotide

SEQ ID NO: 490170 - DNA, 60 bp, Artificial; identical to SEQ ID NO: 6201
  Synthetic oligonucleotide

SEQ ID NO: 490171 - DNA, 60 bp, Artificial; identical to SEQ ID NO: 6854
  Synthetic oligonucleotide

SEQ ID NO: 490172 - DNA, 60 bp, Artificial; identical to SEQ ID NO: 10325
  Synthetic oligonucleotide

SEQ ID NO: 490173 - DNA, 60 bp, Artificial; identical to SEQ ID NO: 10548
  Synthetic oligonucleotide

SEQ ID NO: 490174 - DNA, 53 bp, Artificial; identical to SEQ ID NO: 12879
  Synthetic oligonucleotide

SEQ ID NO: 490175 - DNA, 56 bp, Artificial; identical to SEQ ID NO: 10546
  Synthetic oligonucleotide

SEQ ID NO: 490176 - DNA, 60 bp, Artificial; identical to SEQ ID NO: 82289
  Synthetic oligonucleotide

SEQ ID NO: 490177 - DNA, 58 bp, Artificial; identical to SEQ ID NO: 20037
  Synthetic oligonucleotide

SEQ ID NO: 490178 - DNA, 51 bp, Artificial; identical to SEQ ID NO: 13063
  Synthetic oligonucleotide

SEQ ID NO: 490179 - DNA, 60 bp, Artificial; identical to SEQ ID NO: 112590
  Synthetic oligonucleotide

SEQ ID NO: 490180 - DNA, 60 bp, Artificial; identical to SEQ ID NO: 13039
  Synthetic oligonucleotide

SEQ ID NO: 490181 - DNA, 60 bp, Artificial; identical to SEQ ID NO: 6056
  Synthetic oligonucleotide

SEQ ID NO: 490182 - DNA, 60 bp, Artificial; identical to SEQ ID NO: 14424
  Synthetic oligonucleotide

SEQ ID NO: 490183 - DNA, 60 bp, Artificial; identical to SEQ ID NO: 13910
  Synthetic oligonucleotide

SEQ ID NO: 490184 - DNA, 57 bp, Artificial; identical to SEQ ID NO: 19050
  Synthetic oligonucleotide

SEQ ID NO: 490185 - DNA, 60 bp, Artificial; identical to SEQ ID NO: 13588
  Synthetic oligonucleotide

SEQ ID NO: 490186 - DNA, 60 bp, Artificial; identical to SEQ ID NO: 6414
  Synthetic oligonucleotide

SEQ ID NO: 490187 - DNA, 58 bp, Artificial; identical to SEQ ID NO: 12038
  Synthetic oligonucleotide

SEQ ID NO: 490188 - DNA, 56 bp, Artificial; identical to SEQ ID NO: 19544
  Synthetic oligonucleotide

SEQ ID NO: 490189 - DNA, 60 bp, Artificial; identical to SEQ ID NO: 7823
  Synthetic oligonucleotide

SEQ ID NO: 490190 - DNA, 60 bp, Artificial; identical to SEQ ID NO: 13321
  Synthetic oligonucleotide

SEQ ID NO: 490191 - DNA, 53 bp, Artificial; identical to SEQ ID NO: 18236
  Synthetic oligonucleotide

SEQ ID NO: 490192 - DNA, 60 bp, Artificial; identical to SEQ ID NO: 7288
  Synthetic oligonucleotide

SEQ ID NO: 490193 - DNA, 60 bp, Artificial; identical to SEQ ID NO: 15142
  Synthetic oligonucleotide

SEQ ID NO: 490194 - DNA, 60 bp, Artificial; identical to SEQ ID NO: 8981
  Synthetic oligonucleotide

SEQ ID NO: 490195 - DNA, 55 bp, Artificial; identical to SEQ ID NO: 16575
  Synthetic oligonucleotide

SEQ ID NO: 490196 - DNA, 60 bp, Artificial; identical to SEQ ID NO: 8623
  Synthetic oligonucleotide

SEQ ID NO: 490197 - DNA, 56 bp, Artificial; identical to SEQ ID NO: 18162
  Synthetic oligonucleotide

SEQ ID NO: 490198 - DNA, 55 bp, Artificial; identical to SEQ ID NO: 19926
  Synthetic oligonucleotide

SEQ ID NO: 490199 - DNA, 57 bp, Artificial; identical to SEQ ID NO: 19479
  Synthetic oligonucleotide

SEQ ID NO: 490200 - DNA, 56 bp, Artificial; identical to SEQ ID NO: 15887
  Synthetic oligonucleotide

SEQ ID NO: 490201 - DNA, 60 bp, Artificial; identical to SEQ ID NO: 7940
  Synthetic oligonucleotide

SEQ ID NO: 490202 - DNA, 60 bp, Artificial; identical to SEQ ID NO: 15432
  Synthetic oligonucleotide

SEQ ID NO: 490203 - DNA, 55 bp, Artificial; identical to SEQ ID NO: 11051
  Synthetic oligonucleotide

SEQ ID NO: 490204 - DNA, 54 bp, Artificial; identical to SEQ ID NO: 13419
  Synthetic oligonucleotide

SEQ ID NO: 490205 - DNA, 57 bp, Artificial; identical to SEQ ID NO: 18809
  Synthetic oligonucleotide

SEQ ID NO: 490206 - DNA, 59 bp, Artificial; identical to SEQ ID NO: 18761
  Synthetic oligonucleotide

SEQ ID NO: 490207 - DNA, 58 bp, Artificial; identical to SEQ ID NO: 20494
  Synthetic oligonucleotide

SEQ ID NO: 490208 - DNA, 57 bp, Artificial; identical to SEQ ID NO: 19013
  Synthetic oligonucleotide

SEQ ID NO: 490209 - DNA, 60 bp, Artificial; identical to SEQ ID NO: 13248
  Synthetic oligonucleotide

SEQ ID NO: 490210 - DNA, 60 bp, Artificial; identical to SEQ ID NO: 117220
  Synthetic oligonucleotide

SEQ ID NO: 490211 - DNA, 59 bp, Artificial; identical to SEQ ID NO: 19512
  Synthetic oligonucleotide

SEQ ID NO: 490212 - DNA, 55 bp, Artificial; identical to SEQ ID NO: 11971
  Synthetic oligonucleotide

SEQ ID NO: 490213 - DNA, 57 bp, Artificial; identical to SEQ ID NO: 16234
  Synthetic oligonucleotide

SEQ ID NO: 490214 - DNA, 50 bp, Artificial; identical to SEQ ID NO: 12088
  Synthetic oligonucleotide

SEQ ID NO: 490215 - DNA, 55 bp, Artificial; identical to SEQ ID NO: 11469
  Synthetic oligonucleotide

SEQ ID NO: 490216 - DNA, 59 bp, Artificial; identical to SEQ ID NO: 18612
  Synthetic oligonucleotide

SEQ ID NO: 490217 - DNA, 55 bp, Artificial; identical to SEQ ID NO: 10686
  Synthetic oligonucleotide

SEQ ID NO: 490218 - DNA, 57 bp, Artificial; identical to SEQ ID NO: 20250
  Synthetic oligonucleotide

SEQ ID NO: 490219 - DNA, 58 bp, Artificial; identical to SEQ ID NO: 5801
  Synthetic oligonucleotide

SEQ ID NO: 490220 - DNA, 58 bp, Artificial; identical to SEQ ID NO: 20462
  Synthetic oligonucleotide

SEQ ID NO: 490221 - DNA, 52 bp, Artificial; identical to SEQ ID NO: 18618
  Synthetic oligonucleotide

SEQ ID NO: 490222 - DNA, 55 bp, Artificial; identical to SEQ ID NO: 13443
  Synthetic oligonucleotide

SEQ ID NO: 490223 - DNA, 59 bp, Artificial; identical to SEQ ID NO: 18130
  Synthetic oligonucleotide

SEQ ID NO: 490224 - DNA, 51 bp, Artificial; identical to SEQ ID NO: 16061
  Synthetic oligonucleotide

SEQ ID NO: 490225 - DNA, 55 bp, Artificial; identical to SEQ ID NO: 9607
  Synthetic oligonucleotide

SEQ ID NO: 490226 - DNA, 58 bp, Artificial; identical to SEQ ID NO: 19651
  Synthetic oligonucleotide

SEQ ID NO: 490227 - DNA, 60 bp, Artificial; identical to SEQ ID NO: 8404
  Synthetic oligonucleotide

SEQ ID NO: 490228 - DNA, 56 bp, Artificial; identical to SEQ ID NO: 16517
  Synthetic oligonucleotide

SEQ ID NO: 490229 - DNA, 60 bp, Artificial; identical to SEQ ID NO: 8702
  Synthetic oligonucleotide

SEQ ID NO: 490230 - DNA, 59 bp, Artificial; identical to SEQ ID NO: 16948
  Synthetic oligonucleotide

SEQ ID NO: 490231 - DNA, 59 bp, Artificial; identical to SEQ ID NO: 19166
  Synthetic oligonucleotide

SEQ ID NO: 490232 - DNA, 57 bp, Artificial; identical to SEQ ID NO: 8182
  Synthetic oligonucleotide

SEQ ID NO: 490233 - DNA, 57 bp, Artificial; identical to SEQ ID NO: 18010
  Synthetic oligonucleotide

SEQ ID NO: 490234 - DNA, 60 bp, Artificial; identical to SEQ ID NO: 12546
  Synthetic oligonucleotide

SEQ ID NO: 490235 - DNA, 55 bp, Artificial; identical to SEQ ID NO: 17466
  Synthetic oligonucleotide

SEQ ID NO: 490236 - DNA, 56 bp, Artificial; identical to SEQ ID NO: 11297
  Synthetic oligonucleotide

SEQ ID NO: 490237 - DNA, 60 bp, Artificial; identical to SEQ ID NO: 14078
  Synthetic oligonucleotide

SEQ ID NO: 490238 - DNA, 60 bp, Artificial; identical to SEQ ID NO: 7982
  Synthetic oligonucleotide

SEQ ID NO: 490239 - DNA, 55 bp, Artificial; identical to SEQ ID NO: 8777
  Synthetic oligonucleotide

SEQ ID NO: 490240 - DNA, 55 bp, Artificial; identical to SEQ ID NO: 9219
  Synthetic oligonucleotide

SEQ ID NO: 490241 - DNA, 60 bp, Artificial; identical to SEQ ID NO: 9833
  Synthetic oligonucleotide

SEQ ID NO: 490242 - DNA, 57 bp, Artificial; identical to SEQ ID NO: 18800
  Synthetic oligonucleotide

SEQ ID NO: 490243 - DNA, 58 bp, Artificial; identical to SEQ ID NO: 19868
  Synthetic oligonucleotide

SEQ ID NO: 490244 - DNA, 58 bp, Artificial; identical to SEQ ID NO: 17595
  Synthetic oligonucleotide

SEQ ID NO: 490245 - DNA, 60 bp, Artificial; identical to SEQ ID NO: 9700
  Synthetic oligonucleotide

SEQ ID NO: 490246 - DNA, 58 bp, Artificial; identical to SEQ ID NO: 18310
  Synthetic oligonucleotide

SEQ ID NO: 490247 - DNA, 60 bp, Artificial; identical to SEQ ID NO: 12164
  Synthetic oligonucleotide

SEQ ID NO: 490248 - DNA, 55 bp, Artificial; identical to SEQ ID NO: 13474
  Synthetic oligonucleotide

SEQ ID NO: 490249 - DNA, 60 bp, Artificial; identical to SEQ ID NO: 15043
  Synthetic oligonucleotide

SEQ ID NO: 490250 - DNA, 55 bp, Artificial; identical to SEQ ID NO: 6136
  Synthetic oligonucleotide

SEQ ID NO: 490251 - DNA, 60 bp, Artificial; identical to SEQ ID NO: 8124
  Synthetic oligonucleotide

SEQ ID NO: 490252 - DNA, 55 bp, Artificial; identical to SEQ ID NO: 12025
  Synthetic oligonucleotide

SEQ ID NO: 490253 - DNA, 60 bp, Artificial; identical to SEQ ID NO: 9205
  Synthetic oligonucleotide

SEQ ID NO: 490254 - DNA, 58 bp, Artificial; identical to SEQ ID NO: 16525
  Synthetic oligonucleotide

SEQ ID NO: 490255 - DNA, 55 bp, Artificial; identical to SEQ ID NO: 18922
  Synthetic oligonucleotide

SEQ ID NO: 490256 - DNA, 59 bp, Artificial; identical to SEQ ID NO: 18393
  Synthetic oligonucleotide

SEQ ID NO: 490257 - DNA, 49 bp, Artificial; identical to SEQ ID NO: 18155
  Synthetic oligonucleotide

SEQ ID NO: 490258 - DNA, 60 bp, Artificial; identical to SEQ ID NO: 58765
  Synthetic oligonucleotide

SEQ ID NO: 490259 - DNA, 56 bp, Artificial; identical to SEQ ID NO: 17885
  Synthetic oligonucleotide

SEQ ID NO: 490260 - DNA, 52 bp, Artificial; identical to SEQ ID NO: 6670
  Synthetic oligonucleotide

SEQ ID NO: 490261 - DNA, 60 bp, Artificial; identical to SEQ ID NO: 9812
  Synthetic oligonucleotide

SEQ ID NO: 490262 - DNA, 60 bp, Artificial; identical to SEQ ID NO: 7970
  Synthetic oligonucleotide

SEQ ID NO: 490263 - DNA, 55 bp, Artificial; identical to SEQ ID NO: 19727
  Synthetic oligonucleotide

SEQ ID NO: 490264 - DNA, 54 bp, Artificial; identical to SEQ ID NO: 8344
  Synthetic oligonucleotide

SEQ ID NO: 490265 - DNA, 56 bp, Artificial; identical to SEQ ID NO: 16303
  Synthetic oligonucleotide

SEQ ID NO: 490266 - DNA, 57 bp, Artificial; identical to SEQ ID NO: 17675
  Synthetic oligonucleotide

SEQ ID NO: 490267 - DNA, 57 bp, Artificial; identical to SEQ ID NO: 18951
  Synthetic oligonucleotide

SEQ ID NO: 490268 - DNA, 55 bp, Artificial; identical to SEQ ID NO: 8626
  Synthetic oligonucleotide

SEQ ID NO: 490269 - DNA, 58 bp, Artificial; identical to SEQ ID NO: 20266
  Synthetic oligonucleotide

SEQ ID NO: 490270 - DNA, 52 bp, Artificial; identical to SEQ ID NO: 18213
  Synthetic oligonucleotide

SEQ ID NO: 490271 - DNA, 54 bp, Artificial; identical to SEQ ID NO: 18188
  Synthetic oligonucleotide

SEQ ID NO: 490272 - DNA, 60 bp, Artificial; identical to SEQ ID NO: 75982
  Synthetic oligonucleotide

SEQ ID NO: 490273 - DNA, 51 bp, Artificial; identical to SEQ ID NO: 16041
  Synthetic oligonucleotide

SEQ ID NO: 490274 - DNA, 56 bp, Artificial; identical to SEQ ID NO: 15688
  Synthetic oligonucleotide

SEQ ID NO: 490275 - DNA, 60 bp, Artificial; identical to SEQ ID NO: 15330
  Synthetic oligonucleotide

SEQ ID NO: 490276 - DNA, 59 bp, Artificial; identical to SEQ ID NO: 6152
  Synthetic oligonucleotide

SEQ ID NO: 490277 - DNA, 58 bp, Artificial; identical to SEQ ID NO: 16768
  Synthetic oligonucleotide

SEQ ID NO: 490278 - DNA, 60 bp, Artificial; identical to SEQ ID NO: 13081
  Synthetic oligonucleotide

SEQ ID NO: 490279 - DNA, 54 bp, Artificial; identical to SEQ ID NO: 14340
  Synthetic oligonucleotide

SEQ ID NO: 490280 - DNA, 60 bp, Artificial; identical to SEQ ID NO: 7826
  Synthetic oligonucleotide

SEQ ID NO: 490281 - DNA, 60 bp, Artificial; identical to SEQ ID NO: 341
  Synthetic oligonucleotide

SEQ ID NO: 490282 - DNA, 57 bp, Artificial; identical to SEQ ID NO: 7747
  Synthetic oligonucleotide

SEQ ID NO: 490283 - DNA, 57 bp, Artificial; identical to SEQ ID NO: 7748
  Synthetic oligonucleotide

SEQ ID NO: 490284 - DNA, 58 bp, Artificial; identical to SEQ ID NO: 19662
  Synthetic oligonucleotide

SEQ ID NO: 490285 - DNA, 60 bp, Artificial; identical to SEQ ID NO: 115870
  Synthetic oligonucleotide

SEQ ID NO: 490286 - DNA, 60 bp, Artificial; identical to SEQ ID NO: 6994
  Synthetic oligonucleotide

SEQ ID NO: 490287 - DNA, 51 bp, Artificial; identical to SEQ ID NO: 13403
  Synthetic oligonucleotide

SEQ ID NO: 490288 - DNA, 60 bp, Artificial; identical to SEQ ID NO: 14646
  Synthetic oligonucleotide

SEQ ID NO: 490289 - DNA, 58 bp, Artificial; identical to SEQ ID NO: 7765
  Synthetic oligonucleotide

SEQ ID NO: 490290 - DNA, 60 bp, Artificial; identical to SEQ ID NO: 103519
  Synthetic oligonucleotide

SEQ ID NO: 490291 - DNA, 60 bp, Artificial; identical to SEQ ID NO: 10853
  Synthetic oligonucleotide

SEQ ID NO: 490292 - DNA, 60 bp, Artificial; identical to SEQ ID NO: 15810
  Synthetic oligonucleotide

SEQ ID NO: 490293 - DNA, 51 bp, Artificial; identical to SEQ ID NO: 18161
  Synthetic oligonucleotide

SEQ ID NO: 490294 - DNA, 58 bp, Artificial; identical to SEQ ID NO: 19775
  Synthetic oligonucleotide

SEQ ID NO: 490295 - DNA, 60 bp, Artificial; identical to SEQ ID NO: 13338
  Synthetic oligonucleotide

SEQ ID NO: 490296 - DNA, 56 bp, Artificial; identical to SEQ ID NO: 19222
  Synthetic oligonucleotide

SEQ ID NO: 490297 - DNA, 60 bp, Artificial; identical to SEQ ID NO: 15426
  Synthetic oligonucleotide

SEQ ID NO: 490298 - DNA, 56 bp, Artificial; identical to SEQ ID NO: 5880
  Synthetic oligonucleotide

SEQ ID NO: 490299 - DNA, 60 bp, Artificial; identical to SEQ ID NO: 13163
  Synthetic oligonucleotide

SEQ ID NO: 490300 - DNA, 53 bp, Artificial; identical to SEQ ID NO: 17703
  Synthetic oligonucleotide

SEQ ID NO: 490301 - DNA, 55 bp, Artificial; identical to SEQ ID NO: 7398
  Synthetic oligonucleotide

SEQ ID NO: 490302 - DNA, 55 bp, Artificial; identical to SEQ ID NO: 16403
  Synthetic oligonucleotide

SEQ ID NO: 490303 - DNA, 60 bp, Artificial; identical to SEQ ID NO: 10455
  Synthetic oligonucleotide

SEQ ID NO: 490304 - DNA, 54 bp, Artificial; identical to SEQ ID NO: 18365
  Synthetic oligonucleotide

SEQ ID NO: 490305 - DNA, 57 bp, Artificial; identical to SEQ ID NO: 6393
  Synthetic oligonucleotide

SEQ ID NO: 490306 - DNA, 58 bp, Artificial; identical to SEQ ID NO: 16397
  Synthetic oligonucleotide

SEQ ID NO: 490307 - DNA, 57 bp, Artificial; identical to SEQ ID NO: 12634
  Synthetic oligonucleotide

SEQ ID NO: 490308 - DNA, 60 bp, Artificial; identical to SEQ ID NO: 8756
  Synthetic oligonucleotide

SEQ ID NO: 490309 - DNA, 60 bp, Artificial; identical to SEQ ID NO: 7619
  Synthetic oligonucleotide

SEQ ID NO: 490310 - DNA, 55 bp, Artificial; identical to SEQ ID NO: 16483
  Synthetic oligonucleotide

SEQ ID NO: 490311 - DNA, 60 bp, Artificial; identical to SEQ ID NO: 12307
  Synthetic oligonucleotide

SEQ ID NO: 490312 - DNA, 60 bp, Artificial; identical to SEQ ID NO: 15610
  Synthetic oligonucleotide

SEQ ID NO: 490313 - DNA, 59 bp, Artificial; identical to SEQ ID NO: 18360
  Synthetic oligonucleotide

SEQ ID NO: 490314 - DNA, 60 bp, Artificial; identical to SEQ ID NO: 9341
  Synthetic oligonucleotide

SEQ ID NO: 490315 - DNA, 59 bp, Artificial; identical to SEQ ID NO: 17118
  Synthetic oligonucleotide

SEQ ID NO: 490316 - DNA, 60 bp, Artificial; identical to SEQ ID NO: 13842
  Synthetic oligonucleotide

SEQ ID NO: 490317 - DNA, 58 bp, Artificial; identical to SEQ ID NO: 19517
  Synthetic oligonucleotide

SEQ ID NO: 490318 - DNA, 60 bp, Artificial; identical to SEQ ID NO: 7262
  Synthetic oligonucleotide

SEQ ID NO: 490319 - DNA, 59 bp, Artificial; identical to SEQ ID NO: 18540
  Synthetic oligonucleotide

SEQ ID NO: 490320 - DNA, 60 bp, Artificial; identical to SEQ ID NO: 108397
  Synthetic oligonucleotide

SEQ ID NO: 490321 - DNA, 60 bp, Artificial; identical to SEQ ID NO: 12781
  Synthetic oligonucleotide

SEQ ID NO: 490322 - DNA, 60 bp, Artificial; identical to SEQ ID NO: 9352
  Synthetic oligonucleotide

SEQ ID NO: 490323 - DNA, 59 bp, Artificial; identical to SEQ ID NO: 19983
  Synthetic oligonucleotide

SEQ ID NO: 490324 - DNA, 60 bp, Artificial; identical to SEQ ID NO: 15294
  Synthetic oligonucleotide

SEQ ID NO: 490325 - DNA, 53 bp, Artificial; identical to SEQ ID NO: 12079
  Synthetic oligonucleotide

SEQ ID NO: 490326 - DNA, 59 bp, Artificial; identical to SEQ ID NO: 19221
  Synthetic oligonucleotide

SEQ ID NO: 490327 - DNA, 55 bp, Artificial; identical to SEQ ID NO: 6664
  Synthetic oligonucleotide

SEQ ID NO: 490328 - DNA, 55 bp, Artificial; identical to SEQ ID NO: 17304
  Synthetic oligonucleotide

SEQ ID NO: 490329 - DNA, 56 bp, Artificial; identical to SEQ ID NO: 5779
  Synthetic oligonucleotide

SEQ ID NO: 490330 - DNA, 56 bp, Artificial; identical to SEQ ID NO: 20152
  Synthetic oligonucleotide

SEQ ID NO: 490331 - DNA, 60 bp, Artificial; identical to SEQ ID NO: 28888
  Synthetic oligonucleotide

SEQ ID NO: 490332 - DNA, 57 bp, Artificial; identical to SEQ ID NO: 18098
  Synthetic oligonucleotide

SEQ ID NO: 490333 - DNA, 55 bp, Artificial; identical to SEQ ID NO: 6966
  Synthetic oligonucleotide

SEQ ID NO: 490334 - DNA, 58 bp, Artificial; identical to SEQ ID NO: 9583
  Synthetic oligonucleotide

SEQ ID NO: 490335 - DNA, 55 bp, Artificial; identical to SEQ ID NO: 17936
  Synthetic oligonucleotide

SEQ ID NO: 490336 - DNA, 60 bp, Artificial; identical to SEQ ID NO: 15394
  Synthetic oligonucleotide

SEQ ID NO: 490337 - DNA, 60 bp, Artificial; identical to SEQ ID NO: 6629
  Synthetic oligonucleotide

SEQ ID NO: 490338 - DNA, 50 bp, Artificial; identical to SEQ ID NO: 8608
  Synthetic oligonucleotide

SEQ ID NO: 490339 - DNA, 54 bp, Artificial; identical to SEQ ID NO: 8533
  Synthetic oligonucleotide

SEQ ID NO: 490340 - DNA, 60 bp, Artificial; identical to SEQ ID NO: 10575
  Synthetic oligonucleotide

SEQ ID NO: 490341 - DNA, 60 bp, Artificial; identical to SEQ ID NO: 11673
  Synthetic oligonucleotide

SEQ ID NO: 490342 - DNA, 60 bp, Artificial; identical to SEQ ID NO: 6131
  Synthetic oligonucleotide

SEQ ID NO: 490343 - DNA, 54 bp, Artificial; identical to SEQ ID NO: 19999
  Synthetic oligonucleotide

SEQ ID NO: 490344 - DNA, 52 bp, Artificial; identical to SEQ ID NO: 10795
  Synthetic oligonucleotide

SEQ ID NO: 490345 - DNA, 59 bp, Artificial; identical to SEQ ID NO: 16424
  Synthetic oligonucleotide

SEQ ID NO: 490346 - DNA, 52 bp, Artificial; identical to SEQ ID NO: 10245
  Synthetic oligonucleotide

SEQ ID NO: 490347 - DNA, 59 bp, Artificial; identical to SEQ ID NO: 20571
  Synthetic oligonucleotide

SEQ ID NO: 490348 - DNA, 55 bp, Artificial; identical to SEQ ID NO: 14734
  Synthetic oligonucleotide

SEQ ID NO: 490349 - DNA, 57 bp, Artificial; identical to SEQ ID NO: 15969
  Synthetic oligonucleotide

SEQ ID NO: 490350 - DNA, 58 bp, Artificial; identical to SEQ ID NO: 10893
  Synthetic oligonucleotide

SEQ ID NO: 490351 - DNA, 60 bp, Artificial; identical to SEQ ID NO: 14756
  Synthetic oligonucleotide

SEQ ID NO: 490352 - DNA, 60 bp, Artificial; identical to SEQ ID NO: 11982
  Synthetic oligonucleotide

SEQ ID NO: 490353 - DNA, 60 bp, Artificial; identical to SEQ ID NO: 11010
  Synthetic oligonucleotide

SEQ ID NO: 490354 - DNA, 57 bp, Artificial; identical to SEQ ID NO: 10995
  Synthetic oligonucleotide

SEQ ID NO: 490355 - DNA, 59 bp, Artificial; identical to SEQ ID NO: 19799
  Synthetic oligonucleotide

SEQ ID NO: 490356 - DNA, 60 bp, Artificial; identical to SEQ ID NO: 122656
  Synthetic oligonucleotide

SEQ ID NO: 490357 - DNA, 57 bp, Artificial; identical to SEQ ID NO: 19558
  Synthetic oligonucleotide

SEQ ID NO: 490358 - DNA, 56 bp, Artificial; identical to SEQ ID NO: 11574
  Synthetic oligonucleotide

SEQ ID NO: 490359 - DNA, 60 bp, Artificial; identical to SEQ ID NO: 105850
  Synthetic oligonucleotide

SEQ ID NO: 490360 - DNA, 59 bp, Artificial; identical to SEQ ID NO: 19904
  Synthetic oligonucleotide

SEQ ID NO: 490361 - DNA, 51 bp, Artificial; identical to SEQ ID NO: 7989
  Synthetic oligonucleotide

SEQ ID NO: 490362 - DNA, 60 bp, Artificial; identical to SEQ ID NO: 6059
  Synthetic oligonucleotide

SEQ ID NO: 490363 - DNA, 52 bp, Artificial; identical to SEQ ID NO: 15652
  Synthetic oligonucleotide

SEQ ID NO: 490364 - DNA, 59 bp, Artificial; identical to SEQ ID NO: 18926
  Synthetic oligonucleotide

SEQ ID NO: 490365 - DNA, 60 bp, Artificial; identical to SEQ ID NO: 13964
  Synthetic oligonucleotide

SEQ ID NO: 490366 - DNA, 55 bp, Artificial; identical to SEQ ID NO: 11396
  Synthetic oligonucleotide

SEQ ID NO: 490367 - DNA, 60 bp, Artificial; identical to SEQ ID NO: 10476
  Synthetic oligonucleotide

SEQ ID NO: 490368 - DNA, 60 bp, Artificial; identical to SEQ ID NO: 10844
  Synthetic oligonucleotide

SEQ ID NO: 490369 - DNA, 60 bp, Artificial; identical to SEQ ID NO: 11414
  Synthetic oligonucleotide

SEQ ID NO: 490370 - DNA, 58 bp, Artificial; identical to SEQ ID NO: 16503
  Synthetic oligonucleotide

SEQ ID NO: 490371 - DNA, 57 bp, Artificial; identical to SEQ ID NO: 18687
  Synthetic oligonucleotide

SEQ ID NO: 490372 - DNA, 58 bp, Artificial; identical to SEQ ID NO: 19821
  Synthetic oligonucleotide

SEQ ID NO: 490373 - DNA, 56 bp, Artificial; identical to SEQ ID NO: 20396
  Synthetic oligonucleotide

SEQ ID NO: 490374 - DNA, 58 bp, Artificial; identical to SEQ ID NO: 17026
  Synthetic oligonucleotide

SEQ ID NO: 490375 - DNA, 59 bp, Artificial; identical to SEQ ID NO: 8103
  Synthetic oligonucleotide

SEQ ID NO: 490376 - DNA, 56 bp, Artificial; identical to SEQ ID NO: 17524
  Synthetic oligonucleotide

SEQ ID NO: 490377 - DNA, 54 bp, Artificial; identical to SEQ ID NO: 12070
  Synthetic oligonucleotide

SEQ ID NO: 490378 - DNA, 59 bp, Artificial; identical to SEQ ID NO: 20072
  Synthetic oligonucleotide

SEQ ID NO: 490379 - DNA, 59 bp, Artificial; identical to SEQ ID NO: 16288
  Synthetic oligonucleotide

SEQ ID NO: 490380 - DNA, 60 bp, Artificial; identical to SEQ ID NO: 9845
  Synthetic oligonucleotide

SEQ ID NO: 490381 - DNA, 56 bp, Artificial; identical to SEQ ID NO: 14413
  Synthetic oligonucleotide

SEQ ID NO: 490382 - DNA, 60 bp, Artificial; identical to SEQ ID NO: 14519
  Synthetic oligonucleotide

SEQ ID NO: 490383 - DNA, 50 bp, Artificial; identical to SEQ ID NO: 16004
  Synthetic oligonucleotide

SEQ ID NO: 490384 - DNA, 57 bp, Artificial; identical to SEQ ID NO: 19514
  Synthetic oligonucleotide

SEQ ID NO: 490385 - DNA, 60 bp, Artificial; identical to SEQ ID NO: 10851
  Synthetic oligonucleotide

SEQ ID NO: 490386 - DNA, 56 bp, Artificial; identical to SEQ ID NO: 16660
  Synthetic oligonucleotide

SEQ ID NO: 490387 - DNA, 50 bp, Artificial; identical to SEQ ID NO: 10006
  Synthetic oligonucleotide

SEQ ID NO: 490388 - DNA, 58 bp, Artificial; identical to SEQ ID NO: 19505
  Synthetic oligonucleotide

SEQ ID NO: 490389 - DNA, 60 bp, Artificial; identical to SEQ ID NO: 11657
  Synthetic oligonucleotide

SEQ ID NO: 490390 - DNA, 60 bp, Artificial; identical to SEQ ID NO: 10663
  Synthetic oligonucleotide

SEQ ID NO: 490391 - DNA, 60 bp, Artificial; identical to SEQ ID NO: 13805
  Synthetic oligonucleotide

SEQ ID NO: 490392 - DNA, 60 bp, Artificial; identical to SEQ ID NO: 118380
  Synthetic oligonucleotide

SEQ ID NO: 490393 - DNA, 50 bp, Artificial; identical to SEQ ID NO: 15733
  Synthetic oligonucleotide

SEQ ID NO: 490394 - DNA, 60 bp, Artificial; identical to SEQ ID NO: 7219
  Synthetic oligonucleotide

SEQ ID NO: 490395 - DNA, 60 bp, Artificial; identical to SEQ ID NO: 7220
  Synthetic oligonucleotide

SEQ ID NO: 490396 - DNA, 50 bp, Artificial; identical to SEQ ID NO: 10759
  Synthetic oligonucleotide

SEQ ID NO: 490397 - DNA, 60 bp, Artificial; identical to SEQ ID NO: 11120
  Synthetic oligonucleotide

SEQ ID NO: 490398 - DNA, 52 bp, Artificial; identical to SEQ ID NO: 10464
  Synthetic oligonucleotide

SEQ ID NO: 490399 - DNA, 58 bp, Artificial; identical to SEQ ID NO: 18590
  Synthetic oligonucleotide

SEQ ID NO: 490400 - DNA, 60 bp, Artificial; identical to SEQ ID NO: 11102
  Synthetic oligonucleotide

SEQ ID NO: 490401 - DNA, 60 bp, Artificial; identical to SEQ ID NO: 10370
  Synthetic oligonucleotide

SEQ ID NO: 490402 - DNA, 60 bp, Artificial; identical to SEQ ID NO: 7854
  Synthetic oligonucleotide

SEQ ID NO: 490403 - DNA, 58 bp, Artificial; identical to SEQ ID NO: 17272
  Synthetic oligonucleotide

SEQ ID NO: 490404 - DNA, 60 bp, Artificial; identical to SEQ ID NO: 6512
  Synthetic oligonucleotide

SEQ ID NO: 490405 - DNA, 60 bp, Artificial; identical to SEQ ID NO: 15181
  Synthetic oligonucleotide

SEQ ID NO: 490406 - DNA, 59 bp, Artificial; identical to SEQ ID NO: 19101
  Synthetic oligonucleotide

SEQ ID NO: 490407 - DNA, 60 bp, Artificial; identical to SEQ ID NO: 7980
  Synthetic oligonucleotide

SEQ ID NO: 490408 - DNA, 60 bp, Artificial; identical to SEQ ID NO: 8749
  Synthetic oligonucleotide

SEQ ID NO: 490409 - DNA, 58 bp, Artificial; identical to SEQ ID NO: 16524
  Synthetic oligonucleotide

SEQ ID NO: 490410 - DNA, 52 bp, Artificial; identical to SEQ ID NO: 19058
  Synthetic oligonucleotide

SEQ ID NO: 490411 - DNA, 57 bp, Artificial; identical to SEQ ID NO: 20468
  Synthetic oligonucleotide

SEQ ID NO: 490412 - DNA, 56 bp, Artificial; identical to SEQ ID NO: 19367
  Synthetic oligonucleotide

SEQ ID NO: 490413 - DNA, 56 bp, Artificial; identical to SEQ ID NO: 19114
  Synthetic oligonucleotide

SEQ ID NO: 490414 - DNA, 55 bp, Artificial; identical to SEQ ID NO: 12620
  Synthetic oligonucleotide

SEQ ID NO: 490415 - DNA, 56 bp, Artificial; identical to SEQ ID NO: 11155
  Synthetic oligonucleotide

SEQ ID NO: 490416 - DNA, 56 bp, Artificial; identical to SEQ ID NO: 8973
  Synthetic oligonucleotide

SEQ ID NO: 490417 - DNA, 60 bp, Artificial; identical to SEQ ID NO: 8469
  Synthetic oligonucleotide

SEQ ID NO: 490418 - DNA, 57 bp, Artificial; identical to SEQ ID NO: 8990
  Synthetic oligonucleotide

SEQ ID NO: 490419 - DNA, 58 bp, Artificial; identical to SEQ ID NO: 6212
  Synthetic oligonucleotide

SEQ ID NO: 490420 - DNA, 60 bp, Artificial; identical to SEQ ID NO: 14679
  Synthetic oligonucleotide

SEQ ID NO: 490421 - DNA, 58 bp, Artificial; identical to SEQ ID NO: 5912
  Synthetic oligonucleotide

SEQ ID NO: 490422 - DNA, 60 bp, Artificial; identical to SEQ ID NO: 12255
  Synthetic oligonucleotide

SEQ ID NO: 490423 - DNA, 60 bp, Artificial; identical to SEQ ID NO: 7704
  Synthetic oligonucleotide

SEQ ID NO: 490424 - DNA, 59 bp, Artificial; identical to SEQ ID NO: 18255
  Synthetic oligonucleotide

SEQ ID NO: 490425 - DNA, 60 bp, Artificial; identical to SEQ ID NO: 9099
  Synthetic oligonucleotide

SEQ ID NO: 490426 - DNA, 60 bp, Artificial; identical to SEQ ID NO: 6040
  Synthetic oligonucleotide

SEQ ID NO: 490427 - DNA, 54 bp, Artificial; identical to SEQ ID NO: 14876
  Synthetic oligonucleotide

SEQ ID NO: 490428 - DNA, 58 bp, Artificial; identical to SEQ ID NO: 18014
  Synthetic oligonucleotide

SEQ ID NO: 490429 - DNA, 52 bp, Artificial; identical to SEQ ID NO: 15564
  Synthetic oligonucleotide

SEQ ID NO: 490430 - DNA, 55 bp, Artificial; identical to SEQ ID NO: 10845
  Synthetic oligonucleotide

SEQ ID NO: 490431 - DNA, 60 bp, Artificial; identical to SEQ ID NO: 10951
  Synthetic oligonucleotide

SEQ ID NO: 490432 - DNA, 55 bp, Artificial; identical to SEQ ID NO: 10512
  Synthetic oligonucleotide

SEQ ID NO: 490433 - DNA, 52 bp, Artificial; identical to SEQ ID NO: 7618
  Synthetic oligonucleotide

SEQ ID NO: 490434 - DNA, 60 bp, Artificial; identical to SEQ ID NO: 6103
  Synthetic oligonucleotide

SEQ ID NO: 490435 - DNA, 56 bp, Artificial; identical to SEQ ID NO: 16030
  Synthetic oligonucleotide

SEQ ID NO: 490436 - DNA, 55 bp, Artificial; identical to SEQ ID NO: 10222
  Synthetic oligonucleotide

SEQ ID NO: 490437 - DNA, 60 bp, Artificial; identical to SEQ ID NO: 14959
  Synthetic oligonucleotide

SEQ ID NO: 490438 - DNA, 60 bp, Artificial; identical to SEQ ID NO: 15076
  Synthetic oligonucleotide

SEQ ID NO: 490439 - DNA, 60 bp, Artificial; identical to SEQ ID NO: 8198
  Synthetic oligonucleotide

SEQ ID NO: 490440 - DNA, 60 bp, Artificial; identical to SEQ ID NO: 8336
  Synthetic oligonucleotide

SEQ ID NO: 490441 - DNA, 60 bp, Artificial; identical to SEQ ID NO: 10263
  Synthetic oligonucleotide

SEQ ID NO: 490442 - DNA, 60 bp, Artificial; identical to SEQ ID NO: 12660
  Synthetic oligonucleotide

SEQ ID NO: 490443 - DNA, 58 bp, Artificial; identical to SEQ ID NO: 17748
  Synthetic oligonucleotide

SEQ ID NO: 490444 - DNA, 56 bp, Artificial; identical to SEQ ID NO: 6398
  Synthetic oligonucleotide

SEQ ID NO: 490445 - DNA, 59 bp, Artificial; identical to SEQ ID NO: 17853
  Synthetic oligonucleotide

SEQ ID NO: 490446 - DNA, 55 bp, Artificial; identical to SEQ ID NO: 15945
  Synthetic oligonucleotide

SEQ ID NO: 490447 - DNA, 51 bp, Artificial; identical to SEQ ID NO: 13481
  Synthetic oligonucleotide

SEQ ID NO: 490448 - DNA, 57 bp, Artificial; identical to SEQ ID NO: 19319
  Synthetic oligonucleotide

SEQ ID NO: 490449 - DNA, 57 bp, Artificial; identical to SEQ ID NO: 12952
  Synthetic oligonucleotide

SEQ ID NO: 490450 - DNA, 54 bp, Artificial; identical to SEQ ID NO: 175
  Synthetic oligonucleotide

SEQ ID NO: 490451 - DNA, 58 bp, Artificial; identical to SEQ ID NO: 18294
  Synthetic oligonucleotide

SEQ ID NO: 490452 - DNA, 60 bp, Artificial; identical to SEQ ID NO: 10860
  Synthetic oligonucleotide

SEQ ID NO: 490453 - DNA, 59 bp, Artificial; identical to SEQ ID NO: 10634
  Synthetic oligonucleotide

SEQ ID NO: 490454 - DNA, 60 bp, Artificial; identical to SEQ ID NO: 23177
  Synthetic oligonucleotide

SEQ ID NO: 490455 - DNA, 54 bp, Artificial; identical to SEQ ID NO: 20340
  Synthetic oligonucleotide

SEQ ID NO: 490456 - DNA, 59 bp, Artificial; identical to SEQ ID NO: 13184
  Synthetic oligonucleotide

SEQ ID NO: 490457 - DNA, 60 bp, Artificial; identical to SEQ ID NO: 10532
  Synthetic oligonucleotide

SEQ ID NO: 490458 - DNA, 60 bp, Artificial; identical to SEQ ID NO: 79145
  Synthetic oligonucleotide

SEQ ID NO: 490459 - DNA, 58 bp, Artificial; identical to SEQ ID NO: 16422
  Synthetic oligonucleotide

SEQ ID NO: 490460 - DNA, 60 bp, Artificial; identical to SEQ ID NO: 7466
  Synthetic oligonucleotide

SEQ ID NO: 490461 - DNA, 57 bp, Artificial; identical to SEQ ID NO: 18795
  Synthetic oligonucleotide

SEQ ID NO: 490462 - DNA, 59 bp, Artificial; identical to SEQ ID NO: 7684
  Synthetic oligonucleotide

SEQ ID NO: 490463 - DNA, 56 bp, Artificial; identical to SEQ ID NO: 16932
  Synthetic oligonucleotide

SEQ ID NO: 490464 - DNA, 59 bp, Artificial; identical to SEQ ID NO: 18633
  Synthetic oligonucleotide

SEQ ID NO: 490465 - DNA, 60 bp, Artificial; identical to SEQ ID NO: 109198
  Synthetic oligonucleotide

SEQ ID NO: 490466 - DNA, 60 bp, Artificial; identical to SEQ ID NO: 13739
  Synthetic oligonucleotide

SEQ ID NO: 490467 - DNA, 54 bp, Artificial; identical to SEQ ID NO: 16116
  Synthetic oligonucleotide

SEQ ID NO: 490468 - DNA, 60 bp, Artificial; identical to SEQ ID NO: 12011
  Synthetic oligonucleotide

SEQ ID NO: 490469 - DNA, 59 bp, Artificial; identical to SEQ ID NO: 19181
  Synthetic oligonucleotide

SEQ ID NO: 490470 - DNA, 60 bp, Artificial; identical to SEQ ID NO: 11810
  Synthetic oligonucleotide

SEQ ID NO: 490471 - DNA, 60 bp, Artificial; identical to SEQ ID NO: 13367
  Synthetic oligonucleotide

SEQ ID NO: 490472 - DNA, 54 bp, Artificial; identical to SEQ ID NO: 11820
  Synthetic oligonucleotide

SEQ ID NO: 490473 - DNA, 56 bp, Artificial; identical to SEQ ID NO: 17746
  Synthetic oligonucleotide

SEQ ID NO: 490474 - DNA, 60 bp, Artificial; identical to SEQ ID NO: 9917
  Synthetic oligonucleotide

SEQ ID NO: 490475 - DNA, 60 bp, Artificial; identical to SEQ ID NO: 14633
  Synthetic oligonucleotide

SEQ ID NO: 490476 - DNA, 55 bp, Artificial; identical to SEQ ID NO: 10688
  Synthetic oligonucleotide

SEQ ID NO: 490477 - DNA, 60 bp, Artificial; identical to SEQ ID NO: 255
  Synthetic oligonucleotide

SEQ ID NO: 490478 - DNA, 57 bp, Artificial; identical to SEQ ID NO: 20065
  Synthetic oligonucleotide

SEQ ID NO: 490479 - DNA, 60 bp, Artificial; identical to SEQ ID NO: 75379
  Synthetic oligonucleotide

SEQ ID NO: 490480 - DNA, 60 bp, Artificial; identical to SEQ ID NO: 13094
  Synthetic oligonucleotide

SEQ ID NO: 490481 - DNA, 60 bp, Artificial; identical to SEQ ID NO: 15538
  Synthetic oligonucleotide

SEQ ID NO: 490482 - DNA, 60 bp, Artificial; identical to SEQ ID NO: 5762
  Synthetic oligonucleotide

SEQ ID NO: 490483 - DNA, 60 bp, Artificial; identical to SEQ ID NO: 12471
  Synthetic oligonucleotide

SEQ ID NO: 490484 - DNA, 60 bp, Artificial; identical to SEQ ID NO: 9014
  Synthetic oligonucleotide

SEQ ID NO: 490485 - DNA, 60 bp, Artificial; identical to SEQ ID NO: 8401
  Synthetic oligonucleotide

SEQ ID NO: 490486 - DNA, 60 bp, Artificial; identical to SEQ ID NO: 8008
  Synthetic oligonucleotide

SEQ ID NO: 490487 - DNA, 55 bp, Artificial; identical to SEQ ID NO: 16428
  Synthetic oligonucleotide

SEQ ID NO: 490488 - DNA, 50 bp, Artificial; identical to SEQ ID NO: 18892
  Synthetic oligonucleotide

SEQ ID NO: 490489 - DNA, 57 bp, Artificial; identical to SEQ ID NO: 15937
  Synthetic oligonucleotide

SEQ ID NO: 490490 - DNA, 57 bp, Artificial; identical to SEQ ID NO: 20386
  Synthetic oligonucleotide

SEQ ID NO: 490491 - DNA, 54 bp, Artificial; identical to SEQ ID NO: 76
  Synthetic oligonucleotide

SEQ ID NO: 490492 - DNA, 58 bp, Artificial; identical to SEQ ID NO: 16418
  Synthetic oligonucleotide

SEQ ID NO: 490493 - DNA, 55 bp, Artificial; identical to SEQ ID NO: 20429
  Synthetic oligonucleotide

SEQ ID NO: 490494 - DNA, 59 bp, Artificial; identical to SEQ ID NO: 16718
  Synthetic oligonucleotide

SEQ ID NO: 490495 - DNA, 58 bp, Artificial; identical to SEQ ID NO: 13966
  Synthetic oligonucleotide

SEQ ID NO: 490496 - DNA, 56 bp, Artificial; identical to SEQ ID NO: 9079
  Synthetic oligonucleotide

SEQ ID NO: 490497 - DNA, 50 bp, Artificial; identical to SEQ ID NO: 7275
  Synthetic oligonucleotide

SEQ ID NO: 490498 - DNA, 53 bp, Artificial; identical to SEQ ID NO: 13754
  Synthetic oligonucleotide

SEQ ID NO: 490499 - DNA, 60 bp, Artificial; identical to SEQ ID NO: 13264
  Synthetic oligonucleotide

SEQ ID NO: 490500 - DNA, 57 bp, Artificial; identical to SEQ ID NO: 16413
  Synthetic oligonucleotide

SEQ ID NO: 490501 - DNA, 56 bp, Artificial; identical to SEQ ID NO: 20440
  Synthetic oligonucleotide

SEQ ID NO: 490502 - DNA, 52 bp, Artificial; identical to SEQ ID NO: 16699
  Synthetic oligonucleotide

SEQ ID NO: 490503 - DNA, 60 bp, Artificial; identical to SEQ ID NO: 7089
  Synthetic oligonucleotide

SEQ ID NO: 490504 - DNA, 55 bp, Artificial; identical to SEQ ID NO: 6132
  Synthetic oligonucleotide

SEQ ID NO: 490505 - DNA, 60 bp, Artificial; identical to SEQ ID NO: 12985
  Synthetic oligonucleotide

SEQ ID NO: 490506 - DNA, 60 bp, Artificial; identical to SEQ ID NO: 80906
  Synthetic oligonucleotide

SEQ ID NO: 490507 - DNA, 60 bp, Artificial; identical to SEQ ID NO: 15627
  Synthetic oligonucleotide

SEQ ID NO: 490508 - DNA, 60 bp, Artificial; identical to SEQ ID NO: 14386
  Synthetic oligonucleotide

SEQ ID NO: 490509 - DNA, 60 bp, Artificial; identical to SEQ ID NO: 14453
  Synthetic oligonucleotide

SEQ ID NO: 490510 - DNA, 60 bp, Artificial; identical to SEQ ID NO: 12880
  Synthetic oligonucleotide

SEQ ID NO: 490511 - DNA, 60 bp, Artificial; identical to SEQ ID NO: 8942
  Synthetic oligonucleotide

SEQ ID NO: 490512 - DNA, 60 bp, Artificial; identical to SEQ ID NO: 5994
  Synthetic oligonucleotide

SEQ ID NO: 490513 - DNA, 60 bp, Artificial; identical to SEQ ID NO: 5931
  Synthetic oligonucleotide

SEQ ID NO: 490514 - DNA, 59 bp, Artificial; identical to SEQ ID NO: 18191
  Synthetic oligonucleotide

SEQ ID NO: 490515 - DNA, 60 bp, Artificial; identical to SEQ ID NO: 12263
  Synthetic oligonucleotide

SEQ ID NO: 490516 - DNA, 54 bp, Artificial; identical to SEQ ID NO: 15061
  Synthetic oligonucleotide

SEQ ID NO: 490517 - DNA, 58 bp, Artificial; identical to SEQ ID NO: 18720
  Synthetic oligonucleotide

SEQ ID NO: 490518 - DNA, 60 bp, Artificial; identical to SEQ ID NO: 15536
  Synthetic oligonucleotide

SEQ ID NO: 490519 - DNA, 60 bp, Artificial; identical to SEQ ID NO: 14166
  Synthetic oligonucleotide

SEQ ID NO: 490520 - DNA, 53 bp, Artificial; identical to SEQ ID NO: 18690
  Synthetic oligonucleotide

SEQ ID NO: 490521 - DNA, 60 bp, Artificial; identical to SEQ ID NO: 23367
  Synthetic oligonucleotide

SEQ ID NO: 490522 - DNA, 60 bp, Artificial; identical to SEQ ID NO: 14162
  Synthetic oligonucleotide

SEQ ID NO: 490523 - DNA, 60 bp, Artificial; identical to SEQ ID NO: 12405
  Synthetic oligonucleotide

SEQ ID NO: 490524 - DNA, 60 bp, Artificial; identical to SEQ ID NO: 7597
  Synthetic oligonucleotide

SEQ ID NO: 490525 - DNA, 60 bp, Artificial; identical to SEQ ID NO: 6605
  Synthetic oligonucleotide

SEQ ID NO: 490526 - DNA, 57 bp, Artificial; identical to SEQ ID NO: 20307
  Synthetic oligonucleotide

SEQ ID NO: 490527 - DNA, 60 bp, Artificial; identical to SEQ ID NO: 7870
  Synthetic oligonucleotide

SEQ ID NO: 490528 - DNA, 60 bp, Artificial; identical to SEQ ID NO: 13369
  Synthetic oligonucleotide

SEQ ID NO: 490529 - DNA, 60 bp, Artificial; identical to SEQ ID NO: 14485
  Synthetic oligonucleotide

SEQ ID NO: 490530 - DNA, 60 bp, Artificial; identical to SEQ ID NO: 12276
  Synthetic oligonucleotide

SEQ ID NO: 490531 - DNA, 58 bp, Artificial; identical to SEQ ID NO: 16296
  Synthetic oligonucleotide

SEQ ID NO: 490532 - DNA, 57 bp, Artificial; identical to SEQ ID NO: 14593
  Synthetic oligonucleotide

SEQ ID NO: 490533 - DNA, 55 bp, Artificial; identical to SEQ ID NO: 17366
  Synthetic oligonucleotide

SEQ ID NO: 490534 - DNA, 55 bp, Artificial; identical to SEQ ID NO: 13271
  Synthetic oligonucleotide

SEQ ID NO: 490535 - DNA, 60 bp, Artificial; identical to SEQ ID NO: 37937
  Synthetic oligonucleotide

SEQ ID NO: 490536 - DNA, 54 bp, Artificial; identical to SEQ ID NO: 17435
  Synthetic oligonucleotide

SEQ ID NO: 490537 - DNA, 55 bp, Artificial; identical to SEQ ID NO: 11960
  Synthetic oligonucleotide

SEQ ID NO: 490538 - DNA, 60 bp, Artificial; identical to SEQ ID NO: 10857
  Synthetic oligonucleotide

SEQ ID NO: 490539 - DNA, 56 bp, Artificial; identical to SEQ ID NO: 10751
  Synthetic oligonucleotide

SEQ ID NO: 490540 - DNA, 59 bp, Artificial; identical to SEQ ID NO: 18913
  Synthetic oligonucleotide

SEQ ID NO: 490541 - DNA, 56 bp, Artificial; identical to SEQ ID NO: 6686
  Synthetic oligonucleotide

SEQ ID NO: 490542 - DNA, 60 bp, Artificial; identical to SEQ ID NO: 5735
  Synthetic oligonucleotide

SEQ ID NO: 490543 - DNA, 58 bp, Artificial; identical to SEQ ID NO: 19626
  Synthetic oligonucleotide

SEQ ID NO: 490544 - DNA, 54 bp, Artificial; identical to SEQ ID NO: 8284
  Synthetic oligonucleotide

SEQ ID NO: 490545 - DNA, 57 bp, Artificial; identical to SEQ ID NO: 15970
  Synthetic oligonucleotide

SEQ ID NO: 490546 - DNA, 52 bp, Artificial; identical to SEQ ID NO: 8704
  Synthetic oligonucleotide

SEQ ID NO: 490547 - DNA, 60 bp, Artificial; identical to SEQ ID NO: 6738
  Synthetic oligonucleotide

SEQ ID NO: 490548 - DNA, 60 bp, Artificial; identical to SEQ ID NO: 6671
  Synthetic oligonucleotide

SEQ ID NO: 490549 - DNA, 58 bp, Artificial; identical to SEQ ID NO: 19592
  Synthetic oligonucleotide

SEQ ID NO: 490550 - DNA, 59 bp, Artificial; identical to SEQ ID NO: 18054
  Synthetic oligonucleotide

SEQ ID NO: 490551 - DNA, 53 bp, Artificial; identical to SEQ ID NO: 12265
  Synthetic oligonucleotide

SEQ ID NO: 490552 - DNA, 57 bp, Artificial; identical to SEQ ID NO: 20034
  Synthetic oligonucleotide

SEQ ID NO: 490553 - DNA, 55 bp, Artificial; identical to SEQ ID NO: 12417
  Synthetic oligonucleotide

SEQ ID NO: 490554 - DNA, 57 bp, Artificial; identical to SEQ ID NO: 20287
  Synthetic oligonucleotide

SEQ ID NO: 490555 - DNA, 54 bp, Artificial; identical to SEQ ID NO: 18176
  Synthetic oligonucleotide

SEQ ID NO: 490556 - DNA, 60 bp, Artificial; identical to SEQ ID NO: 13123
  Synthetic oligonucleotide

SEQ ID NO: 490557 - DNA, 60 bp, Artificial; identical to SEQ ID NO: 6834
  Synthetic oligonucleotide

SEQ ID NO: 490558 - DNA, 60 bp, Artificial; identical to SEQ ID NO: 15131
  Synthetic oligonucleotide

SEQ ID NO: 490559 - DNA, 54 bp, Artificial; identical to SEQ ID NO: 13525
  Synthetic oligonucleotide

SEQ ID NO: 490560 - DNA, 50 bp, Artificial; identical to SEQ ID NO: 16064
  Synthetic oligonucleotide

SEQ ID NO: 490561 - DNA, 58 bp, Artificial; identical to SEQ ID NO: 19115
  Synthetic oligonucleotide

SEQ ID NO: 490562 - DNA, 54 bp, Artificial; identical to SEQ ID NO: 10646
  Synthetic oligonucleotide

SEQ ID NO: 490563 - DNA, 60 bp, Artificial; identical to SEQ ID NO: 8562
  Synthetic oligonucleotide

SEQ ID NO: 490564 - DNA, 54 bp, Artificial; identical to SEQ ID NO: 18094
  Synthetic oligonucleotide

SEQ ID NO: 490565 - DNA, 57 bp, Artificial; identical to SEQ ID NO: 19585
  Synthetic oligonucleotide

SEQ ID NO: 490566 - DNA, 56 bp, Artificial; identical to SEQ ID NO: 14219
  Synthetic oligonucleotide

SEQ ID NO: 490567 - DNA, 50 bp, Artificial; identical to SEQ ID NO: 13295
  Synthetic oligonucleotide

SEQ ID NO: 490568 - DNA, 60 bp, Artificial; identical to SEQ ID NO: 11130
  Synthetic oligonucleotide

SEQ ID NO: 490569 - DNA, 59 bp, Artificial; identical to SEQ ID NO: 20455
  Synthetic oligonucleotide

SEQ ID NO: 490570 - DNA, 55 bp, Artificial; identical to SEQ ID NO: 12437
  Synthetic oligonucleotide

SEQ ID NO: 490571 - DNA, 51 bp, Artificial; identical to SEQ ID NO: 10668
  Synthetic oligonucleotide

SEQ ID NO: 490572 - DNA, 55 bp, Artificial; identical to SEQ ID NO: 14045
  Synthetic oligonucleotide

SEQ ID NO: 490573 - DNA, 59 bp, Artificial; identical to SEQ ID NO: 20434
  Synthetic oligonucleotide

SEQ ID NO: 490574 - DNA, 59 bp, Artificial; identical to SEQ ID NO: 19186
  Synthetic oligonucleotide

SEQ ID NO: 490575 - DNA, 57 bp, Artificial; identical to SEQ ID NO: 18655
  Synthetic oligonucleotide

SEQ ID NO: 490576 - DNA, 60 bp, Artificial; identical to SEQ ID NO: 12663
  Synthetic oligonucleotide

SEQ ID NO: 490577 - DNA, 57 bp, Artificial; identical to SEQ ID NO: 19624
  Synthetic oligonucleotide

SEQ ID NO: 490578 - DNA, 57 bp, Artificial; identical to SEQ ID NO: 17978
  Synthetic oligonucleotide

SEQ ID NO: 490579 - DNA, 53 bp, Artificial; identical to SEQ ID NO: 8127
  Synthetic oligonucleotide

SEQ ID NO: 490580 - DNA, 56 bp, Artificial; identical to SEQ ID NO: 16269
  Synthetic oligonucleotide

SEQ ID NO: 490581 - DNA, 51 bp, Artificial; identical to SEQ ID NO: 11485
  Synthetic oligonucleotide

SEQ ID NO: 490582 - DNA, 55 bp, Artificial; identical to SEQ ID NO: 6677
  Synthetic oligonucleotide

SEQ ID NO: 490583 - DNA, 57 bp, Artificial; identical to SEQ ID NO: 18268
  Synthetic oligonucleotide

SEQ ID NO: 490584 - DNA, 57 bp, Artificial; identical to SEQ ID NO: 13523
  Synthetic oligonucleotide

SEQ ID NO: 490585 - DNA, 60 bp, Artificial; identical to SEQ ID NO: 10908
  Synthetic oligonucleotide

SEQ ID NO: 490586 - DNA, 57 bp, Artificial; identical to SEQ ID NO: 14343
  Synthetic oligonucleotide

SEQ ID NO: 490587 - DNA, 55 bp, Artificial; identical to SEQ ID NO: 14714
  Synthetic oligonucleotide

SEQ ID NO: 490588 - DNA, 60 bp, Artificial; identical to SEQ ID NO: 15681
  Synthetic oligonucleotide

SEQ ID NO: 490589 - DNA, 54 bp, Artificial; identical to SEQ ID NO: 7807
  Synthetic oligonucleotide

SEQ ID NO: 490590 - DNA, 53 bp, Artificial; identical to SEQ ID NO: 6914
  Synthetic oligonucleotide

SEQ ID NO: 490591 - DNA, 58 bp, Artificial; identical to SEQ ID NO: 19866
  Synthetic oligonucleotide

SEQ ID NO: 490592 - DNA, 60 bp, Artificial; identical to SEQ ID NO: 35936
  Synthetic oligonucleotide

SEQ ID NO: 490593 - DNA, 60 bp, Artificial; identical to SEQ ID NO: 11932
  Synthetic oligonucleotide

SEQ ID NO: 490594 - DNA, 58 bp, Artificial; identical to SEQ ID NO: 17394
  Synthetic oligonucleotide

SEQ ID NO: 490595 - DNA, 57 bp, Artificial; identical to SEQ ID NO: 18320
  Synthetic oligonucleotide

SEQ ID NO: 490596 - DNA, 60 bp, Artificial; identical to SEQ ID NO: 8607
  Synthetic oligonucleotide

SEQ ID NO: 490597 - DNA, 52 bp, Artificial; identical to SEQ ID NO: 18247
  Synthetic oligonucleotide

SEQ ID NO: 490598 - DNA, 60 bp, Artificial; identical to SEQ ID NO: 9366
  Synthetic oligonucleotide

SEQ ID NO: 490599 - DNA, 60 bp, Artificial; identical to SEQ ID NO: 13557
  Synthetic oligonucleotide

SEQ ID NO: 490600 - DNA, 60 bp, Artificial; identical to SEQ ID NO: 15855
  Synthetic oligonucleotide

SEQ ID NO: 490601 - DNA, 60 bp, Artificial; identical to SEQ ID NO: 9523
  Synthetic oligonucleotide

SEQ ID NO: 490602 - DNA, 59 bp, Artificial; identical to SEQ ID NO: 19177
  Synthetic oligonucleotide

SEQ ID NO: 490603 - DNA, 58 bp, Artificial; identical to SEQ ID NO: 10871
  Synthetic oligonucleotide

SEQ ID NO: 490604 - DNA, 60 bp, Artificial; identical to SEQ ID NO: 12157
  Synthetic oligonucleotide

SEQ ID NO: 490605 - DNA, 52 bp, Artificial; identical to SEQ ID NO: 19235
  Synthetic oligonucleotide

SEQ ID NO: 490606 - DNA, 58 bp, Artificial; identical to SEQ ID NO: 17301
  Synthetic oligonucleotide

SEQ ID NO: 490607 - DNA, 60 bp, Artificial; identical to SEQ ID NO: 11373
  Synthetic oligonucleotide

SEQ ID NO: 490608 - DNA, 55 bp, Artificial; identical to SEQ ID NO: 12945
  Synthetic oligonucleotide

SEQ ID NO: 490609 - DNA, 60 bp, Artificial; identical to SEQ ID NO: 15185
  Synthetic oligonucleotide

SEQ ID NO: 490610 - DNA, 58 bp, Artificial; identical to SEQ ID NO: 7101
  Synthetic oligonucleotide

SEQ ID NO: 490611 - DNA, 60 bp, Artificial; identical to SEQ ID NO: 12399
  Synthetic oligonucleotide

SEQ ID NO: 490612 - DNA, 60 bp, Artificial; identical to SEQ ID NO: 239
  Synthetic oligonucleotide

SEQ ID NO: 490613 - DNA, 60 bp, Artificial; identical to SEQ ID NO: 10557
  Synthetic oligonucleotide

SEQ ID NO: 490614 - DNA, 60 bp, Artificial; identical to SEQ ID NO: 28259
  Synthetic oligonucleotide

SEQ ID NO: 490615 - DNA, 59 bp, Artificial; identical to SEQ ID NO: 18401
  Synthetic oligonucleotide

SEQ ID NO: 490616 - DNA, 60 bp, Artificial; identical to SEQ ID NO: 9719
  Synthetic oligonucleotide

SEQ ID NO: 490617 - DNA, 60 bp, Artificial; identical to SEQ ID NO: 7325
  Synthetic oligonucleotide

SEQ ID NO: 490618 - DNA, 60 bp, Artificial; identical to SEQ ID NO: 7820
  Synthetic oligonucleotide

SEQ ID NO: 490619 - DNA, 60 bp, Artificial; identical to SEQ ID NO: 12601
  Synthetic oligonucleotide

SEQ ID NO: 490620 - DNA, 60 bp, Artificial; identical to SEQ ID NO: 6416
  Synthetic oligonucleotide

SEQ ID NO: 490621 - DNA, 60 bp, Artificial; identical to SEQ ID NO: 15632
  Synthetic oligonucleotide

SEQ ID NO: 490622 - DNA, 60 bp, Artificial; identical to SEQ ID NO: 59469
  Synthetic oligonucleotide

SEQ ID NO: 490623 - DNA, 60 bp, Artificial; identical to SEQ ID NO: 12308
  Synthetic oligonucleotide

SEQ ID NO: 490624 - DNA, 58 bp, Artificial; identical to SEQ ID NO: 16285
  Synthetic oligonucleotide

SEQ ID NO: 490625 - DNA, 58 bp, Artificial; identical to SEQ ID NO: 17966
  Synthetic oligonucleotide

SEQ ID NO: 490626 - DNA, 60 bp, Artificial; identical to SEQ ID NO: 8020
  Synthetic oligonucleotide

SEQ ID NO: 490627 - DNA, 52 bp, Artificial; identical to SEQ ID NO: 12662
  Synthetic oligonucleotide

SEQ ID NO: 490628 - DNA, 60 bp, Artificial; identical to SEQ ID NO: 11263
  Synthetic oligonucleotide

SEQ ID NO: 490629 - DNA, 56 bp, Artificial; identical to SEQ ID NO: 10740
  Synthetic oligonucleotide

SEQ ID NO: 490630 - DNA, 60 bp, Artificial; identical to SEQ ID NO: 10713
  Synthetic oligonucleotide

SEQ ID NO: 490631 - DNA, 55 bp, Artificial; identical to SEQ ID NO: 20411
  Synthetic oligonucleotide

SEQ ID NO: 490632 - DNA, 60 bp, Artificial; identical to SEQ ID NO: 6148
  Synthetic oligonucleotide

SEQ ID NO: 490633 - DNA, 60 bp, Artificial; identical to SEQ ID NO: 11910
  Synthetic oligonucleotide

SEQ ID NO: 490634 - DNA, 60 bp, Artificial; identical to SEQ ID NO: 9338
  Synthetic oligonucleotide

SEQ ID NO: 490635 - DNA, 60 bp, Artificial; identical to SEQ ID NO: 8617
  Synthetic oligonucleotide

SEQ ID NO: 490636 - DNA, 60 bp, Artificial; identical to SEQ ID NO: 8360
  Synthetic oligonucleotide

SEQ ID NO: 490637 - DNA, 60 bp, Artificial; identical to SEQ ID NO: 13516
  Synthetic oligonucleotide

SEQ ID NO: 490638 - DNA, 60 bp, Artificial; identical to SEQ ID NO: 6283
  Synthetic oligonucleotide

SEQ ID NO: 490639 - DNA, 60 bp, Artificial; identical to SEQ ID NO: 8294
  Synthetic oligonucleotide

SEQ ID NO: 490640 - DNA, 58 bp, Artificial; identical to SEQ ID NO: 16349
  Synthetic oligonucleotide

SEQ ID NO: 490641 - DNA, 57 bp, Artificial; identical to SEQ ID NO: 9873
  Synthetic oligonucleotide

SEQ ID NO: 490642 - DNA, 57 bp, Artificial; identical to SEQ ID NO: 20487
  Synthetic oligonucleotide

SEQ ID NO: 490643 - DNA, 52 bp, Artificial; identical to SEQ ID NO: 13897
  Synthetic oligonucleotide

SEQ ID NO: 490644 - DNA, 58 bp, Artificial; identical to SEQ ID NO: 20490
  Synthetic oligonucleotide

SEQ ID NO: 490645 - DNA, 60 bp, Artificial; identical to SEQ ID NO: 6048
  Synthetic oligonucleotide

SEQ ID NO: 490646 - DNA, 55 bp, Artificial; identical to SEQ ID NO: 15647
  Synthetic oligonucleotide

SEQ ID NO: 490647 - DNA, 57 bp, Artificial; identical to SEQ ID NO: 19157
  Synthetic oligonucleotide

SEQ ID NO: 490648 - DNA, 51 bp, Artificial; identical to SEQ ID NO: 17459
  Synthetic oligonucleotide

SEQ ID NO: 490649 - DNA, 60 bp, Artificial; identical to SEQ ID NO: 7008
  Synthetic oligonucleotide

SEQ ID NO: 490650 - DNA, 54 bp, Artificial; identical to SEQ ID NO: 18588
  Synthetic oligonucleotide

SEQ ID NO: 490651 - DNA, 60 bp, Artificial; identical to SEQ ID NO: 15808
  Synthetic oligonucleotide

SEQ ID NO: 490652 - DNA, 60 bp, Artificial; identical to SEQ ID NO: 8082
  Synthetic oligonucleotide

SEQ ID NO: 490653 - DNA, 56 bp, Artificial; identical to SEQ ID NO: 16341
  Synthetic oligonucleotide

SEQ ID NO: 490654 - DNA, 60 bp, Artificial; identical to SEQ ID NO: 8406
  Synthetic oligonucleotide

SEQ ID NO: 490655 - DNA, 57 bp, Artificial; identical to SEQ ID NO: 19312
  Synthetic oligonucleotide

SEQ ID NO: 490656 - DNA, 54 bp, Artificial; identical to SEQ ID NO: 20382
  Synthetic oligonucleotide

SEQ ID NO: 490657 - DNA, 60 bp, Artificial; identical to SEQ ID NO: 12403
  Synthetic oligonucleotide

SEQ ID NO: 490658 - DNA, 60 bp, Artificial; identical to SEQ ID NO: 8051
  Synthetic oligonucleotide

SEQ ID NO: 490659 - DNA, 60 bp, Artificial; identical to SEQ ID NO: 14469
  Synthetic oligonucleotide

SEQ ID NO: 490660 - DNA, 60 bp, Artificial; identical to SEQ ID NO: 9474
  Synthetic oligonucleotide

SEQ ID NO: 490661 - DNA, 55 bp, Artificial; identical to SEQ ID NO: 6324
  Synthetic oligonucleotide

SEQ ID NO: 490662 - DNA, 60 bp, Artificial; identical to SEQ ID NO: 7839
  Synthetic oligonucleotide

SEQ ID NO: 490663 - DNA, 60 bp, Artificial; identical to SEQ ID NO: 11293
  Synthetic oligonucleotide

SEQ ID NO: 490664 - DNA, 60 bp, Artificial; identical to SEQ ID NO: 15799
  Synthetic oligonucleotide

SEQ ID NO: 490665 - DNA, 60 bp, Artificial; identical to SEQ ID NO: 12422
  Synthetic oligonucleotide

SEQ ID NO: 490666 - DNA, 55 bp, Artificial; identical to SEQ ID NO: 11504
  Synthetic oligonucleotide

SEQ ID NO: 490667 - DNA, 54 bp, Artificial; identical to SEQ ID NO: 18758
  Synthetic oligonucleotide

SEQ ID NO: 490668 - DNA, 60 bp, Artificial; identical to SEQ ID NO: 6576
  Synthetic oligonucleotide

SEQ ID NO: 490669 - DNA, 54 bp, Artificial; identical to SEQ ID NO: 16227
  Synthetic oligonucleotide

SEQ ID NO: 490670 - DNA, 59 bp, Artificial; identical to SEQ ID NO: 18192
  Synthetic oligonucleotide

SEQ ID NO: 490671 - DNA, 60 bp, Artificial; identical to SEQ ID NO: 12508
  Synthetic oligonucleotide

SEQ ID NO: 490672 - DNA, 58 bp, Artificial; identical to SEQ ID NO: 17346
  Synthetic oligonucleotide

SEQ ID NO: 490673 - DNA, 59 bp, Artificial; identical to SEQ ID NO: 9753
  Synthetic oligonucleotide

SEQ ID NO: 490674 - DNA, 54 bp, Artificial; identical to SEQ ID NO: 18677
  Synthetic oligonucleotide

SEQ ID NO: 490675 - DNA, 50 bp, Artificial; identical to SEQ ID NO: 10836
  Synthetic oligonucleotide

SEQ ID NO: 490676 - DNA, 57 bp, Artificial; identical to SEQ ID NO: 20262
  Synthetic oligonucleotide

SEQ ID NO: 490677 - DNA, 54 bp, Artificial; identical to SEQ ID NO: 13568
  Synthetic oligonucleotide

SEQ ID NO: 490678 - DNA, 60 bp, Artificial; identical to SEQ ID NO: 5946
  Synthetic oligonucleotide

SEQ ID NO: 490679 - DNA, 59 bp, Artificial; identical to SEQ ID NO: 17379
  Synthetic oligonucleotide

SEQ ID NO: 490680 - DNA, 58 bp, Artificial; identical to SEQ ID NO: 15792
  Synthetic oligonucleotide

SEQ ID NO: 490681 - DNA, 53 bp, Artificial; identical to SEQ ID NO: 16498
  Synthetic oligonucleotide

SEQ ID NO: 490682 - DNA, 57 bp, Artificial; identical to SEQ ID NO: 14962
  Synthetic oligonucleotide

SEQ ID NO: 490683 - DNA, 60 bp, Artificial; identical to SEQ ID NO: 28863
  Synthetic oligonucleotide

SEQ ID NO: 490684 - DNA, 59 bp, Artificial; identical to SEQ ID NO: 19225
  Synthetic oligonucleotide

SEQ ID NO: 490685 - DNA, 60 bp, Artificial; identical to SEQ ID NO: 9548
  Synthetic oligonucleotide

SEQ ID NO: 490686 - DNA, 60 bp, Artificial; identical to SEQ ID NO: 14237
  Synthetic oligonucleotide

SEQ ID NO: 490687 - DNA, 60 bp, Artificial; identical to SEQ ID NO: 11553
  Synthetic oligonucleotide

SEQ ID NO: 490688 - DNA, 51 bp, Artificial; identical to SEQ ID NO: 18903
  Synthetic oligonucleotide

SEQ ID NO: 490689 - DNA, 57 bp, Artificial; identical to SEQ ID NO: 16489
  Synthetic oligonucleotide

SEQ ID NO: 490690 - DNA, 60 bp, Artificial; identical to SEQ ID NO: 12771
  Synthetic oligonucleotide

SEQ ID NO: 490691 - DNA, 51 bp, Artificial; identical to SEQ ID NO: 18728
  Synthetic oligonucleotide

SEQ ID NO: 490692 - DNA, 60 bp, Artificial; identical to SEQ ID NO: 8031
  Synthetic oligonucleotide

SEQ ID NO: 490693 - DNA, 60 bp, Artificial; identical to SEQ ID NO: 13515
  Synthetic oligonucleotide

SEQ ID NO: 490694 - DNA, 57 bp, Artificial; identical to SEQ ID NO: 17801
  Synthetic oligonucleotide

SEQ ID NO: 490695 - DNA, 55 bp, Artificial; identical to SEQ ID NO: 9542
  Synthetic oligonucleotide

SEQ ID NO: 490696 - DNA, 50 bp, Artificial; identical to SEQ ID NO: 6506
  Synthetic oligonucleotide

SEQ ID NO: 490697 - DNA, 56 bp, Artificial; identical to SEQ ID NO: 10414
  Synthetic oligonucleotide

SEQ ID NO: 490698 - DNA, 58 bp, Artificial; identical to SEQ ID NO: 20025
  Synthetic oligonucleotide

SEQ ID NO: 490699 - DNA, 56 bp, Artificial; identical to SEQ ID NO: 20033
  Synthetic oligonucleotide

SEQ ID NO: 490700 - DNA, 60 bp, Artificial; identical to SEQ ID NO: 8016
  Synthetic oligonucleotide

SEQ ID NO: 490701 - DNA, 59 bp, Artificial; identical to SEQ ID NO: 16174
  Synthetic oligonucleotide

SEQ ID NO: 490702 - DNA, 56 bp, Artificial; identical to SEQ ID NO: 19138
  Synthetic oligonucleotide

SEQ ID NO: 490703 - DNA, 53 bp, Artificial; identical to SEQ ID NO: 16287
  Synthetic oligonucleotide

SEQ ID NO: 490704 - DNA, 59 bp, Artificial; identical to SEQ ID NO: 18535
  Synthetic oligonucleotide

SEQ ID NO: 490705 - DNA, 59 bp, Artificial; identical to SEQ ID NO: 17226
  Synthetic oligonucleotide

SEQ ID NO: 490706 - DNA, 60 bp, Artificial; identical to SEQ ID NO: 11095
  Synthetic oligonucleotide

SEQ ID NO: 490707 - DNA, 58 bp, Artificial; identical to SEQ ID NO: 7502
  Synthetic oligonucleotide

SEQ ID NO: 490708 - DNA, 60 bp, Artificial; identical to SEQ ID NO: 14405
  Synthetic oligonucleotide

SEQ ID NO: 490709 - DNA, 51 bp, Artificial; identical to SEQ ID NO: 6149
  Synthetic oligonucleotide

SEQ ID NO: 490710 - DNA, 60 bp, Artificial; identical to SEQ ID NO: 11133
  Synthetic oligonucleotide

SEQ ID NO: 490711 - DNA, 57 bp, Artificial; identical to SEQ ID NO: 18012
  Synthetic oligonucleotide

SEQ ID NO: 490712 - DNA, 60 bp, Artificial; identical to SEQ ID NO: 7153
  Synthetic oligonucleotide

SEQ ID NO: 490713 - DNA, 60 bp, Artificial; identical to SEQ ID NO: 10650
  Synthetic oligonucleotide

SEQ ID NO: 490714 - DNA, 59 bp, Artificial; identical to SEQ ID NO: 16565
  Synthetic oligonucleotide

SEQ ID NO: 490715 - DNA, 60 bp, Artificial; identical to SEQ ID NO: 13866
  Synthetic oligonucleotide

SEQ ID NO: 490716 - DNA, 60 bp, Artificial; identical to SEQ ID NO: 10043
  Synthetic oligonucleotide

SEQ ID NO: 490717 - DNA, 59 bp, Artificial; identical to SEQ ID NO: 17549
  Synthetic oligonucleotide

SEQ ID NO: 490718 - DNA, 58 bp, Artificial; identical to SEQ ID NO: 15594
  Synthetic oligonucleotide

SEQ ID NO: 490719 - DNA, 59 bp, Artificial; identical to SEQ ID NO: 19224
  Synthetic oligonucleotide

SEQ ID NO: 490720 - DNA, 52 bp, Artificial; identical to SEQ ID NO: 13628
  Synthetic oligonucleotide

SEQ ID NO: 490721 - DNA, 59 bp, Artificial; identical to SEQ ID NO: 16426
  Synthetic oligonucleotide

SEQ ID NO: 490722 - DNA, 58 bp, Artificial; identical to SEQ ID NO: 17576
  Synthetic oligonucleotide

SEQ ID NO: 490723 - DNA, 60 bp, Artificial; identical to SEQ ID NO: 7901
  Synthetic oligonucleotide

SEQ ID NO: 490724 - DNA, 60 bp, Artificial; identical to SEQ ID NO: 13010
  Synthetic oligonucleotide

SEQ ID NO: 490725 - DNA, 60 bp, Artificial; identical to SEQ ID NO: 13737
  Synthetic oligonucleotide

SEQ ID NO: 490726 - DNA, 56 bp, Artificial; identical to SEQ ID NO: 15695
  Synthetic oligonucleotide

SEQ ID NO: 490727 - DNA, 59 bp, Artificial; identical to SEQ ID NO: 8221
  Synthetic oligonucleotide

SEQ ID NO: 490728 - DNA, 60 bp, Artificial; identical to SEQ ID NO: 13743
  Synthetic oligonucleotide

SEQ ID NO: 490729 - DNA, 55 bp, Artificial; identical to SEQ ID NO: 16970
  Synthetic oligonucleotide

SEQ ID NO: 490730 - DNA, 60 bp, Artificial; identical to SEQ ID NO: 13131
  Synthetic oligonucleotide

SEQ ID NO: 490731 - DNA, 59 bp, Artificial; identical to SEQ ID NO: 18291
  Synthetic oligonucleotide

SEQ ID NO: 490732 - DNA, 56 bp, Artificial; identical to SEQ ID NO: 10312
  Synthetic oligonucleotide

SEQ ID NO: 490733 - DNA, 60 bp, Artificial; identical to SEQ ID NO: 6618
  Synthetic oligonucleotide

SEQ ID NO: 490734 - DNA, 60 bp, Artificial; identical to SEQ ID NO: 13723
  Synthetic oligonucleotide

SEQ ID NO: 490735 - DNA, 59 bp, Artificial; identical to SEQ ID NO: 18500
  Synthetic oligonucleotide

SEQ ID NO: 490736 - DNA, 52 bp, Artificial; identical to SEQ ID NO: 15077
  Synthetic oligonucleotide

SEQ ID NO: 490737 - DNA, 60 bp, Artificial; identical to SEQ ID NO: 11937
  Synthetic oligonucleotide

SEQ ID NO: 490738 - DNA, 60 bp, Artificial; identical to SEQ ID NO: 12904
  Synthetic oligonucleotide

SEQ ID NO: 490739 - DNA, 56 bp, Artificial; identical to SEQ ID NO: 19009
  Synthetic oligonucleotide

SEQ ID NO: 490740 - DNA, 60 bp, Artificial; identical to SEQ ID NO: 10564
  Synthetic oligonucleotide

SEQ ID NO: 490741 - DNA, 56 bp, Artificial; identical to SEQ ID NO: 17351
  Synthetic oligonucleotide

SEQ ID NO: 490742 - DNA, 58 bp, Artificial; identical to SEQ ID NO: 16573
  Synthetic oligonucleotide

SEQ ID NO: 490743 - DNA, 60 bp, Artificial; identical to SEQ ID NO: 8077
  Synthetic oligonucleotide

SEQ ID NO: 490744 - DNA, 56 bp, Artificial; identical to SEQ ID NO: 15917
  Synthetic oligonucleotide

SEQ ID NO: 490745 - DNA, 60 bp, Artificial; identical to SEQ ID NO: 8043
  Synthetic oligonucleotide

SEQ ID NO: 490746 - DNA, 60 bp, Artificial; identical to SEQ ID NO: 14180
  Synthetic oligonucleotide

SEQ ID NO: 490747 - DNA, 60 bp, Artificial; identical to SEQ ID NO: 12202
  Synthetic oligonucleotide

SEQ ID NO: 490748 - DNA, 60 bp, Artificial; identical to SEQ ID NO: 15755
  Synthetic oligonucleotide

SEQ ID NO: 490749 - DNA, 60 bp, Artificial; identical to SEQ ID NO: 11964
  Synthetic oligonucleotide

SEQ ID NO: 490750 - DNA, 53 bp, Artificial; identical to SEQ ID NO: 17452
  Synthetic oligonucleotide

SEQ ID NO: 490751 - DNA, 60 bp, Artificial; identical to SEQ ID NO: 126
  Synthetic oligonucleotide

SEQ ID NO: 490752 - DNA, 55 bp, Artificial; identical to SEQ ID NO: 13179
  Synthetic oligonucleotide

SEQ ID NO: 490753 - DNA, 52 bp, Artificial; identical to SEQ ID NO: 14612
  Synthetic oligonucleotide

SEQ ID NO: 490754 - DNA, 59 bp, Artificial; identical to SEQ ID NO: 19086
  Synthetic oligonucleotide

SEQ ID NO: 490755 - DNA, 55 bp, Artificial; identical to SEQ ID NO: 5816
  Synthetic oligonucleotide

SEQ ID NO: 490756 - DNA, 60 bp, Artificial; identical to SEQ ID NO: 9222
  Synthetic oligonucleotide

SEQ ID NO: 490757 - DNA, 56 bp, Artificial; identical to SEQ ID NO: 16705
  Synthetic oligonucleotide

SEQ ID NO: 490758 - DNA, 60 bp, Artificial; identical to SEQ ID NO: 6424
  Synthetic oligonucleotide

SEQ ID NO: 490759 - DNA, 60 bp, Artificial; identical to SEQ ID NO: 6411
  Synthetic oligonucleotide

SEQ ID NO: 490760 - DNA, 60 bp, Artificial; identical to SEQ ID NO: 13944
  Synthetic oligonucleotide

SEQ ID NO: 490761 - DNA, 58 bp, Artificial; identical to SEQ ID NO: 11546
  Synthetic oligonucleotide

SEQ ID NO: 490762 - DNA, 55 bp, Artificial; identical to SEQ ID NO: 18932
  Synthetic oligonucleotide

SEQ ID NO: 490763 - DNA, 53 bp, Artificial; identical to SEQ ID NO: 19901
  Synthetic oligonucleotide

SEQ ID NO: 490764 - DNA, 57 bp, Artificial; identical to SEQ ID NO: 11014
  Synthetic oligonucleotide

SEQ ID NO: 490765 - DNA, 55 bp, Artificial; identical to SEQ ID NO: 5949
  Synthetic oligonucleotide

SEQ ID NO: 490766 - DNA, 60 bp, Artificial; identical to SEQ ID NO: 100454
  Synthetic oligonucleotide

SEQ ID NO: 490767 - DNA, 60 bp, Artificial; identical to SEQ ID NO: 13519
  Synthetic oligonucleotide

SEQ ID NO: 490768 - DNA, 60 bp, Artificial; identical to SEQ ID NO: 49027
  Synthetic oligonucleotide

SEQ ID NO: 490769 - DNA, 60 bp, Artificial; identical to SEQ ID NO: 10186
  Synthetic oligonucleotide

SEQ ID NO: 490770 - DNA, 55 bp, Artificial; identical to SEQ ID NO: 16265
  Synthetic oligonucleotide

SEQ ID NO: 490771 - DNA, 60 bp, Artificial; identical to SEQ ID NO: 10633
  Synthetic oligonucleotide

SEQ ID NO: 490772 - DNA, 59 bp, Artificial; identical to SEQ ID NO: 19413
  Synthetic oligonucleotide

SEQ ID NO: 490773 - DNA, 60 bp, Artificial; identical to SEQ ID NO: 78181
  Synthetic oligonucleotide

SEQ ID NO: 490774 - DNA, 60 bp, Artificial; identical to SEQ ID NO: 10407
  Synthetic oligonucleotide

SEQ ID NO: 490775 - DNA, 60 bp, Artificial; identical to SEQ ID NO: 6634
  Synthetic oligonucleotide

SEQ ID NO: 490776 - DNA, 60 bp, Artificial; identical to SEQ ID NO: 13601
  Synthetic oligonucleotide

SEQ ID NO: 490777 - DNA, 55 bp, Artificial; identical to SEQ ID NO: 11405
  Synthetic oligonucleotide

SEQ ID NO: 490778 - DNA, 56 bp, Artificial; identical to SEQ ID NO: 14351
  Synthetic oligonucleotide

SEQ ID NO: 490779 - DNA, 55 bp, Artificial; identical to SEQ ID NO: 8868
  Synthetic oligonucleotide

SEQ ID NO: 490780 - DNA, 50 bp, Artificial; identical to SEQ ID NO: 6419
  Synthetic oligonucleotide

SEQ ID NO: 490781 - DNA, 60 bp, Artificial; identical to SEQ ID NO: 10716
  Synthetic oligonucleotide

SEQ ID NO: 490782 - DNA, 60 bp, Artificial; identical to SEQ ID NO: 10571
  Synthetic oligonucleotide

SEQ ID NO: 490783 - DNA, 58 bp, Artificial; identical to SEQ ID NO: 20335
  Synthetic oligonucleotide

SEQ ID NO: 490784 - DNA, 60 bp, Artificial; identical to SEQ ID NO: 27418
  Synthetic oligonucleotide

SEQ ID NO: 490785 - DNA, 60 bp, Artificial; identical to SEQ ID NO: 37825
  Synthetic oligonucleotide

SEQ ID NO: 490786 - DNA, 58 bp, Artificial; identical to SEQ ID NO: 11818
  Synthetic oligonucleotide

SEQ ID NO: 490787 - DNA, 57 bp, Artificial; identical to SEQ ID NO: 18123
  Synthetic oligonucleotide

SEQ ID NO: 490788 - DNA, 60 bp, Artificial; identical to SEQ ID NO: 15405
  Synthetic oligonucleotide

SEQ ID NO: 490789 - DNA, 59 bp, Artificial; identical to SEQ ID NO: 19426
  Synthetic oligonucleotide

SEQ ID NO: 490790 - DNA, 55 bp, Artificial; identical to SEQ ID NO: 8795
  Synthetic oligonucleotide

SEQ ID NO: 490791 - DNA, 57 bp, Artificial; identical to SEQ ID NO: 15909
  Synthetic oligonucleotide

SEQ ID NO: 490792 - DNA, 59 bp, Artificial; identical to SEQ ID NO: 20169
  Synthetic oligonucleotide

SEQ ID NO: 490793 - DNA, 60 bp, Artificial; identical to SEQ ID NO: 103517
  Synthetic oligonucleotide

SEQ ID NO: 490794 - DNA, 52 bp, Artificial; identical to SEQ ID NO: 7456
  Synthetic oligonucleotide

SEQ ID NO: 490795 - DNA, 60 bp, Artificial; identical to SEQ ID NO: 8449
  Synthetic oligonucleotide

SEQ ID NO: 490796 - DNA, 60 bp, Artificial; identical to SEQ ID NO: 10856
  Synthetic oligonucleotide

SEQ ID NO: 490797 - DNA, 55 bp, Artificial; identical to SEQ ID NO: 20205
  Synthetic oligonucleotide

SEQ ID NO: 490798 - DNA, 59 bp, Artificial; identical to SEQ ID NO: 17990
  Synthetic oligonucleotide

SEQ ID NO: 490799 - DNA, 60 bp, Artificial; identical to SEQ ID NO: 108391
  Synthetic oligonucleotide

SEQ ID NO: 490800 - DNA, 60 bp, Artificial; identical to SEQ ID NO: 7429
  Synthetic oligonucleotide

SEQ ID NO: 490801 - DNA, 60 bp, Artificial; identical to SEQ ID NO: 7606
  Synthetic oligonucleotide

SEQ ID NO: 490802 - DNA, 60 bp, Artificial; identical to SEQ ID NO: 15376
  Synthetic oligonucleotide

SEQ ID NO: 490803 - DNA, 60 bp, Artificial; identical to SEQ ID NO: 6150
  Synthetic oligonucleotide

SEQ ID NO: 490804 - DNA, 60 bp, Artificial; identical to SEQ ID NO: 8619
  Synthetic oligonucleotide

SEQ ID NO: 490805 - DNA, 60 bp, Artificial; identical to SEQ ID NO: 13605
  Synthetic oligonucleotide

SEQ ID NO: 490806 - DNA, 52 bp, Artificial; identical to SEQ ID NO: 8697
  Synthetic oligonucleotide

SEQ ID NO: 490807 - DNA, 51 bp, Artificial; identical to SEQ ID NO: 12258
  Synthetic oligonucleotide

SEQ ID NO: 490808 - DNA, 56 bp, Artificial; identical to SEQ ID NO: 15947
  Synthetic oligonucleotide

SEQ ID NO: 490809 - DNA, 59 bp, Artificial; identical to SEQ ID NO: 17780
  Synthetic oligonucleotide

SEQ ID NO: 490810 - DNA, 60 bp, Artificial; identical to SEQ ID NO: 10078
  Synthetic oligonucleotide

SEQ ID NO: 490811 - DNA, 52 bp, Artificial; identical to SEQ ID NO: 6277
  Synthetic oligonucleotide

SEQ ID NO: 490812 - DNA, 59 bp, Artificial; identical to SEQ ID NO: 13574
  Synthetic oligonucleotide

SEQ ID NO: 490813 - DNA, 58 bp, Artificial; identical to SEQ ID NO: 17090
  Synthetic oligonucleotide

SEQ ID NO: 490814 - DNA, 60 bp, Artificial; identical to SEQ ID NO: 10815
  Synthetic oligonucleotide

SEQ ID NO: 490815 - DNA, 55 bp, Artificial; identical to SEQ ID NO: 15139
  Synthetic oligonucleotide

SEQ ID NO: 490816 - DNA, 60 bp, Artificial; identical to SEQ ID NO: 12081
  Synthetic oligonucleotide

SEQ ID NO: 490817 - DNA, 60 bp, Artificial; identical to SEQ ID NO: 10353
  Synthetic oligonucleotide

SEQ ID NO: 490818 - DNA, 60 bp, Artificial; identical to SEQ ID NO: 8018
  Synthetic oligonucleotide

SEQ ID NO: 490819 - DNA, 54 bp, Artificial; identical to SEQ ID NO: 8670
  Synthetic oligonucleotide

SEQ ID NO: 490820 - DNA, 56 bp, Artificial; identical to SEQ ID NO: 19270
  Synthetic oligonucleotide

SEQ ID NO: 490821 - DNA, 60 bp, Artificial; identical to SEQ ID NO: 11693
  Synthetic oligonucleotide

SEQ ID NO: 490822 - DNA, 55 bp, Artificial; identical to SEQ ID NO: 18698
  Synthetic oligonucleotide

SEQ ID NO: 490823 - DNA, 60 bp, Artificial; identical to SEQ ID NO: 7768
  Synthetic oligonucleotide

SEQ ID NO: 490824 - DNA, 53 bp, Artificial; identical to SEQ ID NO: 7953
  Synthetic oligonucleotide

SEQ ID NO: 490825 - DNA, 55 bp, Artificial; identical to SEQ ID NO: 20526
  Synthetic oligonucleotide

SEQ ID NO: 490826 - DNA, 60 bp, Artificial; identical to SEQ ID NO: 13741
  Synthetic oligonucleotide

SEQ ID NO: 490827 - DNA, 54 bp, Artificial; identical to SEQ ID NO: 7319
  Synthetic oligonucleotide

SEQ ID NO: 490828 - DNA, 60 bp, Artificial; identical to SEQ ID NO: 7880
  Synthetic oligonucleotide

SEQ ID NO: 490829 - DNA, 59 bp, Artificial; identical to SEQ ID NO: 19041
  Synthetic oligonucleotide

SEQ ID NO: 490830 - DNA, 60 bp, Artificial; identical to SEQ ID NO: 10708
  Synthetic oligonucleotide

SEQ ID NO: 490831 - DNA, 60 bp, Artificial; identical to SEQ ID NO: 9934
  Synthetic oligonucleotide

SEQ ID NO: 490832 - DNA, 60 bp, Artificial; identical to SEQ ID NO: 10651
  Synthetic oligonucleotide

SEQ ID NO: 490833 - DNA, 60 bp, Artificial; identical to SEQ ID NO: 6651
  Synthetic oligonucleotide

SEQ ID NO: 490834 - DNA, 59 bp, Artificial; identical to SEQ ID NO: 19697
  Synthetic oligonucleotide

SEQ ID NO: 490835 - DNA, 60 bp, Artificial; identical to SEQ ID NO: 11650
  Synthetic oligonucleotide

SEQ ID NO: 490836 - DNA, 60 bp, Artificial; identical to SEQ ID NO: 11126
  Synthetic oligonucleotide

SEQ ID NO: 490837 - DNA, 54 bp, Artificial; identical to SEQ ID NO: 18283
  Synthetic oligonucleotide

SEQ ID NO: 490838 - DNA, 60 bp, Artificial; identical to SEQ ID NO: 11989
  Synthetic oligonucleotide

SEQ ID NO: 490839 - DNA, 60 bp, Artificial; identical to SEQ ID NO: 12306
  Synthetic oligonucleotide

SEQ ID NO: 490840 - DNA, 55 bp, Artificial; identical to SEQ ID NO: 18945
  Synthetic oligonucleotide

SEQ ID NO: 490841 - DNA, 59 bp, Artificial; identical to SEQ ID NO: 16654
  Synthetic oligonucleotide

SEQ ID NO: 490842 - DNA, 60 bp, Artificial; identical to SEQ ID NO: 8874
  Synthetic oligonucleotide

SEQ ID NO: 490843 - DNA, 54 bp, Artificial; identical to SEQ ID NO: 7437
  Synthetic oligonucleotide

SEQ ID NO: 490844 - DNA, 55 bp, Artificial; identical to SEQ ID NO: 12404
  Synthetic oligonucleotide

SEQ ID NO: 490845 - DNA, 58 bp, Artificial; identical to SEQ ID NO: 16236
  Synthetic oligonucleotide

SEQ ID NO: 490846 - DNA, 60 bp, Artificial; identical to SEQ ID NO: 39095
  Synthetic oligonucleotide

SEQ ID NO: 490847 - DNA, 60 bp, Artificial; identical to SEQ ID NO: 13912
  Synthetic oligonucleotide

SEQ ID NO: 490848 - DNA, 60 bp, Artificial; identical to SEQ ID NO: 8470
  Synthetic oligonucleotide

SEQ ID NO: 490849 - DNA, 60 bp, Artificial; identical to SEQ ID NO: 11168
  Synthetic oligonucleotide

SEQ ID NO: 490850 - DNA, 55 bp, Artificial; identical to SEQ ID NO: 6920
  Synthetic oligonucleotide

SEQ ID NO: 490851 - DNA, 60 bp, Artificial; identical to SEQ ID NO: 6054
  Synthetic oligonucleotide

SEQ ID NO: 490852 - DNA, 57 bp, Artificial; identical to SEQ ID NO: 8112
  Synthetic oligonucleotide

SEQ ID NO: 490853 - DNA, 53 bp, Artificial; identical to SEQ ID NO: 20120
  Synthetic oligonucleotide

SEQ ID NO: 490854 - DNA, 59 bp, Artificial; identical to SEQ ID NO: 19130
  Synthetic oligonucleotide

SEQ ID NO: 490855 - DNA, 58 bp, Artificial; identical to SEQ ID NO: 17777
  Synthetic oligonucleotide

SEQ ID NO: 490856 - DNA, 52 bp, Artificial; identical to SEQ ID NO: 15653
  Synthetic oligonucleotide

SEQ ID NO: 490857 - DNA, 57 bp, Artificial; identical to SEQ ID NO: 19906
  Synthetic oligonucleotide

SEQ ID NO: 490858 - DNA, 60 bp, Artificial; identical to SEQ ID NO: 6197
  Synthetic oligonucleotide

SEQ ID NO: 490859 - DNA, 60 bp, Artificial; identical to SEQ ID NO: 10450
  Synthetic oligonucleotide

SEQ ID NO: 490860 - DNA, 54 bp, Artificial; identical to SEQ ID NO: 7987
  Synthetic oligonucleotide

SEQ ID NO: 490861 - DNA, 56 bp, Artificial; identical to SEQ ID NO: 16692
  Synthetic oligonucleotide

SEQ ID NO: 490862 - DNA, 60 bp, Artificial; identical to SEQ ID NO: 8639
  Synthetic oligonucleotide

SEQ ID NO: 490863 - DNA, 60 bp, Artificial; identical to SEQ ID NO: 11921
  Synthetic oligonucleotide

SEQ ID NO: 490864 - DNA, 53 bp, Artificial; identical to SEQ ID NO: 9045
  Synthetic oligonucleotide

SEQ ID NO: 490865 - DNA, 54 bp, Artificial; identical to SEQ ID NO: 17734
  Synthetic oligonucleotide

SEQ ID NO: 490866 - DNA, 60 bp, Artificial; identical to SEQ ID NO: 7306
  Synthetic oligonucleotide

SEQ ID NO: 490867 - DNA, 60 bp, Artificial; identical to SEQ ID NO: 11572
  Synthetic oligonucleotide

SEQ ID NO: 490868 - DNA, 57 bp, Artificial; identical to SEQ ID NO: 19054
  Synthetic oligonucleotide

SEQ ID NO: 490869 - DNA, 57 bp, Artificial; identical to SEQ ID NO: 19178
  Synthetic oligonucleotide

SEQ ID NO: 490870 - DNA, 60 bp, Artificial; identical to SEQ ID NO: 12752
  Synthetic oligonucleotide

SEQ ID NO: 490871 - DNA, 56 bp, Artificial; identical to SEQ ID NO: 19217
  Synthetic oligonucleotide

SEQ ID NO: 490872 - DNA, 56 bp, Artificial; identical to SEQ ID NO: 10509
  Synthetic oligonucleotide

SEQ ID NO: 490873 - DNA, 60 bp, Artificial; identical to SEQ ID NO: 11435
  Synthetic oligonucleotide

SEQ ID NO: 490874 - DNA, 55 bp, Artificial; identical to SEQ ID NO: 6744
  Synthetic oligonucleotide

SEQ ID NO: 490875 - DNA, 59 bp, Artificial; identical to SEQ ID NO: 16773
  Synthetic oligonucleotide

SEQ ID NO: 490876 - DNA, 58 bp, Artificial; identical to SEQ ID NO: 12618
  Synthetic oligonucleotide

SEQ ID NO: 490877 - DNA, 60 bp, Artificial; identical to SEQ ID NO: 12595
  Synthetic oligonucleotide

SEQ ID NO: 490878 - DNA, 60 bp, Artificial; identical to SEQ ID NO: 14867
  Synthetic oligonucleotide

SEQ ID NO: 490879 - DNA, 60 bp, Artificial; identical to SEQ ID NO: 7922
  Synthetic oligonucleotide

SEQ ID NO: 490880 - DNA, 58 bp, Artificial; identical to SEQ ID NO: 17901
  Synthetic oligonucleotide

SEQ ID NO: 490881 - DNA, 50 bp, Artificial; identical to SEQ ID NO: 7978
  Synthetic oligonucleotide

SEQ ID NO: 490882 - DNA, 57 bp, Artificial; identical to SEQ ID NO: 12753
  Synthetic oligonucleotide

SEQ ID NO: 490883 - DNA, 60 bp, Artificial; identical to SEQ ID NO: 8975
  Synthetic oligonucleotide

SEQ ID NO: 490884 - DNA, 60 bp, Artificial; identical to SEQ ID NO: 7968
  Synthetic oligonucleotide

SEQ ID NO: 490885 - DNA, 60 bp, Artificial; identical to SEQ ID NO: 5778
  Synthetic oligonucleotide

SEQ ID NO: 490886 - DNA, 60 bp, Artificial; identical to SEQ ID NO: 13129
  Synthetic oligonucleotide

SEQ ID NO: 490887 - DNA, 56 bp, Artificial; identical to SEQ ID NO: 17598
  Synthetic oligonucleotide

SEQ ID NO: 490888 - DNA, 55 bp, Artificial; identical to SEQ ID NO: 15581
  Synthetic oligonucleotide

SEQ ID NO: 490889 - DNA, 57 bp, Artificial; identical to SEQ ID NO: 6525
  Synthetic oligonucleotide

SEQ ID NO: 490890 - DNA, 55 bp, Artificial; identical to SEQ ID NO: 20273
  Synthetic oligonucleotide

SEQ ID NO: 490891 - DNA, 60 bp, Artificial; identical to SEQ ID NO: 67130
  Synthetic oligonucleotide

SEQ ID NO: 490892 - DNA, 60 bp, Artificial; identical to SEQ ID NO: 10258
  Synthetic oligonucleotide

SEQ ID NO: 490893 - DNA, 60 bp, Artificial; identical to SEQ ID NO: 9272
  Synthetic oligonucleotide

SEQ ID NO: 490894 - DNA, 54 bp, Artificial; identical to SEQ ID NO: 6112
  Synthetic oligonucleotide

SEQ ID NO: 490895 - DNA, 60 bp, Artificial; identical to SEQ ID NO: 15704
  Synthetic oligonucleotide

SEQ ID NO: 490896 - DNA, 56 bp, Artificial; identical to SEQ ID NO: 16689
  Synthetic oligonucleotide

SEQ ID NO: 490897 - DNA, 60 bp, Artificial; identical to SEQ ID NO: 85059
  Synthetic oligonucleotide

SEQ ID NO: 490898 - DNA, 60 bp, Artificial; identical to SEQ ID NO: 11431
  Synthetic oligonucleotide

SEQ ID NO: 490899 - DNA, 56 bp, Artificial; identical to SEQ ID NO: 16610
  Synthetic oligonucleotide

SEQ ID NO: 490900 - DNA, 60 bp, Artificial; identical to SEQ ID NO: 88989
  Synthetic oligonucleotide

SEQ ID NO: 490901 - DNA, 60 bp, Artificial; identical to SEQ ID NO: 29880
  Synthetic oligonucleotide

SEQ ID NO: 490902 - DNA, 60 bp, Artificial; identical to SEQ ID NO: 6687
  Synthetic oligonucleotide

SEQ ID NO: 490903 - DNA, 55 bp, Artificial; identical to SEQ ID NO: 7814
  Synthetic oligonucleotide

SEQ ID NO: 490904 - DNA, 51 bp, Artificial; identical to SEQ ID NO: 10031
  Synthetic oligonucleotide

SEQ ID NO: 490905 - DNA, 60 bp, Artificial; identical to SEQ ID NO: 85250
  Synthetic oligonucleotide

SEQ ID NO: 490906 - DNA, 58 bp, Artificial; identical to SEQ ID NO: 19663
  Synthetic oligonucleotide

SEQ ID NO: 490907 - DNA, 59 bp, Artificial; identical to SEQ ID NO: 12575
  Synthetic oligonucleotide

SEQ ID NO: 490908 - DNA, 60 bp, Artificial; identical to SEQ ID NO: 15273
  Synthetic oligonucleotide

SEQ ID NO: 490909 - DNA, 58 bp, Artificial; identical to SEQ ID NO: 16339
  Synthetic oligonucleotide

SEQ ID NO: 490910 - DNA, 56 bp, Artificial; identical to SEQ ID NO: 9881
  Synthetic oligonucleotide

SEQ ID NO: 490911 - DNA, 60 bp, Artificial; identical to SEQ ID NO: 5839
  Synthetic oligonucleotide

SEQ ID NO: 490912 - DNA, 59 bp, Artificial; identical to SEQ ID NO: 13923
  Synthetic oligonucleotide

SEQ ID NO: 490913 - DNA, 58 bp, Artificial; identical to SEQ ID NO: 16192
  Synthetic oligonucleotide

SEQ ID NO: 490914 - DNA, 60 bp, Artificial; identical to SEQ ID NO: 15698
  Synthetic oligonucleotide

SEQ ID NO: 490915 - DNA, 58 bp, Artificial; identical to SEQ ID NO: 17985
  Synthetic oligonucleotide

SEQ ID NO: 490916 - DNA, 51 bp, Artificial; identical to SEQ ID NO: 10605
  Synthetic oligonucleotide

SEQ ID NO: 490917 - DNA, 54 bp, Artificial; identical to SEQ ID NO: 11724
  Synthetic oligonucleotide

SEQ ID NO: 490918 - DNA, 55 bp, Artificial; identical to SEQ ID NO: 16661
  Synthetic oligonucleotide

SEQ ID NO: 490919 - DNA, 55 bp, Artificial; identical to SEQ ID NO: 8806
  Synthetic oligonucleotide

SEQ ID NO: 490920 - DNA, 58 bp, Artificial; identical to SEQ ID NO: 10527
  Synthetic oligonucleotide

SEQ ID NO: 490921 - DNA, 60 bp, Artificial; identical to SEQ ID NO: 14620
  Synthetic oligonucleotide

SEQ ID NO: 490922 - DNA, 60 bp, Artificial; identical to SEQ ID NO: 9704
  Synthetic oligonucleotide

SEQ ID NO: 490923 - DNA, 60 bp, Artificial; identical to SEQ ID NO: 7463
  Synthetic oligonucleotide

SEQ ID NO: 490924 - DNA, 52 bp, Artificial; identical to SEQ ID NO: 12248
  Synthetic oligonucleotide

SEQ ID NO: 490925 - DNA, 55 bp, Artificial; identical to SEQ ID NO: 20564
  Synthetic oligonucleotide

SEQ ID NO: 490926 - DNA, 55 bp, Artificial; identical to SEQ ID NO: 14997
  Synthetic oligonucleotide

SEQ ID NO: 490927 - DNA, 53 bp, Artificial; identical to SEQ ID NO: 11748
  Synthetic oligonucleotide

SEQ ID NO: 490928 - DNA, 60 bp, Artificial; identical to SEQ ID NO: 14906
  Synthetic oligonucleotide

SEQ ID NO: 490929 - DNA, 60 bp, Artificial; identical to SEQ ID NO: 6376
  Synthetic oligonucleotide

SEQ ID NO: 490930 - DNA, 60 bp, Artificial; identical to SEQ ID NO: 5840
  Synthetic oligonucleotide

SEQ ID NO: 490931 - DNA, 54 bp, Artificial; identical to SEQ ID NO: 19056
  Synthetic oligonucleotide

SEQ ID NO: 490932 - DNA, 60 bp, Artificial; identical to SEQ ID NO: 14609
  Synthetic oligonucleotide

SEQ ID NO: 490933 - DNA, 60 bp, Artificial; identical to SEQ ID NO: 5758
  Synthetic oligonucleotide

SEQ ID NO: 490934 - DNA, 59 bp, Artificial; identical to SEQ ID NO: 15961
  Synthetic oligonucleotide

SEQ ID NO: 490935 - DNA, 60 bp, Artificial; identical to SEQ ID NO: 8592
  Synthetic oligonucleotide

SEQ ID NO: 490936 - DNA, 56 bp, Artificial; identical to SEQ ID NO: 7845
  Synthetic oligonucleotide

SEQ ID NO: 490937 - DNA, 60 bp, Artificial; identical to SEQ ID NO: 6286
  Synthetic oligonucleotide

SEQ ID NO: 490938 - DNA, 60 bp, Artificial; identical to SEQ ID NO: 8357
  Synthetic oligonucleotide

SEQ ID NO: 490939 - DNA, 60 bp, Artificial; identical to SEQ ID NO: 10456
  Synthetic oligonucleotide

SEQ ID NO: 490940 - DNA, 54 bp, Artificial; identical to SEQ ID NO: 9336
  Synthetic oligonucleotide

SEQ ID NO: 490941 - DNA, 54 bp, Artificial; identical to SEQ ID NO: 10895
  Synthetic oligonucleotide

SEQ ID NO: 490942 - DNA, 60 bp, Artificial; identical to SEQ ID NO: 12352
  Synthetic oligonucleotide

SEQ ID NO: 490943 - DNA, 60 bp, Artificial; identical to SEQ ID NO: 109947
  Synthetic oligonucleotide

SEQ ID NO: 490944 - DNA, 60 bp, Artificial; identical to SEQ ID NO: 15569
  Synthetic oligonucleotide

SEQ ID NO: 490945 - DNA, 54 bp, Artificial; identical to SEQ ID NO: 13289
  Synthetic oligonucleotide

SEQ ID NO: 490946 - DNA, 60 bp, Artificial; identical to SEQ ID NO: 7809
  Synthetic oligonucleotide

SEQ ID NO: 490947 - DNA, 60 bp, Artificial; identical to SEQ ID NO: 57185
  Synthetic oligonucleotide

SEQ ID NO: 490948 - DNA, 58 bp, Artificial; identical to SEQ ID NO: 7228
  Synthetic oligonucleotide

SEQ ID NO: 490949 - DNA, 60 bp, Artificial; identical to SEQ ID NO: 10235
  Synthetic oligonucleotide

SEQ ID NO: 490950 - DNA, 51 bp, Artificial; identical to SEQ ID NO: 11983
  Synthetic oligonucleotide

SEQ ID NO: 490951 - DNA, 60 bp, Artificial; identical to SEQ ID NO: 11512
  Synthetic oligonucleotide

SEQ ID NO: 490952 - DNA, 57 bp, Artificial; identical to SEQ ID NO: 17866
  Synthetic oligonucleotide

SEQ ID NO: 490953 - DNA, 60 bp, Artificial; identical to SEQ ID NO: 8957
  Synthetic oligonucleotide

SEQ ID NO: 490954 - DNA, 51 bp, Artificial; identical to SEQ ID NO: 14824
  Synthetic oligonucleotide

SEQ ID NO: 490955 - DNA, 60 bp, Artificial; identical to SEQ ID NO: 77594
  Synthetic oligonucleotide

SEQ ID NO: 490956 - DNA, 60 bp, Artificial; identical to SEQ ID NO: 7346
  Synthetic oligonucleotide

SEQ ID NO: 490957 - DNA, 60 bp, Artificial; identical to SEQ ID NO: 8114
  Synthetic oligonucleotide

SEQ ID NO: 490958 - DNA, 58 bp, Artificial; identical to SEQ ID NO: 17217
  Synthetic oligonucleotide

SEQ ID NO: 490959 - DNA, 60 bp, Artificial; identical to SEQ ID NO: 6164
  Synthetic oligonucleotide

SEQ ID NO: 490960 - DNA, 60 bp, Artificial; identical to SEQ ID NO: 11602
  Synthetic oligonucleotide

SEQ ID NO: 490961 - DNA, 58 bp, Artificial; identical to SEQ ID NO: 18627
  Synthetic oligonucleotide

SEQ ID NO: 490962 - DNA, 57 bp, Artificial; identical to SEQ ID NO: 16983
  Synthetic oligonucleotide

SEQ ID NO: 490963 - DNA, 57 bp, Artificial; identical to SEQ ID NO: 16685
  Synthetic oligonucleotide

SEQ ID NO: 490964 - DNA, 58 bp, Artificial; identical to SEQ ID NO: 18167
  Synthetic oligonucleotide

SEQ ID NO: 490965 - DNA, 60 bp, Artificial; identical to SEQ ID NO: 8644
  Synthetic oligonucleotide

SEQ ID NO: 490966 - DNA, 58 bp, Artificial; identical to SEQ ID NO: 17758
  Synthetic oligonucleotide

SEQ ID NO: 490967 - DNA, 60 bp, Artificial; identical to SEQ ID NO: 12034
  Synthetic oligonucleotide

SEQ ID NO: 490968 - DNA, 58 bp, Artificial; identical to SEQ ID NO: 17807
  Synthetic oligonucleotide

SEQ ID NO: 490969 - DNA, 60 bp, Artificial; identical to SEQ ID NO: 11601
  Synthetic oligonucleotide

SEQ ID NO: 490970 - DNA, 60 bp, Artificial; identical to SEQ ID NO: 10290
  Synthetic oligonucleotide

SEQ ID NO: 490971 - DNA, 60 bp, Artificial; identical to SEQ ID NO: 8649
  Synthetic oligonucleotide

SEQ ID NO: 490972 - DNA, 50 bp, Artificial; identical to SEQ ID NO: 10801
  Synthetic oligonucleotide

SEQ ID NO: 490973 - DNA, 59 bp, Artificial; identical to SEQ ID NO: 15671
  Synthetic oligonucleotide

SEQ ID NO: 490974 - DNA, 57 bp, Artificial; identical to SEQ ID NO: 17600
  Synthetic oligonucleotide

SEQ ID NO: 490975 - DNA, 60 bp, Artificial; identical to SEQ ID NO: 15051
  Synthetic oligonucleotide

SEQ ID NO: 490976 - DNA, 60 bp, Artificial; identical to SEQ ID NO: 120633
  Synthetic oligonucleotide

SEQ ID NO: 490977 - DNA, 60 bp, Artificial; identical to SEQ ID NO: 12424
  Synthetic oligonucleotide

SEQ ID NO: 490978 - DNA, 57 bp, Artificial; identical to SEQ ID NO: 16211
  Synthetic oligonucleotide

SEQ ID NO: 490979 - DNA, 58 bp, Artificial; identical to SEQ ID NO: 17731
  Synthetic oligonucleotide

SEQ ID NO: 490980 - DNA, 55 bp, Artificial; identical to SEQ ID NO: 18136
  Synthetic oligonucleotide

SEQ ID NO: 490981 - DNA, 57 bp, Artificial; identical to SEQ ID NO: 9235
  Synthetic oligonucleotide

SEQ ID NO: 490982 - DNA, 58 bp, Artificial; identical to SEQ ID NO: 16730
  Synthetic oligonucleotide

SEQ ID NO: 490983 - DNA, 60 bp, Artificial; identical to SEQ ID NO: 7931
  Synthetic oligonucleotide

SEQ ID NO: 490984 - DNA, 60 bp, Artificial; identical to SEQ ID NO: 6349
  Synthetic oligonucleotide

SEQ ID NO: 490985 - DNA, 60 bp, Artificial; identical to SEQ ID NO: 7249
  Synthetic oligonucleotide

SEQ ID NO: 490986 - DNA, 56 bp, Artificial; identical to SEQ ID NO: 15617
  Synthetic oligonucleotide

SEQ ID NO: 490987 - DNA, 50 bp, Artificial; identical to SEQ ID NO: 15373
  Synthetic oligonucleotide

SEQ ID NO: 490988 - DNA, 60 bp, Artificial; identical to SEQ ID NO: 10553
  Synthetic oligonucleotide

SEQ ID NO: 490989 - DNA, 55 bp, Artificial; identical to SEQ ID NO: 19358
  Synthetic oligonucleotide

SEQ ID NO: 490990 - DNA, 60 bp, Artificial; identical to SEQ ID NO: 7861
  Synthetic oligonucleotide

SEQ ID NO: 490991 - DNA, 60 bp, Artificial; identical to SEQ ID NO: 113338
  Synthetic oligonucleotide

SEQ ID NO: 490992 - DNA, 60 bp, Artificial; identical to SEQ ID NO: 10381
  Synthetic oligonucleotide

SEQ ID NO: 490993 - DNA, 60 bp, Artificial; identical to SEQ ID NO: 12597
  Synthetic oligonucleotide

SEQ ID NO: 490994 - DNA, 58 bp, Artificial; identical to SEQ ID NO: 18754
  Synthetic oligonucleotide

SEQ ID NO: 490995 - DNA, 60 bp, Artificial; identical to SEQ ID NO: 8144
  Synthetic oligonucleotide

SEQ ID NO: 490996 - DNA, 60 bp, Artificial; identical to SEQ ID NO: 9676
  Synthetic oligonucleotide

SEQ ID NO: 490997 - DNA, 57 bp, Artificial; identical to SEQ ID NO: 7534
  Synthetic oligonucleotide

SEQ ID NO: 490998 - DNA, 51 bp, Artificial; identical to SEQ ID NO: 7616
  Synthetic oligonucleotide

SEQ ID NO: 490999 - DNA, 60 bp, Artificial; identical to SEQ ID NO: 8106
  Synthetic oligonucleotide

SEQ ID NO: 491000 - DNA, 60 bp, Artificial; identical to SEQ ID NO: 15721
  Synthetic oligonucleotide

SEQ ID NO: 491001 - DNA, 53 bp, Artificial; identical to SEQ ID NO: 14912
  Synthetic oligonucleotide

SEQ ID NO: 491002 - DNA, 60 bp, Artificial; identical to SEQ ID NO: 33506
  Synthetic oligonucleotide

SEQ ID NO: 491003 - DNA, 57 bp, Artificial; identical to SEQ ID NO: 16711
  Synthetic oligonucleotide

SEQ ID NO: 491004 - DNA, 60 bp, Artificial; identical to SEQ ID NO: 10363
  Synthetic oligonucleotide

SEQ ID NO: 491005 - DNA, 60 bp, Artificial; identical to SEQ ID NO: 11827
  Synthetic oligonucleotide

SEQ ID NO: 491006 - DNA, 58 bp, Artificial; identical to SEQ ID NO: 360
  Synthetic oligonucleotide

SEQ ID NO: 491007 - DNA, 52 bp, Artificial; identical to SEQ ID NO: 10542
  Synthetic oligonucleotide

SEQ ID NO: 491008 - DNA, 51 bp, Artificial; identical to SEQ ID NO: 6105
  Synthetic oligonucleotide

SEQ ID NO: 491009 - DNA, 60 bp, Artificial; identical to SEQ ID NO: 12282
  Synthetic oligonucleotide

SEQ ID NO: 491010 - DNA, 60 bp, Artificial; identical to SEQ ID NO: 10410
  Synthetic oligonucleotide

SEQ ID NO: 491011 - DNA, 52 bp, Artificial; identical to SEQ ID NO: 15292
  Synthetic oligonucleotide

SEQ ID NO: 491012 - DNA, 60 bp, Artificial; identical to SEQ ID NO: 6018
  Synthetic oligonucleotide

SEQ ID NO: 491013 - DNA, 60 bp, Artificial; identical to SEQ ID NO: 8138
  Synthetic oligonucleotide

SEQ ID NO: 491014 - DNA, 58 bp, Artificial; identical to SEQ ID NO: 14701
  Synthetic oligonucleotide

SEQ ID NO: 491015 - DNA, 60 bp, Artificial; identical to SEQ ID NO: 15214
  Synthetic oligonucleotide

SEQ ID NO: 491016 - DNA, 60 bp, Artificial; identical to SEQ ID NO: 12369
  Synthetic oligonucleotide

SEQ ID NO: 491017 - DNA, 60 bp, Artificial; identical to SEQ ID NO: 6137
  Synthetic oligonucleotide

SEQ ID NO: 491018 - DNA, 60 bp, Artificial; identical to SEQ ID NO: 10486
  Synthetic oligonucleotide

SEQ ID NO: 491019 - DNA, 56 bp, Artificial; identical to SEQ ID NO: 19549
  Synthetic oligonucleotide

SEQ ID NO: 491020 - DNA, 59 bp, Artificial; identical to SEQ ID NO: 7327
  Synthetic oligonucleotide

SEQ ID NO: 491021 - DNA, 58 bp, Artificial; identical to SEQ ID NO: 19137
  Synthetic oligonucleotide

SEQ ID NO: 491022 - DNA, 59 bp, Artificial; identical to SEQ ID NO: 16933
  Synthetic oligonucleotide

SEQ ID NO: 491023 - DNA, 58 bp, Artificial; identical to SEQ ID NO: 19201
  Synthetic oligonucleotide

SEQ ID NO: 491024 - DNA, 58 bp, Artificial; identical to SEQ ID NO: 10625
  Synthetic oligonucleotide

SEQ ID NO: 491025 - DNA, 57 bp, Artificial; identical to SEQ ID NO: 13867
  Synthetic oligonucleotide

SEQ ID NO: 491026 - DNA, 57 bp, Artificial; identical to SEQ ID NO: 17684
  Synthetic oligonucleotide

SEQ ID NO: 491027 - DNA, 55 bp, Artificial; identical to SEQ ID NO: 6340
  Synthetic oligonucleotide

SEQ ID NO: 491028 - DNA, 60 bp, Artificial; identical to SEQ ID NO: 27824
  Synthetic oligonucleotide

SEQ ID NO: 491029 - DNA, 60 bp, Artificial; identical to SEQ ID NO: 11254
  Synthetic oligonucleotide

SEQ ID NO: 491030 - DNA, 60 bp, Artificial; identical to SEQ ID NO: 9650
  Synthetic oligonucleotide

SEQ ID NO: 491031 - DNA, 60 bp, Artificial; identical to SEQ ID NO: 8463
  Synthetic oligonucleotide

SEQ ID NO: 491032 - DNA, 60 bp, Artificial; identical to SEQ ID NO: 10810
  Synthetic oligonucleotide

SEQ ID NO: 491033 - DNA, 55 bp, Artificial; identical to SEQ ID NO: 11905
  Synthetic oligonucleotide

SEQ ID NO: 491034 - DNA, 58 bp, Artificial; identical to SEQ ID NO: 18011
  Synthetic oligonucleotide

SEQ ID NO: 491035 - DNA, 59 bp, Artificial; identical to SEQ ID NO: 18254
  Synthetic oligonucleotide

SEQ ID NO: 491036 - DNA, 60 bp, Artificial; identical to SEQ ID NO: 8064
  Synthetic oligonucleotide

SEQ ID NO: 491037 - DNA, 58 bp, Artificial; identical to SEQ ID NO: 19723
  Synthetic oligonucleotide

SEQ ID NO: 491038 - DNA, 60 bp, Artificial; identical to SEQ ID NO: 14924
  Synthetic oligonucleotide

SEQ ID NO: 491039 - DNA, 60 bp, Artificial; identical to SEQ ID NO: 6471
  Synthetic oligonucleotide

SEQ ID NO: 491040 - DNA, 55 bp, Artificial; identical to SEQ ID NO: 11506
  Synthetic oligonucleotide

SEQ ID NO: 491041 - DNA, 60 bp, Artificial; identical to SEQ ID NO: 9258
  Synthetic oligonucleotide

SEQ ID NO: 491042 - DNA, 56 bp, Artificial; identical to SEQ ID NO: 19731
  Synthetic oligonucleotide

SEQ ID NO: 491043 - DNA, 59 bp, Artificial; identical to SEQ ID NO: 6378
  Synthetic oligonucleotide

SEQ ID NO: 491044 - DNA, 60 bp, Artificial; identical to SEQ ID NO: 15742
  Synthetic oligonucleotide

SEQ ID NO: 491045 - DNA, 60 bp, Artificial; identical to SEQ ID NO: 11137
  Synthetic oligonucleotide

SEQ ID NO: 491046 - DNA, 60 bp, Artificial; identical to SEQ ID NO: 6445
  Synthetic oligonucleotide

SEQ ID NO: 491047 - DNA, 55 bp, Artificial; identical to SEQ ID NO: 9415
  Synthetic oligonucleotide

SEQ ID NO: 491048 - DNA, 51 bp, Artificial; identical to SEQ ID NO: 8024
  Synthetic oligonucleotide

SEQ ID NO: 491049 - DNA, 60 bp, Artificial; identical to SEQ ID NO: 15105
  Synthetic oligonucleotide

SEQ ID NO: 491050 - DNA, 57 bp, Artificial; identical to SEQ ID NO: 17243
  Synthetic oligonucleotide

SEQ ID NO: 491051 - DNA, 60 bp, Artificial; identical to SEQ ID NO: 10913
  Synthetic oligonucleotide

SEQ ID NO: 491052 - DNA, 58 bp, Artificial; identical to SEQ ID NO: 7566
  Synthetic oligonucleotide

SEQ ID NO: 491053 - DNA, 52 bp, Artificial; identical to SEQ ID NO: 6845
  Synthetic oligonucleotide

SEQ ID NO: 491054 - DNA, 58 bp, Artificial; identical to SEQ ID NO: 18412
  Synthetic oligonucleotide

SEQ ID NO: 491055 - DNA, 55 bp, Artificial; identical to SEQ ID NO: 6842
  Synthetic oligonucleotide

SEQ ID NO: 491056 - DNA, 60 bp, Artificial; identical to SEQ ID NO: 81264
  Synthetic oligonucleotide

SEQ ID NO: 491057 - DNA, 60 bp, Artificial; identical to SEQ ID NO: 15358
  Synthetic oligonucleotide

SEQ ID NO: 491058 - DNA, 60 bp, Artificial; identical to SEQ ID NO: 8989
  Synthetic oligonucleotide

SEQ ID NO: 491059 - DNA, 60 bp, Artificial; identical to SEQ ID NO: 12681
  Synthetic oligonucleotide

SEQ ID NO: 491060 - DNA, 60 bp, Artificial; identical to SEQ ID NO: 7626
  Synthetic oligonucleotide

SEQ ID NO: 491061 - DNA, 60 bp, Artificial; identical to SEQ ID NO: 6273
  Synthetic oligonucleotide

SEQ ID NO: 491062 - DNA, 57 bp, Artificial; identical to SEQ ID NO: 16029
  Synthetic oligonucleotide

SEQ ID NO: 491063 - DNA, 55 bp, Artificial; identical to SEQ ID NO: 14518
  Synthetic oligonucleotide

SEQ ID NO: 491064 - DNA, 55 bp, Artificial; identical to SEQ ID NO: 16871
  Synthetic oligonucleotide

SEQ ID NO: 491065 - DNA, 59 bp, Artificial; identical to SEQ ID NO: 16985
  Synthetic oligonucleotide

SEQ ID NO: 491066 - DNA, 53 bp, Artificial; identical to SEQ ID NO: 12690
  Synthetic oligonucleotide

SEQ ID NO: 491067 - DNA, 60 bp, Artificial; identical to SEQ ID NO: 5750
  Synthetic oligonucleotide

SEQ ID NO: 491068 - DNA, 60 bp, Artificial; identical to SEQ ID NO: 10429
  Synthetic oligonucleotide

SEQ ID NO: 491069 - DNA, 52 bp, Artificial; identical to SEQ ID NO: 19207
  Synthetic oligonucleotide

SEQ ID NO: 491070 - DNA, 58 bp, Artificial; identical to SEQ ID NO: 16841
  Synthetic oligonucleotide

SEQ ID NO: 491071 - DNA, 52 bp, Artificial; identical to SEQ ID NO: 6176
  Synthetic oligonucleotide

SEQ ID NO: 491072 - DNA, 58 bp, Artificial; identical to SEQ ID NO: 16825
  Synthetic oligonucleotide

SEQ ID NO: 491073 - DNA, 60 bp, Artificial; identical to SEQ ID NO: 9853
  Synthetic oligonucleotide

SEQ ID NO: 491074 - DNA, 60 bp, Artificial; identical to SEQ ID NO: 12024
  Synthetic oligonucleotide

SEQ ID NO: 491075 - DNA, 53 bp, Artificial; identical to SEQ ID NO: 17679
  Synthetic oligonucleotide

SEQ ID NO: 491076 - DNA, 55 bp, Artificial; identical to SEQ ID NO: 15883
  Synthetic oligonucleotide

SEQ ID NO: 491077 - DNA, 60 bp, Artificial; identical to SEQ ID NO: 52048
  Synthetic oligonucleotide

SEQ ID NO: 491078 - DNA, 56 bp, Artificial; identical to SEQ ID NO: 17946
  Synthetic oligonucleotide

SEQ ID NO: 491079 - DNA, 59 bp, Artificial; identical to SEQ ID NO: 17029
  Synthetic oligonucleotide

SEQ ID NO: 491080 - DNA, 57 bp, Artificial; identical to SEQ ID NO: 17984
  Synthetic oligonucleotide

SEQ ID NO: 491081 - DNA, 54 bp, Artificial; identical to SEQ ID NO: 19179
  Synthetic oligonucleotide

SEQ ID NO: 491082 - DNA, 57 bp, Artificial; identical to SEQ ID NO: 7719
  Synthetic oligonucleotide

SEQ ID NO: 491083 - DNA, 60 bp, Artificial; identical to SEQ ID NO: 9220
  Synthetic oligonucleotide

SEQ ID NO: 491084 - DNA, 59 bp, Artificial; identical to SEQ ID NO: 19260
  Synthetic oligonucleotide

SEQ ID NO: 491085 - DNA, 52 bp, Artificial; identical to SEQ ID NO: 18753
  Synthetic oligonucleotide

SEQ ID NO: 491086 - DNA, 60 bp, Artificial; identical to SEQ ID NO: 6607
  Synthetic oligonucleotide

SEQ ID NO: 491087 - DNA, 57 bp, Artificial; identical to SEQ ID NO: 18978
  Synthetic oligonucleotide

SEQ ID NO: 491088 - DNA, 60 bp, Artificial; identical to SEQ ID NO: 14107
  Synthetic oligonucleotide

SEQ ID NO: 491089 - DNA, 60 bp, Artificial; identical to SEQ ID NO: 21862
  Synthetic oligonucleotide

SEQ ID NO: 491090 - DNA, 57 bp, Artificial; identical to SEQ ID NO: 18265
  Synthetic oligonucleotide

SEQ ID NO: 491091 - DNA, 57 bp, Artificial; identical to SEQ ID NO: 19077
  Synthetic oligonucleotide

SEQ ID NO: 491092 - DNA, 56 bp, Artificial; identical to SEQ ID NO: 11518
  Synthetic oligonucleotide

SEQ ID NO: 491093 - DNA, 60 bp, Artificial; identical to SEQ ID NO: 13539
  Synthetic oligonucleotide

SEQ ID NO: 491094 - DNA, 51 bp, Artificial; identical to SEQ ID NO: 14639
  Synthetic oligonucleotide

SEQ ID NO: 491095 - DNA, 55 bp, Artificial; identical to SEQ ID NO: 7969
  Synthetic oligonucleotide

SEQ ID NO: 491096 - DNA, 58 bp, Artificial; identical to SEQ ID NO: 6440
  Synthetic oligonucleotide

SEQ ID NO: 491097 - DNA, 59 bp, Artificial; identical to SEQ ID NO: 15951
  Synthetic oligonucleotide

SEQ ID NO: 491098 - DNA, 51 bp, Artificial; identical to SEQ ID NO: 10776
  Synthetic oligonucleotide

SEQ ID NO: 491099 - DNA, 54 bp, Artificial; identical to SEQ ID NO: 7664
  Synthetic oligonucleotide

SEQ ID NO: 491100 - DNA, 60 bp, Artificial; identical to SEQ ID NO: 10799
  Synthetic oligonucleotide

SEQ ID NO: 491101 - DNA, 56 bp, Artificial; identical to SEQ ID NO: 12854
  Synthetic oligonucleotide

SEQ ID NO: 491102 - DNA, 60 bp, Artificial; identical to SEQ ID NO: 8648
  Synthetic oligonucleotide

SEQ ID NO: 491103 - DNA, 57 bp, Artificial; identical to SEQ ID NO: 16641
  Synthetic oligonucleotide

SEQ ID NO: 491104 - DNA, 58 bp, Artificial; identical to SEQ ID NO: 9436
  Synthetic oligonucleotide

SEQ ID NO: 491105 - DNA, 55 bp, Artificial; identical to SEQ ID NO: 7060
  Synthetic oligonucleotide

SEQ ID NO: 491106 - DNA, 50 bp, Artificial; identical to SEQ ID NO: 13837
  Synthetic oligonucleotide

SEQ ID NO: 491107 - DNA, 60 bp, Artificial; identical to SEQ ID NO: 8418
  Synthetic oligonucleotide

SEQ ID NO: 491108 - DNA, 60 bp, Artificial; identical to SEQ ID NO: 14077
  Synthetic oligonucleotide

SEQ ID NO: 491109 - DNA, 60 bp, Artificial; identical to SEQ ID NO: 6053
  Synthetic oligonucleotide

SEQ ID NO: 491110 - DNA, 60 bp, Artificial; identical to SEQ ID NO: 108395
  Synthetic oligonucleotide

SEQ ID NO: 491111 - DNA, 54 bp, Artificial; identical to SEQ ID NO: 7726
  Synthetic oligonucleotide

SEQ ID NO: 491112 - DNA, 59 bp, Artificial; identical to SEQ ID NO: 16409
  Synthetic oligonucleotide

SEQ ID NO: 491113 - DNA, 60 bp, Artificial; identical to SEQ ID NO: 108875
  Synthetic oligonucleotide

SEQ ID NO: 491114 - DNA, 56 bp, Artificial; identical to SEQ ID NO: 179
  Synthetic oligonucleotide

SEQ ID NO: 491115 - DNA, 60 bp, Artificial; identical to SEQ ID NO: 10283
  Synthetic oligonucleotide

SEQ ID NO: 491116 - DNA, 60 bp, Artificial; identical to SEQ ID NO: 12748
  Synthetic oligonucleotide

SEQ ID NO: 491117 - DNA, 60 bp, Artificial; identical to SEQ ID NO: 90721
  Synthetic oligonucleotide

SEQ ID NO: 491118 - DNA, 50 bp, Artificial; identical to SEQ ID NO: 10495
  Synthetic oligonucleotide

SEQ ID NO: 491119 - DNA, 57 bp, Artificial; identical to SEQ ID NO: 19352
  Synthetic oligonucleotide

SEQ ID NO: 491120 - DNA, 58 bp, Artificial; identical to SEQ ID NO: 10603
  Synthetic oligonucleotide

SEQ ID NO: 491121 - DNA, 60 bp, Artificial; identical to SEQ ID NO: 10313
  Synthetic oligonucleotide

SEQ ID NO: 491122 - DNA, 58 bp, Artificial; identical to SEQ ID NO: 17843
  Synthetic oligonucleotide

SEQ ID NO: 491123 - DNA, 60 bp, Artificial; identical to SEQ ID NO: 13206
  Synthetic oligonucleotide

SEQ ID NO: 491124 - DNA, 57 bp, Artificial; identical to SEQ ID NO: 284
  Synthetic oligonucleotide

SEQ ID NO: 491125 - DNA, 60 bp, Artificial; identical to SEQ ID NO: 11140
  Synthetic oligonucleotide

SEQ ID NO: 491126 - DNA, 57 bp, Artificial; identical to SEQ ID NO: 19036
  Synthetic oligonucleotide

SEQ ID NO: 491127 - DNA, 59 bp, Artificial; identical to SEQ ID NO: 7402
  Synthetic oligonucleotide

SEQ ID NO: 491128 - DNA, 60 bp, Artificial; identical to SEQ ID NO: 6125
  Synthetic oligonucleotide

SEQ ID NO: 491129 - DNA, 60 bp, Artificial; identical to SEQ ID NO: 6693
  Synthetic oligonucleotide

SEQ ID NO: 491130 - DNA, 60 bp, Artificial; identical to SEQ ID NO: 9914
  Synthetic oligonucleotide

SEQ ID NO: 491131 - DNA, 56 bp, Artificial; identical to SEQ ID NO: 10233
  Synthetic oligonucleotide

SEQ ID NO: 491132 - DNA, 53 bp, Artificial; identical to SEQ ID NO: 10618
  Synthetic oligonucleotide

SEQ ID NO: 491133 - DNA, 60 bp, Artificial; identical to SEQ ID NO: 15459
  Synthetic oligonucleotide

SEQ ID NO: 491134 - DNA, 60 bp, Artificial; identical to SEQ ID NO: 9743
  Synthetic oligonucleotide

SEQ ID NO: 491135 - DNA, 60 bp, Artificial; identical to SEQ ID NO: 14379
  Synthetic oligonucleotide

SEQ ID NO: 491136 - DNA, 60 bp, Artificial; identical to SEQ ID NO: 12980
  Synthetic oligonucleotide

SEQ ID NO: 491137 - DNA, 58 bp, Artificial; identical to SEQ ID NO: 15354
  Synthetic oligonucleotide

SEQ ID NO: 491138 - DNA, 60 bp, Artificial; identical to SEQ ID NO: 13611
  Synthetic oligonucleotide

SEQ ID NO: 491139 - DNA, 56 bp, Artificial; identical to SEQ ID NO: 11438
  Synthetic oligonucleotide

SEQ ID NO: 491140 - DNA, 54 bp, Artificial; identical to SEQ ID NO: 20369
  Synthetic oligonucleotide

SEQ ID NO: 491141 - DNA, 60 bp, Artificial; identical to SEQ ID NO: 12101
  Synthetic oligonucleotide

SEQ ID NO: 491142 - DNA, 60 bp, Artificial; identical to SEQ ID NO: 7828
  Synthetic oligonucleotide

SEQ ID NO: 491143 - DNA, 60 bp, Artificial; identical to SEQ ID NO: 6297
  Synthetic oligonucleotide

SEQ ID NO: 491144 - DNA, 60 bp, Artificial; identical to SEQ ID NO: 9895
  Synthetic oligonucleotide

SEQ ID NO: 491145 - DNA, 58 bp, Artificial; identical to SEQ ID NO: 17480
  Synthetic oligonucleotide

SEQ ID NO: 491146 - DNA, 57 bp, Artificial; identical to SEQ ID NO: 16021
  Synthetic oligonucleotide

SEQ ID NO: 491147 - DNA, 53 bp, Artificial; identical to SEQ ID NO: 7777
  Synthetic oligonucleotide

SEQ ID NO: 491148 - DNA, 52 bp, Artificial; identical to SEQ ID NO: 13314
  Synthetic oligonucleotide

SEQ ID NO: 491149 - DNA, 60 bp, Artificial; identical to SEQ ID NO: 10316
  Synthetic oligonucleotide

SEQ ID NO: 491150 - DNA, 60 bp, Artificial; identical to SEQ ID NO: 8731
  Synthetic oligonucleotide

SEQ ID NO: 491151 - DNA, 60 bp, Artificial; identical to SEQ ID NO: 12325
  Synthetic oligonucleotide

SEQ ID NO: 491152 - DNA, 60 bp, Artificial; identical to SEQ ID NO: 10833
  Synthetic oligonucleotide

SEQ ID NO: 491153 - DNA, 56 bp, Artificial; identical to SEQ ID NO: 18007
  Synthetic oligonucleotide

SEQ ID NO: 491154 - DNA, 60 bp, Artificial; identical to SEQ ID NO: 11742
  Synthetic oligonucleotide

SEQ ID NO: 491155 - DNA, 60 bp, Artificial; identical to SEQ ID NO: 14655
  Synthetic oligonucleotide

SEQ ID NO: 491156 - DNA, 60 bp, Artificial; identical to SEQ ID NO: 9412
  Synthetic oligonucleotide

SEQ ID NO: 491157 - DNA, 53 bp, Artificial; identical to SEQ ID NO: 14821
  Synthetic oligonucleotide

SEQ ID NO: 491158 - DNA, 60 bp, Artificial; identical to SEQ ID NO: 6090
  Synthetic oligonucleotide

SEQ ID NO: 491159 - DNA, 51 bp, Artificial; identical to SEQ ID NO: 14007
  Synthetic oligonucleotide

SEQ ID NO: 491160 - DNA, 60 bp, Artificial; identical to SEQ ID NO: 68258
  Synthetic oligonucleotide

SEQ ID NO: 491161 - DNA, 57 bp, Artificial; identical to SEQ ID NO: 16294
  Synthetic oligonucleotide

SEQ ID NO: 491162 - DNA, 58 bp, Artificial; identical to SEQ ID NO: 15941
  Synthetic oligonucleotide

SEQ ID NO: 491163 - DNA, 60 bp, Artificial; identical to SEQ ID NO: 15032
  Synthetic oligonucleotide

SEQ ID NO: 491164 - DNA, 60 bp, Artificial; identical to SEQ ID NO: 109837
  Synthetic oligonucleotide

SEQ ID NO: 491165 - DNA, 60 bp, Artificial; identical to SEQ ID NO: 5783
  Synthetic oligonucleotide

SEQ ID NO: 491166 - DNA, 60 bp, Artificial; identical to SEQ ID NO: 87306
  Synthetic oligonucleotide

SEQ ID NO: 491167 - DNA, 54 bp, Artificial; identical to SEQ ID NO: 18735
  Synthetic oligonucleotide

SEQ ID NO: 491168 - DNA, 60 bp, Artificial; identical to SEQ ID NO: 7772
  Synthetic oligonucleotide

SEQ ID NO: 491169 - DNA, 59 bp, Artificial; identical to SEQ ID NO: 18777
  Synthetic oligonucleotide

SEQ ID NO: 491170 - DNA, 60 bp, Artificial; identical to SEQ ID NO: 10232
  Synthetic oligonucleotide

SEQ ID NO: 491171 - DNA, 58 bp, Artificial; identical to SEQ ID NO: 18256
  Synthetic oligonucleotide

SEQ ID NO: 491172 - DNA, 57 bp, Artificial; identical to SEQ ID NO: 19404
  Synthetic oligonucleotide

SEQ ID NO: 491173 - DNA, 60 bp, Artificial; identical to SEQ ID NO: 10193
  Synthetic oligonucleotide

SEQ ID NO: 491174 - DNA, 59 bp, Artificial; identical to SEQ ID NO: 20126
  Synthetic oligonucleotide

SEQ ID NO: 491175 - DNA, 60 bp, Artificial; identical to SEQ ID NO: 7161
  Synthetic oligonucleotide

SEQ ID NO: 491176 - DNA, 60 bp, Artificial; identical to SEQ ID NO: 12458
  Synthetic oligonucleotide

SEQ ID NO: 491177 - DNA, 60 bp, Artificial; identical to SEQ ID NO: 8584
  Synthetic oligonucleotide

SEQ ID NO: 491178 - DNA, 60 bp, Artificial; identical to SEQ ID NO: 13225
  Synthetic oligonucleotide

SEQ ID NO: 491179 - DNA, 57 bp, Artificial; identical to SEQ ID NO: 20130
  Synthetic oligonucleotide

SEQ ID NO: 491180 - DNA, 59 bp, Artificial; identical to SEQ ID NO: 16160
  Synthetic oligonucleotide

SEQ ID NO: 491181 - DNA, 60 bp, Artificial; identical to SEQ ID NO: 14547
  Synthetic oligonucleotide

SEQ ID NO: 491182 - DNA, 60 bp, Artificial; identical to SEQ ID NO: 8207
  Synthetic oligonucleotide

SEQ ID NO: 491183 - DNA, 60 bp, Artificial; identical to SEQ ID NO: 12289
  Synthetic oligonucleotide

SEQ ID NO: 491184 - DNA, 59 bp, Artificial; identical to SEQ ID NO: 17202
  Synthetic oligonucleotide

SEQ ID NO: 491185 - DNA, 60 bp, Artificial; identical to SEQ ID NO: 13088
  Synthetic oligonucleotide

SEQ ID NO: 491186 - DNA, 54 bp, Artificial; identical to SEQ ID NO: 16640
  Synthetic oligonucleotide

SEQ ID NO: 491187 - DNA, 60 bp, Artificial; identical to SEQ ID NO: 10894
  Synthetic oligonucleotide

SEQ ID NO: 491188 - DNA, 57 bp, Artificial; identical to SEQ ID NO: 6081
  Synthetic oligonucleotide

SEQ ID NO: 491189 - DNA, 57 bp, Artificial; identical to SEQ ID NO: 18580
  Synthetic oligonucleotide

SEQ ID NO: 491190 - DNA, 59 bp, Artificial; identical to SEQ ID NO: 20389
  Synthetic oligonucleotide

SEQ ID NO: 491191 - DNA, 56 bp, Artificial; identical to SEQ ID NO: 19288
  Synthetic oligonucleotide

SEQ ID NO: 491192 - DNA, 60 bp, Artificial; identical to SEQ ID NO: 5767
  Synthetic oligonucleotide

SEQ ID NO: 491193 - DNA, 60 bp, Artificial; identical to SEQ ID NO: 10591
  Synthetic oligonucleotide

SEQ ID NO: 491194 - DNA, 59 bp, Artificial; identical to SEQ ID NO: 18510
  Synthetic oligonucleotide

SEQ ID NO: 491195 - DNA, 56 bp, Artificial; identical to SEQ ID NO: 18063
  Synthetic oligonucleotide

SEQ ID NO: 491196 - DNA, 59 bp, Artificial; identical to SEQ ID NO: 16442
  Synthetic oligonucleotide

SEQ ID NO: 491197 - DNA, 58 bp, Artificial; identical to SEQ ID NO: 18689
  Synthetic oligonucleotide

SEQ ID NO: 491198 - DNA, 56 bp, Artificial; identical to SEQ ID NO: 10465
  Synthetic oligonucleotide

SEQ ID NO: 491199 - DNA, 51 bp, Artificial; identical to SEQ ID NO: 8705
  Synthetic oligonucleotide

SEQ ID NO: 491200 - DNA, 59 bp, Artificial; identical to SEQ ID NO: 17730
  Synthetic oligonucleotide

SEQ ID NO: 491201 - DNA, 60 bp, Artificial; identical to SEQ ID NO: 75085
  Synthetic oligonucleotide

SEQ ID NO: 491202 - DNA, 57 bp, Artificial; identical to SEQ ID NO: 19173
  Synthetic oligonucleotide

SEQ ID NO: 491203 - DNA, 60 bp, Artificial; identical to SEQ ID NO: 11898
  Synthetic oligonucleotide

SEQ ID NO: 491204 - DNA, 55 bp, Artificial; identical to SEQ ID NO: 16451
  Synthetic oligonucleotide

SEQ ID NO: 491205 - DNA, 52 bp, Artificial; identical to SEQ ID NO: 12100
  Synthetic oligonucleotide

SEQ ID NO: 491206 - DNA, 60 bp, Artificial; identical to SEQ ID NO: 30324
  Synthetic oligonucleotide

SEQ ID NO: 491207 - DNA, 59 bp, Artificial; identical to SEQ ID NO: 16693
  Synthetic oligonucleotide

SEQ ID NO: 491208 - DNA, 56 bp, Artificial; identical to SEQ ID NO: 19610
  Synthetic oligonucleotide

SEQ ID NO: 491209 - DNA, 60 bp, Artificial; identical to SEQ ID NO: 11520
  Synthetic oligonucleotide

SEQ ID NO: 491210 - DNA, 60 bp, Artificial; identical to SEQ ID NO: 5965
  Synthetic oligonucleotide

SEQ ID NO: 491211 - DNA, 60 bp, Artificial; identical to SEQ ID NO: 14508
  Synthetic oligonucleotide

SEQ ID NO: 491212 - DNA, 60 bp, Artificial; identical to SEQ ID NO: 49786
  Synthetic oligonucleotide

SEQ ID NO: 491213 - DNA, 58 bp, Artificial; identical to SEQ ID NO: 15916
  Synthetic oligonucleotide

SEQ ID NO: 491214 - DNA, 56 bp, Artificial; identical to SEQ ID NO: 19893
  Synthetic oligonucleotide

SEQ ID NO: 491215 - DNA, 55 bp, Artificial; identical to SEQ ID NO: 9544
  Synthetic oligonucleotide

SEQ ID NO: 491216 - DNA, 57 bp, Artificial; identical to SEQ ID NO: 18668
  Synthetic oligonucleotide

SEQ ID NO: 491217 - DNA, 60 bp, Artificial; identical to SEQ ID NO: 11428
  Synthetic oligonucleotide

SEQ ID NO: 491218 - DNA, 59 bp, Artificial; identical to SEQ ID NO: 16113
  Synthetic oligonucleotide

SEQ ID NO: 491219 - DNA, 60 bp, Artificial; identical to SEQ ID NO: 13423
  Synthetic oligonucleotide

SEQ ID NO: 491220 - DNA, 57 bp, Artificial; identical to SEQ ID NO: 18997
  Synthetic oligonucleotide

SEQ ID NO: 491221 - DNA, 57 bp, Artificial; identical to SEQ ID NO: 16369
  Synthetic oligonucleotide

SEQ ID NO: 491222 - DNA, 60 bp, Artificial; identical to SEQ ID NO: 119927
  Synthetic oligonucleotide

SEQ ID NO: 491223 - DNA, 56 bp, Artificial; identical to SEQ ID NO: 18498
  Synthetic oligonucleotide

SEQ ID NO: 491224 - DNA, 54 bp, Artificial; identical to SEQ ID NO: 18573
  Synthetic oligonucleotide

SEQ ID NO: 491225 - DNA, 58 bp, Artificial; identical to SEQ ID NO: 18639
  Synthetic oligonucleotide

SEQ ID NO: 491226 - DNA, 57 bp, Artificial; identical to SEQ ID NO: 16019
  Synthetic oligonucleotide

SEQ ID NO: 491227 - DNA, 60 bp, Artificial; identical to SEQ ID NO: 124193
  Synthetic oligonucleotide

SEQ ID NO: 491228 - DNA, 55 bp, Artificial; identical to SEQ ID NO: 16249
  Synthetic oligonucleotide

SEQ ID NO: 491229 - DNA, 52 bp, Artificial; identical to SEQ ID NO: 6766
  Synthetic oligonucleotide

SEQ ID NO: 491230 - DNA, 60 bp, Artificial; identical to SEQ ID NO: 13046
  Synthetic oligonucleotide

SEQ ID NO: 491231 - DNA, 55 bp, Artificial; identical to SEQ ID NO: 14601
  Synthetic oligonucleotide

SEQ ID NO: 491232 - DNA, 59 bp, Artificial; identical to SEQ ID NO: 18930
  Synthetic oligonucleotide

SEQ ID NO: 491233 - DNA, 60 bp, Artificial; identical to SEQ ID NO: 10827
  Synthetic oligonucleotide

SEQ ID NO: 491234 - DNA, 60 bp, Artificial; identical to SEQ ID NO: 6422
  Synthetic oligonucleotide

SEQ ID NO: 491235 - DNA, 60 bp, Artificial; identical to SEQ ID NO: 10658
  Synthetic oligonucleotide

SEQ ID NO: 491236 - DNA, 60 bp, Artificial; identical to SEQ ID NO: 6021
  Synthetic oligonucleotide

SEQ ID NO: 491237 - DNA, 51 bp, Artificial; identical to SEQ ID NO: 13946
  Synthetic oligonucleotide

SEQ ID NO: 491238 - DNA, 60 bp, Artificial; identical to SEQ ID NO: 13285
  Synthetic oligonucleotide

SEQ ID NO: 491239 - DNA, 59 bp, Artificial; identical to SEQ ID NO: 18598
  Synthetic oligonucleotide

SEQ ID NO: 491240 - DNA, 58 bp, Artificial; identical to SEQ ID NO: 16561
  Synthetic oligonucleotide

SEQ ID NO: 491241 - DNA, 60 bp, Artificial; identical to SEQ ID NO: 8487
  Synthetic oligonucleotide

SEQ ID NO: 491242 - DNA, 56 bp, Artificial; identical to SEQ ID NO: 20023
  Synthetic oligonucleotide

SEQ ID NO: 491243 - DNA, 60 bp, Artificial; identical to SEQ ID NO: 12555
  Synthetic oligonucleotide

SEQ ID NO: 491244 - DNA, 57 bp, Artificial; identical to SEQ ID NO: 17357
  Synthetic oligonucleotide

SEQ ID NO: 491245 - DNA, 60 bp, Artificial; identical to SEQ ID NO: 12914
  Synthetic oligonucleotide

SEQ ID NO: 491246 - DNA, 53 bp, Artificial; identical to SEQ ID NO: 20291
  Synthetic oligonucleotide

SEQ ID NO: 491247 - DNA, 60 bp, Artificial; identical to SEQ ID NO: 11227
  Synthetic oligonucleotide

SEQ ID NO: 491248 - DNA, 55 bp, Artificial; identical to SEQ ID NO: 20467
  Synthetic oligonucleotide

SEQ ID NO: 491249 - DNA, 55 bp, Artificial; identical to SEQ ID NO: 9321
  Synthetic oligonucleotide

SEQ ID NO: 491250 - DNA, 60 bp, Artificial; identical to SEQ ID NO: 6511
  Synthetic oligonucleotide

SEQ ID NO: 491251 - DNA, 55 bp, Artificial; identical to SEQ ID NO: 5731
  Synthetic oligonucleotide

SEQ ID NO: 491252 - DNA, 56 bp, Artificial; identical to SEQ ID NO: 19259
  Synthetic oligonucleotide

SEQ ID NO: 491253 - DNA, 56 bp, Artificial; identical to SEQ ID NO: 85
  Synthetic oligonucleotide

SEQ ID NO: 491254 - DNA, 57 bp, Artificial; identical to SEQ ID NO: 20362
  Synthetic oligonucleotide

SEQ ID NO: 491255 - DNA, 57 bp, Artificial; identical to SEQ ID NO: 18891
  Synthetic oligonucleotide

SEQ ID NO: 491256 - DNA, 56 bp, Artificial; identical to SEQ ID NO: 19620
  Synthetic oligonucleotide

SEQ ID NO: 491257 - DNA, 55 bp, Artificial; identical to SEQ ID NO: 15890
  Synthetic oligonucleotide

SEQ ID NO: 491258 - DNA, 59 bp, Artificial; identical to SEQ ID NO: 12990
  Synthetic oligonucleotide

SEQ ID NO: 491259 - DNA, 53 bp, Artificial; identical to SEQ ID NO: 19194
  Synthetic oligonucleotide

SEQ ID NO: 491260 - DNA, 58 bp, Artificial; identical to SEQ ID NO: 17408
  Synthetic oligonucleotide

SEQ ID NO: 491261 - DNA, 56 bp, Artificial; identical to SEQ ID NO: 13853
  Synthetic oligonucleotide

SEQ ID NO: 491262 - DNA, 60 bp, Artificial; identical to SEQ ID NO: 10580
  Synthetic oligonucleotide

SEQ ID NO: 491263 - DNA, 58 bp, Artificial; identical to SEQ ID NO: 18863
  Synthetic oligonucleotide

SEQ ID NO: 491264 - DNA, 58 bp, Artificial; identical to SEQ ID NO: 19831
  Synthetic oligonucleotide

SEQ ID NO: 491265 - DNA, 60 bp, Artificial; identical to SEQ ID NO: 6731
  Synthetic oligonucleotide

SEQ ID NO: 491266 - DNA, 60 bp, Artificial; identical to SEQ ID NO: 15016
  Synthetic oligonucleotide

SEQ ID NO: 491267 - DNA, 60 bp, Artificial; identical to SEQ ID NO: 13521
  Synthetic oligonucleotide

SEQ ID NO: 491268 - DNA, 60 bp, Artificial; identical to SEQ ID NO: 12176
  Synthetic oligonucleotide

SEQ ID NO: 491269 - DNA, 57 bp, Artificial; identical to SEQ ID NO: 18266
  Synthetic oligonucleotide

SEQ ID NO: 491270 - DNA, 51 bp, Artificial; identical to SEQ ID NO: 6716
  Synthetic oligonucleotide

SEQ ID NO: 491271 - DNA, 54 bp, Artificial; identical to SEQ ID NO: 20191
  Synthetic oligonucleotide

SEQ ID NO: 491272 - DNA, 60 bp, Artificial; identical to SEQ ID NO: 15596
  Synthetic oligonucleotide

SEQ ID NO: 491273 - DNA, 56 bp, Artificial; identical to SEQ ID NO: 19343
  Synthetic oligonucleotide

SEQ ID NO: 491274 - DNA, 55 bp, Artificial; identical to SEQ ID NO: 20260
  Synthetic oligonucleotide

SEQ ID NO: 491275 - DNA, 58 bp, Artificial; identical to SEQ ID NO: 11828
  Synthetic oligonucleotide

SEQ ID NO: 491276 - DNA, 51 bp, Artificial; identical to SEQ ID NO: 20261
  Synthetic oligonucleotide

SEQ ID NO: 491277 - DNA, 55 bp, Artificial; identical to SEQ ID NO: 6042
  Synthetic oligonucleotide

SEQ ID NO: 491278 - DNA, 60 bp, Artificial; identical to SEQ ID NO: 6922
  Synthetic oligonucleotide

SEQ ID NO: 491279 - DNA, 54 bp, Artificial; identical to SEQ ID NO: 18528
  Synthetic oligonucleotide

SEQ ID NO: 491280 - DNA, 57 bp, Artificial; identical to SEQ ID NO: 20421
  Synthetic oligonucleotide

SEQ ID NO: 491281 - DNA, 57 bp, Artificial; identical to SEQ ID NO: 17740
  Synthetic oligonucleotide

SEQ ID NO: 491282 - DNA, 60 bp, Artificial; identical to SEQ ID NO: 7865
  Synthetic oligonucleotide

SEQ ID NO: 491283 - DNA, 51 bp, Artificial; identical to SEQ ID NO: 5930
  Synthetic oligonucleotide

SEQ ID NO: 491284 - DNA, 59 bp, Artificial; identical to SEQ ID NO: 18203
  Synthetic oligonucleotide

SEQ ID NO: 491285 - DNA, 54 bp, Artificial; identical to SEQ ID NO: 11672
  Synthetic oligonucleotide

SEQ ID NO: 491286 - DNA, 60 bp, Artificial; identical to SEQ ID NO: 6888
  Synthetic oligonucleotide

SEQ ID NO: 491287 - DNA, 56 bp, Artificial; identical to SEQ ID NO: 18867
  Synthetic oligonucleotide

SEQ ID NO: 491288 - DNA, 55 bp, Artificial; identical to SEQ ID NO: 18882
  Synthetic oligonucleotide

SEQ ID NO: 491289 - DNA, 58 bp, Artificial; identical to SEQ ID NO: 16837
  Synthetic oligonucleotide

SEQ ID NO: 491290 - DNA, 56 bp, Artificial; identical to SEQ ID NO: 18576
  Synthetic oligonucleotide

SEQ ID NO: 491291 - DNA, 60 bp, Artificial; identical to SEQ ID NO: 7610
  Synthetic oligonucleotide

SEQ ID NO: 491292 - DNA, 60 bp, Artificial; identical to SEQ ID NO: 13990
  Synthetic oligonucleotide

SEQ ID NO: 491293 - DNA, 59 bp, Artificial; identical to SEQ ID NO: 18240
  Synthetic oligonucleotide

SEQ ID NO: 491294 - DNA, 53 bp, Artificial; identical to SEQ ID NO: 6178
  Synthetic oligonucleotide

SEQ ID NO: 491295 - DNA, 58 bp, Artificial; identical to SEQ ID NO: 16309
  Synthetic oligonucleotide

SEQ ID NO: 491296 - DNA, 60 bp, Artificial; identical to SEQ ID NO: 8153
  Synthetic oligonucleotide

SEQ ID NO: 491297 - DNA, 60 bp, Artificial; identical to SEQ ID NO: 9304
  Synthetic oligonucleotide

SEQ ID NO: 491298 - DNA, 60 bp, Artificial; identical to SEQ ID NO: 10314
  Synthetic oligonucleotide

SEQ ID NO: 491299 - DNA, 58 bp, Artificial; identical to SEQ ID NO: 19535
  Synthetic oligonucleotide

SEQ ID NO: 491300 - DNA, 60 bp, Artificial; identical to SEQ ID NO: 7261
  Synthetic oligonucleotide

SEQ ID NO: 491301 - DNA, 60 bp, Artificial; identical to SEQ ID NO: 118136
  Synthetic oligonucleotide

SEQ ID NO: 491302 - DNA, 60 bp, Artificial; identical to SEQ ID NO: 9868
  Synthetic oligonucleotide

SEQ ID NO: 491303 - DNA, 60 bp, Artificial; identical to SEQ ID NO: 12987
  Synthetic oligonucleotide

SEQ ID NO: 491304 - DNA, 60 bp, Artificial; identical to SEQ ID NO: 14350
  Synthetic oligonucleotide

SEQ ID NO: 491305 - DNA, 60 bp, Artificial; identical to SEQ ID NO: 6590
  Synthetic oligonucleotide

SEQ ID NO: 491306 - DNA, 55 bp, Artificial; identical to SEQ ID NO: 13845
  Synthetic oligonucleotide

SEQ ID NO: 491307 - DNA, 60 bp, Artificial; identical to SEQ ID NO: 12433
  Synthetic oligonucleotide

SEQ ID NO: 491308 - DNA, 55 bp, Artificial; identical to SEQ ID NO: 6224
  Synthetic oligonucleotide

SEQ ID NO: 491309 - DNA, 60 bp, Artificial; identical to SEQ ID NO: 12192
  Synthetic oligonucleotide

SEQ ID NO: 491310 - DNA, 54 bp, Artificial; identical to SEQ ID NO: 6143
  Synthetic oligonucleotide

SEQ ID NO: 491311 - DNA, 60 bp, Artificial; identical to SEQ ID NO: 9283
  Synthetic oligonucleotide

SEQ ID NO: 491312 - DNA, 60 bp, Artificial; identical to SEQ ID NO: 9320
  Synthetic oligonucleotide

SEQ ID NO: 491313 - DNA, 60 bp, Artificial; identical to SEQ ID NO: 7086
  Synthetic oligonucleotide

SEQ ID NO: 491314 - DNA, 59 bp, Artificial; identical to SEQ ID NO: 15986
  Synthetic oligonucleotide

SEQ ID NO: 491315 - DNA, 60 bp, Artificial; identical to SEQ ID NO: 11694
  Synthetic oligonucleotide

SEQ ID NO: 491316 - DNA, 54 bp, Artificial; identical to SEQ ID NO: 18545
  Synthetic oligonucleotide

SEQ ID NO: 491317 - DNA, 60 bp, Artificial; identical to SEQ ID NO: 45464
  Synthetic oligonucleotide

SEQ ID NO: 491318 - DNA, 59 bp, Artificial; identical to SEQ ID NO: 16627
  Synthetic oligonucleotide

SEQ ID NO: 491319 - DNA, 57 bp, Artificial; identical to SEQ ID NO: 18363
  Synthetic oligonucleotide

SEQ ID NO: 491320 - DNA, 55 bp, Artificial; identical to SEQ ID NO: 14988
  Synthetic oligonucleotide

SEQ ID NO: 491321 - DNA, 60 bp, Artificial; identical to SEQ ID NO: 13890
  Synthetic oligonucleotide

SEQ ID NO: 491322 - DNA, 52 bp, Artificial; identical to SEQ ID NO: 19736
  Synthetic oligonucleotide

SEQ ID NO: 491323 - DNA, 55 bp, Artificial; identical to SEQ ID NO: 17421
  Synthetic oligonucleotide

SEQ ID NO: 491324 - DNA, 60 bp, Artificial; identical to SEQ ID NO: 15362
  Synthetic oligonucleotide

SEQ ID NO: 491325 - DNA, 56 bp, Artificial; identical to SEQ ID NO: 20094
  Synthetic oligonucleotide

SEQ ID NO: 491326 - DNA, 60 bp, Artificial; identical to SEQ ID NO: 14525
  Synthetic oligonucleotide

SEQ ID NO: 491327 - DNA, 59 bp, Artificial; identical to SEQ ID NO: 16487
  Synthetic oligonucleotide

SEQ ID NO: 491328 - DNA, 60 bp, Artificial; identical to SEQ ID NO: 11557
  Synthetic oligonucleotide

SEQ ID NO: 491329 - DNA, 56 bp, Artificial; identical to SEQ ID NO: 13065
  Synthetic oligonucleotide

SEQ ID NO: 491330 - DNA, 60 bp, Artificial; identical to SEQ ID NO: 12274
  Synthetic oligonucleotide

SEQ ID NO: 491331 - DNA, 57 bp, Artificial; identical to SEQ ID NO: 12838
  Synthetic oligonucleotide

SEQ ID NO: 491332 - DNA, 58 bp, Artificial; identical to SEQ ID NO: 12686
  Synthetic oligonucleotide

SEQ ID NO: 491333 - DNA, 50 bp, Artificial; identical to SEQ ID NO: 10768
  Synthetic oligonucleotide

SEQ ID NO: 491334 - DNA, 60 bp, Artificial; identical to SEQ ID NO: 14692
  Synthetic oligonucleotide

SEQ ID NO: 491335 - DNA, 55 bp, Artificial; identical to SEQ ID NO: 12831
  Synthetic oligonucleotide

SEQ ID NO: 491336 - DNA, 60 bp, Artificial; identical to SEQ ID NO: 10247
  Synthetic oligonucleotide

SEQ ID NO: 491337 - DNA, 60 bp, Artificial; identical to SEQ ID NO: 6246
  Synthetic oligonucleotide

SEQ ID NO: 491338 - DNA, 60 bp, Artificial; identical to SEQ ID NO: 8414
  Synthetic oligonucleotide

SEQ ID NO: 491339 - DNA, 60 bp, Artificial; identical to SEQ ID NO: 15587
  Synthetic oligonucleotide

SEQ ID NO: 491340 - DNA, 59 bp, Artificial; identical to SEQ ID NO: 5770
  Synthetic oligonucleotide

SEQ ID NO: 491341 - DNA, 60 bp, Artificial; identical to SEQ ID NO: 6348
  Synthetic oligonucleotide

SEQ ID NO: 491342 - DNA, 60 bp, Artificial; identical to SEQ ID NO: 14295
  Synthetic oligonucleotide

SEQ ID NO: 491343 - DNA, 57 bp, Artificial; identical to SEQ ID NO: 19443
  Synthetic oligonucleotide

SEQ ID NO: 491344 - DNA, 60 bp, Artificial; identical to SEQ ID NO: 11811
  Synthetic oligonucleotide

SEQ ID NO: 491345 - DNA, 60 bp, Artificial; identical to SEQ ID NO: 10803
  Synthetic oligonucleotide

SEQ ID NO: 491346 - DNA, 60 bp, Artificial; identical to SEQ ID NO: 12066
  Synthetic oligonucleotide

SEQ ID NO: 491347 - DNA, 60 bp, Artificial; identical to SEQ ID NO: 6776
  Synthetic oligonucleotide

SEQ ID NO: 491348 - DNA, 52 bp, Artificial; identical to SEQ ID NO: 8730
  Synthetic oligonucleotide

SEQ ID NO: 491349 - DNA, 60 bp, Artificial; identical to SEQ ID NO: 10437
  Synthetic oligonucleotide

SEQ ID NO: 491350 - DNA, 60 bp, Artificial; identical to SEQ ID NO: 6234
  Synthetic oligonucleotide

SEQ ID NO: 491351 - DNA, 60 bp, Artificial; identical to SEQ ID NO: 7479
  Synthetic oligonucleotide

SEQ ID NO: 491352 - DNA, 60 bp, Artificial; identical to SEQ ID NO: 5795
  Synthetic oligonucleotide

SEQ ID NO: 491353 - DNA, 60 bp, Artificial; identical to SEQ ID NO: 8711
  Synthetic oligonucleotide

SEQ ID NO: 491354 - DNA, 56 bp, Artificial; identical to SEQ ID NO: 11550
  Synthetic oligonucleotide

SEQ ID NO: 491355 - DNA, 60 bp, Artificial; identical to SEQ ID NO: 8023
  Synthetic oligonucleotide

SEQ ID NO: 491356 - DNA, 60 bp, Artificial; identical to SEQ ID NO: 7753
  Synthetic oligonucleotide

SEQ ID NO: 491357 - DNA, 59 bp, Artificial; identical to SEQ ID NO: 17983
  Synthetic oligonucleotide

SEQ ID NO: 491358 - DNA, 59 bp, Artificial; identical to SEQ ID NO: 7790
  Synthetic oligonucleotide

SEQ ID NO: 491359 - DNA, 56 bp, Artificial; identical to SEQ ID NO: 20498
  Synthetic oligonucleotide

SEQ ID NO: 491360 - DNA, 58 bp, Artificial; identical to SEQ ID NO: 16673
  Synthetic oligonucleotide

SEQ ID NO: 491361 - DNA, 57 bp, Artificial; identical to SEQ ID NO: 16687
  Synthetic oligonucleotide

SEQ ID NO: 491362 - DNA, 51 bp, Artificial; identical to SEQ ID NO: 7454
  Synthetic oligonucleotide

SEQ ID NO: 491363 - DNA, 55 bp, Artificial; identical to SEQ ID NO: 8165
  Synthetic oligonucleotide

SEQ ID NO: 491364 - DNA, 55 bp, Artificial; identical to SEQ ID NO: 17206
  Synthetic oligonucleotide

SEQ ID NO: 491365 - DNA, 60 bp, Artificial; identical to SEQ ID NO: 9009
  Synthetic oligonucleotide

SEQ ID NO: 491366 - DNA, 58 bp, Artificial; identical to SEQ ID NO: 20436
  Synthetic oligonucleotide

SEQ ID NO: 491367 - DNA, 56 bp, Artificial; identical to SEQ ID NO: 17232
  Synthetic oligonucleotide

SEQ ID NO: 491368 - DNA, 58 bp, Artificial; identical to SEQ ID NO: 17891
  Synthetic oligonucleotide

SEQ ID NO: 491369 - DNA, 60 bp, Artificial; identical to SEQ ID NO: 11175
  Synthetic oligonucleotide

SEQ ID NO: 491370 - DNA, 55 bp, Artificial; identical to SEQ ID NO: 12143
  Synthetic oligonucleotide

SEQ ID NO: 491371 - DNA, 55 bp, Artificial; identical to SEQ ID NO: 16107
  Synthetic oligonucleotide

SEQ ID NO: 491372 - DNA, 60 bp, Artificial; identical to SEQ ID NO: 111169
  Synthetic oligonucleotide

SEQ ID NO: 491373 - DNA, 55 bp, Artificial; identical to SEQ ID NO: 18657
  Synthetic oligonucleotide

SEQ ID NO: 491374 - DNA, 58 bp, Artificial; identical to SEQ ID NO: 7441
  Synthetic oligonucleotide

SEQ ID NO: 491375 - DNA, 55 bp, Artificial; identical to SEQ ID NO: 16812
  Synthetic oligonucleotide

SEQ ID NO: 491376 - DNA, 60 bp, Artificial; identical to SEQ ID NO: 8585
  Synthetic oligonucleotide

SEQ ID NO: 491377 - DNA, 60 bp, Artificial; identical to SEQ ID NO: 9005
  Synthetic oligonucleotide

SEQ ID NO: 491378 - DNA, 55 bp, Artificial; identical to SEQ ID NO: 16108
  Synthetic oligonucleotide

SEQ ID NO: 491379 - DNA, 60 bp, Artificial; identical to SEQ ID NO: 7387
  Synthetic oligonucleotide

SEQ ID NO: 491380 - DNA, 60 bp, Artificial; identical to SEQ ID NO: 10242
  Synthetic oligonucleotide

SEQ ID NO: 491381 - DNA, 60 bp, Artificial; identical to SEQ ID NO: 8898
  Synthetic oligonucleotide

SEQ ID NO: 491382 - DNA, 60 bp, Artificial; identical to SEQ ID NO: 6171
  Synthetic oligonucleotide

SEQ ID NO: 491383 - DNA, 60 bp, Artificial; identical to SEQ ID NO: 9768
  Synthetic oligonucleotide

SEQ ID NO: 491384 - DNA, 56 bp, Artificial; identical to SEQ ID NO: 18133
  Synthetic oligonucleotide

SEQ ID NO: 491385 - DNA, 60 bp, Artificial; identical to SEQ ID NO: 11460
  Synthetic oligonucleotide

SEQ ID NO: 491386 - DNA, 60 bp, Artificial; identical to SEQ ID NO: 11585
  Synthetic oligonucleotide

SEQ ID NO: 491387 - DNA, 57 bp, Artificial; identical to SEQ ID NO: 13928
  Synthetic oligonucleotide

SEQ ID NO: 491388 - DNA, 60 bp, Artificial; identical to SEQ ID NO: 7147
  Synthetic oligonucleotide

SEQ ID NO: 491389 - DNA, 60 bp, Artificial; identical to SEQ ID NO: 10950
  Synthetic oligonucleotide

SEQ ID NO: 491390 - DNA, 54 bp, Artificial; identical to SEQ ID NO: 12877
  Synthetic oligonucleotide

SEQ ID NO: 491391 - DNA, 60 bp, Artificial; identical to SEQ ID NO: 12891
  Synthetic oligonucleotide

SEQ ID NO: 491392 - DNA, 59 bp, Artificial; identical to SEQ ID NO: 20511
  Synthetic oligonucleotide

SEQ ID NO: 491393 - DNA, 60 bp, Artificial; identical to SEQ ID NO: 9095
  Synthetic oligonucleotide

SEQ ID NO: 491394 - DNA, 60 bp, Artificial; identical to SEQ ID NO: 8115
  Synthetic oligonucleotide

SEQ ID NO: 491395 - DNA, 60 bp, Artificial; identical to SEQ ID NO: 88010
  Synthetic oligonucleotide

SEQ ID NO: 491396 - DNA, 52 bp, Artificial; identical to SEQ ID NO: 14617
  Synthetic oligonucleotide

SEQ ID NO: 491397 - DNA, 60 bp, Artificial; identical to SEQ ID NO: 7350
  Synthetic oligonucleotide

SEQ ID NO: 491398 - DNA, 54 bp, Artificial; identical to SEQ ID NO: 16375
  Synthetic oligonucleotide

SEQ ID NO: 491399 - DNA, 60 bp, Artificial; identical to SEQ ID NO: 6950
  Synthetic oligonucleotide

SEQ ID NO: 491400 - DNA, 60 bp, Artificial; identical to SEQ ID NO: 9169
  Synthetic oligonucleotide

SEQ ID NO: 491401 - DNA, 57 bp, Artificial; identical to SEQ ID NO: 20244
  Synthetic oligonucleotide

SEQ ID NO: 491402 - DNA, 57 bp, Artificial; identical to SEQ ID NO: 11855
  Synthetic oligonucleotide

SEQ ID NO: 491403 - DNA, 60 bp, Artificial; identical to SEQ ID NO: 12533
  Synthetic oligonucleotide

SEQ ID NO: 491404 - DNA, 59 bp, Artificial; identical to SEQ ID NO: 17122
  Synthetic oligonucleotide

SEQ ID NO: 491405 - DNA, 51 bp, Artificial; identical to SEQ ID NO: 11196
  Synthetic oligonucleotide

SEQ ID NO: 491406 - DNA, 60 bp, Artificial; identical to SEQ ID NO: 7832
  Synthetic oligonucleotide

SEQ ID NO: 491407 - DNA, 54 bp, Artificial; identical to SEQ ID NO: 10490
  Synthetic oligonucleotide

SEQ ID NO: 491408 - DNA, 54 bp, Artificial; identical to SEQ ID NO: 17540
  Synthetic oligonucleotide

SEQ ID NO: 491409 - DNA, 56 bp, Artificial; identical to SEQ ID NO: 19958
  Synthetic oligonucleotide

SEQ ID NO: 491410 - DNA, 60 bp, Artificial; identical to SEQ ID NO: 14763
  Synthetic oligonucleotide

SEQ ID NO: 491411 - DNA, 59 bp, Artificial; identical to SEQ ID NO: 7569
  Synthetic oligonucleotide

SEQ ID NO: 491412 - DNA, 53 bp, Artificial; identical to SEQ ID NO: 18740
  Synthetic oligonucleotide

SEQ ID NO: 491413 - DNA, 54 bp, Artificial; identical to SEQ ID NO: 88
  Synthetic oligonucleotide

SEQ ID NO: 491414 - DNA, 58 bp, Artificial; identical to SEQ ID NO: 18208
  Synthetic oligonucleotide

SEQ ID NO: 491415 - DNA, 50 bp, Artificial; identical to SEQ ID NO: 6619
  Synthetic oligonucleotide

SEQ ID NO: 491416 - DNA, 57 bp, Artificial; identical to SEQ ID NO: 17784
  Synthetic oligonucleotide

SEQ ID NO: 491417 - DNA, 59 bp, Artificial; identical to SEQ ID NO: 15511
  Synthetic oligonucleotide

SEQ ID NO: 491418 - DNA, 52 bp, Artificial; identical to SEQ ID NO: 11838
  Synthetic oligonucleotide

SEQ ID NO: 491419 - DNA, 54 bp, Artificial; identical to SEQ ID NO: 6013
  Synthetic oligonucleotide

SEQ ID NO: 491420 - DNA, 60 bp, Artificial; identical to SEQ ID NO: 11567
  Synthetic oligonucleotide

SEQ ID NO: 491421 - DNA, 60 bp, Artificial; identical to SEQ ID NO: 7640
  Synthetic oligonucleotide

SEQ ID NO: 491422 - DNA, 59 bp, Artificial; identical to SEQ ID NO: 19237
  Synthetic oligonucleotide

SEQ ID NO: 491423 - DNA, 51 bp, Artificial; identical to SEQ ID NO: 14744
  Synthetic oligonucleotide

SEQ ID NO: 491424 - DNA, 60 bp, Artificial; identical to SEQ ID NO: 8339
  Synthetic oligonucleotide

SEQ ID NO: 491425 - DNA, 60 bp, Artificial; identical to SEQ ID NO: 7420
  Synthetic oligonucleotide

SEQ ID NO: 491426 - DNA, 59 bp, Artificial; identical to SEQ ID NO: 11279
  Synthetic oligonucleotide

SEQ ID NO: 491427 - DNA, 60 bp, Artificial; identical to SEQ ID NO: 11593
  Synthetic oligonucleotide

SEQ ID NO: 491428 - DNA, 60 bp, Artificial; identical to SEQ ID NO: 15316
  Synthetic oligonucleotide

SEQ ID NO: 491429 - DNA, 60 bp, Artificial; identical to SEQ ID NO: 12519
  Synthetic oligonucleotide

SEQ ID NO: 491430 - DNA, 60 bp, Artificial; identical to SEQ ID NO: 6084
  Synthetic oligonucleotide

SEQ ID NO: 491431 - DNA, 50 bp, Artificial; identical to SEQ ID NO: 7256
  Synthetic oligonucleotide

SEQ ID NO: 491432 - DNA, 60 bp, Artificial; identical to SEQ ID NO: 8516
  Synthetic oligonucleotide

SEQ ID NO: 491433 - DNA, 57 bp, Artificial; identical to SEQ ID NO: 19754
  Synthetic oligonucleotide

SEQ ID NO: 491434 - DNA, 57 bp, Artificial; identical to SEQ ID NO: 6351
  Synthetic oligonucleotide

SEQ ID NO: 491435 - DNA, 60 bp, Artificial; identical to SEQ ID NO: 9767
  Synthetic oligonucleotide

SEQ ID NO: 491436 - DNA, 60 bp, Artificial; identical to SEQ ID NO: 118118
  Synthetic oligonucleotide

SEQ ID NO: 491437 - DNA, 55 bp, Artificial; identical to SEQ ID NO: 20142
  Synthetic oligonucleotide

SEQ ID NO: 491438 - DNA, 54 bp, Artificial; identical to SEQ ID NO: 18840
  Synthetic oligonucleotide

SEQ ID NO: 491439 - DNA, 55 bp, Artificial; identical to SEQ ID NO: 6026
  Synthetic oligonucleotide

SEQ ID NO: 491440 - DNA, 60 bp, Artificial; identical to SEQ ID NO: 10676
  Synthetic oligonucleotide

SEQ ID NO: 491441 - DNA, 55 bp, Artificial; identical to SEQ ID NO: 8713
  Synthetic oligonucleotide

SEQ ID NO: 491442 - DNA, 55 bp, Artificial; identical to SEQ ID NO: 5910
  Synthetic oligonucleotide

SEQ ID NO: 491443 - DNA, 58 bp, Artificial; identical to SEQ ID NO: 6789
  Synthetic oligonucleotide

SEQ ID NO: 491444 - DNA, 59 bp, Artificial; identical to SEQ ID NO: 20263
  Synthetic oligonucleotide

SEQ ID NO: 491445 - DNA, 60 bp, Artificial; identical to SEQ ID NO: 6259
  Synthetic oligonucleotide

SEQ ID NO: 491446 - DNA, 52 bp, Artificial; identical to SEQ ID NO: 12009
  Synthetic oligonucleotide

SEQ ID NO: 491447 - DNA, 55 bp, Artificial; identical to SEQ ID NO: 16787
  Synthetic oligonucleotide

SEQ ID NO: 491448 - DNA, 60 bp, Artificial; identical to SEQ ID NO: 14385
  Synthetic oligonucleotide

SEQ ID NO: 491449 - DNA, 60 bp, Artificial; identical to SEQ ID NO: 13138
  Synthetic oligonucleotide

SEQ ID NO: 491450 - DNA, 56 bp, Artificial; identical to SEQ ID NO: 19728
  Synthetic oligonucleotide

SEQ ID NO: 491451 - DNA, 51 bp, Artificial; identical to SEQ ID NO: 6564
  Synthetic oligonucleotide

SEQ ID NO: 491452 - DNA, 60 bp, Artificial; identical to SEQ ID NO: 6781
  Synthetic oligonucleotide

SEQ ID NO: 491453 - DNA, 54 bp, Artificial; identical to SEQ ID NO: 16984
  Synthetic oligonucleotide

SEQ ID NO: 491454 - DNA, 56 bp, Artificial; identical to SEQ ID NO: 10674
  Synthetic oligonucleotide

SEQ ID NO: 491455 - DNA, 55 bp, Artificial; identical to SEQ ID NO: 9072
  Synthetic oligonucleotide

SEQ ID NO: 491456 - DNA, 51 bp, Artificial; identical to SEQ ID NO: 11717
  Synthetic oligonucleotide

SEQ ID NO: 491457 - DNA, 56 bp, Artificial; identical to SEQ ID NO: 11238
  Synthetic oligonucleotide

SEQ ID NO: 491458 - DNA, 54 bp, Artificial; identical to SEQ ID NO: 9933
  Synthetic oligonucleotide

SEQ ID NO: 491459 - DNA, 60 bp, Artificial; identical to SEQ ID NO: 12746
  Synthetic oligonucleotide

SEQ ID NO: 491460 - DNA, 55 bp, Artificial; identical to SEQ ID NO: 7819
  Synthetic oligonucleotide

SEQ ID NO: 491461 - DNA, 60 bp, Artificial; identical to SEQ ID NO: 123353
  Synthetic oligonucleotide

SEQ ID NO: 491462 - DNA, 57 bp, Artificial; identical to SEQ ID NO: 15915
  Synthetic oligonucleotide

SEQ ID NO: 491463 - DNA, 58 bp, Artificial; identical to SEQ ID NO: 18518
  Synthetic oligonucleotide

SEQ ID NO: 491464 - DNA, 51 bp, Artificial; identical to SEQ ID NO: 20040
  Synthetic oligonucleotide

SEQ ID NO: 491465 - DNA, 60 bp, Artificial; identical to SEQ ID NO: 15565
  Synthetic oligonucleotide

SEQ ID NO: 491466 - DNA, 58 bp, Artificial; identical to SEQ ID NO: 12724
  Synthetic oligonucleotide

SEQ ID NO: 491467 - DNA, 57 bp, Artificial; identical to SEQ ID NO: 17695
  Synthetic oligonucleotide

SEQ ID NO: 491468 - DNA, 60 bp, Artificial; identical to SEQ ID NO: 14669
  Synthetic oligonucleotide

SEQ ID NO: 491469 - DNA, 60 bp, Artificial; identical to SEQ ID NO: 63403
  Synthetic oligonucleotide

SEQ ID NO: 491470 - DNA, 55 bp, Artificial; identical to SEQ ID NO: 20232
  Synthetic oligonucleotide

SEQ ID NO: 491471 - DNA, 60 bp, Artificial; identical to SEQ ID NO: 10458
  Synthetic oligonucleotide

SEQ ID NO: 491472 - DNA, 56 bp, Artificial; identical to SEQ ID NO: 18223
  Synthetic oligonucleotide

SEQ ID NO: 491473 - DNA, 55 bp, Artificial; identical to SEQ ID NO: 20305
  Synthetic oligonucleotide

SEQ ID NO: 491474 - DNA, 60 bp, Artificial; identical to SEQ ID NO: 5799
  Synthetic oligonucleotide

SEQ ID NO: 491475 - DNA, 59 bp, Artificial; identical to SEQ ID NO: 19264
  Synthetic oligonucleotide

SEQ ID NO: 491476 - DNA, 58 bp, Artificial; identical to SEQ ID NO: 17265
  Synthetic oligonucleotide

SEQ ID NO: 491477 - DNA, 60 bp, Artificial; identical to SEQ ID NO: 15281
  Synthetic oligonucleotide

SEQ ID NO: 491478 - DNA, 55 bp, Artificial; identical to SEQ ID NO: 17692
  Synthetic oligonucleotide

SEQ ID NO: 491479 - DNA, 60 bp, Artificial; identical to SEQ ID NO: 12950
  Synthetic oligonucleotide

SEQ ID NO: 491480 - DNA, 60 bp, Artificial; identical to SEQ ID NO: 10699
  Synthetic oligonucleotide

SEQ ID NO: 491481 - DNA, 54 bp, Artificial; identical to SEQ ID NO: 16390
  Synthetic oligonucleotide

SEQ ID NO: 491482 - DNA, 58 bp, Artificial; identical to SEQ ID NO: 20110
  Synthetic oligonucleotide

SEQ ID NO: 491483 - DNA, 59 bp, Artificial; identical to SEQ ID NO: 6017
  Synthetic oligonucleotide

SEQ ID NO: 491484 - DNA, 52 bp, Artificial; identical to SEQ ID NO: 18180
  Synthetic oligonucleotide

SEQ ID NO: 491485 - DNA, 60 bp, Artificial; identical to SEQ ID NO: 5804
  Synthetic oligonucleotide

SEQ ID NO: 491486 - DNA, 56 bp, Artificial; identical to SEQ ID NO: 17392
  Synthetic oligonucleotide

SEQ ID NO: 491487 - DNA, 57 bp, Artificial; identical to SEQ ID NO: 16121
  Synthetic oligonucleotide

SEQ ID NO: 491488 - DNA, 60 bp, Artificial; identical to SEQ ID NO: 13424
  Synthetic oligonucleotide

SEQ ID NO: 491489 - DNA, 60 bp, Artificial; identical to SEQ ID NO: 13197
  Synthetic oligonucleotide

SEQ ID NO: 491490 - DNA, 60 bp, Artificial; identical to SEQ ID NO: 8267
  Synthetic oligonucleotide

SEQ ID NO: 491491 - DNA, 58 bp, Artificial; identical to SEQ ID NO: 16133
  Synthetic oligonucleotide

SEQ ID NO: 491492 - DNA, 57 bp, Artificial; identical to SEQ ID NO: 19412
  Synthetic oligonucleotide

SEQ ID NO: 491493 - DNA, 52 bp, Artificial; identical to SEQ ID NO: 14220
  Synthetic oligonucleotide

SEQ ID NO: 491494 - DNA, 56 bp, Artificial; identical to SEQ ID NO: 18241
  Synthetic oligonucleotide

SEQ ID NO: 491495 - DNA, 59 bp, Artificial; identical to SEQ ID NO: 19234
  Synthetic oligonucleotide

SEQ ID NO: 491496 - DNA, 60 bp, Artificial; identical to SEQ ID NO: 169
  Synthetic oligonucleotide

SEQ ID NO: 491497 - DNA, 56 bp, Artificial; identical to SEQ ID NO: 19550
  Synthetic oligonucleotide

SEQ ID NO: 491498 - DNA, 57 bp, Artificial; identical to SEQ ID NO: 16794
  Synthetic oligonucleotide

SEQ ID NO: 491499 - DNA, 55 bp, Artificial
  Synthetic oligonucleotide
aacacagcggcgaggccctaaggcttgcatacgccatgagccactacagaaagcc

SEQ ID NO: 491500 - DNA, 58 bp, Artificial
  Synthetic oligonucleotide
aagcaccccgacgagaaaatcatcgtctcaatgagccttgggagcccgttcggctcgc

SEQ ID NO: 491501 - DNA, 54 bp, Artificial
  Synthetic oligonucleotide
acactgcaaccgctattataagcgctggatccattacgacacctccgctcagta

SEQ ID NO: 491502 - DNA, 54 bp, Artificial
  Synthetic oligonucleotide
accctgacccttgtactcccggatctcacctcaaggtccaccgtgagcgttccc

SEQ ID NO: 491503 - DNA, 55 bp, Artificial
  Synthetic oligonucleotide
actcggataccccgactgagtcaggcgaagcggacgtcgtaattggcgaggggag

SEQ ID NO: 491504 - DNA, 55 bp, Artificial
  Synthetic oligonucleotide
agtatatgcccgcgtgagctccagcgaccagaggagcgacctcgagaggcaagtg

SEQ ID NO: 491505 - DNA, 55 bp, Artificial
  Synthetic oligonucleotide
atgaggggctttagcatcttggtgaactccactaagtcatcatcagtgaatccac

SEQ ID NO: 491506 - DNA, 53 bp, Artificial
  Synthetic oligonucleotide
cacaggctcgtgtcaaagcctaacaattcggccatcttcctgtacactattaa

SEQ ID NO: 491507 - DNA, 55 bp, Artificial
  Synthetic oligonucleotide
cacgagtccgtttcgcggcctcctgagcgtagccttcgtgggttgtctcgatgga

SEQ ID NO: 491508 - DNA, 55 bp, Artificial
  Synthetic oligonucleotide
cactattccgaggacggtgactacatatacgcctgggaggaagttgttattccga

SEQ ID NO: 491509 - DNA, 55 bp, Artificial
  Synthetic oligonucleotide
cagctggaccgtcgagtttcccgtctacatcgactgtacgtacctgaacggacga

SEQ ID NO: 491510 - DNA, 55 bp, Artificial
  Synthetic oligonucleotide
ccggggtggcaaaggctacgcaaccaaggtaggctaaccgcacgacgtgccatag

SEQ ID NO: 491511 - DNA, 55 bp, Artificial
  Synthetic oligonucleotide
cgagagctgtcgctttgagcgtctgaacccggtaattcgtccggcggcagtagtg

SEQ ID NO: 491512 - DNA, 55 bp, Artificial
  Synthetic oligonucleotide
cgatgccatacgcatccggcaacgccacatcgcacacataccagcacacggccgt

SEQ ID NO: 491513 - DNA, 51 bp, Artificial
  Synthetic oligonucleotide
cgcaatttaggcgcctgatttctatgcccccgtgcattaaattcaaggcgc

SEQ ID NO: 491514 - DNA, 55 bp, Artificial
  Synthetic oligonucleotide
cgcactggtcccttagtctcacttgcgcacgtattggagaacgaccgtgagggct

SEQ ID NO: 491515 - DNA, 55 bp, Artificial
  Synthetic oligonucleotide
cgctgaagtgaacgcagacggagggcgtcggtactcccggtgattccctaggagt

SEQ ID NO: 491516 - DNA, 57 bp, Artificial
  Synthetic oligonucleotide
cgggggacgatgacccagtggtagctatcgtgagccacgccaaaatctctggggtga

SEQ ID NO: 491517 - DNA, 55 bp, Artificial
  Synthetic oligonucleotide
cgtccggacccgttctcgcgtcacggatccaatgcgatatgtatgaatgtgtggc

SEQ ID NO: 491518 - DNA, 59 bp, Artificial
  Synthetic oligonucleotide
cgtgccgtaggcagtaccggtggagtacttgccaagcagtcgatagaagggctcggata

SEQ ID NO: 491519 - DNA, 55 bp, Artificial
  Synthetic oligonucleotide
cgttgaggtaccgcaaaggtaaccatgagggagcaatcgcagggatagtggcggg

SEQ ID NO: 491520 - DNA, 51 bp, Artificial
  Synthetic oligonucleotide
ctcgtgcacttagtaggtgggatggtccatgaggttgcacgtccatattaa

SEQ ID NO: 491521 - DNA, 55 bp, Artificial
  Synthetic oligonucleotide
ctgaggaagaccaaggatggcctcacgaagggattcattgatgaagttatagtgc

SEQ ID NO: 491522 - DNA, 55 bp, Artificial
  Synthetic oligonucleotide
ctgggactacgaccctaactctgagaagaggaccccgataggtgggcagtttgcc

SEQ ID NO: 491523 - DNA, 55 bp, Artificial
  Synthetic oligonucleotide
cttcgagcatccagcccttgagaagtatctaaatcgtttcccagctagacagtac

SEQ ID NO: 491524 - DNA, 55 bp, Artificial
  Synthetic oligonucleotide
gaccaactcgagagtggggtcgtagacacgagtctgaccggacacaccagccctg

SEQ ID NO: 491525 - DNA, 55 bp, Artificial
  Synthetic oligonucleotide
gaccgttccaacttcggcgacgaatcctccgcaaaccgggacgagaagcactgaa

SEQ ID NO: 491526 - DNA, 55 bp, Artificial
  Synthetic oligonucleotide
gacgaaaatcctggccatagtagcagcgatagtcgggtgagaaccccgacggcct

SEQ ID NO: 491527 - DNA, 54 bp, Artificial
  Synthetic oligonucleotide
gactcgaatctacgtactttatcttctacgaaagtgtaaactgggtcaactaat

SEQ ID NO: 491528 - DNA, 56 bp, Artificial
  Synthetic oligonucleotide
gagaggcgctgtaagcgttcgtaacgagccttcgttacgaagcggcctatacgctt

SEQ ID NO: 491529 - DNA, 60 bp, Artificial
  Synthetic oligonucleotide
gagcggctcagtgtaccgcgtgtgcctgatcaccgaaacgtgcgagtgtcccagcgacac

SEQ ID NO: 491530 - DNA, 55 bp, Artificial
  Synthetic oligonucleotide
gcaggtgtcccatctgtggtgccagctgaacctgtgagttggggttactctggga

SEQ ID NO: 491531 - DNA, 55 bp, Artificial
  Synthetic oligonucleotide
gccccaggcaaactgcccacctatcggggtcctcttcgcagagttagggtcgtag

SEQ ID NO: 491532 - DNA, 55 bp, Artificial
  Synthetic oligonucleotide
gctcgtatggatctggagcgaccgagtggacgtgatccgggacccctgtctcttg

SEQ ID NO: 491533 - DNA, 52 bp, Artificial
  Synthetic oligonucleotide
gggcgttacagggtcgattggaggcataagggtagtggtcccagggaaaaaa

SEQ ID NO: 491534 - DNA, 50 bp, Artificial
  Synthetic oligonucleotide
ggggaaaatcgggtatctcctaaccgccgcgtcccttttagaggccctcg

SEQ ID NO: 491535 - DNA, 55 bp, Artificial
  Synthetic oligonucleotide
ggggataatgaaaccgtgaccaacgccaaccagtatacaagcacgtacgccccgc

SEQ ID NO: 491536 - DNA, 55 bp, Artificial
  Synthetic oligonucleotide
gtcggtagctgagcacctaacgagcgatttgagtccgttctggcttgatcggtgc

SEQ ID NO: 491537 - DNA, 55 bp, Artificial
  Synthetic oligonucleotide
gttcagatcacactaacgggcgagaaagcggctgagtacaccgaacggaaggaac

SEQ ID NO: 491538 - DNA, 51 bp, Artificial
  Synthetic oligonucleotide
taattccgttagaggaataagtatgggaaaatagtagttatgcaaggggag

SEQ ID NO: 491539 - DNA, 56 bp, Artificial
  Synthetic oligonucleotide
tacttgaaaataacccctcccggtgctggtatttcgattcgtgccgtctactgctg

SEQ ID NO: 491540 - DNA, 55 bp, Artificial
  Synthetic oligonucleotide
tatatggcgggagagtacggtgttgaggcgctcgctatgccggcacacgtccgtg

SEQ ID NO: 491541 - DNA, 55 bp, Artificial
  Synthetic oligonucleotide
tccctcgtactcttgtgaacgaacacgacgccatgaacgtccgcgtctcagggtc

SEQ ID NO: 491542 - DNA, 60 bp, Artificial
  Synthetic oligonucleotide
tctggtcccgtgcatgctcgcactggtcccttagtctcacttgcgcacgtattggagaac

SEQ ID NO: 491543 - DNA, 60 bp, Artificial
  Synthetic oligonucleotide
tggctaagtcactgacgagcgacagtcagtgggaggatatacagtcgaaagattggttca

SEQ ID NO: 491544 - DNA, 55 bp, Artificial
  Synthetic oligonucleotide
tgtcccgtatcggccggagtgaacccagtgtttgattagggacctgcctgtacgc

SEQ ID NO: 491545 - DNA, 55 bp, Artificial
  Synthetic oligonucleotide
ttaccggcacaatctgttggtcaagctgcgttaattgtcacgccacgtaaacctg

SEQ ID NO: 491546 - DNA, 55 bp, Artificial
  Synthetic oligonucleotide
ttccagaagagtgtgtcgacgtgccgactgctgaaagcgagcaccacgatacccc

SEQ ID NO: 491547 - DNA, 54 bp, Artificial
  Synthetic oligonucleotide
aaaacaaaaccgccctgttaggcggttatgtgataaaatcttccttgtgctatc

SEQ ID NO: 491548 - DNA, 55 bp, Artificial
  Synthetic oligonucleotide
aaaaccagtgatggaaccgggaagaccctttcgcaaagcaataagtagtgatcag

SEQ ID NO: 491549 - DNA, 53 bp, Artificial
  Synthetic oligonucleotide
aaaacccataaacggaaagtttcatgaggcatcttgggttacaaatgtctaac

SEQ ID NO: 491550 - DNA, 59 bp, Artificial
  Synthetic oligonucleotide
aaactagaggacgctgccccgtatattccgtctggatcgctgacagtcggtgcggacac

SEQ ID NO: 491551 - DNA, 55 bp, Artificial
  Synthetic oligonucleotide
aaagcacgtgcaggggtcccctccgctacgctccacccctgtcacaggaagcaac

SEQ ID NO: 491552 - DNA, 57 bp, Artificial
  Synthetic oligonucleotide
aaagtaccgttgaaaagtacgctagacaatatgacggtatggaatatgtgccttata

SEQ ID NO: 491553 - DNA, 55 bp, Artificial
  Synthetic oligonucleotide
aaatcggcgaagacctagctttctacctaaccgaaagccagcagacaccttccgc

SEQ ID NO: 491554 - DNA, 55 bp, Artificial
  Synthetic oligonucleotide
aaatctcatgccgaccgcactatagcgttcacctacgatgaatcctgggatgggc

SEQ ID NO: 491555 - DNA, 51 bp, Artificial
  Synthetic oligonucleotide
aacaatagctcgtgaaatgggatacaccgaaatcaccgttcaatcaacaag

SEQ ID NO: 491556 - DNA, 56 bp, Artificial
  Synthetic oligonucleotide
aacagcggccgctacgtggaacagctccacaagccccgactcccgcacaaaccaaa

SEQ ID NO: 491557 - DNA, 60 bp, Artificial
  Synthetic oligonucleotide
aaccatggatgacgcgtaatcgactcggtcgtggatgattgcgggggcgaccgcgccatg

SEQ ID NO: 491558 - DNA, 54 bp, Artificial
  Synthetic oligonucleotide
aacgagccggtagaaatttccgcgccgcttctgttgcgttctccccttttgcgc

SEQ ID NO: 491559 - DNA, 55 bp, Artificial
  Synthetic oligonucleotide
aacggcgaatcgggatcagaaattcgcagcgcaggttgatagggcgatcgccggt

SEQ ID NO: 491560 - DNA, 51 bp, Artificial
  Synthetic oligonucleotide
aacgttagttataaaattcagtaatatgcttttgtaattcaatagattctc

SEQ ID NO: 491561 - DNA, 53 bp, Artificial
  Synthetic oligonucleotide
aactgactgtaatcgtgtttataggtcgtacagttcactattgtgatgtaacg

SEQ ID NO: 491562 - DNA, 60 bp, Artificial
  Synthetic oligonucleotide
aactgttcgccgtcactagcgcccgctgattgagtgggtcattcgggtcatgcaacccta

SEQ ID NO: 491563 - DNA, 51 bp, Artificial
  Synthetic oligonucleotide
aacttgcttggcgttgagatactgatctgtcgcgagggcgttgagatcaac

SEQ ID NO: 491564 - DNA, 50 bp, Artificial
  Synthetic oligonucleotide
aagatacgtgggatgttgcccaaatggctcggtggtactggaaacgataa

SEQ ID NO: 491565 - DNA, 54 bp, Artificial
  Synthetic oligonucleotide
aagcaagagccgtcgaggccacgcatctcggctgcttaccgtggccccggccag

SEQ ID NO: 491566 - DNA, 52 bp, Artificial
  Synthetic oligonucleotide
aagcccggcccttcctgcgtctgtagccgggaactcccggttataggccgaa

SEQ ID NO: 491567 - DNA, 55 bp, Artificial
  Synthetic oligonucleotide
aagccgatactccgatcatggtgaacgacttgttaaggacctcgaaggcgtctac

SEQ ID NO: 491568 - DNA, 55 bp, Artificial
  Synthetic oligonucleotide
aagccgttcttcgggcgacgcttggatctgtagccggcgttggctcctctagtgg

SEQ ID NO: 491569 - DNA, 55 bp, Artificial
  Synthetic oligonucleotide
aaggaagtctcagaaggagttgcacatgattccttgttatggagtgataacgccc

SEQ ID NO: 491570 - DNA, 54 bp, Artificial
  Synthetic oligonucleotide
aaggatgcattattcatgcagatattcaattataacataagcgcatttattgat

SEQ ID NO: 491571 - DNA, 57 bp, Artificial
  Synthetic oligonucleotide
aaggcgtttcgcgcctagccgtgatcgtaaagagaccagcttgcgtcggaaacagtg

SEQ ID NO: 491572 - DNA, 51 bp, Artificial
  Synthetic oligonucleotide
aaggtctttgctgcggtaatcagtacccgcaaattgagttgtgccccggag

SEQ ID NO: 491573 - DNA, 60 bp, Artificial
  Synthetic oligonucleotide
aagtggccgatgcagcttcctgctcgatacagcaatcggtgggctgccttttctcggatt

SEQ ID NO: 491574 - DNA, 56 bp, Artificial
  Synthetic oligonucleotide
aatcaaccggaccactgccaccgccttttcccctggcatgaaatttaactatcatc

SEQ ID NO: 491575 - DNA, 59 bp, Artificial
  Synthetic oligonucleotide
aatcacaaacaacgtatcccgagaatgcaccacgagaatgcaccagcaaattgttatgt

SEQ ID NO: 491576 - DNA, 51 bp, Artificial
  Synthetic oligonucleotide
aatcccgcctgattatttgtttggcgaggctcgtaacgaaactatttccgt

SEQ ID NO: 491577 - DNA, 56 bp, Artificial
  Synthetic oligonucleotide
aatccgtcgccaggttgagcacatacgcacggtttttcggtaggtgatatgcgctg

SEQ ID NO: 491578 - DNA, 59 bp, Artificial
  Synthetic oligonucleotide
aatgaaaaccgaccgtgcacgctcgtgtgagaaagtcagctacatgagaccaactaccc

SEQ ID NO: 491579 - DNA, 55 bp, Artificial
  Synthetic oligonucleotide
aattcgtacttgtagccgctactacatttgccataagaaacggcacacatataac

SEQ ID NO: 491580 - DNA, 50 bp, Artificial
  Synthetic oligonucleotide
aattctgggcgcgtgaatagctatgcacctaaaccgtcgccgcacggtta

SEQ ID NO: 491581 - DNA, 54 bp, Artificial
  Synthetic oligonucleotide
acaagcggagagacgtataccggcggctggtttcgaacaaggggtgatacaggt

SEQ ID NO: 491582 - DNA, 55 bp, Artificial
  Synthetic oligonucleotide
acaagtccgattacgcggggtacgattatgagcgcaattcgggtgaaggcggccg

SEQ ID NO: 491583 - DNA, 51 bp, Artificial
  Synthetic oligonucleotide
acacaatagactgcctatctatacgggtaaagattctcactccataatccc

SEQ ID NO: 491584 - DNA, 54 bp, Artificial
  Synthetic oligonucleotide
acacactgggccccggattggaccaacgtcacgtcagaacaaaccaaggcctaa

SEQ ID NO: 491585 - DNA, 60 bp, Artificial
  Synthetic oligonucleotide
acaccgcatggatttcaagctttctatgtactagacaagcctgcatatgtgacgaagaaa

SEQ ID NO: 491586 - DNA, 51 bp, Artificial
  Synthetic oligonucleotide
acacgaggtttactgtccttagcctcatccggggagctgaaaacgcgtcag

SEQ ID NO: 491587 - DNA, 50 bp, Artificial
  Synthetic oligonucleotide
acactttagatgccgattggccctcagaagagccttatcagtttgattct

SEQ ID NO: 491588 - DNA, 54 bp, Artificial
  Synthetic oligonucleotide
acagcatcaaccgtccctacccctccgggtgttacctgaacttggccggcaagc

SEQ ID NO: 491589 - DNA, 51 bp, Artificial
  Synthetic oligonucleotide
acaggttgacgcttaagcgtcaagattgctgattcggtggaccctggagaa

SEQ ID NO: 491590 - DNA, 55 bp, Artificial
  Synthetic oligonucleotide
acataaggcgacttatcccaagtaacccacattcaccgcggtacttccacattcc

SEQ ID NO: 491591 - DNA, 55 bp, Artificial
  Synthetic oligonucleotide
acatacgagcatcttcagcgagcttacgcaaatcagtaccagcaaagacctcacc

SEQ ID NO: 491592 - DNA, 50 bp, Artificial
  Synthetic oligonucleotide
acatcgcaaagttcgctaataccccgacgattataaagcgacaagtcagt

SEQ ID NO: 491593 - DNA, 55 bp, Artificial
  Synthetic oligonucleotide
acattgctccctgcgacttaaacacggcctgggtagagttcaggatccgcagagc

SEQ ID NO: 491594 - DNA, 55 bp, Artificial
  Synthetic oligonucleotide
accactctgtgggtttacaacggcaagggtgatgcttatgcaaacccgttgtcag

SEQ ID NO: 491595 - DNA, 54 bp, Artificial
  Synthetic oligonucleotide
accatgggtgcgctatgaagcacagttccgcgcgtccaatcgcaaggaattgcc

SEQ ID NO: 491596 - DNA, 55 bp, Artificial
  Synthetic oligonucleotide
accattaacttagcggagttagcactccgactgcgagagttagaggcgccctcgg

SEQ ID NO: 491597 - DNA, 55 bp, Artificial
  Synthetic oligonucleotide
acccaaagcagtagctatctcttgggctgatgctctacctgtctccggcacgggg

SEQ ID NO: 491598 - DNA, 55 bp, Artificial
  Synthetic oligonucleotide
acccattctacgcggccacgttgggcacacagatcgagagcttggacaatgcgaa

SEQ ID NO: 491599 - DNA, 50 bp, Artificial
  Synthetic oligonucleotide
acccggggttcggctacccctggacgaaggacaaaggagtcgcgggtgtc

SEQ ID NO: 491600 - DNA, 53 bp, Artificial
  Synthetic oligonucleotide
accgatacaaacagactgatcaaattctatattgattagtctgtttgcttacg

SEQ ID NO: 491601 - DNA, 51 bp, Artificial
  Synthetic oligonucleotide
accgcgtatgtattaccaattacgaataactttgagggataccttgttaca

SEQ ID NO: 491602 - DNA, 55 bp, Artificial
  Synthetic oligonucleotide
accgtgggtactacgaggcaaagtcagtctaggttgctgtcgctgctacaagcgc

SEQ ID NO: 491603 - DNA, 55 bp, Artificial
  Synthetic oligonucleotide
accgttggaacagttccgtagagaactccccatctcttgtccgtggaacgcgcaa

SEQ ID NO: 491604 - DNA, 58 bp, Artificial
  Synthetic oligonucleotide
acctacagcgtgcaacagggggacgtgtcaccgcgagaaggatcgctaactacttcga

SEQ ID NO: 491605 - DNA, 51 bp, Artificial
  Synthetic oligonucleotide
acctaccggtattcggagtttgtcagggttcggtaaccgcaatggccccta

SEQ ID NO: 491606 - DNA, 53 bp, Artificial
  Synthetic oligonucleotide
acctatccccatgtcattaccgccattcagagcaaaggcgcattgaccaacct

SEQ ID NO: 491607 - DNA, 54 bp, Artificial
  Synthetic oligonucleotide
acctcggttgtgccagtcttgcgctactcggttataggcgtttggtctgccaga

SEQ ID NO: 491608 - DNA, 58 bp, Artificial
  Synthetic oligonucleotide
acctgcgaggtatgtggcgtctctgactcgactgttactacgagcggaccttactggt

SEQ ID NO: 491609 - DNA, 55 bp, Artificial
  Synthetic oligonucleotide
acgaaagtgttggtagtgaagcaacaccatttcaacgcaataacagcgccgccgg

SEQ ID NO: 491610 - DNA, 57 bp, Artificial
  Synthetic oligonucleotide
acgactggggtgcatttgagccgccccatttaaccttcgccctcacagatacgccat

SEQ ID NO: 491611 - DNA, 52 bp, Artificial
  Synthetic oligonucleotide
acgagaccattagtcagactataatttctgcatgaccacggtaccgctcgga

SEQ ID NO: 491612 - DNA, 57 bp, Artificial
  Synthetic oligonucleotide
acgagtgatgtctccacgcaccttggctgttagccgagccacgtcttcccggttggg

SEQ ID NO: 491613 - DNA, 55 bp, Artificial
  Synthetic oligonucleotide
acgatgcgaacgtttgacccttcgtgcaacaaagtagattgcggctggatgaaaa

SEQ ID NO: 491614 - DNA, 55 bp, Artificial
  Synthetic oligonucleotide
acgccgtttgacagggtgagcctgaacagccttacagggcccgaaatggtcgcgt

SEQ ID NO: 491615 - DNA, 57 bp, Artificial
  Synthetic oligonucleotide
acgcttataatacgtttgctagtgcggacgcggttttgtacctatggattggtgcaa

SEQ ID NO: 491616 - DNA, 58 bp, Artificial
  Synthetic oligonucleotide
acggacatgggtgcgtttctagtcgtttatcattgtaaccggtctcaatgtgagaagc

SEQ ID NO: 491617 - DNA, 55 bp, Artificial
  Synthetic oligonucleotide
acggccctttcgcgttacgccccagttgatggagataacgggcgccagtcatacg

SEQ ID NO: 491618 - DNA, 55 bp, Artificial
  Synthetic oligonucleotide
acggttggcctccccgcatcatccagcggtgtgtgacatttcacctgacgaccgg

SEQ ID NO: 491619 - DNA, 55 bp, Artificial
  Synthetic oligonucleotide
acgtaaattacgccgtgccgcgggttcgctgaccgggattggcagagttgcctcg

SEQ ID NO: 491620 - DNA, 51 bp, Artificial
  Synthetic oligonucleotide
acgtgaaaaaatctcgagcgtgtagtaaaccgcgttttactacacgtggtt

SEQ ID NO: 491621 - DNA, 55 bp, Artificial
  Synthetic oligonucleotide
actacccgtctctcacatcctcagatggtccgtctttcgacgaacgcatcaggcc

SEQ ID NO: 491622 - DNA, 54 bp, Artificial
  Synthetic oligonucleotide
actcatgccttgatagctggtttaacgataagattactaccggtggcaccgggg

SEQ ID NO: 491623 - DNA, 57 bp, Artificial
  Synthetic oligonucleotide
actgatgtcggagcgtgtctcgtgagcacgtaggcattctggacagccgttgcaggc

SEQ ID NO: 491624 - DNA, 53 bp, Artificial
  Synthetic oligonucleotide
actgctgccacgtcgaccacagccgagtcgacggcccgcaacacaacttccga

SEQ ID NO: 491625 - DNA, 54 bp, Artificial
  Synthetic oligonucleotide
actgggtaagtactgcctatgaagaactacgtgatagcgatgtgcttgtatgta

SEQ ID NO: 491626 - DNA, 53 bp, Artificial
  Synthetic oligonucleotide
actggtcggctgatatgccctagacaggatacaggtgcggggtggacaacccc

SEQ ID NO: 491627 - DNA, 59 bp, Artificial
  Synthetic oligonucleotide
acttgtggggcactaaggacatttcacgcttggactacgtcaccggctggcatgcaaag

SEQ ID NO: 491628 - DNA, 54 bp, Artificial
  Synthetic oligonucleotide
actttgcgtgtgcctttgcttacaacgcctttgggcttacccctccgtctgacc

SEQ ID NO: 491629 - DNA, 54 bp, Artificial
  Synthetic oligonucleotide
agaaatgatcttgcacgtatttgtgagccgggatctagatatgtttccgatcta

SEQ ID NO: 491630 - DNA, 58 bp, Artificial
  Synthetic oligonucleotide
agacatggttttgtaaatcaaaattatgcccagtttgtaattggaggcgtgctatgaa

SEQ ID NO: 491631 - DNA, 57 bp, Artificial
  Synthetic oligonucleotide
agactcgctgacgatgataattttatggcaataacctaccgcgtgaatggaggctat

SEQ ID NO: 491632 - DNA, 55 bp, Artificial
  Synthetic oligonucleotide
agactggcggcgaccgttccctgtaggcgccatacccataaggcgagcattcagc

SEQ ID NO: 491633 - DNA, 52 bp, Artificial
  Synthetic oligonucleotide
agagggtggctcggttatagctgggaagacctttggaacgatgtaaaggggt

SEQ ID NO: 491634 - DNA, 55 bp, Artificial
  Synthetic oligonucleotide
agatactatgctccagatctaaggacctgttattgtctaaatacaggtgcactga

SEQ ID NO: 491635 - DNA, 57 bp, Artificial
  Synthetic oligonucleotide
agatgagggtaatccagaagctactaaaaccaaagatgatcagcaaaaaacgattgg

SEQ ID NO: 491636 - DNA, 55 bp, Artificial
  Synthetic oligonucleotide
agatgcgccggtaaccaaaacgccttcgttcgagtgccagttctgtgatacgccc

SEQ ID NO: 491637 - DNA, 55 bp, Artificial
  Synthetic oligonucleotide
agccgtcacatggatatgtgaatgaccccacggaccggaccagctacgttccact

SEQ ID NO: 491638 - DNA, 55 bp, Artificial
  Synthetic oligonucleotide
agcgaccagcatgtcataagcttgaaggcggagtgtccggcctggttgttcgccg

SEQ ID NO: 491639 - DNA, 57 bp, Artificial
  Synthetic oligonucleotide
agcgagatgcgagcgcgccaagcagacaatagaagcggaaatgaagcgacggaatga

SEQ ID NO: 491640 - DNA, 49 bp, Artificial
  Synthetic oligonucleotide
agcgattaaaaagtgaccgccgtttgaccgccgttttgaccgccgtttt

SEQ ID NO: 491641 - DNA, 60 bp, Artificial
  Synthetic oligonucleotide
agcgttccggctgtgatatcgtttatcgcccttggcatcgcactagtcggtctgtggcca

SEQ ID NO: 491642 - DNA, 54 bp, Artificial
  Synthetic oligonucleotide
agctacttaccgatgctaacagcaccattgtcgactggcgaaccgaactggcgt

SEQ ID NO: 491643 - DNA, 51 bp, Artificial
  Synthetic oligonucleotide
aggacatctatggaacccatctacttatattgaaaccataggtcacatatc

SEQ ID NO: 491644 - DNA, 55 bp, Artificial
  Synthetic oligonucleotide
aggagtgccacagagacaggatggagcgtctgaacgtcacagacctcacgaaccc

SEQ ID NO: 491645 - DNA, 58 bp, Artificial
  Synthetic oligonucleotide
aggcgaatttgaagcatcagcattaagtcaatcactcgatactgtaccacttacaggc

SEQ ID NO: 491646 - DNA, 55 bp, Artificial
  Synthetic oligonucleotide
aggcgctgtgctttgctgtctggtcgcttgcatgtgctgatcgtcaaactgcctc

SEQ ID NO: 491647 - DNA, 55 bp, Artificial
  Synthetic oligonucleotide
agggacaatcgtggaaccgtcctgcattcgtataggtgcgctcagaattcgccgg

SEQ ID NO: 491648 - DNA, 50 bp, Artificial
  Synthetic oligonucleotide
agggacggtctgaacggcattgaaatgtcagtagatctcattgagtagcg

SEQ ID NO: 491649 - DNA, 55 bp, Artificial
  Synthetic oligonucleotide
agggcttgcctcttaatgcagccgttttacctcgctcacgtgtaagaacattgcc

SEQ ID NO: 491650 - DNA, 51 bp, Artificial
  Synthetic oligonucleotide
agggttgaggaattcgggatccgctcctgagcgacctacactgagcgggtg

SEQ ID NO: 491651 - DNA, 58 bp, Artificial
  Synthetic oligonucleotide
aggtcctgcggttccaatccgcgtatcagaggatgatctaccgtcgtttcgggattgc

SEQ ID NO: 491652 - DNA, 56 bp, Artificial
  Synthetic oligonucleotide
aggtgacccccagcgagagtgagagttttgcagaccctcaaactgcgaagcaccgt

SEQ ID NO: 491653 - DNA, 55 bp, Artificial
  Synthetic oligonucleotide
agtatacttgacactgtcacgtcactcaaccaatgtgcacctattctcacacgac

SEQ ID NO: 491654 - DNA, 51 bp, Artificial
  Synthetic oligonucleotide
agtcacaggtctgtcctgtaacttgacaagaaagtcgcgttttgcgactag

SEQ ID NO: 491655 - DNA, 55 bp, Artificial
  Synthetic oligonucleotide
agtgaacgagtaacccgcgctgcactgggcgaaacatgcaacttgagatgcacga

SEQ ID NO: 491656 - DNA, 55 bp, Artificial
  Synthetic oligonucleotide
agtggggcgtatcgaccgcaggggctgaatcctctgggttgtcaccagcaacgtc

SEQ ID NO: 491657 - DNA, 53 bp, Artificial
  Synthetic oligonucleotide
ataaaccaaagtacttatcgagccataagcgaaaatcactcggatttctcagc

SEQ ID NO: 491658 - DNA, 60 bp, Artificial
  Synthetic oligonucleotide
ataaggagcgcaagcgttggtatgtcctagaccagatgttcgcctgagattggggtgacc

SEQ ID NO: 491659 - DNA, 55 bp, Artificial
  Synthetic oligonucleotide
ataaggcgagtgtcaacctaagtcggagactgttgaataatgcaggcttcttagg

SEQ ID NO: 491660 - DNA, 55 bp, Artificial
  Synthetic oligonucleotide
ataaggtcagagacctcgggccggataagtagaggcgccaacagtcctctgcctg

SEQ ID NO: 491661 - DNA, 50 bp, Artificial
  Synthetic oligonucleotide
atacgataaatgtatcgagtaaacttgtaagattagtgacaggcactaag

SEQ ID NO: 491662 - DNA, 56 bp, Artificial
  Synthetic oligonucleotide
atagggacgactctttaactagatattagcgccctaccccagaacggcagtcgcca

SEQ ID NO: 491663 - DNA, 51 bp, Artificial
  Synthetic oligonucleotide
atatccaagctacaagagtaactatactaattgcccaaagtatgcttcctc

SEQ ID NO: 491664 - DNA, 55 bp, Artificial
  Synthetic oligonucleotide
atccacgcaaaagtcctgaagtagggcactgcgtcatgtagtataccccatttcc

SEQ ID NO: 491665 - DNA, 55 bp, Artificial
  Synthetic oligonucleotide
atcctatggcggcgacagaatttactatcgacccggcttgcagtggatccgctct

SEQ ID NO: 491666 - DNA, 54 bp, Artificial
  Synthetic oligonucleotide
atcctcgtttattatacttataattataggggaaggcttagagctatcattttg

SEQ ID NO: 491667 - DNA, 54 bp, Artificial
  Synthetic oligonucleotide
atcgcagtcagatcacccagaattaacccgcagctccacttgttagaccctcat

SEQ ID NO: 491668 - DNA, 55 bp, Artificial
  Synthetic oligonucleotide
atcggtcgcaggacagctctccatacgacgaccacggaagcgttctgttggcgta

SEQ ID NO: 491669 - DNA, 60 bp, Artificial
  Synthetic oligonucleotide
atcttctaggaagcggagagctagtgcatgagccggaaggggtctctactgtcgttgcgg

SEQ ID NO: 491670 - DNA, 60 bp, Artificial
  Synthetic oligonucleotide
atgagttggggacacgtgccgcacacaccgcacttaccgagctatcgaacctttcgcgca

SEQ ID NO: 491671 - DNA, 54 bp, Artificial
  Synthetic oligonucleotide
atgattataattcttaatttcactttctaaatgctcatctgtaacgtttggtgt

SEQ ID NO: 491672 - DNA, 50 bp, Artificial
  Synthetic oligonucleotide
atgccgaataaatcacttaaatcgataatcactccaatactgggatagtt

SEQ ID NO: 491673 - DNA, 55 bp, Artificial
  Synthetic oligonucleotide
atgctgggaggtctttctgactatgagtatcaatacctttgtatatccctacccg

SEQ ID NO: 491674 - DNA, 60 bp, Artificial
  Synthetic oligonucleotide
atggatcggtgcctggaacagatgatacgtgacgttcgctcattggggtttgaggtcgct

SEQ ID NO: 491675 - DNA, 58 bp, Artificial
  Synthetic oligonucleotide
atggtccgcaccgtgcgtgcgtcgacaatatgggacgacgtccggaaatgcgtaggcg

SEQ ID NO: 491676 - DNA, 55 bp, Artificial
  Synthetic oligonucleotide
atgtcacatcgctcatggcagtcaccctagctagacgggtcaaacccaagccgcg

SEQ ID NO: 491677 - DNA, 52 bp, Artificial
  Synthetic oligonucleotide
attactatcaattaatcttccgaacatgacaccagtcactgttgattacggt

SEQ ID NO: 491678 - DNA, 55 bp, Artificial
  Synthetic oligonucleotide
attatccgcgcagttatgaagcaggatacggtaacggaccctggtcggtcgtttg

SEQ ID NO: 491679 - DNA, 53 bp, Artificial
  Synthetic oligonucleotide
attattcgcaagagccacagcacttttgttaatcaatgcttggacacctgcct

SEQ ID NO: 491680 - DNA, 55 bp, Artificial
  Synthetic oligonucleotide
attcattgcgtccatcagacgtaaaacgcttacagggcgcggacttagtcgtctg

SEQ ID NO: 491681 - DNA, 54 bp, Artificial
  Synthetic oligonucleotide
attcgtatgcgggttagtttgtcgctagattgcccgcccgtttgtggtgcgggg

SEQ ID NO: 491682 - DNA, 50 bp, Artificial
  Synthetic oligonucleotide
attgcccgtatccgtaacttggcccgtgtcgtagccaaaactttcgtagc

SEQ ID NO: 491683 - DNA, 56 bp, Artificial
  Synthetic oligonucleotide
attgtgataatcctagttggtaatactagacctgagcgactttgaacctatgacgt

SEQ ID NO: 491684 - DNA, 54 bp, Artificial
  Synthetic oligonucleotide
attttagttgtctgttaggcaggttactacctttacgggatgtgttgtccgcga

SEQ ID NO: 491685 - DNA, 53 bp, Artificial
  Synthetic oligonucleotide
caaagtgcaagtctcctcgtggatattccttctcacaacggtcatcggtgccg

SEQ ID NO: 491686 - DNA, 55 bp, Artificial
  Synthetic oligonucleotide
caaatcaggtatggtgcggcgacgtgacgtacatctggacggggaaacgttgggc

SEQ ID NO: 491687 - DNA, 55 bp, Artificial
  Synthetic oligonucleotide
caaccacaggatattctcgttcaagcgcgatgctccgtaaggccatcgcccgagc

SEQ ID NO: 491688 - DNA, 56 bp, Artificial
  Synthetic oligonucleotide
caaccgcaaagcctggatgaagccgtattggcggtgaaaaagctggtcgcggaagg

SEQ ID NO: 491689 - DNA, 50 bp, Artificial
  Synthetic oligonucleotide
caaggtaattaaaccccattgttttagttcgcataagcttccctgacttc

SEQ ID NO: 491690 - DNA, 52 bp, Artificial
  Synthetic oligonucleotide
caatcgtcgggcggtcgatcccgatcactgataacggttgttcttcccgagc

SEQ ID NO: 491691 - DNA, 55 bp, Artificial
  Synthetic oligonucleotide
caatgcgccagctcttggatcacgctgctgaacataactacggcgtaccagcatt

SEQ ID NO: 491692 - DNA, 55 bp, Artificial
  Synthetic oligonucleotide
cacaaggtgcgtaggggcgttttctggtcgttgtctggctatgtagggcgaccgg

SEQ ID NO: 491693 - DNA, 55 bp, Artificial
  Synthetic oligonucleotide
cacacaatccaacttttaatactcactgcgtatattctattaattaccacttagt

SEQ ID NO: 491694 - DNA, 51 bp, Artificial
  Synthetic oligonucleotide
cacacttaccgaaggacgtacaattcgctcttgaatatcctatgagttcag

SEQ ID NO: 491695 - DNA, 55 bp, Artificial
  Synthetic oligonucleotide
cacagcgcgttgcttggcagctgcgtattccggagagagggaggggagcctgtaa

SEQ ID NO: 491696 - DNA, 55 bp, Artificial
  Synthetic oligonucleotide
cacaggtactatctctgccgcaccaagttcaacgctcttctgcactatggtgtcc

SEQ ID NO: 491697 - DNA, 55 bp, Artificial
  Synthetic oligonucleotide
cacccaaggggataactcgcccagataaggggccacacgctcgatttgttgcagg

SEQ ID NO: 491698 - DNA, 60 bp, Artificial
  Synthetic oligonucleotide
cacccgcgttatcgctgtgggatttatcagtctggggacactcctgaccctcagtcttgc

SEQ ID NO: 491699 - DNA, 55 bp, Artificial
  Synthetic oligonucleotide
caccggaagtttatcctacacgtgttagaggcagtggagccggttgggcagctgc

SEQ ID NO: 491700 - DNA, 55 bp, Artificial
  Synthetic oligonucleotide
cacctagcggtcgcttatggtgtgtcgaaacgccttgctcatgagttgggactgg

SEQ ID NO: 491701 - DNA, 55 bp, Artificial
  Synthetic oligonucleotide
cacgcggaagcaacttcaagaagaggcgcgttacccacctgcttatgttgtgcgg

SEQ ID NO: 491702 - DNA, 55 bp, Artificial
  Synthetic oligonucleotide
cacgctcagctgcgcttaacccttgccaaccctgaatagtttgggcgccgaatcg

SEQ ID NO: 491703 - DNA, 55 bp, Artificial
  Synthetic oligonucleotide
cacgttgttgatattcacactcctgacccggaatcgtctgtgcgaagtccggctg

SEQ ID NO: 491704 - DNA, 48 bp, Artificial
  Synthetic oligonucleotide
cacgttttattccgacttttaacacgttttactccgacttttaacacg

SEQ ID NO: 491705 - DNA, 55 bp, Artificial
  Synthetic oligonucleotide
cactcatgccttatctcagccacaggtgtcggggtatagcgtggctacgatgggg

SEQ ID NO: 491706 - DNA, 55 bp, Artificial
  Synthetic oligonucleotide
cactccttaccggtatgccttcaacgctgcacagaacgctcttctaccactgctc

SEQ ID NO: 491707 - DNA, 56 bp, Artificial
  Synthetic oligonucleotide
cactgtgagcgttctcaggggcagccgtaaggctgtgtccgtaccacctaggcaag

SEQ ID NO: 491708 - DNA, 57 bp, Artificial
  Synthetic oligonucleotide
cacttcgtccttggcgtaagtcgctgaaggtcactcgcgttcctacgccttattcaa

SEQ ID NO: 491709 - DNA, 51 bp, Artificial
  Synthetic oligonucleotide
cagaacctagacttagctagccgttacgcccacattaacgctagaaaagcc

SEQ ID NO: 491710 - DNA, 55 bp, Artificial
  Synthetic oligonucleotide
cagatcggtctgggtcacacgagactccttgacgaagtgtcgggacggcagatcc

SEQ ID NO: 491711 - DNA, 55 bp, Artificial
  Synthetic oligonucleotide
cagcaccggcttctgggaagtctgggatgcagtgggagtagtcaccgtactagcc

SEQ ID NO: 491712 - DNA, 54 bp, Artificial
  Synthetic oligonucleotide
cagcccgcgtttccggccactgaacctatccgacacggtttgtcgtgtatgttt

SEQ ID NO: 491713 - DNA, 59 bp, Artificial
  Synthetic oligonucleotide
cagcggtataacagattgattaaccatggattaagtcggaatatgggccataacttatc

SEQ ID NO: 491714 - DNA, 52 bp, Artificial
  Synthetic oligonucleotide
cagctcctagaggctgacatccgtttcaggtggtggcttgttacccgggcca

SEQ ID NO: 491715 - DNA, 52 bp, Artificial
  Synthetic oligonucleotide
caggaaggacgtgttaaagctggcagggaatacgggcatgatgttactgggg

SEQ ID NO: 491716 - DNA, 55 bp, Artificial
  Synthetic oligonucleotide
caggtctgagcgtaacttatatcaaaggacccgcacgcgtatttgattccgaatc

SEQ ID NO: 491717 - DNA, 55 bp, Artificial
  Synthetic oligonucleotide
caggtgagctacagcccgcttacgctcatggggttttatgccgccagtatccctt

SEQ ID NO: 491718 - DNA, 55 bp, Artificial
  Synthetic oligonucleotide
cagtcagttcaaggtacacaggctatgtccgatccaactgcggtacgtccagccg

SEQ ID NO: 491719 - DNA, 55 bp, Artificial
  Synthetic oligonucleotide
cataaacttcgctcgcttgcatgcccgcataataactcccgctcgccataacccc

SEQ ID NO: 491720 - DNA, 56 bp, Artificial
  Synthetic oligonucleotide
cataagacatggttttgtaaatcaaaattatgtccggtttgtaattggagacgtgc

SEQ ID NO: 491721 - DNA, 57 bp, Artificial
  Synthetic oligonucleotide
catacttctacaaaacaattgtgaaagaaggctaataaatgttcaatgcggtagtag

SEQ ID NO: 491722 - DNA, 55 bp, Artificial
  Synthetic oligonucleotide
cataggttttcgtgacatgactcaagctggccgccaacacggacacctcccaggg

SEQ ID NO: 491723 - DNA, 60 bp, Artificial
  Synthetic oligonucleotide
catatcgctatgaacagccctgctatgactatcaaccctgccgccgatatacctagcaag

SEQ ID NO: 491724 - DNA, 54 bp, Artificial
  Synthetic oligonucleotide
catattccaccgggaacattaactgtcgcatcccgtacgatcatatggtcgctt

SEQ ID NO: 491725 - DNA, 50 bp, Artificial
  Synthetic oligonucleotide
catcaatccacaaaaataccacgcgaatgacactcaaaatacaagactac

SEQ ID NO: 491726 - DNA, 55 bp, Artificial
  Synthetic oligonucleotide
catcatggcagcgggtgatcctaattcaactgatatctgggccctagccaattcc

SEQ ID NO: 491727 - DNA, 54 bp, Artificial
  Synthetic oligonucleotide
catccaagaaacggcatttcccaattgggaggccacaaaggtaaccgttacagc

SEQ ID NO: 491728 - DNA, 55 bp, Artificial
  Synthetic oligonucleotide
catcctagcgagcgctacgcagagccacgtttagggcaagtgttggatgcgcgtg

SEQ ID NO: 491729 - DNA, 55 bp, Artificial
  Synthetic oligonucleotide
catcgagaccaagttgctccgccagatacaagacaccgtcggagggtatcgacgc

SEQ ID NO: 491730 - DNA, 55 bp, Artificial
  Synthetic oligonucleotide
catcgcgttaccttgactaccgagctacccgagtgggtcgtagctgagaacgcag

SEQ ID NO: 491731 - DNA, 55 bp, Artificial
  Synthetic oligonucleotide
catcggctaaccaacgcacgcgtcgggctataccttcactcccgtctataaaaga

SEQ ID NO: 491732 - DNA, 55 bp, Artificial
  Synthetic oligonucleotide
catctaagagtaacagtggacacgctaaagaaactcggatcttcagtcggcctag

SEQ ID NO: 491733 - DNA, 52 bp, Artificial
  Synthetic oligonucleotide
catctcaccagttctggtaacagtgttaaggctgactttgaggtaacgcgtt

SEQ ID NO: 491734 - DNA, 55 bp, Artificial
  Synthetic oligonucleotide
catgacatcgctatttatttcgctgatccagggactccttcgcaacgagcactga

SEQ ID NO: 491735 - DNA, 57 bp, Artificial
  Synthetic oligonucleotide
catgagattacgacgagagtaaaaggatcacaagaagatccggctgtttaccagtga

SEQ ID NO: 491736 - DNA, 51 bp, Artificial
  Synthetic oligonucleotide
catgaggcacttaacctggcgaactagcaattaaatccaacctagttggac

SEQ ID NO: 491737 - DNA, 54 bp, Artificial
  Synthetic oligonucleotide
catgctataatagatacacgtcttctcttagcgtttcatagtattatcctcgtt

SEQ ID NO: 491738 - DNA, 55 bp, Artificial
  Synthetic oligonucleotide
catgtcttaaaccctccagagaatctgagctgcgtagcccgcacaaccgacgagc

SEQ ID NO: 491739 - DNA, 52 bp, Artificial
  Synthetic oligonucleotide
catgtgccatcaaatgtgtttgctaaaccttctaacggtgctttaatcgctt

SEQ ID NO: 491740 - DNA, 53 bp, Artificial
  Synthetic oligonucleotide
catgttctagcatagtcgtctttgtgactggatcaattcgagttgacacgcat

SEQ ID NO: 491741 - DNA, 55 bp, Artificial
  Synthetic oligonucleotide
cattccagaactcctggcgggtttgtccggtagcaacatccctgatggtcagacg

SEQ ID NO: 491742 - DNA, 55 bp, Artificial
  Synthetic oligonucleotide
catttgagaaagtctgcgcgtaccctcacctaccgttgcatagataagctcgagc

SEQ ID NO: 491743 - DNA, 56 bp, Artificial
  Synthetic oligonucleotide
catttgcgttaaagtggctgccaatacgaaaggcgttaaaatactcgtgccagtct

SEQ ID NO: 491744 - DNA, 55 bp, Artificial
  Synthetic oligonucleotide
ccaacacccgctgaacgctgttctcaggtacaactggcagacttgcctctcgagt

SEQ ID NO: 491745 - DNA, 55 bp, Artificial
  Synthetic oligonucleotide
ccaagacagtacgggagctgcgtcactgcctgcgatataacacccggctggatgt

SEQ ID NO: 491746 - DNA, 55 bp, Artificial
  Synthetic oligonucleotide
ccaatagcctgggcgccttctaaattaaagattgcatatatccaagctatggcag

SEQ ID NO: 491747 - DNA, 54 bp, Artificial
  Synthetic oligonucleotide
ccacagggttggattcagactccacgccccaacaccacaccgaatactaacccc

SEQ ID NO: 491748 - DNA, 54 bp, Artificial
  Synthetic oligonucleotide
ccacattcttgtggtatgaaatatcggctcaggggactggcccgcttgcaaaca

SEQ ID NO: 491749 - DNA, 55 bp, Artificial
  Synthetic oligonucleotide
ccaccagccacgagtatgctggcaagctttagggacgacctcttagctagactgg

SEQ ID NO: 491750 - DNA, 60 bp, Artificial
  Synthetic oligonucleotide
ccacgcctaggcttgatgcctgcatttacggacgcaatctcaacattgcgttcacgcaat

SEQ ID NO: 491751 - DNA, 55 bp, Artificial
  Synthetic oligonucleotide
ccactactgtaggcaatatagagtccgcagtcctccctgtagggcatgtagtgtc

SEQ ID NO: 491752 - DNA, 55 bp, Artificial
  Synthetic oligonucleotide
ccagcaacggattgcgtagaacaccttttgtgtcgcgtcccgtttacgccggcgc

SEQ ID NO: 491753 - DNA, 55 bp, Artificial
  Synthetic oligonucleotide
ccagccgagcggtagcgttgctaatttatcgcccacagtcgtgtgcgcggttcgg

SEQ ID NO: 491754 - DNA, 58 bp, Artificial
  Synthetic oligonucleotide
ccagcgcgctactgccgtctggcgcggtcaaatggaggccgtcgtgtaagggagaggg

SEQ ID NO: 491755 - DNA, 60 bp, Artificial
  Synthetic oligonucleotide
ccagcggttactgaaggttgacccgctgaagtgcgtgctgtgtggaagtcagatgcgttt

SEQ ID NO: 491756 - DNA, 50 bp, Artificial
  Synthetic oligonucleotide
ccataccacacatccatagtaaatttacgcggtagttgccctgttgttaa

SEQ ID NO: 491757 - DNA, 55 bp, Artificial
  Synthetic oligonucleotide
ccattgcattagctgggttgtgcagtggggcgtaatcagctaagcgatctatctt

SEQ ID NO: 491758 - DNA, 55 bp, Artificial
  Synthetic oligonucleotide
ccattgccaaacgcgtaccacgatagacccgtgaaagcgcaaaatcgggactcac

SEQ ID NO: 491759 - DNA, 51 bp, Artificial
  Synthetic oligonucleotide
cccaatgacgcgccgcaacccactaacgggggatgatcgcccaatgtggcg

SEQ ID NO: 491760 - DNA, 55 bp, Artificial
  Synthetic oligonucleotide
cccaatttggcgttctggttgacgggtaatgtcgcctgagcgcggtacgagtaag

SEQ ID NO: 491761 - DNA, 54 bp, Artificial
  Synthetic oligonucleotide
cccacgaccggctaggttcgcgcaaaaggccaacatgacctctaggggaaccca

SEQ ID NO: 491762 - DNA, 51 bp, Artificial
  Synthetic oligonucleotide
ccccagcgacctctaggcggcgtccaacttcagccaacgagtagtctcgcc

SEQ ID NO: 491763 - DNA, 55 bp, Artificial
  Synthetic oligonucleotide
ccccgcatctacacaggagccattggtggattcaaacgacgtccaggcagacctc

SEQ ID NO: 491764 - DNA, 55 bp, Artificial
  Synthetic oligonucleotide
ccccggtctttcagccatccgaagaactcgctccagctggactccgattcactgt

SEQ ID NO: 491765 - DNA, 54 bp, Artificial
  Synthetic oligonucleotide
cccctacatggagcacagaccgcgctttcggcccacgttttagcccgaatcgaa

SEQ ID NO: 491766 - DNA, 53 bp, Artificial
  Synthetic oligonucleotide
cccctctaattatcgtagactatttacaaatactagcaccttataacgaacgg

SEQ ID NO: 491767 - DNA, 55 bp, Artificial
  Synthetic oligonucleotide
cccctgaccgcttctgacgtccgcccggataccaaccaagggactcgtctgttga

SEQ ID NO: 491768 - DNA, 55 bp, Artificial
  Synthetic oligonucleotide
cccctgtaactgaggacacacggacaccgttaggttgatgacaccgcattacgcc

SEQ ID NO: 491769 - DNA, 51 bp, Artificial
  Synthetic oligonucleotide
cccctgtaccatccgggagccttatgtgtgcatcgccacacaatccacctg

SEQ ID NO: 491770 - DNA, 56 bp, Artificial
  Synthetic oligonucleotide
cccgcacaaggctggcagtcatccaggtacaggagaacgtgcggaaacgggaactc

SEQ ID NO: 491771 - DNA, 55 bp, Artificial
  Synthetic oligonucleotide
cccgccagctcaagagcaggacttgggtaagctgagccataatggtcaccgagcc

SEQ ID NO: 491772 - DNA, 55 bp, Artificial
  Synthetic oligonucleotide
cccgttttcagacgacctccggtcaaaacttatccacaatagtgcagcggcgtag

SEQ ID NO: 491773 - DNA, 55 bp, Artificial
  Synthetic oligonucleotide
ccctaacgaaggctgcgaacccaagattttcttagaaggagcagcacgagcaacc

SEQ ID NO: 491774 - DNA, 47 bp, Artificial
  Synthetic oligonucleotide
ccctacagatttacggttaaaaccctacagatttacggttaaaaccc

SEQ ID NO: 491775 - DNA, 60 bp, Artificial
  Synthetic oligonucleotide
ccctgctggagagcattaagacgcctatgtgcgtggtatccaacggaccggtcagtaaga

SEQ ID NO: 491776 - DNA, 55 bp, Artificial
  Synthetic oligonucleotide
ccgaatggcagtctactaggctgacgttgagggtttccctgcaaggagatcgcct

SEQ ID NO: 491777 - DNA, 55 bp, Artificial
  Synthetic oligonucleotide
ccgagctaccagggcagggcatgtccggtagggtagatggcagacagctctatct

SEQ ID NO: 491778 - DNA, 55 bp, Artificial
  Synthetic oligonucleotide
ccgaggcagtcaagccgggatctgctattgggccccttattcactctgcggaacc

SEQ ID NO: 491779 - DNA, 55 bp, Artificial
  Synthetic oligonucleotide
ccgagtccatgcttgctccctttgcacgggtcacagtttgtcccattcagtgacg

SEQ ID NO: 491780 - DNA, 55 bp, Artificial
  Synthetic oligonucleotide
ccgcactgtctcggcatgcccgctgctgttacagacgtcctgataggtcggagct

SEQ ID NO: 491781 - DNA, 55 bp, Artificial
  Synthetic oligonucleotide
ccgcagcaaacgcctaatttgggaaagccgtagcctagccgagcgacacagcacc

SEQ ID NO: 491782 - DNA, 54 bp, Artificial
  Synthetic oligonucleotide
ccgcagggtaaagagccgcacagcagactgggtaaacctgcgtaacctttggac

SEQ ID NO: 491783 - DNA, 55 bp, Artificial
  Synthetic oligonucleotide
ccgccccgccatgtaacctgcggcggaacctaaactgaaacctcatgagcgatag

SEQ ID NO: 491784 - DNA, 55 bp, Artificial
  Synthetic oligonucleotide
ccgcctgaataacggtccggggatgaatcaggggcgagctaagggttgcgtctcg

SEQ ID NO: 491785 - DNA, 52 bp, Artificial
  Synthetic oligonucleotide
ccgcgaggaagtgtaagtcgattgaacgggtttagttgcttcgataatccga

SEQ ID NO: 491786 - DNA, 55 bp, Artificial
  Synthetic oligonucleotide
ccgctctagcgaggccgaatcccttctcgaggttatgttgctgtaaggtctgcct

SEQ ID NO: 491787 - DNA, 58 bp, Artificial
  Synthetic oligonucleotide
ccgctcttgaggggttgaggggcgcgcccattacgcaggacacacaccgtgagtcgta

SEQ ID NO: 491788 - DNA, 51 bp, Artificial
  Synthetic oligonucleotide
ccggaatggtggacacttggacgggaagggttaccgtttcgcgcggggcaa

SEQ ID NO: 491789 - DNA, 55 bp, Artificial
  Synthetic oligonucleotide
ccggagagctaaccaccgcgcgaacacgctaaagccccaccatcggagctattcc

SEQ ID NO: 491790 - DNA, 55 bp, Artificial
  Synthetic oligonucleotide
ccggattcaacgtccatgcgtctgccaatgtgttccgagaggctgcctcgctggc

SEQ ID NO: 491791 - DNA, 55 bp, Artificial
  Synthetic oligonucleotide
ccggcgtcagtaggtggcataggtcaaatgcacatccctgcgacatggttgacgg

SEQ ID NO: 491792 - DNA, 55 bp, Artificial
  Synthetic oligonucleotide
ccgggctgagctcgggtcctgctacaccggcaatgaaataatcttaaccggcgct

SEQ ID NO: 491793 - DNA, 55 bp, Artificial
  Synthetic oligonucleotide
ccgggttccccgtggcacatgaaggttaccgcttagtgctgctacctctcagtcc

SEQ ID NO: 491794 - DNA, 55 bp, Artificial
  Synthetic oligonucleotide
ccggtattctgcaggggacatcaaatgccgatgcgctgtgtatggggctgtgccc

SEQ ID NO: 491795 - DNA, 48 bp, Artificial
  Synthetic oligonucleotide
ccggtttaaaaggccctgtaactaatggtttcgttgtcgtttttggac

SEQ ID NO: 491796 - DNA, 51 bp, Artificial
  Synthetic oligonucleotide
ccgtagtttccaaatgcattatctgttacgagattaaatccttgtttacgc

SEQ ID NO: 491797 - DNA, 55 bp, Artificial
  Synthetic oligonucleotide
ccgtcaactcatagttgaggtgcgacctgctcgtgtctatatctttgttcgagtg

SEQ ID NO: 491798 - DNA, 55 bp, Artificial
  Synthetic oligonucleotide
ccgtcagagctgcttcgttctctgccacgctgcatcctgcgcttaattgttgcgt

SEQ ID NO: 491799 - DNA, 55 bp, Artificial
  Synthetic oligonucleotide
ccgtctcgctccatgcgcgtcaatattccggtcagacttggacgcaaaatgcagg

SEQ ID NO: 491800 - DNA, 55 bp, Artificial
  Synthetic oligonucleotide
ccgtgaccttcaatatgatactcatccaacggaatctgtggcaacaagcgcagtg

SEQ ID NO: 491801 - DNA, 55 bp, Artificial
  Synthetic oligonucleotide
ccgtgagctacaagctcgcctccgaaccccattcggatgatagctgcgttggctg

SEQ ID NO: 491802 - DNA, 55 bp, Artificial
  Synthetic oligonucleotide
ccgtgaggattctcttcgtaccatatcgcaatggttcgtgcttctgatgtaacac

SEQ ID NO: 491803 - DNA, 56 bp, Artificial
  Synthetic oligonucleotide
ccgtgccacgaaacggagacagagcctagatttcgttctaggtacgttatcacttc

SEQ ID NO: 491804 - DNA, 52 bp, Artificial
  Synthetic oligonucleotide
ccgtgtcgaactctgctaaaagttgcaccacttcaccccaattatgcccata

SEQ ID NO: 491805 - DNA, 55 bp, Artificial
  Synthetic oligonucleotide
ccgttcgccacttgtgcgcgtacctgcttcacgtggtatgggaactcgtcttgag

SEQ ID NO: 491806 - DNA, 55 bp, Artificial
  Synthetic oligonucleotide
ccgttgccgctcaagtacctcggtcgcctattcgtggctagcgttccggctgtga

SEQ ID NO: 491807 - DNA, 55 bp, Artificial
  Synthetic oligonucleotide
ccgttgctccgaggcgctctgatacggtggtgcatggatatcggggatcggatgg

SEQ ID NO: 491808 - DNA, 55 bp, Artificial
  Synthetic oligonucleotide
cctaagacagcttcagagagtccgcggttggtgtgagcggatggacgtcgtttcc

SEQ ID NO: 491809 - DNA, 53 bp, Artificial
  Synthetic oligonucleotide
cctactaacgattaataaaaagggatcgcaaaccttgcctgcgattaataaaa

SEQ ID NO: 491810 - DNA, 55 bp, Artificial
  Synthetic oligonucleotide
cctaggacaggctgttaattatctagaacatgctcacactgttgtgcgtcgattg

SEQ ID NO: 491811 - DNA, 55 bp, Artificial
  Synthetic oligonucleotide
cctagtaggcagatcgcgaaatggggagcgacgtaccgaacaaataccccgcttg

SEQ ID NO: 491812 - DNA, 55 bp, Artificial
  Synthetic oligonucleotide
cctatggtcttactcccgctcctattctcattcgccacgtgcgccttgtgcgcgc

SEQ ID NO: 491813 - DNA, 55 bp, Artificial
  Synthetic oligonucleotide
cctcaacagactacgtgaattttcctagctagaacaaatcgacacgccgttcccc

SEQ ID NO: 491814 - DNA, 55 bp, Artificial
  Synthetic oligonucleotide
cctcagaagcccctctaagcaattttgcatcaactctagccctatccttacccag

SEQ ID NO: 491815 - DNA, 55 bp, Artificial
  Synthetic oligonucleotide
cctcccacgactgacaccctacaagtgctagagtcgcagggttcttgggtagtag

SEQ ID NO: 491816 - DNA, 55 bp, Artificial
  Synthetic oligonucleotide
cctcccgtgagtgtcgttcgtgaccccgcttgcagttaacaacataggtatgcta

SEQ ID NO: 491817 - DNA, 55 bp, Artificial
  Synthetic oligonucleotide
cctccgctttcgcgcaatttcgagacacgggttaacactcatggcatgccgtaac

SEQ ID NO: 491818 - DNA, 55 bp, Artificial
  Synthetic oligonucleotide
cctcgtgtttaacacctgctgaagtgcgtggacgggctcgtaggttgttccgtga

SEQ ID NO: 491819 - DNA, 55 bp, Artificial
  Synthetic oligonucleotide
cctgcaatacctaacatctgcttcattgagccttcgccctcaccattaagctcaa

SEQ ID NO: 491820 - DNA, 54 bp, Artificial
  Synthetic oligonucleotide
cctgccaccgggagagcgtgaaagggtgatggagagctttgagcgggtactgat

SEQ ID NO: 491821 - DNA, 56 bp, Artificial
  Synthetic oligonucleotide
ccttagagcagctgcaacaggactatatgcagcggctgagcgaatgggagagctcc

SEQ ID NO: 491822 - DNA, 55 bp, Artificial
  Synthetic oligonucleotide
ccttcgagtgctgggtggttcgtttcgagttctgaatctccgcagtgaatcatca

SEQ ID NO: 491823 - DNA, 55 bp, Artificial
  Synthetic oligonucleotide
ccttggctccatggaatttggctgtaatgttgcgggatcaaaacttgttgtagtc

SEQ ID NO: 491824 - DNA, 50 bp, Artificial
  Synthetic oligonucleotide
cctttcatgcagccttcgttttgaagcagggtaaataagggcgcgccact

SEQ ID NO: 491825 - DNA, 57 bp, Artificial
  Synthetic oligonucleotide
cctttcggtacgctcacctgcagagccgggagacccggaatagacacactgaatacc

SEQ ID NO: 491826 - DNA, 55 bp, Artificial
  Synthetic oligonucleotide
cctttgtgaacggctgcgtatactggtggtgtacgacgctgggtccgatgcgcga

SEQ ID NO: 491827 - DNA, 55 bp, Artificial
  Synthetic oligonucleotide
ccttttcccggaaatcggcccggtagagaggggaagcggacgcactcatgacaca

SEQ ID NO: 491828 - DNA, 50 bp, Artificial
  Synthetic oligonucleotide
ccttttcgcgtgataccgcgcccaaaggtggtgatgctttatgagtccct

SEQ ID NO: 491829 - DNA, 55 bp, Artificial
  Synthetic oligonucleotide
cgaaaatcagtcatgttcggggaatccttccgctacgccacggcaagtttccgtg

SEQ ID NO: 491830 - DNA, 55 bp, Artificial
  Synthetic oligonucleotide
cgaaaatcgggccgattggcgtcagcgtaatgagcaacgtcggtacgacaattgc

SEQ ID NO: 491831 - DNA, 53 bp, Artificial
  Synthetic oligonucleotide
cgaaagggtcttcccggttccatcactggttttgtaatacccatatctatcag

SEQ ID NO: 491832 - DNA, 56 bp, Artificial
  Synthetic oligonucleotide
cgaaatttccaatcctacgctctgtattgcctccagaacgtcttttctggttctaa

SEQ ID NO: 491833 - DNA, 53 bp, Artificial
  Synthetic oligonucleotide
cgaaccatcaaaagccggtactctgttgccaaccgtgcgaccctaaacaaacc

SEQ ID NO: 491834 - DNA, 54 bp, Artificial
  Synthetic oligonucleotide
cgaagaaatacacgtcaggcgttctgtcgttcgcggagaaggagttaccgccgg

SEQ ID NO: 491835 - DNA, 55 bp, Artificial
  Synthetic oligonucleotide
cgaatgattctaataagacggcgactgataatacgcaggaagacaactcttcgaa

SEQ ID NO: 491836 - DNA, 54 bp, Artificial
  Synthetic oligonucleotide
cgacaatgcgttgttaaggtcaaagacctgtcccgaaccgaaatgctaagggaa

SEQ ID NO: 491837 - DNA, 55 bp, Artificial
  Synthetic oligonucleotide
cgacattctacgttcattggctgaattgacaagagcagctgaactgctttctagc

SEQ ID NO: 491838 - DNA, 55 bp, Artificial
  Synthetic oligonucleotide
cgacatttggttgtgcccttaccgcaggtactggcgctagtggtagcatggagcc

SEQ ID NO: 491839 - DNA, 55 bp, Artificial
  Synthetic oligonucleotide
cgaccgcaggagaacgcgggaattatcgaccccgtgacgtgccaacaggtcaaac

SEQ ID NO: 491840 - DNA, 55 bp, Artificial
  Synthetic oligonucleotide
cgaccggactgaccatagccaagcccgcacaaacaatggttaccccggcaatcgg

SEQ ID NO: 491841 - DNA, 52 bp, Artificial
  Synthetic oligonucleotide
cgacctctacacatctacggattggcaacgctacgcctctgtctgtcgcccc

SEQ ID NO: 491842 - DNA, 53 bp, Artificial
  Synthetic oligonucleotide
cgacggttaacgcgattttctgaacgtcagattgaagcgaaacggacccagtt

SEQ ID NO: 491843 - DNA, 53 bp, Artificial
  Synthetic oligonucleotide
cgacggttctccagaggccacttgttaccggtaatagcaaggacccacttacg

SEQ ID NO: 491844 - DNA, 55 bp, Artificial
  Synthetic oligonucleotide
cgacggttgtcactgcggtctccattcgaatcggacacggggatgcagcggaatc

SEQ ID NO: 491845 - DNA, 59 bp, Artificial
  Synthetic oligonucleotide
cgactctatgacgactcgtcatagagtccccggcgagtcgtcatggagtcggtaacgac

SEQ ID NO: 491846 - DNA, 56 bp, Artificial
  Synthetic oligonucleotide
cgactgatgagggttatttgaagttacataagacatggttttgtaagtcaaaatta

SEQ ID NO: 491847 - DNA, 55 bp, Artificial
  Synthetic oligonucleotide
cgactttggaacgggctcttcaccgctaccgtactaaacgcggagtgcaggtcac

SEQ ID NO: 491848 - DNA, 55 bp, Artificial
  Synthetic oligonucleotide
cgagaaaggaaagccgcatgactgacgtgcaatgtgaacccgcgcttgcggggag

SEQ ID NO: 491849 - DNA, 56 bp, Artificial
  Synthetic oligonucleotide
cgagaatcctttcatcgaaggtatggttgtgccagttaaaagtcagagggttcagt

SEQ ID NO: 491850 - DNA, 55 bp, Artificial
  Synthetic oligonucleotide
cgagactgtgcctgcatgcacttcctccaagcgtggtgcggtgaaccgggacaac

SEQ ID NO: 491851 - DNA, 53 bp, Artificial
  Synthetic oligonucleotide
cgagcctgccgcgtacggtacccattctttcgcaggggtcatatccttgccaa

SEQ ID NO: 491852 - DNA, 55 bp, Artificial
  Synthetic oligonucleotide
cgagcgacgtagcaatgccacgcacgagtcgactactgatccggaggcgcgattg

SEQ ID NO: 491853 - DNA, 57 bp, Artificial
  Synthetic oligonucleotide
cgaggaagcgcaaaggcgtccggtggtgcatgggcacttacgcgccggggcttagtg

SEQ ID NO: 491854 - DNA, 55 bp, Artificial
  Synthetic oligonucleotide
cgaggaggcgtcatgtcatctgccctgacatagtaccgggtcactcctgagccac

SEQ ID NO: 491855 - DNA, 55 bp, Artificial
  Synthetic oligonucleotide
cgcaaattgtaagataatgagtgcgcatgcaaagcttactgttacgaaatgacga

SEQ ID NO: 491856 - DNA, 55 bp, Artificial
  Synthetic oligonucleotide
cgcacaatccaacgcttgtttgctgagccgcgtgacgattacctcggccgtgcga

SEQ ID NO: 491857 - DNA, 51 bp, Artificial
  Synthetic oligonucleotide
cgcacctcctctctacgccgaattgacgtctgagagatagacgaccttcac

SEQ ID NO: 491858 - DNA, 55 bp, Artificial
  Synthetic oligonucleotide
cgcacgcagggtatgaacaccgtagtaagcctctgcggggacttctcgtgtacct

SEQ ID NO: 491859 - DNA, 55 bp, Artificial
  Synthetic oligonucleotide
cgcatcggctaaattacttttaggatctagtggtggctgcccaccttgaggcgac

SEQ ID NO: 491860 - DNA, 55 bp, Artificial
  Synthetic oligonucleotide
cgcatcgtcggaggattttcctaacggaagatgcggtgctgtggagctacgatcg

SEQ ID NO: 491861 - DNA, 52 bp, Artificial
  Synthetic oligonucleotide
cgcattctcggtaagtaccctataatgtacttacatcttgaatgacaacgtg

SEQ ID NO: 491862 - DNA, 51 bp, Artificial
  Synthetic oligonucleotide
cgcattctgatctccgtttggcgtgaagttatatggcagcgtagctgggtt

SEQ ID NO: 491863 - DNA, 51 bp, Artificial
  Synthetic oligonucleotide
cgccaacgcaggaattcgcaggagagggacgctggccagagcttagccgtt

SEQ ID NO: 491864 - DNA, 55 bp, Artificial
  Synthetic oligonucleotide
cgccaataggctaacatctccgcttaaccttcgggcactgggcaggcttcaccct

SEQ ID NO: 491865 - DNA, 55 bp, Artificial
  Synthetic oligonucleotide
cgccaccaatcatcttagaaataagcgtacgatacggcttcatgtcgaataagcc

SEQ ID NO: 491866 - DNA, 57 bp, Artificial
  Synthetic oligonucleotide
cgccaccccgaagcgacaccatcccaaacagccgtcaaggaatccttacgagagtgc

SEQ ID NO: 491867 - DNA, 55 bp, Artificial
  Synthetic oligonucleotide
cgccactggtgaggcaagttcatgggtcgtctacctagccacatctggcgcaatg

SEQ ID NO: 491868 - DNA, 55 bp, Artificial
  Synthetic oligonucleotide
cgccagcttctatgttggggccccgccaacttgcattgtctgttggaattggtga

SEQ ID NO: 491869 - DNA, 57 bp, Artificial
  Synthetic oligonucleotide
cgccagttcaacgatttgctaggcgagcggttcaattttgtcgtttgggcattggct

SEQ ID NO: 491870 - DNA, 55 bp, Artificial
  Synthetic oligonucleotide
cgccattgaatgggcagacgagttcaccgcccgattggaagagtgggcgaagcac

SEQ ID NO: 491871 - DNA, 59 bp, Artificial
  Synthetic oligonucleotide
cgcccatgactgatcgggccacggctagaaaacgagtactgggcggctagctttgcgga

SEQ ID NO: 491872 - DNA, 55 bp, Artificial
  Synthetic oligonucleotide
cgcccgttctgcaagtgtccgctttacatcggccagtttatgctccacactctcc

SEQ ID NO: 491873 - DNA, 55 bp, Artificial
  Synthetic oligonucleotide
cgccgagcgtagcattgtaggcagcgtgtcatgggcgttttgataacgcttatcg

SEQ ID NO: 491874 - DNA, 55 bp, Artificial
  Synthetic oligonucleotide
cgccggatagcggaagtacgctgacagattctcccatttgcgtcgccacgactgg

SEQ ID NO: 491875 - DNA, 54 bp, Artificial
  Synthetic oligonucleotide
cgccggggtgccttgaaagaggtcggttgtatgggatacatggaggcccaaccc

SEQ ID NO: 491876 - DNA, 55 bp, Artificial
  Synthetic oligonucleotide
cgccgtgcctggcggtcaaagacgaaagccagattgtaacgaatgcccggttccc

SEQ ID NO: 491877 - DNA, 51 bp, Artificial
  Synthetic oligonucleotide
cgccgttaggcgccccgtaggggttgccttgaccctaagaacctaggattg

SEQ ID NO: 491878 - DNA, 55 bp, Artificial
  Synthetic oligonucleotide
cgcgaatgtatactaccacatagggacctatcgtatcgccgacttgacaagcccg

SEQ ID NO: 491879 - DNA, 55 bp, Artificial
  Synthetic oligonucleotide
cgcgccccacagtgtcggcaccgggtaatagcgtttcaggtctctgcttgaactg

SEQ ID NO: 491880 - DNA, 55 bp, Artificial
  Synthetic oligonucleotide
cgcgccttgccagttgaactgctaaccaaggcgatgcttggtgtcaccgcactag

SEQ ID NO: 491881 - DNA, 55 bp, Artificial
  Synthetic oligonucleotide
cgcgtatcagaggatgatctaccgtcgtttcgggattgcgcctccagccttaccc

SEQ ID NO: 491882 - DNA, 55 bp, Artificial
  Synthetic oligonucleotide
cgctaaaaggtcacatcggtgttgctcgtgcacgtttcccgaaaggcacacgtgg

SEQ ID NO: 491883 - DNA, 52 bp, Artificial
  Synthetic oligonucleotide
cgctagccaatctgaatgagtatcaatacgcagccataggggccgccctacg

SEQ ID NO: 491884 - DNA, 55 bp, Artificial
  Synthetic oligonucleotide
cgctcagtgctcgaaatgccgacacgctatcgaacagaatggactccccgccgag

SEQ ID NO: 491885 - DNA, 55 bp, Artificial
  Synthetic oligonucleotide
cgctcataatctttaagcgagtgcaacagtaggctgtccgtctcgaaagattgcc

SEQ ID NO: 491886 - DNA, 52 bp, Artificial
  Synthetic oligonucleotide
cgctcctgtagaatcatagtattggcctctatcttcaatgcctaaagtttcc

SEQ ID NO: 491887 - DNA, 53 bp, Artificial
  Synthetic oligonucleotide
cgctctgccaataactgtagattcagcttgggaagagctgttaagaaggcgtg

SEQ ID NO: 491888 - DNA, 59 bp, Artificial
  Synthetic oligonucleotide
cgctgggaagttgtattccaatagcctgggcgccttctaaattaaagattgcatatatc

SEQ ID NO: 491889 - DNA, 55 bp, Artificial
  Synthetic oligonucleotide
cgcttagcgcaagtatgttgtctgatcaagcccaacgcgccttaaaagtgcaaag

SEQ ID NO: 491890 - DNA, 54 bp, Artificial
  Synthetic oligonucleotide
cgcttcagtggaggtggccgaaattgtcccgtccttcaaaccagaaagtgtccg

SEQ ID NO: 491891 - DNA, 53 bp, Artificial
  Synthetic oligonucleotide
cggaagccgtaccatatttaacggtcatacaaatattgacttaaacaatccgt

SEQ ID NO: 491892 - DNA, 55 bp, Artificial
  Synthetic oligonucleotide
cggacgttatccgccatcgtgctctatggagcccggaagttcctcagccgatccc

SEQ ID NO: 491893 - DNA, 55 bp, Artificial
  Synthetic oligonucleotide
cggatcggatccgacccacggtgtctctcgtcatttgatgaaagacgcggcgttg

SEQ ID NO: 491894 - DNA, 55 bp, Artificial
  Synthetic oligonucleotide
cggcaagggaaatcgtaaaaggagatgcagacatacctgagtacatgttagacgg

SEQ ID NO: 491895 - DNA, 60 bp, Artificial
  Synthetic oligonucleotide
cggcaccagagatcaccgccgtgcagtagaccacccgctcaatcgtggcccctgtccaga

SEQ ID NO: 491896 - DNA, 55 bp, Artificial
  Synthetic oligonucleotide
cggccataagttgccagcaacggattgcgtagaacaccttttgtgtcgcgtcccg

SEQ ID NO: 491897 - DNA, 55 bp, Artificial
  Synthetic oligonucleotide
cggccgtaaccgctaaccagattccgaccacaagccgtatcaatgcgctaccccg

SEQ ID NO: 491898 - DNA, 55 bp, Artificial
  Synthetic oligonucleotide
cggcgcccaagactggcagatctaacgaaggcactcccagtaggtggtgcgacag

SEQ ID NO: 491899 - DNA, 55 bp, Artificial
  Synthetic oligonucleotide
cggcgtgtgctacaagccccgacaagtcgcgtacacatggatggttgacgcaccc

SEQ ID NO: 491900 - DNA, 57 bp, Artificial
  Synthetic oligonucleotide
cgggacaaatagcaatgggatttacagagttttttggcgctaggtatgacgaaagca

SEQ ID NO: 491901 - DNA, 56 bp, Artificial
  Synthetic oligonucleotide
cgggacccgctcgaagtcacccctgcctccaaggtgagccagaaggttgaccgcgc

SEQ ID NO: 491902 - DNA, 55 bp, Artificial
  Synthetic oligonucleotide
cgggcgtgattgcagtagtcgggttgttgcgtcgatttcgctgacaacggtggcc

SEQ ID NO: 491903 - DNA, 55 bp, Artificial
  Synthetic oligonucleotide
cggtaaagttttacgtactttaactgaatcaacctatgaaattcagcctcagcaa

SEQ ID NO: 491904 - DNA, 55 bp, Artificial
  Synthetic oligonucleotide
cggtcgtggcaggatgcttcggtcaggacatatcccatcggaagcgcttggtcgg

SEQ ID NO: 491905 - DNA, 55 bp, Artificial
  Synthetic oligonucleotide
cggtggagtcagccgtggatattcaacggatttctacccctccgcctacatgaga

SEQ ID NO: 491906 - DNA, 55 bp, Artificial
  Synthetic oligonucleotide
cggttattccatcacgcaaaggccgcaacgctccacagaaaacagactggcggcg

SEQ ID NO: 491907 - DNA, 55 bp, Artificial
  Synthetic oligonucleotide
cgtagcggttttgtgcgtagctatggcgtaagccgtgtgctccgttggagtaccc

SEQ ID NO: 491908 - DNA, 58 bp, Artificial
  Synthetic oligonucleotide
cgtagtgcgagtgtccaccttaacgcagggctttccgtcacagcgcgatatgtcagcc

SEQ ID NO: 491909 - DNA, 57 bp, Artificial
  Synthetic oligonucleotide
cgtagtgcgggtatccactttaacgcagggcttcccgtcacaacgcgatatatcagc

SEQ ID NO: 491910 - DNA, 55 bp, Artificial
  Synthetic oligonucleotide
cgtcagcgccacccattttccgctgtctatccactgtcgggcaaaatgcgtcggc

SEQ ID NO: 491911 - DNA, 55 bp, Artificial
  Synthetic oligonucleotide
cgtccatccgctcacaccaaccgcggactctctgaagctgtcttaggatttcgcg

SEQ ID NO: 491912 - DNA, 55 bp, Artificial
  Synthetic oligonucleotide
cgtcgaacacaagcagtgcatggttccggcctacatctaagcgtggcagaacatg

SEQ ID NO: 491913 - DNA, 55 bp, Artificial
  Synthetic oligonucleotide
cgtcgattgactcaatggctagactcccaagaaatacccggcagcgcccacgcaa

SEQ ID NO: 491914 - DNA, 54 bp, Artificial
  Synthetic oligonucleotide
cgtctacgagtagacgatcactccaactctacactcccgcaacccatatgccgt

SEQ ID NO: 491915 - DNA, 51 bp, Artificial
  Synthetic oligonucleotide
cgtctcgcacaagacagttaccaggttaagcagttccccaactgacctaac

SEQ ID NO: 491916 - DNA, 56 bp, Artificial
  Synthetic oligonucleotide
cgtctcggatgggagtccggtcggtaggatctcggcagcgtccctaggggtccatc

SEQ ID NO: 491917 - DNA, 53 bp, Artificial
  Synthetic oligonucleotide
cgtgaatgggcctacagcgccgttagagagtactggcggcctaacgggtacga

SEQ ID NO: 491918 - DNA, 55 bp, Artificial
  Synthetic oligonucleotide
cgtgatcacggattaattgggagtaggcataataggagagcttaccagcaagtaa

SEQ ID NO: 491919 - DNA, 53 bp, Artificial
  Synthetic oligonucleotide
cgtgatgtacgggagaacgccccacaggaagatgttcatcggaaggccttcgc

SEQ ID NO: 491920 - DNA, 57 bp, Artificial
  Synthetic oligonucleotide
cgtgcatataaaatttttttcggtatcccatctggaaaagcagtgcatgtaaatgtt

SEQ ID NO: 491921 - DNA, 53 bp, Artificial
  Synthetic oligonucleotide
cgtgcgagaaaacccctcccgatgaagtcggttgtggggatggaacgccttta

SEQ ID NO: 491922 - DNA, 51 bp, Artificial
  Synthetic oligonucleotide
cgtgggttgctcaagcgcacaaagcgacgaggagttacgccgttagtaacg

SEQ ID NO: 491923 - DNA, 55 bp, Artificial
  Synthetic oligonucleotide
cgtgtaggagtccggtgactatgtgagtttcgtgtccgagaatggacgcaggagg

SEQ ID NO: 491924 - DNA, 55 bp, Artificial
  Synthetic oligonucleotide
cgtgtccaccctgttgtggggcaactgggcgaacccgtatatctggattctcttg

SEQ ID NO: 491925 - DNA, 55 bp, Artificial
  Synthetic oligonucleotide
cgtgtgtctgaggctcccgctgggttagatgctcggtttcgctttaccggccacg

SEQ ID NO: 491926 - DNA, 55 bp, Artificial
  Synthetic oligonucleotide
cgttactggctcaactaaggaatcgcctctatgcgagcaagcaaccgcaaggacg

SEQ ID NO: 491927 - DNA, 54 bp, Artificial
  Synthetic oligonucleotide
cgttagcgaccttgccctcccgacacagcctaggacgtcttgtaaacggtaggc

SEQ ID NO: 491928 - DNA, 53 bp, Artificial
  Synthetic oligonucleotide
cgttataatggtgtcatgaccttcacgacgaagtactaaaattggcccgaatc

SEQ ID NO: 491929 - DNA, 52 bp, Artificial
  Synthetic oligonucleotide
cgttataggtctggtcgttcaccgaatggtaagaacttccctttattggtcg

SEQ ID NO: 491930 - DNA, 52 bp, Artificial
  Synthetic oligonucleotide
cgttcacgtcgcttgcatgcgccaaagccataaacgcaaagactgtgcttat

SEQ ID NO: 491931 - DNA, 55 bp, Artificial
  Synthetic oligonucleotide
cgttctgttgggctaaaaggacgtccattacgatttgttactatgggctctgagg

SEQ ID NO: 491932 - DNA, 55 bp, Artificial
  Synthetic oligonucleotide
cgttgcaacccgtcgtgtcggaattcgataggttgaacgcactccctgcgcagcc

SEQ ID NO: 491933 - DNA, 51 bp, Artificial
  Synthetic oligonucleotide
cgtttaaacacggatttattcggcacactcaccattatgtgagtaagtggt

SEQ ID NO: 491934 - DNA, 52 bp, Artificial
  Synthetic oligonucleotide
cgtttcatacgccgcttttgtccgtggtgcatccttaacgggcagttcgtga

SEQ ID NO: 491935 - DNA, 55 bp, Artificial
  Synthetic oligonucleotide
ctaaactacgaggtattgccggtgcgagtcttgttggtcccgtggtggcaactgc

SEQ ID NO: 491936 - DNA, 58 bp, Artificial
  Synthetic oligonucleotide
ctaaagcaaacggtaactcattgaatgattattacaacagaaccattaagaacaagca

SEQ ID NO: 491937 - DNA, 55 bp, Artificial
  Synthetic oligonucleotide
ctaacgctcgcgcaaaagaaatcaactgacgctccccagacgaatactccgcccc

SEQ ID NO: 491938 - DNA, 56 bp, Artificial
  Synthetic oligonucleotide
ctacaactatattatgagttaggatatccaacaacgagtaaagaacttattcatcg

SEQ ID NO: 491939 - DNA, 55 bp, Artificial
  Synthetic oligonucleotide
ctacccgacgattcgggcggataaattcggcttgtgttagccaggtgtcacggct

SEQ ID NO: 491940 - DNA, 58 bp, Artificial
  Synthetic oligonucleotide
ctactacctagacaccgctggacattcaggcttaatagtggctggtatccccgggagc

SEQ ID NO: 491941 - DNA, 52 bp, Artificial
  Synthetic oligonucleotide
ctagcaacctggttttaaacggaactgccaggtacgacatcacaaacgtttt

SEQ ID NO: 491942 - DNA, 55 bp, Artificial
  Synthetic oligonucleotide
ctagcgaggccgaatcccttctcgaggttatgttactgtaaggcctgccttaagt

SEQ ID NO: 491943 - DNA, 60 bp, Artificial
  Synthetic oligonucleotide
ctaggagtgccatcaaatcttgactatggtggcacaactagtagtgctacgctttattct

SEQ ID NO: 491944 - DNA, 53 bp, Artificial
  Synthetic oligonucleotide
ctaggggcagtcggtgggaacttacgcaaagtactttcaagcggtaccgactc

SEQ ID NO: 491945 - DNA, 55 bp, Artificial
  Synthetic oligonucleotide
ctagtaggtcttctaaagaatagcttccgcttgctaggggtgagccgggagaagc

SEQ ID NO: 491946 - DNA, 55 bp, Artificial
  Synthetic oligonucleotide
ctagtcaaggacgcgagtgccacctgcaacttcagcgatatagaagcttggagcg

SEQ ID NO: 491947 - DNA, 52 bp, Artificial
  Synthetic oligonucleotide
ctagttacctgaatgaactagccggagaacctatcgaatgtccgacacggca

SEQ ID NO: 491948 - DNA, 55 bp, Artificial
  Synthetic oligonucleotide
ctataaaacgaggcaatatcggttttcgaagaggcgtggcaatatgacaacgcaa

SEQ ID NO: 491949 - DNA, 54 bp, Artificial
  Synthetic oligonucleotide
ctatctggtgacgggtacgtaaaacatgctcgctgggttgaactctggcgggag

SEQ ID NO: 491950 - DNA, 58 bp, Artificial
  Synthetic oligonucleotide
ctatggccctacccatccgcgacaggccgaagtattcccgaggctcgaatgttgccgc

SEQ ID NO: 491951 - DNA, 53 bp, Artificial
  Synthetic oligonucleotide
ctcaccgaatggattggattaagctgactcctttcgtcatcctaatccaatcc

SEQ ID NO: 491952 - DNA, 55 bp, Artificial
  Synthetic oligonucleotide
ctcacgagctacccaagaaccgattgtgggtacctgccggaatcacaaccatcta

SEQ ID NO: 491953 - DNA, 56 bp, Artificial
  Synthetic oligonucleotide
ctcagttataattaatcagacgcccctggggattctaatagccggttagctttata

SEQ ID NO: 491954 - DNA, 50 bp, Artificial
  Synthetic oligonucleotide
ctccagtttcgtttagaattggtccattagcactagaaactaaagctccc

SEQ ID NO: 491955 - DNA, 54 bp, Artificial
  Synthetic oligonucleotide
ctcccaatcggtctaggggaatagggtctgccatccagtcatactgtccgtttt

SEQ ID NO: 491956 - DNA, 55 bp, Artificial
  Synthetic oligonucleotide
ctccgctttcttcttggacgacgcgagtatatgccaacgcacgccgcaaagggtc

SEQ ID NO: 491957 - DNA, 55 bp, Artificial
  Synthetic oligonucleotide
ctccgtccatacagcgccgagagaggagaccgcacacatggcacagaaggccatc

SEQ ID NO: 491958 - DNA, 54 bp, Artificial
  Synthetic oligonucleotide
ctcctagttggatcaattggtagtgtggtttattcggtaaagaactaatggtct

SEQ ID NO: 491959 - DNA, 55 bp, Artificial
  Synthetic oligonucleotide
ctcctcgcgagatgtcagcagttgacgcgatgcgatttcatggacgaccgttcgg

SEQ ID NO: 491960 - DNA, 55 bp, Artificial
  Synthetic oligonucleotide
ctcgcctcacgccgttaaacggagaaggctctactccaactcgtagctttcccac

SEQ ID NO: 491961 - DNA, 55 bp, Artificial
  Synthetic oligonucleotide
ctcggcatttccgttaccgcgttgaaacgctgggtgcgactgtcccgtgaagggc

SEQ ID NO: 491962 - DNA, 55 bp, Artificial
  Synthetic oligonucleotide
ctcgggtagacgctgacatatggcaacagctggaagatactccggtacgtacccc

SEQ ID NO: 491963 - DNA, 55 bp, Artificial
  Synthetic oligonucleotide
ctcgggtcgccgaccaaagctaaccgagagttctactagcgcgaccaaacgctag

SEQ ID NO: 491964 - DNA, 55 bp, Artificial
  Synthetic oligonucleotide
ctctcggcatctttaagcactaccgagaaacccgtctcatcggtatatacctcgg

SEQ ID NO: 491965 - DNA, 55 bp, Artificial
  Synthetic oligonucleotide
ctctgaccgagccggtaagctgcgctgtacgatcacaaccgacatctggagcgcc

SEQ ID NO: 491966 - DNA, 52 bp, Artificial
  Synthetic oligonucleotide
ctgaacctcccacgactgacaccctacgagtgctagagtcgcagggttcttg

SEQ ID NO: 491967 - DNA, 55 bp, Artificial
  Synthetic oligonucleotide
ctgaccagactcgcctcgctcgaagagtaggtctctgcgaagtcgctagacgacg

SEQ ID NO: 491968 - DNA, 60 bp, Artificial
  Synthetic oligonucleotide
ctgagcgcataggaagcgcatgagggtggatgatcgttcggtttggggtgtttttggcca

SEQ ID NO: 491969 - DNA, 55 bp, Artificial
  Synthetic oligonucleotide
ctgccggctgatggaggcatttagcccgtcggcaaggtgagactttccgtggagg

SEQ ID NO: 491970 - DNA, 57 bp, Artificial
  Synthetic oligonucleotide
ctgccggttttgccttgggtcgtgtgtctgaggctcccgctgggttagatgctcggt

SEQ ID NO: 491971 - DNA, 55 bp, Artificial
  Synthetic oligonucleotide
ctgcgaacagaaggtacgtctatacgagtcgcatgaaatgacggttagaccctcg

SEQ ID NO: 491972 - DNA, 55 bp, Artificial
  Synthetic oligonucleotide
ctgcggacaatgttttcggaagtatgccggaggacatgtcaacggtcggagaggc

SEQ ID NO: 491973 - DNA, 54 bp, Artificial
  Synthetic oligonucleotide
ctgctaccatacgtaacagtaccaagagtagcaaataatacgaaatactgtgta

SEQ ID NO: 491974 - DNA, 55 bp, Artificial
  Synthetic oligonucleotide
ctggaaaacgtcgttgggttaacgcattgttgcaagcgagcggagtgggtgaacc

SEQ ID NO: 491975 - DNA, 55 bp, Artificial
  Synthetic oligonucleotide
ctggatgcctcggtccgtaaagccggtcgcaccatgttcggacccgtcgtaaata

SEQ ID NO: 491976 - DNA, 55 bp, Artificial
  Synthetic oligonucleotide
ctggcatggctcccgcttttgtcgctgcctgttctgcgtggtttctaaatccttg

SEQ ID NO: 491977 - DNA, 55 bp, Artificial
  Synthetic oligonucleotide
ctggcctactgccctcattatttggtagggagatcccgtgacatctcctgcggcg

SEQ ID NO: 491978 - DNA, 55 bp, Artificial
  Synthetic oligonucleotide
ctgtgagtcggctagaccggaaagagccggagatgagcgacaacacacctggcga

SEQ ID NO: 491979 - DNA, 55 bp, Artificial
  Synthetic oligonucleotide
ctgtggataaattaccgtcgtagcatccgcgcttttaccgtcgtagcatccgcgc

SEQ ID NO: 491980 - DNA, 50 bp, Artificial
  Synthetic oligonucleotide
cttaaaccgttgtatgtgatgtaccgtagccctcgtaacatgccggggac

SEQ ID NO: 491981 - DNA, 55 bp, Artificial
  Synthetic oligonucleotide
cttaccgctcgcttcgctcacttgctccaactacgttgagcttagagccccaagg

SEQ ID NO: 491982 - DNA, 55 bp, Artificial
  Synthetic oligonucleotide
cttacgcttccttgcgcccgtgagcgtcatctaacccgagtcgcaagcttggcga

SEQ ID NO: 491983 - DNA, 52 bp, Artificial
  Synthetic oligonucleotide
cttagcgtttcgtctcgaactacagtatctaatcgtgataagtcaagtggct

SEQ ID NO: 491984 - DNA, 55 bp, Artificial
  Synthetic oligonucleotide
cttcgagaccaaggctcgaagtttagccatgagactcgcttagctaggctgctgg

SEQ ID NO: 491985 - DNA, 55 bp, Artificial
  Synthetic oligonucleotide
cttcgcacctctttacccaaggccggcatacgcatcctttacgagctatgccgtc

SEQ ID NO: 491986 - DNA, 56 bp, Artificial
  Synthetic oligonucleotide
cttgacccattcgactccatgacccaccctcccattctgtaccctgtacctgttcc

SEQ ID NO: 491987 - DNA, 52 bp, Artificial
  Synthetic oligonucleotide
cttgatgttgggtaaaatactcaacaaatgggggtgtcgggggtaaacgctg

SEQ ID NO: 491988 - DNA, 55 bp, Artificial
  Synthetic oligonucleotide
cttgcgcgtcttgggctaccaatgctttagatcttgcccctccggcactcgatcc

SEQ ID NO: 491989 - DNA, 55 bp, Artificial
  Synthetic oligonucleotide
cttggtggacctgcgatgcgtattggtctaggcggtggagcagcgtcatccgttg

SEQ ID NO: 491990 - DNA, 55 bp, Artificial
  Synthetic oligonucleotide
ctttccgtggcgtactgcaatagttcattgtacaagctgtgccgcagttccgtat

SEQ ID NO: 491991 - DNA, 55 bp, Artificial
  Synthetic oligonucleotide
ctttcggttgaagggcactgcctgctgtataattacagaccgctgaagtgccggc

SEQ ID NO: 491992 - DNA, 55 bp, Artificial
  Synthetic oligonucleotide
ctttcgtggcacacatactgcccgatgtggcaggcagcgtggtggctccgatagg

SEQ ID NO: 491993 - DNA, 58 bp, Artificial
  Synthetic oligonucleotide
cttttatctactggaggcgagcgtaggtgagagggctccacaggaaccggatgacggc

SEQ ID NO: 491994 - DNA, 55 bp, Artificial
  Synthetic oligonucleotide
gaaagcccagaacgcgacagccgtctagccctcagctacgcaaccgcagtcgttc

SEQ ID NO: 491995 - DNA, 53 bp, Artificial
  Synthetic oligonucleotide
gaaatcatacgtgcggcgtaatagtgcttgaatcttagtaattgtaacagtca

SEQ ID NO: 491996 - DNA, 54 bp, Artificial
  Synthetic oligonucleotide
gaaatctatcaaatttagaacatagtatatttgttctttgagaaatttgtaaat

SEQ ID NO: 491997 - DNA, 51 bp, Artificial
  Synthetic oligonucleotide
gaaccgacgaattacacgatttaatcgaacgttttgacccattggtctagt

SEQ ID NO: 491998 - DNA, 55 bp, Artificial
  Synthetic oligonucleotide
gaacctgaacgtcctatgcaacgcttcctcaacgtgttgactcaccctcgcacgc

SEQ ID NO: 491999 - DNA, 55 bp, Artificial
  Synthetic oligonucleotide
gaactccataccgcttgtcggcaggacgattacctctgaaaacccggaactccgc

SEQ ID NO: 492000 - DNA, 55 bp, Artificial
  Synthetic oligonucleotide
gaagaaaccgcgcgccagtcaacacgataagtgccagcgggtaaaggctctcgcg

SEQ ID NO: 492001 - DNA, 55 bp, Artificial
  Synthetic oligonucleotide
gaagcgatatttctcgccagtggtacgcaccagaaagccacacgcttcgttcggg

SEQ ID NO: 492002 - DNA, 60 bp, Artificial
  Synthetic oligonucleotide
gaagcgttagcgagctagacaaaagcgcatcgcagtttgaaatcgtaggcgttagccgga

SEQ ID NO: 492003 - DNA, 55 bp, Artificial
  Synthetic oligonucleotide
gaaggacccaccataatggggcctaaaacctcaaacgcagacatagaaatcatag

SEQ ID NO: 492004 - DNA, 55 bp, Artificial
  Synthetic oligonucleotide
gaagttccgagccgatatgtccccgaagtttgatgccgttcggcacgaagtgcaa

SEQ ID NO: 492005 - DNA, 50 bp, Artificial
  Synthetic oligonucleotide
gaatattaactcctgatggctaccttgtgaaaataattcctggagacggg

SEQ ID NO: 492006 - DNA, 53 bp, Artificial
  Synthetic oligonucleotide
gaatcggtttggcggaatttgccctaacgaaggctgcgaacccaagattttct

SEQ ID NO: 492007 - DNA, 55 bp, Artificial
  Synthetic oligonucleotide
gacaacatttatttcggtacattagcgggtgcacttgtgttgaaacacggggaaa

SEQ ID NO: 492008 - DNA, 55 bp, Artificial
  Synthetic oligonucleotide
gacagcactgaaacgcttgatagaacccaataagatcggcgtgcaaacagatctg

SEQ ID NO: 492009 - DNA, 55 bp, Artificial
  Synthetic oligonucleotide
gacagtcgcacccagcgtttcaacgcggtaacggaaatgccgagctccggagcga

SEQ ID NO: 492010 - DNA, 55 bp, Artificial
  Synthetic oligonucleotide
gaccaaaattctcgactagccctgcttaagttggtaggacaaagacgaaagctct

SEQ ID NO: 492011 - DNA, 55 bp, Artificial
  Synthetic oligonucleotide
gaccaacgctctgggtgtcgctctcttgctaccgacaacacatccgaacgacgtc

SEQ ID NO: 492012 - DNA, 51 bp, Artificial
  Synthetic oligonucleotide
gacccgaacttcggtcgggcgtttaaacctacttcacgcggattgcaaagt

SEQ ID NO: 492013 - DNA, 55 bp, Artificial
  Synthetic oligonucleotide
gacccgggatgcactgacacacgaatccggaacgcaactgtccttgtgaatcggc

SEQ ID NO: 492014 - DNA, 50 bp, Artificial
  Synthetic oligonucleotide
gaccgaaacaacggacacaagcaggtgtcgctcatcatcactaagagtca

SEQ ID NO: 492015 - DNA, 55 bp, Artificial
  Synthetic oligonucleotide
gactacgaattccataaggtgtaccatacgctgcacaatctctgcgtcagcgacc

SEQ ID NO: 492016 - DNA, 51 bp, Artificial
  Synthetic oligonucleotide
gactactcaaataggagggattgactactcaaataggagggattgactacc

SEQ ID NO: 492017 - DNA, 52 bp, Artificial
  Synthetic oligonucleotide
gactagctggatattgtttaccgtctaaagcatcacggtagttatccctagc

SEQ ID NO: 492018 - DNA, 54 bp, Artificial
  Synthetic oligonucleotide
gagacatggtcatctgataactcttatcggaactcgcactagctgattgatttc

SEQ ID NO: 492019 - DNA, 55 bp, Artificial
  Synthetic oligonucleotide
gagcaaatcttctcgcatgctgttccccaattgttcgcgtcggtgctgagcatgc

SEQ ID NO: 492020 - DNA, 52 bp, Artificial
  Synthetic oligonucleotide
gagcaacaatcatgtcaggagtatgtatagggaacggagcagtgattggtgc

SEQ ID NO: 492021 - DNA, 58 bp, Artificial
  Synthetic oligonucleotide
gagcgctaactctgcgtggttctcaggcaactaccgcacgtacacgtggaccaagggt

SEQ ID NO: 492022 - DNA, 55 bp, Artificial
  Synthetic oligonucleotide
gagctggttgtccacacgccgttcgcttgcgaattcgacgctgaggtgtatgccg

SEQ ID NO: 492023 - DNA, 55 bp, Artificial
  Synthetic oligonucleotide
gaggactgcccggccaacgcccggacaaattgtctctcttcccgcattgttccct

SEQ ID NO: 492024 - DNA, 55 bp, Artificial
  Synthetic oligonucleotide
gaggggcgcgcccattacgcaggacacacaccgtgagtcgtaactacgcccttac

SEQ ID NO: 492025 - DNA, 52 bp, Artificial
  Synthetic oligonucleotide
gaggtcttaccggctacacctacaagcgaaggaaccgggcccctagaaaaga

SEQ ID NO: 492026 - DNA, 55 bp, Artificial
  Synthetic oligonucleotide
gagtaacagaccttgatgtgaggcaaaatctccgcctcaggtcgggcacaagtcc

SEQ ID NO: 492027 - DNA, 53 bp, Artificial
  Synthetic oligonucleotide
gagtatccgctcaatagcacggtcagtaaccaggttcccgccattactccggt

SEQ ID NO: 492028 - DNA, 55 bp, Artificial
  Synthetic oligonucleotide
gagtcgtgaagtcacgacggggtgtgcaagatggggagcatcatggggtcggtca

SEQ ID NO: 492029 - DNA, 60 bp, Artificial
  Synthetic oligonucleotide
gagtgcacatgccccgcagacgcaatctcgtgtgtccatgcgcgcttcgatcgttggcaa

SEQ ID NO: 492030 - DNA, 55 bp, Artificial
  Synthetic oligonucleotide
gagtggactggtcttgcaattcatgcggtgacaactccgagtggggaacggatgc

SEQ ID NO: 492031 - DNA, 53 bp, Artificial
  Synthetic oligonucleotide
gagtggtaaatagttgctcaccgatcggaaatgcgccggtcaggtattgccgg

SEQ ID NO: 492032 - DNA, 55 bp, Artificial
  Synthetic oligonucleotide
gataaaagcccttaattcgctcccattcgcttcctgaacgctttttcccattata

SEQ ID NO: 492033 - DNA, 51 bp, Artificial
  Synthetic oligonucleotide
gatagatggagaatatggactaccaggtaaccgccatatcaccgctacata

SEQ ID NO: 492034 - DNA, 55 bp, Artificial
  Synthetic oligonucleotide
gatatttctcgccagtagtacgcaccagaaagccacacgcttcgttcgggtagcg

SEQ ID NO: 492035 - DNA, 55 bp, Artificial
  Synthetic oligonucleotide
gatcagtcatgttcggggaatccttccgctacgccacggcaagattccgtggatc

SEQ ID NO: 492036 - DNA, 51 bp, Artificial
  Synthetic oligonucleotide
gatccggctgtttttctggcgtgttgacgatagcaaaaagcggttcgctcc

SEQ ID NO: 492037 - DNA, 55 bp, Artificial
  Synthetic oligonucleotide
gatctcttagttagtttcaaacaaataaaacaagggcgttcaatccacgctataa

SEQ ID NO: 492038 - DNA, 55 bp, Artificial
  Synthetic oligonucleotide
gatgatcggcacctgacgatattctggggagttcgcgacacatcgcccatcgacc

SEQ ID NO: 492039 - DNA, 56 bp, Artificial
  Synthetic oligonucleotide
gatggccatcacgcaggtttttccagaattcgccgccggtacctaaatactcccca

SEQ ID NO: 492040 - DNA, 55 bp, Artificial
  Synthetic oligonucleotide
gatgtttgtcctagcaccggtaatgtaacgaagtcattgtagaatccgtagaaca

SEQ ID NO: 492041 - DNA, 51 bp, Artificial
  Synthetic oligonucleotide
gattattggtggaatcgcagtcacttatcgtgatgcctcaaaaatcctagg

SEQ ID NO: 492042 - DNA, 55 bp, Artificial
  Synthetic oligonucleotide
gattcatgctctccaaaagactccgttccagtaccgtcataaaatactcctcgcc

SEQ ID NO: 492043 - DNA, 55 bp, Artificial
  Synthetic oligonucleotide
gattcgtcttgccaccggaccctgtttgtttcggcacgagccctatccatgcagc

SEQ ID NO: 492044 - DNA, 60 bp, Artificial
  Synthetic oligonucleotide
gatttggacacgcagtgcaatagcacttctctattgttaagacagggagataacccgaga

SEQ ID NO: 492045 - DNA, 55 bp, Artificial
  Synthetic oligonucleotide
gcaaccaggcttcacgtcggaactcttgcgagcctgacaacttgagactgtccca

SEQ ID NO: 492046 - DNA, 55 bp, Artificial
  Synthetic oligonucleotide
gcaagtagtatcagaccagggagtggacatcgagtacagggtcttggggcattgc

SEQ ID NO: 492047 - DNA, 58 bp, Artificial
  Synthetic oligonucleotide
gcaatcagacgctccccaaggactatgtagtagatttcccatgtataaaggctggtat

SEQ ID NO: 492048 - DNA, 52 bp, Artificial
  Synthetic oligonucleotide
gcacccggaagacagactatgagtccagcgactataagtattgttgaggcga

SEQ ID NO: 492049 - DNA, 55 bp, Artificial
  Synthetic oligonucleotide
gcacctggacattgagccgggctcggatactgcattgttcaacacgctcttcagc

SEQ ID NO: 492050 - DNA, 55 bp, Artificial
  Synthetic oligonucleotide
gcacgcggacacggatttggggtttgtggtattgaacgacttgggcaatacgacg

SEQ ID NO: 492051 - DNA, 55 bp, Artificial
  Synthetic oligonucleotide
gcactaacatgctcgcggacacgattcccaatgcgagtaggacaccgaagcccgg

SEQ ID NO: 492052 - DNA, 55 bp, Artificial
  Synthetic oligonucleotide
gcactaagacaggattgatggcttcaagttgccgaatggctcgttgttgggcggt

SEQ ID NO: 492053 - DNA, 50 bp, Artificial
  Synthetic oligonucleotide
gcacttggtcgtgcacaagttgcagcggaatcactcggactaggtagtgt

SEQ ID NO: 492054 - DNA, 53 bp, Artificial
  Synthetic oligonucleotide
gcagcggtggctatggtaccaccaacgatatcgcggtgatttggccaaaagat

SEQ ID NO: 492055 - DNA, 55 bp, Artificial
  Synthetic oligonucleotide
gcagctcaatcactggctcgacctgcggtaatacaccgtgccaaagcaaaacggc

SEQ ID NO: 492056 - DNA, 55 bp, Artificial
  Synthetic oligonucleotide
gcaggcacttgcccgaccaataaagggaagttcttaccattcggtgaacgaccag

SEQ ID NO: 492057 - DNA, 53 bp, Artificial
  Synthetic oligonucleotide
gcagggataggggcatcgatatctaatacaccaatcacttcgctgcctttatg

SEQ ID NO: 492058 - DNA, 55 bp, Artificial
  Synthetic oligonucleotide
gcaggtattgcacgcggacacggatttggggtttgtggtattgaacgacttgggc

SEQ ID NO: 492059 - DNA, 55 bp, Artificial
  Synthetic oligonucleotide
gcaggttctcgaagtggtaaaggggtaatgactcttaacattctatcaacggcta

SEQ ID NO: 492060 - DNA, 53 bp, Artificial
  Synthetic oligonucleotide
gcatgacctctacagcacccgaacccgatgaccgacgtgagactcgcacccgg

SEQ ID NO: 492061 - DNA, 54 bp, Artificial
  Synthetic oligonucleotide
gccaccccaaacagctttaaaacgtccctagcggcctttctagcgccctccgca

SEQ ID NO: 492062 - DNA, 60 bp, Artificial
  Synthetic oligonucleotide
gccaggtcaatccaccgatggatcatcaccaaatcacgcatgtggacagacggcccagcc

SEQ ID NO: 492063 - DNA, 50 bp, Artificial
  Synthetic oligonucleotide
gcccagctgcaatacgagtaattaataccacatgcggacaaaccaacttc

SEQ ID NO: 492064 - DNA, 55 bp, Artificial
  Synthetic oligonucleotide
gccccaagctgagttaccagcctgcgtctttctaccgacatactctcgggcattg

SEQ ID NO: 492065 - DNA, 53 bp, Artificial
  Synthetic oligonucleotide
gcccctatcgggttcaccagaaatcggcagaccgaaccttactgcgctgatta

SEQ ID NO: 492066 - DNA, 55 bp, Artificial
  Synthetic oligonucleotide
gcccctggagcacagaacgcaggaatgactggttgcagtggatatcgctggcgtc

SEQ ID NO: 492067 - DNA, 55 bp, Artificial
  Synthetic oligonucleotide
gccctaagctcggtgccacagcaccaacgcgaatccggcaaggcaattgggctca

SEQ ID NO: 492068 - DNA, 55 bp, Artificial
  Synthetic oligonucleotide
gccctagcttccgcacgtaagacggggaccaacgagagatcaaacccaaacgcgc

SEQ ID NO: 492069 - DNA, 55 bp, Artificial
  Synthetic oligonucleotide
gccgaagaaggcaattaacacgtcccatagggttggctgggtacgtgccaaaagc

SEQ ID NO: 492070 - DNA, 55 bp, Artificial
  Synthetic oligonucleotide
gccgactatgacaatcacaacggggatggtgtagatccacgcgctaaccgagcct

SEQ ID NO: 492071 - DNA, 55 bp, Artificial
  Synthetic oligonucleotide
gccgattcaagcgtgagctgtcggcctggaggcaaggtcggcgggttatagcgat

SEQ ID NO: 492072 - DNA, 55 bp, Artificial
  Synthetic oligonucleotide
gccgcagttgcagaactttgacagcagtcacgacattatggtgcgtatgccgcca

SEQ ID NO: 492073 - DNA, 55 bp, Artificial
  Synthetic oligonucleotide
gccgcgttgcatcccgcaacttatccggagtaaagagtccacctaaccctgtcgt

SEQ ID NO: 492074 - DNA, 55 bp, Artificial
  Synthetic oligonucleotide
gccgctggctggactagatccggtgtctctgaaattcacgcgcaacgaacttcag

SEQ ID NO: 492075 - DNA, 55 bp, Artificial
  Synthetic oligonucleotide
gccgcttatgtacgcgttgttctctgctggtctcatgttcccgatgaccgttggc

SEQ ID NO: 492076 - DNA, 60 bp, Artificial
  Synthetic oligonucleotide
gccgttatgaatcgtccaatcaatgacacgttggccgccaacctcctatgcgagccggcc

SEQ ID NO: 492077 - DNA, 58 bp, Artificial
  Synthetic oligonucleotide
gcctgaattgcgtagcaacagggcggtgctttgagtgaatttgacggggttaggggca

SEQ ID NO: 492078 - DNA, 55 bp, Artificial
  Synthetic oligonucleotide
gccttattgaatagcaacctgggcgagactcctgaggcatagagacgagaccgaa

SEQ ID NO: 492079 - DNA, 55 bp, Artificial
  Synthetic oligonucleotide
gccttgttcccagcgctcatgaccggacttgacgttgatgtgcccggcattgctc

SEQ ID NO: 492080 - DNA, 55 bp, Artificial
  Synthetic oligonucleotide
gcgaaagtgctcaacccaaacggaggtgtctaccagaacgcctttcacagtgcct

SEQ ID NO: 492081 - DNA, 55 bp, Artificial
  Synthetic oligonucleotide
gcgacgcttgtagacccggagctgggctcccatgagtcaggtcccttcctttacg

SEQ ID NO: 492082 - DNA, 55 bp, Artificial
  Synthetic oligonucleotide
gcgattaaccctgagtgtagcttgcgtgggcgctatcttgcttcgcttcgcgcta

SEQ ID NO: 492083 - DNA, 55 bp, Artificial
  Synthetic oligonucleotide
gcgcacacaggtgaggtcgtggacatctgcgaccctgtaaaacgcgattgggtgc

SEQ ID NO: 492084 - DNA, 55 bp, Artificial
  Synthetic oligonucleotide
gcgcagactgtgacctgacagtcattggccaacaagagcttgacctagtgacggg

SEQ ID NO: 492085 - DNA, 55 bp, Artificial
  Synthetic oligonucleotide
gcgcagcgcatgaacgttttgccttggaagcctagggattgaagccgggctctcc

SEQ ID NO: 492086 - DNA, 55 bp, Artificial
  Synthetic oligonucleotide
gcgcccgccgctaacaccatggatccgcctacgattcccctggcaccgatgaaac

SEQ ID NO: 492087 - DNA, 54 bp, Artificial
  Synthetic oligonucleotide
gcgccggaaggtatttctacccgactgattccacaggggcggttcgtcactaac

SEQ ID NO: 492088 - DNA, 55 bp, Artificial
  Synthetic oligonucleotide
gcgcgcatgtgggttaaccagtccggacaactcaagttacggggctatctcggga

SEQ ID NO: 492089 - DNA, 51 bp, Artificial
  Synthetic oligonucleotide
gcgcggccgagcctaaggccgatccagtgacactttgtcgtaaatgaacgt

SEQ ID NO: 492090 - DNA, 55 bp, Artificial
  Synthetic oligonucleotide
gcgcgttcttttctctggacgtggtgagacacgatgggtcggcgcctgtgcagtg

SEQ ID NO: 492091 - DNA, 55 bp, Artificial
  Synthetic oligonucleotide
gcgctccgggaccagcgaaggtcagcccattgaggagtcatccatgtacggttcc

SEQ ID NO: 492092 - DNA, 53 bp, Artificial
  Synthetic oligonucleotide
gcgctctccgtaggttaagggctatttggctaaaaagcgtcctattctttgat

SEQ ID NO: 492093 - DNA, 55 bp, Artificial
  Synthetic oligonucleotide
gcgctgtgtaccggctgccataactattggtcggatcacgatataccgtgtgcac

SEQ ID NO: 492094 - DNA, 50 bp, Artificial
  Synthetic oligonucleotide
gcgcttatatgcgtttaaaatgccacgtataagaagccacaataagatat

SEQ ID NO: 492095 - DNA, 60 bp, Artificial
  Synthetic oligonucleotide
gcgggctctggagagcgactcgggggaggagtagtatcttccggccacggatatgatcga

SEQ ID NO: 492096 - DNA, 55 bp, Artificial
  Synthetic oligonucleotide
gcgggtgccactgccttatccaacggtgatgtcgctaaatccggtgagcggatgg

SEQ ID NO: 492097 - DNA, 55 bp, Artificial
  Synthetic oligonucleotide
gcggtaatcatgggcggtcatcagaagcagccgttcggaaggagtgatgacagtg

SEQ ID NO: 492098 - DNA, 55 bp, Artificial
  Synthetic oligonucleotide
gcggtcttccgcttcaaacgtcaccccatccgtggccagcagaaaccgtgccttg

SEQ ID NO: 492099 - DNA, 55 bp, Artificial
  Synthetic oligonucleotide
gcgtaatttaatagcgtggcttgggcgagctgtgcttttgggtctgtcgcttccc

SEQ ID NO: 492100 - DNA, 55 bp, Artificial
  Synthetic oligonucleotide
gcgtagaatctgtcatcagcgcacgtcctcccaccatccggtgctctgtcgcttg

SEQ ID NO: 492101 - DNA, 55 bp, Artificial
  Synthetic oligonucleotide
gcgtagcacgcaacccgcttgtgcgtttagccaaacctatcacggcaactatcgg

SEQ ID NO: 492102 - DNA, 55 bp, Artificial
  Synthetic oligonucleotide
gcgtcacaggcaacggctatcccttgcgggtactaagaggggtgggtgatccatt

SEQ ID NO: 492103 - DNA, 55 bp, Artificial
  Synthetic oligonucleotide
gcgtccgagtgatacaatgccttgtttggcagtgcgggcacgggtgtaaggatcc

SEQ ID NO: 492104 - DNA, 52 bp, Artificial
  Synthetic oligonucleotide
gcgtggggttcaagaatcagaacgtaaaagtttaacggtaccagaatataaa

SEQ ID NO: 492105 - DNA, 55 bp, Artificial
  Synthetic oligonucleotide
gcgtgtggtagtacgattgcatgtgtctccgcgtggggaagattaagggttcccc

SEQ ID NO: 492106 - DNA, 51 bp, Artificial
  Synthetic oligonucleotide
gcgttatttcccgttcccacggcggacgttggtcggccaacttggactgct

SEQ ID NO: 492107 - DNA, 55 bp, Artificial
  Synthetic oligonucleotide
gctaacaccccacggacgtagaacagcgtgggttatcttggtggcattatgggcg

SEQ ID NO: 492108 - DNA, 55 bp, Artificial
  Synthetic oligonucleotide
gctagtcgggcatccctacccgacctacccataaggactccccatgcccctgcaa

SEQ ID NO: 492109 - DNA, 59 bp, Artificial
  Synthetic oligonucleotide
gctatacgaatttatgaaatcattactcaatatcgtaactcaaaagagaaagaacgcac

SEQ ID NO: 492110 - DNA, 51 bp, Artificial
  Synthetic oligonucleotide
gctcccctagggtacacccctaaactcacggttcccaaacgggcaactatc

SEQ ID NO: 492111 - DNA, 55 bp, Artificial
  Synthetic oligonucleotide
gctctggcgtacgctggtagtcaattttaccgttgtggatataacccagcgggcc

SEQ ID NO: 492112 - DNA, 55 bp, Artificial
  Synthetic oligonucleotide
gctctgtatagggttgaacgatgcacgcccaatatggcggctacttccctcacgc

SEQ ID NO: 492113 - DNA, 55 bp, Artificial
  Synthetic oligonucleotide
gctgagacccgagtacgacccgagtaacatcggggaagtcgctgataccctgctc

SEQ ID NO: 492114 - DNA, 60 bp, Artificial
  Synthetic oligonucleotide
gctgcatgacctccaatgagtttgttccgataaatgacacgtgacccctcggataaacta

SEQ ID NO: 492115 - DNA, 57 bp, Artificial
  Synthetic oligonucleotide
gctggagttcacatatgccaacaaccaatgagcaagctctacattaacggaggagat

SEQ ID NO: 492116 - DNA, 55 bp, Artificial
  Synthetic oligonucleotide
gctggtatgatccggcttcattgggtgactgagtggcagcgtagaggtgtcccgc

SEQ ID NO: 492117 - DNA, 55 bp, Artificial
  Synthetic oligonucleotide
gctggtcgtaatggaggtattatgctagcttcgacacatggattgatgcgctccg

SEQ ID NO: 492118 - DNA, 55 bp, Artificial
  Synthetic oligonucleotide
gctgtcagacagccggtattcacacgagcggctatggtcgatattgcgcgagtgc

SEQ ID NO: 492119 - DNA, 55 bp, Artificial
  Synthetic oligonucleotide
gctgtctgccatctatcctaccggacatgccctgccctggtagctcggtaatctg

SEQ ID NO: 492120 - DNA, 55 bp, Artificial
  Synthetic oligonucleotide
gcttagctcggtctccgccacacctggcgccaaatgacagccgatacacatggag

SEQ ID NO: 492121 - DNA, 55 bp, Artificial
  Synthetic oligonucleotide
ggaacacattcgttgacgcctttagggccgccattcgacgcggggttagcaaggc

SEQ ID NO: 492122 - DNA, 55 bp, Artificial
  Synthetic oligonucleotide
ggaacctcagatacacacccatgccgtcgtcattaacgccacgcagaacggggac

SEQ ID NO: 492123 - DNA, 55 bp, Artificial
  Synthetic oligonucleotide
ggaagcaacgcccatggagagaaaagaaaattgataatgtaagttatgcagacat

SEQ ID NO: 492124 - DNA, 53 bp, Artificial
  Synthetic oligonucleotide
ggacctgttagccgagcagtaaaaccggcaatcgatcagttgtcggttgaagc

SEQ ID NO: 492125 - DNA, 55 bp, Artificial
  Synthetic oligonucleotide
ggacgcaacccaaaccgtcagcaaggcggaacagatttcttccgtacagattccc

SEQ ID NO: 492126 - DNA, 55 bp, Artificial
  Synthetic oligonucleotide
ggacgcgagtgccacctgcaacttcagcgatatagaagcttggagcgtatccaac

SEQ ID NO: 492127 - DNA, 55 bp, Artificial
  Synthetic oligonucleotide
ggactcaatcaaggtacgaagcgagtggccgctatcgtggcgactgctgggcgtc

SEQ ID NO: 492128 - DNA, 51 bp, Artificial
  Synthetic oligonucleotide
ggagaattcacaacctctctacgcatgacattagcggcgaatctgttgtgt

SEQ ID NO: 492129 - DNA, 55 bp, Artificial
  Synthetic oligonucleotide
ggagactgatctgagcggtcaggccccagaggtagcagccgagatcggctataag

SEQ ID NO: 492130 - DNA, 55 bp, Artificial
  Synthetic oligonucleotide
ggagcgggacagtgccctagtcggactgtttaccttgcataggggctttgccaaa

SEQ ID NO: 492131 - DNA, 55 bp, Artificial
  Synthetic oligonucleotide
ggagcttctgaccaacactccgtccaccgcaaacatcgagtcctacgcgagcctt

SEQ ID NO: 492132 - DNA, 55 bp, Artificial
  Synthetic oligonucleotide
ggaggctgtccgggcaggttttaagagcttatggcagctacgaacgcctgaagca

SEQ ID NO: 492133 - DNA, 55 bp, Artificial
  Synthetic oligonucleotide
ggataaagaacgcatgaacctgaataacggggacactttagatgccgattggccc

SEQ ID NO: 492134 - DNA, 55 bp, Artificial
  Synthetic oligonucleotide
ggatagtggacagtgaaatagatgcgagaagccgaaataatcgcagccactataa

SEQ ID NO: 492135 - DNA, 55 bp, Artificial
  Synthetic oligonucleotide
ggatgcgcacgctaacttcctgcgtaacaacccgtcttacaaagtcaccgtagaa

SEQ ID NO: 492136 - DNA, 55 bp, Artificial
  Synthetic oligonucleotide
ggatgcttatgcacccgaggtctcaactaggcctttctccgacggaagtctccgt

SEQ ID NO: 492137 - DNA, 55 bp, Artificial
  Synthetic oligonucleotide
ggatggggctggagtccggttcaacggagttgggtcaggctccagtctttgcgct

SEQ ID NO: 492138 - DNA, 55 bp, Artificial
  Synthetic oligonucleotide
ggattaagaaacacgtggcgcgtacggagcgtcttgggattatgggagctctcgg

SEQ ID NO: 492139 - DNA, 60 bp, Artificial
  Synthetic oligonucleotide
ggatttttagcatcctcaggcttctctccatcctgctcagcctcaccagcagccttaaca

SEQ ID NO: 492140 - DNA, 55 bp, Artificial
  Synthetic oligonucleotide
ggcaaaggtcgggtgtggccttcaggtgggtgcagagagtgaaactcctgctcgt

SEQ ID NO: 492141 - DNA, 60 bp, Artificial
  Synthetic oligonucleotide
ggcaacgctacttgcttgataattcggagcgatcaagttttactgttaagcgagtcgcat

SEQ ID NO: 492142 - DNA, 55 bp, Artificial
  Synthetic oligonucleotide
ggcactatttgcggactgccgttatcttgttccgcagggtaaagagccgcacagc

SEQ ID NO: 492143 - DNA, 55 bp, Artificial
  Synthetic oligonucleotide
ggcagattataggcgattatgccgtcggctcctatggtgactgtggcttagtcgc

SEQ ID NO: 492144 - DNA, 55 bp, Artificial
  Synthetic oligonucleotide
ggcaggctaatttagcgaaggaagcagccgtcggccttttggtggtatgaccccg

SEQ ID NO: 492145 - DNA, 60 bp, Artificial
  Synthetic oligonucleotide
ggcagggaaggaggatatgtcgtgtcgcacacacgctcgttcatcgatcccctcgacgtt

SEQ ID NO: 492146 - DNA, 55 bp, Artificial
  Synthetic oligonucleotide
ggcagggtgtgtatggaccagaccatgattgacgtggggcacattgacggagtgc

SEQ ID NO: 492147 - DNA, 55 bp, Artificial
  Synthetic oligonucleotide
ggccagtcacgagatcggctttatgccgacaatgattctacgtacaccgcatgga

SEQ ID NO: 492148 - DNA, 54 bp, Artificial
  Synthetic oligonucleotide
ggcggcaccttaccccgacctcgtttgcggattacgttgatcggacacataccc

SEQ ID NO: 492149 - DNA, 56 bp, Artificial
  Synthetic oligonucleotide
ggcggccgattatggacaatcggtccaattcaagggctcgggtgttacagcactcg

SEQ ID NO: 492150 - DNA, 52 bp, Artificial
  Synthetic oligonucleotide
ggcggttttcttagctcgcgtgggtaccgccaatccaagacccggggcttaa

SEQ ID NO: 492151 - DNA, 55 bp, Artificial
  Synthetic oligonucleotide
ggcgtccgcaactgctcccacataacgaacattctgccctgtccatgattcagcg

SEQ ID NO: 492152 - DNA, 55 bp, Artificial
  Synthetic oligonucleotide
ggctaaattacttttcggatctagtggtggctgcccaccttgaggcgacgccagc

SEQ ID NO: 492153 - DNA, 55 bp, Artificial
  Synthetic oligonucleotide
ggctactgttgatggccactgattagcgttacccgcaccaccgaagtgtggcacg

SEQ ID NO: 492154 - DNA, 50 bp, Artificial
  Synthetic oligonucleotide
gggaatctcacgaagtgcgcacttatacaatctcaacttcgtttcgattg

SEQ ID NO: 492155 - DNA, 55 bp, Artificial
  Synthetic oligonucleotide
gggacagcattcttcacactcacgaatggtgggctcccaatgatgtgggccaact

SEQ ID NO: 492156 - DNA, 55 bp, Artificial
  Synthetic oligonucleotide
gggagagcgctgttgcaaaatccacccctggcgcaatgggtaacagggagacgcg

SEQ ID NO: 492157 - DNA, 58 bp, Artificial
  Synthetic oligonucleotide
gggagatgctggactacctgtttcacgttctacaataacattagtcttaaattccaca

SEQ ID NO: 492158 - DNA, 55 bp, Artificial
  Synthetic oligonucleotide
gggagccagaacttgaatatcacgggcagggataccacttctgagggcagcgcct

SEQ ID NO: 492159 - DNA, 53 bp, Artificial
  Synthetic oligonucleotide
gggatagggcatacaatgggaaaggtcgggaacaggttgctaccctattccct

SEQ ID NO: 492160 - DNA, 55 bp, Artificial
  Synthetic oligonucleotide
gggcacgctggggcttgacttggtgaacactcggacagctgaatcactggccgtc

SEQ ID NO: 492161 - DNA, 55 bp, Artificial
  Synthetic oligonucleotide
gggcagctctgcgctagtggcgattaacgcgctaatgctcaagcgaacccggctg

SEQ ID NO: 492162 - DNA, 55 bp, Artificial
  Synthetic oligonucleotide
gggccgcaaatggctgggatggcaatcgtaccatcaatattgggagccgtcatct

SEQ ID NO: 492163 - DNA, 55 bp, Artificial
  Synthetic oligonucleotide
gggccgtaccctcgcgcctctctccatgaatggggcatatctagcggttgagtgc

SEQ ID NO: 492164 - DNA, 55 bp, Artificial
  Synthetic oligonucleotide
gggccttcattcagcgtgccacacaggcggcatgcgttatcgcagagatgggctg

SEQ ID NO: 492165 - DNA, 55 bp, Artificial
  Synthetic oligonucleotide
gggctgatgtctccggttgaacataacggttactggctggtagatggcgcagtcg

SEQ ID NO: 492166 - DNA, 52 bp, Artificial
  Synthetic oligonucleotide
ggggagaagattcggaactaagagtgattgagtcgcttcactatcatacaat

SEQ ID NO: 492167 - DNA, 55 bp, Artificial
  Synthetic oligonucleotide
ggggccccaacacagaagctgacgaaaagtcagcttacaataatgtgcaagttgg

SEQ ID NO: 492168 - DNA, 50 bp, Artificial
  Synthetic oligonucleotide
gggtatagcgtggctacgatggggatatgcctgtatcgtttaggcgtatc

SEQ ID NO: 492169 - DNA, 55 bp, Artificial
  Synthetic oligonucleotide
gggtccacctttcactaccctaatcgacacgacctgccaaactggacattcgcct

SEQ ID NO: 492170 - DNA, 51 bp, Artificial
  Synthetic oligonucleotide
gggttctaccaagtcctgggttgtgttcgccttggtagcgctcctagttgg

SEQ ID NO: 492171 - DNA, 55 bp, Artificial
  Synthetic oligonucleotide
ggtaacagccatcgactacccaagcgcagcgagatgcgagcgcgccaagcagaca

SEQ ID NO: 492172 - DNA, 55 bp, Artificial
  Synthetic oligonucleotide
ggtaccaatctaccacgtcagctaagctttcttcgagagggcgatgctgtccgcc

SEQ ID NO: 492173 - DNA, 54 bp, Artificial
  Synthetic oligonucleotide
ggtactctgttgccaatcgtgcgaccctaaacaaaccggttcacccaatcgacc

SEQ ID NO: 492174 - DNA, 51 bp, Artificial
  Synthetic oligonucleotide
ggtaggctgacccctgtttaacagtgacgccccccctgtttaacagtgacg

SEQ ID NO: 492175 - DNA, 51 bp, Artificial
  Synthetic oligonucleotide
ggtagtaaatcatcactggtccaaatcggttcactgactgcgccgacgact

SEQ ID NO: 492176 - DNA, 59 bp, Artificial
  Synthetic oligonucleotide
ggtatccatacaagcgtggagtaaagcttagttttagtgcagatagtactacagaacta

SEQ ID NO: 492177 - DNA, 55 bp, Artificial
  Synthetic oligonucleotide
ggtcacatcggtgttgctcgtgcacgtttcccgaaaggcacacgtggttaccaaa

SEQ ID NO: 492178 - DNA, 55 bp, Artificial
  Synthetic oligonucleotide
ggtccaatgctgcttcgagtatcgcggcacgcgtctgttcgccttttcgcatagc

SEQ ID NO: 492179 - DNA, 55 bp, Artificial
  Synthetic oligonucleotide
ggtctattccacccgcgcctgagataaggtattccaccacacactctggctccag

SEQ ID NO: 492180 - DNA, 51 bp, Artificial
  Synthetic oligonucleotide
ggtctatttaacacccttagcacatttggagagactctagacgatgtgatc

SEQ ID NO: 492181 - DNA, 55 bp, Artificial
  Synthetic oligonucleotide
ggtctctgaacggttgaaatgatgtactgtacatgcccatttgtctaaaccaccc

SEQ ID NO: 492182 - DNA, 55 bp, Artificial
  Synthetic oligonucleotide
ggtgactcagccaacgcaccatatggcacctttgtcaagacgagtaaccaagaaa

SEQ ID NO: 492183 - DNA, 51 bp, Artificial
  Synthetic oligonucleotide
ggtgcacaggggtttaaagggggcgtagcctcctttacgtagagggtctaa

SEQ ID NO: 492184 - DNA, 55 bp, Artificial
  Synthetic oligonucleotide
ggtgcgaaggttcatcaatctctccagggttcgttagtggcgcgttaagcgcccc

SEQ ID NO: 492185 - DNA, 55 bp, Artificial
  Synthetic oligonucleotide
ggtgcgggcaaccaggtaaggttggcgagaccatagacacgtaactccgtcgtta

SEQ ID NO: 492186 - DNA, 55 bp, Artificial
  Synthetic oligonucleotide
ggtggtgctccagtcgtggcgacgcaaatgggagaatctgtcagcgtacttccgc

SEQ ID NO: 492187 - DNA, 55 bp, Artificial
  Synthetic oligonucleotide
ggtgttgctcgtgcacgtttcccgaaaggcacacgtggttaccaaatcgatacgc

SEQ ID NO: 492188 - DNA, 58 bp, Artificial
  Synthetic oligonucleotide
ggttatcttggtggcattatgggcgttccgctctttcagccgtcaaggtcaagcccta

SEQ ID NO: 492189 - DNA, 54 bp, Artificial
  Synthetic oligonucleotide
ggttatttatcgcgaacaacagctaagggatgaacaggagcgtgcccggtacag

SEQ ID NO: 492190 - DNA, 55 bp, Artificial
  Synthetic oligonucleotide
ggttcgggcaagactggcgtcggaattcaggtggatagaggcggaagtcccggct

SEQ ID NO: 492191 - DNA, 54 bp, Artificial
  Synthetic oligonucleotide
ggttcgttgggtagcttgacactgatgtaatccttgccttgtctagtaacttcg

SEQ ID NO: 492192 - DNA, 54 bp, Artificial
  Synthetic oligonucleotide
ggttctagggctcgggtgtagcgagtattcgttcccattgggtgcgtccccttg

SEQ ID NO: 492193 - DNA, 55 bp, Artificial
  Synthetic oligonucleotide
ggttgctcatgtaatagccaaccccgcggcgtgttgaaacgtattgtggacggct

SEQ ID NO: 492194 - DNA, 57 bp, Artificial
  Synthetic oligonucleotide
ggtttgatggatatcgtggggctcctgtctaacgagcccgtcaatcccacctcgtct

SEQ ID NO: 492195 - DNA, 52 bp, Artificial
  Synthetic oligonucleotide
gtaaaaacctgtggaactgtgcctatcgtgtcgggtcgtgtcgcacttggca

SEQ ID NO: 492196 - DNA, 55 bp, Artificial
  Synthetic oligonucleotide
gtaaatgcttaccaagtgagcagcctctaaatggaggagcgacctcaatcgcgcc

SEQ ID NO: 492197 - DNA, 53 bp, Artificial
  Synthetic oligonucleotide
gtaactggtcatttccccgttaccaggcatgggggcctcgccataccccgtta

SEQ ID NO: 492198 - DNA, 55 bp, Artificial
  Synthetic oligonucleotide
gtacgcattcctggctccacaatttccgtcgcctacgcactcgcttcgagcgacg

SEQ ID NO: 492199 - DNA, 56 bp, Artificial
  Synthetic oligonucleotide
gtacttttgggagtcagaagcgatggtttggcgtgggggtcacacggctcaaaggc

SEQ ID NO: 492200 - DNA, 51 bp, Artificial
  Synthetic oligonucleotide
gtatatgcccctaaaagctctcccttctaatcatgatttcggagccgcgtg

SEQ ID NO: 492201 - DNA, 55 bp, Artificial
  Synthetic oligonucleotide
gtatcacacacgagaatccaacttgtctcgtcttgctacgcaggtcgccggtact

SEQ ID NO: 492202 - DNA, 55 bp, Artificial
  Synthetic oligonucleotide
gtatttacgtagattgcgtctcgttgtgcaattaagcatagttctgcggctttaa

SEQ ID NO: 492203 - DNA, 59 bp, Artificial
  Synthetic oligonucleotide
gtcaacgtggttgtcttcgcaccatgtcatcagactgtcccgggcgaaaccgctgtccc

SEQ ID NO: 492204 - DNA, 60 bp, Artificial
  Synthetic oligonucleotide
gtcactcctgacttaatcgcggtgctagacagcgagacagggctcccgatcacaacggaa

SEQ ID NO: 492205 - DNA, 55 bp, Artificial
  Synthetic oligonucleotide
gtcaggttaaatgtcacacaccgctggatgatgcggggaggccgaccgtatgagc

SEQ ID NO: 492206 - DNA, 55 bp, Artificial
  Synthetic oligonucleotide
gtccaagcccctttaaggttgcacgctgaatctgtgagtttcgaatagggcttcc

SEQ ID NO: 492207 - DNA, 55 bp, Artificial
  Synthetic oligonucleotide
gtccaccacggtcaaggtacggaatttcgaaccatcagccagttggtccgccacg

SEQ ID NO: 492208 - DNA, 55 bp, Artificial
  Synthetic oligonucleotide
gtccagaagaacattgagaagttgtcttcaggactgcgcatcaaccggtcagggg

SEQ ID NO: 492209 - DNA, 60 bp, Artificial
  Synthetic oligonucleotide
gtccccttgagtgcgtagtcagcgatttagagcggttatgagcgtgcttgtgcggtgagc

SEQ ID NO: 492210 - DNA, 55 bp, Artificial
  Synthetic oligonucleotide
gtcgcccggctgcgatagcatcgtctgatcaacttgcatagacccgcaatcgacg

SEQ ID NO: 492211 - DNA, 55 bp, Artificial
  Synthetic oligonucleotide
gtcgcgctggaaaggaccagcgcggagtgaggcgattggaaacccttcgactgga

SEQ ID NO: 492212 - DNA, 55 bp, Artificial
  Synthetic oligonucleotide
gtcgttgtcatgtcggttgagcgtagtgaaaggaagccggcaaacgagccggacg

SEQ ID NO: 492213 - DNA, 53 bp, Artificial
  Synthetic oligonucleotide
gtcgtttcacgcataatctttccgggcctgatccagtccgtatcggttatctc

SEQ ID NO: 492214 - DNA, 55 bp, Artificial
  Synthetic oligonucleotide
gtctcataatgggcatgggcttaggggagagcgtggcgttaatcaccgatgggcg

SEQ ID NO: 492215 - DNA, 55 bp, Artificial
  Synthetic oligonucleotide
gtctgagttggggcaactgggacgtccgcgtctacgctgccgaagcatacgtgtc

SEQ ID NO: 492216 - DNA, 60 bp, Artificial
  Synthetic oligonucleotide
gtctgcgggtcggccagtcggaaccaatatttcagccgctgttctgtcagagtttgtgat

SEQ ID NO: 492217 - DNA, 56 bp, Artificial
  Synthetic oligonucleotide
gtctggtcggatagagcttgtgtcgttccaatgcctacggataaaatcctctttca

SEQ ID NO: 492218 - DNA, 55 bp, Artificial
  Synthetic oligonucleotide
gtctttgcgggttgtactccatggtaatgacgtctcggggcctgagtattctgcc

SEQ ID NO: 492219 - DNA, 60 bp, Artificial
  Synthetic oligonucleotide
gtgactccgcttgcaaccaggcttcacgtcggaactcttgcgagcctgacaacttgagac

SEQ ID NO: 492220 - DNA, 55 bp, Artificial
  Synthetic oligonucleotide
gtgaggtctgacccgggtccgcgaagtgcgggcctgtgcaagggccagtaatagg

SEQ ID NO: 492221 - DNA, 55 bp, Artificial
  Synthetic oligonucleotide
gtgatctgggcgcgaacgcccaacaccgaagctcgaaacagagacatgcggctcc

SEQ ID NO: 492222 - DNA, 55 bp, Artificial
  Synthetic oligonucleotide
gtgcccggagttagctcggctttggctgaacgactcacaggtggtcgatatgttg

SEQ ID NO: 492223 - DNA, 55 bp, Artificial
  Synthetic oligonucleotide
gtgcctcaaccggtgtaccgatgtgaccgccccaatcttcagctcgctcagccga

SEQ ID NO: 492224 - DNA, 60 bp, Artificial
  Synthetic oligonucleotide
gtgcgaaccgcacggaggacgtgagcaatgacatgtggacaacgttgaactgcgtacagg

SEQ ID NO: 492225 - DNA, 55 bp, Artificial
  Synthetic oligonucleotide
gtgctccctcgttcttcgccagacgcataatcatgaacttagacgccgccaggac

SEQ ID NO: 492226 - DNA, 55 bp, Artificial
  Synthetic oligonucleotide
gtgctgactatgttccccgcgtggtgggtttttagtgcttttactggctgccgtt

SEQ ID NO: 492227 - DNA, 53 bp, Artificial
  Synthetic oligonucleotide
gtgggttaaccagtccggacaactcaagttacggggctatctcgggattccga

SEQ ID NO: 492228 - DNA, 54 bp, Artificial
  Synthetic oligonucleotide
gtggtggaaacgaaatacggtttgttgggactgttgacgcgcgagccgaactac

SEQ ID NO: 492229 - DNA, 56 bp, Artificial
  Synthetic oligonucleotide
gtggttgggggcgactgtccgaagtaaagcttgtagattatgccccggcagatgtc

SEQ ID NO: 492230 - DNA, 55 bp, Artificial
  Synthetic oligonucleotide
gtgtgccacagagtcattctaaggcgatttcaaaaccaaacgatggacaacgatc

SEQ ID NO: 492231 - DNA, 55 bp, Artificial
  Synthetic oligonucleotide
gtgttggttgtgcgagaggtcttccaaagatagccccggccttccgaccggggca

SEQ ID NO: 492232 - DNA, 56 bp, Artificial
  Synthetic oligonucleotide
gttaaaggagctagcctggggaattcgcaagtgctgccacgggactattttaacca

SEQ ID NO: 492233 - DNA, 54 bp, Artificial
  Synthetic oligonucleotide
gttagctaacgaacttgctaggcttaaaagcaatcttaacaatgaggggatgtt

SEQ ID NO: 492234 - DNA, 55 bp, Artificial
  Synthetic oligonucleotide
gttagtacatcttatgctcgtctggaaggatggtgtgagtatataagcccgagtt

SEQ ID NO: 492235 - DNA, 57 bp, Artificial
  Synthetic oligonucleotide
gttcaggctactgcaggtgacgctactaaattggctggtgaagtggctaaggctgat

SEQ ID NO: 492236 - DNA, 55 bp, Artificial
  Synthetic oligonucleotide
gttgatattgttgccgtcacctgattcgtagtcacaagcaaggtatgagcctggg

SEQ ID NO: 492237 - DNA, 55 bp, Artificial
  Synthetic oligonucleotide
gttggggcgtgatatgcgcatggcataagagaacgtgagcatccgtgtctcccct

SEQ ID NO: 492238 - DNA, 52 bp, Artificial
  Synthetic oligonucleotide
gttggtgaacgccatcgaaaaacgaaacgaggctgggttagcgcgtcttaca

SEQ ID NO: 492239 - DNA, 51 bp, Artificial
  Synthetic oligonucleotide
gttggtgatgaactatatctaagagacgcaaatggtagcttaataccaggt

SEQ ID NO: 492240 - DNA, 54 bp, Artificial
  Synthetic oligonucleotide
gtttacactccttcgaacttaatccttgtaccatgttgcaattaaaaccgagta

SEQ ID NO: 492241 - DNA, 54 bp, Artificial
  Synthetic oligonucleotide
gtttccacgctttagggcggtaacgtgcgactgggtggaaaactgcgacatacg

SEQ ID NO: 492242 - DNA, 55 bp, Artificial
  Synthetic oligonucleotide
gtttgacaaccaatccgggtgctgacgatctggttactaaagggcaggccgagcc

SEQ ID NO: 492243 - DNA, 50 bp, Artificial
  Synthetic oligonucleotide
gtttgacgttagcaatatagctgaactcagaaaccttacggacggtagcc

SEQ ID NO: 492244 - DNA, 55 bp, Artificial
  Synthetic oligonucleotide
gttttgtgggtcggggtcgctgttggacaaacgagcggagcggagtgcgtcagtt

SEQ ID NO: 492245 - DNA, 55 bp, Artificial
  Synthetic oligonucleotide
taaaacagggacaagcggtcatcctgtgtcgccttggggtactccagctaagggc

SEQ ID NO: 492246 - DNA, 53 bp, Artificial
  Synthetic oligonucleotide
taactacgtgttctactgtttgtcggttttagttaaccagcaggttgtcttaa

SEQ ID NO: 492247 - DNA, 55 bp, Artificial
  Synthetic oligonucleotide
taagtagtactacacctatctcctcatagtctgaagatacaataatcccacccgc

SEQ ID NO: 492248 - DNA, 55 bp, Artificial
  Synthetic oligonucleotide
taagttcggtagccggataggcccctacctcgttcagtgctctaccgcctgtact

SEQ ID NO: 492249 - DNA, 50 bp, Artificial
  Synthetic oligonucleotide
taatcaagataaatcggaactgaacgcataatgaatagcaaatgggtgct

SEQ ID NO: 492250 - DNA, 60 bp, Artificial
  Synthetic oligonucleotide
taatcgagcaaacaacgcgctcttgtatttgcggcggcagatcaaggaagggcatcgtga

SEQ ID NO: 492251 - DNA, 54 bp, Artificial
  Synthetic oligonucleotide
taatcggtggacgttttgcaaagagtgcgggttggtttaccgtcatcgcttcgg

SEQ ID NO: 492252 - DNA, 59 bp, Artificial
  Synthetic oligonucleotide
taattccaccttgaattgaaagtcccccgtctcaggccgcatatcaggcactaccggca

SEQ ID NO: 492253 - DNA, 52 bp, Artificial
  Synthetic oligonucleotide
taccgtgggcgcttgtaccagccagctaaaccgtcattgcgagcaagccata

SEQ ID NO: 492254 - DNA, 55 bp, Artificial
  Synthetic oligonucleotide
tacgaaagcagatcggtctgggtcacacgagactccttgacgaagtgtcgggacg

SEQ ID NO: 492255 - DNA, 55 bp, Artificial
  Synthetic oligonucleotide
tacggcccgcccaagcggcctgatgaacaaacggagcgttttcagtgattcaacc

SEQ ID NO: 492256 - DNA, 55 bp, Artificial
  Synthetic oligonucleotide
tacggtcgggcgccactctgacaatatcggccacccgaacctgtggacacagacg

SEQ ID NO: 492257 - DNA, 55 bp, Artificial
  Synthetic oligonucleotide
tactcgcctagcttacgcactccatcaggtcgccctaaaggactccctcaggtcg

SEQ ID NO: 492258 - DNA, 54 bp, Artificial
  Synthetic oligonucleotide
tactgctggttacgggcaaggttcaccgctggatacggagcattatctgatgag

SEQ ID NO: 492259 - DNA, 55 bp, Artificial
  Synthetic oligonucleotide
tagaggcataaacttcactcgcttgcatgcccgcataataactcccgctcgccat

SEQ ID NO: 492260 - DNA, 54 bp, Artificial
  Synthetic oligonucleotide
tagatacagggtttgtagctctgctcgtgagcttcacaggtttgagaggttagt

SEQ ID NO: 492261 - DNA, 55 bp, Artificial
  Synthetic oligonucleotide
tagatgagctcataaagtcctcccttttgcatttccccaccggttaaaggcttaa

SEQ ID NO: 492262 - DNA, 50 bp, Artificial
  Synthetic oligonucleotide
tagtcgcaaagccggaatctgtagtcgcaatgccgtaatttgtagtcgat

SEQ ID NO: 492263 - DNA, 58 bp, Artificial
  Synthetic oligonucleotide
tagtgggcatgagtaatacctacgcgcggctgggctagggcttaacgcgcttttgccg

SEQ ID NO: 492264 - DNA, 56 bp, Artificial
  Synthetic oligonucleotide
tagtgtatatactactacaactctagtaagtataccgtaaaaatgtttagcaataa

SEQ ID NO: 492265 - DNA, 55 bp, Artificial
  Synthetic oligonucleotide
tataagattacgcttgatgaaatgagagttctactcctaactatcgggcagatta

SEQ ID NO: 492266 - DNA, 53 bp, Artificial
  Synthetic oligonucleotide
tatataggttaggggacgaaaacggtgctagacttccagtcccagtagacttt

SEQ ID NO: 492267 - DNA, 55 bp, Artificial
  Synthetic oligonucleotide
tatgcatgcatctccgagtgcgcaccgctctcccgcagaccggcgtatgacgttc

SEQ ID NO: 492268 - DNA, 50 bp, Artificial
  Synthetic oligonucleotide
tatgcgtatagggttttagcagatggaaggttgtttttagtagataggtt

SEQ ID NO: 492269 - DNA, 50 bp, Artificial
  Synthetic oligonucleotide
tatgcgttccttctactagtaaattatgagggagcgaccacaatttcgat

SEQ ID NO: 492270 - DNA, 55 bp, Artificial
  Synthetic oligonucleotide
tattcggagcagactattgtgcttaacgccgttcgtcgtatcagcgtcgctgggg

SEQ ID NO: 492271 - DNA, 60 bp, Artificial
  Synthetic oligonucleotide
tattgctcccatgatgactaatcctatgatgaaagttaggggcattagtaaggatttctt

SEQ ID NO: 492272 - DNA, 53 bp, Artificial
  Synthetic oligonucleotide
tattttcttgaccccgcctatctgatccactttctctaataagcttattacta

SEQ ID NO: 492273 - DNA, 55 bp, Artificial
  Synthetic oligonucleotide
tcaagttgcatgtttcgcccagtgcagcgcgggttactcgttcactaaacgcctc

SEQ ID NO: 492274 - DNA, 51 bp, Artificial
  Synthetic oligonucleotide
tcacacccgccatggcgcacttttcatacaattctcactgatgccatatga

SEQ ID NO: 492275 - DNA, 51 bp, Artificial
  Synthetic oligonucleotide
tcacaccgatgtttccagatcacagcgtacccgtttcagcgcggtcagtaa

SEQ ID NO: 492276 - DNA, 55 bp, Artificial
  Synthetic oligonucleotide
tcagacagtgcatgtgggatcaagtctgagtcagtacagtttaacccctattatc

SEQ ID NO: 492277 - DNA, 60 bp, Artificial
  Synthetic oligonucleotide
tcagacagtgtcaggtgagctacagcccgcttacgctcatggggttttatgccgccagta

SEQ ID NO: 492278 - DNA, 55 bp, Artificial
  Synthetic oligonucleotide
tcagatctctgacgcatgatatctcgcagcagtacgggcgggagatggctgcacg

SEQ ID NO: 492279 - DNA, 56 bp, Artificial
  Synthetic oligonucleotide
tcagcgcgttttagcggtgcgcgcaatgcgacgttatggtaaatccatatgggggg

SEQ ID NO: 492280 - DNA, 51 bp, Artificial
  Synthetic oligonucleotide
tcatgctctattgtgccctcgtttggggtgcaattggggtcctctttagct

SEQ ID NO: 492281 - DNA, 55 bp, Artificial
  Synthetic oligonucleotide
tcatttggtggtgtatgggcgttttatacgattaaaccaattacagaccgcccta

SEQ ID NO: 492282 - DNA, 60 bp, Artificial
  Synthetic oligonucleotide
tccaggtcaaagccgcggttcatacgcttcggctctgcttgcgcgtaatggggaacacca

SEQ ID NO: 492283 - DNA, 55 bp, Artificial
  Synthetic oligonucleotide
tccgcgctcgtgactcgccccatttgtcgcttgaatacggtactggtagcgtctc

SEQ ID NO: 492284 - DNA, 56 bp, Artificial
  Synthetic oligonucleotide
tccggctctgtcatacccgatgaccgtaccggattaatccacgattacacccgtaa

SEQ ID NO: 492285 - DNA, 52 bp, Artificial
  Synthetic oligonucleotide
tcgaaaaaggacggacgaagggcgtgattcgtctatcgtgtgccggcaggtg

SEQ ID NO: 492286 - DNA, 55 bp, Artificial
  Synthetic oligonucleotide
tcgcatgctatggatgtcaggtcgcatgcagttcggcgcacgaagtaccagtcgg

SEQ ID NO: 492287 - DNA, 56 bp, Artificial
  Synthetic oligonucleotide
tcgcgggacgccttacgaaatctttaacgtgtcgctgacccagacgctacaccgta

SEQ ID NO: 492288 - DNA, 55 bp, Artificial
  Synthetic oligonucleotide
tcggaatcatccgccccgtccgacttgtccgacaggtcagcctcgtccgagaact

SEQ ID NO: 492289 - DNA, 59 bp, Artificial
  Synthetic oligonucleotide
tcgggtgtgtgcatcctgttcgtccggtgaggccatcccccgtgtgtcctcacgcggag

SEQ ID NO: 492290 - DNA, 54 bp, Artificial
  Synthetic oligonucleotide
tcgggttttctccgcaaaccaatatcagcgtgcgcggcatgaatggagatgcca

SEQ ID NO: 492291 - DNA, 50 bp, Artificial
  Synthetic oligonucleotide
tcggttatcgttccctacgacgaaactcagatggtcgagctttggaggta

SEQ ID NO: 492292 - DNA, 50 bp, Artificial
  Synthetic oligonucleotide
tcgtaaggcgtgtgtgagaagttcgtgtctttcgctctgtcttttttcga

SEQ ID NO: 492293 - DNA, 60 bp, Artificial
  Synthetic oligonucleotide
tcgtctgagtgccctgtacggccatcctgcggcctctgatggggtgatcccggctacaga

SEQ ID NO: 492294 - DNA, 51 bp, Artificial
  Synthetic oligonucleotide
tcgtgtggcgtgaggaaggagttgcctagcgcagcactcaggcgtacgaat

SEQ ID NO: 492295 - DNA, 50 bp, Artificial
  Synthetic oligonucleotide
tcgttagtctttccaatatcgctttagatgaagcgtacttatcccagtta

SEQ ID NO: 492296 - DNA, 50 bp, Artificial
  Synthetic oligonucleotide
tcgttcaaaatggacggggcgtttataaatgggcagtcggtaacgttcca

SEQ ID NO: 492297 - DNA, 55 bp, Artificial
  Synthetic oligonucleotide
tctaaacgagtagggctttcgccgacaccttgccttgagcgtgtgcgtcggctgg

SEQ ID NO: 492298 - DNA, 55 bp, Artificial
  Synthetic oligonucleotide
tctacacaggagccattggtggattcaaacgacgtccaggcagacctcaagcacg

SEQ ID NO: 492299 - DNA, 60 bp, Artificial
  Synthetic oligonucleotide
tctagaagctccgggcgtgattgcagtagtcgggttgttgcgtcgatttcgctgacaacg

SEQ ID NO: 492300 - DNA, 55 bp, Artificial
  Synthetic oligonucleotide
tctataccataggcttcccaaatgccttcttgccaaccaatacggccatcgtctg

SEQ ID NO: 492301 - DNA, 52 bp, Artificial
  Synthetic oligonucleotide
tctatcgtatccttatagataattactacaacgagagggtgacccaactaca

SEQ ID NO: 492302 - DNA, 54 bp, Artificial
  Synthetic oligonucleotide
tctcagccagtgtattacctctaactaatgtagctctcattctactcattccac

SEQ ID NO: 492303 - DNA, 50 bp, Artificial
  Synthetic oligonucleotide
tctccgttcgtggatgtgtccgtttatcggcccctgtctctggtccaaaa

SEQ ID NO: 492304 - DNA, 55 bp, Artificial
  Synthetic oligonucleotide
tctgacgaggctaaccggcgccgagacacatatggcaacatttatgccagatctg

SEQ ID NO: 492305 - DNA, 60 bp, Artificial
  Synthetic oligonucleotide
tctgcccgtgcaaggcgaacttgccctcccaagatgattgcgcagtcgaaccgggattgc

SEQ ID NO: 492306 - DNA, 53 bp, Artificial
  Synthetic oligonucleotide
tctgttgaagcgatccacgcctcgaaatgcttgatgggctttccttcgtaggt

SEQ ID NO: 492307 - DNA, 53 bp, Artificial
  Synthetic oligonucleotide
tcttaggccgctcggccggttgcactcggttaggcaccggcgacccgatttcg

SEQ ID NO: 492308 - DNA, 53 bp, Artificial
  Synthetic oligonucleotide
tcttctgcccctttgggaagtttactcattaagtaatctattggggttccaac

SEQ ID NO: 492309 - DNA, 51 bp, Artificial
  Synthetic oligonucleotide
tctttcatggaagaaatcgagcaagacatgcaccgtctagagcaagacggc

SEQ ID NO: 492310 - DNA, 60 bp, Artificial
  Synthetic oligonucleotide
tctttgcgctggcgtcactttctgaggccgctatggacgcattactgcaactcaaaggga

SEQ ID NO: 492311 - DNA, 60 bp, Artificial
  Synthetic oligonucleotide
tgacagaggtcatggaacgctagctgttcgggctcgcattcctggttgtctatcgggagg

SEQ ID NO: 492312 - DNA, 52 bp, Artificial
  Synthetic oligonucleotide
tgacagataggtctttctgcgctacattcagaggatgtgtagtcatgagcac

SEQ ID NO: 492313 - DNA, 50 bp, Artificial
  Synthetic oligonucleotide
tgacagtgttaagagtatatgggatgcaagcggtgaccttatggaagctg

SEQ ID NO: 492314 - DNA, 55 bp, Artificial
  Synthetic oligonucleotide
tgactcggtaacgtgccagcacgctcgtacttacggaccgtgcgctcactcatac

SEQ ID NO: 492315 - DNA, 55 bp, Artificial
  Synthetic oligonucleotide
tgaggctcctccatatgttgagacccctaagaccattaattggagcgttgcccca

SEQ ID NO: 492316 - DNA, 52 bp, Artificial
  Synthetic oligonucleotide
tgagggttttgccccaagcgtgcgagcctcgtacgaattcgagtgaggcctc

SEQ ID NO: 492317 - DNA, 53 bp, Artificial
  Synthetic oligonucleotide
tgaggtacgtgaacgtgccgtacgtttggtgcaggagtgccaagcggattacg

SEQ ID NO: 492318 - DNA, 55 bp, Artificial
  Synthetic oligonucleotide
tgagtcagattagtcagcaaaattgggtgaccattgggatctctggtttgctcat

SEQ ID NO: 492319 - DNA, 55 bp, Artificial
  Synthetic oligonucleotide
tgatgagtgtcgggacaccggcgagtacgctctcgtggccagtgatggtcgatgc

SEQ ID NO: 492320 - DNA, 55 bp, Artificial
  Synthetic oligonucleotide
tgatgtgaggcaaaatctccgcctcaggtcgggcacaagtccggcctctcacgcg

SEQ ID NO: 492321 - DNA, 51 bp, Artificial
  Synthetic oligonucleotide
tgcacgctcgtgtgagaaagtcagctacatgagaccaactacccgccctga

SEQ ID NO: 492322 - DNA, 55 bp, Artificial
  Synthetic oligonucleotide
tgccgccccactgttcggagcatgaaacgggtctggcacaggatctgtatttcag

SEQ ID NO: 492323 - DNA, 55 bp, Artificial
  Synthetic oligonucleotide
tgccggttagcaacaacgtctaaaagacctgcgatcacgtgggtcccactccagc

SEQ ID NO: 492324 - DNA, 60 bp, Artificial
  Synthetic oligonucleotide
tgcgccactgggcaacggggacgtactggacaccacgacatctatgttggggacgctgtg

SEQ ID NO: 492325 - DNA, 60 bp, Artificial
  Synthetic oligonucleotide
tgcgttctctatctcgatgggcataaagaacgtcttagatgatctattgagttctaacta

SEQ ID NO: 492326 - DNA, 60 bp, Artificial
  Synthetic oligonucleotide
tgctcctctgtcgagtcgccggcatctcacgggcggcctattacaaatggttgaatcgca

SEQ ID NO: 492327 - DNA, 54 bp, Artificial
  Synthetic oligonucleotide
tgcttacggtggttaccgggtggtatacgaatccggcagaataacggaagccgc

SEQ ID NO: 492328 - DNA, 54 bp, Artificial
  Synthetic oligonucleotide
tggcacacaatgggctccttattacagtgttgctggcgtagctgatatgcctat

SEQ ID NO: 492329 - DNA, 60 bp, Artificial
  Synthetic oligonucleotide
tggccattcttctcagggagagcgctgttgcaaaatccacccccggcgcaatgggtaaca

SEQ ID NO: 492330 - DNA, 55 bp, Artificial
  Synthetic oligonucleotide
tggcgggcgtttatcgggttggacgttccaatagttcgcggaaccataccgctga

SEQ ID NO: 492331 - DNA, 54 bp, Artificial
  Synthetic oligonucleotide
tggctggacgataaggctccgattggtcgtggggtcgcccacaactgggtgaga

SEQ ID NO: 492332 - DNA, 60 bp, Artificial
  Synthetic oligonucleotide
tggtgcgtgagtgacggcgcgcgccttctagtgaagaaggggcgcatgctcttgacctgg

SEQ ID NO: 492333 - DNA, 54 bp, Artificial
  Synthetic oligonucleotide
tgtaaacgaggtgcagcaacctttacaggacggattaacaagcagtgacacccc

SEQ ID NO: 492334 - DNA, 55 bp, Artificial
  Synthetic oligonucleotide
tgtacggccatcctgcggcctctgatggggtgatcccggctacagacgcagaaag

SEQ ID NO: 492335 - DNA, 54 bp, Artificial
  Synthetic oligonucleotide
tgtagccgggaactcccggttataggccgaaggatggccgtacagggcactcag

SEQ ID NO: 492336 - DNA, 55 bp, Artificial
  Synthetic oligonucleotide
tgtcgcgattcaacgagagacagtttacgattcgggctgcaaacatgcgtcaggg

SEQ ID NO: 492337 - DNA, 55 bp, Artificial
  Synthetic oligonucleotide
tgtcgtgttgaaagggccgtatacgattgttacggcaccggatggatcgcaatat

SEQ ID NO: 492338 - DNA, 52 bp, Artificial
  Synthetic oligonucleotide
tgtctagcggggttttcgcatgtctacaggcccaaaccgtccacgaccctgc

SEQ ID NO: 492339 - DNA, 60 bp, Artificial
  Synthetic oligonucleotide
tgtctgagcacgtatgctttaagcgtttctatcgtggcaccaccggcgctacaggcaaag

SEQ ID NO: 492340 - DNA, 53 bp, Artificial
  Synthetic oligonucleotide
tgtgctattgatattctgttacgccgtgactacggttgcgtgcgaagttattc

SEQ ID NO: 492341 - DNA, 55 bp, Artificial
  Synthetic oligonucleotide
tgtggtgggcgacacctgttgcatggattactgcgacgatgctaggagtttggcg

SEQ ID NO: 492342 - DNA, 56 bp, Artificial
  Synthetic oligonucleotide
tgttcatgggtttaccgctcattggctagggatgggtattaccgcaggcccaaggg

SEQ ID NO: 492343 - DNA, 55 bp, Artificial
  Synthetic oligonucleotide
ttaacgctagaaaaacagaaaccctataaatagggcttctgattctattcattta

SEQ ID NO: 492344 - DNA, 56 bp, Artificial
  Synthetic oligonucleotide
ttacatcacctcaagcctttgattcattacgagataaaaatcgaaaggttagacag

SEQ ID NO: 492345 - DNA, 53 bp, Artificial
  Synthetic oligonucleotide
ttacttcggtaagagcggccgaagggtgagtacgcgtgggtacctacctgtac

SEQ ID NO: 492346 - DNA, 55 bp, Artificial
  Synthetic oligonucleotide
ttaggctgggatgaagactcgccgtacagtggaggcgcgagcgtcgctctcctca

SEQ ID NO: 492347 - DNA, 60 bp, Artificial
  Synthetic oligonucleotide
ttagttgcttagtgtgatcgatgcgcagttgaaatgcgggcgggaaccctcatgccaact

SEQ ID NO: 492348 - DNA, 55 bp, Artificial
  Synthetic oligonucleotide
ttatggcgttggactagcggcgctttagccaatgaagcgagcgcggctgttaatg

SEQ ID NO: 492349 - DNA, 54 bp, Artificial
  Synthetic oligonucleotide
ttcagccatccgaagaactcgctccagctggactccgattcactgtttccgatt

SEQ ID NO: 492350 - DNA, 60 bp, Artificial
  Synthetic oligonucleotide
ttcagcgctgtcgctggcaatccaggttgggagcgtgtgcagcccataggcgtgtaaaat

SEQ ID NO: 492351 - DNA, 55 bp, Artificial
  Synthetic oligonucleotide
ttcaggcccgaaggactgaatgacacgaaaggcttgcgttttcccacgattgccg

SEQ ID NO: 492352 - DNA, 55 bp, Artificial
  Synthetic oligonucleotide
ttcccgatttgctcgctgaatccgacgacttgggtatgcgcgattggcgccgacg

SEQ ID NO: 492353 - DNA, 55 bp, Artificial
  Synthetic oligonucleotide
ttcctgcgtcccggatacttccggcgactggctcagatccactccgtttgccgcc

SEQ ID NO: 492354 - DNA, 52 bp, Artificial
  Synthetic oligonucleotide
ttctacaacagcaagggcctagtttaggtcgtcctttagtagataccgtcta

SEQ ID NO: 492355 - DNA, 51 bp, Artificial
  Synthetic oligonucleotide
ttctcgtaagaaacgcctttgtcccccatagcattgattgggtcatcaact

SEQ ID NO: 492356 - DNA, 60 bp, Artificial
  Synthetic oligonucleotide
ttctgctccatagcggaaccgtgggctgataccatgacaagcactggtcgtctgatgctg

SEQ ID NO: 492357 - DNA, 54 bp, Artificial
  Synthetic oligonucleotide
ttgaagacccgatgtcgactttggaacgggctcttcaccgctaccgtactaaac

SEQ ID NO: 492358 - DNA, 50 bp, Artificial
  Synthetic oligonucleotide
ttgagcgaagtgagaacgacttacgatgcgaatgagtttcgtcggattat

SEQ ID NO: 492359 - DNA, 58 bp, Artificial
  Synthetic oligonucleotide
ttgcctgtgggccgagctagccactgcatatccctatcgagccaaatggtcagctcac

SEQ ID NO: 492360 - DNA, 60 bp, Artificial
  Synthetic oligonucleotide
ttgcgcccagaagcgcaccctcggtactatccacaccatcagaactagccccgcagggat

SEQ ID NO: 492361 - DNA, 54 bp, Artificial
  Synthetic oligonucleotide
ttggcagatatctggaccccgccctagcggtccggacttggaccccgaacttcc

SEQ ID NO: 492362 - DNA, 55 bp, Artificial
  Synthetic oligonucleotide
ttgggcacgcaggttcatacagtccacacggtgaatagccacaccacgacccttg

SEQ ID NO: 492363 - DNA, 55 bp, Artificial
  Synthetic oligonucleotide
ttgtcataccgggtcgccagaccccgccactgcttcaggtgagcgtactgacgct

SEQ ID NO: 492364 - DNA, 55 bp, Artificial
  Synthetic oligonucleotide
tttaggtgtacaggaatgagcgtgatgccgacgtaacgggcaggtgtgggagttc

SEQ ID NO: 492365 - DNA, 60 bp, Artificial
  Synthetic oligonucleotide
tttcagccccgtaaagcgcatctgacttccgcacagaatgcacttcagcgggtcaacctt

SEQ ID NO: 492366 - DNA, 55 bp, Artificial
  Synthetic oligonucleotide
tttcgcgaaccacccacagcgaggctactcccatgcaactcacgcttggaccggt

SEQ ID NO: 492367 - DNA, 52 bp, Artificial
  Synthetic oligonucleotide
tttgagtcgtgcgatgatgctatcgagtgggggttggttgagtgtgaacttc

SEQ ID NO: 492368 - DNA, 54 bp, Artificial
  Synthetic oligonucleotide
tttggggaactggaattattcttaatcaccgagaaacacaattaaccggatata

SEQ ID NO: 492369 - DNA, 50 bp, Artificial
  Synthetic oligonucleotide
ttttaccgcggttgactcgcatttagggcacgatgggttcatttcatttc

SEQ ID NO: 492370 - DNA, 50 bp, Artificial
  Synthetic oligonucleotide
ttttcccacgcctaagccgctcgtctgcccacttatttaacgctatggct

SEQ ID NO: 492371 - DNA, 52 bp, Artificial
  Synthetic oligonucleotide
ttttgatatactaagtcagtcgctacgccttttcgcgtgataccgcgcccaa

SEQ ID NO: 492372 - DNA, 55 bp, Artificial
  Synthetic oligonucleotide
ttttgcgggacgtctttcggatcctgcgcgtaggctgcggacacagcgagagctg

SEQ ID NO: 492373 - DNA, 51 bp, Artificial
  Synthetic oligonucleotide
ttttgggtggaacaacaaggcattttagggatagagcaaagcgaaggccat

SEQ ID NO: 492374 - DNA, 55 bp, Artificial
  Synthetic oligonucleotide
aaatgtacaatcccatggaaccacgcgctggataacacgacataatcatgcaagg

SEQ ID NO: 492375 - DNA, 57 bp, Artificial
  Synthetic oligonucleotide
aagacctcgcttccattggaaacacacctcatccatcatccgggaccccaccgagag

SEQ ID NO: 492376 - DNA, 60 bp, Artificial
  Synthetic oligonucleotide
aagcgtatctaagcggtgtgatactgaatccaccacgactgcgtctctacaagtatcagt

SEQ ID NO: 492377 - DNA, 55 bp, Artificial
  Synthetic oligonucleotide
aatcgtaatgtgtattgtccacggcgacatctggatgtgagggagcagcgtcctg

SEQ ID NO: 492378 - DNA, 59 bp, Artificial
  Synthetic oligonucleotide
acaccaaattcccccgtcttggtgcagagggctacaatcacgcgcatcgcccagttaga

SEQ ID NO: 492379 - DNA, 56 bp, Artificial
  Synthetic oligonucleotide
acctagtgtaacccattgcgttgaactaatggaaagctatagtactaactctataa

SEQ ID NO: 492380 - DNA, 53 bp, Artificial
  Synthetic oligonucleotide
acgggaactgtcgtgcgcagtagaatgacgaatgacgccacggaacttctctt

SEQ ID NO: 492381 - DNA, 55 bp, Artificial
  Synthetic oligonucleotide
agagtatcgcacgggcagttctaacaggtgcctatcggtgcccaaaggttggcac

SEQ ID NO: 492382 - DNA, 58 bp, Artificial
  Synthetic oligonucleotide
aggccagctagcagcctagcacagtattatcgttccccacgacttcccctccctacca

SEQ ID NO: 492383 - DNA, 55 bp, Artificial
  Synthetic oligonucleotide
agggcgaattgttagttgtatagagcagggcacatgatatctagaccgcccttcc

SEQ ID NO: 492384 - DNA, 54 bp, Artificial
  Synthetic oligonucleotide
atatgtcgcttggaaaccctcagatgagccctcgtgccgacgcacttctcccgt

SEQ ID NO: 492385 - DNA, 55 bp, Artificial
  Synthetic oligonucleotide
atccgctgcgagagtccattcggcctgtgtgggaagggaagcccgggtgaacgga

SEQ ID NO: 492386 - DNA, 55 bp, Artificial
  Synthetic oligonucleotide
caccgggcgcactgaggccctagtgaggctgaagccgagtcatgggtcttgggga

SEQ ID NO: 492387 - DNA, 60 bp, Artificial
  Synthetic oligonucleotide
caggcgatagacgagattgatatcgaaagccagatctgtactacaccggatgatttcaag

SEQ ID NO: 492388 - DNA, 55 bp, Artificial
  Synthetic oligonucleotide
ccaagcacccgtcacagacgacacgtcatttgcaacaggggagctaccttcccct

SEQ ID NO: 492389 - DNA, 55 bp, Artificial
  Synthetic oligonucleotide
ccaccgtcttgaagctcacttgaatgtagtgtagcttgcactccgcgaggagtag

SEQ ID NO: 492390 - DNA, 55 bp, Artificial
  Synthetic oligonucleotide
ccaggtaccagctcgagtgtatgggttaacgcatcttcacaagtctaaaggaacc

SEQ ID NO: 492391 - DNA, 56 bp, Artificial
  Synthetic oligonucleotide
cccaactggatggttacgtctccgtatcccctgacggctaatcgggagtctcctgc

SEQ ID NO: 492392 - DNA, 50 bp, Artificial
  Synthetic oligonucleotide
ccccaagattgataccagcctgtcgaagacgccatctccggaaaagaata

SEQ ID NO: 492393 - DNA, 55 bp, Artificial
  Synthetic oligonucleotide
ccccgtcaaagagatcaaatcccagcgcccaaccgtcaccatgttatcccacgtc

SEQ ID NO: 492394 - DNA, 55 bp, Artificial
  Synthetic oligonucleotide
cccgaattcccacgtgcgtttagtgcgtcatttgcccgtctcaaggagtaccgga

SEQ ID NO: 492395 - DNA, 55 bp, Artificial
  Synthetic oligonucleotide
cccgtaaagtccacgtatgccagccgagcatttatggtcagcgtagccttctcgt

SEQ ID NO: 492396 - DNA, 55 bp, Artificial
  Synthetic oligonucleotide
ccctatcaagactggaagagtaccgtaaccaagtcctcgaaatgcgagagaacgc

SEQ ID NO: 492397 - DNA, 55 bp, Artificial
  Synthetic oligonucleotide
ccgacaggcaccgagaaatgccgatgtctcgcgttgcttaatggcaggggagcct

SEQ ID NO: 492398 - DNA, 54 bp, Artificial
  Synthetic oligonucleotide
ccgcaacaccttctccgcaacaaaccgcccgaacagacacccgtatcaacgccc

SEQ ID NO: 492399 - DNA, 55 bp, Artificial
  Synthetic oligonucleotide
ccgcgcgtggcattagtgacgaaacccctttgacattatggtcaactaaagcgtc

SEQ ID NO: 492400 - DNA, 53 bp, Artificial
  Synthetic oligonucleotide
ccgcttgtagtatttctatatcgccactataggacggggcagcccggaatagg

SEQ ID NO: 492401 - DNA, 55 bp, Artificial
  Synthetic oligonucleotide
ccggatatccgtcccagacccaagacatcatcgtactagaatccgacagaaggta

SEQ ID NO: 492402 - DNA, 58 bp, Artificial
  Synthetic oligonucleotide
cctaccgtattcgagtctctcggcacattctctgttgactaggcttcccccgacgcta

SEQ ID NO: 492403 - DNA, 55 bp, Artificial
  Synthetic oligonucleotide
cctccgggcttgatatatcccaactctccgacagcgagaggtccgctctcgagac

SEQ ID NO: 492404 - DNA, 55 bp, Artificial
  Synthetic oligonucleotide
cctgccacctctcctatctggaatacccgttgctatacgtgctctggtaagggcc

SEQ ID NO: 492405 - DNA, 58 bp, Artificial
  Synthetic oligonucleotide
cctttcatcgctccgttatggaaggcctagaggccacggttccctggcaagcagtcgc

SEQ ID NO: 492406 - DNA, 55 bp, Artificial
  Synthetic oligonucleotide
cgagtacacactggaagtacacctcgtaatacaaaatttctcgggatgcgatacc

SEQ ID NO: 492407 - DNA, 55 bp, Artificial
  Synthetic oligonucleotide
cgatagtgttccggatcgattggacttggcgggacggttgggtgctgagccgtgg

SEQ ID NO: 492408 - DNA, 59 bp, Artificial
  Synthetic oligonucleotide
cgatcaggacaatgctaggccttgtggctatgggtctaatggagaaacccccgctcctc

SEQ ID NO: 492409 - DNA, 55 bp, Artificial
  Synthetic oligonucleotide
cgcacgtcgtacaggtgcatggtaccgttctaccttgccgatgctgttatgggct

SEQ ID NO: 492410 - DNA, 55 bp, Artificial
  Synthetic oligonucleotide
cgcctgaggcgacgatttacttacccactacacgggatagccggctacaccagcg

SEQ ID NO: 492411 - DNA, 55 bp, Artificial
  Synthetic oligonucleotide
cgcggagtacaagctacactacattcaagtgagcttcaagacggtggtgtacagc

SEQ ID NO: 492412 - DNA, 55 bp, Artificial
  Synthetic oligonucleotide
cgcgtgcggcatggtttgcaaaggagtcggacaggtggccttcactctcgctgac

SEQ ID NO: 492413 - DNA, 55 bp, Artificial
  Synthetic oligonucleotide
cggattcaatttacgcggattcggtgcctatcttgtagcagttgcgccaaacttc

SEQ ID NO: 492414 - DNA, 55 bp, Artificial
  Synthetic oligonucleotide
cggtagtcgaaggtatctccctgagtgaggctcgcaagggtcccataggagaggg

SEQ ID NO: 492415 - DNA, 55 bp, Artificial
  Synthetic oligonucleotide
cgtcagggtctatataccaccatggccagtgaccgttcagatgtcaagactaaat

SEQ ID NO: 492416 - DNA, 55 bp, Artificial
  Synthetic oligonucleotide
ctaaaggcggttatgatccaattcagctcatcgaactggtctagaaacagcgtac

SEQ ID NO: 492417 - DNA, 55 bp, Artificial
  Synthetic oligonucleotide
ctagtattgggtcggattgaaggctgtggtcgccgttccaggtttaggcggcagg

SEQ ID NO: 492418 - DNA, 55 bp, Artificial
  Synthetic oligonucleotide
ctccgtgtggtgtagcctagtagcggagacaagctccgaaggggatgcgtcatcc

SEQ ID NO: 492419 - DNA, 55 bp, Artificial
  Synthetic oligonucleotide
ctcctccgtgacgttagagccaacggctttcccctcttcagcggggtattggctc

SEQ ID NO: 492420 - DNA, 55 bp, Artificial
  Synthetic oligonucleotide
ctcgtagttatattcaggcgtcagctgagcccaacacgactcagcgatgctggca

SEQ ID NO: 492421 - DNA, 55 bp, Artificial
  Synthetic oligonucleotide
ctgtcgttgcagattatacctcctttgaaaggtcattctcgagtgtgtaatccga

SEQ ID NO: 492422 - DNA, 55 bp, Artificial
  Synthetic oligonucleotide
cttcctcaggtagatttctcgtcggagtgctgccatggttcgatcaggactcatg

SEQ ID NO: 492423 - DNA, 55 bp, Artificial
  Synthetic oligonucleotide
gaacctcggctgcgtgtagcataaatggacactacgcaagctccaatctacgcgc

SEQ ID NO: 492424 - DNA, 55 bp, Artificial
  Synthetic oligonucleotide
gacacccgggtaattcgagcatagcggcgtattcacggctataaacacaatgccc

SEQ ID NO: 492425 - DNA, 54 bp, Artificial
  Synthetic oligonucleotide
gagccctgtctagggccctttctaagccctattaaagaccctctgcccctccga

SEQ ID NO: 492426 - DNA, 55 bp, Artificial
  Synthetic oligonucleotide
gagcggacttgatcgcgaagaagttcagtcgttcattttcgtctatcatgtaatc

SEQ ID NO: 492427 - DNA, 55 bp, Artificial
  Synthetic oligonucleotide
gaggttccgagcacccgaactattgttccagcctaagctccgtggtcttgagctg

SEQ ID NO: 492428 - DNA, 55 bp, Artificial
  Synthetic oligonucleotide
gagtcagggtaacttgctcactggttacgacgcagcccagtgtacgccaccacgg

SEQ ID NO: 492429 - DNA, 55 bp, Artificial
  Synthetic oligonucleotide
gatacgaatcgtacggtggtccggactttcttcatggcaaggggatgcgttccgg

SEQ ID NO: 492430 - DNA, 59 bp, Artificial
  Synthetic oligonucleotide
gatgcctcctcaatggatcccactctccggccggcgagtcaatcctcgataaccggtgt

SEQ ID NO: 492431 - DNA, 55 bp, Artificial
  Synthetic oligonucleotide
gattgaagttcctgcgagtctcggtatcgcccacatccgaggacaccacagccgc

SEQ ID NO: 492432 - DNA, 55 bp, Artificial
  Synthetic oligonucleotide
gcacgagtccaccaatcactgtcttgatacgcatttagctacgccacactgtacg

SEQ ID NO: 492433 - DNA, 55 bp, Artificial
  Synthetic oligonucleotide
gcaggagaggcaccgacgatatgactggtactgctgcctcatagcgggactggac

SEQ ID NO: 492434 - DNA, 55 bp, Artificial
  Synthetic oligonucleotide
gccagacgaaaccgggaagacctctccacattgttagagctgagagacatcgtgg

SEQ ID NO: 492435 - DNA, 55 bp, Artificial
  Synthetic oligonucleotide
gccgtgctttgcttgcccatcgcactgatgcgtgcgtcattcagcagttgggatt

SEQ ID NO: 492436 - DNA, 55 bp, Artificial
  Synthetic oligonucleotide
gcgaccgatccgactgtacccgaccatgatccctataacctaccttgtcgcaccc

SEQ ID NO: 492437 - DNA, 55 bp, Artificial
  Synthetic oligonucleotide
gcgctgggtcgaagggagtgactggcgtattgaaggggccgacgagtcaggaaag

SEQ ID NO: 492438 - DNA, 54 bp, Artificial
  Synthetic oligonucleotide
gcggggtaggtaggcatgctatcgatctgttaagcaacctcggtttggtctgcc

SEQ ID NO: 492439 - DNA, 58 bp, Artificial
  Synthetic oligonucleotide
gcgtacgcgctcataaagagcaacatttcttagcgtcacgtaggccttttttcgtaga

SEQ ID NO: 492440 - DNA, 55 bp, Artificial
  Synthetic oligonucleotide
gctatagtgagaaacgacggttcgctgtccgattacgttagctctacagcgcgag

SEQ ID NO: 492441 - DNA, 55 bp, Artificial
  Synthetic oligonucleotide
gctgccaccctagtcctaatttccgcccagggcgcgttcttgaagaggaacctcg

SEQ ID NO: 492442 - DNA, 55 bp, Artificial
  Synthetic oligonucleotide
ggacgcgtcatcctttcgcagtcctaacgcagataggttcgcgcctccagcctcc

SEQ ID NO: 492443 - DNA, 55 bp, Artificial
  Synthetic oligonucleotide
ggagcgccgttcggccatgtttgtgcctgacgtccactctaaggcagggctgttc

SEQ ID NO: 492444 - DNA, 55 bp, Artificial
  Synthetic oligonucleotide
ggatccactggctatacgcgttcaggcaacaacgccgccagagtaaagattgcgg

SEQ ID NO: 492445 - DNA, 55 bp, Artificial
  Synthetic oligonucleotide
ggcacagcaactgactcgtcagtcgacacggttctctgtcagcaacaatgcggaa

SEQ ID NO: 492446 - DNA, 55 bp, Artificial
  Synthetic oligonucleotide
ggcattctcgttgagttagggtggggtcccgagtttcagccttagcgctggtcgc

SEQ ID NO: 492447 - DNA, 55 bp, Artificial
  Synthetic oligonucleotide
ggcgctcacgcaaccctcaagacccatgagaggatctgtcaccagccgacaccac

SEQ ID NO: 492448 - DNA, 55 bp, Artificial
  Synthetic oligonucleotide
ggctgtctcgtacatcaggacgctgctccctcacatccagatgtcgccgtggaaa

SEQ ID NO: 492449 - DNA, 55 bp, Artificial
  Synthetic oligonucleotide
gggaacatcaggagaggtaatgtcagaggggcaagtatcagagggtgagtggatg

SEQ ID NO: 492450 - DNA, 55 bp, Artificial
  Synthetic oligonucleotide
gggaccgcatttctactccccgggcggttgcgttcagccggctatggtcaaagct

SEQ ID NO: 492451 - DNA, 55 bp, Artificial
  Synthetic oligonucleotide
gggagacaatcagcggggagcatgggattgaccagagcgggaggtatgttgggac

SEQ ID NO: 492452 - DNA, 55 bp, Artificial
  Synthetic oligonucleotide
gggcggcaatgagtatagtctggaacggcgtcaatgttacgcaaggagctcagtg

SEQ ID NO: 492453 - DNA, 55 bp, Artificial
  Synthetic oligonucleotide
ggggaaggtagctcccctgttgcaaatgacgtgtcgtctgtgacgggtgcttgga

SEQ ID NO: 492454 - DNA, 55 bp, Artificial
  Synthetic oligonucleotide
ggggatggatgtcgaacatgtggacctatcctgcggagatcctaccactccatgt

SEQ ID NO: 492455 - DNA, 55 bp, Artificial
  Synthetic oligonucleotide
ggggccatcatattgccaaggcggacagggatccacgggcactcagtcgaagcat

SEQ ID NO: 492456 - DNA, 55 bp, Artificial
  Synthetic oligonucleotide
ggggttatctcttcgttaggcgggaggaaatgctcggacagtcggcatttggccc

SEQ ID NO: 492457 - DNA, 55 bp, Artificial
  Synthetic oligonucleotide
ggtatgctcaccccataagactccttcacttgcatatgcggagtataagaaatgg

SEQ ID NO: 492458 - DNA, 55 bp, Artificial
  Synthetic oligonucleotide
ggtatgtgtgtctccgctgcctcgtatgtgtggctactgaccaagatacagtatc

SEQ ID NO: 492459 - DNA, 55 bp, Artificial
  Synthetic oligonucleotide
gtatcctccacagctcctcgccagacttcccgaatctctgcgggtctgcacagtc

SEQ ID NO: 492460 - DNA, 55 bp, Artificial
  Synthetic oligonucleotide
gtatcgttgcagtgccagctattggtgcggaccccgggaggacatggctcgatga

SEQ ID NO: 492461 - DNA, 55 bp, Artificial
  Synthetic oligonucleotide
gtcacgttcaaggtctgctagcaccttcaagatgggttgaaatggctcggtcgcc

SEQ ID NO: 492462 - DNA, 55 bp, Artificial
  Synthetic oligonucleotide
gtccggggatgtagtataagagttctaggcctgcctttgaggtagagtaacctgc

SEQ ID NO: 492463 - DNA, 55 bp, Artificial
  Synthetic oligonucleotide
gtcgatcctgattaggcgttcctcttgccgccagccgatctctcatcccacgtcg

SEQ ID NO: 492464 - DNA, 55 bp, Artificial
  Synthetic oligonucleotide
gtggaaacatacttagcatgtagagacaaaccttggtgcgcggcttcaggcgggc

SEQ ID NO: 492465 - DNA, 54 bp, Artificial
  Synthetic oligonucleotide
gttaggaggggatgcagacttaggttaggtctgtcgggtgtttcggagaatggg

SEQ ID NO: 492466 - DNA, 60 bp, Artificial
  Synthetic oligonucleotide
gttcccgctattcattctgccaggtggctgttttgcacgcatcacgcgataagcccccga

SEQ ID NO: 492467 - DNA, 55 bp, Artificial
  Synthetic oligonucleotide
tacccaaggcggccgagacttctacgtccgaatccaaggttgtgtcagaagcccg

SEQ ID NO: 492468 - DNA, 55 bp, Artificial
  Synthetic oligonucleotide
tcaacactcgaccggccgactataacaagaacgctgaaggcaggcccatgtccgc

SEQ ID NO: 492469 - DNA, 55 bp, Artificial
  Synthetic oligonucleotide
tcaggcatgttagctaccggtgtgtccggcacgactgccacctgcgaagctgtcg

SEQ ID NO: 492470 - DNA, 55 bp, Artificial
  Synthetic oligonucleotide
tcgaaccagctctcgttgcacaaacagagactagggcgcgaagtatcctgaccgg

SEQ ID NO: 492471 - DNA, 60 bp, Artificial
  Synthetic oligonucleotide
tgtgtctcgcaggataggctctgcgacaacaactgtgtctcgcaggataggctctgcgtc

SEQ ID NO: 492472 - DNA, 55 bp, Artificial
  Synthetic oligonucleotide
ttaacttccgtgcctcaaccaatatctcgcatcagtggtcacgttatgtcctgcc

SEQ ID NO: 492473 - DNA, 54 bp, Artificial
  Synthetic oligonucleotide
aaaaccctggcattgagttgcacctggaatagtgatgaatgggccgcgggcggc

SEQ ID NO: 492474 - DNA, 55 bp, Artificial
  Synthetic oligonucleotide
aacagaaaagcgggagggcctgcacgtactccagtgggagacgcgccagcagtgt

SEQ ID NO: 492475 - DNA, 56 bp, Artificial
  Synthetic oligonucleotide
aactttatcctcatacagcacaaacgtgcttaatgctaccaaactttaatctgtaa

SEQ ID NO: 492476 - DNA, 55 bp, Artificial
  Synthetic oligonucleotide
aagcgacctcgtaatgtgcaggggcaacatacacacagtgaggccccgtacctgc

SEQ ID NO: 492477 - DNA, 55 bp, Artificial
  Synthetic oligonucleotide
aagtcgccaattccgcattgggacatcgaacacatatggatggttgctgcggagg

SEQ ID NO: 492478 - DNA, 55 bp, Artificial
  Synthetic oligonucleotide
aagtttgccgcgaggctgcaaccggaggattctcttgcggagcgaacccgggaca

SEQ ID NO: 492479 - DNA, 53 bp, Artificial
  Synthetic oligonucleotide
aattcccgccttatcccacgtttggttcgacccgcaaattagagtggacagcc

SEQ ID NO: 492480 - DNA, 50 bp, Artificial
  Synthetic oligonucleotide
acaagagatcgcgtactttggaccgaaaaaagctgtgaggtaactacatt

SEQ ID NO: 492481 - DNA, 55 bp, Artificial
  Synthetic oligonucleotide
acgctctcgctctgtctgtcgcgctgcatgtggcaaaacagccgctgctagagca

SEQ ID NO: 492482 - DNA, 54 bp, Artificial
  Synthetic oligonucleotide
acggcgtacggcttcagaacccagtcgctgtggctctccatacagccagggcac

SEQ ID NO: 492483 - DNA, 55 bp, Artificial
  Synthetic oligonucleotide
acgtagtcggcggtcgccaaccgagccatctgcactgagctgcgggtagcccgta

SEQ ID NO: 492484 - DNA, 55 bp, Artificial
  Synthetic oligonucleotide
actgacgcatcagtgctcacgacaggggcggtactagctggcaatgcgaccgcga

SEQ ID NO: 492485 - DNA, 55 bp, Artificial
  Synthetic oligonucleotide
agacacgcacgcagccaaggggcggaaccaccttcacatacgggtacgcgtgcga

SEQ ID NO: 492486 - DNA, 58 bp, Artificial
  Synthetic oligonucleotide
agggtaccgggcagatgtcataaactatacctcctcatcaaagttagcagtgtcttac

SEQ ID NO: 492487 - DNA, 60 bp, Artificial
  Synthetic oligonucleotide
agtctatgttcggttatacagctaatgtctttactcgaaatacatcagattctccatact

SEQ ID NO: 492488 - DNA, 54 bp, Artificial
  Synthetic oligonucleotide
atttcgaaagcgaaagcaatagtctattaaaaactgacgtttgtgcacgtaatt

SEQ ID NO: 492489 - DNA, 55 bp, Artificial
  Synthetic oligonucleotide
caagccgctgtccccatcgcctcagacgttagaagatcccaccgggagtgtcaag

SEQ ID NO: 492490 - DNA, 55 bp, Artificial
  Synthetic oligonucleotide
caccgcccctcctggaggtatgcacaagccggaccacattatctgggctgacgtg

SEQ ID NO: 492491 - DNA, 55 bp, Artificial
  Synthetic oligonucleotide
cacgcggtgcagtctccccgtgacactgctgttatcctcgcactgtaccacagcg

SEQ ID NO: 492492 - DNA, 55 bp, Artificial
  Synthetic oligonucleotide
cacgtctacagcaggcggtgatctgtgcatgttgtctatttcgcgggaaactggg

SEQ ID NO: 492493 - DNA, 55 bp, Artificial
  Synthetic oligonucleotide
cagccacgccactacgtctttcctaataagcgcggactggcgctatcagcgcatg

SEQ ID NO: 492494 - DNA, 55 bp, Artificial
  Synthetic oligonucleotide
cagcgaaccagcgttgtgtgctacctgcgcactggactaatgtcctctgtgtgcg

SEQ ID NO: 492495 - DNA, 57 bp, Artificial
  Synthetic oligonucleotide
cattccacttgcttataactgtatggacgtaacctccaggcaaagaataatgaccgg

SEQ ID NO: 492496 - DNA, 55 bp, Artificial
  Synthetic oligonucleotide
ccagaggacctcgatttggccgcagcgcagcagaggtgtaggcgggccgtgtttt

SEQ ID NO: 492497 - DNA, 54 bp, Artificial
  Synthetic oligonucleotide
cccaccttgaggagttcatgagtaccgcccgcctagttggactttctgtccggg

SEQ ID NO: 492498 - DNA, 55 bp, Artificial
  Synthetic oligonucleotide
cccactgctccatgagggcgggtatggcgtcgagtacgagctgcaacttatgcgt

SEQ ID NO: 492499 - DNA, 55 bp, Artificial
  Synthetic oligonucleotide
cccagtgagcaccaccgtatcgagctctggcgactcttccaggtgaatcaaggtg

SEQ ID NO: 492500 - DNA, 55 bp, Artificial
  Synthetic oligonucleotide
cccatcttggttgtcacgctgcgaggggagagcgagttgtcgcgggtgtacaacg

SEQ ID NO: 492501 - DNA, 55 bp, Artificial
  Synthetic oligonucleotide
cccgccatatggaaggtacctgactggggtatctagggtggtgcgtataccaccg

SEQ ID NO: 492502 - DNA, 55 bp, Artificial
  Synthetic oligonucleotide
cccgtctctctgcagcactttgccgtggtccaacttcagcgaaagtggggcttcg

SEQ ID NO: 492503 - DNA, 55 bp, Artificial
  Synthetic oligonucleotide
cccgtgaggctagagcgcagacgagggatacggtgcgttgcgtacatgatccaag

SEQ ID NO: 492504 - DNA, 55 bp, Artificial
  Synthetic oligonucleotide
ccctcggcagctctcctactctaccacggtcgccacgactcagctggcagatgta

SEQ ID NO: 492505 - DNA, 55 bp, Artificial
  Synthetic oligonucleotide
ccgcagaggtggcgacagtgttgaacacggagagtgcttgggttgcaaacgtcgc

SEQ ID NO: 492506 - DNA, 52 bp, Artificial
  Synthetic oligonucleotide
ccgctaaaccacgtgtaaaacgcctttgtgtccgtcggaacgggatcacgaa

SEQ ID NO: 492507 - DNA, 55 bp, Artificial
  Synthetic oligonucleotide
ccgtttgtctgagcaatcgcaacgactcgcttcctgtctcctatcgcgtgcctcc

SEQ ID NO: 492508 - DNA, 55 bp, Artificial
  Synthetic oligonucleotide
cgactcgaagctgacgttcatcctgaaggactcgcttggcgggaactcgaagacg

SEQ ID NO: 492509 - DNA, 55 bp, Artificial
  Synthetic oligonucleotide
cgagcgccgcttggcacaaacggcttggcgttgaggtttagagttgttccgcgcg

SEQ ID NO: 492510 - DNA, 55 bp, Artificial
  Synthetic oligonucleotide
cgcacccacgtatacgcacacgcgcaaacggtgtccctgctacccttgcattgcc

SEQ ID NO: 492511 - DNA, 55 bp, Artificial
  Synthetic oligonucleotide
cgccactcatcgccattccggcagtgtttgtgctcatccccggaacccgcatctg

SEQ ID NO: 492512 - DNA, 55 bp, Artificial
  Synthetic oligonucleotide
cgccaggtcaacccacagtacgatgcgctgcgacaggagatcacggatgtgcaca

SEQ ID NO: 492513 - DNA, 55 bp, Artificial
  Synthetic oligonucleotide
cgccgctaccacatcaagaccgcttttgtggacggatgcctcgagcgcttgaagg

SEQ ID NO: 492514 - DNA, 55 bp, Artificial
  Synthetic oligonucleotide
cgcgacggctcagaggtaccagcctccttcccattacttgaagtgtctcgtccac

SEQ ID NO: 492515 - DNA, 55 bp, Artificial
  Synthetic oligonucleotide
cgcgcactcgctcgcgtctcagtgcattcgtttgtggctgtgtttccgcaggtag

SEQ ID NO: 492516 - DNA, 55 bp, Artificial
  Synthetic oligonucleotide
cgctgcacagaagactccgcgtaggaggcggcttggcccatttcaagtgtgggtg

SEQ ID NO: 492517 - DNA, 55 bp, Artificial
  Synthetic oligonucleotide
cgctgggcccagtgatgagaaccttttccgatggaccgcctccatcataggtccg

SEQ ID NO: 492518 - DNA, 55 bp, Artificial
  Synthetic oligonucleotide
cggcagtccagccgcggtattccgggtacacgttgctactctccgccacagtctt

SEQ ID NO: 492519 - DNA, 55 bp, Artificial
  Synthetic oligonucleotide
cggctgcaagtcaaagcgcagcttcgtcggcagtttccgtgctaagatccgttgg

SEQ ID NO: 492520 - DNA, 55 bp, Artificial
  Synthetic oligonucleotide
cgtacggtagaggctctttccaagctggcacacgagaaggacgccatagaggagg

SEQ ID NO: 492521 - DNA, 51 bp, Artificial
  Synthetic oligonucleotide
ctgttttacacccgcctcggttaacaaatggtccgatggggaaactacacc

SEQ ID NO: 492522 - DNA, 55 bp, Artificial
  Synthetic oligonucleotide
cttgcattgcgcctcgagtgataagagtgccatcctgtgtgaggtgtgcgccttc

SEQ ID NO: 492523 - DNA, 55 bp, Artificial
  Synthetic oligonucleotide
gagggcgcactgccctcttgcctacacactccttttcgtggccggaggactcgtt

SEQ ID NO: 492524 - DNA, 55 bp, Artificial
  Synthetic oligonucleotide
gaggtactcgggatgggatccaatcagtacacgagcgcggtagatgtctggagcc

SEQ ID NO: 492525 - DNA, 55 bp, Artificial
  Synthetic oligonucleotide
gcaaccccagagacagaccgacaggaccaactcaagattttcgtcgcctgcactc

SEQ ID NO: 492526 - DNA, 52 bp, Artificial
  Synthetic oligonucleotide
gcacagcatgccgcacacgtgttggtcgcaatcgcgcttcttttcgcagtgg

SEQ ID NO: 492527 - DNA, 55 bp, Artificial
  Synthetic oligonucleotide
gcaccgaacctccctagacatggacgccaaaagggtgcctccaatacggcagcct

SEQ ID NO: 492528 - DNA, 55 bp, Artificial
  Synthetic oligonucleotide
gcagagctgcagcccggcttggtagaagtacggtgacttgcgatgaaggctgggg

SEQ ID NO: 492529 - DNA, 55 bp, Artificial
  Synthetic oligonucleotide
gcagcggtacaacaagctcgtctacccgctccagtttccaccagcaacgcaccgg

SEQ ID NO: 492530 - DNA, 55 bp, Artificial
  Synthetic oligonucleotide
gcaggatagcacgccagcattgttgcactgcatactcagcgagtcatcgagggcc

SEQ ID NO: 492531 - DNA, 55 bp, Artificial
  Synthetic oligonucleotide
gcagtcctacgacggagctaacatcggcatagttacacgccgcaacgaaatgggg

SEQ ID NO: 492532 - DNA, 55 bp, Artificial
  Synthetic oligonucleotide
gcagtcggttggtaaggaaacgtcgtttagcgagccactgccctcgccagaggcc

SEQ ID NO: 492533 - DNA, 55 bp, Artificial
  Synthetic oligonucleotide
gcatacgctgcagtgcttgcagcctaactgtacaaatcgccgacagaagacacac

SEQ ID NO: 492534 - DNA, 55 bp, Artificial
  Synthetic oligonucleotide
gcatcacctacggaacgccccgtctgctgttaaaggagggaccgcgtctactggc

SEQ ID NO: 492535 - DNA, 55 bp, Artificial
  Synthetic oligonucleotide
gccgctactccgcactactgctccgtgtgccatgcatactgcttccgtagagctc

SEQ ID NO: 492536 - DNA, 55 bp, Artificial
  Synthetic oligonucleotide
gcctaaacgatattattaccgtacaagccgttagcaagacatgacagggagttgg

SEQ ID NO: 492537 - DNA, 55 bp, Artificial
  Synthetic oligonucleotide
gcgatgtgcgcactggtggactcgaacggtgctgagcttgccatcagtcgtgcct

SEQ ID NO: 492538 - DNA, 55 bp, Artificial
  Synthetic oligonucleotide
gcgcatagacataggggaatacgaataaatagtcggcgcgtgggcccgtgtgcac

SEQ ID NO: 492539 - DNA, 55 bp, Artificial
  Synthetic oligonucleotide
gcgcatgcagacaaagtctgtataggcagacgcaccgatgccgctcgtctggggt

SEQ ID NO: 492540 - DNA, 55 bp, Artificial
  Synthetic oligonucleotide
gcggcggttcgcaatggactgagcatggtaaatgttgccgagcttcgacgcactg

SEQ ID NO: 492541 - DNA, 55 bp, Artificial
  Synthetic oligonucleotide
gctgattggtctgagcatccgtctgcagctcgagcgatcgctacccgagtacacg

SEQ ID NO: 492542 - DNA, 55 bp, Artificial
  Synthetic oligonucleotide
gctggattgggtagcacgtccaggtggtggcgaagtgtcgctcaatgtgcccctt

SEQ ID NO: 492543 - DNA, 55 bp, Artificial
  Synthetic oligonucleotide
ggagagtgtagagtgcaagcgccgtcggctcatctaccaatcgcgctaccgtggt

SEQ ID NO: 492544 - DNA, 55 bp, Artificial
  Synthetic oligonucleotide
ggagcaggcaaaccactacgctgcctccctctatggcactttcatggagtccgtc

SEQ ID NO: 492545 - DNA, 55 bp, Artificial
  Synthetic oligonucleotide
ggagcgcaccattcgagcaccgggctccctacgtgtgctgttactcctcctcgtt

SEQ ID NO: 492546 - DNA, 55 bp, Artificial
  Synthetic oligonucleotide
ggcaaaccactacgctgcctccctctatggcactttcatggagtccgtcacgcgt

SEQ ID NO: 492547 - DNA, 55 bp, Artificial
  Synthetic oligonucleotide
ggcaaatgacgtgtgccccgagaggatgactgaagctcctcggctatgcatgccg

SEQ ID NO: 492548 - DNA, 55 bp, Artificial
  Synthetic oligonucleotide
ggcagccgacaagagttgtgtccgcgtcactgatgccgataatgagcgagcgcac

SEQ ID NO: 492549 - DNA, 55 bp, Artificial
  Synthetic oligonucleotide
ggcggatggccaccccatgcgattgtagaatggcgagcttcgcgtcaagcttcct

SEQ ID NO: 492550 - DNA, 55 bp, Artificial
  Synthetic oligonucleotide
ggcggtacgcaattatgctaagtgggatgtgcacggagcgacacatgacgtcggc

SEQ ID NO: 492551 - DNA, 51 bp, Artificial
  Synthetic oligonucleotide
ggctgccacatcgccactcctcagaagaaacgcgtacggggcatcctcgcg

SEQ ID NO: 492552 - DNA, 52 bp, Artificial
  Synthetic oligonucleotide
ggcttctacctagctcggaggggacaacgtaagtttccgttccaccgtaggc

SEQ ID NO: 492553 - DNA, 55 bp, Artificial
  Synthetic oligonucleotide
gggatcgtatctccggaggctcacttttcgcggtacgcaagcaacagagggcttg

SEQ ID NO: 492554 - DNA, 59 bp, Artificial
  Synthetic oligonucleotide
gggcaagtcgaccccagtaacagaccccaatgtgcgtcccctggaggtgtacatgtgca

SEQ ID NO: 492555 - DNA, 55 bp, Artificial
  Synthetic oligonucleotide
gggcgcacaagcctattcgccttctcaagtccctcgccacacgcaccgtctctca

SEQ ID NO: 492556 - DNA, 55 bp, Artificial
  Synthetic oligonucleotide
ggggccacgtacttgctcattacagctgccgtgagaggaacgctaagcgaagcag

SEQ ID NO: 492557 - DNA, 55 bp, Artificial
  Synthetic oligonucleotide
ggggtgatccgtgagcgtgttgctgtgcatcgagtctacgtagagagacgtgggg

SEQ ID NO: 492558 - DNA, 55 bp, Artificial
  Synthetic oligonucleotide
ggtcctggaccgccttttcggagtcgtttgcgtatgtacagccggctccgttgac

SEQ ID NO: 492559 - DNA, 55 bp, Artificial
  Synthetic oligonucleotide
ggtgactccgcaacggacctctcctcgtttaaggtgttccagacgctcacgcctc

SEQ ID NO: 492560 - DNA, 55 bp, Artificial
  Synthetic oligonucleotide
gtcaccaggtatacaggcgcatgtggggtgatcaggaactcaccatcgccgtgtg

SEQ ID NO: 492561 - DNA, 53 bp, Artificial
  Synthetic oligonucleotide
gtcagtagtttttgggagtgataggggccggttttatgaatttaaacgctctg

SEQ ID NO: 492562 - DNA, 55 bp, Artificial
  Synthetic oligonucleotide
gtcggaagttgtactccgttctccgcacttcccagtcaagacatgagaccagccc

SEQ ID NO: 492563 - DNA, 55 bp, Artificial
  Synthetic oligonucleotide
gtcggtgtacacggcccagttacctccttcgcgggagtagtggtccatcggatac

SEQ ID NO: 492564 - DNA, 55 bp, Artificial
  Synthetic oligonucleotide
gtctgcgttggtggcacgagctgcgatcatgggtggcacagcgtcaatcgactcg

SEQ ID NO: 492565 - DNA, 55 bp, Artificial
  Synthetic oligonucleotide
gtgaggcgtgcctggaagttgtcgacgcaacacagcaggaggtcgatcggtgagt

SEQ ID NO: 492566 - DNA, 55 bp, Artificial
  Synthetic oligonucleotide
gtgcgcgttcaaggggtggacctagatgctcaagagccccgcatcctagactcca

SEQ ID NO: 492567 - DNA, 60 bp, Artificial
  Synthetic oligonucleotide
gtgtaggcaaatgagtaagagattacatcattcatgatgccaatgagtaccttaaacaag

SEQ ID NO: 492568 - DNA, 55 bp, Artificial
  Synthetic oligonucleotide
taaggctcgctgcaccgaagactccgcgtaggaggcggcttggcccattgcaagt

SEQ ID NO: 492569 - DNA, 55 bp, Artificial
  Synthetic oligonucleotide
tcgtgcgacgattcacgggaccagaacgtttcgttctcgttggagcagaacgagg

SEQ ID NO: 492570 - DNA, 57 bp, Artificial
  Synthetic oligonucleotide
tctactagcgcaggcaaattagtgttcggtggtccgtcaatgatactagctatggga

SEQ ID NO: 492571 - DNA, 55 bp, Artificial
  Synthetic oligonucleotide
tgacccacactggtaggggctccacccctgacactccctgcagtgctccacatag

SEQ ID NO: 492572 - DNA, 52 bp, Artificial
  Synthetic oligonucleotide
tgcaactcacgaaacaagtggcaaccagcactctctcgacaacagccctcta

SEQ ID NO: 492573 - DNA, 55 bp, Artificial
  Synthetic oligonucleotide
tgctagagatgtacagacacccagtgagcaccaccgtatcgagctctggcgactc

SEQ ID NO: 492574 - DNA, 55 bp, Artificial
  Synthetic oligonucleotide
tgctcttctcgactctctgctcacatcgcaagaggggacgcgcacgcctcaatgg

SEQ ID NO: 492575 - DNA, 55 bp, Artificial
  Synthetic oligonucleotide
tggagcgcatctgaagccaccgcgagacgcagtggtagtgatacacgtgcccgca

SEQ ID NO: 492576 - DNA, 53 bp, Artificial
  Synthetic oligonucleotide
tggtcatctgttagcaaattcatatgtgtggctgctttgtaacgacgttggcg

SEQ ID NO: 492577 - DNA, 55 bp, Artificial
  Synthetic oligonucleotide
tgtgctgaatgccagctacattccgccgcactgcatccccgttgtgtttccgatg

SEQ ID NO: 492578 - DNA, 55 bp, Artificial
  Synthetic oligonucleotide
tgtgggcttaacgtacctctacgggcacaagttccgcagccgagcatacattgag

SEQ ID NO: 492579 - DNA, 54 bp, Artificial
  Synthetic oligonucleotide
ttcaccccatcccctcgtgcgtttctccgccctcacgtcaccccgtacacacgc

SEQ ID NO: 492580 - DNA, 55 bp, Artificial
  Synthetic oligonucleotide
ttcacgccccaccacgtcccagaggcaaggcgcgtaggcacacacgtaacccgat

SEQ ID NO: 492581 - DNA, 48 bp, Artificial
  Synthetic oligonucleotide
aaaaaactcctcagggggggaggactaacctccccccggaccatacta

SEQ ID NO: 492582 - DNA, 53 bp, Artificial
  Synthetic oligonucleotide
aaaaacatggagcactcacaagtagcaatacagcagctaccaatgctgattgt

SEQ ID NO: 492583 - DNA, 53 bp, Artificial
  Synthetic oligonucleotide
aaaacccattgttagagtaggccccgagcagtggctgtttcccgaaaggaagc

SEQ ID NO: 492584 - DNA, 60 bp, Artificial
  Synthetic oligonucleotide
aaaagcgaaagtaagaccagagaagatctctcgacgcaggactcggcttgctgaagtgca

SEQ ID NO: 492585 - DNA, 54 bp, Artificial
  Synthetic oligonucleotide
aaaagtaagctcagaagtacacatcccactaggagatgctagattagtagtaag

SEQ ID NO: 492586 - DNA, 55 bp, Artificial
  Synthetic oligonucleotide
aaaagttgtgggagcaaacccgctcaaaggcaggactgttggtttcagatggagg

SEQ ID NO: 492587 - DNA, 54 bp, Artificial
  Synthetic oligonucleotide
aaacaccccgtgtagccgcctactattgcaaccgccgaaaattcgtggactatg

SEQ ID NO: 492588 - DNA, 59 bp, Artificial
  Synthetic oligonucleotide
aaaccccagtggggttctcgtatgatacccgctgctttgactctacagtcactgagagc

SEQ ID NO: 492589 - DNA, 55 bp, Artificial
  Synthetic oligonucleotide
aaaccctgttccgactactgcctctcccatatcgttaatcttctcgaggactggg

SEQ ID NO: 492590 - DNA, 56 bp, Artificial
  Synthetic oligonucleotide
aaacgagtccgtaagcatttcagagtaacgtaccgtagcaagcgctagtccgccgc

SEQ ID NO: 492591 - DNA, 52 bp, Artificial
  Synthetic oligonucleotide
aaacgccggttatttaggacgacattcgatgcctacctacggttagacgaaa

SEQ ID NO: 492592 - DNA, 52 bp, Artificial
  Synthetic oligonucleotide
aaactgggggtaggtgaaggacaataccccgggactaatccacagagggcaa

SEQ ID NO: 492593 - DNA, 54 bp, Artificial
  Synthetic oligonucleotide
aaagagagggatactccctagtcggaattgaccctttccgtctgctccaaaaca

SEQ ID NO: 492594 - DNA, 58 bp, Artificial
  Synthetic oligonucleotide
aaagctaggaacttgattgtcactgagagtggtgccccaccgaccgacttgcaaaaga

SEQ ID NO: 492595 - DNA, 60 bp, Artificial
  Synthetic oligonucleotide
aaaggagaagccatacatgggcaagtagactgtagtccaggaatatggcagctagattgt

SEQ ID NO: 492596 - DNA, 58 bp, Artificial
  Synthetic oligonucleotide
aaaggatagccatgtgtcagcgaggttgttgatggttcggtaagtcgttgtcgtttga

SEQ ID NO: 492597 - DNA, 57 bp, Artificial
  Synthetic oligonucleotide
aaaggatcaacagctcctggggatttggggttgctctggaaaactcatttgcaccac

SEQ ID NO: 492598 - DNA, 56 bp, Artificial
  Synthetic oligonucleotide
aaaggctctccagagtttgattggattcttgggtggacaattaagggattgggaca

SEQ ID NO: 492599 - DNA, 59 bp, Artificial
  Synthetic oligonucleotide
aaaggcttaggcatttcctatggcaggaagaagcggagacagcgacgaagcactcctct

SEQ ID NO: 492600 - DNA, 55 bp, Artificial
  Synthetic oligonucleotide
aaagtatatagtataacctatgctgacgatcctaattactttataggaattaaat

SEQ ID NO: 492601 - DNA, 52 bp, Artificial
  Synthetic oligonucleotide
aaagttgccggaccccaattatttcgctattactagtcccatctataacccc

SEQ ID NO: 492602 - DNA, 57 bp, Artificial
  Synthetic oligonucleotide
aaatacctatgggagtaggcctcagtccgtttctcttggctcagtttactagtgcca

SEQ ID NO: 492603 - DNA, 54 bp, Artificial
  Synthetic oligonucleotide
aaataggggccatacatggagttgggtccggcgtaagaaatagccatccagcgg

SEQ ID NO: 492604 - DNA, 60 bp, Artificial
  Synthetic oligonucleotide
aaatattgcaagccactagcgttgttacacttggcctctggacacgtgggattaattgca

SEQ ID NO: 492605 - DNA, 56 bp, Artificial
  Synthetic oligonucleotide
aaatgaactcacaacaacactcttgggttgtcctcgcatattcctgttgatgaccc

SEQ ID NO: 492606 - DNA, 57 bp, Artificial
  Synthetic oligonucleotide
aaatgccaggccagaagatgtgtccttccaagggcggggggtcttcgagctctcgga

SEQ ID NO: 492607 - DNA, 56 bp, Artificial
  Synthetic oligonucleotide
aaatgcccctatcttatcaacacttccggaaactactgttattagaggacgaagca

SEQ ID NO: 492608 - DNA, 57 bp, Artificial
  Synthetic oligonucleotide
aaatggcgagattaggaaaaggatacatgttcgaaagtaagagcatgaagttacgaa

SEQ ID NO: 492609 - DNA, 52 bp, Artificial
  Synthetic oligonucleotide
aaatgtgacaccctcttgtgtgatattggtgagtcctctccgaacccaacta

SEQ ID NO: 492610 - DNA, 50 bp, Artificial
  Synthetic oligonucleotide
aaatgtggacgtgtttagagcggcgatgtcggacccaatctatcggatac

SEQ ID NO: 492611 - DNA, 57 bp, Artificial
  Synthetic oligonucleotide
aaattcctatgggagtgggcctcagcccgtttctcctggctcagtttactagtgcca

SEQ ID NO: 492612 - DNA, 56 bp, Artificial
  Synthetic oligonucleotide
aaattctatgacgcacgacctccggatgatgttttgcaaggtttaccctttagcta

SEQ ID NO: 492613 - DNA, 59 bp, Artificial
  Synthetic oligonucleotide
aaattggcccaacgctgttcaagagccctccgaagaatttgttgagcgtgtgcgctatg

SEQ ID NO: 492614 - DNA, 52 bp, Artificial
  Synthetic oligonucleotide
aaattgtatggctctggtgatcgatatgtcaggatgggaactgaaagcatga

SEQ ID NO: 492615 - DNA, 55 bp, Artificial
  Synthetic oligonucleotide
aaatttgttgctacagcaatagctccggttcgtcaacgttttcctcagctatact

SEQ ID NO: 492616 - DNA, 58 bp, Artificial
  Synthetic oligonucleotide
aacacagaaactggagcaccccaactcaacccaattgatggaccattacctgaggata

SEQ ID NO: 492617 - DNA, 59 bp, Artificial
  Synthetic oligonucleotide
aacacgattgatcgtttactggttaacggatgtgactgagagaagcgctatctttcggc

SEQ ID NO: 492618 - DNA, 60 bp, Artificial
  Synthetic oligonucleotide
aacactacaggttccaaaagaaccattgcagacctctgtcgagccacaagaggcagcgcg

SEQ ID NO: 492619 - DNA, 55 bp, Artificial
  Synthetic oligonucleotide
aacagaagcacaagtttggacctgtctgcctgtgcaatcgtgcttacatacacga

SEQ ID NO: 492620 - DNA, 53 bp, Artificial
  Synthetic oligonucleotide
aacagaccaacaggattgacactgcccaccggtttagaacaggcaatgcgcaa

SEQ ID NO: 492621 - DNA, 60 bp, Artificial
  Synthetic oligonucleotide
aacagactccgagatgccattggacactgagggggcatacagcaacgaaagtgagtgggg

SEQ ID NO: 492622 - DNA, 50 bp, Artificial
  Synthetic oligonucleotide
aacatttggtcccgttcacttccgaaaccaagttaaaatacgccgccgag

SEQ ID NO: 492623 - DNA, 59 bp, Artificial
  Synthetic oligonucleotide
aaccaatcagaggacaggtggatgcctctctaggaacatggcagatggattgcacccac

SEQ ID NO: 492624 - DNA, 56 bp, Artificial
  Synthetic oligonucleotide
aaccacatgagaagggcataaaccccaactacctcctggcctggaaacaagtgcta

SEQ ID NO: 492625 - DNA, 55 bp, Artificial
  Synthetic oligonucleotide
aaccatgcacatgtcagaagtacccgtaattagtgccgacggggaggtgtacata

SEQ ID NO: 492626 - DNA, 49 bp, Artificial
  Synthetic oligonucleotide
aacccctccttggtaacaaggacccacggggccgaaagccacgtcctaa

SEQ ID NO: 492627 - DNA, 52 bp, Artificial
  Synthetic oligonucleotide
aacccctgagcgcactgattgtaaccttgtgttcagccgtggggatgagctg

SEQ ID NO: 492628 - DNA, 55 bp, Artificial
  Synthetic oligonucleotide
aaccgagtctacgacgtgcagtcccgcacacgcgggtggagcttccccatcccta

SEQ ID NO: 492629 - DNA, 56 bp, Artificial
  Synthetic oligonucleotide
aaccgggcccccctcgatggaagaaagatggctgacggtagcgtactgcgcgcacg

SEQ ID NO: 492630 - DNA, 58 bp, Artificial
  Synthetic oligonucleotide
aacctccggtatcaacgctggaaggtgacactaacgcagatacagcgaacgctcggcg

SEQ ID NO: 492631 - DNA, 55 bp, Artificial
  Synthetic oligonucleotide
aacgaatgtagcatccccgcgaataaccaagtagtgccatgtgaaccaatcataa

SEQ ID NO: 492632 - DNA, 58 bp, Artificial
  Synthetic oligonucleotide
aacgaattctcgcccaacagattgaggcaacgaccgaaaagctgaaccaattgcgctc

SEQ ID NO: 492633 - DNA, 50 bp, Artificial
  Synthetic oligonucleotide
aacggattatacgaaaggaggaacagtgtgccctcactcaggcgggactc

SEQ ID NO: 492634 - DNA, 59 bp, Artificial
  Synthetic oligonucleotide
aacggctacgcttgcgtggtcggagggaagttattcaggccgatgcatgtggaaggcaa

SEQ ID NO: 492635 - DNA, 52 bp, Artificial
  Synthetic oligonucleotide
aacgtccatgctcactgatccctcccatataacagcggaggcggctgcgagg

SEQ ID NO: 492636 - DNA, 60 bp, Artificial
  Synthetic oligonucleotide
aacgtctgctatagtgtcgaaacatcctgcgcgtgttgggctgccacctaccgctagcag

SEQ ID NO: 492637 - DNA, 51 bp, Artificial
  Synthetic oligonucleotide
aactagggtatatcacaaagctaaacacgtcaaagcttggtgcccacgacc

SEQ ID NO: 492638 - DNA, 60 bp, Artificial
  Synthetic oligonucleotide
aactcacggtctggggcattaagcagctccagacaagagtcctggctatagaaagatacc

SEQ ID NO: 492639 - DNA, 51 bp, Artificial
  Synthetic oligonucleotide
aactcatccggagactcaatggcacggccctcgagtctggtggagtcgcta

SEQ ID NO: 492640 - DNA, 50 bp, Artificial
  Synthetic oligonucleotide
aactccattcaggggttgacgtgttctacaaacccactgagcaagtggac

SEQ ID NO: 492641 - DNA, 53 bp, Artificial
  Synthetic oligonucleotide
aactcctacctgccgtccccactttgccgtgcccggtacagaaaagtttggca

SEQ ID NO: 492642 - DNA, 56 bp, Artificial
  Synthetic oligonucleotide
aactcctggccgcttgttttgctcgcagccggtctggagcaaacattctcgggact

SEQ ID NO: 492643 - DNA, 56 bp, Artificial
  Synthetic oligonucleotide
aactctaagagccgagcaagcctcacaggaggtaaaaaattggatgacagaaacct

SEQ ID NO: 492644 - DNA, 60 bp, Artificial
  Synthetic oligonucleotide
aactgagatcataaggatgatggagaatgccagacctgaagacgtgtctttccaggggcg

SEQ ID NO: 492645 - DNA, 51 bp, Artificial
  Synthetic oligonucleotide
aactgtgagtcctccggcccccgaatgcggctaacctaaaccccggagcct

SEQ ID NO: 492646 - DNA, 55 bp, Artificial
  Synthetic oligonucleotide
aactttagagcctatgtggatggattcgaaccgaacggctgcattgagggtaagc

SEQ ID NO: 492647 - DNA, 57 bp, Artificial
  Synthetic oligonucleotide
aacttttcagccgtgtttcagacctattaccagcatcaagtcgacggcggcaattgg

SEQ ID NO: 492648 - DNA, 52 bp, Artificial
  Synthetic oligonucleotide
aagaccccatgttgaagttcccattgggtcgaaaaccgtttggaaagtgcac

SEQ ID NO: 492649 - DNA, 52 bp, Artificial
  Synthetic oligonucleotide
aagaggcgtttttcgcagcctacccccattccgtcgacggtagatggcacaa

SEQ ID NO: 492650 - DNA, 51 bp, Artificial
  Synthetic oligonucleotide
aagagggtctattaccttacccgtgaccccacaacccccctcgcgagagcc

SEQ ID NO: 492651 - DNA, 59 bp, Artificial
  Synthetic oligonucleotide
aagataacgacactgactgggggtactgatcgacaacacccagcccgctctcacagggc

SEQ ID NO: 492652 - DNA, 51 bp, Artificial
  Synthetic oligonucleotide
aagcaaccgcagatcggtatccccgacgcacacccggtcgtctcgcagttg

SEQ ID NO: 492653 - DNA, 60 bp, Artificial
  Synthetic oligonucleotide
aagcactatgggcgcggcgtcaataacgctgacggtacaggccagacaattattgtctgg

SEQ ID NO: 492654 - DNA, 60 bp, Artificial
  Synthetic oligonucleotide
aagcagctccagacaagagtcctggctatagaaagatacctaaaggatcaacagctccta

SEQ ID NO: 492655 - DNA, 53 bp, Artificial
  Synthetic oligonucleotide
aagccgccttggtctgacgacttaacttatgctaacccgtccaatatgcctga

SEQ ID NO: 492656 - DNA, 60 bp, Artificial
  Synthetic oligonucleotide
aagcctatttattgacaaggtgcgaagagccgcgtgtgctcagtgtgcttcctccggccc

SEQ ID NO: 492657 - DNA, 54 bp, Artificial
  Synthetic oligonucleotide
aagcggatatctaaacatttggttacatttaaaggtcagccttataagtgggaa

SEQ ID NO: 492658 - DNA, 54 bp, Artificial
  Synthetic oligonucleotide
aagcggggttaccgcactaactccctgccaagtgaaactcgggacgagtgagta

SEQ ID NO: 492659 - DNA, 52 bp, Artificial
  Synthetic oligonucleotide
aagcgggtggaaaggcttacaatcatgctctcagtgaactaccggagaccct

SEQ ID NO: 492660 - DNA, 55 bp, Artificial
  Synthetic oligonucleotide
aagcgtctcaggttcaccggccaaaaggttccgcatctggccaggagacgagacc

SEQ ID NO: 492661 - DNA, 55 bp, Artificial
  Synthetic oligonucleotide
aagctatcgtcgaatcaactactgaagtaggcaactttcgcgtagttgattggac

SEQ ID NO: 492662 - DNA, 53 bp, Artificial
  Synthetic oligonucleotide
aagctgcgcgtaaccaacgtagcagtaacgacaaaccccgctaacccaaacgc

SEQ ID NO: 492663 - DNA, 50 bp, Artificial
  Synthetic oligonucleotide
aagctgtacgcgtggtatattggactagcggttagaggagacccctccca

SEQ ID NO: 492664 - DNA, 54 bp, Artificial
  Synthetic oligonucleotide
aagctgttttaatagctattggtcaatcaaaagaaattgaaaccactgccactg

SEQ ID NO: 492665 - DNA, 55 bp, Artificial
  Synthetic oligonucleotide
aagcttagtacctcctttgacggtatttgtctggtcgctcaggtgtttccccagc

SEQ ID NO: 492666 - DNA, 56 bp, Artificial
  Synthetic oligonucleotide
aaggacagaagcccttttagggccttaatgagctgtcctctgggtgaagctccgtc

SEQ ID NO: 492667 - DNA, 60 bp, Artificial
  Synthetic oligonucleotide
aaggagagaccaacaacttgctaagccctatgagcctgcatgggatggaggacccagaga

SEQ ID NO: 492668 - DNA, 54 bp, Artificial
  Synthetic oligonucleotide
aaggatgcccttcaggtaccccgaggtaacaagcgaaactcgggatctgagaag

SEQ ID NO: 492669 - DNA, 55 bp, Artificial
  Synthetic oligonucleotide
aaggcccgccgtatatgacgtataaccagccgcaagccggtagcgttaccctgcc

SEQ ID NO: 492670 - DNA, 58 bp, Artificial
  Synthetic oligonucleotide
aaggctgccgcactcccggttagatgcctgcccagtgtagggcagaccgagccgtacg

SEQ ID NO: 492671 - DNA, 50 bp, Artificial
  Synthetic oligonucleotide
aagggagttggtccgtaaaacgaggttcctcccagtggccggtggaacaa

SEQ ID NO: 492672 - DNA, 59 bp, Artificial
  Synthetic oligonucleotide
aagggttctacaactggcaccacggagcggtgcagtatagtggaggcagatttaccatc

SEQ ID NO: 492673 - DNA, 57 bp, Artificial
  Synthetic oligonucleotide
aaggtcatcgatacccttacgtgcggcttcgccgacctcatggggtacataccgctc

SEQ ID NO: 492674 - DNA, 58 bp, Artificial
  Synthetic oligonucleotide
aaggtgtgaagagccccgtgtgctaatagtgagtcctccggcccctgaatgcggctaa

SEQ ID NO: 492675 - DNA, 56 bp, Artificial
  Synthetic oligonucleotide
aaggttagggaaaggatacatgttcgagagtaagagcatgaagcttcggacacaaa

SEQ ID NO: 492676 - DNA, 60 bp, Artificial
  Synthetic oligonucleotide
aagtacctgtgttcgctacgtctcttgaagaggccaatgagttagctgagtggcaatacg

SEQ ID NO: 492677 - DNA, 59 bp, Artificial
  Synthetic oligonucleotide
aagtcgtccgcggtcggaacccagtctctaacggtgctcatacgtgcaagtctgcacaa

SEQ ID NO: 492678 - DNA, 59 bp, Artificial
  Synthetic oligonucleotide
aagtctggtcgtgattacatccccggccgccaacttcagttctatgctcagtgtcggcg

SEQ ID NO: 492679 - DNA, 59 bp, Artificial
  Synthetic oligonucleotide
aagtgtgcggagcgcctccttgtgtcatcggaggggtgggtaacaacaccttgcactgc

SEQ ID NO: 492680 - DNA, 50 bp, Artificial
  Synthetic oligonucleotide
aatacctcaaccataacacaagcctgtccaaaggtcacttttgacccaat

SEQ ID NO: 492681 - DNA, 55 bp, Artificial
  Synthetic oligonucleotide
aatacgattgggtgagaacaaggacgtaatagtcacaagagagccttatgttagc

SEQ ID NO: 492682 - DNA, 56 bp, Artificial
  Synthetic oligonucleotide
aataggagactgccccaagtatgtgaatgttaaatccctaaagcttgccaccggac

SEQ ID NO: 492683 - DNA, 60 bp, Artificial
  Synthetic oligonucleotide
aatatccggtgcttgtcaagattactctcgacgaaggtcagccagcgtatgcgcctggtc

SEQ ID NO: 492684 - DNA, 59 bp, Artificial
  Synthetic oligonucleotide
aatatctaggagaagatagagagtatgaactgtggaagattggagacggacggtgggga

SEQ ID NO: 492685 - DNA, 53 bp, Artificial
  Synthetic oligonucleotide
aatcagcgcctcgcacgcgatgcgtcgcagttggaccatttggccactgtcga

SEQ ID NO: 492686 - DNA, 60 bp, Artificial
  Synthetic oligonucleotide
aatccgtggcggttttgatctagcagtccgagatgacagcagaatggaccgccttgagca

SEQ ID NO: 492687 - DNA, 54 bp, Artificial
  Synthetic oligonucleotide
aatccgttctgtggcgaggggaccctttacactagaacctggtcaacatccggc

SEQ ID NO: 492688 - DNA, 55 bp, Artificial
  Synthetic oligonucleotide
aatcgcaacgacaaggtgctgtgagcaacaatgacaccaagggtactgttaagta

SEQ ID NO: 492689 - DNA, 60 bp, Artificial
  Synthetic oligonucleotide
aatctacaagtttacagagttgtaacagagtgcacatcctgtctgtgtgtaattcgactt

SEQ ID NO: 492690 - DNA, 60 bp, Artificial
  Synthetic oligonucleotide
aatctatagcaataacgcctcgatccaagagtcgtacactgtggatgactttgtatccta

SEQ ID NO: 492691 - DNA, 55 bp, Artificial
  Synthetic oligonucleotide
aatctctgtataaatgtacccgcttcttgcattgtattcagtcgctctgcggaga

SEQ ID NO: 492692 - DNA, 57 bp, Artificial
  Synthetic oligonucleotide
aatgaacttctgagcttcatacaatcgtgttataaaagtaatgttaacgtaggacat

SEQ ID NO: 492693 - DNA, 56 bp, Artificial
  Synthetic oligonucleotide
aatgacatcccagaagttggcggagaaccactacaccctaccccctgactccttgc

SEQ ID NO: 492694 - DNA, 57 bp, Artificial
  Synthetic oligonucleotide
aatgcattgtaagaggccaggaaataagtcagttttgccaataacacttaggtcagg

SEQ ID NO: 492695 - DNA, 58 bp, Artificial
  Synthetic oligonucleotide
aatgctgtagcgtactaccggggtcttgatgtgtccgtcataccggctagcggagacg

SEQ ID NO: 492696 - DNA, 55 bp, Artificial
  Synthetic oligonucleotide
aatggcgccgttatacggcgccgtaagctccggaggatcacactcgcccgggaac

SEQ ID NO: 492697 - DNA, 55 bp, Artificial
  Synthetic oligonucleotide
aatgggctacggctagcaggacatcaaggcttgccaactatgaacactcccggga

SEQ ID NO: 492698 - DNA, 53 bp, Artificial
  Synthetic oligonucleotide
aatggggcacaatgctccttgggttgttaatgatctatagtgctgcaggaaat

SEQ ID NO: 492699 - DNA, 58 bp, Artificial
  Synthetic oligonucleotide
aatgtcaagaacctctacgacaaggtccgactacagcttagggataatgcaaaggagc

SEQ ID NO: 492700 - DNA, 60 bp, Artificial
  Synthetic oligonucleotide
aatgtcatgggaatgatcggaatattacctgacatgactccgagcacagagatgtcacta

SEQ ID NO: 492701 - DNA, 51 bp, Artificial
  Synthetic oligonucleotide
aatgtgccttggaactctagttggagtaataaatccctgaatgatatatgg

SEQ ID NO: 492702 - DNA, 59 bp, Artificial
  Synthetic oligonucleotide
aatgttgcctcttatgggggtctactgccaccagggttgagacagacgataaggtgata

SEQ ID NO: 492703 - DNA, 59 bp, Artificial
  Synthetic oligonucleotide
aattaacgtggctactaggggcgatgctcaccgctagctgccacgttagtggctcctct

SEQ ID NO: 492704 - DNA, 53 bp, Artificial
  Synthetic oligonucleotide
aattcctatgtggatcgaattgatgtcattttacgcaaggacgttgtaatgcg

SEQ ID NO: 492705 - DNA, 59 bp, Artificial
  Synthetic oligonucleotide
aattctgaatactgcagttcctataggatcttgcgttagtaaatgccacaccgacaggg

SEQ ID NO: 492706 - DNA, 60 bp, Artificial
  Synthetic oligonucleotide
aattgagagattgttaccatatagctattggattggccatccagtgacaaacagagcaat

SEQ ID NO: 492707 - DNA, 55 bp, Artificial
  Synthetic oligonucleotide
aattggctcgagttattttagaggctaaacacacctcaaccccaccagaaatctg

SEQ ID NO: 492708 - DNA, 52 bp, Artificial
  Synthetic oligonucleotide
aatttctgcggtcggtgtgttagccccacactcggcccttgctgtacttgag

SEQ ID NO: 492709 - DNA, 54 bp, Artificial
  Synthetic oligonucleotide
acaaatcggtccgaacttggaatgagatcatcccctcgaaagggtgtttaagag

SEQ ID NO: 492710 - DNA, 51 bp, Artificial
  Synthetic oligonucleotide
acaacgtggtccacttttatcggatactaagttatatgctgtgatgaagca

SEQ ID NO: 492711 - DNA, 60 bp, Artificial
  Synthetic oligonucleotide
acaactactgcaggctagtgagtcggagtctcacagtaaggtcaagcacactccctggtg

SEQ ID NO: 492712 - DNA, 56 bp, Artificial
  Synthetic oligonucleotide
acaaggacccgaagagtgccgtgtggaggctactcgaccagcggaccaagctcaga

SEQ ID NO: 492713 - DNA, 58 bp, Artificial
  Synthetic oligonucleotide
acaatccagtgagtggcttgtcgtaacgagcaattctgtggcggaaccgactactttg

SEQ ID NO: 492714 - DNA, 54 bp, Artificial
  Synthetic oligonucleotide
acacacccagtggacccgtttccatcccccgctcaactactcaggtagtggttc

SEQ ID NO: 492715 - DNA, 52 bp, Artificial
  Synthetic oligonucleotide
acaccagtttatgcaacgaccttagataacaagttgcttggtgtacttagaa

SEQ ID NO: 492716 - DNA, 57 bp, Artificial
  Synthetic oligonucleotide
acaccctcagtcatgtttgccacttatgacccactcacgtcaggtacgggggttgct

SEQ ID NO: 492717 - DNA, 50 bp, Artificial
  Synthetic oligonucleotide
acaccctgactatgcatatgtcagaagtacccgtaatcactgctgatggg

SEQ ID NO: 492718 - DNA, 60 bp, Artificial
  Synthetic oligonucleotide
acacctgctaacccattgtgatttcacaccatggctggcatggcatgttgcagccaatgt

SEQ ID NO: 492719 - DNA, 56 bp, Artificial
  Synthetic oligonucleotide
acacctttagtgccggaacactggaacttaatcttcctagcctatcagtggaataa

SEQ ID NO: 492720 - DNA, 60 bp, Artificial
  Synthetic oligonucleotide
acactagcaaggagcatatgcgagaaacttgagcaatctggactcccagttggagggaac

SEQ ID NO: 492721 - DNA, 50 bp, Artificial
  Synthetic oligonucleotide
acactattcgatagctccgatggaactctgcctatgtcacatccgccggg

SEQ ID NO: 492722 - DNA, 55 bp, Artificial
  Synthetic oligonucleotide
acactcacatcttggttcatgccgctgacaacagactcacgccaggctgaccacg

SEQ ID NO: 492723 - DNA, 53 bp, Artificial
  Synthetic oligonucleotide
acagaaggctgtagacaaatactagggcagctacagccatcccttcaaacagg

SEQ ID NO: 492724 - DNA, 54 bp, Artificial
  Synthetic oligonucleotide
acagacccccggcgtaggtcgcgcaatttgggtaaggtcatcgataccctcacg

SEQ ID NO: 492725 - DNA, 56 bp, Artificial
  Synthetic oligonucleotide
acagatagttagtcggtataattactcacgtaagcacatttgtggaattgtatccg

SEQ ID NO: 492726 - DNA, 58 bp, Artificial
  Synthetic oligonucleotide
acagatataatcagtctatgggatgaaagcctaaagccatgtgtaaagttaacccctc

SEQ ID NO: 492727 - DNA, 60 bp, Artificial
  Synthetic oligonucleotide
acagatcactttacctgcgttgggtgaacgccgtgtgcggtgacgcataatccctcagat

SEQ ID NO: 492728 - DNA, 60 bp, Artificial
  Synthetic oligonucleotide
acagcccgtccgtccattctgtgcagagagtttggtgagcacgctagcggacataactca

SEQ ID NO: 492729 - DNA, 60 bp, Artificial
  Synthetic oligonucleotide
acagccgcttagcattccatcacgtggcccgagagttgcatccggagtactacaaggact

SEQ ID NO: 492730 - DNA, 55 bp, Artificial
  Synthetic oligonucleotide
acagctgcacaactcacacaatggctacatatgcccgtatgagacacccgagggg

SEQ ID NO: 492731 - DNA, 59 bp, Artificial
  Synthetic oligonucleotide
acaggaatcccctcaggacaattctgcttagaatatgatggcaccttccctgtttcgcc

SEQ ID NO: 492732 - DNA, 59 bp, Artificial
  Synthetic oligonucleotide
acaggaccagccgctgacctgaattggggtgattctcaagatggtatagtgtgggttgc

SEQ ID NO: 492733 - DNA, 60 bp, Artificial
  Synthetic oligonucleotide
acaggccacctcctgggtcacaggccattggtggggattgcgcctatacgtctctggaca

SEQ ID NO: 492734 - DNA, 60 bp, Artificial
  Synthetic oligonucleotide
acaggcctcactcacatagacgcccacttcctatcccagacaaagcagagtggggagaac

SEQ ID NO: 492735 - DNA, 57 bp, Artificial
  Synthetic oligonucleotide
acaggccttcccgccatcttgccagattagtgcttaccaccagttggcagaggagct

SEQ ID NO: 492736 - DNA, 56 bp, Artificial
  Synthetic oligonucleotide
acagggcccactgggcgctagcactctggtaccgtggtacctttgtgcgcctgttt

SEQ ID NO: 492737 - DNA, 59 bp, Artificial
  Synthetic oligonucleotide
acagtccactacttgaagcagatattgtctggtggtcacaaagccataatgcagcataa

SEQ ID NO: 492738 - DNA, 56 bp, Artificial
  Synthetic oligonucleotide
acagttaaggctaaactcctatccgtagaagaagcctgtaagctgacgcccccaca

SEQ ID NO: 492739 - DNA, 55 bp, Artificial
  Synthetic oligonucleotide
acataagacaagggccaaaggaaccctctagagactatgtagaccggttcttcaa

SEQ ID NO: 492740 - DNA, 50 bp, Artificial
  Synthetic oligonucleotide
acataataatttgtgacgagtgccattccacggatgccacatccatctta

SEQ ID NO: 492741 - DNA, 51 bp, Artificial
  Synthetic oligonucleotide
acatacagtaatggcacatacagtccgggatataattcaagctcacactca

SEQ ID NO: 492742 - DNA, 55 bp, Artificial
  Synthetic oligonucleotide
acatcactccccatgaatctatagaaatgtctgttttaggggaaacctctgaggg

SEQ ID NO: 492743 - DNA, 54 bp, Artificial
  Synthetic oligonucleotide
acatctccttcattgccggtttctgttccgttaaattcgcaggacgtccgcccg

SEQ ID NO: 492744 - DNA, 59 bp, Artificial
  Synthetic oligonucleotide
acatgggccggagtggacactagcagcggagttacgatggcttgcccttacattagtgg

SEQ ID NO: 492745 - DNA, 60 bp, Artificial
  Synthetic oligonucleotide
acatgtgaaagcagcactaagggcgtcatccgtgttaatctgggcttatggggacaacga

SEQ ID NO: 492746 - DNA, 60 bp, Artificial
  Synthetic oligonucleotide
acattctttcagaaggattgtaataaattcacaacaggtgagacgatagcacacggcaaa

SEQ ID NO: 492747 - DNA, 52 bp, Artificial
  Synthetic oligonucleotide
accaagttaatgtcggttcagagcgtcttaaacgacgtacaacggaggattg

SEQ ID NO: 492748 - DNA, 52 bp, Artificial
  Synthetic oligonucleotide
accaataggggaagctagtctagtaataagaacatattggggtttgcaaaca

SEQ ID NO: 492749 - DNA, 52 bp, Artificial
  Synthetic oligonucleotide
accacagtggtagtgactgaggactgcggaaatagaggaccctctttgagaa

SEQ ID NO: 492750 - DNA, 55 bp, Artificial
  Synthetic oligonucleotide
accaccctaaaggcgtccctctggcccgtactgtcaaggcgctattccctgatga

SEQ ID NO: 492751 - DNA, 55 bp, Artificial
  Synthetic oligonucleotide
accactagcctaggtgccggtcctacctcgatctctgcagtcggtgtcctagccc

SEQ ID NO: 492752 - DNA, 55 bp, Artificial
  Synthetic oligonucleotide
accagccccctgatgggggcgacactccaccatgaatcactcccctgtgaggaac

SEQ ID NO: 492753 - DNA, 60 bp, Artificial
  Synthetic oligonucleotide
accagcggggcagcttagagaaccaagagggtctgacatagcagggacaacaagcacagt

SEQ ID NO: 492754 - DNA, 55 bp, Artificial
  Synthetic oligonucleotide
accagggctggcgctcagttgagacctctggtgtcgctgaggaggaggctacttc

SEQ ID NO: 492755 - DNA, 56 bp, Artificial
  Synthetic oligonucleotide
accataacacaagcctgtccaaaggtctcttgggacccaattcctatacattattg

SEQ ID NO: 492756 - DNA, 51 bp, Artificial
  Synthetic oligonucleotide
accccaacgttttgcaccgttgctttctgaaaccccgtggtcgcgacgttc

SEQ ID NO: 492757 - DNA, 53 bp, Artificial
  Synthetic oligonucleotide
acccctggacgccggacccgtccgatgtcctggtgtttgtaccgtacgatcaa

SEQ ID NO: 492758 - DNA, 55 bp, Artificial
  Synthetic oligonucleotide
acccgaacagggacccgaaagcgaaagtaagaccagaggagatctctcgacgcaa

SEQ ID NO: 492759 - DNA, 57 bp, Artificial
  Synthetic oligonucleotide
acccgcgtcggcctaccaagtacgcaactcctcgggcctctaccatgtcaccaatga

SEQ ID NO: 492760 - DNA, 54 bp, Artificial
  Synthetic oligonucleotide
accctaatatgattgacaaaactccagttcactcgtgggaagacataccttacc

SEQ ID NO: 492761 - DNA, 59 bp, Artificial
  Synthetic oligonucleotide
accctactatgccaatgagggagatccatgagtccattcgatggaccaaggacgcacga

SEQ ID NO: 492762 - DNA, 51 bp, Artificial
  Synthetic oligonucleotide
accctagaggaatacaagtggcggacccggaacaaatgggaccccgctggg

SEQ ID NO: 492763 - DNA, 55 bp, Artificial
  Synthetic oligonucleotide
accctgaacgtgtccaggtgagcggctactacgccttcagccttcggcgtcccaa

SEQ ID NO: 492764 - DNA, 55 bp, Artificial
  Synthetic oligonucleotide
accctgtgaccctctacggctaacctgaatggaccgtgacatagtccagtccgca

SEQ ID NO: 492765 - DNA, 55 bp, Artificial
  Synthetic oligonucleotide
acccttgaatggcaatctcaagcgcctctgtagggaagccaagaatgtccaggag

SEQ ID NO: 492766 - DNA, 57 bp, Artificial
  Synthetic oligonucleotide
accgaccatcgagttcaagacatataaatactactcggaaaagaaagtctatcacaa

SEQ ID NO: 492767 - DNA, 60 bp, Artificial
  Synthetic oligonucleotide
accgcatcagctctgtatcgggaagccttagagtctccggagcattgctcacctcaccat

SEQ ID NO: 492768 - DNA, 60 bp, Artificial
  Synthetic oligonucleotide
accgctgcccaaaagcgggccatcgtagccgtgatacccagacctgtgttcacgcagatg

SEQ ID NO: 492769 - DNA, 60 bp, Artificial
  Synthetic oligonucleotide
accgtagcaggcgctcggtgagtcatctctcgtctgactgcagtgacgaggtacagctat

SEQ ID NO: 492770 - DNA, 60 bp, Artificial
  Synthetic oligonucleotide
accgtcgtcgcaggtccataggctgctcactatcgcatcggtatgcccttgcacacgtgt

SEQ ID NO: 492771 - DNA, 50 bp, Artificial
  Synthetic oligonucleotide
accgtttcttaagggttcgagatcaacgggggaatgtactactgtcaccc

SEQ ID NO: 492772 - DNA, 53 bp, Artificial
  Synthetic oligonucleotide
acctacgaaccagcctaccttggcggcaaggaccccagagtcaagggtggccc

SEQ ID NO: 492773 - DNA, 55 bp, Artificial
  Synthetic oligonucleotide
acctcaagatccgtactggcagcgcctacaacacatactcgaccgtccgggacag

SEQ ID NO: 492774 - DNA, 60 bp, Artificial
  Synthetic oligonucleotide
acctctcatgaggtgtgaagccaaagatcggacagggtgtgaagagccgcgtgtgctcac

SEQ ID NO: 492775 - DNA, 58 bp, Artificial
  Synthetic oligonucleotide
acctctccctagaccgtggccgtgaattctgggacccacgacttatgcaggttgctga

SEQ ID NO: 492776 - DNA, 53 bp, Artificial
  Synthetic oligonucleotide
acctgagagtcttcacggaggctatgaccaggtactccgccccccccggcgat

SEQ ID NO: 492777 - DNA, 53 bp, Artificial
  Synthetic oligonucleotide
acctgtggaggacccagtgacagtgactgtgacaattggggttccaaacggcc

SEQ ID NO: 492778 - DNA, 52 bp, Artificial
  Synthetic oligonucleotide
accttatcaccatactataaagtgttcctcgctaggctcatatggtggttgc

SEQ ID NO: 492779 - DNA, 55 bp, Artificial
  Synthetic oligonucleotide
accttcctccatctgaatcggcagaattgctgtgcctgctacgcctgtggggtca

SEQ ID NO: 492780 - DNA, 52 bp, Artificial
  Synthetic oligonucleotide
acgaaagtgagtggggccagacttcgccataaggcctttaacttccgggtcc

SEQ ID NO: 492781 - DNA, 52 bp, Artificial
  Synthetic oligonucleotide
acgacactgtcaccggaattatgaacactggattggcttttgtgtactccgg

SEQ ID NO: 492782 - DNA, 56 bp, Artificial
  Synthetic oligonucleotide
acgacagggccctttcttggattaacccgctcaatgcctggagatttgggcgtgcc

SEQ ID NO: 492783 - DNA, 55 bp, Artificial
  Synthetic oligonucleotide
acgacctggcgtaacaccgtggtcgacttagtcttgcgcatcatcgacagtggtc

SEQ ID NO: 492784 - DNA, 53 bp, Artificial
  Synthetic oligonucleotide
acgacctggtccggaggctcggtgtggcggagggttatgtacgctgcgatgcg

SEQ ID NO: 492785 - DNA, 59 bp, Artificial
  Synthetic oligonucleotide
acgacgctgttgcaactacacactcctggattcctaagaggaaccgctctatcctcaac

SEQ ID NO: 492786 - DNA, 54 bp, Artificial
  Synthetic oligonucleotide
acgacgggtttgcacgtgttcccattaaggacgaatcaaccgacagcggggata

SEQ ID NO: 492787 - DNA, 55 bp, Artificial
  Synthetic oligonucleotide
acgagactcactgcaagtgcggtaactggagaaaccacctgtggacgctatgcgc

SEQ ID NO: 492788 - DNA, 55 bp, Artificial
  Synthetic oligonucleotide
acgagtagtctgcgtattgggacgcaagtttcgatcatccagagcgttgaaaccg

SEQ ID NO: 492789 - DNA, 60 bp, Artificial
  Synthetic oligonucleotide
acgataatgcccatggggtaggatcagtaccgatgcacacagacttagagctcgactttt

SEQ ID NO: 492790 - DNA, 50 bp, Artificial
  Synthetic oligonucleotide
acgatagatctgtctagcgcttccgatacgttaagcattgaactcgtgcg

SEQ ID NO: 492791 - DNA, 55 bp, Artificial
  Synthetic oligonucleotide
acgataggagcttcgacctcaagggatgccctcccgaacaccgagcccagtggtc

SEQ ID NO: 492792 - DNA, 55 bp, Artificial
  Synthetic oligonucleotide
acgatgactataagagatttatgaactactggacctcctcaaacgaggacctaga

SEQ ID NO: 492793 - DNA, 55 bp, Artificial
  Synthetic oligonucleotide
acgcacccacgtcgctataccaccaggcgattaaaggggtccgattggcgtactg

SEQ ID NO: 492794 - DNA, 55 bp, Artificial
  Synthetic oligonucleotide
acgcaccctccagcagacgtaactgctagccgtcggataaccagggcatgacagg

SEQ ID NO: 492795 - DNA, 55 bp, Artificial
  Synthetic oligonucleotide
acgcacctcactcgatataattttcggactggtatgttgcaagggatcagagaag

SEQ ID NO: 492796 - DNA, 55 bp, Artificial
  Synthetic oligonucleotide
acgcagaggcatttcgcttacgtgtgtgctcggtctcccgactggaacgtggata

SEQ ID NO: 492797 - DNA, 60 bp, Artificial
  Synthetic oligonucleotide
acgcaggagtggctctctcgcatgtgggatagggttgacatgctgacttggcgcaacacg

SEQ ID NO: 492798 - DNA, 55 bp, Artificial
  Synthetic oligonucleotide
acgccgaacggacttcttgagttccgcactggagcagccgagatatatggcggcc

SEQ ID NO: 492799 - DNA, 53 bp, Artificial
  Synthetic oligonucleotide
acgcgaccaccgggtagaactttagccgcatatccactcggtgtagggcagag

SEQ ID NO: 492800 - DNA, 55 bp, Artificial
  Synthetic oligonucleotide
acgcgccacaagcaggcagcaagtcgcaaagggccaagtacgggacagcaggcta

SEQ ID NO: 492801 - DNA, 60 bp, Artificial
  Synthetic oligonucleotide
acgcgccagaaactgtggtgtcctcacgtgcaggggtgacagttggagtgtgaccatggt

SEQ ID NO: 492802 - DNA, 53 bp, Artificial
  Synthetic oligonucleotide
acgctagagtctctgcttgcctatggatgatggttatggtagctcaggttgag

SEQ ID NO: 492803 - DNA, 55 bp, Artificial
  Synthetic oligonucleotide
acggctctaggatatgaacctgccgcccgtatttgagatccaatccctcagcccc

SEQ ID NO: 492804 - DNA, 55 bp, Artificial
  Synthetic oligonucleotide
acgggcaaaatgacccgtctgtatgggcgtccatgcgtttctggggcgaatccgt

SEQ ID NO: 492805 - DNA, 56 bp, Artificial
  Synthetic oligonucleotide
acggtcatgatagcgagcgctacacccttagcggtgagtgtgtgcagtgcaataac

SEQ ID NO: 492806 - DNA, 55 bp, Artificial
  Synthetic oligonucleotide
acggtggcaaccagagacggactcgccgcgtccacacggatgtagcgttccttct

SEQ ID NO: 492807 - DNA, 57 bp, Artificial
  Synthetic oligonucleotide
acgtctatgctgtacacgcacccacgtcgctataccaccaggcgattaaaggggtcc

SEQ ID NO: 492808 - DNA, 53 bp, Artificial
  Synthetic oligonucleotide
acgtctgaaaaatggctgaaggtacagaccctttagagggtagcagtgggtgg

SEQ ID NO: 492809 - DNA, 59 bp, Artificial
  Synthetic oligonucleotide
acgtgcgaccaggtcgtcacttatcaacctgtgcgatcggttttgtgcgccaaaaggca

SEQ ID NO: 492810 - DNA, 53 bp, Artificial
  Synthetic oligonucleotide
acgtggcaatcacaacctagagacgaagatgagctccgaatctatgaagcaca

SEQ ID NO: 492811 - DNA, 50 bp, Artificial
  Synthetic oligonucleotide
acgtggccacgatgctttatgaacatccagttaatttctccaatcgacgc

SEQ ID NO: 492812 - DNA, 57 bp, Artificial
  Synthetic oligonucleotide
acgttaaggaggtaaccgcacagaatgctgagtccctgtcatggcccctggtccttg

SEQ ID NO: 492813 - DNA, 55 bp, Artificial
  Synthetic oligonucleotide
acgttcatcaaacgttttcctcacaatccacgcgactgggacaggctcccctacc

SEQ ID NO: 492814 - DNA, 54 bp, Artificial
  Synthetic oligonucleotide
actaaccgaactagatgacggtacagtaggggtaaattctccgcattcggtgcg

SEQ ID NO: 492815 - DNA, 58 bp, Artificial
  Synthetic oligonucleotide
actacgtctcaggtccgcgagcgaacatcgtcggctcagtttatcacgtcttaggggc

SEQ ID NO: 492816 - DNA, 56 bp, Artificial
  Synthetic oligonucleotide
actacttctctgacctggagattgtggtacgccatgacggtaacctaacctgggta

SEQ ID NO: 492817 - DNA, 53 bp, Artificial
  Synthetic oligonucleotide
actagaggggaagcgcatttgcacatgtgggttccccccctcaacgtccgagg

SEQ ID NO: 492818 - DNA, 60 bp, Artificial
  Synthetic oligonucleotide
actagctgcggtaatacccttacatgttacttgaaggcctctgcggcctgtcgagctgca

SEQ ID NO: 492819 - DNA, 55 bp, Artificial
  Synthetic oligonucleotide
actaggtgacgtttattcgatgatgcgttcatggtatgattggagtgttcgaccg

SEQ ID NO: 492820 - DNA, 50 bp, Artificial
  Synthetic oligonucleotide
actaggttcctaccagtatcaggcgggacaagtagtgtttacattgaggt

SEQ ID NO: 492821 - DNA, 59 bp, Artificial
  Synthetic oligonucleotide
actatgcgatccctcagtcccatgaggaacccgaaggttgcgatacgaaccagctcaac

SEQ ID NO: 492822 - DNA, 58 bp, Artificial
  Synthetic oligonucleotide
actattagagtttggtctgagctaaacattggaactggtacctcggcttacacatcat

SEQ ID NO: 492823 - DNA, 51 bp, Artificial
  Synthetic oligonucleotide
actcagacccaaacaaaggcttcgttccctactcatttagctttggcaacg

SEQ ID NO: 492824 - DNA, 51 bp, Artificial
  Synthetic oligonucleotide
actcccaagaagcaaacgccgaccaagaaacggaaacgacccctccggatc

SEQ ID NO: 492825 - DNA, 53 bp, Artificial
  Synthetic oligonucleotide
actcccatctcaccacctctaagagacactcaccctcaggccatgcagtggaa

SEQ ID NO: 492826 - DNA, 60 bp, Artificial
  Synthetic oligonucleotide
actcccctcgcgagggctgcgtgggaaacagcaagacacactccagtcaattcctggcta

SEQ ID NO: 492827 - DNA, 60 bp, Artificial
  Synthetic oligonucleotide
actcgcactcacatcagtatttagcacttggcgtgcttcggacatctgcaacagggaggg

SEQ ID NO: 492828 - DNA, 58 bp, Artificial
  Synthetic oligonucleotide
actgacccgcgcaggcagtagcaacaaacaaccgtaagtaggggtgcctgacatgggc

SEQ ID NO: 492829 - DNA, 56 bp, Artificial
  Synthetic oligonucleotide
actgactttgcccagggctggggccctatcagttatgccaacggaagtggccccga

SEQ ID NO: 492830 - DNA, 53 bp, Artificial
  Synthetic oligonucleotide
actgagcggcgttactggtagcctcgtccggcggtggggataacccctcaaag

SEQ ID NO: 492831 - DNA, 56 bp, Artificial
  Synthetic oligonucleotide
actgagggggtgaacagcaacgaaagtgagtggggccagacttcgccataaggcct

SEQ ID NO: 492832 - DNA, 60 bp, Artificial
  Synthetic oligonucleotide
actgagtatggtgaatttaccatgctgggcatctatgataggtgggccgtcttaccacgc

SEQ ID NO: 492833 - DNA, 60 bp, Artificial
  Synthetic oligonucleotide
actgcaggaccatacgagcactcggtctggaagcagaagggtgcctcacaaggacctgaa

SEQ ID NO: 492834 - DNA, 60 bp, Artificial
  Synthetic oligonucleotide
actgcagttccaataggatcttgcgttagtaaatgccacaccgacaggggctcaatctct

SEQ ID NO: 492835 - DNA, 55 bp, Artificial
  Synthetic oligonucleotide
actgctggagtattgtaatgccttagcaagcacgctagacgtaaaccaaatctgc

SEQ ID NO: 492836 - DNA, 56 bp, Artificial
  Synthetic oligonucleotide
actgggacaggctcccctacctcaacctgccataccttccacccaatgcaggacgc

SEQ ID NO: 492837 - DNA, 60 bp, Artificial
  Synthetic oligonucleotide
actgggcgagtcatgtattcacatggctcgcagaaaaatagtcaagctaataggagatgc

SEQ ID NO: 492838 - DNA, 60 bp, Artificial
  Synthetic oligonucleotide
actggggatgatagaaatgcgactgctagcttcatttatgatgggatgcttgtcgacagt

SEQ ID NO: 492839 - DNA, 54 bp, Artificial
  Synthetic oligonucleotide
actggggtgggaaggcctcaagtatctggggaacctcctgttatattggagtcg

SEQ ID NO: 492840 - DNA, 51 bp, Artificial
  Synthetic oligonucleotide
actgggttgggaagccctcaaatatctggggaatcttctgacatactgggg

SEQ ID NO: 492841 - DNA, 51 bp, Artificial
  Synthetic oligonucleotide
actggtggagagcgccagaatgcaagcgaaattagagcatctgtcgggaga

SEQ ID NO: 492842 - DNA, 58 bp, Artificial
  Synthetic oligonucleotide
actgtaacacatgtgtcacccaaacagtcgatttcagcttggaccctaccttcaccat

SEQ ID NO: 492843 - DNA, 55 bp, Artificial
  Synthetic oligonucleotide
actgtactacgaccggagttcgctatacatggtgtaaatccaatgccggggccgc

SEQ ID NO: 492844 - DNA, 52 bp, Artificial
  Synthetic oligonucleotide
actgtcccaactttgcaagtgttgttctcggaaatgcctcaggcttaggcat

SEQ ID NO: 492845 - DNA, 52 bp, Artificial
  Synthetic oligonucleotide
actgtgattaactacggtctataccaagagagtgaccatcaagtgtccatcg

SEQ ID NO: 492846 - DNA, 54 bp, Artificial
  Synthetic oligonucleotide
acttaccgaactagacaacggtgcggcaggggtaaattctccgcattcggtgcg

SEQ ID NO: 492847 - DNA, 55 bp, Artificial
  Synthetic oligonucleotide
acttacgttgtgcgcacgcggggcccggtggactatcgttcacccacctacagct

SEQ ID NO: 492848 - DNA, 58 bp, Artificial
  Synthetic oligonucleotide
acttagatccataatcatttactcacaatgtgtcatgttgttaaccctagaattacac

SEQ ID NO: 492849 - DNA, 52 bp, Artificial
  Synthetic oligonucleotide
acttagtgaagtacatcgctctccaattagtggtgacgtccggtgttttgtg

SEQ ID NO: 492850 - DNA, 51 bp, Artificial
  Synthetic oligonucleotide
acttatgagggtgataccagtgcaggctataaccatgatgtctccatactt

SEQ ID NO: 492851 - DNA, 60 bp, Artificial
  Synthetic oligonucleotide
acttcagatgcgcttactgtctcaattcgaggtcgatggatggctaggctagctcgcatg

SEQ ID NO: 492852 - DNA, 60 bp, Artificial
  Synthetic oligonucleotide
acttgatctccactggggagttggtggccgtgtccacgcattgcatgagcccgtagctgc

SEQ ID NO: 492853 - DNA, 50 bp, Artificial
  Synthetic oligonucleotide
acttgccatctcttatgtccgttataacggtgacagcgaaacattcgtac

SEQ ID NO: 492854 - DNA, 54 bp, Artificial
  Synthetic oligonucleotide
actttacacccgtacttggtcggaggttgatgccgtctctagcccagcccggcc

SEQ ID NO: 492855 - DNA, 55 bp, Artificial
  Synthetic oligonucleotide
actttccaggggaggcgtgacatgggcgggacatgggagtggcgagccctcagat

SEQ ID NO: 492856 - DNA, 57 bp, Artificial
  Synthetic oligonucleotide
actttgagaacgtccgtactgcatacgagctgtctaagactaacaacttgtcagata

SEQ ID NO: 492857 - DNA, 52 bp, Artificial
  Synthetic oligonucleotide
agaaaaagtggacttcgaggattgcaaggatgttagcgatctaaaacagtat

SEQ ID NO: 492858 - DNA, 56 bp, Artificial
  Synthetic oligonucleotide
agaacatcacatcaggattcctaggacccctgctcgtgttacaggcggggtttttc

SEQ ID NO: 492859 - DNA, 51 bp, Artificial
  Synthetic oligonucleotide
agaaccaactggtgtcttaatatataaaacatacgggacccatattgcgac

SEQ ID NO: 492860 - DNA, 57 bp, Artificial
  Synthetic oligonucleotide
agaaccctttagagactatgtagatcggttctataaaactctaagagccgagcaagc

SEQ ID NO: 492861 - DNA, 53 bp, Artificial
  Synthetic oligonucleotide
agaatcaccaggaactcaaagaacgacgagtcaagcctccacgttgattccgc

SEQ ID NO: 492862 - DNA, 57 bp, Artificial
  Synthetic oligonucleotide
agaattactggtttgtctagttattgggaacgctataagtggttatcagctgtagcc

SEQ ID NO: 492863 - DNA, 60 bp, Artificial
  Synthetic oligonucleotide
agacaaaaggcttaggcatttcctatggcaggaagaagcggagacagcgacgcagcactc

SEQ ID NO: 492864 - DNA, 60 bp, Artificial
  Synthetic oligonucleotide
agacacccaggattcacggtgatagccctttttctagcacatgccataggaacatccatc

SEQ ID NO: 492865 - DNA, 55 bp, Artificial
  Synthetic oligonucleotide
agaccatcagaagcgagcgacacattgctctgtgacattggagagtcatcgtcaa

SEQ ID NO: 492866 - DNA, 60 bp, Artificial
  Synthetic oligonucleotide
agaccatggctccatagtttaggacagtatatctatgacacctatggagatacttggaca

SEQ ID NO: 492867 - DNA, 51 bp, Artificial
  Synthetic oligonucleotide
agaccggtgcttcgggacaggctatcccttctgatgtggttgagactaggc

SEQ ID NO: 492868 - DNA, 52 bp, Artificial
  Synthetic oligonucleotide
agacgttaatgctcctagctttgatagctgtgctgactggtggagtgacact

SEQ ID NO: 492869 - DNA, 56 bp, Artificial
  Synthetic oligonucleotide
agactcggcacgtaccgatatgtcacccccggtgaaagaccgtctgggatgtttga

SEQ ID NO: 492870 - DNA, 52 bp, Artificial
  Synthetic oligonucleotide
agactttagacgagcggatacgatatgggtattagcattacagctaccagcg

SEQ ID NO: 492871 - DNA, 55 bp, Artificial
  Synthetic oligonucleotide
agaggccgctaatcgcgtagaaactcgtctgttgatcgctctcccatcgggagaa

SEQ ID NO: 492872 - DNA, 60 bp, Artificial
  Synthetic oligonucleotide
agaggcgcaacagcatatgttgcaactcacagtctggggcattaaacagctccagacaag

SEQ ID NO: 492873 - DNA, 53 bp, Artificial
  Synthetic oligonucleotide
agaggctttatgtcgggggtcctcttaccaattcaaggggggagaactgcggc

SEQ ID NO: 492874 - DNA, 53 bp, Artificial
  Synthetic oligonucleotide
agaggggccgcaatacggcaggtgggagttccacgtattacaacttagttggg

SEQ ID NO: 492875 - DNA, 60 bp, Artificial
  Synthetic oligonucleotide
agagtccgtaaacaacgctgtggtaatgccagctcatggtccagccaagagcatggaata

SEQ ID NO: 492876 - DNA, 57 bp, Artificial
  Synthetic oligonucleotide
agagtgcacgaggggtacgaagaatttacaatggttgggaaaagagcaacagctata

SEQ ID NO: 492877 - DNA, 60 bp, Artificial
  Synthetic oligonucleotide
agataaccgtgggtacaccacaatcatctggcctgcgctctatccgcgtagccgtgagga

SEQ ID NO: 492878 - DNA, 60 bp, Artificial
  Synthetic oligonucleotide
agatagttgaccttatgtgtcacgccactttcactatgcgtctcctttctcctgtgagag

SEQ ID NO: 492879 - DNA, 56 bp, Artificial
  Synthetic oligonucleotide
agatataattagtctatgggaccaaagcctaaagccatgtgtagagttaacccctc

SEQ ID NO: 492880 - DNA, 60 bp, Artificial
  Synthetic oligonucleotide
agatatctcgcttccatagtcatcagagtaaggatggattccgtgctcgctccctctgac

SEQ ID NO: 492881 - DNA, 54 bp, Artificial
  Synthetic oligonucleotide
agatatgaacaattggaaaagcgatttgaatcactgaaacaaagggtgaatgaa

SEQ ID NO: 492882 - DNA, 60 bp, Artificial
  Synthetic oligonucleotide
agatgctgcatataagcagctgcttttcgcctgtactgggtctctctaggtagaccagat

SEQ ID NO: 492883 - DNA, 60 bp, Artificial
  Synthetic oligonucleotide
agatggagctagccagcacggacaatgagagggacgccatctacagctcagcactcattg

SEQ ID NO: 492884 - DNA, 60 bp, Artificial
  Synthetic oligonucleotide
agattaagcttcgagcgtccacggtacaggcgaagctcttatccatagaggaagcctgcg

SEQ ID NO: 492885 - DNA, 52 bp, Artificial
  Synthetic oligonucleotide
agattccgggtgtcgctcatgtgtatcaactcacgtccgatggggtgcgagt

SEQ ID NO: 492886 - DNA, 59 bp, Artificial
  Synthetic oligonucleotide
agattgaagggtgtgtggagtaccagtgcaagttccaacatctttggcgcatggttccc

SEQ ID NO: 492887 - DNA, 60 bp, Artificial
  Synthetic oligonucleotide
agcaacagtatcagcagacccattagcatccttgctggaaatgtgccacagcacacagat

SEQ ID NO: 492888 - DNA, 52 bp, Artificial
  Synthetic oligonucleotide
agcacaccacctcttattagactcgggtacaacctagttaaggatcccatac

SEQ ID NO: 492889 - DNA, 60 bp, Artificial
  Synthetic oligonucleotide
agcactcaagaatgtcgcaatcaagagttgtcagatagtgtatggtggctgcacttatag

SEQ ID NO: 492890 - DNA, 50 bp, Artificial
  Synthetic oligonucleotide
agcagattgggtgaaactaacactataacaacgcgcagtggtaccactat

SEQ ID NO: 492891 - DNA, 55 bp, Artificial
  Synthetic oligonucleotide
agcaggggcagtctgctttcgccccggcccatttcctacttgaaaggctcctcgg

SEQ ID NO: 492892 - DNA, 52 bp, Artificial
  Synthetic oligonucleotide
agcagtcaaccaccctcccatgtttgtaggtatctcattgggcatcaaacta

SEQ ID NO: 492893 - DNA, 57 bp, Artificial
  Synthetic oligonucleotide
agcatctagggaactagtagtcagttatgttaataataacatgggtctaaaaatcag

SEQ ID NO: 492894 - DNA, 59 bp, Artificial
  Synthetic oligonucleotide
agccacgacacgtactattgggactcgcagtgggatacgcattggccctgaggtacacg

SEQ ID NO: 492895 - DNA, 55 bp, Artificial
  Synthetic oligonucleotide
agccactcaagaagtgctgaaacgcagatggactgggaaattgaccctggcctca

SEQ ID NO: 492896 - DNA, 51 bp, Artificial
  Synthetic oligonucleotide
agccattgattagaaagttctttgagcgaccgtttaaaagtgcactagaag

SEQ ID NO: 492897 - DNA, 56 bp, Artificial
  Synthetic oligonucleotide
agccccgtgtgctcacattgaatcctccggcccctgaatgtggctaaccttaaacc

SEQ ID NO: 492898 - DNA, 55 bp, Artificial
  Synthetic oligonucleotide
agcccgctggtacgtgtcaacaggctaggcccaggaatacccgatcatccgctac

SEQ ID NO: 492899 - DNA, 56 bp, Artificial
  Synthetic oligonucleotide
agcccgtatagccatcaggtccctcactgagaggctttacgttgggggccctctta

SEQ ID NO: 492900 - DNA, 55 bp, Artificial
  Synthetic oligonucleotide
agccctgccccgtatcctcacagcgtcccctgacccgtatcattcgcttatcgcc

SEQ ID NO: 492901 - DNA, 59 bp, Artificial
  Synthetic oligonucleotide
agccgaccatctcaggtgcatcactctatgtcctcgatgtgctcatccctttcaattag

SEQ ID NO: 492902 - DNA, 58 bp, Artificial
  Synthetic oligonucleotide
agccgtcttggacatgatcgctggtgcccactggggagtcctggcgggcatagcgtac

SEQ ID NO: 492903 - DNA, 60 bp, Artificial
  Synthetic oligonucleotide
agcctcccactcagaacgcagatgaagccagcgacacacagctcaagaccggagcaagca

SEQ ID NO: 492904 - DNA, 54 bp, Artificial
  Synthetic oligonucleotide
agcctgacttgcacaggttgttatgcttgtagttcaggcatctcctgcaaagtt

SEQ ID NO: 492905 - DNA, 56 bp, Artificial
  Synthetic oligonucleotide
agccttgtaaacatctttgttctaagatcaccaatatatagttccctgttaccgcc

SEQ ID NO: 492906 - DNA, 60 bp, Artificial
  Synthetic oligonucleotide
agcgaaagtaagaccagaggagatctctcgacgcaagactcggcttgctgaagcgcactc

SEQ ID NO: 492907 - DNA, 60 bp, Artificial
  Synthetic oligonucleotide
agcggaggtatcccattgcagagccactgaatacataatgaagggagtgtacataaacac

SEQ ID NO: 492908 - DNA, 60 bp, Artificial
  Synthetic oligonucleotide
agcggatcagaggacgtcgtgtgttgctcaatgtcatattcgtggactggggcgcttata

SEQ ID NO: 492909 - DNA, 52 bp, Artificial
  Synthetic oligonucleotide
agcgtcaatgaacctgacatacgtgagcaaaatcggaggccccatcgccggt

SEQ ID NO: 492910 - DNA, 56 bp, Artificial
  Synthetic oligonucleotide
agcgtcgtatggacgcttagcaaagtggcgcaaggggttgccaccaatcctaaccc

SEQ ID NO: 492911 - DNA, 53 bp, Artificial
  Synthetic oligonucleotide
agctacgttaggtccaccgccccctaggagggacatagggttgagacagcccc

SEQ ID NO: 492912 - DNA, 50 bp, Artificial
  Synthetic oligonucleotide
agctactcaatatgcggctccgggtcgttacccataggtgtggccaaata

SEQ ID NO: 492913 - DNA, 51 bp, Artificial
  Synthetic oligonucleotide
agctcgaagtgtctcgtaaatctatccgtgatttgcgctcttcgggtatta

SEQ ID NO: 492914 - DNA, 55 bp, Artificial
  Synthetic oligonucleotide
agctcgagccgcacgatcagttggcatccgcgtacaagcgatgacacctccccgt

SEQ ID NO: 492915 - DNA, 60 bp, Artificial
  Synthetic oligonucleotide
agctgcagttattaaaatgcgcatatggaatgttgagtctccaaaaacattaagacatct

SEQ ID NO: 492916 - DNA, 60 bp, Artificial
  Synthetic oligonucleotide
agctgccagaaaaagacagctggactgtcaatgacatacagaaattagtgggaaagttaa

SEQ ID NO: 492917 - DNA, 60 bp, Artificial
  Synthetic oligonucleotide
agctgcttttcgcctgtactgggtctctctaggtagaccagatcagagcccgggagctct

SEQ ID NO: 492918 - DNA, 60 bp, Artificial
  Synthetic oligonucleotide
aggaaacactaaccagcagagagcatctgcaggacaaatcagcgtacagcccacattctc

SEQ ID NO: 492919 - DNA, 60 bp, Artificial
  Synthetic oligonucleotide
aggagagcgttgtgacttggaggacagggatagatcagagcttagcccgctgttactgtc

SEQ ID NO: 492920 - DNA, 53 bp, Artificial
  Synthetic oligonucleotide
aggaggattggtgcaatacccattgatctagcgaaagggacatccggcagtcc

SEQ ID NO: 492921 - DNA, 59 bp, Artificial
  Synthetic oligonucleotide
aggagtcacaggcacgcgttgagtctatcctcgccaacactgaccttacggctaaacag

SEQ ID NO: 492922 - DNA, 57 bp, Artificial
  Synthetic oligonucleotide
aggagtcacagtcctgaatctaccaacagggttcgacaaaccatacgtccgcctaga

SEQ ID NO: 492923 - DNA, 50 bp, Artificial
  Synthetic oligonucleotide
aggatcacccaccatatttcaatacacttcagatcagctgttaaggaagt

SEQ ID NO: 492924 - DNA, 60 bp, Artificial
  Synthetic oligonucleotide
aggatccaacgccaaaagcatggttctaggcaccacaccaggtgactgcggctgccccta

SEQ ID NO: 492925 - DNA, 55 bp, Artificial
  Synthetic oligonucleotide
aggcaaccaagaggcttacagtcctcgggaaggacgcgggtgcgttaacagaaga

SEQ ID NO: 492926 - DNA, 60 bp, Artificial
  Synthetic oligonucleotide
aggcatggtcactcactacatctggtccactgagtacaatgacgggtcgctcttcgccac

SEQ ID NO: 492927 - DNA, 60 bp, Artificial
  Synthetic oligonucleotide
aggcatttcctatggcaggaagaagcggagacagcgacgaagcactcctctgcgcagtga

SEQ ID NO: 492928 - DNA, 60 bp, Artificial
  Synthetic oligonucleotide
aggccaaataatgttgctgatactttgcacatcacagattctcttaatgcggaccacatg

SEQ ID NO: 492929 - DNA, 55 bp, Artificial
  Synthetic oligonucleotide
aggccctatttcacagcacaactatcgccagggctatgccacgcagaccgtgggc

SEQ ID NO: 492930 - DNA, 55 bp, Artificial
  Synthetic oligonucleotide
aggccgcgagccatacccactatggtcgaactagagacggatgccgctctgcctc

SEQ ID NO: 492931 - DNA, 51 bp, Artificial
  Synthetic oligonucleotide
aggcgggatggcaaccagggacaacgcccaggaagaggcctctcttcgggg

SEQ ID NO: 492932 - DNA, 57 bp, Artificial
  Synthetic oligonucleotide
aggcggtgacagtaagggaacctactgtggtgcaccaatcctaggcccaggaagtgc

SEQ ID NO: 492933 - DNA, 59 bp, Artificial
  Synthetic oligonucleotide
aggctccggtggtagggcaggctatgtgccattgtccactcgtcctcccaccagtagta

SEQ ID NO: 492934 - DNA, 52 bp, Artificial
  Synthetic oligonucleotide
aggctgtgtaatcctttgaacccgtttgttagtcataaggagattgagtccg

SEQ ID NO: 492935 - DNA, 52 bp, Artificial
  Synthetic oligonucleotide
agggacaggtccgagctcagtccgctactgctgtccaccacgcagtggcagg

SEQ ID NO: 492936 - DNA, 55 bp, Artificial
  Synthetic oligonucleotide
agggagagccttcgagtcgatcatgaaaggagcaagacgcatggccatcttgggg

SEQ ID NO: 492937 - DNA, 56 bp, Artificial
  Synthetic oligonucleotide
agggagatggctcgacccgtggccataaagctacagtttacactgggagtgccccc

SEQ ID NO: 492938 - DNA, 55 bp, Artificial
  Synthetic oligonucleotide
agggaggcgtgacatgggcgggaccggggagtggcgagccctcagatgctgcata

SEQ ID NO: 492939 - DNA, 60 bp, Artificial
  Synthetic oligonucleotide
agggcaggacggataatcgcgtgggatggacaagcggttctgcagatacataatcctact

SEQ ID NO: 492940 - DNA, 52 bp, Artificial
  Synthetic oligonucleotide
agggccagggacaagattccccctgacctttgggtggtgctttaaactagta

SEQ ID NO: 492941 - DNA, 57 bp, Artificial
  Synthetic oligonucleotide
agggccagggatcagatatccactgacctttgggtggtgcttcaagttagtaccagt

SEQ ID NO: 492942 - DNA, 59 bp, Artificial
  Synthetic oligonucleotide
agggcccactgacgcgaaagcgcgttacatgattgcatacgccccccctggcatggaac

SEQ ID NO: 492943 - DNA, 54 bp, Artificial
  Synthetic oligonucleotide
aggggaccaacaaacagtgattcacccaacaataacgacccctgcaataccgaa

SEQ ID NO: 492944 - DNA, 51 bp, Artificial
  Synthetic oligonucleotide
aggggccgtaacacggcaggtgggacctctacctactacaacttggtaggg

SEQ ID NO: 492945 - DNA, 53 bp, Artificial
  Synthetic oligonucleotide
agggtacaggaaagctgggaccattgcatagtcaactaatttggctgtgctag

SEQ ID NO: 492946 - DNA, 55 bp, Artificial
  Synthetic oligonucleotide
agggtacgtactgaacgttccaggacctggtgcatacagaattcaggatgggcaa

SEQ ID NO: 492947 - DNA, 54 bp, Artificial
  Synthetic oligonucleotide
aggtaataggggacccaaagcaagcacattgtaatgtcagcagagcagcatgga

SEQ ID NO: 492948 - DNA, 60 bp, Artificial
  Synthetic oligonucleotide
aggtatcccattgcagggctactgaatacataatgaagggagtgtacataaacacagctt

SEQ ID NO: 492949 - DNA, 55 bp, Artificial
  Synthetic oligonucleotide
aggtcaacaatgtacccacgaatgccactagcttaatggagagactgcgcttccc

SEQ ID NO: 492950 - DNA, 54 bp, Artificial
  Synthetic oligonucleotide
aggtcagtgggtagaggacctcatagctatggggtctaacagcccgtttgtacc

SEQ ID NO: 492951 - DNA, 55 bp, Artificial
  Synthetic oligonucleotide
aggtcgaccctgctgagcccgccccgtctgatgtatcggggacctatgctgtcca

SEQ ID NO: 492952 - DNA, 54 bp, Artificial
  Synthetic oligonucleotide
aggtgaacctcccaaaggtcaccctgcaatgcgtggccctccccaagcccggga

SEQ ID NO: 492953 - DNA, 58 bp, Artificial
  Synthetic oligonucleotide
aggtgactgcaggtcaggtaacagcaaagggcccgtgagtgggatctatctgaaaccg

SEQ ID NO: 492954 - DNA, 60 bp, Artificial
  Synthetic oligonucleotide
aggtgagagagcaattcactcaggcattatctgactatttgatgcagaatccggagttaa

SEQ ID NO: 492955 - DNA, 54 bp, Artificial
  Synthetic oligonucleotide
aggtggagggtcctttggcctaactgcaatgatacagcagtctcagtgcactct

SEQ ID NO: 492956 - DNA, 60 bp, Artificial
  Synthetic oligonucleotide
aggtgtggtctgggcggtactgggagtggtcaaccctcagatgctgcatataagcagctg

SEQ ID NO: 492957 - DNA, 49 bp, Artificial
  Synthetic oligonucleotide
aggttaaaacatggaaccttcggtcccgttcatttccgaaaccaggtta

SEQ ID NO: 492958 - DNA, 58 bp, Artificial
  Synthetic oligonucleotide
aggttagagacgtgctagtgcgtggcttcggggactctgtggaagaggccctatcgga

SEQ ID NO: 492959 - DNA, 55 bp, Artificial
  Synthetic oligonucleotide
aggttcctgggcttgagacgcagcgtgggtactgcggcctcccgtatgtcaacag

SEQ ID NO: 492960 - DNA, 59 bp, Artificial
  Synthetic oligonucleotide
aggttgacagttttactgaatgcgacacttgtatttatgaatgtgggtccaatggtgtc

SEQ ID NO: 492961 - DNA, 60 bp, Artificial
  Synthetic oligonucleotide
agtaacaagggagccgtatgtgtcatgtgacccattaggatgtaagatgtacgcattgca

SEQ ID NO: 492962 - DNA, 55 bp, Artificial
  Synthetic oligonucleotide
agtaactggcctgtcgtaatgcgtaagtctgtggcggaaccgactactttgggtg

SEQ ID NO: 492963 - DNA, 56 bp, Artificial
  Synthetic oligonucleotide
agtaagtcacaaaacccctcgaaccccaacatgtctatacagtccagttgctgtcg

SEQ ID NO: 492964 - DNA, 60 bp, Artificial
  Synthetic oligonucleotide
agtacacgcagggcctattgcaccaggccagatgagggaacctaggggaagtgacatagc

SEQ ID NO: 492965 - DNA, 60 bp, Artificial
  Synthetic oligonucleotide
agtaccgtcttggaatcttcgatgcgttgcgctcagcactcgaacccggagtgtagctta

SEQ ID NO: 492966 - DNA, 55 bp, Artificial
  Synthetic oligonucleotide
agtactcgacattgtaccgccgttggctcgactcattttagtaaccctacctcag

SEQ ID NO: 492967 - DNA, 58 bp, Artificial
  Synthetic oligonucleotide
agtaggagctcaaggggacaacatttctagattggtacatctggttacaggacagtgg

SEQ ID NO: 492968 - DNA, 60 bp, Artificial
  Synthetic oligonucleotide
agtatgcgcgatcgttcagtgtcgaggtcactgcaggattggggttctctgcggaggaac

SEQ ID NO: 492969 - DNA, 60 bp, Artificial
  Synthetic oligonucleotide
agtcgaggaacgatggcatatgacatcagcacagggagatcagccgacccagtgtatggg

SEQ ID NO: 492970 - DNA, 55 bp, Artificial
  Synthetic oligonucleotide
agtcgtggacgtgtccctacacgggcccagtgtccagcccgcattggagatacac

SEQ ID NO: 492971 - DNA, 53 bp, Artificial
  Synthetic oligonucleotide
agtcttcttcggcgctcgcgagacccacaagagtgtgtcccggagctagtcat

SEQ ID NO: 492972 - DNA, 60 bp, Artificial
  Synthetic oligonucleotide
agtgacggcatgatgttgggcgtcgctaaaccatcgaatgtgcaagcagtaccgaacgca

SEQ ID NO: 492973 - DNA, 60 bp, Artificial
  Synthetic oligonucleotide
agtgagagtcccgctctccaggaattcgagtcacgagatgtactgggtaagtggagcatc

SEQ ID NO: 492974 - DNA, 54 bp, Artificial
  Synthetic oligonucleotide
agtgagtggggccagacttcgccataaggcctttaacttccgggtgcgtatggg

SEQ ID NO: 492975 - DNA, 55 bp, Artificial
  Synthetic oligonucleotide
agtgcaaagagtggctgtagaaagcatagtaatatgggggaagactcctaaattt

SEQ ID NO: 492976 - DNA, 52 bp, Artificial
  Synthetic oligonucleotide
agtgcggaccgtagggacctcgaaatccaagtaccctttggtgattaggatt

SEQ ID NO: 492977 - DNA, 51 bp, Artificial
  Synthetic oligonucleotide
agtggatgggttatgagctacacccagacaaatggactgtacaacctatta

SEQ ID NO: 492978 - DNA, 53 bp, Artificial
  Synthetic oligonucleotide
agtggctaatctagataatctcagggactacctggatgggagtgtaaaggtca

SEQ ID NO: 492979 - DNA, 60 bp, Artificial
  Synthetic oligonucleotide
agtgtggattcgcacacctctcgcttacagaccaccaaatgcccctatcttatcaacact

SEQ ID NO: 492980 - DNA, 60 bp, Artificial
  Synthetic oligonucleotide
agtgtggattcgcactcctcctgcctacagacctgcaaatgcccctatcttatcaacact

SEQ ID NO: 492981 - DNA, 60 bp, Artificial
  Synthetic oligonucleotide
agttcacttgtgtcttcagtcgaatggtacatgaaatcaatggaattgcctgacgaaatt

SEQ ID NO: 492982 - DNA, 51 bp, Artificial
  Synthetic oligonucleotide
agtttatcacgagactctacagctggctgtttgagaagtctggccgtgatt

SEQ ID NO: 492983 - DNA, 60 bp, Artificial
  Synthetic oligonucleotide
agtttcaggccatagagtattcacagctcaacgccacgtcgcacctcgcgcagctagcgc

SEQ ID NO: 492984 - DNA, 52 bp, Artificial
  Synthetic oligonucleotide
agtttcggggctccggtcctgttggcaggtttggtcaaggtcgcctcgagtt

SEQ ID NO: 492985 - DNA, 50 bp, Artificial
  Synthetic oligonucleotide
agtttcgtaatttgacacctggtaatacgaatacgcgcgtctctcgttat

SEQ ID NO: 492986 - DNA, 55 bp, Artificial
  Synthetic oligonucleotide
ataaaacaaggccgtgggagtttcacttgtcggtgtctgcttattaaggtcacca

SEQ ID NO: 492987 - DNA, 58 bp, Artificial
  Synthetic oligonucleotide
ataacacaagcctgtccaaaggtcacttttgacccaattcctatacattattgtgctc

SEQ ID NO: 492988 - DNA, 59 bp, Artificial
  Synthetic oligonucleotide
ataagacgatggctagcgaaatgaacccgcttggcttcactcttgccggtcgaatgccg

SEQ ID NO: 492989 - DNA, 55 bp, Artificial
  Synthetic oligonucleotide
ataaggagagccttactaggacataaagttaaccctaggtgtaactatcaagcag

SEQ ID NO: 492990 - DNA, 55 bp, Artificial
  Synthetic oligonucleotide
ataagtcatgcaaatgggcacctgatctcattaagtatagacctgtgacagatta

SEQ ID NO: 492991 - DNA, 57 bp, Artificial
  Synthetic oligonucleotide
ataatcagtctatgggaccaaggcctaaagccatgtgtaaagttaacccctctctgc

SEQ ID NO: 492992 - DNA, 60 bp, Artificial
  Synthetic oligonucleotide
atacaacagaatggggactgtcaccactgaagtggcatttggtctagtatgcgcaacctg

SEQ ID NO: 492993 - DNA, 60 bp, Artificial
  Synthetic oligonucleotide
atacaatcgatgtcatgcctgacatatatgactttgttaaacccattggcgctgtgctgc

SEQ ID NO: 492994 - DNA, 60 bp, Artificial
  Synthetic oligonucleotide
atacgcgtgtcactccaagcgctctcaaacagagggggcgcgcgtataatgttggtctgg

SEQ ID NO: 492995 - DNA, 54 bp, Artificial
  Synthetic oligonucleotide
atactaagaccgcatatgggaggttgctcgcggacgcccgtacctcgggtttcc

SEQ ID NO: 492996 - DNA, 57 bp, Artificial
  Synthetic oligonucleotide
atactaggtgcgttaaagtttgggtgcaagatacttggagatcgattggacgtgccc

SEQ ID NO: 492997 - DNA, 59 bp, Artificial
  Synthetic oligonucleotide
atactgcagcgactcctgccgaaacaaggcctactatcagcccgttaagcccgagtatg

SEQ ID NO: 492998 - DNA, 60 bp, Artificial
  Synthetic oligonucleotide
atacttcgtgcgcgcccaagggctcattcgtgcatgcatgttggtgcggaaagtcgctgg

SEQ ID NO: 492999 - DNA, 55 bp, Artificial
  Synthetic oligonucleotide
atagatagcgaaagtaatagtaccaaatataggttaataagttgtaacacctcaa

SEQ ID NO: 493000 - DNA, 60 bp, Artificial
  Synthetic oligonucleotide
atagctggctactggagagggagctgtcaatactgctggttaagatgcacggtccgcatc

SEQ ID NO: 493001 - DNA, 59 bp, Artificial
  Synthetic oligonucleotide
ataggaatcccctcaggacaattctgcttgaaatgtgatgacaccttcctgttttgccc

SEQ ID NO: 493002 - DNA, 60 bp, Artificial
  Synthetic oligonucleotide
ataggagaggacataccctttgagggagacaacatgtgctacactgcactcccactcaag

SEQ ID NO: 493003 - DNA, 55 bp, Artificial
  Synthetic oligonucleotide
ataggcctgctttaacatctcgcagaggcactattagatttagtaggttaggtag

SEQ ID NO: 493004 - DNA, 58 bp, Artificial
  Synthetic oligonucleotide
ataggtgggcacacactcgggccgtcccctattcgttgctctgcgttcgtctcagggc

SEQ ID NO: 493005 - DNA, 53 bp, Artificial
  Synthetic oligonucleotide
atatacagtatatcgcgtgcagtagccgtgttctggcaccctacggggtcttc

SEQ ID NO: 493006 - DNA, 55 bp, Artificial
  Synthetic oligonucleotide
atatccgctagcgcatccatagtgacgtcctcaaataatggagtgggcgaggtgc

SEQ ID NO: 493007 - DNA, 57 bp, Artificial
  Synthetic oligonucleotide
atatgagaacaaccctggaagagtgactgtctctacccaaaccagtcaaacaagtgt

SEQ ID NO: 493008 - DNA, 55 bp, Artificial
  Synthetic oligonucleotide
atatggctggtatccgccctagcggccggcacaggtatagcaggcggagttaccg

SEQ ID NO: 493009 - DNA, 58 bp, Artificial
  Synthetic oligonucleotide
atattgaggtgctgcatttaacccaggggacgtgctgggagcagatgtacactccagg

SEQ ID NO: 493010 - DNA, 60 bp, Artificial
  Synthetic oligonucleotide
atcaactaccagcacgggaccatgcaagacctgcacgactcctgctcaaggaaactctac

SEQ ID NO: 493011 - DNA, 60 bp, Artificial
  Synthetic oligonucleotide
atcaactccaaccgcacagcaacttaatgatgttaggaagatctatttagcgctaatgtt

SEQ ID NO: 493012 - DNA, 58 bp, Artificial
  Synthetic oligonucleotide
atcaagataaacctttgcgatggatatatctgtctgctactccaactaaacatctgct

SEQ ID NO: 493013 - DNA, 57 bp, Artificial
  Synthetic oligonucleotide
atcacaagaggcgaggcggactccggaggtgagtacaaattttgttgtcggtgggca

SEQ ID NO: 493014 - DNA, 56 bp, Artificial
  Synthetic oligonucleotide
atcagtcataccaacggaagtggccccgaccaacgcccctactgctggcactaccc

SEQ ID NO: 493015 - DNA, 54 bp, Artificial
  Synthetic oligonucleotide
atcatcaggaattgggagactgtgaagattcaatggtcccaagaccccacgatg

SEQ ID NO: 493016 - DNA, 51 bp, Artificial
  Synthetic oligonucleotide
atcatctacttcatgccctagacggtcagtagaagtccatggcggcacttt

SEQ ID NO: 493017 - DNA, 57 bp, Artificial
  Synthetic oligonucleotide
atcattccatcgcgccagagctacccggtagtcttttgttctccccgtgggtcaaca

SEQ ID NO: 493018 - DNA, 56 bp, Artificial
  Synthetic oligonucleotide
atccagtgtgtatgcagtcgtaatgagcaattgtgggatggaaccgactactttgg

SEQ ID NO: 493019 - DNA, 60 bp, Artificial
  Synthetic oligonucleotide
atccatagaggaagcttgtagcctgacgcccccacactcagccagatctaagttcggcta

SEQ ID NO: 493020 - DNA, 60 bp, Artificial
  Synthetic oligonucleotide
atcccaagcggaggcagctctggagaaccttgtgttactcaatgcggcgtctctggccgg

SEQ ID NO: 493021 - DNA, 55 bp, Artificial
  Synthetic oligonucleotide
atccctccggggattcatgttgtgcagaaccaccagcacagtgtatccggtgcac

SEQ ID NO: 493022 - DNA, 56 bp, Artificial
  Synthetic oligonucleotide
atccctggcctctttatggtaacgagggctgtgggtgggcaggttggctcctgtcc

SEQ ID NO: 493023 - DNA, 51 bp, Artificial
  Synthetic oligonucleotide
atccggccttaagcatccttacgaatctcttccgtctcattatgcgggtat

SEQ ID NO: 493024 - DNA, 60 bp, Artificial
  Synthetic oligonucleotide
atcctcaggacgcagaacacaaccggagagcagtggggagagcgatcaggagggggagct

SEQ ID NO: 493025 - DNA, 55 bp, Artificial
  Synthetic oligonucleotide
atcctcatggcatgtcctgtatggacccactcaagtccccagtccacccgacccc

SEQ ID NO: 493026 - DNA, 60 bp, Artificial
  Synthetic oligonucleotide
atcgcctcttgccgctcactgtgctgatagaacccttcgccgtgacaacgtgaaacagat

SEQ ID NO: 493027 - DNA, 51 bp, Artificial
  Synthetic oligonucleotide
atcggcctgaggctaccttcagagctcggctggatttaggcatcccgggtg

SEQ ID NO: 493028 - DNA, 55 bp, Artificial
  Synthetic oligonucleotide
atcggggactgtcccaagtatgtcaaacagggatctttgaaactagctacaggga

SEQ ID NO: 493029 - DNA, 56 bp, Artificial
  Synthetic oligonucleotide
atcggggtatctgaatcctggggatgtctacgccacttcgcccacaggccttggtg

SEQ ID NO: 493030 - DNA, 57 bp, Artificial
  Synthetic oligonucleotide
atcggtcttcaacagtctgtacgcatctccacaactcgaggggttctcagctgaatc

SEQ ID NO: 493031 - DNA, 60 bp, Artificial
  Synthetic oligonucleotide
atcggtgttagatctgtttgactggtctcgattccgcgcgactataaacatagacacgtc

SEQ ID NO: 493032 - DNA, 57 bp, Artificial
  Synthetic oligonucleotide
atcgtggaataggaagagataggtttcggacaaaaattgaggacgcattgacattac

SEQ ID NO: 493033 - DNA, 59 bp, Artificial
  Synthetic oligonucleotide
atcgtgtctcttgtacttctcggtcacaataccctgttccgtcaggtgcgtggcaatcc

SEQ ID NO: 493034 - DNA, 56 bp, Artificial
  Synthetic oligonucleotide
atcgttggtcctaggacctgcaggaatatgtggagtgggaccttccccattaacgc

SEQ ID NO: 493035 - DNA, 55 bp, Artificial
  Synthetic oligonucleotide
atctaatggatgaagattaccagggtaggctgtgtaaccctctgaacccgtttgt

SEQ ID NO: 493036 - DNA, 56 bp, Artificial
  Synthetic oligonucleotide
atctatagctacacctagctcaaaggttagcctttccatgggtaggtttacattta

SEQ ID NO: 493037 - DNA, 51 bp, Artificial
  Synthetic oligonucleotide
atctccctgacagccgggaagacttggccggtggaagttcgagtgagcctg

SEQ ID NO: 493038 - DNA, 59 bp, Artificial
  Synthetic oligonucleotide
atctcctatacaattgtactttgttccgagtaaatataatcctgctgacggcccatcca

SEQ ID NO: 493039 - DNA, 54 bp, Artificial
  Synthetic oligonucleotide
atctgaagggtaagtgggtgcccggagcggtctacgtcctctacgggatgtggc

SEQ ID NO: 493040 - DNA, 55 bp, Artificial
  Synthetic oligonucleotide
atcttcgacgcgttgcgctcagcactctaccccgagtgtagcttaggtcgatgag

SEQ ID NO: 493041 - DNA, 53 bp, Artificial
  Synthetic oligonucleotide
atcttcggaggttaatatggaatggttagtcgatttatttaacaagctgttgg

SEQ ID NO: 493042 - DNA, 54 bp, Artificial
  Synthetic oligonucleotide
atcttgggcgggagccgaaggtgagtgaaaccaccgtagtctaggggcaattcg

SEQ ID NO: 493043 - DNA, 57 bp, Artificial
  Synthetic oligonucleotide
atctttttggttagcgagctcaagagaggccgcaacacggcaggtggtacctctact

SEQ ID NO: 493044 - DNA, 55 bp, Artificial
  Synthetic oligonucleotide
atgaacaccatgttgggttctgtgacccggatgtttacacagtggcgtgggtcca

SEQ ID NO: 493045 - DNA, 54 bp, Artificial
  Synthetic oligonucleotide
atgaaccgaacttgacaaaagtgcggtaggggtaaattctccgcattcggtgcg

SEQ ID NO: 493046 - DNA, 56 bp, Artificial
  Synthetic oligonucleotide
atgacggtatcggaacagtatgggattatttcggactgcctctaatcaaagagact

SEQ ID NO: 493047 - DNA, 51 bp, Artificial
  Synthetic oligonucleotide
atgacgtatctgactctaacttaaataagttggttcacgtagcaccgagta

SEQ ID NO: 493048 - DNA, 59 bp, Artificial
  Synthetic oligonucleotide
atgagccacagttccgagcgaagagacgcggggggaggatcagcgcccgagagggagta

SEQ ID NO: 493049 - DNA, 56 bp, Artificial
  Synthetic oligonucleotide
atgagcttacgcccgccgagactacggttagactacgagcgtacatgaacaccccg

SEQ ID NO: 493050 - DNA, 60 bp, Artificial
  Synthetic oligonucleotide
atgaggggtatgaggaattcacaatggttgggcggagagcaacagccatcctgaggaaag

SEQ ID NO: 493051 - DNA, 60 bp, Artificial
  Synthetic oligonucleotide
atgatcggaatattacccgacatgaccccaagcactgaaatgtcgctgagggggataaga

SEQ ID NO: 493052 - DNA, 60 bp, Artificial
  Synthetic oligonucleotide
atgatgcaagagcacagctcacacttgaagtgcaactactcagagtgttctggccatacc

SEQ ID NO: 493053 - DNA, 56 bp, Artificial
  Synthetic oligonucleotide
atgatggaaagtgccaaaccagaagacgtgtctttccaggggcggggagtcttcga

SEQ ID NO: 493054 - DNA, 54 bp, Artificial
  Synthetic oligonucleotide
atgattactacccagcccgataccaatctcacatgttaatcggtcatggctttg

SEQ ID NO: 493055 - DNA, 52 bp, Artificial
  Synthetic oligonucleotide
atgcagatccagtagagtcccagtcaactctagaaatagcaggattagttag

SEQ ID NO: 493056 - DNA, 60 bp, Artificial
  Synthetic oligonucleotide
atgcagattccctcacacacgctggttggagcactgcttcggtctgcgacgtactacttc

SEQ ID NO: 493057 - DNA, 60 bp, Artificial
  Synthetic oligonucleotide
atgcatgtatccaagcgaagcaggctttcacattctcgccaacttacaaggcctttctgt

SEQ ID NO: 493058 - DNA, 51 bp, Artificial
  Synthetic oligonucleotide
atgcattaggaatccttcaatcacaaccagatagaagtgaatcagaattag

SEQ ID NO: 493059 - DNA, 60 bp, Artificial
  Synthetic oligonucleotide
atgcattggtgaactcaactctactggagaccagaacaaccaatcagttcctagctgtct

SEQ ID NO: 493060 - DNA, 59 bp, Artificial
  Synthetic oligonucleotide
atgccaggggtgcgagctctgccggtacacgcgcgtcactaacgatcgcgcctatgtca

SEQ ID NO: 493061 - DNA, 60 bp, Artificial
  Synthetic oligonucleotide
atgccttcactcgaccgggcagcgtcccttgtcaggcttcagcaagatgccctaactcat

SEQ ID NO: 493062 - DNA, 60 bp, Artificial
  Synthetic oligonucleotide
atgctacacaccgggaccaggggtcagatatccactgacctttggatggtgctacaagct

SEQ ID NO: 493063 - DNA, 60 bp, Artificial
  Synthetic oligonucleotide
atgctcaagatggagtctactcagcagatggtgagctctattattaacacttcttttgaa

SEQ ID NO: 493064 - DNA, 57 bp, Artificial
  Synthetic oligonucleotide
atggattcctctctctcatggcttgactacgctgttcggtctaatgcgtcggtcacg

SEQ ID NO: 493065 - DNA, 55 bp, Artificial
  Synthetic oligonucleotide
atggcctttcaggaacgtatgtctaatacggcctatcagagaagtatggccgata

SEQ ID NO: 493066 - DNA, 52 bp, Artificial
  Synthetic oligonucleotide
atgggtcagtgcaagtcattttagattcactaccccagatacatactcagca

SEQ ID NO: 493067 - DNA, 57 bp, Artificial
  Synthetic oligonucleotide
atgggtgctataaattcaagtatgcctttccacaatgttcaccccctcaccattggg

SEQ ID NO: 493068 - DNA, 56 bp, Artificial
  Synthetic oligonucleotide
atgggttgaaccaagaagtggtcaggcaactatcccgcaggtaccctcaactacca

SEQ ID NO: 493069 - DNA, 55 bp, Artificial
  Synthetic oligonucleotide
atggtcgcagggcccggaagacattggacgtttacgcgtccctccagttgcggtc

SEQ ID NO: 493070 - DNA, 60 bp, Artificial
  Synthetic oligonucleotide
atggtctagagtggacacagcttggatacagacacctttagtattactgggtgttccaga

SEQ ID NO: 493071 - DNA, 57 bp, Artificial
  Synthetic oligonucleotide
atggtctcaatacacaaaccctgcttttgagattgcccccgatagcagccatgatta

SEQ ID NO: 493072 - DNA, 59 bp, Artificial
  Synthetic oligonucleotide
atggtggcttcagtatttcctgaccagagtagaagcgcaactgcacgtgtgggtccccc

SEQ ID NO: 493073 - DNA, 54 bp, Artificial
  Synthetic oligonucleotide
atggttccgcggcaacccctataaccaaagtttcagcggaacaatggggtcatc

SEQ ID NO: 493074 - DNA, 60 bp, Artificial
  Synthetic oligonucleotide
atggttgcacgtctgtgttactggggatgatagaaatgcgactgctagtttcatttatga

SEQ ID NO: 493075 - DNA, 60 bp, Artificial
  Synthetic oligonucleotide
atgtacacatggcattaagccagtggtatcaactcaattactgttaaatggtagcctagc

SEQ ID NO: 493076 - DNA, 55 bp, Artificial
  Synthetic oligonucleotide
atgtacccacgaatgccactagcttaatggagagattgcgcttcccggtctcagc

SEQ ID NO: 493077 - DNA, 56 bp, Artificial
  Synthetic oligonucleotide
atgtctcgcccgagctggctatcttctgggaggacttcctaaacgggatcggtaac

SEQ ID NO: 493078 - DNA, 52 bp, Artificial
  Synthetic oligonucleotide
atgtgatgtctcgactgccagtacgacaggcgaccattaagctactggtgga

SEQ ID NO: 493079 - DNA, 60 bp, Artificial
  Synthetic oligonucleotide
atgtgccggagcggacattacaaacgtccttctcggtgcatgccactgttgccaatgacc

SEQ ID NO: 493080 - DNA, 58 bp, Artificial
  Synthetic oligonucleotide
atgtggttcggttccacacaggatggggcgagtcacccttcgacatgcctcgtaagag

SEQ ID NO: 493081 - DNA, 60 bp, Artificial
  Synthetic oligonucleotide
attacccgacctaattgctggggcgcatcagaacgccgacccagttgtgctagatgtgag

SEQ ID NO: 493082 - DNA, 59 bp, Artificial
  Synthetic oligonucleotide
attaccctaacaatgtcacacaatctgactttatattagactacacactaacacacgac

SEQ ID NO: 493083 - DNA, 60 bp, Artificial
  Synthetic oligonucleotide
attaccctatagtgcagaacttacaggggcaaatggtacatcagcccatgtcagctagaa

SEQ ID NO: 493084 - DNA, 60 bp, Artificial
  Synthetic oligonucleotide
attcacaattgccagtgaaatgcttgagagccgttttagatcatcttcagtctccagtgc

SEQ ID NO: 493085 - DNA, 51 bp, Artificial
  Synthetic oligonucleotide
attcacgggatcatgcactagtccaatgggaaatcagggatatggggttaa

SEQ ID NO: 493086 - DNA, 52 bp, Artificial
  Synthetic oligonucleotide
attcagcgctcgtggaaacaagcgacgctcttgaagcggttcagtcaacctc

SEQ ID NO: 493087 - DNA, 60 bp, Artificial
  Synthetic oligonucleotide
attcatcggactgcgcgttgaatcatctgtgttgagagtccgaaacccaacattacatga

SEQ ID NO: 493088 - DNA, 55 bp, Artificial
  Synthetic oligonucleotide
attccattgggtgggcgttccaatacagtggtggatgttggtcctacacgtcccc

SEQ ID NO: 493089 - DNA, 59 bp, Artificial
  Synthetic oligonucleotide
attcgcactcctcctgcttacagaccaccaaatgcccctatcttatcaacacttccgga

SEQ ID NO: 493090 - DNA, 60 bp, Artificial
  Synthetic oligonucleotide
attctggcgatctattcaaccgtcgccagttcactagtgctgttagtctccctgggggca

SEQ ID NO: 493091 - DNA, 55 bp, Artificial
  Synthetic oligonucleotide
attcttgagctggggcactattagcctctctcttgatgccgaggggatcacaggg

SEQ ID NO: 493092 - DNA, 58 bp, Artificial
  Synthetic oligonucleotide
attgactcagatgaagtgggcgagcaaatggagcctacgtttgagcatgcggttatgg

SEQ ID NO: 493093 - DNA, 53 bp, Artificial
  Synthetic oligonucleotide
attgcaggtactcggaccttgggaacgtgacgtacgcgaattgttgactatac

SEQ ID NO: 493094 - DNA, 55 bp, Artificial
  Synthetic oligonucleotide
attgcggcatctgtggcgaacccatcgactacgagctcccgcatctcgacccgtg

SEQ ID NO: 493095 - DNA, 55 bp, Artificial
  Synthetic oligonucleotide
attgctcgtcatgcaaacgtcctgctcgcaggtgtaaatgcccaactgaaccgca

SEQ ID NO: 493096 - DNA, 55 bp, Artificial
  Synthetic oligonucleotide
attggacagctggaaaaatctgtggagttggttcaacataacaaattggctgtgg

SEQ ID NO: 493097 - DNA, 55 bp, Artificial
  Synthetic oligonucleotide
attgggacttcaaccccaacaaggatcactggcccgaggcaaatcaggtaggagc

SEQ ID NO: 493098 - DNA, 58 bp, Artificial
  Synthetic oligonucleotide
attgggcgctagcacactggtatcacggtacctttgtgcgcctgttttatcctccctc

SEQ ID NO: 493099 - DNA, 58 bp, Artificial
  Synthetic oligonucleotide
attggttcggttgtacctggatgaactcaactggattcaccaaagtgtgcggagcgcc

SEQ ID NO: 493100 - DNA, 50 bp, Artificial
  Synthetic oligonucleotide
attgtaacctcgcatacgtatgatgaactaatctccgctttaaagctgac

SEQ ID NO: 493101 - DNA, 55 bp, Artificial
  Synthetic oligonucleotide
attgttcaggcacttagggacaacctggaaccaggaaccttcgatcttggagggc

SEQ ID NO: 493102 - DNA, 52 bp, Artificial
  Synthetic oligonucleotide
attgttcccacctgccgctcccctagcccacgcaattggggaaggtgtagac

SEQ ID NO: 493103 - DNA, 50 bp, Artificial
  Synthetic oligonucleotide
attgtttgtacacatgttatctgtaatgctaaaacataggggaatcattg

SEQ ID NO: 493104 - DNA, 54 bp, Artificial
  Synthetic oligonucleotide
atttagtaccaattctcctgcgttccctaacggggcacggtgataggccgttga

SEQ ID NO: 493105 - DNA, 56 bp, Artificial
  Synthetic oligonucleotide
atttcccccataaccctgagtgcaccgtgtttcgggcccctgatggggatgtcatc

SEQ ID NO: 493106 - DNA, 51 bp, Artificial
  Synthetic oligonucleotide
atttccgggttcccacgctacgtcacctataaacgactttcaaattccgtc

SEQ ID NO: 493107 - DNA, 53 bp, Artificial
  Synthetic oligonucleotide
atttctatacgaagaggaccttactaccgatcaacgaaaagactacgaaccta

SEQ ID NO: 493108 - DNA, 50 bp, Artificial
  Synthetic oligonucleotide
atttgaccattacgcatgggaaagatccgttgacaactaagtggaaaacc

SEQ ID NO: 493109 - DNA, 52 bp, Artificial
  Synthetic oligonucleotide
atttggaccccgtggggtactgacaaagaactcccacccgaggcctattatc

SEQ ID NO: 493110 - DNA, 56 bp, Artificial
  Synthetic oligonucleotide
atttgggcgtgcccccgcaagactgctagccgagtagtgttgggtcgcgaaaggcc

SEQ ID NO: 493111 - DNA, 50 bp, Artificial
  Synthetic oligonucleotide
attttatataagagagaaactactcgcagcgcctcattttgtgggtcacc

SEQ ID NO: 493112 - DNA, 60 bp, Artificial
  Synthetic oligonucleotide
attttgtactgtgattgactccacgctcggtccactagcgagtgttagtagtagcactgt

SEQ ID NO: 493113 - DNA, 54 bp, Artificial
  Synthetic oligonucleotide
caaaattactttgaatgaagataaaccaatttcagatgtatgtgttaaagaact

SEQ ID NO: 493114 - DNA, 52 bp, Artificial
  Synthetic oligonucleotide
caaacattgaggattaaggtgcatgaggggtatgaggaattcacaatggttg

SEQ ID NO: 493115 - DNA, 55 bp, Artificial
  Synthetic oligonucleotide
caaaccactcccgtgttgagagaccccgaagtctggactgggttcattcagggcg

SEQ ID NO: 493116 - DNA, 55 bp, Artificial
  Synthetic oligonucleotide
caaacccgcggagaaaccacaagctgaaggaccctatgctggcccccttgaacga

SEQ ID NO: 493117 - DNA, 55 bp, Artificial
  Synthetic oligonucleotide
caaacggcttctgacatcatcacaaatacacgctcaatttcgacaaccgttcagc

SEQ ID NO: 493118 - DNA, 54 bp, Artificial
  Synthetic oligonucleotide
caaacggtagatttgagtaagaaagttagcgagtgtagaaacggaatcatttta

SEQ ID NO: 493119 - DNA, 50 bp, Artificial
  Synthetic oligonucleotide
caaagaaaggccatggcgcactgacccaattgtttgcatactattcaggc

SEQ ID NO: 493120 - DNA, 58 bp, Artificial
  Synthetic oligonucleotide
caaagagtcctccggcccctgaatgcggctaatcctaaccacggagcaagtgccttca

SEQ ID NO: 493121 - DNA, 53 bp, Artificial
  Synthetic oligonucleotide
caaaggtcctgttatccagatgtataccaacgtagaccaagacctcgtaggct

SEQ ID NO: 493122 - DNA, 58 bp, Artificial
  Synthetic oligonucleotide
caaatgggaaaagtactgtgtccttgaaataggggacatgcttctaagaactgccata

SEQ ID NO: 493123 - DNA, 53 bp, Artificial
  Synthetic oligonucleotide
caacaacgggaccgttcgccattctaaccgggtcaaccccaactgcgcaacaa

SEQ ID NO: 493124 - DNA, 54 bp, Artificial
  Synthetic oligonucleotide
caacgtccagacaacaccaggagtgtttaagaccccgttcggaaccataggagc

SEQ ID NO: 493125 - DNA, 50 bp, Artificial
  Synthetic oligonucleotide
caactcggcgtcaggctttgtcagggcccagtttgagcaaggcgggtggt

SEQ ID NO: 493126 - DNA, 60 bp, Artificial
  Synthetic oligonucleotide
caagaatagcaattggagattgccccaagtatgtcaaacagggctctctaaaacttgcaa

SEQ ID NO: 493127 - DNA, 51 bp, Artificial
  Synthetic oligonucleotide
caagagtgcctgagcaagtatggaattgatctccccctaatcacatatatc

SEQ ID NO: 493128 - DNA, 53 bp, Artificial
  Synthetic oligonucleotide
caagccagaggggaatacttgaagatgagcagatgtatcagaagtgctgcaac

SEQ ID NO: 493129 - DNA, 55 bp, Artificial
  Synthetic oligonucleotide
caaggacctcaggaccgtcatgcactgacgactctttctaatttgctccgctggt

SEQ ID NO: 493130 - DNA, 54 bp, Artificial
  Synthetic oligonucleotide
caaggatgaatccaaagttccgtttcctaaggtgttattttggagagcgttggc

SEQ ID NO: 493131 - DNA, 55 bp, Artificial
  Synthetic oligonucleotide
caaggccccacttgacctaagaggatgcaccatggagggttggatattggggaac

SEQ ID NO: 493132 - DNA, 52 bp, Artificial
  Synthetic oligonucleotide
caagggtggacagactgacacaaggtcgtcagacctatgattggacactaaa

SEQ ID NO: 493133 - DNA, 58 bp, Artificial
  Synthetic oligonucleotide
caagtatccagggatatcccagtcttctgggggggacataggggttcacatggcacac

SEQ ID NO: 493134 - DNA, 55 bp, Artificial
  Synthetic oligonucleotide
caagttttcgaagggaataaggagccagcagtcctcaggaacggagacccgcgcc

SEQ ID NO: 493135 - DNA, 60 bp, Artificial
  Synthetic oligonucleotide
caatacagcggattcgtgaggacactgttccagcagatgcgagatgtactcggaacattt

SEQ ID NO: 493136 - DNA, 50 bp, Artificial
  Synthetic oligonucleotide
caatacctctctgagcgtgacgaattggcccaagagctagatgatttgaa

SEQ ID NO: 493137 - DNA, 55 bp, Artificial
  Synthetic oligonucleotide
caatccccgtgacatgtgggctgaactcaatcaggatataccccaatcatgtgcc

SEQ ID NO: 493138 - DNA, 60 bp, Artificial
  Synthetic oligonucleotide
caattatgggcccatcagctcagctaggactgtccctgctcgtgaacagcattgaagagg

SEQ ID NO: 493139 - DNA, 57 bp, Artificial
  Synthetic oligonucleotide
caattcggagaactcgaccttcctcctgaggcaaggaccacagccaacttcctctta

SEQ ID NO: 493140 - DNA, 60 bp, Artificial
  Synthetic oligonucleotide
caatttgaatgatgccacctaccagagaacgagggcacttgtgcgtactgggatggatcc

SEQ ID NO: 493141 - DNA, 55 bp, Artificial
  Synthetic oligonucleotide
cacaaagttgccctccaatcactggttgcttccgcgcagagggttcaaccacccg

SEQ ID NO: 493142 - DNA, 60 bp, Artificial
  Synthetic oligonucleotide
cacaaatgggagaagtactgcgttcttgaaataggggatatgctcctaaggactgcaata

SEQ ID NO: 493143 - DNA, 55 bp, Artificial
  Synthetic oligonucleotide
cacaagccctgggtgctgtagaaataggagcaaccgctgatgtgggcccagagac

SEQ ID NO: 493144 - DNA, 55 bp, Artificial
  Synthetic oligonucleotide
cacactcacgtcgtgcacacgcggggcccgatggactttcgttcacccacctaca

SEQ ID NO: 493145 - DNA, 52 bp, Artificial
  Synthetic oligonucleotide
cacagggatgtactatagaggtaagaaatttatgtagtgcgcaagctgtagc

SEQ ID NO: 493146 - DNA, 59 bp, Artificial
  Synthetic oligonucleotide
cacagggtctaacgctaagagcatggacttgggtacaactcctggcgattgtggttgtc

SEQ ID NO: 493147 - DNA, 59 bp, Artificial
  Synthetic oligonucleotide
cacagtgttaaaacctgtagaggatgctctgtcggtgataaccaagaatgtaagaccaa

SEQ ID NO: 493148 - DNA, 60 bp, Artificial
  Synthetic oligonucleotide
cacatgattctaccctcaaattgatagcaatgctgtacacaccactcagagctaataatg

SEQ ID NO: 493149 - DNA, 57 bp, Artificial
  Synthetic oligonucleotide
cacattgattgcagcgagagcagtgggacttctgggacgcagcagtctcaggggatt

SEQ ID NO: 493150 - DNA, 55 bp, Artificial
  Synthetic oligonucleotide
cacattgtcagccgggagtaacgcccaacgtgcaacgggtggttcttcgtactct

SEQ ID NO: 493151 - DNA, 60 bp, Artificial
  Synthetic oligonucleotide
cacatttagaagggaaagtcatcctggtagcagtccatgtagccagtggctacatagagg

SEQ ID NO: 493152 - DNA, 54 bp, Artificial
  Synthetic oligonucleotide
caccaattgagtcatgaccaagtacttctgttaccccggacttagtatcaataa

SEQ ID NO: 493153 - DNA, 60 bp, Artificial
  Synthetic oligonucleotide
caccacaatactatggcgcgctttgaggatccaacacggcgaccctacaagctacctgat

SEQ ID NO: 493154 - DNA, 59 bp, Artificial
  Synthetic oligonucleotide
caccacggagcagtacagtactcaggaggccggttcaccatccctacaggtgcgggcaa

SEQ ID NO: 493155 - DNA, 60 bp, Artificial
  Synthetic oligonucleotide
caccagaagacaacccgccaatgagagtgccttatgtcgggtcgcgcactgatgagcgta

SEQ ID NO: 493156 - DNA, 50 bp, Artificial
  Synthetic oligonucleotide
cacccatggtaagactcacgactagttactcaggcccacttaacgagtat

SEQ ID NO: 493157 - DNA, 54 bp, Artificial
  Synthetic oligonucleotide
cacccctagcgggggagaactccagaactgcccctgtaacactttccaggactc

SEQ ID NO: 493158 - DNA, 60 bp, Artificial
  Synthetic oligonucleotide
caccctcagatgctgcatataagcagccgcttttcgcctgtactgggtctctctagttag

SEQ ID NO: 493159 - DNA, 53 bp, Artificial
  Synthetic oligonucleotide
caccctggctgccttcccaccgtcttgccagattagtgccttccatcagttag

SEQ ID NO: 493160 - DNA, 55 bp, Artificial
  Synthetic oligonucleotide
cacctggcttttagtatttggcttccgtccttttcggacgtgcatagaccacgtc

SEQ ID NO: 493161 - DNA, 54 bp, Artificial
  Synthetic oligonucleotide
cacgacggcactggaaagagggtctattacctcacccgtgaccctacaactccc

SEQ ID NO: 493162 - DNA, 55 bp, Artificial
  Synthetic oligonucleotide
cacgacgtgtacaccgtggtcggtggaaacaccactactatggttcacgctaagc

SEQ ID NO: 493163 - DNA, 57 bp, Artificial
  Synthetic oligonucleotide
cacgactcctgctcaaggaacctctatgttcccctcttgttgctgtacaaaaccttc

SEQ ID NO: 493164 - DNA, 55 bp, Artificial
  Synthetic oligonucleotide
cacgcaacgctctggctcgcatgaaaactctaactcagctactgagggctccacc

SEQ ID NO: 493165 - DNA, 58 bp, Artificial
  Synthetic oligonucleotide
cacgcagatctaatttagctcgtgagtgggaaacttatcgtagcaattctgcgcgcga

SEQ ID NO: 493166 - DNA, 55 bp, Artificial
  Synthetic oligonucleotide
cacgcgcattgcaacgggctgtcattgacaaaacgaagaccccgatagaaacacg

SEQ ID NO: 493167 - DNA, 54 bp, Artificial
  Synthetic oligonucleotide
cacgctaaccggctacgcaaaagatcaagttgtatgccctcattccggcggtgc

SEQ ID NO: 493168 - DNA, 55 bp, Artificial
  Synthetic oligonucleotide
cacggactcaggcacagcactctgtccgcacagatgccttcggagagcagttccg

SEQ ID NO: 493169 - DNA, 57 bp, Artificial
  Synthetic oligonucleotide
cacgtgggcaggagtagacaccaacagtggggtaacacaagcttgcccttacaatag

SEQ ID NO: 493170 - DNA, 55 bp, Artificial
  Synthetic oligonucleotide
cactacacttcctcactcctacacaccctacaccaggaatttattagaacactta

SEQ ID NO: 493171 - DNA, 54 bp, Artificial
  Synthetic oligonucleotide
cactatgcatactaagacaaaacatgaaactaggcccacaacccatagacgatg

SEQ ID NO: 493172 - DNA, 60 bp, Artificial
  Synthetic oligonucleotide
cactattcacactcgcgcgaggcttcccctttgtcgatgttggagtgtcggctctcctgc

SEQ ID NO: 493173 - DNA, 60 bp, Artificial
  Synthetic oligonucleotide
cactattcacagcaagctcatggtcctacatagtggaaacgtctaattcggacaatggga

SEQ ID NO: 493174 - DNA, 55 bp, Artificial
  Synthetic oligonucleotide
cactattggggtctacgtctttatgtctctggacaggacccagggcttactttcg

SEQ ID NO: 493175 - DNA, 60 bp, Artificial
  Synthetic oligonucleotide
cactcaaggtcagacaatcgtattaaacactgattggagtggctacagtgggtccttcat

SEQ ID NO: 493176 - DNA, 60 bp, Artificial
  Synthetic oligonucleotide
cactcaccaatccccgggtccgagcccaacttgagcttcacattgcctaccagcgcatag

SEQ ID NO: 493177 - DNA, 60 bp, Artificial
  Synthetic oligonucleotide
cactcatcctgagaggatcagtggcccataagtcctgcttgcctgcttgtgtatatggac

SEQ ID NO: 493178 - DNA, 57 bp, Artificial
  Synthetic oligonucleotide
cactcccttagccatccgagtggacgttctgtcctccttcggatgcccaggtcggac

SEQ ID NO: 493179 - DNA, 55 bp, Artificial
  Synthetic oligonucleotide
cactctggtgagcccggcactcttctatggaacactgtttggaatatggccgtca

SEQ ID NO: 493180 - DNA, 55 bp, Artificial
  Synthetic oligonucleotide
cactctgttccgacgagaaaagagatgctagaaccgcaagactgctattgggctg

SEQ ID NO: 493181 - DNA, 59 bp, Artificial
  Synthetic oligonucleotide
cactgactcaaaggcccgctacatggtggcgtacgtcccgcctggtgtcgagacaccac

SEQ ID NO: 493182 - DNA, 60 bp, Artificial
  Synthetic oligonucleotide
cactgatactggtactcatccactggtgacaggctaaggatgcccttcaggtaccccgag

SEQ ID NO: 493183 - DNA, 55 bp, Artificial
  Synthetic oligonucleotide
cactgcagtgacgcgatgaacatcatgtttgaggaggtgtttcgcacagagttcg

SEQ ID NO: 493184 - DNA, 58 bp, Artificial
  Synthetic oligonucleotide
cactgcccaagaattagtggaatcgcaacatctaccggaattgtgtcccagcccttta

SEQ ID NO: 493185 - DNA, 53 bp, Artificial
  Synthetic oligonucleotide
cactgctagcatttcagttgaagaggtcagatatcttggtgttgctcgcagga

SEQ ID NO: 493186 - DNA, 60 bp, Artificial
  Synthetic oligonucleotide
cactggcaaggttattgggatgcatgttggagggaacggttcacatgggttcgcagcagc

SEQ ID NO: 493187 - DNA, 56 bp, Artificial
  Synthetic oligonucleotide
cactggggcgttccaggaggtgtggtctgggcggaactgggagtggccaaccctca

SEQ ID NO: 493188 - DNA, 56 bp, Artificial
  Synthetic oligonucleotide
cactggtgacaggctaaggatgcccttcaggtaccccgaggtaacacgggacactc

SEQ ID NO: 493189 - DNA, 60 bp, Artificial
  Synthetic oligonucleotide
cactgtatggaatatggcagttatagcacattgttatgagtttcgtgacctaaaagttgc

SEQ ID NO: 493190 - DNA, 59 bp, Artificial
  Synthetic oligonucleotide
cactgtatgggcagaaagggcaggcatgggactagccaatcgagtcccaccggtggtag

SEQ ID NO: 493191 - DNA, 54 bp, Artificial
  Synthetic oligonucleotide
cacttcgtgcagcattaagtctgacgtgtgctggaattcgaaagacgaatagat

SEQ ID NO: 493192 - DNA, 55 bp, Artificial
  Synthetic oligonucleotide
cacttctgttcacaccatccgagagaccggacctcgacaattcgcccagagggtg

SEQ ID NO: 493193 - DNA, 55 bp, Artificial
  Synthetic oligonucleotide
cagaacattaatgagccctgcccagaaccccatacggtgtttcatttgcagcgcg

SEQ ID NO: 493194 - DNA, 59 bp, Artificial
  Synthetic oligonucleotide
cagaattaaggcgttcccactaaactgaatataagtaagtgcagtgccgaatggctgag

SEQ ID NO: 493195 - DNA, 51 bp, Artificial
  Synthetic oligonucleotide
cagacacgaggtctcttgggtgccatagtggtaagcatgacggggcgagac

SEQ ID NO: 493196 - DNA, 57 bp, Artificial
  Synthetic oligonucleotide
cagacatgttttgcgagcctaggaatcttggccttgtccccagttaaactggacaaa

SEQ ID NO: 493197 - DNA, 60 bp, Artificial
  Synthetic oligonucleotide
cagacccgtcatctttgcggttaatgacttccgccgatctatctacgctgtctcagtctg

SEQ ID NO: 493198 - DNA, 51 bp, Artificial
  Synthetic oligonucleotide
cagaccgcatattgaaatgggtagctgggttcttatacttaggcacattag

SEQ ID NO: 493199 - DNA, 59 bp, Artificial
  Synthetic oligonucleotide
cagacgatatgttcaacgcattattacccgacctaatcgccggggcgcatcagaacgcc

SEQ ID NO: 493200 - DNA, 60 bp, Artificial
  Synthetic oligonucleotide
cagagctgttttggcttgtcaccagctggccatggttcttcgccagctgtcacgtaaggc

SEQ ID NO: 493201 - DNA, 57 bp, Artificial
  Synthetic oligonucleotide
cagaggtagtgcaaaaagtggctacagaaagcatagtaatatggggaaagaccccta

SEQ ID NO: 493202 - DNA, 60 bp, Artificial
  Synthetic oligonucleotide
cagatacacataccggtgccacagaggggacacacaaatccagacaaggagatcattcga

SEQ ID NO: 493203 - DNA, 60 bp, Artificial
  Synthetic oligonucleotide
cagatgcgcgtgggtgtacgacacagtccgctctacgttcccagcaacatgtgcatgatg

SEQ ID NO: 493204 - DNA, 59 bp, Artificial
  Synthetic oligonucleotide
cagattacatccagtacaggcagggcctattgcaccaggccaaataagagaacctaggg

SEQ ID NO: 493205 - DNA, 52 bp, Artificial
  Synthetic oligonucleotide
cagattataccacaggtaagagatcaggctgggcatcttaagccagcagtac

SEQ ID NO: 493206 - DNA, 55 bp, Artificial
  Synthetic oligonucleotide
cagattcactgcaattgctccgactcgtgcggtgctggacaggtggagaggcgtc

SEQ ID NO: 493207 - DNA, 55 bp, Artificial
  Synthetic oligonucleotide
cagcaaccttttccaggttccgcatggtaccaggagtcaatgctattcagtgcgc

SEQ ID NO: 493208 - DNA, 58 bp, Artificial
  Synthetic oligonucleotide
cagcacccaagagcgacccctgagggacccccgaatcgcaaaggacatcagtatccca

SEQ ID NO: 493209 - DNA, 60 bp, Artificial
  Synthetic oligonucleotide
cagccgcggctgtgcacgcacgctcgttggccagcaccaatctatggcctcttggtggat

SEQ ID NO: 493210 - DNA, 55 bp, Artificial
  Synthetic oligonucleotide
cagcgataccgtctgtcgcgttgcatcgtagaccaggaaccgacgcacctcctcg

SEQ ID NO: 493211 - DNA, 60 bp, Artificial
  Synthetic oligonucleotide
cagcggttgggttgatgtttgccattgtgggaggtctagccgagttggatatcgaatcta

SEQ ID NO: 493212 - DNA, 60 bp, Artificial
  Synthetic oligonucleotide
cagctaaaaggggaagccatgcatggacaagtagactgtagtccaggaatatggcagtta

SEQ ID NO: 493213 - DNA, 59 bp, Artificial
  Synthetic oligonucleotide
cagctagggggactgagtaaccttcaatactcaaggctctatacgagaaacatcggtga

SEQ ID NO: 493214 - DNA, 55 bp, Artificial
  Synthetic oligonucleotide
cagctgccgacccctcaccgattattcccagggctggggccctatcagttatgcc

SEQ ID NO: 493215 - DNA, 55 bp, Artificial
  Synthetic oligonucleotide
cagcttcaagatccggatacgagatgctaaaggtgccaaatgcattgaccgacga

SEQ ID NO: 493216 - DNA, 55 bp, Artificial
  Synthetic oligonucleotide
caggaatcagccgcctgcaactgcactagctaatacgatagaggtattcagatcg

SEQ ID NO: 493217 - DNA, 52 bp, Artificial
  Synthetic oligonucleotide
caggactcgccgtccactctggaccagacgagtaccggcgtctctttgagcc

SEQ ID NO: 493218 - DNA, 60 bp, Artificial
  Synthetic oligonucleotide
caggagtgtgccaatcggaagagcgttattgctcccagagtactcaacattgtaccgccg

SEQ ID NO: 493219 - DNA, 54 bp, Artificial
  Synthetic oligonucleotide
caggattcctaggacccctgctcgtgttacaggcggggtttttctcgttgacaa

SEQ ID NO: 493220 - DNA, 55 bp, Artificial
  Synthetic oligonucleotide
caggcaagctattctgtgctggggtgagttaatgactctcgcttcctgggtgggc

SEQ ID NO: 493221 - DNA, 55 bp, Artificial
  Synthetic oligonucleotide
caggcattatctgactatttgatgcagaatccggagttaaagtcgcgtgtgctac

SEQ ID NO: 493222 - DNA, 51 bp, Artificial
  Synthetic oligonucleotide
caggccgttagtgcatggattattagcactcatctgggacgatctacggag

SEQ ID NO: 493223 - DNA, 56 bp, Artificial
  Synthetic oligonucleotide
caggcctggataccacacccaaacggcaggaccctggcacctaggaaaattggagc

SEQ ID NO: 493224 - DNA, 55 bp, Artificial
  Synthetic oligonucleotide
caggctcgtcggtgcggaacccagacctcccgtcagtggaaccaggtatgctaag

SEQ ID NO: 493225 - DNA, 55 bp, Artificial
  Synthetic oligonucleotide
cagggggggcatatacaggtttgtgactccaggggaacggccctcgggcatgttc

SEQ ID NO: 493226 - DNA, 53 bp, Artificial
  Synthetic oligonucleotide
cagggggtctctcgttccctggactggtccaaagttaccctcgatgggcgacc

SEQ ID NO: 493227 - DNA, 54 bp, Artificial
  Synthetic oligonucleotide
cagggtgtgaagagccgcgtgtgctaccaatgagtcctccggcccctgaatgcg

SEQ ID NO: 493228 - DNA, 59 bp, Artificial
  Synthetic oligonucleotide
caggtaccatcacttcaatacctagccctagtggtagtgcaacaaaatggcagacccca

SEQ ID NO: 493229 - DNA, 56 bp, Artificial
  Synthetic oligonucleotide
caggtcggattaagccatagtacgggaaaaactatgctacctgtgagccccgtcca

SEQ ID NO: 493230 - DNA, 56 bp, Artificial
  Synthetic oligonucleotide
caggtgttattcctccagtaaatgttgataggccgattccactaggacgcagagat

SEQ ID NO: 493231 - DNA, 60 bp, Artificial
  Synthetic oligonucleotide
cagtaacaaccgttcagtatgatcccgcagcactatcgttcttattgaacgctcgtgttg

SEQ ID NO: 493232 - DNA, 60 bp, Artificial
  Synthetic oligonucleotide
cagtagcaactctctattgtgtacatgcagggatagaggtacgagacaccaaagaagcct

SEQ ID NO: 493233 - DNA, 58 bp, Artificial
  Synthetic oligonucleotide
cagtatcgtgttgtccgcgccaccattcggtatcgccccctggtgccgaatgctgtcg

SEQ ID NO: 493234 - DNA, 54 bp, Artificial
  Synthetic oligonucleotide
cagtcaagagtaaggcttggtagggctcctttggtagggctctaaaaagagacc

SEQ ID NO: 493235 - DNA, 55 bp, Artificial
  Synthetic oligonucleotide
cagtcagagccctgaaccgccagtgagcacagccttacctgtcacaccggaccct

SEQ ID NO: 493236 - DNA, 52 bp, Artificial
  Synthetic oligonucleotide
cagtcaggtatggataatgtagtactctggtctatgaagagtaacagactca

SEQ ID NO: 493237 - DNA, 55 bp, Artificial
  Synthetic oligonucleotide
cagtgaaacacagggacaaattacaaagacaacaagtgtcagggagtgtggtcta

SEQ ID NO: 493238 - DNA, 58 bp, Artificial
  Synthetic oligonucleotide
cagtgaatagatctggaatggaagtagatctgacctttataaaggtgactaaaggacc

SEQ ID NO: 493239 - DNA, 55 bp, Artificial
  Synthetic oligonucleotide
cagtgcgaccgtcatccatgtagtagacctgcacaccgagacgtgcgaccactgg

SEQ ID NO: 493240 - DNA, 51 bp, Artificial
  Synthetic oligonucleotide
cagtggaagtttgacagccacctagcatatcatcacatggcccgagagctg

SEQ ID NO: 493241 - DNA, 60 bp, Artificial
  Synthetic oligonucleotide
cagtggaggccctctatcatcttagaggactactgttgtctcaggctctctaaagagtag

SEQ ID NO: 493242 - DNA, 60 bp, Artificial
  Synthetic oligonucleotide
cagtggcccataagtcctgcttgcctgcttgtgtatatggacttgccgtggccagtgggt

SEQ ID NO: 493243 - DNA, 60 bp, Artificial
  Synthetic oligonucleotide
cagtgggtgtttgacagcagcctagcacgcagacatatggcccgtgagaaacatccggag

SEQ ID NO: 493244 - DNA, 54 bp, Artificial
  Synthetic oligonucleotide
cagtgttagcatgttaccatctatgcataaccctctatgagcacaatagttaaa

SEQ ID NO: 493245 - DNA, 57 bp, Artificial
  Synthetic oligonucleotide
cagttagcgaacgctatattcaagctcacataccaaaacaaagtggtcaaagttcaa

SEQ ID NO: 493246 - DNA, 55 bp, Artificial
  Synthetic oligonucleotide
cagttatccggacagtggatatggcaatacacaagtggagactgtggaagcaacg

SEQ ID NO: 493247 - DNA, 55 bp, Artificial
  Synthetic oligonucleotide
cagtttatgggatgaaagcctaaagccatgtgtaaaactaacccctctctgtgtt

SEQ ID NO: 493248 - DNA, 55 bp, Artificial
  Synthetic oligonucleotide
cataagaggactatcaattgtggggctgctgcctctcggacttccactgaatcgc

SEQ ID NO: 493249 - DNA, 58 bp, Artificial
  Synthetic oligonucleotide
catacgggacgtgaccaatgtgcccgtaacctgtgtgacaaagaacttcacgcagtgg

SEQ ID NO: 493250 - DNA, 60 bp, Artificial
  Synthetic oligonucleotide
catactatcgtccagggactctatctgagaaactcacttcgatcactatgcttgccgttc

SEQ ID NO: 493251 - DNA, 50 bp, Artificial
  Synthetic oligonucleotide
catactgacacgtcgaggtttgcgtaaagttgacaagccgtgtccgttaa

SEQ ID NO: 493252 - DNA, 54 bp, Artificial
  Synthetic oligonucleotide
catataagcagctgctttctgcttgtaccgggtctcggttagagaaccaggtct

SEQ ID NO: 493253 - DNA, 56 bp, Artificial
  Synthetic oligonucleotide
catattcagggccgcggtgtgtacccgtggagtggctaaggcggtggactttattc

SEQ ID NO: 493254 - DNA, 60 bp, Artificial
  Synthetic oligonucleotide
catattgcaagtaggaggaggaactacttcacagcagaagtgtcccattgcagggccact

SEQ ID NO: 493255 - DNA, 55 bp, Artificial
  Synthetic oligonucleotide
catcacggggtctctgtactcaaccctgacgcggtcggaattgactactccgccc

SEQ ID NO: 493256 - DNA, 55 bp, Artificial
  Synthetic oligonucleotide
catcacgtggcccgagagttgcatccggagtactacaaggactgctgacatcgag

SEQ ID NO: 493257 - DNA, 55 bp, Artificial
  Synthetic oligonucleotide
catccgagaacatcggtgagagcggatacccgacactggtacgatgggaggaccc

SEQ ID NO: 493258 - DNA, 60 bp, Artificial
  Synthetic oligonucleotide
catcgacaatgtgatgggaatgatcggaatactgcccgatatgaccccaagtactgagat

SEQ ID NO: 493259 - DNA, 55 bp, Artificial
  Synthetic oligonucleotide
catctctcgccgccacccctggacttcgctcacaaccattcactccatctgtgga

SEQ ID NO: 493260 - DNA, 60 bp, Artificial
  Synthetic oligonucleotide
catctgccggaccgtgtgcacttcgcttcacctctgcacgtcgcatggagaccaccgtga

SEQ ID NO: 493261 - DNA, 55 bp, Artificial
  Synthetic oligonucleotide
catgatcgtcagtagtagggcgcaggggtccgacacaattgccagatgcaactgt

SEQ ID NO: 493262 - DNA, 55 bp, Artificial
  Synthetic oligonucleotide
catgccaacgtgggtacaagggagtttggcggggagacggcatcatgcagaccac

SEQ ID NO: 493263 - DNA, 55 bp, Artificial
  Synthetic oligonucleotide
catgccgatcagctagagaatttgccatattgcaagatgacttaacagtattgag

SEQ ID NO: 493264 - DNA, 55 bp, Artificial
  Synthetic oligonucleotide
catgcctgagccacacgcagtactctacgtcacaaacgagctctctcatatcgtt

SEQ ID NO: 493265 - DNA, 55 bp, Artificial
  Synthetic oligonucleotide
catgctactgttaacggtaggttcagatacaggtcggagttatatcgggaacgtg

SEQ ID NO: 493266 - DNA, 60 bp, Artificial
  Synthetic oligonucleotide
catgcttgttaagtgaggaccaagctagcaccttggtatccaatcttatcacgcatgtag

SEQ ID NO: 493267 - DNA, 55 bp, Artificial
  Synthetic oligonucleotide
catggacaggtgtcactcaaaacggaagaagtggatcctgcaaaaggggatcagc

SEQ ID NO: 493268 - DNA, 60 bp, Artificial
  Synthetic oligonucleotide
catggctgctagggtgtgctgccaactggatcctgcgcgggacgtcctttgtctacgtcc

SEQ ID NO: 493269 - DNA, 52 bp, Artificial
  Synthetic oligonucleotide
catgggacctttatgtagagcgcagcaatgcattcagcaactgctacccata

SEQ ID NO: 493270 - DNA, 53 bp, Artificial
  Synthetic oligonucleotide
catgtatcgagggtcagtcagtagaagtattactagacacaggagttgacgac

SEQ ID NO: 493271 - DNA, 58 bp, Artificial
  Synthetic oligonucleotide
cattacttccagacgcgacattatttacacactctttggaaggcggggatcttatata

SEQ ID NO: 493272 - DNA, 55 bp, Artificial
  Synthetic oligonucleotide
cattcaaagactccacggcctcagcgcgttttcactccacagttactctccaggt

SEQ ID NO: 493273 - DNA, 60 bp, Artificial
  Synthetic oligonucleotide
cattccatggggctaaggaggtcgcaatcagctactcaaccggtgcacttgccagttgta

SEQ ID NO: 493274 - DNA, 60 bp, Artificial
  Synthetic oligonucleotide
cattcgtgcatgcatgttggtgcggaaagccgctgggggccattacgtccaaatggctct

SEQ ID NO: 493275 - DNA, 60 bp, Artificial
  Synthetic oligonucleotide
cattgctataccgcacgatatagacttaggggattcccgtgtggttatacaagactatga

SEQ ID NO: 493276 - DNA, 55 bp, Artificial
  Synthetic oligonucleotide
cattgtgatttcacaccatggctggcatggcatgttgcagccaatgtgcccaacg

SEQ ID NO: 493277 - DNA, 60 bp, Artificial
  Synthetic oligonucleotide
catttagaaggaaaaattatcctggtagcagttcatgtagccagtggatacatagaagca

SEQ ID NO: 493278 - DNA, 50 bp, Artificial
  Synthetic oligonucleotide
catttagtatgggcaagcagagagttgggaagattcgcacttaaccctgg

SEQ ID NO: 493279 - DNA, 55 bp, Artificial
  Synthetic oligonucleotide
catttttctggcacggtctgcactcatcctgagaggatccgtagcccataagtcc

SEQ ID NO: 493280 - DNA, 53 bp, Artificial
  Synthetic oligonucleotide
ccaaagccttgtggtatcgtgccggcacaaaccgtatgtggcccagtatattg

SEQ ID NO: 493281 - DNA, 50 bp, Artificial
  Synthetic oligonucleotide
ccaaataataaacctgcgcaccaacaactgtgctacgctggtattgccct

SEQ ID NO: 493282 - DNA, 57 bp, Artificial
  Synthetic oligonucleotide
ccaaatgcattgaccgacgataggtcaaaacccactcaaggccaaacaatcgtatta

SEQ ID NO: 493283 - DNA, 53 bp, Artificial
  Synthetic oligonucleotide
ccaacaaggtaggagtgggagcattcgggccggggttcactcccccgcacgga

SEQ ID NO: 493284 - DNA, 55 bp, Artificial
  Synthetic oligonucleotide
ccaacacaggaacaataggagccgtatccttagacttctccccaggaacgtcagg

SEQ ID NO: 493285 - DNA, 55 bp, Artificial
  Synthetic oligonucleotide
ccaaccttcaacgtcggatggccacgagacggcacttttaacccagacattatta

SEQ ID NO: 493286 - DNA, 57 bp, Artificial
  Synthetic oligonucleotide
ccaacgggggaacgtactattgtcacctgaagaagtcagcgagacacaaggaacaga

SEQ ID NO: 493287 - DNA, 56 bp, Artificial
  Synthetic oligonucleotide
ccaactgcgcaacaacttaatgacgttaggaagatctacttagcgttaatgtttcc

SEQ ID NO: 493288 - DNA, 55 bp, Artificial
  Synthetic oligonucleotide
ccaactgcggagcacgcaccctcaaaccagagggcagcgtgtcgtaatgggcaac

SEQ ID NO: 493289 - DNA, 58 bp, Artificial
  Synthetic oligonucleotide
ccaagcaagagtcctagctgtagaaagatacctacaggatcaacggctcctagggctt

SEQ ID NO: 493290 - DNA, 57 bp, Artificial
  Synthetic oligonucleotide
ccaaggcgcggttcataaagctaaattgtacgtggaagggtcgctgcctacactgct

SEQ ID NO: 493291 - DNA, 60 bp, Artificial
  Synthetic oligonucleotide
ccaaggtgattgctattgggtaatgactgacggccccgccaataggcaggcacactatag

SEQ ID NO: 493292 - DNA, 57 bp, Artificial
  Synthetic oligonucleotide
ccaagtccttcagccgcttaaataaaaggctgccgcactcccggttagatgcctgcc

SEQ ID NO: 493293 - DNA, 60 bp, Artificial
  Synthetic oligonucleotide
ccaagtggcggtctgcacgcactcatcggacttcggcgggatcgcaactctgactttcaa

SEQ ID NO: 493294 - DNA, 52 bp, Artificial
  Synthetic oligonucleotide
ccaatacaggacagagtcattgcagaatagaatacagatagacccagtgaaa

SEQ ID NO: 493295 - DNA, 51 bp, Artificial
  Synthetic oligonucleotide
ccaatagagtactgggtaggctggcgccctgttggggcaccagaaccttct

SEQ ID NO: 493296 - DNA, 55 bp, Artificial
  Synthetic oligonucleotide
ccaattcacgaacggacggacttaaacgtagctcataatgaaggttctaccacca

SEQ ID NO: 493297 - DNA, 55 bp, Artificial
  Synthetic oligonucleotide
ccacaaagggagatggctcgacccgtggccataaagctacagtttacactgggag

SEQ ID NO: 493298 - DNA, 51 bp, Artificial
  Synthetic oligonucleotide
ccacaaatgttgaagttaaccggcgggttatggcccaatcatcggccccaa

SEQ ID NO: 493299 - DNA, 55 bp, Artificial
  Synthetic oligonucleotide
ccacaagaaccccggtgttgtgacaggatcagctgtcgggtgtgacccagatctg

SEQ ID NO: 493300 - DNA, 50 bp, Artificial
  Synthetic oligonucleotide
ccacacaaagtctggtgagcactcgttgcctcggtgttggctggttaata

SEQ ID NO: 493301 - DNA, 60 bp, Artificial
  Synthetic oligonucleotide
ccacacagagcacaatggaatgctatgtgcaacaaacctggggcaccctctcatcctaga

SEQ ID NO: 493302 - DNA, 50 bp, Artificial
  Synthetic oligonucleotide
ccacagcacgcagattggaggagtaaggatggtagacatccttaggcaga

SEQ ID NO: 493303 - DNA, 53 bp, Artificial
  Synthetic oligonucleotide
ccaccacacgtacaatctccgcagccaacacagggtcctccacagagatgcag

SEQ ID NO: 493304 - DNA, 51 bp, Artificial
  Synthetic oligonucleotide
ccaccaccctgcaactctaaaggaacaccaagacttgtacaaaaaggacag

SEQ ID NO: 493305 - DNA, 55 bp, Artificial
  Synthetic oligonucleotide
ccaccattgagaacaatggaggtggcttcatagagatgcagctacccccagggga

SEQ ID NO: 493306 - DNA, 55 bp, Artificial
  Synthetic oligonucleotide
ccaccgcacacactggttggggcgttgctccggtccgcgacatactacttctcag

SEQ ID NO: 493307 - DNA, 51 bp, Artificial
  Synthetic oligonucleotide
ccacgatcttgtattcgtttatgggtgctatcgacactggggacatcctta

SEQ ID NO: 493308 - DNA, 55 bp, Artificial
  Synthetic oligonucleotide
ccacggggccaaaagccacgtcctaacggacccgtcatgtgtgcaaccccagcac

SEQ ID NO: 493309 - DNA, 55 bp, Artificial
  Synthetic oligonucleotide
ccacggtggcaactatccaggggccctccgtcccgtcacactagtagcctacgaa

SEQ ID NO: 493310 - DNA, 54 bp, Artificial
  Synthetic oligonucleotide
ccactagtagtattaccacgtccactattcgtccccctgtaactgtagaaccca

SEQ ID NO: 493311 - DNA, 55 bp, Artificial
  Synthetic oligonucleotide
ccactcggagagttttcacctggacgtatttcgagaaccatgatgcatagtgctc

SEQ ID NO: 493312 - DNA, 59 bp, Artificial
  Synthetic oligonucleotide
ccactgtggggctgaaatcactggacatgtcaaaaacgggacgatgaggatcgttggtc

SEQ ID NO: 493313 - DNA, 60 bp, Artificial
  Synthetic oligonucleotide
ccactttaaggtgacactgatactggtactcaatcactggtgacaggctaaggatgccct

SEQ ID NO: 493314 - DNA, 52 bp, Artificial
  Synthetic oligonucleotide
ccagaaaaacggactatagaactactcctggtgagcagtctcttcgggtcag

SEQ ID NO: 493315 - DNA, 58 bp, Artificial
  Synthetic oligonucleotide
ccagatttagcctggactcaaatcttttatacagcccccagccgtaatgtgctggcca

SEQ ID NO: 493316 - DNA, 55 bp, Artificial
  Synthetic oligonucleotide
ccagcccaaccatactcgacaactacactcaatgtataaaaggctccccagagtt

SEQ ID NO: 493317 - DNA, 54 bp, Artificial
  Synthetic oligonucleotide
ccagcctacctcggtggtaaggaccccagaatcaagggtggcccctcactacaa

SEQ ID NO: 493318 - DNA, 50 bp, Artificial
  Synthetic oligonucleotide
ccagcgcaacaagcgtattgtgtagtcacagtgtgtccgaagtgtagttc

SEQ ID NO: 493319 - DNA, 60 bp, Artificial
  Synthetic oligonucleotide
ccagctcatggtccagccaagagcatggaatatgatgctgttgcaactacacactcctgg

SEQ ID NO: 493320 - DNA, 51 bp, Artificial
  Synthetic oligonucleotide
ccaggaaaacccggtagaaaccgggttgtcaatatgctaaaacgcggtgta

SEQ ID NO: 493321 - DNA, 55 bp, Artificial
  Synthetic oligonucleotide
ccaggaaaggcttgtatggggcctacgaggtgttgagatatcccgtggtcagccc

SEQ ID NO: 493322 - DNA, 55 bp, Artificial
  Synthetic oligonucleotide
ccaggacggcaccaatacccacatcatggcgactgaggcgtctaactacgcccag

SEQ ID NO: 493323 - DNA, 55 bp, Artificial
  Synthetic oligonucleotide
ccaggagcttgctagcataatacaggcaacgagtgagcgtggggcctgcggcctg

SEQ ID NO: 493324 - DNA, 55 bp, Artificial
  Synthetic oligonucleotide
ccaggaggctagtggacttgtcacacaggagacccagacggaccagctcgccaga

SEQ ID NO: 493325 - DNA, 60 bp, Artificial
  Synthetic oligonucleotide
ccaggcctgtatgggaagccatcaggctatgctgctacgatgcaccgcgagggattcttg

SEQ ID NO: 493326 - DNA, 55 bp, Artificial
  Synthetic oligonucleotide
ccaggctggagccggagtgatggtagagggagtgttccacacactatggcacacc

SEQ ID NO: 493327 - DNA, 55 bp, Artificial
  Synthetic oligonucleotide
ccagggaccgggagcggtctatagataaggtcgtgtcccaactcggaaagctgac

SEQ ID NO: 493328 - DNA, 58 bp, Artificial
  Synthetic oligonucleotide
ccaggggcgtgtcgtggccatagtacttggaggtgtgaacgagggctctagaactgcc

SEQ ID NO: 493329 - DNA, 55 bp, Artificial
  Synthetic oligonucleotide
ccagtcaacaccggaggtctaaaggctgtcagcaacgccctaaagaccggccgct

SEQ ID NO: 493330 - DNA, 52 bp, Artificial
  Synthetic oligonucleotide
ccagtcagatttacccagggattaaagtaaaacaactttgtaaactcctcag

SEQ ID NO: 493331 - DNA, 55 bp, Artificial
  Synthetic oligonucleotide
ccagtcgacagactacaccgtgcagttaggccccggacccacgcgagtgattgac

SEQ ID NO: 493332 - DNA, 60 bp, Artificial
  Synthetic oligonucleotide
ccagtcggaatatccagtatggtggaggctatggtttcaagagcccgaattgatgcacga

SEQ ID NO: 493333 - DNA, 51 bp, Artificial
  Synthetic oligonucleotide
ccagtgccgcggttaaggcatcctgttggtgggcaggtatccaacaggaat

SEQ ID NO: 493334 - DNA, 55 bp, Artificial
  Synthetic oligonucleotide
ccagtgtcactgcctgtacattaccctttggtgcaggcccgaacatcgagcatcc

SEQ ID NO: 493335 - DNA, 55 bp, Artificial
  Synthetic oligonucleotide
ccagttctcaccggggtcggcaatgacaacagatggaacggccaaatagtggggc

SEQ ID NO: 493336 - DNA, 60 bp, Artificial
  Synthetic oligonucleotide
ccatagagtattcacagctcaacgccacgtcgcacctcgcgcagctagcgcctggcttag

SEQ ID NO: 493337 - DNA, 55 bp, Artificial
  Synthetic oligonucleotide
ccatatacaggaagatatgacttaaattttgataggtgggtcacagtcaacggct

SEQ ID NO: 493338 - DNA, 60 bp, Artificial
  Synthetic oligonucleotide
ccatatgacatccctgactatgcatcgctccgatccattgtagcatcctcaggaacattg

SEQ ID NO: 493339 - DNA, 55 bp, Artificial
  Synthetic oligonucleotide
ccatcgagggaatctggacgagtgacgggcgccgagaaaccagaggctccgatac

SEQ ID NO: 493340 - DNA, 52 bp, Artificial
  Synthetic oligonucleotide
ccatcttactataccttgagttcactaacaattcagacaagcgtaatcgatg

SEQ ID NO: 493341 - DNA, 55 bp, Artificial
  Synthetic oligonucleotide
ccatgaccccgcatgcttctcttcccgaaagaccaacagggtaccgtggcccgac

SEQ ID NO: 493342 - DNA, 55 bp, Artificial
  Synthetic oligonucleotide
ccatgcctggactcttcgcctaccgcgcagggactaaggttggttactgcggagc

SEQ ID NO: 493343 - DNA, 55 bp, Artificial
  Synthetic oligonucleotide
ccatgcgtgacagaatgtcgtgggacgaatcaaacctccgcgtcatggatcggct

SEQ ID NO: 493344 - DNA, 55 bp, Artificial
  Synthetic oligonucleotide
ccatgctgggcatctatgataggtgggccgtcttaccacgccacgccaaacctgg

SEQ ID NO: 493345 - DNA, 55 bp, Artificial
  Synthetic oligonucleotide
ccatggtacagcatgtggctaaaggcgtgcggatcttggaagcccgagtggcgcg

SEQ ID NO: 493346 - DNA, 55 bp, Artificial
  Synthetic oligonucleotide
ccattacgggccgcatccttctgtcataatgtggaaggcagggagtgctgcacag

SEQ ID NO: 493347 - DNA, 60 bp, Artificial
  Synthetic oligonucleotide
ccattcgccccattgagctacagcacaggagcaaccacatacgtgccaatcacagtaacg

SEQ ID NO: 493348 - DNA, 55 bp, Artificial
  Synthetic oligonucleotide
cccaaacacgtacgcggatgggtcccacgtccacccagactatgcccatacatca

SEQ ID NO: 493349 - DNA, 52 bp, Artificial
  Synthetic oligonucleotide
cccaaacagactgcgttttagaagcaatggcgtttctcgagaaatcccatcc

SEQ ID NO: 493350 - DNA, 52 bp, Artificial
  Synthetic oligonucleotide
cccaaccgacctggagccttggtactccgtccgggatggtggtttaggtatg

SEQ ID NO: 493351 - DNA, 57 bp, Artificial
  Synthetic oligonucleotide
cccaacctccaatcactcaccaacctcctgtcctccaatttgtcctggttatcgctg

SEQ ID NO: 493352 - DNA, 55 bp, Artificial
  Synthetic oligonucleotide
cccaatgtaagcggtcgccaagtaaggcgtacaccacatcgcgttactgtcccga

SEQ ID NO: 493353 - DNA, 59 bp, Artificial
  Synthetic oligonucleotide
cccaccaacagcaggacgtcagttccatctagccctggctgcctccgagttcaaagaga

SEQ ID NO: 493354 - DNA, 56 bp, Artificial
  Synthetic oligonucleotide
cccaccactacggtaaggcgttcgcgcccctattcacgtccaacgcgatgttcaca

SEQ ID NO: 493355 - DNA, 55 bp, Artificial
  Synthetic oligonucleotide
cccacgaactctcacgggtggcagcgactctcagaaaacttggagcgcctcccct

SEQ ID NO: 493356 - DNA, 53 bp, Artificial
  Synthetic oligonucleotide
cccactatcaggacggcaaaggtacaaggtcccggttttgattacgcggtggc

SEQ ID NO: 493357 - DNA, 55 bp, Artificial
  Synthetic oligonucleotide
cccactcctactttcaacgtgaaggctacgatagtgccagggcgggtactgccgt

SEQ ID NO: 493358 - DNA, 53 bp, Artificial
  Synthetic oligonucleotide
cccactgacctttgggtggtgctacaaactagtaccaatggatccagcagagg

SEQ ID NO: 493359 - DNA, 50 bp, Artificial
  Synthetic oligonucleotide
cccactgacgttgatagcggcggtgttgatgctagtggctcattatgcca

SEQ ID NO: 493360 - DNA, 51 bp, Artificial
  Synthetic oligonucleotide
cccagcggaggtcaagggaactaagttactagcccactgggattcaggggc

SEQ ID NO: 493361 - DNA, 55 bp, Artificial
  Synthetic oligonucleotide
cccaggacaaggtaaggactctcccgctatcactcgtgcagaagctctggctatg

SEQ ID NO: 493362 - DNA, 55 bp, Artificial
  Synthetic oligonucleotide
cccaggatcaacacccgtctcttgcattcggtgcgtaccacccaccaataccggg

SEQ ID NO: 493363 - DNA, 50 bp, Artificial
  Synthetic oligonucleotide
cccagttttcgagtagtcccggacctatctaaattggagtcatccgaccg

SEQ ID NO: 493364 - DNA, 60 bp, Artificial
  Synthetic oligonucleotide
cccatactcccgtgccagtcagatgggcagataacaccagtagttacatggcagggagga

SEQ ID NO: 493365 - DNA, 60 bp, Artificial
  Synthetic oligonucleotide
ccccaattgagcatattgcaagcatgaggagaaattatttcacagcagaagtgtctcatt

SEQ ID NO: 493366 - DNA, 54 bp, Artificial
  Synthetic oligonucleotide
ccccacaaccagaatacgatttagagcttataacatcatgctcttccaatgtgt

SEQ ID NO: 493367 - DNA, 55 bp, Artificial
  Synthetic oligonucleotide
ccccaccatcacggatgcggggtcaaatgtgactgtgacaccggacgtccctgtc

SEQ ID NO: 493368 - DNA, 55 bp, Artificial
  Synthetic oligonucleotide
ccccagcctgttcataacatcaacccatgtcataccccagggcgcaaaggagttc

SEQ ID NO: 493369 - DNA, 58 bp, Artificial
  Synthetic oligonucleotide
ccccagggtcaagggtggcccttcattgcaacaagttatgagggaccagctgagacca

SEQ ID NO: 493370 - DNA, 51 bp, Artificial
  Synthetic oligonucleotide
ccccagtgcataatgtacccggcatcgagagaaactggtacgagagttgct

SEQ ID NO: 493371 - DNA, 55 bp, Artificial
  Synthetic oligonucleotide
ccccagtgtggttccgagcaagcacttctgttccccggttgcgtcttatatgctg

SEQ ID NO: 493372 - DNA, 53 bp, Artificial
  Synthetic oligonucleotide
ccccatatgacagatcgtacgaccggagaggggttcaggggagcgcgttgagc

SEQ ID NO: 493373 - DNA, 57 bp, Artificial
  Synthetic oligonucleotide
ccccatggggttctcatatgacacccgctgctttgactccactgtaaccgaaaagga

SEQ ID NO: 493374 - DNA, 54 bp, Artificial
  Synthetic oligonucleotide
cccccttgttgagagcgggggcctctaacttcgactggcgttcaactaactgcc

SEQ ID NO: 493375 - DNA, 54 bp, Artificial
  Synthetic oligonucleotide
ccccgcaagactgctagccgagtagtgttgggtcgcgaaaggccttgtaacggg

SEQ ID NO: 493376 - DNA, 52 bp, Artificial
  Synthetic oligonucleotide
ccccgccgacaggagtccccatcgatagttgattgtttgctccgaaacccgt

SEQ ID NO: 493377 - DNA, 52 bp, Artificial
  Synthetic oligonucleotide
ccccggcattcctcttggggatccctcatatgcaacagcgtccttcggaaca

SEQ ID NO: 493378 - DNA, 52 bp, Artificial
  Synthetic oligonucleotide
ccccggtccaccgaggtctatgtccgatcaatctttggcccgggtggaaccc

SEQ ID NO: 493379 - DNA, 55 bp, Artificial
  Synthetic oligonucleotide
cccctctgtagcggccacccttgggttcgggtcatacatgtctactgcccacggt

SEQ ID NO: 493380 - DNA, 52 bp, Artificial
  Synthetic oligonucleotide
cccctggtggtcctatacctgaaagcgttaccagttacgcgtggcaaacctc

SEQ ID NO: 493381 - DNA, 55 bp, Artificial
  Synthetic oligonucleotide
ccccttacaactggggaactgcaacgtagcaggatggatccttggcaacccagaa

SEQ ID NO: 493382 - DNA, 54 bp, Artificial
  Synthetic oligonucleotide
ccccttaccatgctttgggtgcactcattcttggtgttttgtctcccagcagcc

SEQ ID NO: 493383 - DNA, 55 bp, Artificial
  Synthetic oligonucleotide
ccccttagtcccatgatactgcagggctacacgctctccagtgttggtccgccgt

SEQ ID NO: 493384 - DNA, 58 bp, Artificial
  Synthetic oligonucleotide
ccccttcagcgaacagaagagactcccctcgataggagcaagaccatagcgatggggg

SEQ ID NO: 493385 - DNA, 58 bp, Artificial
  Synthetic oligonucleotide
ccccttgcaagcccttgttacgagatgaggtgtcgttcagagtgggactacacgatta

SEQ ID NO: 493386 - DNA, 55 bp, Artificial
  Synthetic oligonucleotide
cccgaagcaacaggatagcttacctgatactaaggccagtggcccggcgcattcc

SEQ ID NO: 493387 - DNA, 55 bp, Artificial
  Synthetic oligonucleotide
cccgaatacagcgtcgactccaagcaacctagtcgcgagaaacgtgcacggccgt

SEQ ID NO: 493388 - DNA, 50 bp, Artificial
  Synthetic oligonucleotide
cccgactctgtgtccagtacctttagatccaacgtatcctctgttgaaac

SEQ ID NO: 493389 - DNA, 55 bp, Artificial
  Synthetic oligonucleotide
cccgagaatcaaacccgggtagccttcttctacgacagagctgtcccaataggta

SEQ ID NO: 493390 - DNA, 52 bp, Artificial
  Synthetic oligonucleotide
cccgcagctgccaaccgactttacgcgttttaacgggcgtaactgccccgta

SEQ ID NO: 493391 - DNA, 53 bp, Artificial
  Synthetic oligonucleotide
cccgccttagtcgggtaagtcaaccccgacattaacgggcatgtcacgcggac

SEQ ID NO: 493392 - DNA, 55 bp, Artificial
  Synthetic oligonucleotide
cccgcgcttgattcttgccatgcgatacccgctaggatgtggcctaaaccctttc

SEQ ID NO: 493393 - DNA, 60 bp, Artificial
  Synthetic oligonucleotide
cccggagaaagaagtgctaatgtggaagtttgacagcatgctagcattcaagcacgtagc

SEQ ID NO: 493394 - DNA, 55 bp, Artificial
  Synthetic oligonucleotide
cccggatggggctaactcgttgacaccctgcacttgccaagcggagtcctgttgg

SEQ ID NO: 493395 - DNA, 55 bp, Artificial
  Synthetic oligonucleotide
cccgggaggccacaaaccatggaagcagtacgcatggcgtagtggactagcggtt

SEQ ID NO: 493396 - DNA, 54 bp, Artificial
  Synthetic oligonucleotide
cccgggtagccttcttctacgacagagctgtcccaataggtatgttggggcccg

SEQ ID NO: 493397 - DNA, 50 bp, Artificial
  Synthetic oligonucleotide
cccggtgttccatggaaggtttgggtcctgcgtatgtcttgcattggctt

SEQ ID NO: 493398 - DNA, 57 bp, Artificial
  Synthetic oligonucleotide
cccgtagttgatgggattcttgcttcacccgggatactccgcggtgcacacaacctc

SEQ ID NO: 493399 - DNA, 52 bp, Artificial
  Synthetic oligonucleotide
ccctaactatgcacatgtcagaagtacccgtgattagtgccgacggggaggt

SEQ ID NO: 493400 - DNA, 60 bp, Artificial
  Synthetic oligonucleotide
ccctatgtttgactctcctggcaaacatagtgatcatgatccgcgagactcgcaagagac

SEQ ID NO: 493401 - DNA, 55 bp, Artificial
  Synthetic oligonucleotide
ccctcaagaacaaatagggtggatgacaggcaaccctcctatcccagtgggagac

SEQ ID NO: 493402 - DNA, 55 bp, Artificial
  Synthetic oligonucleotide
ccctcgctgatttggacaggaggctagacaacgcccctaagggcaccagagcagc

SEQ ID NO: 493403 - DNA, 50 bp, Artificial
  Synthetic oligonucleotide
ccctgacacgtacgaacaatcggtgatgtggttgcgtgatggagattttc

SEQ ID NO: 493404 - DNA, 60 bp, Artificial
  Synthetic oligonucleotide
ccctgcagctagtgcatgcaatccaacatgtcgctagtcgtaatgagcaattgcgggatg

SEQ ID NO: 493405 - DNA, 60 bp, Artificial
  Synthetic oligonucleotide
ccctgcagctagtgtatgtaatccaacatatggctagtcgtaatgagcaattgcgggatg

SEQ ID NO: 493406 - DNA, 53 bp, Artificial
  Synthetic oligonucleotide
ccctgccttaacactgtaagcgttgtgggctcctccctcggttccggaggcgt

SEQ ID NO: 493407 - DNA, 55 bp, Artificial
  Synthetic oligonucleotide
ccctgcttactggaggttggaagaccgtgtcaggccacgcaagtgccacttcgct

SEQ ID NO: 493408 - DNA, 55 bp, Artificial
  Synthetic oligonucleotide
ccctgctttagattgtacgggagctcaccactgctcgctgcgtcgagagtgttcg

SEQ ID NO: 493409 - DNA, 54 bp, Artificial
  Synthetic oligonucleotide
ccctgttcataggggcctcttcctaccattccgacccctgcgggtccaatcacc

SEQ ID NO: 493410 - DNA, 56 bp, Artificial
  Synthetic oligonucleotide
cccttacttcttcaattgaatggtatttaagatcaatggaattagaccctgaaata

SEQ ID NO: 493411 - DNA, 57 bp, Artificial
  Synthetic oligonucleotide
cccttataggagctgccgaccaattcattggggacctcaccaagaccaactcagccg

SEQ ID NO: 493412 - DNA, 57 bp, Artificial
  Synthetic oligonucleotide
ccgaacatcgcccatcccatgtttaagccgcatatattgttgccacgggccggtggg

SEQ ID NO: 493413 - DNA, 55 bp, Artificial
  Synthetic oligonucleotide
ccgaatgtcaacagaccagtcaacaccggaggtcttaaggcagtcagcaacgccc

SEQ ID NO: 493414 - DNA, 55 bp, Artificial
  Synthetic oligonucleotide
ccgacactgttgacacagtcctcgagaagaatgtgacagtaacacactctgtcaa

SEQ ID NO: 493415 - DNA, 55 bp, Artificial
  Synthetic oligonucleotide
ccgacagaattgatttcgtcggctggaggccagctattttactcccgccccgttg

SEQ ID NO: 493416 - DNA, 56 bp, Artificial
  Synthetic oligonucleotide
ccgacagtagtgtataactatttgagttccagagctccaaactttctaaggttgga

SEQ ID NO: 493417 - DNA, 55 bp, Artificial
  Synthetic oligonucleotide
ccgagcgttatccgtgccgcaggaattgcgaacttgcgtaaacacgcctatcccg

SEQ ID NO: 493418 - DNA, 55 bp, Artificial
  Synthetic oligonucleotide
ccgagggtcatcagaggacaaccacccttaggggattgtgaacacccaggagcac

SEQ ID NO: 493419 - DNA, 55 bp, Artificial
  Synthetic oligonucleotide
ccgatgccacagaggtgatacacaaattcaaacgaggagatcattcgaactgaag

SEQ ID NO: 493420 - DNA, 52 bp, Artificial
  Synthetic oligonucleotide
ccgatgttacgcacacctggacagctaaggtctctgacggcacgaactacgt

SEQ ID NO: 493421 - DNA, 55 bp, Artificial
  Synthetic oligonucleotide
ccgattggtctactccgtgctctggttcttggttacgagacatctgggactgggt

SEQ ID NO: 493422 - DNA, 55 bp, Artificial
  Synthetic oligonucleotide
ccgcacactcccgcattcgttcccgcccgtaagtacatagaagtgccagaacagc

SEQ ID NO: 493423 - DNA, 55 bp, Artificial
  Synthetic oligonucleotide
ccgcacagaatgctgagtccctgtcatggcccctggtccttgggtgtgagcgtat

SEQ ID NO: 493424 - DNA, 57 bp, Artificial
  Synthetic oligonucleotide
ccgcacggaatttggtttccacccaaacgctgagtggatcctgaagactctcgtgaa

SEQ ID NO: 493425 - DNA, 53 bp, Artificial
  Synthetic oligonucleotide
ccgcatattcgaacatgatcaacgaattactaaatggggggtggaatacacgc

SEQ ID NO: 493426 - DNA, 53 bp, Artificial
  Synthetic oligonucleotide
ccgccacacagagaagtgcgttatccttgacgcacccggtctgttacgtgaag

SEQ ID NO: 493427 - DNA, 54 bp, Artificial
  Synthetic oligonucleotide
ccgcccccccaccctcttagaggacaagtggtacacccagcaagacctagcgcc

SEQ ID NO: 493428 - DNA, 52 bp, Artificial
  Synthetic oligonucleotide
ccgccctcacgtccagaaggggtactgtccgttttagtaggttgggacgcag

SEQ ID NO: 493429 - DNA, 55 bp, Artificial
  Synthetic oligonucleotide
ccgccgctggctcgattcattttagtaaccctacctcagtcgaattggattgggt

SEQ ID NO: 493430 - DNA, 59 bp, Artificial
  Synthetic oligonucleotide
ccgcctacttggtcgttagcgctgtcctgggcactcctgttgggggctgttcgatgctc

SEQ ID NO: 493431 - DNA, 55 bp, Artificial
  Synthetic oligonucleotide
ccgcgctcgagactaactcatgggagcccctcttcgctgtgacaatgactggctg

SEQ ID NO: 493432 - DNA, 58 bp, Artificial
  Synthetic oligonucleotide
ccgcttaaataaaaggctgccgcactcccggttagatgcctgcctagtgtagggcaga

SEQ ID NO: 493433 - DNA, 55 bp, Artificial
  Synthetic oligonucleotide
ccggagttgtgtcctagccctttaagactagtggatgggcaaacttgtgacatcg

SEQ ID NO: 493434 - DNA, 59 bp, Artificial
  Synthetic oligonucleotide
ccggcccctgaatgtggctaaccttaaccctgcagctagtgtgtacaatccagtacata

SEQ ID NO: 493435 - DNA, 55 bp, Artificial
  Synthetic oligonucleotide
ccggcccctgaatgtggctaatcctaaccccgtatccattacacacaagccagtg

SEQ ID NO: 493436 - DNA, 52 bp, Artificial
  Synthetic oligonucleotide
ccggcgcgaccacctattgttgtggaatccgtagggcctacagacccttcca

SEQ ID NO: 493437 - DNA, 55 bp, Artificial
  Synthetic oligonucleotide
ccggcggaggtcccgcaacttgggtaaggtcatcgataccctaacatgcggcttc

SEQ ID NO: 493438 - DNA, 55 bp, Artificial
  Synthetic oligonucleotide
ccgggacgtttcgtgaatctattggaagtagccatgattggaacattcgcggacg

SEQ ID NO: 493439 - DNA, 55 bp, Artificial
  Synthetic oligonucleotide
ccgggagcacacagtttctcacgtccgacgactttcagtcaccgtgcgctatgcc

SEQ ID NO: 493440 - DNA, 57 bp, Artificial
  Synthetic oligonucleotide
ccggggaggtgtggtttgggcggagttggggagtggctaaccctcagatgctgcata

SEQ ID NO: 493441 - DNA, 53 bp, Artificial
  Synthetic oligonucleotide
ccgggttcccacgctacgtcaccgctcagcgactttcaaatttcgtcgaccgt

SEQ ID NO: 493442 - DNA, 60 bp, Artificial
  Synthetic oligonucleotide
ccggtcaatccacaggtagtgtgggatgtgccgcgcagctctatcgccaacttaatcatg

SEQ ID NO: 493443 - DNA, 50 bp, Artificial
  Synthetic oligonucleotide
ccggtcgttaaggaaggaccttacgagggaccggtgaaaaagcctgtcgc

SEQ ID NO: 493444 - DNA, 51 bp, Artificial
  Synthetic oligonucleotide
ccggtgagaggatggatccggcagtaaggatggtcgctggtgttgtgggtc

SEQ ID NO: 493445 - DNA, 55 bp, Artificial
  Synthetic oligonucleotide
ccggtgatccccattactattaccctggcccctatgtgctctgagtttgccggcc

SEQ ID NO: 493446 - DNA, 55 bp, Artificial
  Synthetic oligonucleotide
ccggtggtctcaccgcagaggtcggtccttccggtctcaccgcacgtactattag

SEQ ID NO: 493447 - DNA, 54 bp, Artificial
  Synthetic oligonucleotide
ccggtggtggccgagtgagattcgaaagctatccggtaattagggtggggtggc

SEQ ID NO: 493448 - DNA, 52 bp, Artificial
  Synthetic oligonucleotide
ccggttggtcaggttaattggaaacccggatgtgagcgggcccaaactaaca

SEQ ID NO: 493449 - DNA, 58 bp, Artificial
  Synthetic oligonucleotide
ccgtagtcgacggaattcttgcttcacctggggtgctccgcggtgcacacaacctcga

SEQ ID NO: 493450 - DNA, 55 bp, Artificial
  Synthetic oligonucleotide
ccgtccacccacctacggttggactcatggcaccgcgtggccattttagctggac

SEQ ID NO: 493451 - DNA, 59 bp, Artificial
  Synthetic oligonucleotide
ccgtctaattgcgttcgcatcgcgaggcaatcacgtgtctcccacgcattatgtccctg

SEQ ID NO: 493452 - DNA, 55 bp, Artificial
  Synthetic oligonucleotide
ccgtggcaaaagccctagagtctggtctatctcaattccgggtatcggacccgcg

SEQ ID NO: 493453 - DNA, 54 bp, Artificial
  Synthetic oligonucleotide
ccgtggcacacggtgtgtttaaccccgagtttgggcctgccgccttgtctaaca

SEQ ID NO: 493454 - DNA, 55 bp, Artificial
  Synthetic oligonucleotide
ccgtgtgcaccaatctgcacccagctagacgagtcaacgctgaaccatgggtacc

SEQ ID NO: 493455 - DNA, 60 bp, Artificial
  Synthetic oligonucleotide
ccgttggcctctctcttggagatgtgccatagtacacaaattggcgggataaggatggtg

SEQ ID NO: 493456 - DNA, 55 bp, Artificial
  Synthetic oligonucleotide
ccgtttggcgcgtaatcttaactcaggcgactcggttgctctcgttcttcgtccc

SEQ ID NO: 493457 - DNA, 54 bp, Artificial
  Synthetic oligonucleotide
ccgttttgcggggagagcacactttacacccgtacttggtcggaggttgatgcc

SEQ ID NO: 493458 - DNA, 55 bp, Artificial
  Synthetic oligonucleotide
cctaactgacacaagtcgccccaatgaccccactaatgggaactgtgatgcgcca

SEQ ID NO: 493459 - DNA, 52 bp, Artificial
  Synthetic oligonucleotide
cctaatcccctacccaaacctgccaagtctccccccgcctctagttcgactc

SEQ ID NO: 493460 - DNA, 58 bp, Artificial
  Synthetic oligonucleotide
cctaatccctctcagattcgttatggcgccccgaatgtcttcggctcggctaatctgt

SEQ ID NO: 493461 - DNA, 58 bp, Artificial
  Synthetic oligonucleotide
cctaatcgctcctcgaggttacttcaaaatacgcactgggaaaagctcaataatgaga

SEQ ID NO: 493462 - DNA, 60 bp, Artificial
  Synthetic oligonucleotide
cctaccagtagcaggcggaacaagcagtgtgtacatcgaagtattgcacttaactcaagg

SEQ ID NO: 493463 - DNA, 59 bp, Artificial
  Synthetic oligonucleotide
cctacgcgccgtgtaagggcacgcagagggctctctggtagtctctattcagttgtggg

SEQ ID NO: 493464 - DNA, 60 bp, Artificial
  Synthetic oligonucleotide
cctactcccaacagacgcggggtctacttggctgcatcatcactagcctcacaggccggg

SEQ ID NO: 493465 - DNA, 52 bp, Artificial
  Synthetic oligonucleotide
cctagaaggccccgtaatgccccctgagagccccgtagacggacgaacggtg

SEQ ID NO: 493466 - DNA, 57 bp, Artificial
  Synthetic oligonucleotide
cctaggacctgcaagaacatgtggagcgggaccttccccattaatgcctacaccacg

SEQ ID NO: 493467 - DNA, 52 bp, Artificial
  Synthetic oligonucleotide
cctaggcctaggcctcgcccacagcctccaacatatgagggaccatctagtg

SEQ ID NO: 493468 - DNA, 60 bp, Artificial
  Synthetic oligonucleotide
cctagtatcatcttggaatcttcgatgcgttgcgctcagcactcggccccggagtgtagc

SEQ ID NO: 493469 - DNA, 60 bp, Artificial
  Synthetic oligonucleotide
cctagtattatcttggaatcattgatgcgttgcgctcagcactcaaccccagagtgtagc

SEQ ID NO: 493470 - DNA, 55 bp, Artificial
  Synthetic oligonucleotide
cctatagtaacaaatgcacagggacaaatggtacatcagtccctctcccccagga

SEQ ID NO: 493471 - DNA, 55 bp, Artificial
  Synthetic oligonucleotide
cctatcgggagacatgttctcgccgggggacgactgcttaccccttactcggtgc

SEQ ID NO: 493472 - DNA, 58 bp, Artificial
  Synthetic oligonucleotide
cctatggcaggaagaagcggagacagcgacgaagcactcctcctagcagcgaggacca

SEQ ID NO: 493473 - DNA, 55 bp, Artificial
  Synthetic oligonucleotide
cctcacagcattgcgtgagttgtatgggtttgacacgagtgacatcggggcgctc

SEQ ID NO: 493474 - DNA, 60 bp, Artificial
  Synthetic oligonucleotide
cctcacagtaacccagctcttgaggcgactgcaccagtggataagctcggagtgcactac

SEQ ID NO: 493475 - DNA, 60 bp, Artificial
  Synthetic oligonucleotide
cctcactgtgacccagctcctgaggcgactacaccagtggataagctcggagtgtaccac

SEQ ID NO: 493476 - DNA, 53 bp, Artificial
  Synthetic oligonucleotide
cctccacagctacatttcggaccaaccccaacacagtttctaaattcggtcgt

SEQ ID NO: 493477 - DNA, 51 bp, Artificial
  Synthetic oligonucleotide
cctcccatgagatccttcagtaacattgtctgactgtagctcaggcccact

SEQ ID NO: 493478 - DNA, 55 bp, Artificial
  Synthetic oligonucleotide
cctccgatgatcctaagagaaagccaacattagtccgggatccccgtgtgagccg

SEQ ID NO: 493479 - DNA, 55 bp, Artificial
  Synthetic oligonucleotide
cctccttccaaccggttcccatacactactgtgctccacccggctatgctatgct

SEQ ID NO: 493480 - DNA, 55 bp, Artificial
  Synthetic oligonucleotide
cctcgacaatgcggtaaaacagtgttgcgtcaaatatgtcggacgatcctaccac

SEQ ID NO: 493481 - DNA, 55 bp, Artificial
  Synthetic oligonucleotide
cctcgcctgcgaccctgctcttatggctaacctgcctccgcgcgaagtatccctt

SEQ ID NO: 493482 - DNA, 60 bp, Artificial
  Synthetic oligonucleotide
cctctacgcagccagacataacatatgacatttatgctgaccctgatttaggggaacccc

SEQ ID NO: 493483 - DNA, 51 bp, Artificial
  Synthetic oligonucleotide
cctctcaaatcagggtccattcaaaggtttcaatgaagtctccacagcatt

SEQ ID NO: 493484 - DNA, 59 bp, Artificial
  Synthetic oligonucleotide
cctctccaagctgaattcatgggtcctcactatgcttatggacaaccctttgttgtcag

SEQ ID NO: 493485 - DNA, 60 bp, Artificial
  Synthetic oligonucleotide
cctctctcggaagtacacctcctttccatggctgctagggtgtgctgccaactggatcct

SEQ ID NO: 493486 - DNA, 55 bp, Artificial
  Synthetic oligonucleotide
cctgactacgaaccacccgtggtccatggctgtccgcttccaccgtcacagtccc

SEQ ID NO: 493487 - DNA, 60 bp, Artificial
  Synthetic oligonucleotide
cctgagaagtggtcgttcgcacaagcttgcgcgtctcttgacaagaccacttctagcggc

SEQ ID NO: 493488 - DNA, 55 bp, Artificial
  Synthetic oligonucleotide
cctgctaccttgtgcgaccagatgacaggtatactggcgacagacgtaagcgcag

SEQ ID NO: 493489 - DNA, 58 bp, Artificial
  Synthetic oligonucleotide
cctgctacgggtaccatactttgtaagggcccatgccctgctacgagtgtgtgccctg

SEQ ID NO: 493490 - DNA, 55 bp, Artificial
  Synthetic oligonucleotide
cctgcttcctccagcccgttgaggggagggtcggcgagcaaggttacgacaatga

SEQ ID NO: 493491 - DNA, 55 bp, Artificial
  Synthetic oligonucleotide
cctgggactgcagtcgagctgtgttctgtgtgtaccgtggataagccaaacccac

SEQ ID NO: 493492 - DNA, 55 bp, Artificial
  Synthetic oligonucleotide
cctgggtccaccacgtacgtcccaattacggtcacgatagccccaatgtgtgccg

SEQ ID NO: 493493 - DNA, 54 bp, Artificial
  Synthetic oligonucleotide
cctggtctttccattcaagtgggtgatgcctccgcactcacagcccctgagact

SEQ ID NO: 493494 - DNA, 57 bp, Artificial
  Synthetic oligonucleotide
cctgtcaagaatccggaacctaaaggatacgtgctgaatgttccaggacctggtgcg

SEQ ID NO: 493495 - DNA, 55 bp, Artificial
  Synthetic oligonucleotide
cctgtcgaggcccctttgacaatacaggcattggcaggtgcgtttaacggggatc

SEQ ID NO: 493496 - DNA, 60 bp, Artificial
  Synthetic oligonucleotide
cctgtcttgtgcgacgagggacatgcagtaggaatgctggtgtcagtgctccattcgggt

SEQ ID NO: 493497 - DNA, 51 bp, Artificial
  Synthetic oligonucleotide
cctgtgttaacggccgaacatagagcgatgatacagaatgctttggacggg

SEQ ID NO: 493498 - DNA, 55 bp, Artificial
  Synthetic oligonucleotide
ccttacctggtagcgtaccaagccaccgtgtgcgctagggctcaagccccacccc

SEQ ID NO: 493499 - DNA, 55 bp, Artificial
  Synthetic oligonucleotide
ccttcactgtgtgtgttggacccgagacctcgcactcgattggttgcactgcgca

SEQ ID NO: 493500 - DNA, 54 bp, Artificial
  Synthetic oligonucleotide
ccttctgttgctgcaacattgggttttggcgcttacatgtccaaggcccatggg

SEQ ID NO: 493501 - DNA, 59 bp, Artificial
  Synthetic oligonucleotide
ccttgggatacacacaagtggcaatggcactatgggagcagccaatagggtctttccag

SEQ ID NO: 493502 - DNA, 55 bp, Artificial
  Synthetic oligonucleotide
ccttgggcccagaggagttctcggaagcgatacactccggcaaagggtcgagcga

SEQ ID NO: 493503 - DNA, 54 bp, Artificial
  Synthetic oligonucleotide
ccttgtggcgttccttcgtttcctaacaatcccaccaacagcagggatactaaa

SEQ ID NO: 493504 - DNA, 55 bp, Artificial
  Synthetic oligonucleotide
ccttgtgtggttgaagaccctcacctttgagccatcaaccatcgctctgatcgct

SEQ ID NO: 493505 - DNA, 57 bp, Artificial
  Synthetic oligonucleotide
ccttgttggtccaaaatgcgaacccagactgtaagaccattctaagagcattaggac

SEQ ID NO: 493506 - DNA, 56 bp, Artificial
  Synthetic oligonucleotide
cctttatgtttgagcctgagggtcctaaacccatacagggctacaacgattggcta

SEQ ID NO: 493507 - DNA, 55 bp, Artificial
  Synthetic oligonucleotide
cctttgagagcattgcccagctacttgacatcactctaccggtaggcccacccgg

SEQ ID NO: 493508 - DNA, 53 bp, Artificial
  Synthetic oligonucleotide
cctttgatggttgcatacatgttagagagagaacttgtccgcaaaacgagatt

SEQ ID NO: 493509 - DNA, 60 bp, Artificial
  Synthetic oligonucleotide
ccttttgacttctggcgtggagtgatgagcctgacaccgctgttggtgtgtgtggcggcc

SEQ ID NO: 493510 - DNA, 58 bp, Artificial
  Synthetic oligonucleotide
cgaaagcgaaagtaaaagttccagagaagttctctcgacgcaggactcggcttgctga

SEQ ID NO: 493511 - DNA, 51 bp, Artificial
  Synthetic oligonucleotide
cgaaagtgccaacccacgtctttcccactcctaacccgactcccacctcgg

SEQ ID NO: 493512 - DNA, 50 bp, Artificial
  Synthetic oligonucleotide
cgaaatctaaccataatggatcttcatcctgggtcaggaaagacgcggaa

SEQ ID NO: 493513 - DNA, 54 bp, Artificial
  Synthetic oligonucleotide
cgaagagactatcggagaggccttcgcttggctagacaggacggtagaagccat

SEQ ID NO: 493514 - DNA, 59 bp, Artificial
  Synthetic oligonucleotide
cgaagagcctactgagctaattgagagtcctccggcccctgaatgcggctaatcccaac

SEQ ID NO: 493515 - DNA, 55 bp, Artificial
  Synthetic oligonucleotide
cgaagccactgcggtggaccaaccgacacaacctgatgtcgcaacatgtcgtttc

SEQ ID NO: 493516 - DNA, 55 bp, Artificial
  Synthetic oligonucleotide
cgaataccacctaggtttatttagtcccatattcataggacccaccagaagcaac

SEQ ID NO: 493517 - DNA, 56 bp, Artificial
  Synthetic oligonucleotide
cgaatctatggacccttccgagattctagatgacaaatctcactccttcacccgga

SEQ ID NO: 493518 - DNA, 55 bp, Artificial
  Synthetic oligonucleotide
cgaatgtggctcaggtctgtgtggatgttgtttcgcaggtttacggtgtcagccc

SEQ ID NO: 493519 - DNA, 52 bp, Artificial
  Synthetic oligonucleotide
cgacactccatcagtcgaggagtctcgagatgccatgtggacgagggcatgc

SEQ ID NO: 493520 - DNA, 60 bp, Artificial
  Synthetic oligonucleotide
cgacagtcagtagcggggctgacacggaggatgtcgtgtgctgctcaatgtcttattcct

SEQ ID NO: 493521 - DNA, 55 bp, Artificial
  Synthetic oligonucleotide
cgaccctcacagggaccatcgcagtgagatttatcccggtcctgcctgggaacct

SEQ ID NO: 493522 - DNA, 54 bp, Artificial
  Synthetic oligonucleotide
cgaccctctactacccttgaaccaggtcctcctgtacgtcccgcaggggctgta

SEQ ID NO: 493523 - DNA, 54 bp, Artificial
  Synthetic oligonucleotide
cgaccgacagggcgggcgtacctacctacaactggggtgagaatgatacggacg

SEQ ID NO: 493524 - DNA, 51 bp, Artificial
  Synthetic oligonucleotide
cgacctctggcatgtacgccataacttctaaagagacgttaagtgtaataa

SEQ ID NO: 493525 - DNA, 55 bp, Artificial
  Synthetic oligonucleotide
cgaccttcctcctgaggcaaggaccacagccaacttcctcttacaagccgcatcg

SEQ ID NO: 493526 - DNA, 55 bp, Artificial
  Synthetic oligonucleotide
cgacgacctagtcgttatctgtgaaagtcagggagtcccagaggacgcagcgagc

SEQ ID NO: 493527 - DNA, 55 bp, Artificial
  Synthetic oligonucleotide
cgacgttctccccgtcggactatggttcggtgttcgctgcaaatcgattgaccgg

SEQ ID NO: 493528 - DNA, 50 bp, Artificial
  Synthetic oligonucleotide
cgactaaaatagttggtgaccatccgctggttatagagcgtgtgcgggct

SEQ ID NO: 493529 - DNA, 55 bp, Artificial
  Synthetic oligonucleotide
cgactcccttcccacaagcgactgtcgtgcggattgtcttgcgtactaactgggc

SEQ ID NO: 493530 - DNA, 52 bp, Artificial
  Synthetic oligonucleotide
cgacttcaacaaggcctctcgacggcctgacggagttcagacttactgtcga

SEQ ID NO: 493531 - DNA, 55 bp, Artificial
  Synthetic oligonucleotide
cgacttgaactcgactatccaatacactagccatacaactcctaatggacataca

SEQ ID NO: 493532 - DNA, 55 bp, Artificial
  Synthetic oligonucleotide
cgagagagtcttagtagatagggaggttaagcagccattgcttgtaccagagcag

SEQ ID NO: 493533 - DNA, 53 bp, Artificial
  Synthetic oligonucleotide
cgagagcttaagattgctgggagattcttctccctgatgtcatggcaattgag

SEQ ID NO: 493534 - DNA, 55 bp, Artificial
  Synthetic oligonucleotide
cgagcgtgtcgagtctcaggctaacgctcacgtgacgtctttcgggtcccggcta

SEQ ID NO: 493535 - DNA, 51 bp, Artificial
  Synthetic oligonucleotide
cgagctatcgaccctgctccactgactgaggaaccgaaaggtattctcttt

SEQ ID NO: 493536 - DNA, 55 bp, Artificial
  Synthetic oligonucleotide
cgagctccatgatagcgagcgtgattacctcgagtgcaatgggtgggccccatac

SEQ ID NO: 493537 - DNA, 58 bp, Artificial
  Synthetic oligonucleotide
cgagctgccgaccccttactgattttgaccagggctggggccctatcagttatgctaa

SEQ ID NO: 493538 - DNA, 52 bp, Artificial
  Synthetic oligonucleotide
cgaggagacaacccccgctccgaaacaggagtcgaaagacagggaaccctta

SEQ ID NO: 493539 - DNA, 55 bp, Artificial
  Synthetic oligonucleotide
cgaggtgccattggacactgaggggatgaacagcaacgaaagtgagtggggccag

SEQ ID NO: 493540 - DNA, 55 bp, Artificial
  Synthetic oligonucleotide
cgagttgcctgcatggtacaaggtgacaatcaagtaatagctgtaacgagagagg

SEQ ID NO: 493541 - DNA, 55 bp, Artificial
  Synthetic oligonucleotide
cgatcgttaaagccattgaatctgctacgtctgcgctggttcagcacggaagggg

SEQ ID NO: 493542 - DNA, 56 bp, Artificial
  Synthetic oligonucleotide
cgatggtgtgaaagagttagcttcagaaacaatctataaagttgtaaacaaaccac

SEQ ID NO: 493543 - DNA, 55 bp, Artificial
  Synthetic oligonucleotide
cgcaacaatccctcacccactggagatgtgcggagacttgcacgtgcgatcgggg

SEQ ID NO: 493544 - DNA, 57 bp, Artificial
  Synthetic oligonucleotide
cgcaatggcgtcgaccactgggacgcatacaagggggagagggtcgtcctatgggac

SEQ ID NO: 493545 - DNA, 59 bp, Artificial
  Synthetic oligonucleotide
cgcactcctccagcttatagaccaccaaatgcccctatcttatcaacacttccggagac

SEQ ID NO: 493546 - DNA, 55 bp, Artificial
  Synthetic oligonucleotide
cgcagacgtaccagaagtgagcgcacgccaatacaccttgcctatcgtgagtgac

SEQ ID NO: 493547 - DNA, 55 bp, Artificial
  Synthetic oligonucleotide
cgcagcagtctcaggggactacagaaggggtgggaagcccttaagtatctgggga

SEQ ID NO: 493548 - DNA, 54 bp, Artificial
  Synthetic oligonucleotide
cgcaggttactcaatgctataagagctcggcttaacgccacatttactgtgtgt

SEQ ID NO: 493549 - DNA, 56 bp, Artificial
  Synthetic oligonucleotide
cgcagtccccaacctccaatcactcaccaacctcctgtcctccaatttgtcctggt

SEQ ID NO: 493550 - DNA, 53 bp, Artificial
  Synthetic oligonucleotide
cgcatatacaatcggcttcagggatatatcgaggcggtacaattggaggagtt

SEQ ID NO: 493551 - DNA, 57 bp, Artificial
  Synthetic oligonucleotide
cgcatggggaagtagaccatgtccccggagatgagcacgttcccgctggcgtttacg

SEQ ID NO: 493552 - DNA, 54 bp, Artificial
  Synthetic oligonucleotide
cgccacctccacaatttaaaaaacgttacaatactagtgataattcaagaggta

SEQ ID NO: 493553 - DNA, 56 bp, Artificial
  Synthetic oligonucleotide
cgccaccttaggttttggggcgtatatgtctaaggcacatggtgtcgaccctaaca

SEQ ID NO: 493554 - DNA, 60 bp, Artificial
  Synthetic oligonucleotide
cgccacgtgtgagcagattgctgactcacagcatcggtctcacagacagatggtgacaac

SEQ ID NO: 493555 - DNA, 57 bp, Artificial
  Synthetic oligonucleotide
cgccagacccgaagatgtgtctttccaggggcggggagtcttcgagctctcggacga

SEQ ID NO: 493556 - DNA, 60 bp, Artificial
  Synthetic oligonucleotide
cgcccatcaagactctgtataaatgtacccgcttcgtgcattgtattcagtcgctctgcg

SEQ ID NO: 493557 - DNA, 55 bp, Artificial
  Synthetic oligonucleotide
cgcccgcacacgttgacgattacgaggagtgcacacatcagcccgcttcgcttgg

SEQ ID NO: 493558 - DNA, 54 bp, Artificial
  Synthetic oligonucleotide
cgccctaaagaccggccgctacagaaacgaagccggactgagtggcctcgtcct

SEQ ID NO: 493559 - DNA, 55 bp, Artificial
  Synthetic oligonucleotide
cgccggccaggagacatacaccagcacttccggtgagccgtgtcaaggacagaca

SEQ ID NO: 493560 - DNA, 55 bp, Artificial
  Synthetic oligonucleotide
cgccgggaaacaggtcacctcatggacaattggacactattggggtctacgtctt

SEQ ID NO: 493561 - DNA, 51 bp, Artificial
  Synthetic oligonucleotide
cgccgggtcatcacagagcatgaccgaggagacaacatgaataactcgcct

SEQ ID NO: 493562 - DNA, 60 bp, Artificial
  Synthetic oligonucleotide
cgcctacataggtttgcgcccccttgcaagcctttgctacgagatgaggtgtcattcaga

SEQ ID NO: 493563 - DNA, 55 bp, Artificial
  Synthetic oligonucleotide
cgcctggtcattcggggtcccggataacgagccctggtactgtcagaaccctctc

SEQ ID NO: 493564 - DNA, 58 bp, Artificial
  Synthetic oligonucleotide
cgccttctcgcgcctatcacggcctactcccaacagacgcggggcctgcttggctgta

SEQ ID NO: 493565 - DNA, 60 bp, Artificial
  Synthetic oligonucleotide
cgcctttccatggctgctaggatgtgctgccaactggatcctgcgcgggacgtcctttgt

SEQ ID NO: 493566 - DNA, 52 bp, Artificial
  Synthetic oligonucleotide
cgcgcaaaatacgcgcaaaacgaaggtaggacggcgcttgaagcaaataacg

SEQ ID NO: 493567 - DNA, 53 bp, Artificial
  Synthetic oligonucleotide
cgcgcacatcgatacttacgagctgtgcgacgatctaaccctcgccattcgtg

SEQ ID NO: 493568 - DNA, 59 bp, Artificial
  Synthetic oligonucleotide
cgcgcagacactatttggataatatcacaaaggttaccgattaatgctaatgtaatttg

SEQ ID NO: 493569 - DNA, 55 bp, Artificial
  Synthetic oligonucleotide
cgcgcgaggtgcatgcgtagccattataaccgtggataactcagtttccgccacg

SEQ ID NO: 493570 - DNA, 60 bp, Artificial
  Synthetic oligonucleotide
cgcgggaagggatccttcatattacacgatatcccgactagagatcatcgcgggatggag

SEQ ID NO: 493571 - DNA, 55 bp, Artificial
  Synthetic oligonucleotide
cgcggggtcaatcaatgctcccacggtttcagacagcagggcgcttgctaggagg

SEQ ID NO: 493572 - DNA, 55 bp, Artificial
  Synthetic oligonucleotide
cgcggtaccgctgcctacccacttcttggctcgggtatataccaggtccctgttg

SEQ ID NO: 493573 - DNA, 55 bp, Artificial
  Synthetic oligonucleotide
cgcgtgcaaatggctacgggtatctagtcggacgtgttggcaatgaagcatgggg

SEQ ID NO: 493574 - DNA, 55 bp, Artificial
  Synthetic oligonucleotide
cgcgtggcccgttctggagcaactcaactttacggatcacatgagaccggaccct

SEQ ID NO: 493575 - DNA, 55 bp, Artificial
  Synthetic oligonucleotide
cgctagggtctcactcctagcatgccgacgacagctcctgcgttgcactccacac

SEQ ID NO: 493576 - DNA, 60 bp, Artificial
  Synthetic oligonucleotide
cgctctaccagaacgatctaaccgcgggggtgcacatcttctgcgacgggagccatcagt

SEQ ID NO: 493577 - DNA, 55 bp, Artificial
  Synthetic oligonucleotide
cgctgaggtggactcggtcgttcccgtcaataacacctctacgcacatggagggg

SEQ ID NO: 493578 - DNA, 55 bp, Artificial
  Synthetic oligonucleotide
cgctgttagtcccgcaaaagctggacaacttgtcacagtcgccatttcaaccgtt

SEQ ID NO: 493579 - DNA, 55 bp, Artificial
  Synthetic oligonucleotide
cgctgttccaagcccgcaagtacgctgggttcgaacggctgtggttcccctactc

SEQ ID NO: 493580 - DNA, 56 bp, Artificial
  Synthetic oligonucleotide
cgcttctcggtgggcttccgacagaattgatttcgtcggccggtggtcagctgttt

SEQ ID NO: 493581 - DNA, 55 bp, Artificial
  Synthetic oligonucleotide
cggaacattgtacacctcatcatacggcactcaggcaagctattctgtgttgggg

SEQ ID NO: 493582 - DNA, 55 bp, Artificial
  Synthetic oligonucleotide
cggaagggtaagaagtcgctcgtgaccaacgtgccaactctgacgagtggtgcga

SEQ ID NO: 493583 - DNA, 55 bp, Artificial
  Synthetic oligonucleotide
cggacaaggtcttgtcggcagaaaggtactacacaatagatttggcaacctggac

SEQ ID NO: 493584 - DNA, 53 bp, Artificial
  Synthetic oligonucleotide
cggacccggaacaaatgggaccccgctgggtgttccactcctttgattggcga

SEQ ID NO: 493585 - DNA, 55 bp, Artificial
  Synthetic oligonucleotide
cggaccgctatgtccagcgtaccaacctgtactattatggaggcagctcccgcct

SEQ ID NO: 493586 - DNA, 50 bp, Artificial
  Synthetic oligonucleotide
cggagcaaccacatggtatttcaatccagtgattctcagaccaaataacg

SEQ ID NO: 493587 - DNA, 55 bp, Artificial
  Synthetic oligonucleotide
cggagcctaggcggctccaaattcagcgtttgcactgtcgtgtccaacacacccg

SEQ ID NO: 493588 - DNA, 54 bp, Artificial
  Synthetic oligonucleotide
cggaggagggactttatgtcctccccgtgtgttgtttgctggggtacaggtcgc

SEQ ID NO: 493589 - DNA, 54 bp, Artificial
  Synthetic oligonucleotide
cggaggcaaatgccgtggatgaggccagtggtgacttggtcacctttaggagcc

SEQ ID NO: 493590 - DNA, 56 bp, Artificial
  Synthetic oligonucleotide
cggagtggagtctgcggtactaaggggattcttaattctaggcaaggaggacagaa

SEQ ID NO: 493591 - DNA, 60 bp, Artificial
  Synthetic oligonucleotide
cggagtgtggattcgcactcctccagcttatagaccatcaaatgcccctatcttatcaac

SEQ ID NO: 493592 - DNA, 60 bp, Artificial
  Synthetic oligonucleotide
cggatactccaagatacagttactattagtaacgatctgtcagatctgtatcttggagta

SEQ ID NO: 493593 - DNA, 55 bp, Artificial
  Synthetic oligonucleotide
cggatcgcacaagcaacggtcagcgttgacacagcgtactatggggcattgtggt

SEQ ID NO: 493594 - DNA, 55 bp, Artificial
  Synthetic oligonucleotide
cggatgatggaaagtgcaagatcagaagatgtgtctttccaggggcggggagtat

SEQ ID NO: 493595 - DNA, 52 bp, Artificial
  Synthetic oligonucleotide
cggattaaacctattggctttgcgcctacaagtcaaaggcgctatgagctgc

SEQ ID NO: 493596 - DNA, 53 bp, Artificial
  Synthetic oligonucleotide
cggcaatggtacgcaacccaatggtggatggggacgtcatcaacccgtttggg

SEQ ID NO: 493597 - DNA, 58 bp, Artificial
  Synthetic oligonucleotide
cggcccctgaatgcggctaatcctaaccacggagcaggtggttgcaaaccagcaattg

SEQ ID NO: 493598 - DNA, 60 bp, Artificial
  Synthetic oligonucleotide
cggcgcagccagcactcacaataacggaagatacggcccgcacggccaacctagcattag

SEQ ID NO: 493599 - DNA, 52 bp, Artificial
  Synthetic oligonucleotide
cggctagtactccggtattgcggtacccttgtacgcctgttttatatcccct

SEQ ID NO: 493600 - DNA, 51 bp, Artificial
  Synthetic oligonucleotide
cggctatgtaatatgccaccgtgttgggcgttttgatggggtaatttggct

SEQ ID NO: 493601 - DNA, 60 bp, Artificial
  Synthetic oligonucleotide
cgggaagccttagagtctccagagcattgttcacctaaccatacagcactaaggcaagct

SEQ ID NO: 493602 - DNA, 57 bp, Artificial
  Synthetic oligonucleotide
cgggaaggtcagtcaaaattaccctatagtgcagaatcttcaagggcaaatggtaca

SEQ ID NO: 493603 - DNA, 56 bp, Artificial
  Synthetic oligonucleotide
cgggacacgccgtgggcatattcagggccgcggtgtgtacccgtggagtggctaag

SEQ ID NO: 493604 - DNA, 56 bp, Artificial
  Synthetic oligonucleotide
cgggacgatggtaatggaactaatacggatgataaagcgagggattaacgatagga

SEQ ID NO: 493605 - DNA, 55 bp, Artificial
  Synthetic oligonucleotide
cggggccaacgaaggtgctcgcactgcgctgtctgtggtgacgtggacaaaagac

SEQ ID NO: 493606 - DNA, 55 bp, Artificial
  Synthetic oligonucleotide
cggggcgtagacgtgctttataatggctggagctttctttgctggattggcatct

SEQ ID NO: 493607 - DNA, 60 bp, Artificial
  Synthetic oligonucleotide
cgggtcaatgcgggcaggaggtctaggcgcacaaactatgataaccctgtggctacatgg

SEQ ID NO: 493608 - DNA, 55 bp, Artificial
  Synthetic oligonucleotide
cgggtgagcccctaagccatggttgtactgcactatcaatctaagacggtccttc

SEQ ID NO: 493609 - DNA, 51 bp, Artificial
  Synthetic oligonucleotide
cgggtggccgtacgggctatataccccttggtacccggcctcctactgtgg

SEQ ID NO: 493610 - DNA, 58 bp, Artificial
  Synthetic oligonucleotide
cgggttgaacagaatcctaagaggttggaggctgcataccgtgagacttgctcccggc

SEQ ID NO: 493611 - DNA, 55 bp, Artificial
  Synthetic oligonucleotide
cgggtttgcctaccccatgcactagcaaagcactacaccacagtcctcgaagggc

SEQ ID NO: 493612 - DNA, 60 bp, Artificial
  Synthetic oligonucleotide
cggtcaaaattgatatgctccaacagggcaaaaacaactgcgatcgttatccgcaaagca

SEQ ID NO: 493613 - DNA, 60 bp, Artificial
  Synthetic oligonucleotide
cggtctgctctcattctgaggggatcagtggcccataagtcttgcctgcctgcttgtgtg

SEQ ID NO: 493614 - DNA, 55 bp, Artificial
  Synthetic oligonucleotide
cggtgttcagcctatgactggtcctactggtcaggtgttcgctctccgtgctgtc

SEQ ID NO: 493615 - DNA, 55 bp, Artificial
  Synthetic oligonucleotide
cggttactgcgcgacacaacgcacatttcgcagacggccatgccacaaggggtgg

SEQ ID NO: 493616 - DNA, 55 bp, Artificial
  Synthetic oligonucleotide
cgtaaactgtcagtctagccacgtccgtttagatcaaaagtcacgtatactgcga

SEQ ID NO: 493617 - DNA, 53 bp, Artificial
  Synthetic oligonucleotide
cgtaaccccacggccacctgtgtcttcaaagtgttggccccgtaccgcccaga

SEQ ID NO: 493618 - DNA, 54 bp, Artificial
  Synthetic oligonucleotide
cgtacccagatgttcaatagcaaacctaatcatgaatatagcaacgtgcttacc

SEQ ID NO: 493619 - DNA, 60 bp, Artificial
  Synthetic oligonucleotide
cgtactggtgggatggactacaatcctccgatgatttcgccctcatagtgaatgcaccga

SEQ ID NO: 493620 - DNA, 55 bp, Artificial
  Synthetic oligonucleotide
cgtataagtggaggttcgccagtcccttcagcaaggattggaccacgaaagcgcg

SEQ ID NO: 493621 - DNA, 52 bp, Artificial
  Synthetic oligonucleotide
cgtcaaagttggctcggttacttcgggcgacacaacgacggtaactaactcg

SEQ ID NO: 493622 - DNA, 51 bp, Artificial
  Synthetic oligonucleotide
cgtccccttctccgtccgccgtaccgtccgaccacggggcgcacctctctt

SEQ ID NO: 493623 - DNA, 55 bp, Artificial
  Synthetic oligonucleotide
cgtccgccatgtatgggctagggggggctcagataaagaacctccccctgaagac

SEQ ID NO: 493624 - DNA, 55 bp, Artificial
  Synthetic oligonucleotide
cgtcctgagatacctctaacgttccatcccgcggacgtcggccgagtgagagctc

SEQ ID NO: 493625 - DNA, 55 bp, Artificial
  Synthetic oligonucleotide
cgtcctgcgaagcctgagaagggtcctgagcgcactatggaagactcttggaggg

SEQ ID NO: 493626 - DNA, 55 bp, Artificial
  Synthetic oligonucleotide
cgtccttaacaacaccagaccgccgctgggcaattggttcggttgtacctggatg

SEQ ID NO: 493627 - DNA, 55 bp, Artificial
  Synthetic oligonucleotide
cgtctagtgtgggcctgcaggggtatagaaattggcagagggcagcccctagggg

SEQ ID NO: 493628 - DNA, 55 bp, Artificial
  Synthetic oligonucleotide
cgtctcgcgaacttcattaggcgacagttaaccaaaccagcatatggtcgtatgg

SEQ ID NO: 493629 - DNA, 55 bp, Artificial
  Synthetic oligonucleotide
cgtcttgatcgtgatagagtacccacaatggttggagtcacccggcagtcccgag

SEQ ID NO: 493630 - DNA, 56 bp, Artificial
  Synthetic oligonucleotide
cgtgaccggtcagtactcttaccaccctccgcctacttggtcgttgcgctgtcctg

SEQ ID NO: 493631 - DNA, 55 bp, Artificial
  Synthetic oligonucleotide
cgtgcactcgcggggactgatggactgtcgttcacccacctacagctggactcac

SEQ ID NO: 493632 - DNA, 55 bp, Artificial
  Synthetic oligonucleotide
cgtgcccagacatgaagccatgttccgctggatgcggttctcagacctcagcacg

SEQ ID NO: 493633 - DNA, 55 bp, Artificial
  Synthetic oligonucleotide
cgtgcgtggtaattatttccgttgtcccaggggtggggggagttcatctgttgca

SEQ ID NO: 493634 - DNA, 60 bp, Artificial
  Synthetic oligonucleotide
cgtggactatgaaaatcctcataggagtcattattacatggataggaatgaattcacgta

SEQ ID NO: 493635 - DNA, 57 bp, Artificial
  Synthetic oligonucleotide
cgtggtctccacccttcctcaagccgtgatgggcccctcatacggattccagtactc

SEQ ID NO: 493636 - DNA, 59 bp, Artificial
  Synthetic oligonucleotide
cgtgtgctacgtggtcgtagtgagtgggagaaatatggagcggggataattcacaatcc

SEQ ID NO: 493637 - DNA, 55 bp, Artificial
  Synthetic oligonucleotide
cgttcgacataaagcgctgcgagagccttgggatagggtctgtacttggtggcgc

SEQ ID NO: 493638 - DNA, 52 bp, Artificial
  Synthetic oligonucleotide
cgttctccaacggtgctcctatggggcacaagttgcaggatgcagcgcctta

SEQ ID NO: 493639 - DNA, 55 bp, Artificial
  Synthetic oligonucleotide
cgttctccacgtcccaatatttggatgacgggctctactcagggtcctcagggtc

SEQ ID NO: 493640 - DNA, 55 bp, Artificial
  Synthetic oligonucleotide
cgttgtgcgtacgcggagcccgatggactatcgttcacccacctacagctggact

SEQ ID NO: 493641 - DNA, 60 bp, Artificial
  Synthetic oligonucleotide
cgtttctctgggcacagttgtgcatccctctggcagcgcttattattctgttccgctgct

SEQ ID NO: 493642 - DNA, 51 bp, Artificial
  Synthetic oligonucleotide
cgtttgctttggagccttggaccttagtggacactagtacagagactttta

SEQ ID NO: 493643 - DNA, 56 bp, Artificial
  Synthetic oligonucleotide
cgtttggacaatcacgaatgtttattccacatattacacttagttttagcaccaaa

SEQ ID NO: 493644 - DNA, 55 bp, Artificial
  Synthetic oligonucleotide
cgtttggcagctcgaaggcgcagtgctccatactcctggatgtgtcccctgtgag

SEQ ID NO: 493645 - DNA, 56 bp, Artificial
  Synthetic oligonucleotide
ctaaaagtcaggtcggattaagccatagtacggaaaaaactatgctacctgtgagc

SEQ ID NO: 493646 - DNA, 58 bp, Artificial
  Synthetic oligonucleotide
ctaaaggtcccgaatgcggaaacagacaatcagtccggtccagttgcacatcaagtaa

SEQ ID NO: 493647 - DNA, 56 bp, Artificial
  Synthetic oligonucleotide
ctaaatcccgctttctatgtggctcacatcgcgttggaaactgggtgggggcgttc

SEQ ID NO: 493648 - DNA, 52 bp, Artificial
  Synthetic oligonucleotide
ctaacctggttctttatgccgcccctcttagtccgcttttacccctccagga

SEQ ID NO: 493649 - DNA, 56 bp, Artificial
  Synthetic oligonucleotide
ctaactaaatcccaagcacccatgtccggtttacagagtatgctactaagggcaat

SEQ ID NO: 493650 - DNA, 58 bp, Artificial
  Synthetic oligonucleotide
ctaactaaatcccaagcacccatgtctggtttacaaagtatgttactgagagcaattg

SEQ ID NO: 493651 - DNA, 60 bp, Artificial
  Synthetic oligonucleotide
ctaagtaccctctggtgattaggatttacatgaggatgaagcacgtcagggcgtggatac

SEQ ID NO: 493652 - DNA, 60 bp, Artificial
  Synthetic oligonucleotide
ctaatcaggcatgaaaacagaatggtactagccagcactacagctaaggctatggaacag

SEQ ID NO: 493653 - DNA, 56 bp, Artificial
  Synthetic oligonucleotide
ctacaaagactgctgacatcgagttttctacaagggactttccgctggggactttc

SEQ ID NO: 493654 - DNA, 58 bp, Artificial
  Synthetic oligonucleotide
ctacaagcgctgccatttgattatcagactagcgagaaaggtgggctaacctatgcta

SEQ ID NO: 493655 - DNA, 60 bp, Artificial
  Synthetic oligonucleotide
ctacaccacgccctctcagattacctgacgggcctccttgcgctcagcgatcaaaattct

SEQ ID NO: 493656 - DNA, 55 bp, Artificial
  Synthetic oligonucleotide
ctacatcccgcgcctctgctacaagctcactatatgggtccacgcctagcgggtc

SEQ ID NO: 493657 - DNA, 55 bp, Artificial
  Synthetic oligonucleotide
ctaccaagctggagccggggtgatggtagagggagtgttccacacactgtggcac

SEQ ID NO: 493658 - DNA, 60 bp, Artificial
  Synthetic oligonucleotide
ctaccatgcgaacaattcaaccgacactgttgacacagtcctcgagaagaatgtgacagt

SEQ ID NO: 493659 - DNA, 57 bp, Artificial
  Synthetic oligonucleotide
ctaccatggcaagctactgtgctaaatggggcaaagttcctgattggacggaaaact

SEQ ID NO: 493660 - DNA, 55 bp, Artificial
  Synthetic oligonucleotide
ctacccagctaggtaccagtcacacatgctaatcggtcgcgggttcgcgtcccct

SEQ ID NO: 493661 - DNA, 53 bp, Artificial
  Synthetic oligonucleotide
ctaccccccaaaaccttgcggtattgtgcccgcaaagactgtgtgtggtccgg

SEQ ID NO: 493662 - DNA, 55 bp, Artificial
  Synthetic oligonucleotide
ctaccgacagagccgtaatgcggcggccctaattgcaggatgtgggctcaaactg

SEQ ID NO: 493663 - DNA, 55 bp, Artificial
  Synthetic oligonucleotide
ctaccgcgtgcagtgaccactgggagagtatacgacatgaacaccggtactctgc

SEQ ID NO: 493664 - DNA, 55 bp, Artificial
  Synthetic oligonucleotide
ctaccgtccggtgtcccatgggcacgtgcgatactccagttcttaggtgcgggtg

SEQ ID NO: 493665 - DNA, 55 bp, Artificial
  Synthetic oligonucleotide
ctactagcccctctctcattcggctactcacgcctagggttggtgggcaacgtag

SEQ ID NO: 493666 - DNA, 55 bp, Artificial
  Synthetic oligonucleotide
ctactgcccgaatatgccctacatccttccatcgcgcctacccccggctatcgtg

SEQ ID NO: 493667 - DNA, 60 bp, Artificial
  Synthetic oligonucleotide
ctagataccgcctcagctctgtatcgggatgccttagagtctcctgagcattgttcacct

SEQ ID NO: 493668 - DNA, 56 bp, Artificial
  Synthetic oligonucleotide
ctagatccttcgtcagtcagagccgcatctcggttcctgtgaggtacaggcccccc

SEQ ID NO: 493669 - DNA, 60 bp, Artificial
  Synthetic oligonucleotide
ctagcagtgacgatccatggtggcaactatccagggggccctcgtcccgtcacactagtg

SEQ ID NO: 493670 - DNA, 60 bp, Artificial
  Synthetic oligonucleotide
ctagcatggtggaggccatggtgtctagggcccgaattgacgcacgaattgatttcgagt

SEQ ID NO: 493671 - DNA, 56 bp, Artificial
  Synthetic oligonucleotide
ctagcatttcatcacatggcccgagagctgtatccagagtactacaagaactaaga

SEQ ID NO: 493672 - DNA, 55 bp, Artificial
  Synthetic oligonucleotide
ctagccacacctgtgctaggagtcggttctcgtattaccgccttagatcgtacca

SEQ ID NO: 493673 - DNA, 60 bp, Artificial
  Synthetic oligonucleotide
ctagccagcgcaaggcagtcctgtcgactcttgtcggtaggtatggccgccgtacgaagc

SEQ ID NO: 493674 - DNA, 55 bp, Artificial
  Synthetic oligonucleotide
ctagcctaggtgccggccctacctctatttctgcggtcggtgtgttagccccgca

SEQ ID NO: 493675 - DNA, 60 bp, Artificial
  Synthetic oligonucleotide
ctagcgctggcgtctacaggagtgttcaatccaatgatacttgccgctgggctaatggct

SEQ ID NO: 493676 - DNA, 57 bp, Artificial
  Synthetic oligonucleotide
ctagcggtgacgatccacggtggcaactatccaggggccctccgtcccgtcacacta

SEQ ID NO: 493677 - DNA, 50 bp, Artificial
  Synthetic oligonucleotide
ctagctcaagtctcatggcaaggaagcttgagttcgggacagacagtaca

SEQ ID NO: 493678 - DNA, 58 bp, Artificial
  Synthetic oligonucleotide
ctagctgtaacttggtggaataggaatgggccaacgacaagtgcagtccattatccaa

SEQ ID NO: 493679 - DNA, 60 bp, Artificial
  Synthetic oligonucleotide
ctaggagtccagagtgatgctcctttggatcctagttgtggaggggattgctttcacagt

SEQ ID NO: 493680 - DNA, 60 bp, Artificial
  Synthetic oligonucleotide
ctaggatcacttggcacgaaattcttgagctggggcactattagcctctctcttgatgcc

SEQ ID NO: 493681 - DNA, 57 bp, Artificial
  Synthetic oligonucleotide
ctaggccaccgctgggcaattggttcggttgtacctggatgaactcaactgggttca

SEQ ID NO: 493682 - DNA, 53 bp, Artificial
  Synthetic oligonucleotide
ctagtgaaactatggtaccagttagagacagaacccatagtaggagcagagac

SEQ ID NO: 493683 - DNA, 56 bp, Artificial
  Synthetic oligonucleotide
ctagttcggaaaaccagattcctaccggtagcaggcggaacaagcagtgtgtacat

SEQ ID NO: 493684 - DNA, 51 bp, Artificial
  Synthetic oligonucleotide
ctataacatgggaggcaagtggtcaaaaggttgcatgtcaggatggcctgc

SEQ ID NO: 493685 - DNA, 56 bp, Artificial
  Synthetic oligonucleotide
ctataaggtcgctcacagagcggctttatatcgggggtcccttgactaattcaaag

SEQ ID NO: 493686 - DNA, 60 bp, Artificial
  Synthetic oligonucleotide
ctatccacgggctgcgtgatcatagtgggcaggattgtcctgtccgggaagccggcaatt

SEQ ID NO: 493687 - DNA, 57 bp, Artificial
  Synthetic oligonucleotide
ctatctctacctacaccactagcctgggtgccggccctacctctatctccgcggttg

SEQ ID NO: 493688 - DNA, 52 bp, Artificial
  Synthetic oligonucleotide
ctatgatacctatggagatacttggacaggagttgaagctctaataagaaca

SEQ ID NO: 493689 - DNA, 55 bp, Artificial
  Synthetic oligonucleotide
ctatgcgcctggtctgcatgctgtacacgccactccgcacaaatagcccgggtga

SEQ ID NO: 493690 - DNA, 60 bp, Artificial
  Synthetic oligonucleotide
ctatgggcgcagcgtcaataacgctgacggtacaagccagacaattattgtctggtatag

SEQ ID NO: 493691 - DNA, 53 bp, Artificial
  Synthetic oligonucleotide
ctattccgactctggcacagcgtgggtcgtacatcagcggtcgtcagggtatc

SEQ ID NO: 493692 - DNA, 56 bp, Artificial
  Synthetic oligonucleotide
ctattgggatactatgaggtttagatattgtgcaccaccgggttttgccctgctaa

SEQ ID NO: 493693 - DNA, 60 bp, Artificial
  Synthetic oligonucleotide
ctcaaaaggagtcatcgtccctgtggtgcacacagtcaagagtgcaccaggcgaggcatt

SEQ ID NO: 493694 - DNA, 57 bp, Artificial
  Synthetic oligonucleotide
ctcaaacgctggtgacaggctaaggatgcccttcaggtaccccgaggtaacacgtga

SEQ ID NO: 493695 - DNA, 51 bp, Artificial
  Synthetic oligonucleotide
ctcaaagaattacaacaacgggaccgttcgccattctaaccgggtcaaccc

SEQ ID NO: 493696 - DNA, 57 bp, Artificial
  Synthetic oligonucleotide
ctcaatgccccctcttgagggggagcctggtgaccctgacctaagctcaggttcttg

SEQ ID NO: 493697 - DNA, 55 bp, Artificial
  Synthetic oligonucleotide
ctcagcagatggccagttcaatcattaacacttcttttgaagctgcagttgttgc

SEQ ID NO: 493698 - DNA, 55 bp, Artificial
  Synthetic oligonucleotide
ctcagttcattgctcccggaggcaccatcatccttgaatcctgccatggcgcacg

SEQ ID NO: 493699 - DNA, 57 bp, Artificial
  Synthetic oligonucleotide
ctccacacttacgttcctgtgtgcgcgggacccgatggactctcgttcacccactta

SEQ ID NO: 493700 - DNA, 55 bp, Artificial
  Synthetic oligonucleotide
ctccacattgtaccgccgatggctcgattcattttagtaaccctacctcagtcgg

SEQ ID NO: 493701 - DNA, 60 bp, Artificial
  Synthetic oligonucleotide
ctccaccaagattgacgtgctggcgtatgatggttgcacgcagaccacccacggggattg

SEQ ID NO: 493702 - DNA, 58 bp, Artificial
  Synthetic oligonucleotide
ctccaccaagttaactttgagcctgaactggagtggacacaccgtcctgagcctcttg

SEQ ID NO: 493703 - DNA, 55 bp, Artificial
  Synthetic oligonucleotide
ctcccaagaccaatctacatccctgagtcaggacacgccagtgttgacccaccag

SEQ ID NO: 493704 - DNA, 55 bp, Artificial
  Synthetic oligonucleotide
ctccccacctggtgcatcggtgccaaagagtcgtaaggacgccatgttgggtacg

SEQ ID NO: 493705 - DNA, 55 bp, Artificial
  Synthetic oligonucleotide
ctcccgccgtggtaccgctgcctacccacttcttggctcaggcatataccaggtc

SEQ ID NO: 493706 - DNA, 60 bp, Artificial
  Synthetic oligonucleotide
ctccgcagtcctggagcttgatctgtgtagccgtgatgtgtcacgtataacattctttca

SEQ ID NO: 493707 - DNA, 60 bp, Artificial
  Synthetic oligonucleotide
ctccggcccctgaatgcggctaatccaaccccacatctgtcgcacacaatccagtgtgta

SEQ ID NO: 493708 - DNA, 59 bp, Artificial
  Synthetic oligonucleotide
ctcctaaggcgactccaccagtgggtaagctcggagagcaccactccatgctccggttc

SEQ ID NO: 493709 - DNA, 60 bp, Artificial
  Synthetic oligonucleotide
ctcctagggctttggggctgctctggaaaacacatctgcaccactactgtgccttggaac

SEQ ID NO: 493710 - DNA, 58 bp, Artificial
  Synthetic oligonucleotide
ctcctattgtgggaaaccgtggaaactcagccatagcttacatggatgtgtttcgacc

SEQ ID NO: 493711 - DNA, 54 bp, Artificial
  Synthetic oligonucleotide
ctcctctaccttaggctgttgaactcaaaatgttgactcttttcggtaacaagg

SEQ ID NO: 493712 - DNA, 60 bp, Artificial
  Synthetic oligonucleotide
ctcctctgccgatccatactgcggaactcctagccgcttgctttgctcgcagcaggtctg

SEQ ID NO: 493713 - DNA, 56 bp, Artificial
  Synthetic oligonucleotide
ctcgagtctcccgtcaactgcaaggactaggaactgggttgaggaccaaaacagga

SEQ ID NO: 493714 - DNA, 53 bp, Artificial
  Synthetic oligonucleotide
ctcgattggtctgcgcaaagcaaggagcaaaaattacgtgatctaaagaggtc

SEQ ID NO: 493715 - DNA, 57 bp, Artificial
  Synthetic oligonucleotide
ctcgcagccggtctggagcgaaacttatcgggaccgacaattctgtcgtcctgtccc

SEQ ID NO: 493716 - DNA, 57 bp, Artificial
  Synthetic oligonucleotide
ctcgcccgggcatgtctgggagtcggccaacccgttttgtggggagagcacactcta

SEQ ID NO: 493717 - DNA, 55 bp, Artificial
  Synthetic oligonucleotide
ctcgcgtcaaggttacagccccgcacactattaaggccgacccgacaggcgctac

SEQ ID NO: 493718 - DNA, 60 bp, Artificial
  Synthetic oligonucleotide
ctcgcgtggcgcgattttgcgccggcagtataatctgtctacgtccccgcttacgtcatc

SEQ ID NO: 493719 - DNA, 52 bp, Artificial
  Synthetic oligonucleotide
ctcgctcagcacaggatctgatcaggagattcatctctggtgctttacacca

SEQ ID NO: 493720 - DNA, 55 bp, Artificial
  Synthetic oligonucleotide
ctcgctgcgcagcgtgtacaacgagttgggtggtaacctgaagaagggcggtgtg

SEQ ID NO: 493721 - DNA, 60 bp, Artificial
  Synthetic oligonucleotide
ctcgctgtggcccttcggggcatgggcttgaacgctgtggcatattacagggggctggac

SEQ ID NO: 493722 - DNA, 60 bp, Artificial
  Synthetic oligonucleotide
ctcggcttgctgaggtgcacacagcaagaggcgagagcggcgactggtgagtacgccaat

SEQ ID NO: 493723 - DNA, 50 bp, Artificial
  Synthetic oligonucleotide
ctcgggaggttgtgcaactaatagtcaactgctaggggtaagtaatttga

SEQ ID NO: 493724 - DNA, 55 bp, Artificial
  Synthetic oligonucleotide
ctctacgacaaggtccgactacagcttagggataatgcaaaagagctgggtaacg

SEQ ID NO: 493725 - DNA, 60 bp, Artificial
  Synthetic oligonucleotide
ctctagcaacctgggtgggtgataatttggaagatccagcatctagagacctagtagtca

SEQ ID NO: 493726 - DNA, 60 bp, Artificial
  Synthetic oligonucleotide
ctctatggcaatgagagctgtgggtgggcgggatggctcctgtccccccgtggctctcgg

SEQ ID NO: 493727 - DNA, 55 bp, Artificial
  Synthetic oligonucleotide
ctctattcgacgctgacgtaatgatagcccacttagaatcagacggccgagttcc

SEQ ID NO: 493728 - DNA, 55 bp, Artificial
  Synthetic oligonucleotide
ctctcatgggttgccgcatccccaacactagccgccaccctccggtcggtaaaga

SEQ ID NO: 493729 - DNA, 55 bp, Artificial
  Synthetic oligonucleotide
ctctccaacccagaccttttaccttctacattccttaacgattcacagagtctac

SEQ ID NO: 493730 - DNA, 54 bp, Artificial
  Synthetic oligonucleotide
ctctcccaggacataaggtgagtgatgacgtgaactccgagcccaccaaacctg

SEQ ID NO: 493731 - DNA, 53 bp, Artificial
  Synthetic oligonucleotide
ctctccttttgggaggcaggtactactaaagccggctacccttataattataa

SEQ ID NO: 493732 - DNA, 58 bp, Artificial
  Synthetic oligonucleotide
ctctctttacgcggactccccgtatgtgccttctcatctaccggaccgtgtgcacttc

SEQ ID NO: 493733 - DNA, 52 bp, Artificial
  Synthetic oligonucleotide
ctctgactggaactgctaagcatatcgaagaatgctcatgttacgggaagcg

SEQ ID NO: 493734 - DNA, 58 bp, Artificial
  Synthetic oligonucleotide
ctctgagggggcatacagcaacgaaagtgagtggggccagacttcgccatagggcctt

SEQ ID NO: 493735 - DNA, 60 bp, Artificial
  Synthetic oligonucleotide
ctctggaaaactcatttgcaccactactgtgccttggaatgctagttggagtaataaatc

SEQ ID NO: 493736 - DNA, 55 bp, Artificial
  Synthetic oligonucleotide
ctcttgaaccaaggtgctccaaccgtccacagcgtgtcaaccctccacctcgacg

SEQ ID NO: 493737 - DNA, 60 bp, Artificial
  Synthetic oligonucleotide
ctcttgtgcgtactgggatggaccccaggatgtgctcccttatgcaaggatcaactctcc

SEQ ID NO: 493738 - DNA, 60 bp, Artificial
  Synthetic oligonucleotide
ctgaaagcgaaagtaaaccagagaagaactctcgacgcaggactcggcttgctgaagtgc

SEQ ID NO: 493739 - DNA, 57 bp, Artificial
  Synthetic oligonucleotide
ctgacacaagccggcctaatgaccccggaagcgggaactgtgatgcaccaataaccg

SEQ ID NO: 493740 - DNA, 52 bp, Artificial
  Synthetic oligonucleotide
ctgacccccttgtctttgtattggagaccagtgtacaccccacagtacctca

SEQ ID NO: 493741 - DNA, 54 bp, Artificial
  Synthetic oligonucleotide
ctgacggacggggcaaaatagagccctactggcaagtaaggtggaggcccgaaa

SEQ ID NO: 493742 - DNA, 60 bp, Artificial
  Synthetic oligonucleotide
ctgagagtggagccccaccgaccgacttgcaaaagatggtcatgggcaacaccaggcctg

SEQ ID NO: 493743 - DNA, 55 bp, Artificial
  Synthetic oligonucleotide
ctgagagtggctcagacgctactgcctacgaacgttccgattggggaggtctctt

SEQ ID NO: 493744 - DNA, 60 bp, Artificial
  Synthetic oligonucleotide
ctgagcattgctcacctcaccatactgcactcaggcaagccattctctgctcggggaaat

SEQ ID NO: 493745 - DNA, 56 bp, Artificial
  Synthetic oligonucleotide
ctgagcttcatacagtcgtgttataaaagtaatgttaacgtaggacattgcagttc

SEQ ID NO: 493746 - DNA, 55 bp, Artificial
  Synthetic oligonucleotide
ctgaggtgggttacccttcacccccttaccatgctttgggtgcactcattcttgg

SEQ ID NO: 493747 - DNA, 57 bp, Artificial
  Synthetic oligonucleotide
ctgcagcccccgagccatccccaatgccttatgttccgtaccctcgttcaacagagg

SEQ ID NO: 493748 - DNA, 54 bp, Artificial
  Synthetic oligonucleotide
ctgccatgggctggggatctaaggtgtcggttaaggacttagccacccccgcgg

SEQ ID NO: 493749 - DNA, 55 bp, Artificial
  Synthetic oligonucleotide
ctgcctactaagagagtcacctgggtagcgccactaggtgtccgcggagcggact

SEQ ID NO: 493750 - DNA, 55 bp, Artificial
  Synthetic oligonucleotide
ctgcctccgacttgaggcggaaagggttccctagcaccgaagggcggcctacata

SEQ ID NO: 493751 - DNA, 58 bp, Artificial
  Synthetic oligonucleotide
ctgcgaaaggcacacccgtcaacctcgcagtgctccgtgacgagcagctgatcgtact

SEQ ID NO: 493752 - DNA, 55 bp, Artificial
  Synthetic oligonucleotide
ctgcgctggaccaagctagctctgctcgagtcgaccacgctgagtagcgcatctg

SEQ ID NO: 493753 - DNA, 55 bp, Artificial
  Synthetic oligonucleotide
ctgcggtgttcagcctatgactggccctactggtcaggtgttcgctctccgcgca

SEQ ID NO: 493754 - DNA, 55 bp, Artificial
  Synthetic oligonucleotide
ctgctttgactggagttgtccaagcagatagccctcttctaagggattgaaccca

SEQ ID NO: 493755 - DNA, 55 bp, Artificial
  Synthetic oligonucleotide
ctggacctgatcagccgaggccctcacaagattccctctaattatcccgccagcc

SEQ ID NO: 493756 - DNA, 55 bp, Artificial
  Synthetic oligonucleotide
ctggagaagtggcgcttctatctcgtgccgcagaagtatcaggactgcctgtcgc

SEQ ID NO: 493757 - DNA, 55 bp, Artificial
  Synthetic oligonucleotide
ctggagcaccacaacttaacccaattgacggaccattacctgaggacaatgagcc

SEQ ID NO: 493758 - DNA, 60 bp, Artificial
  Synthetic oligonucleotide
ctggagcggaggccttgattacaaccgcaattcacattcaccgctggatcagagggtgtg

SEQ ID NO: 493759 - DNA, 55 bp, Artificial
  Synthetic oligonucleotide
ctggatggattgctagacaaccgggtgattggggcaaccaatggcgagtagaagc

SEQ ID NO: 493760 - DNA, 57 bp, Artificial
  Synthetic oligonucleotide
ctggcactaccctccaagaccttgtggtattgtgcccgcgaaacaagtgtgtggccc

SEQ ID NO: 493761 - DNA, 55 bp, Artificial
  Synthetic oligonucleotide
ctggcagccgcgcgttactgcaattagcggtggctcccgacactctggccaattg

SEQ ID NO: 493762 - DNA, 55 bp, Artificial
  Synthetic oligonucleotide
ctggcatatctcggagcgtccgctgcacatgctaagtccgatgaaccgaccatcc

SEQ ID NO: 493763 - DNA, 59 bp, Artificial
  Synthetic oligonucleotide
ctggcatcactattggagatgtgccatagcacacaaattggtggggtaaggatggtgga

SEQ ID NO: 493764 - DNA, 56 bp, Artificial
  Synthetic oligonucleotide
ctggccgtaccatgctgtttaccccgtctcaacttgggtcactccttgagggcgcc

SEQ ID NO: 493765 - DNA, 55 bp, Artificial
  Synthetic oligonucleotide
ctggcgtgcgtagggttgcagggccccgcttgtacagtagggcaaatcagcaggt

SEQ ID NO: 493766 - DNA, 60 bp, Artificial
  Synthetic oligonucleotide
ctggctggggcttggctatgggccatcagcgcatgcgtggaacctttcaggctcctctgc

SEQ ID NO: 493767 - DNA, 52 bp, Artificial
  Synthetic oligonucleotide
ctgggactttccactggggcgttccaggaggagtggtctgggcgggaccggg

SEQ ID NO: 493768 - DNA, 55 bp, Artificial
  Synthetic oligonucleotide
ctgggcacggccagactacaatcctcctctggttgaggcatggaagcggccagat

SEQ ID NO: 493769 - DNA, 55 bp, Artificial
  Synthetic oligonucleotide
ctgggctaaaggcactgtttgcactggagtgtcctctaaggctggcgattgcccc

SEQ ID NO: 493770 - DNA, 55 bp, Artificial
  Synthetic oligonucleotide
ctggggtcggggatttatcaggtccctgtgggcttaagcttcgacgcctgggagc

SEQ ID NO: 493771 - DNA, 55 bp, Artificial
  Synthetic oligonucleotide
ctgggtagggcaggctacactatacacgtgcagtgcaacgcatccaagttccacc

SEQ ID NO: 493772 - DNA, 50 bp, Artificial
  Synthetic oligonucleotide
ctggttccatgcttcaccttagcactgttactacacttaacagaatgtgc

SEQ ID NO: 493773 - DNA, 55 bp, Artificial
  Synthetic oligonucleotide
ctgtacagagaaatcttcctttcgagagagcaaccattatggcggcattcacggg

SEQ ID NO: 493774 - DNA, 55 bp, Artificial
  Synthetic oligonucleotide
ctgtaggataataaatggacgccagctggtccccaaccgtgacaggattctcgcg

SEQ ID NO: 493775 - DNA, 60 bp, Artificial
  Synthetic oligonucleotide
ctgtagtccaggaatatggcaattagattgcacacatttagaagggaaagtcatcctggt

SEQ ID NO: 493776 - DNA, 55 bp, Artificial
  Synthetic oligonucleotide
ctgtagtgacgccatgaacatcatgtttgaggaggtgttccgcacagactttggc

SEQ ID NO: 493777 - DNA, 59 bp, Artificial
  Synthetic oligonucleotide
ctgtcaacaggctgcgtagtcatagtgggcagagttgttttgtccgggaagccggcagt

SEQ ID NO: 493778 - DNA, 55 bp, Artificial
  Synthetic oligonucleotide
ctgtgacttgatacgtaacgaggaggtggagtggcggttcactacccggagtcgc

SEQ ID NO: 493779 - DNA, 54 bp, Artificial
  Synthetic oligonucleotide
ctgtgcatcagaggctaaagcatatgagagagaagtacataatgtctgggctac

SEQ ID NO: 493780 - DNA, 55 bp, Artificial
  Synthetic oligonucleotide
ctgtgccaggcttgggaacgagactgcgttcgctaccctggtcgtgaaatggctg

SEQ ID NO: 493781 - DNA, 58 bp, Artificial
  Synthetic oligonucleotide
ctgtgcccgcgtcagcctaccaagtacgcaactcctcgggcctttaccatgtcaccaa

SEQ ID NO: 493782 - DNA, 59 bp, Artificial
  Synthetic oligonucleotide
ctgttcactataagacaggaaatggccagcaggggtctatgggattcctttcgtcagtc

SEQ ID NO: 493783 - DNA, 57 bp, Artificial
  Synthetic oligonucleotide
ctgttccgagaggagttttcgtagttgagcatcgtgacgaaatggatatatactgta

SEQ ID NO: 493784 - DNA, 52 bp, Artificial
  Synthetic oligonucleotide
ctgttgctggatctcatcgtgtagtgccattgagctttcgatgagagccaac

SEQ ID NO: 493785 - DNA, 54 bp, Artificial
  Synthetic oligonucleotide
ctgtttaatagtacttggaagctggttaatagtacttgggagctggttaatggt

SEQ ID NO: 493786 - DNA, 56 bp, Artificial
  Synthetic oligonucleotide
cttaaccccaggacagttgttattttggaccatctaggcaacaacagaactgtgag

SEQ ID NO: 493787 - DNA, 50 bp, Artificial
  Synthetic oligonucleotide
cttaatcccgccgaagttgcgtgggaagttactccctacagcttcgtggt

SEQ ID NO: 493788 - DNA, 60 bp, Artificial
  Synthetic oligonucleotide
cttacccaagcagtccctacataaacccaagctctccatatggagctacagccccaagca

SEQ ID NO: 493789 - DNA, 55 bp, Artificial
  Synthetic oligonucleotide
cttaccgacgtttacacctgcgagtaatacgttcagagtgccggtctctgcaccg

SEQ ID NO: 493790 - DNA, 55 bp, Artificial
  Synthetic oligonucleotide
cttacctctcgcaggggtactgtgcggtatagcaggcttgggcaacgggccacct

SEQ ID NO: 493791 - DNA, 55 bp, Artificial
  Synthetic oligonucleotide
cttagaatgcggtttgctgtaccattcgatcagttgtcaaatagagtcacacgat

SEQ ID NO: 493792 - DNA, 60 bp, Artificial
  Synthetic oligonucleotide
cttagacatgatgatcacaaaagttattatatgctttgaccgtatgtaactcaaggtgca

SEQ ID NO: 493793 - DNA, 55 bp, Artificial
  Synthetic oligonucleotide
cttagcggtgtaaccaaggtagctcaattcgtctggcgtgtcatgaccaacccag

SEQ ID NO: 493794 - DNA, 52 bp, Artificial
  Synthetic oligonucleotide
cttatgagtttccagattctaccccgtggtgtaataaccgcgtatctactgt

SEQ ID NO: 493795 - DNA, 55 bp, Artificial
  Synthetic oligonucleotide
cttcattagtgggatacaatacttggcgggcctgtcaacgctgcctggtaacccc

SEQ ID NO: 493796 - DNA, 54 bp, Artificial
  Synthetic oligonucleotide
cttcattgccggtttctgttccgttaaattcgcaggacgtccgcccggagtcag

SEQ ID NO: 493797 - DNA, 51 bp, Artificial
  Synthetic oligonucleotide
cttccccattaacgcttacaccacgggcccctgtaccccccttcctgcgcc

SEQ ID NO: 493798 - DNA, 51 bp, Artificial
  Synthetic oligonucleotide
cttcgactacgttgactgggacgcgggatcgcgtgaaccctgttcaggggg

SEQ ID NO: 493799 - DNA, 55 bp, Artificial
  Synthetic oligonucleotide
cttcgagaagcctagtaatgccgttgaagttttattgacgttacgctcagcacac

SEQ ID NO: 493800 - DNA, 55 bp, Artificial
  Synthetic oligonucleotide
cttcgggtccggtacttaccgatctcttcagtgccctccggagtactgtcgtggc

SEQ ID NO: 493801 - DNA, 53 bp, Artificial
  Synthetic oligonucleotide
cttcggtagtatgggcgggcataccttcgcctaatctgaaatgtagcgcatgc

SEQ ID NO: 493802 - DNA, 52 bp, Artificial
  Synthetic oligonucleotide
cttctatccaacagaccccccgttctacccctggctaccccccaagcgagat

SEQ ID NO: 493803 - DNA, 60 bp, Artificial
  Synthetic oligonucleotide
cttctcacctgccggtccgtgtgcacttcgcttcacctctgcacgtcgcatggagaccac

SEQ ID NO: 493804 - DNA, 53 bp, Artificial
  Synthetic oligonucleotide
cttgaatttagaaatttgacccctgggaacactaacacccgtgtgtcccgata

SEQ ID NO: 493805 - DNA, 55 bp, Artificial
  Synthetic oligonucleotide
cttgcactgcctactaagagagtcacctgggtagcgccactaggtgtccgcggag

SEQ ID NO: 493806 - DNA, 50 bp, Artificial
  Synthetic oligonucleotide
cttgcgtaactaccaacttgctcttaattctgcacgcatggcccaatctg

SEQ ID NO: 493807 - DNA, 55 bp, Artificial
  Synthetic oligonucleotide
cttggaagacaacttggactaaatttagatccccagcattgtataacctgggcct

SEQ ID NO: 493808 - DNA, 60 bp, Artificial
  Synthetic oligonucleotide
cttggatcacacaagggctaatgggtgccctactactctggatgggcgtcaacgcacgag

SEQ ID NO: 493809 - DNA, 54 bp, Artificial
  Synthetic oligonucleotide
cttggcctcagaaaggtgacgcagtttcactacccttaggcacgtctgctgata

SEQ ID NO: 493810 - DNA, 58 bp, Artificial
  Synthetic oligonucleotide
cttgtacaaacgcgatctacgcaggttcccgcaactgacacgaaccgtgcgacttgaa

SEQ ID NO: 493811 - DNA, 56 bp, Artificial
  Synthetic oligonucleotide
cttgtcgcaataaaagtagggggccaaacaaaagaggctctcctagacacaggagc

SEQ ID NO: 493812 - DNA, 57 bp, Artificial
  Synthetic oligonucleotide
cttgtctcagacctaataacaatacaaggacaagtgtacgtataggaccaggacaaa

SEQ ID NO: 493813 - DNA, 55 bp, Artificial
  Synthetic oligonucleotide
ctttagaacatcgtgttaccatggtggctaatagtaaggttccaacacctcgtat

SEQ ID NO: 493814 - DNA, 55 bp, Artificial
  Synthetic oligonucleotide
ctttagtgcgcttaactggcattggagcagtagcagcaacccacaatgccgtgcg

SEQ ID NO: 493815 - DNA, 54 bp, Artificial
  Synthetic oligonucleotide
ctttgaagtcgccgacggctttgttcctactgccgttccgactttatatgacgt

SEQ ID NO: 493816 - DNA, 60 bp, Artificial
  Synthetic oligonucleotide
ctttgggcagagccctagcaagctatgggtacgcgtgcgagccttcatatcatgcatcat

SEQ ID NO: 493817 - DNA, 60 bp, Artificial
  Synthetic oligonucleotide
ctttgtgtcctgccagcgcgggtacaagggggtctggcgaggggatggcattatgcacac

SEQ ID NO: 493818 - DNA, 55 bp, Artificial
  Synthetic oligonucleotide
cttttataggagaactccagacttccttacagaagctatagtacattcagtgttc

SEQ ID NO: 493819 - DNA, 57 bp, Artificial
  Synthetic oligonucleotide
cttttggagtgtggattcgcactcctcccgcttacagaccacccaatgcccctatct

SEQ ID NO: 493820 - DNA, 55 bp, Artificial
  Synthetic oligonucleotide
gaaaagcggacaccacatcgtaccacgcaatcgctgttgagacgaaagccgagcg

SEQ ID NO: 493821 - DNA, 55 bp, Artificial
  Synthetic oligonucleotide
gaaaagggactaaagtctgacttggcagagcaccccgcctacgtgcgtcagcaga

SEQ ID NO: 493822 - DNA, 60 bp, Artificial
  Synthetic oligonucleotide
gaaaagggcaacagctatactcagaaaagcaaccaggagattgattcaactgatagtgag

SEQ ID NO: 493823 - DNA, 53 bp, Artificial
  Synthetic oligonucleotide
gaaacaaacaaatttgcagcgatatgcacacacatggaggtatgcttcatgta

SEQ ID NO: 493824 - DNA, 60 bp, Artificial
  Synthetic oligonucleotide
gaaacctagtaacaccatgaaagttgcgcagtgtttcgctccgcacagccccagtgtaga

SEQ ID NO: 493825 - DNA, 55 bp, Artificial
  Synthetic oligonucleotide
gaaactgcgtgactcctacactcaagtgtgtgaccaccggctaatgtcagctgcc

SEQ ID NO: 493826 - DNA, 58 bp, Artificial
  Synthetic oligonucleotide
gaaattttcttgcaaacgcgccacaagcaggcagcaagtcgcaaagggccaagtacgg

SEQ ID NO: 493827 - DNA, 55 bp, Artificial
  Synthetic oligonucleotide
gaacacggaacatgcctatgagaacaaacgccacactgttgaaggcgggatgcca

SEQ ID NO: 493828 - DNA, 55 bp, Artificial
  Synthetic oligonucleotide
gaacacggttgcaggtatctagaccgggacagctccctggtatccgcctccgcag

SEQ ID NO: 493829 - DNA, 55 bp, Artificial
  Synthetic oligonucleotide
gaacagttgtgtgtgtgagtccagggtccgctagagcaagcgagaccgccgaggc

SEQ ID NO: 493830 - DNA, 59 bp, Artificial
  Synthetic oligonucleotide
gaaccaagacagctaccaatttatagagcaaatggagaaaaagagttgcgtaacagatg

SEQ ID NO: 493831 - DNA, 55 bp, Artificial
  Synthetic oligonucleotide
gaacctaatgggccaagtgtgtatagaaaaccatcaggtggtgtattccaatcta

SEQ ID NO: 493832 - DNA, 55 bp, Artificial
  Synthetic oligonucleotide
gaacgctggtttagtgctaccgtgacgcgccgacaacccgtatcgacgcctctcg

SEQ ID NO: 493833 - DNA, 52 bp, Artificial
  Synthetic oligonucleotide
gaacgtaacggccatggtgcgggtactccttcgtggttgtgttgcggttagt

SEQ ID NO: 493834 - DNA, 55 bp, Artificial
  Synthetic oligonucleotide
gaacgtctgccttgacactagtcgtccaggcagagagccctctcctaagagattg

SEQ ID NO: 493835 - DNA, 54 bp, Artificial
  Synthetic oligonucleotide
gaacttacttcaatggtgtgataactgtacgggttttaaatcgtcaaacctcac

SEQ ID NO: 493836 - DNA, 56 bp, Artificial
  Synthetic oligonucleotide
gaacttctccagccttgaaaactttagagcctatgtggatggattcgaaccgaacg

SEQ ID NO: 493837 - DNA, 58 bp, Artificial
  Synthetic oligonucleotide
gaagcaatttgattggacgggaacttaagtcctaatttgcattgacgtggaccaatca

SEQ ID NO: 493838 - DNA, 55 bp, Artificial
  Synthetic oligonucleotide
gaagctcgcagcatcctacgcctgtgctgcctatggccgtccttacaaggactgt

SEQ ID NO: 493839 - DNA, 55 bp, Artificial
  Synthetic oligonucleotide
gaaggcgcggttatgaacatcgcacaggcaatggctaacatgtgggacaactgaa

SEQ ID NO: 493840 - DNA, 55 bp, Artificial
  Synthetic oligonucleotide
gaagtatcgcaagtaaccgtaaccccggttcgccgggtcatcacagagcatgacc

SEQ ID NO: 493841 - DNA, 53 bp, Artificial
  Synthetic oligonucleotide
gaagtcgtgcaaccagaaaacttggaatacaccattgtgataacacctcactc

SEQ ID NO: 493842 - DNA, 55 bp, Artificial
  Synthetic oligonucleotide
gaagtggccccgaccaacgcccctactgctggcactaccctccaagaccctgcgg

SEQ ID NO: 493843 - DNA, 55 bp, Artificial
  Synthetic oligonucleotide
gaagtgggatgtcatccgctgtccagtcatatggaaccctgccggagtgggtgac

SEQ ID NO: 493844 - DNA, 54 bp, Artificial
  Synthetic oligonucleotide
gaagtgttagtatggaagtttgacagcaccctagcattccatcacgtggcccga

SEQ ID NO: 493845 - DNA, 50 bp, Artificial
  Synthetic oligonucleotide
gaagtttgcagccctggattacttactagggtgtggagtcctagcaggta

SEQ ID NO: 493846 - DNA, 51 bp, Artificial
  Synthetic oligonucleotide
gaataccactctgtcaacaatagcccttcttatcggagtgggaaacttagt

SEQ ID NO: 493847 - DNA, 60 bp, Artificial
  Synthetic oligonucleotide
gaatctcttgcgcggcccagcattacgttacagggcttacagaggcagccccggatgcaa

SEQ ID NO: 493848 - DNA, 60 bp, Artificial
  Synthetic oligonucleotide
gaatgatgccacttatcagagaacaagagcgcttgtccgcactgggatggatcccagaat

SEQ ID NO: 493849 - DNA, 60 bp, Artificial
  Synthetic oligonucleotide
gaatgcggctaatcctaactgcagagcagatacccacacaccagtgggcagtctgtcgta

SEQ ID NO: 493850 - DNA, 60 bp, Artificial
  Synthetic oligonucleotide
gaatgcggctaatcctaactgcggagcacgtgccttcaacccagagggtggcgtgtcgta

SEQ ID NO: 493851 - DNA, 58 bp, Artificial
  Synthetic oligonucleotide
gaatgctgtggtggttcggccgtttttgtctcgtgtgcaaaccgagatccttatcaac

SEQ ID NO: 493852 - DNA, 55 bp, Artificial
  Synthetic oligonucleotide
gaatggagggacgcccgttcacgagctcaacttactgactaccgcgcaggaatgc

SEQ ID NO: 493853 - DNA, 55 bp, Artificial
  Synthetic oligonucleotide
gaatgtgcgaggctcgtgaaccatcggttgatttgcgattaccattatgtgcggg

SEQ ID NO: 493854 - DNA, 60 bp, Artificial
  Synthetic oligonucleotide
gacaacgcaataaggataggagaggacgctcatgtactagtcacaagggagccctatttg

SEQ ID NO: 493855 - DNA, 55 bp, Artificial
  Synthetic oligonucleotide
gacaactcgacaggccgctaacactttccttggggctatccaccttggcccacgc

SEQ ID NO: 493856 - DNA, 60 bp, Artificial
  Synthetic oligonucleotide
gacaatgagtgcatagagtctgtcaaaaatggtacctatgactatcccaaataccaggat

SEQ ID NO: 493857 - DNA, 52 bp, Artificial
  Synthetic oligonucleotide
gacacttgtgttgtcccaagatctcccgagtatttgtgaccttgatccaatg

SEQ ID NO: 493858 - DNA, 58 bp, Artificial
  Synthetic oligonucleotide
gacagcagggagcctacactggacttcccactaagcggcccaatgtccctaccattag

SEQ ID NO: 493859 - DNA, 57 bp, Artificial
  Synthetic oligonucleotide
gacagccggctgatcttgggcgggagccgaaggtgagtgaaaccaccgaagtctagg

SEQ ID NO: 493860 - DNA, 55 bp, Artificial
  Synthetic oligonucleotide
gacagcgtgtgcaacctcacatccgttcacaccattagagagactggaccccgac

SEQ ID NO: 493861 - DNA, 60 bp, Artificial
  Synthetic oligonucleotide
gacatcgtcaatggtgctctgggaagcccaggctgtgatcatttgaatggtgcagaatgg

SEQ ID NO: 493862 - DNA, 60 bp, Artificial
  Synthetic oligonucleotide
gacatggtgcgaagagtctattgagctagttagtaatcctccggcccctgaatgcggcta

SEQ ID NO: 493863 - DNA, 60 bp, Artificial
  Synthetic oligonucleotide
gacatgtgcgaagttttcatgctcagggaagataacaggcaatttggtccaaattgagaa

SEQ ID NO: 493864 - DNA, 60 bp, Artificial
  Synthetic oligonucleotide
gaccacagaagtggctcttggcctagtatgtgccacttgtgaacagattgctgatgcaca

SEQ ID NO: 493865 - DNA, 55 bp, Artificial
  Synthetic oligonucleotide
gaccacgattatagctacggctgacgccaggggccttatccagtcatccagggcc

SEQ ID NO: 493866 - DNA, 55 bp, Artificial
  Synthetic oligonucleotide
gaccacggcgcacgggtgtgacaccatagccagatgtcagtgtaatacaggggtg

SEQ ID NO: 493867 - DNA, 59 bp, Artificial
  Synthetic oligonucleotide
gaccagactattcaccatcaggcaggaaatggccattaggggcctatgggattcctttc

SEQ ID NO: 493868 - DNA, 55 bp, Artificial
  Synthetic oligonucleotide
gaccagccaggatccgacaatgaacaaggggttgatcttccacctcctccgttgt

SEQ ID NO: 493869 - DNA, 60 bp, Artificial
  Synthetic oligonucleotide
gaccatatgttcaacgcattattacccgacctaattgctggagcgcatcagaacgccgac

SEQ ID NO: 493870 - DNA, 55 bp, Artificial
  Synthetic oligonucleotide
gaccatttcgatggctacaaacaacaagccgtcgtaattatggacgatctatgcc

SEQ ID NO: 493871 - DNA, 53 bp, Artificial
  Synthetic oligonucleotide
gacccaaataggtttggcctacccgacaatacaatttacaaccctgataagga

SEQ ID NO: 493872 - DNA, 54 bp, Artificial
  Synthetic oligonucleotide
gacccaacatcagttgcggtgcaatctgtggacctttgacatggaggttcgcag

SEQ ID NO: 493873 - DNA, 55 bp, Artificial
  Synthetic oligonucleotide
gaccccagaaccatcatgaagggcacaaggctccacgtctcaccagctcacactg

SEQ ID NO: 493874 - DNA, 56 bp, Artificial
  Synthetic oligonucleotide
gaccccgcggtttaaagtgcacggcccagcctggctgaagctgtaggtcaggggaa

SEQ ID NO: 493875 - DNA, 54 bp, Artificial
  Synthetic oligonucleotide
gacccctttagtagtacccctttgcctggtgttcgtcgccttgcacagccccgc

SEQ ID NO: 493876 - DNA, 55 bp, Artificial
  Synthetic oligonucleotide
gacccggttgcgacatgaggctagtgctgagtgggaacctcgtgtggaggcgctg

SEQ ID NO: 493877 - DNA, 55 bp, Artificial
  Synthetic oligonucleotide
gaccctaagacaagtcagagaagcaatcgcaaccctgcaatacgggtccggcagc

SEQ ID NO: 493878 - DNA, 55 bp, Artificial
  Synthetic oligonucleotide
gaccggggtgagaacaattaccactggcagccccatcacgtactctacctacggc

SEQ ID NO: 493879 - DNA, 55 bp, Artificial
  Synthetic oligonucleotide
gacctatggcgtgagaatggacgttacgctacagatgtgtacgctgagggtgatg

SEQ ID NO: 493880 - DNA, 59 bp, Artificial
  Synthetic oligonucleotide
gacctttggatggcccttcaagctagtgccagtggacacaagggaagtagaagaggcca

SEQ ID NO: 493881 - DNA, 57 bp, Artificial
  Synthetic oligonucleotide
gacctttggatggtgcttcaagctagtaccagttgacccaagggacgtagaagaggc

SEQ ID NO: 493882 - DNA, 55 bp, Artificial
  Synthetic oligonucleotide
gacgaggctggatttggctcgtttggctcctgagattccgggtgtcgctcatgtg

SEQ ID NO: 493883 - DNA, 60 bp, Artificial
  Synthetic oligonucleotide
gacgcaatatgggctccaaaccttctaccaggatcccagtacccctgatgctgatcactc

SEQ ID NO: 493884 - DNA, 58 bp, Artificial
  Synthetic oligonucleotide
gacgccatgaacatcatgtttgaggaggtgtttcgcacggactttggtttccacccaa

SEQ ID NO: 493885 - DNA, 54 bp, Artificial
  Synthetic oligonucleotide
gacggagtgcataaccctcacatcgccaatcctacgttgtttaacgacacgtac

SEQ ID NO: 493886 - DNA, 60 bp, Artificial
  Synthetic oligonucleotide
gacggctcattggcacgcattaggggcggctcaaatggctgtaggacgtacactagtcga

SEQ ID NO: 493887 - DNA, 55 bp, Artificial
  Synthetic oligonucleotide
gacgtattcataggtgcttgttctgaaccgatctatcgcatatataataggttgc

SEQ ID NO: 493888 - DNA, 57 bp, Artificial
  Synthetic oligonucleotide
gacgtccagtacctctacggtgttggatctgcagtggtatctttcgcccttaagtgg

SEQ ID NO: 493889 - DNA, 55 bp, Artificial
  Synthetic oligonucleotide
gactagaggttagaggagaccccgcgttaaaaagtgcacggcccaacttggctga

SEQ ID NO: 493890 - DNA, 55 bp, Artificial
  Synthetic oligonucleotide
gactaggccgaaacgtgtgtcagagcgcgaacactccaacctactctgacgtccc

SEQ ID NO: 493891 - DNA, 53 bp, Artificial
  Synthetic oligonucleotide
gactatacaaagtctggaactgagaagtacaccatatatcccacagggggaga

SEQ ID NO: 493892 - DNA, 55 bp, Artificial
  Synthetic oligonucleotide
gactccaaggtctacctgccaccggccccagtgtctaaggtggtcagcacggatg

SEQ ID NO: 493893 - DNA, 55 bp, Artificial
  Synthetic oligonucleotide
gactctgcgcaaccacattaatgcccgatggtccctcgccacccaaggggtaccc

SEQ ID NO: 493894 - DNA, 60 bp, Artificial
  Synthetic oligonucleotide
gactgccttcagaggattgatatcaactcctttaggaagcccccctatagtcagcaatag

SEQ ID NO: 493895 - DNA, 55 bp, Artificial
  Synthetic oligonucleotide
gactgggctaactctgagctatggaaactcgccctttactgggccactggccgcc

SEQ ID NO: 493896 - DNA, 55 bp, Artificial
  Synthetic oligonucleotide
gactgtacctgcttcctccagcccgttgaggggagggtcggcgagcaaggttatg

SEQ ID NO: 493897 - DNA, 60 bp, Artificial
  Synthetic oligonucleotide
gactgtgcccttccacaagagttcgtctcgtggttcgcgagcaacggattcacggtgcag

SEQ ID NO: 493898 - DNA, 55 bp, Artificial
  Synthetic oligonucleotide
gactgttgaggggcaaaattcgatctccatcgaaatcttgaggcataagacgggc

SEQ ID NO: 493899 - DNA, 54 bp, Artificial
  Synthetic oligonucleotide
gacttccgttggggctccgtcggtattaccggcctccctgactacaggaatgtc

SEQ ID NO: 493900 - DNA, 55 bp, Artificial
  Synthetic oligonucleotide
gacttggcgtaaggttcatgtgccaacgccctgtgcgggatgaaacctctactgc

SEQ ID NO: 493901 - DNA, 56 bp, Artificial
  Synthetic oligonucleotide
gagaagtgttgcagtggaagtttgacagccgcctagcatttcatcacatggcccga

SEQ ID NO: 493902 - DNA, 53 bp, Artificial
  Synthetic oligonucleotide
gagacaacggagacaacccgacagagcggagcagcttcttttgcctagagtac

SEQ ID NO: 493903 - DNA, 55 bp, Artificial
  Synthetic oligonucleotide
gagacatggcgcacacactaataatgattgggtccaacgcctctgacaggatggg

SEQ ID NO: 493904 - DNA, 58 bp, Artificial
  Synthetic oligonucleotide
gagacattatttacacactctttggaaggcggggatcttatataaaagagagtccaca

SEQ ID NO: 493905 - DNA, 60 bp, Artificial
  Synthetic oligonucleotide
gagagaaccttatgtgtcatgcgatcctggtaaatgttatcaatttgcactcgggcaggg

SEQ ID NO: 493906 - DNA, 51 bp, Artificial
  Synthetic oligonucleotide
gagagatccccttctacggcaaagccatccccattgagaccataaaggggg

SEQ ID NO: 493907 - DNA, 59 bp, Artificial
  Synthetic oligonucleotide
gagagccgggtacacgatacacgtgcagtgcaacgcgtccaaatttcaccaagggtgtc

SEQ ID NO: 493908 - DNA, 56 bp, Artificial
  Synthetic oligonucleotide
gagagggtggtagtgagcattgaccgatttttaagagtccgagaccaacgagggaa

SEQ ID NO: 493909 - DNA, 54 bp, Artificial
  Synthetic oligonucleotide
gagagttaatcaatccaaccacttatggaattggtatgacctatcactgttata

SEQ ID NO: 493910 - DNA, 53 bp, Artificial
  Synthetic oligonucleotide
gagatggagtcttttgatacatctgatgtcaacctctttgggccagcccatta

SEQ ID NO: 493911 - DNA, 60 bp, Artificial
  Synthetic oligonucleotide
gagatgtcgacgtattcataggtgcttgttccgaaccaatctatcgcatatacaataggt

SEQ ID NO: 493912 - DNA, 55 bp, Artificial
  Synthetic oligonucleotide
gagattgatctgagagtggctcagacgctgctgcctacgaacgttccgattgggg

SEQ ID NO: 493913 - DNA, 55 bp, Artificial
  Synthetic oligonucleotide
gagcaatatgttctatcgtttgacgcctcccgccagtctatgggagccgggtcgc

SEQ ID NO: 493914 - DNA, 60 bp, Artificial
  Synthetic oligonucleotide
gagcactagtaggtgtgagaattgtcatgatagtacttaacctagtgagaaacattaggc

SEQ ID NO: 493915 - DNA, 55 bp, Artificial
  Synthetic oligonucleotide
gagcataaggaacaacacttatgaccatacccaatacaggacagagtcattgcag

SEQ ID NO: 493916 - DNA, 57 bp, Artificial
  Synthetic oligonucleotide
gagcccaacattgtcaaaccacatgagaagggcataaaccccaactacctcctggct

SEQ ID NO: 493917 - DNA, 56 bp, Artificial
  Synthetic oligonucleotide
gagccctagtgcgcactgggatggaccccaggatgtgctccctcatgcagggatcg

SEQ ID NO: 493918 - DNA, 52 bp, Artificial
  Synthetic oligonucleotide
gagccttcacagaggctatgaccaggtactccgccccccccggggacccccc

SEQ ID NO: 493919 - DNA, 54 bp, Artificial
  Synthetic oligonucleotide
gagcgccaccctgtgctcggccctctatataggggacttgtgcgggtcggtctt

SEQ ID NO: 493920 - DNA, 51 bp, Artificial
  Synthetic oligonucleotide
gagcgtgagatatcgcggcaaataggtaatgtgctgaaagagcataatagc

SEQ ID NO: 493921 - DNA, 55 bp, Artificial
  Synthetic oligonucleotide
gagctacagcacaggagcaaccacatacgtgccaatcacagtaacggtggcgcca

SEQ ID NO: 493922 - DNA, 56 bp, Artificial
  Synthetic oligonucleotide
gagctacgacactgccactccgtgctaagtattctactttctggtctggccccgcg

SEQ ID NO: 493923 - DNA, 56 bp, Artificial
  Synthetic oligonucleotide
gagctatatggtacatgtggttgggagccaggtaccttgagttcgaggcactcgga

SEQ ID NO: 493924 - DNA, 54 bp, Artificial
  Synthetic oligonucleotide
gagcttcaggttcgaggggacaacccccgctccgaaacaggagccgaaagacag

SEQ ID NO: 493925 - DNA, 56 bp, Artificial
  Synthetic oligonucleotide
gagcttgagtttaggaatctgacacccgggaacactaacacccgtgtatcccgata

SEQ ID NO: 493926 - DNA, 58 bp, Artificial
  Synthetic oligonucleotide
gaggactcttggactcccagcaatgtcaacgaccgaccttgaggcttacttcaaagac

SEQ ID NO: 493927 - DNA, 60 bp, Artificial
  Synthetic oligonucleotide
gaggactggggaccctgcaccgaacatggagagcacagcatcaggattcctaggacccct

SEQ ID NO: 493928 - DNA, 55 bp, Artificial
  Synthetic oligonucleotide
gaggagaccctcccgagcactatagcggaccatattgacgcctgggaaagaccgg

SEQ ID NO: 493929 - DNA, 60 bp, Artificial
  Synthetic oligonucleotide
gaggatgttgccccaattgaacacattgcaagcatgaggaggaactattttacagcggaa

SEQ ID NO: 493930 - DNA, 55 bp, Artificial
  Synthetic oligonucleotide
gaggcatcgcaacgcgacgtacctattgtggcagtggtacacacccctgaaagag

SEQ ID NO: 493931 - DNA, 55 bp, Artificial
  Synthetic oligonucleotide
gaggccaacctgggctacccattcttctagtgtgcaaaggtacggccaaccaggt

SEQ ID NO: 493932 - DNA, 58 bp, Artificial
  Synthetic oligonucleotide
gagggagaagccacacttgaaggcggtgacaacaagggaacctactgtggtgcaccaa

SEQ ID NO: 493933 - DNA, 51 bp, Artificial
  Synthetic oligonucleotide
gagggagggggactatgaattgatgatgagggttaccgcagcccgtactgg

SEQ ID NO: 493934 - DNA, 58 bp, Artificial
  Synthetic oligonucleotide
gagggcagcggaacttctgggacgcagcagtctcaggggactacagaaggggtgggaa

SEQ ID NO: 493935 - DNA, 56 bp, Artificial
  Synthetic oligonucleotide
gagggcaggacctgggctcagcccgggtacccttggcccctctatggcaatgaggg

SEQ ID NO: 493936 - DNA, 52 bp, Artificial
  Synthetic oligonucleotide
gagggccaaacctatataacattcgaaacctccacattccagaggtctgctt

SEQ ID NO: 493937 - DNA, 53 bp, Artificial
  Synthetic oligonucleotide
gagggctaaccccgacagaaagtccgtcagggccagctacaagggcgttaccg

SEQ ID NO: 493938 - DNA, 56 bp, Artificial
  Synthetic oligonucleotide
gaggggatggttagtgactccattaaggaggagctccgacccctcgtccaacagac

SEQ ID NO: 493939 - DNA, 50 bp, Artificial
  Synthetic oligonucleotide
gagggggctttcatcttacaggggatagctactaaagattataggggcgc

SEQ ID NO: 493940 - DNA, 57 bp, Artificial
  Synthetic oligonucleotide
gagggtcaccaccctcgttagctagttcttcggctagccagctgtccgccccgtctc

SEQ ID NO: 493941 - DNA, 52 bp, Artificial
  Synthetic oligonucleotide
gagtacggctaatgttgtgctgatacaggttaattgccctacagacgtggtg

SEQ ID NO: 493942 - DNA, 51 bp, Artificial
  Synthetic oligonucleotide
gagtcagccatcaatgggaacttctgtatactttggtacacagagtggatc

SEQ ID NO: 493943 - DNA, 55 bp, Artificial
  Synthetic oligonucleotide
gagtctactcagcagatggccagttctattattaacacttcttttgaagccgcag

SEQ ID NO: 493944 - DNA, 55 bp, Artificial
  Synthetic oligonucleotide
gagtctagcaactatgctcaataccgtgtacagggcctaactgtccgctggcgcc

SEQ ID NO: 493945 - DNA, 55 bp, Artificial
  Synthetic oligonucleotide
gagtctttcacggacaaaggccgaaccacgtacgcagtgggtcaggacggccctg

SEQ ID NO: 493946 - DNA, 58 bp, Artificial
  Synthetic oligonucleotide
gagtgacctggcatcgctcctagcctccgtccctgtagtggaaggcggcctctcgacc

SEQ ID NO: 493947 - DNA, 54 bp, Artificial
  Synthetic oligonucleotide
gagttgctgacagggactttccgctggggactttccaggggaggtgtggtttgg

SEQ ID NO: 493948 - DNA, 53 bp, Artificial
  Synthetic oligonucleotide
gataactgtcccctcgacctgtcgaaagaaaccaccaagcctacgttcgttgt

SEQ ID NO: 493949 - DNA, 60 bp, Artificial
  Synthetic oligonucleotide
gatacgcacacctcctgcatatagaccacccaatgcccctatcttatcaacacttccgga

SEQ ID NO: 493950 - DNA, 53 bp, Artificial
  Synthetic oligonucleotide
gatagattacatccaatccatgcagggcctatagcaccaggccaaatgagaga

SEQ ID NO: 493951 - DNA, 55 bp, Artificial
  Synthetic oligonucleotide
gatagctgctgagtcgaagtagtacgcactatggatgtagcgccccaatggtggg

SEQ ID NO: 493952 - DNA, 60 bp, Artificial
  Synthetic oligonucleotide
gatatgacgtctgcggaagtatgggcggggccttcgtctaatctgaaatatagcgcatgc

SEQ ID NO: 493953 - DNA, 55 bp, Artificial
  Synthetic oligonucleotide
gatcagggtatgaggtgctaaaggttccgaatgcggaaacagacaatcagtccgg

SEQ ID NO: 493954 - DNA, 55 bp, Artificial
  Synthetic oligonucleotide
gatccactggcgagtgttagtaacaccactgctgcttcgtaacggagcatgacgg

SEQ ID NO: 493955 - DNA, 60 bp, Artificial
  Synthetic oligonucleotide
gatccatactgcggaactcctagccgcctgttttgctcacagccggtctggagcaaaact

SEQ ID NO: 493956 - DNA, 60 bp, Artificial
  Synthetic oligonucleotide
gatccatactgcggaactcctagccgcttgctttgctcgcagccggtctggagtaaagct

SEQ ID NO: 493957 - DNA, 55 bp, Artificial
  Synthetic oligonucleotide
gatccgtgcgattagtgagcgggttcttagcgcttgtgtgggacgatctacggag

SEQ ID NO: 493958 - DNA, 52 bp, Artificial
  Synthetic oligonucleotide
gatcgccacatgcatccagatgcttccgtaatgaaagttgtttcgcgtgatg

SEQ ID NO: 493959 - DNA, 60 bp, Artificial
  Synthetic oligonucleotide
gatcgggacaatttctaactactgatgacaggcaatcacccagtgctttaccaaactatg

SEQ ID NO: 493960 - DNA, 59 bp, Artificial
  Synthetic oligonucleotide
gatcgttgtacctagattacttgatataacattacgcgcttatgatgatagaaaatcga

SEQ ID NO: 493961 - DNA, 55 bp, Artificial
  Synthetic oligonucleotide
gatctaatggcctctgggacgcatccgttacctccctcagcaatcatgagtgggg

SEQ ID NO: 493962 - DNA, 55 bp, Artificial
  Synthetic oligonucleotide
gatcttgttggggcggatactgattggtcatcccgacagcctacttgccgatggg

SEQ ID NO: 493963 - DNA, 55 bp, Artificial
  Synthetic oligonucleotide
gatgaacgcccgtggggtgaccgacgagggctcgtggactgacaacaacagcgta

SEQ ID NO: 493964 - DNA, 55 bp, Artificial
  Synthetic oligonucleotide
gatgaggccaccctccccgcttggagtcaaggcgttgctaacttgaccggtaatg

SEQ ID NO: 493965 - DNA, 60 bp, Artificial
  Synthetic oligonucleotide
gatgatctggcactccaatctgaatgatgccacataccagagaacaagagctctcgtgcg

SEQ ID NO: 493966 - DNA, 51 bp, Artificial
  Synthetic oligonucleotide
gatggcaccataccacaacaattacttcgtatcattcgacaagtcaggtgg

SEQ ID NO: 493967 - DNA, 60 bp, Artificial
  Synthetic oligonucleotide
gatggttatcctaccttcggggagcatctccaagcaaatgacctagattatggccaatgc

SEQ ID NO: 493968 - DNA, 55 bp, Artificial
  Synthetic oligonucleotide
gatgtaccagactatgcatcgctcaggtctctaattgcttcctcaggaaccctgg

SEQ ID NO: 493969 - DNA, 59 bp, Artificial
  Synthetic oligonucleotide
gatgtcaccgtataccctctcccggatggggctaactcgttgacaccctgcacttgcca

SEQ ID NO: 493970 - DNA, 60 bp, Artificial
  Synthetic oligonucleotide
gattaatgaggcaatgcaactatgaatatacgtatgaatagtcacgtaatataattagaa

SEQ ID NO: 493971 - DNA, 50 bp, Artificial
  Synthetic oligonucleotide
gattaggcccacaccatccaggcttatgtgatgcccttgtgacccgctaa

SEQ ID NO: 493972 - DNA, 52 bp, Artificial
  Synthetic oligonucleotide
gattccccctgtcccccccctatatgggggtggttcatcaattggatttcac

SEQ ID NO: 493973 - DNA, 53 bp, Artificial
  Synthetic oligonucleotide
gattgaggctgagtcagtcgacgctggtggtgtgagcaatctcggtgagggga

SEQ ID NO: 493974 - DNA, 60 bp, Artificial
  Synthetic oligonucleotide
gattgcaacacatgtgtcacccagacagttgatttcagccttgaccctaccttcaccatt

SEQ ID NO: 493975 - DNA, 60 bp, Artificial
  Synthetic oligonucleotide
gattgcaacgagagcagtggaacttctgggacgcagcagtctcaggggactacagaaggg

SEQ ID NO: 493976 - DNA, 54 bp, Artificial
  Synthetic oligonucleotide
gatttgataattgagcgaagagaaggaaccgatgtatgctatcccggtaaattc

SEQ ID NO: 493977 - DNA, 60 bp, Artificial
  Synthetic oligonucleotide
gatttgatgtcacagtcccgcactcgcgagatactaacaaaaaccactgtggaccatatg

SEQ ID NO: 493978 - DNA, 55 bp, Artificial
  Synthetic oligonucleotide
gcaaaaccgacattgctccacgggtgttacgtgcgggcgtgtatgtgcgaatccg

SEQ ID NO: 493979 - DNA, 55 bp, Artificial
  Synthetic oligonucleotide
gcaaatggctcacattgcaaccctcactgctgcgctattcgggtgtgatgcgtgc

SEQ ID NO: 493980 - DNA, 54 bp, Artificial
  Synthetic oligonucleotide
gcaacagatggccgtctcaatcattaactcttcttttgaagctgcagttgtagc

SEQ ID NO: 493981 - DNA, 55 bp, Artificial
  Synthetic oligonucleotide
gcaaccaggccttgcctcggagttggtaatccctagtgaacgcctgcactatcgc

SEQ ID NO: 493982 - DNA, 55 bp, Artificial
  Synthetic oligonucleotide
gcaacctgctcgggaggaccacctgctgtcttatctcaatgaacacgtgtgcgta

SEQ ID NO: 493983 - DNA, 55 bp, Artificial
  Synthetic oligonucleotide
gcaacgaacgatggacattgcgtgacacgagccaggaaatgtgggacgcagtgcc

SEQ ID NO: 493984 - DNA, 60 bp, Artificial
  Synthetic oligonucleotide
gcaagacaaagacagatccgtgcgattagtgaacggattcttagcgcttgtctgggacga

SEQ ID NO: 493985 - DNA, 55 bp, Artificial
  Synthetic oligonucleotide
gcaaggttgacctgcatacacaatcaattgacggggcctggggttcaggagtagg

SEQ ID NO: 493986 - DNA, 55 bp, Artificial
  Synthetic oligonucleotide
gcaagtgcagtggatgacaacccctcaggcacaaggaggagtaccagtaggggac

SEQ ID NO: 493987 - DNA, 56 bp, Artificial
  Synthetic oligonucleotide
gcaatatcttatcaccagagccgaggcgcatttgcaagtgtggattccccctctca

SEQ ID NO: 493988 - DNA, 58 bp, Artificial
  Synthetic oligonucleotide
gcaatccagtacctgcggtcatacgtttcataaccgtgcgtacgggcatcgatactta

SEQ ID NO: 493989 - DNA, 53 bp, Artificial
  Synthetic oligonucleotide
gcaatggggggctgcgggaacatactttggagggctctccatcggcaccggtt

SEQ ID NO: 493990 - DNA, 55 bp, Artificial
  Synthetic oligonucleotide
gcaattgtttacatgtgggaagtgcaacctccctagccgatagcccttgaccggg

SEQ ID NO: 493991 - DNA, 55 bp, Artificial
  Synthetic oligonucleotide
gcaatttgggtaaggtcatcgataccctaacttgcggcttcgccgacctcatggg

SEQ ID NO: 493992 - DNA, 56 bp, Artificial
  Synthetic oligonucleotide
gcaccccagctaaacccgatcgatggaccactacctgaggacaatgaaccaagcgg

SEQ ID NO: 493993 - DNA, 51 bp, Artificial
  Synthetic oligonucleotide
gcaccctatgagcctacatggaatggataccgagggagaagtgttaaagtg

SEQ ID NO: 493994 - DNA, 56 bp, Artificial
  Synthetic oligonucleotide
gcacgtttaagtactaccaggttgttcgttgtcgccctctctggcgtggtagtgta

SEQ ID NO: 493995 - DNA, 55 bp, Artificial
  Synthetic oligonucleotide
gcacttctgggaccgacgggagccgatcctcaacctactgctgtccagatagccg

SEQ ID NO: 493996 - DNA, 55 bp, Artificial
  Synthetic oligonucleotide
gcagacccactagcatctctgttggagatgtgccacagcacacagataggcggga

SEQ ID NO: 493997 - DNA, 55 bp, Artificial
  Synthetic oligonucleotide
gcagcagtacctgtacgcccctataacgcagcgagtgaccacgcgtgtcgctcag

SEQ ID NO: 493998 - DNA, 55 bp, Artificial
  Synthetic oligonucleotide
gcagcatggtacctgtgggaagtgaagaaacaacgggctggagtattgtgggacg

SEQ ID NO: 493999 - DNA, 55 bp, Artificial
  Synthetic oligonucleotide
gcagcctacttcgaccacatgagggcactaggcttctgtccaactggcccggaca

SEQ ID NO: 494000 - DNA, 55 bp, Artificial
  Synthetic oligonucleotide
gcagcctctgacacttataagggccgtatatggtggagtaacccttatccatgtt

SEQ ID NO: 494001 - DNA, 55 bp, Artificial
  Synthetic oligonucleotide
gcaggattcaggagtagaggtaaacatagtaacagactcacaatatgcattagga

SEQ ID NO: 494002 - DNA, 55 bp, Artificial
  Synthetic oligonucleotide
gcaggctagtgagcaggagtctaaccgtacggtcaagcacactccctggtggcgt

SEQ ID NO: 494003 - DNA, 55 bp, Artificial
  Synthetic oligonucleotide
gcagggtgagggtcagtcgattgggaacaaaagccagcatgcgcacacgcagtgg

SEQ ID NO: 494004 - DNA, 55 bp, Artificial
  Synthetic oligonucleotide
gcagtagcagcggcctgtcacacggtgatgtattgcatattaccagggagtgtcc

SEQ ID NO: 494005 - DNA, 55 bp, Artificial
  Synthetic oligonucleotide
gcagtggaagttaagatgggtccagcagtcctgagcaaatcagaccccagactcg

SEQ ID NO: 494006 - DNA, 59 bp, Artificial
  Synthetic oligonucleotide
gcagttggcatggttacactatacctaggagtcatggttcaagcggactcgggatgtgt

SEQ ID NO: 494007 - DNA, 55 bp, Artificial
  Synthetic oligonucleotide
gcataagacctacgcacgccgagacgctaggcgaatcacttggacacctctggct

SEQ ID NO: 494008 - DNA, 60 bp, Artificial
  Synthetic oligonucleotide
gcatacatgaagtcacctgtctatgaggactcaccctatgagcctgcagttctttctatc

SEQ ID NO: 494009 - DNA, 55 bp, Artificial
  Synthetic oligonucleotide
gcatagaccaatgggttagcatggtacgcgccggactattgtccgcctcggtcac

SEQ ID NO: 494010 - DNA, 55 bp, Artificial
  Synthetic oligonucleotide
gcatagatgggtgcgtcctcctgaagcgagcgagtaggggtcaaccagaggtcct

SEQ ID NO: 494011 - DNA, 57 bp, Artificial
  Synthetic oligonucleotide
gcatccgacatttattcgggaactacataactaatgatagctattcaaagatgtctg

SEQ ID NO: 494012 - DNA, 56 bp, Artificial
  Synthetic oligonucleotide
gcatcctcaggaacattagaattcacagcagagggattcacatggacaggtgtcac

SEQ ID NO: 494013 - DNA, 55 bp, Artificial
  Synthetic oligonucleotide
gcatgataacgtagccattctaccaactcatgcctcaccaggagagacaatagtc

SEQ ID NO: 494014 - DNA, 55 bp, Artificial
  Synthetic oligonucleotide
gcatgctatggcgactttggggcaacccgttgcgaactaggccgcgttcccagtg

SEQ ID NO: 494015 - DNA, 55 bp, Artificial
  Synthetic oligonucleotide
gcatgcttctgacaggatccaacgccaaaagcatggatctaggcaccacaccagg

SEQ ID NO: 494016 - DNA, 55 bp, Artificial
  Synthetic oligonucleotide
gcattgtagcgatcgaggtatctgatgaaagagttccggctagcgtaagagcggg

SEQ ID NO: 494017 - DNA, 60 bp, Artificial
  Synthetic oligonucleotide
gcatttatgacaagtgggccgttttgccgcgtcatgctaaacctggaccaaccattctga

SEQ ID NO: 494018 - DNA, 55 bp, Artificial
  Synthetic oligonucleotide
gccacacctgtgctaggagtcggttctcgcattaccgccttagatcgcactctcg

SEQ ID NO: 494019 - DNA, 55 bp, Artificial
  Synthetic oligonucleotide
gccacattagagcgtacagcggtcactagcgcagcggcacctctctcgattagca

SEQ ID NO: 494020 - DNA, 51 bp, Artificial
  Synthetic oligonucleotide
gccaccccacaagatttaaacaccatgttaaacacggtggggggacatcaa

SEQ ID NO: 494021 - DNA, 52 bp, Artificial
  Synthetic oligonucleotide
gccacccccccgggatcggtggaggcctttccacagagcaatgcagttatcc

SEQ ID NO: 494022 - DNA, 56 bp, Artificial
  Synthetic oligonucleotide
gccacccttaaaatacccagtgtgcattttggtagtcccagtggctcactagtctc

SEQ ID NO: 494023 - DNA, 60 bp, Artificial
  Synthetic oligonucleotide
gccacgtgctcatggggaccgtacctgccagaagaaccaagacccatccctatgaggcat

SEQ ID NO: 494024 - DNA, 50 bp, Artificial
  Synthetic oligonucleotide
gccactaaaggagagaacacctgcttgttacaccctatgagcctgcatgg

SEQ ID NO: 494025 - DNA, 60 bp, Artificial
  Synthetic oligonucleotide
gccagctacgtccagcaccctcacaagaccgtcagggtcaagttccacacagagaccagg

SEQ ID NO: 494026 - DNA, 55 bp, Artificial
  Synthetic oligonucleotide
gccagggccagtttactaccaagattactcaggccccgtctaccatagggcccca

SEQ ID NO: 494027 - DNA, 55 bp, Artificial
  Synthetic oligonucleotide
gccagtcagatgggcagataacaccagtagttacatggcagggaggagcacagcc

SEQ ID NO: 494028 - DNA, 55 bp, Artificial
  Synthetic oligonucleotide
gccatattgcaagatgacttaacggtattgagatacgctgatgaaattgaagggt

SEQ ID NO: 494029 - DNA, 59 bp, Artificial
  Synthetic oligonucleotide
gccatttgttcagtggtgcgtaggactttcccccactgtctggctttcagttatatgga

SEQ ID NO: 494030 - DNA, 51 bp, Artificial
  Synthetic oligonucleotide
gcccaaggccacaacaatggcatttgctggggtaaccaggtattccttact

SEQ ID NO: 494031 - DNA, 55 bp, Artificial
  Synthetic oligonucleotide
gcccactctgacgtccgtgagtccttagggaggtttatccctaccatcgggccag

SEQ ID NO: 494032 - DNA, 54 bp, Artificial
  Synthetic oligonucleotide
gccccaaatacgttggagtaaaaagtctcaaactggcagtcggtccaaggaatg

SEQ ID NO: 494033 - DNA, 55 bp, Artificial
  Synthetic oligonucleotide
gccccaaattaccactatgaggagtgttcctgttatcctgatgctagcgaggtaa

SEQ ID NO: 494034 - DNA, 56 bp, Artificial
  Synthetic oligonucleotide
gccccaatcatgtactacatttagagcatgagcaaactgattaactcctgggaagt

SEQ ID NO: 494035 - DNA, 52 bp, Artificial
  Synthetic oligonucleotide
gccccagtatgaggaagatgtcaacttgggaagtggaacgcgagcagtaggg

SEQ ID NO: 494036 - DNA, 55 bp, Artificial
  Synthetic oligonucleotide
gccccgtgtgctaatagtgagtcctccggcccctgaatgcggctaatcttacccc

SEQ ID NO: 494037 - DNA, 55 bp, Artificial
  Synthetic oligonucleotide
gccccttaccagcggggcagctcagagatccacgaggatctgacatagcagggac

SEQ ID NO: 494038 - DNA, 55 bp, Artificial
  Synthetic oligonucleotide
gccctagagtcccacctaccgttgttcctccaccacagaacgcgcaagtcactcc

SEQ ID NO: 494039 - DNA, 60 bp, Artificial
  Synthetic oligonucleotide
gccctagattgtcagatctacggggcctgctactccattgaaccacttgacctacctcag

SEQ ID NO: 494040 - DNA, 51 bp, Artificial
  Synthetic oligonucleotide
gccctattaagacgtatagttagacctagttgtgagtaccaagcaggacac

SEQ ID NO: 494041 - DNA, 55 bp, Artificial
  Synthetic oligonucleotide
gccctgttagcattttggacataagacaagggccaaaggaaccctttagagatta

SEQ ID NO: 494042 - DNA, 53 bp, Artificial
  Synthetic oligonucleotide
gcccttcaggtaccccgaggtaacacgcgaaactcgggatctgagaaggggac

SEQ ID NO: 494043 - DNA, 55 bp, Artificial
  Synthetic oligonucleotide
gccgaccgcaccttatccgacgagcagtacgattggatcgtggcgtatgaacgac

SEQ ID NO: 494044 - DNA, 57 bp, Artificial
  Synthetic oligonucleotide
gccgagaccacagttaggttgcgagcgtacatgaacaccccggggcttcccgtgtgc

SEQ ID NO: 494045 - DNA, 60 bp, Artificial
  Synthetic oligonucleotide
gccgatcgactacaggggaatcaccgcacacaggcttgttggcgcagaacctagacctcc

SEQ ID NO: 494046 - DNA, 55 bp, Artificial
  Synthetic oligonucleotide
gccgcaggatgaggcgtcgaccttcgctttgatcccaaccaaacactacggaccg

SEQ ID NO: 494047 - DNA, 55 bp, Artificial
  Synthetic oligonucleotide
gccgcatgcctgagtgccacccgagacttactcatgactttagcggagttggggt

SEQ ID NO: 494048 - DNA, 55 bp, Artificial
  Synthetic oligonucleotide
gccgcctcaaccatgggtgcacttgcgaatactacgccgttagcagagaagtcga

SEQ ID NO: 494049 - DNA, 55 bp, Artificial
  Synthetic oligonucleotide
gccgcctggtcactcagtgctcaactgagataaagaccctggtctgttaggaccc

SEQ ID NO: 494050 - DNA, 55 bp, Artificial
  Synthetic oligonucleotide
gccgcgctcatggtgttacaccgtgggaaccgcgtgagagacatcacgaagcact

SEQ ID NO: 494051 - DNA, 55 bp, Artificial
  Synthetic oligonucleotide
gccgcttggaaggatttggcaaacaagtgctacgcctactcccgcccggaaccag

SEQ ID NO: 494052 - DNA, 55 bp, Artificial
  Synthetic oligonucleotide
gccgcttggtagccgatggtatgcgtgaactgcctcactaactgcaataggggac

SEQ ID NO: 494053 - DNA, 60 bp, Artificial
  Synthetic oligonucleotide
gccggcccgtgtgcacttcgcttcacctctgcacgtcacatggagaccaccgtgaacgcc

SEQ ID NO: 494054 - DNA, 51 bp, Artificial
  Synthetic oligonucleotide
gccgggaccacctaatgaagacgccgaattgttccccggtctagctccggt

SEQ ID NO: 494055 - DNA, 55 bp, Artificial
  Synthetic oligonucleotide
gccgtcatgcgctcccagtgccccacacacaattgtaacataaaagccccgtccg

SEQ ID NO: 494056 - DNA, 55 bp, Artificial
  Synthetic oligonucleotide
gccgtgtgggacagagacgaactataaccacacggtctggaacccaaatagggag

SEQ ID NO: 494057 - DNA, 57 bp, Artificial
  Synthetic oligonucleotide
gccgttggcttgactcattttagcaaccctacctcagtcgaattggattgggttata

SEQ ID NO: 494058 - DNA, 55 bp, Artificial
  Synthetic oligonucleotide
gccgtttcacaaactggggttcagttagcctctcactggacgcagagggcatttc

SEQ ID NO: 494059 - DNA, 55 bp, Artificial
  Synthetic oligonucleotide
gcctacacaaagcctagtacctcctttgacggtgtttgtctggtcgctcaggtgc

SEQ ID NO: 494060 - DNA, 51 bp, Artificial
  Synthetic oligonucleotide
gcctacacggcactccctaataaatggatagggctgtgcatactggcatca

SEQ ID NO: 494061 - DNA, 53 bp, Artificial
  Synthetic oligonucleotide
gcctaccacaagggcccggtgactcgactggctctcccatacaccgcgccaca

SEQ ID NO: 494062 - DNA, 55 bp, Artificial
  Synthetic oligonucleotide
gcctaccccgctgactccacctttgagagacactcatcctcaggccatgcagtgg

SEQ ID NO: 494063 - DNA, 55 bp, Artificial
  Synthetic oligonucleotide
gcctacgagcattcacggatgctatgaccaggtactccgccccccccggggaccc

SEQ ID NO: 494064 - DNA, 55 bp, Artificial
  Synthetic oligonucleotide
gcctacgcccatctctccacctctaagagacagtcatcctcaggccatgcagtgg

SEQ ID NO: 494065 - DNA, 55 bp, Artificial
  Synthetic oligonucleotide
gcctactccacctgtctcccctctaagagactctcatcctcaggccatgcagtgg

SEQ ID NO: 494066 - DNA, 59 bp, Artificial
  Synthetic oligonucleotide
gcctccatggaggccctgcaacaaacagggattacctacggcaacgacaggtggcactg

SEQ ID NO: 494067 - DNA, 52 bp, Artificial
  Synthetic oligonucleotide
gcctgatagcctgtacttaaccagtgattcagaggatagacaaaccttgtcc

SEQ ID NO: 494068 - DNA, 50 bp, Artificial
  Synthetic oligonucleotide
gcctgtgtaggccttgaaataggtagaggacaaccattaggagttggtac

SEQ ID NO: 494069 - DNA, 52 bp, Artificial
  Synthetic oligonucleotide
gccttaacgcaggaggctaatgacttctcaaacctcatccaggcggatctag

SEQ ID NO: 494070 - DNA, 58 bp, Artificial
  Synthetic oligonucleotide
gccttcctttgacatgagtaacgaagggtcttatttcttcggagacaatgcagaggag

SEQ ID NO: 494071 - DNA, 55 bp, Artificial
  Synthetic oligonucleotide
gccttctgacttctttccttccgtacgagatcttctagataccgcctcagctcta

SEQ ID NO: 494072 - DNA, 54 bp, Artificial
  Synthetic oligonucleotide
gcgaaaaaggcactgagacctagatggtgtgatgaaagagtgtcctcagaccag

SEQ ID NO: 494073 - DNA, 55 bp, Artificial
  Synthetic oligonucleotide
gcgaacagggtgtgaagagcctattgagctacatgagattcctccggcccctgaa

SEQ ID NO: 494074 - DNA, 56 bp, Artificial
  Synthetic oligonucleotide
gcgacatacttcagggtctgccggtctctgcgcggctaggtaacttggtcctactt

SEQ ID NO: 494075 - DNA, 55 bp, Artificial
  Synthetic oligonucleotide
gcgaccccttgggctttactcgtctgcatggtaccggtctgcagcactattagcg

SEQ ID NO: 494076 - DNA, 56 bp, Artificial
  Synthetic oligonucleotide
gcgacgtaggcggaagtagtaaatacggctactcctcctgtggccacgtatgttcc

SEQ ID NO: 494077 - DNA, 51 bp, Artificial
  Synthetic oligonucleotide
gcgaggcattcgggtccctggcaatcataattccaggggagtaccccgagc

SEQ ID NO: 494078 - DNA, 55 bp, Artificial
  Synthetic oligonucleotide
gcgcacacactaataatgattgggtccaatgcaactgacaggatgggaatgggcg

SEQ ID NO: 494079 - DNA, 55 bp, Artificial
  Synthetic oligonucleotide
gcgcactgacgtagaagggaactgggctttgacaggaggcatggaactgacaagg

SEQ ID NO: 494080 - DNA, 55 bp, Artificial
  Synthetic oligonucleotide
gcgcagctctatcgccaacttaatcatgaatatagcaacgtgcttacccacgggg

SEQ ID NO: 494081 - DNA, 51 bp, Artificial
  Synthetic oligonucleotide
gcgcagctggcttgagcccatcttgggtgctgttagggcgattcagggtga

SEQ ID NO: 494082 - DNA, 55 bp, Artificial
  Synthetic oligonucleotide
gcgccgagcctttcgtgaactcgcatcacagtcgcacctatactggacatgaggc

SEQ ID NO: 494083 - DNA, 55 bp, Artificial
  Synthetic oligonucleotide
gcgcctctcccctgagccagacttggctcgagtagtgatggatgacctcctagcc

SEQ ID NO: 494084 - DNA, 55 bp, Artificial
  Synthetic oligonucleotide
gcgcgcctgtacataaggacaacggcgtttgctacaatgcccgtcgcggcatgct

SEQ ID NO: 494085 - DNA, 58 bp, Artificial
  Synthetic oligonucleotide
gcgcgggaacccaagaggacgcggctagcctacgagtcttcacggaggctatgactag

SEQ ID NO: 494086 - DNA, 55 bp, Artificial
  Synthetic oligonucleotide
gcgcgtagaccttcggcctcgctgctaccgctctcgctacctctcgagctccctc

SEQ ID NO: 494087 - DNA, 55 bp, Artificial
  Synthetic oligonucleotide
gcgcgtccctttcgatgacgtgcattgcagttggcatggttacactgtacctagg

SEQ ID NO: 494088 - DNA, 60 bp, Artificial
  Synthetic oligonucleotide
gcgctcaagggctcattcgtgcatgcatgttagtgcggaaagtcgctgggggtcattatg

SEQ ID NO: 494089 - DNA, 55 bp, Artificial
  Synthetic oligonucleotide
gcgctggaagccccagcaatggtcgcaaacattccggtcgggtgttcgtgtggct

SEQ ID NO: 494090 - DNA, 55 bp, Artificial
  Synthetic oligonucleotide
gcgcttaaagaacgaccgggccccttatgagacacgtgctcagaactgcgctcag

SEQ ID NO: 494091 - DNA, 55 bp, Artificial
  Synthetic oligonucleotide
gcgcttggagcccgactctgatactctgcagccctctccaattacgcaccaaggg

SEQ ID NO: 494092 - DNA, 54 bp, Artificial
  Synthetic oligonucleotide
gcggaaactaggatatactatttcaaagaggggagaatcctcaaatgggagcct

SEQ ID NO: 494093 - DNA, 55 bp, Artificial
  Synthetic oligonucleotide
gcggactacatgggccttgtgcgaatccatcacactggccactggacctctgacc

SEQ ID NO: 494094 - DNA, 60 bp, Artificial
  Synthetic oligonucleotide
gcggagtagacatgcgggcgggacgtattatagcgtgggatggacaaactgctctacatg

SEQ ID NO: 494095 - DNA, 55 bp, Artificial
  Synthetic oligonucleotide
gcggatccgggtcgttgcccataggtgtagccaaatatcacgggtctgatcagga

SEQ ID NO: 494096 - DNA, 54 bp, Artificial
  Synthetic oligonucleotide
gcggcagcttaccaagagcaactagaccggccggtagtacctcaccctttccgg

SEQ ID NO: 494097 - DNA, 51 bp, Artificial
  Synthetic oligonucleotide
gcgggactcatggactctgacggcaccgtctctgatcgacaggtgacgatc

SEQ ID NO: 494098 - DNA, 56 bp, Artificial
  Synthetic oligonucleotide
gcgggaggaagtgtcattcagagtaggactccacgagtacccggtggggtcgcaat

SEQ ID NO: 494099 - DNA, 55 bp, Artificial
  Synthetic oligonucleotide
gcgggagtgctaggaccctgattgtaactggctttaccgcacttgggctcgacct

SEQ ID NO: 494100 - DNA, 59 bp, Artificial
  Synthetic oligonucleotide
gcgggagttttgttcagcatccagaactaaccggactggattgtatgagatcttgcttt

SEQ ID NO: 494101 - DNA, 54 bp, Artificial
  Synthetic oligonucleotide
gcggtagggagtattgccgacgctctcctttccggagggttaggatcgtggctc

SEQ ID NO: 494102 - DNA, 60 bp, Artificial
  Synthetic oligonucleotide
gcggtcaatccgagacgttgtggcaccagatgtatcgggtcaacgatatcgctggcgatc

SEQ ID NO: 494103 - DNA, 55 bp, Artificial
  Synthetic oligonucleotide
gcggtcgtgggaagagtggaccaacatcgacatccagcccgcacgttcttgggga

SEQ ID NO: 494104 - DNA, 55 bp, Artificial
  Synthetic oligonucleotide
gcggtgacaatggcgggtggagatacctcgctgccgagagcactgaacagaaggg

SEQ ID NO: 494105 - DNA, 55 bp, Artificial
  Synthetic oligonucleotide
gcgtactacagcttcctgtgccgtcctcttgcaacggtggcatgtatcgagtgcg

SEQ ID NO: 494106 - DNA, 55 bp, Artificial
  Synthetic oligonucleotide
gcgtcaactaacgcagggtctatcaacgccccaaccgtgtcagatagtagggccc

SEQ ID NO: 494107 - DNA, 60 bp, Artificial
  Synthetic oligonucleotide
gcgtcggagggagctctactgcagggagcccacataccctaccgagcactcagagggtcg

SEQ ID NO: 494108 - DNA, 55 bp, Artificial
  Synthetic oligonucleotide
gcgtgggacctttgtgtctcctctgccgatccatactgcggaactcctagctgcc

SEQ ID NO: 494109 - DNA, 55 bp, Artificial
  Synthetic oligonucleotide
gcgttacaaggactgctgacagcgagatttctacaagggactttccgctggggac

SEQ ID NO: 494110 - DNA, 60 bp, Artificial
  Synthetic oligonucleotide
gcgttccaggaggtgtggtctgggcgggacatgggagtggtcaaccctcagatgctgcat

SEQ ID NO: 494111 - DNA, 58 bp, Artificial
  Synthetic oligonucleotide
gcgttgcactccacacttacgtcagtgtacacgcgggaaccgatggactttcgttcac

SEQ ID NO: 494112 - DNA, 55 bp, Artificial
  Synthetic oligonucleotide
gctacccagctttggggtgtctgggattaatgaatcggctgatatgagcattgga

SEQ ID NO: 494113 - DNA, 59 bp, Artificial
  Synthetic oligonucleotide
gctacgtcactaacctacgtgtccgtctcctataggccagacaccgtctacgtcataca

SEQ ID NO: 494114 - DNA, 52 bp, Artificial
  Synthetic oligonucleotide
gctagccattcgcttaacatggtgtttactgtagatccaatgcaagaaacta

SEQ ID NO: 494115 - DNA, 55 bp, Artificial
  Synthetic oligonucleotide
gctagccgcctgttttgctcgcagcaggtctggagcaaacctcatcgggactgac

SEQ ID NO: 494116 - DNA, 55 bp, Artificial
  Synthetic oligonucleotide
gctagttcttcggctagccagctgtccgccccgtctcttaaggccacatgcaccg

SEQ ID NO: 494117 - DNA, 60 bp, Artificial
  Synthetic oligonucleotide
gctatagaggcgcaacagagtatgttgcaactcacggtctggggcattaagcagctccag

SEQ ID NO: 494118 - DNA, 60 bp, Artificial
  Synthetic oligonucleotide
gctattaccccatagtagacctggcagatgaggctagaagttccccactggcgacagtgt

SEQ ID NO: 494119 - DNA, 55 bp, Artificial
  Synthetic oligonucleotide
gctcacattgcaaccctcactgctgcgctattcgggtgtgatgcgtgctaacgcc

SEQ ID NO: 494120 - DNA, 60 bp, Artificial
  Synthetic oligonucleotide
gctcagctagaggctaacgggccggagcagtatgtgctgtcgtttgatccggccaaacaa

SEQ ID NO: 494121 - DNA, 60 bp, Artificial
  Synthetic oligonucleotide
gctcagtacaaaaacgtgtgggatgtggactattcggcctttgatgctaaccactgcagt

SEQ ID NO: 494122 - DNA, 51 bp, Artificial
  Synthetic oligonucleotide
gctccacaaatggctagttctggttatcaaagggctaatggcactctagct

SEQ ID NO: 494123 - DNA, 55 bp, Artificial
  Synthetic oligonucleotide
gctccacgtagaatccttccggcccctgaatgtggctaatcctaaccccgcagct

SEQ ID NO: 494124 - DNA, 60 bp, Artificial
  Synthetic oligonucleotide
gctccactagcgcgtcgcttcactagatggactcacgtgcgttcggggcacgaagtacca

SEQ ID NO: 494125 - DNA, 60 bp, Artificial
  Synthetic oligonucleotide
gctccccagctttggagtgtctggaattaacgagtccgctgacatgagtattggagtcac

SEQ ID NO: 494126 - DNA, 55 bp, Artificial
  Synthetic oligonucleotide
gctccgcgccgtaaggcaagctgaaccaaagtagtgacccgacaatgtgccacca

SEQ ID NO: 494127 - DNA, 51 bp, Artificial
  Synthetic oligonucleotide
gctcctacagtccccttgtaggggctctataaatcagcccgtttgctggag

SEQ ID NO: 494128 - DNA, 60 bp, Artificial
  Synthetic oligonucleotide
gctcctgaggactgcaataggccaagtatcaaggccaatgttcctgtatgtgagaaccaa

SEQ ID NO: 494129 - DNA, 58 bp, Artificial
  Synthetic oligonucleotide
gctcgccaggaagaggcctctaatctaatgacttcagttactgaggggggtgggtcat

SEQ ID NO: 494130 - DNA, 57 bp, Artificial
  Synthetic oligonucleotide
gctcgcccagtgacagcccaagcccacaaagagaccaaacctaaagatgagccgggg

SEQ ID NO: 494131 - DNA, 60 bp, Artificial
  Synthetic oligonucleotide
gctctggcgatcgatatgtcaggatgggaactgaaagcatgaattttgccaagagtccag

SEQ ID NO: 494132 - DNA, 55 bp, Artificial
  Synthetic oligonucleotide
gctgattatgcaaccgcacaacccgcaaacactggcaaggtggcaatgtctcacc

SEQ ID NO: 494133 - DNA, 51 bp, Artificial
  Synthetic oligonucleotide
gctgccacgttagtggctcctcttcttgatgattctgccaccatgagtgac

SEQ ID NO: 494134 - DNA, 55 bp, Artificial
  Synthetic oligonucleotide
gctgccctgctagcaatgactaacccacacttagctactggccagatccactggg

SEQ ID NO: 494135 - DNA, 53 bp, Artificial
  Synthetic oligonucleotide
gctgccgaacgtgcacattacctccagtgacgttccgcacagggacagactgt

SEQ ID NO: 494136 - DNA, 55 bp, Artificial
  Synthetic oligonucleotide
gctgccttagcctcataccctaaacggttagcagccgcccaaagatacgcaacgc

SEQ ID NO: 494137 - DNA, 60 bp, Artificial
  Synthetic oligonucleotide
gctgcgaagaacgatcagagcaatccggagacgcagggagctaatgaggtcagcggtaca

SEQ ID NO: 494138 - DNA, 55 bp, Artificial
  Synthetic oligonucleotide
gctgcgacaatgaagcctgttggtcttttgcactagctcaaggcgcactcctggg

SEQ ID NO: 494139 - DNA, 60 bp, Artificial
  Synthetic oligonucleotide
gctgcttatggtgacaatcgaaaagttgttaccatatagctattggattggccatccggt

SEQ ID NO: 494140 - DNA, 60 bp, Artificial
  Synthetic oligonucleotide
gctggcgtgcggccatagcactggacggggggctgcatacaacgcgagactagctttccg

SEQ ID NO: 494141 - DNA, 60 bp, Artificial
  Synthetic oligonucleotide
gctggctcacggggtccagtcacgcagatgtactccagtgccgagggggacttggtggag

SEQ ID NO: 494142 - DNA, 55 bp, Artificial
  Synthetic oligonucleotide
gctggctgcttttagcgggtgcagacaggggtaggggtgtattagatcaggggcg

SEQ ID NO: 494143 - DNA, 55 bp, Artificial
  Synthetic oligonucleotide
gctgggtcatctggatacgctacaagcacggggccgatggattaccgtggcatcg

SEQ ID NO: 494144 - DNA, 55 bp, Artificial
  Synthetic oligonucleotide
gctgtggtcactgatggctaccttaagatggcaggcatgcattttggtgcttgcg

SEQ ID NO: 494145 - DNA, 53 bp, Artificial
  Synthetic oligonucleotide
gcttaacctgtatgacgtgatctcggcaatttgcgttgaggttgacaggcgtg

SEQ ID NO: 494146 - DNA, 53 bp, Artificial
  Synthetic oligonucleotide
gcttaagcaggaagctgttaggcattttcctaggccatggctccatagcttag

SEQ ID NO: 494147 - DNA, 55 bp, Artificial
  Synthetic oligonucleotide
gcttcacctctgcacgtcgcatggaaaccaccgtgaacgccccttggaacttgcc

SEQ ID NO: 494148 - DNA, 55 bp, Artificial
  Synthetic oligonucleotide
gcttcggcagtggtctggtacaatggaaggccagtcaccgaaattgcttcgtggg

SEQ ID NO: 494149 - DNA, 60 bp, Artificial
  Synthetic oligonucleotide
gcttgctgaggtgcacacagcaagaggcgagaacggcgactggtgagtacgccaaatttt

SEQ ID NO: 494150 - DNA, 58 bp, Artificial
  Synthetic oligonucleotide
gcttgttttgctcgcagccggtctggagcgaaacttatcgggaccgacaattctgtcg

SEQ ID NO: 494151 - DNA, 55 bp, Artificial
  Synthetic oligonucleotide
gctttaagacacagtgtggctcaggtatatgcagatacgcaaacctatacacatg

SEQ ID NO: 494152 - DNA, 59 bp, Artificial
  Synthetic oligonucleotide
ggaaacgtatcagcccggtcgttggtttatgcgagctgcgcaggctgtaacagccgtgg

SEQ ID NO: 494153 - DNA, 55 bp, Artificial
  Synthetic oligonucleotide
ggaaagcatggttacacatttgtgtcactggggatgatagaaatgcaactgctag

SEQ ID NO: 494154 - DNA, 60 bp, Artificial
  Synthetic oligonucleotide
ggaaattggatactccgaagacgcagtgtgtctcatagaagggatcaatcacacccatca

SEQ ID NO: 494155 - DNA, 60 bp, Artificial
  Synthetic oligonucleotide
ggaacagcaggaagcactatgggcgcggcgtcaataacgctgacggtacaagccagacaa

SEQ ID NO: 494156 - DNA, 60 bp, Artificial
  Synthetic oligonucleotide
ggaacaggtgattgcaatccagcaactagcctgtcgtaacgcgcaagtctgtggcggaac

SEQ ID NO: 494157 - DNA, 54 bp, Artificial
  Synthetic oligonucleotide
ggaaccaaccacggcggagtgctcctagaaaggcgcgggtcggtaccagacggc

SEQ ID NO: 494158 - DNA, 60 bp, Artificial
  Synthetic oligonucleotide
ggaagatacattgcgtggtttgagcgcaagaatccataacatcgcgaatgcaacatcgat

SEQ ID NO: 494159 - DNA, 60 bp, Artificial
  Synthetic oligonucleotide
ggaagcaaccaaattttgcgcacccatatacgagtgtgcctgggttagctccactggcat

SEQ ID NO: 494160 - DNA, 60 bp, Artificial
  Synthetic oligonucleotide
ggaaggcagcctacccctctgtctccaccgttgagagacactcatcctcaggccatgcag

SEQ ID NO: 494161 - DNA, 55 bp, Artificial
  Synthetic oligonucleotide
ggaaggtgcacacgtgctcgccattcaaagcgcagtcgtcgttccatcacagtgc

SEQ ID NO: 494162 - DNA, 60 bp, Artificial
  Synthetic oligonucleotide
ggaagtatcccattgcagagccactgaatacataatgaagggagtatacataaacacagc

SEQ ID NO: 494163 - DNA, 55 bp, Artificial
  Synthetic oligonucleotide
ggaatctaatcgctccatggtatgggcacattctttcaggagagagccacggaag

SEQ ID NO: 494164 - DNA, 55 bp, Artificial
  Synthetic oligonucleotide
ggaatcttcgatgcgttgcgctcagcactcgaccccggagtgtagcttaggccga

SEQ ID NO: 494165 - DNA, 55 bp, Artificial
  Synthetic oligonucleotide
ggaattgcctgatgaagttaagacggatattgaacaacagctaaattccattgac

SEQ ID NO: 494166 - DNA, 55 bp, Artificial
  Synthetic oligonucleotide
ggacactctcgttctccaccagtggtataaagtccgcagggtcacggacccacac

SEQ ID NO: 494167 - DNA, 53 bp, Artificial
  Synthetic oligonucleotide
ggacagaaccgtctcgggtcccgctccaggccacctccttaacggaagtgtta

SEQ ID NO: 494168 - DNA, 55 bp, Artificial
  Synthetic oligonucleotide
ggacaggtgtcactcaaaacggaggaagtagcgcctgcagaaggggatcagccga

SEQ ID NO: 494169 - DNA, 53 bp, Artificial
  Synthetic oligonucleotide
ggacatacctagccttaaatgccaccgaccccaacaaaactaaagactgttgg

SEQ ID NO: 494170 - DNA, 55 bp, Artificial
  Synthetic oligonucleotide
ggacatctggtgtgcaattcaggtatacagatcctgacacatacactagtgctgg

SEQ ID NO: 494171 - DNA, 60 bp, Artificial
  Synthetic oligonucleotide
ggaccagacttcttatggcgccaatgagactcgtgctctatcggcaccgtatctgtttgg

SEQ ID NO: 494172 - DNA, 59 bp, Artificial
  Synthetic oligonucleotide
ggaccaggggtcagatatccactgacctttgggtggcccttcaagctagtgccagtcga

SEQ ID NO: 494173 - DNA, 55 bp, Artificial
  Synthetic oligonucleotide
ggaccatcacagtgccaactgcatgaacggacacggttgtttaccacgtacccat

SEQ ID NO: 494174 - DNA, 54 bp, Artificial
  Synthetic oligonucleotide
ggacccgggactgtgactctacaagtcaaaacccctaccggcacccaagtgatc

SEQ ID NO: 494175 - DNA, 55 bp, Artificial
  Synthetic oligonucleotide
ggacgctaaactgcttcaggcggaggagcgaaacctgtcagttgcgctgtgtgag

SEQ ID NO: 494176 - DNA, 60 bp, Artificial
  Synthetic oligonucleotide
ggactacatgggctctgtgtgaggctttaaccttagcgacagggcccatctccacattgt

SEQ ID NO: 494177 - DNA, 58 bp, Artificial
  Synthetic oligonucleotide
ggactatagaaattggtcaaagccgcagtgtcaaattacaggatttgcgcctttctct

SEQ ID NO: 494178 - DNA, 56 bp, Artificial
  Synthetic oligonucleotide
ggactgcaaaattgctcccttgatggtagcatacatgctagaaagagagctggtcc

SEQ ID NO: 494179 - DNA, 55 bp, Artificial
  Synthetic oligonucleotide
ggagacgaccacaaggtttggggagcaacacaccatacatactacgttgagggag

SEQ ID NO: 494180 - DNA, 56 bp, Artificial
  Synthetic oligonucleotide
ggagacttgggctctgagacacccaggattcacggtgatagccttttttctagcac

SEQ ID NO: 494181 - DNA, 53 bp, Artificial
  Synthetic oligonucleotide
ggagcaagaggctcctggtccactagggacgtttgtgcaagtaggcacgtcag

SEQ ID NO: 494182 - DNA, 60 bp, Artificial
  Synthetic oligonucleotide
ggagctgacacgttcatcgtcggcactcactctgcgggcggcaacggagttggatactgc

SEQ ID NO: 494183 - DNA, 51 bp, Artificial
  Synthetic oligonucleotide
ggaggagtggacaaatgtggacatccagccagcacgatcctgggggacgta

SEQ ID NO: 494184 - DNA, 52 bp, Artificial
  Synthetic oligonucleotide
ggaggatgaccacgacgagttagggttcatggtaccacctggcctctccaac

SEQ ID NO: 494185 - DNA, 55 bp, Artificial
  Synthetic oligonucleotide
ggaggcgtggtctgggcgggactggggagtggcgagccctcagatgctgcatata

SEQ ID NO: 494186 - DNA, 55 bp, Artificial
  Synthetic oligonucleotide
ggaggctagtgaggacgtcgtctgttgctcgatgtcctacacatggacaggcgcc

SEQ ID NO: 494187 - DNA, 57 bp, Artificial
  Synthetic oligonucleotide
ggaggttcctggtctccgcgcgattacacgccgcagacccaaggcacctacacgaac

SEQ ID NO: 494188 - DNA, 55 bp, Artificial
  Synthetic oligonucleotide
ggagtccttagtagcatggcaatgacagggactaaactgggcacaagaagaggcc

SEQ ID NO: 494189 - DNA, 50 bp, Artificial
  Synthetic oligonucleotide
ggagtgcaatctttttcaccacaagtctctttttacatctggttgggttc

SEQ ID NO: 494190 - DNA, 57 bp, Artificial
  Synthetic oligonucleotide
ggataacatcttgctccgcaaacgtctccgtagcccatgaccacaatggacgtaggt

SEQ ID NO: 494191 - DNA, 51 bp, Artificial
  Synthetic oligonucleotide
ggataagcacagcttgtagaggagattctcataagggttcctattgcccgg

SEQ ID NO: 494192 - DNA, 60 bp, Artificial
  Synthetic oligonucleotide
ggatacttaggccgcgagccattccgaccatggtcgaactagagacagatgccgctctgc

SEQ ID NO: 494193 - DNA, 55 bp, Artificial
  Synthetic oligonucleotide
ggatcctatgtgtgttttgcttcaccagctagggtcccgtttgttggggtgcccc

SEQ ID NO: 494194 - DNA, 57 bp, Artificial
  Synthetic oligonucleotide
ggatcctgcgttcggagccaactcaaacaatccagattgggacttcaaccccaacaa

SEQ ID NO: 494195 - DNA, 55 bp, Artificial
  Synthetic oligonucleotide
ggatggttcaaaagcacgacatatataactctagatcagacctgtgaacacctca

SEQ ID NO: 494196 - DNA, 55 bp, Artificial
  Synthetic oligonucleotide
ggattacacccaggtgcatggtcaactacccctatagactttggcactacccttg

SEQ ID NO: 494197 - DNA, 55 bp, Artificial
  Synthetic oligonucleotide
ggattcgcactcctgtagcttatagaccaccaaatgcccctatcctatcaacgct

SEQ ID NO: 494198 - DNA, 60 bp, Artificial
  Synthetic oligonucleotide
ggattctgggtctcccccagcctgttcataacatcaacccatgtcataccccagggcgca

SEQ ID NO: 494199 - DNA, 59 bp, Artificial
  Synthetic oligonucleotide
ggattgtaagattgctcccttaatggtggcatacatgttggaaagggaactggtccgca

SEQ ID NO: 494200 - DNA, 51 bp, Artificial
  Synthetic oligonucleotide
ggcaacgggtacatacccatagcctacagatttcagtggtacccttgcatg

SEQ ID NO: 494201 - DNA, 60 bp, Artificial
  Synthetic oligonucleotide
ggcaacgtcatcaattggaccaaagattcaataaccgacatctggacttaccaagcagag

SEQ ID NO: 494202 - DNA, 55 bp, Artificial
  Synthetic oligonucleotide
ggcacactacaggtttgtggagaaggacccatactcggctgcggggtatgtcacc

SEQ ID NO: 494203 - DNA, 55 bp, Artificial
  Synthetic oligonucleotide
ggcacacttccgattccgtcagattcgtcaggggcgtgctcagtctgatcagtgg

SEQ ID NO: 494204 - DNA, 55 bp, Artificial
  Synthetic oligonucleotide
ggcacaggtttgtgcccaacagagcgcagttgtcgccacgtcataacagcatcat

SEQ ID NO: 494205 - DNA, 55 bp, Artificial
  Synthetic oligonucleotide
ggcacagtctaacctgtctacgcagcgatctgtccgtaagcgtgcacgttccccg

SEQ ID NO: 494206 - DNA, 55 bp, Artificial
  Synthetic oligonucleotide
ggcaccatcccgactgcccgaaccctgagacggaggactaatgcgcatcaggtca

SEQ ID NO: 494207 - DNA, 55 bp, Artificial
  Synthetic oligonucleotide
ggcacctcgcggggggtaagtacgtccagatggcgctgttagcccttggtaggtg

SEQ ID NO: 494208 - DNA, 55 bp, Artificial
  Synthetic oligonucleotide
ggcacgttgtttcagggcagggcgtatggtgggagcatatggtgcggggtcaacc

SEQ ID NO: 494209 - DNA, 55 bp, Artificial
  Synthetic oligonucleotide
ggcaggaagaagcggagacagcgacgaagcactcctctgcgcagtgaggaccatc

SEQ ID NO: 494210 - DNA, 59 bp, Artificial
  Synthetic oligonucleotide
ggcagggggtaggacgagcgatgtatgcccctcccattgcaggaaacataacatgtacc

SEQ ID NO: 494211 - DNA, 55 bp, Artificial
  Synthetic oligonucleotide
ggcagtggttcctagacctgccgttaccatggctacccggagcggacacacaagg

SEQ ID NO: 494212 - DNA, 60 bp, Artificial
  Synthetic oligonucleotide
ggcatcaccatcccacatgatatagacctcggtgactcccgtgtggttatccaggactac

SEQ ID NO: 494213 - DNA, 55 bp, Artificial
  Synthetic oligonucleotide
ggcatggagttaacaagggaccctactgtttcagagcacgcatctctggttggcc

SEQ ID NO: 494214 - DNA, 60 bp, Artificial
  Synthetic oligonucleotide
ggcatgttatggatggccgatgtcccacttcaatggatcgcgtcggctatagtcctggaa

SEQ ID NO: 494215 - DNA, 52 bp, Artificial
  Synthetic oligonucleotide
ggccaaacacctccggtctcgagaccagagttgctcaggcggaacggttttt

SEQ ID NO: 494216 - DNA, 52 bp, Artificial
  Synthetic oligonucleotide
ggccaaagggctaccttgcgtacccgtagtggcaaacaaatcggggcccgtg

SEQ ID NO: 494217 - DNA, 60 bp, Artificial
  Synthetic oligonucleotide
ggccacgcgattgcaagcggttgctcccatgacaccagttggggttggcatcaacatgga

SEQ ID NO: 494218 - DNA, 55 bp, Artificial
  Synthetic oligonucleotide
ggccactgacacggaactgacagagatacgtgggatgatggacgccagtgagagg

SEQ ID NO: 494219 - DNA, 55 bp, Artificial
  Synthetic oligonucleotide
ggccagtatgacatatcagaaccctacaaactagacaagtacagctgccccaact

SEQ ID NO: 494220 - DNA, 55 bp, Artificial
  Synthetic oligonucleotide
ggccatctctgcaacaagttatgcgagaccaactgaagccattcaccgaaccccg

SEQ ID NO: 494221 - DNA, 55 bp, Artificial
  Synthetic oligonucleotide
ggccatctctgggagtctgccaaccccttctgcggggaggggactttgtataccc

SEQ ID NO: 494222 - DNA, 55 bp, Artificial
  Synthetic oligonucleotide
ggccatggccccaatcatgtactacatttagagcatgagcaaactgattaactcc

SEQ ID NO: 494223 - DNA, 59 bp, Artificial
  Synthetic oligonucleotide
ggcccactgggcgctagcactctggtatcacggtacctttgtgcgcctgttttatctac

SEQ ID NO: 494224 - DNA, 57 bp, Artificial
  Synthetic oligonucleotide
ggcccaggcacattgggccgttgccatcgctattctaggccttcccgcccaaattaa

SEQ ID NO: 494225 - DNA, 55 bp, Artificial
  Synthetic oligonucleotide
ggccccgatcgtagatggcaagcggacggtatgggctagcagcctgccagaaggt

SEQ ID NO: 494226 - DNA, 60 bp, Artificial
  Synthetic oligonucleotide
ggcccctgaatgcggctaatcccaactgcggagcacacacccacaaaccagcgggcagtc

SEQ ID NO: 494227 - DNA, 55 bp, Artificial
  Synthetic oligonucleotide
ggccctgtagagcctattggacctggcacacccactgtcatagatgcaactcccc

SEQ ID NO: 494228 - DNA, 56 bp, Artificial
  Synthetic oligonucleotide
ggccgactagctctgtacctggcggacccgtggtggaactgacgagttcggaacac

SEQ ID NO: 494229 - DNA, 55 bp, Artificial
  Synthetic oligonucleotide
ggccggtggtgaccaaaacgttggtagtgctgtgtatagccccactcccagtggg

SEQ ID NO: 494230 - DNA, 55 bp, Artificial
  Synthetic oligonucleotide
ggcctcactgtgcgcgttaaagttgtttcggtgactgtgaacggggccgcgttgc

SEQ ID NO: 494231 - DNA, 55 bp, Artificial
  Synthetic oligonucleotide
ggcgacgacttagtcgttatctgtgaaagtcagggagtccaggaggacgcggcga

SEQ ID NO: 494232 - DNA, 60 bp, Artificial
  Synthetic oligonucleotide
ggcgactgcaccagtggttaagctcggagagcactactccatgctccggttcctggctaa

SEQ ID NO: 494233 - DNA, 55 bp, Artificial
  Synthetic oligonucleotide
ggcgcatatatacgcccagaaggttttcccccggattggatttgacaaccaggct

SEQ ID NO: 494234 - DNA, 55 bp, Artificial
  Synthetic oligonucleotide
ggcgctagggtctcacccctagcacaccaacgacagtccctgcgttgcactccac

SEQ ID NO: 494235 - DNA, 55 bp, Artificial
  Synthetic oligonucleotide
ggcgctgatctgactcacgtgttgccagcgagtgcggttacttattcacctgccg

SEQ ID NO: 494236 - DNA, 57 bp, Artificial
  Synthetic oligonucleotide
ggcgcttggttcagccggtatggtctcaccacagtctgcttggggttattcccaaac

SEQ ID NO: 494237 - DNA, 60 bp, Artificial
  Synthetic oligonucleotide
ggcgggcaattgcaacgcctgggatgcagatcagaggattcgtatactttgtcgaaacat

SEQ ID NO: 494238 - DNA, 55 bp, Artificial
  Synthetic oligonucleotide
ggcggggagtcttcgagctctcggacgaaaaggcaacgaacccgatcgtgccttc

SEQ ID NO: 494239 - DNA, 58 bp, Artificial
  Synthetic oligonucleotide
ggcgtagtggactagcggttagaggagacccctcccttgcaaatcgcagcaacaatgg

SEQ ID NO: 494240 - DNA, 60 bp, Artificial
  Synthetic oligonucleotide
ggcgttccaggaggagtggtctgggcgggaccggggagtggccagccctcagatgctgca

SEQ ID NO: 494241 - DNA, 55 bp, Artificial
  Synthetic oligonucleotide
ggctaatgcaatcaactcagctgtccccattgactgggtcccaacgggacgtacc

SEQ ID NO: 494242 - DNA, 60 bp, Artificial
  Synthetic oligonucleotide
ggctaatggaagatatacaccaggcataataccaccagtgaatgttgataaaccaatacc

SEQ ID NO: 494243 - DNA, 54 bp, Artificial
  Synthetic oligonucleotide
ggctagccggcaggtgttccaccccccgagaggggacgagtgaggcttatcccg

SEQ ID NO: 494244 - DNA, 51 bp, Artificial
  Synthetic oligonucleotide
ggctattcctcgatacggttcaaccctgactgaggctgcccagttggcccc

SEQ ID NO: 494245 - DNA, 55 bp, Artificial
  Synthetic oligonucleotide
ggctcaacccaactggaggcggaaagatgcggactattcagagagggtgggcccc

SEQ ID NO: 494246 - DNA, 56 bp, Artificial
  Synthetic oligonucleotide
ggctcgaccctcacacaacacagcaagtagggggcgcaattaggaccgttagaaaa

SEQ ID NO: 494247 - DNA, 57 bp, Artificial
  Synthetic oligonucleotide
ggctggaggtcaactgttttactcccgcccggttgtctcagccaatggcgagccgac

SEQ ID NO: 494248 - DNA, 52 bp, Artificial
  Synthetic oligonucleotide
ggctggagttgtctggaattgcacaacagcggttggtctctgcaacctcatg

SEQ ID NO: 494249 - DNA, 55 bp, Artificial
  Synthetic oligonucleotide
ggctggtgagtctcgcgctaaggcgttcggtcgtaagccaactcgtagtgtgact

SEQ ID NO: 494250 - DNA, 55 bp, Artificial
  Synthetic oligonucleotide
ggctgtgcgttttaccacgtgtgaaggcatgcccagtaattctctcaccgggcag

SEQ ID NO: 494251 - DNA, 55 bp, Artificial
  Synthetic oligonucleotide
ggcttaacaagcagggccacctgggcaaggaacattcagacagccataaaccaag

SEQ ID NO: 494252 - DNA, 55 bp, Artificial
  Synthetic oligonucleotide
ggcttcatagcttaggacaatatatctatgatacctatggagatacttggacagg

SEQ ID NO: 494253 - DNA, 55 bp, Artificial
  Synthetic oligonucleotide
ggctttccgcaggtggggatattcgggtgaacagagaaccttatgtgtcgtgcgg

SEQ ID NO: 494254 - DNA, 60 bp, Artificial
  Synthetic oligonucleotide
ggcttttaatgcttttcagtggttgatgctcaagatggagtctacgcaacagatggcaat

SEQ ID NO: 494255 - DNA, 57 bp, Artificial
  Synthetic oligonucleotide
gggaacgcccattaaatctctgtataaatgtacccgcttcttgcattgtaaccagtc

SEQ ID NO: 494256 - DNA, 55 bp, Artificial
  Synthetic oligonucleotide
gggaactaccgggtgtcttggccaaaattcgcagtccccaacctccaatcactca

SEQ ID NO: 494257 - DNA, 55 bp, Artificial
  Synthetic oligonucleotide
gggaactagaacgattcgcagttaatcccggcctattagaaacagcagagggctg

SEQ ID NO: 494258 - DNA, 55 bp, Artificial
  Synthetic oligonucleotide
gggaactcacgtcagggtggacgtgaaacacaaagattctagggagctgcctcag

SEQ ID NO: 494259 - DNA, 60 bp, Artificial
  Synthetic oligonucleotide
gggaactggccaagagaatcgcagcctccctcacaggagaccagcgtgtaggcctcatcc

SEQ ID NO: 494260 - DNA, 57 bp, Artificial
  Synthetic oligonucleotide
gggaagacccacctcgctagggaagtggctaagagaatcgcagcctcccttacagga

SEQ ID NO: 494261 - DNA, 58 bp, Artificial
  Synthetic oligonucleotide
gggacaacctggaacctgggaccttcgatcttggagggctatatgaagcaattgagga

SEQ ID NO: 494262 - DNA, 50 bp, Artificial
  Synthetic oligonucleotide
gggactggttgtcacttgcgtgtctgaaacttcgaattccagttacgaaa

SEQ ID NO: 494263 - DNA, 55 bp, Artificial
  Synthetic oligonucleotide
gggagctgcgacattgggaccattcctgttacggacccactgtggaacagacaac

SEQ ID NO: 494264 - DNA, 54 bp, Artificial
  Synthetic oligonucleotide
gggaggcgccgaagatataagggtctacgacgttaaggacgtcgcatacgacgg

SEQ ID NO: 494265 - DNA, 55 bp, Artificial
  Synthetic oligonucleotide
gggatcaacagctcctaggaacttggggttgctctggaagacacatttgcaccac

SEQ ID NO: 494266 - DNA, 53 bp, Artificial
  Synthetic oligonucleotide
gggatcctgaacgggcatcgctactcgaagctcgctcaggccacggggagcaa

SEQ ID NO: 494267 - DNA, 60 bp, Artificial
  Synthetic oligonucleotide
gggatcgtctctgtatacagagcggagaaacgagtgatctcaatactcttccttgcagcc

SEQ ID NO: 494268 - DNA, 55 bp, Artificial
  Synthetic oligonucleotide
gggcaagttaggagagcgaaatgactcagcccgatgtttcgtggggcgacccgac

SEQ ID NO: 494269 - DNA, 55 bp, Artificial
  Synthetic oligonucleotide
gggcacgaaactgcattcgctaccctggtcgtgaaatggctagcctttggagggg

SEQ ID NO: 494270 - DNA, 60 bp, Artificial
  Synthetic oligonucleotide
gggcagcgtggtgattgtcgggagagtcgttctgtcgggccaacctgctatcattcccga

SEQ ID NO: 494271 - DNA, 56 bp, Artificial
  Synthetic oligonucleotide
gggcccacccgtgtgtcgtggccaaaattcgcagtccccaacctccaatcactcac

SEQ ID NO: 494272 - DNA, 55 bp, Artificial
  Synthetic oligonucleotide
gggccccaaccatgaagacccatctgaaacaatgataccacactcccagaggccc

SEQ ID NO: 494273 - DNA, 55 bp, Artificial
  Synthetic oligonucleotide
gggcgagtacctccgcaggggcccatcagtaaatgggttcacagtggggtcgtca

SEQ ID NO: 494274 - DNA, 54 bp, Artificial
  Synthetic oligonucleotide
gggcgccaccctctgctcggccctatacgtgggggacctgtgcgggtctgtttt

SEQ ID NO: 494275 - DNA, 55 bp, Artificial
  Synthetic oligonucleotide
gggcggaagatagttaccctagcaaaggctactacccgccaattgctgcccgtgt

SEQ ID NO: 494276 - DNA, 55 bp, Artificial
  Synthetic oligonucleotide
gggcgtaccctaagattcagaccaccagccgtgtgctaaggtccctgttctgggg

SEQ ID NO: 494277 - DNA, 55 bp, Artificial
  Synthetic oligonucleotide
gggcgtgtgagccaagacgtgttatggtgtcttccccaccaacggtccacttctc

SEQ ID NO: 494278 - DNA, 60 bp, Artificial
  Synthetic oligonucleotide
gggctatagaggcgcaacagcatatgttgcaactcacggtctggggagttaagcaactcc

SEQ ID NO: 494279 - DNA, 55 bp, Artificial
  Synthetic oligonucleotide
gggctatcgtataaatccagacgcccgttgcagagcacagtgttggtaagagccg

SEQ ID NO: 494280 - DNA, 55 bp, Artificial
  Synthetic oligonucleotide
gggctgcgcttagtggtacacaagtagaacgcctaggaagcgctagggcacgcct

SEQ ID NO: 494281 - DNA, 57 bp, Artificial
  Synthetic oligonucleotide
gggctggaggcacaaggccgtgatctataggacgtggtgtaaggggtatcaggctgt

SEQ ID NO: 494282 - DNA, 55 bp, Artificial
  Synthetic oligonucleotide
gggcttgatacgtgctatgtatctgaacggcttcgtcacgcaacctccagcgtgg

SEQ ID NO: 494283 - DNA, 55 bp, Artificial
  Synthetic oligonucleotide
ggggaacttggatcgacccatcatgcacgctggcactatggatagcatacgccaa

SEQ ID NO: 494284 - DNA, 58 bp, Artificial
  Synthetic oligonucleotide
ggggaatcaccgcacacaggcttgttggcgcagaacccagacctccggtcagtggaac

SEQ ID NO: 494285 - DNA, 58 bp, Artificial
  Synthetic oligonucleotide
ggggaccctgtaccgaatatggagaacatcgcatcaggactcctaggacccctgctcg

SEQ ID NO: 494286 - DNA, 60 bp, Artificial
  Synthetic oligonucleotide
ggggcactgcgaactcgcatgctccgttcgcgcggttgggccgagctggctaggggcttg

SEQ ID NO: 494287 - DNA, 59 bp, Artificial
  Synthetic oligonucleotide
ggggccaaagaggtagcactcggttattctactggtgcacttgctagttgcatgggcct

SEQ ID NO: 494288 - DNA, 55 bp, Artificial
  Synthetic oligonucleotide
ggggccataggggctatgagaatgcgtagtggcctcactgttggccctcgtgtac

SEQ ID NO: 494289 - DNA, 55 bp, Artificial
  Synthetic oligonucleotide
ggggcctcatcctcgtagcactcgtccggaaagttgtgcgggagcctgacaaagg

SEQ ID NO: 494290 - DNA, 55 bp, Artificial
  Synthetic oligonucleotide
ggggcctgtattttcctgctggtggctccagttcagaaacagtgacccctgttcc

SEQ ID NO: 494291 - DNA, 55 bp, Artificial
  Synthetic oligonucleotide
ggggcgaccacagagacctaatgtcgcccgacgtgcgagactcatatgccctaac

SEQ ID NO: 494292 - DNA, 55 bp, Artificial
  Synthetic oligonucleotide
ggggcggtttacgtgggcaattacaggctggtaaacagacacctggctacgcaca

SEQ ID NO: 494293 - DNA, 60 bp, Artificial
  Synthetic oligonucleotide
ggggcgtgacgctgtcatcttactcatgtgtgttgtacacccgactctggtatttgacat

SEQ ID NO: 494294 - DNA, 54 bp, Artificial
  Synthetic oligonucleotide
gggggaaggccgctatatgcggcaggtacctctttaactgggccgttaagacca

SEQ ID NO: 494295 - DNA, 58 bp, Artificial
  Synthetic oligonucleotide
gggggcgcgacgctatcgtcttactcacgtgtgctgtacacccgactttggtattcga

SEQ ID NO: 494296 - DNA, 53 bp, Artificial
  Synthetic oligonucleotide
ggggggttcaccacccgagtacggacagggaccaaaccaacctatatgctcaa

SEQ ID NO: 494297 - DNA, 57 bp, Artificial
  Synthetic oligonucleotide
ggggtaacatggtcagcattgcattctatgggggtatcccagggggaatatcaaccc

SEQ ID NO: 494298 - DNA, 55 bp, Artificial
  Synthetic oligonucleotide
ggggtaagtaatcacgcggcaccaagctttcccgacccgtcaaccacgaggcgca

SEQ ID NO: 494299 - DNA, 50 bp, Artificial
  Synthetic oligonucleotide
ggggtatatcaatgcctcgaaaaccactgcgacacacctcctccctgttg

SEQ ID NO: 494300 - DNA, 55 bp, Artificial
  Synthetic oligonucleotide
ggggtcaagggatttgcattcctagacggagataattcatggcttgggagaacaa

SEQ ID NO: 494301 - DNA, 52 bp, Artificial
  Synthetic oligonucleotide
ggggtcacctacgggtactccactggggaagaccacaccgcagggcccaaca

SEQ ID NO: 494302 - DNA, 50 bp, Artificial
  Synthetic oligonucleotide
ggggtgctccaaaggttaacccatgggctattcctcgatacggttcaacc

SEQ ID NO: 494303 - DNA, 53 bp, Artificial
  Synthetic oligonucleotide
ggggttcaccacccgagcacggacagagaacaaaccagcctatatattcgagc

SEQ ID NO: 494304 - DNA, 55 bp, Artificial
  Synthetic oligonucleotide
gggtacacacctacctgtagtgctggagccctttctatgctgggtgtctgcatgg

SEQ ID NO: 494305 - DNA, 56 bp, Artificial
  Synthetic oligonucleotide
gggtaccacccttgcgagtttggagacatcgggccaggagcgtccgcgctaaacta

SEQ ID NO: 494306 - DNA, 55 bp, Artificial
  Synthetic oligonucleotide
gggtacgcagcagtcggaaactcggaatggagctcccgtcaatggctcatctgag

SEQ ID NO: 494307 - DNA, 55 bp, Artificial
  Synthetic oligonucleotide
gggtatgagatgctgaaagtcccgaatgcggaaacagacaatcagtccagtccag

SEQ ID NO: 494308 - DNA, 55 bp, Artificial
  Synthetic oligonucleotide
gggtcataattggccgcgacgccctacagcaatgccaaggggccctatacctccc

SEQ ID NO: 494309 - DNA, 55 bp, Artificial
  Synthetic oligonucleotide
gggtccgaaaaggaactcagacccacaacaatacaacagccacccaacagagtcg

SEQ ID NO: 494310 - DNA, 55 bp, Artificial
  Synthetic oligonucleotide
gggtctcacccctagcatgccaacgacagcacctgcgctgcactccacacttacg

SEQ ID NO: 494311 - DNA, 52 bp, Artificial
  Synthetic oligonucleotide
gggtcttgactataatactaactgcttaggatttgatcacatgcttagaccg

SEQ ID NO: 494312 - DNA, 55 bp, Artificial
  Synthetic oligonucleotide
gggtgagaagacctgagtgtgctacagatgagtcctccggcccctgaatgcggct

SEQ ID NO: 494313 - DNA, 58 bp, Artificial
  Synthetic oligonucleotide
gggtgagttgatgaatctggccacctgggtgggaagtaatttggaagacccagcatcc

SEQ ID NO: 494314 - DNA, 55 bp, Artificial
  Synthetic oligonucleotide
gggtgcttctacaaccaatgccgcaaacctcgtgccgtctgatgttgtcacgcct

SEQ ID NO: 494315 - DNA, 60 bp, Artificial
  Synthetic oligonucleotide
gggtgtgaagccaaagattggacaaggtgtgaagagtcacgtgtgctcatcttgagtcct

SEQ ID NO: 494316 - DNA, 59 bp, Artificial
  Synthetic oligonucleotide
gggttctgcatcccaacaacgagattctagccggcgcaatttctaacgcggtgctcagg

SEQ ID NO: 494317 - DNA, 60 bp, Artificial
  Synthetic oligonucleotide
gggttcttaggagcagcaggaagcactatgggcgcggcgtcaataacgctgacggtacag

SEQ ID NO: 494318 - DNA, 53 bp, Artificial
  Synthetic oligonucleotide
ggtaaatcgtcggggactgattggaaggcggaggcccgtaagtgggagtctcg

SEQ ID NO: 494319 - DNA, 58 bp, Artificial
  Synthetic oligonucleotide
ggtaactgttgaggtcagtaacaatggccgcaacaggagtaaatcaagggcccgatca

SEQ ID NO: 494320 - DNA, 52 bp, Artificial
  Synthetic oligonucleotide
ggtaatggaagtgtccccggagccggtacgagcaatcatggatctagcgcac

SEQ ID NO: 494321 - DNA, 55 bp, Artificial
  Synthetic oligonucleotide
ggtacagagaaaccttcctttcgagagagcgaccatcatggcggcattcacaggg

SEQ ID NO: 494322 - DNA, 60 bp, Artificial
  Synthetic oligonucleotide
ggtactaatgtggaaaattcagtttcaggacatgtctataacgcattgatttactacaga

SEQ ID NO: 494323 - DNA, 54 bp, Artificial
  Synthetic oligonucleotide
ggtaggagtggatacacaatacatgtgcagtgtaatgctagtaaatttcaccag

SEQ ID NO: 494324 - DNA, 55 bp, Artificial
  Synthetic oligonucleotide
ggtaggctgtgctgccaacgggatcttgcgcgggacgtcctttgtttacgtcccg

SEQ ID NO: 494325 - DNA, 55 bp, Artificial
  Synthetic oligonucleotide
ggtagtccatatgttagtcctttaggccatatagaacagtcagtggactgtgata

SEQ ID NO: 494326 - DNA, 55 bp, Artificial
  Synthetic oligonucleotide
ggtagtcctgactttacaggcggggctagtggttcatggggcgaagaaaacattc

SEQ ID NO: 494327 - DNA, 58 bp, Artificial
  Synthetic oligonucleotide
ggtcagatacccactgacctttggatggtgctacaagctagtaccagttgacccaagg

SEQ ID NO: 494328 - DNA, 59 bp, Artificial
  Synthetic oligonucleotide
ggtcagtcaaaattatcctatagtgcagaacctccaagggcaaatggtacaccaggcca

SEQ ID NO: 494329 - DNA, 59 bp, Artificial
  Synthetic oligonucleotide
ggtcatgtttttgtcataagggaaccatttgtttcttgctctccaacagagtgcaggac

SEQ ID NO: 494330 - DNA, 55 bp, Artificial
  Synthetic oligonucleotide
ggtcatttgtgatgagtgccacagtcatgactcaaccgtgtttctcgggattaga

SEQ ID NO: 494331 - DNA, 55 bp, Artificial
  Synthetic oligonucleotide
ggtccacgtcgcccttcaatgtctctcttgaccaataggctttgccggcgagttg

SEQ ID NO: 494332 - DNA, 57 bp, Artificial
  Synthetic oligonucleotide
ggtccactcactggggggctgacctcgcagtcaccccttatgattacggcgctaaaa

SEQ ID NO: 494333 - DNA, 55 bp, Artificial
  Synthetic oligonucleotide
ggtccagccagaagatatggtcgagacacggtatgtaattactgatcagacccgt

SEQ ID NO: 494334 - DNA, 55 bp, Artificial
  Synthetic oligonucleotide
ggtccttagacagaaatatcagaccctagataacgaagataacctttgattccgc

SEQ ID NO: 494335 - DNA, 55 bp, Artificial
  Synthetic oligonucleotide
ggtcgtgctctactcctaccggagtattctactcttcgcagacgctggctcgact

SEQ ID NO: 494336 - DNA, 55 bp, Artificial
  Synthetic oligonucleotide
ggtctactggttgtgcctattagcccgttggactttgaccaaggagcgacgccag

SEQ ID NO: 494337 - DNA, 51 bp, Artificial
  Synthetic oligonucleotide
ggtctatcggccagtagccgagaaccccgcatcaatgttggagtattgccc

SEQ ID NO: 494338 - DNA, 60 bp, Artificial
  Synthetic oligonucleotide
ggtctctgctaaatcatttagctaccatagacttatccgcagccagtgattcgataagct

SEQ ID NO: 494339 - DNA, 55 bp, Artificial
  Synthetic oligonucleotide
ggtctgacggtgtcttacgcactgtacgcgttaaattctttgacgcgcggccccc

SEQ ID NO: 494340 - DNA, 59 bp, Artificial
  Synthetic oligonucleotide
ggtgaacagggcattgatctaggtactagtggtgaaagaactggacctgctaaggacgc

SEQ ID NO: 494341 - DNA, 55 bp, Artificial
  Synthetic oligonucleotide
ggtgaaccggcatctggcaacccataccgactggcaaaactgtgtatgggaggac

SEQ ID NO: 494342 - DNA, 54 bp, Artificial
  Synthetic oligonucleotide
ggtgacaacaagggaacctactgcggtgcaccaatcttaggtccagggagtgcc

SEQ ID NO: 494343 - DNA, 50 bp, Artificial
  Synthetic oligonucleotide
ggtgatagacagtaaaggtaacacgttaagcgaaagtacgtatatgagtg

SEQ ID NO: 494344 - DNA, 50 bp, Artificial
  Synthetic oligonucleotide
ggtgatatcttgtggggtgtctcaaaagttatgagtctagatctaaacag

SEQ ID NO: 494345 - DNA, 59 bp, Artificial
  Synthetic oligonucleotide
ggtgcacacaacctcgactgcgtgttaagagagggtgccacgctattccctgtggttat

SEQ ID NO: 494346 - DNA, 55 bp, Artificial
  Synthetic oligonucleotide
ggtgcatccactgctcctgcgactcccccgactgcgtccacactctgatcaagac

SEQ ID NO: 494347 - DNA, 60 bp, Artificial
  Synthetic oligonucleotide
ggtgccatacgtccgtcttgatcgtgatagagtacccacaatggttggagtcacccggca

SEQ ID NO: 494348 - DNA, 50 bp, Artificial
  Synthetic oligonucleotide
ggtgcctaaagctgccagaggccagtatagtgggtttgtaagaacgctat

SEQ ID NO: 494349 - DNA, 55 bp, Artificial
  Synthetic oligonucleotide
ggtgcgactccagaaggcactttcaaccccaacacccttcgtatgaacgtgctgc

SEQ ID NO: 494350 - DNA, 55 bp, Artificial
  Synthetic oligonucleotide
ggtgctgcacagacccgcctagatcccgattctctggcacgacccttggctaacc

SEQ ID NO: 494351 - DNA, 55 bp, Artificial
  Synthetic oligonucleotide
ggtggcttaacacattggtcggtgctagggcgattaccttgcgccaagttgaacc

SEQ ID NO: 494352 - DNA, 60 bp, Artificial
  Synthetic oligonucleotide
ggtgggagtcgtgacattgtacctgggagctatggtgcaggctgatagtggttgcgttgt

SEQ ID NO: 494353 - DNA, 53 bp, Artificial
  Synthetic oligonucleotide
ggtgggtacctcactcttgctatttgggagagccccagggtgcccaaatggct

SEQ ID NO: 494354 - DNA, 55 bp, Artificial
  Synthetic oligonucleotide
ggtgtccactcaacgctccggctcgcatgaaaactctaactcagctactgagggc

SEQ ID NO: 494355 - DNA, 57 bp, Artificial
  Synthetic oligonucleotide
ggtgtcccggtgtatgtcacggggacatttcggtgcctgtcaagtctatacctctca

SEQ ID NO: 494356 - DNA, 55 bp, Artificial
  Synthetic oligonucleotide
ggtgtgaacgtcaaccgcaaatctaaactcggtcgctctcctgcctttggtgcct

SEQ ID NO: 494357 - DNA, 55 bp, Artificial
  Synthetic oligonucleotide
ggtgtgctcgcgactaacgtcccaattgaaccattaatcgctccttcacatggtg

SEQ ID NO: 494358 - DNA, 55 bp, Artificial
  Synthetic oligonucleotide
ggtgtgtctgggccggtgagtcttacagctcccagtctcctaacgccacactgcg

SEQ ID NO: 494359 - DNA, 60 bp, Artificial
  Synthetic oligonucleotide
ggtgttagcagtccatcaaactaacactgggtatactggaggtgctgtcataatagaccc

SEQ ID NO: 494360 - DNA, 55 bp, Artificial
  Synthetic oligonucleotide
ggtgttgacatgagggcgggacgcataatcgcgtgggatgggcaagccgcactac

SEQ ID NO: 494361 - DNA, 60 bp, Artificial
  Synthetic oligonucleotide
ggtgtttgtctggtcgctcaggtgcttccccagcactagacctggcagatgaggctagaa

SEQ ID NO: 494362 - DNA, 53 bp, Artificial
  Synthetic oligonucleotide
ggttaggtctatcaccctggggaactccacgatcactacgcaggagtgtgcaa

SEQ ID NO: 494363 - DNA, 55 bp, Artificial
  Synthetic oligonucleotide
ggttcagcccggtattgcctccgagctagtcatccccagtgagcgccttcattac

SEQ ID NO: 494364 - DNA, 53 bp, Artificial
  Synthetic oligonucleotide
ggttcgacaaaccatacgtccgcctagaggacgagacaccccagggtccccag

SEQ ID NO: 494365 - DNA, 60 bp, Artificial
  Synthetic oligonucleotide
ggttcgaccacgcaacaccaaacacgtcaagccactccgaataccttgcagcgatcgcac

SEQ ID NO: 494366 - DNA, 55 bp, Artificial
  Synthetic oligonucleotide
ggttctggcaccagagtctcgagcctcccgtcaactgcaaggactaggagctggg

SEQ ID NO: 494367 - DNA, 55 bp, Artificial
  Synthetic oligonucleotide
ggttctggcactaacgatccgtggtgcactaacccgtttgccgtccctgtctacg

SEQ ID NO: 494368 - DNA, 52 bp, Artificial
  Synthetic oligonucleotide
ggttctggcactgtttagccacaatgccgcagactggttcgaagtggtcagg

SEQ ID NO: 494369 - DNA, 57 bp, Artificial
  Synthetic oligonucleotide
ggttcttgtccatgcgggtgttaccttccgcgtagacgtgccaccagttgttatata

SEQ ID NO: 494370 - DNA, 55 bp, Artificial
  Synthetic oligonucleotide
ggttggccggacacaaccattccaggagagctcgtccccgctggtgagtacgcaa

SEQ ID NO: 494371 - DNA, 55 bp, Artificial
  Synthetic oligonucleotide
ggttggtgtcacactaccatatgataacttgccccgcccaggtgccgactggcga

SEQ ID NO: 494372 - DNA, 55 bp, Artificial
  Synthetic oligonucleotide
ggtttcactcctcgagtataaatcagacattccgagagtaagtgtcacctcgcag

SEQ ID NO: 494373 - DNA, 55 bp, Artificial
  Synthetic oligonucleotide
gtaaagcaactatgtaaactcctcaggggagccaaggcattaacagaggtagtac

SEQ ID NO: 494374 - DNA, 60 bp, Artificial
  Synthetic oligonucleotide
gtaagtagtaataattagtatatgtaatgagctcattggaaatatatgcaatagtaggac

SEQ ID NO: 494375 - DNA, 58 bp, Artificial
  Synthetic oligonucleotide
gtaattgggcactgacgggaggtatggaagtgacgagagaccccaccgttgctgaaca

SEQ ID NO: 494376 - DNA, 55 bp, Artificial
  Synthetic oligonucleotide
gtacaacgaggcatccgaccaactgcggtgcgaaatcgcactcgtatgtcacgtt

SEQ ID NO: 494377 - DNA, 55 bp, Artificial
  Synthetic oligonucleotide
gtacacccagcaggacctgtgcgacgttaacctgttgcaacttgtggtcactgcg

SEQ ID NO: 494378 - DNA, 55 bp, Artificial
  Synthetic oligonucleotide
gtacagtactgacaaacccatacacctcctctgaaatacccatggttgctagagc

SEQ ID NO: 494379 - DNA, 52 bp, Artificial
  Synthetic oligonucleotide
gtacataaccttattggtatgctacagactatagccgatgggaaggctcact

SEQ ID NO: 494380 - DNA, 59 bp, Artificial
  Synthetic oligonucleotide
gtacatcgacctagatgcaaccgccatgcagtctgatgatttcgtattgtcaggccgct

SEQ ID NO: 494381 - DNA, 55 bp, Artificial
  Synthetic oligonucleotide
gtaccacctacggctttatgcgctatccaccatacttggatgtacgacttacctc

SEQ ID NO: 494382 - DNA, 53 bp, Artificial
  Synthetic oligonucleotide
gtaccccgaggtaacaagcgacactcgggatctgagaaggggaccggggcttc

SEQ ID NO: 494383 - DNA, 55 bp, Artificial
  Synthetic oligonucleotide
gtacctcaaccaaatgctccgatcacaatgtttgaacttaggtcaatagtaaggc

SEQ ID NO: 494384 - DNA, 60 bp, Artificial
  Synthetic oligonucleotide
gtacgatcaggctacgtatgggtcgtctaccaaccctatgtatgtctctgatacagttac

SEQ ID NO: 494385 - DNA, 57 bp, Artificial
  Synthetic oligonucleotide
gtacgctccggcgtgcaaacctctcctacgggatgaggtcgcattccaggtcgggct

SEQ ID NO: 494386 - DNA, 56 bp, Artificial
  Synthetic oligonucleotide
gtacttctgtcccctagttaagacgagtgcatggcgcactaagatcagtgccataa

SEQ ID NO: 494387 - DNA, 60 bp, Artificial
  Synthetic oligonucleotide
gtacttggaatagtactgaagattggaatagtactgaagattcaactaacgctgatggaa

SEQ ID NO: 494388 - DNA, 55 bp, Artificial
  Synthetic oligonucleotide
gtagcaacaaacggacaacttgctccaggtgtccatatcgtaacgttctccgctg

SEQ ID NO: 494389 - DNA, 59 bp, Artificial
  Synthetic oligonucleotide
gtagccaatttcagtatggagctacccagctttggggtgtctgggattaatgaatcggc

SEQ ID NO: 494390 - DNA, 53 bp, Artificial
  Synthetic oligonucleotide
gtagccggatctcctagtctagtttggtttcaagtagctggagacgacgctat

SEQ ID NO: 494391 - DNA, 55 bp, Artificial
  Synthetic oligonucleotide
gtaggccgtgtcgattccaatcctaaagtaatcactcttcagcttggcacaccct

SEQ ID NO: 494392 - DNA, 55 bp, Artificial
  Synthetic oligonucleotide
gtaggggtaggcatattcctgctgcctgctcggtaggcagtataacactccggcc

SEQ ID NO: 494393 - DNA, 57 bp, Artificial
  Synthetic oligonucleotide
gtagggtactctgttaaactttgtgagacccccggcaccatgataaggccgagcatg

SEQ ID NO: 494394 - DNA, 51 bp, Artificial
  Synthetic oligonucleotide
gtagtctcagtcttctgcccttacacagacccgccaatgaccaacgtaatc

SEQ ID NO: 494395 - DNA, 52 bp, Artificial
  Synthetic oligonucleotide
gtagtctgtctaatagtggtaacctgactaatagtagtaatgacactatcac

SEQ ID NO: 494396 - DNA, 59 bp, Artificial
  Synthetic oligonucleotide
gtagtgccttctcacgttagttcaatacttgatatgggtcaagggatactacataacac

SEQ ID NO: 494397 - DNA, 53 bp, Artificial
  Synthetic oligonucleotide
gtagtgttgtgggataccctagagtacacgtaaaacacccaccggtttggcag

SEQ ID NO: 494398 - DNA, 55 bp, Artificial
  Synthetic oligonucleotide
gtatgatgagctgcccaggagtgctctttgcaccttctatgcggggaccggcagg

SEQ ID NO: 494399 - DNA, 52 bp, Artificial
  Synthetic oligonucleotide
gtattacaggactactattgacacgtgatggaggaacgagtgcaaacaatga

SEQ ID NO: 494400 - DNA, 58 bp, Artificial
  Synthetic oligonucleotide
gtattcatagagaggcccgatgcagtagacacttgctacccattcgacgtgccagatt

SEQ ID NO: 494401 - DNA, 55 bp, Artificial
  Synthetic oligonucleotide
gtatttcgcgagagcaggagggagtactttgccagaaacacaacgtatgggcggg

SEQ ID NO: 494402 - DNA, 55 bp, Artificial
  Synthetic oligonucleotide
gtcaaccgctctcgtaagacggtggttggcggataactgtcccctcgacctgtcg

SEQ ID NO: 494403 - DNA, 55 bp, Artificial
  Synthetic oligonucleotide
gtcaagccttcttctaagcgtgctggcgcattctaccggagggtcacaatcatcg

SEQ ID NO: 494404 - DNA, 59 bp, Artificial
  Synthetic oligonucleotide
gtcaatatgctaaaacgcggtatgccccgcggattgtccttgattggactgaagagggc

SEQ ID NO: 494405 - DNA, 55 bp, Artificial
  Synthetic oligonucleotide
gtcactcccgaagcaacaggatagcttacctgatactaaggccagtggcccggcg

SEQ ID NO: 494406 - DNA, 56 bp, Artificial
  Synthetic oligonucleotide
gtcaggaatctactcaatcggtatgttatgatgccgagtggtgaagtcactaagca

SEQ ID NO: 494407 - DNA, 51 bp, Artificial
  Synthetic oligonucleotide
gtcaggcaatggcaaccagacgttataaagagatgctttatcacagggtgg

SEQ ID NO: 494408 - DNA, 60 bp, Artificial
  Synthetic oligonucleotide
gtcatagtcacaagggagccctatgttagctgcgataatgacaattgctggtcctttgct

SEQ ID NO: 494409 - DNA, 55 bp, Artificial
  Synthetic oligonucleotide
gtcatatcttcatgggagttgtacaagagtgaaggcgagaccgggctgtgagggc

SEQ ID NO: 494410 - DNA, 54 bp, Artificial
  Synthetic oligonucleotide
gtcattataatttttcatttatatgtcaaaatgcagctacagatgatgacataa

SEQ ID NO: 494411 - DNA, 58 bp, Artificial
  Synthetic oligonucleotide
gtccaaaggtcacttttgacccaattcctatacattattgtgctccagcgggttatgc

SEQ ID NO: 494412 - DNA, 55 bp, Artificial
  Synthetic oligonucleotide
gtccccgcttacatcatctgttgcctcgggcaccaatctggtcctctatgctgcc

SEQ ID NO: 494413 - DNA, 55 bp, Artificial
  Synthetic oligonucleotide
gtcccgcatgttctcccctacaaagctgtgacagctcatggttattgtggttctg

SEQ ID NO: 494414 - DNA, 55 bp, Artificial
  Synthetic oligonucleotide
gtccctacataaacccaagctctccatatggagctacagccccaagcagcccctc

SEQ ID NO: 494415 - DNA, 55 bp, Artificial
  Synthetic oligonucleotide
gtccggcttaaggcctcaacacgtggagtattgcatgtccgtatggtcgctctcc

SEQ ID NO: 494416 - DNA, 55 bp, Artificial
  Synthetic oligonucleotide
gtccggggtgtaccatgtcacgaacgactgttccaactctagcatagtgtatgag

SEQ ID NO: 494417 - DNA, 55 bp, Artificial
  Synthetic oligonucleotide
gtccgtgtatgcttcggagctctcagttatgaaggctgatatgagacacttgtca

SEQ ID NO: 494418 - DNA, 56 bp, Artificial
  Synthetic oligonucleotide
gtcctaattttagtgctgccttagcctcataccctaaacggttagcagccgcccaa

SEQ ID NO: 494419 - DNA, 60 bp, Artificial
  Synthetic oligonucleotide
gtcctctgcgagtgctatgacgcgggctgtgcatggtacgagctcacgcccgccgagacc

SEQ ID NO: 494420 - DNA, 59 bp, Artificial
  Synthetic oligonucleotide
gtcctggctatagaaagatacctaagggatcaacagctcctagggctttggggctgctc

SEQ ID NO: 494421 - DNA, 54 bp, Artificial
  Synthetic oligonucleotide
gtcctgtcaatgacgcctacaagtgaagctccacctgactatgaactgctgttt

SEQ ID NO: 494422 - DNA, 55 bp, Artificial
  Synthetic oligonucleotide
gtcctgtttgagacccatagaagagatcaccctggactcaaatatggactacaca

SEQ ID NO: 494423 - DNA, 55 bp, Artificial
  Synthetic oligonucleotide
gtcgaaacatcctgcgcgtgttgggctgccacctaccgctagcagtggtcatggg

SEQ ID NO: 494424 - DNA, 55 bp, Artificial
  Synthetic oligonucleotide
gtcgattggccagtcgaggctatcgtacatgctgcaggattggttgcttgctgcg

SEQ ID NO: 494425 - DNA, 55 bp, Artificial
  Synthetic oligonucleotide
gtcgcccacgacggcactggaaagagggtctattacctcacccgtgaccctacaa

SEQ ID NO: 494426 - DNA, 52 bp, Artificial
  Synthetic oligonucleotide
gtcgcccacgacggtactggaaagagggtctactaccttacccgtgacccca

SEQ ID NO: 494427 - DNA, 59 bp, Artificial
  Synthetic oligonucleotide
gtcgccgactctaccccttcagatccggagcaaggtgttgttctcacctaccgagctga

SEQ ID NO: 494428 - DNA, 60 bp, Artificial
  Synthetic oligonucleotide
gtcgctcagctataccccatagtagacctggcagatgaggctagaaacaccccactggcg

SEQ ID NO: 494429 - DNA, 60 bp, Artificial
  Synthetic oligonucleotide
gtcgctccgctgttccccacagtagacctggcagatgaggctagaaataccccactggtg

SEQ ID NO: 494430 - DNA, 54 bp, Artificial
  Synthetic oligonucleotide
gtcgctggtatcccattgtcggacctgtccctggagtggccgtatacgccaact

SEQ ID NO: 494431 - DNA, 55 bp, Artificial
  Synthetic oligonucleotide
gtcgctgtcctaccagagtatgtcattgggacagtggcaggcggtacagggatgg

SEQ ID NO: 494432 - DNA, 60 bp, Artificial
  Synthetic oligonucleotide
gtcgggtgttagcagtccatcaaacaaacactgggtacactggaggtgctgtcataatag

SEQ ID NO: 494433 - DNA, 55 bp, Artificial
  Synthetic oligonucleotide
gtcggtgacaggcaatacaagtcagtcgagcgtctgaatacgacgttcgagcgta

SEQ ID NO: 494434 - DNA, 55 bp, Artificial
  Synthetic oligonucleotide
gtcgtgccgtctgatctagttggcgcttacactcctgaggctttatctgccgcgc

SEQ ID NO: 494435 - DNA, 58 bp, Artificial
  Synthetic oligonucleotide
gtcgtgcctccttccttgggggtgcgaacatagccgattgtgtagagtccaggttgac

SEQ ID NO: 494436 - DNA, 55 bp, Artificial
  Synthetic oligonucleotide
gtcgtgctcacactgaagtcccaccccatgaccatactcgacgccatgatcgtgc

SEQ ID NO: 494437 - DNA, 56 bp, Artificial
  Synthetic oligonucleotide
gtcgtggtaccaatcgcgatcttctacgcccattccctgccccctgttgttgggcg

SEQ ID NO: 494438 - DNA, 60 bp, Artificial
  Synthetic oligonucleotide
gtctacattgactattgggatgattctcaagcctttaggaatatggtgtatgtacgttca

SEQ ID NO: 494439 - DNA, 55 bp, Artificial
  Synthetic oligonucleotide
gtctctaccatccgttggttgtccgcgatatggttcggatccctgactggacgcc

SEQ ID NO: 494440 - DNA, 55 bp, Artificial
  Synthetic oligonucleotide
gtctctaggtcaggggagatgggtgcgagagcgtcagtgttgcggggagagaagc

SEQ ID NO: 494441 - DNA, 58 bp, Artificial
  Synthetic oligonucleotide
gtctctttcggagtgtggattcgcactcctccaccctatagaccaccaaatgccccta

SEQ ID NO: 494442 - DNA, 55 bp, Artificial
  Synthetic oligonucleotide
gtctgggctacacatgcctgtgtacccacggaccccaacccacaagaaatagttc

SEQ ID NO: 494443 - DNA, 55 bp, Artificial
  Synthetic oligonucleotide
gtctggggaaatagccattataacagaaagcgatccaatatctgatgttaccact

SEQ ID NO: 494444 - DNA, 55 bp, Artificial
  Synthetic oligonucleotide
gtctgttaggctttgctgccccttttacacaatgtggctatcctgccttaatgcc

SEQ ID NO: 494445 - DNA, 58 bp, Artificial
  Synthetic oligonucleotide
gtcttccttgggttcttaggaacagcaggaagcactatgggcgcggcgtcaataacgc

SEQ ID NO: 494446 - DNA, 59 bp, Artificial
  Synthetic oligonucleotide
gtcttctcatcacgctctgtctagttggtccatcactcggtggtcttcctacacctgcg

SEQ ID NO: 494447 - DNA, 55 bp, Artificial
  Synthetic oligonucleotide
gtctttcggagtgtggatgcgcactcctccagcatatagaccgacaaatgcccct

SEQ ID NO: 494448 - DNA, 55 bp, Artificial
  Synthetic oligonucleotide
gtctttggtccctaaagcagctagaggtcaatacagcggattcgtgaggacgctg

SEQ ID NO: 494449 - DNA, 59 bp, Artificial
  Synthetic oligonucleotide
gtgacagttaacgtcggaggtgttgacatgagggcgggacgcataatcgcgtgggatgg

SEQ ID NO: 494450 - DNA, 60 bp, Artificial
  Synthetic oligonucleotide
gtgactttctgcgaaagttaacgaatgtggctcaggtctgtgtggatgttgtttcgcagg

SEQ ID NO: 494451 - DNA, 60 bp, Artificial
  Synthetic oligonucleotide
gtgagaacaaggacgtcatagtcacaagggagccttatgttagctgcgataatgacaatt

SEQ ID NO: 494452 - DNA, 60 bp, Artificial
  Synthetic oligonucleotide
gtgagaactttgacccttcaaccatgcatcttgtgcgtaccaactcaactgcacaacccg

SEQ ID NO: 494453 - DNA, 55 bp, Artificial
  Synthetic oligonucleotide
gtgagccaccccgttcggcttggttgccaatctacttggttgcgcctaagcggtc

SEQ ID NO: 494454 - DNA, 60 bp, Artificial
  Synthetic oligonucleotide
gtgagtggtgtggggagacgcgtcgttggtggcgtgtgtggggtgaggatagtcgcgcgc

SEQ ID NO: 494455 - DNA, 53 bp, Artificial
  Synthetic oligonucleotide
gtgagtttacacaccgaggttaagggccaattcgggcttgggactggccgggc

SEQ ID NO: 494456 - DNA, 55 bp, Artificial
  Synthetic oligonucleotide
gtgatacacctgtagcaacactgccgatagactatttagtaccaattctcctgcg

SEQ ID NO: 494457 - DNA, 55 bp, Artificial
  Synthetic oligonucleotide
gtgatcgccattccaaccccgaagggacccaatcaatgctggattcgagccattg

SEQ ID NO: 494458 - DNA, 55 bp, Artificial
  Synthetic oligonucleotide
gtgattaagattgcgctgaccaggaggccccttggcatcaagaggctgacacgga

SEQ ID NO: 494459 - DNA, 60 bp, Artificial
  Synthetic oligonucleotide
gtgcaaccaaaaatagagatacttggggaaccatacagtgcttaccagacaatgatgatt

SEQ ID NO: 494460 - DNA, 55 bp, Artificial
  Synthetic oligonucleotide
gtgcacttcgcttcacctctgcacgtcgcatggaaaccaccgtgagcgcccacct

SEQ ID NO: 494461 - DNA, 51 bp, Artificial
  Synthetic oligonucleotide
gtgcataatgtctgggctacgcatgcctgtgtacctacagaccccagccca

SEQ ID NO: 494462 - DNA, 60 bp, Artificial
  Synthetic oligonucleotide
gtgcgaagagccgcgtgtgctcagtgtgcttcctccggcccctgaatgtggctaacctta

SEQ ID NO: 494463 - DNA, 55 bp, Artificial
  Synthetic oligonucleotide
gtgcgaagtgcactgtgccattagcccctgagcccgtgctgcgttttggttacag

SEQ ID NO: 494464 - DNA, 60 bp, Artificial
  Synthetic oligonucleotide
gtgcgactaggtcgtcactcactgacctgtgcgaccggttttgtgcgccaaaaggcatgg

SEQ ID NO: 494465 - DNA, 55 bp, Artificial
  Synthetic oligonucleotide
gtgcgagagcgtcagtattaagcgggggaaaattagatagatgggaaaaaattcg

SEQ ID NO: 494466 - DNA, 55 bp, Artificial
  Synthetic oligonucleotide
gtgcgcttcagtagagtaggtcaaaagtttagcatgcgtactcgcagcggcacac

SEQ ID NO: 494467 - DNA, 52 bp, Artificial
  Synthetic oligonucleotide
gtgctggagctgcttaaggcgagcaacataagggccaccatactgagtaagt

SEQ ID NO: 494468 - DNA, 55 bp, Artificial
  Synthetic oligonucleotide
gtggaaattctgggacagagcagtctcaggggactacagaggggatgggaagccc

SEQ ID NO: 494469 - DNA, 51 bp, Artificial
  Synthetic oligonucleotide
gtggaacttatgggacgcagcagcctcaagggactacagagggtgtgggaa

SEQ ID NO: 494470 - DNA, 60 bp, Artificial
  Synthetic oligonucleotide
gtggagctcatgagaagaggagatctaccagtttggctatcttacaaagtcgcctcagaa

SEQ ID NO: 494471 - DNA, 55 bp, Artificial
  Synthetic oligonucleotide
gtggatggccagtgtggagcctcatcggatagcggcctctatcatgctggagttc

SEQ ID NO: 494472 - DNA, 60 bp, Artificial
  Synthetic oligonucleotide
gtggatggggtatgagctccacccagacaaatggacagtacagcccatccaattacctaa

SEQ ID NO: 494473 - DNA, 59 bp, Artificial
  Synthetic oligonucleotide
gtggattcgcactcctaccgcttacagaccaccaaatgcccctatcttatcaacacttc

SEQ ID NO: 494474 - DNA, 55 bp, Artificial
  Synthetic oligonucleotide
gtggcaaagagggacacctagccagaaattgcagggcccctagaaagaagggctg

SEQ ID NO: 494475 - DNA, 55 bp, Artificial
  Synthetic oligonucleotide
gtggcatatatgttagaaagggaactggtccgcaaaaccaggttcctacctgtag

SEQ ID NO: 494476 - DNA, 56 bp, Artificial
  Synthetic oligonucleotide
gtggccactggcactaacctggttctttatgccgcccctcttagtccgctcttacc

SEQ ID NO: 494477 - DNA, 52 bp, Artificial
  Synthetic oligonucleotide
gtgggaacgaccggtccggtccgtaggctaggcattcggaggtcataatggc

SEQ ID NO: 494478 - DNA, 55 bp, Artificial
  Synthetic oligonucleotide
gtgggagagacgaacaatcaatcgctgaggccatcattgtagcaatggtgttctc

SEQ ID NO: 494479 - DNA, 60 bp, Artificial
  Synthetic oligonucleotide
gtgggatgtgccgcgcagctctatcgccaacttaatcatgaatatagcaacgtgcttacc

SEQ ID NO: 494480 - DNA, 60 bp, Artificial
  Synthetic oligonucleotide
gtgggcccgaaacatactgcggacacaagaatctgaatgcgtatgccacaacggtgtctg

SEQ ID NO: 494481 - DNA, 60 bp, Artificial
  Synthetic oligonucleotide
gtgggctaatgccccgacggctcaacgtatctcagcacatcactactcactaggagcgcg

SEQ ID NO: 494482 - DNA, 55 bp, Artificial
  Synthetic oligonucleotide
gtggggagctacagggtggtgaataggcacttggcaacgcacaatgactggcaga

SEQ ID NO: 494483 - DNA, 60 bp, Artificial
  Synthetic oligonucleotide
gtggggcccgtctatcatagagccccgctggaactatgtagagaggcaagcatgtgtgaa

SEQ ID NO: 494484 - DNA, 52 bp, Artificial
  Synthetic oligonucleotide
gtgggtcccctctgtaagggagacgggttgtaccttacatctgcagatatat

SEQ ID NO: 494485 - DNA, 55 bp, Artificial
  Synthetic oligonucleotide
gtgggttattccctgcacagattaaagcacggaatattataagccctgtcatggg

SEQ ID NO: 494486 - DNA, 52 bp, Artificial
  Synthetic oligonucleotide
gtggtccaaacgtagtacagctggatgggctgctataagggagagaatgcac

SEQ ID NO: 494487 - DNA, 55 bp, Artificial
  Synthetic oligonucleotide
gtggtcgcctctggctcctccacctgacttggtgtttgatcgtgatactcctggc

SEQ ID NO: 494488 - DNA, 55 bp, Artificial
  Synthetic oligonucleotide
gtgtaaggttcatgtgccaacgccctgtgcgggatgaaacctctactgccctagg

SEQ ID NO: 494489 - DNA, 52 bp, Artificial
  Synthetic oligonucleotide
gtgtacaccccaaaatacccagaggttaagaacccacagtccgcctccaacc

SEQ ID NO: 494490 - DNA, 55 bp, Artificial
  Synthetic oligonucleotide
gtgtacgacgatttgagttttcacctttcgtcttagaggagtgcactactccatc

SEQ ID NO: 494491 - DNA, 60 bp, Artificial
  Synthetic oligonucleotide
gtgtactcgtagctcaaataggagggaatttgaagatccttgggatacacacaagtggca

SEQ ID NO: 494492 - DNA, 60 bp, Artificial
  Synthetic oligonucleotide
gtgtagcacacctctaatagcgcctgtgctgtggttgtggtctaggcacgcatctagtgg

SEQ ID NO: 494493 - DNA, 58 bp, Artificial
  Synthetic oligonucleotide
gtgtcatgcagccccgataaatgttatcaattcgcacttgggcagggaactacattgg

SEQ ID NO: 494494 - DNA, 60 bp, Artificial
  Synthetic oligonucleotide
gtgtcatgtgatcccggcaaatgttatcaatttgcactcggacaggggaccacactagac

SEQ ID NO: 494495 - DNA, 51 bp, Artificial
  Synthetic oligonucleotide
gtgtcgatggtttgagtggcccgccgtgtctaacgttccagtcacttctag

SEQ ID NO: 494496 - DNA, 55 bp, Artificial
  Synthetic oligonucleotide
gtgtcgccagcacacgttgacgactacgaggagtgcactcaccaacccgcttcgc

SEQ ID NO: 494497 - DNA, 55 bp, Artificial
  Synthetic oligonucleotide
gtgtctcatcagactcaaacccacccttaccggccccactccactcttgtatcgg

SEQ ID NO: 494498 - DNA, 59 bp, Artificial
  Synthetic oligonucleotide
gtgtctcccctagctgtaacttggtggaataggaatgggccaacgacaagtgcagtcca

SEQ ID NO: 494499 - DNA, 55 bp, Artificial
  Synthetic oligonucleotide
gtgtgactcgtttggcccatgacggatccaaaatccctctgagatgtgtgctggg

SEQ ID NO: 494500 - DNA, 58 bp, Artificial
  Synthetic oligonucleotide
gtgtgccaatcggaagggctttactgctccctgagtacactacattgtaccgccgttg

SEQ ID NO: 494501 - DNA, 60 bp, Artificial
  Synthetic oligonucleotide
gtgtgccaattggaagagcattattgctcccagagtactcaacattgtaccgccgttggc

SEQ ID NO: 494502 - DNA, 55 bp, Artificial
  Synthetic oligonucleotide
gtgtgccagttggccgtgctctactcctaccggagtattctactctccgcaggcg

SEQ ID NO: 494503 - DNA, 59 bp, Artificial
  Synthetic oligonucleotide
gtgtgggaagcaccattctattcgggtcctgacatagtgttgcctacaggccccagtac

SEQ ID NO: 494504 - DNA, 60 bp, Artificial
  Synthetic oligonucleotide
gtgtgtccgcccgtcaagctgcttcgaactttcagcgacacgtccctgtcatcactaagt

SEQ ID NO: 494505 - DNA, 59 bp, Artificial
  Synthetic oligonucleotide
gtgtgtggcgacgacctagtcgttatctgtgaaagtgcgggagttcaggaggacgcggc

SEQ ID NO: 494506 - DNA, 53 bp, Artificial
  Synthetic oligonucleotide
gtgttcccccactcaaccagagggagaatagggacgccaaggaaccactaact

SEQ ID NO: 494507 - DNA, 52 bp, Artificial
  Synthetic oligonucleotide
gttaacatacgcattatttaatgcggcgcagtgtattaccacatttacccca

SEQ ID NO: 494508 - DNA, 55 bp, Artificial
  Synthetic oligonucleotide
gttaccagttaatccgcaggtagtgtgggatgtgccgcgcagctctatcgccaac

SEQ ID NO: 494509 - DNA, 57 bp, Artificial
  Synthetic oligonucleotide
gttagaggagaccccgcgttaagaagtgcacggcccaacttggctgaagctgtaagc

SEQ ID NO: 494510 - DNA, 55 bp, Artificial
  Synthetic oligonucleotide
gttatgggacaaacacctcagcctacccaagcgctactggacacaggagccgacc

SEQ ID NO: 494511 - DNA, 60 bp, Artificial
  Synthetic oligonucleotide
gttcctaaggctgctagaggtcaatacagtggattcgtgaggacactgttccaacagatg

SEQ ID NO: 494512 - DNA, 55 bp, Artificial
  Synthetic oligonucleotide
gttcgaaccagactttacgagccaaccatgagagagctctaccaggaatcgattc

SEQ ID NO: 494513 - DNA, 55 bp, Artificial
  Synthetic oligonucleotide
gttcgacgcgtggattaagacaggagagttgcgaatccgcattgagatgggcgcg

SEQ ID NO: 494514 - DNA, 60 bp, Artificial
  Synthetic oligonucleotide
gttcgcatcgcgaggcaatcacgtgtctcctacgcattatgtccctgagtccgacgcggc

SEQ ID NO: 494515 - DNA, 55 bp, Artificial
  Synthetic oligonucleotide
gttcggctgtacatggatgaatagcaccgggtttactaagacgtgcgggggcccc

SEQ ID NO: 494516 - DNA, 59 bp, Artificial
  Synthetic oligonucleotide
gttcgggacctactcgacaccgcttcagctctctacagggatgctttagagtcaccgga

SEQ ID NO: 494517 - DNA, 54 bp, Artificial
  Synthetic oligonucleotide
gttcgtccgttgtagggcttgcacggccccttcttggttccatctcattttacc

SEQ ID NO: 494518 - DNA, 55 bp, Artificial
  Synthetic oligonucleotide
gttcgtctcgtggttcgcgagcaacggattcacggtgcagtcggacgctctgctg

SEQ ID NO: 494519 - DNA, 55 bp, Artificial
  Synthetic oligonucleotide
gttctcgagataggagacatgctcctacggactgctataggccaggtgtcaaggc

SEQ ID NO: 494520 - DNA, 54 bp, Artificial
  Synthetic oligonucleotide
gttctcgccaacttataaggcctttctacgcaaccaatatctgaacctttaccc

SEQ ID NO: 494521 - DNA, 55 bp, Artificial
  Synthetic oligonucleotide
gttgaaggactcatatgactatggcagactgatttcaggctcgctaagcattaag

SEQ ID NO: 494522 - DNA, 55 bp, Artificial
  Synthetic oligonucleotide
gttgattattgcactacagcttggtcatggaccactcaggtaatctgctgctctg

SEQ ID NO: 494523 - DNA, 58 bp, Artificial
  Synthetic oligonucleotide
gttgcactccacacttacgttgtgcgtacgcggggcccgatggactatcgttcaccca

SEQ ID NO: 494524 - DNA, 57 bp, Artificial
  Synthetic oligonucleotide
gttgcgatcagcactctaccccgagtgtagcttaggccgatgagtctgggcataccc

SEQ ID NO: 494525 - DNA, 55 bp, Artificial
  Synthetic oligonucleotide
gttgctgagctcggccccactgagtctataggtactagcccaccggctgagctag

SEQ ID NO: 494526 - DNA, 55 bp, Artificial
  Synthetic oligonucleotide
gttggatgatttgtacgcacctgttagcgtggtgtgcccttgtggtaggcctgct

SEQ ID NO: 494527 - DNA, 51 bp, Artificial
  Synthetic oligonucleotide
gttggattttcagatcggcaggaatcaatatgattgcaacgtatttcgagc

SEQ ID NO: 494528 - DNA, 55 bp, Artificial
  Synthetic oligonucleotide
gttgggagtccacgacaacgtggctattttaccaacccacgcttcacctggtgaa

SEQ ID NO: 494529 - DNA, 55 bp, Artificial
  Synthetic oligonucleotide
gttgggatggatcctcatccggggtcttaaagcggactgatgctgcggtgggcct

SEQ ID NO: 494530 - DNA, 60 bp, Artificial
  Synthetic oligonucleotide
gttgggctcagtgatgtgcttggaccttctgtgctcgtgaaggcgagaggtgcacggact

SEQ ID NO: 494531 - DNA, 54 bp, Artificial
  Synthetic oligonucleotide
gttggggacgttaccgaatatggcttccttaacctcagtggcagaccaacccac

SEQ ID NO: 494532 - DNA, 55 bp, Artificial
  Synthetic oligonucleotide
gttgggtacttatgtgcggggctgcccagtgatactccaagaggggaggatgccc

SEQ ID NO: 494533 - DNA, 60 bp, Artificial
  Synthetic oligonucleotide
gttgggtcctccttgtagtgggatccagccggttctgacgctgttcagccacaatgccgc

SEQ ID NO: 494534 - DNA, 58 bp, Artificial
  Synthetic oligonucleotide
gttggtagtcctccggcccctgaatgcggctaatcctaactgcggagcagacacccac

SEQ ID NO: 494535 - DNA, 60 bp, Artificial
  Synthetic oligonucleotide
gttggtgggatcggaagattctacatacagatgtgcaccgaactcaaactcagcgactat

SEQ ID NO: 494536 - DNA, 54 bp, Artificial
  Synthetic oligonucleotide
gttggttcccgcccacgtgatttcaagacggaggttgacgtaatctacgggcca

SEQ ID NO: 494537 - DNA, 54 bp, Artificial
  Synthetic oligonucleotide
gttgtacccaccccagaggcccaagtggcggctagcactccggtattacggtac

SEQ ID NO: 494538 - DNA, 60 bp, Artificial
  Synthetic oligonucleotide
gttgtcatattatcgtccagggactctatctgagaaactcacttcaatcactatgcttgc

SEQ ID NO: 494539 - DNA, 60 bp, Artificial
  Synthetic oligonucleotide
gttgtccgcggctgggataaatgttggaccgatatcgccagattatactcaacatatggc

SEQ ID NO: 494540 - DNA, 55 bp, Artificial
  Synthetic oligonucleotide
gttgttcaaaccatcgtgaggtggtgaggcctctcatcattgcgggtcggtggac

SEQ ID NO: 494541 - DNA, 51 bp, Artificial
  Synthetic oligonucleotide
gtttacgtggaacgttgatcgctacagaatgcgtactcggagatgcatata

SEQ ID NO: 494542 - DNA, 57 bp, Artificial
  Synthetic oligonucleotide
gtttcgagccccgggaaagccgcgaaggcagtttgcacattgacggatgtgtacctc

SEQ ID NO: 494543 - DNA, 55 bp, Artificial
  Synthetic oligonucleotide
gtttcttgctctccaacagagtgcaggacgttcttccttacccagggttccctac

SEQ ID NO: 494544 - DNA, 50 bp, Artificial
  Synthetic oligonucleotide
gtttggaaagaaggccgtctcacagaatgatcgcatggcatggatcgttg

SEQ ID NO: 494545 - DNA, 54 bp, Artificial
  Synthetic oligonucleotide
gtttggaaggctctttgtaccaacttactcaggccttgttagttctgctgtggc

SEQ ID NO: 494546 - DNA, 60 bp, Artificial
  Synthetic oligonucleotide
gtttggtctgagctaaatattggaacaggtacctccgcttacacatcactgaatgtgctg

SEQ ID NO: 494547 - DNA, 55 bp, Artificial
  Synthetic oligonucleotide
gtttgtggtaaagctataagcttggtggatagaacatcaaatgttagatatagtg

SEQ ID NO: 494548 - DNA, 59 bp, Artificial
  Synthetic oligonucleotide
gtttgtgttggactgccccgaggtacctggtgtgaactgccgctcttgtgattaccatc

SEQ ID NO: 494549 - DNA, 57 bp, Artificial
  Synthetic oligonucleotide
taaaacagctctagggttgttcccaccctagaggcccaagtggcggctagcactctg

SEQ ID NO: 494550 - DNA, 52 bp, Artificial
  Synthetic oligonucleotide
taaacatgtgacccccatgcgaggcttgcactgtgccttgttgccgtttaca

SEQ ID NO: 494551 - DNA, 57 bp, Artificial
  Synthetic oligonucleotide
taaagccatgtgtgaagttaaccccgctctgtgttaggttaaattgtactaatgcca

SEQ ID NO: 494552 - DNA, 60 bp, Artificial
  Synthetic oligonucleotide
taaatcatctgacatctcatcggccctcgacatcattgaattcatactcaacaccgactc

SEQ ID NO: 494553 - DNA, 60 bp, Artificial
  Synthetic oligonucleotide
taacatcttggaatcttcgatgcgttgcgctcagcactcaaccccagagtgtagcttagg

SEQ ID NO: 494554 - DNA, 57 bp, Artificial
  Synthetic oligonucleotide
taaccctacccacgctcccactcacaccgcccctgctctgtccagaggtaaacgtga

SEQ ID NO: 494555 - DNA, 51 bp, Artificial
  Synthetic oligonucleotide
taacctagagccctggaatcatccggggagtcaacctactactccttgtag

SEQ ID NO: 494556 - DNA, 54 bp, Artificial
  Synthetic oligonucleotide
taacggctactgtcgagcttgttgcaagtccagaccgcttggagtgccgtactg

SEQ ID NO: 494557 - DNA, 55 bp, Artificial
  Synthetic oligonucleotide
taacgggctgcgcttagcttcacaccaaggattaccagtcctcaatacgcccggt

SEQ ID NO: 494558 - DNA, 57 bp, Artificial
  Synthetic oligonucleotide
taacttttcgtatctacacgtaccacctacggctttatgcgctatccaccatacttg

SEQ ID NO: 494559 - DNA, 60 bp, Artificial
  Synthetic oligonucleotide
taagagtacatgaaggatatgaggaattcacaatggttgggcgaagagcaacagccatcc

SEQ ID NO: 494560 - DNA, 60 bp, Artificial
  Synthetic oligonucleotide
taagagtacatgaggggtatgaggaattcacaatggtcgggcggagggcaacagctatcc

SEQ ID NO: 494561 - DNA, 59 bp, Artificial
  Synthetic oligonucleotide
taagcagccggcagttcggtaacagggaccagcggccatacattatggaaggtctgtgg

SEQ ID NO: 494562 - DNA, 50 bp, Artificial
  Synthetic oligonucleotide
taaggatttatgcttaagattgcagcatgtcttaaataagctccaccagg

SEQ ID NO: 494563 - DNA, 53 bp, Artificial
  Synthetic oligonucleotide
taagggaaagtaatcacaaggcttaaagtttattgcggagacccttgccttta

SEQ ID NO: 494564 - DNA, 56 bp, Artificial
  Synthetic oligonucleotide
taagtcaccaaatgttgaggaattaggctattcagataggttaatgcaactcaccg

SEQ ID NO: 494565 - DNA, 56 bp, Artificial
  Synthetic oligonucleotide
taagtgcgtgactgccgcacatgtccttacgggtaattcagctagggtttccgggg

SEQ ID NO: 494566 - DNA, 56 bp, Artificial
  Synthetic oligonucleotide
taagttcactcctcaaaaatgatgtgccgctagccggcccactaatagctggaggc

SEQ ID NO: 494567 - DNA, 58 bp, Artificial
  Synthetic oligonucleotide
taataacaatgcttcggcagtggtctggtacaagggaaggccagtcaccgaaattgcc

SEQ ID NO: 494568 - DNA, 60 bp, Artificial
  Synthetic oligonucleotide
taatactgacatggtgcgaagagtctattgagctagttagtagtcctccggcccctgaat

SEQ ID NO: 494569 - DNA, 52 bp, Artificial
  Synthetic oligonucleotide
taatggacgaagactatcagggcaggctgtgcaatcccctgaatccgtttgt

SEQ ID NO: 494570 - DNA, 60 bp, Artificial
  Synthetic oligonucleotide
taattacacactagtgcggccacaagatagatgttggataatgtcgtgtactgattctga

SEQ ID NO: 494571 - DNA, 50 bp, Artificial
  Synthetic oligonucleotide
taattgggagcggtaagaaggcgtcgcactacagaaatctgttcatggaa

SEQ ID NO: 494572 - DNA, 50 bp, Artificial
  Synthetic oligonucleotide
tacaaatgaacagcaaaccctctatcagaatactgacgcatatgtctcag

SEQ ID NO: 494573 - DNA, 50 bp, Artificial
  Synthetic oligonucleotide
tacaaatgtgactgacttaacgaacacatcctctgcgcacgcggcgacac

SEQ ID NO: 494574 - DNA, 51 bp, Artificial
  Synthetic oligonucleotide
tacaaccgaaggttcacaccagaaatagcagctagacctaaagtcagagaa

SEQ ID NO: 494575 - DNA, 57 bp, Artificial
  Synthetic oligonucleotide
tacaagggcgccagggttgtcctctgggacgacttcggcatggataacgtggtgaag

SEQ ID NO: 494576 - DNA, 60 bp, Artificial
  Synthetic oligonucleotide
tacacaccaggaccagggatcaaatacccactgacctttggatggtgcttcaagctagta

SEQ ID NO: 494577 - DNA, 60 bp, Artificial
  Synthetic oligonucleotide
tacacaccagggccagggatcagatatccactgacctttggatggtgcttcaagctagta

SEQ ID NO: 494578 - DNA, 51 bp, Artificial
  Synthetic oligonucleotide
tacacgaggacattataatttttcgtttagatgtcagaatgcagctacaga

SEQ ID NO: 494579 - DNA, 60 bp, Artificial
  Synthetic oligonucleotide
tacacttccgggttcaggaggctcaatttggctagcttcgctcgcaccacgtttgcagcc

SEQ ID NO: 494580 - DNA, 55 bp, Artificial
  Synthetic oligonucleotide
tacagatcggtcctagcatgcgagttactgcgggttgcagaggttgggcctcccg

SEQ ID NO: 494581 - DNA, 60 bp, Artificial
  Synthetic oligonucleotide
taccacgcaatcgctgttgagacgaaggccgagcgtaaatgttgccatgtgcgcacagaa

SEQ ID NO: 494582 - DNA, 60 bp, Artificial
  Synthetic oligonucleotide
taccatccgactttgtgcctctgacctaccgcgagtgcccaccaccgctatggagccact

SEQ ID NO: 494583 - DNA, 59 bp, Artificial
  Synthetic oligonucleotide
taccattgtctagtttgctttcagacaaaaggcttaggcatttcctatggcaggaagaa

SEQ ID NO: 494584 - DNA, 57 bp, Artificial
  Synthetic oligonucleotide
tacccgctcattgacaccttgcacctgcggctcctcggacctttacctggttacgag

SEQ ID NO: 494585 - DNA, 57 bp, Artificial
  Synthetic oligonucleotide
taccttcaccattgagacaaccacgctcccccaggatgccgtctccaggacccaacg

SEQ ID NO: 494586 - DNA, 55 bp, Artificial
  Synthetic oligonucleotide
tacgatatttgccactcatagacccgcggtccttagaggtgcaagcgcgcacgat

SEQ ID NO: 494587 - DNA, 51 bp, Artificial
  Synthetic oligonucleotide
tacgcggttcggtacccccgccccgtgtactcccctaccgtgatcgaaaga

SEQ ID NO: 494588 - DNA, 60 bp, Artificial
  Synthetic oligonucleotide
tacgcgtcacgtctacacagtgtgctgggtacagcaaatgccccactgagcatttacgag

SEQ ID NO: 494589 - DNA, 55 bp, Artificial
  Synthetic oligonucleotide
tacggtgcatataaaagagctgatcagcacagatttgaaggagactgatggagcc

SEQ ID NO: 494590 - DNA, 54 bp, Artificial
  Synthetic oligonucleotide
tacgtcaggcatgggcggggcttacataatctctcgctaatggttggttcccgg

SEQ ID NO: 494591 - DNA, 54 bp, Artificial
  Synthetic oligonucleotide
tacgtgcccataacggtgacagtagcccctatgtgtgcggagtacaacggtctt

SEQ ID NO: 494592 - DNA, 55 bp, Artificial
  Synthetic oligonucleotide
tacgttgctgcgtctgtcagtaagaaggtctctgctcagggcgcaaacggtgacc

SEQ ID NO: 494593 - DNA, 55 bp, Artificial
  Synthetic oligonucleotide
tacgttgtgcgcgcgcgggacccgatggactatcgttcacccacctacagctgga

SEQ ID NO: 494594 - DNA, 54 bp, Artificial
  Synthetic oligonucleotide
tactagtgccatttgttcagtggttcgtagggctttcccccactgtttggcttt

SEQ ID NO: 494595 - DNA, 55 bp, Artificial
  Synthetic oligonucleotide
tactataagcagtaccaccccaccgcgtgcgaggttgaacctgctttcggacaca

SEQ ID NO: 494596 - DNA, 55 bp, Artificial
  Synthetic oligonucleotide
tactcatccatccggattcgcccttcgttctgccgcccggagacttctacgcagc

SEQ ID NO: 494597 - DNA, 54 bp, Artificial
  Synthetic oligonucleotide
tactccggcttacggccgcatgccaccccttcaaattcccaccttcaccggtcc

SEQ ID NO: 494598 - DNA, 51 bp, Artificial
  Synthetic oligonucleotide
tactcctattacagatttaagcgtactagaccgtaaaacatggactggcgc

SEQ ID NO: 494599 - DNA, 55 bp, Artificial
  Synthetic oligonucleotide
tactctttacgtcacacttatcaatggagtctgcgcccggaatatgatcagcgag

SEQ ID NO: 494600 - DNA, 50 bp, Artificial
  Synthetic oligonucleotide
tactggactgcctctaacaacgacctagacctagccagatacctgggtgc

SEQ ID NO: 494601 - DNA, 57 bp, Artificial
  Synthetic oligonucleotide
tactgtgctacgccgtgggagtttcacttgtcggtgtctacctcttaaggtcactaa

SEQ ID NO: 494602 - DNA, 51 bp, Artificial
  Synthetic oligonucleotide
tacttcggctgcgtgcacttggagctccccgtgatgcgataataggtcagc

SEQ ID NO: 494603 - DNA, 54 bp, Artificial
  Synthetic oligonucleotide
tacttgtaagaggtaactcccctgtgtttaactataacaaggcaactaagaggc

SEQ ID NO: 494604 - DNA, 60 bp, Artificial
  Synthetic oligonucleotide
tagaaataacagcactcatcctaggagcccaggctttgccagtgtacctaatgactctca

SEQ ID NO: 494605 - DNA, 60 bp, Artificial
  Synthetic oligonucleotide
tagaagatcacatcaaattagattctcagagtctgcgacatcatattcaggatatatttt

SEQ ID NO: 494606 - DNA, 59 bp, Artificial
  Synthetic oligonucleotide
tagaagtcaggtcacattaagccatagtacggaacaaactatgctacctgtgagccccg

SEQ ID NO: 494607 - DNA, 60 bp, Artificial
  Synthetic oligonucleotide
tagacatgcgacatctttcgttgatgcagaggagattcccagatgtcctaattcaagcaa

SEQ ID NO: 494608 - DNA, 60 bp, Artificial
  Synthetic oligonucleotide
tagactgcaatacatgtgtcacccagacagtcgacttcagccttgaccctaccttcacca

SEQ ID NO: 494609 - DNA, 60 bp, Artificial
  Synthetic oligonucleotide
tagactgtatatcttgtgcaaaatcagctacaggcctgaaccaaattagcagtagcagca

SEQ ID NO: 494610 - DNA, 58 bp, Artificial
  Synthetic oligonucleotide
tagagacgatcacggaaaagtagcaaccaacggacaacttgcgcccggtgtccatatc

SEQ ID NO: 494611 - DNA, 53 bp, Artificial
  Synthetic oligonucleotide
tagaggcacttgcctactacggtttcaaaccgaatcttcgtaaaacgttcgtg

SEQ ID NO: 494612 - DNA, 55 bp, Artificial
  Synthetic oligonucleotide
tagagtacacgtaaaacacccaccggtttggcaggacaccgcagaggaactgccc

SEQ ID NO: 494613 - DNA, 60 bp, Artificial
  Synthetic oligonucleotide
tagatctccatgattctaatgttcgaaacctccatgaaaaggtcagacgaatgctgaagg

SEQ ID NO: 494614 - DNA, 55 bp, Artificial
  Synthetic oligonucleotide
tagatgcatctgaacttgcggacttaattctaaatgaatggttgtgcaaccctat

SEQ ID NO: 494615 - DNA, 53 bp, Artificial
  Synthetic oligonucleotide
tagattgggtcaaagggcaaccatgtttacacgtagtggtaaacaaatagggg

SEQ ID NO: 494616 - DNA, 60 bp, Artificial
  Synthetic oligonucleotide
tagcatcttgagggtacctgagatctttgcgagtgtgatatttggtggccattgggggat

SEQ ID NO: 494617 - DNA, 53 bp, Artificial
  Synthetic oligonucleotide
tagccgatgggtgttccgccccccgagaggggacgagtgaggcttatcccggg

SEQ ID NO: 494618 - DNA, 60 bp, Artificial
  Synthetic oligonucleotide
tagccggcgttactgtgagcgttggtggcgtcgacatgagggctggacgtataatagcgt

SEQ ID NO: 494619 - DNA, 54 bp, Artificial
  Synthetic oligonucleotide
tagcgaaggagatagtagccagctgtgataaatgtcaactaaaaggggaagcca

SEQ ID NO: 494620 - DNA, 60 bp, Artificial
  Synthetic oligonucleotide
tagcggatcggaggacgtcgtgtgctgctccatgtcatactcctggaccggggctctaat

SEQ ID NO: 494621 - DNA, 59 bp, Artificial
  Synthetic oligonucleotide
tagcggtcgccccatacttgacaaccaagggcgtgtggtcgctattgtgcttggcggag

SEQ ID NO: 494622 - DNA, 55 bp, Artificial
  Synthetic oligonucleotide
tagctaatggttcagatggtttgagtgtcccttgcactataccacaagagtttgt

SEQ ID NO: 494623 - DNA, 54 bp, Artificial
  Synthetic oligonucleotide
taggactgggagcattcgggccagggttcactcccccacacggaggtcttttag

SEQ ID NO: 494624 - DNA, 54 bp, Artificial
  Synthetic oligonucleotide
taggagaggctgatccggtatctacgtcggctgaaattggatggcatatccctc

SEQ ID NO: 494625 - DNA, 60 bp, Artificial
  Synthetic oligonucleotide
taggatggatgacaaataacccacctatcccagtaggagacatctacaaaagatggataa

SEQ ID NO: 494626 - DNA, 53 bp, Artificial
  Synthetic oligonucleotide
taggcaaaaggcctcccacacaaatgatataagacaattagctgaagtaatcc

SEQ ID NO: 494627 - DNA, 60 bp, Artificial
  Synthetic oligonucleotide
taggccatcagcgcatgcgtggaacctttgtgtctcctctaccgatccatactgcggaac

SEQ ID NO: 494628 - DNA, 54 bp, Artificial
  Synthetic oligonucleotide
tagggcacccacgaattggtactattacaaactccctggtcttaccaatcagcg

SEQ ID NO: 494629 - DNA, 55 bp, Artificial
  Synthetic oligonucleotide
tagggccagcacttccggaacacccattaaaaagggcacagacgcgaggttagcc

SEQ ID NO: 494630 - DNA, 53 bp, Artificial
  Synthetic oligonucleotide
taggtgcccctacaccgaacccatgctcatagaccactcagaccccaacagag

SEQ ID NO: 494631 - DNA, 51 bp, Artificial
  Synthetic oligonucleotide
taggtgtgatgtgatcctaatacagactccgggctacgtcttcggtaacga

SEQ ID NO: 494632 - DNA, 60 bp, Artificial
  Synthetic oligonucleotide
taggttacatccagtacatgcagggcctattccaccaggccagatgagagaaccaagggg

SEQ ID NO: 494633 - DNA, 60 bp, Artificial
  Synthetic oligonucleotide
tagtaacaccatgaaagttgcgcagtgtttcgctccgcacaaccccagtgtagatcaggt

SEQ ID NO: 494634 - DNA, 57 bp, Artificial
  Synthetic oligonucleotide
tagtagtcagctatgtcaacgttaatacgggcctaaaaatcagacaactattgtggt

SEQ ID NO: 494635 - DNA, 59 bp, Artificial
  Synthetic oligonucleotide
tagtagtcctccggcccctgaatgcggctaatcccaactgcggagcacacacccacaaa

SEQ ID NO: 494636 - DNA, 59 bp, Artificial
  Synthetic oligonucleotide
tagtcctccggcccctgaatgcggataatcctaactgcggagcagatacccacaaacca

SEQ ID NO: 494637 - DNA, 58 bp, Artificial
  Synthetic oligonucleotide
tagtctctcccactcctcaataaacctccgggtgcgtgtactctgtggtcgcggtctc

SEQ ID NO: 494638 - DNA, 55 bp, Artificial
  Synthetic oligonucleotide
tagtgaacccttgaatggcaatctcaagcgcctctgtaggaaagccaagaatgtc

SEQ ID NO: 494639 - DNA, 49 bp, Artificial
  Synthetic oligonucleotide
tagtgccaccccccgtcccccctattccaactacccgaccctaacccag

SEQ ID NO: 494640 - DNA, 54 bp, Artificial
  Synthetic oligonucleotide
tagtgctgcatgcaactggactcgaggagagcgttgcgacctggaggacaggga

SEQ ID NO: 494641 - DNA, 53 bp, Artificial
  Synthetic oligonucleotide
tagtgctgtggacaaattgtgggtcacaatctattacggggtacctgtgtggc

SEQ ID NO: 494642 - DNA, 60 bp, Artificial
  Synthetic oligonucleotide
tagtggaagccctctccacgctattgcgctccgtgactcctctagtccttgatcccactg

SEQ ID NO: 494643 - DNA, 60 bp, Artificial
  Synthetic oligonucleotide
tagtgggacagccattggggctcatctgtttggggtctcacctgaatacagggtgttgat

SEQ ID NO: 494644 - DNA, 60 bp, Artificial
  Synthetic oligonucleotide
tagttactcctaggtgtgactatccagcaggacataataaggtaggatctctacaatact

SEQ ID NO: 494645 - DNA, 60 bp, Artificial
  Synthetic oligonucleotide
tagttggctatggtgagtggccttcctactgctctgattctgacgctacagcagtggata

SEQ ID NO: 494646 - DNA, 55 bp, Artificial
  Synthetic oligonucleotide
tataaccacaggcacagtgtaggggccacccttgaggcactattccagggtccac

SEQ ID NO: 494647 - DNA, 57 bp, Artificial
  Synthetic oligonucleotide
tataacgtaatccgtgactacgggctgctcgcagaaccctccccggatggggcacag

SEQ ID NO: 494648 - DNA, 51 bp, Artificial
  Synthetic oligonucleotide
tataagacaagcatattgtaacattactaaagcaaactggactgatacttt

SEQ ID NO: 494649 - DNA, 60 bp, Artificial
  Synthetic oligonucleotide
tatacaggaagatatgacctaaattgggataggtgggtcacagtcaatggctataaagtg

SEQ ID NO: 494650 - DNA, 50 bp, Artificial
  Synthetic oligonucleotide
tataccctgatcctggcacaacattatctcggtcgcttagcgtcgcacaa

SEQ ID NO: 494651 - DNA, 55 bp, Artificial
  Synthetic oligonucleotide
tatacgactacaaggaaaaccgattcactgaaattggtgtgacacggagggaagt

SEQ ID NO: 494652 - DNA, 60 bp, Artificial
  Synthetic oligonucleotide
tatactacgccgtcagtataatttgtctacgtctccactcacatccactattgctaccgg

SEQ ID NO: 494653 - DNA, 50 bp, Artificial
  Synthetic oligonucleotide
tatactgcattcactatacctagtataaataatgagacaccagggactag

SEQ ID NO: 494654 - DNA, 55 bp, Artificial
  Synthetic oligonucleotide
tatacttagatgtcaacacggtgtcgtagggatagtctctaccgggggaaacggc

SEQ ID NO: 494655 - DNA, 51 bp, Artificial
  Synthetic oligonucleotide
tatagcgacggttacatcgccctatcctattcaggctcaggaccgctcacc

SEQ ID NO: 494656 - DNA, 51 bp, Artificial
  Synthetic oligonucleotide
tatagtagctgggccaatgggggcaacgtatacagcttttaatcctagaac

SEQ ID NO: 494657 - DNA, 55 bp, Artificial
  Synthetic oligonucleotide
tatataccacttggacgaccctctactacccttgaaccaggtcctcctgtacgtc

SEQ ID NO: 494658 - DNA, 60 bp, Artificial
  Synthetic oligonucleotide
tatatggatgatgtggtactgggggccaaatctgtacaacatcttgaggccctttatacc

SEQ ID NO: 494659 - DNA, 60 bp, Artificial
  Synthetic oligonucleotide
tatatgtacggtgtaatttacaataagtcatgcaaaaagtgcaagctatgcggcctagtg

SEQ ID NO: 494660 - DNA, 60 bp, Artificial
  Synthetic oligonucleotide
tatcacagcgtgtctcatgcccggccccgtttgttcctctggtgcctactcctactttca

SEQ ID NO: 494661 - DNA, 59 bp, Artificial
  Synthetic oligonucleotide
tatcactgccaatacgattctggacgtaattgaaaaattagggactaatcactcagtgg

SEQ ID NO: 494662 - DNA, 55 bp, Artificial
  Synthetic oligonucleotide
tatcagagcggcacactgcatcagtccagcctgtagtcacgtcttgcatgcttcc

SEQ ID NO: 494663 - DNA, 51 bp, Artificial
  Synthetic oligonucleotide
tatcatgagaggccgataatctacatggtaggatcagcaccttcatattgg

SEQ ID NO: 494664 - DNA, 60 bp, Artificial
  Synthetic oligonucleotide
tatcatggccgcagggcttcccttacagcgtgatgcactcatcgcagccggagagcgttt

SEQ ID NO: 494665 - DNA, 60 bp, Artificial
  Synthetic oligonucleotide
tatccagtcatcccgggctcatgctatagttgcactcactcgccacactgagaagtgtgt

SEQ ID NO: 494666 - DNA, 57 bp, Artificial
  Synthetic oligonucleotide
tatccccacgccgatggtacatgggagattagggttcgacggccaataccacgagag

SEQ ID NO: 494667 - DNA, 60 bp, Artificial
  Synthetic oligonucleotide
tatcccgcaggtatcctcaactaccgcgtgcagtgaccactgggagagtatacgacatga

SEQ ID NO: 494668 - DNA, 60 bp, Artificial
  Synthetic oligonucleotide
tatccggcagatagtgtgcgccgaccccatttacaccaggataggggcgtgcttagaggc

SEQ ID NO: 494669 - DNA, 55 bp, Artificial
  Synthetic oligonucleotide
tatctaacgcgatggctggcgtcccgagaatcacgtaccgagtccgcgtgcccgt

SEQ ID NO: 494670 - DNA, 58 bp, Artificial
  Synthetic oligonucleotide
tatctcagacaaagcagagtggggagaaccttccttacctggtagcgtaccaagccac

SEQ ID NO: 494671 - DNA, 55 bp, Artificial
  Synthetic oligonucleotide
tatctccccattggagaccaggagtacttcccaaagtactacccaacacaccgcc

SEQ ID NO: 494672 - DNA, 55 bp, Artificial
  Synthetic oligonucleotide
tatgaaggttgtgttcctcatgtgctaccatacaaggctgtgacagcccatggct

SEQ ID NO: 494673 - DNA, 60 bp, Artificial
  Synthetic oligonucleotide
tatgacacccgctgctttgactccactgtaaccgaaaaggacatcagagccgagggagag

SEQ ID NO: 494674 - DNA, 54 bp, Artificial
  Synthetic oligonucleotide
tatgaccgcaacgcgagaggttgactttacagtgccggatgtacaaaagattct

SEQ ID NO: 494675 - DNA, 50 bp, Artificial
  Synthetic oligonucleotide
tatgagattgctcggttacaagcgaatatgggacagtttcgcgcggctct

SEQ ID NO: 494676 - DNA, 56 bp, Artificial
  Synthetic oligonucleotide
tatgagggggatactagtgcgggctataatcatgatgtgtctattctccgtgcatg

SEQ ID NO: 494677 - DNA, 52 bp, Artificial
  Synthetic oligonucleotide
tatgctcctggaccgttgactcaaactgctgtatttccaagtgagtcacgtt

SEQ ID NO: 494678 - DNA, 52 bp, Artificial
  Synthetic oligonucleotide
tatgcttgtaagcatagcaatacgtggcttagctcatgctgatctaactgtt

SEQ ID NO: 494679 - DNA, 60 bp, Artificial
  Synthetic oligonucleotide
tatggaagtttgacagccgcctagcatttcatcacatggcccgagagctgcatccggagt

SEQ ID NO: 494680 - DNA, 59 bp, Artificial
  Synthetic oligonucleotide
tatggcgcgctttgaggatccaacacggcgaccctacaagctacctgatctgtgcacgg

SEQ ID NO: 494681 - DNA, 60 bp, Artificial
  Synthetic oligonucleotide
tatgggcgcggcgtcaataacgctgacggtacaggccagacaattgctgtctggtatagt

SEQ ID NO: 494682 - DNA, 60 bp, Artificial
  Synthetic oligonucleotide
tatggggcatgtccaaacaatatgatgggcacattctcagtgcggactgtgggaacctcg

SEQ ID NO: 494683 - DNA, 55 bp, Artificial
  Synthetic oligonucleotide
tatgtattcctgccccccaccgaaactaacttttatttcgctgtcttgcctgcct

SEQ ID NO: 494684 - DNA, 53 bp, Artificial
  Synthetic oligonucleotide
tatgtcttacgatgtataggttcacgtacatatcaaattgaggacgacgggtc

SEQ ID NO: 494685 - DNA, 54 bp, Artificial
  Synthetic oligonucleotide
tattcaacacaccacatgctaggagaacaataacccaagcacttggtttgacga

SEQ ID NO: 494686 - DNA, 59 bp, Artificial
  Synthetic oligonucleotide
tattcaccatcaggcaggaaatggccattagggccctatgggactcctttcgtcagtcc

SEQ ID NO: 494687 - DNA, 58 bp, Artificial
  Synthetic oligonucleotide
tattgtgggaaacagtggaaacctagccatagcttacatggatgtgtttcgacccaaa

SEQ ID NO: 494688 - DNA, 60 bp, Artificial
  Synthetic oligonucleotide
tcaaacgggcctcggcacacaacttcaccctggatctgaggatgctgctgtcgtacaatc

SEQ ID NO: 494689 - DNA, 51 bp, Artificial
  Synthetic oligonucleotide
tcaaacgtagacttatgattgacttaacggttgtcttctcgctatgggttt

SEQ ID NO: 494690 - DNA, 55 bp, Artificial
  Synthetic oligonucleotide
tcaaaggaacttacaacaacactggaaaccagccaatcctctatttctggggtgt

SEQ ID NO: 494691 - DNA, 57 bp, Artificial
  Synthetic oligonucleotide
tcaaatggctctgttaccaccctaaaggcgtccctctggcccgtactgtcaaggcgc

SEQ ID NO: 494692 - DNA, 57 bp, Artificial
  Synthetic oligonucleotide
tcaaccacgtacgtgggatccattgtttcaagcgattatgagatctcaatacgtgac

SEQ ID NO: 494693 - DNA, 56 bp, Artificial
  Synthetic oligonucleotide
tcaagccagaagttggcctgtcgtaacgcgtaagtctgtggcggaaccgactactt

SEQ ID NO: 494694 - DNA, 60 bp, Artificial
  Synthetic oligonucleotide
tcaagctagtgtcgtccgcattgttttacatacgaattgggcaagtatgattgataactc

SEQ ID NO: 494695 - DNA, 60 bp, Artificial
  Synthetic oligonucleotide
tcaaggggcgtccacattgtgagacgacgtcttgacacgtcggataggatcgtgaacggc

SEQ ID NO: 494696 - DNA, 50 bp, Artificial
  Synthetic oligonucleotide
tcaaggttttagatctgtgtaggttgttgtctacgataggtaggaagatg

SEQ ID NO: 494697 - DNA, 60 bp, Artificial
  Synthetic oligonucleotide
tcaatcgctgaggcgatcattgtagcaatggtgttctcacaagaggattgcatgataaag

SEQ ID NO: 494698 - DNA, 60 bp, Artificial
  Synthetic oligonucleotide
tcaatctatctgttgggctcagtgatgtgctcggaccttctgtgcttgtgaaggcgagag

SEQ ID NO: 494699 - DNA, 57 bp, Artificial
  Synthetic oligonucleotide
tcaatgcccggaaatttgggcgtgcccccgcgagatcactagccgagtagtgttggg

SEQ ID NO: 494700 - DNA, 59 bp, Artificial
  Synthetic oligonucleotide
tcaatgtcctacacctggacaggcgcacttatcaccccgtgcgccgcggaagaacaaaa

SEQ ID NO: 494701 - DNA, 58 bp, Artificial
  Synthetic oligonucleotide
tcacagggatactattggtacgtgatggaggcaacacatctgaaaacatagagacatt

SEQ ID NO: 494702 - DNA, 59 bp, Artificial
  Synthetic oligonucleotide
tcacatcactctttcggatgcgatagaagtcgagaagtacgtttgtatcgacgaacaat

SEQ ID NO: 494703 - DNA, 57 bp, Artificial
  Synthetic oligonucleotide
tcaccagtggatgcagctcccttcaggtgaagtacattcccgtaagtcgtcggataa

SEQ ID NO: 494704 - DNA, 58 bp, Artificial
  Synthetic oligonucleotide
tcaccccgtgaggttggataccacgggtcacgtcagttctacagtctggcagattttc

SEQ ID NO: 494705 - DNA, 60 bp, Artificial
  Synthetic oligonucleotide
tcaccgtaacccagctcctgaggcgactgcaccagtggataagttcggagtgtaccactc

SEQ ID NO: 494706 - DNA, 55 bp, Artificial
  Synthetic oligonucleotide
tcacgtggtgctattctgcgtcggcagtacaacctgtccacgtctccgcttacgt

SEQ ID NO: 494707 - DNA, 60 bp, Artificial
  Synthetic oligonucleotide
tcacgtggtgctattttgcgccggcagtataatttgtctacgtccccgctcacgtcatct

SEQ ID NO: 494708 - DNA, 53 bp, Artificial
  Synthetic oligonucleotide
tcactgagactggcagtgctgtgcggagacacagacataagacgtctacagga

SEQ ID NO: 494709 - DNA, 55 bp, Artificial
  Synthetic oligonucleotide
tcactgagagtggtgccccaccgactgacttgcaaaagatggtcatgggtaacac

SEQ ID NO: 494710 - DNA, 60 bp, Artificial
  Synthetic oligonucleotide
tcagaggtgatctgaatttcgtcaatagggcgaatcagcgattgaatcctatgcatcaac

SEQ ID NO: 494711 - DNA, 55 bp, Artificial
  Synthetic oligonucleotide
tcagcccaagcaggaaagggcgagttgtgtgcagtctttagagccgaccctgggc

SEQ ID NO: 494712 - DNA, 55 bp, Artificial
  Synthetic oligonucleotide
tcagcccggtattgcctccgagttagtcatccctagtgagcgccttcactaccgc

SEQ ID NO: 494713 - DNA, 60 bp, Artificial
  Synthetic oligonucleotide
tcagctcccggcatagaggggcgcgtagcgtcgtatccagcgctcggtatccgcctttgg

SEQ ID NO: 494714 - DNA, 60 bp, Artificial
  Synthetic oligonucleotide
tcaggaggcttgacccgcagccagatgacaggctactgatcagggtgccatttacagcac

SEQ ID NO: 494715 - DNA, 53 bp, Artificial
  Synthetic oligonucleotide
tcagggatgatcttaaaaagactgtcactcctcagaatttcacaccaggttgt

SEQ ID NO: 494716 - DNA, 56 bp, Artificial
  Synthetic oligonucleotide
tcaggggccgcttacgtagcgttctgccggatgcaccaaggccgggtagggatacc

SEQ ID NO: 494717 - DNA, 60 bp, Artificial
  Synthetic oligonucleotide
tcaggggcgcactgttggaggtcagatgggcatgcttctgacaggatccaacgccaaaag

SEQ ID NO: 494718 - DNA, 60 bp, Artificial
  Synthetic oligonucleotide
tcagtataatcaacgtgagtcgcaggcacgcgttgcgtctatcctcgccaacactgacct

SEQ ID NO: 494719 - DNA, 60 bp, Artificial
  Synthetic oligonucleotide
tcagtcaaaattatcctatagtgcagaacctccaagggcaaatggtacatcaacccatat

SEQ ID NO: 494720 - DNA, 56 bp, Artificial
  Synthetic oligonucleotide
tcagtgatgtgctaggaccttctgtgcttgtgaaggcgagaggtgtacggactagg

SEQ ID NO: 494721 - DNA, 55 bp, Artificial
  Synthetic oligonucleotide
tcagtgggtactcccggaggcggatcccgtttagggagctcaacacttactccgc

SEQ ID NO: 494722 - DNA, 59 bp, Artificial
  Synthetic oligonucleotide
tcataacatcgtgctcctctaacgtgtcagtcgcccacgacggtactggaaagagggtc

SEQ ID NO: 494723 - DNA, 60 bp, Artificial
  Synthetic oligonucleotide
tcatacaatcaacatctcgggatcttaaatgcatcccagaaagtcataagtgacttgcac

SEQ ID NO: 494724 - DNA, 57 bp, Artificial
  Synthetic oligonucleotide
tcatcgtctatgatgtgggagattaacgggccagaatcagtgctagttaacacatat

SEQ ID NO: 494725 - DNA, 54 bp, Artificial
  Synthetic oligonucleotide
tcatggaggttgcgttctctgggaccaaaccctgtaggatcccggtgagggctg

SEQ ID NO: 494726 - DNA, 55 bp, Artificial
  Synthetic oligonucleotide
tcatgtggataccgtgcagtagtcgtgtcctggctccctacggggatttccggag

SEQ ID NO: 494727 - DNA, 55 bp, Artificial
  Synthetic oligonucleotide
tcatgtggtgtgggatgttgggctccaatccagctgcgtgttatgcatcccctgg

SEQ ID NO: 494728 - DNA, 60 bp, Artificial
  Synthetic oligonucleotide
tccaagctacagatcactttacttgcgttgggtgaacgccgtgtgcggtgacgcataatc

SEQ ID NO: 494729 - DNA, 54 bp, Artificial
  Synthetic oligonucleotide
tccacaattcaagaagcgttataacactaatgacaactcaagaggtatgaattt

SEQ ID NO: 494730 - DNA, 55 bp, Artificial
  Synthetic oligonucleotide
tccacccacctacggctggactcacggcgccgcgtagccattttagctggactgt

SEQ ID NO: 494731 - DNA, 55 bp, Artificial
  Synthetic oligonucleotide
tccagaggactatttggagcaattgccggattcattgaaggaggatggacaggca

SEQ ID NO: 494732 - DNA, 60 bp, Artificial
  Synthetic oligonucleotide
tccagatctcagcgacgggtcatggtcaacggtcagtagcggggctgacacggaggatgt

SEQ ID NO: 494733 - DNA, 54 bp, Artificial
  Synthetic oligonucleotide
tccagctggttatgcgattctaaagtgttatgatacagaattcaatgggacggg

SEQ ID NO: 494734 - DNA, 59 bp, Artificial
  Synthetic oligonucleotide
tccaggattgtaaaattgcccccttaatggtagcatacatgctagaaagagaattggtc

SEQ ID NO: 494735 - DNA, 56 bp, Artificial
  Synthetic oligonucleotide
tccatgactggagtcatgcgtggcaactactatgcttttgtgggagtcatgtacaa

SEQ ID NO: 494736 - DNA, 55 bp, Artificial
  Synthetic oligonucleotide
tccatgcacggtcgtgggtctgtgatgtgcgtgtggggctctgcccactggtctt

SEQ ID NO: 494737 - DNA, 51 bp, Artificial
  Synthetic oligonucleotide
tccatgtcagccaggtgattgcgggggcctcttagtctgctcacatggagt

SEQ ID NO: 494738 - DNA, 53 bp, Artificial
  Synthetic oligonucleotide
tccccaccgtgtcctaagccaggaaccgtcacccaccgtccacctgtaccgcc

SEQ ID NO: 494739 - DNA, 50 bp, Artificial
  Synthetic oligonucleotide
tcccccacagttgaagagtgtggatatagtgatagagtgaggtctattac

SEQ ID NO: 494740 - DNA, 53 bp, Artificial
  Synthetic oligonucleotide
tccccgttacctggggcctacggaagggcggaacagcatacgttactcggagc

SEQ ID NO: 494741 - DNA, 54 bp, Artificial
  Synthetic oligonucleotide
tcccgtagtagataaccttcgtggggtccaagctggtacctgacgtctgcagcg

SEQ ID NO: 494742 - DNA, 53 bp, Artificial
  Synthetic oligonucleotide
tcccgttcacttccgaaaccaagttaaaatacgccgccgagttgatgtgaacc

SEQ ID NO: 494743 - DNA, 51 bp, Artificial
  Synthetic oligonucleotide
tccctagaagcatacaaatcgttgacccgagatacaactcaccggaactta

SEQ ID NO: 494744 - DNA, 60 bp, Artificial
  Synthetic oligonucleotide
tccctagcattgctcgtcctcttgctcccccaacgtgcgtatgcttggtcgggtgaagac

SEQ ID NO: 494745 - DNA, 53 bp, Artificial
  Synthetic oligonucleotide
tccctggtagtggactcaagctgcctgttcatgaacctgcaactaaagacata

SEQ ID NO: 494746 - DNA, 59 bp, Artificial
  Synthetic oligonucleotide
tcccttcgtggaggttcctggtctccgcgtgactacacgccgcagactcaaggcaccta

SEQ ID NO: 494747 - DNA, 55 bp, Artificial
  Synthetic oligonucleotide
tccgaaaccaagttaaaatacgccgccgagttgatgtaaatccgggtcatgcaga

SEQ ID NO: 494748 - DNA, 51 bp, Artificial
  Synthetic oligonucleotide
tccgaatccggctgaactaatggtgtagtggccccatgtgggcctgagttc

SEQ ID NO: 494749 - DNA, 53 bp, Artificial
  Synthetic oligonucleotide
tccgacatcaccaacgcagtggaaactgcaacccggggacgatccactcctgg

SEQ ID NO: 494750 - DNA, 55 bp, Artificial
  Synthetic oligonucleotide
tccgaccactgcctcacccacatcgtcaatcttctcgaggactggggaccctgca

SEQ ID NO: 494751 - DNA, 55 bp, Artificial
  Synthetic oligonucleotide
tccgaccactgtatctcacatatcgtcaatcttctcgaggattggggaccctgcg

SEQ ID NO: 494752 - DNA, 55 bp, Artificial
  Synthetic oligonucleotide
tccgcaacacaaactgaccatatctgaagtatcagggcaaggactgtgcataggg

SEQ ID NO: 494753 - DNA, 57 bp, Artificial
  Synthetic oligonucleotide
tccggattgttgtgcaaccaggccttgcctcggagttggtaatccctagtgaacgcc

SEQ ID NO: 494754 - DNA, 53 bp, Artificial
  Synthetic oligonucleotide
tccggcccccgatactgccccggtccctgatgttgattcacgtggcgctatac

SEQ ID NO: 494755 - DNA, 55 bp, Artificial
  Synthetic oligonucleotide
tccgtaaaacgaggttcctcccagtggccggtggaacaagcagtgtttacattga

SEQ ID NO: 494756 - DNA, 59 bp, Artificial
  Synthetic oligonucleotide
tccgtcccaggcaaaatggttgactggttgtcagaccggcctgaggctaccttcagagc

SEQ ID NO: 494757 - DNA, 52 bp, Artificial
  Synthetic oligonucleotide
tccgtgtagggggtcgccataggcttcgacctcccttttaggccttccggac

SEQ ID NO: 494758 - DNA, 56 bp, Artificial
  Synthetic oligonucleotide
tccgtttatgcgtccgagttatccgtgatgaaggtagacatgcgacacttatcctt

SEQ ID NO: 494759 - DNA, 58 bp, Artificial
  Synthetic oligonucleotide
tcctaaggcggttgcaccagtggataagctcggagtgtaccactccgtgctccggttc

SEQ ID NO: 494760 - DNA, 56 bp, Artificial
  Synthetic oligonucleotide
tcctacgagacccgtaagaaggcttgggtaggtgctccgattgtccttgcgttcac

SEQ ID NO: 494761 - DNA, 59 bp, Artificial
  Synthetic oligonucleotide
tcctagggggtgtggtttgggcgggactgggagtggtcaaccctcagatgctgcatata

SEQ ID NO: 494762 - DNA, 55 bp, Artificial
  Synthetic oligonucleotide
tcctatggcaggaagaagcggagacagcgacgcagcactcctccaagcagtacgg

SEQ ID NO: 494763 - DNA, 53 bp, Artificial
  Synthetic oligonucleotide
tcctcagtcgttggcggctaatgcatccggacgaatagattccattggattgt

SEQ ID NO: 494764 - DNA, 58 bp, Artificial
  Synthetic oligonucleotide
tcctccggcccctgaatgcggctaatcctaactgcggagcacatacccttaatccaaa

SEQ ID NO: 494765 - DNA, 59 bp, Artificial
  Synthetic oligonucleotide
tcctctctacactcgtggggaggtatggccgtaagacaaaattgtatgaggcagcccat

SEQ ID NO: 494766 - DNA, 60 bp, Artificial
  Synthetic oligonucleotide
tcctgccgcgttgggtcctccttgtagtgggatccatccggttctgacactgttgagcca

SEQ ID NO: 494767 - DNA, 60 bp, Artificial
  Synthetic oligonucleotide
tcctgggagaaccatccgctgtgacagcagctagtgcagcccaaagacgtggacgcatcg

SEQ ID NO: 494768 - DNA, 50 bp, Artificial
  Synthetic oligonucleotide
tcctttatgctgccccactgaatccccttctaccccttcaggatggtacc

SEQ ID NO: 494769 - DNA, 52 bp, Artificial
  Synthetic oligonucleotide
tcgaaccaaatgtacctcgagaattaagaacgtacactatatttggtcaaca

SEQ ID NO: 494770 - DNA, 58 bp, Artificial
  Synthetic oligonucleotide
tcgagaaacctagtaccaccatgaaggttgcgcagcgtttcgctccgcacaaccccag

SEQ ID NO: 494771 - DNA, 60 bp, Artificial
  Synthetic oligonucleotide
tcgcactcacatcaatacttagcccttggtgtgcttcggacatctgcaacagggaaggta

SEQ ID NO: 494772 - DNA, 59 bp, Artificial
  Synthetic oligonucleotide
tcgcactcctcccgcctacagaccaccaaatgcacctatcttatccacacttccggaaa

SEQ ID NO: 494773 - DNA, 58 bp, Artificial
  Synthetic oligonucleotide
tcgcatgcccgaccccgcttattactcctgtgcctactcctacttagcgtaggagtag

SEQ ID NO: 494774 - DNA, 60 bp, Artificial
  Synthetic oligonucleotide
tcgctcagctattccccctagtagacctggcagatgaggctagaaataccccactggtaa

SEQ ID NO: 494775 - DNA, 58 bp, Artificial
  Synthetic oligonucleotide
tcggaacaatggtaatggaactaattcggatgataaagcgagggattgacgatcggat

SEQ ID NO: 494776 - DNA, 60 bp, Artificial
  Synthetic oligonucleotide
tcggaacacattttgctcagtacagaaacgtgtgggatgtggactattcggcctttgatg

SEQ ID NO: 494777 - DNA, 55 bp, Artificial
  Synthetic oligonucleotide
tcggaggacaagggtggcgactccttgcgcctatcacggcctatgcccaacagac

SEQ ID NO: 494778 - DNA, 58 bp, Artificial
  Synthetic oligonucleotide
tcggatgttcctagcaatgataacatacataacaagaaaccaacccgaatggtttaga

SEQ ID NO: 494779 - DNA, 59 bp, Artificial
  Synthetic oligonucleotide
tcggcaagaggcgagagcggcgactggtgagtacgccgaattttatttgactagcggtg

SEQ ID NO: 494780 - DNA, 60 bp, Artificial
  Synthetic oligonucleotide
tcggctcgatatgtttcgagtattacactacgacaaagatctctcagggtgagatagacg

SEQ ID NO: 494781 - DNA, 52 bp, Artificial
  Synthetic oligonucleotide
tcgggtatcgattgtataaaatacccaacaggacaacttatcacacacggga

SEQ ID NO: 494782 - DNA, 55 bp, Artificial
  Synthetic oligonucleotide
tcggtcagttaccgcacggacctggtcgaaaacaacgagggataggagcccctga

SEQ ID NO: 494783 - DNA, 53 bp, Artificial
  Synthetic oligonucleotide
tcgtaatgggtaactctgtggcggaaccgactactttgggtgtccgtgtttcc

SEQ ID NO: 494784 - DNA, 56 bp, Artificial
  Synthetic oligonucleotide
tcgtcggccggaggccaactattttactcccgcccggttgtctcagccaatggcga

SEQ ID NO: 494785 - DNA, 55 bp, Artificial
  Synthetic oligonucleotide
tcgtgttgaatccatcggtagcggccacgctaggcttcggctctttcatgtcgcg

SEQ ID NO: 494786 - DNA, 55 bp, Artificial
  Synthetic oligonucleotide
tctaaaactgcccgagcttcccatagggtgggttagagtcgtgtgcgtacgccac

SEQ ID NO: 494787 - DNA, 54 bp, Artificial
  Synthetic oligonucleotide
tctacagaataaaattagttcacttgtgtcttcagtcgaatggtacctgaaatc

SEQ ID NO: 494788 - DNA, 53 bp, Artificial
  Synthetic oligonucleotide
tctacagcatcttataagcttaagttctcaggatggcagtctgaaggaaagcc

SEQ ID NO: 494789 - DNA, 60 bp, Artificial
  Synthetic oligonucleotide
tctacgtgctctacgccttgcgtagacactatgagggggttgagctggacacttacacca

SEQ ID NO: 494790 - DNA, 60 bp, Artificial
  Synthetic oligonucleotide
tctactcggatgatcttgtgctgtatgccgagtcccccaccatgccaaactaccactggt

SEQ ID NO: 494791 - DNA, 52 bp, Artificial
  Synthetic oligonucleotide
tctagtcttaatgattcagtggcaatgaggcagacgtttgggaacctgtata

SEQ ID NO: 494792 - DNA, 60 bp, Artificial
  Synthetic oligonucleotide
tctccgaagcaatgcgagagctgccgcccttgaagagtcgctgggaggaagagcctggct

SEQ ID NO: 494793 - DNA, 60 bp, Artificial
  Synthetic oligonucleotide
tctcctacacccacgcctcgcgttctgagagcctcggtatgcagtgtgaccactagcgct

SEQ ID NO: 494794 - DNA, 55 bp, Artificial
  Synthetic oligonucleotide
tctcgacgaatgcacggcacttggtctagacacccctcacatctgggcggacggg

SEQ ID NO: 494795 - DNA, 60 bp, Artificial
  Synthetic oligonucleotide
tctcgcgacttgctcgtgtcatccactaccgcccagggttgtgacacaattgcccgctgt

SEQ ID NO: 494796 - DNA, 57 bp, Artificial
  Synthetic oligonucleotide
tctcggaagaaggtccctgcttactggaggttggaagaccgtgtcaggccacgcaag

SEQ ID NO: 494797 - DNA, 57 bp, Artificial
  Synthetic oligonucleotide
tctcgggaccatcccgggcgattgtggctgcccctatgtctacaagaagggaaacac

SEQ ID NO: 494798 - DNA, 58 bp, Artificial
  Synthetic oligonucleotide
tctctggcagtccgtattttcttagtcagcgaacttaagaggggccgcaatacggcag

SEQ ID NO: 494799 - DNA, 55 bp, Artificial
  Synthetic oligonucleotide
tctctggcgaaccggagtccgtgaactccgttgtggcgaacactaccaggcgctc

SEQ ID NO: 494800 - DNA, 54 bp, Artificial
  Synthetic oligonucleotide
tctgacactcgttgacctgtgtttttggagtgcaatctttttcaccacaagtct

SEQ ID NO: 494801 - DNA, 60 bp, Artificial
  Synthetic oligonucleotide
tctgatatccggcagatagtgtgtgccgaccccatttacaccaggataggggcgtgctta

SEQ ID NO: 494802 - DNA, 53 bp, Artificial
  Synthetic oligonucleotide
tctgctcaaagtgccctactttgtgcgcgtccaaggcctactccggatctgtg

SEQ ID NO: 494803 - DNA, 58 bp, Artificial
  Synthetic oligonucleotide
tctggaatgttcgactcgtccgtcctctgtgagtgctatgacgcgggctgtgcttggt

SEQ ID NO: 494804 - DNA, 60 bp, Artificial
  Synthetic oligonucleotide
tctgggcgggaccggggagtggccagccctcagatgctgcatataagcagctgcttttcg

SEQ ID NO: 494805 - DNA, 55 bp, Artificial
  Synthetic oligonucleotide
tctgtggcgagagcacactttacacccgtacttggtcggaggttgatgccgtctc

SEQ ID NO: 494806 - DNA, 53 bp, Artificial
  Synthetic oligonucleotide
tctgtttccccggtgaacttgcatagactgtgcccacggttgaaagcgagcga

SEQ ID NO: 494807 - DNA, 55 bp, Artificial
  Synthetic oligonucleotide
tcttccggcgagtctccgaggacccaggtcctggtacaataggatccctggctac

SEQ ID NO: 494808 - DNA, 57 bp, Artificial
  Synthetic oligonucleotide
tcttgctaccccaatgatgggaaagtagaatgcgtatgtagagacaattggacagga

SEQ ID NO: 494809 - DNA, 58 bp, Artificial
  Synthetic oligonucleotide
tcttgggctttcgcaaaatacctatgggagtgggcctcagtccgtttctcttggctca

SEQ ID NO: 494810 - DNA, 49 bp, Artificial
  Synthetic oligonucleotide
tcttggggcccgaacgacccccggcgaaggtcccgcaatttgggtaagg

SEQ ID NO: 494811 - DNA, 51 bp, Artificial
  Synthetic oligonucleotide
tcttgtcggggaatgtcatgtgaataggtgtctgtcttggagggacaatga

SEQ ID NO: 494812 - DNA, 53 bp, Artificial
  Synthetic oligonucleotide
tcttgtgtcttccgtgtactccgcgactggtatgtctgccgcagctcgaaact

SEQ ID NO: 494813 - DNA, 57 bp, Artificial
  Synthetic oligonucleotide
tctttggtaggaatagaccctttcaaactgcttcaaaacagccaagtatacagccta

SEQ ID NO: 494814 - DNA, 58 bp, Artificial
  Synthetic oligonucleotide
tcttttcgcggtctccccgtttgtgccttctcatctgccggcccgtgtgcacttcgct

SEQ ID NO: 494815 - DNA, 60 bp, Artificial
  Synthetic oligonucleotide
tcttttggagtgtggattcgcactcctacagcttatagaccaccaaatgcccctatctta

SEQ ID NO: 494816 - DNA, 54 bp, Artificial
  Synthetic oligonucleotide
tgaaacagattcttactcgtgaactgccattttcctcggatttaatcaactatg

SEQ ID NO: 494817 - DNA, 52 bp, Artificial
  Synthetic oligonucleotide
tgaaagggactttccgctggggactttccaggggaggtgtggtttgggcgga

SEQ ID NO: 494818 - DNA, 59 bp, Artificial
  Synthetic oligonucleotide
tgaacgggactggtttcactaagacatgcggagcaccaccttgccgcattaggagggac

SEQ ID NO: 494819 - DNA, 53 bp, Artificial
  Synthetic oligonucleotide
tgaacggggtagtaaaactgctaacaaaaccctgggatgtgattccaatggtg

SEQ ID NO: 494820 - DNA, 60 bp, Artificial
  Synthetic oligonucleotide
tgaagaccctcactactggttccctcatcgcccgagcatcagggttactccatgagaggc

SEQ ID NO: 494821 - DNA, 58 bp, Artificial
  Synthetic oligonucleotide
tgaagagccccgtgtgctcactttgagtcctccggcccctgaatgtggctaaccttaa

SEQ ID NO: 494822 - DNA, 54 bp, Artificial
  Synthetic oligonucleotide
tgaatccacccacggtcgggtccgttggtcgtatgcaccggatggctgcactca

SEQ ID NO: 494823 - DNA, 56 bp, Artificial
  Synthetic oligonucleotide
tgaatctaccaacagggttcgacaaaccatacgtccgcctagaggacgagacaccc

SEQ ID NO: 494824 - DNA, 54 bp, Artificial
  Synthetic oligonucleotide
tgaatgatcacattagagttgctgttgcacattactcagctcaattagccactt

SEQ ID NO: 494825 - DNA, 59 bp, Artificial
  Synthetic oligonucleotide
tgaatttagcagatcgttcctgaagaagtgtgcagatcacggaaagaccatcttgagaa

SEQ ID NO: 494826 - DNA, 54 bp, Artificial
  Synthetic oligonucleotide
tgacaatgacttgagtagttcgtgcttaaagttggctagtcaagtgaaagactc

SEQ ID NO: 494827 - DNA, 59 bp, Artificial
  Synthetic oligonucleotide
tgacaggctaaggatgcccttcaggtaccccgaggtaacacgcgacactcgggatctga

SEQ ID NO: 494828 - DNA, 52 bp, Artificial
  Synthetic oligonucleotide
tgacagtctcctagcacgtagacacatggcccgcgagctacatccggagttt

SEQ ID NO: 494829 - DNA, 55 bp, Artificial
  Synthetic oligonucleotide
tgacatcgtggtccacgctgaaaggagagatcgcagtcaaccgtttaggccgggg

SEQ ID NO: 494830 - DNA, 60 bp, Artificial
  Synthetic oligonucleotide
tgaccattggtgagtgccccaaatatgtaaaatcggagagattagtcttagcaacaggat

SEQ ID NO: 494831 - DNA, 50 bp, Artificial
  Synthetic oligonucleotide
tgacccagtgtacgggaaagtgttcaacccccccaggacgaaccttcccg

SEQ ID NO: 494832 - DNA, 51 bp, Artificial
  Synthetic oligonucleotide
tgacccgagacctctccatcaatggtccagctgcccgggtgcaatcagcac

SEQ ID NO: 494833 - DNA, 56 bp, Artificial
  Synthetic oligonucleotide
tgaccctaagccactgttccggaggttcacacgtgtttggtggtacaacgtggaca

SEQ ID NO: 494834 - DNA, 58 bp, Artificial
  Synthetic oligonucleotide
tgaccctatcactcattggggccacggacaaaatcagtggcccctatcgtgtccccag

SEQ ID NO: 494835 - DNA, 58 bp, Artificial
  Synthetic oligonucleotide
tgactaatccagtggacgcctatggaaccctggtcaggaccctcaccggggctgctac

SEQ ID NO: 494836 - DNA, 60 bp, Artificial
  Synthetic oligonucleotide
tgaggcgactacaccagtggataagctcggattgcaccactccgtgctccggttcctggc

SEQ ID NO: 494837 - DNA, 54 bp, Artificial
  Synthetic oligonucleotide
tgaggtgtcgttcaaagtgggactacacgattacccggtagggtcgcaattacc

SEQ ID NO: 494838 - DNA, 55 bp, Artificial
  Synthetic oligonucleotide
tgagtggtaccctccagattccatttcgccctaatcatcgatggggagatgttag

SEQ ID NO: 494839 - DNA, 51 bp, Artificial
  Synthetic oligonucleotide
tgataccacctggtcaagtacagttgaatagaaaaccactggagctatttt

SEQ ID NO: 494840 - DNA, 60 bp, Artificial
  Synthetic oligonucleotide
tgatacccgctgctttgactctacagtcactgagagcgatatccgtacggaggaggcaat

SEQ ID NO: 494841 - DNA, 60 bp, Artificial
  Synthetic oligonucleotide
tgatcacgaaccagtgattggcttgtcgtaacgcgcaagtctgtggcggaacccgactac

SEQ ID NO: 494842 - DNA, 54 bp, Artificial
  Synthetic oligonucleotide
tgatctactcacggaggaccctccgccttaccgggacccagggccaccctctcc

SEQ ID NO: 494843 - DNA, 59 bp, Artificial
  Synthetic oligonucleotide
tgatgaatctggccacctgggtgggcagtaatttggaagacccagcttccagggaatta

SEQ ID NO: 494844 - DNA, 60 bp, Artificial
  Synthetic oligonucleotide
tgatgcaatgcttggtacacacgtcgtgtgggatttaggtcttcagtcatcatgtcacct

SEQ ID NO: 494845 - DNA, 57 bp, Artificial
  Synthetic oligonucleotide
tgatgcgaacaacctccctgtccaaacggattcacgtttgtcgttctcacttggtgg

SEQ ID NO: 494846 - DNA, 60 bp, Artificial
  Synthetic oligonucleotide
tgatgcgcacctgtgccagggaccgggagcggtctatagataaggtcgtgtcccaactcg

SEQ ID NO: 494847 - DNA, 60 bp, Artificial
  Synthetic oligonucleotide
tgatgctcaagatggagtctactcagcagatggctagttcgattattaacacttctttcg

SEQ ID NO: 494848 - DNA, 55 bp, Artificial
  Synthetic oligonucleotide
tgattactctacagctgccttctggaacggtatccggtgcgacagtgcgacggcc

SEQ ID NO: 494849 - DNA, 60 bp, Artificial
  Synthetic oligonucleotide
tgattggcagattctgtgcacaaatgcactcgaacaacggaccgcagattggctcggcgg

SEQ ID NO: 494850 - DNA, 55 bp, Artificial
  Synthetic oligonucleotide
tgcaacctcacctctgttcacaccatccgggagaccggaccccgacaattcgccc

SEQ ID NO: 494851 - DNA, 60 bp, Artificial
  Synthetic oligonucleotide
tgcaagattcaggatcaggagtaaacatagtaacagactcgcagtatgcattaggaatca

SEQ ID NO: 494852 - DNA, 58 bp, Artificial
  Synthetic oligonucleotide
tgcatacagggtgattgctactgggtgatgactgacggccctgccaataggcaggcgc

SEQ ID NO: 494853 - DNA, 59 bp, Artificial
  Synthetic oligonucleotide
tgcattacggcagatgcacgcgcatgggacattcaaggcgtagccgacggtcaatttct

SEQ ID NO: 494854 - DNA, 57 bp, Artificial
  Synthetic oligonucleotide
tgccctaactcgagtattgtgtacgagacggccgataccattctacactctccgggg

SEQ ID NO: 494855 - DNA, 55 bp, Artificial
  Synthetic oligonucleotide
tgccctgcgaaggactcctgtgaggttagcagctgcctattctgtgtgcacggac

SEQ ID NO: 494856 - DNA, 56 bp, Artificial
  Synthetic oligonucleotide
tgccgcatccccaacactagccgccaccctccggtcggtaaagaatacgcggctcc

SEQ ID NO: 494857 - DNA, 55 bp, Artificial
  Synthetic oligonucleotide
tgcctcttcgcaacccctacgcgccacctagaagaccgtggtttcctaggaccga

SEQ ID NO: 494858 - DNA, 60 bp, Artificial
  Synthetic oligonucleotide
tgccttctcatcggccgcaccgtgtgcacttcgcttcacctctgcacgtcgcatggagac

SEQ ID NO: 494859 - DNA, 54 bp, Artificial
  Synthetic oligonucleotide
tgcgatatgtttcgagagttacgattaccagcgagatatctcacgcgctgtttc

SEQ ID NO: 494860 - DNA, 55 bp, Artificial
  Synthetic oligonucleotide
tgcgccggcagtataatctgtctacgtccccgcttacgtcatccgttgctgcggg

SEQ ID NO: 494861 - DNA, 60 bp, Artificial
  Synthetic oligonucleotide
tgcgcgaggggcctatttattcgatcatatgggctctttctcgcgggctgtcaaggaacg

SEQ ID NO: 494862 - DNA, 55 bp, Artificial
  Synthetic oligonucleotide
tgcgctcccgcatggctggcccctaatggtcctagaccttaaggattgcttcttc

SEQ ID NO: 494863 - DNA, 60 bp, Artificial
  Synthetic oligonucleotide
tgcggctgacacacaagccgcatgcctgagtgccacccgagacttactcatgactttagc

SEQ ID NO: 494864 - DNA, 53 bp, Artificial
  Synthetic oligonucleotide
tgcgggaccaggaaggagatttgtgtggtgtagtctaccacaaggctggattt

SEQ ID NO: 494865 - DNA, 59 bp, Artificial
  Synthetic oligonucleotide
tgcgggggcgagactggttgtgcttgccaccgctacccctccgggctccgtcactgtgc

SEQ ID NO: 494866 - DNA, 54 bp, Artificial
  Synthetic oligonucleotide
tgcggtggttggggcaggagtgcacctgtttcttggaaccagctgagggcttaa

SEQ ID NO: 494867 - DNA, 60 bp, Artificial
  Synthetic oligonucleotide
tgcgtgtggtggcttcagtacttcctgactagagcagaagcgcaactgcacgtgtgggtt

SEQ ID NO: 494868 - DNA, 55 bp, Artificial
  Synthetic oligonucleotide
tgcgttgcgctcagcacccgaccccggggtgtagcttaggctgatgagtctggac

SEQ ID NO: 494869 - DNA, 55 bp, Artificial
  Synthetic oligonucleotide
tgctaaggcccaagatctcgggaccatcccgggtgattgtggttgcccctatgtc

SEQ ID NO: 494870 - DNA, 57 bp, Artificial
  Synthetic oligonucleotide
tgctagtcttgaacccgtctgtcgccgccaccctaggttttggggcgtacatgtcca

SEQ ID NO: 494871 - DNA, 60 bp, Artificial
  Synthetic oligonucleotide
tgctcagcagacgaggggcctcttgggatgcataattaccagcttgaccggccgggacaa

SEQ ID NO: 494872 - DNA, 51 bp, Artificial
  Synthetic oligonucleotide
tgctcggtctccattaacaggcatactactgttaaagaaccctccctattt

SEQ ID NO: 494873 - DNA, 58 bp, Artificial
  Synthetic oligonucleotide
tgctctcttgtctgactgtacccgcgtcggcttaccaagtacgcaactccacgggcct

SEQ ID NO: 494874 - DNA, 50 bp, Artificial
  Synthetic oligonucleotide
tgctctgaactccccaaatgttgaagcgtgcgggtatagtgatagggtgc

SEQ ID NO: 494875 - DNA, 60 bp, Artificial
  Synthetic oligonucleotide
tgctgctcaatgtcttattcctggacaggcgcacttgtcaccccgtgcgccgcggaagaa

SEQ ID NO: 494876 - DNA, 55 bp, Artificial
  Synthetic oligonucleotide
tgcttaggcgctggcagatagtgggcgactttcagtgggctaatacagtaacccc

SEQ ID NO: 494877 - DNA, 55 bp, Artificial
  Synthetic oligonucleotide
tgcttcggtggttgcccctgacgcgcctttctggattaacgcaactctgcaactt

SEQ ID NO: 494878 - DNA, 59 bp, Artificial
  Synthetic oligonucleotide
tgcttctcattgttcaggcgcttagggataacctggaacctgggaccttcgatcttgga

SEQ ID NO: 494879 - DNA, 60 bp, Artificial
  Synthetic oligonucleotide
tgctttgggtgcactcattcttggtgttttgtctgccagcagccggcgtcctctcactag

SEQ ID NO: 494880 - DNA, 53 bp, Artificial
  Synthetic oligonucleotide
tggaaagtcactaacatggctaaccagaattcgctcctcgccactcttggtac

SEQ ID NO: 494881 - DNA, 60 bp, Artificial
  Synthetic oligonucleotide
tggaactccccactgaacacaaaggcgtgtacggcagtctcatggcttcgtacgcctaca

SEQ ID NO: 494882 - DNA, 58 bp, Artificial
  Synthetic oligonucleotide
tggaatcgatttgactcatctgagtgtgcctaaagttcagcccaaaacgttggaggcg

SEQ ID NO: 494883 - DNA, 54 bp, Artificial
  Synthetic oligonucleotide
tggacacactagtggaatacaacccgaggacaccatagaaacaagatttgtgca

SEQ ID NO: 494884 - DNA, 60 bp, Artificial
  Synthetic oligonucleotide
tggacatttgacagccgcctggcactaagacacatagccagagagaaacatccggagttc

SEQ ID NO: 494885 - DNA, 55 bp, Artificial
  Synthetic oligonucleotide
tggaccttcaggcgaccggacctggctcctggacactttcgagtggacccaggaa

SEQ ID NO: 494886 - DNA, 58 bp, Artificial
  Synthetic oligonucleotide
tggacgggtcatgggtctccatccaaaatcacgaagaggccaagtggtgccctcccga

SEQ ID NO: 494887 - DNA, 55 bp, Artificial
  Synthetic oligonucleotide
tggagattgtggtacgccatgatggcaacctaacctgggtacccaacggggcacc

SEQ ID NO: 494888 - DNA, 52 bp, Artificial
  Synthetic oligonucleotide
tggatggaagttaacgtatgtaggctataatggaaagaacacacgaggccac

SEQ ID NO: 494889 - DNA, 55 bp, Artificial
  Synthetic oligonucleotide
tggattccgtggcgtctcctgaaacgaggtgcatgcccaagacccggagacagcg

SEQ ID NO: 494890 - DNA, 55 bp, Artificial
  Synthetic oligonucleotide
tggatttgagagtatcactgcaaggaacgagtttgagcattaagcaaactccctc

SEQ ID NO: 494891 - DNA, 60 bp, Artificial
  Synthetic oligonucleotide
tggcaactagattgtacacacttagaaggaaaagttatcctggtagcagttcatgtagcc

SEQ ID NO: 494892 - DNA, 54 bp, Artificial
  Synthetic oligonucleotide
tggcaactgggatgcgaaatgtacctgagaaacagaccaggggtctgttcggtg

SEQ ID NO: 494893 - DNA, 55 bp, Artificial
  Synthetic oligonucleotide
tggcacgctcttcacccgtgttgactcggaaaactaaccgggtcatccggatccc

SEQ ID NO: 494894 - DNA, 58 bp, Artificial
  Synthetic oligonucleotide
tggcccacttctgccgcaaatttcaacccctctatgctacggaagcgaagagggtgta

SEQ ID NO: 494895 - DNA, 54 bp, Artificial
  Synthetic oligonucleotide
tggcccattggggagtctcccaagggagtggaagaaggttccattggaaaggtc

SEQ ID NO: 494896 - DNA, 54 bp, Artificial
  Synthetic oligonucleotide
tggctaagtcttcatataagcctgggcggattcgtggaaagcgcgtacagcaag

SEQ ID NO: 494897 - DNA, 60 bp, Artificial
  Synthetic oligonucleotide
tggctactgatgtgcctgaactcgagcgaacgaccccagtcatgcagaaaaaagttggac

SEQ ID NO: 494898 - DNA, 55 bp, Artificial
  Synthetic oligonucleotide
tggctaggcgacatctagcagaggggaaggtggacactggagtggccgtgtcgag

SEQ ID NO: 494899 - DNA, 60 bp, Artificial
  Synthetic oligonucleotide
tggctgcttatggtgacaatcaaagaattgttaccatatagctattggattggccatccg

SEQ ID NO: 494900 - DNA, 59 bp, Artificial
  Synthetic oligonucleotide
tgggagactgtaaaaattcaatggtcacaagaccccacaatgttgtacaataagatgga

SEQ ID NO: 494901 - DNA, 56 bp, Artificial
  Synthetic oligonucleotide
tgggagagttgagctcacagggaccagacgggtgaccacggcttctgcggcccaac

SEQ ID NO: 494902 - DNA, 56 bp, Artificial
  Synthetic oligonucleotide
tgggcagggttgtcttgtccgggaagccggcagttatacctgacagggaggttctc

SEQ ID NO: 494903 - DNA, 59 bp, Artificial
  Synthetic oligonucleotide
tgggctatgtgccattaggctctggacagggggtgcgtttggggactcgggtgactaca

SEQ ID NO: 494904 - DNA, 56 bp, Artificial
  Synthetic oligonucleotide
tgggctgtacgcctcccatgggcgaacactggggtaagggcactgtgtgtgcacgc

SEQ ID NO: 494905 - DNA, 54 bp, Artificial
  Synthetic oligonucleotide
tggggaggcatactgcgcaaacgcggaagtaagccccgtcacgtgacggtcacg

SEQ ID NO: 494906 - DNA, 60 bp, Artificial
  Synthetic oligonucleotide
tggggctaaggaggtcgcactcagctactcaaccggtgcacttgccagctgcatgggtct

SEQ ID NO: 494907 - DNA, 55 bp, Artificial
  Synthetic oligonucleotide
tgggtggtgcttcaagctagtaccagttgacccaagggaagtagaagaggccagc

SEQ ID NO: 494908 - DNA, 56 bp, Artificial
  Synthetic oligonucleotide
tgggttacagtttattaaggggttcctgtgtggagagatgcagataccaccctatt

SEQ ID NO: 494909 - DNA, 58 bp, Artificial
  Synthetic oligonucleotide
tggtagaatctattgcgtgcagtgtgccgtaagcccgaggtgcaattactgttccgcg

SEQ ID NO: 494910 - DNA, 60 bp, Artificial
  Synthetic oligonucleotide
tggtagcatacatgctagaaagagaattggtccgcaaaacgaggttcctcccagtggctg

SEQ ID NO: 494911 - DNA, 51 bp, Artificial
  Synthetic oligonucleotide
tggtcacatttaaaggtcagccttataattgggaacagcagtaccttgtca

SEQ ID NO: 494912 - DNA, 52 bp, Artificial
  Synthetic oligonucleotide
tggtcactcccccgaactgccctaacgagtgtgcactagtgtgcttcgcttc

SEQ ID NO: 494913 - DNA, 55 bp, Artificial
  Synthetic oligonucleotide
tggtccactgaatacaatgacgggtcgctcttcgccacgaacactgacctgccgg

SEQ ID NO: 494914 - DNA, 51 bp, Artificial
  Synthetic oligonucleotide
tggtctacaacccgaaatgacaattccacggtaaacacacacattaataca

SEQ ID NO: 494915 - DNA, 58 bp, Artificial
  Synthetic oligonucleotide
tggtgaggcacctcgcagggggtaggtacgtccagatggcgctattagcccttggtag

SEQ ID NO: 494916 - DNA, 60 bp, Artificial
  Synthetic oligonucleotide
tggtgccagacttgggcacgaaactgcattcgctaccctggtcgtgaaatggctagcctt

SEQ ID NO: 494917 - DNA, 55 bp, Artificial
  Synthetic oligonucleotide
tggtggcgagggtgactacacagtatctcgtgtctcgcaggggacgccctttggg

SEQ ID NO: 494918 - DNA, 55 bp, Artificial
  Synthetic oligonucleotide
tggttcgcgagcaacggattcacggtgcagtcggaggccctgctcctcaggtaca

SEQ ID NO: 494919 - DNA, 59 bp, Artificial
  Synthetic oligonucleotide
tggttgcacgcagaccacccacggggactgtgggctaccgttgtatgactctagtggga

SEQ ID NO: 494920 - DNA, 53 bp, Artificial
  Synthetic oligonucleotide
tggtttaccgacagaattgatttcgtcggccgggggtcagctgttttactccc

SEQ ID NO: 494921 - DNA, 50 bp, Artificial
  Synthetic oligonucleotide
tgtactcccctgtcttcgagtacttgtcaggtgacagacaagtagaagag

SEQ ID NO: 494922 - DNA, 55 bp, Artificial
  Synthetic oligonucleotide
tgtagtgattaccgacagagtcgtaatgcagcggccttaattgcgggctgtgggc

SEQ ID NO: 494923 - DNA, 55 bp, Artificial
  Synthetic oligonucleotide
tgtcagacaacttccggattcgacgtcacatatacgctgcctgacggcactactc

SEQ ID NO: 494924 - DNA, 55 bp, Artificial
  Synthetic oligonucleotide
tgtccagtcagtatcctagatattaagcagggacctaaggaaccattccgagact

SEQ ID NO: 494925 - DNA, 55 bp, Artificial
  Synthetic oligonucleotide
tgtccccatccacagggcccaccgggcgctagcacactggtatctcggtaccttt

SEQ ID NO: 494926 - DNA, 58 bp, Artificial
  Synthetic oligonucleotide
tgtcggtgaatcctcccctgagaggcctcttcctaggcccggagtctacctccatctg

SEQ ID NO: 494927 - DNA, 59 bp, Artificial
  Synthetic oligonucleotide
tgtcgtgcttcatatctaaagtatttctaaggctagtgattcctcttaggacttctgcc

SEQ ID NO: 494928 - DNA, 60 bp, Artificial
  Synthetic oligonucleotide
tgtcgtgtgctgctcaatgtcttactcctggacaggcgcacttatcaccccgtgtgccgc

SEQ ID NO: 494929 - DNA, 60 bp, Artificial
  Synthetic oligonucleotide
tgtctagtttgctttcagacaaaaggcttaggcatttactatggcaggaagaagcggaga

SEQ ID NO: 494930 - DNA, 60 bp, Artificial
  Synthetic oligonucleotide
tgtgagcagattgcagattcacggcatcggtctcacagacaaatggcaactatcaccaac

SEQ ID NO: 494931 - DNA, 60 bp, Artificial
  Synthetic oligonucleotide
tgtgagcagattgctgactcacagcatcggtctcacagacaaatggtgactaccaccaac

SEQ ID NO: 494932 - DNA, 51 bp, Artificial
  Synthetic oligonucleotide
tgtgatactaagtgtcaaactccagtgggtgagataaactccagtatgccc

SEQ ID NO: 494933 - DNA, 59 bp, Artificial
  Synthetic oligonucleotide
tgtgcgcgtatgcgagaagatggccctgtacgacgtggttagcaaactccccctggccg

SEQ ID NO: 494934 - DNA, 55 bp, Artificial
  Synthetic oligonucleotide
tgtgcggtttagtagaataggacaacgggggtctatgtacacacgtagtggtaaa

SEQ ID NO: 494935 - DNA, 57 bp, Artificial
  Synthetic oligonucleotide
tgtgctccttaagcgtgggttactggttagggttgtgggcgagtgctacggcgagaa

SEQ ID NO: 494936 - DNA, 60 bp, Artificial
  Synthetic oligonucleotide
tgtggaagtttgacagacacctagcatctaagcacgtagcccgagagctacatccggagt

SEQ ID NO: 494937 - DNA, 53 bp, Artificial
  Synthetic oligonucleotide
tgtggatagggaacacccataccgaacgtggcagtactggggtagctatcgca

SEQ ID NO: 494938 - DNA, 60 bp, Artificial
  Synthetic oligonucleotide
tgtggattcgcactcctcctgcatataggccaccaaatgcccctatcttatcaacacttc

SEQ ID NO: 494939 - DNA, 54 bp, Artificial
  Synthetic oligonucleotide
tgtggcaggaggtaggacgagcaatgtatgcccctcccattgaaggaaacataa

SEQ ID NO: 494940 - DNA, 55 bp, Artificial
  Synthetic oligonucleotide
tgtggcatgccgcagtggcttgtccggctatatcacctagtccggtcggcctgga

SEQ ID NO: 494941 - DNA, 60 bp, Artificial
  Synthetic oligonucleotide
tgtggcgtctcagaggcctggagattagtagaggtggccctctcgggataggcactactg

SEQ ID NO: 494942 - DNA, 57 bp, Artificial
  Synthetic oligonucleotide
tgtgggccgggtggggcggtagctttgaggtccggctatcgatctctggttctggcg

SEQ ID NO: 494943 - DNA, 56 bp, Artificial
  Synthetic oligonucleotide
tgtgggcgtcacatacgggtactccaccgtagaggaccacgttgccgggcccaaca

SEQ ID NO: 494944 - DNA, 55 bp, Artificial
  Synthetic oligonucleotide
tgtgtgcaggtctccccagtgacaccccaagaggagaagatagtcagttcacagg

SEQ ID NO: 494945 - DNA, 53 bp, Artificial
  Synthetic oligonucleotide
tgtgttcgcgaagaacaaatattggctgagcctcccaaaatacgtagtacagt

SEQ ID NO: 494946 - DNA, 59 bp, Artificial
  Synthetic oligonucleotide
tgttcaatagcacttggtacaaaaatggcactaacacaactagcacacagaccagtgaa

SEQ ID NO: 494947 - DNA, 59 bp, Artificial
  Synthetic oligonucleotide
tgttctgagagattggccagctgccgacccctcaccgattattcccagggctggggccc

SEQ ID NO: 494948 - DNA, 58 bp, Artificial
  Synthetic oligonucleotide
tgttctgagaggattcctcattctgggcaaagaagacaagagatatgggccagcatta

SEQ ID NO: 494949 - DNA, 58 bp, Artificial
  Synthetic oligonucleotide
tgttggcttatggtcaatcgccatttaattccgagtccgagtgtatttcactcggtcc

SEQ ID NO: 494950 - DNA, 55 bp, Artificial
  Synthetic oligonucleotide
tgttgtagcctgccagaagtggagacgctagttgcaaggcaggaggaggcctcca

SEQ ID NO: 494951 - DNA, 58 bp, Artificial
  Synthetic oligonucleotide
tgtttcgctccgcacaaccccagtgtagatcaggtcgatgagtcaccgcattccccac

SEQ ID NO: 494952 - DNA, 55 bp, Artificial
  Synthetic oligonucleotide
tgtttgggagtcggctaatccattctgtggcgagagcacactttacacccggact

SEQ ID NO: 494953 - DNA, 60 bp, Artificial
  Synthetic oligonucleotide
tgtttgtgagctcatacgcggggcttacccaaagattcagacgaccagccgtgtgttgcg

SEQ ID NO: 494954 - DNA, 52 bp, Artificial
  Synthetic oligonucleotide
tgttttgtggctctctcttaccgctgctgagtatgaccagactacgtatggg

SEQ ID NO: 494955 - DNA, 57 bp, Artificial
  Synthetic oligonucleotide
ttaaaacagcctgtgggttgcacccacccacagggcccactgggcgctagcacaccg

SEQ ID NO: 494956 - DNA, 54 bp, Artificial
  Synthetic oligonucleotide
ttaaacatggtccgtgcatcaagacaaaagcgtgcctctgaggatgatttgtat

SEQ ID NO: 494957 - DNA, 56 bp, Artificial
  Synthetic oligonucleotide
ttaagagttcgggaccaacgggggaacgtgctactgtcacctgaagaagtcagcga

SEQ ID NO: 494958 - DNA, 52 bp, Artificial
  Synthetic oligonucleotide
ttaaggaaaggctgtcccaatgaagtaataccttttgcttatggagctgtgc

SEQ ID NO: 494959 - DNA, 59 bp, Artificial
  Synthetic oligonucleotide
ttaatccaggtccgttcgcacagactggatatgctccagttaattggggacacggtgaa

SEQ ID NO: 494960 - DNA, 51 bp, Artificial
  Synthetic oligonucleotide
ttaatgctattcgagattctgaagaaggacaatttctgattgcatcctatt

SEQ ID NO: 494961 - DNA, 60 bp, Artificial
  Synthetic oligonucleotide
ttacatacagttcaagagcaaacaccgtattgaaccagtatgtctgttagtgcatggcag

SEQ ID NO: 494962 - DNA, 55 bp, Artificial
  Synthetic oligonucleotide
ttacatctggtccactgaatacaatgacgggtcactcttcgccacgaacactgac

SEQ ID NO: 494963 - DNA, 51 bp, Artificial
  Synthetic oligonucleotide
ttacatgttggcgttgttaaatatggcgattctcaattaagccctactgtt

SEQ ID NO: 494964 - DNA, 51 bp, Artificial
  Synthetic oligonucleotide
ttacccctggacgccggacccgtccgatgttttagtgtttgtcccgtacga

SEQ ID NO: 494965 - DNA, 54 bp, Artificial
  Synthetic oligonucleotide
ttaccgttaatccaggaccattcgcgcaaacaaattacgctccagttaattggg

SEQ ID NO: 494966 - DNA, 55 bp, Artificial
  Synthetic oligonucleotide
ttacctcagctgcctgcacccttactatcagttaatggagatgccgggttgtccc

SEQ ID NO: 494967 - DNA, 52 bp, Artificial
  Synthetic oligonucleotide
ttacgccttccggtgctcttcagaggtggcactctcgcgaggaggtcttatt

SEQ ID NO: 494968 - DNA, 58 bp, Artificial
  Synthetic oligonucleotide
ttactgattgagtgtggagctcctagatctcagggacaacggagtgacctgtctactg

SEQ ID NO: 494969 - DNA, 50 bp, Artificial
  Synthetic oligonucleotide
ttactgcaattagcggtggctcccgacactctggccaattggtgctaatg

SEQ ID NO: 494970 - DNA, 60 bp, Artificial
  Synthetic oligonucleotide
ttagctttacagctaccggttaacccacaggtagtgtgggatgtgccgcgcagctctatc

SEQ ID NO: 494971 - DNA, 51 bp, Artificial
  Synthetic oligonucleotide
ttaggagtaggagcactggtagtagcatttatcttagcaatagttgtgtgg

SEQ ID NO: 494972 - DNA, 60 bp, Artificial
  Synthetic oligonucleotide
ttaggcaagctgtgctatgttggggtgagttgatgaatctggctacctgggtgggaagta

SEQ ID NO: 494973 - DNA, 58 bp, Artificial
  Synthetic oligonucleotide
ttagtgggagtcgtgacattgtatttgggagccatggtgcaggctgatagtggttgtg

SEQ ID NO: 494974 - DNA, 54 bp, Artificial
  Synthetic oligonucleotide
ttataagcgtcggagttatagtatacggagtgccttttaactacgaataccgta

SEQ ID NO: 494975 - DNA, 60 bp, Artificial
  Synthetic oligonucleotide
ttataggtctggcactcttgaccttgtcaccacactataaagtgttcctcgctaagctca

SEQ ID NO: 494976 - DNA, 59 bp, Artificial
  Synthetic oligonucleotide
ttatcaacctggaagatggtttatgcgagccgctcaagttgttacaccagtggtttgtg

SEQ ID NO: 494977 - DNA, 60 bp, Artificial
  Synthetic oligonucleotide
ttatcggaactgacaactctgttgtcctctctcgcaaatacacctcctttccatggctgc

SEQ ID NO: 494978 - DNA, 58 bp, Artificial
  Synthetic oligonucleotide
ttatgaaacgcaggttcggtaatacaatgggctcgcgcattgttgaagcttaccgacg

SEQ ID NO: 494979 - DNA, 60 bp, Artificial
  Synthetic oligonucleotide
ttatgcccagtatcgtgttgtccgcgccaccattcggtatcgccccttggtgccgaatgc

SEQ ID NO: 494980 - DNA, 55 bp, Artificial
  Synthetic oligonucleotide
ttattgggaacgctataagtggttatcagctgtagcccgttacgtcccagcggtg

SEQ ID NO: 494981 - DNA, 57 bp, Artificial
  Synthetic oligonucleotide
ttcaacactgttcccgttcagacccaggataacgcggaggctcaccaagccaaacag

SEQ ID NO: 494982 - DNA, 59 bp, Artificial
  Synthetic oligonucleotide
ttcacaatggttgggcggagggcaacagctatcctaaggaaagcaactagaaggctgat

SEQ ID NO: 494983 - DNA, 52 bp, Artificial
  Synthetic oligonucleotide
ttcacggaggctatgactaggtactctgccccccccggggacccgccccaac

SEQ ID NO: 494984 - DNA, 55 bp, Artificial
  Synthetic oligonucleotide
ttcagtactcgagtctttgggcagtaccagcgatgtgcgcagcataggttcgtcc

SEQ ID NO: 494985 - DNA, 60 bp, Artificial
  Synthetic oligonucleotide
ttcattgacaccctgcacttgcggctcctcggacctatacctggtcacgaggcatgccga

SEQ ID NO: 494986 - DNA, 60 bp, Artificial
  Synthetic oligonucleotide
ttcattgcgaattaacgctgcataccacaattgaagccagctgcccaattaaaagctcgt

SEQ ID NO: 494987 - DNA, 53 bp, Artificial
  Synthetic oligonucleotide
ttccaatccatgcgtaaactctccccctaccggaacgggtgcctatacccaac

SEQ ID NO: 494988 - DNA, 58 bp, Artificial
  Synthetic oligonucleotide
ttccactacccaatctaaatgaggatctaacctgtggaaatatactaatgtgggaggc

SEQ ID NO: 494989 - DNA, 55 bp, Artificial
  Synthetic oligonucleotide
ttccactaggggcgttccaggaggagtggtctgggcgggacttgggagtggtcaa

SEQ ID NO: 494990 - DNA, 56 bp, Artificial
  Synthetic oligonucleotide
ttccatcagggggcactaggggtattcgctgtaccagagatgtgtttggccgggga

SEQ ID NO: 494991 - DNA, 50 bp, Artificial
  Synthetic oligonucleotide
ttccatgggctaactgggttcgaccttacatggtggcttaagtatgttaa

SEQ ID NO: 494992 - DNA, 55 bp, Artificial
  Synthetic oligonucleotide
ttcccgacacgcgaaagcgcattttattgcttagacgagagcccatcgcaaatgt

SEQ ID NO: 494993 - DNA, 55 bp, Artificial
  Synthetic oligonucleotide
ttccgcctgggactttccactggggcgttccaggaggtgtggtctgggcggggca

SEQ ID NO: 494994 - DNA, 57 bp, Artificial
  Synthetic oligonucleotide
ttccgctattccgtctctgacgctttctctagtggcaataaattctctttccccacg

SEQ ID NO: 494995 - DNA, 55 bp, Artificial
  Synthetic oligonucleotide
ttcgaacgaggccctctctgcagtcgacccttccgaatttgtcgaactcaggcgc

SEQ ID NO: 494996 - DNA, 60 bp, Artificial
  Synthetic oligonucleotide
ttcgacggactgcttcgctcacccatctaccccgatgaggtgcccataggcctgaattgt

SEQ ID NO: 494997 - DNA, 60 bp, Artificial
  Synthetic oligonucleotide
ttcgactgctctcaactagggagcaattactggccgcctagtgatccggggctgacggct

SEQ ID NO: 494998 - DNA, 55 bp, Artificial
  Synthetic oligonucleotide
ttcgatgcgttgcgctcagcactcggccccggagtgtagcttaggctgatgagtc

SEQ ID NO: 494999 - DNA, 55 bp, Artificial
  Synthetic oligonucleotide
ttcgcaacctaaacatgtaaaagactgtgcaagtatggtgaagttgtataggcga

SEQ ID NO: 495000 - DNA, 52 bp, Artificial
  Synthetic oligonucleotide
ttcgctcccgcgacctaatcccctacccaaacctgccaagtctccccccgcc

SEQ ID NO: 495001 - DNA, 60 bp, Artificial
  Synthetic oligonucleotide
ttcggcacaactgaacgcttctctttatgcaatcgggttcttgtatcttgagaacaagag

SEQ ID NO: 495002 - DNA, 54 bp, Artificial
  Synthetic oligonucleotide
ttcgggtcatagacgattgggctttcgccacggaaatcgaccaacactgcgtga

SEQ ID NO: 495003 - DNA, 60 bp, Artificial
  Synthetic oligonucleotide
ttcgggtgtgaagtctggcgggcagatgacggatgtgttgaagactgtcgccgatgtgtc

SEQ ID NO: 495004 - DNA, 55 bp, Artificial
  Synthetic oligonucleotide
ttcgtggtgcgtacccaaagatccagactgtgagccgcgtactccgctctctgtt

SEQ ID NO: 495005 - DNA, 55 bp, Artificial
  Synthetic oligonucleotide
ttctaactgacacaagtcggcctaatgaccccgggagcggaaactgtgatgaacc

SEQ ID NO: 495006 - DNA, 60 bp, Artificial
  Synthetic oligonucleotide
ttctaagtgcagcaggtagcactatgggcgcagcggcaacaacgctgacggtacagaccc

SEQ ID NO: 495007 - DNA, 50 bp, Artificial
  Synthetic oligonucleotide
ttctagcgctaaatggacctccggtcgtgtgattggtaccatcgctacga

SEQ ID NO: 495008 - DNA, 51 bp, Artificial
  Synthetic oligonucleotide
ttctataaggaagacgactttcctcaaatgatgtcttttatccttaatcgc

SEQ ID NO: 495009 - DNA, 58 bp, Artificial
  Synthetic oligonucleotide
ttctgaagcggcgtactttcggagcatgttaccctttcatatggtaaggttcgctaga

SEQ ID NO: 495010 - DNA, 52 bp, Artificial
  Synthetic oligonucleotide
ttctgccatgtgttatggagccacagtgacaaatctgcttagagggtctaac

SEQ ID NO: 495011 - DNA, 55 bp, Artificial
  Synthetic oligonucleotide
ttctgcgggacgaaaatcttacactccacggactgaaagcacggtgtcgcgtgtg

SEQ ID NO: 495012 - DNA, 56 bp, Artificial
  Synthetic oligonucleotide
ttctggacagactctaagagcccgcagctgccaaccgactttacgcgttttaacgg

SEQ ID NO: 495013 - DNA, 56 bp, Artificial
  Synthetic oligonucleotide
ttcttctggcgagcggactaccactaatgtcaaccactttcgccattggtgggaac

SEQ ID NO: 495014 - DNA, 60 bp, Artificial
  Synthetic oligonucleotide
ttcttgggaacagcaggaagtactatgggcgcagcgtcaataacgctgacggtacaggtc

SEQ ID NO: 495015 - DNA, 60 bp, Artificial
  Synthetic oligonucleotide
ttgaaagggggcgctagggtctcacccctagcatgccaacgatagctcctgcgtcgcgac

SEQ ID NO: 495016 - DNA, 60 bp, Artificial
  Synthetic oligonucleotide
ttgacaatgtaatgggaatgatcgggatattacctgacatgactccaagtactgagatgt

SEQ ID NO: 495017 - DNA, 57 bp, Artificial
  Synthetic oligonucleotide
ttgaccctaccttcaccattgagacaaccacgctcccccaggatgccgtctcccgga

SEQ ID NO: 495018 - DNA, 60 bp, Artificial
  Synthetic oligonucleotide
ttgacgtgctggcgtacgacgggtgcacgcagaccacccacggtgattgtgggctgccgt

SEQ ID NO: 495019 - DNA, 54 bp, Artificial
  Synthetic oligonucleotide
ttgacttggagcttactttcgttatcacgagcacacaacagccgtccactacgc

SEQ ID NO: 495020 - DNA, 53 bp, Artificial
  Synthetic oligonucleotide
ttgagcctggtatctctgatcgtatgtcggctacgctggcaccaatcggcaac

SEQ ID NO: 495021 - DNA, 54 bp, Artificial
  Synthetic oligonucleotide
ttgaggggtgtccgtcactctacaagttcaacccgtttagaggtgggctaaaca

SEQ ID NO: 495022 - DNA, 50 bp, Artificial
  Synthetic oligonucleotide
ttgagtacagacccaatcctaacgctatgctgtatcatttcggccatgac

SEQ ID NO: 495023 - DNA, 54 bp, Artificial
  Synthetic oligonucleotide
ttgatacggattactatctacgtgatccatcaatctacttttcgaacaacaatc

SEQ ID NO: 495024 - DNA, 54 bp, Artificial
  Synthetic oligonucleotide
ttgatcgtgaacactagtaagtaccctaacatgtacgtgcctgttggtgcagtg

SEQ ID NO: 495025 - DNA, 55 bp, Artificial
  Synthetic oligonucleotide
ttgatttcgtcggctggtggacaattgttctattctcgccccgtcgtctcagcca

SEQ ID NO: 495026 - DNA, 55 bp, Artificial
  Synthetic oligonucleotide
ttgcaccggtgttttcttagaccggttggcagggacgtccagcgttggtactctg

SEQ ID NO: 495027 - DNA, 58 bp, Artificial
  Synthetic oligonucleotide
ttgcacgggtgtgggttacatatgcggtgtgtcggttgtgggaaatatgtgacccatt

SEQ ID NO: 495028 - DNA, 60 bp, Artificial
  Synthetic oligonucleotide
ttgcacttcacacttacgctcgtgcactcgcgggaaccgatggactgtcgttcacccacc

SEQ ID NO: 495029 - DNA, 53 bp, Artificial
  Synthetic oligonucleotide
ttgcattgacgagcgacaatggaacatcattgtcaaaagggcttgaaccaagg

SEQ ID NO: 495030 - DNA, 55 bp, Artificial
  Synthetic oligonucleotide
ttgccggctcgctagaaatccacacacttggtgaaacacgcagcacctaccagaa

SEQ ID NO: 495031 - DNA, 55 bp, Artificial
  Synthetic oligonucleotide
ttgccttggaatgatccggcccaattgaggaatgaactgcgaatggccgcttggc

SEQ ID NO: 495032 - DNA, 50 bp, Artificial
  Synthetic oligonucleotide
ttgcgatacatcagggctgtttaatagcacttgggataacattaccagta

SEQ ID NO: 495033 - DNA, 60 bp, Artificial
  Synthetic oligonucleotide
ttgcggctagcgggacatcaaggtctgccgaccatgaacactccagggagtacacagttc

SEQ ID NO: 495034 - DNA, 55 bp, Artificial
  Synthetic oligonucleotide
ttggaatctcctacagtattggattcaggaactaaggaatagtgctgttagcttg

SEQ ID NO: 495035 - DNA, 54 bp, Artificial
  Synthetic oligonucleotide
ttggacaactgctaggccctgcgttacagataggccagagactggctcctgccc

SEQ ID NO: 495036 - DNA, 59 bp, Artificial
  Synthetic oligonucleotide
ttggacaaggtgtgaagagccccgtgtgctcactttgagtcctccggcccctgaatgtg

SEQ ID NO: 495037 - DNA, 59 bp, Artificial
  Synthetic oligonucleotide
ttggccattggagtgattcggacctcggtccgcttgacctcagtattccgtcgtgctag

SEQ ID NO: 495038 - DNA, 55 bp, Artificial
  Synthetic oligonucleotide
ttggcctccaccaactccagtcggatcacaccacccacggtggctcacagtgatg

SEQ ID NO: 495039 - DNA, 60 bp, Artificial
  Synthetic oligonucleotide
ttggcctggtatgcgccacatgtgagcaaattgctgattcccagcatcggtctcacagac

SEQ ID NO: 495040 - DNA, 55 bp, Artificial
  Synthetic oligonucleotide
ttgggagtcctatgagagggatctgttggttatgcgccatgatgcggctgggtcg

SEQ ID NO: 495041 - DNA, 53 bp, Artificial
  Synthetic oligonucleotide
ttgggatataaatggtcagaagtgtcatttaaaccagcgttttatcagtacac

SEQ ID NO: 495042 - DNA, 55 bp, Artificial
  Synthetic oligonucleotide
ttgggatgcatgttggagggaacggttcacatgggttcgcagcagccctgaagcg

SEQ ID NO: 495043 - DNA, 55 bp, Artificial
  Synthetic oligonucleotide
ttgggggccaagtctgtacaacatcttgagtccctttataccgctattaccaatt

SEQ ID NO: 495044 - DNA, 49 bp, Artificial
  Synthetic oligonucleotide
ttgggttaggttcggaggtgtattaagaaccgttcgagttaagtttttc

SEQ ID NO: 495045 - DNA, 59 bp, Artificial
  Synthetic oligonucleotide
ttggtcctgtctcatgggtccctcgctgatttggacaggaggctagacaacgcccctaa

SEQ ID NO: 495046 - DNA, 60 bp, Artificial
  Synthetic oligonucleotide
ttggtcgtcagcgctgtcctgggcacgcctgttgggggctgttcgacgctctacggtctc

SEQ ID NO: 495047 - DNA, 59 bp, Artificial
  Synthetic oligonucleotide
ttggtgtcttttggagtgtggattcgcactcctctagcctacagaccaccaaatgcccc

SEQ ID NO: 495048 - DNA, 60 bp, Artificial
  Synthetic oligonucleotide
ttgtcaagtgtgctttctgacaaaaggcttaggcatttcctatggcaggaagaagcggag

SEQ ID NO: 495049 - DNA, 55 bp, Artificial
  Synthetic oligonucleotide
ttgtctgcccgcctgtgtctatggacctgccgtagccagtggctacgacttcgaa

SEQ ID NO: 495050 - DNA, 51 bp, Artificial
  Synthetic oligonucleotide
ttgtgcctacacctgacaatcccattcatgacacctatagatatttaacat

SEQ ID NO: 495051 - DNA, 60 bp, Artificial
  Synthetic oligonucleotide
ttgtggatggggtatgagctccatccagacaaatggacggtacagcccatccaattgcct

SEQ ID NO: 495052 - DNA, 55 bp, Artificial
  Synthetic oligonucleotide
ttgtgggtcaccatattcgtgggaacacgagctacagcatgggaggttggtcctc

SEQ ID NO: 495053 - DNA, 55 bp, Artificial
  Synthetic oligonucleotide
ttgtgtgcggactgatgcggatttcccatgcataagatacagaccccgtgtgcga

SEQ ID NO: 495054 - DNA, 58 bp, Artificial
  Synthetic oligonucleotide
tttaactactgatctaccgtccggtgtcccatgggcacgtgcgatactccagttctta

SEQ ID NO: 495055 - DNA, 56 bp, Artificial
  Synthetic oligonucleotide
tttacggagaatcatggatgacgaaggttgggttaggttcggaggtgtattgagaa

SEQ ID NO: 495056 - DNA, 56 bp, Artificial
  Synthetic oligonucleotide
tttagcgtccctcccgcggccgactcgcctacgtgaacgctagctcttcacccgaa

SEQ ID NO: 495057 - DNA, 55 bp, Artificial
  Synthetic oligonucleotide
tttccagggagaattcgcctgggcgggactagggagtggcgagccctcagatgct

SEQ ID NO: 495058 - DNA, 59 bp, Artificial
  Synthetic oligonucleotide
tttcccatggtagacctggcagatgaggctagaaactccccactggcgacagtgttcta

SEQ ID NO: 495059 - DNA, 53 bp, Artificial
  Synthetic oligonucleotide
tttccccggtgaagccacataaactgtacccacggttgaaagtggtagatccg

SEQ ID NO: 495060 - DNA, 52 bp, Artificial
  Synthetic oligonucleotide
tttccgtcgcacacgacggaaccgggaaaagggtctactacctgacccgtga

SEQ ID NO: 495061 - DNA, 58 bp, Artificial
  Synthetic oligonucleotide
tttccgtggcccacgacaacaatggacagagatattactacctcacgagagacccaac

SEQ ID NO: 495062 - DNA, 56 bp, Artificial
  Synthetic oligonucleotide
tttcgcaaaatacctatgggagtgggcctcagtccgtttctcttggctcagtttac

SEQ ID NO: 495063 - DNA, 60 bp, Artificial
  Synthetic oligonucleotide
tttcggattgggaagcattgcaacccagcaacccgagagcaacatcctggacatagatct

SEQ ID NO: 495064 - DNA, 52 bp, Artificial
  Synthetic oligonucleotide
tttgaaagggggcgctagggtctagccctagtgtcgcgtaacgaccgtcccc

SEQ ID NO: 495065 - DNA, 60 bp, Artificial
  Synthetic oligonucleotide
tttgacagccgcctagcattccatcacgtggcccgagagctgcatccggattactacaag

SEQ ID NO: 495066 - DNA, 60 bp, Artificial
  Synthetic oligonucleotide
tttgacagccgcctagcatttcgtcacatggcccgagaggtgcatccggagtactacaaa

SEQ ID NO: 495067 - DNA, 57 bp, Artificial
  Synthetic oligonucleotide
tttgatccgcctcaaacccaccctccatggaccaacgcctctgctatacagactggg

SEQ ID NO: 495068 - DNA, 60 bp, Artificial
  Synthetic oligonucleotide
tttggagtgtggattcgcactcctcctgcatacagaccaccaaatgcccctatcttatcc

SEQ ID NO: 495069 - DNA, 60 bp, Artificial
  Synthetic oligonucleotide
tttggcctagtgtgtgccacttgtgagcagattgcagactcacagcatcggtctcacaga

SEQ ID NO: 495070 - DNA, 56 bp, Artificial
  Synthetic oligonucleotide
tttggggacgtgccggttcaacgtcccagcaggtacaacgctgcaattccctgccc

SEQ ID NO: 495071 - DNA, 50 bp, Artificial
  Synthetic oligonucleotide
tttgtagtgctacagaacaattgtgggtcacaatctactatggggtgcct

SEQ ID NO: 495072 - DNA, 60 bp, Artificial
  Synthetic oligonucleotide
tttgtatgactacaaggagagccgattcattgaaattggagtgacgcgaagggaggtcca

SEQ ID NO: 495073 - DNA, 58 bp, Artificial
  Synthetic oligonucleotide
tttgtatggacggtgacaccatgcctggactcttcgcgtaccgcgcagggaccaaggt

SEQ ID NO: 495074 - DNA, 60 bp, Artificial
  Synthetic oligonucleotide
tttgtggcgcgctctggtctcccctcgggcatgcctttcactagtgtcatcaattcaatc

SEQ ID NO: 495075 - DNA, 60 bp, Artificial
  Synthetic oligonucleotide
ttttaagtaagcatggcgggcggtgacgtgcaatgtcaaaggtcacagcctgtcatgctt

SEQ ID NO: 495076 - DNA, 50 bp, Artificial
  Synthetic oligonucleotide
ttttacgactccaccccttctgttcagcccgggtctctggataccgacta

SEQ ID NO: 495077 - DNA, 60 bp, Artificial
  Synthetic oligonucleotide
ttttatggctggctaccctattgcgagatgctccgcctctgcgaccgttacccacataaa

SEQ ID NO: 495078 - DNA, 60 bp, Artificial
  Synthetic oligonucleotide
ttttcagctgaatcgaggaaattgcttctcattgttcaggcacttagggacaacctggaa

SEQ ID NO: 495079 - DNA, 52 bp, Artificial
  Synthetic oligonucleotide
ttttccggttgcattcattcgttgctctgctctcacagagaacggacctcag

SEQ ID NO: 495080 - DNA, 55 bp, Artificial
  Synthetic oligonucleotide
ttttgcaacacctagtgggtcacttgtatccagcgatgcacaaatttttaatagg

SEQ ID NO: 495081 - DNA, 57 bp, Artificial
  Synthetic oligonucleotide
tttttagccgtaatgagcgtcggtgcccacactgtgagcgcgtacgaacacgtaaca

SEQ ID NO: 495082 - DNA, 53 bp, Artificial; identical to SEQ ID NO: 5829
  Synthetic oligonucleotide

SEQ ID NO: 495083 - DNA, 59 bp, Artificial; identical to SEQ ID NO: 17797
  Synthetic oligonucleotide

SEQ ID NO: 495084 - DNA, 53 bp, Artificial; identical to SEQ ID NO: 10331
  Synthetic oligonucleotide

SEQ ID NO: 495085 - DNA, 55 bp, Artificial; identical to SEQ ID NO: 7560
  Synthetic oligonucleotide

SEQ ID NO: 495086 - DNA, 58 bp, Artificial; identical to SEQ ID NO: 17773
  Synthetic oligonucleotide

SEQ ID NO: 495087 - DNA, 55 bp, Artificial; identical to SEQ ID NO: 5858
  Synthetic oligonucleotide

SEQ ID NO: 495088 - DNA, 55 bp, Artificial; identical to SEQ ID NO: 11754
  Synthetic oligonucleotide

SEQ ID NO: 495089 - DNA, 55 bp, Artificial; identical to SEQ ID NO: 19055
  Synthetic oligonucleotide

SEQ ID NO: 495090 - DNA, 52 bp, Artificial; identical to SEQ ID NO: 9080
  Synthetic oligonucleotide

SEQ ID NO: 495091 - DNA, 58 bp, Artificial; identical to SEQ ID NO: 16559
  Synthetic oligonucleotide

SEQ ID NO: 495092 - DNA, 60 bp, Artificial; identical to SEQ ID NO: 5883
  Synthetic oligonucleotide

SEQ ID NO: 495093 - DNA, 58 bp, Artificial; identical to SEQ ID NO: 11040
  Synthetic oligonucleotide

SEQ ID NO: 495094 - DNA, 52 bp, Artificial; identical to SEQ ID NO: 20502
  Synthetic oligonucleotide

SEQ ID NO: 495095 - DNA, 50 bp, Artificial; identical to SEQ ID NO: 16546
  Synthetic oligonucleotide

SEQ ID NO: 495096 - DNA, 55 bp, Artificial; identical to SEQ ID NO: 8526
  Synthetic oligonucleotide

SEQ ID NO: 495097 - DNA, 52 bp, Artificial; identical to SEQ ID NO: 13413
  Synthetic oligonucleotide

SEQ ID NO: 495098 - DNA, 58 bp, Artificial; identical to SEQ ID NO: 19919
  Synthetic oligonucleotide

SEQ ID NO: 495099 - DNA, 59 bp, Artificial; identical to SEQ ID NO: 18478
  Synthetic oligonucleotide

SEQ ID NO: 495100 - DNA, 55 bp, Artificial; identical to SEQ ID NO: 15092
  Synthetic oligonucleotide

SEQ ID NO: 495101 - DNA, 60 bp, Artificial; identical to SEQ ID NO: 10114
  Synthetic oligonucleotide

SEQ ID NO: 495102 - DNA, 58 bp, Artificial; identical to SEQ ID NO: 20324
  Synthetic oligonucleotide

SEQ ID NO: 495103 - DNA, 55 bp, Artificial; identical to SEQ ID NO: 10391
  Synthetic oligonucleotide

SEQ ID NO: 495104 - DNA, 56 bp, Artificial; identical to SEQ ID NO: 18750
  Synthetic oligonucleotide

SEQ ID NO: 495105 - DNA, 55 bp, Artificial; identical to SEQ ID NO: 19425
  Synthetic oligonucleotide

SEQ ID NO: 495106 - DNA, 56 bp, Artificial; identical to SEQ ID NO: 15178
  Synthetic oligonucleotide

SEQ ID NO: 495107 - DNA, 52 bp, Artificial; identical to SEQ ID NO: 6715
  Synthetic oligonucleotide

SEQ ID NO: 495108 - DNA, 57 bp, Artificial; identical to SEQ ID NO: 16250
  Synthetic oligonucleotide

SEQ ID NO: 495109 - DNA, 54 bp, Artificial; identical to SEQ ID NO: 19148
  Synthetic oligonucleotide

SEQ ID NO: 495110 - DNA, 53 bp, Artificial; identical to SEQ ID NO: 5992
  Synthetic oligonucleotide

SEQ ID NO: 495111 - DNA, 60 bp, Artificial; identical to SEQ ID NO: 9686
  Synthetic oligonucleotide

SEQ ID NO: 495112 - DNA, 60 bp, Artificial; identical to SEQ ID NO: 6655
  Synthetic oligonucleotide

SEQ ID NO: 495113 - DNA, 55 bp, Artificial; identical to SEQ ID NO: 17690
  Synthetic oligonucleotide

SEQ ID NO: 495114 - DNA, 52 bp, Artificial; identical to SEQ ID NO: 19609
  Synthetic oligonucleotide

SEQ ID NO: 495115 - DNA, 58 bp, Artificial; identical to SEQ ID NO: 19897
  Synthetic oligonucleotide

SEQ ID NO: 495116 - DNA, 54 bp, Artificial; identical to SEQ ID NO: 15057
  Synthetic oligonucleotide

SEQ ID NO: 495117 - DNA, 54 bp, Artificial; identical to SEQ ID NO: 5827
  Synthetic oligonucleotide

SEQ ID NO: 495118 - DNA, 59 bp, Artificial; identical to SEQ ID NO: 20068
  Synthetic oligonucleotide

SEQ ID NO: 495119 - DNA, 60 bp, Artificial; identical to SEQ ID NO: 15628
  Synthetic oligonucleotide

SEQ ID NO: 495120 - DNA, 55 bp, Artificial; identical to SEQ ID NO: 6439
  Synthetic oligonucleotide

SEQ ID NO: 495121 - DNA, 52 bp, Artificial; identical to SEQ ID NO: 19113
  Synthetic oligonucleotide

SEQ ID NO: 495122 - DNA, 50 bp, Artificial; identical to SEQ ID NO: 6596
  Synthetic oligonucleotide

SEQ ID NO: 495123 - DNA, 52 bp, Artificial; identical to SEQ ID NO: 5970
  Synthetic oligonucleotide

SEQ ID NO: 495124 - DNA, 58 bp, Artificial; identical to SEQ ID NO: 19099
  Synthetic oligonucleotide

SEQ ID NO: 495125 - DNA, 55 bp, Artificial; identical to SEQ ID NO: 13941
  Synthetic oligonucleotide

SEQ ID NO: 495126 - DNA, 54 bp, Artificial; identical to SEQ ID NO: 17402
  Synthetic oligonucleotide

SEQ ID NO: 495127 - DNA, 57 bp, Artificial; identical to SEQ ID NO: 16022
  Synthetic oligonucleotide

SEQ ID NO: 495128 - DNA, 53 bp, Artificial; identical to SEQ ID NO: 19189
  Synthetic oligonucleotide

SEQ ID NO: 495129 - DNA, 52 bp, Artificial; identical to SEQ ID NO: 11727
  Synthetic oligonucleotide

SEQ ID NO: 495130 - DNA, 60 bp, Artificial; identical to SEQ ID NO: 10764
  Synthetic oligonucleotide

SEQ ID NO: 495131 - DNA, 60 bp, Artificial; identical to SEQ ID NO: 6575
  Synthetic oligonucleotide

SEQ ID NO: 495132 - DNA, 52 bp, Artificial; identical to SEQ ID NO: 15693
  Synthetic oligonucleotide

SEQ ID NO: 495133 - DNA, 54 bp, Artificial; identical to SEQ ID NO: 6330
  Synthetic oligonucleotide

SEQ ID NO: 495134 - DNA, 53 bp, Artificial; identical to SEQ ID NO: 17482
  Synthetic oligonucleotide

SEQ ID NO: 495135 - DNA, 51 bp, Artificial; identical to SEQ ID NO: 18910
  Synthetic oligonucleotide

SEQ ID NO: 495136 - DNA, 52 bp, Artificial; identical to SEQ ID NO: 10589
  Synthetic oligonucleotide

SEQ ID NO: 495137 - DNA, 53 bp, Artificial; identical to SEQ ID NO: 6115
  Synthetic oligonucleotide

SEQ ID NO: 495138 - DNA, 60 bp, Artificial; identical to SEQ ID NO: 8363
  Synthetic oligonucleotide

SEQ ID NO: 495139 - DNA, 58 bp, Artificial; identical to SEQ ID NO: 17073
  Synthetic oligonucleotide

SEQ ID NO: 495140 - DNA, 51 bp, Artificial; identical to SEQ ID NO: 20122
  Synthetic oligonucleotide

SEQ ID NO: 495141 - DNA, 59 bp, Artificial; identical to SEQ ID NO: 19127
  Synthetic oligonucleotide

SEQ ID NO: 495142 - DNA, 54 bp, Artificial; identical to SEQ ID NO: 20278
  Synthetic oligonucleotide

SEQ ID NO: 495143 - DNA, 54 bp, Artificial; identical to SEQ ID NO: 18817
  Synthetic oligonucleotide

SEQ ID NO: 495144 - DNA, 54 bp, Artificial; identical to SEQ ID NO: 14730
  Synthetic oligonucleotide

SEQ ID NO: 495145 - DNA, 58 bp, Artificial; identical to SEQ ID NO: 20554
  Synthetic oligonucleotide

SEQ ID NO: 495146 - DNA, 54 bp, Artificial; identical to SEQ ID NO: 6940
  Synthetic oligonucleotide

SEQ ID NO: 495147 - DNA, 58 bp, Artificial; identical to SEQ ID NO: 17176
  Synthetic oligonucleotide

SEQ ID NO: 495148 - DNA, 60 bp, Artificial; identical to SEQ ID NO: 12580
  Synthetic oligonucleotide

SEQ ID NO: 495149 - DNA, 54 bp, Artificial; identical to SEQ ID NO: 17589
  Synthetic oligonucleotide

SEQ ID NO: 495150 - DNA, 57 bp, Artificial; identical to SEQ ID NO: 19891
  Synthetic oligonucleotide

SEQ ID NO: 495151 - DNA, 55 bp, Artificial; identical to SEQ ID NO: 18078
  Synthetic oligonucleotide

SEQ ID NO: 495152 - DNA, 60 bp, Artificial; identical to SEQ ID NO: 13942
  Synthetic oligonucleotide

SEQ ID NO: 495153 - DNA, 55 bp, Artificial; identical to SEQ ID NO: 19005
  Synthetic oligonucleotide

SEQ ID NO: 495154 - DNA, 60 bp, Artificial; identical to SEQ ID NO: 11588
  Synthetic oligonucleotide

SEQ ID NO: 495155 - DNA, 58 bp, Artificial; identical to SEQ ID NO: 6479
  Synthetic oligonucleotide

SEQ ID NO: 495156 - DNA, 56 bp, Artificial; identical to SEQ ID NO: 18166
  Synthetic oligonucleotide

SEQ ID NO: 495157 - DNA, 56 bp, Artificial; identical to SEQ ID NO: 16613
  Synthetic oligonucleotide

SEQ ID NO: 495158 - DNA, 60 bp, Artificial; identical to SEQ ID NO: 5841
  Synthetic oligonucleotide

SEQ ID NO: 495159 - DNA, 57 bp, Artificial; identical to SEQ ID NO: 6974
  Synthetic oligonucleotide

SEQ ID NO: 495160 - DNA, 55 bp, Artificial; identical to SEQ ID NO: 18806
  Synthetic oligonucleotide

SEQ ID NO: 495161 - DNA, 59 bp, Artificial; identical to SEQ ID NO: 16637
  Synthetic oligonucleotide

SEQ ID NO: 495162 - DNA, 57 bp, Artificial; identical to SEQ ID NO: 20395
  Synthetic oligonucleotide

SEQ ID NO: 495163 - DNA, 60 bp, Artificial; identical to SEQ ID NO: 9829
  Synthetic oligonucleotide

SEQ ID NO: 495164 - DNA, 58 bp, Artificial; identical to SEQ ID NO: 18403
  Synthetic oligonucleotide

SEQ ID NO: 495165 - DNA, 54 bp, Artificial; identical to SEQ ID NO: 15152
  Synthetic oligonucleotide

SEQ ID NO: 495166 - DNA, 60 bp, Artificial; identical to SEQ ID NO: 13996
  Synthetic oligonucleotide

SEQ ID NO: 495167 - DNA, 58 bp, Artificial; identical to SEQ ID NO: 18425
  Synthetic oligonucleotide

SEQ ID NO: 495168 - DNA, 53 bp, Artificial; identical to SEQ ID NO: 12174
  Synthetic oligonucleotide

SEQ ID NO: 495169 - DNA, 60 bp, Artificial; identical to SEQ ID NO: 14491
  Synthetic oligonucleotide

SEQ ID NO: 495170 - DNA, 56 bp, Artificial; identical to SEQ ID NO: 17569
  Synthetic oligonucleotide

SEQ ID NO: 495171 - DNA, 58 bp, Artificial; identical to SEQ ID NO: 17682
  Synthetic oligonucleotide

SEQ ID NO: 495172 - DNA, 60 bp, Artificial; identical to SEQ ID NO: 9632
  Synthetic oligonucleotide

SEQ ID NO: 495173 - DNA, 53 bp, Artificial; identical to SEQ ID NO: 6008
  Synthetic oligonucleotide

SEQ ID NO: 495174 - DNA, 52 bp, Artificial; identical to SEQ ID NO: 13457
  Synthetic oligonucleotide

SEQ ID NO: 495175 - DNA, 55 bp, Artificial; identical to SEQ ID NO: 19079
  Synthetic oligonucleotide

SEQ ID NO: 495176 - DNA, 55 bp, Artificial; identical to SEQ ID NO: 13719
  Synthetic oligonucleotide

SEQ ID NO: 495177 - DNA, 57 bp, Artificial; identical to SEQ ID NO: 17273
  Synthetic oligonucleotide

SEQ ID NO: 495178 - DNA, 58 bp, Artificial; identical to SEQ ID NO: 18709
  Synthetic oligonucleotide

SEQ ID NO: 495179 - DNA, 53 bp, Artificial; identical to SEQ ID NO: 6005
  Synthetic oligonucleotide

SEQ ID NO: 495180 - DNA, 60 bp, Artificial; identical to SEQ ID NO: 13814
  Synthetic oligonucleotide

SEQ ID NO: 495181 - DNA, 54 bp, Artificial; identical to SEQ ID NO: 9799
  Synthetic oligonucleotide

SEQ ID NO: 495182 - DNA, 60 bp, Artificial; identical to SEQ ID NO: 7946
  Synthetic oligonucleotide

SEQ ID NO: 495183 - DNA, 59 bp, Artificial; identical to SEQ ID NO: 16896
  Synthetic oligonucleotide

SEQ ID NO: 495184 - DNA, 60 bp, Artificial; identical to SEQ ID NO: 9543
  Synthetic oligonucleotide

SEQ ID NO: 495185 - DNA, 55 bp, Artificial; identical to SEQ ID NO: 20280
  Synthetic oligonucleotide

SEQ ID NO: 495186 - DNA, 58 bp, Artificial; identical to SEQ ID NO: 7043
  Synthetic oligonucleotide

SEQ ID NO: 495187 - DNA, 52 bp, Artificial; identical to SEQ ID NO: 7174
  Synthetic oligonucleotide

SEQ ID NO: 495188 - DNA, 56 bp, Artificial; identical to SEQ ID NO: 195
  Synthetic oligonucleotide

SEQ ID NO: 495189 - DNA, 55 bp, Artificial; identical to SEQ ID NO: 9960
  Synthetic oligonucleotide

SEQ ID NO: 495190 - DNA, 60 bp, Artificial; identical to SEQ ID NO: 9055
  Synthetic oligonucleotide

SEQ ID NO: 495191 - DNA, 55 bp, Artificial; identical to SEQ ID NO: 12946
  Synthetic oligonucleotide

SEQ ID NO: 495192 - DNA, 54 bp, Artificial; identical to SEQ ID NO: 18081
  Synthetic oligonucleotide

SEQ ID NO: 495193 - DNA, 57 bp, Artificial; identical to SEQ ID NO: 20322
  Synthetic oligonucleotide

SEQ ID NO: 495194 - DNA, 55 bp, Artificial; identical to SEQ ID NO: 11621
  Synthetic oligonucleotide

SEQ ID NO: 495195 - DNA, 51 bp, Artificial; identical to SEQ ID NO: 12444
  Synthetic oligonucleotide

SEQ ID NO: 495196 - DNA, 50 bp, Artificial; identical to SEQ ID NO: 11257
  Synthetic oligonucleotide

SEQ ID NO: 495197 - DNA, 58 bp, Artificial; identical to SEQ ID NO: 20036
  Synthetic oligonucleotide

SEQ ID NO: 495198 - DNA, 51 bp, Artificial; identical to SEQ ID NO: 7052
  Synthetic oligonucleotide

SEQ ID NO: 495199 - DNA, 50 bp, Artificial; identical to SEQ ID NO: 5914
  Synthetic oligonucleotide

SEQ ID NO: 495200 - DNA, 60 bp, Artificial; identical to SEQ ID NO: 8411
  Synthetic oligonucleotide

SEQ ID NO: 495201 - DNA, 59 bp, Artificial; identical to SEQ ID NO: 18193
  Synthetic oligonucleotide

SEQ ID NO: 495202 - DNA, 53 bp, Artificial; identical to SEQ ID NO: 6491
  Synthetic oligonucleotide

SEQ ID NO: 495203 - DNA, 54 bp, Artificial; identical to SEQ ID NO: 13326
  Synthetic oligonucleotide

SEQ ID NO: 495204 - DNA, 60 bp, Artificial; identical to SEQ ID NO: 9948
  Synthetic oligonucleotide

SEQ ID NO: 495205 - DNA, 55 bp, Artificial; identical to SEQ ID NO: 17875
  Synthetic oligonucleotide

SEQ ID NO: 495206 - DNA, 56 bp, Artificial; identical to SEQ ID NO: 13050
  Synthetic oligonucleotide

SEQ ID NO: 495207 - DNA, 60 bp, Artificial; identical to SEQ ID NO: 7644
  Synthetic oligonucleotide

SEQ ID NO: 495208 - DNA, 57 bp, Artificial; identical to SEQ ID NO: 17959
  Synthetic oligonucleotide

SEQ ID NO: 495209 - DNA, 60 bp, Artificial; identical to SEQ ID NO: 13465
  Synthetic oligonucleotide

SEQ ID NO: 495210 - DNA, 55 bp, Artificial; identical to SEQ ID NO: 12895
  Synthetic oligonucleotide

SEQ ID NO: 495211 - DNA, 52 bp, Artificial; identical to SEQ ID NO: 11524
  Synthetic oligonucleotide

SEQ ID NO: 495212 - DNA, 56 bp, Artificial; identical to SEQ ID NO: 16155
  Synthetic oligonucleotide

SEQ ID NO: 495213 - DNA, 60 bp, Artificial; identical to SEQ ID NO: 11472
  Synthetic oligonucleotide

SEQ ID NO: 495214 - DNA, 54 bp, Artificial; identical to SEQ ID NO: 19654
  Synthetic oligonucleotide

SEQ ID NO: 495215 - DNA, 55 bp, Artificial; identical to SEQ ID NO: 7462
  Synthetic oligonucleotide

SEQ ID NO: 495216 - DNA, 55 bp, Artificial; identical to SEQ ID NO: 12434
  Synthetic oligonucleotide

SEQ ID NO: 495217 - DNA, 55 bp, Artificial; identical to SEQ ID NO: 9208
  Synthetic oligonucleotide

SEQ ID NO: 495218 - DNA, 60 bp, Artificial; identical to SEQ ID NO: 7483
  Synthetic oligonucleotide

SEQ ID NO: 495219 - DNA, 60 bp, Artificial; identical to SEQ ID NO: 9274
  Synthetic oligonucleotide

SEQ ID NO: 495220 - DNA, 53 bp, Artificial; identical to SEQ ID NO: 12981
  Synthetic oligonucleotide

SEQ ID NO: 495221 - DNA, 60 bp, Artificial; identical to SEQ ID NO: 10154
  Synthetic oligonucleotide

SEQ ID NO: 495222 - DNA, 50 bp, Artificial; identical to SEQ ID NO: 6949
  Synthetic oligonucleotide

SEQ ID NO: 495223 - DNA, 54 bp, Artificial; identical to SEQ ID NO: 6432
  Synthetic oligonucleotide

SEQ ID NO: 495224 - DNA, 60 bp, Artificial; identical to SEQ ID NO: 7602
  Synthetic oligonucleotide

SEQ ID NO: 495225 - DNA, 53 bp, Artificial; identical to SEQ ID NO: 6183
  Synthetic oligonucleotide

SEQ ID NO: 495226 - DNA, 58 bp, Artificial; identical to SEQ ID NO: 17534
  Synthetic oligonucleotide

SEQ ID NO: 495227 - DNA, 54 bp, Artificial; identical to SEQ ID NO: 19094
  Synthetic oligonucleotide

SEQ ID NO: 495228 - DNA, 53 bp, Artificial; identical to SEQ ID NO: 12050
  Synthetic oligonucleotide

SEQ ID NO: 495229 - DNA, 60 bp, Artificial; identical to SEQ ID NO: 8676
  Synthetic oligonucleotide

SEQ ID NO: 495230 - DNA, 58 bp, Artificial; identical to SEQ ID NO: 17068
  Synthetic oligonucleotide

SEQ ID NO: 495231 - DNA, 60 bp, Artificial; identical to SEQ ID NO: 11664
  Synthetic oligonucleotide

SEQ ID NO: 495232 - DNA, 55 bp, Artificial; identical to SEQ ID NO: 17255
  Synthetic oligonucleotide

SEQ ID NO: 495233 - DNA, 51 bp, Artificial; identical to SEQ ID NO: 13119
  Synthetic oligonucleotide

SEQ ID NO: 495234 - DNA, 54 bp, Artificial; identical to SEQ ID NO: 17393
  Synthetic oligonucleotide

SEQ ID NO: 495235 - DNA, 60 bp, Artificial; identical to SEQ ID NO: 6741
  Synthetic oligonucleotide

SEQ ID NO: 495236 - DNA, 52 bp, Artificial; identical to SEQ ID NO: 13684
  Synthetic oligonucleotide

SEQ ID NO: 495237 - DNA, 51 bp, Artificial; identical to SEQ ID NO: 6757
  Synthetic oligonucleotide

SEQ ID NO: 495238 - DNA, 60 bp, Artificial; identical to SEQ ID NO: 15365
  Synthetic oligonucleotide

SEQ ID NO: 495239 - DNA, 57 bp, Artificial; identical to SEQ ID NO: 17798
  Synthetic oligonucleotide

SEQ ID NO: 495240 - DNA, 55 bp, Artificial; identical to SEQ ID NO: 11521
  Synthetic oligonucleotide

SEQ ID NO: 495241 - DNA, 59 bp, Artificial; identical to SEQ ID NO: 18569
  Synthetic oligonucleotide

SEQ ID NO: 495242 - DNA, 60 bp, Artificial; identical to SEQ ID NO: 12723
  Synthetic oligonucleotide

SEQ ID NO: 495243 - DNA, 52 bp, Artificial; identical to SEQ ID NO: 5916
  Synthetic oligonucleotide

SEQ ID NO: 495244 - DNA, 52 bp, Artificial; identical to SEQ ID NO: 17791
  Synthetic oligonucleotide

SEQ ID NO: 495245 - DNA, 51 bp, Artificial; identical to SEQ ID NO: 13370
  Synthetic oligonucleotide

SEQ ID NO: 495246 - DNA, 55 bp, Artificial; identical to SEQ ID NO: 7886
  Synthetic oligonucleotide

SEQ ID NO: 495247 - DNA, 53 bp, Artificial; identical to SEQ ID NO: 11044
  Synthetic oligonucleotide

SEQ ID NO: 495248 - DNA, 55 bp, Artificial; identical to SEQ ID NO: 12253
  Synthetic oligonucleotide

SEQ ID NO: 495249 - DNA, 60 bp, Artificial; identical to SEQ ID NO: 6644
  Synthetic oligonucleotide

SEQ ID NO: 495250 - DNA, 54 bp, Artificial; identical to SEQ ID NO: 7920
  Synthetic oligonucleotide

SEQ ID NO: 495251 - DNA, 58 bp, Artificial; identical to SEQ ID NO: 19852
  Synthetic oligonucleotide

SEQ ID NO: 495252 - DNA, 54 bp, Artificial; identical to SEQ ID NO: 13180
  Synthetic oligonucleotide

SEQ ID NO: 495253 - DNA, 52 bp, Artificial; identical to SEQ ID NO: 6025
  Synthetic oligonucleotide

SEQ ID NO: 495254 - DNA, 55 bp, Artificial; identical to SEQ ID NO: 5909
  Synthetic oligonucleotide

SEQ ID NO: 495255 - DNA, 55 bp, Artificial; identical to SEQ ID NO: 8596
  Synthetic oligonucleotide

SEQ ID NO: 495256 - DNA, 51 bp, Artificial; identical to SEQ ID NO: 11241
  Synthetic oligonucleotide

SEQ ID NO: 495257 - DNA, 60 bp, Artificial; identical to SEQ ID NO: 7180
  Synthetic oligonucleotide

SEQ ID NO: 495258 - DNA, 55 bp, Artificial; identical to SEQ ID NO: 11610
  Synthetic oligonucleotide

SEQ ID NO: 495259 - DNA, 56 bp, Artificial; identical to SEQ ID NO: 9993
  Synthetic oligonucleotide

SEQ ID NO: 495260 - DNA, 60 bp, Artificial; identical to SEQ ID NO: 6314
  Synthetic oligonucleotide

SEQ ID NO: 495261 - DNA, 55 bp, Artificial; identical to SEQ ID NO: 10654
  Synthetic oligonucleotide

SEQ ID NO: 495262 - DNA, 60 bp, Artificial; identical to SEQ ID NO: 296
  Synthetic oligonucleotide

SEQ ID NO: 495263 - DNA, 55 bp, Artificial; identical to SEQ ID NO: 6721
  Synthetic oligonucleotide

SEQ ID NO: 495264 - DNA, 54 bp, Artificial; identical to SEQ ID NO: 18502
  Synthetic oligonucleotide

SEQ ID NO: 495265 - DNA, 59 bp, Artificial; identical to SEQ ID NO: 16228
  Synthetic oligonucleotide

SEQ ID NO: 495266 - DNA, 60 bp, Artificial; identical to SEQ ID NO: 7511
  Synthetic oligonucleotide

SEQ ID NO: 495267 - DNA, 55 bp, Artificial; identical to SEQ ID NO: 11834
  Synthetic oligonucleotide

SEQ ID NO: 495268 - DNA, 57 bp, Artificial; identical to SEQ ID NO: 18102
  Synthetic oligonucleotide

SEQ ID NO: 495269 - DNA, 57 bp, Artificial; identical to SEQ ID NO: 9052
  Synthetic oligonucleotide

SEQ ID NO: 495270 - DNA, 55 bp, Artificial; identical to SEQ ID NO: 10086
  Synthetic oligonucleotide

SEQ ID NO: 495271 - DNA, 58 bp, Artificial; identical to SEQ ID NO: 16668
  Synthetic oligonucleotide

SEQ ID NO: 495272 - DNA, 55 bp, Artificial; identical to SEQ ID NO: 9664
  Synthetic oligonucleotide

SEQ ID NO: 495273 - DNA, 55 bp, Artificial; identical to SEQ ID NO: 11110
  Synthetic oligonucleotide

SEQ ID NO: 495274 - DNA, 56 bp, Artificial; identical to SEQ ID NO: 9826
  Synthetic oligonucleotide

SEQ ID NO: 495275 - DNA, 55 bp, Artificial; identical to SEQ ID NO: 15457
  Synthetic oligonucleotide

SEQ ID NO: 495276 - DNA, 60 bp, Artificial; identical to SEQ ID NO: 14205
  Synthetic oligonucleotide

SEQ ID NO: 495277 - DNA, 52 bp, Artificial; identical to SEQ ID NO: 11298
  Synthetic oligonucleotide

SEQ ID NO: 495278 - DNA, 60 bp, Artificial; identical to SEQ ID NO: 6699
  Synthetic oligonucleotide

SEQ ID NO: 495279 - DNA, 54 bp, Artificial; identical to SEQ ID NO: 6441
  Synthetic oligonucleotide

SEQ ID NO: 495280 - DNA, 60 bp, Artificial; identical to SEQ ID NO: 11951
  Synthetic oligonucleotide

SEQ ID NO: 495281 - DNA, 57 bp, Artificial; identical to SEQ ID NO: 12454
  Synthetic oligonucleotide

SEQ ID NO: 495282 - DNA, 56 bp, Artificial; identical to SEQ ID NO: 17676
  Synthetic oligonucleotide

SEQ ID NO: 495283 - DNA, 60 bp, Artificial; identical to SEQ ID NO: 11747
  Synthetic oligonucleotide

SEQ ID NO: 495284 - DNA, 53 bp, Artificial; identical to SEQ ID NO: 14323
  Synthetic oligonucleotide

SEQ ID NO: 495285 - DNA, 58 bp, Artificial; identical to SEQ ID NO: 9685
  Synthetic oligonucleotide

SEQ ID NO: 495286 - DNA, 55 bp, Artificial; identical to SEQ ID NO: 12924
  Synthetic oligonucleotide

SEQ ID NO: 495287 - DNA, 60 bp, Artificial; identical to SEQ ID NO: 6835
  Synthetic oligonucleotide

SEQ ID NO: 495288 - DNA, 60 bp, Artificial; identical to SEQ ID NO: 6843
  Synthetic oligonucleotide

SEQ ID NO: 495289 - DNA, 55 bp, Artificial; identical to SEQ ID NO: 15540
  Synthetic oligonucleotide

SEQ ID NO: 495290 - DNA, 55 bp, Artificial; identical to SEQ ID NO: 13339
  Synthetic oligonucleotide

SEQ ID NO: 495291 - DNA, 60 bp, Artificial; identical to SEQ ID NO: 9771
  Synthetic oligonucleotide

SEQ ID NO: 495292 - DNA, 58 bp, Artificial; identical to SEQ ID NO: 17949
  Synthetic oligonucleotide

SEQ ID NO: 495293 - DNA, 54 bp, Artificial; identical to SEQ ID NO: 16346
  Synthetic oligonucleotide

SEQ ID NO: 495294 - DNA, 57 bp, Artificial; identical to SEQ ID NO: 15994
  Synthetic oligonucleotide

SEQ ID NO: 495295 - DNA, 56 bp, Artificial; identical to SEQ ID NO: 19498
  Synthetic oligonucleotide

SEQ ID NO: 495296 - DNA, 59 bp, Artificial; identical to SEQ ID NO: 19909
  Synthetic oligonucleotide

SEQ ID NO: 495297 - DNA, 55 bp, Artificial; identical to SEQ ID NO: 18056
  Synthetic oligonucleotide

SEQ ID NO: 495298 - DNA, 51 bp, Artificial; identical to SEQ ID NO: 9143
  Synthetic oligonucleotide

SEQ ID NO: 495299 - DNA, 57 bp, Artificial; identical to SEQ ID NO: 19699
  Synthetic oligonucleotide

SEQ ID NO: 495300 - DNA, 53 bp, Artificial; identical to SEQ ID NO: 7255
  Synthetic oligonucleotide

SEQ ID NO: 495301 - DNA, 52 bp, Artificial; identical to SEQ ID NO: 16488
  Synthetic oligonucleotide

SEQ ID NO: 495302 - DNA, 58 bp, Artificial; identical to SEQ ID NO: 19588
  Synthetic oligonucleotide

SEQ ID NO: 495303 - DNA, 55 bp, Artificial; identical to SEQ ID NO: 11199
  Synthetic oligonucleotide

SEQ ID NO: 495304 - DNA, 52 bp, Artificial; identical to SEQ ID NO: 11387
  Synthetic oligonucleotide

SEQ ID NO: 495305 - DNA, 55 bp, Artificial; identical to SEQ ID NO: 11480
  Synthetic oligonucleotide

SEQ ID NO: 495306 - DNA, 60 bp, Artificial; identical to SEQ ID NO: 14524
  Synthetic oligonucleotide

SEQ ID NO: 495307 - DNA, 53 bp, Artificial; identical to SEQ ID NO: 15244
  Synthetic oligonucleotide

SEQ ID NO: 495308 - DNA, 54 bp, Artificial; identical to SEQ ID NO: 6604
  Synthetic oligonucleotide

SEQ ID NO: 495309 - DNA, 51 bp, Artificial; identical to SEQ ID NO: 7272
  Synthetic oligonucleotide

SEQ ID NO: 495310 - DNA, 54 bp, Artificial; identical to SEQ ID NO: 18263
  Synthetic oligonucleotide

SEQ ID NO: 495311 - DNA, 51 bp, Artificial; identical to SEQ ID NO: 8183
  Synthetic oligonucleotide

SEQ ID NO: 495312 - DNA, 59 bp, Artificial; identical to SEQ ID NO: 8665
  Synthetic oligonucleotide

SEQ ID NO: 495313 - DNA, 60 bp, Artificial; identical to SEQ ID NO: 10144
  Synthetic oligonucleotide

SEQ ID NO: 495314 - DNA, 55 bp, Artificial; identical to SEQ ID NO: 15396
  Synthetic oligonucleotide

SEQ ID NO: 495315 - DNA, 55 bp, Artificial; identical to SEQ ID NO: 5919
  Synthetic oligonucleotide

SEQ ID NO: 495316 - DNA, 57 bp, Artificial; identical to SEQ ID NO: 18509
  Synthetic oligonucleotide

SEQ ID NO: 495317 - DNA, 55 bp, Artificial; identical to SEQ ID NO: 11339
  Synthetic oligonucleotide

SEQ ID NO: 495318 - DNA, 53 bp, Artificial; identical to SEQ ID NO: 10499
  Synthetic oligonucleotide

SEQ ID NO: 495319 - DNA, 51 bp, Artificial; identical to SEQ ID NO: 5937
  Synthetic oligonucleotide

SEQ ID NO: 495320 - DNA, 55 bp, Artificial; identical to SEQ ID NO: 6871
  Synthetic oligonucleotide

SEQ ID NO: 495321 - DNA, 52 bp, Artificial; identical to SEQ ID NO: 7623
  Synthetic oligonucleotide

SEQ ID NO: 495322 - DNA, 55 bp, Artificial; identical to SEQ ID NO: 9515
  Synthetic oligonucleotide

SEQ ID NO: 495323 - DNA, 55 bp, Artificial; identical to SEQ ID NO: 6945
  Synthetic oligonucleotide

SEQ ID NO: 495324 - DNA, 55 bp, Artificial; identical to SEQ ID NO: 7557
  Synthetic oligonucleotide

SEQ ID NO: 495325 - DNA, 58 bp, Artificial; identical to SEQ ID NO: 19811
  Synthetic oligonucleotide

SEQ ID NO: 495326 - DNA, 55 bp, Artificial; identical to SEQ ID NO: 13044
  Synthetic oligonucleotide

SEQ ID NO: 495327 - DNA, 55 bp, Artificial; identical to SEQ ID NO: 5753
  Synthetic oligonucleotide

SEQ ID NO: 495328 - DNA, 55 bp, Artificial; identical to SEQ ID NO: 10389
  Synthetic oligonucleotide

SEQ ID NO: 495329 - DNA, 54 bp, Artificial; identical to SEQ ID NO: 18120
  Synthetic oligonucleotide

SEQ ID NO: 495330 - DNA, 55 bp, Artificial; identical to SEQ ID NO: 12530
  Synthetic oligonucleotide

SEQ ID NO: 495331 - DNA, 55 bp, Artificial; identical to SEQ ID NO: 6531
  Synthetic oligonucleotide

SEQ ID NO: 495332 - DNA, 50 bp, Artificial; identical to SEQ ID NO: 20123
  Synthetic oligonucleotide

SEQ ID NO: 495333 - DNA, 51 bp, Artificial; identical to SEQ ID NO: 17977
  Synthetic oligonucleotide

SEQ ID NO: 495334 - DNA, 60 bp, Artificial; identical to SEQ ID NO: 13429
  Synthetic oligonucleotide

SEQ ID NO: 495335 - DNA, 54 bp, Artificial; identical to SEQ ID NO: 9429
  Synthetic oligonucleotide

SEQ ID NO: 495336 - DNA, 59 bp, Artificial; identical to SEQ ID NO: 20489
  Synthetic oligonucleotide

SEQ ID NO: 495337 - DNA, 59 bp, Artificial; identical to SEQ ID NO: 20269
  Synthetic oligonucleotide

SEQ ID NO: 495338 - DNA, 53 bp, Artificial; identical to SEQ ID NO: 6243
  Synthetic oligonucleotide

SEQ ID NO: 495339 - DNA, 51 bp, Artificial; identical to SEQ ID NO: 5933
  Synthetic oligonucleotide

SEQ ID NO: 495340 - DNA, 50 bp, Artificial; identical to SEQ ID NO: 6684
  Synthetic oligonucleotide

SEQ ID NO: 495341 - DNA, 58 bp, Artificial; identical to SEQ ID NO: 18669
  Synthetic oligonucleotide

SEQ ID NO: 495342 - DNA, 55 bp, Artificial; identical to SEQ ID NO: 8272
  Synthetic oligonucleotide

SEQ ID NO: 495343 - DNA, 55 bp, Artificial; identical to SEQ ID NO: 9985
  Synthetic oligonucleotide

SEQ ID NO: 495344 - DNA, 55 bp, Artificial; identical to SEQ ID NO: 15904
  Synthetic oligonucleotide

SEQ ID NO: 495345 - DNA, 53 bp, Artificial; identical to SEQ ID NO: 10943
  Synthetic oligonucleotide

SEQ ID NO: 495346 - DNA, 55 bp, Artificial; identical to SEQ ID NO: 6793
  Synthetic oligonucleotide

SEQ ID NO: 495347 - DNA, 51 bp, Artificial; identical to SEQ ID NO: 8251
  Synthetic oligonucleotide

SEQ ID NO: 495348 - DNA, 55 bp, Artificial; identical to SEQ ID NO: 9900
  Synthetic oligonucleotide

SEQ ID NO: 495349 - DNA, 60 bp, Artificial; identical to SEQ ID NO: 9233
  Synthetic oligonucleotide

SEQ ID NO: 495350 - DNA, 55 bp, Artificial; identical to SEQ ID NO: 15727
  Synthetic oligonucleotide

SEQ ID NO: 495351 - DNA, 55 bp, Artificial; identical to SEQ ID NO: 12201
  Synthetic oligonucleotide

SEQ ID NO: 495352 - DNA, 53 bp, Artificial; identical to SEQ ID NO: 14224
  Synthetic oligonucleotide

SEQ ID NO: 495353 - DNA, 53 bp, Artificial; identical to SEQ ID NO: 17709
  Synthetic oligonucleotide

SEQ ID NO: 495354 - DNA, 59 bp, Artificial; identical to SEQ ID NO: 17964
  Synthetic oligonucleotide

SEQ ID NO: 495355 - DNA, 55 bp, Artificial; identical to SEQ ID NO: 12812
  Synthetic oligonucleotide

SEQ ID NO: 495356 - DNA, 53 bp, Artificial; identical to SEQ ID NO: 16686
  Synthetic oligonucleotide

SEQ ID NO: 495357 - DNA, 60 bp, Artificial; identical to SEQ ID NO: 13355
  Synthetic oligonucleotide

SEQ ID NO: 495358 - DNA, 60 bp, Artificial; identical to SEQ ID NO: 9560
  Synthetic oligonucleotide

SEQ ID NO: 495359 - DNA, 60 bp, Artificial; identical to SEQ ID NO: 11707
  Synthetic oligonucleotide

SEQ ID NO: 495360 - DNA, 60 bp, Artificial; identical to SEQ ID NO: 8725
  Synthetic oligonucleotide

SEQ ID NO: 495361 - DNA, 55 bp, Artificial; identical to SEQ ID NO: 8085
  Synthetic oligonucleotide

SEQ ID NO: 495362 - DNA, 55 bp, Artificial; identical to SEQ ID NO: 9347
  Synthetic oligonucleotide

SEQ ID NO: 495363 - DNA, 50 bp, Artificial; identical to SEQ ID NO: 9044
  Synthetic oligonucleotide

SEQ ID NO: 495364 - DNA, 55 bp, Artificial; identical to SEQ ID NO: 13055
  Synthetic oligonucleotide

SEQ ID NO: 495365 - DNA, 55 bp, Artificial; identical to SEQ ID NO: 8030
  Synthetic oligonucleotide

SEQ ID NO: 495366 - DNA, 60 bp, Artificial; identical to SEQ ID NO: 9023
  Synthetic oligonucleotide

SEQ ID NO: 495367 - DNA, 55 bp, Artificial; identical to SEQ ID NO: 14017
  Synthetic oligonucleotide

SEQ ID NO: 495368 - DNA, 50 bp, Artificial; identical to SEQ ID NO: 10649
  Synthetic oligonucleotide

SEQ ID NO: 495369 - DNA, 57 bp, Artificial; identical to SEQ ID NO: 14816
  Synthetic oligonucleotide

SEQ ID NO: 495370 - DNA, 51 bp, Artificial; identical to SEQ ID NO: 7636
  Synthetic oligonucleotide

SEQ ID NO: 495371 - DNA, 55 bp, Artificial; identical to SEQ ID NO: 8194
  Synthetic oligonucleotide

SEQ ID NO: 495372 - DNA, 55 bp, Artificial; identical to SEQ ID NO: 7627
  Synthetic oligonucleotide

SEQ ID NO: 495373 - DNA, 55 bp, Artificial; identical to SEQ ID NO: 11581
  Synthetic oligonucleotide

SEQ ID NO: 495374 - DNA, 58 bp, Artificial; identical to SEQ ID NO: 16534
  Synthetic oligonucleotide

SEQ ID NO: 495375 - DNA, 54 bp, Artificial; identical to SEQ ID NO: 18252
  Synthetic oligonucleotide

SEQ ID NO: 495376 - DNA, 58 bp, Artificial; identical to SEQ ID NO: 20117
  Synthetic oligonucleotide

SEQ ID NO: 495377 - DNA, 57 bp, Artificial; identical to SEQ ID NO: 17882
  Synthetic oligonucleotide

SEQ ID NO: 495378 - DNA, 56 bp, Artificial; identical to SEQ ID NO: 19924
  Synthetic oligonucleotide

SEQ ID NO: 495379 - DNA, 52 bp, Artificial; identical to SEQ ID NO: 16779
  Synthetic oligonucleotide

SEQ ID NO: 495380 - DNA, 54 bp, Artificial; identical to SEQ ID NO: 19431
  Synthetic oligonucleotide

SEQ ID NO: 495381 - DNA, 55 bp, Artificial; identical to SEQ ID NO: 11313
  Synthetic oligonucleotide

SEQ ID NO: 495382 - DNA, 55 bp, Artificial; identical to SEQ ID NO: 12240
  Synthetic oligonucleotide

SEQ ID NO: 495383 - DNA, 60 bp, Artificial; identical to SEQ ID NO: 12727
  Synthetic oligonucleotide

SEQ ID NO: 495384 - DNA, 55 bp, Artificial; identical to SEQ ID NO: 16496
  Synthetic oligonucleotide

SEQ ID NO: 495385 - DNA, 60 bp, Artificial; identical to SEQ ID NO: 11179
  Synthetic oligonucleotide

SEQ ID NO: 495386 - DNA, 55 bp, Artificial; identical to SEQ ID NO: 9534
  Synthetic oligonucleotide

SEQ ID NO: 495387 - DNA, 56 bp, Artificial; identical to SEQ ID NO: 16274
  Synthetic oligonucleotide

SEQ ID NO: 495388 - DNA, 54 bp, Artificial; identical to SEQ ID NO: 16783
  Synthetic oligonucleotide

SEQ ID NO: 495389 - DNA, 52 bp, Artificial; identical to SEQ ID NO: 6682
  Synthetic oligonucleotide

SEQ ID NO: 495390 - DNA, 50 bp, Artificial; identical to SEQ ID NO: 11388
  Synthetic oligonucleotide

SEQ ID NO: 495391 - DNA, 50 bp, Artificial; identical to SEQ ID NO: 15157
  Synthetic oligonucleotide

SEQ ID NO: 495392 - DNA, 60 bp, Artificial; identical to SEQ ID NO: 5886
  Synthetic oligonucleotide

SEQ ID NO: 495393 - DNA, 59 bp, Artificial; identical to SEQ ID NO: 5855
  Synthetic oligonucleotide

SEQ ID NO: 495394 - DNA, 53 bp, Artificial; identical to SEQ ID NO: 9720
  Synthetic oligonucleotide

SEQ ID NO: 495395 - DNA, 60 bp, Artificial; identical to SEQ ID NO: 15395
  Synthetic oligonucleotide

SEQ ID NO: 495396 - DNA, 60 bp, Artificial; identical to SEQ ID NO: 9061
  Synthetic oligonucleotide

SEQ ID NO: 495397 - DNA, 60 bp, Artificial; identical to SEQ ID NO: 7981
  Synthetic oligonucleotide

SEQ ID NO: 495398 - DNA, 57 bp, Artificial; identical to SEQ ID NO: 7499
  Synthetic oligonucleotide

SEQ ID NO: 495399 - DNA, 55 bp, Artificial; identical to SEQ ID NO: 6106
  Synthetic oligonucleotide

SEQ ID NO: 495400 - DNA, 58 bp, Artificial; identical to SEQ ID NO: 18570
  Synthetic oligonucleotide

SEQ ID NO: 495401 - DNA, 52 bp, Artificial; identical to SEQ ID NO: 7607
  Synthetic oligonucleotide

SEQ ID NO: 495402 - DNA, 50 bp, Artificial; identical to SEQ ID NO: 12789
  Synthetic oligonucleotide

SEQ ID NO: 495403 - DNA, 52 bp, Artificial; identical to SEQ ID NO: 14628
  Synthetic oligonucleotide

SEQ ID NO: 495404 - DNA, 59 bp, Artificial; identical to SEQ ID NO: 17021
  Synthetic oligonucleotide

SEQ ID NO: 495405 - DNA, 50 bp, Artificial; identical to SEQ ID NO: 7663
  Synthetic oligonucleotide

SEQ ID NO: 495406 - DNA, 60 bp, Artificial; identical to SEQ ID NO: 13272
  Synthetic oligonucleotide

SEQ ID NO: 495407 - DNA, 60 bp, Artificial; identical to SEQ ID NO: 6827
  Synthetic oligonucleotide

SEQ ID NO: 495408 - DNA, 56 bp, Artificial; identical to SEQ ID NO: 17508
  Synthetic oligonucleotide

SEQ ID NO: 495409 - DNA, 60 bp, Artificial; identical to SEQ ID NO: 8700
  Synthetic oligonucleotide

SEQ ID NO: 495410 - DNA, 50 bp, Artificial; identical to SEQ ID NO: 10418
  Synthetic oligonucleotide

SEQ ID NO: 495411 - DNA, 52 bp, Artificial; identical to SEQ ID NO: 10052
  Synthetic oligonucleotide

SEQ ID NO: 495412 - DNA, 52 bp, Artificial; identical to SEQ ID NO: 7113
  Synthetic oligonucleotide

SEQ ID NO: 495413 - DNA, 56 bp, Artificial; identical to SEQ ID NO: 16199
  Synthetic oligonucleotide

SEQ ID NO: 495414 - DNA, 53 bp, Artificial; identical to SEQ ID NO: 5963
  Synthetic oligonucleotide

SEQ ID NO: 495415 - DNA, 55 bp, Artificial; identical to SEQ ID NO: 6566
  Synthetic oligonucleotide

SEQ ID NO: 495416 - DNA, 51 bp, Artificial; identical to SEQ ID NO: 11117
  Synthetic oligonucleotide

SEQ ID NO: 495417 - DNA, 54 bp, Artificial; identical to SEQ ID NO: 11239
  Synthetic oligonucleotide

SEQ ID NO: 495418 - DNA, 60 bp, Artificial; identical to SEQ ID NO: 11273
  Synthetic oligonucleotide

SEQ ID NO: 495419 - DNA, 60 bp, Artificial; identical to SEQ ID NO: 11325
  Synthetic oligonucleotide

SEQ ID NO: 495420 - DNA, 59 bp, Artificial; identical to SEQ ID NO: 13325
  Synthetic oligonucleotide

SEQ ID NO: 495421 - DNA, 50 bp, Artificial; identical to SEQ ID NO: 15334
  Synthetic oligonucleotide

SEQ ID NO: 495422 - DNA, 53 bp, Artificial; identical to SEQ ID NO: 12732
  Synthetic oligonucleotide

SEQ ID NO: 495423 - DNA, 51 bp, Artificial; identical to SEQ ID NO: 10597
  Synthetic oligonucleotide

SEQ ID NO: 495424 - DNA, 58 bp, Artificial; identical to SEQ ID NO: 12280
  Synthetic oligonucleotide

SEQ ID NO: 495425 - DNA, 51 bp, Artificial; identical to SEQ ID NO: 6211
  Synthetic oligonucleotide

SEQ ID NO: 495426 - DNA, 58 bp, Artificial; identical to SEQ ID NO: 11591
  Synthetic oligonucleotide

SEQ ID NO: 495427 - DNA, 57 bp, Artificial; identical to SEQ ID NO: 9114
  Synthetic oligonucleotide

SEQ ID NO: 495428 - DNA, 51 bp, Artificial; identical to SEQ ID NO: 15309
  Synthetic oligonucleotide

SEQ ID NO: 495429 - DNA, 55 bp, Artificial; identical to SEQ ID NO: 13006
  Synthetic oligonucleotide

SEQ ID NO: 495430 - DNA, 55 bp, Artificial; identical to SEQ ID NO: 13394
  Synthetic oligonucleotide

SEQ ID NO: 495431 - DNA, 53 bp, Artificial; identical to SEQ ID NO: 6010
  Synthetic oligonucleotide

SEQ ID NO: 495432 - DNA, 60 bp, Artificial; identical to SEQ ID NO: 99891
  Synthetic oligonucleotide

SEQ ID NO: 495433 - DNA, 52 bp, Artificial; identical to SEQ ID NO: 11053
  Synthetic oligonucleotide

SEQ ID NO: 495434 - DNA, 51 bp, Artificial; identical to SEQ ID NO: 6204
  Synthetic oligonucleotide

SEQ ID NO: 495435 - DNA, 55 bp, Artificial; identical to SEQ ID NO: 13807
  Synthetic oligonucleotide

SEQ ID NO: 495436 - DNA, 60 bp, Artificial; identical to SEQ ID NO: 10205
  Synthetic oligonucleotide

SEQ ID NO: 495437 - DNA, 55 bp, Artificial; identical to SEQ ID NO: 10210
  Synthetic oligonucleotide

SEQ ID NO: 495438 - DNA, 60 bp, Artificial; identical to SEQ ID NO: 7316
  Synthetic oligonucleotide

SEQ ID NO: 495439 - DNA, 54 bp, Artificial; identical to SEQ ID NO: 11903
  Synthetic oligonucleotide

SEQ ID NO: 495440 - DNA, 56 bp, Artificial; identical to SEQ ID NO: 14458
  Synthetic oligonucleotide

SEQ ID NO: 495441 - DNA, 52 bp, Artificial; identical to SEQ ID NO: 6279
  Synthetic oligonucleotide

SEQ ID NO: 495442 - DNA, 60 bp, Artificial; identical to SEQ ID NO: 10306
  Synthetic oligonucleotide

SEQ ID NO: 495443 - DNA, 55 bp, Artificial; identical to SEQ ID NO: 7633
  Synthetic oligonucleotide

SEQ ID NO: 495444 - DNA, 58 bp, Artificial; identical to SEQ ID NO: 17360
  Synthetic oligonucleotide

SEQ ID NO: 495445 - DNA, 60 bp, Artificial; identical to SEQ ID NO: 57368
  Synthetic oligonucleotide

SEQ ID NO: 495446 - DNA, 50 bp, Artificial; identical to SEQ ID NO: 9999
  Synthetic oligonucleotide

SEQ ID NO: 495447 - DNA, 51 bp, Artificial; identical to SEQ ID NO: 13262
  Synthetic oligonucleotide

SEQ ID NO: 495448 - DNA, 60 bp, Artificial; identical to SEQ ID NO: 8739
  Synthetic oligonucleotide

SEQ ID NO: 495449 - DNA, 60 bp, Artificial; identical to SEQ ID NO: 9369
  Synthetic oligonucleotide

SEQ ID NO: 495450 - DNA, 52 bp, Artificial; identical to SEQ ID NO: 11333
  Synthetic oligonucleotide

SEQ ID NO: 495451 - DNA, 52 bp, Artificial; identical to SEQ ID NO: 13103
  Synthetic oligonucleotide

SEQ ID NO: 495452 - DNA, 54 bp, Artificial; identical to SEQ ID NO: 15499
  Synthetic oligonucleotide

SEQ ID NO: 495453 - DNA, 54 bp, Artificial; identical to SEQ ID NO: 6743
  Synthetic oligonucleotide

SEQ ID NO: 495454 - DNA, 50 bp, Artificial; identical to SEQ ID NO: 6968
  Synthetic oligonucleotide

SEQ ID NO: 495455 - DNA, 55 bp, Artificial; identical to SEQ ID NO: 10704
  Synthetic oligonucleotide

SEQ ID NO: 495456 - DNA, 56 bp, Artificial; identical to SEQ ID NO: 16905
  Synthetic oligonucleotide

SEQ ID NO: 495457 - DNA, 60 bp, Artificial; identical to SEQ ID NO: 9520
  Synthetic oligonucleotide

SEQ ID NO: 495458 - DNA, 57 bp, Artificial; identical to SEQ ID NO: 11490
  Synthetic oligonucleotide

SEQ ID NO: 495459 - DNA, 60 bp, Artificial; identical to SEQ ID NO: 7656
  Synthetic oligonucleotide

SEQ ID NO: 495460 - DNA, 55 bp, Artificial; identical to SEQ ID NO: 9261
  Synthetic oligonucleotide

SEQ ID NO: 495461 - DNA, 50 bp, Artificial; identical to SEQ ID NO: 5961
  Synthetic oligonucleotide

SEQ ID NO: 495462 - DNA, 54 bp, Artificial; identical to SEQ ID NO: 13796
  Synthetic oligonucleotide

SEQ ID NO: 495463 - DNA, 50 bp, Artificial; identical to SEQ ID NO: 9979
  Synthetic oligonucleotide

SEQ ID NO: 495464 - DNA, 58 bp, Artificial; identical to SEQ ID NO: 15012
  Synthetic oligonucleotide

SEQ ID NO: 495465 - DNA, 53 bp, Artificial; identical to SEQ ID NO: 12129
  Synthetic oligonucleotide

SEQ ID NO: 495466 - DNA, 55 bp, Artificial; identical to SEQ ID NO: 9297
  Synthetic oligonucleotide

SEQ ID NO: 495467 - DNA, 55 bp, Artificial; identical to SEQ ID NO: 10209
  Synthetic oligonucleotide

SEQ ID NO: 495468 - DNA, 56 bp, Artificial; identical to SEQ ID NO: 9604
  Synthetic oligonucleotide

SEQ ID NO: 495469 - DNA, 60 bp, Artificial; identical to SEQ ID NO: 5863
  Synthetic oligonucleotide

SEQ ID NO: 495470 - DNA, 55 bp, Artificial; identical to SEQ ID NO: 5923
  Synthetic oligonucleotide

SEQ ID NO: 495471 - DNA, 59 bp, Artificial; identical to SEQ ID NO: 17389
  Synthetic oligonucleotide

SEQ ID NO: 495472 - DNA, 53 bp, Artificial; identical to SEQ ID NO: 12581
  Synthetic oligonucleotide

SEQ ID NO: 495473 - DNA, 55 bp, Artificial; identical to SEQ ID NO: 6375
  Synthetic oligonucleotide

SEQ ID NO: 495474 - DNA, 55 bp, Artificial; identical to SEQ ID NO: 6342
  Synthetic oligonucleotide

SEQ ID NO: 495475 - DNA, 56 bp, Artificial; identical to SEQ ID NO: 18774
  Synthetic oligonucleotide

SEQ ID NO: 495476 - DNA, 52 bp, Artificial; identical to SEQ ID NO: 10467
  Synthetic oligonucleotide

SEQ ID NO: 495477 - DNA, 54 bp, Artificial; identical to SEQ ID NO: 14436
  Synthetic oligonucleotide

SEQ ID NO: 495478 - DNA, 55 bp, Artificial; identical to SEQ ID NO: 12243
  Synthetic oligonucleotide

SEQ ID NO: 495479 - DNA, 55 bp, Artificial; identical to SEQ ID NO: 14668
  Synthetic oligonucleotide

SEQ ID NO: 495480 - DNA, 60 bp, Artificial; identical to SEQ ID NO: 13675
  Synthetic oligonucleotide

SEQ ID NO: 495481 - DNA, 52 bp, Artificial; identical to SEQ ID NO: 12452
  Synthetic oligonucleotide

SEQ ID NO: 495482 - DNA, 55 bp, Artificial; identical to SEQ ID NO: 15838
  Synthetic oligonucleotide

SEQ ID NO: 495483 - DNA, 55 bp, Artificial; identical to SEQ ID NO: 13447
  Synthetic oligonucleotide

SEQ ID NO: 495484 - DNA, 55 bp, Artificial; identical to SEQ ID NO: 12659
  Synthetic oligonucleotide

SEQ ID NO: 495485 - DNA, 55 bp, Artificial; identical to SEQ ID NO: 11258
  Synthetic oligonucleotide

SEQ ID NO: 495486 - DNA, 57 bp, Artificial; identical to SEQ ID NO: 18602
  Synthetic oligonucleotide

SEQ ID NO: 495487 - DNA, 59 bp, Artificial; identical to SEQ ID NO: 11063
  Synthetic oligonucleotide

SEQ ID NO: 495488 - DNA, 58 bp, Artificial; identical to SEQ ID NO: 12195
  Synthetic oligonucleotide

SEQ ID NO: 495489 - DNA, 55 bp, Artificial; identical to SEQ ID NO: 6377
  Synthetic oligonucleotide

SEQ ID NO: 495490 - DNA, 60 bp, Artificial; identical to SEQ ID NO: 7897
  Synthetic oligonucleotide

SEQ ID NO: 495491 - DNA, 55 bp, Artificial; identical to SEQ ID NO: 9139
  Synthetic oligonucleotide

SEQ ID NO: 495492 - DNA, 54 bp, Artificial; identical to SEQ ID NO: 11793
  Synthetic oligonucleotide

SEQ ID NO: 495493 - DNA, 58 bp, Artificial; identical to SEQ ID NO: 6555
  Synthetic oligonucleotide

SEQ ID NO: 495494 - DNA, 54 bp, Artificial; identical to SEQ ID NO: 15518
  Synthetic oligonucleotide

SEQ ID NO: 495495 - DNA, 55 bp, Artificial; identical to SEQ ID NO: 9654
  Synthetic oligonucleotide

SEQ ID NO: 495496 - DNA, 55 bp, Artificial; identical to SEQ ID NO: 9800
  Synthetic oligonucleotide

SEQ ID NO: 495497 - DNA, 51 bp, Artificial; identical to SEQ ID NO: 14662
  Synthetic oligonucleotide

SEQ ID NO: 495498 - DNA, 55 bp, Artificial; identical to SEQ ID NO: 9466
  Synthetic oligonucleotide

SEQ ID NO: 495499 - DNA, 60 bp, Artificial; identical to SEQ ID NO: 13975
  Synthetic oligonucleotide

SEQ ID NO: 495500 - DNA, 60 bp, Artificial; identical to SEQ ID NO: 6480
  Synthetic oligonucleotide

SEQ ID NO: 495501 - DNA, 57 bp, Artificial; identical to SEQ ID NO: 9559
  Synthetic oligonucleotide

SEQ ID NO: 495502 - DNA, 58 bp, Artificial; identical to SEQ ID NO: 18558
  Synthetic oligonucleotide

SEQ ID NO: 495503 - DNA, 60 bp, Artificial; identical to SEQ ID NO: 11538
  Synthetic oligonucleotide

SEQ ID NO: 495504 - DNA, 58 bp, Artificial; identical to SEQ ID NO: 6560
  Synthetic oligonucleotide

SEQ ID NO: 495505 - DNA, 55 bp, Artificial; identical to SEQ ID NO: 8721
  Synthetic oligonucleotide

SEQ ID NO: 495506 - DNA, 60 bp, Artificial; identical to SEQ ID NO: 9230
  Synthetic oligonucleotide

SEQ ID NO: 495507 - DNA, 59 bp, Artificial; identical to SEQ ID NO: 13341
  Synthetic oligonucleotide

SEQ ID NO: 495508 - DNA, 53 bp, Artificial; identical to SEQ ID NO: 10282
  Synthetic oligonucleotide

SEQ ID NO: 495509 - DNA, 55 bp, Artificial; identical to SEQ ID NO: 11523
  Synthetic oligonucleotide

SEQ ID NO: 495510 - DNA, 56 bp, Artificial; identical to SEQ ID NO: 20401
  Synthetic oligonucleotide

SEQ ID NO: 495511 - DNA, 52 bp, Artificial; identical to SEQ ID NO: 20004
  Synthetic oligonucleotide

SEQ ID NO: 495512 - DNA, 54 bp, Artificial; identical to SEQ ID NO: 15878
  Synthetic oligonucleotide

SEQ ID NO: 495513 - DNA, 55 bp, Artificial; identical to SEQ ID NO: 16785
  Synthetic oligonucleotide

SEQ ID NO: 495514 - DNA, 52 bp, Artificial; identical to SEQ ID NO: 9919
  Synthetic oligonucleotide

SEQ ID NO: 495515 - DNA, 59 bp, Artificial; identical to SEQ ID NO: 17028
  Synthetic oligonucleotide

SEQ ID NO: 495516 - DNA, 55 bp, Artificial; identical to SEQ ID NO: 9097
  Synthetic oligonucleotide

SEQ ID NO: 495517 - DNA, 53 bp, Artificial; identical to SEQ ID NO: 8566
  Synthetic oligonucleotide

SEQ ID NO: 495518 - DNA, 55 bp, Artificial; identical to SEQ ID NO: 14641
  Synthetic oligonucleotide

SEQ ID NO: 495519 - DNA, 56 bp, Artificial; identical to SEQ ID NO: 20226
  Synthetic oligonucleotide

SEQ ID NO: 495520 - DNA, 60 bp, Artificial; identical to SEQ ID NO: 7278
  Synthetic oligonucleotide

SEQ ID NO: 495521 - DNA, 57 bp, Artificial; identical to SEQ ID NO: 5864
  Synthetic oligonucleotide

SEQ ID NO: 495522 - DNA, 55 bp, Artificial; identical to SEQ ID NO: 10178
  Synthetic oligonucleotide

SEQ ID NO: 495523 - DNA, 60 bp, Artificial; identical to SEQ ID NO: 14806
  Synthetic oligonucleotide

SEQ ID NO: 495524 - DNA, 55 bp, Artificial; identical to SEQ ID NO: 14430
  Synthetic oligonucleotide

SEQ ID NO: 495525 - DNA, 60 bp, Artificial; identical to SEQ ID NO: 9851
  Synthetic oligonucleotide

SEQ ID NO: 495526 - DNA, 55 bp, Artificial; identical to SEQ ID NO: 13945
  Synthetic oligonucleotide

SEQ ID NO: 495527 - DNA, 53 bp, Artificial; identical to SEQ ID NO: 10206
  Synthetic oligonucleotide

SEQ ID NO: 495528 - DNA, 54 bp, Artificial; identical to SEQ ID NO: 19571
  Synthetic oligonucleotide

SEQ ID NO: 495529 - DNA, 55 bp, Artificial; identical to SEQ ID NO: 8220
  Synthetic oligonucleotide

SEQ ID NO: 495530 - DNA, 52 bp, Artificial; identical to SEQ ID NO: 17097
  Synthetic oligonucleotide

SEQ ID NO: 495531 - DNA, 60 bp, Artificial; identical to SEQ ID NO: 14697
  Synthetic oligonucleotide

SEQ ID NO: 495532 - DNA, 50 bp, Artificial; identical to SEQ ID NO: 6719
  Synthetic oligonucleotide

SEQ ID NO: 495533 - DNA, 50 bp, Artificial; identical to SEQ ID NO: 10328
  Synthetic oligonucleotide

SEQ ID NO: 495534 - DNA, 52 bp, Artificial; identical to SEQ ID NO: 7059
  Synthetic oligonucleotide

SEQ ID NO: 495535 - DNA, 58 bp, Artificial; identical to SEQ ID NO: 18752
  Synthetic oligonucleotide

SEQ ID NO: 495536 - DNA, 56 bp, Artificial; identical to SEQ ID NO: 18843
  Synthetic oligonucleotide

SEQ ID NO: 495537 - DNA, 55 bp, Artificial; identical to SEQ ID NO: 11677
  Synthetic oligonucleotide

SEQ ID NO: 495538 - DNA, 60 bp, Artificial; identical to SEQ ID NO: 9199
  Synthetic oligonucleotide

SEQ ID NO: 495539 - DNA, 60 bp, Artificial; identical to SEQ ID NO: 14982
  Synthetic oligonucleotide

SEQ ID NO: 495540 - DNA, 58 bp, Artificial; identical to SEQ ID NO: 20410
  Synthetic oligonucleotide

SEQ ID NO: 495541 - DNA, 55 bp, Artificial; identical to SEQ ID NO: 9590
  Synthetic oligonucleotide

SEQ ID NO: 495542 - DNA, 55 bp, Artificial; identical to SEQ ID NO: 13610
  Synthetic oligonucleotide

SEQ ID NO: 495543 - DNA, 55 bp, Artificial; identical to SEQ ID NO: 11181
  Synthetic oligonucleotide

SEQ ID NO: 495544 - DNA, 51 bp, Artificial; identical to SEQ ID NO: 9513
  Synthetic oligonucleotide

SEQ ID NO: 495545 - DNA, 58 bp, Artificial; identical to SEQ ID NO: 18914
  Synthetic oligonucleotide

SEQ ID NO: 495546 - DNA, 53 bp, Artificial; identical to SEQ ID NO: 16835
  Synthetic oligonucleotide

SEQ ID NO: 495547 - DNA, 50 bp, Artificial; identical to SEQ ID NO: 10430
  Synthetic oligonucleotide

SEQ ID NO: 495548 - DNA, 50 bp, Artificial; identical to SEQ ID NO: 5881
  Synthetic oligonucleotide

SEQ ID NO: 495549 - DNA, 51 bp, Artificial; identical to SEQ ID NO: 12359
  Synthetic oligonucleotide

SEQ ID NO: 495550 - DNA, 60 bp, Artificial; identical to SEQ ID NO: 10112
  Synthetic oligonucleotide

SEQ ID NO: 495551 - DNA, 59 bp, Artificial; identical to SEQ ID NO: 6036
  Synthetic oligonucleotide

SEQ ID NO: 495552 - DNA, 52 bp, Artificial; identical to SEQ ID NO: 14884
  Synthetic oligonucleotide

SEQ ID NO: 495553 - DNA, 54 bp, Artificial; identical to SEQ ID NO: 7455
  Synthetic oligonucleotide

SEQ ID NO: 495554 - DNA, 52 bp, Artificial; identical to SEQ ID NO: 12132
  Synthetic oligonucleotide

SEQ ID NO: 495555 - DNA, 60 bp, Artificial; identical to SEQ ID NO: 107437
  Synthetic oligonucleotide

SEQ ID NO: 495556 - DNA, 56 bp, Artificial; identical to SEQ ID NO: 15329
  Synthetic oligonucleotide

SEQ ID NO: 495557 - DNA, 54 bp, Artificial; identical to SEQ ID NO: 15608
  Synthetic oligonucleotide

SEQ ID NO: 495558 - DNA, 60 bp, Artificial; identical to SEQ ID NO: 13577
  Synthetic oligonucleotide

SEQ ID NO: 495559 - DNA, 51 bp, Artificial; identical to SEQ ID NO: 17325
  Synthetic oligonucleotide

SEQ ID NO: 495560 - DNA, 56 bp, Artificial; identical to SEQ ID NO: 13854
  Synthetic oligonucleotide

SEQ ID NO: 495561 - DNA, 55 bp, Artificial; identical to SEQ ID NO: 9027
  Synthetic oligonucleotide

SEQ ID NO: 495562 - DNA, 50 bp, Artificial; identical to SEQ ID NO: 6431
  Synthetic oligonucleotide

SEQ ID NO: 495563 - DNA, 59 bp, Artificial; identical to SEQ ID NO: 10037
  Synthetic oligonucleotide

SEQ ID NO: 495564 - DNA, 58 bp, Artificial; identical to SEQ ID NO: 20578
  Synthetic oligonucleotide

SEQ ID NO: 495565 - DNA, 60 bp, Artificial; identical to SEQ ID NO: 9008
  Synthetic oligonucleotide

SEQ ID NO: 495566 - DNA, 60 bp, Artificial; identical to SEQ ID NO: 9266
  Synthetic oligonucleotide

SEQ ID NO: 495567 - DNA, 52 bp, Artificial; identical to SEQ ID NO: 11972
  Synthetic oligonucleotide

SEQ ID NO: 495568 - DNA, 51 bp, Artificial; identical to SEQ ID NO: 12709
  Synthetic oligonucleotide

SEQ ID NO: 495569 - DNA, 60 bp, Artificial; identical to SEQ ID NO: 7337
  Synthetic oligonucleotide

SEQ ID NO: 495570 - DNA, 59 bp, Artificial; identical to SEQ ID NO: 16586
  Synthetic oligonucleotide

SEQ ID NO: 495571 - DNA, 60 bp, Artificial; identical to SEQ ID NO: 10352
  Synthetic oligonucleotide

SEQ ID NO: 495572 - DNA, 56 bp, Artificial; identical to SEQ ID NO: 8556
  Synthetic oligonucleotide

SEQ ID NO: 495573 - DNA, 60 bp, Artificial; identical to SEQ ID NO: 13292
  Synthetic oligonucleotide

SEQ ID NO: 495574 - DNA, 60 bp, Artificial; identical to SEQ ID NO: 10346
  Synthetic oligonucleotide

SEQ ID NO: 495575 - DNA, 59 bp, Artificial; identical to SEQ ID NO: 6481
  Synthetic oligonucleotide

SEQ ID NO: 495576 - DNA, 57 bp, Artificial; identical to SEQ ID NO: 6030
  Synthetic oligonucleotide

SEQ ID NO: 495577 - DNA, 50 bp, Artificial; identical to SEQ ID NO: 10272
  Synthetic oligonucleotide

SEQ ID NO: 495578 - DNA, 51 bp, Artificial; identical to SEQ ID NO: 15115
  Synthetic oligonucleotide

SEQ ID NO: 495579 - DNA, 52 bp, Artificial; identical to SEQ ID NO: 14398
  Synthetic oligonucleotide

SEQ ID NO: 495580 - DNA, 60 bp, Artificial; identical to SEQ ID NO: 5900
  Synthetic oligonucleotide

SEQ ID NO: 495581 - DNA, 55 bp, Artificial; identical to SEQ ID NO: 15990
  Synthetic oligonucleotide

SEQ ID NO: 495582 - DNA, 59 bp, Artificial; identical to SEQ ID NO: 17384
  Synthetic oligonucleotide

SEQ ID NO: 495583 - DNA, 60 bp, Artificial; identical to SEQ ID NO: 9661
  Synthetic oligonucleotide

SEQ ID NO: 495584 - DNA, 53 bp, Artificial; identical to SEQ ID NO: 17996
  Synthetic oligonucleotide

SEQ ID NO: 495585 - DNA, 60 bp, Artificial; identical to SEQ ID NO: 7848
  Synthetic oligonucleotide

SEQ ID NO: 495586 - DNA, 51 bp, Artificial; identical to SEQ ID NO: 11367
  Synthetic oligonucleotide

SEQ ID NO: 495587 - DNA, 55 bp, Artificial; identical to SEQ ID NO: 14399
  Synthetic oligonucleotide

SEQ ID NO: 495588 - DNA, 56 bp, Artificial; identical to SEQ ID NO: 14835
  Synthetic oligonucleotide

SEQ ID NO: 495589 - DNA, 55 bp, Artificial; identical to SEQ ID NO: 10127
  Synthetic oligonucleotide

SEQ ID NO: 495590 - DNA, 60 bp, Artificial; identical to SEQ ID NO: 9750
  Synthetic oligonucleotide

SEQ ID NO: 495591 - DNA, 57 bp, Artificial; identical to SEQ ID NO: 5971
  Synthetic oligonucleotide

SEQ ID NO: 495592 - DNA, 60 bp, Artificial; identical to SEQ ID NO: 14607
  Synthetic oligonucleotide

SEQ ID NO: 495593 - DNA, 53 bp, Artificial; identical to SEQ ID NO: 6640
  Synthetic oligonucleotide

SEQ ID NO: 495594 - DNA, 57 bp, Artificial; identical to SEQ ID NO: 10685
  Synthetic oligonucleotide

SEQ ID NO: 495595 - DNA, 50 bp, Artificial; identical to SEQ ID NO: 13575
  Synthetic oligonucleotide

SEQ ID NO: 495596 - DNA, 60 bp, Artificial; identical to SEQ ID NO: 7236
  Synthetic oligonucleotide

SEQ ID NO: 495597 - DNA, 55 bp, Artificial; identical to SEQ ID NO: 10034
  Synthetic oligonucleotide

SEQ ID NO: 495598 - DNA, 55 bp, Artificial; identical to SEQ ID NO: 7331
  Synthetic oligonucleotide

SEQ ID NO: 495599 - DNA, 60 bp, Artificial; identical to SEQ ID NO: 13056
  Synthetic oligonucleotide

SEQ ID NO: 495600 - DNA, 55 bp, Artificial; identical to SEQ ID NO: 10638
  Synthetic oligonucleotide

SEQ ID NO: 495601 - DNA, 60 bp, Artificial; identical to SEQ ID NO: 15300
  Synthetic oligonucleotide

SEQ ID NO: 495602 - DNA, 52 bp, Artificial; identical to SEQ ID NO: 14049
  Synthetic oligonucleotide

SEQ ID NO: 495603 - DNA, 60 bp, Artificial; identical to SEQ ID NO: 13061
  Synthetic oligonucleotide

SEQ ID NO: 495604 - DNA, 60 bp, Artificial; identical to SEQ ID NO: 9940
  Synthetic oligonucleotide

SEQ ID NO: 495605 - DNA, 57 bp, Artificial; identical to SEQ ID NO: 18309
  Synthetic oligonucleotide

SEQ ID NO: 495606 - DNA, 60 bp, Artificial; identical to SEQ ID NO: 15336
  Synthetic oligonucleotide

SEQ ID NO: 495607 - DNA, 53 bp, Artificial; identical to SEQ ID NO: 6142
  Synthetic oligonucleotide

SEQ ID NO: 495608 - DNA, 56 bp, Artificial; identical to SEQ ID NO: 6179
  Synthetic oligonucleotide

SEQ ID NO: 495609 - DNA, 58 bp, Artificial; identical to SEQ ID NO: 17276
  Synthetic oligonucleotide

SEQ ID NO: 495610 - DNA, 60 bp, Artificial; identical to SEQ ID NO: 10141
  Synthetic oligonucleotide

SEQ ID NO: 495611 - DNA, 60 bp, Artificial; identical to SEQ ID NO: 10177
  Synthetic oligonucleotide

SEQ ID NO: 495612 - DNA, 60 bp, Artificial; identical to SEQ ID NO: 11979
  Synthetic oligonucleotide

SEQ ID NO: 495613 - DNA, 59 bp, Artificial; identical to SEQ ID NO: 17332
  Synthetic oligonucleotide

SEQ ID NO: 495614 - DNA, 60 bp, Artificial; identical to SEQ ID NO: 8191
  Synthetic oligonucleotide

SEQ ID NO: 495615 - DNA, 53 bp, Artificial; identical to SEQ ID NO: 20015
  Synthetic oligonucleotide

SEQ ID NO: 495616 - DNA, 55 bp, Artificial; identical to SEQ ID NO: 13259
  Synthetic oligonucleotide

SEQ ID NO: 495617 - DNA, 60 bp, Artificial; identical to SEQ ID NO: 11281
  Synthetic oligonucleotide

SEQ ID NO: 495618 - DNA, 60 bp, Artificial; identical to SEQ ID NO: 13477
  Synthetic oligonucleotide

SEQ ID NO: 495619 - DNA, 60 bp, Artificial; identical to SEQ ID NO: 14606
  Synthetic oligonucleotide

SEQ ID NO: 495620 - DNA, 55 bp, Artificial; identical to SEQ ID NO: 8655
  Synthetic oligonucleotide

SEQ ID NO: 495621 - DNA, 57 bp, Artificial; identical to SEQ ID NO: 12953
  Synthetic oligonucleotide

SEQ ID NO: 495622 - DNA, 54 bp, Artificial; identical to SEQ ID NO: 10985
  Synthetic oligonucleotide

SEQ ID NO: 495623 - DNA, 54 bp, Artificial; identical to SEQ ID NO: 11218
  Synthetic oligonucleotide

SEQ ID NO: 495624 - DNA, 58 bp, Artificial; identical to SEQ ID NO: 17685
  Synthetic oligonucleotide

SEQ ID NO: 495625 - DNA, 55 bp, Artificial; identical to SEQ ID NO: 12821
  Synthetic oligonucleotide

SEQ ID NO: 495626 - DNA, 60 bp, Artificial; identical to SEQ ID NO: 11739
  Synthetic oligonucleotide

SEQ ID NO: 495627 - DNA, 52 bp, Artificial; identical to SEQ ID NO: 17622
  Synthetic oligonucleotide

SEQ ID NO: 495628 - DNA, 59 bp, Artificial; identical to SEQ ID NO: 20316
  Synthetic oligonucleotide

SEQ ID NO: 495629 - DNA, 59 bp, Artificial; identical to SEQ ID NO: 14443
  Synthetic oligonucleotide

SEQ ID NO: 495630 - DNA, 60 bp, Artificial; identical to SEQ ID NO: 15734
  Synthetic oligonucleotide

SEQ ID NO: 495631 - DNA, 51 bp, Artificial; identical to SEQ ID NO: 14976
  Synthetic oligonucleotide

SEQ ID NO: 495632 - DNA, 55 bp, Artificial; identical to SEQ ID NO: 11561
  Synthetic oligonucleotide

SEQ ID NO: 495633 - DNA, 51 bp, Artificial; identical to SEQ ID NO: 14822
  Synthetic oligonucleotide

SEQ ID NO: 495634 - DNA, 54 bp, Artificial; identical to SEQ ID NO: 13380
  Synthetic oligonucleotide

SEQ ID NO: 495635 - DNA, 60 bp, Artificial; identical to SEQ ID NO: 9216
  Synthetic oligonucleotide

SEQ ID NO: 495636 - DNA, 60 bp, Artificial; identical to SEQ ID NO: 6577
  Synthetic oligonucleotide

SEQ ID NO: 495637 - DNA, 55 bp, Artificial; identical to SEQ ID NO: 8945
  Synthetic oligonucleotide

SEQ ID NO: 495638 - DNA, 59 bp, Artificial; identical to SEQ ID NO: 17091
  Synthetic oligonucleotide

SEQ ID NO: 495639 - DNA, 55 bp, Artificial; identical to SEQ ID NO: 18390
  Synthetic oligonucleotide

SEQ ID NO: 495640 - DNA, 50 bp, Artificial; identical to SEQ ID NO: 14553
  Synthetic oligonucleotide

SEQ ID NO: 495641 - DNA, 60 bp, Artificial; identical to SEQ ID NO: 14657
  Synthetic oligonucleotide

SEQ ID NO: 495642 - DNA, 59 bp, Artificial; identical to SEQ ID NO: 19240
  Synthetic oligonucleotide

SEQ ID NO: 495643 - DNA, 56 bp, Artificial; identical to SEQ ID NO: 19979
  Synthetic oligonucleotide

SEQ ID NO: 495644 - DNA, 55 bp, Artificial; identical to SEQ ID NO: 7990
  Synthetic oligonucleotide

SEQ ID NO: 495645 - DNA, 60 bp, Artificial; identical to SEQ ID NO: 9244
  Synthetic oligonucleotide

SEQ ID NO: 495646 - DNA, 58 bp, Artificial; identical to SEQ ID NO: 18493
  Synthetic oligonucleotide

SEQ ID NO: 495647 - DNA, 60 bp, Artificial; identical to SEQ ID NO: 12770
  Synthetic oligonucleotide

SEQ ID NO: 495648 - DNA, 60 bp, Artificial; identical to SEQ ID NO: 7509
  Synthetic oligonucleotide

SEQ ID NO: 495649 - DNA, 59 bp, Artificial; identical to SEQ ID NO: 10606
  Synthetic oligonucleotide

SEQ ID NO: 495650 - DNA, 50 bp, Artificial; identical to SEQ ID NO: 6200
  Synthetic oligonucleotide

SEQ ID NO: 495651 - DNA, 52 bp, Artificial; identical to SEQ ID NO: 14327
  Synthetic oligonucleotide

SEQ ID NO: 495652 - DNA, 60 bp, Artificial; identical to SEQ ID NO: 7942
  Synthetic oligonucleotide

SEQ ID NO: 495653 - DNA, 60 bp, Artificial; identical to SEQ ID NO: 11251
  Synthetic oligonucleotide

SEQ ID NO: 495654 - DNA, 55 bp, Artificial; identical to SEQ ID NO: 12069
  Synthetic oligonucleotide

SEQ ID NO: 495655 - DNA, 55 bp, Artificial; identical to SEQ ID NO: 13141
  Synthetic oligonucleotide

SEQ ID NO: 495656 - DNA, 60 bp, Artificial; identical to SEQ ID NO: 8084
  Synthetic oligonucleotide

SEQ ID NO: 495657 - DNA, 54 bp, Artificial; identical to SEQ ID NO: 18660
  Synthetic oligonucleotide

SEQ ID NO: 495658 - DNA, 60 bp, Artificial; identical to SEQ ID NO: 15331
  Synthetic oligonucleotide

SEQ ID NO: 495659 - DNA, 56 bp, Artificial; identical to SEQ ID NO: 17789
  Synthetic oligonucleotide

SEQ ID NO: 495660 - DNA, 55 bp, Artificial; identical to SEQ ID NO: 9021
  Synthetic oligonucleotide

SEQ ID NO: 495661 - DNA, 57 bp, Artificial; identical to SEQ ID NO: 11204
  Synthetic oligonucleotide

SEQ ID NO: 495662 - DNA, 54 bp, Artificial; identical to SEQ ID NO: 7593
  Synthetic oligonucleotide

SEQ ID NO: 495663 - DNA, 53 bp, Artificial; identical to SEQ ID NO: 13524
  Synthetic oligonucleotide

SEQ ID NO: 495664 - DNA, 55 bp, Artificial; identical to SEQ ID NO: 13067
  Synthetic oligonucleotide

SEQ ID NO: 495665 - DNA, 59 bp, Artificial; identical to SEQ ID NO: 19423
  Synthetic oligonucleotide

SEQ ID NO: 495666 - DNA, 55 bp, Artificial; identical to SEQ ID NO: 11784
  Synthetic oligonucleotide

SEQ ID NO: 495667 - DNA, 53 bp, Artificial; identical to SEQ ID NO: 18793
  Synthetic oligonucleotide

SEQ ID NO: 495668 - DNA, 60 bp, Artificial; identical to SEQ ID NO: 15108
  Synthetic oligonucleotide

SEQ ID NO: 495669 - DNA, 52 bp, Artificial; identical to SEQ ID NO: 17604
  Synthetic oligonucleotide

SEQ ID NO: 495670 - DNA, 60 bp, Artificial; identical to SEQ ID NO: 9602
  Synthetic oligonucleotide

SEQ ID NO: 495671 - DNA, 54 bp, Artificial; identical to SEQ ID NO: 18846
  Synthetic oligonucleotide

SEQ ID NO: 495672 - DNA, 60 bp, Artificial; identical to SEQ ID NO: 9825
  Synthetic oligonucleotide

SEQ ID NO: 495673 - DNA, 58 bp, Artificial; identical to SEQ ID NO: 20173
  Synthetic oligonucleotide

SEQ ID NO: 495674 - DNA, 60 bp, Artificial; identical to SEQ ID NO: 6720
  Synthetic oligonucleotide

SEQ ID NO: 495675 - DNA, 60 bp, Artificial; identical to SEQ ID NO: 8680
  Synthetic oligonucleotide

SEQ ID NO: 495676 - DNA, 60 bp, Artificial; identical to SEQ ID NO: 8380
  Synthetic oligonucleotide

SEQ ID NO: 495677 - DNA, 51 bp, Artificial; identical to SEQ ID NO: 10287
  Synthetic oligonucleotide

SEQ ID NO: 495678 - DNA, 55 bp, Artificial; identical to SEQ ID NO: 18521
  Synthetic oligonucleotide

SEQ ID NO: 495679 - DNA, 50 bp, Artificial; identical to SEQ ID NO: 9922
  Synthetic oligonucleotide

SEQ ID NO: 495680 - DNA, 60 bp, Artificial; identical to SEQ ID NO: 7528
  Synthetic oligonucleotide

SEQ ID NO: 495681 - DNA, 53 bp, Artificial; identical to SEQ ID NO: 20156
  Synthetic oligonucleotide

SEQ ID NO: 495682 - DNA, 57 bp, Artificial; identical to SEQ ID NO: 18727
  Synthetic oligonucleotide

SEQ ID NO: 495683 - DNA, 53 bp, Artificial; identical to SEQ ID NO: 6117
  Synthetic oligonucleotide

SEQ ID NO: 495684 - DNA, 56 bp, Artificial; identical to SEQ ID NO: 17386
  Synthetic oligonucleotide

SEQ ID NO: 495685 - DNA, 55 bp, Artificial; identical to SEQ ID NO: 7074
  Synthetic oligonucleotide

SEQ ID NO: 495686 - DNA, 60 bp, Artificial; identical to SEQ ID NO: 7382
  Synthetic oligonucleotide

SEQ ID NO: 495687 - DNA, 60 bp, Artificial; identical to SEQ ID NO: 14936
  Synthetic oligonucleotide

SEQ ID NO: 495688 - DNA, 60 bp, Artificial; identical to SEQ ID NO: 10782
  Synthetic oligonucleotide

SEQ ID NO: 495689 - DNA, 50 bp, Artificial; identical to SEQ ID NO: 268
  Synthetic oligonucleotide

SEQ ID NO: 495690 - DNA, 55 bp, Artificial; identical to SEQ ID NO: 15315
  Synthetic oligonucleotide

SEQ ID NO: 495691 - DNA, 60 bp, Artificial; identical to SEQ ID NO: 10772
  Synthetic oligonucleotide

SEQ ID NO: 495692 - DNA, 53 bp, Artificial; identical to SEQ ID NO: 20038
  Synthetic oligonucleotide

SEQ ID NO: 495693 - DNA, 59 bp, Artificial; identical to SEQ ID NO: 18829
  Synthetic oligonucleotide

SEQ ID NO: 495694 - DNA, 55 bp, Artificial; identical to SEQ ID NO: 8252
  Synthetic oligonucleotide

SEQ ID NO: 495695 - DNA, 55 bp, Artificial
  Synthetic oligonucleotide
ttctgctccaaggggcgccacggcgactgcatgaaggagatccccgtaaacggga

SEQ ID NO: 495696 - DNA, 55 bp, Artificial
  Synthetic oligonucleotide
tctgctgtacaatttaccttccagggccatcttgtacatttcggcgacatacggg

SEQ ID NO: 495697 - DNA, 55 bp, Artificial
  Synthetic oligonucleotide
taaaccatgcagaggtaatcacatacccaaagaccggcgatcgggtcctagatga

SEQ ID NO: 495698 - DNA, 55 bp, Artificial
  Synthetic oligonucleotide
ggttcatcaacttttcatcagaggataaacaggcatccatccccgtcacatacgg

SEQ ID NO: 495699 - DNA, 55 bp, Artificial
  Synthetic oligonucleotide
gggcaggactttgatgaccacggcaaactgaccctgcccaagacgccttgcaagc

SEQ ID NO: 495700 - DNA, 55 bp, Artificial
  Synthetic oligonucleotide
ggcgacggcacaaggatgtttgtttctggcggcggctccatacaacagtacgacc

SEQ ID NO: 495701 - DNA, 55 bp, Artificial
  Synthetic oligonucleotide
ggcagatcgcacgaatcttgccccgcgcaggccctgtttgcacatactatgcccc

SEQ ID NO: 495702 - DNA, 55 bp, Artificial
  Synthetic oligonucleotide
gcactgggctcgcagtttggcttcagctccgccccgtcgttcgagcataacttta

SEQ ID NO: 495703 - DNA, 55 bp, Artificial
  Synthetic oligonucleotide
gaatcgcgcggcatagtgctggaggtaaacgacgaggtaggcataggcccgtcgg

SEQ ID NO: 495704 - DNA, 55 bp, Artificial
  Synthetic oligonucleotide
ctagcatagaacctagttgcaatcagtcaagaaccggggctctgcgacatctggg

SEQ ID NO: 495705 - DNA, 55 bp, Artificial
  Synthetic oligonucleotide
cgggcaatccgaaacaaaagcccttcaaggggcattccaaggccataatgtcggc

SEQ ID NO: 495706 - DNA, 55 bp, Artificial
  Synthetic oligonucleotide
ccgggcgtgagggagccccgcaatgtaaccagaaacgcaaatgacagtgcggcag

SEQ ID NO: 495707 - DNA, 55 bp, Artificial
  Synthetic oligonucleotide
ccctgtcatgcgtggcaagcgtcagcccctggttgtcgcggagcatgatgcttac

SEQ ID NO: 495708 - DNA, 55 bp, Artificial
  Synthetic oligonucleotide
ccccgtacaggatcacctccattccgaacacccttgcagtaaagccgtccgattc

SEQ ID NO: 495709 - DNA, 55 bp, Artificial
  Synthetic oligonucleotide
catcctttaacatccgggctctaaaccactcattggtggtaagtaccacatcccc

SEQ ID NO: 495710 - DNA, 52 bp, Artificial
  Synthetic oligonucleotide
gggatttgtagagcccgagaagatagcgaggtactttcacggcgagataaag

SEQ ID NO: 495711 - DNA, 51 bp, Artificial
  Synthetic oligonucleotide
ctccccggtacgagccaaagcatgtattgagcaaggagtttgccggcacat

SEQ ID NO: 495712 - DNA, 55 bp, Artificial
  Synthetic oligonucleotide
ttcaatctcggactccgggatataccacctgccgtggatgttgacagccctaacc

SEQ ID NO: 495713 - DNA, 55 bp, Artificial
  Synthetic oligonucleotide
ttatatctagcgttgctaggcgtcgtgatagttatcgtaggcaactacttgtcga

SEQ ID NO: 495714 - DNA, 55 bp, Artificial
  Synthetic oligonucleotide
ggcaacatgccgtggaccccttgcctcaggctcttgtgttaacaggcatagttat

SEQ ID NO: 495715 - DNA, 55 bp, Artificial
  Synthetic oligonucleotide
ggaggccatacatgtcggggattcctgtagcagggacgtcataggtgcattgctc

SEQ ID NO: 495716 - DNA, 55 bp, Artificial
  Synthetic oligonucleotide
gccgaggccttttcgttatacgtcggcctatcctacgtactagacttactcgcgt

SEQ ID NO: 495717 - DNA, 55 bp, Artificial
  Synthetic oligonucleotide
gcactactcttacactgggtattttatcggctacagcgataagcgggtttaagct

SEQ ID NO: 495718 - DNA, 55 bp, Artificial
  Synthetic oligonucleotide
gataaggttgactactggtatctgttgagctctggcgcggtggatctaggagccg

SEQ ID NO: 495719 - DNA, 55 bp, Artificial
  Synthetic oligonucleotide
gagcccttctcacatggttcttatcgaggcctgtcagtactacgacgctgcccac

SEQ ID NO: 495720 - DNA, 55 bp, Artificial
  Synthetic oligonucleotide
gacgcctactcccgacaaaatgtaggacacctcgcttcctcccaggaggttcgcg

SEQ ID NO: 495721 - DNA, 55 bp, Artificial
  Synthetic oligonucleotide
gaatgtattatccaggtatacagggtcctcgacgacttctgcttcgaaccaatat

SEQ ID NO: 495722 - DNA, 55 bp, Artificial
  Synthetic oligonucleotide
ctgagaggtctagactactatgtctacgagcgactaaggtttgacaacgtcgtgg

SEQ ID NO: 495723 - DNA, 55 bp, Artificial
  Synthetic oligonucleotide
ctcagacggcactccataggggttttagactcctctatcccttctacactggtcc

SEQ ID NO: 495724 - DNA, 55 bp, Artificial
  Synthetic oligonucleotide
cgtgaactctctgcccactacgaagtacgactctgctgacaggtacttctcgagt

SEQ ID NO: 495725 - DNA, 55 bp, Artificial
  Synthetic oligonucleotide
cggcccactgcctttagattaatgcttcaaggggttttaagattttcctaggcag

SEQ ID NO: 495726 - DNA, 55 bp, Artificial
  Synthetic oligonucleotide
cgagtggggcctctgatacagcgccgcccaccaacttagtgacaattatcgtctt

SEQ ID NO: 495727 - DNA, 55 bp, Artificial
  Synthetic oligonucleotide
cgaccgacttgactttaccgtgttcacgcgtcatgttagtccacttaaggcctgc

SEQ ID NO: 495728 - DNA, 55 bp, Artificial
  Synthetic oligonucleotide
cgaaccctaggtctacactacttaccacgtattttcccaagtctagctcctcgct

SEQ ID NO: 495729 - DNA, 55 bp, Artificial
  Synthetic oligonucleotide
cctggctccaatcagtattttaacccgtttctccactgcggcatcaatcagtctc

SEQ ID NO: 495730 - DNA, 55 bp, Artificial
  Synthetic oligonucleotide
ccgttgtctctaagtagctcttcttgagtagatagactagctcgtatgcggcgtt

SEQ ID NO: 495731 - DNA, 55 bp, Artificial
  Synthetic oligonucleotide
ccggcaatgggcgtgctgggattattctataatgtcctacgtgagaagcccattg

SEQ ID NO: 495732 - DNA, 55 bp, Artificial
  Synthetic oligonucleotide
ccgaggattgccgggcctaaacctaagcccagtacccacaccggagttgctcatg

SEQ ID NO: 495733 - DNA, 55 bp, Artificial
  Synthetic oligonucleotide
ccattaaggcgtcgtcatcgtattacgcgccggtgagcggtaggatagtagaggt

SEQ ID NO: 495734 - DNA, 55 bp, Artificial
  Synthetic oligonucleotide
agagttggcctgtacagcaacacctctgcaccagggtccaggtttacgacggcga

SEQ ID NO: 495735 - DNA, 54 bp, Artificial
  Synthetic oligonucleotide
tggtctaccacgctgtcggggatttgtagcccgatgtgctcgaagtggtgtact

SEQ ID NO: 495736 - DNA, 54 bp, Artificial
  Synthetic oligonucleotide
caatgaccgtgtaggtgcctccaggtatgtggcctatatacagggcggtagaga

SEQ ID NO: 495737 - DNA, 55 bp, Artificial
  Synthetic oligonucleotide
tcggcagaagccttatcccgaaaggagtatagttgagtaggaggcctataagggg

SEQ ID NO: 495738 - DNA, 55 bp, Artificial
  Synthetic oligonucleotide
tcgcggaagctaattgaattgccctcttctccagtctcatcgaaaatggcacagt

SEQ ID NO: 495739 - DNA, 55 bp, Artificial
  Synthetic oligonucleotide
taacgcctgctttcaaagtgaatgctacaagaaattacggtgcagaagtggttct

SEQ ID NO: 495740 - DNA, 55 bp, Artificial
  Synthetic oligonucleotide
gtattacttcgagaagagttgggccttttgcgggcagaattagagatactggagt

SEQ ID NO: 495741 - DNA, 55 bp, Artificial
  Synthetic oligonucleotide
gtatccttactctataagcgttctcgtctcattcttaaccctattcccagagctc

SEQ ID NO: 495742 - DNA, 55 bp, Artificial
  Synthetic oligonucleotide
gcggatttgaaacctccaaggctactgatctaggatctaaaactctgccaacttc

SEQ ID NO: 495743 - DNA, 55 bp, Artificial
  Synthetic oligonucleotide
gccgtatttctagctattattggacaatatgccagcccgcagtagcccctacctc

SEQ ID NO: 495744 - DNA, 55 bp, Artificial
  Synthetic oligonucleotide
gcagctcaaggtcttggagccctgctcatagaatcgatagagggagacttctata

SEQ ID NO: 495745 - DNA, 55 bp, Artificial
  Synthetic oligonucleotide
gataaggtctgcaagcttaaccgcgctctcccatggcttatctaagtccaggtga

SEQ ID NO: 495746 - DNA, 55 bp, Artificial
  Synthetic oligonucleotide
gagaggtcctccgaagtcgttaacaggactgaagacatccatggcagttacagca

SEQ ID NO: 495747 - DNA, 55 bp, Artificial
  Synthetic oligonucleotide
gaagactagctccgtattctgaaaccccagatggagacgttgaattatatgcctc

SEQ ID NO: 495748 - DNA, 55 bp, Artificial
  Synthetic oligonucleotide
cggcttatcaagtttggagagtaacactatcctgctaggtttgctttcgcttctt

SEQ ID NO: 495749 - DNA, 55 bp, Artificial
  Synthetic oligonucleotide
ccttctggaagctctttcggatacttaggtaacttaccaatcgttacagaaccac

SEQ ID NO: 495750 - DNA, 52 bp, Artificial
  Synthetic oligonucleotide
ggtggcaattaccatgggaccaccatcaatcgggtttccgagcccatcaaaa

SEQ ID NO: 495751 - DNA, 51 bp, Artificial
  Synthetic oligonucleotide
gaagtagatgtgagcgtatacatagcttcaatcgacccggagataaacagc

SEQ ID NO: 495752 - DNA, 50 bp, Artificial
  Synthetic oligonucleotide
agaggctcagccctctctacctcctcggaaagagccccataatgttcatt

SEQ ID NO: 495753 - DNA, 50 bp, Artificial
  Synthetic oligonucleotide
agagctttctgttatgacaggactgccgcagtctaaagtttacgagtccc

SEQ ID NO: 495754 - DNA, 60 bp, Artificial
  Synthetic oligonucleotide
ctgttctgtccgctcggttaatgtcgttgtactgtcccctcagtggctcgtctttgagta

SEQ ID NO: 495755 - DNA, 60 bp, Artificial
  Synthetic oligonucleotide
tgtatctgagaatagatccaaatttctcagaccctcacggtttgttagattcaatgtgag

SEQ ID NO: 495756 - DNA, 60 bp, Artificial
  Synthetic oligonucleotide
aaccccgattatacttttgtgagtaccgccgagagtcgcggctgttggaccttcgatact

SEQ ID NO: 495757 - DNA, 58 bp, Artificial
  Synthetic oligonucleotide
ggcaggttgttcggtcgggtttgtcgcatctgtgtacttactgacccatgactgcgac

SEQ ID NO: 495758 - DNA, 55 bp, Artificial
  Synthetic oligonucleotide
gagagtcgaggaccgcacactgttgaacgatacttccgaacatgggtgcgagacg

SEQ ID NO: 495759 - DNA, 55 bp, Artificial
  Synthetic oligonucleotide
gagcctcccgttcgaatgtttggtaagacgcgagtgacgggcgtagcgggaccct

SEQ ID NO: 495760 - DNA, 55 bp, Artificial
  Synthetic oligonucleotide
gaggtcatgcctatacagaagtaatcgatagctcggtacttaattttggtggccg

SEQ ID NO: 495761 - DNA, 55 bp, Artificial
  Synthetic oligonucleotide
gagtgccaagaatcgcgtctgggctcagctcacactcctcaaacggatcgttcga

SEQ ID NO: 495762 - DNA, 55 bp, Artificial
  Synthetic oligonucleotide
gatggcggatagctggagagtccgaagtaccaggagcatccgttgggcgaacggg

SEQ ID NO: 495763 - DNA, 55 bp, Artificial
  Synthetic oligonucleotide
gatggcgtcagatactacgaaatcgcgtgaggagggtgtcgggagttacgccgcg

SEQ ID NO: 495764 - DNA, 55 bp, Artificial
  Synthetic oligonucleotide
gatgtccgtccgatctttcacggtataggcgccactcatcattgcgctcgtcagc

SEQ ID NO: 495765 - DNA, 55 bp, Artificial
  Synthetic oligonucleotide
gatgtttgcgtacgcctatctcacagagaccgaccggatggcattcctctgcccc

SEQ ID NO: 495766 - DNA, 55 bp, Artificial
  Synthetic oligonucleotide
gattctccgtacgggactgactctggtagcgataggtcctgggtgatgcgattcc

SEQ ID NO: 495767 - DNA, 55 bp, Artificial
  Synthetic oligonucleotide
gcacgtcatgggccaggtgagctaccgatgggactgagggacgacctcgatagat

SEQ ID NO: 495768 - DNA, 55 bp, Artificial
  Synthetic oligonucleotide
gcagctcgatcctctcgttccggccaggcgtcggtcgtttgataccaatcttcga

SEQ ID NO: 495769 - DNA, 55 bp, Artificial
  Synthetic oligonucleotide
gcagtcacgattgacacaccaagttgtacaccaacagagatactcttaagcacgg

SEQ ID NO: 495770 - DNA, 55 bp, Artificial
  Synthetic oligonucleotide
gcattacgcgggagaaacaagttagcgatcactcaaccatagatgtacaaacggg

SEQ ID NO: 495771 - DNA, 55 bp, Artificial
  Synthetic oligonucleotide
gcccgctcggcgtaatccacatgaaaggccaccggctccggaaaagaggtcgaca

SEQ ID NO: 495772 - DNA, 55 bp, Artificial
  Synthetic oligonucleotide
gccctgttctagccattttcggcccgtccgtgcctttaggctgttggcgcactaa

SEQ ID NO: 495773 - DNA, 55 bp, Artificial; identical to SEQ ID NO: 135958
  Synthetic oligonucleotide

SEQ ID NO: 495774 - DNA, 55 bp, Artificial
  Synthetic oligonucleotide
gccgttcgaggtgaaccagcatctgacggcggtaggggtgtgtggggagttgaga

SEQ ID NO: 495775 - DNA, 55 bp, Artificial
  Synthetic oligonucleotide
gccttctctcgattagggttgaacagtcggggtcgactgcacagagcgaaacctg

SEQ ID NO: 495776 - DNA, 55 bp, Artificial
  Synthetic oligonucleotide
gcgactcaccggactcgctgttaggggtgtgcctaagggcacaacatcaaaacac

SEQ ID NO: 495777 - DNA, 55 bp, Artificial
  Synthetic oligonucleotide
gcgagaagacataattgaggagatcgccaataactacagggacgagcggtatgcc

SEQ ID NO: 495778 - DNA, 55 bp, Artificial
  Synthetic oligonucleotide
gcgagtacgaggactatatttcagcgtggctaaagacggggctgaaggacttccg

SEQ ID NO: 495779 - DNA, 55 bp, Artificial
  Synthetic oligonucleotide
gcggatccgtgtcggctcatcgactaccgatacgtgaacgagccacgagacgatg

SEQ ID NO: 495780 - DNA, 55 bp, Artificial
  Synthetic oligonucleotide
gcggtcagtaaggcgattgaggaccacttcatgggaaccggacatcgactgctag

SEQ ID NO: 495781 - DNA, 55 bp, Artificial
  Synthetic oligonucleotide
gctcgtgcacacatctgtgctattgcacacgctaaggtcgtcttaccgacgcctg

SEQ ID NO: 495782 - DNA, 55 bp, Artificial
  Synthetic oligonucleotide
gcgtgtcctcaccgcggggtcggcagctacgtttcggctttcaatcctgagaatc

SEQ ID NO: 495783 - DNA, 55 bp, Artificial
  Synthetic oligonucleotide
gctcgccgcaatgtttcgtgtaggtgtgtatgtgaaccacctcgggacgtgctac

SEQ ID NO: 495784 - DNA, 55 bp, Artificial
  Synthetic oligonucleotide
gctcgtccactgggactggacgaacgttgtggaaagtgttgccggaagcgggctg

SEQ ID NO: 495785 - DNA, 55 bp, Artificial
  Synthetic oligonucleotide
cgtcttgcgtcggtcgaatgaacttctgcagtcgatccagtgattcctcgacccg

SEQ ID NO: 495786 - DNA, 55 bp, Artificial
  Synthetic oligonucleotide
cgtgggagtcatgaccgtcgggatatccgctctgttcgtcttcgtgggcgcaacg

SEQ ID NO: 495787 - DNA, 55 bp, Artificial
  Synthetic oligonucleotide
cgtgtgcgaggtttcgctcggctttcgactggaaccgaccacgattctgttcccg

SEQ ID NO: 495788 - DNA, 55 bp, Artificial
  Synthetic oligonucleotide
cgttcgagcctatccctaacgccttctctcccataaactgagaattcgacgttag

SEQ ID NO: 495789 - DNA, 55 bp, Artificial
  Synthetic oligonucleotide
ctacctgcacgccgacgtctaacagtcggctattcgaccccgtgactaccctcca

SEQ ID NO: 495790 - DNA, 55 bp, Artificial
  Synthetic oligonucleotide
ctccacgacattgaagaacgactctaccgaaggatcatcttgcagggtcgctgag

SEQ ID NO: 495791 - DNA, 55 bp, Artificial
  Synthetic oligonucleotide
ctccatgtactgactggcattcatggttgtacaaagtgactgaacacaatgaaca

SEQ ID NO: 495792 - DNA, 55 bp, Artificial
  Synthetic oligonucleotide
ctccctaacttacaataggtgcctccggtacctttgctactactcctgtaccacc

SEQ ID NO: 495793 - DNA, 55 bp, Artificial
  Synthetic oligonucleotide
ctctacatacaccagtggttcagacggtgtatccctgtcgcttctcactcgagcg

SEQ ID NO: 495794 - DNA, 55 bp, Artificial
  Synthetic oligonucleotide
ctctcggcacgtatatcccgctaatccgcactattaagtcgatcccgaaagttgg

SEQ ID NO: 495795 - DNA, 55 bp, Artificial
  Synthetic oligonucleotide
ctctctcgagccgtcacggtcgaactctgcggtcattatacgacaaaacggacgg

SEQ ID NO: 495796 - DNA, 55 bp, Artificial
  Synthetic oligonucleotide
ctctgtatcagcgatcgcacacggtccgcgtcgggcgaccctttgatactgtcac

SEQ ID NO: 495797 - DNA, 55 bp, Artificial
  Synthetic oligonucleotide
ctgcgacgcgtagacgactaaacagttaagtgagtgctgtactgccgagtccgcc

SEQ ID NO: 495798 - DNA, 55 bp, Artificial
  Synthetic oligonucleotide
ctgttggacgagtctgactgtggttaccttgagtcgctagtcaaacgtcatcccg

SEQ ID NO: 495799 - DNA, 55 bp, Artificial
  Synthetic oligonucleotide
ctgttgtggcgcaatttagcctgcgctgtggattcggacgagtccgttcgagctt

SEQ ID NO: 495800 - DNA, 55 bp, Artificial
  Synthetic oligonucleotide
cttcgtctgaagcgactcccgactgcgaacatcaccgatacctctcggctgctgt

SEQ ID NO: 495801 - DNA, 55 bp, Artificial
  Synthetic oligonucleotide
cttttccacaggagataacggctgaccagtcggcaatacacatcgtcattgaact

SEQ ID NO: 495802 - DNA, 55 bp, Artificial
  Synthetic oligonucleotide
gaaaaccccgccggctattcggcaactcgaagacccggaacgctacgatgttcag

SEQ ID NO: 495803 - DNA, 55 bp, Artificial
  Synthetic oligonucleotide
gaaatattgtcgcacactcattgagtccaccatctggagaataaataagaacccc

SEQ ID NO: 495804 - DNA, 55 bp, Artificial
  Synthetic oligonucleotide
gaaccacagttgatgctctcacaatttgcacagtcgatgtatgagttcgcgtcct

SEQ ID NO: 495805 - DNA, 55 bp, Artificial
  Synthetic oligonucleotide
gaagtgctgacgacatagttactgaggattcaactatggcacaacagggacgcat

SEQ ID NO: 495806 - DNA, 55 bp, Artificial
  Synthetic oligonucleotide
gaccacgttcagcagctatacggatatttaagtcgaatcgcctcgtagtatgacg

SEQ ID NO: 495807 - DNA, 55 bp, Artificial
  Synthetic oligonucleotide
gacgaaccagccacgttactacagaacgctaatcagacacgtcttcgatacgtcg

SEQ ID NO: 495808 - DNA, 55 bp, Artificial
  Synthetic oligonucleotide
gacgaacgggttacgaatcccgtgttgcccttgagcgaacgtccgtagtttctcc

SEQ ID NO: 495809 - DNA, 55 bp, Artificial
  Synthetic oligonucleotide
gacgggctacgtctaccggacggtctgggactcgccaactgacgccaaagagttc

SEQ ID NO: 495810 - DNA, 55 bp, Artificial
  Synthetic oligonucleotide
gactccgtctgggccgattactgggcggaggtacgagagggttttccgccagtca

SEQ ID NO: 495811 - DNA, 55 bp, Artificial
  Synthetic oligonucleotide
gacttgcaaacgctactataattcgattcgaacgttcagaggtggtactcgcgac

SEQ ID NO: 495812 - DNA, 55 bp, Artificial
  Synthetic oligonucleotide
gagaccgtgcggttccacaggtgtacagcggagaccgaaaagcaacagcgtttct

SEQ ID NO: 495813 - DNA, 55 bp, Artificial
  Synthetic oligonucleotide
gagagacgaggagatgatcgactgaatcgatgtcggaaaccgcacgcaccttccg

SEQ ID NO: 495814 - DNA, 55 bp, Artificial
  Synthetic oligonucleotide
gtccgtccgtcacagtccgccagtgtcacgacaaacgaaccgagagtagaagctc

SEQ ID NO: 495815 - DNA, 55 bp, Artificial
  Synthetic oligonucleotide
gtctaacccgtttgtacatctatggttgagtgatcgctaacttgtttctcccgcg

SEQ ID NO: 495816 - DNA, 55 bp, Artificial
  Synthetic oligonucleotide
gtctaccgagcgcccaccgtcgggcactaaattcacgaacatccctcgacagaaa

SEQ ID NO: 495817 - DNA, 55 bp, Artificial
  Synthetic oligonucleotide
gtctctccgtctgtactgcacatcggtctatccacgctacgatttaaacacgaag

SEQ ID NO: 495818 - DNA, 55 bp, Artificial
  Synthetic oligonucleotide
gtctgacacagaattaaggtggacgagcttcattaaccgcgtatgaccagagcga

SEQ ID NO: 495819 - DNA, 55 bp, Artificial
  Synthetic oligonucleotide
gtctgtaaccatgatgccgcgaaaacagccttctcgggaagagcttcaaccctac

SEQ ID NO: 495820 - DNA, 55 bp, Artificial
  Synthetic oligonucleotide
gtgactgctcgcagcgaaactgctcatcgtccagcggatcgtatgctcggaaccg

SEQ ID NO: 495821 - DNA, 55 bp, Artificial
  Synthetic oligonucleotide
gtgctccccatgctcgcccattatcggacagtgaacgttttgccccgcttcaccc

SEQ ID NO: 495822 - DNA, 55 bp, Artificial
  Synthetic oligonucleotide
gttccgctatcccgacctcacttcggaccaaccgcttcaagcgcttccaagaacc

SEQ ID NO: 495823 - DNA, 55 bp, Artificial
  Synthetic oligonucleotide
gttctaactaagcggctttgtgaagtactgagattcagttctcgccgtatgacgc

SEQ ID NO: 495824 - DNA, 55 bp, Artificial
  Synthetic oligonucleotide
taagccaccggacggctactcacgccaaccactgactgcatagtcagtatcgaac

SEQ ID NO: 495825 - DNA, 55 bp, Artificial
  Synthetic oligonucleotide
tagcaaacgactcgaagaaaacattcccgggatggtgctcggaacggttcgacgg

SEQ ID NO: 495826 - DNA, 55 bp, Artificial
  Synthetic oligonucleotide
taggtgacgttcggattcgttccgatgtccgccagtagctcgaactgcgattccg

SEQ ID NO: 495827 - DNA, 55 bp, Artificial
  Synthetic oligonucleotide
tatcgagtagggacagtctctcgcggagccaaagcgacgtctcccgagcagacgg

SEQ ID NO: 495828 - DNA, 55 bp, Artificial
  Synthetic oligonucleotide
tatggttgagtgatcgctaacttgtttctcccgcgtaatgcaattaccggtctcc

SEQ ID NO: 495829 - DNA, 55 bp, Artificial
  Synthetic oligonucleotide
tcgccaacattcagctgcatgggcgtcgctgtgagagcgtagagacaccgggagg

SEQ ID NO: 495830 - DNA, 55 bp, Artificial
  Synthetic oligonucleotide
tcgcttccgacgggcgaatttacgctgggacggaccccgctcgactgttctgttc

SEQ ID NO: 495831 - DNA, 55 bp, Artificial
  Synthetic oligonucleotide
tcggttctgagggtgaacacgtcgcccggccgaatctcctttggcccgagcggtt

SEQ ID NO: 495832 - DNA, 55 bp, Artificial
  Synthetic oligonucleotide
tcgtcaccaggattcttgtgggatggccgacaaacccgaagtatggcgactgtcg

SEQ ID NO: 495833 - DNA, 55 bp, Artificial
  Synthetic oligonucleotide
tctactcgtgggaacccagttgcctctcgctcgggtacggacaggaccccgagac

SEQ ID NO: 495834 - DNA, 55 bp, Artificial
  Synthetic oligonucleotide
tctcgtttcggtcttcgttcgcaagatatccctccggcggggcgagaatccgcgc

SEQ ID NO: 495835 - DNA, 55 bp, Artificial
  Synthetic oligonucleotide
tctgcttccgaagagcgaacaccgaatcttcgttccgtaggatcacgcgcacaac

SEQ ID NO: 495836 - DNA, 55 bp, Artificial
  Synthetic oligonucleotide
tgagcgccccgtaccgcgtccacccctatacgtcgccgtacgtccacatagttca

SEQ ID NO: 495837 - DNA, 55 bp, Artificial
  Synthetic oligonucleotide
tgcccgtcgagtgcaaacactactacgctcgcgaggcgcactctcgacctgactc

SEQ ID NO: 495838 - DNA, 55 bp, Artificial
  Synthetic oligonucleotide
tggtcgggtgcttcgggaagccaccccagaacgattcgtagtagggctcctgact

SEQ ID NO: 495839 - DNA, 55 bp, Artificial
  Synthetic oligonucleotide
ttatcgttggcgacgacccctgtggggacttctcacgcccgtcgagagtcgtgtc

SEQ ID NO: 495840 - DNA, 55 bp, Artificial
  Synthetic oligonucleotide
ttcgaaggggtcatcacgaggagacaactcgctacctcgcaccaccaacccgcag

SEQ ID NO: 495841 - DNA, 55 bp, Artificial
  Synthetic oligonucleotide
ttggatacgaacattgaaattacagactcgttcacggtaccggtttgcgtaaacg

SEQ ID NO: 495842 - DNA, 55 bp, Artificial
  Synthetic oligonucleotide
tttgtcgtctgcgcgttttcggacgctcatgccacagtctctcgcaccgagcgac

SEQ ID NO: 495843 - DNA, 55 bp, Artificial
  Synthetic oligonucleotide
gctctgtctcgctcatgcgcgtaccgaggtggacccgaaccaatagcgcttcgac

SEQ ID NO: 495844 - DNA, 55 bp, Artificial
  Synthetic oligonucleotide
gcttggccaggactgggaagcggcacttggtgaaccccgctgtctggatgtcgaa

SEQ ID NO: 495845 - DNA, 55 bp, Artificial
  Synthetic oligonucleotide
ggagagtttgtggttcaagtccttgattcgacgctgttctttgttacccacacgg

SEQ ID NO: 495846 - DNA, 55 bp, Artificial
  Synthetic oligonucleotide
ggaggcgagatgaaaagggcacaggtgctgtcctcgtgacgttcgtcagcgtttg

SEQ ID NO: 495847 - DNA, 55 bp, Artificial
  Synthetic oligonucleotide
ggatagaacggccatccaacggcggtttgacaccgctgaattcactgaacagggt

SEQ ID NO: 495848 - DNA, 55 bp, Artificial
  Synthetic oligonucleotide
ggatgtcctgtgtccgttaggactcacgtgtcgcgttggcgctcgagaatcggcc

SEQ ID NO: 495849 - DNA, 55 bp, Artificial
  Synthetic oligonucleotide
ggcaagtgagataaccatgcagatgccacgccgattcaatacgtactgcccgcac

SEQ ID NO: 495850 - DNA, 55 bp, Artificial
  Synthetic oligonucleotide
ggcgaggatttgattaccgttcgagtcctacacgcatagcatgccagactggctg

SEQ ID NO: 495851 - DNA, 55 bp, Artificial
  Synthetic oligonucleotide
ggcggcagagaatccagacatggactgggacaagaactcaccagtctgggatgag

SEQ ID NO: 495852 - DNA, 55 bp, Artificial
  Synthetic oligonucleotide
ggctaactccgtgatcagggccggaccaaaatattattcgattccctagattggt

SEQ ID NO: 495853 - DNA, 55 bp, Artificial
  Synthetic oligonucleotide
gggatcagtttcatcggtcccacctgcgagctcaatatcaaggcggacccaacgg

SEQ ID NO: 495854 - DNA, 55 bp, Artificial
  Synthetic oligonucleotide
gggccagctatgacgaccgaccacctcctctcggttcgcgggctgaagaaacact

SEQ ID NO: 495855 - DNA, 55 bp, Artificial
  Synthetic oligonucleotide
gggcccgctcgtccgtgcggactcgtttcgccaccaatcgttatgacgaatcgtc

SEQ ID NO: 495856 - DNA, 55 bp, Artificial
  Synthetic oligonucleotide
ggggatccgaactcgcgtccgtcgaggagagattgagggcgttctgaaccaggtc

SEQ ID NO: 495857 - DNA, 55 bp, Artificial
  Synthetic oligonucleotide
gggtccatactcgggtctgactcaacatcggttcccttaagtgggaatccgaaaa

SEQ ID NO: 495858 - DNA, 55 bp, Artificial
  Synthetic oligonucleotide
gggttgtccgtggggaactcctcgtggctcatacgacgaggtaacgccagtggac

SEQ ID NO: 495859 - DNA, 55 bp, Artificial
  Synthetic oligonucleotide
ggtcactcgagactagtggtacaaatgtcgaacggacgagcgaggatttgcctcg

SEQ ID NO: 495860 - DNA, 55 bp, Artificial
  Synthetic oligonucleotide
ggtcgaacgtccgctctaagcgagtccgtgattccggtacggcatccagggtggt

SEQ ID NO: 495861 - DNA, 55 bp, Artificial
  Synthetic oligonucleotide
ggtcgccagggtttacgtcgttcccgtcgaactatcgcgtatgtcactcgacagc

SEQ ID NO: 495862 - DNA, 55 bp, Artificial
  Synthetic oligonucleotide
ggtctcacgggtcgacgcgacatcgtagaattctccgactccgaagttgtggaga

SEQ ID NO: 495863 - DNA, 55 bp, Artificial
  Synthetic oligonucleotide
ggtgtgtagggtcccatttacagggcgtaggtcatcgtaccgggacggtgtgtcg

SEQ ID NO: 495864 - DNA, 55 bp, Artificial
  Synthetic oligonucleotide
ggttccggaggacgagacgccggagcgatggagatttacgatttgagcccgaatg

SEQ ID NO: 495865 - DNA, 55 bp, Artificial
  Synthetic oligonucleotide
ggttcgtccccggtttcctcttctgagaggaggttgattcggactgcctcaagga

SEQ ID NO: 495866 - DNA, 55 bp, Artificial
  Synthetic oligonucleotide
gtacccggggacacagcagaagtgggtacacttgttgagccacgcgatgacgccc

SEQ ID NO: 495867 - DNA, 55 bp, Artificial
  Synthetic oligonucleotide
gtagtacttgtttagtaagagggctcttgcgacgaactggaaaacactctcgcgg

SEQ ID NO: 495868 - DNA, 55 bp, Artificial
  Synthetic oligonucleotide
gtcagacttctaacactctcccaaagcgtcttttgattgccgattggactcaaaa

SEQ ID NO: 495869 - DNA, 55 bp, Artificial
  Synthetic oligonucleotide
gtcaggaactggagtctacctcgcagaagtacgacgttccgtgcgaagtcgagta

SEQ ID NO: 495870 - DNA, 55 bp, Artificial
  Synthetic oligonucleotide
gtccatgtgccggggaaagcagcacgagggttaaaatccaccgccccaccaaccg

SEQ ID NO: 495871 - DNA, 55 bp, Artificial
  Synthetic oligonucleotide
gtccgaccgtgttatttgtcgaaactgcgatttcaaaccggtttacacctatggg

SEQ ID NO: 495872 - DNA, 55 bp, Artificial
  Synthetic oligonucleotide
cagagtagaagcaatgctaaatgggaacaagatcggttgggaatcgcagggacct

SEQ ID NO: 495873 - DNA, 55 bp, Artificial
  Synthetic oligonucleotide
cagcgccgaacaaccccatcggaaggacgaccgaaccctggcagtacttgttccc

SEQ ID NO: 495874 - DNA, 55 bp, Artificial
  Synthetic oligonucleotide
cagggcgactgtaaccggtaagctcgtctcacggggattcagcgagttagtcgag

SEQ ID NO: 495875 - DNA, 55 bp, Artificial
  Synthetic oligonucleotide
cagttctctatttccgaggattagaatgtggctcgggcctccacctctcttgacc

SEQ ID NO: 495876 - DNA, 55 bp, Artificial
  Synthetic oligonucleotide
catactactggccctctatcgttctggcgattcgtgcgtgactaaggtgctgata

SEQ ID NO: 495877 - DNA, 55 bp, Artificial
  Synthetic oligonucleotide
catgtcggtgtttataaagagaagtttaacagcgccctccggtcgcgagaccccg

SEQ ID NO: 495878 - DNA, 55 bp, Artificial
  Synthetic oligonucleotide
ccaagaggagcgcaccaccgctcctcttggactgaaccgacctttgggacgggtc

SEQ ID NO: 495879 - DNA, 55 bp, Artificial
  Synthetic oligonucleotide
ccaagaggcactcacggaggtcacagacgagatgcgagagcaactcgaacccgac

SEQ ID NO: 495880 - DNA, 55 bp, Artificial
  Synthetic oligonucleotide
ccatatcgagatggttgcagatgcgttcgtactggtcgtacacccggctcgtgag

SEQ ID NO: 495881 - DNA, 55 bp, Artificial
  Synthetic oligonucleotide
ccatttggctggactatcactttcggataccatctctattctcgagagggttggg

SEQ ID NO: 495882 - DNA, 55 bp, Artificial
  Synthetic oligonucleotide
cccaatatctctcgaccactatatcctactcaactcgacacacccgaattcgatg

SEQ ID NO: 495883 - DNA, 55 bp, Artificial
  Synthetic oligonucleotide
ccccaacgtaggatgacgatatcttgccgactcgtcggatgacgattctaccagc

SEQ ID NO: 495884 - DNA, 55 bp, Artificial
  Synthetic oligonucleotide
ccccgccaaccattgtgaagtaaccaagaggctccctcaagagagcttgaccttg

SEQ ID NO: 495885 - DNA, 55 bp, Artificial
  Synthetic oligonucleotide
ccccgctcgataccgtgtctggtgtccgtcagatggaggtacgttcgattcccgt

SEQ ID NO: 495886 - DNA, 55 bp, Artificial
  Synthetic oligonucleotide
ccccgggacgacgtgttcgtgagattcgtcttcattcatatacgacgtggtagtc

SEQ ID NO: 495887 - DNA, 55 bp, Artificial
  Synthetic oligonucleotide
cccgaacgcggactttcgacgggtgattactacaaccgtctgtggcaggttctcg

SEQ ID NO: 495888 - DNA, 55 bp, Artificial
  Synthetic oligonucleotide
cccgctacgactgccgctggtttgtgtgtatcgatgcttcgggatcgataaccgg

SEQ ID NO: 495889 - DNA, 55 bp, Artificial
  Synthetic oligonucleotide
cccgcttccctcatcactacgtgttagccaactggccgcttagccagagtggaca

SEQ ID NO: 495890 - DNA, 55 bp, Artificial
  Synthetic oligonucleotide
ccctcaaaatgcgagtcgaccgcttccataattcctgggtgggcagtcacggaag

SEQ ID NO: 495891 - DNA, 55 bp, Artificial
  Synthetic oligonucleotide
ccctcacgggtggtcgtcagttccctcgtactcatcgtgacctgtgcgctcctgt

SEQ ID NO: 495892 - DNA, 55 bp, Artificial
  Synthetic oligonucleotide
cccttcgaagagtgagtccgagcgtcgtcaacgaatgaaaggacccggaatcctc

SEQ ID NO: 495893 - DNA, 55 bp, Artificial
  Synthetic oligonucleotide
ccgaactcgtagtactcgcaggattttgtgtgctcattggacgttcactcgaagt

SEQ ID NO: 495894 - DNA, 55 bp, Artificial
  Synthetic oligonucleotide
ccgactccacgtcgacctctggaacgacgcacccgagacgtaggtagatcctctc

SEQ ID NO: 495895 - DNA, 55 bp, Artificial
  Synthetic oligonucleotide
ccgagtgaatcgacatcggttctgttgctcgaccctcgtttgggtggccggtggc

SEQ ID NO: 495896 - DNA, 55 bp, Artificial
  Synthetic oligonucleotide
ccgccgcctccagtttgaagtccttactcaccaacggcggctcattcgcatacgt

SEQ ID NO: 495897 - DNA, 55 bp, Artificial
  Synthetic oligonucleotide
aagcgttttccgacgggcgatcgaacccggctccatgagcgaactcgatgccgac

SEQ ID NO: 495898 - DNA, 55 bp, Artificial
  Synthetic oligonucleotide
aagtatcctatgggtctcttgagtgcccacagtcgataatctgcaaaccgtcgca

SEQ ID NO: 495899 - DNA, 55 bp, Artificial
  Synthetic oligonucleotide
aatctacccggtcgcgagcacacgcagcccctacggacagcgcgagactcgatct

SEQ ID NO: 495900 - DNA, 55 bp, Artificial
  Synthetic oligonucleotide
aatgctttgtaaatcggcaccgccaaagtaagcggtatcgaagctggcaccagga

SEQ ID NO: 495901 - DNA, 55 bp, Artificial
  Synthetic oligonucleotide
acaagggttagtcacgaagaacacaattcaggcgacattcggctgttacgcgccc

SEQ ID NO: 495902 - DNA, 55 bp, Artificial
  Synthetic oligonucleotide
accacgcaaagaatagcctcgagtaagcgggttctccctggaattgtcccgcacg

SEQ ID NO: 495903 - DNA, 55 bp, Artificial
  Synthetic oligonucleotide
accggtacaccggttctgcctcctcgtggtcactagcaacgtcttcagcctcccg

SEQ ID NO: 495904 - DNA, 55 bp, Artificial
  Synthetic oligonucleotide
acgaccaccgagtcccacacgccttgcactcgcgctcgccccgaattttcatgtg

SEQ ID NO: 495905 - DNA, 55 bp, Artificial
  Synthetic oligonucleotide
acgacctcgtgacacacacctacggcgaggtctcattgaagtccacatataccag

SEQ ID NO: 495906 - DNA, 55 bp, Artificial
  Synthetic oligonucleotide
acgcgaactgcagtgaatactcgggaacaaaacgaggaatacgctcagcggatgc

SEQ ID NO: 495907 - DNA, 55 bp, Artificial
  Synthetic oligonucleotide
acgctcctggcacgctcaagtctccgcgagacctccggttccgctgcacaagcga

SEQ ID NO: 495908 - DNA, 55 bp, Artificial
  Synthetic oligonucleotide
actccacccatcggtcgtccaccactccccatcgaacgatgagaccgcagatgag

SEQ ID NO: 495909 - DNA, 55 bp, Artificial
  Synthetic oligonucleotide
actgatggctcactcacacgacgcgaccgggttcgccgaatcgcctccccagtca

SEQ ID NO: 495910 - DNA, 55 bp, Artificial
  Synthetic oligonucleotide
acttcgagagcgggcccataaccggtcgtcgaaactgcttgacaacgctacggac

SEQ ID NO: 495911 - DNA, 55 bp, Artificial
  Synthetic oligonucleotide
acttgctagagcgggctgcccctggtatctctgcgctacagggatggcttcaggg

SEQ ID NO: 495912 - DNA, 55 bp, Artificial
  Synthetic oligonucleotide
agaatcggggtatagtggtttatcagacccaaactctagcggttttgcgggagcc

SEQ ID NO: 495913 - DNA, 55 bp, Artificial
  Synthetic oligonucleotide
agtcggcatcgcgactctggaggcgaaagtagtcgagaggcggtgtgagagcgag

SEQ ID NO: 495914 - DNA, 55 bp, Artificial
  Synthetic oligonucleotide
agtcttcagacgtcgcaaaggcggcgaattgtcctaacgctgccgaaaggaagac

SEQ ID NO: 495915 - DNA, 55 bp, Artificial
  Synthetic oligonucleotide
atcgtgttgctagacaatatgtcaccggcggattgcgagcgagcagtcgaacgac

SEQ ID NO: 495916 - DNA, 55 bp, Artificial
  Synthetic oligonucleotide
atgcgcgaccgtgggatccagcaggtgcggtactacatcggcgtccaagtcaccc

SEQ ID NO: 495917 - DNA, 55 bp, Artificial
  Synthetic oligonucleotide
atgtctctttcgtggcgggcgttcgagtccttcgaccgagacgagtgggccgcaa

SEQ ID NO: 495918 - DNA, 55 bp, Artificial
  Synthetic oligonucleotide
attcgtctttagctaagactcacacctcggttgcgtagcggtagcgagcgtctct

SEQ ID NO: 495919 - DNA, 55 bp, Artificial
  Synthetic oligonucleotide
atttgtgggagtggctacaattctctggtaacgatgtcgacgtcttccgagcagt

SEQ ID NO: 495920 - DNA, 55 bp, Artificial
  Synthetic oligonucleotide
caagtcaacggactagagtacgatcacgcactactcgaggcagggaaggatccgg

SEQ ID NO: 495921 - DNA, 55 bp, Artificial
  Synthetic oligonucleotide
cacatagctcaaaataggcgtgcatgggctaccttagaagagtatctctctactc

SEQ ID NO: 495922 - DNA, 55 bp, Artificial
  Synthetic oligonucleotide
cacccagactgagtacgagccccgtggttgtcccgataggacgtggggaactgtg

SEQ ID NO: 495923 - DNA, 55 bp, Artificial
  Synthetic oligonucleotide
cgagacgatataaggcgatataaggtatcccctccgactaaggtcgtacatggac

SEQ ID NO: 495924 - DNA, 55 bp, Artificial
  Synthetic oligonucleotide
cgagcagcgtagattgattcgttccaagccttcccgctgacgcgattcagctcga

SEQ ID NO: 495925 - DNA, 55 bp, Artificial
  Synthetic oligonucleotide
cgagtccgaagtgatacgaaacggggtactcgtcactagattctccgtacgggac

SEQ ID NO: 495926 - DNA, 55 bp, Artificial
  Synthetic oligonucleotide
cgtcagtctcacctgcggggtctgggactgtgagacgctcctgttctacgtttcg

SEQ ID NO: 495927 - DNA, 55 bp, Artificial
  Synthetic oligonucleotide
cgagttctggactcgggaccgggtagcgggttgagaagcccgtaccacagtcgat

SEQ ID NO: 495928 - DNA, 55 bp, Artificial
  Synthetic oligonucleotide
cgatcgcgattacgtcgaggcaaagagggacgcctatcctgccgaaaacgtgtgg

SEQ ID NO: 495929 - DNA, 55 bp, Artificial
  Synthetic oligonucleotide
cgcaaccgagagttcgtcttcgtggaggttgacgtgtacgttgtggtactcgccc

SEQ ID NO: 495930 - DNA, 55 bp, Artificial
  Synthetic oligonucleotide
cgtcacccgatctctcttctacggtggaccgactcggaaatcaatttctgtactc

SEQ ID NO: 495931 - DNA, 55 bp, Artificial
  Synthetic oligonucleotide
cgcaagtagaggactcgaaccagaagataccgtcactgttgaagaacgaaccccg

SEQ ID NO: 495932 - DNA, 55 bp, Artificial
  Synthetic oligonucleotide
cgcacagtcaccgatggggtttgcagattgatataatcgcgggccgatagtcggt

SEQ ID NO: 495933 - DNA, 55 bp, Artificial
  Synthetic oligonucleotide
cgtaggatggccacagagaagtcatttcaggtctggtatcgatgaatcagcccac

SEQ ID NO: 495934 - DNA, 55 bp, Artificial
  Synthetic oligonucleotide
cgccggagtcggggaggtattcgatgatacttcggtgggctccgaactcgctgat

SEQ ID NO: 495935 - DNA, 55 bp, Artificial
  Synthetic oligonucleotide
cggtcgtcacggtagtcgtgaactgttagagcgaccccttcgagccgacctgctc

SEQ ID NO: 495936 - DNA, 55 bp, Artificial
  Synthetic oligonucleotide
cggggtgtcaatcatgagcgatagcaggttctgatagaggagattccggttcgtt

SEQ ID NO: 495937 - DNA, 55 bp, Artificial
  Synthetic oligonucleotide
cgcgcagttcgaatcgaacctttcgtggcttgtcgctatcttccggcatctcgtc

SEQ ID NO: 495938 - DNA, 55 bp, Artificial
  Synthetic oligonucleotide
cgcggatcaacaaatgaggggtgcgcttctttcgcctgtgaacggatgagggagc

SEQ ID NO: 495939 - DNA, 55 bp, Artificial
  Synthetic oligonucleotide
cgcgtcgattgcatcagactcgagccgtgggtcttccgcacaatctacggtggac

SEQ ID NO: 495940 - DNA, 55 bp, Artificial
  Synthetic oligonucleotide
cggggcggagaatatgcgccagaagataactccgagtcctcacggcgaggatagg

SEQ ID NO: 495941 - DNA, 55 bp, Artificial
  Synthetic oligonucleotide
cgctccgcactcggtccggatttcactgcgtcccgaacacttccagagagtccgt

SEQ ID NO: 495942 - DNA, 55 bp, Artificial
  Synthetic oligonucleotide
cgctctcgcccgaacggaacacaacgacatggttgacggaacccagctcgccgaa

SEQ ID NO: 495943 - DNA, 55 bp, Artificial
  Synthetic oligonucleotide
cgctgggatactccttcatacttagtcctccgtgaggtcttctgcgtaggatttg

SEQ ID NO: 495944 - DNA, 55 bp, Artificial
  Synthetic oligonucleotide
cggcgagcgagtgcgtgtaaacaacacttatgtgtctgctatggcgaagggcgac

SEQ ID NO: 495945 - DNA, 55 bp, Artificial
  Synthetic oligonucleotide
ccggaggaaaactcggatcgtgctcagttgggttctgagggtcatgttattgacg

SEQ ID NO: 495946 - DNA, 55 bp, Artificial
  Synthetic oligonucleotide
ccgtagcgaatcatctcgcaggtccttactcaaccagtacagccctcgaagcggt

SEQ ID NO: 495947 - DNA, 55 bp, Artificial
  Synthetic oligonucleotide
ccgtcttgcgccacctgacgacgccccaagtgtttcacccgaagaggcagaggat

SEQ ID NO: 495948 - DNA, 55 bp, Artificial
  Synthetic oligonucleotide
ccgtgaggtgattgctcgatgggacaccgcgcactcgttgcgtatgaacgcacag

SEQ ID NO: 495949 - DNA, 55 bp, Artificial
  Synthetic oligonucleotide
cgtcgctcggtagatcgagagttcgtaggctcgcgctggcgaatcgtgtgcgatg

SEQ ID NO: 495950 - DNA, 55 bp, Artificial
  Synthetic oligonucleotide
ccgttaccgtctgctccgccgaattcatcctttacttcggacgcgattgcctcgg

SEQ ID NO: 495951 - DNA, 55 bp, Artificial
  Synthetic oligonucleotide
cctatcccgggagtattgcgttgacgagacgtgttccgaagcgtcgtggggaaac

SEQ ID NO: 495952 - DNA, 55 bp, Artificial
  Synthetic oligonucleotide
cctcctagtcatctattggggtacctccacgaaatcgcaagcttacaccccgagg

SEQ ID NO: 495953 - DNA, 55 bp, Artificial
  Synthetic oligonucleotide
cgtcgccttgtaccatgacctcaggaccaccacgaccgcccattgttgtccgtcg

SEQ ID NO: 495954 - DNA, 55 bp, Artificial
  Synthetic oligonucleotide
cctgttcggtaccggcccaggcccgaggatccagaatgtcggtcgttggatcgat

SEQ ID NO: 495955 - DNA, 55 bp, Artificial
  Synthetic oligonucleotide
cgtcctcggattagtaattgaatgaaaatacgctggtatccgtctatcacggtcg

SEQ ID NO: 495956 - DNA, 55 bp, Artificial
  Synthetic oligonucleotide
ccttattggatcgaagttactagttctgctcgttggaatcattctcgttggcgtc

SEQ ID NO: 495957 - DNA, 55 bp, Artificial
  Synthetic oligonucleotide
cgagaattctcaacccggattatcgaagattaagagagaaaacggtctcgtgcac

SEQ ID NO: 495958 - DNA, 55 bp, Artificial
  Synthetic oligonucleotide
cgacttcgagggcccgtcaatccaagcgaggcaataacgttctcctgagagtcga

SEQ ID NO: 495959 - DNA, 55 bp, Artificial
  Synthetic oligonucleotide
cgacgtcaagctgggaggacaatccagtcgagaccccgttattgacgcccgtgag

SEQ ID NO: 495960 - DNA, 55 bp, Artificial
  Synthetic oligonucleotide
cgtccgagtctcgatagactgcatcgaccctaatgtcgtacgtcgccccagcacc

SEQ ID NO: 495961 - DNA, 55 bp, Artificial
  Synthetic oligonucleotide
cgaccgggtaatcgccatcctcgaagatatcacgccgcagaaacgaatcgagcgg

SEQ ID NO: 495962 - DNA, 55 bp, Artificial
  Synthetic oligonucleotide
cgtccgggagttgcttgctcattcgcgtcgtcgtagggtcgattcgtgaatagtg

SEQ ID NO: 495963 - DNA, 55 bp, Artificial
  Synthetic oligonucleotide
cgaccaccgaagagttacgggaactgggaatcgatccggccgacaatgtgaccgg

SEQ ID NO: 495964 - DNA, 55 bp, Artificial
  Synthetic oligonucleotide
cgaatccatagtgttcttgacgctgtgatagcagaacaacgtgccggggattgcg

SEQ ID NO: 495965 - DNA, 54 bp, Artificial
  Synthetic oligonucleotide
ccccgatgtcgagacccagttgggagggtttgaccgagatgcaagcatcgaggt

SEQ ID NO: 495966 - DNA, 54 bp, Artificial
  Synthetic oligonucleotide
ctcccgggcagaactgttccaccacgaaaaggtgtcgacggacacctccgaaca

SEQ ID NO: 495967 - DNA, 54 bp, Artificial
  Synthetic oligonucleotide
ggataggaatcgacacagcccggacgaacggaagtaccgagggttctattcaga

SEQ ID NO: 495968 - DNA, 54 bp, Artificial
  Synthetic oligonucleotide
ggtgtgtgaatcgagaggctatccgagggctgtttctcgtaggcattggatacc

SEQ ID NO: 495969 - DNA, 54 bp, Artificial
  Synthetic oligonucleotide
cgggccaattggtggccacgctactctggagagcgggacaaaacaacgaatcgg

SEQ ID NO: 495970 - DNA, 54 bp, Artificial
  Synthetic oligonucleotide
agaggagtacgccgggtaccacgaactggcgtatctccatcctaatcgctttga

SEQ ID NO: 495971 - DNA, 54 bp, Artificial
  Synthetic oligonucleotide
cgaagcagtcgtccgtgaactccaaccccgcgccgagattatccggactgagta

SEQ ID NO: 495972 - DNA, 53 bp, Artificial
  Synthetic oligonucleotide
acgacgcatcgtacgactcgatctcctcgtgagccaacgcgacccgctctcgt

SEQ ID NO: 495973 - DNA, 53 bp, Artificial
  Synthetic oligonucleotide
acatgggacgttactctgtactatcaagactcgtctatcttgccacctcgtga

SEQ ID NO: 495974 - DNA, 53 bp, Artificial
  Synthetic oligonucleotide
tccgttctctgactcgccacgattcgaggactggatcgaactgtacgacgggt

SEQ ID NO: 495975 - DNA, 53 bp, Artificial
  Synthetic oligonucleotide
tgatatcgaggtcctctgtcccgaccactccctggtctcgtgggtggctgttt

SEQ ID NO: 495976 - DNA, 53 bp, Artificial
  Synthetic oligonucleotide
tggactgtcgcggttacgattcaggggttcaagtacggctacctcgaaggaaa

SEQ ID NO: 495977 - DNA, 53 bp, Artificial
  Synthetic oligonucleotide
cgggaatcatcggtttcgagttcgccgctatcgctctcggtcccctcgaacgc

SEQ ID NO: 495978 - DNA, 53 bp, Artificial
  Synthetic oligonucleotide
cccgcttatcgtagaacgttgcggtaatgaacatctcggcaggaaactgaccc

SEQ ID NO: 495979 - DNA, 53 bp, Artificial
  Synthetic oligonucleotide
agtgctcaccacttccgcgagtcatatcgacacgagaccagcaatgttcagga

SEQ ID NO: 495980 - DNA, 53 bp, Artificial
  Synthetic oligonucleotide
gagtagctatcccaacaccgcgatgtagcgggtgagcgaagcgtgaacccggc

SEQ ID NO: 495981 - DNA, 53 bp, Artificial
  Synthetic oligonucleotide
atcgacccataggttcaggctcgctaccgctcgacgtaactgtttccctccca

SEQ ID NO: 495982 - DNA, 53 bp, Artificial
  Synthetic oligonucleotide
cgcgagggtggtgcctgactggtttactcacgcgacactaccgttcccttagt

SEQ ID NO: 495983 - DNA, 53 bp, Artificial
  Synthetic oligonucleotide
attgtctgtggagacgggctgttagccgcacgtaggttctcttgatggagcgt

SEQ ID NO: 495984 - DNA, 53 bp, Artificial
  Synthetic oligonucleotide
cgaccggaaaacacaccccagtcgacgcgcccaccatttgtgcatcgtgtaga

SEQ ID NO: 495985 - DNA, 53 bp, Artificial
  Synthetic oligonucleotide
ggtctacggaggggaccaacgatggctgagtacctgcgtgtaacgcccacatc

SEQ ID NO: 495986 - DNA, 53 bp, Artificial
  Synthetic oligonucleotide
cgcgaccatcgaggtagtcgtgcacatctgtatgctcctcccggaacggtttc

SEQ ID NO: 495987 - DNA, 53 bp, Artificial
  Synthetic oligonucleotide
caatcagaccgcacccgaggtaatccttgctattacggctcacggtgtctggc

SEQ ID NO: 495988 - DNA, 52 bp, Artificial
  Synthetic oligonucleotide
catcgtgcaggtccaattcgaggccgacggtgtacagagctacgtcgtatcg

SEQ ID NO: 495989 - DNA, 52 bp, Artificial
  Synthetic oligonucleotide
tgggtattcggacgcaccgcatacagaaccgctcaaacgttcgtttccgggg

SEQ ID NO: 495990 - DNA, 52 bp, Artificial
  Synthetic oligonucleotide
ggggaacacgttctcgttccgttggatggttcgccgaaatcggtggaggcgt

SEQ ID NO: 495991 - DNA, 52 bp, Artificial
  Synthetic oligonucleotide
ggggtcagaagcggtaacacatctatggcaacaaacactatcaatcggacgg

SEQ ID NO: 495992 - DNA, 52 bp, Artificial
  Synthetic oligonucleotide
atttaccgcgacgcactcggtctcctccaagcccgaaccgtcactacctacg

SEQ ID NO: 495993 - DNA, 52 bp, Artificial
  Synthetic oligonucleotide
tgtccgcggcagaactcgctacagaggtccaagagctacgggaagaactcgc

SEQ ID NO: 495994 - DNA, 52 bp, Artificial
  Synthetic oligonucleotide
ttggttctcacgcgaacagaggcgaagacgctacccgtggcgacgacagagt

SEQ ID NO: 495995 - DNA, 52 bp, Artificial
  Synthetic oligonucleotide
agaacgggtccggacgcaaactggactacacgtacataacggtcatagacag

SEQ ID NO: 495996 - DNA, 51 bp, Artificial
  Synthetic oligonucleotide
gcttgaacgactacctcggggagacgatgctgtacgttctccagtcgaagc

SEQ ID NO: 495997 - DNA, 51 bp, Artificial
  Synthetic oligonucleotide
ccgtgtgtcgctgcgtatcatcagtggcgctggacgaacggtctcactgac

SEQ ID NO: 495998 - DNA, 51 bp, Artificial
  Synthetic oligonucleotide
cagtcgagtggactggtaatcggtcgtcgcaatcgagaacacgtcgtgtct

SEQ ID NO: 495999 - DNA, 51 bp, Artificial
  Synthetic oligonucleotide
tcggcccgaccatggatgtccgccgcccacgtccggagttcgcgagcgtac

SEQ ID NO: 496000 - DNA, 51 bp, Artificial
  Synthetic oligonucleotide
tcacggtcgcctacgtgccgatctacccgaacatgcagcactacatcatgc

SEQ ID NO: 496001 - DNA, 51 bp, Artificial
  Synthetic oligonucleotide
actcgcctcgcgtcgtcggcatcgagtcgtgtctgatactgttgtcttacc

SEQ ID NO: 496002 - DNA, 51 bp, Artificial
  Synthetic oligonucleotide
aggttgctctctacgttccgtgaacgaattcgatgggtgccgagtcggggc

SEQ ID NO: 496003 - DNA, 50 bp, Artificial
  Synthetic oligonucleotide
acagatattgcgcttttgtgacacataacgggacgacatgaatacgccat

SEQ ID NO: 496004 - DNA, 50 bp, Artificial
  Synthetic oligonucleotide
tgatgggcacggatgtgggtcgaagccaggtagttgtaagttttcaggtt

SEQ ID NO: 496005 - DNA, 50 bp, Artificial
  Synthetic oligonucleotide
actaccgagatctggcgtgagtccactggggcgaatcggtcgtttatcat

SEQ ID NO: 496006 - DNA, 50 bp, Artificial
  Synthetic oligonucleotide
tacagcccgaatctacaggacgcccatattaaatagtgtcgggaagcccc

SEQ ID NO: 496007 - DNA, 50 bp, Artificial
  Synthetic oligonucleotide
aacgagagtcccacgtgaaacgagtgacacaccaatcgcacagcggtcat

SEQ ID NO: 496008 - DNA, 55 bp, Artificial
  Synthetic oligonucleotide
ctgaggaatttcactgaaagcacgtccaaagatattctattttcccagtgtcagg

SEQ ID NO: 496009 - DNA, 55 bp, Artificial
  Synthetic oligonucleotide
tgggtgattctcgattgcagtgttttccaatgattctggcaattgttgaggttgt

SEQ ID NO: 496010 - DNA, 55 bp, Artificial
  Synthetic oligonucleotide
gaaggggcttattatcatttccgcatttcggagagtaaatacatgaagggcatcc

SEQ ID NO: 496011 - DNA, 55 bp, Artificial
  Synthetic oligonucleotide
tcctggatgatggagaataagctgctcctatagccaggggccaaagcatagaaag

SEQ ID NO: 496012 - DNA, 55 bp, Artificial
  Synthetic oligonucleotide
gataatccgtcattccaatcatcgggaacttccacttcacaaacttctgcacagt

SEQ ID NO: 496013 - DNA, 55 bp, Artificial
  Synthetic oligonucleotide
gttaccaatgctgtaaaccacggtattgacgtaagacacggaaccggaccaaatg

SEQ ID NO: 496014 - DNA, 55 bp, Artificial
  Synthetic oligonucleotide
gcgagtaaatcgccgccaagcagtctgatttctaagggtataccttcaccttcac

SEQ ID NO: 496015 - DNA, 55 bp, Artificial
  Synthetic oligonucleotide
gcggtaacttaactcatggtaatcttacccatactggacgttacgacatggaatt

SEQ ID NO: 496016 - DNA, 55 bp, Artificial
  Synthetic oligonucleotide
gctctgataacatctgcaccaaattcgtgatggaaaccttcagtagctggtccca

SEQ ID NO: 496017 - DNA, 55 bp, Artificial
  Synthetic oligonucleotide
gcttatggcagattcccgttcgcctagacagatactcagacctacagcgtagttc

SEQ ID NO: 496018 - DNA, 55 bp, Artificial
  Synthetic oligonucleotide
ggagactctgcagccttcgtattcagctgttacaatgtaggtgcccggacgtaac

SEQ ID NO: 496019 - DNA, 55 bp, Artificial
  Synthetic oligonucleotide
ggataatgtgtcctggagtgtttggttggctccttatgagtatgtgtttagtcgt

SEQ ID NO: 496020 - DNA, 55 bp, Artificial
  Synthetic oligonucleotide
ggattgtgactttgcaccctacaatgtccttgaatacactctgggcattgcagaa

SEQ ID NO: 496021 - DNA, 55 bp, Artificial
  Synthetic oligonucleotide
ggcgcgtattgatagggacaccatgcatagatatattgagaattacccctcaacc

SEQ ID NO: 496022 - DNA, 55 bp, Artificial
  Synthetic oligonucleotide
ggtcgtcaggaccgtttgatatgttggagcggtaatgcggtttgccttgacgaat

SEQ ID NO: 496023 - DNA, 55 bp, Artificial
  Synthetic oligonucleotide
gttacaacagacataataactgtaaccatacaggttgatcccggctgcatatcag

SEQ ID NO: 496024 - DNA, 55 bp, Artificial
  Synthetic oligonucleotide
gtgtgaccacattctggacaaacagcttttgtagttgggagtgtatttacgtctt

SEQ ID NO: 496025 - DNA, 55 bp, Artificial
  Synthetic oligonucleotide
aacagtagcgttaactaaagccttaccgttgctgtctaagaatagtgcagaatac

SEQ ID NO: 496026 - DNA, 55 bp, Artificial
  Synthetic oligonucleotide
tttaacaacgtccaatcctttaactgtcggttcaatagtaactttcgcctgcctg

SEQ ID NO: 496027 - DNA, 55 bp, Artificial
  Synthetic oligonucleotide
agtcctacaaaaccgcctataattcccatgttaagtacatttgcacccaacgcgg

SEQ ID NO: 496028 - DNA, 55 bp, Artificial
  Synthetic oligonucleotide
tgtatcttgaacctggaaggtatttggtaggtgatgcatgtgtgcttttaactcg

SEQ ID NO: 496029 - DNA, 55 bp, Artificial
  Synthetic oligonucleotide
atatctaatctgtagcatcagcgatgtactggatgggtatgttgctcgcaaatac

SEQ ID NO: 496030 - DNA, 55 bp, Artificial
  Synthetic oligonucleotide
atcctgcggtcccaataatgcctgcatacaaaggtataatgattcagtagctccg

SEQ ID NO: 496031 - DNA, 55 bp, Artificial
  Synthetic oligonucleotide
caatctattaaacccgaagaacatggattgtatcttagcggaggtaaaggagcaa

SEQ ID NO: 496032 - DNA, 55 bp, Artificial
  Synthetic oligonucleotide
cacatattgacgatgtgtgttgatgtatatccgtgcataagtaaccctactggca

SEQ ID NO: 496033 - DNA, 55 bp, Artificial
  Synthetic oligonucleotide
cacttcaaagcggtgtggcagtacctgatttggtaactcaggggacaggtttggt

SEQ ID NO: 496034 - DNA, 55 bp, Artificial
  Synthetic oligonucleotide
cagagcttaaaaggcgtttcgataacctgaatttgtcaggcaatgtaacaatcat

SEQ ID NO: 496035 - DNA, 55 bp, Artificial
  Synthetic oligonucleotide
ccagggccaggatagtggcaagtatggcagcactggttcggttgaatgcagctac

SEQ ID NO: 496036 - DNA, 55 bp, Artificial
  Synthetic oligonucleotide
ccccaatctggtattgagttccgtttagaacgtaccctgcatcctcgttaaccac

SEQ ID NO: 496037 - DNA, 55 bp, Artificial
  Synthetic oligonucleotide
cctattttccgtggagcagttcatatctaatcggagcaaatgaaatagccaacta

SEQ ID NO: 496038 - DNA, 55 bp, Artificial
  Synthetic oligonucleotide
cgacacagattacatatttcaccttgcagctatggctagtgttccattaagtgta

SEQ ID NO: 496039 - DNA, 55 bp, Artificial
  Synthetic oligonucleotide
cgcttaaaccagtttgagcattaccagtagcgaatgcagtagatgcaccagctgc

SEQ ID NO: 496040 - DNA, 55 bp, Artificial
  Synthetic oligonucleotide
cggtggctcccataccacgggatgcttcaatggtggctgctaccggaccgtatcc

SEQ ID NO: 496041 - DNA, 55 bp, Artificial
  Synthetic oligonucleotide
ctaaggcaagcaagatgaatgcaatccagggtgcccagacttcaaccagtgcagc

SEQ ID NO: 496042 - DNA, 55 bp, Artificial
  Synthetic oligonucleotide
ctactaaaataaggattgtgaccgatatctattactctggtgatggagtagtggg

SEQ ID NO: 496043 - DNA, 52 bp, Artificial
  Synthetic oligonucleotide
gagtcggaaccataatcgccgcaaccagtatgaacagtggcatgttactact

SEQ ID NO: 496044 - DNA, 52 bp, Artificial
  Synthetic oligonucleotide
ataacctgcaaagccacctactttaaattcagagccgtatgttccagtcatg

SEQ ID NO: 496045 - DNA, 51 bp, Artificial
  Synthetic oligonucleotide
gtgaagtaaatagttgcgttagctattgggtttccaaatgcgtcaactagt

SEQ ID NO: 496046 - DNA, 51 bp, Artificial
  Synthetic oligonucleotide
gaaaagaacagcatgaccgtttaaatcattagccagttcaacagcaacaca

SEQ ID NO: 496047 - DNA, 51 bp, Artificial
  Synthetic oligonucleotide
aatgcagtatcaggtttagcacctaactgtttagctgcattgtacaaacca

SEQ ID NO: 496048 - DNA, 50 bp, Artificial
  Synthetic oligonucleotide
gatgcttcctatgtggcctatggacattccatggtatgtgatccatgggg

SEQ ID NO: 496049 - DNA, 50 bp, Artificial
  Synthetic oligonucleotide
tttgccatgctcccagtatgatctgattccagtaaccctgcagcctgggt

SEQ ID NO: 496050 - DNA, 55 bp, Artificial
  Synthetic oligonucleotide
ttctcatcacccaaggcaactttaaccccaggttttcccaaatcctcaaggcaag

SEQ ID NO: 496051 - DNA, 55 bp, Artificial
  Synthetic oligonucleotide
tgcttcccttattgccttaggtccaaatcttgcccctgccttaaaactcgtggtt

SEQ ID NO: 496052 - DNA, 55 bp, Artificial
  Synthetic oligonucleotide
gtgtgttaaaactggcaacgctccaacatggtctaaatgtgcatgggatacgaat

SEQ ID NO: 496053 - DNA, 55 bp, Artificial
  Synthetic oligonucleotide
gccaggaggggttgattctcacacacacgttgcaggacctaaattaactgttgga

SEQ ID NO: 496054 - DNA, 55 bp, Artificial
  Synthetic oligonucleotide
gcaccgataagttttgctatccctgaaccaagtgtttgggctactccagttgaac

SEQ ID NO: 496055 - DNA, 55 bp, Artificial
  Synthetic oligonucleotide
gagagggcactgcaacgtcaatggatttaaccaagttgcttcatacatgtatggc

SEQ ID NO: 496056 - DNA, 55 bp, Artificial
  Synthetic oligonucleotide
ctgcatagggacagacatgcctgttaagattgagtatgacattggaggggctaat

SEQ ID NO: 496057 - DNA, 55 bp, Artificial
  Synthetic oligonucleotide
cgtttggaggtaagccatatctctttggtgctattgctacaccagggtctattaa

SEQ ID NO: 496058 - DNA, 55 bp, Artificial
  Synthetic oligonucleotide
ccgctgcccttgcatcgaagtaggtaattcctccacataacgctggtttatcagg

SEQ ID NO: 496059 - DNA, 55 bp, Artificial
  Synthetic oligonucleotide
cccaatctcagagagggtagatgcaagaatcctcttatatcaagttcctggagga

SEQ ID NO: 496060 - DNA, 55 bp, Artificial
  Synthetic oligonucleotide
agaagcaggtgcctacgattatctcttcatatacaaaagtgtcgcaaaccagcac

SEQ ID NO: 496061 - DNA, 55 bp, Artificial
  Synthetic oligonucleotide
acatgtttggccaattccctatcaccctctacaaatgcttttacggcgttttcca

SEQ ID NO: 496062 - DNA, 53 bp, Artificial
  Synthetic oligonucleotide
ctccacccgagtgattttggaactcataggagaaagaaactcccatgtccttt

SEQ ID NO: 496063 - DNA, 53 bp, Artificial
  Synthetic oligonucleotide
taagtggctcctataactgatgtagtcccactcgccaaacctaacattggaat

SEQ ID NO: 496064 - DNA, 52 bp, Artificial
  Synthetic oligonucleotide
gtctttgggattagcgggagtccaagattgcaaggaactcattttgcggtaa

SEQ ID NO: 496065 - DNA, 52 bp, Artificial
  Synthetic oligonucleotide
ttgcaccactcgctgttatgagaatttgtgggatatgtcaaacaacgcatgg

SEQ ID NO: 496066 - DNA, 50 bp, Artificial
  Synthetic oligonucleotide
cagtaacgcatagacacgtattccacccaagaagaacagtttccatcccc

SEQ ID NO: 496067 - DNA, 55 bp, Artificial
  Synthetic oligonucleotide
tgacacggttagctggtataacacgttgtacaataacgtgggccgccaggttact

SEQ ID NO: 496068 - DNA, 55 bp, Artificial
  Synthetic oligonucleotide
tctattggcaagcctgaggaggtattgcctctcatcacagaggccatgatatgat

SEQ ID NO: 496069 - DNA, 55 bp, Artificial
  Synthetic oligonucleotide
ggcggctcttttaagcctcgactcgcccttatcccgtgcagccttaaccttgacc

SEQ ID NO: 496070 - DNA, 55 bp, Artificial
  Synthetic oligonucleotide
ggaggcgtagtctgccaggtcgtacgtgttattatcgcccgtcgcgcattccacg

SEQ ID NO: 496071 - DNA, 55 bp, Artificial
  Synthetic oligonucleotide
gccacgagaaggattttgctccccgtcatgcgggctacatcgaagtcggataggc

SEQ ID NO: 496072 - DNA, 55 bp, Artificial
  Synthetic oligonucleotide
gcaggactccactacgcggtaatcgtcatatatgcccgtatccagcctggctatc

SEQ ID NO: 496073 - DNA, 55 bp, Artificial
  Synthetic oligonucleotide
gagtataagaataagctatacatacaccggaggaacgccgcggtcccagaggtcc

SEQ ID NO: 496074 - DNA, 55 bp, Artificial
  Synthetic oligonucleotide
ctatggggcactttgactgaaggggtggactacaagtttgataggtgccgtaccg

SEQ ID NO: 496075 - DNA, 55 bp, Artificial
  Synthetic oligonucleotide
cgcgaggcgcctggaaaggtagacggtcttgccaatctgcctgagcttgatgctc

SEQ ID NO: 496076 - DNA, 55 bp, Artificial
  Synthetic oligonucleotide
cccgaatatctcgctctctacatcgaggttgacgtcgtttaccgcgcacaggtcc

SEQ ID NO: 496077 - DNA, 55 bp, Artificial
  Synthetic oligonucleotide
cccctatcttcatggcgcaatccggacagctcaggttctccagcattagtacgac

SEQ ID NO: 496078 - DNA, 55 bp, Artificial
  Synthetic oligonucleotide
aggtttgagtccgagccgctgaaggagggtatggcgaagggcaacgtggctaaag

SEQ ID NO: 496079 - DNA, 55 bp, Artificial
  Synthetic oligonucleotide
accgagttatgctcagaggctatgctcacgaacaccctggcgttgtcgcggatgg

SEQ ID NO: 496080 - DNA, 54 bp, Artificial
  Synthetic oligonucleotide
ttctgccctggacatatgattcccctgaacacagaatatcgttacgattttaac

SEQ ID NO: 496081 - DNA, 53 bp, Artificial
  Synthetic oligonucleotide
tatgcagcccaatattcgtctcgatccctattttcatgctcctcaagataggg

SEQ ID NO: 496082 - DNA, 52 bp, Artificial
  Synthetic oligonucleotide
aggcttaaggtatgagtagaacatctccgacgcgtctaccctgctatcctgt

SEQ ID NO: 496083 - DNA, 52 bp, Artificial
  Synthetic oligonucleotide
ttatgttacatggcccggcagatgggatacacgctttcccaggctgagacaa

SEQ ID NO: 496084 - DNA, 55 bp, Artificial
  Synthetic oligonucleotide
ctgtcatagtggttccgaatgacagacttctggaagttgtacccaacctcccact

SEQ ID NO: 496085 - DNA, 55 bp, Artificial
  Synthetic oligonucleotide
gagaaatggctacatctcgcggcctggcgcaaactcggggatatcgacctcggag

SEQ ID NO: 496086 - DNA, 55 bp, Artificial
  Synthetic oligonucleotide
gaggggcttaagatggttactctccatacgatcttccagtacccctgtagcacgc

SEQ ID NO: 496087 - DNA, 55 bp, Artificial
  Synthetic oligonucleotide
gcagcgtatgccagagttgcgggatgccgctttccggagatgaagtcaggggtac

SEQ ID NO: 496088 - DNA, 55 bp, Artificial
  Synthetic oligonucleotide
gcgaaacgctccttatccccgctggcgcatcaagacgatcaaatgcacgcagtcc

SEQ ID NO: 496089 - DNA, 55 bp, Artificial
  Synthetic oligonucleotide
gctcaccgatagaaaacgggtaattgccgttgaggaccctgaccttctcatcgtg

SEQ ID NO: 496090 - DNA, 55 bp, Artificial
  Synthetic oligonucleotide
gggaaagtaaatgatatagtcagctggcttgaagaacctgaaacatccggatact

SEQ ID NO: 496091 - DNA, 55 bp, Artificial
  Synthetic oligonucleotide
gggagactggccagagcgatagagattcctgccgtactctgagatcacacctccc

SEQ ID NO: 496092 - DNA, 55 bp, Artificial
  Synthetic oligonucleotide
ggggtggcggatcatttcaccttaccttgagggtgcgtgggagtgatcgccggtc

SEQ ID NO: 496093 - DNA, 55 bp, Artificial
  Synthetic oligonucleotide
ggtacaacagaaccatgtctcagctcagagggaatgatacggaaattcagcctgg

SEQ ID NO: 496094 - DNA, 55 bp, Artificial
  Synthetic oligonucleotide
ggtcgctccggagagatagatctgacgcgattctcatgctcgaggtagaagcaaa

SEQ ID NO: 496095 - DNA, 55 bp, Artificial
  Synthetic oligonucleotide
gtaaaccagagagggtatgagatcctggggtataccggggaagaccttaccggga

SEQ ID NO: 496096 - DNA, 55 bp, Artificial
  Synthetic oligonucleotide
gtggaggcatatgcaggaattgcggctgtagatgcatatcttggtgcaacccaga

SEQ ID NO: 496097 - DNA, 55 bp, Artificial
  Synthetic oligonucleotide
gtgggctaaatgagcgtttcgatcctctccgccgaacctgcccctccgtccagca

SEQ ID NO: 496098 - DNA, 55 bp, Artificial
  Synthetic oligonucleotide
gttcccacagtcttgttgctgctatcccaggttaccgtaacaccggtcatggggc

SEQ ID NO: 496099 - DNA, 55 bp, Artificial
  Synthetic oligonucleotide
tcagtcataggacatccatccgccgaataagagtgagaatatatgacttgcgggg

SEQ ID NO: 496100 - DNA, 55 bp, Artificial
  Synthetic oligonucleotide
tcccctgaagtttcacagtccatacagaccagacgcccgtacccgagataacggc

SEQ ID NO: 496101 - DNA, 55 bp, Artificial
  Synthetic oligonucleotide
tctcgtctcggagggagaactctcaacggcgatccagggctacctgaacgccacg

SEQ ID NO: 496102 - DNA, 55 bp, Artificial
  Synthetic oligonucleotide
tgagatctgaaaacggataataattctcagtcagggtgccgtaatatgtgggacc

SEQ ID NO: 496103 - DNA, 55 bp, Artificial
  Synthetic oligonucleotide
aaacgctgcatcgacgactaccggaagggagcggggatcgtctacgtcatgctcg

SEQ ID NO: 496104 - DNA, 55 bp, Artificial
  Synthetic oligonucleotide
caagaaatgatgtacttccgccgcaaccggagaggacggttttatgtgacgttaa

SEQ ID NO: 496105 - DNA, 55 bp, Artificial
  Synthetic oligonucleotide
ccattcttagtgcacagactaccgacaggacagtcaattcggttaaaggcagact

SEQ ID NO: 496106 - DNA, 55 bp, Artificial
  Synthetic oligonucleotide
ccccagctcaggaatctcctctaccccatggagtggttctttcggttctccatcc

SEQ ID NO: 496107 - DNA, 55 bp, Artificial
  Synthetic oligonucleotide
ccctccgggaatacgtcagatcatatcgaaattccggttcctgtgatatattctg

SEQ ID NO: 496108 - DNA, 55 bp, Artificial
  Synthetic oligonucleotide
ccctgaatgcccatacaggagtgccgatcacaattacatccgatgcggagacatc

SEQ ID NO: 496109 - DNA, 55 bp, Artificial
  Synthetic oligonucleotide
ccggaccgccgctgtactcaagcacaatgatccggttgacgagcgctcctccaga

SEQ ID NO: 496110 - DNA, 55 bp, Artificial
  Synthetic oligonucleotide
ccggagaaagcctgccgtgaaacggcaaaagggtcagaaggggcagtcgcggtga

SEQ ID NO: 496111 - DNA, 55 bp, Artificial
  Synthetic oligonucleotide
ccgggcttcgtcagatccgggtttcaagcaattgactgggattcagcaaaggttg

SEQ ID NO: 496112 - DNA, 55 bp, Artificial
  Synthetic oligonucleotide
ccggtataggattcaaacggtatctttccggagtccgcaacactctgaagtctct

SEQ ID NO: 496113 - DNA, 55 bp, Artificial
  Synthetic oligonucleotide
cgaggggcatctggatgatctgacggcgtcctgtctcttcgatcttgtcctctcc

SEQ ID NO: 496114 - DNA, 55 bp, Artificial
  Synthetic oligonucleotide
cggcgacaacagaggttcccggtccgaactgtggtttatatgccatagataattt

SEQ ID NO: 496115 - DNA, 55 bp, Artificial
  Synthetic oligonucleotide
cggctccgtcgcaatctcttcgtcgacggattaaacaaactcggtcttacctgcc

SEQ ID NO: 496116 - DNA, 55 bp, Artificial
  Synthetic oligonucleotide
cgggtgtaagtcagatggcaggtcagattgccattggtagcggagttatcatcgg

SEQ ID NO: 496117 - DNA, 55 bp, Artificial
  Synthetic oligonucleotide
cgtgcacgggtaagggcaacgttcagcctgtttaagctatcgaggaaacctattc

SEQ ID NO: 496118 - DNA, 55 bp, Artificial
  Synthetic oligonucleotide
ctcacccgggacgaatcactgaaggtatccgaccattacccggtttatgcgaaat

SEQ ID NO: 496119 - DNA, 55 bp, Artificial
  Synthetic oligonucleotide
ctgcggatcgttacagaagcgttggaaaaccggtaggatattcagaggtgaagat

SEQ ID NO: 496120 - DNA, 54 bp, Artificial
  Synthetic oligonucleotide
actgggtccactgctacgtcggcgagcctggaaaataggcgctttcatgcgtac

SEQ ID NO: 496121 - DNA, 54 bp, Artificial
  Synthetic oligonucleotide
accgcggggtctttgataactcagaggcagggacattcatcgttgcaccggaga

SEQ ID NO: 496122 - DNA, 54 bp, Artificial
  Synthetic oligonucleotide
ttactccgatatcattccggtgtgcaaactctttcagggctgatttagcctccc

SEQ ID NO: 496123 - DNA, 52 bp, Artificial
  Synthetic oligonucleotide
tcctgaccatccgcctgtggcacggtcaccgacaaatttgtcccctgtccgg

SEQ ID NO: 496124 - DNA, 51 bp, Artificial
  Synthetic oligonucleotide
tatgcttaaagagaatgtgtctgaatcaaaatttagcaggtccgggcacat

SEQ ID NO: 496125 - DNA, 51 bp, Artificial
  Synthetic oligonucleotide
ttcacatatacgcaatcgccagaacggtcggtcctgaagatccctaccgga

SEQ ID NO: 496126 - DNA, 55 bp, Artificial
  Synthetic oligonucleotide
agacccgacgaccatcccttccgcacgaccgtcagcccggatatggtccagtatc

SEQ ID NO: 496127 - DNA, 55 bp, Artificial
  Synthetic oligonucleotide
catcgggtaccgcgacaagttcgctgccggtgtctattccggtaagatcgagggt

SEQ ID NO: 496128 - DNA, 55 bp, Artificial
  Synthetic oligonucleotide
ccattgccaacccggctggggctttaaacataatctggatagatactatatgccc

SEQ ID NO: 496129 - DNA, 55 bp, Artificial
  Synthetic oligonucleotide
ccccgcatactttacgaaagtcgggtggtgggtcgttgaataaaaccccttgggg

SEQ ID NO: 496130 - DNA, 55 bp, Artificial
  Synthetic oligonucleotide
cccgggatgacctgccacgggaccaacatttatctgttctgacccggtgatccac

SEQ ID NO: 496131 - DNA, 55 bp, Artificial
  Synthetic oligonucleotide
ccgtcgcgaggaaggagggagcacggtaaccatcgtaggagatctcggagtaggc

SEQ ID NO: 496132 - DNA, 55 bp, Artificial
  Synthetic oligonucleotide
cgggctcgtgcgggaccggaagagttccttctggagcgccggataaagagtgtca

SEQ ID NO: 496133 - DNA, 55 bp, Artificial
  Synthetic oligonucleotide
ctcctcttccttgtttacggcctcgcacggctgggaggactggtatgaaagaggc

SEQ ID NO: 496134 - DNA, 55 bp, Artificial
  Synthetic oligonucleotide
gaatgctaccgaccctccggcgtgcattctttataccatgggcaggcaagtcctg

SEQ ID NO: 496135 - DNA, 55 bp, Artificial
  Synthetic oligonucleotide
gataagggctgtttctcctcgaagaattaccagacaggtgtcctgaattaaatgg

SEQ ID NO: 496136 - DNA, 55 bp, Artificial
  Synthetic oligonucleotide
gattgcaaagatcccgaggaacgagacaaacgaggacgctacccctcccaccgcc

SEQ ID NO: 496137 - DNA, 55 bp, Artificial
  Synthetic oligonucleotide
gcagtatggcatgaagagggcagcagacttcatcgacgatataactcaccttgcc

SEQ ID NO: 496138 - DNA, 55 bp, Artificial
  Synthetic oligonucleotide
gcccgtagcatcatcgatccaggccgaagagaaggtaacaatccggcgggtcccg

SEQ ID NO: 496139 - DNA, 54 bp, Artificial
  Synthetic oligonucleotide
cctggtatgcctttataggttgcccttggcggtgttaaaggtagcggatggctt

SEQ ID NO: 496140 - DNA, 54 bp, Artificial
  Synthetic oligonucleotide
ctgacatggtgatcacacatgaccaggcaagttatccagccctgccgggttatg

SEQ ID NO: 496141 - DNA, 53 bp, Artificial
  Synthetic oligonucleotide
tcccggtgccgtcacattgatatagtggaccttctgctcggtactggaaccga

SEQ ID NO: 496142 - DNA, 53 bp, Artificial
  Synthetic oligonucleotide
aatataagacaggggacagaaatatttatcagcggggataattcgcttggcca

SEQ ID NO: 496143 - DNA, 60 bp, Artificial
  Synthetic oligonucleotide
tttcccggctctctctgaccggataccaggggcggaagtgtgctcgatgtggccagccct

SEQ ID NO: 496144 - DNA, 60 bp, Artificial
  Synthetic oligonucleotide
cgtcgtactgcgtcatgaacttagccacccactcaaacccaggcaggtctccggtgcagt

SEQ ID NO: 496145 - DNA, 60 bp, Artificial
  Synthetic oligonucleotide
ccttcaatcggatgctggtagatgctggcttcgccgtggttaagaacttcaccaacaacg

SEQ ID NO: 496146 - DNA, 60 bp, Artificial
  Synthetic oligonucleotide
caccagaaccgaaggggcggagctcagccgaaagtgatcggccaaaaaaggagctttccg

SEQ ID NO: 496147 - DNA, 60 bp, Artificial
  Synthetic oligonucleotide
ataggtataactctgcaagcttacccttaacatctacctgtgccctaaaacccttcagta

SEQ ID NO: 496148 - DNA, 60 bp, Artificial
  Synthetic oligonucleotide
agttcgagcaaagttcgagcaaagttcgagcaaagttcgagcaaagttcgagcaaagttc

SEQ ID NO: 496149 - DNA, 60 bp, Artificial
  Synthetic oligonucleotide
aggccctactgaagcgggccgggatcaaaggggcattgaaggcggctcttctgactgacc

SEQ ID NO: 496150 - DNA, 60 bp, Artificial
  Synthetic oligonucleotide
actttgtgcacgcatcccgagaccttctttgcctatataaaatcgcaaagcagcggcggt

SEQ ID NO: 496151 - DNA, 57 bp, Artificial
  Synthetic oligonucleotide
catcttggattcgagggcttaggccgtcgcctcttcgatgattctgatcgataggat

SEQ ID NO: 496152 - DNA, 55 bp, Artificial
  Synthetic oligonucleotide
catgggctttgctcaagaattccacagggtcttaaaagacgacggaagtctcgta

SEQ ID NO: 496153 - DNA, 55 bp, Artificial
  Synthetic oligonucleotide
cggtttattcacctcaaagggccgtatcgaggcgccagatcgtgaaatagccgcc

SEQ ID NO: 496154 - DNA, 55 bp, Artificial
  Synthetic oligonucleotide
gagagcatcctatccatgggtcggagacgggtcataatctcgtcgtcagtcccgc

SEQ ID NO: 496155 - DNA, 55 bp, Artificial
  Synthetic oligonucleotide
ggagagcttgaggcagtataacgtcaggcttcccgaagagcttatccagaccctc

SEQ ID NO: 496156 - DNA, 55 bp, Artificial
  Synthetic oligonucleotide
ggggccggaaacaagctcaggcggattatcccagcgttgcgggctatcggcattg

SEQ ID NO: 496157 - DNA, 55 bp, Artificial
  Synthetic oligonucleotide
ttacgcggtttcacgttcccgctaatctgataaggtgacgctgcttatggtgggg

SEQ ID NO: 496158 - DNA, 54 bp, Artificial
  Synthetic oligonucleotide
cggtaagtcctggcttggaaggatccttcgggctgtggtcgatcctaataagtc

SEQ ID NO: 496159 - DNA, 53 bp, Artificial
  Synthetic oligonucleotide
gatatagttatggaccccttctgtggtagcaacgtaactgggttcgtggcgga

SEQ ID NO: 496160 - DNA, 55 bp, Artificial
  Synthetic oligonucleotide
taggcccacagcgttaatggcccttaggccctctgcctctagcaaagcgtagccg

SEQ ID NO: 496161 - DNA, 55 bp, Artificial
  Synthetic oligonucleotide
ggcatcttcagaggcagtgatactaattttgcctcacagtgcgtgcaatgcggag

SEQ ID NO: 496162 - DNA, 55 bp, Artificial
  Synthetic oligonucleotide
ggacaatatcatgagagaattcacagttgtcattgaacaggatgaggacggcatt

SEQ ID NO: 496163 - DNA, 55 bp, Artificial
  Synthetic oligonucleotide
gcgcagtaagggttttgatgtaagggatgacattttccacatagatgatgccttc

SEQ ID NO: 496164 - DNA, 55 bp, Artificial
  Synthetic oligonucleotide
gcatacggaatttaccccgaatatgccatgcaatccatatcgggtcttgaggaac

SEQ ID NO: 496165 - DNA, 55 bp, Artificial
  Synthetic oligonucleotide
gcactgccaagtcatactggcatatactgacacctgacggccagttgcacagtac

SEQ ID NO: 496166 - DNA, 55 bp, Artificial
  Synthetic oligonucleotide
gcaagggcgatatcccgttgttgcttaacattggtcctagcagtgatatcccgag

SEQ ID NO: 496167 - DNA, 55 bp, Artificial
  Synthetic oligonucleotide
cgtccccgaaatcgagtcttttcaaagtaagctggttacgatcgaagatccattt

SEQ ID NO: 496168 - DNA, 55 bp, Artificial
  Synthetic oligonucleotide
ccggacgtagttatcaaaagacaggatcgtggaggtgtgaccatcagcagcaccg

SEQ ID NO: 496169 - DNA, 55 bp, Artificial
  Synthetic oligonucleotide
ccgctaaaggaaacgtaccatatagcgactcctataaggattgtaagggacccgg

SEQ ID NO: 496170 - DNA, 55 bp, Artificial
  Synthetic oligonucleotide
ccccgtgctcgaaggtttccacggttataagctcttcagggatgtctgcaaacgt

SEQ ID NO: 496171 - DNA, 55 bp, Artificial
  Synthetic oligonucleotide
ccactcgcatggaatcgtgaacgattttcccgcaatccataatgatagcacggtc

SEQ ID NO: 496172 - DNA, 55 bp, Artificial
  Synthetic oligonucleotide
caggagagcaattatcagggcacggtcgataaccccgcaagcaggttcgtccggc

SEQ ID NO: 496173 - DNA, 55 bp, Artificial
  Synthetic oligonucleotide
acgcagcgcccatgggaatcattcgcaggaatgataaactctatgtgcggctttt

SEQ ID NO: 496174 - DNA, 55 bp, Artificial
  Synthetic oligonucleotide
aactgcggaaacttaccgcgatatcacttccgggataatggatgtctacctttcg

SEQ ID NO: 496175 - DNA, 54 bp, Artificial
  Synthetic oligonucleotide
ctccctgttgagcatgttatcctgcataactaccgaaggctgtcggacaatact

SEQ ID NO: 496176 - DNA, 50 bp, Artificial
  Synthetic oligonucleotide
actgttttagcctggtgatgacattgactgccttctccacataatagctg

SEQ ID NO: 496177 - DNA, 56 bp, Artificial
  Synthetic oligonucleotide
ctctactaactctgagatgatttctaaatagtcctccattcttgtacttgaacgag

SEQ ID NO: 496178 - DNA, 56 bp, Artificial
  Synthetic oligonucleotide
gcaaacgaactatttattgcgatctgtttcaatagatcactatgcaatcagagtcc

SEQ ID NO: 496179 - DNA, 55 bp, Artificial
  Synthetic oligonucleotide
ctccgatgccggaggtattgaccttactgtaactgagactaatgaggcaaccgga

SEQ ID NO: 496180 - DNA, 55 bp, Artificial
  Synthetic oligonucleotide
ctcgaccattaatttgttgtaaccatcgattgggtcaactattgcaattccgtac

SEQ ID NO: 496181 - DNA, 55 bp, Artificial
  Synthetic oligonucleotide
ctgcaacttcgtatgcaagtgttttagagccttccacataatgagagcgcatgtt

SEQ ID NO: 496182 - DNA, 55 bp, Artificial
  Synthetic oligonucleotide
ctggggcgttaactgttacccatttcttttctcgccatttgtcctttactcgtcc

SEQ ID NO: 496183 - DNA, 55 bp, Artificial
  Synthetic oligonucleotide
gaacgacatcgattggaggattggcaattcgtcttgcacatgatattcgaaatcc

SEQ ID NO: 496184 - DNA, 55 bp, Artificial
  Synthetic oligonucleotide
gacactgtttcatgaccacacgagccacaatggcagaaaggatcactagtcatga

SEQ ID NO: 496185 - DNA, 55 bp, Artificial
  Synthetic oligonucleotide
ttcaggggctacatgccctaccatgaatcctcgtgtacctccggaaaacctgccg

SEQ ID NO: 496186 - DNA, 55 bp, Artificial
  Synthetic oligonucleotide
gcaccagtctccatgctaaatgagtctcctgctaaggagtccatcattagaccat

SEQ ID NO: 496187 - DNA, 55 bp, Artificial
  Synthetic oligonucleotide
gcatccaatcccaaattataagagcgctccaattgttccctgatggacacattgc

SEQ ID NO: 496188 - DNA, 55 bp, Artificial
  Synthetic oligonucleotide
gcatcgtacattgcactatgcgatggtaacactgcaatccctatggcttcaagtc

SEQ ID NO: 496189 - DNA, 55 bp, Artificial
  Synthetic oligonucleotide
gcctaaaatccagaacagtaactccagttctaacggcaattgccaaacttccgtc

SEQ ID NO: 496190 - DNA, 55 bp, Artificial
  Synthetic oligonucleotide
gcctcattagtctcagttacagtaaggtcaatacctccggcatcggagtcagacc

SEQ ID NO: 496191 - DNA, 55 bp, Artificial
  Synthetic oligonucleotide
gcgtgattggttcagttgtgaagtttcctccaaacaaggtagaatgcgtcaacag

SEQ ID NO: 496192 - DNA, 55 bp, Artificial
  Synthetic oligonucleotide
ttatgttgatgaccgaaaagtaatgggaggctggtttaaacctgtagcacttgcg

SEQ ID NO: 496193 - DNA, 55 bp, Artificial
  Synthetic oligonucleotide
tgaagccagaccaataggattactccaaatgaaagacgatgggaagctagatgac

SEQ ID NO: 496194 - DNA, 55 bp, Artificial
  Synthetic oligonucleotide
tccatcatcgacaaaatttaatacaggtcctatacccatgcctatcccatctgca

SEQ ID NO: 496195 - DNA, 55 bp, Artificial
  Synthetic oligonucleotide
taatgagtcatcttgtttggcggcattcctacgtttgccttaacctgaccatacg

SEQ ID NO: 496196 - DNA, 55 bp, Artificial
  Synthetic oligonucleotide
taaacggtcaagaattaactgtagtggatgtttacgaggcagttggcgcatatga

SEQ ID NO: 496197 - DNA, 55 bp, Artificial
  Synthetic oligonucleotide
tgggagcacttgcatacgtagtcagagtatatgctagactcgtagaactaggtgc

SEQ ID NO: 496198 - DNA, 55 bp, Artificial
  Synthetic oligonucleotide
tggtgtctttggattgtatcgtacctcatcaagtgagacacaatgtacggtgtca

SEQ ID NO: 496199 - DNA, 55 bp, Artificial
  Synthetic oligonucleotide
tgtatgccttgaaatggggctatccgtctagactggaaccaacagatctactacc

SEQ ID NO: 496200 - DNA, 55 bp, Artificial
  Synthetic oligonucleotide
gtctgcggaactatcagtggatttgctggaaactcaaatacaactttggatccca

SEQ ID NO: 496201 - DNA, 55 bp, Artificial
  Synthetic oligonucleotide
gtctacggagtcataatttctcctcaagccaaatcctgccttgaacattaatggg

SEQ ID NO: 496202 - DNA, 55 bp, Artificial
  Synthetic oligonucleotide
gtccgttcgactgtatcttgacattaatgcaccacgatcaacttgtcttggagtg

SEQ ID NO: 496203 - DNA, 55 bp, Artificial
  Synthetic oligonucleotide
gtcaattgtaggtcccgaatcgtcatttatgtactcaaatccacaatgggtcaca

SEQ ID NO: 496204 - DNA, 55 bp, Artificial
  Synthetic oligonucleotide
gtcaaggtgttcaaacatctggtggtgtcaatgtagagggttcatggtatttggg

SEQ ID NO: 496205 - DNA, 55 bp, Artificial
  Synthetic oligonucleotide
ggttatgcagattatgacggttgtcctgattcgattccatcctttactggaaaac

SEQ ID NO: 496206 - DNA, 55 bp, Artificial
  Synthetic oligonucleotide
ggtatcctcacggaagagatgtttcacaaacttcccaagtagtccttcacgttac

SEQ ID NO: 496207 - DNA, 55 bp, Artificial
  Synthetic oligonucleotide
gggcttgtatgcatggtctactaccttgcctgttattactactgtctctcctgag

SEQ ID NO: 496208 - DNA, 55 bp, Artificial
  Synthetic oligonucleotide
ggataaattccagtcattgcagccaagttgatatctagtcttgggataatgccaa

SEQ ID NO: 496209 - DNA, 55 bp, Artificial
  Synthetic oligonucleotide
tgttaattgtcacttcctctggatacagtcttgccagctccaatgttagctctag

SEQ ID NO: 496210 - DNA, 55 bp, Artificial
  Synthetic oligonucleotide
aaactgcagtattttcagtaggtcttgattctggttcactacaactcagcaagcc

SEQ ID NO: 496211 - DNA, 55 bp, Artificial
  Synthetic oligonucleotide
aaagtggttgcctttgatctcatttgtatgggaatcggagtagtaatcggaatag

SEQ ID NO: 496212 - DNA, 55 bp, Artificial
  Synthetic oligonucleotide
tttcggttacacctggtgtctcttgtcgagcccaagtcttatcgaagtttggcat

SEQ ID NO: 496213 - DNA, 55 bp, Artificial
  Synthetic oligonucleotide
acacttgtattaattggcacgtcaagtttgattggacatggtgcagccagtgggg

SEQ ID NO: 496214 - DNA, 55 bp, Artificial
  Synthetic oligonucleotide
acagtgtacctctacccaagtattcagcacggaataacccaactgcagaatctac

SEQ ID NO: 496215 - DNA, 55 bp, Artificial
  Synthetic oligonucleotide
ttggagcactatctgccacacttactgcaaattcctttaaggcctcacttgttgg

SEQ ID NO: 496216 - DNA, 55 bp, Artificial
  Synthetic oligonucleotide
actgctattgttatatttgctctagttcggataattggaggaaccactgcaggcc

SEQ ID NO: 496217 - DNA, 55 bp, Artificial
  Synthetic oligonucleotide
atgaacgagatcatcagtttaatttatggttcacgttagcagtacctccaggttc

SEQ ID NO: 496218 - DNA, 55 bp, Artificial
  Synthetic oligonucleotide
atgggtaatctgtagcacatgccttcacaatataactccaatacggagaaccctt

SEQ ID NO: 496219 - DNA, 55 bp, Artificial
  Synthetic oligonucleotide
ttgaccatctcctagcatacaatcatcaactaattgcttgtagcgtggttcaaaa

SEQ ID NO: 496220 - DNA, 55 bp, Artificial
  Synthetic oligonucleotide
caaagattccggttgcctcattagtctcagttacagtaaggtcaatacctccggc

SEQ ID NO: 496221 - DNA, 55 bp, Artificial
  Synthetic oligonucleotide
cacatttgtctaggactgcatagtgagataggttggctttgcgagagattgcaga

SEQ ID NO: 496222 - DNA, 55 bp, Artificial
  Synthetic oligonucleotide
cactctgggtatgtcgtaatggtctgcaagactgactattctgtatggcaatgac

SEQ ID NO: 496223 - DNA, 55 bp, Artificial
  Synthetic oligonucleotide
cacttgatcatgatctgcacgtagttggttagttgcactcattttgcatcaccaa

SEQ ID NO: 496224 - DNA, 55 bp, Artificial
  Synthetic oligonucleotide
cagcacctgtgtaaattgctgcatagtcgtgattaactgctgcgtatgcacctgg

SEQ ID NO: 496225 - DNA, 55 bp, Artificial
  Synthetic oligonucleotide
cagccagaaggcggttcatttaccaacgctactagcggatggagttctgcatatc

SEQ ID NO: 496226 - DNA, 55 bp, Artificial
  Synthetic oligonucleotide
ctccataaacgtctccgtctgtaagaacaattacgggtaatcccatttcatcatg

SEQ ID NO: 496227 - DNA, 55 bp, Artificial
  Synthetic oligonucleotide
ctcacctgtgttcgcatccgttactagtgtcccttggccgcatcttgggcatttg

SEQ ID NO: 496228 - DNA, 55 bp, Artificial
  Synthetic oligonucleotide
ttcctcgttctgctgtaactacatcacaattttcggattcttctttgacacggcc

SEQ ID NO: 496229 - DNA, 55 bp, Artificial
  Synthetic oligonucleotide
ctacggaaaatgaaccgccaaggatagctatgccgagaataacggacattatggc

SEQ ID NO: 496230 - DNA, 55 bp, Artificial
  Synthetic oligonucleotide
ctaatgaagtagcagtcaacatccatgccatatcacctgtgtcaactttacaggg

SEQ ID NO: 496231 - DNA, 55 bp, Artificial
  Synthetic oligonucleotide
cgtggctttaatgcaccttgaggctttactgcttcacggagtttgccagttacgc

SEQ ID NO: 496232 - DNA, 55 bp, Artificial
  Synthetic oligonucleotide
cggatggcagaatctaccaagtagaatacgcaatagagacggtaaagagagggac

SEQ ID NO: 496233 - DNA, 55 bp, Artificial
  Synthetic oligonucleotide
cgcgactcgtcaaatcctgcgccaaatattgaaagattcttgcatcacaacaaag

SEQ ID NO: 496234 - DNA, 55 bp, Artificial
  Synthetic oligonucleotide
ccgtgtagtagcttttccgtaacaatatttgctactgcaactgcattcggtattg

SEQ ID NO: 496235 - DNA, 55 bp, Artificial
  Synthetic oligonucleotide
ccgtaatcgctccacaagataacggagcattgcataagagccaccttgtgcacca

SEQ ID NO: 496236 - DNA, 55 bp, Artificial
  Synthetic oligonucleotide
ccctgcatttgttttactgtttggtggagcagtaggcaagtccgcacaattcccc

SEQ ID NO: 496237 - DNA, 55 bp, Artificial
  Synthetic oligonucleotide
ccattcgttaggaccataactcatgtaatagttcccaccattttgcggaattctg

SEQ ID NO: 496238 - DNA, 55 bp, Artificial
  Synthetic oligonucleotide
ccacacaagcatataatggtaaaatgtccactgtgcggagaatcgctaaataaca

SEQ ID NO: 496239 - DNA, 55 bp, Artificial
  Synthetic oligonucleotide
catccaaattctgtctaattgatgcggcataagacgctgtagaaaacggaatgac

SEQ ID NO: 496240 - DNA, 55 bp, Artificial
  Synthetic oligonucleotide
cataccctctacgtccaagtgattttgcaacaagtgttgatacttctcctgttcc

SEQ ID NO: 496241 - DNA, 55 bp, Artificial
  Synthetic oligonucleotide
caggctctggcacatactctactttaacaaccactcaaagcacaacttattctca

SEQ ID NO: 496242 - DNA, 55 bp, Artificial
  Synthetic oligonucleotide
cagcgacgtattacgccctaattatgacagtatacacatggatagcaaaaggtgc

SEQ ID NO: 496243 - DNA, 54 bp, Artificial
  Synthetic oligonucleotide
tcgttaataattggcacgtagaaaaggtcgagtaaaggacaagtggcgagaaaa

SEQ ID NO: 496244 - DNA, 54 bp, Artificial
  Synthetic oligonucleotide
gtttcactgtacacggaaaaggccatcctgatctaacacttactcacactgaag

SEQ ID NO: 496245 - DNA, 54 bp, Artificial
  Synthetic oligonucleotide
gtgtcaggcatagaagtaagtgcagtagaaacatcggaaagctcaggcatattt

SEQ ID NO: 496246 - DNA, 54 bp, Artificial
  Synthetic oligonucleotide
ggagtaatgatccaaacatggctgatgagtctttaagttctggactgtttccta

SEQ ID NO: 496247 - DNA, 54 bp, Artificial
  Synthetic oligonucleotide
gaggaggctgaaagaacaatcgttgaaggtttcttagaacccctctcaagaaaa

SEQ ID NO: 496248 - DNA, 54 bp, Artificial
  Synthetic oligonucleotide
aatcgcggtgctcattgcaatggtgtctcggctaaatagcgacaactccattcc

SEQ ID NO: 496249 - DNA, 53 bp, Artificial
  Synthetic oligonucleotide
tccgtagcttcggcagtatagaggcgattacaattagcacatactggaaaata

SEQ ID NO: 496250 - DNA, 53 bp, Artificial
  Synthetic oligonucleotide
gtttattcatccgtaatagaggcagaacgaaaaggggagtatctaggagcatg

SEQ ID NO: 496251 - DNA, 53 bp, Artificial
  Synthetic oligonucleotide
ctagtttatgtgagctatttgccttccagctaacaccgcgagatatccctgac

SEQ ID NO: 496252 - DNA, 53 bp, Artificial
  Synthetic oligonucleotide
actatacaacaggagcactagctaaatatgcaacactagttggctcggctgca

SEQ ID NO: 496253 - DNA, 53 bp, Artificial
  Synthetic oligonucleotide
tttggccaaccttgaccacaaacatcgccttctaccatcgcattcatctggta

SEQ ID NO: 496254 - DNA, 52 bp, Artificial
  Synthetic oligonucleotide
ggacaggcgtcaaattgaaccatttgtttccccacaacaggatttgccaaag

SEQ ID NO: 496255 - DNA, 52 bp, Artificial
  Synthetic oligonucleotide
ttgtggacacctgcatcggataattttcttgtagttacaggacctacgccct

SEQ ID NO: 496256 - DNA, 51 bp, Artificial
  Synthetic oligonucleotide
attcttggtttctcagacattaacttcggctccgtgggactttcgcataga

SEQ ID NO: 496257 - DNA, 55 bp, Artificial
  Synthetic oligonucleotide
tgttgttaacggcagttgatcgttgacaatttctgacacgcggccacccctagct

SEQ ID NO: 496258 - DNA, 55 bp, Artificial
  Synthetic oligonucleotide
tggcgtaacaccaatgccgccagacagaaatacagccggcctatcttcttgcagc

SEQ ID NO: 496259 - DNA, 55 bp, Artificial
  Synthetic oligonucleotide
gttggcgttgacagggacgctggcattatccggatctacggcgaaggctcggact

SEQ ID NO: 496260 - DNA, 55 bp, Artificial
  Synthetic oligonucleotide
gtcaatcttgcccatcctgccgcttctatagtcctctatcgcttggtagatctca

SEQ ID NO: 496261 - DNA, 55 bp, Artificial
  Synthetic oligonucleotide
gtacatacaaggcccaacaacgaacggcctcatagaagctatgagaggatgcggc

SEQ ID NO: 496262 - DNA, 55 bp, Artificial
  Synthetic oligonucleotide
ggtgtcggctgccttcaggtccatgaattcgatatcacgttctgtcagcgcgcac

SEQ ID NO: 496263 - DNA, 55 bp, Artificial
  Synthetic oligonucleotide
ggagccatattcgtgcttaccggcccagccataggtctagcaggggacgccgtga

SEQ ID NO: 496264 - DNA, 55 bp, Artificial
  Synthetic oligonucleotide
gatatgaggttggatatgccttcgcttatcaccaatgcctatgttcggaaggctc

SEQ ID NO: 496265 - DNA, 55 bp, Artificial
  Synthetic oligonucleotide
gagcgcaggcactggtgaagaccactctagggatggccgcaaagactacactgac

SEQ ID NO: 496266 - DNA, 55 bp, Artificial
  Synthetic oligonucleotide
gaactgagttcttcaactatctcgtctgcattaatcgttatgacttgacgcagtc

SEQ ID NO: 496267 - DNA, 55 bp, Artificial
  Synthetic oligonucleotide
cggctggttaaaattggcgcgcccgtaatggtgatgtgatatcaattgagctttg

SEQ ID NO: 496268 - DNA, 55 bp, Artificial
  Synthetic oligonucleotide
cggcgacatgatagaatactgctcaaagaaggtgccccaatggtacccgatcagc

SEQ ID NO: 496269 - DNA, 55 bp, Artificial
  Synthetic oligonucleotide
cagaggatggatatttggatacaagctgcacataacgtcaagcaatggcagcctg

SEQ ID NO: 496270 - DNA, 54 bp, Artificial
  Synthetic oligonucleotide
ccaagtacacattgtcgccagaggccgccatctcttggttgtacgagtccaacg

SEQ ID NO: 496271 - DNA, 54 bp, Artificial
  Synthetic oligonucleotide
agacgcttttctgtcgcgcaagatggatgtctattcaatgattctggttgctac

SEQ ID NO: 496272 - DNA, 53 bp, Artificial
  Synthetic oligonucleotide
gctgggcgacaataaaacgtagaggtgtttggcatgggtattattagcaatca

SEQ ID NO: 496273 - DNA, 53 bp, Artificial
  Synthetic oligonucleotide
atccggccagaaggagctccgacggttcaccgctttggcaacaaggcagacct

SEQ ID NO: 496274 - DNA, 55 bp, Artificial
  Synthetic oligonucleotide
tgacgccatgaaccccgcagtagaggacgtagtaactggggtatacttcgatggg

SEQ ID NO: 496275 - DNA, 55 bp, Artificial
  Synthetic oligonucleotide
tagaaatcgcaatggagacctgaatcgcccagagatcttcccgcagacatattaa

SEQ ID NO: 496276 - DNA, 55 bp, Artificial
  Synthetic oligonucleotide
ggtctatctccttgactcccttcagtacctccaaggacattttcctcacttgttc

SEQ ID NO: 496277 - DNA, 55 bp, Artificial
  Synthetic oligonucleotide
gggcgaatcttcccttatggttatcagcgacgctgtcataatcttgtcagccggg

SEQ ID NO: 496278 - DNA, 55 bp, Artificial
  Synthetic oligonucleotide
ggacttacattcaagatacaacgttccgtaaacacttggaggataaggaatgttc

SEQ ID NO: 496279 - DNA, 55 bp, Artificial
  Synthetic oligonucleotide
ggacgagagcataactgtatacgtctcccttcaggggcccacaggtagcaagtac

SEQ ID NO: 496280 - DNA, 55 bp, Artificial
  Synthetic oligonucleotide
gccagcgtcgagagtcatcaaccttaccttgaaccccatggcgactactcgctcc

SEQ ID NO: 496281 - DNA, 55 bp, Artificial
  Synthetic oligonucleotide
ccttccgtacggtagtattagcaccgccccgtatttctctacttccttgcaccag

SEQ ID NO: 496282 - DNA, 55 bp, Artificial
  Synthetic oligonucleotide
ccgcaatagtccactgatatcatgactctgtcctcaactcccctaacagcttccc

SEQ ID NO: 496283 - DNA, 55 bp, Artificial
  Synthetic oligonucleotide
ccccaggatctcatcacgctatgggagggcgtcggcgttaaggttgaggagaaac

SEQ ID NO: 496284 - DNA, 55 bp, Artificial
  Synthetic oligonucleotide
ccactttgtggggataagaaccactaagaaggagttaatagccgggttgttagcc

SEQ ID NO: 496285 - DNA, 55 bp, Artificial
  Synthetic oligonucleotide
catctccaccgaacttggattccctctctaccttaagaccggaggggtcagaagg

SEQ ID NO: 496286 - DNA, 55 bp, Artificial
  Synthetic oligonucleotide
cagtgaataatgtatgcatgacaaggcaatgagatatctctcgatcctcctagtt

SEQ ID NO: 496287 - DNA, 55 bp, Artificial
  Synthetic oligonucleotide
cagaagctttgactcagacgttactgttgcgacttattacttgacagcgttctca

SEQ ID NO: 496288 - DNA, 54 bp, Artificial
  Synthetic oligonucleotide
tattgagggcttacccacagttgttccttatttgttgggtgagacaccatttcc

SEQ ID NO: 496289 - DNA, 51 bp, Artificial
  Synthetic oligonucleotide
cagtccatcctggtagaggaggcgatgtctaggaacctccccgtggggaag

SEQ ID NO: 496290 - DNA, 51 bp, Artificial
  Synthetic oligonucleotide
atgtacttagtgaagaggatggggaactgtctctcagcgatctctatggga

SEQ ID NO: 496291 - DNA, 55 bp, Artificial
  Synthetic oligonucleotide
cgtatcccgatgccttaagctctaatcctacctcactgcttaaaacactccctac

SEQ ID NO: 496292 - DNA, 55 bp, Artificial
  Synthetic oligonucleotide
cgtcacaatcgaggggcagagggtcttccgggtaactgagtacccaaacgagagc

SEQ ID NO: 496293 - DNA, 55 bp, Artificial
  Synthetic oligonucleotide
ctcaagcgtcccctggtactcctccacgtaaccgcctatcctgactccgaggcct

SEQ ID NO: 496294 - DNA, 55 bp, Artificial
  Synthetic oligonucleotide
ctccggtttgcaacctaaggttgaatgttcactatataagctttgcgtcacagat

SEQ ID NO: 496295 - DNA, 55 bp, Artificial
  Synthetic oligonucleotide
ctggcccagatagacgagaggacgcgcagggactacaagattaagtggtaaccag

SEQ ID NO: 496296 - DNA, 55 bp, Artificial
  Synthetic oligonucleotide
ctgtgggcttgtggaggatagggattttgttgccgtgttgaaccttcggatgtgg

SEQ ID NO: 496297 - DNA, 55 bp, Artificial
  Synthetic oligonucleotide
ctttggaacctgtacaagtaaattttggcatgtctcaagcaaggagctattgagg

SEQ ID NO: 496298 - DNA, 55 bp, Artificial
  Synthetic oligonucleotide
gacctcgccgacgggcatgtttctctcgctgtgaagggccactatattccccttc

SEQ ID NO: 496299 - DNA, 55 bp, Artificial
  Synthetic oligonucleotide
gacgttacattcatagccgttggaacaccatcgagagaagacggctcaatcgacc

SEQ ID NO: 496300 - DNA, 55 bp, Artificial
  Synthetic oligonucleotide
gactatggttttcgtcccgttgtacatgaagtttatggcatccgtccagctcctc

SEQ ID NO: 496301 - DNA, 55 bp, Artificial
  Synthetic oligonucleotide
gagaggaggacttattccgggagtacggctcagtcatattttaggagatgtggag

SEQ ID NO: 496302 - DNA, 55 bp, Artificial
  Synthetic oligonucleotide
gagctgggaacccctggttcctcccgtcattcctgctatgaaaatcgggtagtcg

SEQ ID NO: 496303 - DNA, 55 bp, Artificial
  Synthetic oligonucleotide
gcccagttactgaggaagaaagtgacgccccaagaaatctgaaggccgctataag

SEQ ID NO: 496304 - DNA, 55 bp, Artificial
  Synthetic oligonucleotide
gcccttcttcacttaaggaaggcacctggatcctaccgaagaggtcgatgagcga

SEQ ID NO: 496305 - DNA, 55 bp, Artificial
  Synthetic oligonucleotide
gcctcggagagctttatcccaacgatgtccatggctcacacgaacctgcccatgg

SEQ ID NO: 496306 - DNA, 55 bp, Artificial
  Synthetic oligonucleotide
gcggttccaattgaagccagaactgccgtgattactatcactaactgctggctaa

SEQ ID NO: 496307 - DNA, 55 bp, Artificial
  Synthetic oligonucleotide
gctaaggcgctgtttaagccatctatagtctatctttccgagttatggcgtgagg

SEQ ID NO: 496308 - DNA, 55 bp, Artificial
  Synthetic oligonucleotide
gctcctctgagatgctctttgtcccaacaacggcaagtatggggttaccgggaag

SEQ ID NO: 496309 - DNA, 55 bp, Artificial
  Synthetic oligonucleotide
gcttcactcgcccttctggatggatataaccataccggcagcgactgtttgaccc

SEQ ID NO: 496310 - DNA, 55 bp, Artificial
  Synthetic oligonucleotide
gcttcataacagtcgggaacgttgcacgttgttgtaaaaccgtgcggatctatcc

SEQ ID NO: 496311 - DNA, 55 bp, Artificial
  Synthetic oligonucleotide
ggagcaatagcccttgttctaattggcctgtacgcagtactagtaaagaagaacc

SEQ ID NO: 496312 - DNA, 55 bp, Artificial
  Synthetic oligonucleotide
ggccgccccaaaagcaccactttggctcatgaacgctattgggccaaattttggc

SEQ ID NO: 496313 - DNA, 55 bp, Artificial
  Synthetic oligonucleotide
gggcttaaatccgagaagctctgtgatagatgcatagaagtctcccagactgtct

SEQ ID NO: 496314 - DNA, 55 bp, Artificial
  Synthetic oligonucleotide
gggtaggaaacgagaccctgattggggtagtccatattggagagggaaccctgta

SEQ ID NO: 496315 - DNA, 55 bp, Artificial
  Synthetic oligonucleotide
ggtcctcataataacaaaccccgaaacggttaaggcactctcggagccgacccgg

SEQ ID NO: 496316 - DNA, 55 bp, Artificial
  Synthetic oligonucleotide
ggtggcctaaccttccaacacttatccatcaccctctcacacctaggcgcatacc

SEQ ID NO: 496317 - DNA, 55 bp, Artificial
  Synthetic oligonucleotide
gtcccctaccacgaacagagttccaacggggtagccttcccggccttcaatgctc

SEQ ID NO: 496318 - DNA, 55 bp, Artificial
  Synthetic oligonucleotide
gttaaggttgatcaagatgtttgtatcggagatgctatctgtgcaagtctctgcc

SEQ ID NO: 496319 - DNA, 55 bp, Artificial
  Synthetic oligonucleotide
gttgcaataagactctgggagaattgaaactagggtgggaattgtaatcgacccg

SEQ ID NO: 496320 - DNA, 55 bp, Artificial
  Synthetic oligonucleotide
taggcctcctattggaatcaatctttatataggacactttgcagcactcttcgtc

SEQ ID NO: 496321 - DNA, 55 bp, Artificial
  Synthetic oligonucleotide
tcctgtctctatctcactggccaaccaagccatgaacacgtacacaagtattgcc

SEQ ID NO: 496322 - DNA, 55 bp, Artificial
  Synthetic oligonucleotide
tggatgaccaacccttactatctttaccccttcccttgcaagtctctcaactaga

SEQ ID NO: 496323 - DNA, 55 bp, Artificial
  Synthetic oligonucleotide
caaagaactccctgagccagcccctctcgtagacccactcgtacgttccgggcca

SEQ ID NO: 496324 - DNA, 55 bp, Artificial
  Synthetic oligonucleotide
agtgcgctctagctcctcctcaaactttatacccaactccaatatctcttcgggg

SEQ ID NO: 496325 - DNA, 55 bp, Artificial
  Synthetic oligonucleotide
agtactcgtcacgtattctctttgcttcagtctctgttcaaggttgtacattgcc

SEQ ID NO: 496326 - DNA, 55 bp, Artificial
  Synthetic oligonucleotide
cacacatctctaagggattcttcggattgcagttgaagggacagtctgccacgac

SEQ ID NO: 496327 - DNA, 55 bp, Artificial
  Synthetic oligonucleotide
cacagttctcacagacccatacttctgtcttgtcactctcctcgagtagcctctc

SEQ ID NO: 496328 - DNA, 55 bp, Artificial
  Synthetic oligonucleotide
cacgggcaggcttatcgcccctgctactagttgcaataagactctgggagaattg

SEQ ID NO: 496329 - DNA, 55 bp, Artificial
  Synthetic oligonucleotide
cagctcaaggtatttctcacgtggtctaacggttattcttatcttcgagccttcg

SEQ ID NO: 496330 - DNA, 55 bp, Artificial
  Synthetic oligonucleotide
cagctcgggaagctttctggagtccatgtggagcagcttaacgttcttaacgccc

SEQ ID NO: 496331 - DNA, 55 bp, Artificial
  Synthetic oligonucleotide
agcggctgagggaagagacctttacggaccagctcgacaggatcctcatccaccc

SEQ ID NO: 496332 - DNA, 55 bp, Artificial
  Synthetic oligonucleotide
ccaagaccctaccttatttggactgctaaagaactcgaggaatgtggagttgact

SEQ ID NO: 496333 - DNA, 55 bp, Artificial
  Synthetic oligonucleotide
cccagcggcctgaacctgtcggcgaaattcctgtgaacgaccgccaaaaggggct

SEQ ID NO: 496334 - DNA, 55 bp, Artificial
  Synthetic oligonucleotide
ccccttctcaagccttaaaacatgcccgagatagcggtcagaatgacaaagcgca

SEQ ID NO: 496335 - DNA, 55 bp, Artificial
  Synthetic oligonucleotide
ccctcgtagagtaatccatgctacaggtataccaacgcactcaaaacttggagca

SEQ ID NO: 496336 - DNA, 55 bp, Artificial
  Synthetic oligonucleotide
ccgcaacggtggggaataagatatacatcataagggagaactttctcggggacgt

SEQ ID NO: 496337 - DNA, 55 bp, Artificial
  Synthetic oligonucleotide
ccgcccgccttcagggttaggagcagaaaagcggtcttcatctcaaggtgtagcg

SEQ ID NO: 496338 - DNA, 55 bp, Artificial
  Synthetic oligonucleotide
ccgcggacgttgctctgaaggagaggagaacgcttgtacttttaattcgcgaaac

SEQ ID NO: 496339 - DNA, 55 bp, Artificial
  Synthetic oligonucleotide
accccgagtggggagataaaagagctcaaaatgtatcagagatggcctgtgagag

SEQ ID NO: 496340 - DNA, 55 bp, Artificial
  Synthetic oligonucleotide
cctgactcgggctactacgacaggatagttctctttctaaccggcgggagggagc

SEQ ID NO: 496341 - DNA, 55 bp, Artificial
  Synthetic oligonucleotide
ccttatgacgtctcccctctgaaccttcgtcatgatcactacctcctttaactcc

SEQ ID NO: 496342 - DNA, 55 bp, Artificial
  Synthetic oligonucleotide
cgacgctaatagtggtattggccttctacataggagaaacatcaaaaccccagag

SEQ ID NO: 496343 - DNA, 55 bp, Artificial
  Synthetic oligonucleotide
cgagcggaaactcagagaactcgctgttttggaggagtgtctcttcggaaacctc

SEQ ID NO: 496344 - DNA, 55 bp, Artificial
  Synthetic oligonucleotide
cgcatcgatgttgccaggtacattgaccacaccaatctcaagccatacgcgacta

SEQ ID NO: 496345 - DNA, 55 bp, Artificial
  Synthetic oligonucleotide
aatgaagaacaaggggactaaatgaaccgcgagctcctgaccaccagtttgcccc

SEQ ID NO: 496346 - DNA, 55 bp, Artificial
  Synthetic oligonucleotide
cgccaaaagggccattgtaggactcgcccgaacaggaggatatgcgtacaacgga

SEQ ID NO: 496347 - DNA, 55 bp, Artificial
  Synthetic oligonucleotide
aagattcgttgaagcccttggctgaggcaggtcttatcgagagcgcttctccgga

SEQ ID NO: 496348 - DNA, 54 bp, Artificial
  Synthetic oligonucleotide
actccctccttagcggcaggaagtttgtgagcgtcccgttgtgggctacggcta

SEQ ID NO: 496349 - DNA, 53 bp, Artificial
  Synthetic oligonucleotide
caaattcgaagtacttttcaaaccatcccatgtgtttcaccctccgtgttgac

SEQ ID NO: 496350 - DNA, 53 bp, Artificial
  Synthetic oligonucleotide
cccactccaccgtaagcacttggctgttatacttcatcgcaaggctcagcgga

SEQ ID NO: 496351 - DNA, 53 bp, Artificial
  Synthetic oligonucleotide
ctaaggcggggattcctggatttgaggagccgggatataatatcgtaaacccc

SEQ ID NO: 496352 - DNA, 53 bp, Artificial
  Synthetic oligonucleotide
cggtgtcgtacggtttgagggtaattacgtcactactcatgaactcttttacg

SEQ ID NO: 496353 - DNA, 52 bp, Artificial
  Synthetic oligonucleotide
cataagcgcgagggagaggaagggcaccggaatcctgcggaatgagataaaa

SEQ ID NO: 496354 - DNA, 52 bp, Artificial
  Synthetic oligonucleotide
agaagggacatacccggagacaagtggttaaggcagctgaaggacactgtgg

SEQ ID NO: 496355 - DNA, 52 bp, Artificial
  Synthetic oligonucleotide
ccgtggttctcctttaccagtaacgccctcagcgacatgggttcgctcaaaa

SEQ ID NO: 496356 - DNA, 50 bp, Artificial
  Synthetic oligonucleotide
ggctgggccccgtagcgtatgtaaacgttggaggttatcctgaggatgtt

SEQ ID NO: 496357 - DNA, 55 bp, Artificial
  Synthetic oligonucleotide
gatgaaccttctcgtgtttactgcgtacaacgctcctcccctcgcatgggaggtc

SEQ ID NO: 496358 - DNA, 55 bp, Artificial
  Synthetic oligonucleotide
gaggccacttggcaaagtacagcctacccctagggacatacgccgcgccttccgt

SEQ ID NO: 496359 - DNA, 55 bp, Artificial
  Synthetic oligonucleotide
gagcggtgaggcgtggactagagaggcgtgcgagcagttgtcgcattgggaacca

SEQ ID NO: 496360 - DNA, 55 bp, Artificial
  Synthetic oligonucleotide
gcaagaacctgtaacaacgcagggcttagctaaagtcggcacatatctagcaacg

SEQ ID NO: 496361 - DNA, 55 bp, Artificial
  Synthetic oligonucleotide
gcatagacttttcaccaccaatcgacacaatgaacgttaaagtcgactactggag

SEQ ID NO: 496362 - DNA, 55 bp, Artificial
  Synthetic oligonucleotide
ctcacgaaaatgtgggtatacgacgaagccctttacgtgacgttcttagtatgtc

SEQ ID NO: 496363 - DNA, 55 bp, Artificial
  Synthetic oligonucleotide
cgtttccagcgtctgaggtctactatccttacagtgctgtgtttgcaaactgcga

SEQ ID NO: 496364 - DNA, 55 bp, Artificial
  Synthetic oligonucleotide
cgtagtgtatcaaaactcctacttcgccattcccgggttttacgtagacgccgcc

SEQ ID NO: 496365 - DNA, 55 bp, Artificial
  Synthetic oligonucleotide
gcccgactacgtcgtgagacaagttgcgccggtcagacctcccgacagagtagtg

SEQ ID NO: 496366 - DNA, 55 bp, Artificial
  Synthetic oligonucleotide
cggacctactacgagctcaggtatagattcttcgcctattggctgagggcggtgc

SEQ ID NO: 496367 - DNA, 55 bp, Artificial
  Synthetic oligonucleotide
ggacccaacctagagaacttggcagagccaaaagtcacggcggaagaggctactc

SEQ ID NO: 496368 - DNA, 55 bp, Artificial
  Synthetic oligonucleotide
cgaggtctcaaataaaacctacgaagtccaaacgctcagattcttaccgtctgtt

SEQ ID NO: 496369 - DNA, 55 bp, Artificial
  Synthetic oligonucleotide
cgaggcgagccaaggaacctcggctagtctgtactgaaacagcgagatgtgtatt

SEQ ID NO: 496370 - DNA, 55 bp, Artificial
  Synthetic oligonucleotide
ccgcggcgaatttctctacatcaacatagagactatgaagactaagcggattaag

SEQ ID NO: 496371 - DNA, 55 bp, Artificial
  Synthetic oligonucleotide
ggctactctaaacgccggtacgcagttccaaaccgtgagcgaattgcccgtaggt

SEQ ID NO: 496372 - DNA, 55 bp, Artificial
  Synthetic oligonucleotide
gtttatgcgctatggcgaggagtggccgaggaaacacgacctctccactctaagg

SEQ ID NO: 496373 - DNA, 55 bp, Artificial
  Synthetic oligonucleotide
aactgcccggccccacgtccctcgccttgacccctgcctcgaagaggtagtagtt

SEQ ID NO: 496374 - DNA, 54 bp, Artificial
  Synthetic oligonucleotide
ctcggcaaactactagtgccgagagaccttgaggaattaaggaggatatacggc

SEQ ID NO: 496375 - DNA, 53 bp, Artificial
  Synthetic oligonucleotide
cttgtcgaggtggcggtgcaatgaagtgcgtgatatgaccgccgaaatactgt

SEQ ID NO: 496376 - DNA, 53 bp, Artificial
  Synthetic oligonucleotide
cggaagaatctggcagaggagattagaaagccagaaggcgcaatatcagtagg

SEQ ID NO: 496377 - DNA, 52 bp, Artificial
  Synthetic oligonucleotide
atctgttgcgagataacaaggacgtaggaaattgatgcgggccccgccagga

SEQ ID NO: 496378 - DNA, 52 bp, Artificial
  Synthetic oligonucleotide
aggggtacgtctctaacatgcacgttatcctcagcacgctaatggcccaatg

SEQ ID NO: 496379 - DNA, 51 bp, Artificial
  Synthetic oligonucleotide
cgtacgccgagtttgcatgaagcgtaattacggcgttcggcatacgtacaa

SEQ ID NO: 496380 - DNA, 51 bp, Artificial
  Synthetic oligonucleotide
tgccacatcgctcaattatctcgccgctctagagcgtacgtatagcgcgcc

SEQ ID NO: 496381 - DNA, 55 bp, Artificial
  Synthetic oligonucleotide
gtacaaggtgaaacggcacggtttgcttcctgtaagcatccagcactacaacatc

SEQ ID NO: 496382 - DNA, 55 bp, Artificial
  Synthetic oligonucleotide
gctgcttcaggctcaactattgcggaggaagcgcctggcagctacaaagatgtgg

SEQ ID NO: 496383 - DNA, 55 bp, Artificial
  Synthetic oligonucleotide
gcggctcctcttcaagtataggcctgagattacttgcaatagcctctctctcgtt

SEQ ID NO: 496384 - DNA, 55 bp, Artificial
  Synthetic oligonucleotide
gcctacctcttccattgtttccctgatagcagcttcgtcaggagtctctctttcc

SEQ ID NO: 496385 - DNA, 55 bp, Artificial
  Synthetic oligonucleotide
gcagcggagaataccaagcgaactgtgaattgattgaaagggaagacgtaattgt

SEQ ID NO: 496386 - DNA, 55 bp, Artificial
  Synthetic oligonucleotide
cgtcagaggcctttaattctcgagattcgttcggtggcggagagtagtgagctgc

SEQ ID NO: 496387 - DNA, 55 bp, Artificial
  Synthetic oligonucleotide
cgctgagaatcctacaactgtggtcatcgaggatccgagtatcgcaaggcctcaa

SEQ ID NO: 496388 - DNA, 55 bp, Artificial
  Synthetic oligonucleotide
cgcgttctcttgatttaggcctagaagcgactgatatccgggctccgacgttgac

SEQ ID NO: 496389 - DNA, 55 bp, Artificial
  Synthetic oligonucleotide
ccggtcaggaaatcaaggcttgtactagatttcatagtcaaggacctagcgtttt

SEQ ID NO: 496390 - DNA, 55 bp, Artificial
  Synthetic oligonucleotide
ccgcatactttagcaaggacaagagatctctctgaaacggaatcttattcaggcc

SEQ ID NO: 496391 - DNA, 55 bp, Artificial
  Synthetic oligonucleotide
catcggtctctgcttcagtcacatcttctccgtctacaattatctttccggagtc

SEQ ID NO: 496392 - DNA, 55 bp, Artificial
  Synthetic oligonucleotide
atagtaccagcttagaatgtttaggctgggatcgcacagtttctactactcggtc

SEQ ID NO: 496393 - DNA, 55 bp, Artificial
  Synthetic oligonucleotide
actacgaatgcgaatactgctacatccagacagcctgaacagaacggtatcaacc

SEQ ID NO: 496394 - DNA, 52 bp, Artificial
  Synthetic oligonucleotide
ttcgaaaacactcctctcgtgctttacaatgattacagtgaggcctcaatcg

SEQ ID NO: 496395 - DNA, 51 bp, Artificial
  Synthetic oligonucleotide
gactcgccctcgaacaggtacaaagaatggtcaaagaactcgacggaaagg

SEQ ID NO: 496396 - DNA, 51 bp, Artificial
  Synthetic oligonucleotide
tatctgttaaacgggtgccctcgaggcctggataaccttcctcgctgtttt

SEQ ID NO: 496397 - DNA, 50 bp, Artificial
  Synthetic oligonucleotide
caatcactggcctagaaccaagcaaggaagtcagcccggatgaagcagtc

SEQ ID NO: 496398 - DNA, 55 bp, Artificial
  Synthetic oligonucleotide
aaccctaatcacatcactcaaggttatcgtcatcaagggttcaatgggcattctc

SEQ ID NO: 496399 - DNA, 55 bp, Artificial
  Synthetic oligonucleotide
aaccgattgtacctgccctcgatatcatggatgctcagagacagggcgaaacccc

SEQ ID NO: 496400 - DNA, 55 bp, Artificial
  Synthetic oligonucleotide
tcacctcttccgggtaccggggctcgaagggcgaccgcaccacgtccttgatgaa

SEQ ID NO: 496401 - DNA, 55 bp, Artificial
  Synthetic oligonucleotide
atttatccgcggcgctgagagtccaatagcggagggaccgacgaatggtatggga

SEQ ID NO: 496402 - DNA, 55 bp, Artificial
  Synthetic oligonucleotide
cacggacaacatgggaggcggcaggatatctgggttcatacgctcgctggaagag

SEQ ID NO: 496403 - DNA, 55 bp, Artificial
  Synthetic oligonucleotide
catgtcatcttcggcggggaggacaagctccggaagctcatcgactcgtccatcc

SEQ ID NO: 496404 - DNA, 55 bp, Artificial
  Synthetic oligonucleotide
ccagatcatcgctcgggaacgcttccctgagcttctcccggtacccttggacctc

SEQ ID NO: 496405 - DNA, 55 bp, Artificial
  Synthetic oligonucleotide
tacgaggaccatctgtcccactttaaggtcggagatggacaccggcccgtcgggg

SEQ ID NO: 496406 - DNA, 55 bp, Artificial
  Synthetic oligonucleotide
gactgcacgatgagcatcccaccgtagaccaacgatgcggaggtctggtatcccc

SEQ ID NO: 496407 - DNA, 55 bp, Artificial
  Synthetic oligonucleotide
gcctgggagcgcagacctgcatcatctcgtacaaggctgacctgagcactggcga

SEQ ID NO: 496408 - DNA, 55 bp, Artificial
  Synthetic oligonucleotide
gggatcacctaatcttcttaatccgatcctcaggtcggtgctggatctccgaacc

SEQ ID NO: 496409 - DNA, 55 bp, Artificial
  Synthetic oligonucleotide
ggtcctggtgccaaccagcgagtacgccattactgccaaggagctttacggcctt

SEQ ID NO: 496410 - DNA, 55 bp, Artificial
  Synthetic oligonucleotide
gtggtggtatgcttcgggctcatggagaaactgaccgtggacattaacacgcttt

SEQ ID NO: 496411 - DNA, 54 bp, Artificial
  Synthetic oligonucleotide
tgtccctcgcaatattcaccgtcgcgggctcttcaggatactacctggggaccg

SEQ ID NO: 496412 - DNA, 54 bp, Artificial
  Synthetic oligonucleotide
cgacggaggttccacaatctatgtcctggaccctgccactggatatgagtatag

SEQ ID NO: 496413 - DNA, 52 bp, Artificial
  Synthetic oligonucleotide
ataccttcacctgagcgttggctacgatctcctcacaggtgtcgttgagact

SEQ ID NO: 496414 - DNA, 50 bp, Artificial
  Synthetic oligonucleotide
atcatgtctcaggatgggaagacattcaaggataacgcgatcaacggcca

SEQ ID NO: 496415 - DNA, 60 bp, Artificial
  Synthetic oligonucleotide
tcacgcgccaccttgcatggcaggactacacctgcaccaaggtggccgctgatctggccg

SEQ ID NO: 496416 - DNA, 60 bp, Artificial
  Synthetic oligonucleotide
taaatgagaaacagcacgttaggggtaaaccccttaaaaccccgttttaacttcaaagga

SEQ ID NO: 496417 - DNA, 60 bp, Artificial
  Synthetic oligonucleotide
gttgtttttgcacgtctggacttcgagccgctgttactgcgtcgaacgtgacgagtgttt

SEQ ID NO: 496418 - DNA, 60 bp, Artificial; identical to SEQ ID NO: 141855
  Synthetic oligonucleotide

SEQ ID NO: 496419 - DNA, 60 bp, Artificial
  Synthetic oligonucleotide
atcgaggaccaagtattgggttttagagattaccgtgcagatgttgtgcttatctgtcgg

SEQ ID NO: 496420 - DNA, 60 bp, Artificial
  Synthetic oligonucleotide
atggtcggcgaagcagagaaacgccagtgacctttgtaaaaaaccgagttcccgccctct

SEQ ID NO: 496421 - DNA, 60 bp, Artificial
  Synthetic oligonucleotide
gtgattgcaacaccgagccttcagcaagtccgattagaacacacctaagcggaccgcctt

SEQ ID NO: 496422 - DNA, 60 bp, Artificial
  Synthetic oligonucleotide
gtctgattacccctttcagggataacacactaacccctattgccattctggcaaaccggc

SEQ ID NO: 496423 - DNA, 60 bp, Artificial
  Synthetic oligonucleotide
cacatgatcgcggtgatttctcccgaagttctggccgaagccggagaccctagagacccc

SEQ ID NO: 496424 - DNA, 60 bp, Artificial
  Synthetic oligonucleotide
ggtttttgacccagatatgctttcccaaataccagtagaagggattcggttcaaaccgtc

SEQ ID NO: 496425 - DNA, 60 bp, Artificial
  Synthetic oligonucleotide
ggttttcatccaaacataaaacgattatccggctttatagcataaaaatggtagcaaata

SEQ ID NO: 496426 - DNA, 60 bp, Artificial
  Synthetic oligonucleotide
ccagacaggcaatcaaaccacctaaccgcaacggcatcgacctaaccgcaacgacaaaaa

SEQ ID NO: 496427 - DNA, 60 bp, Artificial
  Synthetic oligonucleotide
ggcgcgtccgaactggaaaatacgacttactgggagcaggaaacgtgagcatcgggaacc

SEQ ID NO: 496428 - DNA, 60 bp, Artificial
  Synthetic oligonucleotide
cccctttcagggataacacactaacccctattgcctctggcaaaccggctccgccttagg

SEQ ID NO: 496429 - DNA, 60 bp, Artificial
  Synthetic oligonucleotide
ggccgtcattgccgagattgaggacgagacaaacaggcggctcaggacggacggtgagtt

SEQ ID NO: 496430 - DNA, 60 bp, Artificial
  Synthetic oligonucleotide
ggcaatgggcaatagccagccggtcaagcatggccgagtggggcaggagagttatccacc

SEQ ID NO: 496431 - DNA, 60 bp, Artificial
  Synthetic oligonucleotide
ccctgataggggttgtcccactggatgaagccttttccagactggaagccgccttccacg

SEQ ID NO: 496432 - DNA, 60 bp, Artificial
  Synthetic oligonucleotide
gcaggtcaagactaccctgccgatcgaggccataagcccgttgtccggccggggtatttg

SEQ ID NO: 496433 - DNA, 60 bp, Artificial
  Synthetic oligonucleotide
cggccggaactgccggttttgtgctgttccgggccttgcggattgcagctcttttggcgg

SEQ ID NO: 496434 - DNA, 60 bp, Artificial
  Synthetic oligonucleotide
cgggaagagtacgaggcaatagaccgccggaaggccgagctggatgcacgagaaatcgcg

SEQ ID NO: 496435 - DNA, 60 bp, Artificial
  Synthetic oligonucleotide
gatctggccgagatgcgcggtgtcgataaggcccatatggctcgcaccatcgcgcttctg

SEQ ID NO: 496436 - DNA, 60 bp, Artificial
  Synthetic oligonucleotide
gatccggttagaaataaagcgaagatggaagacttgcggagccttaggtactagtaagag

SEQ ID NO: 496437 - DNA, 60 bp, Artificial
  Synthetic oligonucleotide
gacggtgccagacgatcgggaggcgctccccggtctctggcgcagatactagccgggaga

SEQ ID NO: 496438 - DNA, 60 bp, Artificial
  Synthetic oligonucleotide
gaacatcattgaagtgctgactaacaggggcggtttaagcctcgcagaaattgccacggc

SEQ ID NO: 496439 - DNA, 60 bp, Artificial
  Synthetic oligonucleotide
ctcgatgggtgtcatttttcctcccgcaccaagtgggtgcaatggtctgttgtgatttcc

SEQ ID NO: 496440 - DNA, 60 bp, Artificial
  Synthetic oligonucleotide
ctctaagcgccccctaaccgcgctgcgggtctgggcactgtgcttcaaacacctgcggac

SEQ ID NO: 496441 - DNA, 60 bp, Artificial
  Synthetic oligonucleotide
aaaattttttgcaatcactaaattggggattcgttgtttttgcttacagccgatcttgcg

SEQ ID NO: 496442 - DNA, 60 bp, Artificial
  Synthetic oligonucleotide
aaagcagacggtcccgcctttctggcgttccgtggtccatccgttcccacggcacatggt

SEQ ID NO: 496443 - DNA, 60 bp, Artificial
  Synthetic oligonucleotide
aacggacagcatgggccgcgatcaatgcgcttgagagtatcggccttatccgtgtggaag

SEQ ID NO: 496444 - DNA, 60 bp, Artificial
  Synthetic oligonucleotide
aagccacggcatcaattctttgagctagggaatcttcgaaccgtttaagcatacagcacc

SEQ ID NO: 496445 - DNA, 60 bp, Artificial
  Synthetic oligonucleotide
tttcgggccatcactcgaacccgccagaaggtaggcggcatgaaggggccgggtatggtt

SEQ ID NO: 496446 - DNA, 60 bp, Artificial
  Synthetic oligonucleotide
ttggtgtcgtttatttcggcttttgccatagaagccaaagcccccagaagttcgcctttg

SEQ ID NO: 496447 - DNA, 60 bp, Artificial
  Synthetic oligonucleotide
acagttcttcaaacgctacaacagcaagacgccagagaaaggcggagccaagaaggccaa

SEQ ID NO: 496448 - DNA, 60 bp, Artificial
  Synthetic oligonucleotide
accgcaacggcattgcggttaggtcaaaaaggtatccatttttgccactgatcgcgtgtc

SEQ ID NO: 496449 - DNA, 60 bp, Artificial
  Synthetic oligonucleotide
acgagtgtttcttttcgcgttgtcatgtcggttctctgttccgtcgattacgacaaaaat

SEQ ID NO: 496450 - DNA, 60 bp, Artificial
  Synthetic oligonucleotide
tggttgtgactttcagtgcggcggcactgaaaaaaaggccgggaatctgtaagattttaa

SEQ ID NO: 496451 - DNA, 60 bp, Artificial
  Synthetic oligonucleotide
tcttttggcgttctgtcagtcttgtcatagagcaagatcaggatgcgctgttctgtcgat

SEQ ID NO: 496452 - DNA, 60 bp, Artificial
  Synthetic oligonucleotide
tcctcaccttctcggccgatgtttgggaacatggcaagatctgtggtggcgtcgatcagc

SEQ ID NO: 496453 - DNA, 60 bp, Artificial
  Synthetic oligonucleotide
agggcttttggatttgtacctaaagaccttgggttcgtgccgagtaatctactgtttcga

SEQ ID NO: 496454 - DNA, 60 bp, Artificial
  Synthetic oligonucleotide
agggaatcttcgaaccgtttaagcatacagcacccatttagtaacggcaaaaaattttgt

SEQ ID NO: 496455 - DNA, 60 bp, Artificial
  Synthetic oligonucleotide
agcaacaagcgcgtggatgccaccagaacggctatgaatctcgccgcatctcaatacagc

SEQ ID NO: 496456 - DNA, 60 bp, Artificial
  Synthetic oligonucleotide
tccgtgtggcagggacaccctgcacccctaccccctgttaccatatgatgcgcttttgtg

SEQ ID NO: 496457 - DNA, 59 bp, Artificial
  Synthetic oligonucleotide
tccaccccttgagcaatacccctgccgcccggttctctaccccttcagaacgggggcga

SEQ ID NO: 496458 - DNA, 58 bp, Artificial
  Synthetic oligonucleotide
gccgtcaggcccgtccagagtagagatgagcgtatttcggtctgactggcctgtagcg

SEQ ID NO: 496459 - DNA, 58 bp, Artificial
  Synthetic oligonucleotide
gcaggggtattgctcaaggggtggagtggctggcggattttcctccccgctttgcagg

SEQ ID NO: 496460 - DNA, 58 bp, Artificial
  Synthetic oligonucleotide
ggcgcacaatctgggccatggctcgctccctgtggagaacccgtcattaggtcacgga

SEQ ID NO: 496461 - DNA, 58 bp, Artificial
  Synthetic oligonucleotide
ccccgttttcctccaaccttccctaatactcttttgggatatggataccggcggaagg

SEQ ID NO: 496462 - DNA, 55 bp, Artificial
  Synthetic oligonucleotide
gctaagtcctctgcagcaaatccatgccatttatcttccggttttaactgccaac

SEQ ID NO: 496463 - DNA, 55 bp, Artificial
  Synthetic oligonucleotide
gcctgctgcgagaaacagtagcccctgcatgatagtttcatgacacgccccggga

SEQ ID NO: 496464 - DNA, 55 bp, Artificial
  Synthetic oligonucleotide
gccgtgtagcacacatcactggcatgcccgtctgtatctttcgtgcgccataatg

SEQ ID NO: 496465 - DNA, 55 bp, Artificial; identical to SEQ ID NO: 142064
  Synthetic oligonucleotide

SEQ ID NO: 496466 - DNA, 55 bp, Artificial
  Synthetic oligonucleotide
gccgctgaggtgtgtacggcacgacttcgctccccaattcttaaaacctgtttcc

SEQ ID NO: 496467 - DNA, 55 bp, Artificial
  Synthetic oligonucleotide
ttgctttggagggccgctttgcgcccgttactcgccggacaatcataccgccacc

SEQ ID NO: 496468 - DNA, 55 bp, Artificial
  Synthetic oligonucleotide
gcacatgtccaaccttggtcgtggaagggttctccgcgcccatgtggattcgccg

SEQ ID NO: 496469 - DNA, 55 bp, Artificial
  Synthetic oligonucleotide
gcacatctgtccaatgtaacaatccaacacgttcttccctcaccaacgaatactc

SEQ ID NO: 496470 - DNA, 55 bp, Artificial
  Synthetic oligonucleotide
gcaaccgccctccattccttaagacgagcccagaagttttcgacgaaatgtcggt

SEQ ID NO: 496471 - DNA, 55 bp, Artificial
  Synthetic oligonucleotide
gattgttcatccttgtgcagatggaagccaatgctagggtgaggggaaatttcta

SEQ ID NO: 496472 - DNA, 55 bp, Artificial
  Synthetic oligonucleotide
tcccgcctttctggcgttccgtggtccatccgttcccacggcacatggtcagcag

SEQ ID NO: 496473 - DNA, 55 bp, Artificial
  Synthetic oligonucleotide
gtgcgcatagaaagcattttgtgcgtctgattacccctttcagggataacacact

SEQ ID NO: 496474 - DNA, 55 bp, Artificial
  Synthetic oligonucleotide
gtccccatagttcagcttgtacgatttcatcaagatgagcagcttcaaaagcttg

SEQ ID NO: 496475 - DNA, 55 bp, Artificial
  Synthetic oligonucleotide
tttcggtcaggccgcagagtggagctgtctgcctcaaggtcccgccatgctggaa

SEQ ID NO: 496476 - DNA, 55 bp, Artificial
  Synthetic oligonucleotide
gagaggggaacggttcaggcccagggacgtcacggtcaggacaccataatcgctg

SEQ ID NO: 496477 - DNA, 55 bp, Artificial
  Synthetic oligonucleotide
gacagggtagctacggtcaggcggctctgatcgcgaaacaggcagccctttccga

SEQ ID NO: 496478 - DNA, 55 bp, Artificial
  Synthetic oligonucleotide
gaatggcactctccgcgcttcttcgtgctgttggggatgcgaagcgttcgatgcg

SEQ ID NO: 496479 - DNA, 55 bp, Artificial
  Synthetic oligonucleotide
gaagccatcgaggcacaccacccgatgcccaccccaatcgatccgcgggaagcgt

SEQ ID NO: 496480 - DNA, 55 bp, Artificial
  Synthetic oligonucleotide
tagttcatatcaaccgagatacgggtgcggtcatcatgccagtcaaaatcagcac

SEQ ID NO: 496481 - DNA, 55 bp, Artificial
  Synthetic oligonucleotide
cttcggcttgctcattttcagccccgcttcgacttcttgtcagagccatgaccgg

SEQ ID NO: 496482 - DNA, 55 bp, Artificial
  Synthetic oligonucleotide
ttttggggtgtgcggccaaaggttccccttagcgatcttgaggctccccggacgg

SEQ ID NO: 496483 - DNA, 55 bp, Artificial
  Synthetic oligonucleotide
ctctctgccaaatgcctatccgcacggtcataatagagatttaaccgctttcctg

SEQ ID NO: 496484 - DNA, 55 bp, Artificial
  Synthetic oligonucleotide
tcgcagcgtcgtggctgctgctgcctatcgtgccggtcaggaactgacggacgag

SEQ ID NO: 496485 - DNA, 55 bp, Artificial
  Synthetic oligonucleotide
gtaaatgtaggcaattgatttggatccgtcacattattcgctgtaaatgcgtctg

SEQ ID NO: 496486 - DNA, 55 bp, Artificial
  Synthetic oligonucleotide
tgcctttgacggcacaatagatggcagtacgaacaagggtgtaggcaaccttctg

SEQ ID NO: 496487 - DNA, 55 bp, Artificial
  Synthetic oligonucleotide
tggatcaccggagcttcgagcgccaagggagggagcaggagccgacccggcacat

SEQ ID NO: 496488 - DNA, 55 bp, Artificial
  Synthetic oligonucleotide
ggtttccgctgcctgtgccttgcggacgtccagcgaaccattccatgccacatgc

SEQ ID NO: 496489 - DNA, 55 bp, Artificial
  Synthetic oligonucleotide
ggttcagtgttcctattggattatggattgaacaacaagctgcgacattggcacc

SEQ ID NO: 496490 - DNA, 55 bp, Artificial
  Synthetic oligonucleotide
ggtggcgctcctctcgacctctcgtggaagaggtatcttgtcgtggtgcaacacg

SEQ ID NO: 496491 - DNA, 55 bp, Artificial
  Synthetic oligonucleotide
ggtgaattctcgcagtcaggtgacggaaaggtctcgatagctgtagcgaggttcg

SEQ ID NO: 496492 - DNA, 55 bp, Artificial
  Synthetic oligonucleotide
gtggacgagaaaggcgcgggagttgtggatctcttcgtgtgcccgactgccatgc

SEQ ID NO: 496493 - DNA, 55 bp, Artificial
  Synthetic oligonucleotide
ggggttgaagccgcgctgatgactggcgaactgccaagtcggaatcatggctgga

SEQ ID NO: 496494 - DNA, 55 bp, Artificial
  Synthetic oligonucleotide
ggggcttggtcagaacggcatcccgttgcctgatacggtttccacaggtcctgtt

SEQ ID NO: 496495 - DNA, 55 bp, Artificial; identical to SEQ ID NO: 142231
  Synthetic oligonucleotide

SEQ ID NO: 496496 - DNA, 55 bp, Artificial
  Synthetic oligonucleotide
ggctggcaggctttccccttccggtgatggtcaagggagataccagccagtcacg

SEQ ID NO: 496497 - DNA, 55 bp, Artificial
  Synthetic oligonucleotide
ggcggtcacgggatcgaggaccaagtattgggttttagagattaccgtgcagatg

SEQ ID NO: 496498 - DNA, 55 bp, Artificial
  Synthetic oligonucleotide
gtggcggtctgcatacggctcaacatggtgaaacctcccggccaaagcccttcgg

SEQ ID NO: 496499 - DNA, 55 bp, Artificial
  Synthetic oligonucleotide
gtaagatttgatgatgcgtgggccagtgagcaatttgaacaatatggggaacctt

SEQ ID NO: 496500 - DNA, 55 bp, Artificial
  Synthetic oligonucleotide
ttcggcagggacgacctacaagcgtgccgaaagtcaaattcaaatatggttagcg

SEQ ID NO: 496501 - DNA, 55 bp, Artificial
  Synthetic oligonucleotide
ggccattattgccaacacttcctcccaatgcgacattaatacttcggacaacccc

SEQ ID NO: 496502 - DNA, 55 bp, Artificial
  Synthetic oligonucleotide
gttcaagttctgtgggagtaagcctgccgtgcgcctgaatcagcttggcgtccgg

SEQ ID NO: 496503 - DNA, 55 bp, Artificial
  Synthetic oligonucleotide
ttgctgtgttcgaagggatgacgaacatcatgccaacaactgttacagacgtgcg

SEQ ID NO: 496504 - DNA, 55 bp, Artificial
  Synthetic oligonucleotide
ggcaagcatcctttggagcggaaagaagaactgaaagacctgcggcatcgctggg

SEQ ID NO: 496505 - DNA, 55 bp, Artificial
  Synthetic oligonucleotide
ggcaacaaacgctcatacagcgccattcaggattcatggggagaatgggccagcc

SEQ ID NO: 496506 - DNA, 55 bp, Artificial
  Synthetic oligonucleotide
ggattgaagctggtcgtaatcaaatgatcggcgggctttgtgaaagtccgttaac

SEQ ID NO: 496507 - DNA, 55 bp, Artificial
  Synthetic oligonucleotide
ggataatgatgggctggttctgatcgtcaatcatttcgataacaagctcgaaggc

SEQ ID NO: 496508 - DNA, 55 bp, Artificial
  Synthetic oligonucleotide
ggaacgacggtattttcccagaacgatgccgtttcaacgacgcccagggcctatg

SEQ ID NO: 496509 - DNA, 55 bp, Artificial
  Synthetic oligonucleotide
ggaacagcgcctagaaaatatcgagcagagacaatttgcggcccggtcgtttgtg

SEQ ID NO: 496510 - DNA, 55 bp, Artificial
  Synthetic oligonucleotide
gctgtcatcctgtaaaggcggtacgccacaggcgagaagaaaatccgcaatcccg

SEQ ID NO: 496511 - DNA, 55 bp, Artificial
  Synthetic oligonucleotide
gctatcgcagagctcaagatcatcctcccgaagctgggcatcgtgtcacaggatg

SEQ ID NO: 496512 - DNA, 55 bp, Artificial
  Synthetic oligonucleotide
caccgtgagtcgtaactacgcccttactacgttcggggcacctgaaccgcacgca

SEQ ID NO: 496513 - DNA, 55 bp, Artificial
  Synthetic oligonucleotide
caggaggctggaaactcatacgcgcctgcgctacactctgtctgcatcgggttcg

SEQ ID NO: 496514 - DNA, 55 bp, Artificial
  Synthetic oligonucleotide
catagagataacagcggatatccccatgcatctgtgccagggagggcagtctgcg

SEQ ID NO: 496515 - DNA, 55 bp, Artificial
  Synthetic oligonucleotide
catcaatgggcagaattgcaccctcgatgtgcgggaattgatgtcaccccatgaa

SEQ ID NO: 496516 - DNA, 55 bp, Artificial
  Synthetic oligonucleotide
catggaatgtccgtcaaatcccttccacacaagaatggattgcagcagaaagttg

SEQ ID NO: 496517 - DNA, 55 bp, Artificial
  Synthetic oligonucleotide
ccaacaataatgtatctctcacccgcatacgcgtcgagttgagacaccgcgccac

SEQ ID NO: 496518 - DNA, 55 bp, Artificial
  Synthetic oligonucleotide
ccaccccgcgagccgctgacggctcaggccacgatgaactcattccatttcctga

SEQ ID NO: 496519 - DNA, 55 bp, Artificial
  Synthetic oligonucleotide
ccagttggacagggttgtttcgtcaatatcgagaacgatcgcaggcttgtgcacc

SEQ ID NO: 496520 - DNA, 55 bp, Artificial
  Synthetic oligonucleotide
ccatgctttatgaagatggattgacgaccggccataacccactgtccggcttcaa

SEQ ID NO: 496521 - DNA, 55 bp, Artificial
  Synthetic oligonucleotide
ccccacagatgcccgtagagtgtccagaagtctgaagtgagagggaaaccgccct

SEQ ID NO: 496522 - DNA, 55 bp, Artificial
  Synthetic oligonucleotide
ccccgacatacacgtcgatttcaggaacacccgcatagatggcgccttccgtccg

SEQ ID NO: 496523 - DNA, 55 bp, Artificial
  Synthetic oligonucleotide
ccccttacaccctggggtgccaagacgcgaagcaccgtttcgttgggttgcactt

SEQ ID NO: 496524 - DNA, 55 bp, Artificial
  Synthetic oligonucleotide
cccgccgtgttggcagtgctcgtgccggtgtccctgtcgacactcgacatctcac

SEQ ID NO: 496525 - DNA, 55 bp, Artificial
  Synthetic oligonucleotide
cccgcgcacgcatgttgccccaaggcgccaagctttcatgatggcaccaccaact

SEQ ID NO: 496526 - DNA, 55 bp, Artificial
  Synthetic oligonucleotide
cccgcggctccttgtcccgatcctgtcgttcagaggagtttcgcaccatgtccag

SEQ ID NO: 496527 - DNA, 55 bp, Artificial
  Synthetic oligonucleotide
ccgcttctgagccagataaaacagagcgagatgccaccagagatgcgtgtacatg

SEQ ID NO: 496528 - DNA, 55 bp, Artificial
  Synthetic oligonucleotide
aaaccggctccgccttaggagtgtggcagggacaccctgcaccccttccctgcaa

SEQ ID NO: 496529 - DNA, 55 bp, Artificial
  Synthetic oligonucleotide
aagacaggggccggttgtcagatcactcagtgtgcatccatcagccgatgagaca

SEQ ID NO: 496530 - DNA, 55 bp, Artificial
  Synthetic oligonucleotide
aatattgcccacaaaaggggcggtgacgaaattttagccaaccgcatctggcggg

SEQ ID NO: 496531 - DNA, 55 bp, Artificial
  Synthetic oligonucleotide
aatcagcagaggttcgagcggaatgaccagaaggctgaaaattgccgcaaccagc

SEQ ID NO: 496532 - DNA, 55 bp, Artificial
  Synthetic oligonucleotide
acacctcaacgacttcatggcagcctataatttcgggcgaaggctcaagaccctg

SEQ ID NO: 496533 - DNA, 55 bp, Artificial
  Synthetic oligonucleotide
acgggcggcctacggcgctcccgcgctgcgctcgctccgggtctgcatccatttt

SEQ ID NO: 496534 - DNA, 55 bp, Artificial
  Synthetic oligonucleotide
agaacaccatcgtggccgcatagggcgccgtgggatccgcacctaagtctagggt

SEQ ID NO: 496535 - DNA, 55 bp, Artificial
  Synthetic oligonucleotide
agacccgagcgcgcaacgccagacacgtactggagccttatccgcgatgtccatg

SEQ ID NO: 496536 - DNA, 55 bp, Artificial
  Synthetic oligonucleotide
agatcaccgaccgacaaaacgcatggctgtggctccaggccgttccgggcctcgt

SEQ ID NO: 496537 - DNA, 55 bp, Artificial
  Synthetic oligonucleotide
agattggcgcggacgccagccatatgccgggagccgtaaacctcgcagcgggcct

SEQ ID NO: 496538 - DNA, 55 bp, Artificial
  Synthetic oligonucleotide
aggtcaggggtatcgtctgccatcagctcacaggctgccgctaggtgtatcttct

SEQ ID NO: 496539 - DNA, 55 bp, Artificial
  Synthetic oligonucleotide
agtggcgacccataatgaactggttcggctagatcagcgggtaaagactgcgacc

SEQ ID NO: 496540 - DNA, 55 bp, Artificial
  Synthetic oligonucleotide
atagacttcccctcgcgttgaaacgggcgcaccatcctcccggccgtccgccaag

SEQ ID NO: 496541 - DNA, 55 bp, Artificial
  Synthetic oligonucleotide
atgaagcgcacatggaactggttcgtggcctgtccagctttcgggccgcccttcc

SEQ ID NO: 496542 - DNA, 55 bp, Artificial
  Synthetic oligonucleotide
caaatatgatctgcatgccgtaaaacagatgggacgaaacattgagttgatccgg

SEQ ID NO: 496543 - DNA, 55 bp, Artificial
  Synthetic oligonucleotide
caaattgcgctacagatagtttgatagtcttccgaagttccagagagaggcagca

SEQ ID NO: 496544 - DNA, 55 bp, Artificial
  Synthetic oligonucleotide
cacatagctcattggtgtctccgatcctcattcgggcccggctgtgcggcccatt

SEQ ID NO: 496545 - DNA, 55 bp, Artificial
  Synthetic oligonucleotide
ctcgtgggtttaaccctagagccttgggattgaggccaagggcttttggatttgt

SEQ ID NO: 496546 - DNA, 55 bp, Artificial
  Synthetic oligonucleotide
ctcgggcagaacgtgttcgctcacgggttcaaacacaccgcgagacgccgtgaca

SEQ ID NO: 496547 - DNA, 55 bp, Artificial
  Synthetic oligonucleotide
ctcccgcaccaagtgggtgcaatggtctgttgtgatttccgtttccgcgtgaccc

SEQ ID NO: 496548 - DNA, 55 bp, Artificial
  Synthetic oligonucleotide
ctaaagaccttgggttcgtgccgagtaatctactgtttcgacgtaggctcaccgc

SEQ ID NO: 496549 - DNA, 55 bp, Artificial
  Synthetic oligonucleotide
cgtttcgttgggttgcacttgatatgcaaagggctggcaccgcggcggagatggg

SEQ ID NO: 496550 - DNA, 55 bp, Artificial
  Synthetic oligonucleotide
cgttattggccctgtcgggatggacggattgcagcgcgtgcaccagtcgttcctc

SEQ ID NO: 496551 - DNA, 55 bp, Artificial
  Synthetic oligonucleotide
cgtgcaacttggattggaatccgggaaattggaggtgagagcggggacctcgggg

SEQ ID NO: 496552 - DNA, 55 bp, Artificial
  Synthetic oligonucleotide
cgtcgcttatggtcatgatcctgaactcactgcttccggcctacgaccttcaggc

SEQ ID NO: 496553 - DNA, 55 bp, Artificial
  Synthetic oligonucleotide
cggtgcttggagctatcaatctccctgcggcacttctgaatggcgcgttgtcgct

SEQ ID NO: 496554 - DNA, 55 bp, Artificial
  Synthetic oligonucleotide
cggccgatgtttgggaacatggcaagatctgtggtggcgtcgatcagccggagca

SEQ ID NO: 496555 - DNA, 55 bp, Artificial
  Synthetic oligonucleotide
cggccaatgcccgaatggcatctttgtccacgagcatacggctcatccttcgtct

SEQ ID NO: 496556 - DNA, 55 bp, Artificial
  Synthetic oligonucleotide
cgcccaattccatcttgcatacgccctacagcatagttcggatcgacttggttta

SEQ ID NO: 496557 - DNA, 55 bp, Artificial
  Synthetic oligonucleotide
cgccaccacctcgtggatcacaagcgattcagtcaggcaggaaaccgctctaggc

SEQ ID NO: 496558 - DNA, 55 bp, Artificial
  Synthetic oligonucleotide
cgcagggaggggttttgacgcacacttaagccccgaaacacggtaaggacattcc

SEQ ID NO: 496559 - DNA, 55 bp, Artificial
  Synthetic oligonucleotide
ccttgtggggagaggagataaggtagccgcccacaaaggaaacgatacgcctcca

SEQ ID NO: 496560 - DNA, 55 bp, Artificial
  Synthetic oligonucleotide
cctgtcttcatacggtcccggtgagatgggagggcacaatttcatcctgccatag

SEQ ID NO: 496561 - DNA, 55 bp, Artificial
  Synthetic oligonucleotide
cctgaggaaccgggacagtcgtgtcccatgctgaatgaatttcagggtcggatct

SEQ ID NO: 496562 - DNA, 55 bp, Artificial
  Synthetic oligonucleotide
cgaagtatgtcagggtggcgttcctcaatggagcgtcgttgcacccggttcctcc

SEQ ID NO: 496563 - DNA, 55 bp, Artificial
  Synthetic oligonucleotide
cgagagcgcctctgtattgcgtggaggcacagtccatcctgttacgccgggttgg

SEQ ID NO: 496564 - DNA, 55 bp, Artificial
  Synthetic oligonucleotide
cctctgcagttgaggcctggatttgtgggagaatcaaacggcaaacgcctgcccc

SEQ ID NO: 496565 - DNA, 55 bp, Artificial
  Synthetic oligonucleotide
ccgtctaagtcgcagatcgagccgcgatgatccttccaacatctggagggatcca

SEQ ID NO: 496566 - DNA, 55 bp, Artificial
  Synthetic oligonucleotide
cgagggcgccatatatcagctgacaggccctgaaaccctgcgcggtaaagcggtg

SEQ ID NO: 496567 - DNA, 55 bp, Artificial
  Synthetic oligonucleotide
cgattgatggacaagttttctgtcacgcttgagcagcgagcgtcagtcgccaaag

SEQ ID NO: 496568 - DNA, 55 bp, Artificial
  Synthetic oligonucleotide
ccggcgtctaatgcgacagccggtacactcgatgagcggacttacacaccgggca

SEQ ID NO: 496569 - DNA, 54 bp, Artificial
  Synthetic oligonucleotide
cgcaatttgtaaggctgcatcttgaccatcacgcaccgcccaaacaaccaagct

SEQ ID NO: 496570 - DNA, 53 bp, Artificial
  Synthetic oligonucleotide
acggaaagaactggcccgggatttcgcccgtgagctggtggcgcggtacgggg

SEQ ID NO: 496571 - DNA, 53 bp, Artificial
  Synthetic oligonucleotide
caaggagtgccgtgcggagacgcatgttttcgtcctcttagtgactaacgttt

SEQ ID NO: 496572 - DNA, 53 bp, Artificial
  Synthetic oligonucleotide
ccccagccccttcctccttcgcgtattcgcctgatggccgcacgtctctggtc

SEQ ID NO: 496573 - DNA, 53 bp, Artificial
  Synthetic oligonucleotide
caaaaatcatcgccgtgacgccagagggtgcattcaggggcaagatggataat

SEQ ID NO: 496574 - DNA, 52 bp, Artificial
  Synthetic oligonucleotide
accacccgcgagacaacgactgtaggcgagcctccctttggcatcgcaggcc

SEQ ID NO: 496575 - DNA, 52 bp, Artificial
  Synthetic oligonucleotide
actatagttgcgtggtacgcaactatcaggaagatttcccatgtccgtttca

SEQ ID NO: 496576 - DNA, 52 bp, Artificial
  Synthetic oligonucleotide
cgtgtggaagcccgctacctatacgacccagagaagggtaagacggtcagaa

SEQ ID NO: 496577 - DNA, 52 bp, Artificial
  Synthetic oligonucleotide
gagccgtccgacgttggggcaatttcgctctaccacccctcatgcactctcc

SEQ ID NO: 496578 - DNA, 52 bp, Artificial
  Synthetic oligonucleotide
cattaggcgcccgtaagagccccttgtaagaaccaggacggaaacgcgcatg

SEQ ID NO: 496579 - DNA, 52 bp, Artificial
  Synthetic oligonucleotide
cgatcctcatacacgctcgtcccatacacgtccgattgccgggacgcggaat

SEQ ID NO: 496580 - DNA, 52 bp, Artificial
  Synthetic oligonucleotide
caacgtaccgcccgactcggacagcctgcatcaaaggaacggccattataat

SEQ ID NO: 496581 - DNA, 51 bp, Artificial
  Synthetic oligonucleotide
gaagggcatacgctcgcagaagcccttctgacacccacgaagctttatgtg

SEQ ID NO: 496582 - DNA, 51 bp, Artificial
  Synthetic oligonucleotide
actgtcagcacgacttattccgtaccctatcatctggctcgacagtttctg

SEQ ID NO: 496583 - DNA, 51 bp, Artificial
  Synthetic oligonucleotide
atcagactgcgacatgaagagactcctccgttagggcctgacgcaccgggg

SEQ ID NO: 496584 - DNA, 51 bp, Artificial
  Synthetic oligonucleotide
tagaaatccgatccctcttcagcactcagttcgggcatcttcccttcgttg

SEQ ID NO: 496585 - DNA, 51 bp, Artificial
  Synthetic oligonucleotide
caatgctgactcgtggtacgaaaagaccattaccaccacgtcgcaaaggca

SEQ ID NO: 496586 - DNA, 51 bp, Artificial
  Synthetic oligonucleotide
ctacatcgaacgccaaggcaaatatgcccatcgcctagaaactggtgaacg

SEQ ID NO: 496587 - DNA, 51 bp, Artificial
  Synthetic oligonucleotide
aatggggaagcactgacatggcaccggaaccgatcctcctgactccggggc

SEQ ID NO: 496588 - DNA, 51 bp, Artificial
  Synthetic oligonucleotide
gcaatggtctgttgtgatttccgtttccgcgtgaccctgttgaggataccc

SEQ ID NO: 496589 - DNA, 51 bp, Artificial
  Synthetic oligonucleotide
ctgagagacgaaatttccgatggtgggcacacggcagcctctgacggtaat

SEQ ID NO: 496590 - DNA, 51 bp, Artificial
  Synthetic oligonucleotide
agttcgtgggcacgtatgatctgctcaccaagaaactgcatactcaggaag

SEQ ID NO: 496591 - DNA, 51 bp, Artificial
  Synthetic oligonucleotide
tcaacagtttatacagatccgctaggaattgcgctgccccaatggaagggg

SEQ ID NO: 496592 - DNA, 50 bp, Artificial
  Synthetic oligonucleotide
tactcccaatttaggatcttttaacgccgcaccttctagaataacacgaa

SEQ ID NO: 496593 - DNA, 50 bp, Artificial
  Synthetic oligonucleotide
gatatggatttgacggataggtggtagatcgccacgcctcgctccgttca

SEQ ID NO: 496594 - DNA, 50 bp, Artificial
  Synthetic oligonucleotide
cgagatttcatccatggagacgcgggaggcttcaaccggagaaaggtttt

SEQ ID NO: 496595 - DNA, 55 bp, Artificial
  Synthetic oligonucleotide
aatattgagggcaatgccaatgacaatggctgtgcttatcagcgcgataatgacc

SEQ ID NO: 496596 - DNA, 55 bp, Artificial
  Synthetic oligonucleotide
gaggctgcacgcgttgttcggcatttggtaattgcgtcaagagattacgcagttt

SEQ ID NO: 496597 - DNA, 55 bp, Artificial
  Synthetic oligonucleotide
agcccaggttttctggagtgtttcgaccatctccacccaatcgttcactaccgca

SEQ ID NO: 496598 - DNA, 55 bp, Artificial
  Synthetic oligonucleotide
agtttagccaccggccttagccagcgacacgtctcccatcacttcttgcatgagc

SEQ ID NO: 496599 - DNA, 55 bp, Artificial
  Synthetic oligonucleotide
atcgaaagtgggttgagatagtgctgcccttgaatctggctatggcggggttggc

SEQ ID NO: 496600 - DNA, 55 bp, Artificial
  Synthetic oligonucleotide
ccactcattgccttggctattcctgcggtatatgccggttgggcgtacatcggtc

SEQ ID NO: 496601 - DNA, 55 bp, Artificial
  Synthetic oligonucleotide
ccactggcctataatgaaaatcaggtcttgcaacgtatattgcgatatctgggcc

SEQ ID NO: 496602 - DNA, 55 bp, Artificial
  Synthetic oligonucleotide
cccctgggctgtgatttcgggttatggcaccaatcagcaaattggcgcgaccgct

SEQ ID NO: 496603 - DNA, 55 bp, Artificial
  Synthetic oligonucleotide
cccgcgcggctcttctacaataggtccattccgttgacgctgtttgcgttatgcg

SEQ ID NO: 496604 - DNA, 55 bp, Artificial
  Synthetic oligonucleotide
cccgggccaggagttctgccggaaaaccaggaccgtcatccattacgctcaactc

SEQ ID NO: 496605 - DNA, 55 bp, Artificial
  Synthetic oligonucleotide
ccgcagctcagtgtgcgcgatattgaaatggccacccgccatatgctggattacc

SEQ ID NO: 496606 - DNA, 55 bp, Artificial
  Synthetic oligonucleotide
ccggtgaagaaccgtgcatgcgtcattttgctttggtcaccgtcatagttcttcc

SEQ ID NO: 496607 - DNA, 55 bp, Artificial
  Synthetic oligonucleotide
cgaaatgacgttaaacagacagttccgcaacctgacattactcacaggaggcttc

SEQ ID NO: 496608 - DNA, 55 bp, Artificial
  Synthetic oligonucleotide
gagccaggctttcatcaggaatcgatttaagatcggtcagataggctacatctcc

SEQ ID NO: 496609 - DNA, 54 bp, Artificial
  Synthetic oligonucleotide
gccgcgtggctgaaaatactgatcaggaccgcgtcgaaacctaccggagtggtt

SEQ ID NO: 496610 - DNA, 51 bp, Artificial
  Synthetic oligonucleotide
aagaatggggagtttccagagcgccgccatattgagggattcatggaaggt

SEQ ID NO: 496611 - DNA, 50 bp, Artificial
  Synthetic oligonucleotide
actctacgccaactaccgcagcaccgtgctcaatgcttttgatcaggtgg

SEQ ID NO: 496612 - DNA, 55 bp, Artificial
  Synthetic oligonucleotide
tgcgaggaaagaccagggctaaagcccctcttccggcatggctgattcagcgggc

SEQ ID NO: 496613 - DNA, 55 bp, Artificial
  Synthetic oligonucleotide
gtcgcgacgctcggcccaaaggtgacgaagtgcgctggcgttaggcttgtttgtg

SEQ ID NO: 496614 - DNA, 55 bp, Artificial
  Synthetic oligonucleotide
gtacagatgccgtggtctgcgtggcctgcgaagcgcgtaacagctctgccgagac

SEQ ID NO: 496615 - DNA, 55 bp, Artificial
  Synthetic oligonucleotide
gcgcggtggcgcaacgtactcggtcagcggatcgttgtggaactcctcattgacg

SEQ ID NO: 496616 - DNA, 55 bp, Artificial
  Synthetic oligonucleotide
gcgcagtggtctaggcgctccagctgaaacaaacggcgacaacaccagcggactg

SEQ ID NO: 496617 - DNA, 55 bp, Artificial
  Synthetic oligonucleotide
gaacgagtggcttgcgacgcgacatgcgatagctccttgcttccgtaaaactact

SEQ ID NO: 496618 - DNA, 55 bp, Artificial
  Synthetic oligonucleotide
cttagtgcgtgtttactcttcaacatggcgaagattagatgatatcgaacgcagg

SEQ ID NO: 496619 - DNA, 55 bp, Artificial
  Synthetic oligonucleotide
cgcaattcttacaataaactccgcacatgcccaacaatctgcgcgatccctaccg

SEQ ID NO: 496620 - DNA, 55 bp, Artificial
  Synthetic oligonucleotide
cgatgcgtcgtgagcattcgctctctcttgcacgatattacttgactctgcatga

SEQ ID NO: 496621 - DNA, 55 bp, Artificial
  Synthetic oligonucleotide
cagccgattcgttaccatggaatgactccgggaccaaaggttgttaggaccagag

SEQ ID NO: 496622 - DNA, 55 bp, Artificial
  Synthetic oligonucleotide
cactacgcacgcttccttgtcgagaacccggctggaccggtaaacatctgtctgg

SEQ ID NO: 496623 - DNA, 55 bp, Artificial
  Synthetic oligonucleotide
atgacgcgttcccttgtctacgcggccgaacctgtgacacagacaggcgtggtcg

SEQ ID NO: 496624 - DNA, 55 bp, Artificial
  Synthetic oligonucleotide
acgttcacccttgagttccgcaagacccgttctaacggacaaggcccgctccgat

SEQ ID NO: 496625 - DNA, 55 bp, Artificial
  Synthetic oligonucleotide
acggcagtaaatgcaggccgaggcgtgaagtccgcgcgcaacaacccgtcatggt

SEQ ID NO: 496626 - DNA, 55 bp, Artificial
  Synthetic oligonucleotide
acagtacgagggcctagacctatacaagcccgtctacggccaatccccggttcgc

SEQ ID NO: 496627 - DNA, 53 bp, Artificial
  Synthetic oligonucleotide
gtcgcttcggtcgtgggtctggttacgattcgcatctttggattcacgaatcc

SEQ ID NO: 496628 - DNA, 51 bp, Artificial
  Synthetic oligonucleotide
atggaaacgtgtttccggcatgccttctcccgatcgaggtggttacggtgc

SEQ ID NO: 496629 - DNA, 57 bp, Artificial
  Synthetic oligonucleotide
gaaatttaatcgaaagtcgataaaccttacaattccgggctttctagcatgttcttg

SEQ ID NO: 496630 - DNA, 55 bp, Artificial
  Synthetic oligonucleotide
gcctttgagatccgtggtggaaaagaagatgtcctgcggatcgaacaaacgctcg

SEQ ID NO: 496631 - DNA, 55 bp, Artificial
  Synthetic oligonucleotide
gcgcactatcgctcatactaatgcaaagaagtggtaaatggtcaatcgtgtgtct

SEQ ID NO: 496632 - DNA, 55 bp, Artificial
  Synthetic oligonucleotide
gcggagccaccgaggagccacggtcctcaacgcagagctctcacggagagtctta

SEQ ID NO: 496633 - DNA, 55 bp, Artificial
  Synthetic oligonucleotide
gcggaggaaacgactgtttcactgaagttgtcattccttagtagggtacttctgg

SEQ ID NO: 496634 - DNA, 55 bp, Artificial
  Synthetic oligonucleotide
gcggcgtgagtcaaacggaggaatacgtgccgacccacacagtttcccagcccga

SEQ ID NO: 496635 - DNA, 55 bp, Artificial
  Synthetic oligonucleotide
gcggtccctatcaacccgatccaactatccgcattcggagcatccactcaatgac

SEQ ID NO: 496636 - DNA, 55 bp, Artificial
  Synthetic oligonucleotide
gcgtggtacgaggacggtttctactcgggcgggtcaagcgaacgcctctctcccc

SEQ ID NO: 496637 - DNA, 55 bp, Artificial
  Synthetic oligonucleotide
gctacacattttgataaggcaacggcatcaggagttgtatgccccaataggtttc

SEQ ID NO: 496638 - DNA, 55 bp, Artificial
  Synthetic oligonucleotide
gctcaagcctcgtaaaatgccagtatcaatggaaggcggggacaagctgagcttg

SEQ ID NO: 496639 - DNA, 55 bp, Artificial
  Synthetic oligonucleotide
gctcatgaacgcgtggtttagccacattactcctgtccggtttcccaccccggac

SEQ ID NO: 496640 - DNA, 55 bp, Artificial
  Synthetic oligonucleotide
gctcgaggcgtcaggagccgaagcgccgtccggagcggatgcacccaacgattca

SEQ ID NO: 496641 - DNA, 55 bp, Artificial
  Synthetic oligonucleotide
gctgcaagcgcaagctgaggtccagcggttgaattatgaacgcgccgagcacgtg

SEQ ID NO: 496642 - DNA, 55 bp, Artificial
  Synthetic oligonucleotide
gctggtctgtcgctgagaaaccttccacagttccacgtagcttgttggagaaacc

SEQ ID NO: 496643 - DNA, 55 bp, Artificial
  Synthetic oligonucleotide
gctggttgcgttcgctcatatgtcgaatcctccaaaggcattaaatccactgcgc

SEQ ID NO: 496644 - DNA, 55 bp, Artificial
  Synthetic oligonucleotide
ggaaggctgacataacttcctctccgccgcatcacaccccgatcgcgacaccttg

SEQ ID NO: 496645 - DNA, 55 bp, Artificial
  Synthetic oligonucleotide
ggacccggcggttgttttgttcgatccgcctgagccttcaacgtagggcagtctc

SEQ ID NO: 496646 - DNA, 55 bp, Artificial
  Synthetic oligonucleotide
ggagacaacctgtgacacgcccgcttcctgaactgaccgtcggcatcctaggagc

SEQ ID NO: 496647 - DNA, 55 bp, Artificial
  Synthetic oligonucleotide
ggagcgccggacggatagcgttggaggcgtgagtgacgtgacaatcgaaacccct

SEQ ID NO: 496648 - DNA, 55 bp, Artificial
  Synthetic oligonucleotide
ggcaggggtggagcgtaacggctttgtgccgtgtggctgaacttctgtagtggac

SEQ ID NO: 496649 - DNA, 55 bp, Artificial
  Synthetic oligonucleotide
ggccgatggggagttctaccaaaagccggcacagagccagggcgataggctgaca

SEQ ID NO: 496650 - DNA, 55 bp, Artificial
  Synthetic oligonucleotide
ggcgcgccagagggacgccggtgtatagaagcccagatcatggatctatcggacg

SEQ ID NO: 496651 - DNA, 55 bp, Artificial
  Synthetic oligonucleotide
ggctaccggtttcgctcatggtaaccaccgcacccataacgatcgggaaggaggt

SEQ ID NO: 496652 - DNA, 55 bp, Artificial
  Synthetic oligonucleotide
ggctaggattgctgccggcgagaccgcacaaatggcagagggactatcgccagct

SEQ ID NO: 496653 - DNA, 55 bp, Artificial
  Synthetic oligonucleotide
ggcttcccttcaggtcaggggcaggtaactacgaatgaattacacgggtgtgagc

SEQ ID NO: 496654 - DNA, 55 bp, Artificial
  Synthetic oligonucleotide
gggccacctgtgctcggcgaaggtatggatgatcgttactgcctgctcaataggg

SEQ ID NO: 496655 - DNA, 55 bp, Artificial
  Synthetic oligonucleotide
gggcccagaatcgttcacgttgagtctatggaactcgatgagctgagccccgcag

SEQ ID NO: 496656 - DNA, 55 bp, Artificial
  Synthetic oligonucleotide
ctcgctacccagcgcgacactccggtctgacctgacaaacccaaggttttatgcg

SEQ ID NO: 496657 - DNA, 55 bp, Artificial
  Synthetic oligonucleotide
ctgaccctcgctgacgctcttgcaatagtccgcgaccattacgccgaatcgcggg

SEQ ID NO: 496658 - DNA, 55 bp, Artificial
  Synthetic oligonucleotide
ctgaccgctccaggtgtccaaaacggagggtattggcccgaacctcgcacagcgt

SEQ ID NO: 496659 - DNA, 55 bp, Artificial
  Synthetic oligonucleotide
ctgcaaagggccacatgccgcaccaagtaatctagcgcatacaatgacgctccga

SEQ ID NO: 496660 - DNA, 55 bp, Artificial
  Synthetic oligonucleotide
ctggacaggcaactatttcgtcccgatggagcaacaacccagagtcctgcagtgg

SEQ ID NO: 496661 - DNA, 55 bp, Artificial
  Synthetic oligonucleotide
ctggaggaacctaatctcttcaatgaggacttgacgatcactgtgacggagggct

SEQ ID NO: 496662 - DNA, 55 bp, Artificial
  Synthetic oligonucleotide
ctgtgggtgctaccagtatcgccccagcaaagcgacttgctgcgagattcaccgc

SEQ ID NO: 496663 - DNA, 55 bp, Artificial
  Synthetic oligonucleotide
gaaaggccgtgccagcggagcttcaacgacgcttccaatgttcgtaaagtgccgg

SEQ ID NO: 496664 - DNA, 55 bp, Artificial
  Synthetic oligonucleotide
gaacgagcgatgctctcgcctgatcctgtcccgtaaggcaaagccacccacccct

SEQ ID NO: 496665 - DNA, 55 bp, Artificial
  Synthetic oligonucleotide
gacccggtccggctcgtgcgagatccgataatgggactaaagacctgtcaaacgt

SEQ ID NO: 496666 - DNA, 55 bp, Artificial
  Synthetic oligonucleotide
gacgattcagatatgctgaacgtggttcccggtttgaaaaggatctccgcttcgc

SEQ ID NO: 496667 - DNA, 55 bp, Artificial
  Synthetic oligonucleotide
gacggtagataatgaatttgggcactccgagggattcaccctaccccaaaccccg

SEQ ID NO: 496668 - DNA, 55 bp, Artificial
  Synthetic oligonucleotide
gacgtacacagagaacgtcttaatgcaccttctggtgctgggtgctttctgactc

SEQ ID NO: 496669 - DNA, 55 bp, Artificial
  Synthetic oligonucleotide
gacgttaaagcccctgattgggaagctctgttcgggtacttccgtaacgcccgag

SEQ ID NO: 496670 - DNA, 55 bp, Artificial
  Synthetic oligonucleotide
gactcaccatacggccgtccggatacctcaggaaactcatgcatgttctagtacc

SEQ ID NO: 496671 - DNA, 55 bp, Artificial
  Synthetic oligonucleotide
gactttcaacgaactgttctcagaccctcatagattagaaaagctgtcccagggc

SEQ ID NO: 496672 - DNA, 55 bp, Artificial
  Synthetic oligonucleotide
gatgccactcttggtatgtcagtgttggatcgtcgtccgaatcaagaagaacgcc

SEQ ID NO: 496673 - DNA, 55 bp, Artificial
  Synthetic oligonucleotide
gattagtgcgcgagtgaatctcatcccgaatggtcacgaatcagtcctcttcggc

SEQ ID NO: 496674 - DNA, 55 bp, Artificial
  Synthetic oligonucleotide
gcactatgctgcttgtagctgacggagatacatgggtcgtcaaacacttctggtc

SEQ ID NO: 496675 - DNA, 55 bp, Artificial
  Synthetic oligonucleotide
gcagctgagcagtgcaatgccaccccacatagtgcgatacccacctatccagtgc

SEQ ID NO: 496676 - DNA, 55 bp, Artificial
  Synthetic oligonucleotide
gccattgcgggattagacgtagatcccaaacactgcatcatggtaggcgaccggc

SEQ ID NO: 496677 - DNA, 55 bp, Artificial
  Synthetic oligonucleotide
gcccacgacccagtgatcagtaaaacgcctgacgagggagaaatacagcgtcgcg

SEQ ID NO: 496678 - DNA, 55 bp, Artificial
  Synthetic oligonucleotide
gccgaaaacagggaaagcatccttcggggcaccttttgtgaccgcaccggagagg

SEQ ID NO: 496679 - DNA, 55 bp, Artificial
  Synthetic oligonucleotide
gccgattttgacggttcccacaagcgaaagcgcgttagtctcatgacatgcacaa

SEQ ID NO: 496680 - DNA, 55 bp, Artificial
  Synthetic oligonucleotide
gccgcaggtcaggcattagctagcgcattaaacctagagcaaacccatgctgctc

SEQ ID NO: 496681 - DNA, 55 bp, Artificial
  Synthetic oligonucleotide
gcctctgcttcgatgcgagctttgggatcaggtttcgtccccacatccggttgag

SEQ ID NO: 496682 - DNA, 55 bp, Artificial
  Synthetic oligonucleotide
gcctggtgcttctggcaccgagacgacgatgttgcactgccgactcgatgtgacg

SEQ ID NO: 496683 - DNA, 55 bp, Artificial
  Synthetic oligonucleotide
gtgggcgcagtgactggtgatgatttctcgtgctactatctcggaatgatcccgc

SEQ ID NO: 496684 - DNA, 55 bp, Artificial
  Synthetic oligonucleotide
gtgtctctcgacagaccattgccaagtgggaggctccgggtggtaatcccgacat

SEQ ID NO: 496685 - DNA, 55 bp, Artificial
  Synthetic oligonucleotide
gtgttgcgtcatgtcccttcattcctccatgaagttgtcattgtggtctgcgggg

SEQ ID NO: 496686 - DNA, 55 bp, Artificial
  Synthetic oligonucleotide
gttccggcactaaccgactgtccgggcgaaacatagatgcgttgcatgtgcaggt

SEQ ID NO: 496687 - DNA, 55 bp, Artificial
  Synthetic oligonucleotide
gtttccgggcgttcttaagtgcttcggatggattatgacgggttcttgtgcgtcg

SEQ ID NO: 496688 - DNA, 55 bp, Artificial
  Synthetic oligonucleotide
taagacccgttccagactcggagacctgccagtcatcgggctccccaaccctcgt

SEQ ID NO: 496689 - DNA, 55 bp, Artificial
  Synthetic oligonucleotide
tacattcagggcaaggttcccatcaccgcctgccagtgggcatggattcattccg

SEQ ID NO: 496690 - DNA, 55 bp, Artificial
  Synthetic oligonucleotide
tcacacccttgaactgacggtgagcctcgattcggtgtcgtaccggccggctacc

SEQ ID NO: 496691 - DNA, 55 bp, Artificial
  Synthetic oligonucleotide
tcaccgattgctgggacttcgaatcaatgtcgcacaacgcgtttacggtcggggc

SEQ ID NO: 496692 - DNA, 55 bp, Artificial
  Synthetic oligonucleotide
tcacgagcccttccattgagttggcgaccatagcactgacactcctcgcacgcga

SEQ ID NO: 496693 - DNA, 55 bp, Artificial
  Synthetic oligonucleotide
tcaggtcacgacggtcaaggtaagcctaaccttagatgttctcgtcgcccaagag

SEQ ID NO: 496694 - DNA, 55 bp, Artificial
  Synthetic oligonucleotide
tcatcgaagaccgggaacctaaccccgatctggctcgtattgtgaccgcaacccc

SEQ ID NO: 496695 - DNA, 55 bp, Artificial
  Synthetic oligonucleotide
tcccgtactcggaggtggcacgctcgggccgttactgcaagaaactcgcgaagcg

SEQ ID NO: 496696 - DNA, 55 bp, Artificial
  Synthetic oligonucleotide
tcgacagtggaaggtcgcgatagattgaggaactatgagcaaccacgcctacgag

SEQ ID NO: 496697 - DNA, 55 bp, Artificial
  Synthetic oligonucleotide
tcgatctccaccgttgggtgatgcgttcttccgaagggccagaaccacatgacgg

SEQ ID NO: 496698 - DNA, 55 bp, Artificial
  Synthetic oligonucleotide
tcgcgtctgattggtcgatggccggagagagggttcgcgccacgggttgacatga

SEQ ID NO: 496699 - DNA, 55 bp, Artificial
  Synthetic oligonucleotide
tgacgggcctcacaagaaaggcgtgcgataacgaggcgctcaggtatcggccgga

SEQ ID NO: 496700 - DNA, 55 bp, Artificial
  Synthetic oligonucleotide
tgcgtccgcggatgacgagagggtgccgtcgaagagtgctcgcgtctccaccatg

SEQ ID NO: 496701 - DNA, 55 bp, Artificial
  Synthetic oligonucleotide
tgggttcctggcgcgctcttcgttctcatggcgctcacgagtgtccttcctggac

SEQ ID NO: 496702 - DNA, 55 bp, Artificial
  Synthetic oligonucleotide
tggttcaggacaaacggttcaaggggatggaagaacaactgcgctccgggtgggg

SEQ ID NO: 496703 - DNA, 55 bp, Artificial
  Synthetic oligonucleotide
tgtccccgtcacgctcggtggccgtaccctctacctggcacccggcgttccgacc

SEQ ID NO: 496704 - DNA, 55 bp, Artificial
  Synthetic oligonucleotide
tgtgtaagatgctaacgcctaacgtcctactaacacaaaacccttcttatggtct

SEQ ID NO: 496705 - DNA, 55 bp, Artificial
  Synthetic oligonucleotide
ttagcgcaacccagcgacaggtaagtgtgtccgaaggtgatcttccgtcgtcgtc

SEQ ID NO: 496706 - DNA, 55 bp, Artificial
  Synthetic oligonucleotide
ttcatcaggcgtacgactatcaggagagacagcatgaaagactcactgcacgact

SEQ ID NO: 496707 - DNA, 55 bp, Artificial
  Synthetic oligonucleotide
ttcttgccagtaagaattacatgcgtgtgagacaaggccagtcaagccagcgagg

SEQ ID NO: 496708 - DNA, 55 bp, Artificial
  Synthetic oligonucleotide
ttgagctgacacgatgagcttgaaactcaattggcgagggcgctcatacatccct

SEQ ID NO: 496709 - DNA, 55 bp, Artificial
  Synthetic oligonucleotide
ttgatcggtcatctatttcgcctctcggccggctcgtttccttctacgctgtgcc

SEQ ID NO: 496710 - DNA, 55 bp, Artificial
  Synthetic oligonucleotide
gggcctatggccccgccgggaaatcaccgtcccctggcatcctgtacgaccggtg

SEQ ID NO: 496711 - DNA, 55 bp, Artificial
  Synthetic oligonucleotide
gggctcctggaacaatcatgcgccaacgcggaagcgtaagctgctactgcacgcc

SEQ ID NO: 496712 - DNA, 55 bp, Artificial
  Synthetic oligonucleotide
gggctttccgagcagtacccctcctcgtagcagcacctagagaggttgccggaag

SEQ ID NO: 496713 - DNA, 55 bp, Artificial
  Synthetic oligonucleotide
gggtaggttcatgccgtctaggcaccagtcatcggctttggcctgtgagcgctgg

SEQ ID NO: 496714 - DNA, 55 bp, Artificial
  Synthetic oligonucleotide
gggtcacggttgcgccactcgcacgtagacctattgcctcagccatcttgacgcc

SEQ ID NO: 496715 - DNA, 55 bp, Artificial
  Synthetic oligonucleotide
gggtccgcgattaaaaggtcggcgcctgtgggaagcctttcgaaagggatgtcgg

SEQ ID NO: 496716 - DNA, 55 bp, Artificial
  Synthetic oligonucleotide
gggtgcgcgccattttaacctatttgcaggacaaagctccccactaggtcagttg

SEQ ID NO: 496717 - DNA, 55 bp, Artificial
  Synthetic oligonucleotide
gggtggtgagggtaagtccattaaggctcgcgatcaggtgcccgtttcgcgccgt

SEQ ID NO: 496718 - DNA, 55 bp, Artificial
  Synthetic oligonucleotide
gggtttgtcaggtcagaccggagtgtcgcgctggatagcgagtaacaattcgcac

SEQ ID NO: 496719 - DNA, 55 bp, Artificial
  Synthetic oligonucleotide
ggtaaaaccaccgattgctaagagcgatacccagatcagtgcgtaactcccgggg

SEQ ID NO: 496720 - DNA, 55 bp, Artificial
  Synthetic oligonucleotide
ggtaacgctccgtctggtagacatatggcttgagcgtgagatgaaatggatagtc

SEQ ID NO: 496721 - DNA, 55 bp, Artificial
  Synthetic oligonucleotide
ggtacatcaggacggtcctgggcgcaccttgggcggtttcaccgcattctagcgt

SEQ ID NO: 496722 - DNA, 55 bp, Artificial
  Synthetic oligonucleotide
ggtcataccattccccaccatgtccgccctagaaggtcatcaaccatgcgactcc

SEQ ID NO: 496723 - DNA, 55 bp, Artificial
  Synthetic oligonucleotide
ggtgagtctttcaccggaaccgtgtgaagggcgagggtcctgaggactcctgtcc

SEQ ID NO: 496724 - DNA, 55 bp, Artificial
  Synthetic oligonucleotide
ggttcccacaagcgaaagcgcgttagtctcatgacatgcacaaccgtccgatccc

SEQ ID NO: 496725 - DNA, 55 bp, Artificial
  Synthetic oligonucleotide
gtaccggcggagacttggtgtcatgacgctagaggttggtgtgagttggctgggg

SEQ ID NO: 496726 - DNA, 55 bp, Artificial
  Synthetic oligonucleotide
gtatccggcaatgcgggaaggcaggattcgtagcgcattcacaggttgcgcgggg

SEQ ID NO: 496727 - DNA, 55 bp, Artificial
  Synthetic oligonucleotide
gtcaagtagaccgatgggcctggggaacggcccggactgaccgatcgcacatttg

SEQ ID NO: 496728 - DNA, 55 bp, Artificial
  Synthetic oligonucleotide
gtcaatagctcgaaatatctcgggcagagaatcgttcaaggcgtctagcgggtgc

SEQ ID NO: 496729 - DNA, 55 bp, Artificial
  Synthetic oligonucleotide
gtcagtgctatggtcgccaactcaatggaagggctcgtgaagaacgtaccgacgg

SEQ ID NO: 496730 - DNA, 55 bp, Artificial
  Synthetic oligonucleotide
gtccgggtagtgcttggtcaggtgggagatctcgacggggttcactgcttctcct

SEQ ID NO: 496731 - DNA, 55 bp, Artificial
  Synthetic oligonucleotide
gtcgcagcaaaccgcctcacatcaccttcgaacccttcagaaggcgggcctggca

SEQ ID NO: 496732 - DNA, 55 bp, Artificial
  Synthetic oligonucleotide
gtcgcaggtccgctgaggaaaccacgacgaggaagggctaaggcccactcatgac

SEQ ID NO: 496733 - DNA, 55 bp, Artificial
  Synthetic oligonucleotide
gtctaggttatcgacggcgtactgtgcttcctcttcggtgaactttccgccatgc

SEQ ID NO: 496734 - DNA, 55 bp, Artificial
  Synthetic oligonucleotide
gtctcacacgcatgtaattcttactgacaagaagctcggatcgaagggaggccga

SEQ ID NO: 496735 - DNA, 55 bp, Artificial
  Synthetic oligonucleotide
gtctgcctctaaagggtggtaagaggatcctccgagccaattctgcgcctcccgg

SEQ ID NO: 496736 - DNA, 55 bp, Artificial
  Synthetic oligonucleotide
gtgaggaccttagggctcgaacccactcatgagccgcacattcagaccagtagca

SEQ ID NO: 496737 - DNA, 55 bp, Artificial
  Synthetic oligonucleotide
gtgccggtgcttgcgaggagtgggtcatagactcttgcctccgttcagtggtggg

SEQ ID NO: 496738 - DNA, 55 bp, Artificial
  Synthetic oligonucleotide
atcgagcgatagcctgcgtgagccgcaatgttgcgtgtggttcgaatggcccggc

SEQ ID NO: 496739 - DNA, 55 bp, Artificial
  Synthetic oligonucleotide
atgccgttgttcgtcaggcagattcgggccagccggggaatgcagctcatgcagc

SEQ ID NO: 496740 - DNA, 55 bp, Artificial
  Synthetic oligonucleotide
atttggcttgacggcccacctggcggtgctattgtgcgcgtgccttccgggacgg

SEQ ID NO: 496741 - DNA, 55 bp, Artificial
  Synthetic oligonucleotide
caaacgagaagccggacaggccttaccgtccgcacacagccttagggttgacatc

SEQ ID NO: 496742 - DNA, 55 bp, Artificial
  Synthetic oligonucleotide
caagcaggtcaatgatccacccaacatgactaacgtttgacaggtctttagtccc

SEQ ID NO: 496743 - DNA, 55 bp, Artificial
  Synthetic oligonucleotide
cacaccctacgtcaacaagaacgactccgcgcagccttcacggcagatgaggtgc

SEQ ID NO: 496744 - DNA, 55 bp, Artificial
  Synthetic oligonucleotide
cacagactaagacgtatttcagatttctctcaggaatgccggtagagtggttctc

SEQ ID NO: 496745 - DNA, 55 bp, Artificial
  Synthetic oligonucleotide
cacagcggaaggtattttgtggagctcgttcaaatttcggattccgaactgaaac

SEQ ID NO: 496746 - DNA, 55 bp, Artificial
  Synthetic oligonucleotide
caccggcggtttcgggactcctcacggcctcagccccggtcggcactgatgcggt

SEQ ID NO: 496747 - DNA, 55 bp, Artificial
  Synthetic oligonucleotide
cacctctgcttgcccgatttcgacagtccgtaccggatcagcttcctgccacagg

SEQ ID NO: 496748 - DNA, 55 bp, Artificial
  Synthetic oligonucleotide
cacgaatatgtttctgtccctgccgacgacactgacgtccttggtattctcgcgt

SEQ ID NO: 496749 - DNA, 55 bp, Artificial
  Synthetic oligonucleotide
cactccagggcctaacgcatcagcggccaggggtgagtctcttagtgtggtggca

SEQ ID NO: 496750 - DNA, 55 bp, Artificial
  Synthetic oligonucleotide
cagtagcagctttcgcttccgcgttggcgcatgattgttccaggagccctgcgcg

SEQ ID NO: 496751 - DNA, 55 bp, Artificial
  Synthetic oligonucleotide
catgcagccaaccgcgaggccctattgcgcccgcctcctttccaacctaggatga

SEQ ID NO: 496752 - DNA, 55 bp, Artificial
  Synthetic oligonucleotide
catgggcgcacggacctttatgcgcttctagtccccgacttggcgaacccttacc

SEQ ID NO: 496753 - DNA, 55 bp, Artificial
  Synthetic oligonucleotide
ccaaggttttatgcgtagcgttgccagaagtggcaccacacaagggtgtccgtcc

SEQ ID NO: 496754 - DNA, 55 bp, Artificial
  Synthetic oligonucleotide
ccaatgcggggtgaagaccctcacacgggtaacggggctaggctttctccgtgac

SEQ ID NO: 496755 - DNA, 55 bp, Artificial
  Synthetic oligonucleotide
ccacggaatgctcggcggtaactccgtgatcaccgaatacctgcacatgcaacgc

SEQ ID NO: 496756 - DNA, 55 bp, Artificial
  Synthetic oligonucleotide
ccacggctcaatcgcctcctgaagccgaacgggctcgtagaagaggatctcaccg

SEQ ID NO: 496757 - DNA, 55 bp, Artificial
  Synthetic oligonucleotide
ccactacgcggctaccagggcgttaagacgccaactccccgagggtcacaccata

SEQ ID NO: 496758 - DNA, 55 bp, Artificial
  Synthetic oligonucleotide
ccagcagttcacaggaggccccgcgtgggatacggacccatcaaggcaacagtcg

SEQ ID NO: 496759 - DNA, 55 bp, Artificial
  Synthetic oligonucleotide
ccaggatcctcaccccttttcgtgagtgagggtggcgtgcaatacactggtgggg

SEQ ID NO: 496760 - DNA, 55 bp, Artificial
  Synthetic oligonucleotide
ccaggggtcctcaatgtcgtcttgaccgaaggaaacgttgataccggcgtcggtt

SEQ ID NO: 496761 - DNA, 55 bp, Artificial
  Synthetic oligonucleotide
ccagtcgcagcgtttacaaactgtaagctcgacgttgacaatcgtatcaacgagg

SEQ ID NO: 496762 - DNA, 55 bp, Artificial
  Synthetic oligonucleotide
ccattccggttatggttcgcctgagcacgagatcagacgaccgggaggcggacac

SEQ ID NO: 496763 - DNA, 55 bp, Artificial
  Synthetic oligonucleotide
cccaccatcgacatgggcatgcgcagaataagggcggccgcggagaatttccagg

SEQ ID NO: 496764 - DNA, 55 bp, Artificial
  Synthetic oligonucleotide
aaacacaccacaggaggacagatgccccaagtgacgcgcacgcaccccgctccga

SEQ ID NO: 496765 - DNA, 55 bp, Artificial
  Synthetic oligonucleotide
aaacctgtccgcacaagtcgaacaggtctccaacgcggtcccgcctcccctagcc

SEQ ID NO: 496766 - DNA, 55 bp, Artificial
  Synthetic oligonucleotide
aacagggacatgccctgccagtgcagtgaaagagtggccccggtccacgtagagg

SEQ ID NO: 496767 - DNA, 55 bp, Artificial
  Synthetic oligonucleotide
aagagctgaattcctctcaggctgcttctgccatttctcgttcctgccatgtcca

SEQ ID NO: 496768 - DNA, 55 bp, Artificial
  Synthetic oligonucleotide
aagcaccgggctgcgacgacgcgtaactctgttggcctccgtatcctggctgagc

SEQ ID NO: 496769 - DNA, 55 bp, Artificial
  Synthetic oligonucleotide
aagcggatgagcgcctacgcccctccgagtgagtcgaccgatcccaatgtgagca

SEQ ID NO: 496770 - DNA, 55 bp, Artificial
  Synthetic oligonucleotide
aagtccggcaccgactcctgacaccccgatcacaagccaatgttcgtgcgtgggc

SEQ ID NO: 496771 - DNA, 55 bp, Artificial
  Synthetic oligonucleotide
aagtcgaaggttgcttcacgatagatcacggggccaacaagagcatcgggttcta

SEQ ID NO: 496772 - DNA, 55 bp, Artificial
  Synthetic oligonucleotide
aagttcgttcctatttccctgatgcaacgttggacaccaaggtcccacgttcaat

SEQ ID NO: 496773 - DNA, 55 bp, Artificial
  Synthetic oligonucleotide
aatactacccgtaagtgtcgcgcgggccccttcctttcactcgcaaccggccgtg

SEQ ID NO: 496774 - DNA, 55 bp, Artificial
  Synthetic oligonucleotide
acaataaaccacctcactcttttgtgacacgcgtcccataacgatggcgacgggg

SEQ ID NO: 496775 - DNA, 55 bp, Artificial
  Synthetic oligonucleotide
acacgggaacaagctactacgggctccacgcctagcgactttagtgttacacagg

SEQ ID NO: 496776 - DNA, 55 bp, Artificial
  Synthetic oligonucleotide
acatcctacgaccgcccgccgacacgaatcacacccttgaaccgacggtgagcct

SEQ ID NO: 496777 - DNA, 55 bp, Artificial
  Synthetic oligonucleotide
accctcttgtcagcggtgagtggatcttcatacacgcattatcgtcgcggacggg

SEQ ID NO: 496778 - DNA, 55 bp, Artificial
  Synthetic oligonucleotide
accttgtggaaccattgaacgaacctgcgagttccctgggaatttctcacggctc

SEQ ID NO: 496779 - DNA, 55 bp, Artificial
  Synthetic oligonucleotide
acgccacgcgggagatcatagtgttcggaaacctgcaagaccgcctcaccgagtc

SEQ ID NO: 496780 - DNA, 55 bp, Artificial
  Synthetic oligonucleotide
acggtgcagctattgggcgataacgagggcgtagccagccactaccggcgcgtgt

SEQ ID NO: 496781 - DNA, 55 bp, Artificial
  Synthetic oligonucleotide
acgtctgctccgactgcgtgagccactgcgagtcgcgcatgttgaggcgaagcgc

SEQ ID NO: 496782 - DNA, 55 bp, Artificial
  Synthetic oligonucleotide
actgttccctccgtggggtaccgcttcatcggaaaggtcggacaatgaggaaccg

SEQ ID NO: 496783 - DNA, 55 bp, Artificial
  Synthetic oligonucleotide
agcaaccgtccaataccgagatcatcatgctaaccaattttgccggccaatgacc

SEQ ID NO: 496784 - DNA, 55 bp, Artificial
  Synthetic oligonucleotide
agcgaccgaatggacgtttcataacgatgtccgaatcaggatcgcgaacatcgat

SEQ ID NO: 496785 - DNA, 55 bp, Artificial
  Synthetic oligonucleotide
agcgtcaaacccgcgcgaagacacatgtgagccatgacggacaggagcggtaggt

SEQ ID NO: 496786 - DNA, 55 bp, Artificial
  Synthetic oligonucleotide
aggacaggcccggtaggggccgcatagaggcaaggagctcaacgaccgtggacaa

SEQ ID NO: 496787 - DNA, 55 bp, Artificial
  Synthetic oligonucleotide
aggcagtggtagctacccagatgacagccgcggtggcatttagtgcccgtagtcg

SEQ ID NO: 496788 - DNA, 55 bp, Artificial
  Synthetic oligonucleotide
atccatcccagggagatgactccgatgcccaatattctcttgtcggtcataacgt

SEQ ID NO: 496789 - DNA, 55 bp, Artificial
  Synthetic oligonucleotide
atcctagtcgcgtgatgcccgcctcgtgtagtctccggcccacgatcgcccggtt

SEQ ID NO: 496790 - DNA, 55 bp, Artificial
  Synthetic oligonucleotide
atccttgggcgtttacgagcggcggggcggggactactccttcgtggacatcatg

SEQ ID NO: 496791 - DNA, 55 bp, Artificial
  Synthetic oligonucleotide
cctcgtcccttgagtccttcttggatcggttccagacgggtgaggcggaggagag

SEQ ID NO: 496792 - DNA, 55 bp, Artificial
  Synthetic oligonucleotide
cgtgaaaccggttcgtgcattcacatagcggacgactatttagcctcgggttttc

SEQ ID NO: 496793 - DNA, 55 bp, Artificial
  Synthetic oligonucleotide
cggtgtggggtgtgatgtcttggagctggggatcgtacgagtcgggtttcactgc

SEQ ID NO: 496794 - DNA, 55 bp, Artificial
  Synthetic oligonucleotide
cgacgtcgtgacgccagttatgatcggtaaggattcgcgctatagcaagacccac

SEQ ID NO: 496795 - DNA, 55 bp, Artificial
  Synthetic oligonucleotide
cgagatagtagtacgagaaatcatcaccagtcactgcgcccacgacccagtgatc

SEQ ID NO: 496796 - DNA, 55 bp, Artificial
  Synthetic oligonucleotide
cgataaccggtaccacggcgctttaggagtcgtatttccctcgaccgatgtccgc

SEQ ID NO: 496797 - DNA, 55 bp, Artificial
  Synthetic oligonucleotide
cgatccctcgacctcgatgactccgtccttcttagccatgttcctccgtcggtgc

SEQ ID NO: 496798 - DNA, 55 bp, Artificial
  Synthetic oligonucleotide
cgatctgtggttgaacagtatctatcgtacgcgaattttgctcttagagcgggga

SEQ ID NO: 496799 - DNA, 55 bp, Artificial
  Synthetic oligonucleotide
cgcctagacccgaaacgtccttttcgacctcgcgcaaatgcaggtacgtgccggc

SEQ ID NO: 496800 - DNA, 55 bp, Artificial
  Synthetic oligonucleotide
cgcgagtcgagtactcaatgagagttgcgcgctcaacgtggaggttatcggaggc

SEQ ID NO: 496801 - DNA, 55 bp, Artificial
  Synthetic oligonucleotide
cgcgatgagctagtgagcgaactggttcaggacaaacggttcaaggggatggaag

SEQ ID NO: 496802 - DNA, 55 bp, Artificial
  Synthetic oligonucleotide
cggggcgcgccgttatgttctccatcccatcgacgaatgacaatcccgacatcgg

SEQ ID NO: 496803 - DNA, 55 bp, Artificial
  Synthetic oligonucleotide
cgcgcgggtacgaacccataaaacgaacctcgggcgaatagcgatgcagaccaac

SEQ ID NO: 496804 - DNA, 55 bp, Artificial
  Synthetic oligonucleotide
cgggctttagacagtttgcgtggaagcaaaccgttgaacaggagaattaatgcct

SEQ ID NO: 496805 - DNA, 55 bp, Artificial
  Synthetic oligonucleotide
cgcgttgagcagcctcgtgagggcgcgtcgaggatccgttgtcatggtgtcaatc

SEQ ID NO: 496806 - DNA, 55 bp, Artificial
  Synthetic oligonucleotide
cgctcacgctgaggatcggcggcgtctagatccacccgctcaatcactactaggc

SEQ ID NO: 496807 - DNA, 55 bp, Artificial
  Synthetic oligonucleotide
cgctggccacggctattggggcggtgactgggtggattttggagcatgttcaccc

SEQ ID NO: 496808 - DNA, 55 bp, Artificial
  Synthetic oligonucleotide
cgggaccatacggtgctcctacaacgatggaggcgggtatcacgtgttgcggtcc

SEQ ID NO: 496809 - DNA, 55 bp, Artificial
  Synthetic oligonucleotide
cggcttgactggccttgtctcacacgcatgtaattcttactggcaagaagctcgg

SEQ ID NO: 496810 - DNA, 55 bp, Artificial
  Synthetic oligonucleotide
cgctgtttcataccacgcgagaaaccgcttactttagtgtcagcgtactgggtta

SEQ ID NO: 496811 - DNA, 55 bp, Artificial
  Synthetic oligonucleotide
cggaacatggacttgcggtatctctcaggttgcacgcctacgtcgtgatggacac

SEQ ID NO: 496812 - DNA, 55 bp, Artificial
  Synthetic oligonucleotide
cggcacgtccatggggaacaacttcaacaaccgctctgaggaagccgttggctcg

SEQ ID NO: 496813 - DNA, 55 bp, Artificial
  Synthetic oligonucleotide
cccgatttcgacagtccgtaccggatcagcttcctgccacaggaatcgcatttcg

SEQ ID NO: 496814 - DNA, 55 bp, Artificial
  Synthetic oligonucleotide
cccgtcactttcggcctcgaaaacattcgcaaggaactcacggttgtaatgcgcg

SEQ ID NO: 496815 - DNA, 55 bp, Artificial
  Synthetic oligonucleotide
ccctcacagacggatgctcctgagacgcagacccaccagaatccgacgagccttc

SEQ ID NO: 496816 - DNA, 55 bp, Artificial
  Synthetic oligonucleotide
cgtgcgaccagcattcgccatgatgcctgtagacggttccaggtagtaccaatct

SEQ ID NO: 496817 - DNA, 55 bp, Artificial
  Synthetic oligonucleotide
ccgaacgcgtcctacgtcatatcccacacggtccgtttcatcgccgatctgtggg

SEQ ID NO: 496818 - DNA, 55 bp, Artificial
  Synthetic oligonucleotide
cccgatgcgcacagattgaggagcaactgacacgtgtctgaccaggacgccactg

SEQ ID NO: 496819 - DNA, 55 bp, Artificial
  Synthetic oligonucleotide
cccctgcgcccgaagaattccccgatgatcgcattccaccgttctacgaggcggt

SEQ ID NO: 496820 - DNA, 55 bp, Artificial
  Synthetic oligonucleotide
ctagttggcttactgccgatggatatgggcgcactcttgcccgcaaaactccgcc

SEQ ID NO: 496821 - DNA, 55 bp, Artificial
  Synthetic oligonucleotide
ccgacatactcccgtcgcgacacactcaacgtcatagacgagcacgacatgggag

SEQ ID NO: 496822 - DNA, 55 bp, Artificial
  Synthetic oligonucleotide
ccgcctccattgagcctttctgaagccacgtctgaagcgagataccccagcagcc

SEQ ID NO: 496823 - DNA, 55 bp, Artificial
  Synthetic oligonucleotide
ccggacattacccaccggttagctttccgggaggcgctcccatctagctcgttgg

SEQ ID NO: 496824 - DNA, 55 bp, Artificial
  Synthetic oligonucleotide
ccggtctgggacaaacccttcggtcaaggctccgtaaaccctgcgccaaggcaag

SEQ ID NO: 496825 - DNA, 55 bp, Artificial
  Synthetic oligonucleotide
ccgtatcgagtgtgtggccattcttctccgcaaaatcggcgataaaaccgtcgtt

SEQ ID NO: 496826 - DNA, 55 bp, Artificial
  Synthetic oligonucleotide
ctcagctaccgagccagtgtttgagttggctcctgcctgcatgatttgcgtcgac

SEQ ID NO: 496827 - DNA, 55 bp, Artificial
  Synthetic oligonucleotide
ccgtcccggtggtgtgaggagttgtttcggtggcgaggaggctatcggtgatgag

SEQ ID NO: 496828 - DNA, 55 bp, Artificial
  Synthetic oligonucleotide
ccgtgtcccctacgccgtgagtaatcaagacaggaagcccactttgacggagggg

SEQ ID NO: 496829 - DNA, 55 bp, Artificial
  Synthetic oligonucleotide
cctaacccgccttaaggtaggctccaaactaattgacgccaagggcgtctcgcag

SEQ ID NO: 496830 - DNA, 54 bp, Artificial
  Synthetic oligonucleotide
cccctaaccaccaggaggatctccgtggaagacagcattatctccaggatcccg

SEQ ID NO: 496831 - DNA, 54 bp, Artificial
  Synthetic oligonucleotide
gttcgcgtgagacattatcgagcagcgctaatgcgccgacaagcgcctgaggac

SEQ ID NO: 496832 - DNA, 54 bp, Artificial
  Synthetic oligonucleotide
agatgcagtgggtagaagtcgcattgaggtggatttgccgctccagctggatcg

SEQ ID NO: 496833 - DNA, 54 bp, Artificial
  Synthetic oligonucleotide
acaaaagaagcgccagccgggctaaaatcccaaccaacacacctctcaaggcac

SEQ ID NO: 496834 - DNA, 54 bp, Artificial
  Synthetic oligonucleotide
ctagcctctttcgccgccgaatgctgcacttctcatgctcccgacaggacaggt

SEQ ID NO: 496835 - DNA, 54 bp, Artificial
  Synthetic oligonucleotide
gtgactctgcccctgcatcgtagattgaacgatccttgtacgtggtcctcattg

SEQ ID NO: 496836 - DNA, 54 bp, Artificial
  Synthetic oligonucleotide
tgggtgagcactggtcgcaaccggtattgaatcgtttcgattggaatgattcca

SEQ ID NO: 496837 - DNA, 54 bp, Artificial
  Synthetic oligonucleotide
gctgaagaacggccccatgcgtgggaaaattggtgctcgcctgggccagcaagt

SEQ ID NO: 496838 - DNA, 54 bp, Artificial
  Synthetic oligonucleotide
cgcatcggtcggaacggggtggcagatgtgaagcgtttccacatgtcgtgcaca

SEQ ID NO: 496839 - DNA, 54 bp, Artificial
  Synthetic oligonucleotide
gccgtcgaaaactacgcgactcatatcgagatcgacatggaagctctttctgat

SEQ ID NO: 496840 - DNA, 54 bp, Artificial
  Synthetic oligonucleotide
ccttacctcttcgttccagacatcgagaattgtctgttccttgagtgaaggcct

SEQ ID NO: 496841 - DNA, 53 bp, Artificial
  Synthetic oligonucleotide
tccacacatcggcataccactattactaaggagtaatcccgtggcattaaagg

SEQ ID NO: 496842 - DNA, 53 bp, Artificial
  Synthetic oligonucleotide
cggcgtacaacgacaggtggaccagtgagacgtgagacaaagcgccgcggtat

SEQ ID NO: 496843 - DNA, 53 bp, Artificial
  Synthetic oligonucleotide
ctgacagcgtggctgacgtgggactccaacttcacgcgggccatcataggata

SEQ ID NO: 496844 - DNA, 53 bp, Artificial
  Synthetic oligonucleotide
ttttcgttatctgtcgaagcctcgtaccccgcttggcgtgatcctgcggaaaa

SEQ ID NO: 496845 - DNA, 53 bp, Artificial
  Synthetic oligonucleotide
tatcctgctgcgactccgactcatcgagggcaggttggggacgtggtgggcgc

SEQ ID NO: 496846 - DNA, 53 bp, Artificial
  Synthetic oligonucleotide
ggccaagacgatggccgtcagaaggatctgcggaatgctgtgtcgatgacgaa

SEQ ID NO: 496847 - DNA, 53 bp, Artificial
  Synthetic oligonucleotide
acgtcgggttttcgcgaccgttgataaacgaaatcgtgtcggtgttgcgcccc

SEQ ID NO: 496848 - DNA, 53 bp, Artificial
  Synthetic oligonucleotide
gttcactattcgaacattccgacaccgctactcgggcagtttcacgcgctata

SEQ ID NO: 496849 - DNA, 53 bp, Artificial
  Synthetic oligonucleotide
cccctgccgagaagattgacgattcgcacggctgtgatgatagtcgcaccgcc

SEQ ID NO: 496850 - DNA, 53 bp, Artificial
  Synthetic oligonucleotide
gcaatgaattagtagatgaggattatgcggacctcgtcgatggggccattatt

SEQ ID NO: 496851 - DNA, 53 bp, Artificial
  Synthetic oligonucleotide
agtgtgctcacgtgtggcgtcaaaacatgagtgcagcggccgacccgcgtgcg

SEQ ID NO: 496852 - DNA, 52 bp, Artificial
  Synthetic oligonucleotide
ccccaggacttccccgccacgggcaggagggcggtgaaaccaagaccacccc

SEQ ID NO: 496853 - DNA, 52 bp, Artificial
  Synthetic oligonucleotide
ttggaactgatccgctctgcagcatatgagaagggtgttcgggtacgcatga

SEQ ID NO: 496854 - DNA, 52 bp, Artificial
  Synthetic oligonucleotide
ccccaaggagacagggctccgcgattcccggtgttccaaaatgcgtctgagt

SEQ ID NO: 496855 - DNA, 52 bp, Artificial
  Synthetic oligonucleotide
aagaacggcttatctggtagataggcgatctcatctcgactggggcacctca

SEQ ID NO: 496856 - DNA, 52 bp, Artificial
  Synthetic oligonucleotide
cctgcccgcacccgaacgaccaacgattgtcggcgcagccatgcagacatcc

SEQ ID NO: 496857 - DNA, 52 bp, Artificial
  Synthetic oligonucleotide
cgggtgaccggggtaaacggttggtaaacactccctatgaggagcatcacca

SEQ ID NO: 496858 - DNA, 52 bp, Artificial
  Synthetic oligonucleotide
tcggatgctcctccgcgctcatcgccagaaagttccggtacacctccgggga

SEQ ID NO: 496859 - DNA, 52 bp, Artificial
  Synthetic oligonucleotide
gacgacatgagagccgttatatggtcacagacttcggtcggcactccagtgt

SEQ ID NO: 496860 - DNA, 52 bp, Artificial
  Synthetic oligonucleotide
acggttcccattgagatccccgccctcgatgaggcgactcctccggttcccc

SEQ ID NO: 496861 - DNA, 51 bp, Artificial
  Synthetic oligonucleotide
ggtgcctcgtgcgaagaagcggtagttgtgcggttgggagtcacggaatcg

SEQ ID NO: 496862 - DNA, 51 bp, Artificial
  Synthetic oligonucleotide
ggggtctcgtcggacggacggttgtctgcgggagaagtcgatgccataggg

SEQ ID NO: 496863 - DNA, 51 bp, Artificial
  Synthetic oligonucleotide
agcaggacctggctatggcgattgatgacctagaactgcaggctcgttcct

SEQ ID NO: 496864 - DNA, 51 bp, Artificial
  Synthetic oligonucleotide
ttgacggggccgctgaatattctcctctaatctctcgttactcccacgccc

SEQ ID NO: 496865 - DNA, 51 bp, Artificial
  Synthetic oligonucleotide
tcattgcctacgagggtgaacgaaacaccgtggtcccgttctgcataaccc

SEQ ID NO: 496866 - DNA, 50 bp, Artificial
  Synthetic oligonucleotide
ggggtactacgcacatgggagagattaattgtgtgccgccgacatctttt

SEQ ID NO: 496867 - DNA, 50 bp, Artificial
  Synthetic oligonucleotide
tagtgcgcctagaggaacgccaaatatggaacgtgggagtagaacatgcg

SEQ ID NO: 496868 - DNA, 55 bp, Artificial
  Synthetic oligonucleotide
caactaatagaccgattcgtcgttgaaccactgttggaccttattgagtaaggcc

SEQ ID NO: 496869 - DNA, 55 bp, Artificial
  Synthetic oligonucleotide
ctttgaagctggcaaggatttaatcgagatgggcttagacctcccattctccgaa

SEQ ID NO: 496870 - DNA, 55 bp, Artificial
  Synthetic oligonucleotide
gaggcagtggaactaacattagattgggctaagaatagaacagttacgggatcag

SEQ ID NO: 496871 - DNA, 55 bp, Artificial
  Synthetic oligonucleotide
gaggtagatggcgacggagatgacagttgcaaggagaatgaccgtgataccgatc

SEQ ID NO: 496872 - DNA, 55 bp, Artificial
  Synthetic oligonucleotide
gccttggcttcgacaacggtcttaaccttagggatcctcgtcctctctggtaacc

SEQ ID NO: 496873 - DNA, 55 bp, Artificial
  Synthetic oligonucleotide
gcgcgcttcataagcctttcgttcgcgtttcttggctgccattgtcacaagactt

SEQ ID NO: 496874 - DNA, 55 bp, Artificial
  Synthetic oligonucleotide
gctatcaggggcagggattagccaccataggggtgagttatttaatcaatgcctg

SEQ ID NO: 496875 - DNA, 55 bp, Artificial
  Synthetic oligonucleotide
ggaaactagtattacccagaaccaagctctcctgggccccgtaggccatctcccc

SEQ ID NO: 496876 - DNA, 55 bp, Artificial
  Synthetic oligonucleotide
ggatccgcatcggctaatgattgagaagctccgtcacgtccagcgtactcgtctg

SEQ ID NO: 496877 - DNA, 55 bp, Artificial
  Synthetic oligonucleotide
ggccttcgggaaaagcgttggtagggctgagtcaatgactaggctgatcaaaaga

SEQ ID NO: 496878 - DNA, 55 bp, Artificial
  Synthetic oligonucleotide
gtagcaagattctagaggtcggttaaatgtgtaagtgatcgaggagggatggctt

SEQ ID NO: 496879 - DNA, 55 bp, Artificial
  Synthetic oligonucleotide
gtcatgataagcttgataaaagtctggcttgtcttcagcccattgacagcgtcgc

SEQ ID NO: 496880 - DNA, 55 bp, Artificial
  Synthetic oligonucleotide
tgactgggtcaatgctgtcagttattttacctggcttagagtttggatccttagg

SEQ ID NO: 496881 - DNA, 54 bp, Artificial
  Synthetic oligonucleotide
tgagagaggttcgttactcggatcacaggaacatgttctaccgcccctgtcgac

SEQ ID NO: 496882 - DNA, 52 bp, Artificial
  Synthetic oligonucleotide
catggtattatcaagtaagttccaccagttgacctatcctcgtctcttgggg

SEQ ID NO: 496883 - DNA, 50 bp, Artificial
  Synthetic oligonucleotide
tgccctttgtgtccattcaaccttgggcaggactgcctgataccatcgat

SEQ ID NO: 496884 - DNA, 50 bp, Artificial
  Synthetic oligonucleotide
agaggccaaccctaagatgatgacctaccaaaagggcctgcagcatggta

SEQ ID NO: 496885 - DNA, 60 bp, Artificial
  Synthetic oligonucleotide
cagtaaacaaatgtcagtacatgcgtgctaacatccttcgtagagatccccaccagatca

SEQ ID NO: 496886 - DNA, 60 bp, Artificial
  Synthetic oligonucleotide
gctccacgtcctgccaatcgacctttttccactgatcggacactgttttcagcgcagata

SEQ ID NO: 496887 - DNA, 60 bp, Artificial
  Synthetic oligonucleotide
gtgcttatcgaaccccatacgtacctccggccagaaccaaacccgcttccgtggataact

SEQ ID NO: 496888 - DNA, 60 bp, Artificial
  Synthetic oligonucleotide
caaaacctaactccgttcaccccttacctggaatagccccgacttggtttttgggccggc

SEQ ID NO: 496889 - DNA, 60 bp, Artificial
  Synthetic oligonucleotide
cctttggtaacttgatgatccacacaagccatgtagaggaaacgaaccttgagcaaggac

SEQ ID NO: 496890 - DNA, 60 bp, Artificial
  Synthetic oligonucleotide
gcaaccaaacagactggcgagaagaccccacaccagagtgccctgaagggcctcccatcg

SEQ ID NO: 496891 - DNA, 60 bp, Artificial
  Synthetic oligonucleotide
ataccgatcctgctcggaccgggttttcgcgtgcatggcctccgggctcccggtgatcag

SEQ ID NO: 496892 - DNA, 60 bp, Artificial
  Synthetic oligonucleotide
ggcaaacacatcaaatctctcgtttactgagagtggggcacaatgccccaccagtttcgc

SEQ ID NO: 496893 - DNA, 60 bp, Artificial
  Synthetic oligonucleotide
aggttacgctgaacgcctgaagatcgtcaatgatctagcttcgggatcttctgtgcttga

SEQ ID NO: 496894 - DNA, 60 bp, Artificial
  Synthetic oligonucleotide
ctgcaccgcgctataccgcgcacaacaaaaaatccataaacgtgacaacagaggcatgaa

SEQ ID NO: 496895 - DNA, 60 bp, Artificial
  Synthetic oligonucleotide
gataggctcgccctcctgcttggctacgttaaaaatgacgtagttacgctggatagctcg

SEQ ID NO: 496896 - DNA, 60 bp, Artificial
  Synthetic oligonucleotide
agaggttaagcggctcaccatggcactcgatagcgcccagggcgtgataggccgacaagg

SEQ ID NO: 496897 - DNA, 60 bp, Artificial
  Synthetic oligonucleotide
ggatggcggccggaaactggcggggatccggcgccgatgccacgccacgatcaacgaaaa

SEQ ID NO: 496898 - DNA, 60 bp, Artificial
  Synthetic oligonucleotide
cttgctgttctcaatgccccgcgccaggccatgaacctgcccgacccgatcagcaaagtc

SEQ ID NO: 496899 - DNA, 60 bp, Artificial
  Synthetic oligonucleotide
ccgctcgcttattcgtcagtcgggcatgtccaaccttcagtgtgtaccggatcaaccctg

SEQ ID NO: 496900 - DNA, 60 bp, Artificial
  Synthetic oligonucleotide
ccgccgctttcagtttctggacacgcagaatggcaaagttcatcggggggactccggggc

SEQ ID NO: 496901 - DNA, 55 bp, Artificial
  Synthetic oligonucleotide
gctgtcaacatgtcacccaagacccgtgaggcgttcccgcccaaggtccggactt

SEQ ID NO: 496902 - DNA, 55 bp, Artificial
  Synthetic oligonucleotide
gctgtccaaggtttgcgttcactaactgctttccctttgaggcttcggcactggt

SEQ ID NO: 496903 - DNA, 55 bp, Artificial
  Synthetic oligonucleotide
gctgaatgtgaaccgagggagtataccgcctggcatggtcggataataggcgaaa

SEQ ID NO: 496904 - DNA, 55 bp, Artificial
  Synthetic oligonucleotide
gctccatgtcacctccttcaagtttaaagatcgcgccccgttcaacgcagttaca

SEQ ID NO: 496905 - DNA, 55 bp, Artificial
  Synthetic oligonucleotide
gcggcccacatcaaacacaagtcaaacatcggcctcagcgtgagcccggcctatc

SEQ ID NO: 496906 - DNA, 55 bp, Artificial
  Synthetic oligonucleotide
gccgttgcggtggatctctttgaccgcctcatgctccacgtcctgccaatcgacc

SEQ ID NO: 496907 - DNA, 55 bp, Artificial
  Synthetic oligonucleotide
gccgccattccctatctgactgacaagggttccatcactttgatcagcggtattc

SEQ ID NO: 496908 - DNA, 55 bp, Artificial
  Synthetic oligonucleotide
gccgagcgcatgtggtgagctattggaaatcaacgcagaacctgagtaacgccac

SEQ ID NO: 496909 - DNA, 55 bp, Artificial
  Synthetic oligonucleotide
gcccctgccttgtggcgacttcccttttcatatccatgctcctgccatggccgga

SEQ ID NO: 496910 - DNA, 55 bp, Artificial
  Synthetic oligonucleotide
gccatttcagtgcctaacccactgctttcaaaggttagcattgcccagactacca

SEQ ID NO: 496911 - DNA, 55 bp, Artificial
  Synthetic oligonucleotide
gccatgaacacgcccaataatgccaagcacttactcggatttcgtcgtaaaccgc

SEQ ID NO: 496912 - DNA, 55 bp, Artificial
  Synthetic oligonucleotide
gccaagggtccaggtggcactgtacatgaccacgtcgctgcgcttttgctgcagg

SEQ ID NO: 496913 - DNA, 55 bp, Artificial
  Synthetic oligonucleotide
gcagcccgcgctccagtgatgtatctgagctcgtttattactttacaggtggcgc

SEQ ID NO: 496914 - DNA, 55 bp, Artificial
  Synthetic oligonucleotide
gatgagggcttaaccttggaaggcgtcgcccagatctatcatgacgacggtacca

SEQ ID NO: 496915 - DNA, 55 bp, Artificial
  Synthetic oligonucleotide
gagtcgaacatacatcacctcttttatttagtagaacggcaatcacggcaccagc

SEQ ID NO: 496916 - DNA, 55 bp, Artificial
  Synthetic oligonucleotide
gagggttatccgttaacggctacggcagaagcaccgcaggcgtcataaacccatc

SEQ ID NO: 496917 - DNA, 55 bp, Artificial
  Synthetic oligonucleotide
gagcgatctctacgcggctgactccttctcggccgactgggccaaggactatgtc

SEQ ID NO: 496918 - DNA, 55 bp, Artificial
  Synthetic oligonucleotide
gagagcttgggaccttttgcgaaccatctagcaatgacttagagcatgctttcca

SEQ ID NO: 496919 - DNA, 55 bp, Artificial
  Synthetic oligonucleotide
ttttgcgaacgttgttgagtactacttcagccatgacgagctccgctcttgaatc

SEQ ID NO: 496920 - DNA, 55 bp, Artificial
  Synthetic oligonucleotide
ttcgtcagtcgggcatgtccaaccttcagtgtgtaccggatcaaccctgtagggg

SEQ ID NO: 496921 - DNA, 55 bp, Artificial
  Synthetic oligonucleotide
ttcggtggtagcaaaactcaaagacgaggtttggccataagggagccaggcagag

SEQ ID NO: 496922 - DNA, 55 bp, Artificial
  Synthetic oligonucleotide
tgtcgcgctataccggcgatgtgctggctcacaccctgttcagcggtgcccgtca

SEQ ID NO: 496923 - DNA, 55 bp, Artificial
  Synthetic oligonucleotide
tggcgctccaggcgggccgtggaggcctcccggagtatggggtcatagaagcgct

SEQ ID NO: 496924 - DNA, 55 bp, Artificial
  Synthetic oligonucleotide
tcgtcgatgtggttgaggattagttcgtggttaaacatggggatagtctgttggg

SEQ ID NO: 496925 - DNA, 55 bp, Artificial
  Synthetic oligonucleotide
tcatctggttctttagcgcacgtttacccagccagtcattcaggttgcttgagcc

SEQ ID NO: 496926 - DNA, 55 bp, Artificial
  Synthetic oligonucleotide
tattccctggcgtacttctgacagtcatacatgacaattacaccgaacacaggcc

SEQ ID NO: 496927 - DNA, 55 bp, Artificial
  Synthetic oligonucleotide
gtgtggaaaatcctccccgcagatacggggacgcgaaattttatgccctgttgtc

SEQ ID NO: 496928 - DNA, 55 bp, Artificial
  Synthetic oligonucleotide
gtgtcggtatccagcctgttggtctcgtggctgatccttacacctgatgatttgg

SEQ ID NO: 496929 - DNA, 55 bp, Artificial
  Synthetic oligonucleotide
gtgaaatgagaggtttatcgtgataagcgccttatactaacgccgtgatcgcagg

SEQ ID NO: 496930 - DNA, 55 bp, Artificial
  Synthetic oligonucleotide
gtcgggcatgtccaaccttcagtgtgtaccggatcaaccctgtaggggcttcagc

SEQ ID NO: 496931 - DNA, 55 bp, Artificial
  Synthetic oligonucleotide
gtagataacgaccaccacaaagcccgtgagcggatacgtggcggtcaaccaatac

SEQ ID NO: 496932 - DNA, 55 bp, Artificial
  Synthetic oligonucleotide
gtacctccggccagaaccaaacccgcttccgtggataactgctgccgcccacaag

SEQ ID NO: 496933 - DNA, 55 bp, Artificial
  Synthetic oligonucleotide
gtaccgacccgatgcggtacacagaggccagattccagttggctatctgggcgtg

SEQ ID NO: 496934 - DNA, 55 bp, Artificial
  Synthetic oligonucleotide
gtaagtggagaggctgaccctctgcgtgaagacaccttcgtgctttccatctgac

SEQ ID NO: 496935 - DNA, 55 bp, Artificial
  Synthetic oligonucleotide
ggtcgatcgccctttatttagcgagaatgattggctgatcacaaagcgcctctct

SEQ ID NO: 496936 - DNA, 55 bp, Artificial
  Synthetic oligonucleotide
gggtaacgacttgcgccattattcacatcccaacacccaacaaaagggcttctct

SEQ ID NO: 496937 - DNA, 55 bp, Artificial
  Synthetic oligonucleotide
ggctataaccgaacgctttcggagcagaacaacgaactggaggagaaactgcagg

SEQ ID NO: 496938 - DNA, 55 bp, Artificial
  Synthetic oligonucleotide
ggcgggccgagtaccctatttccaggtggttgagctcgatcgctttatagcagac

SEQ ID NO: 496939 - DNA, 55 bp, Artificial
  Synthetic oligonucleotide
ggcctgcaaagtcgcaacattctaagggatttggtcaggaggtgaaacctgcggg

SEQ ID NO: 496940 - DNA, 55 bp, Artificial
  Synthetic oligonucleotide
ggccccgttgataggtttcaggatgatccgccttgcttcccgctatcggcaccgc

SEQ ID NO: 496941 - DNA, 55 bp, Artificial
  Synthetic oligonucleotide
ggatacttctcatcaatgacaatcgggaccaccaaaccctgtctgcccctgtgga

SEQ ID NO: 496942 - DNA, 55 bp, Artificial
  Synthetic oligonucleotide
ggaccccacctgtcgtcaatgaaagggagttgtcatttatgttggttatccgtcc

SEQ ID NO: 496943 - DNA, 55 bp, Artificial
  Synthetic oligonucleotide
ccctgtaggggcttcagctttaccagagatagtgaaaccgtcttgggatggcttg

SEQ ID NO: 496944 - DNA, 55 bp, Artificial
  Synthetic oligonucleotide
ccctccttggcgactattgctggcaacacactgcggtaccacaccatcacgtccc

SEQ ID NO: 496945 - DNA, 55 bp, Artificial
  Synthetic oligonucleotide
cccgagaacgtggtatctatccagctgcatatggacgagagcaccccgcacttcc

SEQ ID NO: 496946 - DNA, 55 bp, Artificial
  Synthetic oligonucleotide
ccccagcgggatgacagtgcccgtctcaagagctataccgccttcttccatccgg

SEQ ID NO: 496947 - DNA, 55 bp, Artificial
  Synthetic oligonucleotide
cccagcgaaataagggatcctcaagcccgataattagtccgcgcttgtttgctcg

SEQ ID NO: 496948 - DNA, 55 bp, Artificial
  Synthetic oligonucleotide
ccacccaaggccattgtcggggtttgtagccagtgtagggtgcgacgtcatcgcc

SEQ ID NO: 496949 - DNA, 55 bp, Artificial
  Synthetic oligonucleotide
ccaataaacaggccatcatggtcaaaacagggctcggcgctcacttccatccagc

SEQ ID NO: 496950 - DNA, 55 bp, Artificial
  Synthetic oligonucleotide
catgtatagcaaccaccaaggagcccgtcatgttagcgatccgcttacccagtga

SEQ ID NO: 496951 - DNA, 55 bp, Artificial
  Synthetic oligonucleotide
catgcgtgctaacatccttcgtagagatccccaccagatcaacccacacgaggcg

SEQ ID NO: 496952 - DNA, 55 bp, Artificial
  Synthetic oligonucleotide
cagtcgacttagcaacgactgccaaagacacaatagccatacacaacagcgcaac

SEQ ID NO: 496953 - DNA, 55 bp, Artificial
  Synthetic oligonucleotide
cagaccccattacagaacttttcggtaagcccgattattcgcacatagcacggga

SEQ ID NO: 496954 - DNA, 55 bp, Artificial
  Synthetic oligonucleotide
caccggataaatgccttacaagggtactggcctggcactcatccaccattgccgc

SEQ ID NO: 496955 - DNA, 55 bp, Artificial
  Synthetic oligonucleotide
caccgcaagcacctttatgccaagctgaatgccggctctcaaggagccttgtttg

SEQ ID NO: 496956 - DNA, 55 bp, Artificial
  Synthetic oligonucleotide
caatttgatagtaccccttcgggagcctaaaacaatcaatttggagatttgaagc

SEQ ID NO: 496957 - DNA, 55 bp, Artificial
  Synthetic oligonucleotide
caatctgccccacattttgcaaaggatccgactccagtgtttggtgacaagtttt

SEQ ID NO: 496958 - DNA, 55 bp, Artificial
  Synthetic oligonucleotide
attaagaggcatatgttatcccgtgaaacgcggtgacatcaggatggtgtcactc

SEQ ID NO: 496959 - DNA, 55 bp, Artificial
  Synthetic oligonucleotide
atcagatggccctctcgctggtctcaaagatagtgggcagcgaagagttactgac

SEQ ID NO: 496960 - DNA, 55 bp, Artificial
  Synthetic oligonucleotide
aggttgcttgtaaatcccgtaaatcagcagtagcgtcgtccctgaccacacctag

SEQ ID NO: 496961 - DNA, 55 bp, Artificial
  Synthetic oligonucleotide
agctcgccttcagcgccattcccctcaatgcggataccttcaatcaacttgaccc

SEQ ID NO: 496962 - DNA, 55 bp, Artificial
  Synthetic oligonucleotide
actggagctaacccacgccctgactctaatcgagcagtggattggccccgccacc

SEQ ID NO: 496963 - DNA, 55 bp, Artificial
  Synthetic oligonucleotide
acatccttgctcatcctgtgacccatggaagcccctattctaaccacctcgggca

SEQ ID NO: 496964 - DNA, 55 bp, Artificial
  Synthetic oligonucleotide
acaaggccgagcaagggagaaatgcaatgtcactatatgatccaaagctggagag

SEQ ID NO: 496965 - DNA, 55 bp, Artificial
  Synthetic oligonucleotide
aaggttgcgaaccatgggaggctatggtgcgcgtcgcacgctgggccgtatgtga

SEQ ID NO: 496966 - DNA, 55 bp, Artificial
  Synthetic oligonucleotide
aagatgacgtagcatggcatcgtattgaggacatgaagagagaaccgcagccatg

SEQ ID NO: 496967 - DNA, 55 bp, Artificial
  Synthetic oligonucleotide
gacttgaatccaatccctccggccacgtgttcacgccaatggtgacggccaaggg

SEQ ID NO: 496968 - DNA, 55 bp, Artificial
  Synthetic oligonucleotide
gacttcggtacccgccttgccaaagcgcaccaagtggaggtggaacccagaaccc

SEQ ID NO: 496969 - DNA, 55 bp, Artificial
  Synthetic oligonucleotide
gactcgtaaactgctctaactgcgacctactaccgtgcaacttccagttggctgc

SEQ ID NO: 496970 - DNA, 55 bp, Artificial
  Synthetic oligonucleotide
ctggaggagaaactgcaggatctccagccaaagcggagccgcggtaaggggatgg

SEQ ID NO: 496971 - DNA, 55 bp, Artificial
  Synthetic oligonucleotide
ctgccacttccccttgaacatggaagagccgaagaaatgaacccgagtcatcacc

SEQ ID NO: 496972 - DNA, 55 bp, Artificial
  Synthetic oligonucleotide
ctcttgatatactcatggaaaacatcatgccttacatagtgagtattgagtgacc

SEQ ID NO: 496973 - DNA, 55 bp, Artificial
  Synthetic oligonucleotide
ctcgaccggaaaccagactgcctagcttaacttcatccgttgcacgcacttcggc

SEQ ID NO: 496974 - DNA, 55 bp, Artificial
  Synthetic oligonucleotide
ctcgacccgccaagattgaggacagtaccggggtttgtcttttctggacagtacg

SEQ ID NO: 496975 - DNA, 55 bp, Artificial
  Synthetic oligonucleotide
ctccatcctgactcaggtgaagatccaggctatcggagtcggtgtcactctgctc

SEQ ID NO: 496976 - DNA, 55 bp, Artificial
  Synthetic oligonucleotide
ctcaacataacggggaccgttccatgggaggcgaggctcaacacagagagtcccc

SEQ ID NO: 496977 - DNA, 55 bp, Artificial
  Synthetic oligonucleotide
ctactgtcggacaaactgcagttcctggggagttccagcaaacgctaggcactgt

SEQ ID NO: 496978 - DNA, 55 bp, Artificial
  Synthetic oligonucleotide
cggggagctgatcttgctcaggtgaagcgggttttgctggttcgctgggacgcca

SEQ ID NO: 496979 - DNA, 55 bp, Artificial
  Synthetic oligonucleotide
cccttaccctgacactgagcccggaacttgccaccctgtttgaacaatatgaagc

SEQ ID NO: 496980 - DNA, 55 bp, Artificial
  Synthetic oligonucleotide
ccgtaaccgccggcaacacatatcatcagtgccatagcgccgattaacggccatg

SEQ ID NO: 496981 - DNA, 55 bp, Artificial
  Synthetic oligonucleotide
cgaatggaggtgatcccgcagttcgattgcgacccttaccgggtggattttcggg

SEQ ID NO: 496982 - DNA, 55 bp, Artificial
  Synthetic oligonucleotide
cgattccacatatgttaatatgtgcgctgtattacgctgcaacgcgtcaagcaac

SEQ ID NO: 496983 - DNA, 55 bp, Artificial
  Synthetic oligonucleotide
cgcatcacctttggtggcagcgagttggctgactatccctttacctgcggtgggg

SEQ ID NO: 496984 - DNA, 55 bp, Artificial
  Synthetic oligonucleotide
cgcctgaagccccatagtaaggcaagtgccaccctctgtctggccaatttcagcc

SEQ ID NO: 496985 - DNA, 55 bp, Artificial
  Synthetic oligonucleotide
cggactatcgcccagtcctgcgacatgagctttaaccttggcgccgtgccgttca

SEQ ID NO: 496986 - DNA, 55 bp, Artificial
  Synthetic oligonucleotide
cggagagcacagatgcagctcgaaattagccgtgaggccctgttacgtcctctgc

SEQ ID NO: 496987 - DNA, 55 bp, Artificial
  Synthetic oligonucleotide
cggctcaaaaggaactgcttgattatggcttgccgctattggtggggatgtcgcg

SEQ ID NO: 496988 - DNA, 55 bp, Artificial
  Synthetic oligonucleotide
cgggcgatagagaggcccataccagaacctttcaatacaccttgccgcactgtac

SEQ ID NO: 496989 - DNA, 54 bp, Artificial
  Synthetic oligonucleotide
tgatgttagcgccgtaggcaaccttgcctgcatccagcctgacgatcaactgct

SEQ ID NO: 496990 - DNA, 53 bp, Artificial
  Synthetic oligonucleotide
ccgcacaacagaattaagggcctatctgggcaagcaggccgtgaggggtgagg

SEQ ID NO: 496991 - DNA, 52 bp, Artificial
  Synthetic oligonucleotide
ggtgcacgggtttctgtaaattccggctatgccttagcccggctacaaggat

SEQ ID NO: 496992 - DNA, 52 bp, Artificial
  Synthetic oligonucleotide
agccatgccgactcgccctggtcggcctttcagtccgtcgatctgatgctgt

SEQ ID NO: 496993 - DNA, 52 bp, Artificial
  Synthetic oligonucleotide
tgttagccacagagttatacacagatcctgcacttttatctgggtttcggta

SEQ ID NO: 496994 - DNA, 51 bp, Artificial
  Synthetic oligonucleotide
ttttcgccccgcagggctcctactttgcgtagcaaagtgtaaggagtacac

SEQ ID NO: 496995 - DNA, 50 bp, Artificial
  Synthetic oligonucleotide
tcagatcgacgtactccgatagccaggctagatcataaggacggggttcc

SEQ ID NO: 496996 - DNA, 50 bp, Artificial
  Synthetic oligonucleotide
gcggcaatacggatttggcctgattgaggttatgctcgcctttattattg

SEQ ID NO: 496997 - DNA, 50 bp, Artificial
  Synthetic oligonucleotide
gactcaaaccaagataccgagaaactgacgcggctccaatacccagtaac

SEQ ID NO: 496998 - DNA, 55 bp, Artificial
  Synthetic oligonucleotide
gaacgcatccggacgaacttattgtcgggctggtttccgtttctgacagggccac

SEQ ID NO: 496999 - DNA, 55 bp, Artificial
  Synthetic oligonucleotide
cttgccttcggtaagttcgctgacacgtttgcacagcgcatcggccgaaccatac

SEQ ID NO: 497000 - DNA, 55 bp, Artificial
  Synthetic oligonucleotide
gtacgctttggttatgaccgcggatgagcttacagctgcattcaattaaacgggc

SEQ ID NO: 497001 - DNA, 55 bp, Artificial
  Synthetic oligonucleotide
ctggaaagatggcaaagcccagaagccacccgcaggaacgatacccagcggtctg

SEQ ID NO: 497002 - DNA, 55 bp, Artificial
  Synthetic oligonucleotide
ctgcgggtagcccaggcgttgcttaaatatcggatcgtcgtaataacgcaccttc

SEQ ID NO: 497003 - DNA, 55 bp, Artificial
  Synthetic oligonucleotide
cgggtcaaaccaaaccgcaacgcggctcgacgttgactacatagaagcccacagc

SEQ ID NO: 497004 - DNA, 55 bp, Artificial
  Synthetic oligonucleotide
cggcgccggaccgcagcatagaacttcgttcaatgcctacgacacaacaacatga

SEQ ID NO: 497005 - DNA, 55 bp, Artificial
  Synthetic oligonucleotide
cggagggaatcatgaccgacatcggtcggatggcacatgtcgtgccagctcgcac

SEQ ID NO: 497006 - DNA, 55 bp, Artificial
  Synthetic oligonucleotide
cgctttcggtactgaacggggaaatacgtgaaccgacttggggcccatttacccg

SEQ ID NO: 497007 - DNA, 55 bp, Artificial
  Synthetic oligonucleotide
cgctatgcgaggccctttattgtagctagtccggcaattacttgcggctacccac

SEQ ID NO: 497008 - DNA, 55 bp, Artificial
  Synthetic oligonucleotide
cgcggcccgtttagcccaggataaagagcaatggtaccctcgtcgtaatgaggct

SEQ ID NO: 497009 - DNA, 55 bp, Artificial
  Synthetic oligonucleotide
cgcgatccgctaaagtcggttccgctgaaatctaccttgtcgaaaacacgacccg

SEQ ID NO: 497010 - DNA, 55 bp, Artificial
  Synthetic oligonucleotide
cgcgacattccggcgcgttcctgctagggttcggattccccaccatacgcaagca

SEQ ID NO: 497011 - DNA, 55 bp, Artificial
  Synthetic oligonucleotide
cgccctgagcccttttatctgcagcaaaagattgtgtcgttctatcatccgccca

SEQ ID NO: 497012 - DNA, 55 bp, Artificial
  Synthetic oligonucleotide
cgcatagcctatacagtatcgcgccagccactaaccacaaaagcaccactaaagg

SEQ ID NO: 497013 - DNA, 55 bp, Artificial
  Synthetic oligonucleotide
cgcagccaaatctcacagggtgaggttccggccgataacgggttacagcaaaggc

SEQ ID NO: 497014 - DNA, 55 bp, Artificial
  Synthetic oligonucleotide
cgagcgacgaaatcttacaacaagctgaataactgtcaggactcgtggggcttga

SEQ ID NO: 497015 - DNA, 55 bp, Artificial
  Synthetic oligonucleotide
ggggacggcttgcatgtaacttacgcaaaattacacgtagaaatgcgtagtttcc

SEQ ID NO: 497016 - DNA, 55 bp, Artificial
  Synthetic oligonucleotide
ggcgccctacacggcaggcttctaaattcatcttgaccctttcctagcgcccggt

SEQ ID NO: 497017 - DNA, 55 bp, Artificial
  Synthetic oligonucleotide
gggtaagcggcccttcacctgtctcggtttcagtcagcagtaccccgcccgatga

SEQ ID NO: 497018 - DNA, 55 bp, Artificial
  Synthetic oligonucleotide
ggtgcggccgcacagtgcgctcatctcgacatcggacaagtaataggcgttgtca

SEQ ID NO: 497019 - DNA, 55 bp, Artificial
  Synthetic oligonucleotide
ggtggttcaatcatagcatttagcaggtcgaatgcgtgtaaccattggccgatgc

SEQ ID NO: 497020 - DNA, 55 bp, Artificial
  Synthetic oligonucleotide
gctcggggattacgatgcgtttagggccattagcgcctaatttcggtgcccagac

SEQ ID NO: 497021 - DNA, 55 bp, Artificial
  Synthetic oligonucleotide
ggttcgtcggatatccatggtgcctactgaagtgaatacgggccagcaaagcccg

SEQ ID NO: 497022 - DNA, 55 bp, Artificial
  Synthetic oligonucleotide
gcgaggcagagggtagggtgacagaggcaaaggtgtgcgatcacatcgagccgca

SEQ ID NO: 497023 - DNA, 55 bp, Artificial
  Synthetic oligonucleotide
gcccgggctattcatcggcgcatgccgctgttctgtgcgagcaacagctactacg

SEQ ID NO: 497024 - DNA, 55 bp, Artificial
  Synthetic oligonucleotide
gcccctgaataagtgccaaccgttgtagctccgccaacaatatcaaggtttgaag

SEQ ID NO: 497025 - DNA, 55 bp, Artificial
  Synthetic oligonucleotide
gcccaagcgcacgttttcaacagtgggcacgccaggacgtggatattccaacgcc

SEQ ID NO: 497026 - DNA, 55 bp, Artificial
  Synthetic oligonucleotide
gccaaagaccgtcaggagcttgataaggccagacttgaacaccataagaaggtgt

SEQ ID NO: 497027 - DNA, 55 bp, Artificial
  Synthetic oligonucleotide
gcatccacctattgcgtagccgcattatccttttcttgcgcggtcgcgtccatag

SEQ ID NO: 497028 - DNA, 55 bp, Artificial
  Synthetic oligonucleotide
gatcgccgcactgcaccaaacgagttcggcatttaccgccttgatttagcggaaa

SEQ ID NO: 497029 - DNA, 55 bp, Artificial
  Synthetic oligonucleotide
gacgtttccggtagcccttccatcgcgtcctttcgtcattggagtatgagccgcc

SEQ ID NO: 497030 - DNA, 55 bp, Artificial
  Synthetic oligonucleotide
gacatctccagaaaggggtgacaaagctcatatccctgcgccagtccgggcaatg

SEQ ID NO: 497031 - DNA, 55 bp, Artificial
  Synthetic oligonucleotide
gacatacagggcgtccacactgactggactctctaggagcttcgcgcaatgctgg

SEQ ID NO: 497032 - DNA, 55 bp, Artificial
  Synthetic oligonucleotide
ttgcaaagctccccgtatgtattccatatatggctggaagtattatcggcgattg

SEQ ID NO: 497033 - DNA, 55 bp, Artificial
  Synthetic oligonucleotide
aaacgtcttgggacaaggtggtggtagacaggctggaagccacggatttatccca

SEQ ID NO: 497034 - DNA, 55 bp, Artificial
  Synthetic oligonucleotide
tgtatgtgaaactggccacccaatactgcccggactgccaagtcccggtcgcacc

SEQ ID NO: 497035 - DNA, 55 bp, Artificial
  Synthetic oligonucleotide
tgggccggctgtgcgatggtgctggatgtctgcccgtgtcgtgctcatcaaagca

SEQ ID NO: 497036 - DNA, 55 bp, Artificial
  Synthetic oligonucleotide
tgcggcccgtttcgtacagctattattaagcaagcgcccctacaatccggcgggc

SEQ ID NO: 497037 - DNA, 55 bp, Artificial
  Synthetic oligonucleotide
accgatacccgcccgagttctgaaaccgggtatagaccctagccccgttctgaga

SEQ ID NO: 497038 - DNA, 55 bp, Artificial
  Synthetic oligonucleotide
tcgtcaggtatgtgctgcacagcatatagataaatttgcgctcgggattcagacg

SEQ ID NO: 497039 - DNA, 55 bp, Artificial
  Synthetic oligonucleotide
acgtaatgatggtacttgtatcgactgtcagcgagcatatatccagccgattccg

SEQ ID NO: 497040 - DNA, 55 bp, Artificial
  Synthetic oligonucleotide
tcgcgtcgccacgaaatttgctgcttaattaaaccgccccttgcccagcatgcag

SEQ ID NO: 497041 - DNA, 55 bp, Artificial
  Synthetic oligonucleotide
aggttttggagacgatccggccgtaaaggtccgagacgctgcccgggcccattgt

SEQ ID NO: 497042 - DNA, 55 bp, Artificial
  Synthetic oligonucleotide
agtcagatccgcccgcttcatggctacggtcggctcagtcttggtcggacgcagt

SEQ ID NO: 497043 - DNA, 55 bp, Artificial
  Synthetic oligonucleotide
agtgttgggctccctggttatcacggaatgcaggacttcccacaggggcgtgacg

SEQ ID NO: 497044 - DNA, 55 bp, Artificial
  Synthetic oligonucleotide
atactattgatttgcttgtgttttacgccattgccacggttcaaccgcgccggcg

SEQ ID NO: 497045 - DNA, 55 bp, Artificial
  Synthetic oligonucleotide
tcgaaggcgctaacccaggtgcccctgcttcgctatctagtcaatggcatcgtgg

SEQ ID NO: 497046 - DNA, 55 bp, Artificial
  Synthetic oligonucleotide
tcattcgatcaagaccatgacttatacctcagcaccccatgcggcattaccgatc

SEQ ID NO: 497047 - DNA, 55 bp, Artificial
  Synthetic oligonucleotide
caaggcgttgtgggtatcgttcagggactggtgcacatcctgtgccgccgtctcc

SEQ ID NO: 497048 - DNA, 55 bp, Artificial
  Synthetic oligonucleotide
cgaataatcgttatcagggcggtaactcccatgaatgcctccgatctctacgcat

SEQ ID NO: 497049 - DNA, 55 bp, Artificial
  Synthetic oligonucleotide
cctagagataatgggcaaatgcccggaggtcacgaatcaatcaaggaggggacag

SEQ ID NO: 497050 - DNA, 55 bp, Artificial
  Synthetic oligonucleotide
ccggaggtcacgaatcaatcaaggaggggacagtagaacaataacgctgagccgg

SEQ ID NO: 497051 - DNA, 55 bp, Artificial
  Synthetic oligonucleotide
ccgcacattcgacggatgccctaagccttctcctacatcgtttggaggtttcggg

SEQ ID NO: 497052 - DNA, 55 bp, Artificial
  Synthetic oligonucleotide
ccctgtcttgatatgaatcaggtcagcggtgatatgttgggatattttcggcagg

SEQ ID NO: 497053 - DNA, 55 bp, Artificial
  Synthetic oligonucleotide
cccgttccgagcgtctcgtctttagttcacaagatcagggttcgtgacatgcttt

SEQ ID NO: 497054 - DNA, 55 bp, Artificial
  Synthetic oligonucleotide
cccgaacatcaacgcgagccttatctttaagcaccttatagggtgcagctggcga

SEQ ID NO: 497055 - DNA, 55 bp, Artificial
  Synthetic oligonucleotide
cccacaggtttcttatgctgcaaacccatgtccttatgcccgacaaataaccggc

SEQ ID NO: 497056 - DNA, 55 bp, Artificial
  Synthetic oligonucleotide
ccatttgcggccggccatacggcttgcgccgtcttctttgcactaaaattccccg

SEQ ID NO: 497057 - DNA, 55 bp, Artificial
  Synthetic oligonucleotide
gtatctatggcgaccggcctaatggggcgaaaggtctacacccggttggggcgtg

SEQ ID NO: 497058 - DNA, 55 bp, Artificial
  Synthetic oligonucleotide
ccagcagccacgttcgtgatcttgttgccacccatgttcagggtgtcacccgcat

SEQ ID NO: 497059 - DNA, 55 bp, Artificial
  Synthetic oligonucleotide
cattgctaatgtaaagatacattcagaaacaggtggttacgatgtcctgccttcc

SEQ ID NO: 497060 - DNA, 55 bp, Artificial
  Synthetic oligonucleotide
catccgggtcaaaatcgttagatgtgttatccaagcaccaggcgtaccgccctcc

SEQ ID NO: 497061 - DNA, 55 bp, Artificial
  Synthetic oligonucleotide
gtcctcaggcggaactactaaaccacaccgcgccttatctaccacgacgttcgct

SEQ ID NO: 497062 - DNA, 55 bp, Artificial
  Synthetic oligonucleotide
cagcaaactcgtcccattccctgcgggagacgtcaatatgcaatggcttacccta

SEQ ID NO: 497063 - DNA, 55 bp, Artificial
  Synthetic oligonucleotide
taaagagatccttagctctaagctacccatggctgccaatgttgataggcttatg

SEQ ID NO: 497064 - DNA, 55 bp, Artificial
  Synthetic oligonucleotide
cacgcagccaaatcatatcgtcccaactaagtctatcacggccagtacgaaaacc

SEQ ID NO: 497065 - DNA, 54 bp, Artificial
  Synthetic oligonucleotide
tttggtccgtgtggcgaaacagtgtgttccggccccgccagcctacgaatgaaa

SEQ ID NO: 497066 - DNA, 54 bp, Artificial
  Synthetic oligonucleotide
ggcaataaccagcgtcctattgtcagcaagtaaatacagccgaccaccatgcag

SEQ ID NO: 497067 - DNA, 54 bp, Artificial
  Synthetic oligonucleotide
gcgcgcgcccaagccccgccactgatgagcatcgttcaatagtgaatgcggatt

SEQ ID NO: 497068 - DNA, 53 bp, Artificial
  Synthetic oligonucleotide
aaaacaattcccctgcaaggcgaattcgggttatgatcgccgcactgcaccaa

SEQ ID NO: 497069 - DNA, 53 bp, Artificial
  Synthetic oligonucleotide
tgtctggctaaatgcacgattcgaacgcatactgccgtccctaccggtgaaaa

SEQ ID NO: 497070 - DNA, 52 bp, Artificial
  Synthetic oligonucleotide
cttgcccttgtcgcaaaaccaggtgggactggccctgatggtgtatatcggt

SEQ ID NO: 497071 - DNA, 52 bp, Artificial
  Synthetic oligonucleotide
ccatgaacattcgacacatgcacaccaagcgtcttgcggcgaccctgtgtac

SEQ ID NO: 497072 - DNA, 52 bp, Artificial
  Synthetic oligonucleotide
cagactgccgggacgctgcccacaaacgcgtagccttgaccacgcacggagc

SEQ ID NO: 497073 - DNA, 52 bp, Artificial
  Synthetic oligonucleotide
accttcaacagagcgtcgggttcatctgactagagacgatcactccaactct

SEQ ID NO: 497074 - DNA, 52 bp, Artificial
  Synthetic oligonucleotide
atcaggcccgagtccacctcacgcagactgacttccgcaatacgggcgaaaa

SEQ ID NO: 497075 - DNA, 52 bp, Artificial
  Synthetic oligonucleotide
agacatggcttgtctggcgtgctcgtacaacttctctatgatgtcgctaggg

SEQ ID NO: 497076 - DNA, 51 bp, Artificial
  Synthetic oligonucleotide
aaaagttactgctgcgtttacccaccgataccagctcgtgctccaaagcca

SEQ ID NO: 497077 - DNA, 51 bp, Artificial
  Synthetic oligonucleotide
aagacgtaccccgtgcgccctgctctacgatcagcacactattggttttac

SEQ ID NO: 497078 - DNA, 51 bp, Artificial
  Synthetic oligonucleotide
aaggtccaggaaatgtactcgaaacgtcgaccggctaatattgccatggct

SEQ ID NO: 497079 - DNA, 51 bp, Artificial
  Synthetic oligonucleotide
tcttcaggactggctcgatcagtcccgtcaatctggcctgagcgttgcctt

SEQ ID NO: 497080 - DNA, 51 bp, Artificial
  Synthetic oligonucleotide
caacggccaccggagagcataagggcaggaacaaggtatggccacactttg

SEQ ID NO: 497081 - DNA, 51 bp, Artificial
  Synthetic oligonucleotide
gtggtgttttccatcccggagtcctggttgcctgatgtggccggcccgctc

SEQ ID NO: 497082 - DNA, 51 bp, Artificial
  Synthetic oligonucleotide
catatgacgcatattgaacatgtctcactcctcattgtggttagcgggcgg

SEQ ID NO: 497083 - DNA, 51 bp, Artificial
  Synthetic oligonucleotide
ggcccgcagcattcacgtcaaggcagtctacaacgaaggggaagaagtttt

SEQ ID NO: 497084 - DNA, 50 bp, Artificial
  Synthetic oligonucleotide
tcagttcgcgcgaagcttcaccccggttgtattttcgtacccttctgtcg

SEQ ID NO: 497085 - DNA, 50 bp, Artificial
  Synthetic oligonucleotide
aagcaaacagataactgttggattcggcaatgcataatgtcgcggcgtcc

SEQ ID NO: 497086 - DNA, 50 bp, Artificial
  Synthetic oligonucleotide
gtagcgttacccagtgactattgcgtagacatcgagccatcttgagcccc

SEQ ID NO: 497087 - DNA, 50 bp, Artificial
  Synthetic oligonucleotide
ggaataaaatcactgtccgttccctgattcgacggtatccaaacgccgtc

SEQ ID NO: 497088 - DNA, 55 bp, Artificial
  Synthetic oligonucleotide
cgccaccgtctatatggtccgtcatctggtgggagtcgcggtatgaataagctga

SEQ ID NO: 497089 - DNA, 55 bp, Artificial
  Synthetic oligonucleotide
cgtataacggatgtggagcgcacgttcatgccaacaagcgtgcctgactgtctcg

SEQ ID NO: 497090 - DNA, 55 bp, Artificial
  Synthetic oligonucleotide
cttcgttatcattgacgcacgaagcaggaccagaccctatctccgcagaaacacg

SEQ ID NO: 497091 - DNA, 55 bp, Artificial
  Synthetic oligonucleotide
gaccggctgtgctgtggatagttacgcgctcagaggtatagaatggcccgttcaa

SEQ ID NO: 497092 - DNA, 55 bp, Artificial
  Synthetic oligonucleotide
gacgtgatggtctgacatgagatgtcctccctttcgtcctcagtcccctcaggtg

SEQ ID NO: 497093 - DNA, 55 bp, Artificial
  Synthetic oligonucleotide
gattccgtgttgttcttttagcgtccgacgccttctatctctgcacgatggtttt

SEQ ID NO: 497094 - DNA, 55 bp, Artificial
  Synthetic oligonucleotide
gcccaaccgtcgattccgttccgccccaacctggatattctcgaacggccggaac

SEQ ID NO: 497095 - DNA, 55 bp, Artificial
  Synthetic oligonucleotide
gccgtgtggtcagcctggatggtggctacgagcattttcgcactgcctacccgga

SEQ ID NO: 497096 - DNA, 55 bp, Artificial
  Synthetic oligonucleotide
gcgcgaccgggtgaggcctttggaaatacgacgcctacgttgtccgataatcccg

SEQ ID NO: 497097 - DNA, 55 bp, Artificial
  Synthetic oligonucleotide
gcgcgctagcatgaatatgcaggtgagtggctacgaacggcggtaaccaccgatc

SEQ ID NO: 497098 - DNA, 55 bp, Artificial
  Synthetic oligonucleotide
gcggcctctccactaaacacggatccctcaatagtccgacatcgcaccatggcgg

SEQ ID NO: 497099 - DNA, 55 bp, Artificial
  Synthetic oligonucleotide
ggaaccccggcctcctattggagtcgcgcatgtcgttctggaaactgaccgtatg

SEQ ID NO: 497100 - DNA, 55 bp, Artificial
  Synthetic oligonucleotide
ggcgtcacctccagccgcaattctgcattaacaaagtcgatagacgttgcacctg

SEQ ID NO: 497101 - DNA, 55 bp, Artificial
  Synthetic oligonucleotide
ggggcggtgacgcactggtataaggtaaacccgttgtggcaaatgatgatccggc

SEQ ID NO: 497102 - DNA, 55 bp, Artificial
  Synthetic oligonucleotide
gtccttgttccttgaagaccggaagcaaacgatgacaacaaagacctacgtggct

SEQ ID NO: 497103 - DNA, 55 bp, Artificial
  Synthetic oligonucleotide
gtgataagccagtatcacggggtctccctggcggaactgaatattcctgccctgc

SEQ ID NO: 497104 - DNA, 55 bp, Artificial
  Synthetic oligonucleotide
gttgaggccttccagggtgtaactgccgaaattcacatcactgccaatgctgtcg

SEQ ID NO: 497105 - DNA, 55 bp, Artificial
  Synthetic oligonucleotide
tcgacgtcaccgggacagaccgttacggcaacacggcacaacgtgcctggcgcta

SEQ ID NO: 497106 - DNA, 55 bp, Artificial
  Synthetic oligonucleotide
tgccttggcagcgaatacagtgtgaattcatacctccaagaccaatagacgcccc

SEQ ID NO: 497107 - DNA, 55 bp, Artificial
  Synthetic oligonucleotide
tttgtgagttgctccagaaaggagcgctaaaagacgatgtgcctgtcgtattctg

SEQ ID NO: 497108 - DNA, 55 bp, Artificial
  Synthetic oligonucleotide
accgttgatggcgacctcgggactacggtctaccactttgatgggctaggctccg

SEQ ID NO: 497109 - DNA, 55 bp, Artificial
  Synthetic oligonucleotide
agacagacaaacgtgtgggtccctgaactgtgttcaggtttagtcgttaaggagg

SEQ ID NO: 497110 - DNA, 55 bp, Artificial
  Synthetic oligonucleotide
agagtggcgatacccgccgtgatttccaggatgtcctgcggactgagccgtggtg

SEQ ID NO: 497111 - DNA, 55 bp, Artificial
  Synthetic oligonucleotide
agctggcgcatttaagagtagaggcaccaacggggtctgggcgattagcccaagg

SEQ ID NO: 497112 - DNA, 55 bp, Artificial
  Synthetic oligonucleotide
acagctcacgcgtcagtttgccgctcttattagccctgaccttgaaatccggccc

SEQ ID NO: 497113 - DNA, 55 bp, Artificial
  Synthetic oligonucleotide
caacgccgttggaaacatgacacgaattcttgcactggaaaccgcgggagaaacc

SEQ ID NO: 497114 - DNA, 55 bp, Artificial
  Synthetic oligonucleotide
cagattccagtttattccgagagcttgtgtgaggttataagcctggaagctcttt

SEQ ID NO: 497115 - DNA, 55 bp, Artificial
  Synthetic oligonucleotide
catcgttcctgttactacgaacaccgtaagcggagccgtcgtatcgatgcggagc

SEQ ID NO: 497116 - DNA, 55 bp, Artificial
  Synthetic oligonucleotide
cccagtaactcattgcatctgacgttgacgtgtagggcctgtcgcggttccgctt

SEQ ID NO: 497117 - DNA, 55 bp, Artificial
  Synthetic oligonucleotide
ccccatacttatacgtgcccctgccaacagggttacggacctagttatccacaga

SEQ ID NO: 497118 - DNA, 55 bp, Artificial
  Synthetic oligonucleotide
cccctatggcgaaattgtcgtttcattggggttcgttctggttttggcggtattc

SEQ ID NO: 497119 - DNA, 55 bp, Artificial
  Synthetic oligonucleotide
cccggcatagtcccttggtcgtagacccaattggctagaaagtttgcgcccacgg

SEQ ID NO: 497120 - DNA, 55 bp, Artificial
  Synthetic oligonucleotide
cccgttatttcaacagcgccctcagcagccatccttaccgccactggtaagcggg

SEQ ID NO: 497121 - DNA, 55 bp, Artificial
  Synthetic oligonucleotide
ccctgcgtagctatgcgagccaggccgggaccatcaacatcacaccgatcactga

SEQ ID NO: 497122 - DNA, 55 bp, Artificial
  Synthetic oligonucleotide
cctggtcaatcctgtaatggttgcgttataagttcccgaaagcgtggttcggccg

SEQ ID NO: 497123 - DNA, 54 bp, Artificial
  Synthetic oligonucleotide
ccacgtagagagtgccgttccggtaagccactccagaaggcagggttagcgaat

SEQ ID NO: 497124 - DNA, 54 bp, Artificial
  Synthetic oligonucleotide
tgatatgttcccagtatgatgagcccggtacgaggaggtccacaatcggtctga

SEQ ID NO: 497125 - DNA, 53 bp, Artificial
  Synthetic oligonucleotide
tttgatgtcagggcttggccgcaacgaggccatgagtctggcgcgtacctttt

SEQ ID NO: 497126 - DNA, 53 bp, Artificial
  Synthetic oligonucleotide
gaccgctagtctcggaggtccgccagaaaggtgtgcaaggaacggttaaccgg

SEQ ID NO: 497127 - DNA, 52 bp, Artificial
  Synthetic oligonucleotide
aaactgtgacctccgattcagcctgacacttctctcgtcttgctctgatccc

SEQ ID NO: 497128 - DNA, 52 bp, Artificial
  Synthetic oligonucleotide
agtctgaactgatgcgaccggtcaatccctccatctatacaccggaggagtt

SEQ ID NO: 497129 - DNA, 52 bp, Artificial
  Synthetic oligonucleotide
cacggtgatttctggcttattgacgaaagcggcaaccataccagaaagcgta

SEQ ID NO: 497130 - DNA, 52 bp, Artificial
  Synthetic oligonucleotide
gattccagttccggtattggatcagataggtgctgtggccaatccaggtgaa

SEQ ID NO: 497131 - DNA, 51 bp, Artificial
  Synthetic oligonucleotide
agatatattccttgtagccctcctgcgagcctccgccgtactgatatgtag

SEQ ID NO: 497132 - DNA, 55 bp, Artificial
  Synthetic oligonucleotide
ttccaaacctgatacgatagccgactacgcttaaagctgtctacaaacctttgcg

SEQ ID NO: 497133 - DNA, 55 bp, Artificial
  Synthetic oligonucleotide
gtcacgccaagacaatcaaggatcatgtggcaattcgtagagcttagcgctctgc

SEQ ID NO: 497134 - DNA, 55 bp, Artificial
  Synthetic oligonucleotide
ggtcctggctgcccagtccttggctgtacacgctcatgttcatgaaaggctcgcc

SEQ ID NO: 497135 - DNA, 55 bp, Artificial
  Synthetic oligonucleotide
gccgcttgcaagtcgtggctgttaatttcgacgtttgccgagtcttttacaatga

SEQ ID NO: 497136 - DNA, 55 bp, Artificial
  Synthetic oligonucleotide
gaggcttgagtgcggctcaggttgtaacgcggctcgtggaagtataccggaggtc

SEQ ID NO: 497137 - DNA, 55 bp, Artificial
  Synthetic oligonucleotide
gacgcttaaggtgtccgcaccacgattcgtgacgtacaagcatgtctcccttgca

SEQ ID NO: 497138 - DNA, 55 bp, Artificial
  Synthetic oligonucleotide
gacgagaggctacttatagcaaaacggttgattgcagaaaggtgtctttacggcg

SEQ ID NO: 497139 - DNA, 55 bp, Artificial
  Synthetic oligonucleotide
gaccggaacgtttgacacggatttgattacgcttgcagtctatgtcgtggctctc

SEQ ID NO: 497140 - DNA, 55 bp, Artificial
  Synthetic oligonucleotide
cgtgccaggacacttaggtggttaacccatgcgcgagaacagtcccgtcttgacg

SEQ ID NO: 497141 - DNA, 55 bp, Artificial
  Synthetic oligonucleotide
ccggctcttccgagtcgcttctggtataataagctgtgataacgtctgaacgagc

SEQ ID NO: 497142 - DNA, 55 bp, Artificial
  Synthetic oligonucleotide
ccgaaagacgtgaaaagcgtgatcgcaatcggtaaatataccgtgcaggtaacgc

SEQ ID NO: 497143 - DNA, 55 bp, Artificial
  Synthetic oligonucleotide
ccctgatggcgcgatggagaggtcttttgacgtggctgcgtgcggaggatgggtt

SEQ ID NO: 497144 - DNA, 55 bp, Artificial
  Synthetic oligonucleotide
caagcgctcgctggctttgccgtgaaatatcgattgggatcgactccgagtgggt

SEQ ID NO: 497145 - DNA, 55 bp, Artificial
  Synthetic oligonucleotide
aacgcccactcttggcaggacttgtgttgtatttgttggcctcgctcttatgtgg

SEQ ID NO: 497146 - DNA, 54 bp, Artificial
  Synthetic oligonucleotide
tatgctggacatcaaagggcccaagatccggacgggtaaaatccaaggcggcca

SEQ ID NO: 497147 - DNA, 52 bp, Artificial
  Synthetic oligonucleotide
cttgagcgcaacgtgttaattgtagcgcaaggtcaggatcacccgcggctgt

SEQ ID NO: 497148 - DNA, 51 bp, Artificial
  Synthetic oligonucleotide
cttcaaccgggttcgtgaactgattccacaagtttcagatgagattgaacg

SEQ ID NO: 497149 - DNA, 55 bp, Artificial
  Synthetic oligonucleotide
gcatagctttcatccgaagaagaagcgtgtacctcagccgggacgctacgcctga

SEQ ID NO: 497150 - DNA, 55 bp, Artificial
  Synthetic oligonucleotide
gcattatgtggtattgaacctggtaggctcgtcgctgtttctgatcagcgtgggc

SEQ ID NO: 497151 - DNA, 55 bp, Artificial
  Synthetic oligonucleotide
gccactaacccttcctccctaactgacgcaggaggcaagtatatcattataaggg

SEQ ID NO: 497152 - DNA, 55 bp, Artificial
  Synthetic oligonucleotide
gccagggcacttttgaacggtccaacaccgactagcaatggttaaggcaacgtat

SEQ ID NO: 497153 - DNA, 55 bp, Artificial
  Synthetic oligonucleotide
gcccaggacttcccgcatactgcggcacatttaaagagtcgactggagaacgggc

SEQ ID NO: 497154 - DNA, 55 bp, Artificial
  Synthetic oligonucleotide
gccccttcgcttgtggaagggagatgtcatggtatgtccaaaggggctggtactg

SEQ ID NO: 497155 - DNA, 55 bp, Artificial
  Synthetic oligonucleotide
gcccctttcataaagcgacctatgtgcttatgactatcctcatcagtggaaatcg

SEQ ID NO: 497156 - DNA, 55 bp, Artificial
  Synthetic oligonucleotide
gccgacgcctcaatacgtatcgtagaaggtgacttaggtggcgcactcggcggat

SEQ ID NO: 497157 - DNA, 55 bp, Artificial
  Synthetic oligonucleotide
gccgacgtaccgagctcaacctgggaatcggcaacactgacgtgcaaaccctccc

SEQ ID NO: 497158 - DNA, 55 bp, Artificial
  Synthetic oligonucleotide
gccggagccaatttattagagcagcactccttacacgaattttccgaaggggtgg

SEQ ID NO: 497159 - DNA, 55 bp, Artificial
  Synthetic oligonucleotide
gcgagacaatccagtacgtctagtaatttctcgcagggaaaacccatcacgaaaa

SEQ ID NO: 497160 - DNA, 55 bp, Artificial
  Synthetic oligonucleotide
gcgagcgtgtcgctacagtgtttagagatggtgagacaattgagcttcttccgcg

SEQ ID NO: 497161 - DNA, 55 bp, Artificial
  Synthetic oligonucleotide
gcgaggaagcaatatcagaggcagcagcgactggggtggccccgtggcattactc

SEQ ID NO: 497162 - DNA, 55 bp, Artificial
  Synthetic oligonucleotide
gcgctatggcgaaaaggtttgctaccgacgtaggcttcaatgtgtgtaacgatgc

SEQ ID NO: 497163 - DNA, 55 bp, Artificial
  Synthetic oligonucleotide
gcgctttcgtgtttatgcgtgcttgtagccaaagttcagctggcaaccacacgct

SEQ ID NO: 497164 - DNA, 55 bp, Artificial
  Synthetic oligonucleotide
gcggcattctagtcaaataccggtgcaagttcaatggttatggtttggtcaggca

SEQ ID NO: 497165 - DNA, 55 bp, Artificial
  Synthetic oligonucleotide
gcggttaaattctgtttagtctcgtctggcaaagcgcgccacgttgtaccacgtt

SEQ ID NO: 497166 - DNA, 55 bp, Artificial
  Synthetic oligonucleotide
gcgtacccagagatcgacattggggaagaggtctgaattgatctgctggtagggg

SEQ ID NO: 497167 - DNA, 55 bp, Artificial
  Synthetic oligonucleotide
gcgtatagggtgtaaaccagagacggttgtgacgtaccgggtgcagtacgggcag

SEQ ID NO: 497168 - DNA, 55 bp, Artificial
  Synthetic oligonucleotide
gcgtcgaatcaaactcacctaggctataacggtattttacgcttacgtgatgatc

SEQ ID NO: 497169 - DNA, 55 bp, Artificial
  Synthetic oligonucleotide
gcgtctctggcataatagcgcgcctgaattgacccgattgttcagttttccgtca

SEQ ID NO: 497170 - DNA, 55 bp, Artificial
  Synthetic oligonucleotide
gctacctgctgctgagttaatccagcctcttcacgcatacttagcaacgtgtcga

SEQ ID NO: 497171 - DNA, 55 bp, Artificial
  Synthetic oligonucleotide
gctagggttgggtaaatctctccgtgcaaaagcatctagcgaattgcctatgagg

SEQ ID NO: 497172 - DNA, 55 bp, Artificial
  Synthetic oligonucleotide
ctttattgaatgcggccatgagagcttgcgccccgcctgccatgtttgacgcccc

SEQ ID NO: 497173 - DNA, 55 bp, Artificial
  Synthetic oligonucleotide
ctttccggccattgccggtacctcacagttatcgccttatttagccatcggcgtg

SEQ ID NO: 497174 - DNA, 55 bp, Artificial
  Synthetic oligonucleotide
ctttggcaatgtataaagagcgtcggtgtaccaacgaggccttttctcgctcggt

SEQ ID NO: 497175 - DNA, 55 bp, Artificial
  Synthetic oligonucleotide
gaccatcagctctagaacacagatctgcccggatttcgacaaagatacgcgaaac

SEQ ID NO: 497176 - DNA, 55 bp, Artificial
  Synthetic oligonucleotide
gacggattaacaagtgatgtcaaatggccgactaaacgttcagaacaggctagcc

SEQ ID NO: 497177 - DNA, 55 bp, Artificial
  Synthetic oligonucleotide
gacggcagggtaacctgactgcgtttcgccatctcgattaagctgtccagacgca

SEQ ID NO: 497178 - DNA, 55 bp, Artificial
  Synthetic oligonucleotide
gagaccaaactgagtgggtagagttgatcaatgcaggagccaatgaactggtggg

SEQ ID NO: 497179 - DNA, 55 bp, Artificial
  Synthetic oligonucleotide
gagccactggcttttgtccgccgtggcgaattcttgccatgttgcagtattccca

SEQ ID NO: 497180 - DNA, 55 bp, Artificial
  Synthetic oligonucleotide
gagcgcgcacaaaacccggtctattcccatgaagaggtctaccagggtccatttg

SEQ ID NO: 497181 - DNA, 55 bp, Artificial
  Synthetic oligonucleotide
gaggccgactgcaattttggttggactgatagcaatctgcttggtgtcaaccttc

SEQ ID NO: 497182 - DNA, 55 bp, Artificial
  Synthetic oligonucleotide
gagggattagccataaattcagcccgacatttaaaagcgcacccataccatggct

SEQ ID NO: 497183 - DNA, 55 bp, Artificial
  Synthetic oligonucleotide
gagtgtgccagtaacggtcaggtttactgccaacgtacccattaacgcttgcgcg

SEQ ID NO: 497184 - DNA, 55 bp, Artificial
  Synthetic oligonucleotide
gatacgggatcacataaacgttctggccaaccgataaaccacaattttcaccggt

SEQ ID NO: 497185 - DNA, 55 bp, Artificial
  Synthetic oligonucleotide
gatcctgttggtgtggcggcccgctcggtgaaagagtgtttgctgatccaattac

SEQ ID NO: 497186 - DNA, 55 bp, Artificial
  Synthetic oligonucleotide
gatcgtgttttcacgtgacatggtctatgacgtttacgaagtctgtggcagggcc

SEQ ID NO: 497187 - DNA, 55 bp, Artificial
  Synthetic oligonucleotide
gattctctctcaattcagacgggccagaagcacacgccctgaagatttaccccgg

SEQ ID NO: 497188 - DNA, 55 bp, Artificial
  Synthetic oligonucleotide
gcaagcgcatatacgcttagggctgtctcagaaagaacatgtatcgctttcagtt

SEQ ID NO: 497189 - DNA, 55 bp, Artificial
  Synthetic oligonucleotide
gcaaggtctgttgttcggtttgggctaataactgccgcaaataactctggctttg

SEQ ID NO: 497190 - DNA, 55 bp, Artificial
  Synthetic oligonucleotide
gcaatctgccggcaaacttaaagccaaactcagagctaaagcactgggtaaggcc

SEQ ID NO: 497191 - DNA, 55 bp, Artificial
  Synthetic oligonucleotide
gcacaggcggtttcattttccgtatacaccgacaatgttagcgagggccgttgag

SEQ ID NO: 497192 - DNA, 55 bp, Artificial
  Synthetic oligonucleotide
gcaccacaagcagctattttcactgagtcgaaaggtcagcatgactacgcccttg

SEQ ID NO: 497193 - DNA, 55 bp, Artificial
  Synthetic oligonucleotide
gcagattctgcgtcctggaccattgttagagcgtcttggtccacattaccgctat

SEQ ID NO: 497194 - DNA, 55 bp, Artificial
  Synthetic oligonucleotide
gcagccatagtagacggtgaataaccactttgttcttcccatcgctcttgttgag

SEQ ID NO: 497195 - DNA, 55 bp, Artificial
  Synthetic oligonucleotide
gcagggtcacgtactacctctgacaaagtatccatgctagttatcgaagacaacg

SEQ ID NO: 497196 - DNA, 55 bp, Artificial
  Synthetic oligonucleotide
gttgcactcctaacccctaacttgatagcattgcgccctctgaaagctgagggcg

SEQ ID NO: 497197 - DNA, 55 bp, Artificial
  Synthetic oligonucleotide
gttgctattgttaggtgctaactagatccacctttaccgaaaggcttatccagag

SEQ ID NO: 497198 - DNA, 55 bp, Artificial
  Synthetic oligonucleotide
gtttagtatcagcggtatgcattgcgcgtcctgtgtcagcaaaattgagcaggcc

SEQ ID NO: 497199 - DNA, 55 bp, Artificial
  Synthetic oligonucleotide
gttttgggaatctttacgggcaggtcagtttattcacggccagtttccgcgactg

SEQ ID NO: 497200 - DNA, 55 bp, Artificial
  Synthetic oligonucleotide
taacaactcctgagccactatgatcaggatcaggtcctgacactctctgcccagc

SEQ ID NO: 497201 - DNA, 55 bp, Artificial
  Synthetic oligonucleotide
taacgctcccagcgataacagggcacataaaaggtgtggttcagaaaactgaggg

SEQ ID NO: 497202 - DNA, 55 bp, Artificial
  Synthetic oligonucleotide
taccagcgaatatccgtcgtggttctattcaatcgatcaaggtgcgaccacgcta

SEQ ID NO: 497203 - DNA, 55 bp, Artificial
  Synthetic oligonucleotide
tacctgcgttatatatccagttgccatggtcaaccacacagcgataactatccgg

SEQ ID NO: 497204 - DNA, 55 bp, Artificial
  Synthetic oligonucleotide
tatcaacgacctcggggttggttagatcatgtcagggatcctggatactgtaaac

SEQ ID NO: 497205 - DNA, 55 bp, Artificial
  Synthetic oligonucleotide
tcatccgacggggcttgttcaaacgataacatgtctgaataatgggcttgacccg

SEQ ID NO: 497206 - DNA, 55 bp, Artificial
  Synthetic oligonucleotide
tcgctttgaacccgcatcgagtaacggcggtgtgtgctggaaccccttggatgaa

SEQ ID NO: 497207 - DNA, 55 bp, Artificial
  Synthetic oligonucleotide
tcgcttttgcgcggagaaaaccgtcgagaatcgaccaatagcctgcccaaacgct

SEQ ID NO: 497208 - DNA, 55 bp, Artificial
  Synthetic oligonucleotide
tcggataaacgcagggcgtgaacgcaaggcctaaaccaagtagggtgagtaagcc

SEQ ID NO: 497209 - DNA, 55 bp, Artificial
  Synthetic oligonucleotide
tctatagctcctcgcggagttctctgcgccgaaggcccctcgaatcttcaagggg

SEQ ID NO: 497210 - DNA, 55 bp, Artificial
  Synthetic oligonucleotide
tgagtcacttggcactagcaaggatggcaaacccgtctatctaaaagacttatgg

SEQ ID NO: 497211 - DNA, 55 bp, Artificial
  Synthetic oligonucleotide
tgctggtagtgcctggatgcgcgtgggcatttggggtttggtggtccctgccact

SEQ ID NO: 497212 - DNA, 55 bp, Artificial
  Synthetic oligonucleotide
tgctgtaatgttagtcgtacctctgggcatactaggctcggtaacggcagcattt

SEQ ID NO: 497213 - DNA, 55 bp, Artificial
  Synthetic oligonucleotide
tgtcacactttaaggggcgcaaatggtactctctttgttacaaaaggtcaaaagt

SEQ ID NO: 497214 - DNA, 55 bp, Artificial
  Synthetic oligonucleotide
tgtgccaattagtggcttggttgccggtgaaaacatcctcacgtttgagcatgag

SEQ ID NO: 497215 - DNA, 55 bp, Artificial
  Synthetic oligonucleotide
tgttgcactcattgtcactggcggtatctcacctaacgcttgtggtgtgttagct

SEQ ID NO: 497216 - DNA, 55 bp, Artificial
  Synthetic oligonucleotide
ttaccgaaggaagcagcatgactctagctaacgtacgagattgagtcgtcgccat

SEQ ID NO: 497217 - DNA, 55 bp, Artificial
  Synthetic oligonucleotide
ttcacgtgacggtgtatgtgcagcagaccagttgttagctgatcatttacgccgt

SEQ ID NO: 497218 - DNA, 55 bp, Artificial
  Synthetic oligonucleotide
ttcgagtgtgccgcctactccgcgcagaaccgtcgaaagcaaaccggtgacccca

SEQ ID NO: 497219 - DNA, 55 bp, Artificial
  Synthetic oligonucleotide
tttacagcaggcagacggtagcttcagtaccgagccctggcaaccgggttggccg

SEQ ID NO: 497220 - DNA, 55 bp, Artificial
  Synthetic oligonucleotide
gctgcagcagggtccggaaaatgggcagttgagcctgagtggtactgcgttcagc

SEQ ID NO: 497221 - DNA, 55 bp, Artificial
  Synthetic oligonucleotide
gctgccagtgctgaaatacgaattgtcagctgatgttaatcgttgagccgttaag

SEQ ID NO: 497222 - DNA, 55 bp, Artificial
  Synthetic oligonucleotide
gctggtttaaataccgcccctctggcgtcccgttgtcggctataaagtcagccgc

SEQ ID NO: 497223 - DNA, 55 bp, Artificial
  Synthetic oligonucleotide
gctgtggtagcgggagtgttttagccgtcatcaaccaagcctcgggcgagtaaag

SEQ ID NO: 497224 - DNA, 55 bp, Artificial
  Synthetic oligonucleotide
gcttaaggccgccatgcgtttgtcttggggcatatcgccctgtaagtaggccaca

SEQ ID NO: 497225 - DNA, 55 bp, Artificial
  Synthetic oligonucleotide
ggaccggcgaacttacagtacgcttacgatgccaaaggctgtcgcggcaacctag

SEQ ID NO: 497226 - DNA, 55 bp, Artificial
  Synthetic oligonucleotide
ggatcgccgctgtgttgaacggtttggctaccaaacagctctagcattcgaccgt

SEQ ID NO: 497227 - DNA, 55 bp, Artificial
  Synthetic oligonucleotide
ggcatacagttcccgcgtaccacagactacgtgtctgttgctgcaggcgactacc

SEQ ID NO: 497228 - DNA, 55 bp, Artificial
  Synthetic oligonucleotide
ggcccgtaagccgggctgagaaaccggagcctgtatgtctttaaccacgcaccgc

SEQ ID NO: 497229 - DNA, 55 bp, Artificial
  Synthetic oligonucleotide
ggccttttactgaaggctcgtgcaggttagaatctccggtcacttcaggcaccgg

SEQ ID NO: 497230 - DNA, 55 bp, Artificial
  Synthetic oligonucleotide
ggcgtttgaaaggcgcgcattctataccaagttatgcaaggcttcacgttacggt

SEQ ID NO: 497231 - DNA, 55 bp, Artificial
  Synthetic oligonucleotide
ggggatactcgctcgggattgcctgccgtattgaccccagtcttcaggcaatcgg

SEQ ID NO: 497232 - DNA, 55 bp, Artificial
  Synthetic oligonucleotide
gggtaacctgtaaccgatagggcaccgccttacgcttggtcggtagctccagcac

SEQ ID NO: 497233 - DNA, 55 bp, Artificial
  Synthetic oligonucleotide
gggtaggccagcgcttggtagtctgcgaacgccaactgtacgaactgcgaaccac

SEQ ID NO: 497234 - DNA, 55 bp, Artificial
  Synthetic oligonucleotide
ggtaggacgggcacttcgagagttagtggctgagggtaagctactgaaaattggt

SEQ ID NO: 497235 - DNA, 55 bp, Artificial
  Synthetic oligonucleotide
ggtagtggtcgcgtcacgctacggtaacccaccacggccagctacctaacgagtg

SEQ ID NO: 497236 - DNA, 55 bp, Artificial
  Synthetic oligonucleotide
ggtcgggaatatttggttagttatgcaccttgcgtactcaggttttccacagggg

SEQ ID NO: 497237 - DNA, 55 bp, Artificial
  Synthetic oligonucleotide
ggtgccggatcggcacgccttgttgcgtaagttccgcagtccaggttgcagcagt

SEQ ID NO: 497238 - DNA, 55 bp, Artificial
  Synthetic oligonucleotide
ggtgtgctactgcctgtttattacggaaattgacccgcacaagatcggtttgctg

SEQ ID NO: 497239 - DNA, 55 bp, Artificial
  Synthetic oligonucleotide
gtaaaacgggcaagtaagccattatcggtataagccattgtgtaactatcaccgg

SEQ ID NO: 497240 - DNA, 55 bp, Artificial
  Synthetic oligonucleotide
gtagctgccgaggtccgcaacggtgaggaatggtcagccctgtatcccatggaag

SEQ ID NO: 497241 - DNA, 55 bp, Artificial
  Synthetic oligonucleotide
gtattaagttatgagagcggtggtgatcaactaacccgagaatcacgtcgtcgtt

SEQ ID NO: 497242 - DNA, 55 bp, Artificial
  Synthetic oligonucleotide
gtattggtcgcaatggttgttggaattagtacacaagcttgtacatcaaagtcgc

SEQ ID NO: 497243 - DNA, 55 bp, Artificial
  Synthetic oligonucleotide
gtcgcctttcacgaaggctgttatacctggggcaagagctacagataccgaaggg

SEQ ID NO: 497244 - DNA, 55 bp, Artificial
  Synthetic oligonucleotide
caaatagatgacgaagtaatcgttaaaacccctgaaggcagctgtcgttggtacg

SEQ ID NO: 497245 - DNA, 55 bp, Artificial
  Synthetic oligonucleotide
caattaagtgtgcagaatattgttcgcgaagtgggctaggcagggccaccaacgc

SEQ ID NO: 497246 - DNA, 55 bp, Artificial
  Synthetic oligonucleotide
caattaggatcggattgccatccgggtcttcaatcacaatactaccggggccaga

SEQ ID NO: 497247 - DNA, 55 bp, Artificial
  Synthetic oligonucleotide
cacagacttcgtaaacgtcatagaccatgtcacgtgagaacacgatccacgcccc

SEQ ID NO: 497248 - DNA, 55 bp, Artificial
  Synthetic oligonucleotide
cacgatattcttgtaacacagttatgtcctcttggtcgttgcttgcagtctggtc

SEQ ID NO: 497249 - DNA, 55 bp, Artificial
  Synthetic oligonucleotide
cacttgtttgaacacacccaattaccgactcatggacgattcaggagcccgacat

SEQ ID NO: 497250 - DNA, 55 bp, Artificial
  Synthetic oligonucleotide
cactttctgcaggttgcaggctcacaccgccgtaggcgaaaccggaaagactgcc

SEQ ID NO: 497251 - DNA, 55 bp, Artificial
  Synthetic oligonucleotide
cagctgaatttcgccctgccttgcttgttcagcagtttgccctattgcactgggc

SEQ ID NO: 497252 - DNA, 55 bp, Artificial
  Synthetic oligonucleotide
caggatggtgaccaacacaggttttatgtaccgcattcactatccgaacagactc

SEQ ID NO: 497253 - DNA, 55 bp, Artificial
  Synthetic oligonucleotide
caggctgatcgcacgctcatattcaccgatgcacgacaagcgctgcattttaaac

SEQ ID NO: 497254 - DNA, 55 bp, Artificial
  Synthetic oligonucleotide
cagggtatcagccatgtggttagaggctacgatttacttgacacaaccatttggc

SEQ ID NO: 497255 - DNA, 55 bp, Artificial
  Synthetic oligonucleotide
catcggggttaaaggaaatgcgctcaggccggaaaacatgctggatactccgatg

SEQ ID NO: 497256 - DNA, 55 bp, Artificial
  Synthetic oligonucleotide
catgggcattttgttgtgtgatcgaaactatcatgccaatcgaaagcctgctggc

SEQ ID NO: 497257 - DNA, 55 bp, Artificial
  Synthetic oligonucleotide
catttcacgataatcacgcggtcggtggacttatcagtaaagtcacatatgacac

SEQ ID NO: 497258 - DNA, 55 bp, Artificial
  Synthetic oligonucleotide
ccacatgacagatatttaattgatcgccgcttatatggctctgtctggctcgacc

SEQ ID NO: 497259 - DNA, 55 bp, Artificial
  Synthetic oligonucleotide
ccacatgttcgtgcgtaatctcattctgcagtttacccttgcttttatcaccttg

SEQ ID NO: 497260 - DNA, 55 bp, Artificial
  Synthetic oligonucleotide
ccagcgagctgacaaaacgctcggcaaaggcatgccagtccaacgtcgggtaggc

SEQ ID NO: 497261 - DNA, 55 bp, Artificial
  Synthetic oligonucleotide
ccatgtcggggttgctgcgtcgggtacagattgatcccgaaacagggtatcggtt

SEQ ID NO: 497262 - DNA, 55 bp, Artificial
  Synthetic oligonucleotide
ccatttgggcaccctcatgaactgaagctctgggccggggatgcatgtgcacccc

SEQ ID NO: 497263 - DNA, 55 bp, Artificial
  Synthetic oligonucleotide
cccaagtcctgatgtcccgagcgggtgtcttttatcgttgcttgtcagaacggta

SEQ ID NO: 497264 - DNA, 55 bp, Artificial
  Synthetic oligonucleotide
cccaggactacaaaggcgcgttctggcacttctataccctatcgaacggcggcta

SEQ ID NO: 497265 - DNA, 55 bp, Artificial
  Synthetic oligonucleotide
cccagggcaatgaaagggaccgaagccaaggcaccgaaaaccgcgagccgcttca

SEQ ID NO: 497266 - DNA, 55 bp, Artificial
  Synthetic oligonucleotide
aaacttgaccctgaaacagatgtgataggtacaacctcaacaaatcgtacgccta

SEQ ID NO: 497267 - DNA, 55 bp, Artificial
  Synthetic oligonucleotide
aaaggggccatgctggccgttcctggtattgtcgatctatccgaccttgtagccg

SEQ ID NO: 497268 - DNA, 55 bp, Artificial
  Synthetic oligonucleotide
aaatgccacaagccatgggctgcgatgggtctgaccgggccgtccgaattgggtg

SEQ ID NO: 497269 - DNA, 55 bp, Artificial
  Synthetic oligonucleotide
aaattcgcaacttaaatggcgggcacagacgtcgggtcgagttagctcgctgcct

SEQ ID NO: 497270 - DNA, 55 bp, Artificial
  Synthetic oligonucleotide
aaattggctcgaaagacctctgctgttatacgccagtagagggcagcatgtatcc

SEQ ID NO: 497271 - DNA, 55 bp, Artificial
  Synthetic oligonucleotide
aacctgtcgtatctgcaatcgattgagaccattccggccgacaccagttgcaacg

SEQ ID NO: 497272 - DNA, 55 bp, Artificial
  Synthetic oligonucleotide
aacggacttagagtggcattgcgctcaccctgtcgccacaacaaaacagtgtcga

SEQ ID NO: 497273 - DNA, 55 bp, Artificial
  Synthetic oligonucleotide
aactcagcagatttcgggtgctcaggcatcgtatctggcacctctgttcctgtac

SEQ ID NO: 497274 - DNA, 55 bp, Artificial
  Synthetic oligonucleotide
aactgtatcgccctgcgataaaaccagactctctaaatgcgtcaaaggcgatttt

SEQ ID NO: 497275 - DNA, 55 bp, Artificial
  Synthetic oligonucleotide
aaggcgcaaattaactcctcgcttagcaacaactatcgcatgacactgcaggcca

SEQ ID NO: 497276 - DNA, 55 bp, Artificial
  Synthetic oligonucleotide
aatggtgccaacgtgtcgttgaaaataacacgcctgcgtaaacaggagggcagtg

SEQ ID NO: 497277 - DNA, 55 bp, Artificial
  Synthetic oligonucleotide
accgctgttttcgcgcaaccatttcaggcatcggaacatagcctgcaaatgaatg

SEQ ID NO: 497278 - DNA, 55 bp, Artificial
  Synthetic oligonucleotide
acctcgctgaaaagttcggtaagttcattccccaagacgctcatgccaaggcaga

SEQ ID NO: 497279 - DNA, 55 bp, Artificial
  Synthetic oligonucleotide
acgccttctcgatacgtgtgcgtggtcgacttcagtttcgttacgccaaccccgg

SEQ ID NO: 497280 - DNA, 55 bp, Artificial
  Synthetic oligonucleotide
acgctcttgtggacgttgtgctgcctccacagaaggcatttattgcgcggaagtg

SEQ ID NO: 497281 - DNA, 55 bp, Artificial
  Synthetic oligonucleotide
actcttctagcgactctgtaataataactcggctatgagataaagcgccgctggc

SEQ ID NO: 497282 - DNA, 55 bp, Artificial
  Synthetic oligonucleotide
agaggccctgcttagtttatgtgcagatgtggtgactgcggttaaagaacgtaac

SEQ ID NO: 497283 - DNA, 55 bp, Artificial
  Synthetic oligonucleotide
agcatcggtgacgatgtgaacattacttacacaggcgtagagctacgggcggagg

SEQ ID NO: 497284 - DNA, 55 bp, Artificial
  Synthetic oligonucleotide
agtatgataatggttccgaatatctactgcacgatggcctgctgcgggaataccg

SEQ ID NO: 497285 - DNA, 55 bp, Artificial
  Synthetic oligonucleotide
agtctcgctggctttaacgctgaggcaggcgttggcagtctgctcacgggtgaca

SEQ ID NO: 497286 - DNA, 55 bp, Artificial
  Synthetic oligonucleotide
agtctgttcagtacatcgcggatagaccaccatacagaccaattggttcagtctg

SEQ ID NO: 497287 - DNA, 55 bp, Artificial
  Synthetic oligonucleotide
agttcgctggtaatgatgcaccacaattgcgtttagaagtgatgaatcgtcacag

SEQ ID NO: 497288 - DNA, 55 bp, Artificial
  Synthetic oligonucleotide
attcatttccgggtcagcctggacttcccggacagggcccgtcacgacaaggacc

SEQ ID NO: 497289 - DNA, 55 bp, Artificial
  Synthetic oligonucleotide
cgcactgtggattgcgaccagtggctgctgtaaacggttagcaggttgtacgggg

SEQ ID NO: 497290 - DNA, 55 bp, Artificial
  Synthetic oligonucleotide
cgccaaccgtcccgttactgttgtgctcattcgtctcggtcgccaagaccggctc

SEQ ID NO: 497291 - DNA, 55 bp, Artificial
  Synthetic oligonucleotide
cgccaggcagcagtttgcacaaatcttaagtacggtgagcaagcagcagccagta

SEQ ID NO: 497292 - DNA, 55 bp, Artificial
  Synthetic oligonucleotide
cgccagttaatttgtaagctttgtctagctctagtgcagtttcttgctggttaag

SEQ ID NO: 497293 - DNA, 55 bp, Artificial
  Synthetic oligonucleotide
cgcctgaagtattgaatcccaaaacaaagccggcccgattatccagccgcgtgcg

SEQ ID NO: 497294 - DNA, 55 bp, Artificial
  Synthetic oligonucleotide
cgctcatctttgggaccataatatccggcgttgcaaataacgatgtcgatagccg

SEQ ID NO: 497295 - DNA, 55 bp, Artificial
  Synthetic oligonucleotide
cgctgcgaacggacgcatggtcttcgttggtcgccacttctccgacatggtccag

SEQ ID NO: 497296 - DNA, 55 bp, Artificial
  Synthetic oligonucleotide
cgtcgtcattcgactcgacaagtgccagcctataattcgccgaccacataaatcc

SEQ ID NO: 497297 - DNA, 55 bp, Artificial
  Synthetic oligonucleotide
cttgggccacttgttccacactgtacttaactaactcagcgccttgaggttttac

SEQ ID NO: 497298 - DNA, 55 bp, Artificial
  Synthetic oligonucleotide
cgtccagggagcgtaagatccgaaactgaccatcaggggagacatgagcgctacc

SEQ ID NO: 497299 - DNA, 55 bp, Artificial
  Synthetic oligonucleotide
cggcgatagcagggccgataataggtgcggcacccgctactgacgtaaaatggtg

SEQ ID NO: 497300 - DNA, 55 bp, Artificial
  Synthetic oligonucleotide
cggcgtcatgcctaggctggcaaacactaataatgagcccgccagcaccaagcgc

SEQ ID NO: 497301 - DNA, 55 bp, Artificial
  Synthetic oligonucleotide
cgggcagttgggtctctttgaccaacaatgcctcgtccccttcgaagtaggctac

SEQ ID NO: 497302 - DNA, 55 bp, Artificial
  Synthetic oligonucleotide
cttacgcctggtaattgccaacgctcactttacgggctcggaaattacgccgccg

SEQ ID NO: 497303 - DNA, 55 bp, Artificial
  Synthetic oligonucleotide
ctgcactgataaacgatgacttgcggcactgatcaaccacataaagtgtcgagat

SEQ ID NO: 497304 - DNA, 55 bp, Artificial
  Synthetic oligonucleotide
ctgtgataaagagaacagtcaagcggctgcataaaatgacccaagtacaagctaa

SEQ ID NO: 497305 - DNA, 55 bp, Artificial
  Synthetic oligonucleotide
cgggttaggtcccaacactggtcggacgaatccatgcatgccgcacatccgatgc

SEQ ID NO: 497306 - DNA, 55 bp, Artificial
  Synthetic oligonucleotide
ctggagtaatacggcggtggtgggcggttatttcgggttgcccggtgagtgggag

SEQ ID NO: 497307 - DNA, 55 bp, Artificial
  Synthetic oligonucleotide
cgtagcccgtcagttgggtaaagccccggttcacatagacaattttacggtctgg

SEQ ID NO: 497308 - DNA, 55 bp, Artificial
  Synthetic oligonucleotide
cggtacatgcagggtggacgttcctggctcattttgccgtgctgactgtcctcac

SEQ ID NO: 497309 - DNA, 55 bp, Artificial
  Synthetic oligonucleotide
ctcctgtaaatactcatccgttgactccgcaaagttatccgcatagataaagtct

SEQ ID NO: 497310 - DNA, 55 bp, Artificial
  Synthetic oligonucleotide
ccccaagctagcaggctagggccgcagtcagaaaccacgacccaagccaaaaggg

SEQ ID NO: 497311 - DNA, 55 bp, Artificial
  Synthetic oligonucleotide
ccccacataatgattctgtttaaacgcggcaaaacacgcatcacgctcacggctc

SEQ ID NO: 497312 - DNA, 55 bp, Artificial
  Synthetic oligonucleotide
ccccatggtagccttggcgcagacttaccagccgggtcttttgggtttgacccac

SEQ ID NO: 497313 - DNA, 55 bp, Artificial
  Synthetic oligonucleotide
ccccgattgatcttcagcgaagactgttctgcgtcattcagttccaggagtcttt

SEQ ID NO: 497314 - DNA, 55 bp, Artificial
  Synthetic oligonucleotide
cccgcgttaaaacgcattgccattgagtccggcccgggttttacctcgttacctg

SEQ ID NO: 497315 - DNA, 55 bp, Artificial
  Synthetic oligonucleotide
ccctaacgatttctcacattttcgcggaagcagcagtaacttttcctcagtgact

SEQ ID NO: 497316 - DNA, 55 bp, Artificial
  Synthetic oligonucleotide
ctccaggctattcacgctgccactgatattcagcataccaccgcgggcagcttgc

SEQ ID NO: 497317 - DNA, 55 bp, Artificial
  Synthetic oligonucleotide
ccctgtgcgcaatacctgtcgagactcgaacgtctggaacaaagccgccagcagt

SEQ ID NO: 497318 - DNA, 55 bp, Artificial
  Synthetic oligonucleotide
cctggactaattggccttgttgtcgattttagtggcaccttcggcaagtcttgcc

SEQ ID NO: 497319 - DNA, 55 bp, Artificial
  Synthetic oligonucleotide
cctgtgtattcctgtgcatgttatcgcgtaaagcgtcgttttagtgcaaggaaac

SEQ ID NO: 497320 - DNA, 55 bp, Artificial
  Synthetic oligonucleotide
ccttaaacgatacgaccttgccaacagcagcaagcgatagagtagaaattttgcg

SEQ ID NO: 497321 - DNA, 55 bp, Artificial
  Synthetic oligonucleotide
ccttagcgcgtatctcaaacagaccgtctcccatagactctgtgtgaggtggacc

SEQ ID NO: 497322 - DNA, 55 bp, Artificial
  Synthetic oligonucleotide
ctagcgcaaggccaattatcagaaaactacgttgcgattccatagaggtctcttt

SEQ ID NO: 497323 - DNA, 55 bp, Artificial
  Synthetic oligonucleotide
cgtgctcataagccatatgctggatgtagatatgtaaaggcgcacccgtattagg

SEQ ID NO: 497324 - DNA, 55 bp, Artificial
  Synthetic oligonucleotide
ccttggtcctaagattatgactgaggcacttaagccgcataccgttgaggctgtg

SEQ ID NO: 497325 - DNA, 55 bp, Artificial
  Synthetic oligonucleotide
cgatgaacggtaattgtcagggccagtcatcaaggcaatttgtcgatgcccgaga

SEQ ID NO: 497326 - DNA, 55 bp, Artificial
  Synthetic oligonucleotide
ctgcaaggcactgatttaaccggaatgaaaagttttgaacgggtggcaaacggcg

SEQ ID NO: 497327 - DNA, 55 bp, Artificial
  Synthetic oligonucleotide
cgcaccggctaccgaaaacacggagcgtctggcccaatattcacccgcagcgatc

SEQ ID NO: 497328 - DNA, 54 bp, Artificial
  Synthetic oligonucleotide
tatcgttgctgactccactatggcttaataaaccccaaaattctgtgctaacac

SEQ ID NO: 497329 - DNA, 54 bp, Artificial
  Synthetic oligonucleotide
tgaccctttggcgcccggcgaaaccatctccgatgaggagttgatgacgctttt

SEQ ID NO: 497330 - DNA, 54 bp, Artificial
  Synthetic oligonucleotide
gacagtggtaaacgcttttgaataaaacgcggccatatggtttgcacatgacgg

SEQ ID NO: 497331 - DNA, 54 bp, Artificial
  Synthetic oligonucleotide
gaagtctccgcttacttcaaatttgaccgtgccacataaacaggagcccttgtg

SEQ ID NO: 497332 - DNA, 54 bp, Artificial
  Synthetic oligonucleotide
gtgcggcgagcggtcagatatgggttttcatcatccccttggcgtttagatttt

SEQ ID NO: 497333 - DNA, 54 bp, Artificial
  Synthetic oligonucleotide
ccccaagcgagtgcccgaccaggttgatcctgccatccggtgtttcctggaaat

SEQ ID NO: 497334 - DNA, 53 bp, Artificial
  Synthetic oligonucleotide
agcggggttagatcagcgcgtgcatattttagctgagcaaagtttcagccgtg

SEQ ID NO: 497335 - DNA, 53 bp, Artificial
  Synthetic oligonucleotide
taatagtgattttgcccgttggtacgtgccattcccaggtaccgactcttgtg

SEQ ID NO: 497336 - DNA, 53 bp, Artificial
  Synthetic oligonucleotide
gtactcaccccgatagaaccggtggacccgagcacacagacagattgtggggt

SEQ ID NO: 497337 - DNA, 53 bp, Artificial
  Synthetic oligonucleotide
ttcggctattacctgcccatgtttcgggacgtgaatgaaagtcactgcacgtc

SEQ ID NO: 497338 - DNA, 53 bp, Artificial
  Synthetic oligonucleotide
atctacccgcggcgccaaagcttccagggtcgtcattacacgccggctcaggt

SEQ ID NO: 497339 - DNA, 53 bp, Artificial
  Synthetic oligonucleotide
ggactgggcgtttggagtcttacgagttgttttgtcccgatggccaatgtcaa

SEQ ID NO: 497340 - DNA, 53 bp, Artificial
  Synthetic oligonucleotide
gccattacgccaaggagtgaacacagacacgtcctcataggtcacgctaacgt

SEQ ID NO: 497341 - DNA, 53 bp, Artificial
  Synthetic oligonucleotide
gccgatacatcagcttcagaaagtgaccacctgtttagagtccaggacgaagt

SEQ ID NO: 497342 - DNA, 53 bp, Artificial
  Synthetic oligonucleotide
gcggtacatattggtgcctgtgaattggtcgaatacgtaacgaagcggcaaac

SEQ ID NO: 497343 - DNA, 53 bp, Artificial
  Synthetic oligonucleotide
tctgcgaattggataccaaaactagcactgctgtctaattgtttgaaacccac

SEQ ID NO: 497344 - DNA, 52 bp, Artificial
  Synthetic oligonucleotide
tttaggtcgaattccacaaggtcgctggggtacacccgaagactttaaaggc

SEQ ID NO: 497345 - DNA, 52 bp, Artificial
  Synthetic oligonucleotide
gttcactgtaagcaggactggcgcagctactgactgccaatgcgactagcag

SEQ ID NO: 497346 - DNA, 52 bp, Artificial
  Synthetic oligonucleotide
agtcaacggggcagtcatgctcgcaaaggtcatgatcggcaagatgcgatcc

SEQ ID NO: 497347 - DNA, 52 bp, Artificial
  Synthetic oligonucleotide
atcactggcatcagacccctcccagaagcgactgctctggcaatcgattcgg

SEQ ID NO: 497348 - DNA, 52 bp, Artificial
  Synthetic oligonucleotide
atccgaatttggttcctttgaggccgacaacgtcccggatcacccagagtag

SEQ ID NO: 497349 - DNA, 51 bp, Artificial
  Synthetic oligonucleotide
gactacagggcgacactatcaaaggggaaggtggttcaaagcctggtcacg

SEQ ID NO: 497350 - DNA, 51 bp, Artificial
  Synthetic oligonucleotide
aacggcagctccggcccggatcagaacgtcgataacaacgaggacaatgaa

SEQ ID NO: 497351 - DNA, 51 bp, Artificial
  Synthetic oligonucleotide
gatatccccagcggtggcttccagcgtttcatgccgttctaagcctaaata

SEQ ID NO: 497352 - DNA, 51 bp, Artificial
  Synthetic oligonucleotide
agcttggcggtggataggccaaggatgaacgttgttgagttatccctccca

SEQ ID NO: 497353 - DNA, 51 bp, Artificial
  Synthetic oligonucleotide
cagaagcgcatagcgtgggccacagagccggatacagtcaggcttggtcag

SEQ ID NO: 497354 - DNA, 50 bp, Artificial
  Synthetic oligonucleotide
tcgcagccctatcagacgcagctttaaggagcgcaagtttggaccttcaa

SEQ ID NO: 497355 - DNA, 50 bp, Artificial
  Synthetic oligonucleotide
acgtatcctcaccggagggcactcccaccagtcggaacaggccagtcgca

SEQ ID NO: 497356 - DNA, 50 bp, Artificial
  Synthetic oligonucleotide
actcttcaacggcgacggcaatgaatacagtgcacaaatcattagcgtgc

SEQ ID NO: 497357 - DNA, 50 bp, Artificial
  Synthetic oligonucleotide
ttacgcgcacttggggagagtcttgcagtggtataaagcttcttgcatga

SEQ ID NO: 497358 - DNA, 55 bp, Artificial
  Synthetic oligonucleotide
tctattaccaaatccagaacgagagcggataggccgtttacggtatccagatttt

SEQ ID NO: 497359 - DNA, 55 bp, Artificial
  Synthetic oligonucleotide
tagaaaagttaactccaccatctactgaaacttgcgttttaaggttacggtcctg

SEQ ID NO: 497360 - DNA, 55 bp, Artificial
  Synthetic oligonucleotide
gttaccgctcttcagtagtttgctatctaatgcgaaccttttaatgatgcacctc

SEQ ID NO: 497361 - DNA, 55 bp, Artificial
  Synthetic oligonucleotide
gtgtccgggcactgggatgacaacgaagggttattttgataatagccgtacttga

SEQ ID NO: 497362 - DNA, 55 bp, Artificial
  Synthetic oligonucleotide
gtatatttaaagctacggaatcaacttcatgcactcgctcagttattatgcgcag

SEQ ID NO: 497363 - DNA, 55 bp, Artificial
  Synthetic oligonucleotide
ggctcggtttagacgaagatattactgaatgcatagcacttgcacatgatcttgg

SEQ ID NO: 497364 - DNA, 55 bp, Artificial
  Synthetic oligonucleotide
ggcagtgtcaattgcaacattacgtactatggaatacgttcttggtaggtctctc

SEQ ID NO: 497365 - DNA, 55 bp, Artificial
  Synthetic oligonucleotide
ggcaagtatttaacccacttgacataaacatcatgcgtgaagctgctagacacct

SEQ ID NO: 497366 - DNA, 55 bp, Artificial
  Synthetic oligonucleotide
ggagaatggagtcaagagactagcagaggaattacagtatttgcctttagctctg

SEQ ID NO: 497367 - DNA, 55 bp, Artificial
  Synthetic oligonucleotide
ggaagtgactctctctggttggctgtatcgcaaacgtgatcatggtaatctgatc

SEQ ID NO: 497368 - DNA, 55 bp, Artificial
  Synthetic oligonucleotide
gctgagcatttagcccacttgctattgaatctcctaatcgtttactagcgctacc

SEQ ID NO: 497369 - DNA, 55 bp, Artificial
  Synthetic oligonucleotide
gctagctcgaataaaggcaatagtccgtcgtactaaaggacatcctgaatcggtg

SEQ ID NO: 497370 - DNA, 55 bp, Artificial
  Synthetic oligonucleotide
gccgtcacttcaccgtatccactaatctttactctagctaccttacgtagtgctg

SEQ ID NO: 497371 - DNA, 55 bp, Artificial
  Synthetic oligonucleotide
gcagaggatctagcgagattgactgctttatatgaggctgccggtcatggccgta

SEQ ID NO: 497372 - DNA, 55 bp, Artificial
  Synthetic oligonucleotide
gcaccacaaactctggcgtattttcaaattggttccaatattcctttctgcctag

SEQ ID NO: 497373 - DNA, 55 bp, Artificial
  Synthetic oligonucleotide
aagagtgaaaaggtaggctatcatgcacatacagtggctttcgatagtcctggta

SEQ ID NO: 497374 - DNA, 55 bp, Artificial
  Synthetic oligonucleotide
accttcgagatagctcgcgtacttacagatatcgttaacagtaccactactaagt

SEQ ID NO: 497375 - DNA, 55 bp, Artificial
  Synthetic oligonucleotide
agaattacaaactgctgtgttactagatgaagcaatcggcactatggaagtacga

SEQ ID NO: 497376 - DNA, 55 bp, Artificial
  Synthetic oligonucleotide
atatcacgagttaccataaccgattccgatgcactcaagattccctttactccca

SEQ ID NO: 497377 - DNA, 55 bp, Artificial
  Synthetic oligonucleotide
caggtagcgtactctcctctagtgcaaatagcagtggagttgcagatggcttatc

SEQ ID NO: 497378 - DNA, 55 bp, Artificial
  Synthetic oligonucleotide
catgtctgacagtgttgtcttgcctaatacgtgatatgtatactgcatcttcctg

SEQ ID NO: 497379 - DNA, 55 bp, Artificial
  Synthetic oligonucleotide
cctatcataggatgacaaattggaccccagactatgcaagaaatctaaggcgaat

SEQ ID NO: 497380 - DNA, 55 bp, Artificial
  Synthetic oligonucleotide
cctggtgtaggtggctgcattgacaaaagcaaaggggtttatagcaaaggctctc

SEQ ID NO: 497381 - DNA, 55 bp, Artificial
  Synthetic oligonucleotide
cggatgataaagtgctaagtgttgtctgattagcaaggtagccgcaagcgaaagt

SEQ ID NO: 497382 - DNA, 55 bp, Artificial
  Synthetic oligonucleotide
cgggatagtgccacacggtggcaaacttgctcgattccaccagattgttccgata

SEQ ID NO: 497383 - DNA, 55 bp, Artificial
  Synthetic oligonucleotide
ctcacatcagaaattggtttgcaggtctcccagagtcgaaggcacgaggttacaa

SEQ ID NO: 497384 - DNA, 55 bp, Artificial
  Synthetic oligonucleotide
ctgcactaccaatcacatcgggacgcataatcattcctgctccacctccatatgg

SEQ ID NO: 497385 - DNA, 55 bp, Artificial
  Synthetic oligonucleotide
ctgcataatgctaactccggtttcttgatctccggctaaaattgtgtgctgtatc

SEQ ID NO: 497386 - DNA, 55 bp, Artificial
  Synthetic oligonucleotide
ctgttgatcacttggctgttagccctattggttcttcacaaattgactgtaatgg

SEQ ID NO: 497387 - DNA, 55 bp, Artificial
  Synthetic oligonucleotide
gagagaatattttggacgaaagttggctctctagtcttgaaaacgtcatggctac

SEQ ID NO: 497388 - DNA, 53 bp, Artificial
  Synthetic oligonucleotide
gatcaagtctactgctccgttggtatacatccgcttgatactactgtggaaaa

SEQ ID NO: 497389 - DNA, 52 bp, Artificial
  Synthetic oligonucleotide
tgggccaaaaggtttgtagagcctttcttatggcgtgcttgatcagaacttc

SEQ ID NO: 497390 - DNA, 51 bp, Artificial
  Synthetic oligonucleotide
cataccgaccgccatgtacttagcaaccttttcagttgcaagacaagcccc

SEQ ID NO: 497391 - DNA, 50 bp, Artificial
  Synthetic oligonucleotide
tcgcgtcaggaatcccttattgcgtagcacagaatgcaagccttgactta

SEQ ID NO: 497392 - DNA, 60 bp, Artificial
  Synthetic oligonucleotide
tagataatcaatttgaacgtgaacatgcaagagaagtaaaaagtagacagaaaggatatg

SEQ ID NO: 497393 - DNA, 60 bp, Artificial
  Synthetic oligonucleotide
gagaagcggtttatgctgatccatgaaaggagcattaaggaattgacacgtgcagccgat

SEQ ID NO: 497394 - DNA, 60 bp, Artificial
  Synthetic oligonucleotide
gtattccgaattatctcagactgttaaatgaatgtgaagaattttccgaaaagttaaccg

SEQ ID NO: 497395 - DNA, 60 bp, Artificial
  Synthetic oligonucleotide
gaaagttaccgaataactgagacatcgatggtctgaatccaaattcaggcactgaaatca

SEQ ID NO: 497396 - DNA, 60 bp, Artificial
  Synthetic oligonucleotide
gtcaaaatacgtatagggttacgttaattgacatcatttcgtcgctttgctagactgatg

SEQ ID NO: 497397 - DNA, 60 bp, Artificial
  Synthetic oligonucleotide
atcaacaaatacgttaattataactacaagagaattgaccgaaaaaagcaaggtatctag

SEQ ID NO: 497398 - DNA, 60 bp, Artificial
  Synthetic oligonucleotide
cgtagttatcaaatcgataactacgattttttattatttcgtgtgtcacaaatatgtgac

SEQ ID NO: 497399 - DNA, 60 bp, Artificial
  Synthetic oligonucleotide
tggtttttatcacgctgtggcgtgatttggcgaagccaacaaggtctcgcagagcccaca

SEQ ID NO: 497400 - DNA, 60 bp, Artificial
  Synthetic oligonucleotide
agatatcgaaacagccgggaacccccgtgttactggacgggggttcctcatttcgcaact

SEQ ID NO: 497401 - DNA, 60 bp, Artificial
  Synthetic oligonucleotide
cgctgaagatatatgatagatttattgacttccgctttcgaattttatgtaaataagctg

SEQ ID NO: 497402 - DNA, 60 bp, Artificial
  Synthetic oligonucleotide
ctagataactataacttgctaggtacatatactggaatgggttttgatttacaagaagcg

SEQ ID NO: 497403 - DNA, 60 bp, Artificial
  Synthetic oligonucleotide
acgaggtatagttgctcgacttggactagcaattgtaccagccgaaccacccagttctat

SEQ ID NO: 497404 - DNA, 60 bp, Artificial
  Synthetic oligonucleotide
gacataagcaactgaacaccaaccgcttcaactttcttctgatccacccgagtttctccc

SEQ ID NO: 497405 - DNA, 60 bp, Artificial
  Synthetic oligonucleotide
ctacaacgagttctcgttgctcatgtgtcttatcatctttatgtactttgttatagtagt

SEQ ID NO: 497406 - DNA, 60 bp, Artificial
  Synthetic oligonucleotide
atcgcgtgttgggtgacgtttaatggaataattgtcaaattcttcgcatgctgcagaatt

SEQ ID NO: 497407 - DNA, 60 bp, Artificial
  Synthetic oligonucleotide
gattaagggggtctggggaagagttccccagcaggtttggacagagtccaaggttttgtt

SEQ ID NO: 497408 - DNA, 60 bp, Artificial
  Synthetic oligonucleotide
caaataattactagaagaactggagcaataatgatacatccaagccttgttcatcgtggt

SEQ ID NO: 497409 - DNA, 60 bp, Artificial
  Synthetic oligonucleotide
acggggttaagttgttcgacttggaccaggaattgtaccagccgaaccgccagttcttcc

SEQ ID NO: 497410 - DNA, 60 bp, Artificial
  Synthetic oligonucleotide
caaaaagcttttcgcaagaagatgtagctcgaaaggttggagtgactagacaagctgttt

SEQ ID NO: 497411 - DNA, 60 bp, Artificial
  Synthetic oligonucleotide
tcctcccgcctgcaccgcgcatacagcttacgctgaatgcttgtactggcgtccgtactc

SEQ ID NO: 497412 - DNA, 60 bp, Artificial
  Synthetic oligonucleotide
gaataacgtcgttatgacggttgtccaaccgtataaataagcaaatactccaaggtaatc

SEQ ID NO: 497413 - DNA, 60 bp, Artificial
  Synthetic oligonucleotide
attcattacgtttagaggaacagaaacgttattttgagagttcactagtgtttattcaaa

SEQ ID NO: 497414 - DNA, 60 bp, Artificial
  Synthetic oligonucleotide
atgcggtcattcataatgacgaggctagccctcatatgcacttgaattttgtgcctgtgg

SEQ ID NO: 497415 - DNA, 60 bp, Artificial
  Synthetic oligonucleotide
taaacgccactaagaacgttaatggaatcgcaacagagaatgcgataattggccaatatg

SEQ ID NO: 497416 - DNA, 60 bp, Artificial
  Synthetic oligonucleotide
atgataagacgcatgagcaacgagaattggtcgtagcgattggggaaggtaaagacgacc

SEQ ID NO: 497417 - DNA, 60 bp, Artificial
  Synthetic oligonucleotide
tatgattctatgcatcttcttatacattcctattatggcgggcttttcggcctccccata

SEQ ID NO: 497418 - DNA, 60 bp, Artificial
  Synthetic oligonucleotide
gctgttgcaactttctattatcatactcatcaagccttattagcaactcaatatgctaac

SEQ ID NO: 497419 - DNA, 60 bp, Artificial
  Synthetic oligonucleotide
ccccttccagtccgcttaccattgacacttaccgctaatttttccttttccaacaatcgc

SEQ ID NO: 497420 - DNA, 60 bp, Artificial
  Synthetic oligonucleotide
ctgtacagatttaaaagtgacttgaacccagtccagggaagggattgtgtagatatcgaa

SEQ ID NO: 497421 - DNA, 60 bp, Artificial
  Synthetic oligonucleotide
ggctcaaacaaaaaattccgaataagaagagcaagtataacggctatcacaatagccttg

SEQ ID NO: 497422 - DNA, 60 bp, Artificial
  Synthetic oligonucleotide
aggttttgttttttgtcatgcaaagcatggcttggcgatagccaaaacagcctcgcagag

SEQ ID NO: 497423 - DNA, 60 bp, Artificial
  Synthetic oligonucleotide
tttattcaaaaacgttatgggaaacaaaatacgttgtatgcgatggttcatatggatgaa

SEQ ID NO: 497424 - DNA, 60 bp, Artificial
  Synthetic oligonucleotide
agttgaataaaccgcccaagaattgattctaaggcggttttacctttccatatcatatcc

SEQ ID NO: 497425 - DNA, 60 bp, Artificial
  Synthetic oligonucleotide
ccaaaacgtttccgttttgacaatccaagagggtcttagtgtcatgagtttgtcaactcc

SEQ ID NO: 497426 - DNA, 60 bp, Artificial
  Synthetic oligonucleotide
aacatcgtggttacacgtgagcaatggagagatatgacagaaaaagtgaatgcagcggtt

SEQ ID NO: 497427 - DNA, 60 bp, Artificial
  Synthetic oligonucleotide
aaccatgcttagcatggctaaaagacctcggactttgtccgaacctacaaggggaaattt

SEQ ID NO: 497428 - DNA, 60 bp, Artificial
  Synthetic oligonucleotide
gcgaccattatcttcgcccctgcttatactcttcaagtagcttttcattgcttttgagtc

SEQ ID NO: 497429 - DNA, 60 bp, Artificial
  Synthetic oligonucleotide
ggggttaagttgctcgacttggactagcaattgtaccagccgaaccgccaattcttacgt

SEQ ID NO: 497430 - DNA, 60 bp, Artificial
  Synthetic oligonucleotide
catggagcgtttttaacaaagtgagtaaaagtttctctaaattttgtttgaccatttctt

SEQ ID NO: 497431 - DNA, 60 bp, Artificial
  Synthetic oligonucleotide
aggagcattaaggagttgatacgtgcagcggatttatcaccctcttggcatttcctcaaa

SEQ ID NO: 497432 - DNA, 60 bp, Artificial
  Synthetic oligonucleotide
agcttttaggtgaagataaacgaaccgacttttttcttgtgaaggtggagatttttgagt

SEQ ID NO: 497433 - DNA, 60 bp, Artificial
  Synthetic oligonucleotide
cgatagatcaaggcggttcggcaggtacaattgctagtccaagtcgtgcaacttaaatcc

SEQ ID NO: 497434 - DNA, 60 bp, Artificial
  Synthetic oligonucleotide
tatattagctatgaccgagggtttaatgagcgattggaacaactcgcaatccgattattg

SEQ ID NO: 497435 - DNA, 60 bp, Artificial
  Synthetic oligonucleotide
ggtgttgtttcgtccttatgtacgttagcggacaatacatttttttcaccgccataacga

SEQ ID NO: 497436 - DNA, 60 bp, Artificial
  Synthetic oligonucleotide
taggatccctttggtaacgctattactaaagggatcggagaatcttctatctagtcaata

SEQ ID NO: 497437 - DNA, 60 bp, Artificial
  Synthetic oligonucleotide
ttcccttcccctgtgcgtttcctcctttgcaagaagggccaacgggacctacggggtcaa

SEQ ID NO: 497438 - DNA, 60 bp, Artificial
  Synthetic oligonucleotide
gtaacaccgaactaaacatgttaaaggcatactgcaagattcttcccacgtccatgctaa

SEQ ID NO: 497439 - DNA, 59 bp, Artificial
  Synthetic oligonucleotide
ggggatctgaggtagccaagaacttaggaattggctcaagtactttacgtaaatattgc

SEQ ID NO: 497440 - DNA, 59 bp, Artificial
  Synthetic oligonucleotide
ggtcgtttatagctgttctgtggccttccagtggcctttggtggtcatttagtggctgt

SEQ ID NO: 497441 - DNA, 59 bp, Artificial
  Synthetic oligonucleotide
ggctgacatctaggacactctaatttattacaagttaaagacttagcataatgcttacc

SEQ ID NO: 497442 - DNA, 58 bp, Artificial
  Synthetic oligonucleotide
ccctcgatgtttattcatttccttcttatgttcacgttcaaattgattatcaactccc

SEQ ID NO: 497443 - DNA, 58 bp, Artificial
  Synthetic oligonucleotide
cgaatgtatttcaatcaaaagtgacaatgtatccacagaaaacctcactctcctatac

SEQ ID NO: 497444 - DNA, 58 bp, Artificial
  Synthetic oligonucleotide
cgatagtgataaattcattactttgtggtaaaggaacctttcttgtgtcaccatttgc

SEQ ID NO: 497445 - DNA, 58 bp, Artificial
  Synthetic oligonucleotide
cgattacgtgaagtacattgtttgaatcggaaagatgtaaaagtttgtagtgattggg

SEQ ID NO: 497446 - DNA, 58 bp, Artificial
  Synthetic oligonucleotide
gcatagctctttcttcttctgaatatccaccagtttgcaattggtcataaatactatc

SEQ ID NO: 497447 - DNA, 58 bp, Artificial
  Synthetic oligonucleotide
gttcatcagacaaactacccattattttatccctatcttcaaggtccaaataagtacc

SEQ ID NO: 497448 - DNA, 58 bp, Artificial
  Synthetic oligonucleotide
cgttatgttaactgatagtgtatggagtatacaaagaaaacaagagtatggctaccac

SEQ ID NO: 497449 - DNA, 57 bp, Artificial
  Synthetic oligonucleotide
cacataaagataagcccatctttctaacttctcaatatccaaaacaaaagcacctcc

SEQ ID NO: 497450 - DNA, 57 bp, Artificial
  Synthetic oligonucleotide
gtattagtcacatccacatctcctttcacagtatatgcccatatagttattatcgtc

SEQ ID NO: 497451 - DNA, 57 bp, Artificial
  Synthetic oligonucleotide
cgtgaacatacaagagaaataagaagtagacagaaaggatatgacatggaacgttag

SEQ ID NO: 497452 - DNA, 57 bp, Artificial
  Synthetic oligonucleotide
gaagaacagaaacgttattttgagagttcactagcgtttattcaaaagcgttatggc

SEQ ID NO: 497453 - DNA, 57 bp, Artificial
  Synthetic oligonucleotide
gtctaattttctaccaaatcttacataaatgcaagcctatttcgactccattcggtg

SEQ ID NO: 497454 - DNA, 57 bp, Artificial
  Synthetic oligonucleotide
gcgcattacctaaatgtctagcacgaatttcgatataccagtcatttaacatgtttg

SEQ ID NO: 497455 - DNA, 56 bp, Artificial
  Synthetic oligonucleotide
gtcattttaaacttttcagctagatatgtaggtgatgccggattatttgtctcacg

SEQ ID NO: 497456 - DNA, 56 bp, Artificial
  Synthetic oligonucleotide
gtagtaacagcttcgcctgattacatgcattcattaagtttagaagaacagaaacg

SEQ ID NO: 497457 - DNA, 56 bp, Artificial
  Synthetic oligonucleotide
catactgagattctacgtactgttagaagtgccatgaatgataaatataatgcgcc

SEQ ID NO: 497458 - DNA, 56 bp, Artificial
  Synthetic oligonucleotide
cctgcaaaagaattaggaatcataacatgcatgtttcaaggtcaaagtgatgtagc

SEQ ID NO: 497459 - DNA, 56 bp, Artificial
  Synthetic oligonucleotide
ctggcatcccatatatgatgaatttgttggttctcatgaatctggaaattggattc

SEQ ID NO: 497460 - DNA, 56 bp, Artificial
  Synthetic oligonucleotide
cgtgaacataaatatgaggctttccagtaagataacgtttatctaaagagcctacc

SEQ ID NO: 497461 - DNA, 56 bp, Artificial
  Synthetic oligonucleotide
ctcttcgctagttgtaaatactagaaacgaggagaaaagtatgccaaacactattg

SEQ ID NO: 497462 - DNA, 55 bp, Artificial
  Synthetic oligonucleotide
cttctggtcgcaagtttagtcgtaaaacataatgcacagtatatggcacggacat

SEQ ID NO: 497463 - DNA, 55 bp, Artificial
  Synthetic oligonucleotide
cttcgtccgatacgcgccgcactcaccaactgttccataaactctggttgctggg

SEQ ID NO: 497464 - DNA, 55 bp, Artificial
  Synthetic oligonucleotide
gcgaaatactttcgagcaggagacattctcggggatggaaagttaattctcggag

SEQ ID NO: 497465 - DNA, 55 bp, Artificial
  Synthetic oligonucleotide
gcgaaatatgcaaatcctgaaacggtagtcgtgcttaagcataatggacaacaag

SEQ ID NO: 497466 - DNA, 55 bp, Artificial
  Synthetic oligonucleotide
cttcacgatgcttcacgagatctattatagccaatccaataagcttcccgaggct

SEQ ID NO: 497467 - DNA, 55 bp, Artificial
  Synthetic oligonucleotide
gcgaaccctttacaatgagaatccctgtgttagcctgcccgggctagccagtccg

SEQ ID NO: 497468 - DNA, 55 bp, Artificial; identical to SEQ ID NO: 147367
  Synthetic oligonucleotide

SEQ ID NO: 497469 - DNA, 55 bp, Artificial
  Synthetic oligonucleotide
cttaaagagatccataaggagcttaatttgggagatgcggaagatggggatctaa

SEQ ID NO: 497470 - DNA, 55 bp, Artificial
  Synthetic oligonucleotide
gcgaggacagagcaaagctgtgtgtcttcgctatgagttatgttcatatgtttcg

SEQ ID NO: 497471 - DNA, 55 bp, Artificial
  Synthetic oligonucleotide
gcgagggaatcgcaggaaccgcagccgttacgaatctattttgatagcggattta

SEQ ID NO: 497472 - DNA, 55 bp, Artificial
  Synthetic oligonucleotide
gcgagtgcaaatgtgacgaatcaagctatagaccaccaacagagaacgaatacgc

SEQ ID NO: 497473 - DNA, 55 bp, Artificial
  Synthetic oligonucleotide
gcgatatacaagttacgacgcgatttcttcatgtactttctctgctgcaacgcca

SEQ ID NO: 497474 - DNA, 55 bp, Artificial
  Synthetic oligonucleotide
gcgcatccgcctaaggccgaatgctcgccatacctaacataacctctagggcgta

SEQ ID NO: 497475 - DNA, 55 bp, Artificial
  Synthetic oligonucleotide
gcgcccgtattgttcctgtatgcgtttgtgcatccagcgctggagctcgtcctta

SEQ ID NO: 497476 - DNA, 55 bp, Artificial
  Synthetic oligonucleotide
gcgcctcagcaagtaactgagggtgctgtttattaatataacggacgagtaccac

SEQ ID NO: 497477 - DNA, 55 bp, Artificial
  Synthetic oligonucleotide
gcgctgcaaagacgactgtaatgaccgtattaaaactacgtgctagagtttgcat

SEQ ID NO: 497478 - DNA, 55 bp, Artificial
  Synthetic oligonucleotide
ctgtgtatgtgctgacattttcccggcgtggttggtagattgtcattgaaaccgt

SEQ ID NO: 497479 - DNA, 55 bp, Artificial
  Synthetic oligonucleotide
ctgtgggtgcaagtaatgacccacagggaatgaataaagattgggtacctgtaac

SEQ ID NO: 497480 - DNA, 55 bp, Artificial
  Synthetic oligonucleotide
gcccctggaccgctaagctatagtttgcgcaataactatctctgggcagatttga

SEQ ID NO: 497481 - DNA, 55 bp, Artificial
  Synthetic oligonucleotide
gccccttgataagcgagattacatacttcattgtaggtgacaacgcttagcggtc

SEQ ID NO: 497482 - DNA, 55 bp, Artificial
  Synthetic oligonucleotide
cttggactgaaccataccaaacttcatccctatagtcagctcgttgcggttagtg

SEQ ID NO: 497483 - DNA, 55 bp, Artificial
  Synthetic oligonucleotide
cttgctatgatttccaaacatttgctctttatacccaggaaccccttcaaagaac

SEQ ID NO: 497484 - DNA, 55 bp, Artificial
  Synthetic oligonucleotide
cttgcggaagctcatatacgtctttggacttggaacgtgctaagtatcgatcgct

SEQ ID NO: 497485 - DNA, 55 bp, Artificial
  Synthetic oligonucleotide
gcccgatattatgggatatggtgcattggtgacagctggatttatcatgataggt

SEQ ID NO: 497486 - DNA, 55 bp, Artificial
  Synthetic oligonucleotide
gcccgtttccgggtctcttttaaacgacagatgctctgcacattcagataaacgc

SEQ ID NO: 497487 - DNA, 55 bp, Artificial
  Synthetic oligonucleotide
gcccttctcattcgattcaaacgcttgcaccgaggacttgatttgaccaatcgtc

SEQ ID NO: 497488 - DNA, 55 bp, Artificial
  Synthetic oligonucleotide
gccgaaaccagctcttgtagttaggtgatgagtgaacatatagcgttgctcttcc

SEQ ID NO: 497489 - DNA, 55 bp, Artificial
  Synthetic oligonucleotide
cttgcgcagctgtaaacagttccggcggtgtccggtgatgatcccggtcaagttc

SEQ ID NO: 497490 - DNA, 55 bp, Artificial
  Synthetic oligonucleotide
cttgaagttcctgttaaagacaaagccaaccgcatatatccattggaacctagct

SEQ ID NO: 497491 - DNA, 55 bp, Artificial
  Synthetic oligonucleotide
cttgaacccagtccagggaagggattgtgtagatatcgaaacagccgggaacccc

SEQ ID NO: 497492 - DNA, 55 bp, Artificial
  Synthetic oligonucleotide
gccgcttggacctgttggacttattacaccttggaatgctccatttatgcttgag

SEQ ID NO: 497493 - DNA, 55 bp, Artificial
  Synthetic oligonucleotide
gccggaaaccatacattcaatatagagattctcacctctgacatgatggcggaca

SEQ ID NO: 497494 - DNA, 55 bp, Artificial
  Synthetic oligonucleotide
gccggatttgttgtaatcctctgtcatgagcttataacgagagtcaatcaggttg

SEQ ID NO: 497495 - DNA, 55 bp, Artificial
  Synthetic oligonucleotide
gccggctctaccctggcaatttatcttgctaaggcaggtttccatgtgttgttag

SEQ ID NO: 497496 - DNA, 55 bp, Artificial
  Synthetic oligonucleotide
gccgtttcgcggttcagattcagacactaatatggtgtttatgactctgagtccg

SEQ ID NO: 497497 - DNA, 55 bp, Artificial
  Synthetic oligonucleotide
gcctgctacccttgactcttggtatctatacacctctatgacatttccagacttg

SEQ ID NO: 497498 - DNA, 55 bp, Artificial
  Synthetic oligonucleotide
gccttgcgttacaacattaccgcagtcgcttaatggcggaccataactgctggtc

SEQ ID NO: 497499 - DNA, 55 bp, Artificial
  Synthetic oligonucleotide
gctctcacagaaggccggagaacttatcgaggagttacgttttaatatagcgact

SEQ ID NO: 497500 - DNA, 55 bp, Artificial
  Synthetic oligonucleotide
gctctcagaactgattccaggctatgaacttattgacgaaggtccttgaactaaa

SEQ ID NO: 497501 - DNA, 55 bp, Artificial
  Synthetic oligonucleotide
gctgacacaacgtgcatctcccatagcgatgtatgcggaagcaccgttttcgacg

SEQ ID NO: 497502 - DNA, 55 bp, Artificial
  Synthetic oligonucleotide
gctgaccgaattgagggagaaacagcaagggaaggaaaggatattaaaacaaggg

SEQ ID NO: 497503 - DNA, 55 bp, Artificial
  Synthetic oligonucleotide
gctgacgttgagtccagaaggtgtaaaacaactgttagctgaactagaaccatac

SEQ ID NO: 497504 - DNA, 55 bp, Artificial
  Synthetic oligonucleotide
gctgataatcgtggcgctggctcgtatataggtaacaaagtggagaaattaccag

SEQ ID NO: 497505 - DNA, 55 bp, Artificial
  Synthetic oligonucleotide
gctgcaatgactgttataaagggatttgatagaaaccgttcctcatcaggcacac

SEQ ID NO: 497506 - DNA, 55 bp, Artificial
  Synthetic oligonucleotide
gctgctttatcttataagcgtcttattggttatggcggattacttaaagagatcc

SEQ ID NO: 497507 - DNA, 55 bp, Artificial
  Synthetic oligonucleotide
gctggcaaaagtagatatgacacatcgatacaggttgctaatgaagtcggggtgc

SEQ ID NO: 497508 - DNA, 55 bp, Artificial
  Synthetic oligonucleotide
gctggttttacagtggatggtataaatccatcatgcccgattgcggctatgagca

SEQ ID NO: 497509 - DNA, 55 bp, Artificial
  Synthetic oligonucleotide
gctgtaagaacttatccgctgtacttgttgctgcgtaatcgaaacttcccacaac

SEQ ID NO: 497510 - DNA, 55 bp, Artificial
  Synthetic oligonucleotide
gctgtacttggcccaatcatatttcattgcaatcagccttgtgacctgtcctccc

SEQ ID NO: 497511 - DNA, 55 bp, Artificial
  Synthetic oligonucleotide
ctgggtggttcggctggtacaattgctggtccaagtcgggcaacttaacctcgtt

SEQ ID NO: 497512 - DNA, 55 bp, Artificial
  Synthetic oligonucleotide
gctgtggcgtgatttggcgaagccaacaaggtctcgcagagcccacaccaaatgg

SEQ ID NO: 497513 - DNA, 55 bp, Artificial
  Synthetic oligonucleotide
gctgtggctaccccaccaacaaatggagtacttgtactacgatcagatggaacgt

SEQ ID NO: 497514 - DNA, 55 bp, Artificial
  Synthetic oligonucleotide
ctgggctgatcgatgtaaggtaagatgtgccaagtacaatcactaccaatacgag

SEQ ID NO: 497515 - DNA, 55 bp, Artificial
  Synthetic oligonucleotide
gcttaatccagtgatattgcttgtcgcgtataaacaaactcctaccggaggtgta

SEQ ID NO: 497516 - DNA, 55 bp, Artificial
  Synthetic oligonucleotide
gcttctgccaaatccttgacttcttcaaatccaacgacatgtctgcaataatgtg

SEQ ID NO: 497517 - DNA, 55 bp, Artificial
  Synthetic oligonucleotide
gcttgagatgcactgtcatacgtacctaagttttgtaccctcgcactttctgtcc

SEQ ID NO: 497518 - DNA, 55 bp, Artificial
  Synthetic oligonucleotide
ctgtctatcaaacctttcacagcatgttcggcacattcaaaatcgagcatccttg

SEQ ID NO: 497519 - DNA, 55 bp, Artificial
  Synthetic oligonucleotide
gcggaactcttcaacgtcagattcgtttacccattcgtcttttgcgaataactta

SEQ ID NO: 497520 - DNA, 55 bp, Artificial
  Synthetic oligonucleotide
gcggataaaatgctgaaccgtataaaagcgcgcggtaacgagcatcgtctggccg

SEQ ID NO: 497521 - DNA, 55 bp, Artificial
  Synthetic oligonucleotide
gcggccaaatcagtggaagcgttactttccaaaactgctgccattccgtcgctcc

SEQ ID NO: 497522 - DNA, 55 bp, Artificial
  Synthetic oligonucleotide
gcggtaagtgtcaatggtaagcggactggaaggggtcagcggtttgtgctgatcc

SEQ ID NO: 497523 - DNA, 55 bp, Artificial
  Synthetic oligonucleotide
gcggtctttgtaaatccacacattatttacgctggagataaagatagtgtgaatg

SEQ ID NO: 497524 - DNA, 55 bp, Artificial
  Synthetic oligonucleotide
gcgtaacggaaaggaggacacgaacacatgaatgaagcccaaccgataaagtcga

SEQ ID NO: 497525 - DNA, 55 bp, Artificial
  Synthetic oligonucleotide
gcgtacttattagcggcttcgttccatgcgaatggggaacctgctccatctacgc

SEQ ID NO: 497526 - DNA, 55 bp, Artificial
  Synthetic oligonucleotide
gcgtatacgggtggcctcacattcctatgatcggttaaccagagagacaatgggg

SEQ ID NO: 497527 - DNA, 55 bp, Artificial
  Synthetic oligonucleotide
gcgtcgtcggggcaagctttctctggtttccaactgggattgcgcaagcgtaccc

SEQ ID NO: 497528 - DNA, 55 bp, Artificial
  Synthetic oligonucleotide
gcgtctcacctgcttctattaccgtgtttatcccctgtacagactcgttatttag

SEQ ID NO: 497529 - DNA, 55 bp, Artificial
  Synthetic oligonucleotide
gcgttgtgttatcaagcacatctttcacagcatcacgaatacgcatccatagttc

SEQ ID NO: 497530 - DNA, 55 bp, Artificial
  Synthetic oligonucleotide
gcgtttgtaacccggcaattccgctgtgacgattatttcggaatcgtattcgtct

SEQ ID NO: 497531 - DNA, 55 bp, Artificial
  Synthetic oligonucleotide
gctaaagaggggcttattgtggggtatggtgaaggaaaatatggtccagatgata

SEQ ID NO: 497532 - DNA, 55 bp, Artificial
  Synthetic oligonucleotide
gctaataatctccttcgacatatcgtctttatcacgaacatgcatgatgcgttgc

SEQ ID NO: 497533 - DNA, 55 bp, Artificial
  Synthetic oligonucleotide
gctatcctggctaaataccccgcctcgaccattatctaaccaaacatgacgcacc

SEQ ID NO: 497534 - DNA, 55 bp, Artificial
  Synthetic oligonucleotide
gctattcacgatgttagtttaggggcttgcaagttgtatatgcacctcagggatc

SEQ ID NO: 497535 - DNA, 55 bp, Artificial
  Synthetic oligonucleotide
gctcccagcagcactgtagccaaatgttgttccggtgctgtcgctacttctctgt

SEQ ID NO: 497536 - DNA, 55 bp, Artificial
  Synthetic oligonucleotide
gctcgttgctgttgtttacgaagcgtttcaattcgttcacgaagggtagtatgac

SEQ ID NO: 497537 - DNA, 55 bp, Artificial
  Synthetic oligonucleotide
gaatgcatgattctgatcaatatactgcagcagtcgaaacgcctgataaagcgca

SEQ ID NO: 497538 - DNA, 55 bp, Artificial
  Synthetic oligonucleotide
gaatgatgcgtgcatgccagaaagaagcccacccttcgttcattacttttgtctc

SEQ ID NO: 497539 - DNA, 55 bp, Artificial
  Synthetic oligonucleotide
gagcggtaaatgcacgactgtcatttgcaccttttgcgaatttatacccgctcac

SEQ ID NO: 497540 - DNA, 55 bp, Artificial
  Synthetic oligonucleotide
gagcggtactggcatacttcgtgatttcattgatagtagtgcagtaaagtgatgg

SEQ ID NO: 497541 - DNA, 55 bp, Artificial
  Synthetic oligonucleotide
gagctctaaaagaggggatttgtgaagcgattcaacttgcaaaggaaggccgcat

SEQ ID NO: 497542 - DNA, 55 bp, Artificial
  Synthetic oligonucleotide
gagctgtaatagccgcctggaataaggctctacgcaaatgagaagaaccacgctt

SEQ ID NO: 497543 - DNA, 55 bp, Artificial
  Synthetic oligonucleotide
gaatcgcaggaaccgcagccgttacgaatctattttgatagcggatttaaaccgc

SEQ ID NO: 497544 - DNA, 55 bp, Artificial
  Synthetic oligonucleotide
gagctttgcgggtgaaaaggcaaaaggatctatattagcgactgcaaaccagggg

SEQ ID NO: 497545 - DNA, 55 bp, Artificial
  Synthetic oligonucleotide
gaagtgtcgaagtatcctgtaaaagatacagatgtcatcaaaggaagtgaggtca

SEQ ID NO: 497546 - DNA, 55 bp, Artificial
  Synthetic oligonucleotide
gaggaaaactgctaatgcctctcttgtctatatgtataactaaggcatacagctt

SEQ ID NO: 497547 - DNA, 55 bp, Artificial
  Synthetic oligonucleotide
gaaggcggaaaggttccgcagcttagacgactttaacaaaaggctccgggaaatc

SEQ ID NO: 497548 - DNA, 55 bp, Artificial
  Synthetic oligonucleotide
gaggctagccctcatatgcacttgaattttgtgcctgtggcgagtgggtataagc

SEQ ID NO: 497549 - DNA, 55 bp, Artificial
  Synthetic oligonucleotide
gaggtccctgaatacctgggttaccttgtggtcctgttgggccttctggacccgg

SEQ ID NO: 497550 - DNA, 55 bp, Artificial
  Synthetic oligonucleotide
gataaaggtaaagcggctttggtaaactggaatgctagtgtagatcgacttgacc

SEQ ID NO: 497551 - DNA, 55 bp, Artificial
  Synthetic oligonucleotide
gaagccgcaaatctctgagatgatggaaggcttcagaaagctgttccagtataaa

SEQ ID NO: 497552 - DNA, 55 bp, Artificial
  Synthetic oligonucleotide
gatcaagaaattttcgcctatagtgaagtgttacaacaacttgggttgtcaggcc

SEQ ID NO: 497553 - DNA, 55 bp, Artificial
  Synthetic oligonucleotide
gatcgcttgtaggcgtgcatccctcctggggtaatggtattcgtcccaaagtgta

SEQ ID NO: 497554 - DNA, 55 bp, Artificial
  Synthetic oligonucleotide
gatcgtcgtcaagcattaggacttcgttacattgttaactactctcgcttacgcg

SEQ ID NO: 497555 - DNA, 55 bp, Artificial
  Synthetic oligonucleotide
gatctcaatagaaggagcgtttcaaggaggcggtattggggaagtctctggagct

SEQ ID NO: 497556 - DNA, 55 bp, Artificial
  Synthetic oligonucleotide
gacgaagtgttaacgaagaaacgctatgaccatgaaccattaagtgtacttgagc

SEQ ID NO: 497557 - DNA, 55 bp, Artificial
  Synthetic oligonucleotide
gacgctcatggtcattgggccgatacacatcagcccgaagaatggttccgtcaga

SEQ ID NO: 497558 - DNA, 55 bp, Artificial
  Synthetic oligonucleotide
gactataggcccaatccatctgatacctttctcgattgattacctccgcactggc

SEQ ID NO: 497559 - DNA, 55 bp, Artificial
  Synthetic oligonucleotide
gacccaagtaccggaaaggtattaagtcttgtgagtacgccagcatatgacccga

SEQ ID NO: 497560 - DNA, 55 bp, Artificial
  Synthetic oligonucleotide
gaccatttctaaggggctttgcctaatagtccagtacttattagctttcttgccg

SEQ ID NO: 497561 - DNA, 55 bp, Artificial
  Synthetic oligonucleotide
gactcttggtatctatacacctctatgacatttccagacttgtagactttggtgt

SEQ ID NO: 497562 - DNA, 55 bp, Artificial
  Synthetic oligonucleotide
gactttcttccggtaatccttatcaaaggcttcagcagaaacaccttttgctagc

SEQ ID NO: 497563 - DNA, 55 bp, Artificial
  Synthetic oligonucleotide
gaccactaaacgaccacgaaaactgggacgcctatttattaattggtggtcactg

SEQ ID NO: 497564 - DNA, 55 bp, Artificial
  Synthetic oligonucleotide
gaccaccgtggcatgatgtaagacacgatctagtatggcattggcgagtttaggg

SEQ ID NO: 497565 - DNA, 55 bp, Artificial
  Synthetic oligonucleotide
gagacatcgatggtctgaatccaaattcaggcactgaaatcaactcctaaaggtg

SEQ ID NO: 497566 - DNA, 55 bp, Artificial
  Synthetic oligonucleotide
gagatcagtgaacgagtaaaacgaaagccacgagccaattcggttgtactttcag

SEQ ID NO: 497567 - DNA, 55 bp, Artificial
  Synthetic oligonucleotide
gagcaagcccgcgtctatttccagctgccatgtaggctacacgcgaaccttctgg

SEQ ID NO: 497568 - DNA, 55 bp, Artificial
  Synthetic oligonucleotide
gacatgagccattccttcaaagcagccgtagaccaagcattagggaaaccaattg

SEQ ID NO: 497569 - DNA, 55 bp, Artificial
  Synthetic oligonucleotide
gacatagggaactatggggaggccgaaaagcccgccataataggaatgtataaaa

SEQ ID NO: 497570 - DNA, 55 bp, Artificial
  Synthetic oligonucleotide
gacaagagcggttttacggacgattttatcgcacgattccacttccgtcccatgc

SEQ ID NO: 497571 - DNA, 55 bp, Artificial
  Synthetic oligonucleotide
gagcattaaggaatggacacgtgcagccgcttctccatcctcttggcagttcatc

SEQ ID NO: 497572 - DNA, 55 bp, Artificial
  Synthetic oligonucleotide
gagcgcattctcatgactaatcccttcccacaatacttcattgctcaccaatatc

SEQ ID NO: 497573 - DNA, 55 bp, Artificial
  Synthetic oligonucleotide
gagcgcgagaagccatgtgacccattgttaatgcaaagatatgtacgtagtactg

SEQ ID NO: 497574 - DNA, 55 bp, Artificial
  Synthetic oligonucleotide
gaattaaccaaagtgggatccatagatttaccttctaccacatacggctcaaaca

SEQ ID NO: 497575 - DNA, 55 bp, Artificial
  Synthetic oligonucleotide
gaaatatcgcaccttctgttatggaaaatgctaatgatttgcgtgatagcgagcg

SEQ ID NO: 497576 - DNA, 55 bp, Artificial
  Synthetic oligonucleotide
gaaactagcatatcccgaccacttccatgagccaatactttcaaataaacgccgc

SEQ ID NO: 497577 - DNA, 55 bp, Artificial
  Synthetic oligonucleotide
ctttgcgggcagctctattaaaagctggaaggacaactgggattcctacgaatgg

SEQ ID NO: 497578 - DNA, 55 bp, Artificial
  Synthetic oligonucleotide
gcatcaaacggtttaacctggatggtattagacccaattggtgacgttgctgcaa

SEQ ID NO: 497579 - DNA, 55 bp, Artificial
  Synthetic oligonucleotide
gcatcttcttatacattcctattatggcgggcttttcggcctccccatagttccc

SEQ ID NO: 497580 - DNA, 55 bp, Artificial
  Synthetic oligonucleotide
gcattcgtacagaagaagtgtcgtaattggtgtggagtaataacattgctgtatg

SEQ ID NO: 497581 - DNA, 55 bp, Artificial
  Synthetic oligonucleotide
ctttctattggagatgagcagtgggagcaatttgtgggcagagtgcctttacctc

SEQ ID NO: 497582 - DNA, 55 bp, Artificial
  Synthetic oligonucleotide
gccaaaaggtctcattgacctagccgtctaagagtagtgacagtatatttggagg

SEQ ID NO: 497583 - DNA, 55 bp, Artificial
  Synthetic oligonucleotide
gccacccttggttcctcggaaaacatgggcagcttaggcggcagtattctgagct

SEQ ID NO: 497584 - DNA, 55 bp, Artificial
  Synthetic oligonucleotide
gccactgaccaacaataaaattcaccaaagcactcactgacattccgtagcgatc

SEQ ID NO: 497585 - DNA, 55 bp, Artificial
  Synthetic oligonucleotide
gccagatagagaacatttaaccgaggtctatgcaaggattttaagaggcgtggca

SEQ ID NO: 497586 - DNA, 55 bp, Artificial
  Synthetic oligonucleotide
gccagctatgattagatttagagcctcctggaatgatcccttgtttggctaactc

SEQ ID NO: 497587 - DNA, 55 bp, Artificial
  Synthetic oligonucleotide
gccagggaaaacaagagggattgaacgtagggctgcgtatgagcgcgagaagcca

SEQ ID NO: 497588 - DNA, 55 bp, Artificial
  Synthetic oligonucleotide
gccatacctactacgccacaatatgtaatacaagctaatactccagacataccgc

SEQ ID NO: 497589 - DNA, 55 bp, Artificial
  Synthetic oligonucleotide
gccattttctttcgcaagacgctgtacattttcaaagtgtttctgggcttcagcg

SEQ ID NO: 497590 - DNA, 55 bp, Artificial
  Synthetic oligonucleotide
ctttcactggaacaccaactacatcctctacaatccttactctgtcgctatcaat

SEQ ID NO: 497591 - DNA, 55 bp, Artificial
  Synthetic oligonucleotide
gcccagtctttactctttactgtactgccttatttagcttctcaatggctctatc

SEQ ID NO: 497592 - DNA, 55 bp, Artificial
  Synthetic oligonucleotide
gccccaatcatagaacaagcctcgcaagtaattccaagccaagtagagaaccagt

SEQ ID NO: 497593 - DNA, 55 bp, Artificial
  Synthetic oligonucleotide
cttgtccttgtaatatcgtccctacacgacaaactgaatgtactccctagcaccg

SEQ ID NO: 497594 - DNA, 55 bp, Artificial
  Synthetic oligonucleotide
gatgtcctaacagtttcgccatttcatctcccaaatggagaatgcgaatgtgccg

SEQ ID NO: 497595 - DNA, 55 bp, Artificial
  Synthetic oligonucleotide
gaagaatggttagaaatgtggcgagaagtaacagatatgccagagattacgcaag

SEQ ID NO: 497596 - DNA, 55 bp, Artificial
  Synthetic oligonucleotide
gattggtccttaatttcctgtatcgctctcctgacaatccccatgaatgagttag

SEQ ID NO: 497597 - DNA, 55 bp, Artificial
  Synthetic oligonucleotide
gatttgtggcctccaattagtgtatttctatgtctagctgtagcgctatgcgtgt

SEQ ID NO: 497598 - DNA, 55 bp, Artificial
  Synthetic oligonucleotide
gcaaactatcatttgtaccagaagaacccacaacagcaccgacataatctctccc

SEQ ID NO: 497599 - DNA, 55 bp, Artificial
  Synthetic oligonucleotide
gcaaagcaacctggcgctatgtaaaaggtatcctcaaatcctgggaaactaaagg

SEQ ID NO: 497600 - DNA, 55 bp, Artificial
  Synthetic oligonucleotide
gcaaagcatggcttggcgatagccaaaacagcctcgcagagccttttcattgtgt

SEQ ID NO: 497601 - DNA, 55 bp, Artificial
  Synthetic oligonucleotide
gcaaattatcagccgttcaaaaggacaatcagctgtcgctgcagctgcttaccgc

SEQ ID NO: 497602 - DNA, 55 bp, Artificial
  Synthetic oligonucleotide
gcaaccagtctataccagctagtaagtcttttacgcttgtgtaactacgaccttg

SEQ ID NO: 497603 - DNA, 55 bp, Artificial
  Synthetic oligonucleotide
gcaagggttaaagagtctatccaagcgatatcagaccatgcgttggacttaaatg

SEQ ID NO: 497604 - DNA, 55 bp, Artificial
  Synthetic oligonucleotide
gaagaactggagcaataatgatacatccaagccttgttcatcgtggtaaagatac

SEQ ID NO: 497605 - DNA, 55 bp, Artificial
  Synthetic oligonucleotide
gaacgtgttctggcaatatagagtacggttaactgctgttctttgagagaacgca

SEQ ID NO: 497606 - DNA, 55 bp, Artificial
  Synthetic oligonucleotide
gcaatgatggctggactgacacacttgtattaacctctttaatcattggagggat

SEQ ID NO: 497607 - DNA, 55 bp, Artificial
  Synthetic oligonucleotide
gcacacttggggctcatagcttaaggacataattcttgtgtatgttccccatagg

SEQ ID NO: 497608 - DNA, 55 bp, Artificial
  Synthetic oligonucleotide
gcactcctaaatgtaagaaacgatttagcccttaataccgtagctccttcccgta

SEQ ID NO: 497609 - DNA, 55 bp, Artificial
  Synthetic oligonucleotide
gcagaactagaggcagcgctaaataacttgttaccaggagaagagtttgatgcgt

SEQ ID NO: 497610 - DNA, 55 bp, Artificial
  Synthetic oligonucleotide
gaacagttaatctgcatacctaaaggcgtcctcagaatgctcagattcgtttctg

SEQ ID NO: 497611 - DNA, 55 bp, Artificial
  Synthetic oligonucleotide
gaacaacggatgtttattacagcgtttcaagcatccctggagtgcagtgcatgga

SEQ ID NO: 497612 - DNA, 55 bp, Artificial
  Synthetic oligonucleotide
gcagctgatcccacgtagctttcataaaagggaatttgatgcccgttaaggcgcg

SEQ ID NO: 497613 - DNA, 55 bp, Artificial
  Synthetic oligonucleotide
gaaattatagtcttgctaggtgcgtcaacaccttggaagatgagcggtactggca

SEQ ID NO: 497614 - DNA, 55 bp, Artificial
  Synthetic oligonucleotide
taacaaggattagcgcccaatgttgaagaatcggagccttttgttggaaaagggg

SEQ ID NO: 497615 - DNA, 55 bp, Artificial
  Synthetic oligonucleotide
taaccgttttatgaccagacaaataggagctttgcgggaagggttactgcatagc

SEQ ID NO: 497616 - DNA, 55 bp, Artificial
  Synthetic oligonucleotide
taagcgcaagatgggatgtttggcgcgaaaatattctgatagtaagacttagcgc

SEQ ID NO: 497617 - DNA, 55 bp, Artificial
  Synthetic oligonucleotide
taagttgcacgacttggactagcaattgtacctgccgaaccgccttgatctatcg

SEQ ID NO: 497618 - DNA, 55 bp, Artificial
  Synthetic oligonucleotide
taatcaaatttcacgtgcaggggctctgactttatccgccagttcaattgtatcg

SEQ ID NO: 497619 - DNA, 55 bp, Artificial
  Synthetic oligonucleotide
taccgctaatcgtgcttactgcggaccggcctcatgaactaagggatgttggcgc

SEQ ID NO: 497620 - DNA, 55 bp, Artificial
  Synthetic oligonucleotide
tactggcgtagagcattatcgtcctgatgatgtcctctaatacatattgagtacg

SEQ ID NO: 497621 - DNA, 55 bp, Artificial
  Synthetic oligonucleotide
tactgtgtgtaaacactaggtatggacgaatcgtggaaaggggtgtatccagtgg

SEQ ID NO: 497622 - DNA, 55 bp, Artificial
  Synthetic oligonucleotide
taggagagtttgcatcagtaactagtttaggtcctgcgggattggctattacagg

SEQ ID NO: 497623 - DNA, 55 bp, Artificial
  Synthetic oligonucleotide
tagtacggtaacctctctcttcctttcggccgtagaatctcatcgcaatgccaac

SEQ ID NO: 497624 - DNA, 55 bp, Artificial
  Synthetic oligonucleotide
tatcacacagacaattggagcggatatcagggtaattgatatgccattacttgat

SEQ ID NO: 497625 - DNA, 55 bp, Artificial
  Synthetic oligonucleotide
tatcacgtctatgaaatttcaggtgaatcggatgcctggaaatatgaggtagacc

SEQ ID NO: 497626 - DNA, 55 bp, Artificial
  Synthetic oligonucleotide
tatccaagacttgccgaaacaagcatatcgctacggtgtgggcgcttatgagggg

SEQ ID NO: 497627 - DNA, 55 bp, Artificial
  Synthetic oligonucleotide
tatgcaggattcccaagcgtccgaaaagcttcgtacaagctgtaaaagtatgcgg

SEQ ID NO: 497628 - DNA, 55 bp, Artificial
  Synthetic oligonucleotide
tatggagtaaggattttacttagaacgatagaactggtggttcggctggtacaat

SEQ ID NO: 497629 - DNA, 55 bp, Artificial
  Synthetic oligonucleotide
tattgcaaacagaagaagtggagacggaagcttatttccgagccactcaatgccg

SEQ ID NO: 497630 - DNA, 55 bp, Artificial
  Synthetic oligonucleotide
tcacgggacattcagcgtgaattgagggatgttgaccggttattaaagtttaacc

SEQ ID NO: 497631 - DNA, 55 bp, Artificial
  Synthetic oligonucleotide
tcaggaggagatgctaagagatttatttatcgatgtactaggggtgacaagcgtt

SEQ ID NO: 497632 - DNA, 55 bp, Artificial
  Synthetic oligonucleotide
tcatcgtggtaaagatacaaaagagaaatacttacttgctagattcgaagatttt

SEQ ID NO: 497633 - DNA, 55 bp, Artificial
  Synthetic oligonucleotide
tcccaccgtgacgaggtgagtgtctttcggttcgatgtagcgggcaaactccctc

SEQ ID NO: 497634 - DNA, 55 bp, Artificial
  Synthetic oligonucleotide
tccctgaattcatcatttgactggatatgcaccttgtgttgaaaatcaccccgag

SEQ ID NO: 497635 - DNA, 55 bp, Artificial
  Synthetic oligonucleotide
tccctttcatatccaactcgttcttaataagacctctaaagccctcaaattgcct

SEQ ID NO: 497636 - DNA, 55 bp, Artificial
  Synthetic oligonucleotide
gtgacccgaaatgtgtcgcatcaaccattcaaaaggctgttcgcacgtcgtaccg

SEQ ID NO: 497637 - DNA, 55 bp, Artificial
  Synthetic oligonucleotide
gtgacttggcttaaacgtccaggtcccattgttaattttcggaatgtaatttctg

SEQ ID NO: 497638 - DNA, 55 bp, Artificial
  Synthetic oligonucleotide
gtgatagaaggtatgtgtgaagcttgtgtcttaccaacgctcccgacattatgtg

SEQ ID NO: 497639 - DNA, 55 bp, Artificial
  Synthetic oligonucleotide
gtgattccgcagtctgtaaaatttacggcaccggtccatattctcgtaaacgctt

SEQ ID NO: 497640 - DNA, 55 bp, Artificial
  Synthetic oligonucleotide
gtgcaaatatctctggaatgttcaatgcgtcttacgcctactaagtctttcccca

SEQ ID NO: 497641 - DNA, 55 bp, Artificial
  Synthetic oligonucleotide
gtgccaaactgtatgcctaagataccaaactgtgtacctgacgttccaaattgtg

SEQ ID NO: 497642 - DNA, 55 bp, Artificial
  Synthetic oligonucleotide
gtgccaccactttccctagattaattgataccatcagtctagcaaagcgacgaaa

SEQ ID NO: 497643 - DNA, 55 bp, Artificial
  Synthetic oligonucleotide
gtggaagtatcattgcatatatccctaatctgtttcgctagctcactatacttac

SEQ ID NO: 497644 - DNA, 55 bp, Artificial
  Synthetic oligonucleotide
gtggtaacattatgcgggcatgctgctgataactgtccagtaacaccgcctcatg

SEQ ID NO: 497645 - DNA, 55 bp, Artificial
  Synthetic oligonucleotide
gtggtgctggttcgacagttgctcgtgtaataagtggccctggtcacactggagg

SEQ ID NO: 497646 - DNA, 55 bp, Artificial
  Synthetic oligonucleotide
gtgtaactcgttgttttgatcgagcaaaatgattcctttggggcttcgttccgga

SEQ ID NO: 497647 - DNA, 55 bp, Artificial
  Synthetic oligonucleotide
gtgtggcggccgaataataattttgtatccccattacagtcgtgttaaatctcca

SEQ ID NO: 497648 - DNA, 55 bp, Artificial
  Synthetic oligonucleotide
gtgttctttcgctaattgctcaatataagctgtttccgcttctctccaatgcgca

SEQ ID NO: 497649 - DNA, 55 bp, Artificial
  Synthetic oligonucleotide
gtgttgtggatagctgttgtctacaaggtgtggtaattgtggataagttccccta

SEQ ID NO: 497650 - DNA, 55 bp, Artificial
  Synthetic oligonucleotide
gttaaatcacaaaccgtaatctcctcgtcacttacccgccctcttagccttcccg

SEQ ID NO: 497651 - DNA, 55 bp, Artificial
  Synthetic oligonucleotide
gttagtataagcaggtccactaattctggctgtatattagatatttcctctaaat

SEQ ID NO: 497652 - DNA, 55 bp, Artificial
  Synthetic oligonucleotide
gttattaggcaacgtcaatatgctacaagagtccctactcctgatatttcgaagt

SEQ ID NO: 497653 - DNA, 55 bp, Artificial
  Synthetic oligonucleotide
gttcgttttgaggaactaccaagaggatggaaaatcggttgcacgtgtccattcc

SEQ ID NO: 497654 - DNA, 55 bp, Artificial
  Synthetic oligonucleotide
gttgatacgtgcagcggatttatcaccctcttggcatttcctcaaaacgaaccgc

SEQ ID NO: 497655 - DNA, 55 bp, Artificial
  Synthetic oligonucleotide
gttggcgctatcgtgctcacaaggtatcgaagacccgcaacatagttgtcaggct

SEQ ID NO: 497656 - DNA, 55 bp, Artificial
  Synthetic oligonucleotide
gttgtacagtcgctctcaatcgttgatacaagccctaattcccctcgggcaacta

SEQ ID NO: 497657 - DNA, 55 bp, Artificial
  Synthetic oligonucleotide
gtttgcttccatcgccaagccgataaactcaaaagtgggatttaggcatatcggc

SEQ ID NO: 497658 - DNA, 55 bp, Artificial
  Synthetic oligonucleotide
ttccaaactgcttatagaggaaaaggtgttaaggttgcaatacttgactcaggta

SEQ ID NO: 497659 - DNA, 55 bp, Artificial
  Synthetic oligonucleotide
ttccatatcaatgatttcatggctacgctgctggtaaaagcccgcaacaagaccc

SEQ ID NO: 497660 - DNA, 55 bp, Artificial
  Synthetic oligonucleotide
ttcctagttctccaaaatattccgccgaaaccttttatcatcgcaactaactcct

SEQ ID NO: 497661 - DNA, 55 bp, Artificial
  Synthetic oligonucleotide
ttcgaaaggtccattaaatgtatccgagttacagaagttactacgtgttccccaa

SEQ ID NO: 497662 - DNA, 55 bp, Artificial
  Synthetic oligonucleotide
ttcgcacgggataaatcttgatcatccagtccgtagtcattcatccccggtccta

SEQ ID NO: 497663 - DNA, 55 bp, Artificial
  Synthetic oligonucleotide
ttcgccatgcggtcacttataaggtatccgtatgtatagaccctgttcactcagc

SEQ ID NO: 497664 - DNA, 55 bp, Artificial
  Synthetic oligonucleotide
ttctgtgatcgattttctttctgccaaagcgactgcaaatgcggcattaaacgtg

SEQ ID NO: 497665 - DNA, 55 bp, Artificial
  Synthetic oligonucleotide
ttcttccttatgtacatctcaaaggaaaagggtttcgacgtgcaaagcgcttacc

SEQ ID NO: 497666 - DNA, 55 bp, Artificial
  Synthetic oligonucleotide
ttgctcgacttgaacaagcaattgtaccagccgaaccacccagttctcccaaccg

SEQ ID NO: 497667 - DNA, 55 bp, Artificial
  Synthetic oligonucleotide
ttggctgaagcatggagaagagtaaaacggaatcaagggagcggtgggattgatg

SEQ ID NO: 497668 - DNA, 55 bp, Artificial
  Synthetic oligonucleotide
ttggggccgttacaaatgttgtaaatcttgctggggtaggagccacactcgttgc

SEQ ID NO: 497669 - DNA, 55 bp, Artificial
  Synthetic oligonucleotide
ttgggtagcttctgcaatcgattgtgcttctccactgtctaataattcctttgcg

SEQ ID NO: 497670 - DNA, 55 bp, Artificial
  Synthetic oligonucleotide
ttggtaatcagcatagcacgaagattgagagaatccaataatttggtctagcacg

SEQ ID NO: 497671 - DNA, 55 bp, Artificial
  Synthetic oligonucleotide
ttggtggatgctgaagctagccgttttattacaccttaataagttgtctggtagc

SEQ ID NO: 497672 - DNA, 55 bp, Artificial
  Synthetic oligonucleotide
ttgttccaatatagcataagcgactccgacagcactgttattacgttgaagtggt

SEQ ID NO: 497673 - DNA, 55 bp, Artificial
  Synthetic oligonucleotide
tttaaatgtgccggttgttattgtaagacgggacagcagggtcacagaaggttct

SEQ ID NO: 497674 - DNA, 55 bp, Artificial
  Synthetic oligonucleotide
tttccccggattatccagacggttgaaatatacgttggccggtccggcgattaag

SEQ ID NO: 497675 - DNA, 55 bp, Artificial
  Synthetic oligonucleotide
tttcccggggtggggttgcctttgggagtttgagggatgccggccaccctagcaa

SEQ ID NO: 497676 - DNA, 55 bp, Artificial
  Synthetic oligonucleotide
tttggtattccccagccccggcatctgcatagataccaaacggattgtaaactcc

SEQ ID NO: 497677 - DNA, 55 bp, Artificial
  Synthetic oligonucleotide
ttttactgacaggaaaatggacggtagttgctactgcttttcttacaggatgtgt

SEQ ID NO: 497678 - DNA, 55 bp, Artificial
  Synthetic oligonucleotide
ttttcatcctcttaacgcttaactatccctggcgcgcatccgcctaaggccgaat

SEQ ID NO: 497679 - DNA, 55 bp, Artificial
  Synthetic oligonucleotide
ttttcttgtttggttaataccgacattactactcgcgctaagcacacgttactcc

SEQ ID NO: 497680 - DNA, 55 bp, Artificial
  Synthetic oligonucleotide
tccgctacgctccatgtacacaatgaaaaggctctgcgaggctgttttggctatc

SEQ ID NO: 497681 - DNA, 55 bp, Artificial
  Synthetic oligonucleotide
tcgccaactcgaccaaacacacaagggtcaccaccctttaacctagtaacggtct

SEQ ID NO: 497682 - DNA, 55 bp, Artificial
  Synthetic oligonucleotide
tctcacgccttcactctgacgtaatgtaattccgtcccactgcatgccatcttta

SEQ ID NO: 497683 - DNA, 55 bp, Artificial
  Synthetic oligonucleotide
tctcatgagaatcgtggtcttgaagttcttccaacgattcatttaggccatgtcg

SEQ ID NO: 497684 - DNA, 55 bp, Artificial
  Synthetic oligonucleotide
tctcttcgtaccgatttagcctgaacgattctttgtcccagttcggtttcgaaaa

SEQ ID NO: 497685 - DNA, 55 bp, Artificial
  Synthetic oligonucleotide
tcttactcagaccataggggtgattaaacgtggctggaaccgttggatcaaactg

SEQ ID NO: 497686 - DNA, 55 bp, Artificial
  Synthetic oligonucleotide
tgaatccttttcttcgatatagccctgtttaagctcctccaaagaagcgtcccag

SEQ ID NO: 497687 - DNA, 55 bp, Artificial
  Synthetic oligonucleotide
tgacaggccaagagggtgaagaatcaattgcacgtgtcaattccttaatgctcct

SEQ ID NO: 497688 - DNA, 55 bp, Artificial
  Synthetic oligonucleotide
tgatggcaacccgttaacgtttagcttacaaacggcacccggaaacggagtagcc

SEQ ID NO: 497689 - DNA, 55 bp, Artificial
  Synthetic oligonucleotide
tgatggtaaatcctatggttctagcatttgggtgtggagtggttggaaatgggaa

SEQ ID NO: 497690 - DNA, 55 bp, Artificial
  Synthetic oligonucleotide
tgcagctaacctgccctgttaacttcaataaagaaggcgtttattcctgcttgag

SEQ ID NO: 497691 - DNA, 55 bp, Artificial
  Synthetic oligonucleotide
tgcaggattcgctgatgtacttgcagttattccatgtgatgtatggagcgcagac

SEQ ID NO: 497692 - DNA, 55 bp, Artificial
  Synthetic oligonucleotide
tgctacaacgaggtttcccttcgcggtcaacaatcaacggttcattggatgaggc

SEQ ID NO: 497693 - DNA, 55 bp, Artificial
  Synthetic oligonucleotide
tggaaggtaactcgtatgtactattgtttgccagcagctatttcagtgctagggg

SEQ ID NO: 497694 - DNA, 55 bp, Artificial
  Synthetic oligonucleotide
tggaattaccgcctgtgactacgccaggtcggcccggaataagcctatcggcgcc

SEQ ID NO: 497695 - DNA, 55 bp, Artificial
  Synthetic oligonucleotide
tggattccgtagtccgcttgcttccaggggttcttggaaatgaacagtcagctcc

SEQ ID NO: 497696 - DNA, 55 bp, Artificial
  Synthetic oligonucleotide
tggctctctggcaggaggagcactcatagaatccttcggcggtgcaacaatgtat

SEQ ID NO: 497697 - DNA, 55 bp, Artificial
  Synthetic oligonucleotide
tgtatctgggtcagtcaacgtacagcgagtgattctctcgttcgactatgcagtc

SEQ ID NO: 497698 - DNA, 55 bp, Artificial
  Synthetic oligonucleotide
tgtcggtcttattctagtcaagacgtgtttgaaagtgggataatattttgagggg

SEQ ID NO: 497699 - DNA, 55 bp, Artificial
  Synthetic oligonucleotide
ttacgtgttgttacctctatggcaatgtaaccgccatgtgcctcgctatagacag

SEQ ID NO: 497700 - DNA, 55 bp, Artificial
  Synthetic oligonucleotide
ttagaaagttacgctaacgatgatacattaggggatgcattatgggcaggaaccg

SEQ ID NO: 497701 - DNA, 55 bp, Artificial
  Synthetic oligonucleotide
ttagagcgtcgaaatcaaaatgggcatgggagctgcgttttatggttcacaggac

SEQ ID NO: 497702 - DNA, 55 bp, Artificial
  Synthetic oligonucleotide
ttatccaaaccatccgtattatccgatgatcgacgagtattgttttcggtcaaaa

SEQ ID NO: 497703 - DNA, 55 bp, Artificial
  Synthetic oligonucleotide
ggatctcagctactggtgcaggattactacaaccttcaggttccatggtcccagc

SEQ ID NO: 497704 - DNA, 55 bp, Artificial
  Synthetic oligonucleotide
ggatgtctcacgaatgtaatagatacaaattcttatgaagaggctcagtccggtc

SEQ ID NO: 497705 - DNA, 55 bp, Artificial
  Synthetic oligonucleotide
ggatttgtttattcacaagcgctaaaagagtttctatcacgacaggacggactcc

SEQ ID NO: 497706 - DNA, 55 bp, Artificial
  Synthetic oligonucleotide
ggcacccctggatttccttccggcaatttcggaagttatccgtaccccggaggcc

SEQ ID NO: 497707 - DNA, 55 bp, Artificial
  Synthetic oligonucleotide
ggcaccgctatgttggcttagaagggaaaatattgggtattgatacgtttggtgc

SEQ ID NO: 497708 - DNA, 55 bp, Artificial
  Synthetic oligonucleotide
ggcagcgcacatgtatcggtttagttacgatagccagtgataaggttatagccga

SEQ ID NO: 497709 - DNA, 55 bp, Artificial
  Synthetic oligonucleotide
ggccgtaaccgtcacataatacgagggtactaccgaggggtataggcagggacgc

SEQ ID NO: 497710 - DNA, 55 bp, Artificial
  Synthetic oligonucleotide
ggcctggtgtcctggcgttcgccaaattgacaggtcaagatcataatctagtcga

SEQ ID NO: 497711 - DNA, 55 bp, Artificial
  Synthetic oligonucleotide
ggcctttccgactggataggaaatcaattggcggcacttgaaggaatgaaccttc

SEQ ID NO: 497712 - DNA, 55 bp, Artificial
  Synthetic oligonucleotide
ggcgaaaacgttaaaagcagcggatgctccagctatattctttgtaaacggccac

SEQ ID NO: 497713 - DNA, 55 bp, Artificial
  Synthetic oligonucleotide
ggcgagaaagcagaacaaactcaaatctaactgttatcggccgcccaggtgtagg

SEQ ID NO: 497714 - DNA, 55 bp, Artificial
  Synthetic oligonucleotide
ggcgcaggattagctgtgtttgcaagcgccattgtcgcattattattccaagttg

SEQ ID NO: 497715 - DNA, 55 bp, Artificial
  Synthetic oligonucleotide
ggcggcttggatgctgttatggaagaacacacccttgatgcaattctgacaccga

SEQ ID NO: 497716 - DNA, 55 bp, Artificial
  Synthetic oligonucleotide
ggcgttggaccgattttaggtgccactatactaagtgaaattggggatatacacc

SEQ ID NO: 497717 - DNA, 55 bp, Artificial
  Synthetic oligonucleotide
ggctactatgtgtcaccgttacattgtcggctgatgccggacttcctccacttgg

SEQ ID NO: 497718 - DNA, 55 bp, Artificial
  Synthetic oligonucleotide
ggctctatcagcagattgaaaagttttcttagcaatatctacttgctccttagca

SEQ ID NO: 497719 - DNA, 55 bp, Artificial
  Synthetic oligonucleotide
ggctttgtagccgcttttatttcactccatccaagcgaaagtctcctaagatatg

SEQ ID NO: 497720 - DNA, 55 bp, Artificial
  Synthetic oligonucleotide
gggaagtatatgggagtggtctagttgcagttaataccgcctgaaaagtgatctg

SEQ ID NO: 497721 - DNA, 55 bp, Artificial
  Synthetic oligonucleotide
gggaataaaacaaactggcatcacagcaggatcagctctggccagtttgatactg

SEQ ID NO: 497722 - DNA, 55 bp, Artificial
  Synthetic oligonucleotide
gggagatccacttccatccacggcacgcaatacagaacgccaatacatgtgtttg

SEQ ID NO: 497723 - DNA, 55 bp, Artificial
  Synthetic oligonucleotide
gggagcattctagactaggaaaatcggggttcctaaaagattccctaaatttagg

SEQ ID NO: 497724 - DNA, 55 bp, Artificial
  Synthetic oligonucleotide
gggatcagcggtttatgctgatccctgaaaggagcattaaggaatggacacgtgc

SEQ ID NO: 497725 - DNA, 55 bp, Artificial
  Synthetic oligonucleotide
gcttgccttagtggatcttcagctcgtgctgagactgcgattactcgtcccaccg

SEQ ID NO: 497726 - DNA, 55 bp, Artificial
  Synthetic oligonucleotide
gctttaagtgtggccaacaagtcattccgcatgagctatatgtatcgcccgacga

SEQ ID NO: 497727 - DNA, 55 bp, Artificial
  Synthetic oligonucleotide
ggaacacatcttttaacgttattagcatagcctgacggagtggaagtgtactata

SEQ ID NO: 497728 - DNA, 55 bp, Artificial
  Synthetic oligonucleotide
ggaatatgttcccttattggaattgattgaatcgttagaacggggccaccttgca

SEQ ID NO: 497729 - DNA, 55 bp, Artificial
  Synthetic oligonucleotide
ggaatgacgaaccctgtattggcatgcgtatagaaactaaccccgacctagcctc

SEQ ID NO: 497730 - DNA, 55 bp, Artificial
  Synthetic oligonucleotide
ggaatggttccatacaagaaaatgtctctaaatcagtctgtcctactcgattcag

SEQ ID NO: 497731 - DNA, 55 bp, Artificial
  Synthetic oligonucleotide
ggaattctcttgcccctattaactctaatgggttatagtccaggtatagccacaa

SEQ ID NO: 497732 - DNA, 55 bp, Artificial
  Synthetic oligonucleotide
ggacacgtgcagccgattctccatcctcttggcagttcctcaaaacgaatcgttt

SEQ ID NO: 497733 - DNA, 55 bp, Artificial
  Synthetic oligonucleotide
ggacaggctcaaaatgtgccaaccgccacactcgagatttccctttaatagccgg

SEQ ID NO: 497734 - DNA, 55 bp, Artificial
  Synthetic oligonucleotide
ggaccaattcggaaagatgattgcgtacgatatgattgactccaattcaccgcac

SEQ ID NO: 497735 - DNA, 55 bp, Artificial
  Synthetic oligonucleotide
ggacgttattttgcgtttggttgaggaggacgttatctcgaatagagaggcgaag

SEQ ID NO: 497736 - DNA, 55 bp, Artificial
  Synthetic oligonucleotide
ggactaactgatcattttgcctgtgtgcgttaccgacctgattgagtctgctgtt

SEQ ID NO: 497737 - DNA, 55 bp, Artificial
  Synthetic oligonucleotide
ggagaacaactagaaataatggctctaggagaaaaggtatatagcacagagccta

SEQ ID NO: 497738 - DNA, 55 bp, Artificial
  Synthetic oligonucleotide
ggagaagcttggggatataagtcagttacggtggacgggttttatgatagacagg

SEQ ID NO: 497739 - DNA, 55 bp, Artificial
  Synthetic oligonucleotide
ggagaccagtccattggcttatttcctttgtatagggcaacccaatctacagtgg

SEQ ID NO: 497740 - DNA, 55 bp, Artificial
  Synthetic oligonucleotide
ggagcaaacccggcagataatattcccagcattagctgtcactcatttcaatccg

SEQ ID NO: 497741 - DNA, 55 bp, Artificial
  Synthetic oligonucleotide
ggagcatttcacgataggattccatgtcatgtatgaggaaattacgaatcgcgtc

SEQ ID NO: 497742 - DNA, 55 bp, Artificial
  Synthetic oligonucleotide
ggagccatactagcaagtggaatatgcgaagcgtatggagctaatagtagaagtg

SEQ ID NO: 497743 - DNA, 55 bp, Artificial
  Synthetic oligonucleotide
ggagtaaaggggaaacaatgggagttaaacaattactgtcagaggcacaacgaaa

SEQ ID NO: 497744 - DNA, 55 bp, Artificial
  Synthetic oligonucleotide
ggagtgccttcctatcttgggaaccttgttaagaaacctcggaaaacacttaagc

SEQ ID NO: 497745 - DNA, 55 bp, Artificial
  Synthetic oligonucleotide
ggataaagaggacgatactataggcggtaaggttgaagtaccatcagctcacatc

SEQ ID NO: 497746 - DNA, 55 bp, Artificial
  Synthetic oligonucleotide
ggatatgcggaacacaaaatatccgttttctggaccccttttctataattcttag

SEQ ID NO: 497747 - DNA, 55 bp, Artificial
  Synthetic oligonucleotide
ggttggggaaaagctgatgcttttacaatcttcttcaatggtcttcctcctgtag

SEQ ID NO: 497748 - DNA, 55 bp, Artificial
  Synthetic oligonucleotide
ggttttggcggaatcacacaatcactcctttaaccattcatcaatctgtttcggt

SEQ ID NO: 497749 - DNA, 55 bp, Artificial
  Synthetic oligonucleotide
gtaaaatcattgagaaagacagtatagaaagagaaaaggtccttagagagacccg

SEQ ID NO: 497750 - DNA, 55 bp, Artificial
  Synthetic oligonucleotide
gtaacactgagggaagcgagttatccgattccgggagaagctaagcatgactggc

SEQ ID NO: 497751 - DNA, 55 bp, Artificial
  Synthetic oligonucleotide
gtaataaagtaccgtatactacagccttatcatagtcgtatccacctaaatgtgc

SEQ ID NO: 497752 - DNA, 55 bp, Artificial
  Synthetic oligonucleotide
gtacaaagcataagctctcgcattagaaccatctactccagtctcagaacgggct

SEQ ID NO: 497753 - DNA, 55 bp, Artificial
  Synthetic oligonucleotide
gtacgagcgagagcgagatacacgtaggaccgtagggacaagaagaagacagagc

SEQ ID NO: 497754 - DNA, 55 bp, Artificial
  Synthetic oligonucleotide
gtacttgcaatgggaatgttcggggccacaacacaaattggtgacaatcaagggt

SEQ ID NO: 497755 - DNA, 55 bp, Artificial
  Synthetic oligonucleotide
gtagagacggtaaatgagcgtcaaaaggtccgttggctattcttaacccttaccg

SEQ ID NO: 497756 - DNA, 55 bp, Artificial
  Synthetic oligonucleotide
gtagagcgctatcagcgtcagtctagagaatttaagcaggcgattgccttggagc

SEQ ID NO: 497757 - DNA, 55 bp, Artificial
  Synthetic oligonucleotide
gtagaggataacccctatggagctgtaagatttgctggagagccactcccacctg

SEQ ID NO: 497758 - DNA, 55 bp, Artificial
  Synthetic oligonucleotide
gtagttacgctgcgattcggtggcacttacaccgcttatggacaaaagtttaaga

SEQ ID NO: 497759 - DNA, 55 bp, Artificial
  Synthetic oligonucleotide
gtataccacacagaccctgcactctcctaaattaatcatgacttttgctcgctat

SEQ ID NO: 497760 - DNA, 55 bp, Artificial
  Synthetic oligonucleotide
gtatgtttcgaaaggaaaaggatacaacgatagagatccaaacggaacaacagtt

SEQ ID NO: 497761 - DNA, 55 bp, Artificial
  Synthetic oligonucleotide
gtcaatctcaggctggtacgtgccgtcctcaatagattggtgaagcgtgcataac

SEQ ID NO: 497762 - DNA, 55 bp, Artificial
  Synthetic oligonucleotide
gtcactcgttgggtggtactgtcgattcaacggcacacattacggtccgtctgtg

SEQ ID NO: 497763 - DNA, 55 bp, Artificial
  Synthetic oligonucleotide
gtccatcgtgaaagaaagtcaatacgtggcattacaacaattaacaggagctcgt

SEQ ID NO: 497764 - DNA, 55 bp, Artificial
  Synthetic oligonucleotide
gtcctccaccaaatacataggtagaacgccctatccattggcgacctacatcggc

SEQ ID NO: 497765 - DNA, 55 bp, Artificial
  Synthetic oligonucleotide
gtcgaacgagagaatcactcgctgtacgttgactgacccagatacatatggtagc

SEQ ID NO: 497766 - DNA, 55 bp, Artificial
  Synthetic oligonucleotide
gtcgagcgtaattcgaacggatggacagcagatatatagtccggagtcgaatacg

SEQ ID NO: 497767 - DNA, 55 bp, Artificial
  Synthetic oligonucleotide
gtcggcgttataacgataggattcgcaaggaatctctcagccgtgcttgtcgccg

SEQ ID NO: 497768 - DNA, 55 bp, Artificial
  Synthetic oligonucleotide
gtcttgctaggtgcgtcaacaccttggaagatgagcggtactggcatacttcgtg

SEQ ID NO: 497769 - DNA, 55 bp, Artificial
  Synthetic oligonucleotide
gggccaattactaatacgataatcaccgctaacgcgattaacataccgttttctg

SEQ ID NO: 497770 - DNA, 55 bp, Artificial
  Synthetic oligonucleotide
gggcgtttcgggctacagatggggcgtcctttgaagtggggagggatataggcaa

SEQ ID NO: 497771 - DNA, 55 bp, Artificial
  Synthetic oligonucleotide
gggcttgttaagaatgaactagttggaagggaagtagaggattactttgagcgtg

SEQ ID NO: 497772 - DNA, 55 bp, Artificial
  Synthetic oligonucleotide
ggggaaacggttaccaccatttatggcgacaatgacatgcagactgcgctggtag

SEQ ID NO: 497773 - DNA, 55 bp, Artificial
  Synthetic oligonucleotide
ggggaagaccacatcgctatcaagttaagcttatgcaaagtcaattttaggcgag

SEQ ID NO: 497774 - DNA, 55 bp, Artificial
  Synthetic oligonucleotide
ggggcagcaacgaaaagagataacctagagaaacgggcgaaagatgcgaaggctc

SEQ ID NO: 497775 - DNA, 55 bp, Artificial
  Synthetic oligonucleotide
ggggctagcctgggacttgcagagaatcaatgataggaatgaagtgtttcatcga

SEQ ID NO: 497776 - DNA, 55 bp, Artificial
  Synthetic oligonucleotide
gggtatactttctttaggagcttaacgctaggagtaagtgtataggagagtgagg

SEQ ID NO: 497777 - DNA, 55 bp, Artificial
  Synthetic oligonucleotide
gggtgtcgtagcagactcgaatccgatggacttgtacttcttcatatcaggtcaa

SEQ ID NO: 497778 - DNA, 55 bp, Artificial
  Synthetic oligonucleotide
gggttgtgatcttcgaaatagtcatcaaatatgtgttccaaaacgatactgctgt

SEQ ID NO: 497779 - DNA, 55 bp, Artificial
  Synthetic oligonucleotide
ggtaggggtagaaccagcatctccgagtgaaacggacatttttttgaatgttcgg

SEQ ID NO: 497780 - DNA, 55 bp, Artificial; identical to SEQ ID NO: 147769
  Synthetic oligonucleotide

SEQ ID NO: 497781 - DNA, 55 bp, Artificial
  Synthetic oligonucleotide
ggtcaaattgaccgctttgccgacgaaacacgtatcgcaaaatatgcaggcctct

SEQ ID NO: 497782 - DNA, 55 bp, Artificial
  Synthetic oligonucleotide
ggtcggcggacacactagagatatctcgagacgtccaagcaatgattctaaatcg

SEQ ID NO: 497783 - DNA, 55 bp, Artificial
  Synthetic oligonucleotide
ggtgaaaccgcgacgttggataacgtgaacatcgatcaccttttagagtgtgttc

SEQ ID NO: 497784 - DNA, 55 bp, Artificial
  Synthetic oligonucleotide
ggtgaaataaccacatgctctatccccgaaaagactagctggtcaacaaagtgtg

SEQ ID NO: 497785 - DNA, 55 bp, Artificial
  Synthetic oligonucleotide
ggtgagaataacgggagtaagtcgtaattctattaataagttgtggcacaatgag

SEQ ID NO: 497786 - DNA, 55 bp, Artificial
  Synthetic oligonucleotide
ggtgcagcatggtatggaagcgcgaccggtcatactatattggctgttggacaac

SEQ ID NO: 497787 - DNA, 55 bp, Artificial
  Synthetic oligonucleotide
ggtggatagcagtgatacagtcgctgtagtaagcgcagggattgtagttgtgggt

SEQ ID NO: 497788 - DNA, 55 bp, Artificial
  Synthetic oligonucleotide
ggtgggatcagtggttgaaaggcattgatactggtgtgaaagatgatccaaaact

SEQ ID NO: 497789 - DNA, 55 bp, Artificial
  Synthetic oligonucleotide
ggtgtggtagaaacagtcagtaatcgtgtttcagtaaaggatacggttggtgaaa

SEQ ID NO: 497790 - DNA, 55 bp, Artificial
  Synthetic oligonucleotide
ggttgcaccggttatagcagccgctacgatccatacaggagtggacatagtagcg

SEQ ID NO: 497791 - DNA, 55 bp, Artificial
  Synthetic oligonucleotide
ggttggaaaatgtctgttgagaaatcaaacttctccgttaacccctcatcaaagt

SEQ ID NO: 497792 - DNA, 55 bp, Artificial
  Synthetic oligonucleotide
catctccataaagaccttataagcctccatagactctctgcttgcttgtttccca

SEQ ID NO: 497793 - DNA, 55 bp, Artificial
  Synthetic oligonucleotide
catggaaaagcgtcagcttttatcatgccaaggcaggagcattttgccctccatg

SEQ ID NO: 497794 - DNA, 55 bp, Artificial
  Synthetic oligonucleotide
catggaaacctgccttagcaagataaattgccagggtagagccggcacatctagc

SEQ ID NO: 497795 - DNA, 55 bp, Artificial
  Synthetic oligonucleotide
catggcagaacgtttagtagggaagcaagctccgcgttttgaaatggaagcagta

SEQ ID NO: 497796 - DNA, 55 bp, Artificial
  Synthetic oligonucleotide
cattacggttcttatatgccttacgggtgtggttgctttgggcaaaacaaaccag

SEQ ID NO: 497797 - DNA, 55 bp, Artificial
  Synthetic oligonucleotide
cattcaactttatcgagataacatgccagaactaagatggttaatggcaaaccac

SEQ ID NO: 497798 - DNA, 55 bp, Artificial
  Synthetic oligonucleotide
cattccctcagatcctcacgtacagactaggtacgctccggtcttcgttcacttg

SEQ ID NO: 497799 - DNA, 55 bp, Artificial
  Synthetic oligonucleotide
cattgaaggagacccattgtataaagggcgtgctattcaattatcagccgcgagg

SEQ ID NO: 497800 - DNA, 55 bp, Artificial
  Synthetic oligonucleotide
cattgtagcaccattataacaccgttaatgcgaagtcactaatgccatttgctac

SEQ ID NO: 497801 - DNA, 55 bp, Artificial
  Synthetic oligonucleotide
ccaaacatgaccgcaaagatgcgctagtaatcgctcgcctcataaaagatgggcg

SEQ ID NO: 497802 - DNA, 55 bp, Artificial
  Synthetic oligonucleotide
ccaacaaaggaattgtatcccactgggttaacaacatatgacgctctgattgaag

SEQ ID NO: 497803 - DNA, 55 bp, Artificial
  Synthetic oligonucleotide
ccaactattactcgtgaaggaaacgttgttactttcactgcaaaagcaggtacaa

SEQ ID NO: 497804 - DNA, 55 bp, Artificial
  Synthetic oligonucleotide
ccaactgttcatgatatctcctgtaagtaccacttgtaagatgtattgccccaaa

SEQ ID NO: 497805 - DNA, 55 bp, Artificial
  Synthetic oligonucleotide
ccacatatgcatattggtgtgatgccaattacagaagacaaccgtttgtcggcaa

SEQ ID NO: 497806 - DNA, 55 bp, Artificial
  Synthetic oligonucleotide
ccacatgggaacgctgctttcttgggttaccttctataacaattacaactgccga

SEQ ID NO: 497807 - DNA, 55 bp, Artificial
  Synthetic oligonucleotide
ccactaacgtacgggttactgacaggtccagcaaatgggacggtggtagtaaatc

SEQ ID NO: 497808 - DNA, 55 bp, Artificial
  Synthetic oligonucleotide
ccactcgattacacctctttatagcgcttctgtaacaattgctgtacacgtgccg

SEQ ID NO: 497809 - DNA, 55 bp, Artificial
  Synthetic oligonucleotide
ccagaacattatttaaccagcgagtgcttgaaggcataaatgactgcctgggttc

SEQ ID NO: 497810 - DNA, 55 bp, Artificial
  Synthetic oligonucleotide
ccagcatatggatggaaccatattagcgcagagaggacgaatcgacttctaccag

SEQ ID NO: 497811 - DNA, 55 bp, Artificial
  Synthetic oligonucleotide
ccagccccggcctagtggacaagtcttggtcggtggcatccgcatggtagacatc

SEQ ID NO: 497812 - DNA, 55 bp, Artificial
  Synthetic oligonucleotide
ccagtcaccttctccatatacttggtatccttctgggtcctgctctttacgtaac

SEQ ID NO: 497813 - DNA, 55 bp, Artificial
  Synthetic oligonucleotide
cagcattggctgcagaggccctaaaagacattattcctaactctcgtccaaagcg

SEQ ID NO: 497814 - DNA, 55 bp, Artificial
  Synthetic oligonucleotide
cagccacgatagtataagcaacatccggtttcaagcttaccctgtttagggagag

SEQ ID NO: 497815 - DNA, 55 bp, Artificial
  Synthetic oligonucleotide
cagccgtacaagtgtccatgatattaccgaccgaatcctccttgatttggcgaag

SEQ ID NO: 497816 - DNA, 55 bp, Artificial
  Synthetic oligonucleotide
cagcggtaaacctagtaacgttaaattgctcccaaacgaagctaaggttgtccgg

SEQ ID NO: 497817 - DNA, 55 bp, Artificial
  Synthetic oligonucleotide
cagctcacgctgtcgatgaatcgtttatacaaaggggcatcgaactacatatgca

SEQ ID NO: 497818 - DNA, 55 bp, Artificial
  Synthetic oligonucleotide
cagctgttacacctactgacggtgctaaaaccctggtaaaagggattctttctcc

SEQ ID NO: 497819 - DNA, 55 bp, Artificial
  Synthetic oligonucleotide
caggaaatccgtacttacgttattacctagttgaagccgccaactctgtaagacg

SEQ ID NO: 497820 - DNA, 55 bp, Artificial
  Synthetic oligonucleotide
caggactgacagtcagatcacgtttcattcttgcgatcgtcattagttcaagagc

SEQ ID NO: 497821 - DNA, 55 bp, Artificial
  Synthetic oligonucleotide
caggagaccaatttcttagacaagttgtttacgccagcagttaagaacgtagagc

SEQ ID NO: 497822 - DNA, 55 bp, Artificial
  Synthetic oligonucleotide
caggagctggtaacaagcagttgggatacatctgaaagtagaccacgtaagtact

SEQ ID NO: 497823 - DNA, 55 bp, Artificial
  Synthetic oligonucleotide
caggggcaattatggttggggcagcttctgcaagggtccctcataaacgttcata

SEQ ID NO: 497824 - DNA, 55 bp, Artificial
  Synthetic oligonucleotide
caggtgtgcattctggagtgcaagtggattatactccggatggcattaatttgaa

SEQ ID NO: 497825 - DNA, 55 bp, Artificial
  Synthetic oligonucleotide
cagtataacctccaacagcaatacgtggaatttggatcgttttcgctccagtcca

SEQ ID NO: 497826 - DNA, 55 bp, Artificial
  Synthetic oligonucleotide
cagttgtgggaattggacgaactagaattggcggtcttactcgttataacgatca

SEQ ID NO: 497827 - DNA, 55 bp, Artificial
  Synthetic oligonucleotide
catacagcttacgctgaatgcttgtactggcgtccgtactcttcggcggtcgact

SEQ ID NO: 497828 - DNA, 55 bp, Artificial
  Synthetic oligonucleotide
catacgggattggaggaactaacaccgcatgtacttagacatacttttggccatg

SEQ ID NO: 497829 - DNA, 55 bp, Artificial
  Synthetic oligonucleotide
catactgacttcccaatatggttcaccgtctactaaccctagaaagcgaatcatc

SEQ ID NO: 497830 - DNA, 55 bp, Artificial
  Synthetic oligonucleotide
catagagtgtgggtagagcctgggctggaagcttgtctctcagtgaatgtgctat

SEQ ID NO: 497831 - DNA, 55 bp, Artificial
  Synthetic oligonucleotide
catcaaaaggacgagttttatctaattttggatcttgttgcgtaattgctcggtc

SEQ ID NO: 497832 - DNA, 55 bp, Artificial
  Synthetic oligonucleotide
catcgtccaaaacctaccgttccatctaaaaccagcaacagatcttggccctaca

SEQ ID NO: 497833 - DNA, 55 bp, Artificial
  Synthetic oligonucleotide
catctaacttttgtgccgtaatttcagaaaacctaacagggacacgtctcctctt

SEQ ID NO: 497834 - DNA, 55 bp, Artificial
  Synthetic oligonucleotide
cccctaatagtttaattcagcttatggcatcagcttttgttacatgtacagtacc

SEQ ID NO: 497835 - DNA, 55 bp, Artificial
  Synthetic oligonucleotide
cccctcttataataattggtgagcgttttgacttctatctatgcccgcccagccg

SEQ ID NO: 497836 - DNA, 55 bp, Artificial
  Synthetic oligonucleotide
cccctcttttagcatccgaagggcaaccgtccctttcggtgaccgtgacatcacc

SEQ ID NO: 497837 - DNA, 55 bp, Artificial
  Synthetic oligonucleotide
ccccttgaataccaggaggtccctgaggtcctgttggtcctggatctccaatctc

SEQ ID NO: 497838 - DNA, 55 bp, Artificial
  Synthetic oligonucleotide
cccgcttcttcgtaagtgaagttgtctctcttccctgctcgtacttctgatatct

SEQ ID NO: 497839 - DNA, 55 bp, Artificial
  Synthetic oligonucleotide
cccggatagaagattctaatgtcgtagttggttgccaacccaagtcagttagtgc

SEQ ID NO: 497840 - DNA, 55 bp, Artificial
  Synthetic oligonucleotide
cccgtattgaagctagtcaatgtccgtcgaaaacttatcctatcatccaggatgg

SEQ ID NO: 497841 - DNA, 55 bp, Artificial
  Synthetic oligonucleotide
ccctaacgccctgattgtagggttactgaaccatgctctattatacacatcgtat

SEQ ID NO: 497842 - DNA, 55 bp, Artificial
  Synthetic oligonucleotide
ccctcctttacctgagggatgtacgttgcatagcgaccaaggttcggtttacaca

SEQ ID NO: 497843 - DNA, 55 bp, Artificial
  Synthetic oligonucleotide
ccctgacttcgttatactgctcttaatctcaaaagacggtactaaggtgtaggat

SEQ ID NO: 497844 - DNA, 55 bp, Artificial
  Synthetic oligonucleotide
ccctgttacaaggagaaaatcctaagtggcgaaacaaaatgctagaagccgcttc

SEQ ID NO: 497845 - DNA, 55 bp, Artificial
  Synthetic oligonucleotide
cccttggaaaattcgctcggtccactaacaacacatggaaacctgccttagcaag

SEQ ID NO: 497846 - DNA, 55 bp, Artificial
  Synthetic oligonucleotide
cccttgtctgaaggcgattcatccaccacttactcactgggatttgcccttcaca

SEQ ID NO: 497847 - DNA, 55 bp, Artificial
  Synthetic oligonucleotide
ccgaaatggaggcaaaagatgcgctttgaacagggaggagtaacgaggctcaccc

SEQ ID NO: 497848 - DNA, 55 bp, Artificial
  Synthetic oligonucleotide
ccgaacgcggtgtgtacactaaaacaggctctattttccctggtgtatacatcac

SEQ ID NO: 497849 - DNA, 55 bp, Artificial
  Synthetic oligonucleotide
ccgaataagaagagcaagtataacggctatcacaatagccttgccccactctaaa

SEQ ID NO: 497850 - DNA, 55 bp, Artificial
  Synthetic oligonucleotide
ccgagatcaattacactcgtattcatatttggaccagccccgaaatggttcggac

SEQ ID NO: 497851 - DNA, 55 bp, Artificial
  Synthetic oligonucleotide
ccgagtgattccaatgaggggaaaagccgttttgctgcaagtgtttgtaatgttc

SEQ ID NO: 497852 - DNA, 55 bp, Artificial
  Synthetic oligonucleotide
ccgatccgcttgacttgcatttcgcctgtaaagtatagaaacgcataaacgtact

SEQ ID NO: 497853 - DNA, 55 bp, Artificial
  Synthetic oligonucleotide
ccgatgatgactcctagtctgttcgcgagcttttcttcatcctcaaactccacgg

SEQ ID NO: 497854 - DNA, 55 bp, Artificial
  Synthetic oligonucleotide
ccgcaggcaaggtacctattgatgtcaatcacctgaatgtggatatgctcactat

SEQ ID NO: 497855 - DNA, 55 bp, Artificial
  Synthetic oligonucleotide
ccagttcgaaagctttcccttggtcaacgtatgcgatgtgagcttgcagctgcac

SEQ ID NO: 497856 - DNA, 55 bp, Artificial
  Synthetic oligonucleotide
ccagttgtcttatatcaagggagcattgctttattcgctacccaaattgaccgtt

SEQ ID NO: 497857 - DNA, 55 bp, Artificial
  Synthetic oligonucleotide
ccataagcctatcagcacttgacttatgcttgtcgtcgataaccagtcgccttgc

SEQ ID NO: 497858 - DNA, 55 bp, Artificial
  Synthetic oligonucleotide
ccatagcactgagtgatctggaacttataggtgttggcttattcagtcctctgac

SEQ ID NO: 497859 - DNA, 55 bp, Artificial
  Synthetic oligonucleotide
ccatatgcgcggattgaaacgcgatgtgttaaagggtgcaaattcaactcggctg

SEQ ID NO: 497860 - DNA, 55 bp, Artificial
  Synthetic oligonucleotide
ccatcgcagtattggtataaacataagaaagcacgcaaggatcgtgtgcgtagtc

SEQ ID NO: 497861 - DNA, 55 bp, Artificial
  Synthetic oligonucleotide
ccatgaaaggagcattaaggaattgacacgtgcagccgattcatcaccctcttgg

SEQ ID NO: 497862 - DNA, 55 bp, Artificial
  Synthetic oligonucleotide
ccatggtaagcggactggaatgggtcagcggtttgtgctgacctatgaaaggagc

SEQ ID NO: 497863 - DNA, 55 bp, Artificial
  Synthetic oligonucleotide
ccatgtgatgcattaacatttacagttctgtcctttgtatctgccttagccaaag

SEQ ID NO: 497864 - DNA, 55 bp, Artificial
  Synthetic oligonucleotide
ccattacacaacaagatccaacattagataaaactcgtccttttgatgattggcg

SEQ ID NO: 497865 - DNA, 55 bp, Artificial
  Synthetic oligonucleotide
ccattcagatagcgggtaaccaaataaacattgatcaaggcctcgtgtcaaaaca

SEQ ID NO: 497866 - DNA, 55 bp, Artificial
  Synthetic oligonucleotide
ccattcctggtgtatgtactgttacaacatgctcttttaagaaacggtccgccat

SEQ ID NO: 497867 - DNA, 55 bp, Artificial
  Synthetic oligonucleotide
ccattggactatttgcccaataacaaacaaacgttagcccattggatcgctaata

SEQ ID NO: 497868 - DNA, 55 bp, Artificial
  Synthetic oligonucleotide
cccaatttcacttagtatagtggcacctaaaatcggtccaacgccaggtattgtc

SEQ ID NO: 497869 - DNA, 55 bp, Artificial
  Synthetic oligonucleotide
cccagcaggatgtatatagtgctgaatctgatagagataatgcgcagtctaattt

SEQ ID NO: 497870 - DNA, 55 bp, Artificial
  Synthetic oligonucleotide
cccagtgttcgctttatgcttcctactcacaggctgttctccttacttcaaacct

SEQ ID NO: 497871 - DNA, 55 bp, Artificial
  Synthetic oligonucleotide
cccataacttgttgattgctgtttgcgatttcaaatactgcgcctggtagtggct

SEQ ID NO: 497872 - DNA, 55 bp, Artificial
  Synthetic oligonucleotide
cccattcgcacaaatatatggagataagggattggttaagccgccttatgatatg

SEQ ID NO: 497873 - DNA, 55 bp, Artificial
  Synthetic oligonucleotide
cccattctgttaaacgtgataaatccattaactcatttcgttgtgcctctgacag

SEQ ID NO: 497874 - DNA, 55 bp, Artificial
  Synthetic oligonucleotide
ccccaaattccaacggaattttatggtgacagtgccaacccactaatccaacttc

SEQ ID NO: 497875 - DNA, 55 bp, Artificial
  Synthetic oligonucleotide
ccccacaagattcccttgcgcacgctcactgagaaattcgtaatgtaaagaccat

SEQ ID NO: 497876 - DNA, 55 bp, Artificial
  Synthetic oligonucleotide
ccccatgactaagccaatgccaatagtcccttgaacctccactttagcctcagtc

SEQ ID NO: 497877 - DNA, 55 bp, Artificial
  Synthetic oligonucleotide
acgatcggagtgtagtccaacttcatagctcttttccaaaggctcgtccattccg

SEQ ID NO: 497878 - DNA, 55 bp, Artificial
  Synthetic oligonucleotide
acggaaacggtcaaacacaccgtagtctgcaaattcaccagaaccagttccgtcc

SEQ ID NO: 497879 - DNA, 55 bp, Artificial
  Synthetic oligonucleotide
acggatgtttcgggagtagcaaggatattaatgggtgtcgggttcattgtgttag

SEQ ID NO: 497880 - DNA, 55 bp, Artificial
  Synthetic oligonucleotide
actccctctacgcccgaactggttccactcattatccatctcccacggattgaag

SEQ ID NO: 497881 - DNA, 55 bp, Artificial
  Synthetic oligonucleotide
actccctttccgtatctttcaacagcataattggtaaggtgatacttgttcccct

SEQ ID NO: 497882 - DNA, 55 bp, Artificial
  Synthetic oligonucleotide
actttatccggtcaattgcctctacttatagtacgggatcagggtatggcaacct

SEQ ID NO: 497883 - DNA, 55 bp, Artificial
  Synthetic oligonucleotide
agaacggacctggtatcatccctggtttagcgctgtacattcctgaaagcggacc

SEQ ID NO: 497884 - DNA, 55 bp, Artificial
  Synthetic oligonucleotide
agaagctgaccttgtgattggtgtgggaactcgctactcagatttcaccacagga

SEQ ID NO: 497885 - DNA, 55 bp, Artificial
  Synthetic oligonucleotide
agacaatattacggtggtggacgaattgttcgttaagtatctaaaaggagaggga

SEQ ID NO: 497886 - DNA, 55 bp, Artificial
  Synthetic oligonucleotide
agagttccttgtaagattcgcgtacttcttcgttcgcatcggttgttaaaacacg

SEQ ID NO: 497887 - DNA, 55 bp, Artificial
  Synthetic oligonucleotide
agccagggaagttaacagtgatacgcagctgtatcgccaagccggaaattcggtt

SEQ ID NO: 497888 - DNA, 55 bp, Artificial
  Synthetic oligonucleotide
agcgatggggtcctgccaacataacaagaatttcgtacgccaaggaattattagg

SEQ ID NO: 497889 - DNA, 55 bp, Artificial
  Synthetic oligonucleotide
agcgtcttgttttcgccatgcggtcacttataaggtatccgtatgtatagaccct

SEQ ID NO: 497890 - DNA, 55 bp, Artificial
  Synthetic oligonucleotide
agctgggaaaatggagataaagtccctaagattgaacgtctaccgacaatcgcga

SEQ ID NO: 497891 - DNA, 55 bp, Artificial
  Synthetic oligonucleotide
agctttgcctacaggggaagagcttgttgaacactatctcaagccgctgtccagg

SEQ ID NO: 497892 - DNA, 55 bp, Artificial
  Synthetic oligonucleotide
aggtcgtattttgctgtgggtatcagctcttacaggtttcgcgcgtatctgggct

SEQ ID NO: 497893 - DNA, 55 bp, Artificial
  Synthetic oligonucleotide
agtaatccaacattgggagaagtccgagggagaattattgtactacaagactttc

SEQ ID NO: 497894 - DNA, 55 bp, Artificial
  Synthetic oligonucleotide
agtacagcaaaatctgctcttacagatgctatacctcttgtcactaactatgctt

SEQ ID NO: 497895 - DNA, 55 bp, Artificial
  Synthetic oligonucleotide
agtctgttcctggttctaatcggttcaaggctccctctaactctgcggcctcata

SEQ ID NO: 497896 - DNA, 55 bp, Artificial
  Synthetic oligonucleotide
agtggtaggctgcatagcaagatctaatgtccctgcggctaatgtgttattcgtc

SEQ ID NO: 497897 - DNA, 55 bp, Artificial
  Synthetic oligonucleotide
aaaactatgccgttggctggcaaagtgcaggaaacacacctgaaccatggcttgg

SEQ ID NO: 497898 - DNA, 55 bp, Artificial
  Synthetic oligonucleotide
aaaatcgtgtactgagggagcaccccaaatggaaagactacgcatatgattggac

SEQ ID NO: 497899 - DNA, 55 bp, Artificial
  Synthetic oligonucleotide
aaacctttctacgcttgcgattcgacacctttcagaggttgtagagggaatgccg

SEQ ID NO: 497900 - DNA, 55 bp, Artificial
  Synthetic oligonucleotide
aaattaagggaaggaccacaccaactacctagccctagcattaagtcataagatc

SEQ ID NO: 497901 - DNA, 55 bp, Artificial
  Synthetic oligonucleotide
aacaccaaggaacaagtcataggaacgatctcaggcatctttgatgctattcaac

SEQ ID NO: 497902 - DNA, 55 bp, Artificial
  Synthetic oligonucleotide
aacgaaccatcttttgtatatgtgcggcaattactggctgacatctaggacactc

SEQ ID NO: 497903 - DNA, 55 bp, Artificial
  Synthetic oligonucleotide
aactacgaccatactcactaatggcgtactccactttaggtgggacttgagggta

SEQ ID NO: 497904 - DNA, 55 bp, Artificial
  Synthetic oligonucleotide
aactccgatagtacagaaacagttaactcaagaggcacagagtattctaaagaga

SEQ ID NO: 497905 - DNA, 55 bp, Artificial
  Synthetic oligonucleotide
aacttaccgagactagaagagacaataccagataaacaggaaggagagaccacga

SEQ ID NO: 497906 - DNA, 55 bp, Artificial
  Synthetic oligonucleotide
aagcgaggtaaaggacacaagccttgcataaaacaagcctacgggatgtaaatcc

SEQ ID NO: 497907 - DNA, 55 bp, Artificial
  Synthetic oligonucleotide
aatccccggaaccgcatagagtactcctccaccactaggaacatccacgacacct

SEQ ID NO: 497908 - DNA, 55 bp, Artificial
  Synthetic oligonucleotide
aatccctcagtgatatgtttattgtcccatgcgattggaatgaagcagtctgctg

SEQ ID NO: 497909 - DNA, 55 bp, Artificial
  Synthetic oligonucleotide
aatctcgaagtccacctatcgctccaatcggaaaacctcctcccagcacctttcc

SEQ ID NO: 497910 - DNA, 55 bp, Artificial
  Synthetic oligonucleotide
aattaacaaacgagccatttggaggcgcattaaaggtgcaaccttttgttgcacc

SEQ ID NO: 497911 - DNA, 55 bp, Artificial
  Synthetic oligonucleotide
aattctcaagatcaggaaaggctacaataaagccaatctctccctctgtagtttc

SEQ ID NO: 497912 - DNA, 55 bp, Artificial
  Synthetic oligonucleotide
acaactatactagcgatcaatttacaggactccacggcctggtaattccaggtac

SEQ ID NO: 497913 - DNA, 55 bp, Artificial
  Synthetic oligonucleotide
acaaggttaatatcgacagtacgcgatcgtgcagctgaaaatatatggagaaagc

SEQ ID NO: 497914 - DNA, 55 bp, Artificial
  Synthetic oligonucleotide
acaggaagtagcgattccaagcgaagacaatggaaccgtacaagaggaaactagc

SEQ ID NO: 497915 - DNA, 55 bp, Artificial
  Synthetic oligonucleotide
accaagcatggtgtacataaggaatcgactgtgccaactgatcagcgttcttaat

SEQ ID NO: 497916 - DNA, 55 bp, Artificial
  Synthetic oligonucleotide
accagcgatgccacaattagaagcataatgatggtaaaagggagtgcagctataa

SEQ ID NO: 497917 - DNA, 55 bp, Artificial
  Synthetic oligonucleotide
accttcaaaccattttatgtactgtctaatacctgatgtgtatccctgaacagtg

SEQ ID NO: 497918 - DNA, 55 bp, Artificial
  Synthetic oligonucleotide
acgagttcaacgtgtttagattatcctaatgaagatttcggccgttgtatcggaa

SEQ ID NO: 497919 - DNA, 55 bp, Artificial
  Synthetic oligonucleotide
caacatcgttgtatttacaagattcagcgtatctaaagcttgttgctcataagcg

SEQ ID NO: 497920 - DNA, 55 bp, Artificial
  Synthetic oligonucleotide
caaccgtttatgccctatttaaaaccctctctcttctcactctatatataaaggc

SEQ ID NO: 497921 - DNA, 55 bp, Artificial
  Synthetic oligonucleotide
caacctttgtcggagtaccaccgagtacatataatcctgatgatgcattgtccgc

SEQ ID NO: 497922 - DNA, 55 bp, Artificial
  Synthetic oligonucleotide
caacgatcggaggcattaaggactttctcgctaacaatgcgaaagttaaaagcgt

SEQ ID NO: 497923 - DNA, 55 bp, Artificial
  Synthetic oligonucleotide
caacgtggcgtgtgctatatatcaagacttaagttaaaccataccgtctatacga

SEQ ID NO: 497924 - DNA, 55 bp, Artificial
  Synthetic oligonucleotide
caactaaagaataatgtgccttcctgctgtttcttacatatacactttgagcctc

SEQ ID NO: 497925 - DNA, 55 bp, Artificial
  Synthetic oligonucleotide
caagactacatttgagaatgtgggttcaagttgctgtttgactgaattgcacaaa

SEQ ID NO: 497926 - DNA, 55 bp, Artificial
  Synthetic oligonucleotide
caagaggaatcatcatctgactgagtgtgatagggaaattaacgccccgttcggc

SEQ ID NO: 497927 - DNA, 55 bp, Artificial
  Synthetic oligonucleotide
caagtgttgtaaagtcgcattaccctctgtttgcttcccgaatgcttcgtcttcg

SEQ ID NO: 497928 - DNA, 55 bp, Artificial
  Synthetic oligonucleotide
caatcagagcttgctccgttgcggacagcaatgagcttgcttcgacaggttggac

SEQ ID NO: 497929 - DNA, 55 bp, Artificial
  Synthetic oligonucleotide
caatccaagagggtcttagtgtcatgagtttgtcaactccttaatgctcccttcg

SEQ ID NO: 497930 - DNA, 55 bp, Artificial
  Synthetic oligonucleotide
caatcgttttggaatacacgagttccatccggttttctaaatgacatccgcaccg

SEQ ID NO: 497931 - DNA, 55 bp, Artificial
  Synthetic oligonucleotide
caattcacctttcaatataggaatcgataatcctcctattgacccgatagcacac

SEQ ID NO: 497932 - DNA, 55 bp, Artificial
  Synthetic oligonucleotide
cacaagacaatcaagttggtataactggaatttctcctgatgcagacctttatgg

SEQ ID NO: 497933 - DNA, 55 bp, Artificial
  Synthetic oligonucleotide
cacataagtcagcaagctcttcgccagtcatagctcctgatgatagctttccact

SEQ ID NO: 497934 - DNA, 55 bp, Artificial
  Synthetic oligonucleotide
cactcctgctgaagtagcgaaataagctaaagatcttgcctcatcgaagcttgaa

SEQ ID NO: 497935 - DNA, 55 bp, Artificial
  Synthetic oligonucleotide
cagaaggaaccaaaagaccaagatgtacagaagagtcaatgcaactaacaagaac

SEQ ID NO: 497936 - DNA, 55 bp, Artificial
  Synthetic oligonucleotide
cagaggggtttctgtaaaactactttgtcgtaagcgttgaaacttgcgactcgtg

SEQ ID NO: 497937 - DNA, 55 bp, Artificial
  Synthetic oligonucleotide
cagatgaatacatgaacaaagaaactccttctgatgctagtcctctagcaatcta

SEQ ID NO: 497938 - DNA, 55 bp, Artificial
  Synthetic oligonucleotide
cagcaggatttactaaaaggtaagttacgtgaattcgctgcaggtgtggaagtat

SEQ ID NO: 497939 - DNA, 55 bp, Artificial
  Synthetic oligonucleotide
ataattctagagttaccccttttacgtgtgtggaattcgcctccgtcttaggaag

SEQ ID NO: 497940 - DNA, 55 bp, Artificial
  Synthetic oligonucleotide
atacaccgaagggctacacgctaaacctagggactagcttatctgcaccatcagt

SEQ ID NO: 497941 - DNA, 55 bp, Artificial
  Synthetic oligonucleotide
atacgtgttaagatacgcgagtatgaactgttatattgctaatgccatcgctact

SEQ ID NO: 497942 - DNA, 55 bp, Artificial; identical to SEQ ID NO: 148631
  Synthetic oligonucleotide

SEQ ID NO: 497943 - DNA, 55 bp, Artificial
  Synthetic oligonucleotide
atatcctccgctttaggattcccctgttttaaccctaatttcgcagccattctca

SEQ ID NO: 497944 - DNA, 55 bp, Artificial
  Synthetic oligonucleotide
atatggaaagcgagccgttttgtgtttatattccaaaggcacttagaaagaaagc

SEQ ID NO: 497945 - DNA, 55 bp, Artificial
  Synthetic oligonucleotide
atcagaatcagtagacacctgagcaaactcctcaagacactgattaaagaaagca

SEQ ID NO: 497946 - DNA, 55 bp, Artificial
  Synthetic oligonucleotide
atcgtcgacgggttccgtatgtaatccgacggagtaacaggccctaccactcccc

SEQ ID NO: 497947 - DNA, 55 bp, Artificial
  Synthetic oligonucleotide
atcgtctagatatatcctctagtttgctgtacccattttcaccggggaacaaact

SEQ ID NO: 497948 - DNA, 55 bp, Artificial
  Synthetic oligonucleotide
atcttgcatacgatgttcacttgcaaacgatgcgtataaatgatggaatgcttgg

SEQ ID NO: 497949 - DNA, 55 bp, Artificial
  Synthetic oligonucleotide
atgcaaatcctgaaacggtagtcgtgcttaagcataatggacaacaagtagcatc

SEQ ID NO: 497950 - DNA, 55 bp, Artificial
  Synthetic oligonucleotide
atgctactatctttcaggcaataaagcacgggagaagcgtacagacatatggtcc

SEQ ID NO: 497951 - DNA, 55 bp, Artificial
  Synthetic oligonucleotide
atgctgcgatacggtggcacttacaccgcttatggacaaaagtttaagaatggcc

SEQ ID NO: 497952 - DNA, 55 bp, Artificial
  Synthetic oligonucleotide
atggccaggcatatccagaggcaccgtgtgctaatccagtgagtaaggtattagt

SEQ ID NO: 497953 - DNA, 55 bp, Artificial
  Synthetic oligonucleotide
atgtttgggagtacgcaatagcttggtttactattcctttaggcaaccctacggg

SEQ ID NO: 497954 - DNA, 55 bp, Artificial
  Synthetic oligonucleotide
attccggaagaacccctgaaggattatcataaaggcaatgttaaagcccgcatga

SEQ ID NO: 497955 - DNA, 55 bp, Artificial
  Synthetic oligonucleotide
attgacattgtagggagtgatgtaaatgcctgttatcacggtgaaattggctaaa

SEQ ID NO: 497956 - DNA, 55 bp, Artificial
  Synthetic oligonucleotide
caaaacctatcagtcttagctattcgttacctatctgaagttgtcgaaaagtccc

SEQ ID NO: 497957 - DNA, 55 bp, Artificial
  Synthetic oligonucleotide
caaaacgatctacaaaagcctcaagacgacccacaaaccatctttaaacggtctc

SEQ ID NO: 497958 - DNA, 55 bp, Artificial
  Synthetic oligonucleotide
caaactggatatcagatgatttagtcgttcgctcatctcctgaacttggattgct

SEQ ID NO: 497959 - DNA, 55 bp, Artificial
  Synthetic oligonucleotide
caaatcttacataaatgcaagcctatttcgactccattcggtgttttaacgctgc

SEQ ID NO: 497960 - DNA, 55 bp, Artificial
  Synthetic oligonucleotide
caaatgcctggtaaatatattcggccagggagtgggtattcaccaccaggtgtgg

SEQ ID NO: 497961 - DNA, 55 bp, Artificial
  Synthetic oligonucleotide
cggcaggtctgctttcggtatccctttcagattccttcttccggcacggaaatgc

SEQ ID NO: 497962 - DNA, 55 bp, Artificial
  Synthetic oligonucleotide
cggccgccacacatattaatcacgacttagatcacatgagttgccatctcataag

SEQ ID NO: 497963 - DNA, 55 bp, Artificial
  Synthetic oligonucleotide
cggctaatgcaatcagatacggcacaccacttaatttatcatggagaaacgttgt

SEQ ID NO: 497964 - DNA, 55 bp, Artificial
  Synthetic oligonucleotide
cggctctctgtcggagtgttgtggaggttatacgtagttttcgcagtatctccat

SEQ ID NO: 497965 - DNA, 55 bp, Artificial
  Synthetic oligonucleotide
cgggagggatggtctttccttatttctggccggtattaatcggtcttgtacttgc

SEQ ID NO: 497966 - DNA, 55 bp, Artificial
  Synthetic oligonucleotide
cgggctcaaacgctctgtttctatccgcttgttcccttaactctgtaacggaaac

SEQ ID NO: 497967 - DNA, 55 bp, Artificial
  Synthetic oligonucleotide
cgggtagagcctgctaaaataaccggtggataatcggtgttcgcaggaatctccc

SEQ ID NO: 497968 - DNA, 55 bp, Artificial
  Synthetic oligonucleotide
cggtatccaccaattagaatcactcatggccacaaactcttttgcaatactgttg

SEQ ID NO: 497969 - DNA, 55 bp, Artificial
  Synthetic oligonucleotide
cggtatgtttggtggaatcgggaaagccctagcgctgttgggtagatccatgatg

SEQ ID NO: 497970 - DNA, 55 bp, Artificial
  Synthetic oligonucleotide
cggtctcaattactggaccgagcggtttaaaggtagcataagacttggcccgggt

SEQ ID NO: 497971 - DNA, 55 bp, Artificial
  Synthetic oligonucleotide
cggtgttgcactgtctgtattaccaccactcttgtctagtgtttgtacagaagcg

SEQ ID NO: 497972 - DNA, 55 bp, Artificial
  Synthetic oligonucleotide
cggttcaatcgttacaaccttgccgagtaccttgaattctgctccataacgattc

SEQ ID NO: 497973 - DNA, 55 bp, Artificial
  Synthetic oligonucleotide
cgtaacaattaattgagtgactgctatgatcccggatagtagtgtgttcttccaa

SEQ ID NO: 497974 - DNA, 55 bp, Artificial
  Synthetic oligonucleotide
cgtaagagcttcaccagtatgtggattgcgtccttcacgggcagcacgttctctt

SEQ ID NO: 497975 - DNA, 55 bp, Artificial
  Synthetic oligonucleotide
cgtatcattccacatagcgatgtttcaaataacaccaggcgtttgtggaaagcga

SEQ ID NO: 497976 - DNA, 55 bp, Artificial
  Synthetic oligonucleotide
cgtatctcatcgcaatcatgattttatcagcggtttaaaagacttgcgttctcaa

SEQ ID NO: 497977 - DNA, 55 bp, Artificial
  Synthetic oligonucleotide
cgtatgagccgaatgactccctctgcaagaggaaagtatagaacattgtcctcgt

SEQ ID NO: 497978 - DNA, 55 bp, Artificial
  Synthetic oligonucleotide
cgtcgattctatcattcacgacgtaggagagtatgaggaggagaatcgtccggcc

SEQ ID NO: 497979 - DNA, 55 bp, Artificial
  Synthetic oligonucleotide
cgtctacactggtgccataagcctgggcgataccaaacaaggattggttaggctg

SEQ ID NO: 497980 - DNA, 55 bp, Artificial
  Synthetic oligonucleotide
cgtcttcactcccctactccatcgcgaacttttgagttgaatactccaggttctg

SEQ ID NO: 497981 - DNA, 55 bp, Artificial
  Synthetic oligonucleotide
cgcccgttacagaagtcacgctgtcaccatgtagaggaagataagatgcgaagcc

SEQ ID NO: 497982 - DNA, 55 bp, Artificial
  Synthetic oligonucleotide
cgccgtcgcaatctgccatcgcttgacgtacgtcttcgtctagcttaatttgatc

SEQ ID NO: 497983 - DNA, 55 bp, Artificial
  Synthetic oligonucleotide
cgccttccatgatttctctatcccagtgctttgagactgccttggtatattcctc

SEQ ID NO: 497984 - DNA, 55 bp, Artificial
  Synthetic oligonucleotide
cgcgaaatactggtacggtcacaaagcggcgccaatccactgaatcgttatcagt

SEQ ID NO: 497985 - DNA, 55 bp, Artificial
  Synthetic oligonucleotide
cgcggaattatgaccttgcctacatacaaagtaatttccgcccgcctctgttaac

SEQ ID NO: 497986 - DNA, 55 bp, Artificial
  Synthetic oligonucleotide
cgcggacatggtaattaatttgcagaccgaattaacgttttgtgtccactcctga

SEQ ID NO: 497987 - DNA, 55 bp, Artificial
  Synthetic oligonucleotide
cgcgtgaggaatctgaagcacatgaagtggtaccttgtccccaaataggttcggc

SEQ ID NO: 497988 - DNA, 55 bp, Artificial
  Synthetic oligonucleotide
cgctcattgtcctgttattgtgtctaatgttggttttgttcgttgccttcttgag

SEQ ID NO: 497989 - DNA, 55 bp, Artificial
  Synthetic oligonucleotide
cgctcgtttaatgacgttcgggtcaagaagaccatacgaaagagctacaccaact

SEQ ID NO: 497990 - DNA, 55 bp, Artificial
  Synthetic oligonucleotide
cgctggcacgccaaaccctcgaacaaaagaaataccacatcttactgacgaattt

SEQ ID NO: 497991 - DNA, 55 bp, Artificial
  Synthetic oligonucleotide
cgctgggcgaatgaactagaagtgagcgggtacaaattcgcaaaaggtgcaaatg

SEQ ID NO: 497992 - DNA, 55 bp, Artificial
  Synthetic oligonucleotide
cgctggtatgtcttccacggttttggactcttcctctggatgcttaccatctcct

SEQ ID NO: 497993 - DNA, 55 bp, Artificial
  Synthetic oligonucleotide
cgcttcaacctgttgtttcttcgctttcatcttttcaattttctcttctaactcc

SEQ ID NO: 497994 - DNA, 55 bp, Artificial
  Synthetic oligonucleotide
cgcttcaagctttgttaacggcgctattattacagctgatggtggctggactgcg

SEQ ID NO: 497995 - DNA, 55 bp, Artificial
  Synthetic oligonucleotide
cgcttcatcctgatcgattgtcgttaagactactttcgagttaataaaacatctg

SEQ ID NO: 497996 - DNA, 55 bp, Artificial
  Synthetic oligonucleotide
cggaaacctttatgagtgaggttgaatcagccattgctattgataaatcgcctgg

SEQ ID NO: 497997 - DNA, 55 bp, Artificial
  Synthetic oligonucleotide
cggaaatggacagtttggtttcggtgacaatgtaactcgtgggcaagtagcgcgt

SEQ ID NO: 497998 - DNA, 55 bp, Artificial
  Synthetic oligonucleotide
cggaacgatgctcaatggcaggtgatatgaccgcattgccaaatccagttacggg

SEQ ID NO: 497999 - DNA, 55 bp, Artificial
  Synthetic oligonucleotide
cggaatcgaagcaagtctgttgaacttctttctcgggtatttggtcatacagaga

SEQ ID NO: 498000 - DNA, 55 bp, Artificial
  Synthetic oligonucleotide
cggacgtttggcgattcgctaagattatttcgaaggttggacgcagcgcaatagt

SEQ ID NO: 498001 - DNA, 55 bp, Artificial
  Synthetic oligonucleotide
ctcccggggaaatcgtacttgcagcaatggacaagcagttaggaatgcctacagt

SEQ ID NO: 498002 - DNA, 55 bp, Artificial
  Synthetic oligonucleotide
ctcccttccttttacatccctgtatactcaccgaattcatcgcgtagtacgtgac

SEQ ID NO: 498003 - DNA, 55 bp, Artificial
  Synthetic oligonucleotide
ctcctacatgactatcctttgtaggctctagactgtatacaataccttcccactc

SEQ ID NO: 498004 - DNA, 55 bp, Artificial
  Synthetic oligonucleotide
ctcctggaacaggctcaaacgtaaagtgggatgttactccttttggagctatgcg

SEQ ID NO: 498005 - DNA, 55 bp, Artificial
  Synthetic oligonucleotide
ctcctggagatgaaatgttcattcacactgcacctgtttatacgacgacaaagga

SEQ ID NO: 498006 - DNA, 55 bp, Artificial
  Synthetic oligonucleotide
ctcctgtatccttgtctacaaagtcctcaatgtttaagaatttggctcctgaacc

SEQ ID NO: 498007 - DNA, 55 bp, Artificial
  Synthetic oligonucleotide
ctcctttaacgtatcctcgttggacgggaggatatagtggttttccttctgatgg

SEQ ID NO: 498008 - DNA, 55 bp, Artificial
  Synthetic oligonucleotide
ctcgaacatagagatggacttttctattaatctcacgttattggtagctaaccct

SEQ ID NO: 498009 - DNA, 55 bp, Artificial
  Synthetic oligonucleotide
ctcggcaggcatgaataatgttgccaatgcagtcggcccgcttgttggtgcaggc

SEQ ID NO: 498010 - DNA, 55 bp, Artificial
  Synthetic oligonucleotide
ctcgggcagcatggccgttaaggaggtcgaagacggtaggtattatgcggtagga

SEQ ID NO: 498011 - DNA, 55 bp, Artificial
  Synthetic oligonucleotide
ctcggtacatctggtgctgcggtaatcgcaaggatgacacgttcaagtatgttag

SEQ ID NO: 498012 - DNA, 55 bp, Artificial
  Synthetic oligonucleotide
ctctacaatttgtactggtgttaccctcttacagtagcccaagttatcctcctag

SEQ ID NO: 498013 - DNA, 55 bp, Artificial
  Synthetic oligonucleotide
ctctgacagtaattgtttaactcccattgtttcccctttactcctttataagagc

SEQ ID NO: 498014 - DNA, 55 bp, Artificial
  Synthetic oligonucleotide
ctgaagtccccttcaagttttctggtaacgtaacaacccaatcactacaaacttt

SEQ ID NO: 498015 - DNA, 55 bp, Artificial
  Synthetic oligonucleotide
ctgaagttaagagtcggcaaagatgttgtctccgttgacttcgtgcctcgctcca

SEQ ID NO: 498016 - DNA, 55 bp, Artificial
  Synthetic oligonucleotide
ctgagtgtgattggcacacgtcggccctcaggcgaagcaaaggccaaaatgcaaa

SEQ ID NO: 498017 - DNA, 55 bp, Artificial
  Synthetic oligonucleotide
ctgatgccgcaatcgcaagatatagaaagatgcataaagttcgttgacagcattg

SEQ ID NO: 498018 - DNA, 55 bp, Artificial
  Synthetic oligonucleotide
ctgcgtacatctcgttcctcggggcgaagcgaagctcctgcatactgttgcaaaa

SEQ ID NO: 498019 - DNA, 55 bp, Artificial
  Synthetic oligonucleotide
ctggcttcaatgttgccagtttctcaagagatgtttctcgtcttggcccttcatc

SEQ ID NO: 498020 - DNA, 55 bp, Artificial
  Synthetic oligonucleotide
cgtgaaaataattggcgtaacaacagaaggggcgtgttgtttcacatatgcaagg

SEQ ID NO: 498021 - DNA, 55 bp, Artificial
  Synthetic oligonucleotide
cgtgcaccttccgtcgactgacacccataagcgttacttaagcagttagctcggc

SEQ ID NO: 498022 - DNA, 55 bp, Artificial
  Synthetic oligonucleotide
cgtgcacgctcattgttataggtttaaccccaccgtaaaccatggcgttccgaac

SEQ ID NO: 498023 - DNA, 55 bp, Artificial
  Synthetic oligonucleotide
cgtgccgaaatcgttgccggatacaagaagcagtccaaggatggcagcggtaatt

SEQ ID NO: 498024 - DNA, 55 bp, Artificial
  Synthetic oligonucleotide
cgtgggtccaaccgaacttgtccgaaatccctaaatcatcccaagtttgccactt

SEQ ID NO: 498025 - DNA, 55 bp, Artificial
  Synthetic oligonucleotide
cgttaacgagtaacgccaccatgtccttttcaggatgtccgcggtagattgggga

SEQ ID NO: 498026 - DNA, 55 bp, Artificial
  Synthetic oligonucleotide
cgttaatatacccctcgtctgcaaagaatttcatgacacgagttacctcgtttcg

SEQ ID NO: 498027 - DNA, 55 bp, Artificial
  Synthetic oligonucleotide
cgttaatggaatcgcaacagagaatgcgataattggccaatatgctcctaaccag

SEQ ID NO: 498028 - DNA, 55 bp, Artificial
  Synthetic oligonucleotide
cgttctccattagtaaagccccaataagacggaaggctgactgtgtgttaggaaa

SEQ ID NO: 498029 - DNA, 55 bp, Artificial
  Synthetic oligonucleotide
cgttctctacatgcagattccaatccacactatggaacgggaaaaggtggaacca

SEQ ID NO: 498030 - DNA, 55 bp, Artificial
  Synthetic oligonucleotide
cgtttaaagcacttttgtggcacgttttgtgtcccttgtagcacgctttacgccc

SEQ ID NO: 498031 - DNA, 55 bp, Artificial
  Synthetic oligonucleotide
cgtttaaatcagcttgttgaacctagtctcccagtaaaatatccgcgcactccag

SEQ ID NO: 498032 - DNA, 55 bp, Artificial
  Synthetic oligonucleotide
cgtttgaagtaggaggggacgtagaagtctccgaggcaacgttaaaagcgtcccc

SEQ ID NO: 498033 - DNA, 55 bp, Artificial
  Synthetic oligonucleotide
cgttttggaacccactcacagaactcatctaagttaccgttccaatcgaactcac

SEQ ID NO: 498034 - DNA, 55 bp, Artificial
  Synthetic oligonucleotide
ctaaacggttatcctctaatactacttcctctactgcattacgcacgtctaacat

SEQ ID NO: 498035 - DNA, 55 bp, Artificial
  Synthetic oligonucleotide
ctaccgggtcctattggaaaattactatccaaaagagcgcacccagctggctgtc

SEQ ID NO: 498036 - DNA, 55 bp, Artificial
  Synthetic oligonucleotide
ctcaacgtacccctccttaactatcgtttcactttctgtttcgtctagctcttct

SEQ ID NO: 498037 - DNA, 55 bp, Artificial
  Synthetic oligonucleotide
ctcaccttaccatcatattattgtggatgaattcccggactttgttgtgcgcccg

SEQ ID NO: 498038 - DNA, 55 bp, Artificial
  Synthetic oligonucleotide
ctcagccactaaaacacttttaccttgtttctttgtactaagatgatgtccatgc

SEQ ID NO: 498039 - DNA, 55 bp, Artificial
  Synthetic oligonucleotide
ctcagcgaagcaatactgatgccgtaggttctcgaagagtggatgattttcccgt

SEQ ID NO: 498040 - DNA, 55 bp, Artificial
  Synthetic oligonucleotide
ctccatatagccgaggttgataaggcccctgttctctaaatcagaagctatctct

SEQ ID NO: 498041 - DNA, 55 bp, Artificial
  Synthetic oligonucleotide
ccgggcatctctaagcctagaggtcttgtgaatgtacaggccatttaggaattgg

SEQ ID NO: 498042 - DNA, 55 bp, Artificial
  Synthetic oligonucleotide
ccggtgggtaattgccacttctgccccgttccagcgctcttttatctcggttccg

SEQ ID NO: 498043 - DNA, 55 bp, Artificial
  Synthetic oligonucleotide
ccttcacggttatcagcaatccttctcagttgagtgtgaaggcctctttccaagg

SEQ ID NO: 498044 - DNA, 55 bp, Artificial
  Synthetic oligonucleotide
ccgtctccgcctgtaatgggtgaataggaaacgtccttgacatcataaccgaggc

SEQ ID NO: 498045 - DNA, 55 bp, Artificial
  Synthetic oligonucleotide
ccttctaaaatgtcccactctttattcgttagtaaaccgtcaggtcttccagtgt

SEQ ID NO: 498046 - DNA, 55 bp, Artificial
  Synthetic oligonucleotide
cgaattagttagatggaaggaggtgcaacatggcagaaattaaagtaggactcac

SEQ ID NO: 498047 - DNA, 55 bp, Artificial
  Synthetic oligonucleotide
ccgttacctttgttgctgtactcacgattccagaattgtttgtagccgttacata

SEQ ID NO: 498048 - DNA, 55 bp, Artificial
  Synthetic oligonucleotide
cctgccctgttacatcttggtatacaccatatagtgcaggaaccccggctccttc

SEQ ID NO: 498049 - DNA, 55 bp, Artificial
  Synthetic oligonucleotide
cgaatatcggaaggtttaaacgcattaaagctgtggccgtttatggaaaagaacc

SEQ ID NO: 498050 - DNA, 55 bp, Artificial
  Synthetic oligonucleotide
ccgtttctccgtaaataaataagaaggcttcccgatttgttctgccccattctaa

SEQ ID NO: 498051 - DNA, 55 bp, Artificial
  Synthetic oligonucleotide
cctgcagatatattgcggatgcttggacatcctatgcgtttgatgatcgttcgag

SEQ ID NO: 498052 - DNA, 55 bp, Artificial
  Synthetic oligonucleotide
cctgatggaacagcccattcatccgagtcaaaagcccttaccattaacaattcat

SEQ ID NO: 498053 - DNA, 55 bp, Artificial
  Synthetic oligonucleotide
cctatgcctaaaggcgaactaaagtctctcatggattttaccttatcgcgaaatc

SEQ ID NO: 498054 - DNA, 55 bp, Artificial
  Synthetic oligonucleotide
cgaaaaggggtcagaccctcacaggaatttcgctctctatgtcgaaggggctttc

SEQ ID NO: 498055 - DNA, 55 bp, Artificial
  Synthetic oligonucleotide
cgaatatccaaggtgtcgatgctcaaacaaattggtggccagattcattagtgcg

SEQ ID NO: 498056 - DNA, 55 bp, Artificial
  Synthetic oligonucleotide
cgaactctaagtgaatccgaactgtacactggcgaaaagtcagaggaatttaccg

SEQ ID NO: 498057 - DNA, 55 bp, Artificial
  Synthetic oligonucleotide
cctcctgctatctcaaggcttgaacgcactaattcgataagcggatgatgggcca

SEQ ID NO: 498058 - DNA, 55 bp, Artificial
  Synthetic oligonucleotide
cctcgcagagccttttcattgtgtacatggagcatagcggaatgtcacaatacag

SEQ ID NO: 498059 - DNA, 55 bp, Artificial
  Synthetic oligonucleotide
cctctggcattagggttaacgtcttttgagaagttatattgcgggttgtagtaca

SEQ ID NO: 498060 - DNA, 55 bp, Artificial
  Synthetic oligonucleotide
cctcttggtcactttgttccgcatacaaagcgtatatgagttttaatttcgcttc

SEQ ID NO: 498061 - DNA, 55 bp, Artificial
  Synthetic oligonucleotide
cgaacaagcttaaagcctagttgctcaaggttctctgatagtttaactgatggtc

SEQ ID NO: 498062 - DNA, 55 bp, Artificial
  Synthetic oligonucleotide
cgaaatgactaaacaacgaggatatgatatggaaaggtaaaaccgccttagaatc

SEQ ID NO: 498063 - DNA, 55 bp, Artificial
  Synthetic oligonucleotide
cgaaagatggtaaatatgagtttaaggttgaaacgaagccagcgggtgtaaatga

SEQ ID NO: 498064 - DNA, 55 bp, Artificial
  Synthetic oligonucleotide
cgaaagacggtagaccttcactcgcccaattaacagggtttaacgaaccattcac

SEQ ID NO: 498065 - DNA, 55 bp, Artificial
  Synthetic oligonucleotide
cctgttaaagacaaagccaaccgcatatatccattggaacctagcttagatgatc

SEQ ID NO: 498066 - DNA, 55 bp, Artificial
  Synthetic oligonucleotide
ccgccatttaaaacgatcatcgtagggaatacttgaacgtcgtaatagcggacaa

SEQ ID NO: 498067 - DNA, 55 bp, Artificial
  Synthetic oligonucleotide
cgcccgtaaaactctcatgcagtcaataacatcgttcttcctatctgctcaacca

SEQ ID NO: 498068 - DNA, 55 bp, Artificial
  Synthetic oligonucleotide
cctgttttcgttggaagaaacgtgtagttcggagttttgagagattgagtgtttg

SEQ ID NO: 498069 - DNA, 55 bp, Artificial
  Synthetic oligonucleotide
cgcccagtaggcttcttgttatcaaagacgacgtttatctctgatagcactgacg

SEQ ID NO: 498070 - DNA, 55 bp, Artificial
  Synthetic oligonucleotide
cgcccaccattccttgcatttctctgcccacagtattacgcatatcacgagctgt

SEQ ID NO: 498071 - DNA, 55 bp, Artificial
  Synthetic oligonucleotide
ccgccggcaagtagcggtgggaaattgttaatcccagtcggtggaccttatcgaa

SEQ ID NO: 498072 - DNA, 55 bp, Artificial
  Synthetic oligonucleotide
cgccatctgctaatgcttagcaggctcgttgcgcttttcttagtgaacagcagga

SEQ ID NO: 498073 - DNA, 55 bp, Artificial
  Synthetic oligonucleotide
ccgcgacagctactgctttaaccgagactcaccctctcactaccgcgacagctac

SEQ ID NO: 498074 - DNA, 55 bp, Artificial
  Synthetic oligonucleotide
cgcaccgtacggcgaaatacaaagccgataagctatatacggacggtatagtagt

SEQ ID NO: 498075 - DNA, 55 bp, Artificial
  Synthetic oligonucleotide
ccgctccgaatgttggtgctagactcggtacgtgacttacaattttgtctggctc

SEQ ID NO: 498076 - DNA, 55 bp, Artificial
  Synthetic oligonucleotide
ccgctgtaaatcggcttttgctacatatccttttgtgctcaccatgaacaccagg

SEQ ID NO: 498077 - DNA, 55 bp, Artificial
  Synthetic oligonucleotide
ccgcttggtggccattaactaaagagcgataccagtatatcattagcggccttga

SEQ ID NO: 498078 - DNA, 55 bp, Artificial
  Synthetic oligonucleotide
ccttagcagatagagaactatcgcgcggaaacatacacctctcaccagaaccggg

SEQ ID NO: 498079 - DNA, 55 bp, Artificial
  Synthetic oligonucleotide
cctggtccaacgtcttcgattaagcctggataagtgactgagaagcgctcagcag

SEQ ID NO: 498080 - DNA, 55 bp, Artificial
  Synthetic oligonucleotide
cgcaacaggataggctttatctccatctgcagttatcgaatgaggttttgtggca

SEQ ID NO: 498081 - DNA, 55 bp, Artificial
  Synthetic oligonucleotide
ccggacacctttaagctctttgccaaaggctcttgccactttcagggaatcggtg

SEQ ID NO: 498082 - DNA, 55 bp, Artificial
  Synthetic oligonucleotide
cgcaaaggattagagattgggtctgaaaatccgaactacggtacatatcatcctc

SEQ ID NO: 498083 - DNA, 55 bp, Artificial
  Synthetic oligonucleotide
cgatttgagtgttccgtaaatagcgccgatgtcttttctggattccccatatatt

SEQ ID NO: 498084 - DNA, 55 bp, Artificial
  Synthetic oligonucleotide
cgatctttgatatagggatgcatcacatggccaattgaaatgccttcggccaata

SEQ ID NO: 498085 - DNA, 55 bp, Artificial
  Synthetic oligonucleotide
cgatcaaaggaagatataaaggctctggagcgcgaactaggaatgacgccagggc

SEQ ID NO: 498086 - DNA, 55 bp, Artificial
  Synthetic oligonucleotide
cgaggaaaacgcgcggattaggggattcgtcaagagtttaaaactacctatcggc

SEQ ID NO: 498087 - DNA, 55 bp, Artificial
  Synthetic oligonucleotide
cctgctaatattgtaaaccttggttggtccagcacattcatagatgcgttaggcc

SEQ ID NO: 498088 - DNA, 55 bp, Artificial
  Synthetic oligonucleotide
cgacgcataaaatgtgctagtgtcggcatcgcaacaggacgtggcacctttgcgg

SEQ ID NO: 498089 - DNA, 55 bp, Artificial
  Synthetic oligonucleotide
ccggcccatctagaactgccatactaaatgcggctaatgcaatcagatacggcac

SEQ ID NO: 498090 - DNA, 54 bp, Artificial
  Synthetic oligonucleotide
gaatgcagttatcggtgcgttattagatagagggattgtatacacgctgcagtt

SEQ ID NO: 498091 - DNA, 54 bp, Artificial
  Synthetic oligonucleotide
gacagcattctgctcgcccaaatgatcaagaacgtgattaaatctgtttcggaa

SEQ ID NO: 498092 - DNA, 54 bp, Artificial
  Synthetic oligonucleotide
cgtgaaacaccaggaacgccgcttaataggattccttttccgccgaatgatttt

SEQ ID NO: 498093 - DNA, 54 bp, Artificial
  Synthetic oligonucleotide
tatagcaagcgtaactgaaggtctgcgactcgctctccccttaacagcatcctt

SEQ ID NO: 498094 - DNA, 54 bp, Artificial
  Synthetic oligonucleotide
ctaatgtaacataacgtatggaggggtaaggaatgaagtttgtgcaaccaattc

SEQ ID NO: 498095 - DNA, 54 bp, Artificial
  Synthetic oligonucleotide
tccccgccaatggccctccttcgcctgtttagcagcttttcagtattgccatga

SEQ ID NO: 498096 - DNA, 54 bp, Artificial
  Synthetic oligonucleotide
cctaatgcctgcaagcgaaagggcggttctaaacgtaaataactattagcaacc

SEQ ID NO: 498097 - DNA, 54 bp, Artificial
  Synthetic oligonucleotide
tcgattctaaagcccacggacaggacgttgacacatttgccggtacctgacccc

SEQ ID NO: 498098 - DNA, 54 bp, Artificial
  Synthetic oligonucleotide
gaaatagctgaaatggttggtatcaataggagttactacgctggggtatctgtg

SEQ ID NO: 498099 - DNA, 54 bp, Artificial
  Synthetic oligonucleotide
cccctgtaaagaggggtcatcccaaagtgataaagattggtccctattaagcca

SEQ ID NO: 498100 - DNA, 54 bp, Artificial
  Synthetic oligonucleotide
cttgttcattacggttcttatatgccttacgggtgtggttgctttgggcaaaac

SEQ ID NO: 498101 - DNA, 54 bp, Artificial
  Synthetic oligonucleotide
gcttttccgacttttcctaatgcaagtcgagaagcaaacgcatctttattcaca

SEQ ID NO: 498102 - DNA, 54 bp, Artificial
  Synthetic oligonucleotide
ttctagcgaaattgctgccgttcatagacgaagacggtcttgtacatacaccta

SEQ ID NO: 498103 - DNA, 54 bp, Artificial
  Synthetic oligonucleotide
ttgaacagtatcattaagtctagggaattaaggttggagctagagttaccagag

SEQ ID NO: 498104 - DNA, 54 bp, Artificial
  Synthetic oligonucleotide
ttggaacgcaagtgaagcaagtcgtcgtgatgacgcacttaaagagcgggtaag

SEQ ID NO: 498105 - DNA, 54 bp, Artificial
  Synthetic oligonucleotide
aaagtgcgccttgaatacggtttacaccttcttttaggcttcgagcgacttcta

SEQ ID NO: 498106 - DNA, 54 bp, Artificial
  Synthetic oligonucleotide
ctgggatttgccgttttgacttccctcggtctactcgtcggtggacaacgctac

SEQ ID NO: 498107 - DNA, 54 bp, Artificial
  Synthetic oligonucleotide
aaaacatactctttgacctcctttgtagaagaagtgggagacatttcggatcca

SEQ ID NO: 498108 - DNA, 54 bp, Artificial
  Synthetic oligonucleotide
gtcattgggcgatgctgcatttcaactaaatagtcaaaagaagctctgtgcggt

SEQ ID NO: 498109 - DNA, 54 bp, Artificial
  Synthetic oligonucleotide
cgaacaattgggttacaggtgacgcggtgatttccactctaggcggacgctttc

SEQ ID NO: 498110 - DNA, 54 bp, Artificial
  Synthetic oligonucleotide
catcatttcctcgaaccttacacatttcagcctcagacaagtcaataaggtttt

SEQ ID NO: 498111 - DNA, 54 bp, Artificial
  Synthetic oligonucleotide
cgtcagtgtgatagggcaatggctacgggcgatataacagccgcacgagagtta

SEQ ID NO: 498112 - DNA, 54 bp, Artificial
  Synthetic oligonucleotide
catcacgcatttggatacttcctccgccatatacgactacaacatccgtttcga

SEQ ID NO: 498113 - DNA, 54 bp, Artificial
  Synthetic oligonucleotide
cgtataataatgcggaagggttttctgctagcgaacgataaagggtagacaatt

SEQ ID NO: 498114 - DNA, 54 bp, Artificial
  Synthetic oligonucleotide
cgacctgtttgccgtcctcgttgtatcctcgtatgaccacgtgagcatgcggat

SEQ ID NO: 498115 - DNA, 54 bp, Artificial
  Synthetic oligonucleotide
cagctatcggtattcaagtggctatccaagtagccatcgctattgtaatccgta

SEQ ID NO: 498116 - DNA, 54 bp, Artificial
  Synthetic oligonucleotide
caggtaacttacaggtagtacaaaacgcttcaggacaaatcgctaaagcattat

SEQ ID NO: 498117 - DNA, 54 bp, Artificial
  Synthetic oligonucleotide
ccaatcgacatgacaacggtatgatcagtgttcccaaatgccttaaagcaaagc

SEQ ID NO: 498118 - DNA, 53 bp, Artificial
  Synthetic oligonucleotide
cccgaaaatcggaactcctagctcctcttcagtcagattccaatctttcggca

SEQ ID NO: 498119 - DNA, 53 bp, Artificial
  Synthetic oligonucleotide
ccgttcatatctggacaaatgagccttcactcttgcaaccatctcatttgggc

SEQ ID NO: 498120 - DNA, 53 bp, Artificial
  Synthetic oligonucleotide
ggacaaccttatggaaacgcgcaatgaagcttgattattcccctgtagtaaac

SEQ ID NO: 498121 - DNA, 53 bp, Artificial
  Synthetic oligonucleotide
tctggtggtcgtttatagccgttctgtggtcttccagttgccctcagtggtcg

SEQ ID NO: 498122 - DNA, 53 bp, Artificial
  Synthetic oligonucleotide
ggctcttttactgctaaatgtaccccatgcagcagaaccaatagcaatggcac

SEQ ID NO: 498123 - DNA, 53 bp, Artificial
  Synthetic oligonucleotide
tcctccggatgccccacttctacaattctaccatcatgcatatagacagccca

SEQ ID NO: 498124 - DNA, 53 bp, Artificial
  Synthetic oligonucleotide
agacacctgaagcgttgaaactataccaatcatggttctgtaaagtgaggttg

SEQ ID NO: 498125 - DNA, 53 bp, Artificial
  Synthetic oligonucleotide
tccgatccgataattacgagtatccgttccggtctttccgtttcccaaagacg

SEQ ID NO: 498126 - DNA, 53 bp, Artificial
  Synthetic oligonucleotide
ccagcgtaaagagggttttctcgattcgtcccatttctccaagtgctgttgcg

SEQ ID NO: 498127 - DNA, 53 bp, Artificial
  Synthetic oligonucleotide
tgcactatagcttacgtttgacaccttattcgggtgagacgtgggttaccgag

SEQ ID NO: 498128 - DNA, 53 bp, Artificial
  Synthetic oligonucleotide
ggctgttcgattgttttagggacaattcctttaatggtgcagccttggtccaa

SEQ ID NO: 498129 - DNA, 53 bp, Artificial
  Synthetic oligonucleotide
ccgtcaaagtgtgtggatggagttcactatataccccaaactcacgaattctg

SEQ ID NO: 498130 - DNA, 53 bp, Artificial
  Synthetic oligonucleotide
cttcacgacgcttataaacaacaacgtattcctctcctgctgcaggctctagt

SEQ ID NO: 498131 - DNA, 53 bp, Artificial
  Synthetic oligonucleotide
aactttcgtgaggaaccttgttcttcggatattttattcaacgctgcaatgac

SEQ ID NO: 498132 - DNA, 53 bp, Artificial
  Synthetic oligonucleotide
ggttacatggagggcacttggttattttgcggcggtagaagcggggcttgtag

SEQ ID NO: 498133 - DNA, 53 bp, Artificial
  Synthetic oligonucleotide
cgcgaagcttggacaatttaggaataatttcgtcccgtgttgctacttctaaa

SEQ ID NO: 498134 - DNA, 53 bp, Artificial
  Synthetic oligonucleotide
tttgaagaggaacccgttcggatacctccagcccgtaaccgcccaatccagca

SEQ ID NO: 498135 - DNA, 53 bp, Artificial
  Synthetic oligonucleotide
ttttacccatggcgaatcttccttccaactgcataaatcgtatcatcggtcct

SEQ ID NO: 498136 - DNA, 53 bp, Artificial
  Synthetic oligonucleotide
gccaaccaagcattagaaaaggcccaaagcaacgagcgtattacgcacctttc

SEQ ID NO: 498137 - DNA, 53 bp, Artificial
  Synthetic oligonucleotide
cgtaacggagatacagtggtagtaacagacttgactcgactttcacgttctac

SEQ ID NO: 498138 - DNA, 53 bp, Artificial
  Synthetic oligonucleotide
atagccattcgctttatgtgctgcataggcaagtcccgagcaatcgtagccaa

SEQ ID NO: 498139 - DNA, 53 bp, Artificial
  Synthetic oligonucleotide
taaacgattaacgggtatcaacatatatgttacgaatacgccttgggaagtgg

SEQ ID NO: 498140 - DNA, 53 bp, Artificial
  Synthetic oligonucleotide
atatcatctttagtaaagagaccaagaccgttacgactgtccatggattcttg

SEQ ID NO: 498141 - DNA, 53 bp, Artificial
  Synthetic oligonucleotide
cccatgccataaagttgggacgaaataaattggtgtatccttaccctagtagg

SEQ ID NO: 498142 - DNA, 53 bp, Artificial
  Synthetic oligonucleotide
caagaattagtggatgaagggaatttgcgtcttgcgaatgagctgatacagtg

SEQ ID NO: 498143 - DNA, 53 bp, Artificial
  Synthetic oligonucleotide
attgcccgattacgcttgtcccgtccaatacagcaggtataaccttttcctgg

SEQ ID NO: 498144 - DNA, 53 bp, Artificial
  Synthetic oligonucleotide
gttcccctagtgagtcgggcgaacggtgtaagagtggtgcgaacactacttac

SEQ ID NO: 498145 - DNA, 53 bp, Artificial
  Synthetic oligonucleotide
gcgcataccaagcgcatataggcgcatacgggacacatacaaagtgccgaaaa

SEQ ID NO: 498146 - DNA, 53 bp, Artificial
  Synthetic oligonucleotide
tatccaattcctggctgcagcgaatcgttctttcacttgtcagtccatgtttt

SEQ ID NO: 498147 - DNA, 53 bp, Artificial
  Synthetic oligonucleotide
gacaatgcaagcctcacaattatttgttggaggttcaggtcctgtacacacta

SEQ ID NO: 498148 - DNA, 53 bp, Artificial
  Synthetic oligonucleotide
gaagtttgactggacgacaaataaatgttaacgtatcgttgcgtcgcatcgct

SEQ ID NO: 498149 - DNA, 53 bp, Artificial
  Synthetic oligonucleotide
caatcatgaaagaaaccaaagtgaagcaaacagatccaagacaccaaaacagc

SEQ ID NO: 498150 - DNA, 53 bp, Artificial
  Synthetic oligonucleotide
taagtcgaattacccgcctgaaagatacacaatgcttagagaagcacttgatt

SEQ ID NO: 498151 - DNA, 52 bp, Artificial
  Synthetic oligonucleotide
tgaagtgaaacatgccaaacagctcagtgcatctcgtaatctgattcgaaat

SEQ ID NO: 498152 - DNA, 52 bp, Artificial
  Synthetic oligonucleotide
cagtagaacttacaccagtacaggcgccaccagttgattatacggccctatc

SEQ ID NO: 498153 - DNA, 52 bp, Artificial
  Synthetic oligonucleotide
ggagtatccataccttagttggaactaagaaattggtgtagccttaccgtag

SEQ ID NO: 498154 - DNA, 52 bp, Artificial
  Synthetic oligonucleotide
cttcttgatccatggatttcaatgtaggtatgggaggttgttgatagccgag

SEQ ID NO: 498155 - DNA, 52 bp, Artificial
  Synthetic oligonucleotide
acgtttcatcgcagtacggttgtagggcacaccattcctcccataacatacg

SEQ ID NO: 498156 - DNA, 52 bp, Artificial
  Synthetic oligonucleotide
ttacagtctggtgcatataacactggccgtatcgaattttaagagtcgttac

SEQ ID NO: 498157 - DNA, 52 bp, Artificial
  Synthetic oligonucleotide
acaataaatgctaacggaatagcaatactaaatgccacaatcggccatatcc

SEQ ID NO: 498158 - DNA, 52 bp, Artificial
  Synthetic oligonucleotide
taattcgacatcactgctcgtacctgtactcatgtatcttccactccctttt

SEQ ID NO: 498159 - DNA, 52 bp, Artificial; identical to SEQ ID NO: 149691
  Synthetic oligonucleotide

SEQ ID NO: 498160 - DNA, 52 bp, Artificial
  Synthetic oligonucleotide
ccttgcaggacattaaagaccgcgtaaatgtgcagaagatgcctgatacagt

SEQ ID NO: 498161 - DNA, 52 bp, Artificial
  Synthetic oligonucleotide
gatgtccgaatggtagtgtctaccaaacttgtttcacttcctggcgcatttg

SEQ ID NO: 498162 - DNA, 52 bp, Artificial
  Synthetic oligonucleotide
gtggaaacggtgttctctgtcctcgtcgaccagtatcggatcacagacattc

SEQ ID NO: 498163 - DNA, 52 bp, Artificial
  Synthetic oligonucleotide
ccccgaacgcgtaaagtcgctgacattggaaagcgcctcgccgggtctaaat

SEQ ID NO: 498164 - DNA, 52 bp, Artificial
  Synthetic oligonucleotide
agctggagctagaggaccaactggtcctcaaggaaaccaaggtattcaagga

SEQ ID NO: 498165 - DNA, 52 bp, Artificial
  Synthetic oligonucleotide
ttttcggttacctggctcagaaagtagtccgtatcccgcctggcactaacgc

SEQ ID NO: 498166 - DNA, 52 bp, Artificial
  Synthetic oligonucleotide
gataaatacccctaaatcatatcttgcttcgctcagactacaaagtctaccg

SEQ ID NO: 498167 - DNA, 52 bp, Artificial
  Synthetic oligonucleotide
ctgctacccaatccagtttgacgttgtgcttaccctcaaagcgattcatcgt

SEQ ID NO: 498168 - DNA, 52 bp, Artificial
  Synthetic oligonucleotide
ggcaccgcgaatagcggtgtcattcagtgtttcaaggggagtttaaattatt

SEQ ID NO: 498169 - DNA, 52 bp, Artificial
  Synthetic oligonucleotide
cacttttagggttctcctttaggcccgctgacttgatgtcgcctataacgac

SEQ ID NO: 498170 - DNA, 52 bp, Artificial
  Synthetic oligonucleotide
gctgcgcttagaatctcaagtctccctgctgaccatccttccagtgtctttt

SEQ ID NO: 498171 - DNA, 52 bp, Artificial
  Synthetic oligonucleotide
acttagccatattccctgtatattgtgtcgttccgccaccttctccgttttt

SEQ ID NO: 498172 - DNA, 51 bp, Artificial
  Synthetic oligonucleotide
ggggagggcgtgccatcccttttgcggagtgtgtcggaaacattgtgtccg

SEQ ID NO: 498173 - DNA, 51 bp, Artificial
  Synthetic oligonucleotide
ccggtgcctttctcaacgtaaacgccgtaatcagaagatgtcccaataaca

SEQ ID NO: 498174 - DNA, 51 bp, Artificial
  Synthetic oligonucleotide
aatctcctacaaccactcccgaagagcgcgataagagattcctatatgatt

SEQ ID NO: 498175 - DNA, 51 bp, Artificial
  Synthetic oligonucleotide
gttcagccctgtttccctctcaactgaaataagcgccccaatgcggcgttt

SEQ ID NO: 498176 - DNA, 51 bp, Artificial
  Synthetic oligonucleotide
ttttctatgatctgtggtcgtctagtggtcgtttatagctgttctgtggcc

SEQ ID NO: 498177 - DNA, 51 bp, Artificial
  Synthetic oligonucleotide
cagtattgttagtcggaggaatattggcaggaaatgtagcatttgtgacaa

SEQ ID NO: 498178 - DNA, 51 bp, Artificial
  Synthetic oligonucleotide
ttttctaacgtgaagtgaattcgtcccattctatactactccttaccctcg

SEQ ID NO: 498179 - DNA, 51 bp, Artificial
  Synthetic oligonucleotide
aatcaatctctaaagctctatctgttgccccttttgttgcttcattttggc

SEQ ID NO: 498180 - DNA, 51 bp, Artificial
  Synthetic oligonucleotide
gacagcgttttgcatgagtgttgccctaaagcaaagtgaagtttctgagag

SEQ ID NO: 498181 - DNA, 51 bp, Artificial
  Synthetic oligonucleotide
ggtatattcatatgtaatagatgtcttaccggaagcttgtaggttttcctt

SEQ ID NO: 498182 - DNA, 51 bp, Artificial
  Synthetic oligonucleotide
aaggcgtttatgaaagctgcaccaattgaggagtaatgatataggagggga

SEQ ID NO: 498183 - DNA, 51 bp, Artificial
  Synthetic oligonucleotide
ggagtgataaaggtgtaacgagtgaaatataccgaaagtgatgttgcactg

SEQ ID NO: 498184 - DNA, 51 bp, Artificial
  Synthetic oligonucleotide
taaccctcacgctcacatcatgttaaccatgagaaacgtagaccaagatgg

SEQ ID NO: 498185 - DNA, 51 bp, Artificial; identical to SEQ ID NO: 149713
  Synthetic oligonucleotide

SEQ ID NO: 498186 - DNA, 51 bp, Artificial
  Synthetic oligonucleotide
aacaggctggttgtccttccataatagggaatttgcaatcggtcaccattg

SEQ ID NO: 498187 - DNA, 51 bp, Artificial
  Synthetic oligonucleotide
ctaatcttcgttgcccctctaaaatactgactcactaacccctttgacacg

SEQ ID NO: 498188 - DNA, 51 bp, Artificial
  Synthetic oligonucleotide
cacactgttctaaactctacaatttgtactggtgttaccctcttacagtag

SEQ ID NO: 498189 - DNA, 51 bp, Artificial
  Synthetic oligonucleotide
ctagatggactgccaggtgtggtaggaatcgtgttaggtggatccagggca

SEQ ID NO: 498190 - DNA, 51 bp, Artificial
  Synthetic oligonucleotide
tccactgtctccggtacaatttctccttgaagccactggtttatcatctta

SEQ ID NO: 498191 - DNA, 51 bp, Artificial
  Synthetic oligonucleotide
gaacggtcacaacttacagctgaacattttgatctggcgggactcacgagt

SEQ ID NO: 498192 - DNA, 51 bp, Artificial
  Synthetic oligonucleotide
agtttccttggggtattgaggttgattggtgttaattcgcctcttccgatg

SEQ ID NO: 498193 - DNA, 51 bp, Artificial
  Synthetic oligonucleotide
caataaccgtgtactgccccttcagcacgactattacccggtgtttcattg

SEQ ID NO: 498194 - DNA, 51 bp, Artificial
  Synthetic oligonucleotide
tcgtattggacatgctatggctgaacaaacaatgtatatagacgttgaacc

SEQ ID NO: 498195 - DNA, 51 bp, Artificial
  Synthetic oligonucleotide
cagactacgggaacgtacctaaagctgaagttgttagaaatgttcgctttt

SEQ ID NO: 498196 - DNA, 51 bp, Artificial
  Synthetic oligonucleotide
tcttaggagtcggtgcatttgcgcaaggaacgcaaccaccaagctgtttaa

SEQ ID NO: 498197 - DNA, 51 bp, Artificial
  Synthetic oligonucleotide
tgatagaatactcaacagttgtattgtagggccaattggctctggtaaaca

SEQ ID NO: 498198 - DNA, 51 bp, Artificial
  Synthetic oligonucleotide
acgcaactcgccccatttgaacatcttgcgttgtcaatgcagctattacga

SEQ ID NO: 498199 - DNA, 51 bp, Artificial
  Synthetic oligonucleotide
gctacgcaatcgcctgtatccattgagtctgcaagtttagcccaaatgttt

SEQ ID NO: 498200 - DNA, 51 bp, Artificial
  Synthetic oligonucleotide
gccctgaacattagaaaagcgcagtggatctcatagtagagacccgactcc

SEQ ID NO: 498201 - DNA, 51 bp, Artificial
  Synthetic oligonucleotide
gatggtatagcgatagtgatttaatggtgttgcgccgatttatggagttaa

SEQ ID NO: 498202 - DNA, 51 bp, Artificial
  Synthetic oligonucleotide
ccgtccgcaagctcaaaccatgttggagaaatgacattaatacccggcatc

SEQ ID NO: 498203 - DNA, 50 bp, Artificial
  Synthetic oligonucleotide
acaagagtatcaagagttatctgagagtgagaagcaagagtataacggtc

SEQ ID NO: 498204 - DNA, 50 bp, Artificial
  Synthetic oligonucleotide
ttacttagagcgtccacctgaagggtatatgagcgagtttgcagcagggg

SEQ ID NO: 498205 - DNA, 50 bp, Artificial
  Synthetic oligonucleotide
gggacaccatggatattcaacttcgtaaaacacgggaccatcgagctgcc

SEQ ID NO: 498206 - DNA, 50 bp, Artificial
  Synthetic oligonucleotide
gctacgaaaaatccaaacagtaccccaaacaaaatgactaacaatggcat

SEQ ID NO: 498207 - DNA, 50 bp, Artificial
  Synthetic oligonucleotide
ctatctcatttaatcaatctcaccaaagttcattaagccacaataacaga

SEQ ID NO: 498208 - DNA, 50 bp, Artificial
  Synthetic oligonucleotide
ctattcaatcactagtcctaattcacgttgaactccagagaacgagtatc

SEQ ID NO: 498209 - DNA, 50 bp, Artificial
  Synthetic oligonucleotide
ttttacaatctgtacgttcctgagtttcgcttaacaaggtggacggagcg

SEQ ID NO: 498210 - DNA, 50 bp, Artificial
  Synthetic oligonucleotide
ttaattgcagaaaacccgatggattgcgtagccgttggaacaggtatcat

SEQ ID NO: 498211 - DNA, 50 bp, Artificial
  Synthetic oligonucleotide
cgtctgtccataaacataacatttatgttacaaatcgaataactaaggtt

SEQ ID NO: 498212 - DNA, 50 bp, Artificial
  Synthetic oligonucleotide
tgtcaacgtttcagccgcagtgttcggtccagactcctgggaacaatacc

SEQ ID NO: 498213 - DNA, 50 bp, Artificial
  Synthetic oligonucleotide
cacggagcttggcggaacttacaaaatcctgacaggctctaatgcaggtt

SEQ ID NO: 498214 - DNA, 50 bp, Artificial
  Synthetic oligonucleotide
ggagcaggaaacgcattctaagcttgtccgattggcaattgaatggggag

SEQ ID NO: 498215 - DNA, 50 bp, Artificial
  Synthetic oligonucleotide
tcgttaggaagcgatggagaacgtagaagattcggtatagcaaatgcgta

SEQ ID NO: 498216 - DNA, 50 bp, Artificial
  Synthetic oligonucleotide
aaggctcattcccgctacgtgagctgatacaggggacacttatcatgctc

SEQ ID NO: 498217 - DNA, 50 bp, Artificial
  Synthetic oligonucleotide
actgcttgtcatgcagttgtagcttgggcaaaaggtagaaatatcgcacc

SEQ ID NO: 498218 - DNA, 50 bp, Artificial
  Synthetic oligonucleotide
acaggttgcgctaacaacctgtgcaaattcatagtattggcgtactatga

SEQ ID NO: 498219 - DNA, 50 bp, Artificial
  Synthetic oligonucleotide
gtgccttgtatagcacctttcatgttcattcccacgttattgcatgtttt

SEQ ID NO: 498220 - DNA, 50 bp, Artificial
  Synthetic oligonucleotide
tgaatcgagttatataacgagtcactacgttcacccggatttaatgtacc

SEQ ID NO: 498221 - DNA, 55 bp, Artificial
  Synthetic oligonucleotide
gaattactccgatgcccatgataaagaatgtcaagctagtaacaggccatgatgc

SEQ ID NO: 498222 - DNA, 55 bp, Artificial
  Synthetic oligonucleotide
gaccgtatacccctgtaggacgatagaatacataaggaaatccggggatactttg

SEQ ID NO: 498223 - DNA, 55 bp, Artificial
  Synthetic oligonucleotide
gcaacctagctcctcttttgaatcgaaactgatgcagagaatacagcaagaagcc

SEQ ID NO: 498224 - DNA, 55 bp, Artificial
  Synthetic oligonucleotide
gcacaccgctttcgaagtaagttatgtccattgcatcaacagtgcccggtgtgcg

SEQ ID NO: 498225 - DNA, 55 bp, Artificial
  Synthetic oligonucleotide
gccaacgcgggttgaatcttgtttgaataccttgcccacaaactgcggtttgata

SEQ ID NO: 498226 - DNA, 55 bp, Artificial
  Synthetic oligonucleotide
gcccattttctgtaagccatagtgtactgctttagatgccccacctgttcctagt

SEQ ID NO: 498227 - DNA, 55 bp, Artificial
  Synthetic oligonucleotide
gccccattataaaaccatggtcacaagccaacatcactgtacgtcctgtcgcagg

SEQ ID NO: 498228 - DNA, 55 bp, Artificial
  Synthetic oligonucleotide
gccccgtaccggccgtgcccgtttcactttccctaccggacaaggcaacatcttg

SEQ ID NO: 498229 - DNA, 55 bp, Artificial
  Synthetic oligonucleotide
gcgagggcatactcgactgaagttcccactcccctgttgtggcattgcgcaccat

SEQ ID NO: 498230 - DNA, 55 bp, Artificial
  Synthetic oligonucleotide
gcgctttggaatgattgtctaaatataataagagacaatgttgcggagtcgacat

SEQ ID NO: 498231 - DNA, 55 bp, Artificial
  Synthetic oligonucleotide
ggatatccaagtgaacagttactctattaccacaaaggagtggatgaggttgctc

SEQ ID NO: 498232 - DNA, 55 bp, Artificial
  Synthetic oligonucleotide
ggcgcagggcttcaaacaactctccgttttctgtgttgggcagtcccaatggcag

SEQ ID NO: 498233 - DNA, 55 bp, Artificial
  Synthetic oligonucleotide
ggctcgaaagcaatggctaggttggctacaagctgtaaactgatatttaggattg

SEQ ID NO: 498234 - DNA, 55 bp, Artificial
  Synthetic oligonucleotide
gggaccatcgtgttctgggatgtggaacagcaggcatggagaaacttccagctcg

SEQ ID NO: 498235 - DNA, 55 bp, Artificial
  Synthetic oligonucleotide
gggaggtaccttatctataagtttgcagatggtcgttggggtaagctccttggtc

SEQ ID NO: 498236 - DNA, 55 bp, Artificial
  Synthetic oligonucleotide
gggatagcgaacgatctgctcaggcagtggctcataaactaacgatacaatcagt

SEQ ID NO: 498237 - DNA, 55 bp, Artificial
  Synthetic oligonucleotide
gggtatactccggagcaattggacagtatggtgaatgcgcagaactggaagttcg

SEQ ID NO: 498238 - DNA, 55 bp, Artificial
  Synthetic oligonucleotide
ggttcggccagttacattgaagtcgaagcgttaacggatatccccgaggagaaga

SEQ ID NO: 498239 - DNA, 55 bp, Artificial
  Synthetic oligonucleotide
gtactcgtaaggagtatttcttagaccttgtaaaacagctaagttgccgcctctt

SEQ ID NO: 498240 - DNA, 55 bp, Artificial
  Synthetic oligonucleotide
gtacttacctggtaggttgaaggctgggctaatatacccaatagaattcccacag

SEQ ID NO: 498241 - DNA, 55 bp, Artificial
  Synthetic oligonucleotide
gtatggtgagtgacattctatgccatttcgggagtaagcctgtcctaggtagtac

SEQ ID NO: 498242 - DNA, 55 bp, Artificial
  Synthetic oligonucleotide
gtcacgcactttcatcttaccctcaatacctaaatcggagaatttcaccgaacga

SEQ ID NO: 498243 - DNA, 55 bp, Artificial
  Synthetic oligonucleotide
gttcggggttagaagtccaattccacttatcgctcaaaccgctaagtctatagcg

SEQ ID NO: 498244 - DNA, 55 bp, Artificial
  Synthetic oligonucleotide
gttgacaggataggcgtccacatgcatgaaagtcttaagcgaggccgcactctcg

SEQ ID NO: 498245 - DNA, 55 bp, Artificial
  Synthetic oligonucleotide
tagtgtccatccatatcagagatggtaccgtgagccgtgcctttcacctttacag

SEQ ID NO: 498246 - DNA, 55 bp, Artificial
  Synthetic oligonucleotide
tgagacatcaggaggctccgggaacaacatttaagaagcatatggcgatagccaa

SEQ ID NO: 498247 - DNA, 55 bp, Artificial
  Synthetic oligonucleotide
tggtcggagcaaacaatacttttcggacaaagacccgtactatgctgtgacgggt

SEQ ID NO: 498248 - DNA, 55 bp, Artificial
  Synthetic oligonucleotide
ttacccaagccgtttgttttaactaacgcactttatgaaggagtgtcatgatatc

SEQ ID NO: 498249 - DNA, 55 bp, Artificial
  Synthetic oligonucleotide
acagataccatagagcggctcactaagttaaagcgaaacaatcctccgcgagtac

SEQ ID NO: 498250 - DNA, 55 bp, Artificial
  Synthetic oligonucleotide
attcggcctggcttacctcaagggtcgattcgttcacttttacggtttcggcggc

SEQ ID NO: 498251 - DNA, 55 bp, Artificial
  Synthetic oligonucleotide
caattggatgtgctggttacaaacgatatttctttatccgaggggtgttgggtac

SEQ ID NO: 498252 - DNA, 55 bp, Artificial
  Synthetic oligonucleotide
cacggccactttccagtaaacggagtctccggtaagttgggtagcgcggaacagc

SEQ ID NO: 498253 - DNA, 55 bp, Artificial
  Synthetic oligonucleotide
cagatgcctttactcatgaaatagtgggttggatcctatccggtagtctcgttgc

SEQ ID NO: 498254 - DNA, 55 bp, Artificial
  Synthetic oligonucleotide
caggtcagtggaaagaaatggctaggctaactgctcaaactcctttaccgattgc

SEQ ID NO: 498255 - DNA, 55 bp, Artificial
  Synthetic oligonucleotide
catcgtattaaactggaatatcttcaggtgacaagtggggtaggcgtacggtcag

SEQ ID NO: 498256 - DNA, 55 bp, Artificial
  Synthetic oligonucleotide
cattggataaacgagctcctttctatttgcaggctcgctaccgttttgatgccgg

SEQ ID NO: 498257 - DNA, 55 bp, Artificial
  Synthetic oligonucleotide
ccaacgggatgaagcgcaacatataggtgatttcgggcgagaaggtccatcccat

SEQ ID NO: 498258 - DNA, 55 bp, Artificial
  Synthetic oligonucleotide
ccacaggaaatgctactcaactcaaactagaagcagatcgacaagctatgaaggc

SEQ ID NO: 498259 - DNA, 55 bp, Artificial
  Synthetic oligonucleotide
ccagctggggaccgttgccatcggatataatagtcttgtcgccatacttcaggct

SEQ ID NO: 498260 - DNA, 55 bp, Artificial
  Synthetic oligonucleotide
cccataggctcaacccctctattccagtttgtttaggatacacgataccactctg

SEQ ID NO: 498261 - DNA, 55 bp, Artificial
  Synthetic oligonucleotide
cccgtatcgatacattccgtaccgggacgtaagtgtggagtgacaaaacggaagt

SEQ ID NO: 498262 - DNA, 55 bp, Artificial
  Synthetic oligonucleotide
ccgcgaaccggctttcatacgcgatcacatggctactctgggagtaaccaccatg

SEQ ID NO: 498263 - DNA, 55 bp, Artificial
  Synthetic oligonucleotide
gaaggatttaataagtacgccaaagctggactttcagcctttgtaactcataagc

SEQ ID NO: 498264 - DNA, 55 bp, Artificial
  Synthetic oligonucleotide
cgcagacttcatcttctcactgacacgcatcaacgaacaagaccgtgcctacacc

SEQ ID NO: 498265 - DNA, 55 bp, Artificial
  Synthetic oligonucleotide
cggattatatctgatcaaagaaccaataccaccgtaagaacccttgaccatcatc

SEQ ID NO: 498266 - DNA, 55 bp, Artificial
  Synthetic oligonucleotide
cggctatcagcaaggcacgtccgaaatttcctttatgagcaaacttaccacgcgg

SEQ ID NO: 498267 - DNA, 55 bp, Artificial
  Synthetic oligonucleotide
cgttgtgaatcccgctatgtcaatgggttatgatatggctcgcgatgctgctaag

SEQ ID NO: 498268 - DNA, 55 bp, Artificial
  Synthetic oligonucleotide
ctagcaaaatcgagtcctgtatttgcagacggctataaagtaggattggttcgag

SEQ ID NO: 498269 - DNA, 55 bp, Artificial
  Synthetic oligonucleotide
ctcaaaagccggtttcaacccggtgatttgttcggagaataatgctttggcacgg

SEQ ID NO: 498270 - DNA, 55 bp, Artificial
  Synthetic oligonucleotide
ctcttggcgtaccatctgcaaacttttactcagttcttcacggttgtactgcatt

SEQ ID NO: 498271 - DNA, 55 bp, Artificial
  Synthetic oligonucleotide
ctttatggctgttttatccgaaacggacggtgtatatcatgccatcggtttcttg

SEQ ID NO: 498272 - DNA, 54 bp, Artificial
  Synthetic oligonucleotide
acgaagcatcagactatgccaatgcagcctattttgctaatgtagacggttatt

SEQ ID NO: 498273 - DNA, 54 bp, Artificial
  Synthetic oligonucleotide
tgagtacacatccataaattcccctgcctgtcggaaaaggcggaatgtatcttg

SEQ ID NO: 498274 - DNA, 54 bp, Artificial
  Synthetic oligonucleotide
gttcgccttcattcgggaaatctccagactttacgtcggtgatgtagccttgaa

SEQ ID NO: 498275 - DNA, 54 bp, Artificial
  Synthetic oligonucleotide
gcaacagtacaaaattcggactgaagtacgacatcaatgccaacctctcctctt

SEQ ID NO: 498276 - DNA, 53 bp, Artificial
  Synthetic oligonucleotide
caaagcaataaattgagctgttactgtggctgttgcagcacctcgaatacccc

SEQ ID NO: 498277 - DNA, 53 bp, Artificial
  Synthetic oligonucleotide
atccgaggcatgtggggcacactgacggacaagaacaacccgtacaaaagcgg

SEQ ID NO: 498278 - DNA, 52 bp, Artificial
  Synthetic oligonucleotide
gacaatcttaatactttgcatctcatccgattgctcaaaatgaagttcgggg

SEQ ID NO: 498279 - DNA, 52 bp, Artificial
  Synthetic oligonucleotide
ggccccacttggttctattatacggaaaggtggactaggaatgcccgttgtc

SEQ ID NO: 498280 - DNA, 51 bp, Artificial
  Synthetic oligonucleotide
gcaggcgctggggctgtaggaacgcacctagccaaactgttgtctagcgaa

SEQ ID NO: 498281 - DNA, 51 bp, Artificial
  Synthetic oligonucleotide
actcctttgttggattgcatcatcgaaaccattccttcacctcaagtatta

SEQ ID NO: 498282 - DNA, 51 bp, Artificial
  Synthetic oligonucleotide
cgtgattgaacatctcgcagaggaatgagtagaacagtacaggcagataaa

SEQ ID NO: 498283 - DNA, 51 bp, Artificial
  Synthetic oligonucleotide
gcttcatacaggaagccttcgataccaactgggtggttccgctcggtccga

SEQ ID NO: 498284 - DNA, 50 bp, Artificial
  Synthetic oligonucleotide
tctgggtaacggattgtttcagcgtaacaaacttagaagacgtccgggaa

SEQ ID NO: 498285 - DNA, 55 bp, Artificial
  Synthetic oligonucleotide
gttattaacagggaccatgcataacataacagaagcgccacggaaaacttgaggc

SEQ ID NO: 498286 - DNA, 55 bp, Artificial
  Synthetic oligonucleotide
cttcacaatcctcaaagcacggtgaagcggttatgggattaatgcgcacataccc

SEQ ID NO: 498287 - DNA, 55 bp, Artificial
  Synthetic oligonucleotide
cttccgttacaaatggcgctaacccatccatataaccaagctcttgtgcaaccat

SEQ ID NO: 498288 - DNA, 55 bp, Artificial
  Synthetic oligonucleotide
cttctcgattaaggtttattcccgccgaaatcagaccttgtaaagctgcataagc

SEQ ID NO: 498289 - DNA, 55 bp, Artificial
  Synthetic oligonucleotide
cttgccaatcctcccctatcccaaagccacaccggtcattagaatttggggcagt

SEQ ID NO: 498290 - DNA, 55 bp, Artificial
  Synthetic oligonucleotide
cttgggctaactcctccataaatttcgagttcagcttgaagcaaactttctcgca

SEQ ID NO: 498291 - DNA, 55 bp, Artificial
  Synthetic oligonucleotide
gaaattgtaccattcgacggaaaaccgccagttttattaatgtcctggatgaact

SEQ ID NO: 498292 - DNA, 55 bp, Artificial
  Synthetic oligonucleotide
gaacatagaaagtgcaatagcagctgtcgtcaaaaccgcaacgatagatgcgcaa

SEQ ID NO: 498293 - DNA, 55 bp, Artificial
  Synthetic oligonucleotide
gaagcctaaggcacatgttatgaggagaataggcgaaaagttcatcgctggtgga

SEQ ID NO: 498294 - DNA, 55 bp, Artificial
  Synthetic oligonucleotide
gacagtcaagcagcatgggaatggttagcgatggctgaactacctgcacatactc

SEQ ID NO: 498295 - DNA, 55 bp, Artificial
  Synthetic oligonucleotide
gacgctctttcactcatcattagcaatttggatgcattttgtgttcgtgcaatag

SEQ ID NO: 498296 - DNA, 55 bp, Artificial
  Synthetic oligonucleotide
gacggaatagatgttccggaaaggtatatggcaaggcaggacgagataaatagtc

SEQ ID NO: 498297 - DNA, 55 bp, Artificial
  Synthetic oligonucleotide
gacgtcagcttcttggcaacatgatatccgttttaggcaacatgatatccgtttc

SEQ ID NO: 498298 - DNA, 55 bp, Artificial
  Synthetic oligonucleotide
gagcgggcacttatattgtgtgcacgacgatgagccagataagcacgtaaatcag

SEQ ID NO: 498299 - DNA, 55 bp, Artificial
  Synthetic oligonucleotide
gagcgtagattcgcaagcatcacctctttgcgttctcggggtctaaaatatccac

SEQ ID NO: 498300 - DNA, 55 bp, Artificial
  Synthetic oligonucleotide
gaggggattgtcgggtgtggttacgccatacaatactctttaatgagaaaagcgt

SEQ ID NO: 498301 - DNA, 55 bp, Artificial
  Synthetic oligonucleotide
gagtgttatgacgattgccctcaggcaccaccataatggcattcgcctcagcaag

SEQ ID NO: 498302 - DNA, 55 bp, Artificial
  Synthetic oligonucleotide
gtgttgttaccgctccaacaaatggggccgctggtgttgtccccgcagttttacg

SEQ ID NO: 498303 - DNA, 55 bp, Artificial
  Synthetic oligonucleotide
gtggtacggatttgaatttcggtgcttacggtttgaaggctgttgagccggagag

SEQ ID NO: 498304 - DNA, 55 bp, Artificial
  Synthetic oligonucleotide
gattacagcacgcttatgcactgtaaaagcttctgaactgctatggccagatgcc

SEQ ID NO: 498305 - DNA, 55 bp, Artificial
  Synthetic oligonucleotide
cggcttggttccatactgtctcatttgacagggcgtggagctttgtcggatcagg

SEQ ID NO: 498306 - DNA, 55 bp, Artificial
  Synthetic oligonucleotide
cggtcagtatcgtcctagtgaagatgagccttttatgaatgagcggcaaaaggca

SEQ ID NO: 498307 - DNA, 55 bp, Artificial
  Synthetic oligonucleotide
cggtgattgctaaacaaggtatcatagcctcaggggtgaggatccccacaggagg

SEQ ID NO: 498308 - DNA, 55 bp, Artificial
  Synthetic oligonucleotide
cgtatgatgcgtcagtgtgagcttgttgggcgtgttcaacgttacaagtctgacg

SEQ ID NO: 498309 - DNA, 55 bp, Artificial
  Synthetic oligonucleotide
cgtatgcggagctgtgtagaacaaagtcgtgaggtatgtttccattgaagcactg

SEQ ID NO: 498310 - DNA, 55 bp, Artificial
  Synthetic oligonucleotide
cgtctacgcaacgatcaatagggaactaaaagcccgaaacctcgatacatagaat

SEQ ID NO: 498311 - DNA, 55 bp, Artificial
  Synthetic oligonucleotide
cgtgaaagcaaaggcagatatgctaatgcactagaggaggatttgctgcttgtgg

SEQ ID NO: 498312 - DNA, 55 bp, Artificial
  Synthetic oligonucleotide
cgtgagccagttataccaggacggttttaccggatctgcgaggagttgaccgccc

SEQ ID NO: 498313 - DNA, 55 bp, Artificial
  Synthetic oligonucleotide
cgtgatcatgggcatatgttggcggttggaatgagtccgcgtggtgttatggcag

SEQ ID NO: 498314 - DNA, 55 bp, Artificial
  Synthetic oligonucleotide
cgtgcagacagagatccaattgcgaattggtggtggacaattgatcgctctatct

SEQ ID NO: 498315 - DNA, 55 bp, Artificial
  Synthetic oligonucleotide
cgtggtctttcgcgtaatgccgtaatcgcaccctatgcaagtcttttggccgctc

SEQ ID NO: 498316 - DNA, 55 bp, Artificial
  Synthetic oligonucleotide
cgttcccttcatgcgcacctgcaattcggtaataccttttaggtcttgtatttgg

SEQ ID NO: 498317 - DNA, 55 bp, Artificial
  Synthetic oligonucleotide
ctagccggaaacaaatcagtggcattgcttggtaattcgagactagccatccgtc

SEQ ID NO: 498318 - DNA, 55 bp, Artificial
  Synthetic oligonucleotide
ctattggatctgccaaaggacctcataataccgatggtttgcgttctatccgcgc

SEQ ID NO: 498319 - DNA, 55 bp, Artificial
  Synthetic oligonucleotide
ctcatccacgtcagacttgtaacgttgaacacgcccaacaagctcacactgacgc

SEQ ID NO: 498320 - DNA, 55 bp, Artificial
  Synthetic oligonucleotide
ctcggccgctccgtctccccaagggacataaccaacagctgttgcaacaaacttt

SEQ ID NO: 498321 - DNA, 55 bp, Artificial
  Synthetic oligonucleotide
ctctttaggtgtgaaggggtgtatattggctaccgtaggccaactcacaggcatc

SEQ ID NO: 498322 - DNA, 55 bp, Artificial
  Synthetic oligonucleotide
ctgatgccggctctcgtggaacaagccaatcgcaaatatccggacatgaatctga

SEQ ID NO: 498323 - DNA, 55 bp, Artificial
  Synthetic oligonucleotide
ctggtcccaatgcaaatgctcttgtaccacaaacggcaggctatatcgtcatgcc

SEQ ID NO: 498324 - DNA, 55 bp, Artificial
  Synthetic oligonucleotide
ctgtctcttgggaaaccgccgtcattccctgtttacgtgcaatgatacctaatac

SEQ ID NO: 498325 - DNA, 55 bp, Artificial
  Synthetic oligonucleotide
cttatcaggaatttagtcgtacagttggtgtagatgcgcacttaaatcctcgtag

SEQ ID NO: 498326 - DNA, 55 bp, Artificial
  Synthetic oligonucleotide
gcgcgttccacatccaagagcaagtataagatcaccaattgtttggcttgagttc

SEQ ID NO: 498327 - DNA, 55 bp, Artificial
  Synthetic oligonucleotide
gcgtcgtaaaactatcaataggaacaggtttcccatggttcaagatcagatccgt

SEQ ID NO: 498328 - DNA, 55 bp, Artificial
  Synthetic oligonucleotide
gctattggttacagcagtagatgtctgagcagatgcctccgctttctcagtctta

SEQ ID NO: 498329 - DNA, 55 bp, Artificial
  Synthetic oligonucleotide
gtgcgcacaggggttgaacgggcctatggcgacaaacttaaatacaaaatgcgcc

SEQ ID NO: 498330 - DNA, 55 bp, Artificial
  Synthetic oligonucleotide
gctccagttatggaaacctctgacgctgagggagccgtatgatggatcttgtaat

SEQ ID NO: 498331 - DNA, 55 bp, Artificial
  Synthetic oligonucleotide
gcttccatgacagccatacgcacagcgattcccatttctacttgtgtatgaatca

SEQ ID NO: 498332 - DNA, 55 bp, Artificial
  Synthetic oligonucleotide
gcttggttgcagaatttgctggtgggagcgctcattttaatcttattccggggag

SEQ ID NO: 498333 - DNA, 55 bp, Artificial
  Synthetic oligonucleotide
gtgaggtggatgtgttacgccagcaagcccctgttattgaaggggttccagcgtg

SEQ ID NO: 498334 - DNA, 55 bp, Artificial
  Synthetic oligonucleotide
ggcagggacatctctccaatccatagctggtctattaatgaccttatgacgttgt

SEQ ID NO: 498335 - DNA, 55 bp, Artificial
  Synthetic oligonucleotide
ggcgtccattaaggcgctcttccacgcgcgctactgcgtgtatcatagcatcggc

SEQ ID NO: 498336 - DNA, 55 bp, Artificial
  Synthetic oligonucleotide
gtgaggaatcaaactattacccttaaaactactgcagcaccttaactgcaacctg

SEQ ID NO: 498337 - DNA, 55 bp, Artificial
  Synthetic oligonucleotide
ggctatcacctgtttcataactcgtcgtctgttgatccgttaaacgctccggcat

SEQ ID NO: 498338 - DNA, 55 bp, Artificial
  Synthetic oligonucleotide
gggcgatcattaacaggaacttgaagtgatccatcacgcgcccgcttctcataaa

SEQ ID NO: 498339 - DNA, 55 bp, Artificial
  Synthetic oligonucleotide
ggggaacagcgcaggttgttgattcatctcatttagaagcatcttatgaaggtac

SEQ ID NO: 498340 - DNA, 55 bp, Artificial
  Synthetic oligonucleotide
ggggaccgaaaatacgatgattattcagccactgatgaaaacgtggagaagaacg

SEQ ID NO: 498341 - DNA, 55 bp, Artificial
  Synthetic oligonucleotide
ggggatcatcagtttcgaaatccaccacgataagcttaattcacgaccaatggct

SEQ ID NO: 498342 - DNA, 55 bp, Artificial
  Synthetic oligonucleotide
ggggtctaattcctgttggatcacgtgcagcaataagttttgtacgtgtgagcgc

SEQ ID NO: 498343 - DNA, 55 bp, Artificial
  Synthetic oligonucleotide
gggttgcagctctctttacattgtggacagggtgggattattttcgtgcaggctt

SEQ ID NO: 498344 - DNA, 55 bp, Artificial
  Synthetic oligonucleotide
ggtgggtctactgagattaaaacctatattgaacggctctccccttatggtgaat

SEQ ID NO: 498345 - DNA, 55 bp, Artificial
  Synthetic oligonucleotide
gtagggtctatgcttatgcagctttacaaggtctgatttcggcgggaataaacct

SEQ ID NO: 498346 - DNA, 55 bp, Artificial
  Synthetic oligonucleotide
gtcagcccttctcaagtccataaacagcatgtaatgttctaaccgcaagttcagt

SEQ ID NO: 498347 - DNA, 55 bp, Artificial
  Synthetic oligonucleotide
gattcggtcatcatatcccttgtcttttcgaccctcataggagtgtgttttggtt

SEQ ID NO: 498348 - DNA, 55 bp, Artificial
  Synthetic oligonucleotide
gattgcacgtttagatcccatgaaaatggtatgggatgcaagtgctgtgaaacca

SEQ ID NO: 498349 - DNA, 55 bp, Artificial
  Synthetic oligonucleotide
gcaataactgtgatacaagttgagctgtataatcaaccatgggcacaatccttgc

SEQ ID NO: 498350 - DNA, 55 bp, Artificial
  Synthetic oligonucleotide
gcaatgaatgtggcaagacgacctaaaacaaggttttctgcgtcaataataaccc

SEQ ID NO: 498351 - DNA, 55 bp, Artificial
  Synthetic oligonucleotide
gcacgtcttattgctgactttctatcaggtatgaccgatcactatgctctacgcg

SEQ ID NO: 498352 - DNA, 55 bp, Artificial
  Synthetic oligonucleotide
gcactgcaactgtgcggggaatacgtgtttgccagaaaagaagccacgcattcgg

SEQ ID NO: 498353 - DNA, 55 bp, Artificial
  Synthetic oligonucleotide
gcatacggcaggaggacaccgccgttatgacctatccaagcttagacctgagctt

SEQ ID NO: 498354 - DNA, 55 bp, Artificial
  Synthetic oligonucleotide
gcatcaattcttgccgtgatgcgggcttgttcttccgcagttggggtgcgaccgt

SEQ ID NO: 498355 - DNA, 55 bp, Artificial
  Synthetic oligonucleotide
gccaatggagcgattaattctagctcaagtgatgccgtagcgggtaaccagcttc

SEQ ID NO: 498356 - DNA, 55 bp, Artificial
  Synthetic oligonucleotide
gccacctgttatactgccctgtccccgtaaatcttccgtcaaattgcgtattgcc

SEQ ID NO: 498357 - DNA, 55 bp, Artificial
  Synthetic oligonucleotide
gccacgactatgggcatcaaaatgcaatcctgtgttaccatagcgagacatcaga

SEQ ID NO: 498358 - DNA, 55 bp, Artificial
  Synthetic oligonucleotide
gccattctcaaaccgccctgcactataagccggtgctaagagaatgccaggttcc

SEQ ID NO: 498359 - DNA, 55 bp, Artificial
  Synthetic oligonucleotide
gccccaattgggcaaacgttaatgacacaaccaggcatgagtggacgggtattac

SEQ ID NO: 498360 - DNA, 55 bp, Artificial
  Synthetic oligonucleotide
gcccgtcttctggtcagagtttgggtacatcgtccgcccatagtatggacccgcc

SEQ ID NO: 498361 - DNA, 55 bp, Artificial
  Synthetic oligonucleotide
gcgaaacccaatcacggcatcttggctgtctcttaacacgagataaagcgtgcgg

SEQ ID NO: 498362 - DNA, 55 bp, Artificial
  Synthetic oligonucleotide
gcgaaataacatgcgatggcacgggctgctaaaccaaatggttaaagatgtgcgc

SEQ ID NO: 498363 - DNA, 55 bp, Artificial
  Synthetic oligonucleotide
gtggctatatgacgccttacgaatgtgctggcgatgacgatacatttatcagccg

SEQ ID NO: 498364 - DNA, 55 bp, Artificial
  Synthetic oligonucleotide
gcgagcgatccaatttaaccatgtcgaatggataacgcacgagataagcaagtga

SEQ ID NO: 498365 - DNA, 55 bp, Artificial
  Synthetic oligonucleotide
gcgatcaattgtccaccaccaattcgcaattggatctctatctgcacgcgtaacc

SEQ ID NO: 498366 - DNA, 55 bp, Artificial
  Synthetic oligonucleotide
gcgcacgtgttgaggatatctctactgctggattagaattaacgcgtggctcgac

SEQ ID NO: 498367 - DNA, 55 bp, Artificial
  Synthetic oligonucleotide
gcgccgcgtctatatggataaatgggccgcttatgttacaggtcaatcttaagat

SEQ ID NO: 498368 - DNA, 55 bp, Artificial
  Synthetic oligonucleotide
atggcacggtttcaagagattgcgttagatttgattgttgtaccggagcgtatac

SEQ ID NO: 498369 - DNA, 55 bp, Artificial
  Synthetic oligonucleotide
atggtaagtggactcagctgtactgccatcgttcttgaacgtattgatcttgaaa

SEQ ID NO: 498370 - DNA, 55 bp, Artificial
  Synthetic oligonucleotide
attcaggcctttcaagatcgcgtaagagaacccattggcgagcaccatcacgcaa

SEQ ID NO: 498371 - DNA, 55 bp, Artificial
  Synthetic oligonucleotide
tctgcgcatttattctaccatctacgtggtgcatctatcgattccacaatagcac

SEQ ID NO: 498372 - DNA, 55 bp, Artificial
  Synthetic oligonucleotide
attcccgccgaaatcagaccttgtaaagccgcataagcatagaccctacagtcca

SEQ ID NO: 498373 - DNA, 55 bp, Artificial
  Synthetic oligonucleotide
attgaacggcgtgataatacattttcgcttattcaaaccagtgaacgcggggcac

SEQ ID NO: 498374 - DNA, 55 bp, Artificial
  Synthetic oligonucleotide
tctcatcaatttgatcacgaactgcaatcaactcattgcgccgacttttcagttc

SEQ ID NO: 498375 - DNA, 55 bp, Artificial
  Synthetic oligonucleotide
tcattcaagggcagggtggagcaatagctgtcagtacacatttacaatgtcacgg

SEQ ID NO: 498376 - DNA, 55 bp, Artificial
  Synthetic oligonucleotide
caacgtgataaattctctggttatgaccgtatagaaggtggaacaagagccaatg

SEQ ID NO: 498377 - DNA, 55 bp, Artificial
  Synthetic oligonucleotide
caagaagcagaccgtggcaagctgattacggcatgtgggatggacatacaaagcc

SEQ ID NO: 498378 - DNA, 55 bp, Artificial
  Synthetic oligonucleotide
caagccagtggcccaacaataacctatctggaacgccataccattaaagcggcta

SEQ ID NO: 498379 - DNA, 55 bp, Artificial
  Synthetic oligonucleotide
caagtgttctcaaagtggtcgaccgaccatacgctatgaatggcatcctttagtg

SEQ ID NO: 498380 - DNA, 55 bp, Artificial
  Synthetic oligonucleotide
cacgaatgtccatgtcataactagctaattggaaacctgcacccaatgtgtcgag

SEQ ID NO: 498381 - DNA, 55 bp, Artificial
  Synthetic oligonucleotide
cacgcactcgatattttcgcatccatcccgttatagggagctctaatatacgcgc

SEQ ID NO: 498382 - DNA, 55 bp, Artificial
  Synthetic oligonucleotide
cacgggagcatcctttacaaggtttcctagacctcgcactcctttagaaactccc

SEQ ID NO: 498383 - DNA, 55 bp, Artificial
  Synthetic oligonucleotide
cactgaaccctagtcagcattttgcttttagtgctggaaagcacctggacatggc

SEQ ID NO: 498384 - DNA, 55 bp, Artificial
  Synthetic oligonucleotide
cagaaattgagggctttatatccgttgcacctcaacctaatgtttatgacttctc

SEQ ID NO: 498385 - DNA, 55 bp, Artificial
  Synthetic oligonucleotide
cagcacgcttatgcgctgtaaaagcttctgaactgctatggccagatgccatcac

SEQ ID NO: 498386 - DNA, 55 bp, Artificial
  Synthetic oligonucleotide
cagcgacaacgatttctaacgcgccatccttatgacgaaaatcaggtgtaagaac

SEQ ID NO: 498387 - DNA, 55 bp, Artificial
  Synthetic oligonucleotide
cagcggataatgggcattttgctcgagccaccatgacagtaaatggcggcaatga

SEQ ID NO: 498388 - DNA, 55 bp, Artificial
  Synthetic oligonucleotide
caggagttcttatgtcacaatacaatcccacaacagcggatttcgaagctcttct

SEQ ID NO: 498389 - DNA, 55 bp, Artificial
  Synthetic oligonucleotide
ttgaaagacgagaataacgaggtacgggtcgatgatgcagccaagattgttggct

SEQ ID NO: 498390 - DNA, 55 bp, Artificial
  Synthetic oligonucleotide
aaaataaggcggacacgattacctccagaaggacgtaattccaccatttggcctt

SEQ ID NO: 498391 - DNA, 55 bp, Artificial
  Synthetic oligonucleotide
aaaccaaacagggcgtattgtttcgcaaaagcggatagagctttcaaccgatggt

SEQ ID NO: 498392 - DNA, 55 bp, Artificial
  Synthetic oligonucleotide
aatgcgtaaagggcaacgcgatatgattgctccagtaatacgtgttcaaaaggca

SEQ ID NO: 498393 - DNA, 55 bp, Artificial
  Synthetic oligonucleotide
aatttgcctatagacctctgcgtcatgctccacgtatttcagcgcttattggtgc

SEQ ID NO: 498394 - DNA, 55 bp, Artificial
  Synthetic oligonucleotide
acaaaatctcgtgccgctaaaaccgatgtggcctcatccaccataacgcctggag

SEQ ID NO: 498395 - DNA, 55 bp, Artificial
  Synthetic oligonucleotide
acaaagaccgttctagatagagttctcctcgcttttctttctcaatcatgccgcg

SEQ ID NO: 498396 - DNA, 55 bp, Artificial
  Synthetic oligonucleotide
ttcttgttgcgagtgaagattatggaagacgtatagagctttctgctatgctccg

SEQ ID NO: 498397 - DNA, 55 bp, Artificial
  Synthetic oligonucleotide
ttatcatgcgtacgcgtcatcagcgcaagaaatgagaaaggtagtctgaagtggt

SEQ ID NO: 498398 - DNA, 55 bp, Artificial
  Synthetic oligonucleotide
agacaacaaaatcggttatgccaaaatggtcaaagcccatgtaatgcataggcac

SEQ ID NO: 498399 - DNA, 55 bp, Artificial
  Synthetic oligonucleotide
agacaatgaggggtaatgtttgtgaatagcaagagccatcttacaaagcaggctg

SEQ ID NO: 498400 - DNA, 55 bp, Artificial
  Synthetic oligonucleotide
agatccccaatcaaaatctcatttgctgctaatcgatcgaaaacttgctgaaccg

SEQ ID NO: 498401 - DNA, 55 bp, Artificial
  Synthetic oligonucleotide
aggaaaaccgttgtcgcaccaacattcctgcccgtcgccataaagcgcaagacaa

SEQ ID NO: 498402 - DNA, 55 bp, Artificial
  Synthetic oligonucleotide
aggtaacaccccgtgcttgttatacgagctctaaagatgagccaacgcgtacaac

SEQ ID NO: 498403 - DNA, 55 bp, Artificial
  Synthetic oligonucleotide
agtgatcatgaatgatgttattaaaacacgctgtggttttgttgcgctcattggg

SEQ ID NO: 498404 - DNA, 55 bp, Artificial
  Synthetic oligonucleotide
tggttatcgaagagagggcgggttttaatggggcgttcaagataacgacgtgggg

SEQ ID NO: 498405 - DNA, 55 bp, Artificial
  Synthetic oligonucleotide
tgggtaacttttggagacaagacaaccgttataaaatctggtgaattgaccccac

SEQ ID NO: 498406 - DNA, 55 bp, Artificial
  Synthetic oligonucleotide
atcatagcatttacattgaatagccgcataacctccttgatcacggattgtagcg

SEQ ID NO: 498407 - DNA, 55 bp, Artificial
  Synthetic oligonucleotide
tggaaatgggaatcgctgtgcgtatggctgtcatggaggctttattggattcacg

SEQ ID NO: 498408 - DNA, 55 bp, Artificial
  Synthetic oligonucleotide
tgagtaatagtggtatatccgcgcgtgatgttagtgtaacttatcgcaatggtca

SEQ ID NO: 498409 - DNA, 55 bp, Artificial
  Synthetic oligonucleotide
atgaaaacggcttaaatcgtgtaagcgcggggcgtttaatgcaaatttccgatat

SEQ ID NO: 498410 - DNA, 55 bp, Artificial
  Synthetic oligonucleotide
ccgccccagtattatgctggttcaggatttattgacaccttttgcactcggtcgt

SEQ ID NO: 498411 - DNA, 55 bp, Artificial
  Synthetic oligonucleotide
ccgtaaacgccgtcttaacaaacgctttaatcgaagtgatcaaagcaccacgggg

SEQ ID NO: 498412 - DNA, 55 bp, Artificial
  Synthetic oligonucleotide
ccgtcgttacactttccccgcaagggtattgtatagcgtaaccacacccgacaga

SEQ ID NO: 498413 - DNA, 55 bp, Artificial
  Synthetic oligonucleotide
ccgtggcgcttctgttatgttatgcatggtccctgttaataacattgcactcgga

SEQ ID NO: 498414 - DNA, 55 bp, Artificial
  Synthetic oligonucleotide
cctacatcgcatttacgaagagccgcgcaattatgactgcgataacggtgcatag

SEQ ID NO: 498415 - DNA, 55 bp, Artificial
  Synthetic oligonucleotide
tagaaatgagtcgtcagcgtattcgtgtatcggttttagaaagcacgacacaacc

SEQ ID NO: 498416 - DNA, 55 bp, Artificial
  Synthetic oligonucleotide
cctcgagggtctccgtaacgttgtatccattcactgacacgacgcgagcctgcat

SEQ ID NO: 498417 - DNA, 55 bp, Artificial
  Synthetic oligonucleotide
cctggaatggaaggggcggaaaaccttaatcttaacactccatatctactaccag

SEQ ID NO: 498418 - DNA, 55 bp, Artificial
  Synthetic oligonucleotide
cctggggaagttctttatgatcggaagaagcaattatctgctattgtaagagctg

SEQ ID NO: 498419 - DNA, 55 bp, Artificial
  Synthetic oligonucleotide
cctgtaatttaatgaagctacattgattcaaagccagccattgccgtaaacacgg

SEQ ID NO: 498420 - DNA, 55 bp, Artificial
  Synthetic oligonucleotide
tacgtctcctgttccgacacgtgcagaagtatcagacgttgctacagcagtttat

SEQ ID NO: 498421 - DNA, 55 bp, Artificial
  Synthetic oligonucleotide
cctttgagtgcagatgctccatctgtatagctttcaacccgatagccttctgtct

SEQ ID NO: 498422 - DNA, 55 bp, Artificial
  Synthetic oligonucleotide
cgacatctctcgtgaatcccctaattccggtaaaacggtccgtaaaatgcccgca

SEQ ID NO: 498423 - DNA, 55 bp, Artificial
  Synthetic oligonucleotide
cgagtgaagattatggaagacgtatagagctttctgctatgctccgaggttttgg

SEQ ID NO: 498424 - DNA, 55 bp, Artificial
  Synthetic oligonucleotide
cgattcagtttcaggacgtgccacgaattatctccctcagtaaatcatcatggta

SEQ ID NO: 498425 - DNA, 55 bp, Artificial
  Synthetic oligonucleotide
taatgattttacggatcaatcagttacttggaatgctggtacggatgctatgctc

SEQ ID NO: 498426 - DNA, 55 bp, Artificial
  Synthetic oligonucleotide
cgcaaatgatcaataccggataaaggttttcctgtcatacggtccattccactgt

SEQ ID NO: 498427 - DNA, 55 bp, Artificial
  Synthetic oligonucleotide
cgcaattgggtgcttcaaggggtatttccagagccatataagctagggagagcag

SEQ ID NO: 498428 - DNA, 55 bp, Artificial
  Synthetic oligonucleotide
cggagcagacctttgtcatgcgtgattttcattcgcctaatattttatggcgtga

SEQ ID NO: 498429 - DNA, 55 bp, Artificial
  Synthetic oligonucleotide
taactacacaagatacggcttaatgctcctctaaaaggaaaactatgggcgcgtt

SEQ ID NO: 498430 - DNA, 55 bp, Artificial
  Synthetic oligonucleotide
cggcgcggtccaaatccactctctcgaaattatgaaagcaatggacctgatgtta

SEQ ID NO: 498431 - DNA, 55 bp, Artificial
  Synthetic oligonucleotide
cagggtttcaacgtttacaggcttatcaaacaacagtactcgcagatacaggatc

SEQ ID NO: 498432 - DNA, 55 bp, Artificial
  Synthetic oligonucleotide
cagtaacgcgtgcagatttagcgagcgtagtttgtaaaagagtgggcttgtcaca

SEQ ID NO: 498433 - DNA, 55 bp, Artificial
  Synthetic oligonucleotide
catcagcactaaaagctttcaggtctcgcttggctgaggcgatcccctcttgcag

SEQ ID NO: 498434 - DNA, 55 bp, Artificial
  Synthetic oligonucleotide
catgaatatgatcaccaaggcccacccaacagagaagatcttccacttcactgcg

SEQ ID NO: 498435 - DNA, 55 bp, Artificial
  Synthetic oligonucleotide
catgacggcggaatgttgagacactcatatgaagcaattttgcactttcacggtc

SEQ ID NO: 498436 - DNA, 55 bp, Artificial
  Synthetic oligonucleotide
catggcttatgagatattcagcccataccaaagctgtggccgttgccaagtcgcc

SEQ ID NO: 498437 - DNA, 55 bp, Artificial
  Synthetic oligonucleotide
tcaagcctatatgctccagaacttcaacgctacgattggtggtacccgttaggac

SEQ ID NO: 498438 - DNA, 55 bp, Artificial
  Synthetic oligonucleotide
ccaaacagacaaattatgcactccggatgcttatgtactgtgcagataatcagga

SEQ ID NO: 498439 - DNA, 55 bp, Artificial
  Synthetic oligonucleotide
ccaacccaaagcaacacctgtagggacaattgctccagaattcatacctagagcc

SEQ ID NO: 498440 - DNA, 55 bp, Artificial
  Synthetic oligonucleotide
ccacagtggttgggattgaacggcgtgataatacattttcgcttattcaaaccag

SEQ ID NO: 498441 - DNA, 55 bp, Artificial
  Synthetic oligonucleotide
ccaccgagatctctgttgctggtttagccaatttgatgccaccattgcgtccacg

SEQ ID NO: 498442 - DNA, 55 bp, Artificial
  Synthetic oligonucleotide
ccatacgcggcgcaatagaaagctgacgataagatgcgcgatcaagaacttggcc

SEQ ID NO: 498443 - DNA, 55 bp, Artificial
  Synthetic oligonucleotide
ccatgcgtcgtcaactagcaatgcgggcttatgcacatactgctgcgtatgatac

SEQ ID NO: 498444 - DNA, 55 bp, Artificial
  Synthetic oligonucleotide
ccattgccaaccattcttatgccgttttgctatcattagcacggtaagttgcttc

SEQ ID NO: 498445 - DNA, 55 bp, Artificial
  Synthetic oligonucleotide
cccacaaggtttcaacaaccgcataaccttttcccaaagcatctaacaaatccgt

SEQ ID NO: 498446 - DNA, 55 bp, Artificial
  Synthetic oligonucleotide
cccacacggcttaattatgcaaggattgtgcctatggttgattatacggctcaac

SEQ ID NO: 498447 - DNA, 55 bp, Artificial
  Synthetic oligonucleotide
cccaccacatcctctttaggtgtgaaggggtgtatattggctaccataggccaac

SEQ ID NO: 498448 - DNA, 55 bp, Artificial
  Synthetic oligonucleotide
ccccataagggtattgtatagcgtaaccacacccgacaagccatttatacgctat

SEQ ID NO: 498449 - DNA, 55 bp, Artificial
  Synthetic oligonucleotide
cccgcccacagacccaagcattataagaaagatgcgtattgtcataaacatgggc

SEQ ID NO: 498450 - DNA, 55 bp, Artificial
  Synthetic oligonucleotide
ccctcatacctcgcagtcacttataaatcgtagctgccgccaggaggttaggcgc

SEQ ID NO: 498451 - DNA, 55 bp, Artificial
  Synthetic oligonucleotide
cccttcacgttatggagactgggaaattaaaggccgcgccattgacttttaaaag

SEQ ID NO: 498452 - DNA, 54 bp, Artificial
  Synthetic oligonucleotide
aaaacacgttttatccagcgtatagctgattaatgaggtcgcaatgaaagctgc

SEQ ID NO: 498453 - DNA, 54 bp, Artificial
  Synthetic oligonucleotide
acagaatgttactggtattgcttttgctaaggatgaagcgcaaatttcgctccg

SEQ ID NO: 498454 - DNA, 54 bp, Artificial
  Synthetic oligonucleotide
gatcggtagtcaatccggacaggttcaacaaagtgaaggcttgatgctttcgag

SEQ ID NO: 498455 - DNA, 54 bp, Artificial
  Synthetic oligonucleotide
atactcggctcacgtaatacgcttgaactctgtaccatactttaaaacctttca

SEQ ID NO: 498456 - DNA, 54 bp, Artificial
  Synthetic oligonucleotide
attcatcgattggccaacacgtgcacgaataacctgagattcaatcattgcacg

SEQ ID NO: 498457 - DNA, 54 bp, Artificial
  Synthetic oligonucleotide
cgattcgcaattgggtgcttcaaggggtatttctaaagccatacaagctaggga

SEQ ID NO: 498458 - DNA, 53 bp, Artificial
  Synthetic oligonucleotide
ttttaaatcccacaatgcttcagtagccccaccctcaagtatcgctttccact

SEQ ID NO: 498459 - DNA, 53 bp, Artificial
  Synthetic oligonucleotide
acttctgagtctgatgttgattggcagatagcaccagaggcaataagttctcg

SEQ ID NO: 498460 - DNA, 53 bp, Artificial
  Synthetic oligonucleotide
atcttgtgggagaggaagtgaagcgatttctgtatcaaggacatccataaaat

SEQ ID NO: 498461 - DNA, 53 bp, Artificial
  Synthetic oligonucleotide
tctcaaagtttcttgtgctacttctggtccaattgaaacgagaacaacttcgg

SEQ ID NO: 498462 - DNA, 53 bp, Artificial
  Synthetic oligonucleotide
tctacaccacgttgcatgccattcgttgaagcactccgtaagagatcagatac

SEQ ID NO: 498463 - DNA, 53 bp, Artificial
  Synthetic oligonucleotide
tcacgaatagctccaacgattaaaccacgaattaatcctggatcgcggaaccg

SEQ ID NO: 498464 - DNA, 53 bp, Artificial
  Synthetic oligonucleotide
cattctaacagctacgcccatttcaacttgtgtttggatgacactgtgtgaac

SEQ ID NO: 498465 - DNA, 53 bp, Artificial
  Synthetic oligonucleotide
cctttccactggtatttctcgttctcattttgatgattacttattgggcaggg

SEQ ID NO: 498466 - DNA, 53 bp, Artificial
  Synthetic oligonucleotide
cggatcatgaagcgtgtgccaccacccgccaagggatacagattggctcgtga

SEQ ID NO: 498467 - DNA, 53 bp, Artificial
  Synthetic oligonucleotide
cttatctcttggtgcaggaatggctctttctggacagcttaattctcaatctt

SEQ ID NO: 498468 - DNA, 52 bp, Artificial
  Synthetic oligonucleotide
tttggcgctgtgtggctttaagtgctccagtgttaagagaaattgcaccatg

SEQ ID NO: 498469 - DNA, 52 bp, Artificial
  Synthetic oligonucleotide
cctacggtagccaatatacacccctttgcacctaaagaggatgtgatgggtt

SEQ ID NO: 498470 - DNA, 52 bp, Artificial
  Synthetic oligonucleotide
tttaaacggggcgatgcgtgatcaggtgagtcaacgtattgagcggtttgtg

SEQ ID NO: 498471 - DNA, 52 bp, Artificial
  Synthetic oligonucleotide
gctcagctgccaacatctctttctgaaagtaagccccttgaaccgctgtaag

SEQ ID NO: 498472 - DNA, 52 bp, Artificial
  Synthetic oligonucleotide
gcgagatttggatgaaccagaacgtttcgcggtggttattcgtaaggcggtc

SEQ ID NO: 498473 - DNA, 52 bp, Artificial
  Synthetic oligonucleotide
ttatattagaacagatggacactacaccttcaggagaggaggtaaccccgat

SEQ ID NO: 498474 - DNA, 51 bp, Artificial
  Synthetic oligonucleotide
gagtttaatccaaggtgttttgaagagatctcgtgctaattgggctgtggt

SEQ ID NO: 498475 - DNA, 51 bp, Artificial
  Synthetic oligonucleotide
atcacttcgcccaaacgcgttaaccaagcacatgaaatttcgtaagtaaaa

SEQ ID NO: 498476 - DNA, 51 bp, Artificial
  Synthetic oligonucleotide
atccgaaagcatagcgagcacattgtatagtggctttgtgacgtagcatgc

SEQ ID NO: 498477 - DNA, 51 bp, Artificial
  Synthetic oligonucleotide
atttgcattggcttgtataatcaaacgctctcccaattgctcacgtaacat

SEQ ID NO: 498478 - DNA, 50 bp, Artificial
  Synthetic oligonucleotide
ggcacatttacgggagagcttgctgcgataatagatactgaatctgcccc

SEQ ID NO: 498479 - DNA, 50 bp, Artificial
  Synthetic oligonucleotide
caaacgcccgccaacacggatcatccattgatgaggattttgcatgtcaa

SEQ ID NO: 498480 - DNA, 50 bp, Artificial
  Synthetic oligonucleotide
ggctacactctctacggaaactgccttactcttggcttcttgtgctaatc

SEQ ID NO: 498481 - DNA, 55 bp, Artificial
  Synthetic oligonucleotide
ggttgacggtgcactcgtttgtgtatacgtaaatgaataccggatcgtgagaaga

SEQ ID NO: 498482 - DNA, 55 bp, Artificial
  Synthetic oligonucleotide
ggtgagtcggcaatcgatcgttccggaggtgtgatgtgacagcccgaaggtgact

SEQ ID NO: 498483 - DNA, 55 bp, Artificial
  Synthetic oligonucleotide
gcactcacgcctcttaccggttgaatagggcgagcgacgtgaatctttatggcta

SEQ ID NO: 498484 - DNA, 55 bp, Artificial
  Synthetic oligonucleotide
ctctgctgcaggtgatgcggcctcaggaagagaccttccgaccaaacgaccttgc

SEQ ID NO: 498485 - DNA, 55 bp, Artificial
  Synthetic oligonucleotide
cgtcattaaccacgttcaacctcgcctttaccgatcgtctgcatgatccggttcg

SEQ ID NO: 498486 - DNA, 55 bp, Artificial
  Synthetic oligonucleotide
cgtatccatcaccacccgtcgctcacggtcgacatcctggttcgagaaacgcaag

SEQ ID NO: 498487 - DNA, 55 bp, Artificial
  Synthetic oligonucleotide
cggcctgcgaggaatcgatgatggagacgccccaatgccgtcacgtagaattctc

SEQ ID NO: 498488 - DNA, 55 bp, Artificial
  Synthetic oligonucleotide
cggcctctcgtggcgtttgcgagtccagcagcagtaacgttgagtgttcgctggg

SEQ ID NO: 498489 - DNA, 55 bp, Artificial
  Synthetic oligonucleotide
cgaagcatcgcgttccgctcctcttgattgagaagggacgctgtcatgccgtcgt

SEQ ID NO: 498490 - DNA, 55 bp, Artificial
  Synthetic oligonucleotide
atgaggctggtttcaagactaccgacgcgccctgttagtgccccgggtgcaacgc

SEQ ID NO: 498491 - DNA, 55 bp, Artificial
  Synthetic oligonucleotide
aagcacgtaatggcccatctcgggacccagcatctcgctctgccagttgaaggcg

SEQ ID NO: 498492 - DNA, 54 bp, Artificial
  Synthetic oligonucleotide
tatgagctcctgcgcccgtgtgatcgtaggcgtcggctgctgtacgacggatgt

SEQ ID NO: 498493 - DNA, 53 bp, Artificial
  Synthetic oligonucleotide
tatgggcggcgtcacgttgatgcgtctcatgcctgcacctccgctttcggctg

SEQ ID NO: 498494 - DNA, 53 bp, Artificial
  Synthetic oligonucleotide
tgttgtctgacggagaacggacgcaggggagcctcgcaattgttgaccggcga

SEQ ID NO: 498495 - DNA, 53 bp, Artificial
  Synthetic oligonucleotide
ttggctgcggggtccaaggttctggcaagcaattgccgggaatggtgggctcg

SEQ ID NO: 498496 - DNA, 52 bp, Artificial
  Synthetic oligonucleotide
aagtctgatgagccatgccgttcttctgtccctggatggatatggcgtgtga

SEQ ID NO: 498497 - DNA, 51 bp, Artificial
  Synthetic oligonucleotide
ctggcgtgaatggcgcactagagaaaatctatcgatccgggctcatcgggg

SEQ ID NO: 498498 - DNA, 60 bp, Artificial
  Synthetic oligonucleotide
tcttttaggccctccgcagcccttggaaacattgggctcagaggatgttactggggacaa

SEQ ID NO: 498499 - DNA, 60 bp, Artificial
  Synthetic oligonucleotide
gaatgggggcagaagggacggcgagatcagcgacctctgggcggacgacgggccaagcgg

SEQ ID NO: 498500 - DNA, 60 bp, Artificial
  Synthetic oligonucleotide
tcgctgccctggtcctcgaggctcctgtggtcgattctcgcggtctcgtccagccgcgcg

SEQ ID NO: 498501 - DNA, 60 bp, Artificial
  Synthetic oligonucleotide
cttacggaaaatgcaacctccggttgcatgtaagtgcgccctaatctttgattagggatt

SEQ ID NO: 498502 - DNA, 60 bp, Artificial
  Synthetic oligonucleotide
cttaagtccatcaagccccagctggagaggttgttcaaatgcgtgtacatcatcagtaac

SEQ ID NO: 498503 - DNA, 60 bp, Artificial
  Synthetic oligonucleotide
caggactccccaaacaccctccgatggcctgatctgacgtccaaaaaaaggacgccgtgc

SEQ ID NO: 498504 - DNA, 60 bp, Artificial
  Synthetic oligonucleotide
ccggggacaaaaagggaacgaaccggggacgacaaaaagggagcgaaccggggacaaaaa

SEQ ID NO: 498505 - DNA, 60 bp, Artificial
  Synthetic oligonucleotide
tacacgggcttcatgctatactcctacttaaagtacacactggattttggcatgaaaatg

SEQ ID NO: 498506 - DNA, 60 bp, Artificial
  Synthetic oligonucleotide
taagtatctgtatacctgtctagctgggaccccccgctcagccctactcccacaagggct

SEQ ID NO: 498507 - DNA, 60 bp, Artificial
  Synthetic oligonucleotide
cctcggctgcatgtcgtggtcgtggatggccttggtggccctcatgcggaacctgttggc

SEQ ID NO: 498508 - DNA, 60 bp, Artificial
  Synthetic oligonucleotide
cggagaaataccagatcgattggctgcggaacgaaccacagtcgcacggcctgttcgaaa

SEQ ID NO: 498509 - DNA, 58 bp, Artificial
  Synthetic oligonucleotide
gcgggttcagggacacgctcgtgcgcttccactgcctgcggccccgcttgtcggtctt

SEQ ID NO: 498510 - DNA, 58 bp, Artificial
  Synthetic oligonucleotide
gaagacgtgggacactttagttgaaaacaggattcttattaagctttcagaagataag

SEQ ID NO: 498511 - DNA, 55 bp, Artificial
  Synthetic oligonucleotide
gcgttgagcttcttccaaggtgtgccaataacaggactcgtcatgtgtactcctg

SEQ ID NO: 498512 - DNA, 55 bp, Artificial
  Synthetic oligonucleotide
gctcgtgctctaatggcaatccaatgtactcgtcaagcgcaaatccgcgcacgcg

SEQ ID NO: 498513 - DNA, 55 bp, Artificial
  Synthetic oligonucleotide
gctgctccaatcgtgcaagcaatgtgtcgatttgcctgcccgcattcagcgtagg

SEQ ID NO: 498514 - DNA, 55 bp, Artificial
  Synthetic oligonucleotide
ggaacgcacttgttcacgcaaacgcgaaattgtacgctcatagttagcaaaggcc

SEQ ID NO: 498515 - DNA, 55 bp, Artificial
  Synthetic oligonucleotide
ggagaggccgggcaacgacttgagacggccattcgctacgccaaacgctcccata

SEQ ID NO: 498516 - DNA, 55 bp, Artificial
  Synthetic oligonucleotide
ggatgatgatacccgttccaaggatttgacgctcccggaggacgagccgtggatg

SEQ ID NO: 498517 - DNA, 55 bp, Artificial
  Synthetic oligonucleotide
ggcaaatctggaagtctctgcgcttcgtcaataacaactggagtactaagatttt

SEQ ID NO: 498518 - DNA, 55 bp, Artificial
  Synthetic oligonucleotide
ggcatgggtagctgcactttcacgggtcattatgcgttgacgcttatccatggta

SEQ ID NO: 498519 - DNA, 55 bp, Artificial
  Synthetic oligonucleotide
gcggctgagtacgcgaagcttattacgcatgcggttcctgctccacacgagcagt

SEQ ID NO: 498520 - DNA, 55 bp, Artificial
  Synthetic oligonucleotide
gcggattatcggttattcccatgccctacccatccttgtgccatacagtgcggta

SEQ ID NO: 498521 - DNA, 55 bp, Artificial
  Synthetic oligonucleotide
gcgcatgattgatgcagcttacgaacaacctatggatgcgtacgaagtaagacgc

SEQ ID NO: 498522 - DNA, 55 bp, Artificial
  Synthetic oligonucleotide
gccgaacctgttttgagcttctcgggatatgagaacatcgtcttttcgatggatg

SEQ ID NO: 498523 - DNA, 55 bp, Artificial
  Synthetic oligonucleotide
gcccgctccgactacgacgtgtatctgtactgcacggggcccatacccgaagatg

SEQ ID NO: 498524 - DNA, 55 bp, Artificial
  Synthetic oligonucleotide
gcccgaaagttactggtggaagattcagactaggaataacaagaatgctgaggtg

SEQ ID NO: 498525 - DNA, 55 bp, Artificial
  Synthetic oligonucleotide
gccaagcaagctgttattgttggcgattctaagcaaatgccacctactaatttct

SEQ ID NO: 498526 - DNA, 55 bp, Artificial
  Synthetic oligonucleotide
gcattgagcgtgattgtgtgcgcaagtagaggtattcgttgcggtgttgtaatag

SEQ ID NO: 498527 - DNA, 55 bp, Artificial
  Synthetic oligonucleotide
gcatgggaactcgcagtagttaataaagccgccggaagcaagatacgggaagtca

SEQ ID NO: 498528 - DNA, 55 bp, Artificial
  Synthetic oligonucleotide
gcactgttttccttactgcagtgacactatgcataatcgggtgcatcgttgcagc

SEQ ID NO: 498529 - DNA, 55 bp, Artificial
  Synthetic oligonucleotide
gcacactcagcaggagcatgggcccgtgaggattgttgtccgaacgtacgccgtg

SEQ ID NO: 498530 - DNA, 55 bp, Artificial
  Synthetic oligonucleotide
gagtgccattaataacgcctacagaaacagcggaaacggagtctttaagaacgtt

SEQ ID NO: 498531 - DNA, 55 bp, Artificial
  Synthetic oligonucleotide
ttatccgaagcgctcagcgtatctgtccgggatcaacgcaggtaccgcaattggg

SEQ ID NO: 498532 - DNA, 55 bp, Artificial
  Synthetic oligonucleotide
tgtagcgaaaatcgtgtaatatagttagagcctccgcgtggcactacgtcaccca

SEQ ID NO: 498533 - DNA, 55 bp, Artificial
  Synthetic oligonucleotide
tgagcacggtttgttggacggaatcactctagatttgggccgtagaacactcgcc

SEQ ID NO: 498534 - DNA, 55 bp, Artificial
  Synthetic oligonucleotide
tctgagtggcctgaggatcctattgatgcgggtaagatggaggctacggagaggg

SEQ ID NO: 498535 - DNA, 55 bp, Artificial
  Synthetic oligonucleotide
tcctggatattctccagagcagaccgcggcccattcgcctctgacctcgcctgtg

SEQ ID NO: 498536 - DNA, 55 bp, Artificial
  Synthetic oligonucleotide
tcctcacgtcggccttggctcccatgagttttccacggatcgctgccgtgtggtc

SEQ ID NO: 498537 - DNA, 55 bp, Artificial
  Synthetic oligonucleotide
tcagggacttttactgtagatatgctcgccatgaattgtctgcgataacatgggg

SEQ ID NO: 498538 - DNA, 55 bp, Artificial
  Synthetic oligonucleotide
tatttgccaaatccaaagaacggttgattgatgcaataggtggatgcggatgcct

SEQ ID NO: 498539 - DNA, 55 bp, Artificial
  Synthetic oligonucleotide
tattacccgcgtcatcaatggggaggcattaggcaccctggttacgcacgacagc

SEQ ID NO: 498540 - DNA, 55 bp, Artificial
  Synthetic oligonucleotide
gtgtaacaactaatttggttgctcaaaacacttgcggtgtgcgcgaagtttacac

SEQ ID NO: 498541 - DNA, 55 bp, Artificial
  Synthetic oligonucleotide
gtggcataataggaaagcttgtgactggaggagtaatccgctagcacagcacagc

SEQ ID NO: 498542 - DNA, 55 bp, Artificial
  Synthetic oligonucleotide
gtgctcacgttctttaacccaagaattacgagcctgggagaatgcggaacgagcc

SEQ ID NO: 498543 - DNA, 55 bp, Artificial
  Synthetic oligonucleotide
gtctagtagctactacaacttgaggtcccaggggcatactgagcattaactcacg

SEQ ID NO: 498544 - DNA, 55 bp, Artificial
  Synthetic oligonucleotide
gtcaaacattgtaacgtgcgtgcaagcggtaataaacacgccttcttctggcacg

SEQ ID NO: 498545 - DNA, 55 bp, Artificial
  Synthetic oligonucleotide
gtaccagttgcaagtgaagctattcttgcgatcagcgcaactaatcttaaagcgc

SEQ ID NO: 498546 - DNA, 55 bp, Artificial
  Synthetic oligonucleotide
ggttgcagggaaaatatgcacgctcgtaacgtgtccgataaggtctccggtaagg

SEQ ID NO: 498547 - DNA, 55 bp, Artificial
  Synthetic oligonucleotide
ggtgaaatcctccgctgacttgtatggctgtcactgtgcctgcatccctggggta

SEQ ID NO: 498548 - DNA, 55 bp, Artificial
  Synthetic oligonucleotide
gggtccacggtgggcagcatgcatgtaaccgctgataatcctctcgaccaggatg

SEQ ID NO: 498549 - DNA, 55 bp, Artificial
  Synthetic oligonucleotide
gggtagacgcatggcacaaggtaaatcacaagacaaatcgcatagcacgaatcag

SEQ ID NO: 498550 - DNA, 55 bp, Artificial
  Synthetic oligonucleotide
gggctgtgacggtggatagtttgcgtagggcgtatggcagggattttgcgcgtaa

SEQ ID NO: 498551 - DNA, 55 bp, Artificial
  Synthetic oligonucleotide
gggcgtggcaaccacgaaaggaccgtgattagcaatggatgatgatacccgttcc

SEQ ID NO: 498552 - DNA, 55 bp, Artificial
  Synthetic oligonucleotide
gggcacttacgaagagagccacgctgttatgaacaagcttgctgagattggcatt

SEQ ID NO: 498553 - DNA, 55 bp, Artificial
  Synthetic oligonucleotide
ggcttgaccaacaatgagcacacttatcactggttggctttgagctggggtactg

SEQ ID NO: 498554 - DNA, 55 bp, Artificial
  Synthetic oligonucleotide
ggctgcggaacgaaccacagtcgcacggcctgttcgaaaactgggtgcaattgag

SEQ ID NO: 498555 - DNA, 55 bp, Artificial
  Synthetic oligonucleotide
ggcgtagtcagatcgttgattgctgcgacttcaatgtcattagcttcaccgcctt

SEQ ID NO: 498556 - DNA, 55 bp, Artificial
  Synthetic oligonucleotide
ggcgaagtagacactgtgcgctttaacggtcagcaattattccgcatttgcgacg

SEQ ID NO: 498557 - DNA, 55 bp, Artificial
  Synthetic oligonucleotide
ggcattcaactggcgttcaggaagtatgatttcaccaagggcctcaccggaggcg

SEQ ID NO: 498558 - DNA, 55 bp, Artificial
  Synthetic oligonucleotide
agcagctctgaccgggccctgtcgtatgccgatcccgcgtctgtcacgtggtggt

SEQ ID NO: 498559 - DNA, 55 bp, Artificial
  Synthetic oligonucleotide
cgagacattgtggggcgtgtgcccctcatcgcattcactcccgatgaccagcgtc

SEQ ID NO: 498560 - DNA, 55 bp, Artificial
  Synthetic oligonucleotide
cgaactcttgcgaactacttgcgatgtgcgcggtagaagcgaatcaagctctggg

SEQ ID NO: 498561 - DNA, 55 bp, Artificial
  Synthetic oligonucleotide
ccttgctggtagaatcatatcaccatacggatgatgcagaccatgtaaggagccg

SEQ ID NO: 498562 - DNA, 55 bp, Artificial
  Synthetic oligonucleotide
cctgccatagcgttccttcttacctatacggatttcgaaaacttgttacttgcga

SEQ ID NO: 498563 - DNA, 55 bp, Artificial
  Synthetic oligonucleotide
cctataaggattgttggagttgtgaacgatggcgtagactcagcaaaagtatacg

SEQ ID NO: 498564 - DNA, 55 bp, Artificial
  Synthetic oligonucleotide
ccggttaccacagcattggctgaacagaccctgcaggacttcttctcaacggacg

SEQ ID NO: 498565 - DNA, 55 bp, Artificial
  Synthetic oligonucleotide
ccgctgaaagttacgcagaacacgtctggagcaagagaagcaatcgaaatatgct

SEQ ID NO: 498566 - DNA, 55 bp, Artificial
  Synthetic oligonucleotide
ccaaacgtgagagtttcgtctcgcatttggagggtttggtctggcgtatcgctcc

SEQ ID NO: 498567 - DNA, 55 bp, Artificial
  Synthetic oligonucleotide
catgcaagttcggaccaggacaagcgcaggacttacctagagccagactccaatg

SEQ ID NO: 498568 - DNA, 55 bp, Artificial
  Synthetic oligonucleotide
catgagtcaagctctaccaatttacaagcacccctacccgtgggcgtgatccacg

SEQ ID NO: 498569 - DNA, 55 bp, Artificial
  Synthetic oligonucleotide
catcatgaacatgtgcatggaatgtgtggttgatgacagagcgaacgagacgatt

SEQ ID NO: 498570 - DNA, 55 bp, Artificial
  Synthetic oligonucleotide
cagcgcggaaaagagcacctgggtatacgcgatcatcgttggcggaagtaaccga

SEQ ID NO: 498571 - DNA, 55 bp, Artificial
  Synthetic oligonucleotide
cactgctgagggcagtttcccgtgtttgatccacagggtcacctgcttgcgattg

SEQ ID NO: 498572 - DNA, 55 bp, Artificial
  Synthetic oligonucleotide
cactgaatccccagcgttctcgctttactattgagccgttggaaccaggtttcgg

SEQ ID NO: 498573 - DNA, 55 bp, Artificial
  Synthetic oligonucleotide
cacattcggcgcagatacaacacgctatcctgtggataaccacgcaaagtcggtg

SEQ ID NO: 498574 - DNA, 55 bp, Artificial
  Synthetic oligonucleotide
caactggtatgacgaagaagatttgccttgcaacagctatgattcacagcccgcg

SEQ ID NO: 498575 - DNA, 55 bp, Artificial
  Synthetic oligonucleotide
caacggtcctcagcctccggataaagatcacgaatacatgcttgaagttttcggc

SEQ ID NO: 498576 - DNA, 55 bp, Artificial
  Synthetic oligonucleotide
caacaagcgtcaccgtgagcagaatcctgcagacgtagcaatttacatgctaggc

SEQ ID NO: 498577 - DNA, 55 bp, Artificial
  Synthetic oligonucleotide
atgtagtgagacctgcagtgatctccgttgatacattcgtgccgttttctttgag

SEQ ID NO: 498578 - DNA, 55 bp, Artificial
  Synthetic oligonucleotide
atccagatccgtggattatgccgaatatttccataagcccatttgctattacggc

SEQ ID NO: 498579 - DNA, 55 bp, Artificial
  Synthetic oligonucleotide
atcagggcacggccctctgccagcctcctgagtcattttatcgctggctgtcccc

SEQ ID NO: 498580 - DNA, 55 bp, Artificial
  Synthetic oligonucleotide
ataagtgtgcagtatttcggatccctgcggcattccttctagtgcccggtgcgtt

SEQ ID NO: 498581 - DNA, 55 bp, Artificial
  Synthetic oligonucleotide
agtagtaagtatgagctcggaaaagcgttgattacttacaaaaggggagagcgcc

SEQ ID NO: 498582 - DNA, 55 bp, Artificial
  Synthetic oligonucleotide
gagagggctgtttcttattatgattcccggtatccggaaagggctgtgacggtgg

SEQ ID NO: 498583 - DNA, 55 bp, Artificial
  Synthetic oligonucleotide
gacgctgttgatgcggcaaccagcaaggaagatttggttcgcacactcggcgcac

SEQ ID NO: 498584 - DNA, 55 bp, Artificial
  Synthetic oligonucleotide
gacgcgctccaactgcagaaataagctgcgaatcaacatgcttggcaatatgccc

SEQ ID NO: 498585 - DNA, 55 bp, Artificial
  Synthetic oligonucleotide
ctgcagcaatatctctagcgttcataatcgcagtttgctcggcatcaaccgaagc

SEQ ID NO: 498586 - DNA, 55 bp, Artificial
  Synthetic oligonucleotide
ctcgcataggctagggcagcatgatctcctcaatctccacgcgatccgtgcgcga

SEQ ID NO: 498587 - DNA, 55 bp, Artificial
  Synthetic oligonucleotide
ctcccgggtatcaagaatcagggtttcaaagcggaagcgctcacactcgtcctgg

SEQ ID NO: 498588 - DNA, 55 bp, Artificial
  Synthetic oligonucleotide
ctcatattgcggaggcggaagttagagtgttgactccttttagagcttcgaaaag

SEQ ID NO: 498589 - DNA, 55 bp, Artificial
  Synthetic oligonucleotide
ctagaatattcacgtatacttttgctgagtctacgccatcgctcacaactccaac

SEQ ID NO: 498590 - DNA, 55 bp, Artificial
  Synthetic oligonucleotide
cgtctgaaagcttacgaacttccagaaggatctcgcgattctaaaggtcagcatg

SEQ ID NO: 498591 - DNA, 55 bp, Artificial
  Synthetic oligonucleotide
cgtaataaccctataccacaaatcctgagtttcgctcatgtgatacgttctatcg

SEQ ID NO: 498592 - DNA, 55 bp, Artificial
  Synthetic oligonucleotide
cggttttaagacgattgtagatggcgtaaagcctttaacagacgaggaatgcgat

SEQ ID NO: 498593 - DNA, 55 bp, Artificial
  Synthetic oligonucleotide
cggtcggaaacattcacattaggaccatgcgtatctagagcaaacttcatgtcgt

SEQ ID NO: 498594 - DNA, 55 bp, Artificial
  Synthetic oligonucleotide
accgccatgcgattgatgcgtatgtggaggaactcaccgaacggtatgcgtaccg

SEQ ID NO: 498595 - DNA, 55 bp, Artificial
  Synthetic oligonucleotide
cgggacagtgatgttggcatgttcaggatcggtaattcggaaccgattgcctccc

SEQ ID NO: 498596 - DNA, 55 bp, Artificial
  Synthetic oligonucleotide
cggattactcctccagtcacaagccttcctattatgccacatcttcgcgacacgc

SEQ ID NO: 498597 - DNA, 55 bp, Artificial
  Synthetic oligonucleotide
cgctggaggcgtagcccagcacatgattcaagcctctaacataaatccagacgac

SEQ ID NO: 498598 - DNA, 55 bp, Artificial
  Synthetic oligonucleotide
cgctgcggagtaaccctcgtaagctctgcaacatcacgaaccgtcaatccctgat

SEQ ID NO: 498599 - DNA, 55 bp, Artificial
  Synthetic oligonucleotide
agaagttgcagtccatgggtctgtctttgaaggcttcgccgattggcttcgacgc

SEQ ID NO: 498600 - DNA, 55 bp, Artificial
  Synthetic oligonucleotide
cgcgagtatacaatttgcttgcggcaccaaagtcaattagacgaactgttccgtc

SEQ ID NO: 498601 - DNA, 55 bp, Artificial
  Synthetic oligonucleotide
cgcaaagcaacgaatagtccacaccgtctcgcgaattcatgacgtggatgggtgc

SEQ ID NO: 498602 - DNA, 54 bp, Artificial
  Synthetic oligonucleotide
cgcatacaccacgccaagcactcctaccacaccacaaaacaacgatgtgtgaat

SEQ ID NO: 498603 - DNA, 53 bp, Artificial
  Synthetic oligonucleotide
cattggtcatgaaagcgtccctggtccgaacgaacctgaccgaatcgctcaca

SEQ ID NO: 498604 - DNA, 53 bp, Artificial
  Synthetic oligonucleotide
ctggcagcagctttaccggcagttcggcagcgataccaaaagagctgtggaag

SEQ ID NO: 498605 - DNA, 52 bp, Artificial
  Synthetic oligonucleotide
ctgcctgtacggaccattccacttccaactgcttgcaagcaaagattcgtaa

SEQ ID NO: 498606 - DNA, 52 bp, Artificial
  Synthetic oligonucleotide
aacatcaattgaatgggcatacccgtagtagccaagaatggatgccagggtg

SEQ ID NO: 498607 - DNA, 51 bp, Artificial
  Synthetic oligonucleotide
tcgctgttctctgggcttgtggtattggaagcagacttaaggcatcttcgc

SEQ ID NO: 498608 - DNA, 51 bp, Artificial
  Synthetic oligonucleotide
aaaagcaggacgcctagctgtgttgcgagatgatattagtgcggatcctat

SEQ ID NO: 498609 - DNA, 51 bp, Artificial
  Synthetic oligonucleotide
ggccttggctcccatgagttttccacggatcgctgccgtgtggtcggccct

SEQ ID NO: 498610 - DNA, 51 bp, Artificial
  Synthetic oligonucleotide
gctagggtacgggcaactctcgacgcgaaatcgtggggaaagccgattaca

SEQ ID NO: 498611 - DNA, 51 bp, Artificial
  Synthetic oligonucleotide
gatcatcccgtgccggttgatctcaaggtgatcgccaggctccgcaagccg

SEQ ID NO: 498612 - DNA, 51 bp, Artificial
  Synthetic oligonucleotide
gagcttgggtagtggcggtatctccgtaaccagccaatctcaacaacgaag

SEQ ID NO: 498613 - DNA, 50 bp, Artificial
  Synthetic oligonucleotide
tcgcccgtttggaacgcacagccgggaacagctcacaaagcacttgtaaa

SEQ ID NO: 498614 - DNA, 50 bp, Artificial
  Synthetic oligonucleotide
cgctccatttgcgagacgacactcgcactatacgtgctcgctacgaaact

SEQ ID NO: 498615 - DNA, 50 bp, Artificial
  Synthetic oligonucleotide
ttaccttagtaatgtaacgacccttaatggtgcttggcttcaaacggcgg

SEQ ID NO: 498616 - DNA, 60 bp, Artificial
  Synthetic oligonucleotide
ggaaaagtggtccttgttcggaaattggcactataaccccaccctatcgcgcgcgtgcgt

SEQ ID NO: 498617 - DNA, 60 bp, Artificial
  Synthetic oligonucleotide
gcccattagtgtggtgtgggagtccacattcaggataggtaaatttaaggctaggatgcc

SEQ ID NO: 498618 - DNA, 60 bp, Artificial
  Synthetic oligonucleotide
gagcatcacaattaaaatccgtaatttatcccgtcacgctctcccatcttacgctacaga

SEQ ID NO: 498619 - DNA, 60 bp, Artificial
  Synthetic oligonucleotide
ggaatttaaggctaggatgtcccattttaggttatggattcctatggggtagggtaccct

SEQ ID NO: 498620 - DNA, 60 bp, Artificial
  Synthetic oligonucleotide
ggattgcatattaatctccgtatgtaaccaatgcgcattctgttgcttaaaccaataatc

SEQ ID NO: 498621 - DNA, 60 bp, Artificial
  Synthetic oligonucleotide
gaaaacaaagcaatactctttgcaatctcctttctattatacttaccatgatcacttttt

SEQ ID NO: 498622 - DNA, 60 bp, Artificial
  Synthetic oligonucleotide
cttcacaaaacgtacgaaaaatcttacaccccgcttccgaatgaagagactcatccctaa

SEQ ID NO: 498623 - DNA, 60 bp, Artificial
  Synthetic oligonucleotide
cttatataagactagggactatagttcgatgggtatttttttaatgaacccatcgcccat

SEQ ID NO: 498624 - DNA, 60 bp, Artificial
  Synthetic oligonucleotide
taagaataagccacagcatgaatcgtctcaaaagaaccaaaagcttgacccatcatttta

SEQ ID NO: 498625 - DNA, 60 bp, Artificial
  Synthetic oligonucleotide
catcattttaatctctggaatgggaaaccacttgggaatcatttcggaccaataatttcc

SEQ ID NO: 498626 - DNA, 60 bp, Artificial
  Synthetic oligonucleotide
atctcctccctattatatctaccatgatcactttttctaatatccatcaaaactttcaac

SEQ ID NO: 498627 - DNA, 60 bp, Artificial
  Synthetic oligonucleotide
tccctcattttcttcacaaagtgtacgaaaaattttacaacctgcttccgaatgaagaga

SEQ ID NO: 498628 - DNA, 60 bp, Artificial
  Synthetic oligonucleotide
aaagccattcctgttcttccttccatcggaataggaactaatagatcaggcatccctggt

SEQ ID NO: 498629 - DNA, 60 bp, Artificial
  Synthetic oligonucleotide
accattttggaatcatctctgaccaataatttccgacctccgtttctgtctgagtaaaac

SEQ ID NO: 498630 - DNA, 60 bp, Artificial
  Synthetic oligonucleotide
aactttcaacttattcatagtcgcttcatcttccaaaaaagcatgaaaatcatctaaacc

SEQ ID NO: 498631 - DNA, 60 bp, Artificial
  Synthetic oligonucleotide
aaggctaggatgccccatttaaggttatggatccctattggtagggtaccctaccaatag

SEQ ID NO: 498632 - DNA, 60 bp, Artificial
  Synthetic oligonucleotide
tattttcatagaaatacctacaggatatgaagctcaaatccgacctagaagcggattagc

SEQ ID NO: 498633 - DNA, 60 bp, Artificial
  Synthetic oligonucleotide
accaataatcataagcccactgatactcaaaaggcttaaaattcaaacgatctttcgtca

SEQ ID NO: 498634 - DNA, 60 bp, Artificial
  Synthetic oligonucleotide
tcataagcccactgatattcgaaaggcttaaaatttaaacgatctttcgttatacccatt

SEQ ID NO: 498635 - DNA, 60 bp, Artificial
  Synthetic oligonucleotide
ttactcatcaacctatctcatcattcttttaccgtaaaaaatggcgatagaatagcacaa

SEQ ID NO: 498636 - DNA, 60 bp, Artificial
  Synthetic oligonucleotide
aatgccaaatccatcccatgataaatagattctcttacagaatccttcaatccctcattt

SEQ ID NO: 498637 - DNA, 60 bp, Artificial
  Synthetic oligonucleotide
acaattgaattccctctgcagctgcagaaaataaagcaacactccttgctatctcctccc

SEQ ID NO: 498638 - DNA, 58 bp, Artificial
  Synthetic oligonucleotide
ggcactataaccccaccctatcgcgcgcgtgcgtaagcgtgcgcgtgggcgataacgt

SEQ ID NO: 498639 - DNA, 57 bp, Artificial
  Synthetic oligonucleotide
aaccaatatatccggaagacctggtcttaatctcatcacttttataagaaacctctc

SEQ ID NO: 498640 - DNA, 57 bp, Artificial
  Synthetic oligonucleotide
ctctctggaagtttctcatttatcaggaatattagcttccgagttaggattaaatgc

SEQ ID NO: 498641 - DNA, 57 bp, Artificial
  Synthetic oligonucleotide
ctacattcattagatatgacatcatattgcatggaagttttattgtttctcatttta

SEQ ID NO: 498642 - DNA, 57 bp, Artificial
  Synthetic oligonucleotide
atgaagttcggaacccatcgcccagtagtgtggtgtgggagaaaagggatgttcatc

SEQ ID NO: 498643 - DNA, 57 bp, Artificial
  Synthetic oligonucleotide
acctagaagcggattagccttacgtcatgggataactgttctaaacaatccagggac

SEQ ID NO: 498644 - DNA, 56 bp, Artificial
  Synthetic oligonucleotide
ctccgtttccaaataaaccatgaagaaccaaaataggataaccagatccgtaaatc

SEQ ID NO: 498645 - DNA, 56 bp, Artificial
  Synthetic oligonucleotide
tgagtaaaaccttttaatatatctccaataacattcctttctcgattcgacaaact

SEQ ID NO: 498646 - DNA, 56 bp, Artificial
  Synthetic oligonucleotide
agccgggatcgacttacaagcctatctggaaaaagagattattattccatctatgg

SEQ ID NO: 498647 - DNA, 55 bp, Artificial
  Synthetic oligonucleotide
ggtgtaatgcttgtcacagtgcacaagttcgtccatttagagatgaggtagtccg

SEQ ID NO: 498648 - DNA, 55 bp, Artificial
  Synthetic oligonucleotide
gggttatggagccgtactatactgtgggaagttcctttaatgtccattatatccg

SEQ ID NO: 498649 - DNA, 55 bp, Artificial
  Synthetic oligonucleotide
ggcttcctcttatagttaaccaagaatcgataggagataaaactcctcccgttgc

SEQ ID NO: 498650 - DNA, 55 bp, Artificial
  Synthetic oligonucleotide
gtcctgaggcccttttctagtcttatagactagggactataggtcgaggaaatga

SEQ ID NO: 498651 - DNA, 55 bp, Artificial
  Synthetic oligonucleotide
taccgttgcataattcggtccatgaagaccataattcatagaaataaccccagca

SEQ ID NO: 498652 - DNA, 55 bp, Artificial
  Synthetic oligonucleotide
ggagacgtatatgttgtggctccaaataaacctcaatctggagttggacatggaa

SEQ ID NO: 498653 - DNA, 55 bp, Artificial
  Synthetic oligonucleotide
tatttaactcctgttccaggaggaatagggcctatgacccgtgttatgttactaa

SEQ ID NO: 498654 - DNA, 55 bp, Artificial
  Synthetic oligonucleotide
cagctgcagaaaataaagcaacactccttgctatctcctccctattatatctacc

SEQ ID NO: 498655 - DNA, 55 bp, Artificial
  Synthetic oligonucleotide
caggatatgaagctcaaatccgacctagaagcggattagccttacgtcatgggat

SEQ ID NO: 498656 - DNA, 55 bp, Artificial
  Synthetic oligonucleotide
ccctagaacgtcgtatagcattggcgatagattgaatcgcatgattttgtcctac

SEQ ID NO: 498657 - DNA, 55 bp, Artificial
  Synthetic oligonucleotide
ccgtaatttatcccgtcacgctctcccatcttacgctacagaaggatcctcagga

SEQ ID NO: 498658 - DNA, 55 bp, Artificial
  Synthetic oligonucleotide
ccgtatgtaaccaatgcgcattctgttgcttaaaccaataatcataagcccactg

SEQ ID NO: 498659 - DNA, 55 bp, Artificial
  Synthetic oligonucleotide
ctcctgtcaactgcattaatccatgttgtccatccaactcagcgtttaaactacg

SEQ ID NO: 498660 - DNA, 55 bp, Artificial
  Synthetic oligonucleotide
ctcttccttgtatatgaatttcctttggaggagtttctatagattccatagccgc

SEQ ID NO: 498661 - DNA, 55 bp, Artificial
  Synthetic oligonucleotide
ctggaatgggaaaccacttgggaatcatttcggaccaataatttcccacttcggt

SEQ ID NO: 498662 - DNA, 55 bp, Artificial
  Synthetic oligonucleotide
gaatatatgattcttggacctaaatcccgaacgggattgatagcagctcctgtgg

SEQ ID NO: 498663 - DNA, 55 bp, Artificial
  Synthetic oligonucleotide
gaatcgtctcaaaagaaccaaaagcttgacccatcattttgatctctggaatggg

SEQ ID NO: 498664 - DNA, 55 bp, Artificial
  Synthetic oligonucleotide
gacccctaatcgtacagatgctatgagtcattatggaatagctcgtgatttatac

SEQ ID NO: 498665 - DNA, 55 bp, Artificial
  Synthetic oligonucleotide
gcgcgtgcgtaagcgtgcgcgtgggcgataacgtatattaatacgtgatatttac

SEQ ID NO: 498666 - DNA, 54 bp, Artificial
  Synthetic oligonucleotide
accatagaaaaccatagccctttaacaaaagtcccaaaaaagatggttatttta

SEQ ID NO: 498667 - DNA, 53 bp, Artificial
  Synthetic oligonucleotide
acacaaaccttatgcgaatccaagaaatacggccagtggaacattgaaaattc

SEQ ID NO: 498668 - DNA, 53 bp, Artificial
  Synthetic oligonucleotide
tcatccctaacagaaaaaataatttgttgccctatacccttcaaacgattaga

SEQ ID NO: 498669 - DNA, 51 bp, Artificial
  Synthetic oligonucleotide
tgctaaattagcaggcggtctttctcaaggtgtagaacctttagcggcaaa

SEQ ID NO: 498670 - DNA, 51 bp, Artificial
  Synthetic oligonucleotide
ttgcatgagccgcttctccttctaaatttgcttcgaccatgacatatccag

SEQ ID NO: 498671 - DNA, 51 bp, Artificial
  Synthetic oligonucleotide
aatagcacaaatagtagtttacaaacacgaaaaagtaaaatggaacccata

SEQ ID NO: 498672 - DNA, 50 bp, Artificial
  Synthetic oligonucleotide
ctgggactgtttctgctgtacttgaagcaagtatagagggaattccatcc

SEQ ID NO: 498673 - DNA, 50 bp, Artificial
  Synthetic oligonucleotide
aaaatcttacacccagcttccgaatgaagagactcatccctaacagaaaa

SEQ ID NO: 498674 - DNA, 60 bp, Artificial
  Synthetic oligonucleotide
tttaaaagttgacacgtgaatgtcaatttttgatttttagtttatacagtaatgtattaa

SEQ ID NO: 498675 - DNA, 60 bp, Artificial
  Synthetic oligonucleotide
tgaagtcggcaaactcaaaaacataaggactggaaagtatgcaaaatataacaaactcgt

SEQ ID NO: 498676 - DNA, 60 bp, Artificial
  Synthetic oligonucleotide
tccgaaaggctttactaacaaaccagcttaaaagacattaaacttttaaaatctttattg

SEQ ID NO: 498677 - DNA, 60 bp, Artificial
  Synthetic oligonucleotide
tacccgagaaagtaacattttgattatgaaattatcaaacattaaatatactgagaataa

SEQ ID NO: 498678 - DNA, 60 bp, Artificial
  Synthetic oligonucleotide
gtttgtgttagtattctgttgtcttaaatttttaattagttaagggcttttattttatac

SEQ ID NO: 498679 - DNA, 60 bp, Artificial
  Synthetic oligonucleotide
gtattttgatgttaaagccgatgattttaattgtattaagtttaacgacttgttgaactc

SEQ ID NO: 498680 - DNA, 60 bp, Artificial
  Synthetic oligonucleotide
cttatatccgaatagaacattaaagcgaatacataaagactttgtaaacaatgaaacttt

SEQ ID NO: 498681 - DNA, 60 bp, Artificial
  Synthetic oligonucleotide
ctgagaataaagcaaaaataaaaagcatagtattaaattagaatgcctctatttgcttaa

SEQ ID NO: 498682 - DNA, 60 bp, Artificial
  Synthetic oligonucleotide
acgatgattgataataaagcgaataacaacaagtttaattcaaataaagattttgaaact

SEQ ID NO: 498683 - DNA, 60 bp, Artificial
  Synthetic oligonucleotide
acaaactcgtttaaaaatagcaatattcaaaatcaaaaaagttgtatatctagttttgat

SEQ ID NO: 498684 - DNA, 60 bp, Artificial
  Synthetic oligonucleotide
aatgtattaaaatatagtaaaaagcaacaacgacacgaagtgcttattaattaatagtgt

SEQ ID NO: 498685 - DNA, 60 bp, Artificial
  Synthetic oligonucleotide
aacgatgttgtcaatagctccgcttcatacgatttaatcatcaattttaatgctaagact

SEQ ID NO: 498686 - DNA, 60 bp, Artificial
  Synthetic oligonucleotide
aacattgattataaaagttgctttaatgatttttataacaaattatcagatatagataaa

SEQ ID NO: 498687 - DNA, 56 bp, Artificial
  Synthetic oligonucleotide
tagttttgatacaatatcattaaattatagcttagtacaaaataatataaagttcg

SEQ ID NO: 498688 - DNA, 55 bp, Artificial
  Synthetic oligonucleotide
ctgtacgcttcaaataatggtgtttttttaatctatagtagattaaagtagattg

SEQ ID NO: 498689 - DNA, 53 bp, Artificial
  Synthetic oligonucleotide
tatcgaacgatgttaattatcattctttcaaagaatactcagatttattgata

SEQ ID NO: 498690 - DNA, 50 bp, Artificial
  Synthetic oligonucleotide
atgaggcaaatataaagcaaatagatagcttataaattattctatactag

SEQ ID NO: 498691 - DNA, 55 bp, Artificial
  Synthetic oligonucleotide
ggcgcgaatacggcagagatggggtaacaatccgtaaagaagcgtgagttggcgc

SEQ ID NO: 498692 - DNA, 55 bp, Artificial
  Synthetic oligonucleotide
ggcccacctcagtcttgtggctggcataccatataccacaggaactgcaacccgg

SEQ ID NO: 498693 - DNA, 55 bp, Artificial
  Synthetic oligonucleotide
ggatcccggcgacaagcccaggagcactgccaatccggacactttgataagggtc

SEQ ID NO: 498694 - DNA, 55 bp, Artificial
  Synthetic oligonucleotide
ggagacggcagaaattcaacctcttcagggcgttacggcactcatccccaccctg

SEQ ID NO: 498695 - DNA, 55 bp, Artificial
  Synthetic oligonucleotide
ggactgtggtgaaggccctgaccaataactgatggggacggatatgagcggatcg

SEQ ID NO: 498696 - DNA, 55 bp, Artificial
  Synthetic oligonucleotide
ggacgcatcatcacgatggccgaacgatatcaggacagaccgtttccttccgatg

SEQ ID NO: 498697 - DNA, 55 bp, Artificial
  Synthetic oligonucleotide
ggaaacggtctgtcctgatatcgttcggccatcgtgatgatgcgtcccttcggga

SEQ ID NO: 498698 - DNA, 55 bp, Artificial
  Synthetic oligonucleotide
gctgggtttgcggggagctttgccttgatcaaccgcgctttcgtccgggtcctga

SEQ ID NO: 498699 - DNA, 55 bp, Artificial
  Synthetic oligonucleotide
gctagctccagtagcctgtcgcgttcacccgcgagccattcgttccagccctctt

SEQ ID NO: 498700 - DNA, 55 bp, Artificial
  Synthetic oligonucleotide
gcgtgatcgcgtggagcaagggaaaatacggcaggggcaagctgtcacggcaaga

SEQ ID NO: 498701 - DNA, 55 bp, Artificial
  Synthetic oligonucleotide
gcgctggcgtgcccaattaaatcgcgaatcgtgcgcgaatctgatgatattgcgg

SEQ ID NO: 498702 - DNA, 55 bp, Artificial
  Synthetic oligonucleotide
gcgcgggagttcagtaatccctcttggaaggtgattgtgtcggcctcacgtggcc

SEQ ID NO: 498703 - DNA, 55 bp, Artificial
  Synthetic oligonucleotide
gcgcagattcgacattttaatgaccgttccattgcgtcgcaactgaggccgtttc

SEQ ID NO: 498704 - DNA, 55 bp, Artificial
  Synthetic oligonucleotide
gcccgctgacacgctttcgaaacgaccagggttcccgtgcggcagatcattccag

SEQ ID NO: 498705 - DNA, 55 bp, Artificial
  Synthetic oligonucleotide
gcccatacttgcgtcggcatcggacgaactttcccgatgaagctaacgaagagac

SEQ ID NO: 498706 - DNA, 55 bp, Artificial
  Synthetic oligonucleotide
gcaaatgagagatgtcacgaagctaccccgacacgactgatgcgtagccgggcgg

SEQ ID NO: 498707 - DNA, 55 bp, Artificial
  Synthetic oligonucleotide
gatggagtaatggacccgcacctgatggaggcaccatactgcaacggcgatgctg

SEQ ID NO: 498708 - DNA, 55 bp, Artificial
  Synthetic oligonucleotide
gatcccataatggcgtggcgactggacgagcactcaaccaaagatggccccgccc

SEQ ID NO: 498709 - DNA, 55 bp, Artificial
  Synthetic oligonucleotide
gatcatggatggagtgacgagatcccgacagctaactcgcccctctcggcacccc

SEQ ID NO: 498710 - DNA, 55 bp, Artificial
  Synthetic oligonucleotide
gagcccgtacaaatacgagtgacgagctataatgaccggaggctattagctgccg

SEQ ID NO: 498711 - DNA, 55 bp, Artificial
  Synthetic oligonucleotide
gagcaggcagtcaggagcaagcataacaaagggctgtaacgcattaacaatcgaa

SEQ ID NO: 498712 - DNA, 55 bp, Artificial
  Synthetic oligonucleotide
ctggcgtgcggttaccagtttctaatgacgggactgctaagacccaagatctgcc

SEQ ID NO: 498713 - DNA, 55 bp, Artificial
  Synthetic oligonucleotide
tttgttgctggcgcgagggaattgacatgcggcggctggctagcctggttcgacg

SEQ ID NO: 498714 - DNA, 55 bp, Artificial
  Synthetic oligonucleotide
ttggcagaaccggatctcaaccggcttgcgtctgcgtggcacaccgatggagacc

SEQ ID NO: 498715 - DNA, 55 bp, Artificial
  Synthetic oligonucleotide
tgtacctcttcgcatgaaataacgtcatgtatcctgctgccagatgactgccaga

SEQ ID NO: 498716 - DNA, 55 bp, Artificial
  Synthetic oligonucleotide
tgacgccttcgaccaagtaatcatctctccatcgaccctaagctccttatttgcg

SEQ ID NO: 498717 - DNA, 55 bp, Artificial
  Synthetic oligonucleotide
tgaattcgcggcccctgcgagttctgcacaccgtagtttccccggatcgcgagac

SEQ ID NO: 498718 - DNA, 55 bp, Artificial
  Synthetic oligonucleotide
tcggtctcgcatcgatctacgccattatcaaactgtcgtcgggagtttaattgat

SEQ ID NO: 498719 - DNA, 55 bp, Artificial
  Synthetic oligonucleotide
tatggttcaatggcgctttgaggtagcttttgcccgaatacgccttgaaagtatt

SEQ ID NO: 498720 - DNA, 55 bp, Artificial
  Synthetic oligonucleotide
tagcggccgcggttaactaggctccgagggagttatcaagcccggctgagaaccg

SEQ ID NO: 498721 - DNA, 55 bp, Artificial
  Synthetic oligonucleotide
taccgcggctgtgtttactcgaattcgttgtttgttgcgtacgagtgagtaacca

SEQ ID NO: 498722 - DNA, 55 bp, Artificial
  Synthetic oligonucleotide
gtgctgccaatcctctcgcccgcgacggtaccttcagaccgtccagcaggatgaa

SEQ ID NO: 498723 - DNA, 55 bp, Artificial
  Synthetic oligonucleotide
gtgctgaagactctggcaaagagggaaattgccatgcggatgaggagtgcaggtt

SEQ ID NO: 498724 - DNA, 55 bp, Artificial
  Synthetic oligonucleotide
gtgcactcgcgtggtatgtcttcatgtccgcgtcgggctatcagaacgcgttcgc

SEQ ID NO: 498725 - DNA, 55 bp, Artificial
  Synthetic oligonucleotide
gtgatgggaacccggatgacgtctggcgcgaatatcacagctggagcacccggga

SEQ ID NO: 498726 - DNA, 55 bp, Artificial
  Synthetic oligonucleotide
gtcggttccgcaacttgtgggaagacgggatttaacgggacctccttatagaagg

SEQ ID NO: 498727 - DNA, 55 bp, Artificial
  Synthetic oligonucleotide
gtcccggaaagcctggatcatgcggatgagcgagagcagcattggtagtctcctg

SEQ ID NO: 498728 - DNA, 55 bp, Artificial
  Synthetic oligonucleotide
gtcaggtggagttatcggaccgcgagtcaatccggccgaaccttgtgcgttgcct

SEQ ID NO: 498729 - DNA, 55 bp, Artificial
  Synthetic oligonucleotide
ggtactcggtcttacaggccagacctgcgtaattcttcatacacgccttacgctg

SEQ ID NO: 498730 - DNA, 55 bp, Artificial
  Synthetic oligonucleotide
gggtcgcacaattttccgtcgatccacccaggtggccgcaggagcttcgttaccg

SEQ ID NO: 498731 - DNA, 55 bp, Artificial
  Synthetic oligonucleotide
ggctttctatagtggtatcaagcgtaggttcccggcaagggaaacgggctcctgc

SEQ ID NO: 498732 - DNA, 55 bp, Artificial
  Synthetic oligonucleotide
ggcggtccgcgctttaatcattccccgtcgatagaccaggattgtggccgatgct

SEQ ID NO: 498733 - DNA, 55 bp, Artificial
  Synthetic oligonucleotide
ggcggagcacatccttaccaggcttggctatcgtcatggcccgatcttctattgg

SEQ ID NO: 498734 - DNA, 55 bp, Artificial
  Synthetic oligonucleotide
ggcgcgggtcttcggtcgcacatagtcctcatcgtcgaatggcctgaagtcgttg

SEQ ID NO: 498735 - DNA, 55 bp, Artificial
  Synthetic oligonucleotide
ccgccaatgccatggtcaaacgttccgatcttctcgagccaggcaaaagcatggc

SEQ ID NO: 498736 - DNA, 55 bp, Artificial
  Synthetic oligonucleotide
ccgatcaaatgacctggccgagaatccgaacgtattcctccaccatggcgtccac

SEQ ID NO: 498737 - DNA, 55 bp, Artificial
  Synthetic oligonucleotide
cccgtgaaaccaaatgtcgaacaggggcgtggcagtttccgcgcgcaggctgtgt

SEQ ID NO: 498738 - DNA, 55 bp, Artificial
  Synthetic oligonucleotide
cccaggcgctctttgtgattgcttcgatgtctacggatgcaagtttaaggatggt

SEQ ID NO: 498739 - DNA, 55 bp, Artificial
  Synthetic oligonucleotide
ccatccctccccacaagggatggccgcattttctctcggctccgacgtaaggccc

SEQ ID NO: 498740 - DNA, 55 bp, Artificial
  Synthetic oligonucleotide
ccatccagggtcagatagtagaatggaatgctagctgccatcttgcctccgtccg

SEQ ID NO: 498741 - DNA, 55 bp, Artificial
  Synthetic oligonucleotide
ccatccaactgccaacgttgtccaaacaccaccggcttgagtagccgagatggca

SEQ ID NO: 498742 - DNA, 55 bp, Artificial
  Synthetic oligonucleotide
catcagatagaactgtccttccccaagatgcttgggcgtgaagaacgcgaaagta

SEQ ID NO: 498743 - DNA, 55 bp, Artificial
  Synthetic oligonucleotide
cacttcaacacgatccgacctcactcatcgctgaactaccgaccgcctgcaccgc

SEQ ID NO: 498744 - DNA, 55 bp, Artificial
  Synthetic oligonucleotide
cactggaacttggcgtgtattatacaagcgcgctggaaccctatgattgccccaa

SEQ ID NO: 498745 - DNA, 55 bp, Artificial
  Synthetic oligonucleotide
cacgggccgtgcatgagatagttcgaacagttttgtcggcgtgctgattcggacc

SEQ ID NO: 498746 - DNA, 55 bp, Artificial
  Synthetic oligonucleotide
cacgaggcctgacagcaagctctcgatcccgcctgaaatactcttttccagcggc

SEQ ID NO: 498747 - DNA, 55 bp, Artificial
  Synthetic oligonucleotide
caatgggacggcaatgcgctactctccggaacacaaggcggaaacccacgcacga

SEQ ID NO: 498748 - DNA, 55 bp, Artificial
  Synthetic oligonucleotide
caacgcaacagggaaaattaaccatactcattgagggactattcaccgaaatggc

SEQ ID NO: 498749 - DNA, 55 bp, Artificial
  Synthetic oligonucleotide
atgagcagccatgtcccacgcgcaatcaaatgcctacatcatcgaggttcacgac

SEQ ID NO: 498750 - DNA, 55 bp, Artificial
  Synthetic oligonucleotide
aggacgcaacaggggtcaagggagcaaacggaagagccgatgagcgataatgcag

SEQ ID NO: 498751 - DNA, 55 bp, Artificial
  Synthetic oligonucleotide
agcgtctagccaggcttagctcgatctatcgacttcgtttccattctgatgcggc

SEQ ID NO: 498752 - DNA, 55 bp, Artificial
  Synthetic oligonucleotide
agcgtcgggagccgttgatctaggtcaagggaggtggaacttggcccattacccc

SEQ ID NO: 498753 - DNA, 55 bp, Artificial
  Synthetic oligonucleotide
acgtggatatgtagacgaccccaaccccaagtcgactacagaaagcgcccgcccc

SEQ ID NO: 498754 - DNA, 55 bp, Artificial
  Synthetic oligonucleotide
aaggaggtcccgttaaatcccgtcttcccacaagttgcggaaaccaccccatgac

SEQ ID NO: 498755 - DNA, 55 bp, Artificial
  Synthetic oligonucleotide
aaagcgaacgaaagcctgactttgcacttgaggtcttacgctaagcaaactgggt

SEQ ID NO: 498756 - DNA, 55 bp, Artificial
  Synthetic oligonucleotide
ctcgacaagtttcgtaagaggaccccatgaacaggaccgtctttgcccttccggc

SEQ ID NO: 498757 - DNA, 55 bp, Artificial
  Synthetic oligonucleotide
cgtgaaaacggtcccgtctggtactgagatgcccctgcaaacgtccgtgcgtgcg

SEQ ID NO: 498758 - DNA, 55 bp, Artificial
  Synthetic oligonucleotide
cgtagccgctcagacgctctcgcaatcgaacgaactggttgtcctcggtccggac

SEQ ID NO: 498759 - DNA, 55 bp, Artificial
  Synthetic oligonucleotide
cgggcttgcgctcgtatcgcaagggtgccaatagaacgattctggacggggtgtt

SEQ ID NO: 498760 - DNA, 55 bp, Artificial
  Synthetic oligonucleotide
ctgcatcttattagaaagacgtcggatttaacgattccaaagccctggcatgggg

SEQ ID NO: 498761 - DNA, 55 bp, Artificial
  Synthetic oligonucleotide
cggctgttggatccagccaacacggcttgaaaattgaaatggaggcgagtcttga

SEQ ID NO: 498762 - DNA, 55 bp, Artificial
  Synthetic oligonucleotide
cggaggattgcgacgtttgcaccatgatgcgcccgtagttttacctgcgaatggt

SEQ ID NO: 498763 - DNA, 55 bp, Artificial
  Synthetic oligonucleotide
cgcgaccgaatagaccggcgcagctccccttatccatccgtctagattcagggag

SEQ ID NO: 498764 - DNA, 55 bp, Artificial
  Synthetic oligonucleotide
cgcccagaccgatgtcgtacttcctgcgaaagtcgataggcaaagacacacgcca

SEQ ID NO: 498765 - DNA, 55 bp, Artificial
  Synthetic oligonucleotide
cgatttcgtcaattcccacatctgttcgaaaaccaatcctatctgataccgagcg

SEQ ID NO: 498766 - DNA, 55 bp, Artificial
  Synthetic oligonucleotide
ctgctcgccccgtttgtcgaaaccatcttgcgtcaaacgcaggcacctgggatcg

SEQ ID NO: 498767 - DNA, 55 bp, Artificial
  Synthetic oligonucleotide
ccttgaccgaatagggcgacatctccgccccgaagatgcgataaacctccgtcgg

SEQ ID NO: 498768 - DNA, 55 bp, Artificial
  Synthetic oligonucleotide
ccgtggctggcactctataggtattgtcagttggttgcgggtgcccgaacacccg

SEQ ID NO: 498769 - DNA, 55 bp, Artificial
  Synthetic oligonucleotide
ccgctaaggtctcgcagccgcgctccgaacgacacaaccgagcgccggacagcag

SEQ ID NO: 498770 - DNA, 55 bp, Artificial
  Synthetic oligonucleotide
ccgcgaccctgtaccgtcgcaaaccggtagcaacctgtgcttccgaccagcgttc

SEQ ID NO: 498771 - DNA, 54 bp, Artificial
  Synthetic oligonucleotide
aaatcagaacatccgtcatggcaggcctctcctgttgtgagttcgatggtccct

SEQ ID NO: 498772 - DNA, 54 bp, Artificial
  Synthetic oligonucleotide
gcgaaccatcctgggttcccgctcaatcggtcagatattcggggtgaaggctcc

SEQ ID NO: 498773 - DNA, 54 bp, Artificial
  Synthetic oligonucleotide
cctgttttgcccggtcccatccgagattcagattgcaaccagtagccgttccgc

SEQ ID NO: 498774 - DNA, 54 bp, Artificial
  Synthetic oligonucleotide
aatgtattgagagcttcaggtgtcatcggaacggtccgcccttacgcaacgcga

SEQ ID NO: 498775 - DNA, 54 bp, Artificial
  Synthetic oligonucleotide
ggaaccaaatgcctggaccgtcgttattttggccgggctgagcagagcaggttc

SEQ ID NO: 498776 - DNA, 53 bp, Artificial
  Synthetic oligonucleotide
tgttgggatcgctagtccctattctccccgtattacgatccgaggtgcgagca

SEQ ID NO: 498777 - DNA, 53 bp, Artificial
  Synthetic oligonucleotide
aacatatggtagctgccgctgcctgtcgctacgatgaacggcgatttatgatc

SEQ ID NO: 498778 - DNA, 53 bp, Artificial
  Synthetic oligonucleotide
acgaagacccgaaacgccgcggctgaatggaaattacgcccgccaccctcaaa

SEQ ID NO: 498779 - DNA, 53 bp, Artificial
  Synthetic oligonucleotide
tcgcgcttgaggatgctgcgaatcttcggccggacaacattggtcaaccagtt

SEQ ID NO: 498780 - DNA, 53 bp, Artificial
  Synthetic oligonucleotide
tatcggcggattctatgagggcgtgaaagccaatcccgagcaggaaaagcaca

SEQ ID NO: 498781 - DNA, 53 bp, Artificial
  Synthetic oligonucleotide
gtgccggcgattgaactggctgacttcaagagcttcaatgtcgaaaagccggt

SEQ ID NO: 498782 - DNA, 53 bp, Artificial
  Synthetic oligonucleotide
gcagctcctgtgagcacggttcttccgaacggtgacatacggcttccgaacaa

SEQ ID NO: 498783 - DNA, 53 bp, Artificial
  Synthetic oligonucleotide
cgcgttagcccggaccacgtagtaattatcggcatccttcgcacgccagataa

SEQ ID NO: 498784 - DNA, 52 bp, Artificial
  Synthetic oligonucleotide
ataggcgccgtacgaggatcgagcacagttccctccgaatgtcacggcggta

SEQ ID NO: 498785 - DNA, 52 bp, Artificial
  Synthetic oligonucleotide
tgcctgggcactgttccctcgcgttcaccgaatggcgatcgtccgacggaac

SEQ ID NO: 498786 - DNA, 52 bp, Artificial
  Synthetic oligonucleotide
cgaatagcccggaccaatacctcgacggacctgttgacgttgtccgcaggca

SEQ ID NO: 498787 - DNA, 51 bp, Artificial
  Synthetic oligonucleotide
gtatcgtcgcctgttcgtgctgaactgatgcgtccatgtccgctccttacg

SEQ ID NO: 498788 - DNA, 50 bp, Artificial
  Synthetic oligonucleotide
ttttaatctgtcggggcaagcggtagagggacgcctctgtattggacaca

SEQ ID NO: 498789 - DNA, 55 bp, Artificial
  Synthetic oligonucleotide
ttttccggggtatccgcgaacccagttctcggggaagcgtcggacctcatcgtgc

SEQ ID NO: 498790 - DNA, 55 bp, Artificial
  Synthetic oligonucleotide
ggttctgggatttgcgcttgtgggtggggtaagtatagagttaactctcgttgct

SEQ ID NO: 498791 - DNA, 55 bp, Artificial
  Synthetic oligonucleotide
ggtcggtggtgattatagtcgtggagccatttgccaagtgcgtcgttgcgttcgt

SEQ ID NO: 498792 - DNA, 55 bp, Artificial
  Synthetic oligonucleotide
ggccttctggagggtttcaaccttcggtgcgatccaccagaacataatgtcggcg

SEQ ID NO: 498793 - DNA, 55 bp, Artificial
  Synthetic oligonucleotide
ggattcgacaaccagcctcacgcccaactagtgactcggactcggcagttgcctt

SEQ ID NO: 498794 - DNA, 55 bp, Artificial
  Synthetic oligonucleotide
gcgcaccaacctgcaggacaatgtggttctgcacgctgacgaagactatccctgc

SEQ ID NO: 498795 - DNA, 55 bp, Artificial
  Synthetic oligonucleotide
gcctacgacatcgcctacggtcctgcggacatcattacagatggagtcgacgggt

SEQ ID NO: 498796 - DNA, 55 bp, Artificial
  Synthetic oligonucleotide
gccgcacaccggttagcaagagaaactcccgttagcagtggttgctaaagcgaag

SEQ ID NO: 498797 - DNA, 55 bp, Artificial
  Synthetic oligonucleotide
gcactgtgaactctctgtgacgtatccttgtgagacagaagacacacagcagttc

SEQ ID NO: 498798 - DNA, 55 bp, Artificial
  Synthetic oligonucleotide
ctgacaagctgtgtcagcagctggtagagcaagtgcgcgacatactcccgcttgg

SEQ ID NO: 498799 - DNA, 55 bp, Artificial
  Synthetic oligonucleotide
cggaagtacatccgtgaccgacgattggaccgagtccgacaggagttgcgggacg

SEQ ID NO: 498800 - DNA, 55 bp, Artificial
  Synthetic oligonucleotide
cgagtccaccgtccggcgacgcaggttcctctcgggtaagagaactgccaattgc

SEQ ID NO: 498801 - DNA, 55 bp, Artificial
  Synthetic oligonucleotide
cgaccgattacgtgacagtttgcagcgagacggctctccatggtgaacatgtcac

SEQ ID NO: 498802 - DNA, 55 bp, Artificial
  Synthetic oligonucleotide
cgaacgctcacagatgggtgggcatatgccaggtgctaccaatcagaaaacgaac

SEQ ID NO: 498803 - DNA, 55 bp, Artificial
  Synthetic oligonucleotide
ccggagcattcggaattcctcagtataggcgggtcaggattcgccttcgaagtct

SEQ ID NO: 498804 - DNA, 55 bp, Artificial
  Synthetic oligonucleotide
atagtacaatgaccgcatgccgcctcggcacggatcgtaggggaagacgtatccg

SEQ ID NO: 498805 - DNA, 55 bp, Artificial
  Synthetic oligonucleotide
acgcacagttcctcgtgtcagtggccgacccgtcgtctggagctgccacggatga

SEQ ID NO: 498806 - DNA, 55 bp, Artificial
  Synthetic oligonucleotide
acctcctgtaccaagggcgacggactctgctgacacgccggtccctgctgaacaa

SEQ ID NO: 498807 - DNA, 55 bp, Artificial
  Synthetic oligonucleotide
aatggccgcggggcttccctccagagcagggttaagaatcgaacccgcttcccca

SEQ ID NO: 498808 - DNA, 54 bp, Artificial
  Synthetic oligonucleotide
acactgagggcactcccctgcagcgttttcatcgctcatacgggacattcaccg

SEQ ID NO: 498809 - DNA, 52 bp, Artificial
  Synthetic oligonucleotide
cgcacagtccacgggtggtgaccgaatgtgtctggcatggcgattgttccct

SEQ ID NO: 498810 - DNA, 52 bp, Artificial
  Synthetic oligonucleotide
gacctcgctcctgatccgacgattggagaagtcccttgccacctactgagaa

SEQ ID NO: 498811 - DNA, 51 bp, Artificial
  Synthetic oligonucleotide
caccctcttggacggcaaacgcatctccaaagtcaatgtgaccgatggaac

SEQ ID NO: 498812 - DNA, 51 bp, Artificial
  Synthetic oligonucleotide
agcgatcaggcgaacgatccgagggtcgatctgcgacacgcggtgagaggg

SEQ ID NO: 498813 - DNA, 50 bp, Artificial
  Synthetic oligonucleotide
gcttcactgtgacacgttaagcttcctgagagaactctgtgttgccaatc

SEQ ID NO: 498814 - DNA, 55 bp, Artificial
  Synthetic oligonucleotide
gatagcgcttgaactccatcgtataggtcgcacgtccctgcgtcagcgagcgtag

SEQ ID NO: 498815 - DNA, 55 bp, Artificial
  Synthetic oligonucleotide
gatgcgttgcgccctgtcgtagtagcatggcggcgaatcgctccagcgacgagat

SEQ ID NO: 498816 - DNA, 55 bp, Artificial
  Synthetic oligonucleotide
gatttgagaatccgacagccagcttctgagatcgcgcttaagaacttccctgcga

SEQ ID NO: 498817 - DNA, 55 bp, Artificial
  Synthetic oligonucleotide
gcaaggcaactgtaagcagattgactcgttatccgcattccccgtaaaatcgtgc

SEQ ID NO: 498818 - DNA, 55 bp, Artificial
  Synthetic oligonucleotide
gcaccatgttcaagcgcatttggctgcgtatgcaacgtagactcgacgaaacccg

SEQ ID NO: 498819 - DNA, 55 bp, Artificial
  Synthetic oligonucleotide
gcaccttcgtccgacagtcgttggacgcagttatccgactgctggacagcaccgc

SEQ ID NO: 498820 - DNA, 55 bp, Artificial
  Synthetic oligonucleotide
gcacgagtgaggccggtatgagggccgcaattttaatcgaacatatccggctggg

SEQ ID NO: 498821 - DNA, 55 bp, Artificial
  Synthetic oligonucleotide
gcaggtcgccagtgagttgcgtccataatgtgtgtgctgcctgcagaccgctccg

SEQ ID NO: 498822 - DNA, 55 bp, Artificial
  Synthetic oligonucleotide
gcatcagagcccaatcctgcatggaatcaaagaggggatcaagattgatcagaca

SEQ ID NO: 498823 - DNA, 55 bp, Artificial
  Synthetic oligonucleotide
gccaacaagagagaggtcgtcgtgaagccggttcctcccgcggtgctgttttccg

SEQ ID NO: 498824 - DNA, 55 bp, Artificial
  Synthetic oligonucleotide
gccaactatcttcgtgtggtccgagagttcaccgtctttctcggtcgcgcgcctg

SEQ ID NO: 498825 - DNA, 55 bp, Artificial
  Synthetic oligonucleotide
gccaccacggcctcgcgtaaatcgaatgtcttcggcaagcctgcacgcgcaatcg

SEQ ID NO: 498826 - DNA, 55 bp, Artificial
  Synthetic oligonucleotide
gcccaaaacgatcaaacctgacaccaactttctcgtcgtcaccaacaagcggacg

SEQ ID NO: 498827 - DNA, 55 bp, Artificial
  Synthetic oligonucleotide
gcccaagggctagtgatcggcggtcggaagacccgtttcgaactggtctcgcaag

SEQ ID NO: 498828 - DNA, 55 bp, Artificial
  Synthetic oligonucleotide
gccccatggatcgcgcacgtagtggaaatgattcgatccgagtacatgccgaccg

SEQ ID NO: 498829 - DNA, 55 bp, Artificial
  Synthetic oligonucleotide
gccccgtgcgattcgataacgcctttatcaccggccgataaaccggtgtgaagtg

SEQ ID NO: 498830 - DNA, 55 bp, Artificial
  Synthetic oligonucleotide
gcccgaaacgcatatccgtcttgaacttttcgttacgcagcacccgccctccggc

SEQ ID NO: 498831 - DNA, 55 bp, Artificial
  Synthetic oligonucleotide
gccctttgtgcctcagcgtacgtgagttcctacggacgcctcttgatttcgccgc

SEQ ID NO: 498832 - DNA, 55 bp, Artificial
  Synthetic oligonucleotide
gccgatccggtctatgcagaattctcgctggaagcaaaatgctatcgtccgccac

SEQ ID NO: 498833 - DNA, 55 bp, Artificial
  Synthetic oligonucleotide
gccgttctttcggagctattcgctctcaggtgcgccgtcgacaggccgatatcgc

SEQ ID NO: 498834 - DNA, 55 bp, Artificial
  Synthetic oligonucleotide
gcctcactgtatcgggaccgcgatgggcgctccagtcggacaaatccgtaaggga

SEQ ID NO: 498835 - DNA, 55 bp, Artificial
  Synthetic oligonucleotide
gcctcattgatgaatcggttgaatgatgcgaaccgctcgcaagcttcgatgcgag

SEQ ID NO: 498836 - DNA, 55 bp, Artificial
  Synthetic oligonucleotide
gcgccattcgtgcagtttgtggattgacgtttctctcgcatatgagaaaagcgct

SEQ ID NO: 498837 - DNA, 55 bp, Artificial
  Synthetic oligonucleotide
gcgccgtgtgccattcgtgtacgggttgcaaggttcttctcgattcggtatcgcc

SEQ ID NO: 498838 - DNA, 55 bp, Artificial
  Synthetic oligonucleotide
gcgcgataagcacactcccgcgatggcgtaggggccagtccttcgggaataagac

SEQ ID NO: 498839 - DNA, 55 bp, Artificial
  Synthetic oligonucleotide
gcgctcagacgcgcatggtcaacaaagcgtgatgtgtgcaatgcagaagcgagcg

SEQ ID NO: 498840 - DNA, 55 bp, Artificial
  Synthetic oligonucleotide
gcggccttaacgcgttcggcaaaacggttcaggacaacacccagacgaagctgac

SEQ ID NO: 498841 - DNA, 55 bp, Artificial
  Synthetic oligonucleotide
gcgggacgaacatagtagttctcgagcatgacaatctcccaaggaaagtgggaag

SEQ ID NO: 498842 - DNA, 55 bp, Artificial
  Synthetic oligonucleotide
gcgggcagcggaagcttgtgaaccgggtctatcaaccatggaagtctcgctcgag

SEQ ID NO: 498843 - DNA, 55 bp, Artificial
  Synthetic oligonucleotide
gcgggcggtcttacgacggtgcatgcgaacgatcccatttcggcgttcgtgcgta

SEQ ID NO: 498844 - DNA, 55 bp, Artificial
  Synthetic oligonucleotide
cgtctgtcatccggcctattcaattcggccgactgttcgctgaacgggacgagcc

SEQ ID NO: 498845 - DNA, 55 bp, Artificial
  Synthetic oligonucleotide
cgtgtgccgtccattacgcggcgctcagacaaccgggcgatgcatctcgaacatg

SEQ ID NO: 498846 - DNA, 55 bp, Artificial
  Synthetic oligonucleotide
cgttcgcacgcgtacttgtccagaacccgctttgacgccgaatctttgatcaccg

SEQ ID NO: 498847 - DNA, 55 bp, Artificial
  Synthetic oligonucleotide
cgttctttacggatcatcttccagtgcagaaggggttgcgccaaggttcgatccg

SEQ ID NO: 498848 - DNA, 55 bp, Artificial
  Synthetic oligonucleotide
ctatctaaaagcacttagagatgggtgcgagtcgggtagtcagggtagtgattgt

SEQ ID NO: 498849 - DNA, 55 bp, Artificial
  Synthetic oligonucleotide
ctccacttcgaacaatgtctggctcttcgctggggaattgtgccacaagggtcgt

SEQ ID NO: 498850 - DNA, 55 bp, Artificial
  Synthetic oligonucleotide
ctccgtactgactactacggtcaattgaatgtggcttgcgccactccctttccac

SEQ ID NO: 498851 - DNA, 55 bp, Artificial
  Synthetic oligonucleotide
ctcgcggatgatgaggtgacagcactgtttcgctctctcccaaagcaggggcgct

SEQ ID NO: 498852 - DNA, 55 bp, Artificial
  Synthetic oligonucleotide
ctcggagtgcaaagcgcccctgctttgggagagagcgaaacagtgctgtcacctc

SEQ ID NO: 498853 - DNA, 55 bp, Artificial
  Synthetic oligonucleotide
ctctctcccaaagcaggggcgctttgcactccgagatcgaatcctattgctcttt

SEQ ID NO: 498854 - DNA, 55 bp, Artificial
  Synthetic oligonucleotide
ctgagcggattgataccgctatgctcggcgcgacgacaccattcctgtagctgtg

SEQ ID NO: 498855 - DNA, 55 bp, Artificial
  Synthetic oligonucleotide
ctgccagaaactgcaaagtgaaaaggatggcgtgacacgtccggatccattgatg

SEQ ID NO: 498856 - DNA, 55 bp, Artificial
  Synthetic oligonucleotide
ctgccagacggaatcacacccataatcagtttagtgttcctcagtgcggcgacat

SEQ ID NO: 498857 - DNA, 55 bp, Artificial
  Synthetic oligonucleotide
ctgcccgccactaggccaccgatgtctctgaacgacccacaagagacctacagca

SEQ ID NO: 498858 - DNA, 55 bp, Artificial
  Synthetic oligonucleotide
ctggcaacctacgcagcgcgcatctcggcccatggcaagacacaacatcaaccac

SEQ ID NO: 498859 - DNA, 55 bp, Artificial
  Synthetic oligonucleotide
ctgggtcgacgaaatgtttcggtgcccgatatagtctccaatatgcttaagtgaa

SEQ ID NO: 498860 - DNA, 55 bp, Artificial
  Synthetic oligonucleotide
ctggtaagcgggctcaacattgccaacggtggattgcttcactgcaacggcaatc

SEQ ID NO: 498861 - DNA, 55 bp, Artificial
  Synthetic oligonucleotide
ctgtcattcccagtcgagtccgccctttctccagatgtaggcgaaaccgagcaaa

SEQ ID NO: 498862 - DNA, 55 bp, Artificial
  Synthetic oligonucleotide
cttccgaacaccgtttcttgcatgatgtgcctccagttaaattatgagatgcgtg

SEQ ID NO: 498863 - DNA, 55 bp, Artificial
  Synthetic oligonucleotide
cttgtccgcgccgaaactgaacgcttgggtggcaaactgttcaagtggctcgtcc

SEQ ID NO: 498864 - DNA, 55 bp, Artificial
  Synthetic oligonucleotide
ctttgcgggagttgtgttttatcgactgcttgattcgaatataacaaagcgacgc

SEQ ID NO: 498865 - DNA, 55 bp, Artificial
  Synthetic oligonucleotide
gaagttgcgcgaaggaatgagcccttcgcaggaggtagcgtgaaatggcagaacg

SEQ ID NO: 498866 - DNA, 55 bp, Artificial
  Synthetic oligonucleotide
gactggagaaagcgttggcgtctttagttgtagccggaatgttcgactgcacagc

SEQ ID NO: 498867 - DNA, 55 bp, Artificial
  Synthetic oligonucleotide
gactggctcccacgtactgcgccacagttgcgtccagcacttgctcaacgcccat

SEQ ID NO: 498868 - DNA, 55 bp, Artificial
  Synthetic oligonucleotide
gagattcgcccgtcagtttgatgcggtgatgtcgctgcataagccgatctagcat

SEQ ID NO: 498869 - DNA, 55 bp, Artificial
  Synthetic oligonucleotide
gagcagcagtacttgccagtacatagacgtcaccaggctctctggtgtcttcact

SEQ ID NO: 498870 - DNA, 55 bp, Artificial
  Synthetic oligonucleotide
gagcgtcttttcttcgacaacgcaggcgggtcgttcagactgaaatcggcactgg

SEQ ID NO: 498871 - DNA, 55 bp, Artificial
  Synthetic oligonucleotide
gaggaaagcgtgttgtgtgtgtttgaagtctcgcgataagaagtcatgcgttgca

SEQ ID NO: 498872 - DNA, 55 bp, Artificial
  Synthetic oligonucleotide
gaggcggcggggagcgaatatttgagcacataatttgttacagtgaattgagcca

SEQ ID NO: 498873 - DNA, 55 bp, Artificial
  Synthetic oligonucleotide
gagggttcaccttatctcactacgcaggggtgtgcaaaccgcacacggacggttt

SEQ ID NO: 498874 - DNA, 55 bp, Artificial
  Synthetic oligonucleotide
gtgctttgacggaatgagttcgttaaaggcgcatgactttatgccgttaacccgg

SEQ ID NO: 498875 - DNA, 55 bp, Artificial
  Synthetic oligonucleotide
gtggcgaggtcggttttctcagtcgagccagtgtgcaagtcaccctgccctaccg

SEQ ID NO: 498876 - DNA, 55 bp, Artificial
  Synthetic oligonucleotide
gttatgtggccctttcttttcgaagtagcgaccgtgggccattttgttgcttcac

SEQ ID NO: 498877 - DNA, 55 bp, Artificial
  Synthetic oligonucleotide
gttcagaatggttcagatgaggttcatgcattgttacaatctgtcccgccggcgc

SEQ ID NO: 498878 - DNA, 55 bp, Artificial
  Synthetic oligonucleotide
gttcgctaatgcaactcgttctccccgatgaacgtccgggcgtctttgtgaagcg

SEQ ID NO: 498879 - DNA, 55 bp, Artificial
  Synthetic oligonucleotide
taccaacagcccgcaacttgcagcctactacagtcaggtgtttcgcaacgcgggg

SEQ ID NO: 498880 - DNA, 55 bp, Artificial
  Synthetic oligonucleotide
tagagatgcccgcactcgtacccgctgccaacctcacgttcgatcacttctatct

SEQ ID NO: 498881 - DNA, 55 bp, Artificial
  Synthetic oligonucleotide
tagccaagctcagcattcagggcgactacaggcccctctggctggcctactcgtg

SEQ ID NO: 498882 - DNA, 55 bp, Artificial
  Synthetic oligonucleotide
tatcacccggtagcggatcccctccacatccgtcgggacagcagcggggtccatt

SEQ ID NO: 498883 - DNA, 55 bp, Artificial
  Synthetic oligonucleotide
tatcgccacacgaagctgctcggcccgtggatcgagcatctagccgccaatctcg

SEQ ID NO: 498884 - DNA, 55 bp, Artificial
  Synthetic oligonucleotide
tcatgaacgctatcgccaaagttatcgtgtccctcgctgtggtcgcttcgcccac

SEQ ID NO: 498885 - DNA, 55 bp, Artificial
  Synthetic oligonucleotide
tccccgctgagtctgatgcaccctcctctactcctccggtatgcatggcccacag

SEQ ID NO: 498886 - DNA, 55 bp, Artificial
  Synthetic oligonucleotide
tctgcgtagtgaggccagtctaggttcgtgcggtttatccggtcaaatagcgaca

SEQ ID NO: 498887 - DNA, 55 bp, Artificial
  Synthetic oligonucleotide
tctgtccgcttggcctcagctatcctgcttgtggttcgaggtgccgacgaatcgc

SEQ ID NO: 498888 - DNA, 55 bp, Artificial
  Synthetic oligonucleotide
tcttcacgcctcgataatcggggctatggccagccaggcccggcatgattctcgc

SEQ ID NO: 498889 - DNA, 55 bp, Artificial
  Synthetic oligonucleotide
tgccacgagggttacagggagatttcgaggtggcgtgcaggtggcggcacaaacg

SEQ ID NO: 498890 - DNA, 55 bp, Artificial
  Synthetic oligonucleotide
tgcgaagaaaatccctgggtttaaagtgggtgggacttggcgtttctcgcgcgcg

SEQ ID NO: 498891 - DNA, 55 bp, Artificial
  Synthetic oligonucleotide
tgcggctgacgggttacgctgacggataccgaacaggccgatccgaaacgaagcg

SEQ ID NO: 498892 - DNA, 55 bp, Artificial
  Synthetic oligonucleotide
tggacagcccggacgtattgcgctcgcgttttcgagagaagagactaatgcatgg

SEQ ID NO: 498893 - DNA, 55 bp, Artificial
  Synthetic oligonucleotide
tggcgacgtgtattagacccagccccacccagacctcggcttccaagcgagctga

SEQ ID NO: 498894 - DNA, 55 bp, Artificial
  Synthetic oligonucleotide
tggtgcaactctggagccgtgacggatttcaaggggcgctgtcagtggtgacccg

SEQ ID NO: 498895 - DNA, 55 bp, Artificial
  Synthetic oligonucleotide
tgtgccaaaacctagcagtcgtccaacagcgatcgacagctcattcctgtgcccc

SEQ ID NO: 498896 - DNA, 55 bp, Artificial
  Synthetic oligonucleotide
tgtttgcgaagcaatcaaagcctggaggtaagtatcatgaaactcgttcaatcgc

SEQ ID NO: 498897 - DNA, 55 bp, Artificial
  Synthetic oligonucleotide
ttcaagggatgtacgtacggccgacgggttaagcaggtccccgtctgccgtccac

SEQ ID NO: 498898 - DNA, 55 bp, Artificial
  Synthetic oligonucleotide
ttcaccgcatccgaccggcgcaatactccgcccttttcgggattcatgcagcccg

SEQ ID NO: 498899 - DNA, 55 bp, Artificial
  Synthetic oligonucleotide
ttccggggccacggggctggatcgaagcgctgcacaacgtcaatctgtcgattcc

SEQ ID NO: 498900 - DNA, 55 bp, Artificial
  Synthetic oligonucleotide
ttcgttcttcggattgccgacgtagctgaagggcccagttgccccgatagccgcg

SEQ ID NO: 498901 - DNA, 55 bp, Artificial
  Synthetic oligonucleotide
ttcgttttccctcgcggtcatcagaatcgtttccgctatggcaaccgtgtggagc

SEQ ID NO: 498902 - DNA, 55 bp, Artificial
  Synthetic oligonucleotide
ttgatcgcggatgttcgcagttcgccggtttgggcagcgataactcttgaacgcg

SEQ ID NO: 498903 - DNA, 55 bp, Artificial
  Synthetic oligonucleotide
ttggcgacaacacgatgcaggtaaaacattcgctgtgcctgttaagccgaacccc

SEQ ID NO: 498904 - DNA, 55 bp, Artificial
  Synthetic oligonucleotide
gcgtgaccttataccatcccgcgagaacttgatgtgtgggtggtttgcacgccgc

SEQ ID NO: 498905 - DNA, 55 bp, Artificial
  Synthetic oligonucleotide
gctcgacgccaacttcgtaaaagccgagccaagcccgtgtgcgacgcgctctatg

SEQ ID NO: 498906 - DNA, 55 bp, Artificial
  Synthetic oligonucleotide
gctcttatcggcgcactgtcggaatcaatcggtctcgcatggcacacgccaaacc

SEQ ID NO: 498907 - DNA, 55 bp, Artificial
  Synthetic oligonucleotide
ggaaaaccccgatcctcacatcgtcctatgacatccggcgtcgctaattggcggg

SEQ ID NO: 498908 - DNA, 55 bp, Artificial
  Synthetic oligonucleotide
ggacgtgcacgaagcctgatctcgtatcggctgattgcctgacaggaaagcccgc

SEQ ID NO: 498909 - DNA, 55 bp, Artificial
  Synthetic oligonucleotide
ggatcgcgcacggtccgtcacatcgcaccgcttaacaaacgggtacagccatttc

SEQ ID NO: 498910 - DNA, 55 bp, Artificial
  Synthetic oligonucleotide
ggcaagcatgtggatagcctgcgcacaccgcaaccaagcgcttgatccgaaagac

SEQ ID NO: 498911 - DNA, 55 bp, Artificial
  Synthetic oligonucleotide
ggcacatccgtacggcgtagcgcttcgaaccagactacctgcgctgaattcccgc

SEQ ID NO: 498912 - DNA, 55 bp, Artificial
  Synthetic oligonucleotide
ggcacgcccgtccagattccgggctacatgctttggacagctattgcctatgcga

SEQ ID NO: 498913 - DNA, 55 bp, Artificial
  Synthetic oligonucleotide
ggcacgtatcctcactttgctgatcgctggcattgacgccaagatcagtttgccg

SEQ ID NO: 498914 - DNA, 55 bp, Artificial
  Synthetic oligonucleotide
ggccgccccttggcggaccgcgtttggcacagcactaatatgtaaacagcgcact

SEQ ID NO: 498915 - DNA, 55 bp, Artificial
  Synthetic oligonucleotide
ggcggacgttggaacgatgcgagatgaactggccgcaatcctgcgaggtggcggg

SEQ ID NO: 498916 - DNA, 55 bp, Artificial
  Synthetic oligonucleotide
ggcggcatgatttcgcccttgctgacataccgcgttgcctcgagacaaactcgag

SEQ ID NO: 498917 - DNA, 55 bp, Artificial
  Synthetic oligonucleotide
ggcggcgttcatccagaatccgtcgaacggcttatccagtacctggatgtgggac

SEQ ID NO: 498918 - DNA, 55 bp, Artificial
  Synthetic oligonucleotide
ggcgttactgtgtgcgggcgaagaccaaacacacagggctgccggtctggagtac

SEQ ID NO: 498919 - DNA, 55 bp, Artificial
  Synthetic oligonucleotide
ggcgttgatgcggggtgttctctagctgcacggcaaacattgggcgcagtagccg

SEQ ID NO: 498920 - DNA, 55 bp, Artificial
  Synthetic oligonucleotide
ggcttcatccgcaagtcctgcttgatatggataatgaagcggtcgttaggcgcac

SEQ ID NO: 498921 - DNA, 55 bp, Artificial
  Synthetic oligonucleotide
gggcctcgcactccgtaggcacgggcaacttcacgattgacgcaaagaccagtcc

SEQ ID NO: 498922 - DNA, 55 bp, Artificial
  Synthetic oligonucleotide
gggcctttgtcgtgttgctgccgtttgccctcctgtccggccagtctacgtttca

SEQ ID NO: 498923 - DNA, 55 bp, Artificial
  Synthetic oligonucleotide
ggggcgttgaagagtgctgcttctactctgtatcaggttaagaatggggtttggg

SEQ ID NO: 498924 - DNA, 55 bp, Artificial
  Synthetic oligonucleotide
ggggtaagcgcgcggcaaacccatcttgacgggtcgggttagtcgacgatcaccg

SEQ ID NO: 498925 - DNA, 55 bp, Artificial
  Synthetic oligonucleotide
ggtaacaccgtaagtatttcgctattcgtagacagggcgcagacccatcccggag

SEQ ID NO: 498926 - DNA, 55 bp, Artificial
  Synthetic oligonucleotide
ggtcagccgtagcagccaatcggcaatctgttcgttctccgcattgcgctgccgc

SEQ ID NO: 498927 - DNA, 55 bp, Artificial
  Synthetic oligonucleotide
ggtcatggtttactccgtcttggtaacgttcataaaagcgctgctggcgtgcagc

SEQ ID NO: 498928 - DNA, 55 bp, Artificial
  Synthetic oligonucleotide
gtaccgcctgcccggtgttaccgcgccggaagacgatgggcgtaccgcttttcag

SEQ ID NO: 498929 - DNA, 55 bp, Artificial
  Synthetic oligonucleotide
gtacgaacaccgttcagcgattccctcaacgtgacgcagatttgggtacgcctcg

SEQ ID NO: 498930 - DNA, 55 bp, Artificial
  Synthetic oligonucleotide
gtaggcgccaacgcgggccttctggagcatcgggatagacaattgcgtcctctcc

SEQ ID NO: 498931 - DNA, 55 bp, Artificial
  Synthetic oligonucleotide
gtcatgcagttacgatgtcctttgagccggtaaggcacgccagccaacactccgg

SEQ ID NO: 498932 - DNA, 55 bp, Artificial
  Synthetic oligonucleotide
gtctattcttgtcgttcgccctgccggtcaatttacgaattcagacgtgttcttt

SEQ ID NO: 498933 - DNA, 55 bp, Artificial
  Synthetic oligonucleotide
gtctcgagagggtgttgtctctgagacgcaactggatgactccactccctgtggc

SEQ ID NO: 498934 - DNA, 55 bp, Artificial
  Synthetic oligonucleotide
gtgctcgatctatgtgtagtgccccgttatgtggagtccggcggggcaaggcaca

SEQ ID NO: 498935 - DNA, 55 bp, Artificial
  Synthetic oligonucleotide
cagcataggttgtacacggttaaagactacgatgcagattacaggcgggaggccg

SEQ ID NO: 498936 - DNA, 55 bp, Artificial
  Synthetic oligonucleotide
cagccactctaggggattcgatgttgcgatgcaataaaacgacgctgggaacggg

SEQ ID NO: 498937 - DNA, 55 bp, Artificial
  Synthetic oligonucleotide
cagtctcagtctgcggaagaatatcgcacacataccgcgtattcgcgcccttacc

SEQ ID NO: 498938 - DNA, 55 bp, Artificial
  Synthetic oligonucleotide
cagtctgaatcgctcagatcagccggcacggaaacgcgatgctcgtttgaagtcc

SEQ ID NO: 498939 - DNA, 55 bp, Artificial
  Synthetic oligonucleotide
catacgtgcgatggggatgcgtacggcccgctgcgttcgacatggctgactgtct

SEQ ID NO: 498940 - DNA, 55 bp, Artificial
  Synthetic oligonucleotide
catttccgttcaaggggacgctcgcattgcccgcatagggtgagtcgagtgtgag

SEQ ID NO: 498941 - DNA, 55 bp, Artificial
  Synthetic oligonucleotide
ccaaaagatagtaaagtgactagactcggtcaagcccgcatttaacgaaagcccg

SEQ ID NO: 498942 - DNA, 55 bp, Artificial
  Synthetic oligonucleotide
ccacaagaatatggccagacaacgtgaaagctggaaacttagggtaaacgtcgat

SEQ ID NO: 498943 - DNA, 55 bp, Artificial
  Synthetic oligonucleotide
ccaccgttgttgcaggccaatccgttcactctgcataaacttcgatgcaagacac

SEQ ID NO: 498944 - DNA, 55 bp, Artificial
  Synthetic oligonucleotide
ccacgccgttcgtcgccccttcatcgccgcagttacggaacccttctcatgagca

SEQ ID NO: 498945 - DNA, 55 bp, Artificial
  Synthetic oligonucleotide
ccagcctttccgaaccacgtcagcgctagacaccttatcggtcggataccgacgg

SEQ ID NO: 498946 - DNA, 55 bp, Artificial
  Synthetic oligonucleotide
ccattcctccatccgcgagggaatactcgcggcggggagccgattaccctcagat

SEQ ID NO: 498947 - DNA, 55 bp, Artificial
  Synthetic oligonucleotide
ccattcgaggagggttttgtcgtccttccaggcggtacgagctcgggatcccgtc

SEQ ID NO: 498948 - DNA, 55 bp, Artificial
  Synthetic oligonucleotide
cccagatctttcgccaaacgcccgacgagactcaccattttaccaagcagcggac

SEQ ID NO: 498949 - DNA, 55 bp, Artificial
  Synthetic oligonucleotide
cccctgcaagggtctgtcctgcgcgtattgcgtgaccttccattgccgtggccaa

SEQ ID NO: 498950 - DNA, 55 bp, Artificial
  Synthetic oligonucleotide
cccgcatttctcgatcccgctcaactacgagccggacacgttctggacctatgac

SEQ ID NO: 498951 - DNA, 55 bp, Artificial
  Synthetic oligonucleotide
cccgcgcaagcacacgaacgattgctactacaccgaggattattacgccagtttc

SEQ ID NO: 498952 - DNA, 55 bp, Artificial
  Synthetic oligonucleotide
ccctcgcctaaagagtgccctcataaacccaaccgggcttggatcgcgcacggtc

SEQ ID NO: 498953 - DNA, 55 bp, Artificial
  Synthetic oligonucleotide
ccgacggcgtgactccgaaaacgttgggagagcaccccaaaaccgatgcagacgc

SEQ ID NO: 498954 - DNA, 55 bp, Artificial
  Synthetic oligonucleotide
ccgatccccgaaggtgcagtgaagtggtcgtgcaaggacgggttgtctttctaca

SEQ ID NO: 498955 - DNA, 55 bp, Artificial
  Synthetic oligonucleotide
ccgatgaccttggcggggagacggatagcggcgcgaattcacaaaccaccgttgt

SEQ ID NO: 498956 - DNA, 55 bp, Artificial
  Synthetic oligonucleotide
ccgcacgcttttaatcgccgatatcgttcaaactcctgctggccgtgctttacgc

SEQ ID NO: 498957 - DNA, 55 bp, Artificial
  Synthetic oligonucleotide
ccgcactatggtctggtaccgactgagctaatcgcggacctgtcagctctgaccg

SEQ ID NO: 498958 - DNA, 55 bp, Artificial
  Synthetic oligonucleotide
ccgcgcgttcttacgaatgattcgagttggagagggtacggaaactccgatcggc

SEQ ID NO: 498959 - DNA, 55 bp, Artificial
  Synthetic oligonucleotide
ccgcgtactcgccgttccagggtcgatcgcaacgggttgcgcaaacaactttccg

SEQ ID NO: 498960 - DNA, 55 bp, Artificial
  Synthetic oligonucleotide
ccgctcgaaacgttctcgaaacactgagggatctgcgtcgatccacttgtccggc

SEQ ID NO: 498961 - DNA, 55 bp, Artificial
  Synthetic oligonucleotide
ccggccgtgctctgtcactcgcggacatagagcgaatcgtcgtcgggaacaagtc

SEQ ID NO: 498962 - DNA, 55 bp, Artificial
  Synthetic oligonucleotide
ccggctcgcggagattgcagccgagggcctttccaaaggggccacggtctatatc

SEQ ID NO: 498963 - DNA, 55 bp, Artificial
  Synthetic oligonucleotide
ccgtgcacctacacttttgctgtccgctcggcatgcgaagattcatcggcgtgcc

SEQ ID NO: 498964 - DNA, 55 bp, Artificial
  Synthetic oligonucleotide
aaaactccaagggctagcctcacgtgccgtacgacccagcggatcggattcatgc

SEQ ID NO: 498965 - DNA, 55 bp, Artificial
  Synthetic oligonucleotide
aaccctgcttgactccgtacagccctgatggcgaagcgacgaacccaggcggagg

SEQ ID NO: 498966 - DNA, 55 bp, Artificial
  Synthetic oligonucleotide
aacgcgaaatgggtgccggaagccgactgcgcttttggtttaccatagcggaccg

SEQ ID NO: 498967 - DNA, 55 bp, Artificial
  Synthetic oligonucleotide
aagttgcaccgagcgcgcccaggatacctaatggcaccaccatgattaccgaggc

SEQ ID NO: 498968 - DNA, 55 bp, Artificial
  Synthetic oligonucleotide
aattcactgtaacaaattatgtgctcaaatattcgctccccgccgcctcagcacg

SEQ ID NO: 498969 - DNA, 55 bp, Artificial
  Synthetic oligonucleotide
acgaagcgtttacgactcacctcttcctcagcgcgcgacagctccgcggatgacg

SEQ ID NO: 498970 - DNA, 55 bp, Artificial
  Synthetic oligonucleotide
actacgatggcaaaaccttcgcacattgtgtattcgggaatttaagacgggttgc

SEQ ID NO: 498971 - DNA, 55 bp, Artificial
  Synthetic oligonucleotide
agaccgtgcgcgatccaagcccgattgggcctacgagggcactctttaggcgagt

SEQ ID NO: 498972 - DNA, 55 bp, Artificial
  Synthetic oligonucleotide
agattccttccggctcgtattgcacgtccggatgttccgccttcgcgtgcgtgag

SEQ ID NO: 498973 - DNA, 55 bp, Artificial
  Synthetic oligonucleotide
aggcccggcagaagctcaatcgacacccctaccagcgttcgtccctgttgctatg

SEQ ID NO: 498974 - DNA, 55 bp, Artificial
  Synthetic oligonucleotide
atacgaatcttgtcgatgcgatgcgcgttttcttgaaagttgcggatgcaaggag

SEQ ID NO: 498975 - DNA, 55 bp, Artificial
  Synthetic oligonucleotide
atccggcagaggtgtgacgccggatcgcttaaccttgttcgcctcacgccactcc

SEQ ID NO: 498976 - DNA, 55 bp, Artificial
  Synthetic oligonucleotide
atgcagctccctgaggcgtgcggctgatcttgcggattgcgacatgactgctcac

SEQ ID NO: 498977 - DNA, 55 bp, Artificial
  Synthetic oligonucleotide
atgcagtgattcgtcctgcaacacgtagttgatgaacggagtcagaaacgagcac

SEQ ID NO: 498978 - DNA, 55 bp, Artificial
  Synthetic oligonucleotide
atggtcggggccgcttcttcccctgcaaggacgttcataaacgtcgcccgttccc

SEQ ID NO: 498979 - DNA, 55 bp, Artificial
  Synthetic oligonucleotide
atggtgcgatgacgattgactgatggtggaagatgcatgaacggtaagagagcgg

SEQ ID NO: 498980 - DNA, 55 bp, Artificial
  Synthetic oligonucleotide
atgtcccgccgcaaagcgaaaacgataccggtcgtgcgatcccgtgtattcggtc

SEQ ID NO: 498981 - DNA, 55 bp, Artificial
  Synthetic oligonucleotide
atgtccgactcagaaagctgcgtgcaggctacccagggccaggctactccgacct

SEQ ID NO: 498982 - DNA, 55 bp, Artificial
  Synthetic oligonucleotide
attcagaaagtggagtcgtgatcggcttgtgtctcggccgccggctcatgcgacg

SEQ ID NO: 498983 - DNA, 55 bp, Artificial
  Synthetic oligonucleotide
atttcgtttcaggggcgggaggcatggcagcccgtcagcatgacacccgaggttc

SEQ ID NO: 498984 - DNA, 55 bp, Artificial
  Synthetic oligonucleotide
caagcacgctccttgctcggactcgaacatccagacggttcgacacgtgtccaga

SEQ ID NO: 498985 - DNA, 55 bp, Artificial
  Synthetic oligonucleotide
caattgcgagcgatgatgtcaacccaggcgattcaatgccaaataggttgaccag

SEQ ID NO: 498986 - DNA, 55 bp, Artificial
  Synthetic oligonucleotide
cacaagtggagcgaattttgcgacagccttcaaggagcgctttggtctgacgcca

SEQ ID NO: 498987 - DNA, 55 bp, Artificial
  Synthetic oligonucleotide
cacaggcacatgtcaggacattggtccaaggaaaagcaacaaattacaattccgt

SEQ ID NO: 498988 - DNA, 55 bp, Artificial
  Synthetic oligonucleotide
caccaagccttccgcagcccgttgaacgaagtcgaggctcccatgataagcaagc

SEQ ID NO: 498989 - DNA, 55 bp, Artificial
  Synthetic oligonucleotide
caccgaccgttcaatcaatcatatgtcgcagctctttcaaggagtcatgcgcgat

SEQ ID NO: 498990 - DNA, 55 bp, Artificial
  Synthetic oligonucleotide
cacgagatctggggagtcgagattccgcactgacgcagaccggaagcgctctcac

SEQ ID NO: 498991 - DNA, 55 bp, Artificial
  Synthetic oligonucleotide
cacgcccgcgtagctaatgcgttccgagccagctgccacccatgctccgattaac

SEQ ID NO: 498992 - DNA, 55 bp, Artificial
  Synthetic oligonucleotide
cactcggtgcgccacacgattaccttgcggttgggctgaaaatccggtgcattgg

SEQ ID NO: 498993 - DNA, 55 bp, Artificial
  Synthetic oligonucleotide
cagaccgcgcctgccgtattcgtgagccatcgacaagcttgcccgcctattcgtc

SEQ ID NO: 498994 - DNA, 55 bp, Artificial
  Synthetic oligonucleotide
cggctcaattttcagtcggcgcgatccctataagtggctcaattttcggtcggcg

SEQ ID NO: 498995 - DNA, 55 bp, Artificial
  Synthetic oligonucleotide
cgagtcgtcagatgcgagatacagcgcggcgttcacgacttcaggtgtttggccc

SEQ ID NO: 498996 - DNA, 55 bp, Artificial
  Synthetic oligonucleotide
cgatagcttcggatcgaaccttggcgcaaccccttctgcactggaagatgatccg

SEQ ID NO: 498997 - DNA, 55 bp, Artificial
  Synthetic oligonucleotide
cggcgacggcaaatgctcaacttgcttcgctgaaccggctagcgaactacacttc

SEQ ID NO: 498998 - DNA, 55 bp, Artificial
  Synthetic oligonucleotide
cgatgcgtagggttgtttgttcggcgcatccacgacacgcccagtacaacttcac

SEQ ID NO: 498999 - DNA, 55 bp, Artificial
  Synthetic oligonucleotide
cgatgtaacggcttcaacggatcgggcttcacctgtgcgttgacggatgccccat

SEQ ID NO: 499000 - DNA, 55 bp, Artificial
  Synthetic oligonucleotide
cggccttccatcgatcgaaaagccggttcacgcatgctcgtcacccgaaacgttc

SEQ ID NO: 499001 - DNA, 55 bp, Artificial
  Synthetic oligonucleotide
cgcaccgaccgacatcagcttcgtgcgagccctccatacgattcagcacgagcta

SEQ ID NO: 499002 - DNA, 55 bp, Artificial
  Synthetic oligonucleotide
cgcagcggcaccgtgtccctatcatgtccaggaccactcaccacatgcacacgga

SEQ ID NO: 499003 - DNA, 55 bp, Artificial
  Synthetic oligonucleotide
cggccagtcgtatctatttagaacatctgcgtgattaatcggccatacggatact

SEQ ID NO: 499004 - DNA, 55 bp, Artificial
  Synthetic oligonucleotide
cggatgtcgatctgtgcgctagcttaacatctcgcgacactgcaccatggccgca

SEQ ID NO: 499005 - DNA, 55 bp, Artificial
  Synthetic oligonucleotide
cgccagagcaatgaatccgccaggcttcggaccgcacagctcataagtgggcacg

SEQ ID NO: 499006 - DNA, 55 bp, Artificial
  Synthetic oligonucleotide
cgccctcctatgtctagcgatcaatgaacgagcgtagcttatctgcgcgactagg

SEQ ID NO: 499007 - DNA, 55 bp, Artificial
  Synthetic oligonucleotide
cgccttccgatggcctgacacgatcgtccgatgcgccctacgcacctgagcggca

SEQ ID NO: 499008 - DNA, 55 bp, Artificial
  Synthetic oligonucleotide
cggatgaaaattcggatgcaccgtgtaacccgagagcgtgcggcgtaaaataccg

SEQ ID NO: 499009 - DNA, 55 bp, Artificial
  Synthetic oligonucleotide
cgcgcagactcaacgcatagccacataccaacgcacacgcaacaggattacgtcg

SEQ ID NO: 499010 - DNA, 55 bp, Artificial
  Synthetic oligonucleotide
cgctgcttttctcccgcttgccagtgctgcatggcgtgccattctggttgatgcg

SEQ ID NO: 499011 - DNA, 55 bp, Artificial
  Synthetic oligonucleotide
cgctgcaatgcatgccgcgatgataaacgaatcagccaacatggcgcacgcgggc

SEQ ID NO: 499012 - DNA, 55 bp, Artificial
  Synthetic oligonucleotide
cgcgcaggcaccggctcgttcagcacacggtcatagcgctcatgaaacatgttgt

SEQ ID NO: 499013 - DNA, 55 bp, Artificial
  Synthetic oligonucleotide
cgctacttaaacagtattggacgatgcttcagcggttcgcctatcctgagcccgc

SEQ ID NO: 499014 - DNA, 55 bp, Artificial
  Synthetic oligonucleotide
cgcgcctttcagggtcacgccactaattcgcagtcggcttaccgattcgagcagc

SEQ ID NO: 499015 - DNA, 55 bp, Artificial
  Synthetic oligonucleotide
cgcgtcgcacacgggcttggctcggcttttacgaagttggcgtcgagcttcgaca

SEQ ID NO: 499016 - DNA, 55 bp, Artificial
  Synthetic oligonucleotide
cgcgctgcgtatcgttgacggctttcctacggtgccttccatgccacgactgctc

SEQ ID NO: 499017 - DNA, 55 bp, Artificial
  Synthetic oligonucleotide
ccgttgcagagggaatgtccgacggtgcaggatgttccgctagcgcgacgtcatg

SEQ ID NO: 499018 - DNA, 55 bp, Artificial
  Synthetic oligonucleotide
cgtcgtgaacctggtgagcagcgtggcttctagcgagtcggtcctgggcacatca

SEQ ID NO: 499019 - DNA, 55 bp, Artificial
  Synthetic oligonucleotide
cctgcctacgaggcgatcccggattcgtggctgcacttcggttacgacctgcttg

SEQ ID NO: 499020 - DNA, 55 bp, Artificial
  Synthetic oligonucleotide
ccttacatctacgggacgaaccacgaggaccagaaaggcgcccgtcttcaggcac

SEQ ID NO: 499021 - DNA, 55 bp, Artificial
  Synthetic oligonucleotide
ccttctcagtctgcctgatagacatcgcaacttcataatcagacaggtcgtcacg

SEQ ID NO: 499022 - DNA, 55 bp, Artificial
  Synthetic oligonucleotide
cgaacttaaccagccgaacgcagaatcgaagggacgcatgagggacgaaacgggc

SEQ ID NO: 499023 - DNA, 55 bp, Artificial
  Synthetic oligonucleotide
cgaagaccgggatacagcagtacgtcagagctcgtttgcctgaaccttgccatct

SEQ ID NO: 499024 - DNA, 55 bp, Artificial
  Synthetic oligonucleotide
cgaagcagtttgcacgctcgcattcgactgtaacgaaagcgctgaccatccaaca

SEQ ID NO: 499025 - DNA, 55 bp, Artificial
  Synthetic oligonucleotide
cggtgcagatccgcctgttatcgaacagggacacgatacggcgcctggtgatctc

SEQ ID NO: 499026 - DNA, 55 bp, Artificial
  Synthetic oligonucleotide
cgaagctgagatatccgtttacggtgtcgatgcaacaatataacattgcgtccgc

SEQ ID NO: 499027 - DNA, 55 bp, Artificial
  Synthetic oligonucleotide
cgacagcgcggtgtgtcgctgcctctgcacctaagataggagcgaagactatcgt

SEQ ID NO: 499028 - DNA, 55 bp, Artificial
  Synthetic oligonucleotide
cgggctcccgaactggatctatttcgattggtacgcttcaattggaggtatccgt

SEQ ID NO: 499029 - DNA, 55 bp, Artificial
  Synthetic oligonucleotide
cgactcgccgcctcgtaccgtaagttgttgttgcatcgtgttgttagaccctttg

SEQ ID NO: 499030 - DNA, 55 bp, Artificial
  Synthetic oligonucleotide
cgactcgtgagctatcgcgataccgtgcccacgtggactgatgatcctgttactg

SEQ ID NO: 499031 - DNA, 55 bp, Artificial
  Synthetic oligonucleotide
cgggcagcctagctggtgccaggttcaatgctccaagacctgtccttccctactt

SEQ ID NO: 499032 - DNA, 55 bp, Artificial
  Synthetic oligonucleotide
cgagatccggtctgatctcgtcgagtaacttgtcgaatacgtctcgcgtctccgg

SEQ ID NO: 499033 - DNA, 55 bp, Artificial
  Synthetic oligonucleotide
cgagatgctatcttgcgatacacctgttcgcgccttacccggaagaaatgatgca

SEQ ID NO: 499034 - DNA, 55 bp, Artificial
  Synthetic oligonucleotide
cgagcgggaggcacgatgaccattccaaaacgacgacccggagtgcgctacgaag

SEQ ID NO: 499035 - DNA, 55 bp, Artificial
  Synthetic oligonucleotide
cgagcgtgcgggaagcggaacaactttctcgcgacgcggagtttgactccatggc

SEQ ID NO: 499036 - DNA, 55 bp, Artificial
  Synthetic oligonucleotide
cggctcttttgtgcatcaatcattcgccatgtgtgcggtaaacctcataagctgc

SEQ ID NO: 499037 - DNA, 55 bp, Artificial
  Synthetic oligonucleotide
cgaggagaccgggattgatggtttcaacttgagccgcactgtggtgcccgagagc

SEQ ID NO: 499038 - DNA, 54 bp, Artificial
  Synthetic oligonucleotide
aacgcacgtgccgtcgactgttgcggagaaggacgttccgatggtcgtgaagtg

SEQ ID NO: 499039 - DNA, 54 bp, Artificial
  Synthetic oligonucleotide
tcggccgcttgtggtcggacggcaattattgaaccgcgattcggctcagctcca

SEQ ID NO: 499040 - DNA, 54 bp, Artificial
  Synthetic oligonucleotide
cggagattccgagcgttcaggttttcgaacaagaaagcctcggtgaagcagcga

SEQ ID NO: 499041 - DNA, 54 bp, Artificial
  Synthetic oligonucleotide
aatcactcagatcgcgtatgaatgtggtttcacggatagctcgcatctcatcaa

SEQ ID NO: 499042 - DNA, 54 bp, Artificial
  Synthetic oligonucleotide
gttcgtcaccttgtcattcgtgtgtgcttgacctaatattcagcccctcgtcgc

SEQ ID NO: 499043 - DNA, 54 bp, Artificial
  Synthetic oligonucleotide
ttttcttatggcagaacaacgtggtcgtgcccatggctgcgttcatcccgcgtg

SEQ ID NO: 499044 - DNA, 54 bp, Artificial
  Synthetic oligonucleotide
cgcgcgccgcaaatacgctctcgtagatgtactcgctggctgaaggatccgaca

SEQ ID NO: 499045 - DNA, 54 bp, Artificial
  Synthetic oligonucleotide
cagagacaggccgtttcgcatcaatggcaccgatttcgggtatgtgtggaacgc

SEQ ID NO: 499046 - DNA, 54 bp, Artificial
  Synthetic oligonucleotide
gtccgaaatcatccgatatgtcccgaaacgaatccactcaggatacacttaggc

SEQ ID NO: 499047 - DNA, 54 bp, Artificial
  Synthetic oligonucleotide
cgaagctcgcgcagaccgtgcggcaagtgagcagcctgtacgtcaacaacgcat

SEQ ID NO: 499048 - DNA, 53 bp, Artificial
  Synthetic oligonucleotide
tgtggggactcatagcacatcctccccgtctccctgtgcgacactgcgaagtt

SEQ ID NO: 499049 - DNA, 53 bp, Artificial
  Synthetic oligonucleotide
acaggcaggaaatggcgacgtccaggcccggactgaagcgtggatgaactcat

SEQ ID NO: 499050 - DNA, 53 bp, Artificial
  Synthetic oligonucleotide
gcaggcccgttccagaccactggcaggctgtgctgcagaaggtcggcattgcc

SEQ ID NO: 499051 - DNA, 53 bp, Artificial
  Synthetic oligonucleotide
cgagggtacggctgatggtgtcgagctgttgatgcgtcgcatggcatttcctg

SEQ ID NO: 499052 - DNA, 53 bp, Artificial
  Synthetic oligonucleotide
cgatcggagcgatcgtattggagtgcaggcttcccgctggccgcaaatgccgt

SEQ ID NO: 499053 - DNA, 53 bp, Artificial
  Synthetic oligonucleotide
aacgttattcttatcagatctgtatcgactgcggaagagacagtccaaccatg

SEQ ID NO: 499054 - DNA, 53 bp, Artificial
  Synthetic oligonucleotide
gctttctggctgcagaaatcctgtgtggtctgacgatgaacgcgtccaatcgt

SEQ ID NO: 499055 - DNA, 53 bp, Artificial
  Synthetic oligonucleotide
tctgggtttacccgtaatgttgcgttgcggtacagtcgcgcccacgatgtttg

SEQ ID NO: 499056 - DNA, 53 bp, Artificial
  Synthetic oligonucleotide
ttcgcttggggtctgaagccgcatccgagggccattgcgttgctgtaccgttt

SEQ ID NO: 499057 - DNA, 53 bp, Artificial
  Synthetic oligonucleotide
gaaacgcagcagaatccaacggcgtcttgttctcttcaagcaacgcgacgaac

SEQ ID NO: 499058 - DNA, 53 bp, Artificial
  Synthetic oligonucleotide
gcatcgtttcgggttcgaggatgcggggagtcgaagtctttccggtggacacg

SEQ ID NO: 499059 - DNA, 53 bp, Artificial
  Synthetic oligonucleotide
ctgatgcggagcccgtttcccgcctcggtaaatggggaagcatcggggacttt

SEQ ID NO: 499060 - DNA, 53 bp, Artificial
  Synthetic oligonucleotide
tcaccagtacttcccgcagcacttgccgcgtacggtctttgaccctgtgcagg

SEQ ID NO: 499061 - DNA, 53 bp, Artificial
  Synthetic oligonucleotide
tattccgtgggacatcgcggttggcaacgacctccgccatccacaagtcaaag

SEQ ID NO: 499062 - DNA, 53 bp, Artificial
  Synthetic oligonucleotide
aaaataacgacgggaggaagaacaccacacgcgtcgcactgatcgcatacgac

SEQ ID NO: 499063 - DNA, 53 bp, Artificial
  Synthetic oligonucleotide
gtctttgttctgccgccacactattggcacattggcgaagcgactgacttctc

SEQ ID NO: 499064 - DNA, 53 bp, Artificial
  Synthetic oligonucleotide
gtggagtagtccatgttcaatgtggctcgctggtcggtgagagaagcggctca

SEQ ID NO: 499065 - DNA, 52 bp, Artificial
  Synthetic oligonucleotide
tcatgcacagcagccacatgccggatttcagcttcgagtagtcgagtacgtt

SEQ ID NO: 499066 - DNA, 52 bp, Artificial
  Synthetic oligonucleotide
tagccgggcggtgcagggtacacttccgtctcaacagtatgatgcgccggag

SEQ ID NO: 499067 - DNA, 52 bp, Artificial
  Synthetic oligonucleotide
cctccaaccgtcccggcatcccctcaagctatcccgtttcactgtcgttacc

SEQ ID NO: 499068 - DNA, 52 bp, Artificial
  Synthetic oligonucleotide
tgcgcctttcactgggcgctgtcaacgtgcgctccggcaactcggtctattt

SEQ ID NO: 499069 - DNA, 52 bp, Artificial
  Synthetic oligonucleotide
caattagcgtattagcctaaaggcgtattgcgtcgtcgtgtggtggcgggta

SEQ ID NO: 499070 - DNA, 52 bp, Artificial
  Synthetic oligonucleotide
acgactacaactacgttgatgtcgtcctgcgttccacgtgcgggatttcgcg

SEQ ID NO: 499071 - DNA, 52 bp, Artificial
  Synthetic oligonucleotide
tggttcagtgtcggtggttctttcggacgcgccttcttgcagagcacgtgag

SEQ ID NO: 499072 - DNA, 52 bp, Artificial
  Synthetic oligonucleotide
gcactggcgcaaacccggcacgttcgactggcacgaggcttggctgtccctg

SEQ ID NO: 499073 - DNA, 52 bp, Artificial
  Synthetic oligonucleotide
gttcgccggaccgaaacggacgacgtgtcaaaactcgactacgaatactggg

SEQ ID NO: 499074 - DNA, 51 bp, Artificial
  Synthetic oligonucleotide
cctattccgtcatacctcgcgaaagcgcctgagccaaagcaacgtggcgat

SEQ ID NO: 499075 - DNA, 51 bp, Artificial
  Synthetic oligonucleotide
ggcgcgtgaacagcggttcctacgattcgaagggcatcactggccgccttg

SEQ ID NO: 499076 - DNA, 51 bp, Artificial
  Synthetic oligonucleotide
ctcatctacggcccctttgatcgctcggttattcaatatagtgttcccgac

SEQ ID NO: 499077 - DNA, 51 bp, Artificial
  Synthetic oligonucleotide
cagcccgaagctgtcgcaaggtacgaatagtggtcattttctggtcggtca

SEQ ID NO: 499078 - DNA, 51 bp, Artificial
  Synthetic oligonucleotide
agtaacggggatatcgttcgcgtggagcaacgtgaagacagcaaggtattt

SEQ ID NO: 499079 - DNA, 51 bp, Artificial
  Synthetic oligonucleotide
tcgcaaatctgctcattaccaagaacggcgcagacgtgtcgttcctctcga

SEQ ID NO: 499080 - DNA, 51 bp, Artificial
  Synthetic oligonucleotide
atggcgagtcctcgcagtccgttcgtggttgaagggtcaggtgcgtggctt

SEQ ID NO: 499081 - DNA, 51 bp, Artificial
  Synthetic oligonucleotide
ctttcgcgctggttctttccataggattccaaatgaatgacctcgtgacgt

SEQ ID NO: 499082 - DNA, 50 bp, Artificial
  Synthetic oligonucleotide
gagagcgaaacagtgctgtcacctcatcatccgcgagatagtgggtgtca

SEQ ID NO: 499083 - DNA, 50 bp, Artificial
  Synthetic oligonucleotide
cttttccactcacgggttttctcttcgatgcaggcaacacctctgtccga

SEQ ID NO: 499084 - DNA, 50 bp, Artificial
  Synthetic oligonucleotide
ttttctcctggagtcgttcacacggaaggtctgccatgcgtcagttacaa

SEQ ID NO: 499085 - DNA, 50 bp, Artificial
  Synthetic oligonucleotide
gttcgcttggcgcttaccgttaacacgatcatcgttatccacgtccgatt

SEQ ID NO: 499086 - DNA, 55 bp, Artificial
  Synthetic oligonucleotide
ttgccgaaactcgatctcgatccaggcgaaggaatggaggtgactctagacgagg

SEQ ID NO: 499087 - DNA, 55 bp, Artificial
  Synthetic oligonucleotide
ggttcgaagcgctcgctctaactgaccacccttcagggctgcctcccaacaggag

SEQ ID NO: 499088 - DNA, 55 bp, Artificial
  Synthetic oligonucleotide
ggtctcctccattcctatcgtagtcgagacgcctgatgacccgaccacgcgtaac

SEQ ID NO: 499089 - DNA, 55 bp, Artificial
  Synthetic oligonucleotide
ggggaacgcagggaggcatatcagcttgcccgacgtttgacccaacaaagccgat

SEQ ID NO: 499090 - DNA, 55 bp, Artificial
  Synthetic oligonucleotide
gggcagccgccgatatgcttcaaccgtaagcagtgaacgggcctctcctcctgtc

SEQ ID NO: 499091 - DNA, 55 bp, Artificial
  Synthetic oligonucleotide
gcccacgcctggttcacaaggaggaaaccggagaacaaccaaccgctcacccatg

SEQ ID NO: 499092 - DNA, 55 bp, Artificial
  Synthetic oligonucleotide
gcacagttgaatcgtgtacaccgaacccagcgcgaggggaaatctaccctttcgc

SEQ ID NO: 499093 - DNA, 55 bp, Artificial
  Synthetic oligonucleotide
gagccaggtattgcattacgaagatgggcacttcatcatagggctacccagtgcc

SEQ ID NO: 499094 - DNA, 55 bp, Artificial
  Synthetic oligonucleotide
ctcaccgaatccatcacgagccattcaatatccgtctgcgaaggtgtcgatcatc

SEQ ID NO: 499095 - DNA, 55 bp, Artificial
  Synthetic oligonucleotide
cgctagagatagcgaagcaatgtatcagggtgggcgcgacggtagctgcgatacc

SEQ ID NO: 499096 - DNA, 55 bp, Artificial
  Synthetic oligonucleotide
cccagacatgaggagccactatgcaacccaatcaaatatctcgacgcagattctt

SEQ ID NO: 499097 - DNA, 55 bp, Artificial
  Synthetic oligonucleotide
ccagcatccccttctctgctcggatggcatgaggcgacgcattgagttattcacc

SEQ ID NO: 499098 - DNA, 55 bp, Artificial
  Synthetic oligonucleotide
caggtagatgggtccgccgtctcttcaacagcctcagagaaggatgcaggtgaac

SEQ ID NO: 499099 - DNA, 55 bp, Artificial
  Synthetic oligonucleotide
acccaacatgccctcggaggaggtcttcagcatgccgcacaaccggcgcacacaa

SEQ ID NO: 499100 - DNA, 54 bp, Artificial
  Synthetic oligonucleotide
ctgggctgtccccggcccaaagcgccgtgagcgggtgattttgaaggtaggcgt

SEQ ID NO: 499101 - DNA, 52 bp, Artificial
  Synthetic oligonucleotide
tttgggcgctgaccagcgtattgatctgcagcggaatgttcctggcaactat

SEQ ID NO: 499102 - DNA, 51 bp, Artificial
  Synthetic oligonucleotide
cgggcgagcctcgcaccgtcgtcatgtgtacgatctaccgccctcaggtga

SEQ ID NO: 499103 - DNA, 55 bp, Artificial
  Synthetic oligonucleotide
ggtcttgcttacttcggtatctcatgtttaccgcaatcctaaattgagcaacctc

SEQ ID NO: 499104 - DNA, 55 bp, Artificial
  Synthetic oligonucleotide
ggtaggcttatttgtagtccgccaattcaggttagccatatagcctacaggcgga

SEQ ID NO: 499105 - DNA, 55 bp, Artificial
  Synthetic oligonucleotide
gcctgtgaaagaagtgctgcaattgtggtaaatgccgcgataacagatacaaata

SEQ ID NO: 499106 - DNA, 55 bp, Artificial
  Synthetic oligonucleotide
gatgcttcgtgagtaagttccgaaaggtcgtttacaactttaaggattggttcgg

SEQ ID NO: 499107 - DNA, 55 bp, Artificial
  Synthetic oligonucleotide
cttgataatacagttcctcaaacaggtgctgcaaatgttgttacttcggttacac

SEQ ID NO: 499108 - DNA, 55 bp, Artificial
  Synthetic oligonucleotide
ctatcaattgacgaagaatgtaccttccgatacaacgcttgtcgtgttcagaaag

SEQ ID NO: 499109 - DNA, 55 bp, Artificial
  Synthetic oligonucleotide
cggggattgccggaccagattcaattgagggaaaacaagttggcctttgctacgt

SEQ ID NO: 499110 - DNA, 55 bp, Artificial
  Synthetic oligonucleotide
ccttttaccctgcttccgtcaagggtcaaggtgtaataacactcattgctgatgc

SEQ ID NO: 499111 - DNA, 55 bp, Artificial
  Synthetic oligonucleotide
ccttctccgcaggattttgtagacgtttataagccattactcgaagaaggacacg

SEQ ID NO: 499112 - DNA, 55 bp, Artificial
  Synthetic oligonucleotide
cccttcttcacgggtcattgggtccttaggtcgaaaagaatttccatcgcctaca

SEQ ID NO: 499113 - DNA, 55 bp, Artificial
  Synthetic oligonucleotide
cccaacgccaagccattctggtcctgcgtagttcccaattgagcaacctacctga

SEQ ID NO: 499114 - DNA, 55 bp, Artificial
  Synthetic oligonucleotide
cacttaccaacctattgctgcaagctataccgtttactgaaatatacgttgggtt

SEQ ID NO: 499115 - DNA, 55 bp, Artificial
  Synthetic oligonucleotide
caactttatacaacacaagacctgcgctttctaaaatcgtctttgcctcgtcaac

SEQ ID NO: 499116 - DNA, 55 bp, Artificial
  Synthetic oligonucleotide
atgcgtggggcttgtatgagggtcaaattgttgtttggatgcatacgggttcacg

SEQ ID NO: 499117 - DNA, 55 bp, Artificial
  Synthetic oligonucleotide
ataccttcttgaggaccgtttcaatattgagaaagcgcgtgcagatagacttggc

SEQ ID NO: 499118 - DNA, 54 bp, Artificial
  Synthetic oligonucleotide
gtgctgaagccgtagataagcgaaaattgagccacattgttagttcgattaatt

SEQ ID NO: 499119 - DNA, 53 bp, Artificial
  Synthetic oligonucleotide
cactgagacaaagtcatcaacctggacgatattcatttcctcgccaatgttgt

SEQ ID NO: 499120 - DNA, 60 bp, Artificial
  Synthetic oligonucleotide
tgcagcatgtggcacttatttagcctttgctgtctacaaaaacgcccagacgcaggagct

SEQ ID NO: 499121 - DNA, 60 bp, Artificial
  Synthetic oligonucleotide
cccaaactttaggggatttcactagccacagaatgcaagcccagaacctagacttagcta

SEQ ID NO: 499122 - DNA, 60 bp, Artificial; identical to SEQ ID NO: 159835
  Synthetic oligonucleotide

SEQ ID NO: 499123 - DNA, 60 bp, Artificial
  Synthetic oligonucleotide
ctttgcaagagaacgatgacatttgaattttgccccgcagtgcccaatactctagggagt

SEQ ID NO: 499124 - DNA, 60 bp, Artificial
  Synthetic oligonucleotide
tttggagtaccaacgacctaagcgaacttgtttttgtcatgcaaaatgcactttcgcaag

SEQ ID NO: 499125 - DNA, 60 bp, Artificial
  Synthetic oligonucleotide
tatcttgatactattaagaaactatgggcggattagattaaggcttttaaccgcgctgtg

SEQ ID NO: 499126 - DNA, 60 bp, Artificial
  Synthetic oligonucleotide
tatcacctttttgtatatatccttctccgcttttataattgccatctagtccttctgcaa

SEQ ID NO: 499127 - DNA, 60 bp, Artificial
  Synthetic oligonucleotide
ctatttctaccgcgtttttaaagccatagaggcaaagagaagggtaggctatatcttcct

SEQ ID NO: 499128 - DNA, 60 bp, Artificial
  Synthetic oligonucleotide
acccacatgcagactttacccaatgagataaagccactttaccagacaagataaagcgac

SEQ ID NO: 499129 - DNA, 60 bp, Artificial
  Synthetic oligonucleotide
acggagtgcaagccacgaaagcgaagcgtaagcgtagcgaagtggctaagctatgaatgc

SEQ ID NO: 499130 - DNA, 60 bp, Artificial
  Synthetic oligonucleotide
agcattcaaaaacgcttttttaggctttgtccgcgccactgaatttatcggtgatcaaac

SEQ ID NO: 499131 - DNA, 59 bp, Artificial
  Synthetic oligonucleotide
gcaaatgaataaaagtccaagttttgaattgacttatcaagaaccacaagaccctaagg

SEQ ID NO: 499132 - DNA, 59 bp, Artificial
  Synthetic oligonucleotide
cgagcttaaaggaattttagcaaaccaaaacctaaacatcgttcgagaaaccataaatc

SEQ ID NO: 499133 - DNA, 58 bp, Artificial
  Synthetic oligonucleotide
cccttgattcgcttatgcttgtactaatcatacctactattgtaaaatttggtaagcc

SEQ ID NO: 499134 - DNA, 58 bp, Artificial
  Synthetic oligonucleotide
cctgtagttgatgcctatagaatttatgcaagataataaaataagcgggaaattcccg

SEQ ID NO: 499135 - DNA, 57 bp, Artificial
  Synthetic oligonucleotide
ctacaatgttaagggatatgctaaattacgcattaaatgagggtggttacactaacg

SEQ ID NO: 499136 - DNA, 57 bp, Artificial
  Synthetic oligonucleotide
ctattgaagacgctcaagaattatatatcgaaaacgagaacaaaacccaattagccg

SEQ ID NO: 499137 - DNA, 56 bp, Artificial
  Synthetic oligonucleotide
gaaccaactgttttaagattcgatcgttttgcttcatcccacaaaactttacactc

SEQ ID NO: 499138 - DNA, 56 bp, Artificial
  Synthetic oligonucleotide
ccaagtatgcctaatgccatagctattaaacctatgctaatcggaattgatacttc

SEQ ID NO: 499139 - DNA, 55 bp, Artificial
  Synthetic oligonucleotide
gccccgcagtgcccaatactctagggagtttacgaccgccccacaaagtgggaga

SEQ ID NO: 499140 - DNA, 55 bp, Artificial
  Synthetic oligonucleotide
gcccatcacataaagcccgccaaatgtgcctatgatagagactggcacagcaagc

SEQ ID NO: 499141 - DNA, 55 bp, Artificial
  Synthetic oligonucleotide
gccacttaatacagctacagagcccctttctaatttaatcgtatcttcgcagatt

SEQ ID NO: 499142 - DNA, 55 bp, Artificial
  Synthetic oligonucleotide
ttctgcttcaagcatcaaagctgtagtttgtgtaggttgttcttgtgccacgagc

SEQ ID NO: 499143 - DNA, 55 bp, Artificial
  Synthetic oligonucleotide
gcagccccgcttttatcgatgagctcgatgtcaaactgcgttctgttcgcgctta

SEQ ID NO: 499144 - DNA, 55 bp, Artificial
  Synthetic oligonucleotide
gcaccagtccaacttctccattgaggggtttagtgaagcggttgcgtatgaggag

SEQ ID NO: 499145 - DNA, 55 bp, Artificial
  Synthetic oligonucleotide
gcccttgtggaggttttaacacgtatttataccgatgcacacggactgtttacaa

SEQ ID NO: 499146 - DNA, 55 bp, Artificial
  Synthetic oligonucleotide
gccgaagtagatacgggaagagattattacattaaagaaggagctgaaattatcc

SEQ ID NO: 499147 - DNA, 55 bp, Artificial
  Synthetic oligonucleotide
gatttaataggaaacatcgaaattggcgaggattcttctgtttggtttggctgtg

SEQ ID NO: 499148 - DNA, 55 bp, Artificial
  Synthetic oligonucleotide
gatggaaaacttgatgtttcacttcttgcttcaaaactagcaaatggcggtggtc

SEQ ID NO: 499149 - DNA, 55 bp, Artificial
  Synthetic oligonucleotide
gatcactatttaattgcacctgtagtaaaatgagtggattgcctgttgcttctgc

SEQ ID NO: 499150 - DNA, 55 bp, Artificial
  Synthetic oligonucleotide
gagcctatacctgcacttggctcaaatatttctttggtgtgaccatcattattaa

SEQ ID NO: 499151 - DNA, 55 bp, Artificial
  Synthetic oligonucleotide
gagcatctagtcgtctctcactcagccgttggcaatatgtgggagctaagaaacg

SEQ ID NO: 499152 - DNA, 55 bp, Artificial
  Synthetic oligonucleotide
gagatcgaggacgcaaaagccgtcgtaaagagcatcgccgatggatgtcagctag

SEQ ID NO: 499153 - DNA, 55 bp, Artificial
  Synthetic oligonucleotide
ttgacaaagagatgcgagatatcgacgttacgtggctaaaacttggtaggcatct

SEQ ID NO: 499154 - DNA, 55 bp, Artificial
  Synthetic oligonucleotide
gacccagaggtttgggagtatctcaaaaccgagtacttcacatggtgtggcatgg

SEQ ID NO: 499155 - DNA, 55 bp, Artificial
  Synthetic oligonucleotide
gaatgaccaaacagagcctagagagattagccaatcatcttcacttagcgaccca

SEQ ID NO: 499156 - DNA, 55 bp, Artificial
  Synthetic oligonucleotide
gaagtccgccaatagcccttatatagtagtatgggataagcacaactaccgtgtc

SEQ ID NO: 499157 - DNA, 55 bp, Artificial
  Synthetic oligonucleotide
cttgttctagtaaactatctgcaacaggacaagttggacttgtaagtgtcatatc

SEQ ID NO: 499158 - DNA, 55 bp, Artificial
  Synthetic oligonucleotide
cttgtagtttacattcaccagcttggtcacatgtaggacagtcaattgggtgatt

SEQ ID NO: 499159 - DNA, 55 bp, Artificial
  Synthetic oligonucleotide
cttgtagccctttccacctttgccactttcgcttgcatagcaaatactgtttggt

SEQ ID NO: 499160 - DNA, 55 bp, Artificial
  Synthetic oligonucleotide
cttcgtccgggtttgaggcgaagtcgttccaagcgccaaaatactcttggatatc

SEQ ID NO: 499161 - DNA, 55 bp, Artificial
  Synthetic oligonucleotide
tgcccttctaatgaaccataagcatcagctatccatccctcttctgcatcaatag

SEQ ID NO: 499162 - DNA, 55 bp, Artificial
  Synthetic oligonucleotide
tggctaatgataccagcacaatggttaaaatcagctactgcaggactgatagggg

SEQ ID NO: 499163 - DNA, 55 bp, Artificial
  Synthetic oligonucleotide
tccgcatagcttacagggactaatttctctccttgttctctttgagagataggta

SEQ ID NO: 499164 - DNA, 55 bp, Artificial
  Synthetic oligonucleotide
tccgcaaactcatatattcgtggcatcgcaaagtgcattctttcagcttgaaagc

SEQ ID NO: 499165 - DNA, 55 bp, Artificial
  Synthetic oligonucleotide
tcacttgcacaaccaatccctgcatcaacaataactggaacttttactgcatctc

SEQ ID NO: 499166 - DNA, 55 bp, Artificial
  Synthetic oligonucleotide
tatgcttacttggcggaaaatgaaagggatctgatcagccaaagaacaaaagcag

SEQ ID NO: 499167 - DNA, 55 bp, Artificial
  Synthetic oligonucleotide
tgggatttgtcgatgtaacgcaaacgtggagtgaagtagaattagacccctatcg

SEQ ID NO: 499168 - DNA, 55 bp, Artificial
  Synthetic oligonucleotide
tagactttcacatggttgcagctacttctgtggcggcaaatcgtggtgcgatagc

SEQ ID NO: 499169 - DNA, 55 bp, Artificial
  Synthetic oligonucleotide
tacctgtgagtttgacgcatgcagtaagtgttttgtgctgatgacttcagcaaac

SEQ ID NO: 499170 - DNA, 55 bp, Artificial
  Synthetic oligonucleotide
taattgatacaatgcaaggattgactgatactatcacaggagcaactgctaaggc

SEQ ID NO: 499171 - DNA, 55 bp, Artificial
  Synthetic oligonucleotide
gtgagcgaacatagtcctcattaatggtgtacaattcaggtaaggtaatgcggtc

SEQ ID NO: 499172 - DNA, 55 bp, Artificial
  Synthetic oligonucleotide
gtccgtgatgttttatgctctcatcgtagcagccaccatcatcaactggcatcaa

SEQ ID NO: 499173 - DNA, 55 bp, Artificial
  Synthetic oligonucleotide
gtcacaagtgcttgaacttcaaggataattgcacgacttccttccattgttacag

SEQ ID NO: 499174 - DNA, 55 bp, Artificial
  Synthetic oligonucleotide
tgtaacactagatggagaaaatgacttccaaggaacagtaaacgcaagtggagca

SEQ ID NO: 499175 - DNA, 55 bp, Artificial
  Synthetic oligonucleotide
gtactcgtggtgaagaaatctctattccacctgaaatgattgttgagcaggtgcg

SEQ ID NO: 499176 - DNA, 55 bp, Artificial
  Synthetic oligonucleotide
gtaagctgtactccaaggagttgaatctaaacttctaagtaatgttgcaggatgg

SEQ ID NO: 499177 - DNA, 55 bp, Artificial; identical to SEQ ID NO: 160156
  Synthetic oligonucleotide

SEQ ID NO: 499178 - DNA, 55 bp, Artificial
  Synthetic oligonucleotide
gcctgcgaccgctttctcgctcacggctacgtcttcttgctgcccggtgatcgaa

SEQ ID NO: 499179 - DNA, 55 bp, Artificial
  Synthetic oligonucleotide
gctagcaaatagtgtaaatcagcaaattactgaagcaggaagtagtgtagcgagt

SEQ ID NO: 499180 - DNA, 55 bp, Artificial
  Synthetic oligonucleotide
gctctgcaatcaccaattctacacgagggccatagaccacgtaaacagccgcctt

SEQ ID NO: 499181 - DNA, 55 bp, Artificial
  Synthetic oligonucleotide
gctgaggttattgcagttgatagatgggatagttatgatacttcggcaaaagaac

SEQ ID NO: 499182 - DNA, 55 bp, Artificial
  Synthetic oligonucleotide
ggcaaaggccataaatagcaagctagctccgatatagtctcctatcagatcgata

SEQ ID NO: 499183 - DNA, 55 bp, Artificial
  Synthetic oligonucleotide
ggctagcactacagattctatctatgtagataattgctggttcaccctagataga

SEQ ID NO: 499184 - DNA, 55 bp, Artificial
  Synthetic oligonucleotide
ggctagtcttcgccctctctacttcagccttgctttgcagataggtcatctcatt

SEQ ID NO: 499185 - DNA, 55 bp, Artificial
  Synthetic oligonucleotide
ggctccaaatcaaggataccatacaaaatccatcccgcaatcaatggtgtcatga

SEQ ID NO: 499186 - DNA, 55 bp, Artificial
  Synthetic oligonucleotide
gggagttcaaggattagatggtggtggaagcggtggagctttagatatggcaaaa

SEQ ID NO: 499187 - DNA, 55 bp, Artificial
  Synthetic oligonucleotide
gggatgacttggtatcgattagagcagtgagtattagttgcatgtcggcctgaac

SEQ ID NO: 499188 - DNA, 55 bp, Artificial
  Synthetic oligonucleotide
gggcactcccctccccactgccaaaagctctttgatcgttaactctctgcccatg

SEQ ID NO: 499189 - DNA, 55 bp, Artificial
  Synthetic oligonucleotide
gggcggatagcaaagtttgaaggtagttgcgaaaagaatgttgcaggtagggcga

SEQ ID NO: 499190 - DNA, 55 bp, Artificial
  Synthetic oligonucleotide
gggtgggatagatggacgcattggtatagtcctgatattttcgccgccttagctg

SEQ ID NO: 499191 - DNA, 55 bp, Artificial
  Synthetic oligonucleotide
ggtgtcgaaataaactatcactttgtttgcgaaaagctcgtcgtaagcacccttt

SEQ ID NO: 499192 - DNA, 55 bp, Artificial
  Synthetic oligonucleotide
ggttacttgtaggtattagtgcaggagctaacgcatatgtagcaagtcaagtggc

SEQ ID NO: 499193 - DNA, 55 bp, Artificial
  Synthetic oligonucleotide
gtaaagttaaagaagctgttccaaatgcgtaagattcagctcctaacatcgcagc

SEQ ID NO: 499194 - DNA, 55 bp, Artificial
  Synthetic oligonucleotide
catcaacccatgagaaatgtacatctccttgtccccatgtagaacttcctatgaa

SEQ ID NO: 499195 - DNA, 55 bp, Artificial
  Synthetic oligonucleotide
ttgccacctacaccccacgaaacctaacgtttactgccaataatggctcgagtgc

SEQ ID NO: 499196 - DNA, 55 bp, Artificial
  Synthetic oligonucleotide
caggtgcgccttctggtctatcttgtaagatagctctttgaaacatccataacat

SEQ ID NO: 499197 - DNA, 55 bp, Artificial
  Synthetic oligonucleotide
ttgccgcactctttggaggagttcctgttcaagtatcaggaccaactggacctat

SEQ ID NO: 499198 - DNA, 55 bp, Artificial
  Synthetic oligonucleotide
caggatcctcaaagccaagccccgctctaagagcagctgctacgccgtctcctgt

SEQ ID NO: 499199 - DNA, 55 bp, Artificial
  Synthetic oligonucleotide
caggacaaacttccgcccttttaagagcggtaagcgaacttaacggctacgaaaa

SEQ ID NO: 499200 - DNA, 55 bp, Artificial
  Synthetic oligonucleotide
cagctgaacttccgtgataatcattgtctggattgtatggtggaacaaagttccc

SEQ ID NO: 499201 - DNA, 55 bp, Artificial
  Synthetic oligonucleotide
cagcggtggtggtggagtaaaaggacttcaagcaatgagaattatgttccaacac

SEQ ID NO: 499202 - DNA, 55 bp, Artificial
  Synthetic oligonucleotide
cactagccacagaatgcaagcccagaacctagacttagctagccgttacgcccac

SEQ ID NO: 499203 - DNA, 55 bp, Artificial
  Synthetic oligonucleotide
caagctgaaacatcgtgcttttaacgaaaatgttgatgatcgctgctacaacgat

SEQ ID NO: 499204 - DNA, 55 bp, Artificial
  Synthetic oligonucleotide
caagcctccctaaaagtgccctatacgcccattgtgcatgtcaaccgcattcgcc

SEQ ID NO: 499205 - DNA, 55 bp, Artificial
  Synthetic oligonucleotide
caagattggcagatggtagtgaatctcctacaacagatgcatacatagcacaaac

SEQ ID NO: 499206 - DNA, 55 bp, Artificial
  Synthetic oligonucleotide
caacttactgactcgcctaacggcttgagtcttcggaggctagcactacagattc

SEQ ID NO: 499207 - DNA, 55 bp, Artificial
  Synthetic oligonucleotide
atttatcgccctctagctcaaactcagctaatggctcgctatcatcataagctct

SEQ ID NO: 499208 - DNA, 55 bp, Artificial
  Synthetic oligonucleotide
ataactggtagaggtgttagctttgatggcgtttcaagagttacttctcagtacc

SEQ ID NO: 499209 - DNA, 55 bp, Artificial
  Synthetic oligonucleotide
agtgcatgaagaagagggcacctttccaggaggcgttcacttagagatgacaggg

SEQ ID NO: 499210 - DNA, 55 bp, Artificial
  Synthetic oligonucleotide
aggctgataaagcccgtccacgactacggccgcgcttactctaacgatacttgca

SEQ ID NO: 499211 - DNA, 55 bp, Artificial
  Synthetic oligonucleotide
aggatatggtttgcactcagcccttcgcgtagcgtctttatgataggtatgcccc

SEQ ID NO: 499212 - DNA, 55 bp, Artificial; identical to SEQ ID NO: 160283
  Synthetic oligonucleotide

SEQ ID NO: 499213 - DNA, 55 bp, Artificial
  Synthetic oligonucleotide
aatttggcggtatcattttgagttttgggcaaagtcttaaagcctcatttacgct

SEQ ID NO: 499214 - DNA, 55 bp, Artificial
  Synthetic oligonucleotide
aatgagtgcgagcttttgctagccccacttgcgttttgctctgataacgcgctga

SEQ ID NO: 499215 - DNA, 55 bp, Artificial
  Synthetic oligonucleotide
aatcccataaagacgatatgcgcaaattaaataaagagaatgctgctcttcgcac

SEQ ID NO: 499216 - DNA, 55 bp, Artificial
  Synthetic oligonucleotide
aagggtatcgcttatacaggacaaacttccgcccttttaagagcggtaagcgaac

SEQ ID NO: 499217 - DNA, 55 bp, Artificial
  Synthetic oligonucleotide
aaggcggagcttataaattccagcactggctgagtagccgtgggtcttatctttt

SEQ ID NO: 499218 - DNA, 55 bp, Artificial
  Synthetic oligonucleotide
aaatcgagcaagatatatatgcgagtatgggaaatgcagtgttaattccacgcgg

SEQ ID NO: 499219 - DNA, 55 bp, Artificial
  Synthetic oligonucleotide
aaaggtgtagttgatgcccttgaccattcatctccaaagtttgcagttggtggca

SEQ ID NO: 499220 - DNA, 55 bp, Artificial
  Synthetic oligonucleotide
aaagatagcaagtgtcggcacaacagcgattacaaatcctacataacaaagcagc

SEQ ID NO: 499221 - DNA, 55 bp, Artificial
  Synthetic oligonucleotide
aaaccccgccccacgagtgccacccgcattaccacgccatactagtagcccctag

SEQ ID NO: 499222 - DNA, 55 bp, Artificial
  Synthetic oligonucleotide
aaaagttctggtcttagtgtaatacaagaaagggttccgtatggttgctctgagg

SEQ ID NO: 499223 - DNA, 55 bp, Artificial
  Synthetic oligonucleotide
tttgtagctaatggttcctgcaacaatgagtaagtccgcttgtctgggtgaaaag

SEQ ID NO: 499224 - DNA, 55 bp, Artificial
  Synthetic oligonucleotide
ctgttccatgaagttttctatgtgagtccctggtgttttcaagcagagcacttct

SEQ ID NO: 499225 - DNA, 55 bp, Artificial
  Synthetic oligonucleotide
ctggtcgaataacgcaacgcattttcttcggttataaggccgcctcttatggcct

SEQ ID NO: 499226 - DNA, 55 bp, Artificial
  Synthetic oligonucleotide
ctgctacgcaatggtagagaataaacgtggtaggatcgcagctaaacttcgcgta

SEQ ID NO: 499227 - DNA, 55 bp, Artificial
  Synthetic oligonucleotide
ctgatacaggcggtagggacagtaaagaaatgagatttgctttagctttaagtga

SEQ ID NO: 499228 - DNA, 55 bp, Artificial
  Synthetic oligonucleotide
ctgacctgatggggcatacaagcatccaaactacgcgaatttatctacgcagaac

SEQ ID NO: 499229 - DNA, 55 bp, Artificial
  Synthetic oligonucleotide
ctccaaatagtggccaaagtgaataaattccacctttaggatcgatagcaccttg

SEQ ID NO: 499230 - DNA, 55 bp, Artificial
  Synthetic oligonucleotide
ctcatgtgcgttgagatgacgcttgcaggatcaactatcgtgtaaccactaagta

SEQ ID NO: 499231 - DNA, 55 bp, Artificial
  Synthetic oligonucleotide
ctagggtgaaccagcaattatctacatagatagaatctgtagtgccagcctccga

SEQ ID NO: 499232 - DNA, 55 bp, Artificial
  Synthetic oligonucleotide
ctaataagtttggtattactatacctacacccttaccacttcttgtgggagctcc

SEQ ID NO: 499233 - DNA, 55 bp, Artificial
  Synthetic oligonucleotide
cgttagaaatcaagcaagggcttatcaaacggctgccgagcaagaatttgcaagt

SEQ ID NO: 499234 - DNA, 55 bp, Artificial
  Synthetic oligonucleotide
cgtatgcttgaagcaaagcatagtgttattgtctcacatgtgcatcctgatggcg

SEQ ID NO: 499235 - DNA, 55 bp, Artificial
  Synthetic oligonucleotide
cggtgcattcataattgccacatttccagctaagtatgcttccattatgcctgga

SEQ ID NO: 499236 - DNA, 55 bp, Artificial
  Synthetic oligonucleotide
cggtcttggaccacaaggcatgagcggtgcaagctctgtgatgggcgtgcatata

SEQ ID NO: 499237 - DNA, 55 bp, Artificial
  Synthetic oligonucleotide
cggattaaatttattcgtcgcaagtggaataacaggattgagtatggggcaagtt

SEQ ID NO: 499238 - DNA, 55 bp, Artificial
  Synthetic oligonucleotide
cgctcccctagaggccttaaaatgcaatctagggcatatgagcaaggcatggcat

SEQ ID NO: 499239 - DNA, 55 bp, Artificial
  Synthetic oligonucleotide
cattctgtcaatttatgcttacttggcggaaaatgaaagggatctgatcagccaa

SEQ ID NO: 499240 - DNA, 55 bp, Artificial
  Synthetic oligonucleotide
ccactctctgccgtgcgatacgtcgtgcttcacgagcttactcacctgctctatc

SEQ ID NO: 499241 - DNA, 55 bp, Artificial
  Synthetic oligonucleotide
ccatattaatagtacctgatggttctcctgcgccagttgttagaccagtagctcc

SEQ ID NO: 499242 - DNA, 55 bp, Artificial
  Synthetic oligonucleotide
ccatgaaccctcagctaaaccataataccctggtagtgtatcagcaagacaaccc

SEQ ID NO: 499243 - DNA, 55 bp, Artificial
  Synthetic oligonucleotide
ccatgctccaacaaatcaaagcaacctattctttctgtggcatattctgaacgaa

SEQ ID NO: 499244 - DNA, 55 bp, Artificial
  Synthetic oligonucleotide
ccctcctctaacaaccacttcttgcatagctttaataactgctggaaatttatct

SEQ ID NO: 499245 - DNA, 55 bp, Artificial
  Synthetic oligonucleotide
ccctgatgctaatccttgcctttaagtttagcccttttgcgatctcttcaagcct

SEQ ID NO: 499246 - DNA, 55 bp, Artificial
  Synthetic oligonucleotide
ccttgcctaagcgatcaagcaccgccatagagccattttgcgcgatgtagcggtc

SEQ ID NO: 499247 - DNA, 55 bp, Artificial
  Synthetic oligonucleotide
cgaaccacaaccaaatcaaattacaccaccaaaagaagcagaaactatgcaaagc

SEQ ID NO: 499248 - DNA, 55 bp, Artificial
  Synthetic oligonucleotide
cgaactctttgcaacgcgtatcatgcccttaaatgtcggccctccaagtgcaacg

SEQ ID NO: 499249 - DNA, 55 bp, Artificial
  Synthetic oligonucleotide
cgagcgatgcgcaatcagtgagccaatacaccctcgaagttctccgtacaagctc

SEQ ID NO: 499250 - DNA, 55 bp, Artificial
  Synthetic oligonucleotide
cgaggcaatgctgttcccacattgaaaacacctgaaatgcctgaaagtgcggctt

SEQ ID NO: 499251 - DNA, 55 bp, Artificial
  Synthetic oligonucleotide
cgcaaagtccgtgattacaagcataaggaagataaactccttgtcgcaaagctgc

SEQ ID NO: 499252 - DNA, 54 bp, Artificial
  Synthetic oligonucleotide
ttacagcttttgctttgcggcaaatggcctagccatcgtcataggcgctaggct

SEQ ID NO: 499253 - DNA, 54 bp, Artificial
  Synthetic oligonucleotide
acaacagcacaagcggctgaaatattgggcttgtctttgcaaggaatacactat

SEQ ID NO: 499254 - DNA, 54 bp, Artificial
  Synthetic oligonucleotide
cgaaaatgcagcgtaatcaagcgcgttcatatcctctatgtcagcgccagtgct

SEQ ID NO: 499255 - DNA, 54 bp, Artificial
  Synthetic oligonucleotide
catagctgaaacagtttcaccgttttgaagtgctaagtacccaaagcaaacagc

SEQ ID NO: 499256 - DNA, 54 bp, Artificial
  Synthetic oligonucleotide
ggaggcgttaagagcgaaaaggatacgctaagccttagcagacatagtagtgcg

SEQ ID NO: 499257 - DNA, 53 bp, Artificial
  Synthetic oligonucleotide
atttaacgcgtaaaactaagatcaaaggcttaaccagcactagctggtttgcc

SEQ ID NO: 499258 - DNA, 53 bp, Artificial
  Synthetic oligonucleotide
aaaacctctgaatatctccacgcagccaaagagggaaaacccattcatcatct

SEQ ID NO: 499259 - DNA, 52 bp, Artificial
  Synthetic oligonucleotide
tggttatgccactgcacaaagaagtgcatacataggtttaaaggcttctttc

SEQ ID NO: 499260 - DNA, 52 bp, Artificial
  Synthetic oligonucleotide
gcatctgagggtactgggctaatcgctggaggagctgctagacctgttcttg

SEQ ID NO: 499261 - DNA, 52 bp, Artificial
  Synthetic oligonucleotide
ttttgctagcatgctctttggtgcttcgcccttttcatgccacgcttcaagc

SEQ ID NO: 499262 - DNA, 51 bp, Artificial
  Synthetic oligonucleotide
gtatcgcaccaagatgtcaaatgatggaattgtgtaaaccattagaagcac

SEQ ID NO: 499263 - DNA, 51 bp, Artificial
  Synthetic oligonucleotide
cataagggtaagcgcttaaacacaattcaggggctaagacaatactcttat

SEQ ID NO: 499264 - DNA, 51 bp, Artificial
  Synthetic oligonucleotide
ttgtaggacatgtttcccctgcaagcaaccagtaatgagatgcactgtgat

SEQ ID NO: 499265 - DNA, 50 bp, Artificial
  Synthetic oligonucleotide
tatctttgactttttctagtattttttgagcgaattcaaaagttttttta

SEQ ID NO: 499266 - DNA, 50 bp, Artificial; identical to SEQ ID NO: 160651
  Synthetic oligonucleotide

SEQ ID NO: 499267 - DNA, 55 bp, Artificial
  Synthetic oligonucleotide
ttgttgcacgacggggatgaaggtgttcttgtaccaggcatcatccaccaagcct

SEQ ID NO: 499268 - DNA, 55 bp, Artificial
  Synthetic oligonucleotide
gtcgatattgcttcgcttagacggttaacagaacatgccttttcgcttgccgata

SEQ ID NO: 499269 - DNA, 55 bp, Artificial
  Synthetic oligonucleotide
gtcatcgcggctggaacggtcattggcaaccgtgagcagagctgtgtacggggtt

SEQ ID NO: 499270 - DNA, 55 bp, Artificial
  Synthetic oligonucleotide
gtatgggtgaaaggaaatatgataaaccttgcgcacaaatgccgttacatagccg

SEQ ID NO: 499271 - DNA, 55 bp, Artificial
  Synthetic oligonucleotide
ggctggatacgggcgaaatcggaagcggcaggcgggtggtaaagcgggttttggc

SEQ ID NO: 499272 - DNA, 55 bp, Artificial
  Synthetic oligonucleotide
ggagttggatcatggttgtgggctccggttgggaaaggtgcgcattatatggggt

SEQ ID NO: 499273 - DNA, 55 bp, Artificial
  Synthetic oligonucleotide
gcgcaccacgaacgtccccgacagctacacgacctacctcagcaaacacttccgc

SEQ ID NO: 499274 - DNA, 55 bp, Artificial
  Synthetic oligonucleotide
gcgagcttggcagacagctaaatcgtccgcatgacgcccgtgttggcaggacgtc

SEQ ID NO: 499275 - DNA, 55 bp, Artificial
  Synthetic oligonucleotide
cggtctgtattgggtctatatcagcctctattactacggtaatgcgccgttgccg

SEQ ID NO: 499276 - DNA, 55 bp, Artificial
  Synthetic oligonucleotide
cgcgagaagagaaataccgtgaaagacctcattctgtcgggactgaccagcgccc

SEQ ID NO: 499277 - DNA, 55 bp, Artificial
  Synthetic oligonucleotide
cctagtaaccacgccgcttgacgagcccagcactgacgccgcttggcagcttttg

SEQ ID NO: 499278 - DNA, 55 bp, Artificial
  Synthetic oligonucleotide
cccatgcggggagaaccctcagcgagcgggaagacgactgatatagacgttccaa

SEQ ID NO: 499279 - DNA, 54 bp, Artificial
  Synthetic oligonucleotide
ctgtaaattgaaagagttcaagaaggttgccatgagggcggagaagacaggttc

SEQ ID NO: 499280 - DNA, 54 bp, Artificial
  Synthetic oligonucleotide
tggcagggtcgtccagaccaccccgctcacgccgccaagcgccggttttcaaaa

SEQ ID NO: 499281 - DNA, 52 bp, Artificial
  Synthetic oligonucleotide
tgttcctctatgccacttatgttacctacgccttcatgggacgtgactatga

SEQ ID NO: 499282 - DNA, 52 bp, Artificial
  Synthetic oligonucleotide
aaaagaccgctataagacttgcccgtttcctgtgccgcattcgttattgcca

SEQ ID NO: 499283 - DNA, 51 bp, Artificial
  Synthetic oligonucleotide
agtttctgtgttattcaggggatcagtctattgaagtccaggcggtgaggt

SEQ ID NO: 499284 - DNA, 55 bp, Artificial
  Synthetic oligonucleotide
gttcgcacgcaaggcttggtctaagtagtgaattaaggcttggttctcaacgtca

SEQ ID NO: 499285 - DNA, 55 bp, Artificial
  Synthetic oligonucleotide
gttcccgtttgttgcaggagatgccaagctagacgattaaaactgtacacttgta

SEQ ID NO: 499286 - DNA, 55 bp, Artificial
  Synthetic oligonucleotide
gtcgttcagacggatttgaaacctttgcgtgactcgaatcccctctactctagtc

SEQ ID NO: 499287 - DNA, 55 bp, Artificial
  Synthetic oligonucleotide
gtacactttcgaatgttttctcttcttgtggagtcgactctgtttccgcagctgc

SEQ ID NO: 499288 - DNA, 55 bp, Artificial
  Synthetic oligonucleotide
ggtgagccattgccgcaatcggacagtgtggattagttgccgttgcatcgaaccc

SEQ ID NO: 499289 - DNA, 55 bp, Artificial
  Synthetic oligonucleotide
gggtcattagtcggaatatcgcgtcctatctgaatcggaccacttggcgtatcca

SEQ ID NO: 499290 - DNA, 55 bp, Artificial
  Synthetic oligonucleotide
ggggtgcgttatgctgagagagacccattgaacctgtcaagttagtgcttgcgaa

SEQ ID NO: 499291 - DNA, 55 bp, Artificial
  Synthetic oligonucleotide
ggatcaagggagtacgatagttgggcctcaccgtgatgatttaaaattcctagtc

SEQ ID NO: 499292 - DNA, 55 bp, Artificial
  Synthetic oligonucleotide
gcgcctctttcgtcataccaatcttttcaccgactttcatcatccctttattccc

SEQ ID NO: 499293 - DNA, 55 bp, Artificial
  Synthetic oligonucleotide
gccaccaccggggattaagtcacttagttcttgtaaggaagcttcgggatgggct

SEQ ID NO: 499294 - DNA, 55 bp, Artificial
  Synthetic oligonucleotide
gacgttctagtaaactcacaatctcacctgttgttggttgggaactcgttggtaa

SEQ ID NO: 499295 - DNA, 55 bp, Artificial
  Synthetic oligonucleotide
gaacagaatggtcgtccaggaacttacgtcattatccgaaacgaagatgggtccg

SEQ ID NO: 499296 - DNA, 55 bp, Artificial
  Synthetic oligonucleotide
ctcgccatatatcccgcgtaaggtttcatctgtcgcctcagcaacggagccatca

SEQ ID NO: 499297 - DNA, 55 bp, Artificial
  Synthetic oligonucleotide
cgtacgccatcccattagttatcctccagtttgtatctcgtctcgtacagaccgg

SEQ ID NO: 499298 - DNA, 55 bp, Artificial
  Synthetic oligonucleotide
cggtctaacaagtagtccagaagctcttatgaaaatcagaacctctcgcctaaaa

SEQ ID NO: 499299 - DNA, 55 bp, Artificial
  Synthetic oligonucleotide
cgacaaattatattcctttacctcgttggtacgtaaaaggcacgaaaggtacggc

SEQ ID NO: 499300 - DNA, 55 bp, Artificial
  Synthetic oligonucleotide
ccttatcaaaattagtcgggcaagatattcggattggttggatggttggacctag

SEQ ID NO: 499301 - DNA, 55 bp, Artificial
  Synthetic oligonucleotide
ccacagcggacagaatggcttctttcgagtgaaatacctcggcacccggagcaac

SEQ ID NO: 499302 - DNA, 55 bp, Artificial
  Synthetic oligonucleotide
ccaacgttgaatgacgcagctgattatattccagcgaaaacactcggtgaaccgc

SEQ ID NO: 499303 - DNA, 55 bp, Artificial
  Synthetic oligonucleotide
cagtagttgcatcaggaacggatataacaacgattccagtccctactttagaagg

SEQ ID NO: 499304 - DNA, 55 bp, Artificial
  Synthetic oligonucleotide
cacgggctgctaaagacgtttctgcgtgcccagtacaaatatgttctgtgatctc

SEQ ID NO: 499305 - DNA, 55 bp, Artificial
  Synthetic oligonucleotide
acgccgccaacagctaaggaattagctagctggattgaagcttctggtttaccaa

SEQ ID NO: 499306 - DNA, 52 bp, Artificial
  Synthetic oligonucleotide
aggttacgttagtgcaccggtcatttataaggccagtcggatgaatataccg

SEQ ID NO: 499307 - DNA, 51 bp, Artificial
  Synthetic oligonucleotide
gtctcatctctaagactgccgctcataattggacctcgagtcgatccttgc

SEQ ID NO: 499308 - DNA, 50 bp, Artificial
  Synthetic oligonucleotide
acccactaggaatttgaaatgccgttactacagatccgtcttcgccacgc

SEQ ID NO: 499309 - DNA, 55 bp, Artificial
  Synthetic oligonucleotide
tgacggctgccgaagttcgctcgaccggcatggactggacgtttgcgcccaccat

SEQ ID NO: 499310 - DNA, 55 bp, Artificial
  Synthetic oligonucleotide
tcacggtataatcctaacagttcctgactttggttaagggtgcttggccgcaggg

SEQ ID NO: 499311 - DNA, 55 bp, Artificial
  Synthetic oligonucleotide
gtggtgcgacgcttcaatatcaaccgtcatcccggacccctctgtccgccgcaag

SEQ ID NO: 499312 - DNA, 55 bp, Artificial
  Synthetic oligonucleotide
ggggcgacccaagccgatgtgcttagccatatggtatggtaagtatgagcgccga

SEQ ID NO: 499313 - DNA, 55 bp, Artificial
  Synthetic oligonucleotide
ggccaacccgactaaggttcccaagttggcgaagtaggatagtgttgcgtggcgg

SEQ ID NO: 499314 - DNA, 55 bp, Artificial
  Synthetic oligonucleotide
ctgttgagatcgtaaccgtcaacgtcgtcagctatcgcgcctccgtccccggctg

SEQ ID NO: 499315 - DNA, 55 bp, Artificial
  Synthetic oligonucleotide
ctcatccggcgtaagcaggcgattagatagggcgtggcgcttgtagtaccagacg

SEQ ID NO: 499316 - DNA, 55 bp, Artificial
  Synthetic oligonucleotide
ctaccgcataggtcgaggagaaaccccatgcacgatcgtcgaggcctgatcctgt

SEQ ID NO: 499317 - DNA, 55 bp, Artificial
  Synthetic oligonucleotide
cgggtcggcgttacccttgaaatcgcctttcgggaaacggatcagagcacgatag

SEQ ID NO: 499318 - DNA, 55 bp, Artificial
  Synthetic oligonucleotide
cggatgctcagacctgagacacggacgtaggtcatcgtattcctatagatagtgg

SEQ ID NO: 499319 - DNA, 55 bp, Artificial
  Synthetic oligonucleotide
cggaagtgagcccaccaacgcccttcggctagcgccattgactctttaggtcgcg

SEQ ID NO: 499320 - DNA, 55 bp, Artificial
  Synthetic oligonucleotide
cgcgacagggacattgaacgtcctccttcttctctgaagacagtagcctagagcg

SEQ ID NO: 499321 - DNA, 55 bp, Artificial
  Synthetic oligonucleotide
cgcccctctcggctctcggcttctggccattaaccttgaggctgtatgccatgcg

SEQ ID NO: 499322 - DNA, 55 bp, Artificial
  Synthetic oligonucleotide
cattgcgatcctgcaactaaacggtattcgcgtgtcgcataacggccacatattg

SEQ ID NO: 499323 - DNA, 55 bp, Artificial
  Synthetic oligonucleotide
caccggcgtgcgattccttgagaattgcgatggtaacagccaacttgttttccct

SEQ ID NO: 499324 - DNA, 55 bp, Artificial
  Synthetic oligonucleotide
cacaacgaacgaaacactctgataccgtcctcgaaaccggagagtcgcggcatgc

SEQ ID NO: 499325 - DNA, 55 bp, Artificial
  Synthetic oligonucleotide
aacttcgttccgccgcttgacccgtcgttaagccgtgggcgctaggatcgtcccc

SEQ ID NO: 499326 - DNA, 53 bp, Artificial
  Synthetic oligonucleotide
ctcttgttggttcagagtgatacagggcgcgggtaaagaccgagtttcggaga

SEQ ID NO: 499327 - DNA, 53 bp, Artificial
  Synthetic oligonucleotide
ggggatttcttggtgcaaacgccgacggaatatgggtggaggttacggaagtt

SEQ ID NO: 499328 - DNA, 53 bp, Artificial
  Synthetic oligonucleotide
agctgcggctattcgaacctgcccgctctctgtggctatgtaatcgaaaatgt

SEQ ID NO: 499329 - DNA, 52 bp, Artificial
  Synthetic oligonucleotide
ggggaaatacgtaagaccgccgtctacggaccacgctctcaaatggccttct

SEQ ID NO: 499330 - DNA, 52 bp, Artificial
  Synthetic oligonucleotide
agttcccgtgcggaacagttggacaggcggcgcaaactgccagttttagtga

SEQ ID NO: 499331 - DNA, 51 bp, Artificial
  Synthetic oligonucleotide
ctatgctgagcactatctcgacctgatccacgctatcgaagccgtggcatc

SEQ ID NO: 499332 - DNA, 50 bp, Artificial
  Synthetic oligonucleotide
cagcatcgcctcttcaagaaccgacatttgcaggtgatagatgacgcttt

SEQ ID NO: 499333 - DNA, 50 bp, Artificial
  Synthetic oligonucleotide
ttgccatccttttacgggacgaggtcgagttaggtgacgcagatgtggca

SEQ ID NO: 499334 - DNA, 55 bp, Artificial
  Synthetic oligonucleotide
ttgtcaaagtccgagggattcggctccgacgcgtggggtgtcatcccgacacgcg

SEQ ID NO: 499335 - DNA, 55 bp, Artificial
  Synthetic oligonucleotide
tggtcccgggctcttgacgtctgtgactcccctcacctagacatggcgcgacaac

SEQ ID NO: 499336 - DNA, 55 bp, Artificial
  Synthetic oligonucleotide
tctctctgatcggagacaccgatgtccgacgtccctcggggcctgcgcgcctcca

SEQ ID NO: 499337 - DNA, 55 bp, Artificial
  Synthetic oligonucleotide
tcctgtgaaggaaccgaggggttaggttcgcgacggtgcgtgctcgtaccaccga

SEQ ID NO: 499338 - DNA, 55 bp, Artificial
  Synthetic oligonucleotide
gtcgtgcctgcgggctgcgagtgccttcacggatcggtcctcgtctcgcactggt

SEQ ID NO: 499339 - DNA, 55 bp, Artificial
  Synthetic oligonucleotide
gtccaggacggtcgtccgagacacctaccgtgaagagcgtgcgtgccttgcccga

SEQ ID NO: 499340 - DNA, 55 bp, Artificial
  Synthetic oligonucleotide
ggctccaaccgtccacagggtctgttcacgcatcgagcgggtttcggtccctgtg

SEQ ID NO: 499341 - DNA, 55 bp, Artificial
  Synthetic oligonucleotide
ggatcgttccgatgccaagtcgtgaccatcggggcaccgtcagagcgttgtgctc

SEQ ID NO: 499342 - DNA, 55 bp, Artificial
  Synthetic oligonucleotide
gcggggatgttacctgtcggtaagacattctcgtttcgggcaacacatctgtgtt

SEQ ID NO: 499343 - DNA, 55 bp, Artificial
  Synthetic oligonucleotide
ctcctgcgcgtgggtgcctccgcggctctgcagttgtgactccttggtacacccg

SEQ ID NO: 499344 - DNA, 55 bp, Artificial
  Synthetic oligonucleotide
cgaccccacgacctcgtcaggagacagcaatgcccacgaacgacccgcgtcagaa

SEQ ID NO: 499345 - DNA, 55 bp, Artificial
  Synthetic oligonucleotide
ccgagaaggttaggggatgcgcgaatagcgggttcgtcgagggtgcttccgcttg

SEQ ID NO: 499346 - DNA, 55 bp, Artificial
  Synthetic oligonucleotide
atctgtggctctcctgtggccagtgccagtgcaggccgaccctagggaggcgaac

SEQ ID NO: 499347 - DNA, 52 bp, Artificial
  Synthetic oligonucleotide
gttcgtccgacccatcgtagaggggcccgctcgtgaccccggacacagcccg

SEQ ID NO: 499348 - DNA, 52 bp, Artificial
  Synthetic oligonucleotide
agcaccgttcgagtgaaggtccgagacagacaggggagtccgatgcatcgtc

SEQ ID NO: 499349 - DNA, 52 bp, Artificial
  Synthetic oligonucleotide
acgcatgacgacgagcctatgcctttcgagtggaacttctcggggtacgaag

SEQ ID NO: 499350 - DNA, 51 bp, Artificial
  Synthetic oligonucleotide
atgggtctacggtggctccgccgttcaacaccgcgtaggcaagaccatcta

SEQ ID NO: 499351 - DNA, 60 bp, Artificial
  Synthetic oligonucleotide
tttaacaggtatccaaatagaaggtccccgtttactttaatagatcaattcaaagagcgc

SEQ ID NO: 499352 - DNA, 60 bp, Artificial
  Synthetic oligonucleotide
ggtagttgagacgttaagttatccgtcatgcctgtatcataagctgataacatttgcgta

SEQ ID NO: 499353 - DNA, 60 bp, Artificial
  Synthetic oligonucleotide
ggatccttttctagaagctaatagatatgctgttttatacggtattgactggaataaaga

SEQ ID NO: 499354 - DNA, 60 bp, Artificial
  Synthetic oligonucleotide
gcagtctaagtttttttcaaccaaaagtctaccacctaaagttgcaaagtctaccaccta

SEQ ID NO: 499355 - DNA, 60 bp, Artificial
  Synthetic oligonucleotide
gcaactttaggtggtagacttttcgatgaaaaacacttagactccgcaactcttaatgcg

SEQ ID NO: 499356 - DNA, 60 bp, Artificial
  Synthetic oligonucleotide
gaccttttattaatctggtgtcaaccaaacataaaggctttatcatagaaccatgcccta

SEQ ID NO: 499357 - DNA, 60 bp, Artificial
  Synthetic oligonucleotide
gaccttgcaactttaggtggtagaccttgcaactttaggtggtagaccttgcaactttag

SEQ ID NO: 499358 - DNA, 60 bp, Artificial
  Synthetic oligonucleotide
ctaccacctaaagttgcaaagtctaccacctaaagttgcaaagtctaccacctaaagttg

SEQ ID NO: 499359 - DNA, 60 bp, Artificial
  Synthetic oligonucleotide
cctgtgcacgaattaaatcttagcgttgttgaaaacacagaaccatgtctatttttccct

SEQ ID NO: 499360 - DNA, 60 bp, Artificial
  Synthetic oligonucleotide
atcttatgtctagatctataatcatacctgtgacgtatttgggcaataacgctagctttg

SEQ ID NO: 499361 - DNA, 60 bp, Artificial
  Synthetic oligonucleotide
aactttcattatgtctgaatcagaacagcccaggcgtttatattcagttactgctgtagc

SEQ ID NO: 499362 - DNA, 58 bp, Artificial
  Synthetic oligonucleotide
gtgatatataacaagctgctcgcacttgttttgttccttcgcaccaggggacgattct

SEQ ID NO: 499363 - DNA, 56 bp, Artificial
  Synthetic oligonucleotide
cctagatagctgtgataaacatacaacgggtatttgtaactcaacagctaatttcc

SEQ ID NO: 499364 - DNA, 56 bp, Artificial
  Synthetic oligonucleotide
taaaactatagagtcaaccgaaacaacattctcagcatggataagtttagtattct

SEQ ID NO: 499365 - DNA, 55 bp, Artificial
  Synthetic oligonucleotide
ctggtgtcaaccaaacataaaggctttatcatagaaccatgccctatcatagtag

SEQ ID NO: 499366 - DNA, 55 bp, Artificial
  Synthetic oligonucleotide
ccaaaagtctaccacctaaagttgcaaagtctaccacctaaagttgcaaagtcta

SEQ ID NO: 499367 - DNA, 55 bp, Artificial
  Synthetic oligonucleotide
atcatacctgtgacgtatttgggcaataacgctagctttgccattttccccggat

SEQ ID NO: 499368 - DNA, 51 bp, Artificial
  Synthetic oligonucleotide
ccttagcatactatgaactatttatcggtctcccaagcaagaacgaacaac

SEQ ID NO: 499369 - DNA, 51 bp, Artificial
  Synthetic oligonucleotide
ctgtgtattttagacactccaccaagtctgggtacgctaaccgaagaagcg

SEQ ID NO: 499370 - DNA, 50 bp, Artificial
  Synthetic oligonucleotide
ccaaccccctaaaatcttccacaagaacagatgagggaatgatatcaagg

SEQ ID NO: 499371 - DNA, 55 bp, Artificial
  Synthetic oligonucleotide
cggttggctcgccaacgcggcgcacttcaaggttctgggtctcatctttgccagc

SEQ ID NO: 499372 - DNA, 55 bp, Artificial
  Synthetic oligonucleotide
cttcatggtcccgatcacccagggtaatgaatccgtctgattcacagtaatcggg

SEQ ID NO: 499373 - DNA, 55 bp, Artificial
  Synthetic oligonucleotide
gaggacggcttccttccgtacatacatgtagaggaataattcttcgcgcgggagc

SEQ ID NO: 499374 - DNA, 55 bp, Artificial
  Synthetic oligonucleotide
gatacctttgtctgaatgacttggtaccaactgagataggcgggcggatgggcac

SEQ ID NO: 499375 - DNA, 55 bp, Artificial
  Synthetic oligonucleotide
gcccaaccgtgacaacggacggtttcccactcacgctaacgacacggcaggacgt

SEQ ID NO: 499376 - DNA, 55 bp, Artificial
  Synthetic oligonucleotide
gccccaccccggatcagacggcattcttacgacgttggttctgggtttcgtcgtt

SEQ ID NO: 499377 - DNA, 55 bp, Artificial
  Synthetic oligonucleotide
gcggcagatctttaagtctggtcggcgcaacagcggttaaatcccagtgggcggc

SEQ ID NO: 499378 - DNA, 55 bp, Artificial
  Synthetic oligonucleotide
gcgttggtgcagtatggcaacctgtggcaatcgttataaagctgcgcagttcagg

SEQ ID NO: 499379 - DNA, 55 bp, Artificial
  Synthetic oligonucleotide
gctgcatatgataagtaagcacgcgcactaactcaatcgtcgatgcaagctaaac

SEQ ID NO: 499380 - DNA, 55 bp, Artificial
  Synthetic oligonucleotide
ggcactcctagccgctggggcaaccgtgaaactaccatcggggaaccgctctaac

SEQ ID NO: 499381 - DNA, 55 bp, Artificial
  Synthetic oligonucleotide
ggcgcaattaaaatgccgtgcgtaaaggccatattgcactcggccgctttaagcg

SEQ ID NO: 499382 - DNA, 55 bp, Artificial
  Synthetic oligonucleotide
gggcggacactcaaaagcgcccattccaactctgcggaccctatctcagcccgct

SEQ ID NO: 499383 - DNA, 55 bp, Artificial
  Synthetic oligonucleotide
ggtcatgatctccccacggatcgctttggatacgaacatcgttctgcggtacctg

SEQ ID NO: 499384 - DNA, 55 bp, Artificial
  Synthetic oligonucleotide
gtcttttactacgacgacagtatcggttaagtgttgcagggttctgggccaggtg

SEQ ID NO: 499385 - DNA, 55 bp, Artificial
  Synthetic oligonucleotide
gtgtcgtattattcatagccattctaccgatcagcaaatgcgggactggatagcg

SEQ ID NO: 499386 - DNA, 55 bp, Artificial
  Synthetic oligonucleotide
tacgggcggatggccagcacttaacccgaccaggacttttagccgacgcgaagcg

SEQ ID NO: 499387 - DNA, 55 bp, Artificial
  Synthetic oligonucleotide
tagtgtgttttccttatggtgttggcttagtggctattgcacaaagccgatgggg

SEQ ID NO: 499388 - DNA, 55 bp, Artificial
  Synthetic oligonucleotide
tcacgagggtttcgattattttgaactggatcgcgccagcgaattctggaagcag

SEQ ID NO: 499389 - DNA, 55 bp, Artificial
  Synthetic oligonucleotide
tctttggaatggagttgccaaaccgcgcccagagcgagaaacgtcgtttcgtggc

SEQ ID NO: 499390 - DNA, 55 bp, Artificial
  Synthetic oligonucleotide
tggtgcgcttagcacaccttaaggcaataacgggaagcggctggcaaggttactg

SEQ ID NO: 499391 - DNA, 55 bp, Artificial
  Synthetic oligonucleotide
ttgctgagaacatcgccaactccttcgtagatattaactctattccggtagcggc

SEQ ID NO: 499392 - DNA, 55 bp, Artificial
  Synthetic oligonucleotide
aaaataccgaaaagcacaaagctaccaagtggcttacacatttccctcgacaaag

SEQ ID NO: 499393 - DNA, 55 bp, Artificial
  Synthetic oligonucleotide
aactaacaccggagccaccatgcgcgatgacattttagccactgccttaacactg

SEQ ID NO: 499394 - DNA, 55 bp, Artificial
  Synthetic oligonucleotide
aggcttcatggatggagagatcccgcaaagcccatcccgtagtataatgccgagc

SEQ ID NO: 499395 - DNA, 55 bp, Artificial
  Synthetic oligonucleotide
aggggaaacaagtataacgttgcatagagaggtgccagatgagagtaagactgga

SEQ ID NO: 499396 - DNA, 55 bp, Artificial
  Synthetic oligonucleotide
agtgcggattggcactagatcgcgagatgacttgagcgattaagccgaaacggga

SEQ ID NO: 499397 - DNA, 55 bp, Artificial
  Synthetic oligonucleotide
cagcaacgaaattcagttgacgaaatcaggcagtgttgtagccacagtaggcagc

SEQ ID NO: 499398 - DNA, 55 bp, Artificial
  Synthetic oligonucleotide
catcgccaaactgataaacgaaagtgccctcgaaattggttgtcttcagcgcccc

SEQ ID NO: 499399 - DNA, 55 bp, Artificial
  Synthetic oligonucleotide
ccaatgacttgattgaataccggtgtgtcttgagagtctgttctggaggcaagac

SEQ ID NO: 499400 - DNA, 55 bp, Artificial
  Synthetic oligonucleotide
cccgttactcggaggagttggctgatgcggctgttttcagcgctttacacccggg

SEQ ID NO: 499401 - DNA, 55 bp, Artificial
  Synthetic oligonucleotide
ccggcagtatggtttgcagtcagcctctggtcgcagtgagcacattgcctgtcgc

SEQ ID NO: 499402 - DNA, 55 bp, Artificial
  Synthetic oligonucleotide
ccgggtttaaatgctgtggggctaacagcgcagtagggcgaagtaaatagcttgg

SEQ ID NO: 499403 - DNA, 55 bp, Artificial
  Synthetic oligonucleotide
cgacccaatgcagaatagagtgaagccacgtaaccatttgcttttctaggaaacg

SEQ ID NO: 499404 - DNA, 55 bp, Artificial
  Synthetic oligonucleotide
cgaccgatgattttccacggttcgaggactaattccgagttgacgggcaatatcc

SEQ ID NO: 499405 - DNA, 55 bp, Artificial
  Synthetic oligonucleotide
cgcaacccaagcacccgataaaagcgctgggcgtcgaactcacattcaaacgcgc

SEQ ID NO: 499406 - DNA, 55 bp, Artificial
  Synthetic oligonucleotide
cgccgcccatttactgcccggcgccaaccgtgccagatgctaagaacgaaagctg

SEQ ID NO: 499407 - DNA, 55 bp, Artificial
  Synthetic oligonucleotide
cgcgaacctctagcgggtccgatccgtagttctgttgtgtggacttttcttgact

SEQ ID NO: 499408 - DNA, 55 bp, Artificial
  Synthetic oligonucleotide
cgcgcggctgaagcgccacctagccttctggattggcttggctttcctatccctc

SEQ ID NO: 499409 - DNA, 54 bp, Artificial
  Synthetic oligonucleotide
cgcagatgccaccttgtcacgtttagatgtgatccgcggtggttcagccagtac

SEQ ID NO: 499410 - DNA, 54 bp, Artificial
  Synthetic oligonucleotide
acaacgcgaggataagagtcggctggacgaactgatggggcagtcgcaacggac

SEQ ID NO: 499411 - DNA, 54 bp, Artificial
  Synthetic oligonucleotide
tcctgagtctggcagcagggacaatgatattcgggaattttataggcgaacgat

SEQ ID NO: 499412 - DNA, 53 bp, Artificial
  Synthetic oligonucleotide
ctaccgcaaacgccaggggcattacgatagggatagacaccgcgaaaatcccc

SEQ ID NO: 499413 - DNA, 51 bp, Artificial
  Synthetic oligonucleotide
aactattgtccgcccatggtctggcagtgcgctgcgtgcatcttggtctgc

SEQ ID NO: 499414 - DNA, 50 bp, Artificial
  Synthetic oligonucleotide
cgctggatgaacccgcgctgttaaaagcactgggtaatgtggctagctca

SEQ ID NO: 499415 - DNA, 60 bp, Artificial
  Synthetic oligonucleotide
cttagctgctttactgactgcacctgtttatcccccttgtatcccgttacttgtctaatt

SEQ ID NO: 499416 - DNA, 60 bp, Artificial
  Synthetic oligonucleotide
tctcgcaaaaagtgtccgtaaaacttccacttttttcagaaaaaatgagcagataaatct

SEQ ID NO: 499417 - DNA, 60 bp, Artificial
  Synthetic oligonucleotide
agttgttatttttctcaccccctttcgtctgacaatattattatattacttttcgtctga

SEQ ID NO: 499418 - DNA, 60 bp, Artificial
  Synthetic oligonucleotide
cttagcataaaaatgtctaaaactatgagggtgcattttctccttacttattcctgtctt

SEQ ID NO: 499419 - DNA, 60 bp, Artificial
  Synthetic oligonucleotide
ggagcctagtcagtgcctaggttttctctgtcccccaatgtaaacgttcttacataactt

SEQ ID NO: 499420 - DNA, 60 bp, Artificial
  Synthetic oligonucleotide
atactcaatgatttaatcctttaaataaacaccaacaccgcgggaagtcctaccactcga

SEQ ID NO: 499421 - DNA, 60 bp, Artificial
  Synthetic oligonucleotide
tctacacagatagtcgtggggattaaggggacccacagctgtcagtgtagaccttttttc

SEQ ID NO: 499422 - DNA, 60 bp, Artificial
  Synthetic oligonucleotide
atagaaacttttctctaatatcgccccattttatcaccttctttcgttgaaaaagcaagt

SEQ ID NO: 499423 - DNA, 60 bp, Artificial
  Synthetic oligonucleotide
atatcatggactttatagggtaaagcagatacaaggatatggagttttatatcgtattaa

SEQ ID NO: 499424 - DNA, 60 bp, Artificial
  Synthetic oligonucleotide
tctaatagaagcttgtacatgtaccttaattcagggagcatgtccacctcttaatatgca

SEQ ID NO: 499425 - DNA, 60 bp, Artificial
  Synthetic oligonucleotide
atctagcttacaatctaacatttcatacacttgcataagtctatttgtaatttcattatg

SEQ ID NO: 499426 - DNA, 60 bp, Artificial
  Synthetic oligonucleotide
cctttcaggatttataatagttgggctgaaagcatattagatcatgcgaaattcttacag

SEQ ID NO: 499427 - DNA, 60 bp, Artificial
  Synthetic oligonucleotide
tcatattcatatccttaatacttccttttcaaccttaattactccaacaatacttgtact

SEQ ID NO: 499428 - DNA, 60 bp, Artificial
  Synthetic oligonucleotide
tagaaatggaagatggtctgttgaaaaagatacagctggtcatggaggtagaaagtggaa

SEQ ID NO: 499429 - DNA, 60 bp, Artificial
  Synthetic oligonucleotide
taatgccaagaagtgcaacagcagcattagctggtactttctttatcccaggagtaggac

SEQ ID NO: 499430 - DNA, 60 bp, Artificial
  Synthetic oligonucleotide
taaatataaatactctctttcttaggatcattaattgttaagctcaataattctgatatt

SEQ ID NO: 499431 - DNA, 60 bp, Artificial
  Synthetic oligonucleotide
ctccttctactggtttaataccttgtaaaattttatactttcgcttacttgagataaatt

SEQ ID NO: 499432 - DNA, 60 bp, Artificial
  Synthetic oligonucleotide
ggggatatgaaggtgctattaggtcattagaggttacatttaataactatagggataaaa

SEQ ID NO: 499433 - DNA, 60 bp, Artificial
  Synthetic oligonucleotide
cagcaaatttgtcagctaaatcagtatttagaatttcatttatgacaatatcaatatctt

SEQ ID NO: 499434 - DNA, 60 bp, Artificial
  Synthetic oligonucleotide
gtctgctaatagcattaaaaatcccccacaatcttttatcctttcggacattttcacaga

SEQ ID NO: 499435 - DNA, 60 bp, Artificial
  Synthetic oligonucleotide
gtctagaaaaaagaatataagaggtaagacaggaggacctgttaatgagtaagaaaattg

SEQ ID NO: 499436 - DNA, 60 bp, Artificial
  Synthetic oligonucleotide
cattaacattacctaatgtttctggtgaagatttaaggggaacagttaagcatatggcag

SEQ ID NO: 499437 - DNA, 60 bp, Artificial
  Synthetic oligonucleotide
gcatttctcccacgatagctctaaatagtttgctagagtttcattcttgtatagatattg

SEQ ID NO: 499438 - DNA, 60 bp, Artificial
  Synthetic oligonucleotide
cgtagagcctattagagataaaactaagattcaagatgttaaactttatcttaaaggaaa

SEQ ID NO: 499439 - DNA, 60 bp, Artificial
  Synthetic oligonucleotide
ttagcagagccgttcccacctaaaaactaaacggttttttatgttaggataagaaaaggt

SEQ ID NO: 499440 - DNA, 60 bp, Artificial
  Synthetic oligonucleotide
ttatgagtttctaatatagtctttaaaagcttatttactgttctcactttttcattatcc

SEQ ID NO: 499441 - DNA, 60 bp, Artificial
  Synthetic oligonucleotide
cctccagtagacattatcgacgtcgataaaaaatagaatatgcttttcttttagcagagc

SEQ ID NO: 499442 - DNA, 60 bp, Artificial
  Synthetic oligonucleotide
aatcttgaatctaatgccatacttaatgcttgtgatatacctttaattgacaaaggggct

SEQ ID NO: 499443 - DNA, 60 bp, Artificial
  Synthetic oligonucleotide
cttttcattgttctaaatggatttaatgagataaataagtcctctttatctttagagttc

SEQ ID NO: 499444 - DNA, 60 bp, Artificial
  Synthetic oligonucleotide
gctttttatacctcttctaatcccctcggatttgtctatcccttctttttcacaatactt

SEQ ID NO: 499445 - DNA, 60 bp, Artificial
  Synthetic oligonucleotide
cctataattgctaatattggtgaagatgtagcgaaatgtattgatgtagtaccagcttta

SEQ ID NO: 499446 - DNA, 60 bp, Artificial
  Synthetic oligonucleotide
gagatactgttttctgactaatctattattgtataagtattataccatagacgtatataa

SEQ ID NO: 499447 - DNA, 60 bp, Artificial
  Synthetic oligonucleotide
aaaatcactttagtgtgaatatactactgtataggttaaaatctcttagaattgattctg

SEQ ID NO: 499448 - DNA, 60 bp, Artificial
  Synthetic oligonucleotide
accagctttatatgatatagagttcgaacaagtagcaggtaaaaacaataaagctgttac

SEQ ID NO: 499449 - DNA, 60 bp, Artificial
  Synthetic oligonucleotide
tgccacttaaaattataaactagtgtatagaaaaaggcaagtttttttggttcaacccta

SEQ ID NO: 499450 - DNA, 60 bp, Artificial
  Synthetic oligonucleotide
tgatatacaatgtatttaatgtgaaatcaattgaagggagttgttattgtattatgtcag

SEQ ID NO: 499451 - DNA, 60 bp, Artificial
  Synthetic oligonucleotide
tgactttttccataattcaagccatctttctctgttaatataagttttagaagttcgatt

SEQ ID NO: 499452 - DNA, 60 bp, Artificial
  Synthetic oligonucleotide
acggatatcccatctttatttgcttagtcccgacgtctggactaaatatccctccagtag

SEQ ID NO: 499453 - DNA, 60 bp, Artificial
  Synthetic oligonucleotide
acgtatataaattatctacttatttatggactttaaatagcatcataaggtctacacaga

SEQ ID NO: 499454 - DNA, 60 bp, Artificial
  Synthetic oligonucleotide
tgactatgaagatcttgttcaacatggatatttatcagttataaaggcagttaacatgta

SEQ ID NO: 499455 - DNA, 60 bp, Artificial
  Synthetic oligonucleotide
cctacttaggaaagaatccttcaccattggagaatgttcaaggatatacacctataattg

SEQ ID NO: 499456 - DNA, 60 bp, Artificial
  Synthetic oligonucleotide
gctcgtaataacctagcattaaaggtatgtccatattttgtcctaaataaattaagagct

SEQ ID NO: 499457 - DNA, 59 bp, Artificial
  Synthetic oligonucleotide
gcaagtaatgcattaaagcttataagctgtcctatagacatagagccctttaaaacttg

SEQ ID NO: 499458 - DNA, 58 bp, Artificial
  Synthetic oligonucleotide
ctactaaatcccctgttttaataggagtacttatatcaacaataccatctataggcgc

SEQ ID NO: 499459 - DNA, 58 bp, Artificial
  Synthetic oligonucleotide
aagaaaaggtgaaggttagaaaacaacccatatgctttcctttcccttcgccgtatcg

SEQ ID NO: 499460 - DNA, 58 bp, Artificial
  Synthetic oligonucleotide
catatggcagaatgctttgctaagcttataagatatttgagtggaaatgctaagataa

SEQ ID NO: 499461 - DNA, 58 bp, Artificial
  Synthetic oligonucleotide
ttaccctttcacacatatattactcaatacttattgctataagcctttcagtgtttac

SEQ ID NO: 499462 - DNA, 57 bp, Artificial
  Synthetic oligonucleotide
aactttttagtcatagtatcatcatcccctaaaatcaattcatcaagtgtaagggag

SEQ ID NO: 499463 - DNA, 57 bp, Artificial
  Synthetic oligonucleotide
ggggttgtaactaatccaaatacttgtcatatatgttattgtcattcgcctatgagg

SEQ ID NO: 499464 - DNA, 56 bp, Artificial
  Synthetic oligonucleotide
ggacttaagttagatggagctagtaaactgacaataacaagagatgctgctaatac

SEQ ID NO: 499465 - DNA, 56 bp, Artificial
  Synthetic oligonucleotide
gcctaaaggagactaaacaataagctcccccatatagctcttaaaaaaaattgcac

SEQ ID NO: 499466 - DNA, 56 bp, Artificial
  Synthetic oligonucleotide
ctgattctttatcctctaggctcactacaatttcatttctagccttatcttgtacc

SEQ ID NO: 499467 - DNA, 55 bp, Artificial
  Synthetic oligonucleotide
gcctgctcttatattcttccagaatcgtcacactggcggtagagccaatacggct

SEQ ID NO: 499468 - DNA, 55 bp, Artificial
  Synthetic oligonucleotide
gcctgcgggcataatgtacagctggcaaacctgtacggggcagccttgggaattc

SEQ ID NO: 499469 - DNA, 55 bp, Artificial
  Synthetic oligonucleotide
gctgtggatttccacaccctagtcccatatttgattcttttggtgcagattctag

SEQ ID NO: 499470 - DNA, 55 bp, Artificial
  Synthetic oligonucleotide
gccttcagaatctcgaccttggtcgtatactcaaacattgccataatttcacctc

SEQ ID NO: 499471 - DNA, 55 bp, Artificial
  Synthetic oligonucleotide
gcggaacccaaattacgcgaggcatgattagcatgattgagaccgataaagcagg

SEQ ID NO: 499472 - DNA, 55 bp, Artificial
  Synthetic oligonucleotide
gcgggcatggctccagcaaataaacctcgaattacacttttaatttcagttgatg

SEQ ID NO: 499473 - DNA, 55 bp, Artificial
  Synthetic oligonucleotide
gcgtgaagcattaacacgtttagcagctcagggacttgctaagcaaagcccaaac

SEQ ID NO: 499474 - DNA, 55 bp, Artificial
  Synthetic oligonucleotide
gcgtgatatacgggctgattttagctggaggtaagggcagtagactatatcctct

SEQ ID NO: 499475 - DNA, 55 bp, Artificial
  Synthetic oligonucleotide
gccgctgctaaattagctggaccatcatatcctagctccgagctatttctcattg

SEQ ID NO: 499476 - DNA, 55 bp, Artificial
  Synthetic oligonucleotide
gctggctttacaagctgccagcccatattcattcattccatcacatcgtccgaat

SEQ ID NO: 499477 - DNA, 55 bp, Artificial
  Synthetic oligonucleotide
gctgctgtaccaccatggcttcctggataccatgcatttaagatagctgcacatc

SEQ ID NO: 499478 - DNA, 55 bp, Artificial
  Synthetic oligonucleotide
gcccctatatccgttgtcacaaccggcgttccaagagccaggctccgtaaaacct

SEQ ID NO: 499479 - DNA, 55 bp, Artificial
  Synthetic oligonucleotide
gcgcctcttgtcgcgctaatatctgtaagaaattgctggacttgtacaacatcta

SEQ ID NO: 499480 - DNA, 55 bp, Artificial
  Synthetic oligonucleotide
gaccatctggtatgggagacatgagtggtgctcattgtgctgcgctatggcttgg

SEQ ID NO: 499481 - DNA, 55 bp, Artificial
  Synthetic oligonucleotide
gacgatgaatggagggaaaataacgggtaacagcgcttcctatggagcggccgtg

SEQ ID NO: 499482 - DNA, 55 bp, Artificial
  Synthetic oligonucleotide
gactacggttcttttagcaaggaaactcactcagacgagctgaggagtacagttc

SEQ ID NO: 499483 - DNA, 55 bp, Artificial
  Synthetic oligonucleotide
gactcaggtgcccctatagtagagggctttacagccggaaggatagacatttcac

SEQ ID NO: 499484 - DNA, 55 bp, Artificial
  Synthetic oligonucleotide
gagaacccgccgggaaatggaaaccgattcacggtaagtatcagccgggatgata

SEQ ID NO: 499485 - DNA, 55 bp, Artificial
  Synthetic oligonucleotide
gagatgctgcatatatagcggctaatagtaatcctgttatacccaccggtagttg

SEQ ID NO: 499486 - DNA, 55 bp, Artificial
  Synthetic oligonucleotide
gagcactatcatccatatggatatccaggtccaatggtagttaaggttccagttg

SEQ ID NO: 499487 - DNA, 55 bp, Artificial
  Synthetic oligonucleotide
gagccaaggcctgttactacccatgatagtatagacattgtacctacttccgcta

SEQ ID NO: 499488 - DNA, 55 bp, Artificial
  Synthetic oligonucleotide
gagctaggctttctccttgcttatagggccggatgggatgttagtttaggcgcaa

SEQ ID NO: 499489 - DNA, 55 bp, Artificial
  Synthetic oligonucleotide
gagtacatgcagcgccaatttataaccaaaagcatgaactagtacaaccagacgg

SEQ ID NO: 499490 - DNA, 55 bp, Artificial
  Synthetic oligonucleotide
gagtgcagataatgcggaagcagtggatataatgaagtcgactcttagtaatgca

SEQ ID NO: 499491 - DNA, 55 bp, Artificial
  Synthetic oligonucleotide
gataatagtatattccctatcttaaagcacaagcctcccggagtatgtccaggcg

SEQ ID NO: 499492 - DNA, 55 bp, Artificial
  Synthetic oligonucleotide
gataatctgtttgcaggaaacaatccatcagggcctccactgtaacttacgtcac

SEQ ID NO: 499493 - DNA, 55 bp, Artificial
  Synthetic oligonucleotide
gataccacctgctcatagtcggccagttttaccggcttatgtacgattcccttat

SEQ ID NO: 499494 - DNA, 55 bp, Artificial
  Synthetic oligonucleotide
gatcccagtgctctcacttgaagttcgtctgatatgtaattagcatacatcttga

SEQ ID NO: 499495 - DNA, 55 bp, Artificial
  Synthetic oligonucleotide
gatcctctatccatgaaagtttctaaaccatctccaaactctatggccttcatgg

SEQ ID NO: 499496 - DNA, 55 bp, Artificial
  Synthetic oligonucleotide
gatctccaagccttttctatacgctgataagctccatttccctttataggtgttg

SEQ ID NO: 499497 - DNA, 55 bp, Artificial
  Synthetic oligonucleotide
gatgtcacgacagtaatgccatcagcagtagtataagtggtttcggtatttccgc

SEQ ID NO: 499498 - DNA, 55 bp, Artificial
  Synthetic oligonucleotide
gatgtctacagtgctggtgataacggcataataatgaaaggagctgcgtctaatc

SEQ ID NO: 499499 - DNA, 55 bp, Artificial
  Synthetic oligonucleotide
gattatcatccagacaaacaatacctcagattttatagcaaaccaggagggcata

SEQ ID NO: 499500 - DNA, 55 bp, Artificial
  Synthetic oligonucleotide
gcaaagttcctctttagggcaagttattgtcacttccttgctttctcctggctgt

SEQ ID NO: 499501 - DNA, 55 bp, Artificial
  Synthetic oligonucleotide
gcaagacatgattcacattgatgctcccattttggttttccatcgtgcataacta

SEQ ID NO: 499502 - DNA, 55 bp, Artificial
  Synthetic oligonucleotide
gcataccgctataccacggttgcaatggctgctctcagctactattttgcccctg

SEQ ID NO: 499503 - DNA, 55 bp, Artificial
  Synthetic oligonucleotide
gcatgcgcgagattcccagccgttccgaaattttctgctgggtcatgttttctac

SEQ ID NO: 499504 - DNA, 55 bp, Artificial
  Synthetic oligonucleotide
gcccataccttagttcctgttaatgcagcttttggtccagaggttggtgctcccc

SEQ ID NO: 499505 - DNA, 55 bp, Artificial
  Synthetic oligonucleotide
gccccaccgggaacccaaacaatggactcatctaatgcatacagattcttagtga

SEQ ID NO: 499506 - DNA, 55 bp, Artificial
  Synthetic oligonucleotide
gtctccagaacgtaaaccgcgctgaccagtgaaagcagaatcagagcgacggcgc

SEQ ID NO: 499507 - DNA, 55 bp, Artificial
  Synthetic oligonucleotide
gttacgcgtcagctggtacagcctaagctggtgggagacagtatgggactcaatc

SEQ ID NO: 499508 - DNA, 55 bp, Artificial
  Synthetic oligonucleotide
gttatgctaagactagaagctaatccgggagaatcagtaaggctatactggcatg

SEQ ID NO: 499509 - DNA, 55 bp, Artificial
  Synthetic oligonucleotide
gttctgagctgcaggagaaaattgactttgacccggaggccgatatgttctgtgc

SEQ ID NO: 499510 - DNA, 55 bp, Artificial
  Synthetic oligonucleotide
gttgcagaggctgaactgttaggtgttactgttgactctggaacgaagactacag

SEQ ID NO: 499511 - DNA, 55 bp, Artificial
  Synthetic oligonucleotide
gttttccgcaatgctggagaccgtaatatattcaccacatcgataataccgcgcc

SEQ ID NO: 499512 - DNA, 55 bp, Artificial
  Synthetic oligonucleotide
gttttgatagtaggtagtgggtgtgatatcttaagtatacgtagagtggagtcgc

SEQ ID NO: 499513 - DNA, 55 bp, Artificial
  Synthetic oligonucleotide
taagagttacttttgagttaccatctagtttattaatagtttctttggtgttact

SEQ ID NO: 499514 - DNA, 55 bp, Artificial
  Synthetic oligonucleotide
tagaactgatggggtgttccctgtatttgaatcaaaccaaccatttgtacctaag

SEQ ID NO: 499515 - DNA, 55 bp, Artificial
  Synthetic oligonucleotide
tcagtaaatgtgagaaggctcagctaaaatttgaggaggggacatctcatcatac

SEQ ID NO: 499516 - DNA, 55 bp, Artificial
  Synthetic oligonucleotide
tccacgtggatgactacaaacaggacagtattctggggcctcctcagattcatgc

SEQ ID NO: 499517 - DNA, 55 bp, Artificial
  Synthetic oligonucleotide
tcccttcaatcaggtcaaggtcatttctacggcaccccttgtgaggtattgaaaa

SEQ ID NO: 499518 - DNA, 55 bp, Artificial
  Synthetic oligonucleotide
tcctgcataccgggcggcatcaggtgaacaatggggccggaggtaaagatggtcg

SEQ ID NO: 499519 - DNA, 55 bp, Artificial
  Synthetic oligonucleotide
tcctttaccagttccacctatcgatggattgcaagcaagaagtgctattgcatct

SEQ ID NO: 499520 - DNA, 55 bp, Artificial
  Synthetic oligonucleotide
tctacagccaaggttatgcagagtctacaaccacagctaagtaccttgtagatca

SEQ ID NO: 499521 - DNA, 55 bp, Artificial
  Synthetic oligonucleotide
tctcattttgtacaatgcctgtgacctattcaggaatgacagtacttccaaaggc

SEQ ID NO: 499522 - DNA, 55 bp, Artificial
  Synthetic oligonucleotide
tctgcaagagctgctataatccgtcccgcgaagcagactgtaaagaactttgtcc

SEQ ID NO: 499523 - DNA, 55 bp, Artificial
  Synthetic oligonucleotide
tcttcagtcctgcagctacaaggacaaatccataggttaatatccttgcaggctg

SEQ ID NO: 499524 - DNA, 55 bp, Artificial
  Synthetic oligonucleotide
tctttacagtctgcttcgcgggacggattatagcagctcttgcaaagtttaacgc

SEQ ID NO: 499525 - DNA, 55 bp, Artificial
  Synthetic oligonucleotide
tctttcgccctgcattgtgaggataaaccttggacaccagaaacagactgcttct

SEQ ID NO: 499526 - DNA, 55 bp, Artificial
  Synthetic oligonucleotide
tgcccaaatttcctgcgatgatattacctgcattcaccatttgactatagccgcc

SEQ ID NO: 499527 - DNA, 55 bp, Artificial
  Synthetic oligonucleotide
tgctagtagtggagcgctaggaacattaggagcaagtctaggtgcaatatctgca

SEQ ID NO: 499528 - DNA, 55 bp, Artificial
  Synthetic oligonucleotide
tgggagctgctgcatttgtaaccaggatcagagccatccttttaagggatacggg

SEQ ID NO: 499529 - DNA, 55 bp, Artificial
  Synthetic oligonucleotide
tgtgaacaaacctggtgcagccatagatctacttgcgagtcctgctatccctgct

SEQ ID NO: 499530 - DNA, 55 bp, Artificial
  Synthetic oligonucleotide
ttgagcactgccgggagtcaggggttaagattccggaacggatttccgtggtgag

SEQ ID NO: 499531 - DNA, 55 bp, Artificial
  Synthetic oligonucleotide
ttgggaagggcattctaaattacgtgttgaacaattgagagcaaattacggctat

SEQ ID NO: 499532 - DNA, 55 bp, Artificial
  Synthetic oligonucleotide
ttgtgtggtagaattgcagtatggtttaataggaggaatgtatgttagagcggtg

SEQ ID NO: 499533 - DNA, 55 bp, Artificial
  Synthetic oligonucleotide
ttttgtgtaggactcttccagccaaggagcccctctctggccactccatatagcc

SEQ ID NO: 499534 - DNA, 55 bp, Artificial
  Synthetic oligonucleotide
gcttctttccctattggaatttcaagggcagcaaccgaaagaccaaacttatcct

SEQ ID NO: 499535 - DNA, 55 bp, Artificial
  Synthetic oligonucleotide
gcttgcttttgagctgtacccattccagtcaatattccgtgacttatacactgac

SEQ ID NO: 499536 - DNA, 55 bp, Artificial
  Synthetic oligonucleotide
gctttgagcactggagctaacgcttccttaaccatatccccataaggtcctgggc

SEQ ID NO: 499537 - DNA, 55 bp, Artificial
  Synthetic oligonucleotide
ggaaatcatccgggcattccgttccctgtcaatggaggcgtcctccctcagacag

SEQ ID NO: 499538 - DNA, 55 bp, Artificial
  Synthetic oligonucleotide
ggaatacagcaactgcgcttataggtccgtagcttccggttactccgaacatggt

SEQ ID NO: 499539 - DNA, 55 bp, Artificial
  Synthetic oligonucleotide
ggacctaagtacagggagttaataagtagtacggttaaaacaacagagggtacgg

SEQ ID NO: 499540 - DNA, 55 bp, Artificial
  Synthetic oligonucleotide
ggactattctacaggtgaagtgagggcgatagttggcggacgtggacctcatcca

SEQ ID NO: 499541 - DNA, 55 bp, Artificial
  Synthetic oligonucleotide
ggagcagtggatcggcaagaaggaccgtttcccggtcaagggacgttcgctcagc

SEQ ID NO: 499542 - DNA, 55 bp, Artificial
  Synthetic oligonucleotide
ggagttgaaaatgcgtgatatacgggctgattttagctggaggtaagggcagtag

SEQ ID NO: 499543 - DNA, 55 bp, Artificial
  Synthetic oligonucleotide
ggcagttccgtttgctatctcccatgctgttttagtctgatttatcggaagcttc

SEQ ID NO: 499544 - DNA, 55 bp, Artificial
  Synthetic oligonucleotide
ggcccatgttaccttttgcccgctgaccgcagcgccgatgatatatgccgcggtg

SEQ ID NO: 499545 - DNA, 55 bp, Artificial
  Synthetic oligonucleotide
ggcgcataatattacaatcgttgcacctagagaacagaaaagtgcttcaagccat

SEQ ID NO: 499546 - DNA, 55 bp, Artificial
  Synthetic oligonucleotide
gggaacggtaatattgcagggtcagcaacggcatatctagatgtttctgcagacg

SEQ ID NO: 499547 - DNA, 55 bp, Artificial
  Synthetic oligonucleotide
gggatggccgtaagagttgcctttcccgcactggattaccacccaggagggagac

SEQ ID NO: 499548 - DNA, 55 bp, Artificial
  Synthetic oligonucleotide
ggggagtatccttacaagaccatattgcagaagacggtctgtgagagcatggcct

SEQ ID NO: 499549 - DNA, 55 bp, Artificial
  Synthetic oligonucleotide
gggtaaccctatagtaccatcagcacagtgtagcttaaccttcctgttcggtatg

SEQ ID NO: 499550 - DNA, 55 bp, Artificial
  Synthetic oligonucleotide
gggttccaacttgctacaataaagctggtactgcccatccctctcatatacagtc

SEQ ID NO: 499551 - DNA, 55 bp, Artificial
  Synthetic oligonucleotide
ggtcctattaatccaattgctattggcgctgcaatcaatactataatcgctggtt

SEQ ID NO: 499552 - DNA, 55 bp, Artificial
  Synthetic oligonucleotide
ggtgatgctgtttctaagctgcaaggagctaaagtggacacaaactcccttgata

SEQ ID NO: 499553 - DNA, 55 bp, Artificial
  Synthetic oligonucleotide
gtacaaagccatctgcgaccaatccggaattcagggcaacgcctatggaggcacc

SEQ ID NO: 499554 - DNA, 55 bp, Artificial
  Synthetic oligonucleotide
gtaggtatgtatcctgttgccacttagggatatcaagtccacttagtgagatgtt

SEQ ID NO: 499555 - DNA, 55 bp, Artificial
  Synthetic oligonucleotide
gtatataatagggacagtcgggccgaatgtaaaagatagaacagtacttaagagc

SEQ ID NO: 499556 - DNA, 55 bp, Artificial
  Synthetic oligonucleotide
gtatccccaacgccccttaatactgcaaacagtgaattgtttattccctggaata

SEQ ID NO: 499557 - DNA, 55 bp, Artificial
  Synthetic oligonucleotide
gtccacttccatcaagtttactaacccactctggttttgtaactccagccatgtc

SEQ ID NO: 499558 - DNA, 55 bp, Artificial
  Synthetic oligonucleotide
gtccattgctgttgtgcgtgaagcattaacacgtttagcagctcagggactagct

SEQ ID NO: 499559 - DNA, 55 bp, Artificial
  Synthetic oligonucleotide
gtccctcatctgctgcattaaagattagtattccaccacctttagtccaagcctc

SEQ ID NO: 499560 - DNA, 55 bp, Artificial
  Synthetic oligonucleotide
gtcctctagcacacggaattctacagtatatgggtcagaccatttacccagagtg

SEQ ID NO: 499561 - DNA, 55 bp, Artificial
  Synthetic oligonucleotide
gtctagcgagaagaattcttggtgcatctgttagggaacaaacggtagcatgttt

SEQ ID NO: 499562 - DNA, 55 bp, Artificial
  Synthetic oligonucleotide
cagctactgcaaatgccccatcacttgctggactcacattatcactgcttgagtc

SEQ ID NO: 499563 - DNA, 55 bp, Artificial
  Synthetic oligonucleotide
cagctgcccacaaatcaaaatctataccaccaagttcctcataacgtccaaccgc

SEQ ID NO: 499564 - DNA, 55 bp, Artificial
  Synthetic oligonucleotide
cagggtgggtcaagagtaagtacgtcagcagggataccagttgtgttacagacgg

SEQ ID NO: 499565 - DNA, 55 bp, Artificial
  Synthetic oligonucleotide
caggtacgggccggattacgggctttatattgaatccagggtaggatacggaacc

SEQ ID NO: 499566 - DNA, 55 bp, Artificial
  Synthetic oligonucleotide
caggtccaaaccttagggcttctggcattgatctagatttaaggcgtgatgttcc

SEQ ID NO: 499567 - DNA, 55 bp, Artificial
  Synthetic oligonucleotide
caggttggtgttcagggtcacatagcgcatgatggcggaaggagcggtaacgacc

SEQ ID NO: 499568 - DNA, 55 bp, Artificial
  Synthetic oligonucleotide
cagtctgtcgcacgggctttgaagcaccaatccccttccgaccttattcggcacc

SEQ ID NO: 499569 - DNA, 55 bp, Artificial
  Synthetic oligonucleotide
catacattggatattcagatgctactccagaatctcgtggctttgcctatgcaga

SEQ ID NO: 499570 - DNA, 55 bp, Artificial
  Synthetic oligonucleotide
catagctttgtgctcgtctccgggatataaatcgccaaaggaggtgcggaccggg

SEQ ID NO: 499571 - DNA, 55 bp, Artificial
  Synthetic oligonucleotide
catatgttttaggagagcacggtgatagtgaagttgtaagctggagcacatcaag

SEQ ID NO: 499572 - DNA, 55 bp, Artificial
  Synthetic oligonucleotide
catcgccaggtgatccattgtcgggtataatatcaacacagcctggtataacacc

SEQ ID NO: 499573 - DNA, 55 bp, Artificial
  Synthetic oligonucleotide
catggggcataattatgttccgcatatgacggtcggaaaagtatcttctacggag

SEQ ID NO: 499574 - DNA, 55 bp, Artificial
  Synthetic oligonucleotide
ccaaacgcaccttatttgcattaggcgcccataatatgaacttcgcactactctt

SEQ ID NO: 499575 - DNA, 55 bp, Artificial
  Synthetic oligonucleotide
ccaaagcagactattccagattcatgaatgtaacggcatccctggctttaaaact

SEQ ID NO: 499576 - DNA, 55 bp, Artificial
  Synthetic oligonucleotide
ccaagcaacaccgttaactccaggggtacttcctgtgatcataggtttgccaaga

SEQ ID NO: 499577 - DNA, 55 bp, Artificial
  Synthetic oligonucleotide
ccaatggaattaggcatattgtcagatgaaggctctggtgagataaatccttacc

SEQ ID NO: 499578 - DNA, 55 bp, Artificial
  Synthetic oligonucleotide
ccacatatcctgaaagcacgctaaccataacggaagctacgaatgtaattagcat

SEQ ID NO: 499579 - DNA, 55 bp, Artificial
  Synthetic oligonucleotide
ccacgagagctgaagcttcggatgtagctaatgctatacatgatggtagcgatgc

SEQ ID NO: 499580 - DNA, 55 bp, Artificial
  Synthetic oligonucleotide
ccactagggctatctttaaaccaagcctcataggctttctcagcacttctcgttg

SEQ ID NO: 499581 - DNA, 55 bp, Artificial
  Synthetic oligonucleotide
ccagacctataacaatatgaaatgggactttgcggaggatgaagcactaagggat

SEQ ID NO: 499582 - DNA, 55 bp, Artificial
  Synthetic oligonucleotide
ccagagtggggaaagccatggggaagtccaccatatggagatgatcctagggatc

SEQ ID NO: 499583 - DNA, 55 bp, Artificial
  Synthetic oligonucleotide
ccatgggagatctggatcttgcgtttctcacattaacggacaaggacaggagcga

SEQ ID NO: 499584 - DNA, 55 bp, Artificial
  Synthetic oligonucleotide
cccagcatgaatcaagttttacttaatagaggtaggatgtgacggaataccccgt

SEQ ID NO: 499585 - DNA, 55 bp, Artificial
  Synthetic oligonucleotide
cccatggctgcctcatcccataagacagatggggtggtttatttcaaagggtgag

SEQ ID NO: 499586 - DNA, 55 bp, Artificial
  Synthetic oligonucleotide
ccccagggctgtcccgccttccatacccggatagtatcccatgagaatggacgcc

SEQ ID NO: 499587 - DNA, 55 bp, Artificial
  Synthetic oligonucleotide
cccgcatgtcgcacgcttcaggcggatatccccgaaggatccccagataattgtc

SEQ ID NO: 499588 - DNA, 55 bp, Artificial
  Synthetic oligonucleotide
ccctcctcatcaggctcactcacggtaacaacctttgtgtctgatgaagtaacag

SEQ ID NO: 499589 - DNA, 55 bp, Artificial
  Synthetic oligonucleotide
aaaatgtccgtctctagtgtatgctacttcattatttcccctttgacgtaccata

SEQ ID NO: 499590 - DNA, 55 bp, Artificial
  Synthetic oligonucleotide
aaccacctctgagtgactctaatacagtccggtagactccgttacaagtctagta

SEQ ID NO: 499591 - DNA, 55 bp, Artificial
  Synthetic oligonucleotide
aagaaattccgttctgctccatatattcgttcagccccttcaaaatatgcagggg

SEQ ID NO: 499592 - DNA, 55 bp, Artificial
  Synthetic oligonucleotide
aagcccaagagcaactttggattggattagaggatctcaggcaatggcttattgt

SEQ ID NO: 499593 - DNA, 55 bp, Artificial
  Synthetic oligonucleotide
acaccaagtgctaaagctccttcataaaatgaatacggtacagccctaaatgcct

SEQ ID NO: 499594 - DNA, 55 bp, Artificial
  Synthetic oligonucleotide
acatgtctgtctggtcagccaacgcatgtttgatccatgccgcattctccataac

SEQ ID NO: 499595 - DNA, 55 bp, Artificial
  Synthetic oligonucleotide
acctcagcatcagtaactccccaaatacttacaagcttactgtttacatcataga

SEQ ID NO: 499596 - DNA, 55 bp, Artificial
  Synthetic oligonucleotide
acctggtgggtaactcgagcatttaatcttaatagagcttccatagtttggtctg

SEQ ID NO: 499597 - DNA, 55 bp, Artificial
  Synthetic oligonucleotide
acgcaggatgggaactatcaagtgacttcgcaggactaggacttgtagcagaaca

SEQ ID NO: 499598 - DNA, 55 bp, Artificial
  Synthetic oligonucleotide
actacggagtcagtaccaattatgatcaggccgactcccgctttcaagtggcgat

SEQ ID NO: 499599 - DNA, 55 bp, Artificial
  Synthetic oligonucleotide
agcaggtaatgaggtccgaaacacaggagcatatagagaagatttattccggctc

SEQ ID NO: 499600 - DNA, 55 bp, Artificial
  Synthetic oligonucleotide
agccttcgcaagttctacagaatcctcataggttttcataaatgctccacttccg

SEQ ID NO: 499601 - DNA, 55 bp, Artificial
  Synthetic oligonucleotide
atactcatccgcagccgtatcttccctttgcttatcttgctttgcggtcaccagg

SEQ ID NO: 499602 - DNA, 55 bp, Artificial
  Synthetic oligonucleotide
atatggtttatgtctagactgcgcagcaacatcatctcaatgttaagagagcgtg

SEQ ID NO: 499603 - DNA, 55 bp, Artificial
  Synthetic oligonucleotide
attggacggaatgacggtagagataattgcagatggctgtcacctgccgccggag

SEQ ID NO: 499604 - DNA, 55 bp, Artificial
  Synthetic oligonucleotide
caaatctttgtgacacctttgaggccttcaacggaataaatatgtgtacattgtc

SEQ ID NO: 499605 - DNA, 55 bp, Artificial
  Synthetic oligonucleotide
caacaggaaaggtgaaggcctttaagctgttaaacgttgcaggggcatactggag

SEQ ID NO: 499606 - DNA, 55 bp, Artificial
  Synthetic oligonucleotide
caagcaccgtgttcagcatcaactctagcttgtaaattagttttagtatcggcta

SEQ ID NO: 499607 - DNA, 55 bp, Artificial
  Synthetic oligonucleotide
caatcacctaatccataactttcgattaaaccacattgtaaaaatccctttaatg

SEQ ID NO: 499608 - DNA, 55 bp, Artificial
  Synthetic oligonucleotide
cacaccgaagcccgatgcacagtctattacacagctggtaaagcacagcggccgc

SEQ ID NO: 499609 - DNA, 55 bp, Artificial
  Synthetic oligonucleotide
cacacggacttccttggaaactatcccggacttaaaagccttagcctgtccgaca

SEQ ID NO: 499610 - DNA, 55 bp, Artificial
  Synthetic oligonucleotide
cacgtccgcttttagaatatcctgcttatccagagtataaaggaagcggagatgt

SEQ ID NO: 499611 - DNA, 55 bp, Artificial
  Synthetic oligonucleotide
cagacaaaccgtatttgctgtcggatctgatgaaaacagacctgtgttgaccgga

SEQ ID NO: 499612 - DNA, 55 bp, Artificial
  Synthetic oligonucleotide
cagactggtctgacagctgtctgtggaggcggttgacgaagaaatagccactgga

SEQ ID NO: 499613 - DNA, 55 bp, Artificial
  Synthetic oligonucleotide
cagatccaacagttgatgagggaatggttgctaaaatatcaagatccttctcaca

SEQ ID NO: 499614 - DNA, 55 bp, Artificial
  Synthetic oligonucleotide
cagatgctatcgctgcctcacgcatttgacttgtaatttccagaactaattttga

SEQ ID NO: 499615 - DNA, 55 bp, Artificial
  Synthetic oligonucleotide
cagatggtgtgaaggtatttgggtattctccatggagtgcaattgatcttgtttc

SEQ ID NO: 499616 - DNA, 55 bp, Artificial
  Synthetic oligonucleotide
cagccatgttcacctgatagtgggttccccagccctgagttgtgaaatgtcccag

SEQ ID NO: 499617 - DNA, 55 bp, Artificial
  Synthetic oligonucleotide
cgcctagaactgctgcaacgaatgccttaagtccaggcatagcacccatgtaagg

SEQ ID NO: 499618 - DNA, 55 bp, Artificial
  Synthetic oligonucleotide
cgctaaaactggagttgacatcatatcggttggagcgcttactcactcggttaag

SEQ ID NO: 499619 - DNA, 55 bp, Artificial
  Synthetic oligonucleotide
cgggaacatgcagaaatggttacaagctcccatttagaaccttccagcgaaaatt

SEQ ID NO: 499620 - DNA, 55 bp, Artificial
  Synthetic oligonucleotide
cgggcagcccgattccggcagggaaagccttccattgagtgggatgtaagctttt

SEQ ID NO: 499621 - DNA, 55 bp, Artificial
  Synthetic oligonucleotide
cgtcaaatctttgaagtcttgccttttgcttagtagttctggctttagcaccacg

SEQ ID NO: 499622 - DNA, 55 bp, Artificial
  Synthetic oligonucleotide
cgtcgtgatggaataattgaagtaagattgcacaccaacggaggaccatatgaac

SEQ ID NO: 499623 - DNA, 55 bp, Artificial
  Synthetic oligonucleotide
ctaaagttgtagtcaaaggattagcatgtccatcagtaggacaccagcttgcacc

SEQ ID NO: 499624 - DNA, 55 bp, Artificial
  Synthetic oligonucleotide
cttgcaggagttaaccctgacatacttaagagacgtccaaagcctgctagcagtc

SEQ ID NO: 499625 - DNA, 55 bp, Artificial
  Synthetic oligonucleotide
ctaattcagtttgactctgtgcattaatagaaatctgcgctactccagaggccac

SEQ ID NO: 499626 - DNA, 55 bp, Artificial
  Synthetic oligonucleotide
cttagtgcccctaccatacctagtgaaagaactacattagaggtaactgccataa

SEQ ID NO: 499627 - DNA, 55 bp, Artificial
  Synthetic oligonucleotide
ctagcataccttttgtaacatatggacatgtaccatgtagtgcaccatcaacctg

SEQ ID NO: 499628 - DNA, 55 bp, Artificial
  Synthetic oligonucleotide
ctaggcacttaactccacgttcccctaatgccgtgataagataaaatgctggctt

SEQ ID NO: 499629 - DNA, 55 bp, Artificial
  Synthetic oligonucleotide
ctatgtactcttcactgtatgagctaataacaaccgcatacgcattattcggaac

SEQ ID NO: 499630 - DNA, 55 bp, Artificial
  Synthetic oligonucleotide
ctatgttcataaccctcctgtctgtctctgattgtgtccgacttatatacccgga

SEQ ID NO: 499631 - DNA, 55 bp, Artificial
  Synthetic oligonucleotide
ctggtggatttacagtgttgataatagcttcgaaaagtggtcccataccttgtga

SEQ ID NO: 499632 - DNA, 55 bp, Artificial
  Synthetic oligonucleotide
ctcctattgcatagaatgcaacgtgtcccattgaaagctgtcctgcaaatcctag

SEQ ID NO: 499633 - DNA, 55 bp, Artificial
  Synthetic oligonucleotide
ctcctcagctcgtctgagtgagtttccttgctaaaagaaccgtactcccaaactc

SEQ ID NO: 499634 - DNA, 55 bp, Artificial
  Synthetic oligonucleotide
ctctgctggggttggtggaatattgtacgaagatatggggctaaacaaacctgct

SEQ ID NO: 499635 - DNA, 55 bp, Artificial
  Synthetic oligonucleotide
ctgagtcttccatggactattcttctcacccttatactgacagcagccctgtgtc

SEQ ID NO: 499636 - DNA, 55 bp, Artificial
  Synthetic oligonucleotide
ctgggtgctgatcgctcgctcataagaggtcatggcgcaccggctgtttggctgg

SEQ ID NO: 499637 - DNA, 55 bp, Artificial
  Synthetic oligonucleotide
ctgcccacatggggattacgaataatacaaccccgataagattggcaaattcccc

SEQ ID NO: 499638 - DNA, 55 bp, Artificial
  Synthetic oligonucleotide
ctgcttccaacggtagatgttgttgcattatcacttccttccactaaagagacct

SEQ ID NO: 499639 - DNA, 55 bp, Artificial
  Synthetic oligonucleotide
ctgcgtagccgaaaataccgggttagaataggacgaatcaactgaatttatggta

SEQ ID NO: 499640 - DNA, 55 bp, Artificial
  Synthetic oligonucleotide
gacagcggcactatccggacttaactcatcaatgtacagtgcttcaaggatgctg

SEQ ID NO: 499641 - DNA, 55 bp, Artificial
  Synthetic oligonucleotide
ccgaggagattggaagggatattgatatagaagtggatggggacataacccctga

SEQ ID NO: 499642 - DNA, 55 bp, Artificial
  Synthetic oligonucleotide
ccgcctgtggcagaatcccgatatataaaggacaccgtatatccattccgcttta

SEQ ID NO: 499643 - DNA, 55 bp, Artificial
  Synthetic oligonucleotide
gacaaaataggcaaggctatagcagagggtattttaggacacagcatttctagta

SEQ ID NO: 499644 - DNA, 55 bp, Artificial
  Synthetic oligonucleotide
ccgcttgctccatctgaatagaaggcacatacagtaaatgcggtgaaggacagac

SEQ ID NO: 499645 - DNA, 55 bp, Artificial
  Synthetic oligonucleotide
gaagattgagggactttataaggttatcgttaatagagaatccgatgatgagggg

SEQ ID NO: 499646 - DNA, 55 bp, Artificial
  Synthetic oligonucleotide
cctaagatggcagataatgcaatgggaccaatgggaggtttgtttgcttgtgacc

SEQ ID NO: 499647 - DNA, 55 bp, Artificial
  Synthetic oligonucleotide
cctacgaaacgcacgtacagaatataggttggcaagattgggtttacgatgggaa

SEQ ID NO: 499648 - DNA, 55 bp, Artificial
  Synthetic oligonucleotide
cctcatgtcaggtgaagccagcatttgtgctacctcaacaaaggcccttccaccg

SEQ ID NO: 499649 - DNA, 55 bp, Artificial
  Synthetic oligonucleotide
cctctgaaccggtaccagcagttgtaggaatagctactgaaatcgcctttgtacc

SEQ ID NO: 499650 - DNA, 55 bp, Artificial
  Synthetic oligonucleotide
cctggtggatacttaccgtttatcgctctattatacaaaggagcagtcccttcca

SEQ ID NO: 499651 - DNA, 55 bp, Artificial
  Synthetic oligonucleotide
ccttagttatatcaggaaatcatgacaatccggatagattagttgcagcagggcc

SEQ ID NO: 499652 - DNA, 55 bp, Artificial
  Synthetic oligonucleotide
gaaacagcatcaccttttgaaagttcaacttgagtatgttctcttgctggtccta

SEQ ID NO: 499653 - DNA, 55 bp, Artificial
  Synthetic oligonucleotide
ccttatggccagaagaggagtagagcttaatgcggtctactatcattcaccacca

SEQ ID NO: 499654 - DNA, 55 bp, Artificial
  Synthetic oligonucleotide
ccttgtatttctcgctattacatgaggtctgcatggctctatgaacttactattg

SEQ ID NO: 499655 - DNA, 55 bp, Artificial
  Synthetic oligonucleotide
cctttagcagtaaatccaagctcctctgcagccttaattactccaagagcgctgg

SEQ ID NO: 499656 - DNA, 55 bp, Artificial
  Synthetic oligonucleotide
cttgtggttatgggagtgaagacggtgccctttacggagtctcactttgggttgc

SEQ ID NO: 499657 - DNA, 55 bp, Artificial
  Synthetic oligonucleotide
cgatgagcgtgtttatgcagatttacagcaaatgatgaatgatgccagggcagct

SEQ ID NO: 499658 - DNA, 55 bp, Artificial
  Synthetic oligonucleotide
cgatgggtggatgagatgtcgtccggacagtggcagccccacaaagccagacagg

SEQ ID NO: 499659 - DNA, 55 bp, Artificial
  Synthetic oligonucleotide
cgccaatttctcacgggcggtattcagcttttcaccgctcttttccatacggagc

SEQ ID NO: 499660 - DNA, 55 bp, Artificial
  Synthetic oligonucleotide
cttgtaggccttacaacctctccttcatgcattacataacttaagcatccttcat

SEQ ID NO: 499661 - DNA, 55 bp, Artificial
  Synthetic oligonucleotide
cttgtagaaagacagttcctagctgcggatgattggcactttgggtctgctatat

SEQ ID NO: 499662 - DNA, 54 bp, Artificial
  Synthetic oligonucleotide
tgaggataacctaccaataatccctccacgagtgtccaccacgaataattatag

SEQ ID NO: 499663 - DNA, 54 bp, Artificial
  Synthetic oligonucleotide
ttccagcctggggtatgatgtgacgccaagatgggacgagccgagagcggatat

SEQ ID NO: 499664 - DNA, 54 bp, Artificial
  Synthetic oligonucleotide
tttagctgcaggattgacactagctgatatcaatgttccttctccatatgctgc

SEQ ID NO: 499665 - DNA, 54 bp, Artificial
  Synthetic oligonucleotide
ccggatttcctgtggctacactaagtatgggaaaaggtgttttcaatgaagcac

SEQ ID NO: 499666 - DNA, 54 bp, Artificial
  Synthetic oligonucleotide
gtacaaacaaaagttagccaacttggtatgccttcatttgaacgtgctgacgaa

SEQ ID NO: 499667 - DNA, 54 bp, Artificial
  Synthetic oligonucleotide
gccttatcaacatctgcccagtaaacaaggtttggtcttggttcagcaaccttc

SEQ ID NO: 499668 - DNA, 54 bp, Artificial
  Synthetic oligonucleotide
ggcagcaccgaattctgccatcataagagcgaatggaacgaagaatgttatagc

SEQ ID NO: 499669 - DNA, 54 bp, Artificial
  Synthetic oligonucleotide
ccctctgcaagtccatggaagaatacatcactgcccatacggcttacgtcaccg

SEQ ID NO: 499670 - DNA, 53 bp, Artificial
  Synthetic oligonucleotide
acaactggatacttcactaaacatggcgacagcgcagtagatatatttccaat

SEQ ID NO: 499671 - DNA, 53 bp, Artificial
  Synthetic oligonucleotide
cgttcatagacatacctagaggaacgcccgttttcacacagggtttattataa

SEQ ID NO: 499672 - DNA, 53 bp, Artificial
  Synthetic oligonucleotide
gtggcagcaggatgagttaagtttgcggcttaggtctagcaggctttcccatt

SEQ ID NO: 499673 - DNA, 53 bp, Artificial
  Synthetic oligonucleotide
actacagacgcttaccatattacttcgccagactaccatggcgcggcacgggc

SEQ ID NO: 499674 - DNA, 53 bp, Artificial
  Synthetic oligonucleotide
gcatacttgcatacaacgaggaagtacagcggatccttcaattagagctaacc

SEQ ID NO: 499675 - DNA, 53 bp, Artificial
  Synthetic oligonucleotide
aaagggcccgtgcgtgatcgtgggacggtgcggtgattatgtgctgcgcaatt

SEQ ID NO: 499676 - DNA, 53 bp, Artificial
  Synthetic oligonucleotide
ggagaggctcagatttggttaccttcatagtttgtatggaaattggcaaggtg

SEQ ID NO: 499677 - DNA, 53 bp, Artificial
  Synthetic oligonucleotide
atacatcgggatttccacccaggcaacatattacgggcacattctggactatg

SEQ ID NO: 499678 - DNA, 53 bp, Artificial
  Synthetic oligonucleotide
ttttctcagattgcgacgtcagtacaaaataccgctcttatggcttttcaacc

SEQ ID NO: 499679 - DNA, 52 bp, Artificial
  Synthetic oligonucleotide
ttcttatatcttcctctgatagatctcctaaagttgctacttttgttaagtt

SEQ ID NO: 499680 - DNA, 52 bp, Artificial
  Synthetic oligonucleotide
ccgctaacatcttcaaactttggtcggtgtgcagatgctaacggattccaag

SEQ ID NO: 499681 - DNA, 52 bp, Artificial
  Synthetic oligonucleotide
ctgggcccttaccatcagtatagcagtaatctgtatccaaagaactttccag

SEQ ID NO: 499682 - DNA, 52 bp, Artificial
  Synthetic oligonucleotide
tttggcatcccagaaagagctgtacgaccactatgtggaggttgccaagcat

SEQ ID NO: 499683 - DNA, 52 bp, Artificial
  Synthetic oligonucleotide
gctaggaggataataataagtgcttcagaggacgtcgggaatgcagatccac

SEQ ID NO: 499684 - DNA, 52 bp, Artificial
  Synthetic oligonucleotide
atgccatcagcgcataatgctaatgcctctagtagtgtagaagcaacagtag

SEQ ID NO: 499685 - DNA, 51 bp, Artificial
  Synthetic oligonucleotide
aagaaaattgtattagctaaacaaagttatgactttgagtctgatggtaaa

SEQ ID NO: 499686 - DNA, 51 bp, Artificial
  Synthetic oligonucleotide
gaattagttctgtgagttaaagcggctcttacagctcccgcaacatctgaa

SEQ ID NO: 499687 - DNA, 51 bp, Artificial
  Synthetic oligonucleotide
aaaacttacaggagcagaggtaaaggcaactgatcttagagcaggggcggc

SEQ ID NO: 499688 - DNA, 51 bp, Artificial
  Synthetic oligonucleotide
aagcagtttgcccgccttgcaagagaagtgtggaatgtggacgagacagat

SEQ ID NO: 499689 - DNA, 51 bp, Artificial
  Synthetic oligonucleotide
tgggctaattggaggaattacagctataggtgaatacaccatgcgagcaat

SEQ ID NO: 499690 - DNA, 51 bp, Artificial
  Synthetic oligonucleotide
tgctaggagttcttggtgagttccctgctctattatggttccatgattcat

SEQ ID NO: 499691 - DNA, 51 bp, Artificial
  Synthetic oligonucleotide
gtcattatcccacagccactgaggtgtgggccaaagggcaacgctgggcct

SEQ ID NO: 499692 - DNA, 51 bp, Artificial
  Synthetic oligonucleotide
aggccgaatctgtattttggggtgcagagtccgaaggataaatatgcgtgt

SEQ ID NO: 499693 - DNA, 51 bp, Artificial
  Synthetic oligonucleotide
ataacttatttcacgtaattatttgagttaattccttcatctttttgaccc

SEQ ID NO: 499694 - DNA, 51 bp, Artificial
  Synthetic oligonucleotide
attttgctgtctgctcattgcactcatctgacaaagctacaaaatctccat

SEQ ID NO: 499695 - DNA, 51 bp, Artificial
  Synthetic oligonucleotide
atctaagagcaggtatccggtaaggggcgttgatgtatcccattatcaggg

SEQ ID NO: 499696 - DNA, 51 bp, Artificial
  Synthetic oligonucleotide
attgattctgacgctatataagggcatatcaattcttatcaagaacataga

SEQ ID NO: 499697 - DNA, 50 bp, Artificial
  Synthetic oligonucleotide
actcccttagctgacccagtccctgataacccaacacataaagctgctcc

SEQ ID NO: 499698 - DNA, 50 bp, Artificial
  Synthetic oligonucleotide
ctattgatgcgactagaagatatggtggtcatttgcaagtggctatgagt

SEQ ID NO: 499699 - DNA, 50 bp, Artificial
  Synthetic oligonucleotide
tattcttcttgcaagtattaaaacattgtccttatgttttggtatatagc

SEQ ID NO: 499700 - DNA, 55 bp, Artificial
  Synthetic oligonucleotide
ggagcaccttgggattatgatagaaactttggtggacttaggattcttaccccat

SEQ ID NO: 499701 - DNA, 55 bp, Artificial
  Synthetic oligonucleotide
ggagaacctttggagcttaccctcagaagagatttcgggaagtttccgttcgaag

SEQ ID NO: 499702 - DNA, 55 bp, Artificial
  Synthetic oligonucleotide
ggacgggaacgtagcagcattaagtagatctttctgtgtgccgcaaggtcaccta

SEQ ID NO: 499703 - DNA, 55 bp, Artificial
  Synthetic oligonucleotide
gcttatctccttgccaaagtcaagggcaactaattgggcttgctcgaagtcaatt

SEQ ID NO: 499704 - DNA, 55 bp, Artificial
  Synthetic oligonucleotide
gctgcccttgaccaatcaggtggctcaacacctaaggcacttttaaattatgggg

SEQ ID NO: 499705 - DNA, 55 bp, Artificial
  Synthetic oligonucleotide
gctccctcaaccggatccatgcctatggttgccaatagcagtccgaacacgcctg

SEQ ID NO: 499706 - DNA, 55 bp, Artificial
  Synthetic oligonucleotide
gctcaagcaaggccgccaagtgctggcttagggatagatataggtcaatatctcc

SEQ ID NO: 499707 - DNA, 55 bp, Artificial
  Synthetic oligonucleotide
gctaaccatagccctcttgttatcaatgattcctgcaccgacagcactagcagca

SEQ ID NO: 499708 - DNA, 55 bp, Artificial
  Synthetic oligonucleotide
gccggtttgggtgaaatcttgactggaattcataagtcttgccgggattcccttt

SEQ ID NO: 499709 - DNA, 55 bp, Artificial
  Synthetic oligonucleotide
gccccgctcttttacctgctatagacatatcttggcatgggctgccaaaagtgat

SEQ ID NO: 499710 - DNA, 55 bp, Artificial
  Synthetic oligonucleotide
gcaggagacttcggaattcaacgcattgctcttagaggaccaggttgcatagatg

SEQ ID NO: 499711 - DNA, 55 bp, Artificial
  Synthetic oligonucleotide
gcagaaagttcgtgttccatggcgtgcactgaccatcctgttgccttgcccgtag

SEQ ID NO: 499712 - DNA, 55 bp, Artificial
  Synthetic oligonucleotide
gattcttgcattgggttagttacgacacccaccatattttcaacagttgggtcta

SEQ ID NO: 499713 - DNA, 55 bp, Artificial
  Synthetic oligonucleotide
gatgaccgtggttccaccttaattaaactcaagggatttaacgcatccatacgcc

SEQ ID NO: 499714 - DNA, 55 bp, Artificial
  Synthetic oligonucleotide
gagtataagggtcattctcaatgtctccagagagcgaatcattgtaggcatgggc

SEQ ID NO: 499715 - DNA, 55 bp, Artificial
  Synthetic oligonucleotide
gagcgccctattcttccttttaactgataaagttggctaagtcccatcatgtcag

SEQ ID NO: 499716 - DNA, 55 bp, Artificial
  Synthetic oligonucleotide
gagatacacaagccttatccgaaagaataccagccctatcaagaacaataggacc

SEQ ID NO: 499717 - DNA, 55 bp, Artificial
  Synthetic oligonucleotide
gactgcggaaatgttacaagtaagtacacaactcttgaagccagccaagacgaac

SEQ ID NO: 499718 - DNA, 55 bp, Artificial
  Synthetic oligonucleotide
gactctgccgcagcctgcaaggaaaagtgcatctccacagaacaatttatcgccc

SEQ ID NO: 499719 - DNA, 55 bp, Artificial
  Synthetic oligonucleotide
gacgtcaaagcctaagcttgtaaagaacttgtgccagaaaggataatcctcgtag

SEQ ID NO: 499720 - DNA, 55 bp, Artificial
  Synthetic oligonucleotide
gaccatgactttctcaccctatataaagatgagctttgtgtcacagatggacttg

SEQ ID NO: 499721 - DNA, 55 bp, Artificial
  Synthetic oligonucleotide
gacatgacccttgcataggtattaggatactgccggttatagagtccgtttgtgc

SEQ ID NO: 499722 - DNA, 55 bp, Artificial
  Synthetic oligonucleotide
gacatatgcagttatttaactgtacacctcaaacaacctcacttgttatggggat

SEQ ID NO: 499723 - DNA, 55 bp, Artificial
  Synthetic oligonucleotide
gacacaaatgcaaaagatgttcccataactataggcagacccgcccctatttgaa

SEQ ID NO: 499724 - DNA, 55 bp, Artificial
  Synthetic oligonucleotide
gaactggcattgactcgccagtcaccgctgattcatcaagagatgatgcaccctc

SEQ ID NO: 499725 - DNA, 55 bp, Artificial
  Synthetic oligonucleotide
ctttctgcaagggatgaaagtatggataacatcaactcgctttccattgtcctgg

SEQ ID NO: 499726 - DNA, 55 bp, Artificial
  Synthetic oligonucleotide
cttcgactagctggtctaagtacctaaacatgaccttatctggtagtcctctgtg

SEQ ID NO: 499727 - DNA, 55 bp, Artificial
  Synthetic oligonucleotide
cttcgaacaagcttgggaagacgtcaagaattactgatgacctaactttgtcgct

SEQ ID NO: 499728 - DNA, 55 bp, Artificial
  Synthetic oligonucleotide
cttcaggaacgatgacaagttttccgtcttcgtcttttgtatagcctaagaacct

SEQ ID NO: 499729 - DNA, 55 bp, Artificial
  Synthetic oligonucleotide
ctggtggctacaacataaaatctccagctggcatgaactacatgcactgcgacat

SEQ ID NO: 499730 - DNA, 55 bp, Artificial
  Synthetic oligonucleotide
ttgatattactagggatagaccagacatacctccggctgctatatggtgttgtag

SEQ ID NO: 499731 - DNA, 55 bp, Artificial
  Synthetic oligonucleotide
ttaaggtctaacaacctctagcctcagttaacggtggcttccgtacttgcctact

SEQ ID NO: 499732 - DNA, 55 bp, Artificial
  Synthetic oligonucleotide
tgggatggtgtggatgtcaaggatgctaattacaccattcgttacctgcagggcg

SEQ ID NO: 499733 - DNA, 55 bp, Artificial
  Synthetic oligonucleotide
tcccaactagcttttcaacagggaaggtctcgcccgttaggcttgactcatcgct

SEQ ID NO: 499734 - DNA, 55 bp, Artificial
  Synthetic oligonucleotide
tccatcctactaacagcctccttgattaccgaatccggtgtggatgctccggcgg

SEQ ID NO: 499735 - DNA, 55 bp, Artificial
  Synthetic oligonucleotide
tccatagattgaaagtgcgtgtgtagctaaagttcttgctgcaacgtggaatacg

SEQ ID NO: 499736 - DNA, 55 bp, Artificial
  Synthetic oligonucleotide
tccacagagccggctgactaaggccaagaaatgctgcagccttgtttacagatcc

SEQ ID NO: 499737 - DNA, 55 bp, Artificial
  Synthetic oligonucleotide
tatcagactctaagtttctctctgttacaaaagagtagtctctttctatggctgg

SEQ ID NO: 499738 - DNA, 55 bp, Artificial
  Synthetic oligonucleotide
tagtcaaatcttttgttagaactgcctctccagttagataaccttcaggatcgtg

SEQ ID NO: 499739 - DNA, 55 bp, Artificial
  Synthetic oligonucleotide
taggtgatgaccctgcatgtgagcctatgaatttagccattagcccgtccactgc

SEQ ID NO: 499740 - DNA, 55 bp, Artificial
  Synthetic oligonucleotide
taacagagtctttacctttgggagctttagcagcactaacacttttaattgctac

SEQ ID NO: 499741 - DNA, 55 bp, Artificial
  Synthetic oligonucleotide
gttgtagacatctccgtaaacaccgactaaagtaaagcttttagaaccttggctc

SEQ ID NO: 499742 - DNA, 55 bp, Artificial
  Synthetic oligonucleotide
gttgaaagcgaggctttatttaaggaagcccttagcatggtagatgaggtcggta

SEQ ID NO: 499743 - DNA, 55 bp, Artificial
  Synthetic oligonucleotide
gttcttgagtcagcaacatgagttacaacggctgcaagttttagtgagtccatga

SEQ ID NO: 499744 - DNA, 55 bp, Artificial
  Synthetic oligonucleotide
gtgttctatcacctaatatgatttgtacttgtgaaccaaaaggtacaacgcctac

SEQ ID NO: 499745 - DNA, 55 bp, Artificial
  Synthetic oligonucleotide
gtggttgtatacattgttagtgcaccattggcaagggctacgcttgagtggattg

SEQ ID NO: 499746 - DNA, 55 bp, Artificial
  Synthetic oligonucleotide
gtgggttattgaaacaaataacaagagctacattttcaacgccacaacaggcgca

SEQ ID NO: 499747 - DNA, 55 bp, Artificial
  Synthetic oligonucleotide
gtggcgtgtcatattcacacacgactaaatcttcccattgactaccacataaaca

SEQ ID NO: 499748 - DNA, 55 bp, Artificial
  Synthetic oligonucleotide
gtgcgagatttctacctgctcttaccggtactacaatatgtggtacttcaacgtc

SEQ ID NO: 499749 - DNA, 55 bp, Artificial
  Synthetic oligonucleotide
gtgacgtccttgtagacggaagatttgttgaagccctaaaggacttaaaactaag

SEQ ID NO: 499750 - DNA, 55 bp, Artificial
  Synthetic oligonucleotide
gtctccatgggagcaagcaaggccaactctgccatagttcacggtggctatgcag

SEQ ID NO: 499751 - DNA, 55 bp, Artificial
  Synthetic oligonucleotide
gtcagtagtgtgtccagtaaattctgcctgtgtagatccacgcttcttagtccag

SEQ ID NO: 499752 - DNA, 55 bp, Artificial
  Synthetic oligonucleotide
gtcaccatcccaaaggacgatgaccgtggttccaccttaattaaactctagggat

SEQ ID NO: 499753 - DNA, 55 bp, Artificial
  Synthetic oligonucleotide
gtatctgttagtccgtgttctagagcagctaggatatcagcacctgtaacttcga

SEQ ID NO: 499754 - DNA, 55 bp, Artificial
  Synthetic oligonucleotide
ggtcgtggagttaaagtgtccgttggagaacaagaagcggttatagatacttatg

SEQ ID NO: 499755 - DNA, 55 bp, Artificial
  Synthetic oligonucleotide
gggagtcttttgcctagtgcccttgtaatccttgtaaatgtctgacctaaaagtc

SEQ ID NO: 499756 - DNA, 55 bp, Artificial
  Synthetic oligonucleotide
gggaatgttctgactctggataagacgaacctgaaagtaagaccgcatcacctgc

SEQ ID NO: 499757 - DNA, 55 bp, Artificial
  Synthetic oligonucleotide
gggaagtctagctttagacgttttggttggtcagtacgtgacttgtctacatcct

SEQ ID NO: 499758 - DNA, 55 bp, Artificial
  Synthetic oligonucleotide
ggccggcaaattcagaccttttaccatctaggtggctatttagggtcaaatccac

SEQ ID NO: 499759 - DNA, 55 bp, Artificial
  Synthetic oligonucleotide
ggatttatcttctagcatagcggatgagccgtctgtgtttaactcgcaaaatttg

SEQ ID NO: 499760 - DNA, 55 bp, Artificial
  Synthetic oligonucleotide
ggatctggaatgggtacaagtggtcttgttggacaaatctcaacttttgctgcca

SEQ ID NO: 499761 - DNA, 55 bp, Artificial
  Synthetic oligonucleotide
ccctgcggtagccatgcactaagaataacaaggccatggtagaatcgagcccacc

SEQ ID NO: 499762 - DNA, 55 bp, Artificial
  Synthetic oligonucleotide
ccataagtcccgccaaaacatagaaggactcctagacttagtgcctgatgtggcc

SEQ ID NO: 499763 - DNA, 55 bp, Artificial
  Synthetic oligonucleotide
ccagcgggattgataccatcacctactaagtctccaagaccagagcctactgttg

SEQ ID NO: 499764 - DNA, 55 bp, Artificial
  Synthetic oligonucleotide
ccagataaaccacgctgttgataagctttctcccacctatataccatagatccat

SEQ ID NO: 499765 - DNA, 55 bp, Artificial
  Synthetic oligonucleotide
ccaagggtggtattgtagcaaatggaaaggcagaagtcctagataacgacgacaa

SEQ ID NO: 499766 - DNA, 55 bp, Artificial
  Synthetic oligonucleotide
cattactgcttcaccttgcgcttcgtcgtattgccaaatttcagggtagaaggtg

SEQ ID NO: 499767 - DNA, 55 bp, Artificial
  Synthetic oligonucleotide
catgcctcttgagaattctactacaccatatcttgagagaactccaccgtcagcc

SEQ ID NO: 499768 - DNA, 55 bp, Artificial
  Synthetic oligonucleotide
catcacaagggactagataaactagcctttacaggatcaactagtgtaggtcgtc

SEQ ID NO: 499769 - DNA, 55 bp, Artificial
  Synthetic oligonucleotide
catcaagccctacgttgtttcctaagatattgctaaatcctccaaccgaaaagga

SEQ ID NO: 499770 - DNA, 55 bp, Artificial
  Synthetic oligonucleotide
catagccaaccccacttatctcacctctactaacagcataaagtccatgtagcac

SEQ ID NO: 499771 - DNA, 55 bp, Artificial
  Synthetic oligonucleotide
cagacatgaatgcatccgcataagaatttagtactggccaacctactgttactgg

SEQ ID NO: 499772 - DNA, 55 bp, Artificial
  Synthetic oligonucleotide
cactcgaccagtgttatttgcttcttcggcgccccttggggactctcctgtgctt

SEQ ID NO: 499773 - DNA, 55 bp, Artificial
  Synthetic oligonucleotide
cactccgtgcgctctatgccgctcgggcaatgtggtcctttaggagctggacagg

SEQ ID NO: 499774 - DNA, 55 bp, Artificial
  Synthetic oligonucleotide
cacccttaaaacggtaggcttcaacttccaaatccctgtcataacaaactgttcg

SEQ ID NO: 499775 - DNA, 55 bp, Artificial
  Synthetic oligonucleotide
caagcttcacttcatacttgtctgcagaataatttacgccgagagtgtcgcaggc

SEQ ID NO: 499776 - DNA, 55 bp, Artificial
  Synthetic oligonucleotide
caacattgaccgttagggcacatacaccaatgagtcattctaaaataggctggga

SEQ ID NO: 499777 - DNA, 55 bp, Artificial
  Synthetic oligonucleotide
attggcgcggggtctccggacgaagggtacaagttcaataatcacaatccgcagt

SEQ ID NO: 499778 - DNA, 55 bp, Artificial
  Synthetic oligonucleotide
atctcacacctaagaaataagttatgcaagcggaaaggagtaagtgcgcacatgg

SEQ ID NO: 499779 - DNA, 55 bp, Artificial
  Synthetic oligonucleotide
atattaagagccgcaattgcataagttaacatactctttaagctctctcctgcca

SEQ ID NO: 499780 - DNA, 55 bp, Artificial
  Synthetic oligonucleotide
agtctataccccaattgttgtagctattgcgcttatagtagcgattatccctccc

SEQ ID NO: 499781 - DNA, 55 bp, Artificial
  Synthetic oligonucleotide
agtcatgaaaggaccacctgaacctgatccttggattattaccttatccataggc

SEQ ID NO: 499782 - DNA, 55 bp, Artificial
  Synthetic oligonucleotide
agatagaaagtgttgccccacctattactggcataggaatcgatgtaagtagtgc

SEQ ID NO: 499783 - DNA, 55 bp, Artificial
  Synthetic oligonucleotide
agaccactacaatcaacagcactagaacttgctgcaccccaaacataaggcttac

SEQ ID NO: 499784 - DNA, 55 bp, Artificial
  Synthetic oligonucleotide
acttcactatcagttgaaactccttggggtgccttaactggtatgttataggccc

SEQ ID NO: 499785 - DNA, 55 bp, Artificial
  Synthetic oligonucleotide
acctacggaccaccttcgcccagattagggcagtgagggagccgacgagtagagc

SEQ ID NO: 499786 - DNA, 55 bp, Artificial
  Synthetic oligonucleotide
aatcttgttccttcttgaattactacaactgttccaaaaggacagcctgcgggca

SEQ ID NO: 499787 - DNA, 55 bp, Artificial
  Synthetic oligonucleotide
aagaccctgtgtcatattctccatcgagcttatacattgtgaaaccatttgcaag

SEQ ID NO: 499788 - DNA, 55 bp, Artificial
  Synthetic oligonucleotide
ctgcatctatgtcccaccaaagactcactatatttggattagcctctcgccagga

SEQ ID NO: 499789 - DNA, 55 bp, Artificial
  Synthetic oligonucleotide
ctgaacccggccccttagaagctccgtacacttttaacccatattcccacatctc

SEQ ID NO: 499790 - DNA, 55 bp, Artificial
  Synthetic oligonucleotide
ctcgtaccatcaatattagagcctcagccgtcgaatcttgccaatcgaagctccc

SEQ ID NO: 499791 - DNA, 55 bp, Artificial
  Synthetic oligonucleotide
ctattttgatggagctagccgtgtaattaaagaagactggggtggtcttatggac

SEQ ID NO: 499792 - DNA, 55 bp, Artificial
  Synthetic oligonucleotide
ctatactcattagacgactttactgctgaaaatggggttaggagcactagcgata

SEQ ID NO: 499793 - DNA, 55 bp, Artificial
  Synthetic oligonucleotide
ctaagcgaatatttctctatggtacgggtcacattcaaaacattgtctgtctgga

SEQ ID NO: 499794 - DNA, 55 bp, Artificial
  Synthetic oligonucleotide
cgtttgtgcgaaagcttcggccatcttcgggtctacttcaggaaccctttcgatc

SEQ ID NO: 499795 - DNA, 55 bp, Artificial
  Synthetic oligonucleotide
cgtattacttggtcatcattaaagaccatcatccctgcatagcatccgttatgag

SEQ ID NO: 499796 - DNA, 55 bp, Artificial
  Synthetic oligonucleotide
cgtagccatatttattagctatcctctcctcgggaccaccctttatgcctacata

SEQ ID NO: 499797 - DNA, 55 bp, Artificial
  Synthetic oligonucleotide
cggcaggaactttcccaactagcttttcaacagggaaggtctcgcccgttaggct

SEQ ID NO: 499798 - DNA, 55 bp, Artificial
  Synthetic oligonucleotide
cgccctttgctagatttgggtttaccctaacttctacatcataaggagtcttgtt

SEQ ID NO: 499799 - DNA, 55 bp, Artificial
  Synthetic oligonucleotide
cgccataaaatattttctgcccactatattgatctggctccatgtggcatgatga

SEQ ID NO: 499800 - DNA, 55 bp, Artificial
  Synthetic oligonucleotide
cgccaacccattggagttactaggttcaaacaaaacggacgaacccgaaaggggc

SEQ ID NO: 499801 - DNA, 55 bp, Artificial
  Synthetic oligonucleotide
cgaatatcatggcaaatatgggcgaacccttaagttccgcaagaacatctctcgg

SEQ ID NO: 499802 - DNA, 55 bp, Artificial
  Synthetic oligonucleotide
cctttcatatgtcgaaaatctacgatcgcaatcttcacaaagtcgcctgcgtctg

SEQ ID NO: 499803 - DNA, 55 bp, Artificial
  Synthetic oligonucleotide
ccgggagcgataggatatgctcaagaaacgggaattccatttgcagagggacttg

SEQ ID NO: 499804 - DNA, 55 bp, Artificial
  Synthetic oligonucleotide
ccttcagtcaatgtgcgaagtctcagcataggattaagttccagaagtccaacta

SEQ ID NO: 499805 - DNA, 55 bp, Artificial
  Synthetic oligonucleotide
cctagaagatggctacgacactcttatcactggagcaggtggcgaactttctgaa

SEQ ID NO: 499806 - DNA, 55 bp, Artificial
  Synthetic oligonucleotide
cctgtcatttcgacattgcccttaccttccatgacacttgcctcaacttgaagca

SEQ ID NO: 499807 - DNA, 55 bp, Artificial
  Synthetic oligonucleotide
cctgacgccaactacgtctaacactatattcctcctatgaagagttgccctatgg

SEQ ID NO: 499808 - DNA, 55 bp, Artificial
  Synthetic oligonucleotide
cctagaatcgatgactcttcactgattgttccgctatcacttaaaacagcctttg

SEQ ID NO: 499809 - DNA, 55 bp, Artificial
  Synthetic oligonucleotide
ccggttctaagcacactggaatatttccatgacgagtatcttgctcacgttgtga

SEQ ID NO: 499810 - DNA, 55 bp, Artificial
  Synthetic oligonucleotide
cctctccagaggttcttaccgcaatgtcacttccagagcattgaacagtaactag

SEQ ID NO: 499811 - DNA, 55 bp, Artificial
  Synthetic oligonucleotide
cctatatcaagggtaaagcttggggaaaggttgcagaaataatagcaaagcaact

SEQ ID NO: 499812 - DNA, 54 bp, Artificial
  Synthetic oligonucleotide
tccccatacgctggaatagctctccaaaagttcacagtatagttgtaatcctta

SEQ ID NO: 499813 - DNA, 54 bp, Artificial
  Synthetic oligonucleotide
tcactatctggcagtccgcaacttcaggggcgagctcactggcccgtttacggc

SEQ ID NO: 499814 - DNA, 54 bp, Artificial
  Synthetic oligonucleotide
agacctgagcagtcatattgatcataggagaagccttgaacgcttagggcataa

SEQ ID NO: 499815 - DNA, 54 bp, Artificial
  Synthetic oligonucleotide
ctaggcttaacttctatgttcggtatggagataggtgtatccctagcgctatcg

SEQ ID NO: 499816 - DNA, 54 bp, Artificial
  Synthetic oligonucleotide
gcaacgttttcatctgccctgaagcatgatatgcgtatactgggcttgtgaaaa

SEQ ID NO: 499817 - DNA, 54 bp, Artificial
  Synthetic oligonucleotide
ggcacacgcttcaagtaataccgaccatcctgttagacaaggtatgtggggtgc

SEQ ID NO: 499818 - DNA, 54 bp, Artificial
  Synthetic oligonucleotide
caaggttctaaagcttttataccatattcgccgtatgcaagctcattaccacgc

SEQ ID NO: 499819 - DNA, 54 bp, Artificial
  Synthetic oligonucleotide
gatacattaaccccataggattgagccttaataaatctgggactgcattcgtta

SEQ ID NO: 499820 - DNA, 53 bp, Artificial
  Synthetic oligonucleotide
agccccattccggcttattaaattcagcaatgccgcagttatatatcgactca

SEQ ID NO: 499821 - DNA, 53 bp, Artificial
  Synthetic oligonucleotide
tgttcaagggcgatagcttgggcacgtctttcctcagccttagcttgggcaat

SEQ ID NO: 499822 - DNA, 53 bp, Artificial
  Synthetic oligonucleotide
gtggttatacaggtcaaattggcgaaggagttgcctttcttccttggctaggg

SEQ ID NO: 499823 - DNA, 53 bp, Artificial
  Synthetic oligonucleotide
actcatatgcacttcgttttagttggactttggaatccttgaaaatcaccccg

SEQ ID NO: 499824 - DNA, 53 bp, Artificial
  Synthetic oligonucleotide
acggtcgaagaaattgggtaaatcataatcgacgcgaatgacctaccgccatt

SEQ ID NO: 499825 - DNA, 53 bp, Artificial
  Synthetic oligonucleotide
gaggacagttggagttgatggttctaacaacaggtctggcggagcctttcctc

SEQ ID NO: 499826 - DNA, 52 bp, Artificial
  Synthetic oligonucleotide
aggcttacaagctgagcttcctcatctgtcgatactcttgcataggcagcaa

SEQ ID NO: 499827 - DNA, 52 bp, Artificial
  Synthetic oligonucleotide
tactccttccgattattttacgcccatccagccagatacaaccatcttcatt

SEQ ID NO: 499828 - DNA, 52 bp, Artificial
  Synthetic oligonucleotide
ccccaacttttacagcagcatctgttagctcaaagtcgtcgtaccttctttt

SEQ ID NO: 499829 - DNA, 51 bp, Artificial
  Synthetic oligonucleotide
tgcctctttgtagccctctatatctctgacatggtacttttggaaggcctt

SEQ ID NO: 499830 - DNA, 51 bp, Artificial
  Synthetic oligonucleotide
tctgatgcaggagtaagttcatctacaaagggagaaactttacttgatacc

SEQ ID NO: 499831 - DNA, 51 bp, Artificial
  Synthetic oligonucleotide
tccattatatctgctacgggtggagctcctgatccactgcgttcttctgtt

SEQ ID NO: 499832 - DNA, 51 bp, Artificial
  Synthetic oligonucleotide
ccaactacacctaaacatgtaggacatactaaagtatttggtgcttgtcca

SEQ ID NO: 499833 - DNA, 51 bp, Artificial
  Synthetic oligonucleotide
cactgcatggtcttgctcaaagagattactgataaagttcgcgcctctatc

SEQ ID NO: 499834 - DNA, 50 bp, Artificial
  Synthetic oligonucleotide
aaatctgcgaataagtaattagtccatcttgagactcgctgatcgattgg

SEQ ID NO: 499835 - DNA, 50 bp, Artificial
  Synthetic oligonucleotide
tagcgcatgttgcaggtgcatcctgaagcactcttcctccgtgggatgaa

SEQ ID NO: 499836 - DNA, 55 bp, Artificial
  Synthetic oligonucleotide
tctggcatatgcatacatccaacgctacaaccaagtcttataggtagacttccgt

SEQ ID NO: 499837 - DNA, 55 bp, Artificial
  Synthetic oligonucleotide
tcgtgatatggctcagactctgcccctgtataatttccataatcaggctccgggg

SEQ ID NO: 499838 - DNA, 55 bp, Artificial
  Synthetic oligonucleotide
gtacttgccaatgttaaggatattaagggcatggacagcgggcttctaggggctg

SEQ ID NO: 499839 - DNA, 55 bp, Artificial
  Synthetic oligonucleotide
gtacttgaccatttcacttctctcgaagtgttctctcgcctagttagcgttaact

SEQ ID NO: 499840 - DNA, 55 bp, Artificial
  Synthetic oligonucleotide
gggtttatgaagagtggtgttcatccaactgcagtcgatccgagggccggaggca

SEQ ID NO: 499841 - DNA, 55 bp, Artificial
  Synthetic oligonucleotide
ggctgaccctcactgttacatgcctatacccgtctgctgatattccgtacctgac

SEQ ID NO: 499842 - DNA, 55 bp, Artificial
  Synthetic oligonucleotide
gctgctacagccgtactgaatttagaaacacctacaattgaaaagcagagcatgc

SEQ ID NO: 499843 - DNA, 55 bp, Artificial
  Synthetic oligonucleotide
gcgttccggctaaaatccacagctactgcgacgatgtagcgacaaatttctgcgg

SEQ ID NO: 499844 - DNA, 55 bp, Artificial
  Synthetic oligonucleotide
gcggcatggtgtatgaggatgcgatgagcaagcttatagatggatatagcaagag

SEQ ID NO: 499845 - DNA, 55 bp, Artificial
  Synthetic oligonucleotide
gcaccaaagaatagctatgttgcactttccggaccatcgcacgcagaggaggtag

SEQ ID NO: 499846 - DNA, 55 bp, Artificial
  Synthetic oligonucleotide
gaggcgcaagtatagagtttcaggtaaagaatatgactgattcaccgtgctcgct

SEQ ID NO: 499847 - DNA, 55 bp, Artificial
  Synthetic oligonucleotide
gagctcaaggaagctacagtcgacatgctcggaaaagcaggtacagtcaaggtta

SEQ ID NO: 499848 - DNA, 55 bp, Artificial
  Synthetic oligonucleotide
gactaaatcttttggcatatgacatgctgtatggagacagatacatctacgacgg

SEQ ID NO: 499849 - DNA, 55 bp, Artificial
  Synthetic oligonucleotide
cggccggcaggattccctgtgctgcgaattcaagtgcgcgactcatgagcgggat

SEQ ID NO: 499850 - DNA, 55 bp, Artificial
  Synthetic oligonucleotide
cgctctgatcctttgcaacagcaactgtccacttaactactccgcctgtttctgc

SEQ ID NO: 499851 - DNA, 55 bp, Artificial
  Synthetic oligonucleotide
cgatcatgaggaacataacggtggctatttcaaacaagctgtcgagaacctctcc

SEQ ID NO: 499852 - DNA, 55 bp, Artificial
  Synthetic oligonucleotide
cctgtgtagaccagtcgtaaacatcaacaggacttatggttttgccatttgccgt

SEQ ID NO: 499853 - DNA, 55 bp, Artificial
  Synthetic oligonucleotide
cctgacttgagctccatctccttcgaatcccagtcgattgccttgaaatccacct

SEQ ID NO: 499854 - DNA, 55 bp, Artificial
  Synthetic oligonucleotide
cctacactataggctataagatgtcggttggtaatgaggcggattttgtgagcct

SEQ ID NO: 499855 - DNA, 55 bp, Artificial
  Synthetic oligonucleotide
cctaagcagcaaaattgcttgtggcaagcagaacacatcctactgcctgaagacg

SEQ ID NO: 499856 - DNA, 55 bp, Artificial
  Synthetic oligonucleotide
ccctgttatgctcgcagcaaacacatcgaggcttgtaaatgtaatgtataagcta

SEQ ID NO: 499857 - DNA, 55 bp, Artificial
  Synthetic oligonucleotide
ccaatattgctatcgtcaaagttttacgggatacacttaaggcttgcggaatcac

SEQ ID NO: 499858 - DNA, 55 bp, Artificial
  Synthetic oligonucleotide
agagcttgtccggcgcgattcataccgtaataccggataggatcgagtgcggcac

SEQ ID NO: 499859 - DNA, 55 bp, Artificial
  Synthetic oligonucleotide
acctgcgattttctcccaattaggttcctcctgtgtagtgagttctgcagcagac

SEQ ID NO: 499860 - DNA, 55 bp, Artificial
  Synthetic oligonucleotide
aaggctttgcgtgggcatggtgtatatcccagcccggatggagctaagctgtaca

SEQ ID NO: 499861 - DNA, 55 bp, Artificial
  Synthetic oligonucleotide
ttttggggattctttaaagtcggcattttgggctatggaggcggtccaggatcca

SEQ ID NO: 499862 - DNA, 55 bp, Artificial
  Synthetic oligonucleotide
tcgaccttggaatcccgtaaggtcttgtaatatccgtgaatcatgttggggtcgc

SEQ ID NO: 499863 - DNA, 55 bp, Artificial
  Synthetic oligonucleotide
tcatccggggttgcaataaagggctcgagtacacgaagtcccgagggatgacccc

SEQ ID NO: 499864 - DNA, 55 bp, Artificial
  Synthetic oligonucleotide
ggggctctcgatagacggccaagagccgtttgacaccgagaccccgttgggcgac

SEQ ID NO: 499865 - DNA, 55 bp, Artificial
  Synthetic oligonucleotide
gggcgaatagcggtagattatgaagcccaagcggccatggaacttgaacaactcg

SEQ ID NO: 499866 - DNA, 55 bp, Artificial
  Synthetic oligonucleotide
ggctccacaggttgtgcaagaccataattctgccgcactcacgaccccacccgct

SEQ ID NO: 499867 - DNA, 55 bp, Artificial
  Synthetic oligonucleotide
ggacgaggaggacaataagcatgcacgtggatctacaccaggatgtatgggcctt

SEQ ID NO: 499868 - DNA, 55 bp, Artificial
  Synthetic oligonucleotide
gctgtacccggtaaccctaaggactgtccaacaatttgtgcccgttgggtttcgc

SEQ ID NO: 499869 - DNA, 55 bp, Artificial
  Synthetic oligonucleotide
gcgggactggcaccgggtgatgaatggattgcgttaaatggatatcggatacgtc

SEQ ID NO: 499870 - DNA, 55 bp, Artificial
  Synthetic oligonucleotide
gcccagtggattcgtaacatggctcttaatgtatccacgacggagcaggatgtct

SEQ ID NO: 499871 - DNA, 55 bp, Artificial
  Synthetic oligonucleotide
gatgtcgaccatcgaccaaattaagtggctacaagctcaaggatatggggtgtca

SEQ ID NO: 499872 - DNA, 55 bp, Artificial
  Synthetic oligonucleotide
ctggaaggtattaccgaacacacggctcaggatgtccaacaagctgtccgggagg

SEQ ID NO: 499873 - DNA, 55 bp, Artificial
  Synthetic oligonucleotide
cggatggtgccttgaaccgaagtgggaagtatagctggattaaggcgccacgtta

SEQ ID NO: 499874 - DNA, 55 bp, Artificial
  Synthetic oligonucleotide
cgccaacgtcgtatccgacagccgtccatgctggttcaagctcgtctaaccaagg

SEQ ID NO: 499875 - DNA, 55 bp, Artificial
  Synthetic oligonucleotide
cgattgctcaatgaactgccgggactctcggccccttcacgaatggaggtcgccg

SEQ ID NO: 499876 - DNA, 55 bp, Artificial
  Synthetic oligonucleotide
cgatggaaagccgtaggaccggacacgttatgttggccttacggactatggctgc

SEQ ID NO: 499877 - DNA, 55 bp, Artificial
  Synthetic oligonucleotide
cgatgcgacgttttgcaatccggatgcggggcacgaaaagggcaatgtggaggcg

SEQ ID NO: 499878 - DNA, 55 bp, Artificial
  Synthetic oligonucleotide
ccgggccgaaaccgtggataatcctaggcttttacgccaggtcatttcagcgtta

SEQ ID NO: 499879 - DNA, 55 bp, Artificial
  Synthetic oligonucleotide
cattagcggcagtgtgggcgatcatggaattgcggtaatgctgcgacgagaaggc

SEQ ID NO: 499880 - DNA, 55 bp, Artificial
  Synthetic oligonucleotide
cataggtcaaggctttcaaatcgctatggttttgttgtcagccaccgcgatcctt

SEQ ID NO: 499881 - DNA, 55 bp, Artificial
  Synthetic oligonucleotide
cagcgatcgccgttcagggatttcgtgaagccctgacagtatttacccacgaggc

SEQ ID NO: 499882 - DNA, 55 bp, Artificial
  Synthetic oligonucleotide
aagttccggtggtaaccacggcgtatgatgagctggctgccaccagtcgggcctc

SEQ ID NO: 499883 - DNA, 55 bp, Artificial
  Synthetic oligonucleotide
aaccaggctatcgaccccggtccacataggtgcgcaattcattcccatagagggg

SEQ ID NO: 499884 - DNA, 53 bp, Artificial
  Synthetic oligonucleotide
ccgggagtcttccattattcggacgtggtggcgcgatctttgaggcacacccc

SEQ ID NO: 499885 - DNA, 51 bp, Artificial
  Synthetic oligonucleotide
agtctggcttggttgctccatcgaccgttggcttcaaaaccaaagttggga

SEQ ID NO: 499886 - DNA, 55 bp, Artificial
  Synthetic oligonucleotide
gcacagaaagagagggtacagttaaatactcggactgtcgtgaggtagttgaggt

SEQ ID NO: 499887 - DNA, 55 bp, Artificial
  Synthetic oligonucleotide
gcaccatgttctctcctgttggtcaccgaactgccaaggggctgtgcccctccca

SEQ ID NO: 499888 - DNA, 55 bp, Artificial
  Synthetic oligonucleotide
gcacgatgatttcgcgcttgcccaggagcttcatctggtagcggtcctgtgagcc

SEQ ID NO: 499889 - DNA, 55 bp, Artificial
  Synthetic oligonucleotide
gcaggaatgcggaaggaacaagcaggcgtgtgaacaccgtgccaatatactcgcc

SEQ ID NO: 499890 - DNA, 55 bp, Artificial
  Synthetic oligonucleotide
gcatcccgatcaccagagcactgggaacccttactgaccgggtgaatgtgcaagc

SEQ ID NO: 499891 - DNA, 55 bp, Artificial
  Synthetic oligonucleotide
gcatcgcttcccgtgaaagattcgcggattttatcgaccttccaggagttgcccc

SEQ ID NO: 499892 - DNA, 55 bp, Artificial
  Synthetic oligonucleotide
gccccgccaagactatttcgaactgattccaagtcgttcgaacaatttccaattc

SEQ ID NO: 499893 - DNA, 55 bp, Artificial
  Synthetic oligonucleotide
gccggcaatgaacggtctaccgaccacacctcagcgccttccgacgccatggcac

SEQ ID NO: 499894 - DNA, 55 bp, Artificial
  Synthetic oligonucleotide
gcgaccatctttgcccaacccttcgaacccgtgggctgccaatcttgtcgtgaca

SEQ ID NO: 499895 - DNA, 55 bp, Artificial
  Synthetic oligonucleotide
gcgagcacaggcatagctggcagacatagctgatataggagcgaccagcttacga

SEQ ID NO: 499896 - DNA, 55 bp, Artificial
  Synthetic oligonucleotide
gcgcaccaaattattcacacgtctaccatcttctgtgaagatctctggcgtgccg

SEQ ID NO: 499897 - DNA, 55 bp, Artificial
  Synthetic oligonucleotide
gcgcccagatacagcgcgagcgcaaagactattacgaccagctagagaccaccca

SEQ ID NO: 499898 - DNA, 55 bp, Artificial
  Synthetic oligonucleotide
gcgtgaatgccccattatcgttgctgtgcgacaatgcaggggttgttggctccag

SEQ ID NO: 499899 - DNA, 55 bp, Artificial
  Synthetic oligonucleotide
gctcccgcggctgattcgtcaactcacttggcaggcgggtgccatagaacgcaca

SEQ ID NO: 499900 - DNA, 55 bp, Artificial
  Synthetic oligonucleotide
gctgcggtccctgatgggatctgctggttgacgcctcgatcgcttacacgcactc

SEQ ID NO: 499901 - DNA, 55 bp, Artificial
  Synthetic oligonucleotide
gcttgggagtgagaggcctgaagaatccaagggacagtgcaggtcagccggcggt

SEQ ID NO: 499902 - DNA, 55 bp, Artificial
  Synthetic oligonucleotide
ggaaagtaaaagccgtgtgcgacccctgtctcaatgctgaccatggtgggctcgg

SEQ ID NO: 499903 - DNA, 55 bp, Artificial
  Synthetic oligonucleotide
ggaaatcttgctcactcatcacttgctccagtggatgttcggatgcccaacgctg

SEQ ID NO: 499904 - DNA, 55 bp, Artificial
  Synthetic oligonucleotide
ggaggcatcaaacgctttgagtattcctgcccagtgttgcttgattgtcttggcc

SEQ ID NO: 499905 - DNA, 55 bp, Artificial
  Synthetic oligonucleotide
ggccaagccgcgaacaagttgtcgcaatgggtggtacatcgtttggctgaaccag

SEQ ID NO: 499906 - DNA, 55 bp, Artificial
  Synthetic oligonucleotide
cggcggtgtgctccgatcagatatcgaatttcagtccattcagaactgcaagcac

SEQ ID NO: 499907 - DNA, 55 bp, Artificial
  Synthetic oligonucleotide
cggctaccaaggtgcaattcaggcagcatttccggaccaaacccgtcctggtctg

SEQ ID NO: 499908 - DNA, 55 bp, Artificial
  Synthetic oligonucleotide
cggctggcagaaattggggctgaaccgccggcaatcaaggtgactcacaccccga

SEQ ID NO: 499909 - DNA, 55 bp, Artificial
  Synthetic oligonucleotide
cgggcacagggccatcgctggtgaattggaaagcgatctcctctctgttcggtgg

SEQ ID NO: 499910 - DNA, 55 bp, Artificial
  Synthetic oligonucleotide
cggggcggtggactgtggtcaggcaggagcgaacaagggaacaaacatagcggtg

SEQ ID NO: 499911 - DNA, 55 bp, Artificial
  Synthetic oligonucleotide
cgggtgctggtcttgcacgtcaaacgcgccgcgtccaaccctgaaaatgcttggg

SEQ ID NO: 499912 - DNA, 55 bp, Artificial
  Synthetic oligonucleotide
cggtctgtcgaggagaaacccgggcgttttcacacggtttcgatttcgctggaac

SEQ ID NO: 499913 - DNA, 55 bp, Artificial
  Synthetic oligonucleotide
cggtgattttccggaaacgcgggagtcacgcagcagaaatcggtgctcaaggctg

SEQ ID NO: 499914 - DNA, 55 bp, Artificial
  Synthetic oligonucleotide
ctaccctggtaatacgcctgacggctgtggcccatatgctggcaagccctcttca

SEQ ID NO: 499915 - DNA, 55 bp, Artificial
  Synthetic oligonucleotide
ctccgaccgtgcctggatcgtggcggactatgaagtgcctgcggatttgccacag

SEQ ID NO: 499916 - DNA, 55 bp, Artificial
  Synthetic oligonucleotide
ctgactggatggcatgaggaaaccttgcggttttgggctttccagacagtctcag

SEQ ID NO: 499917 - DNA, 55 bp, Artificial
  Synthetic oligonucleotide
ctgaggtgtacagcgtaaagtatatgcatcctgtactctatccctctctttccgg

SEQ ID NO: 499918 - DNA, 55 bp, Artificial
  Synthetic oligonucleotide
ctgctttgcgattccagaaatcgactaaggcataggcgaatacgccgtcgtgcag

SEQ ID NO: 499919 - DNA, 55 bp, Artificial
  Synthetic oligonucleotide
cttgagtcgaggatcaggtgttttcgagaaacgctcgatcacagcttgggtgatg

SEQ ID NO: 499920 - DNA, 55 bp, Artificial
  Synthetic oligonucleotide
cttgggtttcaatgcatcattctaaatgttgagacagccatctcgcacaaacggg

SEQ ID NO: 499921 - DNA, 55 bp, Artificial
  Synthetic oligonucleotide
cttgtcatacggaaagggccctccttcacggatcagcgcatacgtcgcccgccct

SEQ ID NO: 499922 - DNA, 55 bp, Artificial
  Synthetic oligonucleotide
gaccgaaagcaaccccatgacaccaaccctcacctatttggcctggatggccgtc

SEQ ID NO: 499923 - DNA, 55 bp, Artificial
  Synthetic oligonucleotide
gaccttcgaggcagggcaccgatcaaccaaggtcagggccccgggcttacaagtt

SEQ ID NO: 499924 - DNA, 55 bp, Artificial
  Synthetic oligonucleotide
gacggttttgcattcgcaatcattcgccaattcaggacttacagagggatgccat

SEQ ID NO: 499925 - DNA, 55 bp, Artificial
  Synthetic oligonucleotide
gagcctgttgggctaaatcgttatgaatgactacaacggtcaccaaatgcaacgg

SEQ ID NO: 499926 - DNA, 55 bp, Artificial
  Synthetic oligonucleotide
gaggcatgtccttgtccgtgtagcagaggctcacagtcgcctcccacgcttccca

SEQ ID NO: 499927 - DNA, 55 bp, Artificial
  Synthetic oligonucleotide
tattcgcggaacgatgcacccacttgcgggtgttgcaaggccagttcaacggtgg

SEQ ID NO: 499928 - DNA, 55 bp, Artificial
  Synthetic oligonucleotide
tcataactcaggagatcaagctcatgaccaactatggcactcttttgcgcgcagc

SEQ ID NO: 499929 - DNA, 55 bp, Artificial
  Synthetic oligonucleotide
tcatgggtgggtctccttgtgaagttgcctcccgccggtgcaagaccgcaggatg

SEQ ID NO: 499930 - DNA, 55 bp, Artificial
  Synthetic oligonucleotide
tcccggggtgatggaaaccatgtatcacatgctcagtcaggtgacctgctcgtgg

SEQ ID NO: 499931 - DNA, 55 bp, Artificial
  Synthetic oligonucleotide
tcctcgccagcgtgtaccgcgaactacagacatccctggtggagaagccggacga

SEQ ID NO: 499932 - DNA, 55 bp, Artificial
  Synthetic oligonucleotide
tcctttcggacatctggtgcgttgagtaccagtgaggcgaatcccaaccaagggg

SEQ ID NO: 499933 - DNA, 55 bp, Artificial
  Synthetic oligonucleotide
tcgacagagcgcagattggtcagcgggattcgctccgtgacctctccacgacgga

SEQ ID NO: 499934 - DNA, 55 bp, Artificial
  Synthetic oligonucleotide
tcgtctcgagggactctcttaacgaatcacagcgccacgtgcatctgcggcctcc

SEQ ID NO: 499935 - DNA, 55 bp, Artificial
  Synthetic oligonucleotide
tctcatttcacccctgtaaatgagacagcttgatcggcagagtggagttgtccga

SEQ ID NO: 499936 - DNA, 55 bp, Artificial
  Synthetic oligonucleotide
tctttgagcaacccgcggtatgcggtctccaaagcgcctccgtgcaatgtcgtat

SEQ ID NO: 499937 - DNA, 55 bp, Artificial
  Synthetic oligonucleotide
tgaggtgaatcaccgctgccaactggcgcttgaccacagcctcggtctggcctgt

SEQ ID NO: 499938 - DNA, 55 bp, Artificial
  Synthetic oligonucleotide
tggtccggtcccgcccaatcgtcacgtactcgtattccttcgattcggccgggga

SEQ ID NO: 499939 - DNA, 55 bp, Artificial
  Synthetic oligonucleotide
tgtaggagccgctgccaagccgcgctcgcacggggaattgcacgccgtggtacaa

SEQ ID NO: 499940 - DNA, 55 bp, Artificial
  Synthetic oligonucleotide
tgtgatgcgccataccgaggaggtgagcggctaccttctgaagcgtctggacggc

SEQ ID NO: 499941 - DNA, 55 bp, Artificial
  Synthetic oligonucleotide
tgttggcagccaagccgcacacgcgcacactgaaccctgtcatgggagcagatgc

SEQ ID NO: 499942 - DNA, 55 bp, Artificial
  Synthetic oligonucleotide
ttcttgggacaaatgttcgcaaacgtaacggaaagcgctatgctgaacgcacagg

SEQ ID NO: 499943 - DNA, 55 bp, Artificial
  Synthetic oligonucleotide
ttgcggtcccagttcttgcgccccaggtacttgatggccatggcgtagcgccctg

SEQ ID NO: 499944 - DNA, 55 bp, Artificial
  Synthetic oligonucleotide
ttgctagatgactccgagcctcacgccccgcctgtgctggggacgctgcaacgct

SEQ ID NO: 499945 - DNA, 55 bp, Artificial
  Synthetic oligonucleotide
ttgctaggtgtacgtagaaatactcacagaaggcttgaggcctcgtgcttgcgcc

SEQ ID NO: 499946 - DNA, 55 bp, Artificial
  Synthetic oligonucleotide
tttgatgtcaagccgcgctggccactgcacgaactcgcttgagtccacgtccgag

SEQ ID NO: 499947 - DNA, 55 bp, Artificial
  Synthetic oligonucleotide
tttgtcagcgacaagctacgcaaagaacttcaagcgtatgttaaatcagtgccgc

SEQ ID NO: 499948 - DNA, 55 bp, Artificial
  Synthetic oligonucleotide
ggccaccgatgtccgacttatgcacacaaaacgtgatgcggcgcaacataaagcc

SEQ ID NO: 499949 - DNA, 55 bp, Artificial
  Synthetic oligonucleotide
ggccatggggatgtagatgcggcacaaaccgggagttaaaaggcctccctacaat

SEQ ID NO: 499950 - DNA, 55 bp, Artificial
  Synthetic oligonucleotide
ggcgcaaactatctgtatgtccacgggcaccgaagtttctgaacccagcggcgtg

SEQ ID NO: 499951 - DNA, 55 bp, Artificial
  Synthetic oligonucleotide
ggcgtagtgcgtcggcattatggtcgattgcccctaaagtggtggatcgcccaac

SEQ ID NO: 499952 - DNA, 55 bp, Artificial
  Synthetic oligonucleotide
gggcgacaaagtaggtgccattcgcctgatcaacaaacgagcggcagtctggtct

SEQ ID NO: 499953 - DNA, 55 bp, Artificial
  Synthetic oligonucleotide
gggcgttgcgaacaaaccgccaaatcggaccaagacaactgcatgattttggacg

SEQ ID NO: 499954 - DNA, 55 bp, Artificial
  Synthetic oligonucleotide
gggctgcctagttgtcgccggctcttggttcgcggctatgcttgtagcgggagtt

SEQ ID NO: 499955 - DNA, 55 bp, Artificial
  Synthetic oligonucleotide
ggggcgctcaggcacggggctttatacgacttgattgaccgtgaaagcacgcacg

SEQ ID NO: 499956 - DNA, 55 bp, Artificial
  Synthetic oligonucleotide
ggggtactgcgatggcgggcgttgtcctgtgggtgcaagcgttattcttgcttga

SEQ ID NO: 499957 - DNA, 55 bp, Artificial
  Synthetic oligonucleotide
gggtacacgcagtggctttgctatcctccttgtctcgagacgaccaacgaggttc

SEQ ID NO: 499958 - DNA, 55 bp, Artificial
  Synthetic oligonucleotide
gggtccgcaagtcttcgagtagttgtgagtcgttcatatgtctcccattaacgcc

SEQ ID NO: 499959 - DNA, 55 bp, Artificial
  Synthetic oligonucleotide
gggtgttcagcggcaagttgttcgcggtgtgagtcggcggcgtacctggcttaga

SEQ ID NO: 499960 - DNA, 55 bp, Artificial
  Synthetic oligonucleotide
ggtggtctggggcgttgtatgaatgagcgcatgccaggccctctggccgtggata

SEQ ID NO: 499961 - DNA, 55 bp, Artificial
  Synthetic oligonucleotide
gtcacggccacgcaagcgaggagtcagccattggtcaacccggcaaagctgccaa

SEQ ID NO: 499962 - DNA, 55 bp, Artificial
  Synthetic oligonucleotide
gtcagtgcggcaacaaatgaccgcctgaacacccagtgcccatccaacaggagtg

SEQ ID NO: 499963 - DNA, 55 bp, Artificial
  Synthetic oligonucleotide
gtcgatatgtgctggtcctccttgggtgctttgtggaacgtgtttctcccgtgag

SEQ ID NO: 499964 - DNA, 55 bp, Artificial
  Synthetic oligonucleotide
gtgatgccgtgaatcggaagcaggaaatactcaaagatggccacttcacaggttg

SEQ ID NO: 499965 - DNA, 55 bp, Artificial
  Synthetic oligonucleotide
gttagacgtgaaacttatcgtgacctgattagtcgggatcagattcctgcccgcc

SEQ ID NO: 499966 - DNA, 55 bp, Artificial
  Synthetic oligonucleotide
gttcgcttaaagaattatagttggcatacgtatgaatttccaaacccctgaagcc

SEQ ID NO: 499967 - DNA, 55 bp, Artificial
  Synthetic oligonucleotide
gttgttcagattgatccgactctccaaaatcacggcctgagcttacacggcccgc

SEQ ID NO: 499968 - DNA, 55 bp, Artificial
  Synthetic oligonucleotide
tagctgcctaacccctgcccctcaagccagggctgaaggctgcgtggattcgtac

SEQ ID NO: 499969 - DNA, 55 bp, Artificial
  Synthetic oligonucleotide
ccctgaagttcacagtcacttttgtcatggcagccgctttgtctgcaggtgccgc

SEQ ID NO: 499970 - DNA, 55 bp, Artificial
  Synthetic oligonucleotide
cccggtgttcttgttccacatcgtgatctgctgcgtgatgtacgcgttgagcgag

SEQ ID NO: 499971 - DNA, 55 bp, Artificial
  Synthetic oligonucleotide
atcgctgcccttcgcgtcaagcgtttaggcgcggcgccgagtagaaagatcccga

SEQ ID NO: 499972 - DNA, 55 bp, Artificial
  Synthetic oligonucleotide
cccgcgcggcctcttcagaatcccttccttgctttgagccgctgcacaacgagca

SEQ ID NO: 499973 - DNA, 55 bp, Artificial
  Synthetic oligonucleotide
cccgcattcttttcgtaggaaaccaggatgcccgcgactattcactcttttcacc

SEQ ID NO: 499974 - DNA, 55 bp, Artificial
  Synthetic oligonucleotide
agcctcccagatcgaagcgccagaaaatttcgctccgcccatcgcctgtgagggc

SEQ ID NO: 499975 - DNA, 55 bp, Artificial
  Synthetic oligonucleotide
cccgaagcccaactgtccatcagcgagggcctgtcgagtgcgatgcaagaaaacc

SEQ ID NO: 499976 - DNA, 55 bp, Artificial
  Synthetic oligonucleotide
ccccagggatgacgagctgatccatccagaggcaacctacgaagtcaagcctggc

SEQ ID NO: 499977 - DNA, 55 bp, Artificial
  Synthetic oligonucleotide
ccccaccgctatgagagaccacgcccttttcgacaagatagacctccatctcata

SEQ ID NO: 499978 - DNA, 55 bp, Artificial
  Synthetic oligonucleotide
cccagtcgcgggaggcaacagcgtacgagcgcgggaatttcaatgactgatcggg

SEQ ID NO: 499979 - DNA, 55 bp, Artificial
  Synthetic oligonucleotide
ccattccatagctgacgttgtgaaacagcaggacccgtgtggcgtgctcgaagct

SEQ ID NO: 499980 - DNA, 55 bp, Artificial
  Synthetic oligonucleotide
agcgttagaaaagggaaaccgaaatgaccagctttgcacacgttgagtaccccac

SEQ ID NO: 499981 - DNA, 55 bp, Artificial
  Synthetic oligonucleotide
ccatatacggcctctatcgaagggtaaaccttaaattcgacaggcaatccacctt

SEQ ID NO: 499982 - DNA, 55 bp, Artificial
  Synthetic oligonucleotide
aggatctggcaacatggtgggcctggacagcacaggacccgggtttgtcttcgcc

SEQ ID NO: 499983 - DNA, 55 bp, Artificial
  Synthetic oligonucleotide
ccagactccggtagaactgcgcaaactgtgggtcgcggccaaaagcctctgcgta

SEQ ID NO: 499984 - DNA, 55 bp, Artificial
  Synthetic oligonucleotide
ccacgttttcaacgctgccgcgcaagaccacctggcgctctccgatctttgtcgc

SEQ ID NO: 499985 - DNA, 55 bp, Artificial
  Synthetic oligonucleotide
caccaggggtccgccagtagccaaaaccctagggagcctttgtctgcagccaacg

SEQ ID NO: 499986 - DNA, 55 bp, Artificial
  Synthetic oligonucleotide
catggcttcatgcgaaatttgccttggaaattggtatccgattcgtcaaatggtc

SEQ ID NO: 499987 - DNA, 55 bp, Artificial
  Synthetic oligonucleotide
cagttgcgactcattagttcaacccaagactggagagtttcatgctgtcacgccg

SEQ ID NO: 499988 - DNA, 55 bp, Artificial
  Synthetic oligonucleotide
atactgcgccctcccaatgagcacggagagagacacccatgttgcgtcgcagtta

SEQ ID NO: 499989 - DNA, 55 bp, Artificial
  Synthetic oligonucleotide
cagtgcactgcacgaaatcatctacggcgttattccgcaggtgatgcctctgtgg

SEQ ID NO: 499990 - DNA, 55 bp, Artificial
  Synthetic oligonucleotide
cagtctggtggaccctcacgacatcttttgcccatgtgggctagttagaatgccc

SEQ ID NO: 499991 - DNA, 55 bp, Artificial
  Synthetic oligonucleotide
caggtggggcaatcttgggtaagccttgcgcgaagtcacgcttgttattgtccca

SEQ ID NO: 499992 - DNA, 55 bp, Artificial
  Synthetic oligonucleotide
atcgaccacgcaagtcgctgattggtcggggtagatgtcggtgcccagggccaga

SEQ ID NO: 499993 - DNA, 55 bp, Artificial
  Synthetic oligonucleotide
cagggtcagttggcaactcaatacttcaatggacaaaccacggagattgatcgcc

SEQ ID NO: 499994 - DNA, 55 bp, Artificial
  Synthetic oligonucleotide
cagggcccgcttcctgtcggttctctcctacagcgataaatttacaaagggctac

SEQ ID NO: 499995 - DNA, 55 bp, Artificial
  Synthetic oligonucleotide
caggacccaccaaacaaaagccgcaaggcacaaagcgccgacgctattataaaga

SEQ ID NO: 499996 - DNA, 55 bp, Artificial
  Synthetic oligonucleotide
cagctaaaccgcaaagtgccaatccaatattgaccagggtgttccactgacctgc

SEQ ID NO: 499997 - DNA, 55 bp, Artificial
  Synthetic oligonucleotide
cacgtggaaagctgtctagaaacatggtgatggtgcctggtccgggctctgaatg

SEQ ID NO: 499998 - DNA, 55 bp, Artificial
  Synthetic oligonucleotide
cacgctgtgtatgaaacaccgcctgaagacagacccacggggcagaaataacggc

SEQ ID NO: 499999 - DNA, 55 bp, Artificial
  Synthetic oligonucleotide
cacgctacgaactgtggtcttgtcctgctgacatatgacgcgatatgcgctcgtg

SEQ ID NO: 500000 - DNA, 55 bp, Artificial
  Synthetic oligonucleotide
caccgcgactcctgacgagcgccaaagaccaagagggaacaccgacatgcgcatg

SEQ ID NO: 500001 - DNA, 55 bp, Artificial
  Synthetic oligonucleotide
cggccgtggcacagttctggttgctgcgatcattgccttaagctgtgtcagtaac

SEQ ID NO: 500002 - DNA, 55 bp, Artificial
  Synthetic oligonucleotide
cggccaaatactagttacagacggggaaaccgctttgtacggacttgaggcccga

SEQ ID NO: 500003 - DNA, 55 bp, Artificial
  Synthetic oligonucleotide
cggatatattctcaccggatttgttggcctattggttactgttggggccacttgg

SEQ ID NO: 500004 - DNA, 55 bp, Artificial
  Synthetic oligonucleotide
cggagggcgcattatccagttgacggcagaagtaggacctggacagtatgaagga

SEQ ID NO: 500005 - DNA, 55 bp, Artificial
  Synthetic oligonucleotide
cgcttgtatagtccccagccgtgaatcgcccgacgcccgccatcgtgagccagtc

SEQ ID NO: 500006 - DNA, 55 bp, Artificial
  Synthetic oligonucleotide
cgctggaaattcaacaaattttggaaggcacgccgcacctacaagccagcggcac

SEQ ID NO: 500007 - DNA, 55 bp, Artificial
  Synthetic oligonucleotide
cgctcagccccggctttcgcagtttaaagttcggtggggcgagatctcccctcga

SEQ ID NO: 500008 - DNA, 55 bp, Artificial
  Synthetic oligonucleotide
aaccgatggatgatcggccaccccgcaaccccgttcgacacgcagcaccatggaa

SEQ ID NO: 500009 - DNA, 55 bp, Artificial
  Synthetic oligonucleotide
aaccgatggcactggagccttgggagatcagcgacttgtccaggggtcgcatggc

SEQ ID NO: 500010 - DNA, 55 bp, Artificial
  Synthetic oligonucleotide
aagggacggtgctggatgacggggctgctactgtgcatcagacggcgacgctaca

SEQ ID NO: 500011 - DNA, 55 bp, Artificial
  Synthetic oligonucleotide
aagtgtcaaacaggggtatgcacggagaagcggggccggtgcctggcaagacgca

SEQ ID NO: 500012 - DNA, 55 bp, Artificial
  Synthetic oligonucleotide
cgcgctgaggtagctcagacccacctacctggggttactacaattttctctcaag

SEQ ID NO: 500013 - DNA, 55 bp, Artificial
  Synthetic oligonucleotide
cgccgttcagcgaggaatgccccgaaaactgaagcgcgttccagccactcaccca

SEQ ID NO: 500014 - DNA, 55 bp, Artificial
  Synthetic oligonucleotide
cgcccacgggtccttgcgggaccagatccctaggtgcgcgagcaggatgtcacca

SEQ ID NO: 500015 - DNA, 55 bp, Artificial
  Synthetic oligonucleotide
cgcactgtcctgggccatccatgcctcgttattgattgcacaacgcgccgcgtgc

SEQ ID NO: 500016 - DNA, 55 bp, Artificial
  Synthetic oligonucleotide
aatactgggtgcaatcgccctcgctgcattgtcggaactggggtgtcaatacgga

SEQ ID NO: 500017 - DNA, 55 bp, Artificial
  Synthetic oligonucleotide
ccgaccaccgcaccacggaaagcttgtcagctcctgtaagggcagcaacatgcac

SEQ ID NO: 500018 - DNA, 55 bp, Artificial
  Synthetic oligonucleotide
ccgcgatccaggagagtttgtctatcatctgaattctttgtagttgctcggtcgg

SEQ ID NO: 500019 - DNA, 55 bp, Artificial
  Synthetic oligonucleotide
ccgggattgtcacgctcccacaagaaatagcaaacgccacctttcagccccacac

SEQ ID NO: 500020 - DNA, 55 bp, Artificial
  Synthetic oligonucleotide
cctcgggaagcgattgcagtgaattgtaggatgtggggtcaggccgagttttcgc

SEQ ID NO: 500021 - DNA, 55 bp, Artificial
  Synthetic oligonucleotide
acgcgtcaggaaccacgtcggcaagtgtcacaatttgcaccttcgcccgtggcgg

SEQ ID NO: 500022 - DNA, 55 bp, Artificial
  Synthetic oligonucleotide
cctgaaacttttcaaactgggttacagctgggccggtcccatgagtctgtgcgcg

SEQ ID NO: 500023 - DNA, 55 bp, Artificial
  Synthetic oligonucleotide
cctgcaatgagattgggcacatatcccaggctggagaccgctgcctgcacccggg

SEQ ID NO: 500024 - DNA, 55 bp, Artificial
  Synthetic oligonucleotide
atttgcccgctctgagaacggtttgacatcggtgggcttgacgctcaaacgccac

SEQ ID NO: 500025 - DNA, 55 bp, Artificial
  Synthetic oligonucleotide
atgttgagcaggtctacattcgatcactcaataacggtaacggcatcgatgcatc

SEQ ID NO: 500026 - DNA, 55 bp, Artificial
  Synthetic oligonucleotide
aatttcggtcatttgtagacgccatacgcgacatcggttgcgcacacacgtgtgg

SEQ ID NO: 500027 - DNA, 55 bp, Artificial
  Synthetic oligonucleotide
cctggcgaaggaagcgggactgacttcgggcgctttctatgttcatttcgactcc

SEQ ID NO: 500028 - DNA, 55 bp, Artificial
  Synthetic oligonucleotide
cgaagccaccgggcagtccgtcatgattgagatgtacgcggatcgtctggaggtg

SEQ ID NO: 500029 - DNA, 55 bp, Artificial
  Synthetic oligonucleotide
aatggatggggcactcctgcggccagggtgtccaacgctctcggggtgcaagtat

SEQ ID NO: 500030 - DNA, 55 bp, Artificial
  Synthetic oligonucleotide
cgagaaagcaatgatgaacgcagtgactatcgccacaatatagtagatggggaag

SEQ ID NO: 500031 - DNA, 55 bp, Artificial
  Synthetic oligonucleotide
cgatgcaggagtggttttctccgtagagacctgaaaacccaccagcaccggcgtg

SEQ ID NO: 500032 - DNA, 54 bp, Artificial
  Synthetic oligonucleotide
gtgcacatgctgccaaggcaaatatataggcacagtgaactgtctctgtttcgg

SEQ ID NO: 500033 - DNA, 54 bp, Artificial
  Synthetic oligonucleotide
atgtatctgggagctttagggagttcaacttcggactgggagagggtttacata

SEQ ID NO: 500034 - DNA, 54 bp, Artificial
  Synthetic oligonucleotide
tagaacctgttcttgggttgtactgggcagcacaagccccttgatggaacacag

SEQ ID NO: 500035 - DNA, 54 bp, Artificial
  Synthetic oligonucleotide
tcccgcaatggtttgcggtagatgacacaaaggaagctcaagtggcacgttacc

SEQ ID NO: 500036 - DNA, 54 bp, Artificial
  Synthetic oligonucleotide
agcaattacagccgtttcgctttgaccagcagcaccgattactactcggtcggc

SEQ ID NO: 500037 - DNA, 54 bp, Artificial
  Synthetic oligonucleotide
tctcggtttgcaatcagcaggccactcttggctgcgtcttcgtagatggagact

SEQ ID NO: 500038 - DNA, 54 bp, Artificial
  Synthetic oligonucleotide
acgcaacgggatcatcgggttttggcagtgctgtgaacgtgggaggcacatttt

SEQ ID NO: 500039 - DNA, 54 bp, Artificial
  Synthetic oligonucleotide
aaaagtgtagttgtctagttgtgacgcgtggcggctgatacgccgaccggggtc

SEQ ID NO: 500040 - DNA, 54 bp, Artificial
  Synthetic oligonucleotide
cggcgttttgacgagaaccatgaatctccttgaactgaaacggaacaacagggg

SEQ ID NO: 500041 - DNA, 54 bp, Artificial
  Synthetic oligonucleotide
cctggcctggcacatgcacgtaggcgtggcttgagaacacgtccaccggcgatc

SEQ ID NO: 500042 - DNA, 54 bp, Artificial
  Synthetic oligonucleotide
gagaccgcacgcggactcgcatcagataccgattttgccgtgatggcacaagag

SEQ ID NO: 500043 - DNA, 54 bp, Artificial
  Synthetic oligonucleotide
gaggtggtacgggagcgcattgaccactgcaacgtgcccgtccagggcattcgt

SEQ ID NO: 500044 - DNA, 54 bp, Artificial
  Synthetic oligonucleotide
gatccgtgaagggactgcggcgacacagccacagatggggcaaaaccagaccat

SEQ ID NO: 500045 - DNA, 53 bp, Artificial
  Synthetic oligonucleotide
aaaagttcgatgggcgaatccggctaagctacacaaagaccgaggacgtccag

SEQ ID NO: 500046 - DNA, 53 bp, Artificial
  Synthetic oligonucleotide
ttcgtcaccgtcttaattattgactgctcttcgctcaggaacgccaagcaagg

SEQ ID NO: 500047 - DNA, 53 bp, Artificial
  Synthetic oligonucleotide
gacccgtcataacgctggacgaactcaggagacaacagacatgaagaaacgca

SEQ ID NO: 500048 - DNA, 53 bp, Artificial
  Synthetic oligonucleotide
accaaggcgggtatctatattttctatgacacccggggaagagcgctctacgc

SEQ ID NO: 500049 - DNA, 53 bp, Artificial
  Synthetic oligonucleotide
acttcattgcttcgagtgatcacggcaaaacgctgaccgtctccactgacccc

SEQ ID NO: 500050 - DNA, 53 bp, Artificial
  Synthetic oligonucleotide
agaggtgaaatactagccctgttgtgctacgggtcggccaagtacggagtttt

SEQ ID NO: 500051 - DNA, 53 bp, Artificial
  Synthetic oligonucleotide
tcccctgcaggttcaatgatctccacctgggcatgggcggacgacaggcacgc

SEQ ID NO: 500052 - DNA, 53 bp, Artificial
  Synthetic oligonucleotide
gctacgaggaaagtaggctagacgcgagcgagcggcgtagatttatcgtaaaa

SEQ ID NO: 500053 - DNA, 53 bp, Artificial
  Synthetic oligonucleotide
gctcttaccagacttgatttgaagcgccagcagtttgcctgtcgggtaagggt

SEQ ID NO: 500054 - DNA, 53 bp, Artificial
  Synthetic oligonucleotide
caaaaggatggaatgccacccaaagtccgaaagcgttgagcgcgagccatgcc

SEQ ID NO: 500055 - DNA, 52 bp, Artificial
  Synthetic oligonucleotide
atgcctgcggacgaaccacccaccacgttccgcgaaaagctgcatctttcgc

SEQ ID NO: 500056 - DNA, 52 bp, Artificial
  Synthetic oligonucleotide
cgtctataagcacctgatgcgcgactcgcaaaactaccagatgggcccggct

SEQ ID NO: 500057 - DNA, 52 bp, Artificial
  Synthetic oligonucleotide
cgtggttcgagcaagcgctcaaccggtcaagtcaggcgcactttggtgcccc

SEQ ID NO: 500058 - DNA, 52 bp, Artificial
  Synthetic oligonucleotide
caagccctttccacggcaacgctcaactgctcatcccgcgcttgccaatcga

SEQ ID NO: 500059 - DNA, 52 bp, Artificial
  Synthetic oligonucleotide
tgtatgcccgagtttgcgataggtgtttgcgtttcatgcccggaatttgcat

SEQ ID NO: 500060 - DNA, 52 bp, Artificial
  Synthetic oligonucleotide
tggaattcaagagcctgattcgctgggcgattgatgtggatccgattgcgat

SEQ ID NO: 500061 - DNA, 52 bp, Artificial
  Synthetic oligonucleotide
ggatgagatccctaaagttcgggctgtcaaccacccaacccggagaaattcc

SEQ ID NO: 500062 - DNA, 52 bp, Artificial
  Synthetic oligonucleotide
gcatgaactttgagccccggtaccgctattccacgccagacaccgtatgggg

SEQ ID NO: 500063 - DNA, 52 bp, Artificial
  Synthetic oligonucleotide
gtttaccctatcaatatcaaggcggccgaacagttttccggcatcctcaaaa

SEQ ID NO: 500064 - DNA, 52 bp, Artificial
  Synthetic oligonucleotide
agtttaagggccccgaccccacctcttctggtgggtcacccgctctggtcgt

SEQ ID NO: 500065 - DNA, 52 bp, Artificial
  Synthetic oligonucleotide
catgtacccggcgagatcacgatccagtgcatttcgggtgaggcagacgttg

SEQ ID NO: 500066 - DNA, 51 bp, Artificial
  Synthetic oligonucleotide
gtccttaagcctggcacctgataagtctgcgattgcagcgtccacagtcgc

SEQ ID NO: 500067 - DNA, 51 bp, Artificial
  Synthetic oligonucleotide
gcctgccatgcggggccggtgataacgacagcccactgcaaagcggcgacc

SEQ ID NO: 500068 - DNA, 51 bp, Artificial
  Synthetic oligonucleotide
cgctactcgagcttgacccaaatcaatcctaaggcatgtcttcgcgctgtc

SEQ ID NO: 500069 - DNA, 51 bp, Artificial
  Synthetic oligonucleotide
cgcggcctagagtttgcactccagaccgcaggtgctgatttagcgcttgcg

SEQ ID NO: 500070 - DNA, 51 bp, Artificial
  Synthetic oligonucleotide
agactgctctgcgtgctattgaaagcgtagtgctctgccgccaaccattcc

SEQ ID NO: 500071 - DNA, 51 bp, Artificial
  Synthetic oligonucleotide
tgtcgtatcacggtctgcggaatacaccgatttcattcgcagggaaatgga

SEQ ID NO: 500072 - DNA, 51 bp, Artificial
  Synthetic oligonucleotide
gacgcgctatgcctacgacacagagggccgcgtaatcgcacagaccacgcc

SEQ ID NO: 500073 - DNA, 51 bp, Artificial
  Synthetic oligonucleotide
ggcgatgaaccacaccagctgcttcggtggaaagcgatcctcatcgacgtt

SEQ ID NO: 500074 - DNA, 51 bp, Artificial
  Synthetic oligonucleotide
accgttaggcaacatcgtcgcggtgtggtttgctctggactgaggcatcgc

SEQ ID NO: 500075 - DNA, 51 bp, Artificial
  Synthetic oligonucleotide
tgaaaatttgtgccaataacgttttctcagaggccaagtcagctgtagcct

SEQ ID NO: 500076 - DNA, 51 bp, Artificial
  Synthetic oligonucleotide
gttggcgtctgacgcgaccttgctggcccacaaagaccactggttggtgcg

SEQ ID NO: 500077 - DNA, 50 bp, Artificial
  Synthetic oligonucleotide
cgattcggatgggttgcagaaatccgactcgacattcatccgctacctgt

SEQ ID NO: 500078 - DNA, 50 bp, Artificial
  Synthetic oligonucleotide
ttaaccagagtcatgacttgagtgctgcgatcccggttaaacgcgagatt

SEQ ID NO: 500079 - DNA, 50 bp, Artificial
  Synthetic oligonucleotide
agaaaccagcggtgcaggatggctcatccgtgaattatcaatccgcccaa

SEQ ID NO: 500080 - DNA, 50 bp, Artificial
  Synthetic oligonucleotide
gttggaacacggccagcatttaccccatagacgtgattggttccaaaagt

SEQ ID NO: 500081 - DNA, 55 bp, Artificial
  Synthetic oligonucleotide
gcctgacaccccgttccgttgtagcgaaatccgttctactgcgctctgtaggaag

SEQ ID NO: 500082 - DNA, 55 bp, Artificial
  Synthetic oligonucleotide
gcgaatcggcagactgcgggactttagagcagaaagcgttagccaagccatcgcg

SEQ ID NO: 500083 - DNA, 55 bp, Artificial
  Synthetic oligonucleotide
gcgaccagggaccacaacctattcggcatgaaatgggcttcatcgtacgcctccg

SEQ ID NO: 500084 - DNA, 55 bp, Artificial
  Synthetic oligonucleotide
gcgacgaatcgcgagtccttcttagaaacgcacagcctccacttcccatatcggt

SEQ ID NO: 500085 - DNA, 55 bp, Artificial
  Synthetic oligonucleotide
gcgcaaaccctgaccggaccgtattcgtcgacctacgacgtggattccgtgcttc

SEQ ID NO: 500086 - DNA, 55 bp, Artificial
  Synthetic oligonucleotide
gcgcgcaatgccggtagttatcgtgccctcatcaggcgaaacgtacccttgcaca

SEQ ID NO: 500087 - DNA, 55 bp, Artificial
  Synthetic oligonucleotide
gcgctcgacgaaacgcgggctcttcgtgatttaaacgcggcgctaacacctaacg

SEQ ID NO: 500088 - DNA, 55 bp, Artificial
  Synthetic oligonucleotide
gcggcaacctgacgtccagtggggcgggtggcaacaagccaacacgaaatgtcct

SEQ ID NO: 500089 - DNA, 55 bp, Artificial
  Synthetic oligonucleotide
gcggcgatcgtacccaaaagcctgatgttattaggaaagctataattgatcgcct

SEQ ID NO: 500090 - DNA, 55 bp, Artificial
  Synthetic oligonucleotide
gcggtatgttgatgccaacaatagtcctatgggcgatatgattgttgaagaagct

SEQ ID NO: 500091 - DNA, 55 bp, Artificial
  Synthetic oligonucleotide
gcgtgccaagcttgctaccaaacgtatttacacctttgttgtcccgaagcacagc

SEQ ID NO: 500092 - DNA, 55 bp, Artificial
  Synthetic oligonucleotide
gctaccaaggcacttactgcattgggatacaaggttaccgcaagcaatcacacgt

SEQ ID NO: 500093 - DNA, 55 bp, Artificial
  Synthetic oligonucleotide
gctactttcaatgacctcggactttccgagaaggctctctctgccgtcgtcgacc

SEQ ID NO: 500094 - DNA, 55 bp, Artificial
  Synthetic oligonucleotide
gctcgataccacgttttcttcggatcgctaccttgaatttaatgccaaaggcgtt

SEQ ID NO: 500095 - DNA, 55 bp, Artificial
  Synthetic oligonucleotide
gctggtacgaagcggccgagggcgagtttacgaactacgccaatggtgacgaacc

SEQ ID NO: 500096 - DNA, 55 bp, Artificial
  Synthetic oligonucleotide
gctgttcatccatttgttaccccaaaggaatcataaacctgctacgcttcgggcg

SEQ ID NO: 500097 - DNA, 55 bp, Artificial
  Synthetic oligonucleotide
ggaaatagaccgctatctcgcaactttgtaggaggagcgcatgcattcgaagacc

SEQ ID NO: 500098 - DNA, 55 bp, Artificial
  Synthetic oligonucleotide
gaagatggggcgcgcttacggatgttgccattgatagtgcggggatactcgctgg

SEQ ID NO: 500099 - DNA, 55 bp, Artificial
  Synthetic oligonucleotide
gaattcggcacctcttacgacccgttcgatctgacgaggattggcctcggaggtc

SEQ ID NO: 500100 - DNA, 55 bp, Artificial
  Synthetic oligonucleotide
gacacgcaggcgtcccctcaggttcgagctgagcgaagaagtaaagagcctgctg

SEQ ID NO: 500101 - DNA, 55 bp, Artificial
  Synthetic oligonucleotide
gaccgacatcgtccagtgtaggagttcgcaagcggggcagccgatactggaagca

SEQ ID NO: 500102 - DNA, 55 bp, Artificial
  Synthetic oligonucleotide
gacctgggcaagcgacagccccaggtacttcaaggtcagaatgcgatacaggtct

SEQ ID NO: 500103 - DNA, 55 bp, Artificial
  Synthetic oligonucleotide
gacgcttcggcgttttgagaagaagaggattgcatctatgattcgcatttacgat

SEQ ID NO: 500104 - DNA, 55 bp, Artificial
  Synthetic oligonucleotide
gagccctttcgtccctagatgcgtcgccaggtttcatctgtaaaccgattcgagc

SEQ ID NO: 500105 - DNA, 55 bp, Artificial
  Synthetic oligonucleotide
gagccgcgacgtttccgaaccttcgtgaatgcgatggcacatttcgatggtgggg

SEQ ID NO: 500106 - DNA, 55 bp, Artificial
  Synthetic oligonucleotide
gatattcagaagggactcgatatgggtatgcaaagctatatggcgacggtatttg

SEQ ID NO: 500107 - DNA, 55 bp, Artificial
  Synthetic oligonucleotide
gatccgctgagcaggccattccgcatcgaatgcatttccgcagggaatgcagggg

SEQ ID NO: 500108 - DNA, 55 bp, Artificial
  Synthetic oligonucleotide
gatgtcaacttttgcattatacccaaagtcgaaagcgtagtatgaacgccacgca

SEQ ID NO: 500109 - DNA, 55 bp, Artificial
  Synthetic oligonucleotide
gattcggtagttgcaccccagcgctgcgagcggtaatttggccactcaagctttg

SEQ ID NO: 500110 - DNA, 55 bp, Artificial
  Synthetic oligonucleotide
gcaccccttggctattgccccatttcgtcagagtcgcgtataccatggcactcct

SEQ ID NO: 500111 - DNA, 55 bp, Artificial
  Synthetic oligonucleotide
gcacgtagccagcatcgggacggtgttggagcgagtgctcgtctgtatgccactc

SEQ ID NO: 500112 - DNA, 55 bp, Artificial
  Synthetic oligonucleotide
gcagggaccgtatacgtgagctcgggatccatgattgcgaacttgggacgtgcgc

SEQ ID NO: 500113 - DNA, 55 bp, Artificial
  Synthetic oligonucleotide
gcattacgggctggttctgcaacgctatgtcgtagggcagatggggctctagggc

SEQ ID NO: 500114 - DNA, 55 bp, Artificial
  Synthetic oligonucleotide
gccctcttccacgattgcaacggtctggctttcgtaggaaagcgtcacttcgcgg

SEQ ID NO: 500115 - DNA, 55 bp, Artificial
  Synthetic oligonucleotide
taccccaccagacgaccgcccgtccgcttgtagtccatcaccctgacgaaggctt

SEQ ID NO: 500116 - DNA, 55 bp, Artificial
  Synthetic oligonucleotide
tagcgtcctatctggcacaaaaccgcgagatgctttcggtattcaccgtgcgcgt

SEQ ID NO: 500117 - DNA, 55 bp, Artificial
  Synthetic oligonucleotide
tattttggcgctggcgggcacctatcttctcgcgaccggaggcaacccctccaac

SEQ ID NO: 500118 - DNA, 55 bp, Artificial
  Synthetic oligonucleotide
tccgggaatgtatgtctcatttccggatccgccggtcagcgaatctgtgatgatc

SEQ ID NO: 500119 - DNA, 55 bp, Artificial
  Synthetic oligonucleotide
tcgtccacgcgagccgccagcatattctcggtgtgggccgccgcatgggccgatt

SEQ ID NO: 500120 - DNA, 55 bp, Artificial
  Synthetic oligonucleotide
tcgtgccagatcaataagggcagaaacttcggccttgcgcgtttcttcgcttgtg

SEQ ID NO: 500121 - DNA, 55 bp, Artificial
  Synthetic oligonucleotide
tgacctggaccgaacctttccccatggttgtcgtgcccgtaaggactgcgcggtc

SEQ ID NO: 500122 - DNA, 55 bp, Artificial
  Synthetic oligonucleotide
tgcgtacctttcggtcggattctgacgtgcgtgcgcgatgggcgtcttgcactgc

SEQ ID NO: 500123 - DNA, 55 bp, Artificial
  Synthetic oligonucleotide
tgctgcgtcttagatgcacgttttccccgtgctacaatcgctcgcgaacgtggga

SEQ ID NO: 500124 - DNA, 55 bp, Artificial
  Synthetic oligonucleotide
tgctgtgccaggcaagtttgacgagagttttactgcgctaggcaagtggtccgtt

SEQ ID NO: 500125 - DNA, 55 bp, Artificial
  Synthetic oligonucleotide
tgggagccccagctcacttcccggctcacacaggctaactgtagtaaaagcagcc

SEQ ID NO: 500126 - DNA, 55 bp, Artificial
  Synthetic oligonucleotide
tggttgcgctccgaacttctaaacgtttccatatgcacgctacagctctgcggga

SEQ ID NO: 500127 - DNA, 55 bp, Artificial
  Synthetic oligonucleotide
tgtcgagaaatacgtgcgatgcctggacaaagtcactcattggctgctccttcgg

SEQ ID NO: 500128 - DNA, 55 bp, Artificial
  Synthetic oligonucleotide
tgtcgcccttgcacatctccttatatatatgtcggaagccaaccggcttgaccac

SEQ ID NO: 500129 - DNA, 55 bp, Artificial
  Synthetic oligonucleotide
ttattgcaccagttaaacacggtaatttacactttcgcacacttagcgtagctag

SEQ ID NO: 500130 - DNA, 55 bp, Artificial
  Synthetic oligonucleotide
ttccatgccggggaagtcagtttggcggagcgcctcatagaggacaacggcggct

SEQ ID NO: 500131 - DNA, 55 bp, Artificial
  Synthetic oligonucleotide
ttcgcgcagtgcaggtatacgtgacgcatccattgctggcacgccttcaagcggg

SEQ ID NO: 500132 - DNA, 55 bp, Artificial
  Synthetic oligonucleotide
ggactcccagccgttttcgctcggatggtagaaacagccccgttcaaggccttcg

SEQ ID NO: 500133 - DNA, 55 bp, Artificial
  Synthetic oligonucleotide
ggatccccagagttgccctggacgattggatagtcgatcccagtcccggggacgt

SEQ ID NO: 500134 - DNA, 55 bp, Artificial
  Synthetic oligonucleotide
gggcaacgactataattcataacttgccatacttatttcgaaacatcgtaaggag

SEQ ID NO: 500135 - DNA, 55 bp, Artificial
  Synthetic oligonucleotide
gggccatgcgtgctctctggcatcgcggtcaatcttaatgcgatcttaatacgca

SEQ ID NO: 500136 - DNA, 55 bp, Artificial
  Synthetic oligonucleotide
gggcgcaagcgagcaaacgccgcattcataaagcgcacatgtacgagtagtgcgt

SEQ ID NO: 500137 - DNA, 55 bp, Artificial
  Synthetic oligonucleotide
gggcgtcgtgttctgtgagatcgtcccggtccgtttattgtctatccttcatcgg

SEQ ID NO: 500138 - DNA, 55 bp, Artificial
  Synthetic oligonucleotide
gggcgttgccacaacgcgcgtgctatctacctgctttaacgtgtcggttacgcgg

SEQ ID NO: 500139 - DNA, 55 bp, Artificial
  Synthetic oligonucleotide
ggggcttcctcgtaggagggacctgcaatcattgacgatatgagcgcgcaagggc

SEQ ID NO: 500140 - DNA, 55 bp, Artificial
  Synthetic oligonucleotide
gggttccctcaggttcagacacttttgccctcttcgcggagtcaggatcggccac

SEQ ID NO: 500141 - DNA, 55 bp, Artificial
  Synthetic oligonucleotide
ggtacccagattcttcatgcgcctgtctttaacttccacgccacagcctaaaacg

SEQ ID NO: 500142 - DNA, 55 bp, Artificial
  Synthetic oligonucleotide
ggtattggcgtagtaggtgttcgttgagctggagaatccgctggtgaaaatggtt

SEQ ID NO: 500143 - DNA, 55 bp, Artificial
  Synthetic oligonucleotide
ggtgcgcctgttcttcgtcgaaaatcttatctgcgcgtccgttgttgcgggaggc

SEQ ID NO: 500144 - DNA, 55 bp, Artificial
  Synthetic oligonucleotide
gtagggttcacctgtgttacctttgtgttctgccgttcataaaacgcattgagcg

SEQ ID NO: 500145 - DNA, 55 bp, Artificial
  Synthetic oligonucleotide
gtcacgcattcctccttttgatagatagttgtattttacgccagtttgcccgcgg

SEQ ID NO: 500146 - DNA, 55 bp, Artificial
  Synthetic oligonucleotide
gtcgcgggagccttgatgtgggtggtttcgggtcggctccaggtgagaaaaccac

SEQ ID NO: 500147 - DNA, 55 bp, Artificial
  Synthetic oligonucleotide
gtcgtatggtgctattgtgctccttgaaccagcagatgaacgtgataaaaggaaa

SEQ ID NO: 500148 - DNA, 55 bp, Artificial
  Synthetic oligonucleotide
gtgggcacctacgagaaaggcccgtcatgacctgcgattccaaaaccgatcgtcg

SEQ ID NO: 500149 - DNA, 55 bp, Artificial
  Synthetic oligonucleotide
cgaggtttcgatgcttatgtcggagatcgtatcgtggcatctggctggacgtgaa

SEQ ID NO: 500150 - DNA, 55 bp, Artificial
  Synthetic oligonucleotide
cgagcgatgaatttgagcatagggttgctattgtaccttttcttcgttcgtgcga

SEQ ID NO: 500151 - DNA, 55 bp, Artificial
  Synthetic oligonucleotide
cgagacgtccccaacgtgaccgcatcaggggcactcacggtcagtgtgatatcgg

SEQ ID NO: 500152 - DNA, 55 bp, Artificial
  Synthetic oligonucleotide
cgaatagcggcaaggatgttggctattatcgcctggccttcagatccgcgctcac

SEQ ID NO: 500153 - DNA, 55 bp, Artificial
  Synthetic oligonucleotide
cctcttgtcgatcgtattgacatttgtttggacattgcccggcccgacccctcga

SEQ ID NO: 500154 - DNA, 55 bp, Artificial
  Synthetic oligonucleotide
ccgtggagcttgctcaaaggtgcaggttcacgaagattcacgtgttcccgtactc

SEQ ID NO: 500155 - DNA, 55 bp, Artificial
  Synthetic oligonucleotide
ccgccgatcttccaggattcatctgcgacttcgctttctatgcggtgttttcggg

SEQ ID NO: 500156 - DNA, 55 bp, Artificial
  Synthetic oligonucleotide
ccgccctcgatgaacgacacagtcggatcgctataggagaacgatgtgtatgacc

SEQ ID NO: 500157 - DNA, 55 bp, Artificial
  Synthetic oligonucleotide
ccgaatagatcgtgcgcctcgttctcgaagggaaatgccgcaagaaacgaccccg

SEQ ID NO: 500158 - DNA, 55 bp, Artificial
  Synthetic oligonucleotide
cccggcatgtctggctatatcgttggtggtgacgttgtaataccccgattcggag

SEQ ID NO: 500159 - DNA, 55 bp, Artificial
  Synthetic oligonucleotide
cccgaaactgaagcacgacgcctcgtatccacatactcaaacctgatcttgcgtc

SEQ ID NO: 500160 - DNA, 55 bp, Artificial
  Synthetic oligonucleotide
ccccttctggcagggatgtgggtcctctcccctgcgctttatccgagtaaagtgc

SEQ ID NO: 500161 - DNA, 55 bp, Artificial
  Synthetic oligonucleotide
ccccaagacggtgggtcgcagtggtctgacacctatccatacgtgcggctacacg

SEQ ID NO: 500162 - DNA, 55 bp, Artificial
  Synthetic oligonucleotide
ccagtgcatgcacgtcatatcggcgcttgcgcgcaccacgggaataccacctgct

SEQ ID NO: 500163 - DNA, 55 bp, Artificial
  Synthetic oligonucleotide
ccaggtcaaaggcgggaaaacgccacctaaggcatcgagctacgaacagccggag

SEQ ID NO: 500164 - DNA, 55 bp, Artificial
  Synthetic oligonucleotide
cattgtttgtgctcttaagaaatgccaacacatttccggcgcgtaacgtgcgtct

SEQ ID NO: 500165 - DNA, 55 bp, Artificial
  Synthetic oligonucleotide
catggtgcgtaacaggggaggttcactatgagaactcaagcgcgtataccgccac

SEQ ID NO: 500166 - DNA, 55 bp, Artificial
  Synthetic oligonucleotide
catactgcacatgcgatttcagggtggtatgcacatcagagcccttgacgggctg

SEQ ID NO: 500167 - DNA, 55 bp, Artificial
  Synthetic oligonucleotide
caggatcggtttgcaggtatgtgacgttcgttgtgtagcatgccgtttattatcg

SEQ ID NO: 500168 - DNA, 55 bp, Artificial
  Synthetic oligonucleotide
caacaggctgtacggtctcacggagattgtcgacgggcatattgtcggcactggc

SEQ ID NO: 500169 - DNA, 55 bp, Artificial
  Synthetic oligonucleotide
atctctacgattcacggcagctacaccgttgcctccatggtggtcttcacgggag

SEQ ID NO: 500170 - DNA, 55 bp, Artificial
  Synthetic oligonucleotide
atccgtggatccgctcgagcaggcagacccagccgagacgcagaagccacgaaca

SEQ ID NO: 500171 - DNA, 55 bp, Artificial
  Synthetic oligonucleotide
atccgaactttgcaactctggcacgcttcggcccttcgcagcattcgccttaaac

SEQ ID NO: 500172 - DNA, 55 bp, Artificial
  Synthetic oligonucleotide
aggacctacatggcgtacgacaccaaagtctggcgttgcggaaaatacaccctta

SEQ ID NO: 500173 - DNA, 55 bp, Artificial
  Synthetic oligonucleotide
acgccttgtcaagcaagcccatgcttctcgtatattcctgatattccctcgtgac

SEQ ID NO: 500174 - DNA, 55 bp, Artificial
  Synthetic oligonucleotide
acgccccgatagctgcccacgatgctcttcatctcccggttgaacgcaatgtcct

SEQ ID NO: 500175 - DNA, 55 bp, Artificial
  Synthetic oligonucleotide
acgccaagcccagccctcagaatcgaagaggagccccagtcgctcctgcgtgata

SEQ ID NO: 500176 - DNA, 55 bp, Artificial
  Synthetic oligonucleotide
accgatcgtcctggagcgaccttcacgctttggcgctactcgatgcacggcagtg

SEQ ID NO: 500177 - DNA, 55 bp, Artificial
  Synthetic oligonucleotide
aacctcgcatggagtagcacgtactacagctgcttacatgccgctcgtaaggcga

SEQ ID NO: 500178 - DNA, 55 bp, Artificial
  Synthetic oligonucleotide
aacacatcaacctgcggaattgcgtccaaacgacgctcgatgtattcccgagaag

SEQ ID NO: 500179 - DNA, 55 bp, Artificial
  Synthetic oligonucleotide
aaaggtagtgagcttaccatggttcctaataacccaaccgacctcaatgcaagcg

SEQ ID NO: 500180 - DNA, 55 bp, Artificial
  Synthetic oligonucleotide
gaaaccgttacctacccagcaattaaacgtgcagcgttagcggtggccaatatgc

SEQ ID NO: 500181 - DNA, 55 bp, Artificial
  Synthetic oligonucleotide
cttgctggcggaacgaagtgcgctggcatagcagctggcatagcggagaggaaag

SEQ ID NO: 500182 - DNA, 55 bp, Artificial
  Synthetic oligonucleotide
cttgctgcgccgccctctgatgcgacgatgttcccggtttcgctttaatagtacc

SEQ ID NO: 500183 - DNA, 55 bp, Artificial
  Synthetic oligonucleotide
ctgtggctaaatgctcgccattattcgacagacgcgaaatgaggctaagctgcgc

SEQ ID NO: 500184 - DNA, 55 bp, Artificial
  Synthetic oligonucleotide
ctgtatccgttctgtttccgttttgtatcctggttataagccagctcgtgagcct

SEQ ID NO: 500185 - DNA, 55 bp, Artificial
  Synthetic oligonucleotide
ctgcgttgcgccaaatggcaaaatagtgccgtcgatgtcagaaagaatgagtttg

SEQ ID NO: 500186 - DNA, 55 bp, Artificial
  Synthetic oligonucleotide
ctgcgcaatctaagcgtgttttacgatgaaaaccaggtgattcatgctatcaacc

SEQ ID NO: 500187 - DNA, 55 bp, Artificial
  Synthetic oligonucleotide
ctcgcgatagcgaaaaccgaaatctcgtagctgtatcatctccaactccccgcgg

SEQ ID NO: 500188 - DNA, 55 bp, Artificial
  Synthetic oligonucleotide
ctccacacgatgtagtgagaaaacctgacgtaagataggtagcgctcattaccag

SEQ ID NO: 500189 - DNA, 55 bp, Artificial
  Synthetic oligonucleotide
cgttcggtgcgaagttctcgcaattacggtgtattgtgctgcgctagagaataca

SEQ ID NO: 500190 - DNA, 55 bp, Artificial
  Synthetic oligonucleotide
cgtgttggtgacgcatgacttcaacgaggctcaaacgcttgccgacagggtaggc

SEQ ID NO: 500191 - DNA, 55 bp, Artificial
  Synthetic oligonucleotide
cgtctccgcgacggtaggcgttgatcgcgcggtccagtgggcgcgtcgcacgttt

SEQ ID NO: 500192 - DNA, 55 bp, Artificial
  Synthetic oligonucleotide
cgtcgatgccttgaattgcacgatgtctcctaactcgccgctgctttcggtaggc

SEQ ID NO: 500193 - DNA, 55 bp, Artificial
  Synthetic oligonucleotide
cggttatgctgtttaagaatggcgaagtagtgcattctctcgtaggcaatatgcc

SEQ ID NO: 500194 - DNA, 55 bp, Artificial
  Synthetic oligonucleotide
cggtaatagtgtcgtcaatacgctttgctacagcagcgcgtacctcatcggtagc

SEQ ID NO: 500195 - DNA, 55 bp, Artificial
  Synthetic oligonucleotide
cgcagttcaggcgtggtattgctcagctgcgatacgggagctataagctcttcgg

SEQ ID NO: 500196 - DNA, 55 bp, Artificial
  Synthetic oligonucleotide
cgcttacgcgtgtgtggtaggttgttttgccgcatttagctgttgcacctcagta

SEQ ID NO: 500197 - DNA, 55 bp, Artificial
  Synthetic oligonucleotide
cgccatgccatgcactgcccgcgacttcaggcgccacgcacggaatccgaacctt

SEQ ID NO: 500198 - DNA, 55 bp, Artificial
  Synthetic oligonucleotide
cgccgtcccggaaaactggtaagagtttcgggcagggtccgaacacaacgccgaa

SEQ ID NO: 500199 - DNA, 55 bp, Artificial
  Synthetic oligonucleotide
cgcgttctgcctgctagaatgcggcaacgctcctgagattccaacagagctgagc

SEQ ID NO: 500200 - DNA, 55 bp, Artificial
  Synthetic oligonucleotide
cgcgccttcagacagtattgtgtcacctgacgtgcgcttggcaaaagttcagtcg

SEQ ID NO: 500201 - DNA, 55 bp, Artificial
  Synthetic oligonucleotide
cgcaatgttgaaccgggtatcaccgaaagcaaatggtacagggttgtagcaccat

SEQ ID NO: 500202 - DNA, 55 bp, Artificial
  Synthetic oligonucleotide
cgcgaacacagttttacagccttacccttctgaatgatagcggccgttcgacgcg

SEQ ID NO: 500203 - DNA, 55 bp, Artificial
  Synthetic oligonucleotide
cgcagaatctcatagcatgcatcaagacgacgcttgttctccttcgaaaccgggc

SEQ ID NO: 500204 - DNA, 54 bp, Artificial
  Synthetic oligonucleotide
actggagaggtatccagacgatcctccatttactaagtctggcaatcgttggta

SEQ ID NO: 500205 - DNA, 54 bp, Artificial
  Synthetic oligonucleotide
gatcctggataagcggcgcgaaggaatcggcggtttggaaggcatagctcacaa

SEQ ID NO: 500206 - DNA, 54 bp, Artificial
  Synthetic oligonucleotide
taacctagacgagcaaaaggccgcaccccggaacccaacggtccgaagcgcggc

SEQ ID NO: 500207 - DNA, 54 bp, Artificial
  Synthetic oligonucleotide
gacaccgggtgtctacgaaccacgctctgcgcacaatgttgacgggcaagaaaa

SEQ ID NO: 500208 - DNA, 54 bp, Artificial
  Synthetic oligonucleotide
ccctcgtcgttgatgcatgtgtggtgaagaagattcggatggcgctcgagaacc

SEQ ID NO: 500209 - DNA, 54 bp, Artificial
  Synthetic oligonucleotide
gtagcaccacaaagcatgcgcacgcgaacgccaaaatgatcgcacacgtcactt

SEQ ID NO: 500210 - DNA, 53 bp, Artificial
  Synthetic oligonucleotide
ctcatggtacgagaagcccctctctgggatgtcgagctggggtgacgataccc

SEQ ID NO: 500211 - DNA, 53 bp, Artificial
  Synthetic oligonucleotide
ccacttgtcatgactcgcctgggatcgggtacttccgactaggataaaggtgt

SEQ ID NO: 500212 - DNA, 53 bp, Artificial
  Synthetic oligonucleotide
atgcggtcctatatgtacacacccagccgcaggtgattattctcggggacact

SEQ ID NO: 500213 - DNA, 53 bp, Artificial
  Synthetic oligonucleotide
ccgtgcgtattgatagtggcgacttagctaaattatccaaacaagcacgtcgc

SEQ ID NO: 500214 - DNA, 53 bp, Artificial
  Synthetic oligonucleotide
ctgcacgtataccagctccgatgacactcaaacccttaccatcgaaggccata

SEQ ID NO: 500215 - DNA, 53 bp, Artificial
  Synthetic oligonucleotide
ggggtgcaagcatgcattacggaatggttattgacaccaagcgctgcgttggc

SEQ ID NO: 500216 - DNA, 53 bp, Artificial
  Synthetic oligonucleotide
acgttggaatatgtataagttgaatgccacgcatgtaaagcgctgcacataaa

SEQ ID NO: 500217 - DNA, 52 bp, Artificial
  Synthetic oligonucleotide
aacaagagaaataaacacagtgcaaaaccgcaggttacacttgggattgggc

SEQ ID NO: 500218 - DNA, 52 bp, Artificial
  Synthetic oligonucleotide
taactgcggagcgaaacgcacggcaaggttaggaggacactatgcatcctgc

SEQ ID NO: 500219 - DNA, 52 bp, Artificial
  Synthetic oligonucleotide
gtgcaaaagctcgcctatgtgttttacggcgcctcgtacgcgcatgtgctcg

SEQ ID NO: 500220 - DNA, 52 bp, Artificial
  Synthetic oligonucleotide
cggaaagcgtcatgcaggattacctccccaaagacgtgtacaagaccctcct

SEQ ID NO: 500221 - DNA, 51 bp, Artificial
  Synthetic oligonucleotide
cgcaggcgcgttgtcagagatttccatgacgaaatcgtcgatgtctttgga

SEQ ID NO: 500222 - DNA, 51 bp, Artificial
  Synthetic oligonucleotide
gttgtatacgtttcgatggcgctaggggttgttctgcaggctttggtgtat

SEQ ID NO: 500223 - DNA, 51 bp, Artificial
  Synthetic oligonucleotide
cgatttactcggtttcgcgattaagtatgcctctgcgtgcgtctgcgccgg

SEQ ID NO: 500224 - DNA, 50 bp, Artificial
  Synthetic oligonucleotide
cttcgtccctttccgtgaattccgattcccacgtctgtggctgataggaa

SEQ ID NO: 500225 - DNA, 55 bp, Artificial
  Synthetic oligonucleotide
cggtaaatagaagtacgttcctattatattggcacatcgcacccggttgggacga

SEQ ID NO: 500226 - DNA, 55 bp, Artificial
  Synthetic oligonucleotide
cgtacattccggaggagcaaacagctgcctgggacctctacaaacagtgcaaggc

SEQ ID NO: 500227 - DNA, 55 bp, Artificial
  Synthetic oligonucleotide
cgtgcgcgtccgaacgaacgtaggcaaagaactcggcttcgacccagcgttattg

SEQ ID NO: 500228 - DNA, 55 bp, Artificial
  Synthetic oligonucleotide
gactccgaccaactatctgctaaagttaacggcaggttaacgcagagggaacgag

SEQ ID NO: 500229 - DNA, 55 bp, Artificial
  Synthetic oligonucleotide
gcaccgatggcatgtagttaccgcgtcaatcatatagggactgatcgtgcccgca

SEQ ID NO: 500230 - DNA, 55 bp, Artificial
  Synthetic oligonucleotide
gccgggattcggctgggatacagcctggttgcaatacggtaaaggccgctccctc

SEQ ID NO: 500231 - DNA, 55 bp, Artificial
  Synthetic oligonucleotide
gcgaagataacgatcggggtgaccgagttgatggaatcacccgtcacggctttcc

SEQ ID NO: 500232 - DNA, 55 bp, Artificial
  Synthetic oligonucleotide
gcgctaatggctatccgggtggtcactgacagcgcgtctggtatcccgcaggaca

SEQ ID NO: 500233 - DNA, 55 bp, Artificial
  Synthetic oligonucleotide
gctttgagtagacagtgagacccacccgaaaggatcccgcacatgtctacaccca

SEQ ID NO: 500234 - DNA, 55 bp, Artificial
  Synthetic oligonucleotide
gggcgaagttcccgaacctctagaacaccgtactcagaacacaaggttcaccagg

SEQ ID NO: 500235 - DNA, 55 bp, Artificial
  Synthetic oligonucleotide
gggcgcgctatcggccttgctcaacctggagaaggatattgaggtcgtagccacc

SEQ ID NO: 500236 - DNA, 55 bp, Artificial
  Synthetic oligonucleotide
ggggacactcccgccttgctgggctttagccagatcttcgcaccgatatagacac

SEQ ID NO: 500237 - DNA, 55 bp, Artificial
  Synthetic oligonucleotide
ggggagtgagtgtcggggtcggttctgctcagtcacggggtccatcctaacgtca

SEQ ID NO: 500238 - DNA, 55 bp, Artificial
  Synthetic oligonucleotide
ggggatactgtcacacataatcagacacgtgacattgataagaaaggcctcatca

SEQ ID NO: 500239 - DNA, 55 bp, Artificial
  Synthetic oligonucleotide
gggtaaagagcggttccataggcactccctccgttggttcgttagttaattaact

SEQ ID NO: 500240 - DNA, 55 bp, Artificial
  Synthetic oligonucleotide
gtccaggcgtgtgcaggcgctatgatgatgtgagcgtccagggaacaatgccgtg

SEQ ID NO: 500241 - DNA, 55 bp, Artificial
  Synthetic oligonucleotide
gtcctgatacggggactgttaccggacactacccgacacgccgcccggaaccaaa

SEQ ID NO: 500242 - DNA, 55 bp, Artificial
  Synthetic oligonucleotide
tcgggctagggcggtggtagggtaggaccgttatccgtccccgagcgaacgtaag

SEQ ID NO: 500243 - DNA, 55 bp, Artificial
  Synthetic oligonucleotide
tggcctgggttatatccctggggaacgaccacggtgtagtggcgctgcattcccc

SEQ ID NO: 500244 - DNA, 55 bp, Artificial
  Synthetic oligonucleotide
ttagtgctgttcacccggcgtcccaggttacgggcgtgtgagttggcgtgggact

SEQ ID NO: 500245 - DNA, 55 bp, Artificial
  Synthetic oligonucleotide
ttgccgtcgtcccctgggtgttccgacgcgacagtagcgatgatctcgaaggcag

SEQ ID NO: 500246 - DNA, 55 bp, Artificial
  Synthetic oligonucleotide
aacgcgtagcgcgggtcgtcagtttgcgcgtactcgttgtccgtgtcgatctccg

SEQ ID NO: 500247 - DNA, 55 bp, Artificial
  Synthetic oligonucleotide
aattcagcgtggcacgacccgtcggctccgagtccaccagtccggccttgcgtag

SEQ ID NO: 500248 - DNA, 55 bp, Artificial
  Synthetic oligonucleotide
acccgttgaagctgtgttccgtccttgctccaatcagcctttcggtgagatagtg

SEQ ID NO: 500249 - DNA, 55 bp, Artificial
  Synthetic oligonucleotide
accgtccgttcttcaggtagatgttcacgtcgtcaccgttgaacaggtccggtac

SEQ ID NO: 500250 - DNA, 55 bp, Artificial
  Synthetic oligonucleotide
aggacacatatgcctcctttgcggccagcccctggagtgtggcgagggcgaaggt

SEQ ID NO: 500251 - DNA, 55 bp, Artificial
  Synthetic oligonucleotide
aggcgtgcggcgcggacgttctcctgagcattcgtaaacgcttcgcggaccacag

SEQ ID NO: 500252 - DNA, 55 bp, Artificial
  Synthetic oligonucleotide
agtacgccctggacgcctcatggcagttcgatgcgacccacgcagatcggaacag

SEQ ID NO: 500253 - DNA, 55 bp, Artificial
  Synthetic oligonucleotide
cagtgggccctcaaacacggtcgcgcgaaggagatgaccaccaacgcaaactcca

SEQ ID NO: 500254 - DNA, 55 bp, Artificial
  Synthetic oligonucleotide
ccccgcggaatcctaggcatctacttcatgtgcgaagactgcgatgaagtgcatt

SEQ ID NO: 500255 - DNA, 55 bp, Artificial
  Synthetic oligonucleotide
cccctacaccgttgatgtgctccgccgattgaaagacgcgggtgcgatcaacttc

SEQ ID NO: 500256 - DNA, 55 bp, Artificial
  Synthetic oligonucleotide
cccgcaagtaacgctcatcacgcacgtcaagtaaaggactttccgcagtgcaggt

SEQ ID NO: 500257 - DNA, 55 bp, Artificial
  Synthetic oligonucleotide
cctgaccccttgttggtggacataggctagccccggttgatagccggaggaaggt

SEQ ID NO: 500258 - DNA, 55 bp, Artificial
  Synthetic oligonucleotide
cctgcacggatgaaccggtacttctcggaaagcatgggatcatgctacctccgag

SEQ ID NO: 500259 - DNA, 55 bp, Artificial
  Synthetic oligonucleotide
cgagtcgttctggtgtacttccccgatatcagaatgaccgccccgggcagggctc

SEQ ID NO: 500260 - DNA, 55 bp, Artificial
  Synthetic oligonucleotide
cgcagccggcgtcagaccatactcatgcaacgaactgtaggcataacaatccatc

SEQ ID NO: 500261 - DNA, 55 bp, Artificial
  Synthetic oligonucleotide
cgcgtaaaacattccggggtaactacatgtaggtgatttagtggccgtatcctgc

SEQ ID NO: 500262 - DNA, 54 bp, Artificial
  Synthetic oligonucleotide
caaagctgagtacgtagcaaagcagcgcgcgttctctgcgcgagcggaaccttt

SEQ ID NO: 500263 - DNA, 54 bp, Artificial
  Synthetic oligonucleotide
gaaatctgacgggcgccgtacgctagttgcctatgggagagaacatgacagaca

SEQ ID NO: 500264 - DNA, 53 bp, Artificial
  Synthetic oligonucleotide
ccgagtggtcaaccccaggcgcattttcaaccacgtgtgcaaaacggatcttt

SEQ ID NO: 500265 - DNA, 52 bp, Artificial
  Synthetic oligonucleotide
gtcacaccttttccatcacgtggtttcgaaacaataggtacacacgcgaggc

SEQ ID NO: 500266 - DNA, 52 bp, Artificial
  Synthetic oligonucleotide
ccttggtgtggtgtgacctctgacacgatggaacggagagtcatcctaatca

SEQ ID NO: 500267 - DNA, 51 bp, Artificial
  Synthetic oligonucleotide
cacgacacgctgcgaggtctgaacccggacgaagcggggaagaccatggtt

SEQ ID NO: 500268 - DNA, 50 bp, Artificial
  Synthetic oligonucleotide
actgtccttaccgtactcaccgacacaaatcagcggggcctataattgat

SEQ ID NO: 500269 - DNA, 50 bp, Artificial
  Synthetic oligonucleotide
acatctgctcaagttcgcccctatacagcgcttttcagaatctactacta

SEQ ID NO: 500270 - DNA, 55 bp, Artificial
  Synthetic oligonucleotide
aggcggcatggcgtgttttggaaatgagtttaagtgtgttacaagacggttattc

SEQ ID NO: 500271 - DNA, 55 bp, Artificial
  Synthetic oligonucleotide
ccaaaccaatgcgtatctaagcttaaaacgttcatccccatttcaacaaggcggg

SEQ ID NO: 500272 - DNA, 55 bp, Artificial
  Synthetic oligonucleotide
cgccaagtcatgcgccgcttaggcttaaacgaaaccatgcgctataaagcgatcg

SEQ ID NO: 500273 - DNA, 55 bp, Artificial
  Synthetic oligonucleotide
taacgtttgttgcgctacttcctgaggaatcccggctgagtcaggaatgccgcca

SEQ ID NO: 500274 - DNA, 55 bp, Artificial
  Synthetic oligonucleotide
cggccgctttgtgtaatttaactgggcttaaaccgacctacggacgaatttcacg

SEQ ID NO: 500275 - DNA, 55 bp, Artificial
  Synthetic oligonucleotide
cggtgatatcccaccgattatgatggaagggctacaacgtgcgatgcgtatcgcc

SEQ ID NO: 500276 - DNA, 55 bp, Artificial
  Synthetic oligonucleotide
ctgcccataatattgggttaatgcatcatgtttatgccgcattacgcgcccatta

SEQ ID NO: 500277 - DNA, 55 bp, Artificial
  Synthetic oligonucleotide
cttgtttagcccaattggtcagattgtaggctgggtaaaagaacagggccgtcag

SEQ ID NO: 500278 - DNA, 55 bp, Artificial
  Synthetic oligonucleotide
gagcgttgggcgaagcgtgttcagcttttggcaggagcgttattaagtctaggcc

SEQ ID NO: 500279 - DNA, 55 bp, Artificial
  Synthetic oligonucleotide
gtggaccgtgtgaattatttatagaggccgctgggtttagacacatttatgaagg

SEQ ID NO: 500280 - DNA, 55 bp, Artificial
  Synthetic oligonucleotide
ggaaccgttgatcccaggagatgacgcttctcacgaacaattttggccatctcct

SEQ ID NO: 500281 - DNA, 55 bp, Artificial
  Synthetic oligonucleotide
ggcggcatcgcactggcactaagctgctgccaaacgtctgagctgctatgtaatg

SEQ ID NO: 500282 - DNA, 54 bp, Artificial
  Synthetic oligonucleotide
tcacgctgaggattcacatagcgatggaagtaacgttccgtcaaacgacggtcc

SEQ ID NO: 500283 - DNA, 53 bp, Artificial
  Synthetic oligonucleotide
acggctcgatgttgtactactttcgctcccgctcgtgcaaactcagtcatttc

SEQ ID NO: 500284 - DNA, 52 bp, Artificial
  Synthetic oligonucleotide
cgcgctattatgaatcattaagtccgtggcatgtaattcgacttttccgctc

SEQ ID NO: 500285 - DNA, 52 bp, Artificial
  Synthetic oligonucleotide
ttgttgtttactgtatccacttcgcacctattctcttccaggattgcaatcc

SEQ ID NO: 500286 - DNA, 51 bp, Artificial
  Synthetic oligonucleotide
gcccctcacgtgaatcactccaaaatagggctcagccacttgactaacaga

SEQ ID NO: 500287 - DNA, 55 bp, Artificial
  Synthetic oligonucleotide
gctccaattggcagaaattgctccggatttcacagaggaatagatctgtggagcc

SEQ ID NO: 500288 - DNA, 55 bp, Artificial
  Synthetic oligonucleotide
gccggaatgttgggattatctgcttgcgccatgtccaaatatgcaagtgccaata

SEQ ID NO: 500289 - DNA, 55 bp, Artificial
  Synthetic oligonucleotide
gcagaaattttcactacctggctatgtgaagagctaaaggatctgggccatcaag

SEQ ID NO: 500290 - DNA, 55 bp, Artificial
  Synthetic oligonucleotide
gcacttaagcttcccaggttgatggcatagttgcctacattttcacctgcggctc

SEQ ID NO: 500291 - DNA, 55 bp, Artificial
  Synthetic oligonucleotide
gcaagagcggtaggtgagaatgtgggaagctatgcgattaatctaggaagtctgg

SEQ ID NO: 500292 - DNA, 55 bp, Artificial
  Synthetic oligonucleotide
gatcagaccaaggagtgtagttcctgacgtggttgtcccacttacatcacgaagc

SEQ ID NO: 500293 - DNA, 55 bp, Artificial
  Synthetic oligonucleotide
gatagctggtacgatgggcaatttagaccggcgagcggaggctcggggagatcag

SEQ ID NO: 500294 - DNA, 55 bp, Artificial
  Synthetic oligonucleotide
gagtcaccacatagtctgtatttacagctgtggatgctcccggagccaaggttcc

SEQ ID NO: 500295 - DNA, 55 bp, Artificial
  Synthetic oligonucleotide
gagagagttggtctttatggaggtagttatggcgggtttataactttgatggctc

SEQ ID NO: 500296 - DNA, 55 bp, Artificial
  Synthetic oligonucleotide
gacctcttgggtatcgaatagagaaaggaccctcgtattgcgtagcggtatacat

SEQ ID NO: 500297 - DNA, 55 bp, Artificial
  Synthetic oligonucleotide
gacaaatagggacaatagttgggttatcattgtcagttgctgaacccgaaaggtc

SEQ ID NO: 500298 - DNA, 55 bp, Artificial
  Synthetic oligonucleotide
gaaaggacgttgctcgatttcataatttgtatctggagcgatacctaatgcgtgg

SEQ ID NO: 500299 - DNA, 55 bp, Artificial
  Synthetic oligonucleotide
cttccttgtagagactaccatcaggttgcctgaactgggtatgccttttgggtgg

SEQ ID NO: 500300 - DNA, 55 bp, Artificial
  Synthetic oligonucleotide
ctgcataagaggagagccccgtaagcaggctttgacgctttaggttttgcatggc

SEQ ID NO: 500301 - DNA, 55 bp, Artificial
  Synthetic oligonucleotide
ctagcagccttgtcaattagcgttaacacccaaacagttggacagacatacgaag

SEQ ID NO: 500302 - DNA, 55 bp, Artificial
  Synthetic oligonucleotide
cgttaactgcttgtgcatgtcatactttccatgacatccgaacgtataaagtagc

SEQ ID NO: 500303 - DNA, 55 bp, Artificial
  Synthetic oligonucleotide
cggttcagggtattggtctacaagtttgccgattcttctggtttgcgttccagac

SEQ ID NO: 500304 - DNA, 55 bp, Artificial
  Synthetic oligonucleotide
cgggctagcttctggccgatatggtattcgtctaatccactgacagtgactgttc

SEQ ID NO: 500305 - DNA, 55 bp, Artificial
  Synthetic oligonucleotide
cggcctgactctgcgcacttacctgtgttcctgaaagaacatctattgcgttgac

SEQ ID NO: 500306 - DNA, 55 bp, Artificial
  Synthetic oligonucleotide
tttcgacgaggtgcctttcagtgaggcgttgaacccagctatctttaatcctctg

SEQ ID NO: 500307 - DNA, 55 bp, Artificial
  Synthetic oligonucleotide
ttgcatcattctgaagagttgtccgatcttcatattatcaggatagcggccgatc

SEQ ID NO: 500308 - DNA, 55 bp, Artificial
  Synthetic oligonucleotide
tgcggatggcatgttgtattgatcggtcgttcatggctttgcccgggttctgtcc

SEQ ID NO: 500309 - DNA, 55 bp, Artificial
  Synthetic oligonucleotide
gtgtgttccagcttctctgatctccagaggctcgccgcagcagaaaatcggtgta

SEQ ID NO: 500310 - DNA, 55 bp, Artificial
  Synthetic oligonucleotide
gtccattaataggtcgataatccaaaccagcgatcatttcacctgaacccagacc

SEQ ID NO: 500311 - DNA, 55 bp, Artificial
  Synthetic oligonucleotide
gtccaggtgatattggattgccttggacagaactactttctccacgtcttgccca

SEQ ID NO: 500312 - DNA, 55 bp, Artificial
  Synthetic oligonucleotide
gtatctctagcgcctagacctattggcttgatgtcataggattttccagcttcaa

SEQ ID NO: 500313 - DNA, 55 bp, Artificial
  Synthetic oligonucleotide
ggttggatatgccaaatagattacagatcaactgcaattcgtctaccttccccgc

SEQ ID NO: 500314 - DNA, 55 bp, Artificial
  Synthetic oligonucleotide
ggtgcaaaatgaagtgagtatggaccgggagcatccaaagtccgatcgtatttac

SEQ ID NO: 500315 - DNA, 55 bp, Artificial
  Synthetic oligonucleotide
ggtccttgagaggtagtttggactttaatttcagagcttattgccacaggatcag

SEQ ID NO: 500316 - DNA, 55 bp, Artificial
  Synthetic oligonucleotide
gggccttaaatggtagaggactcgtccgcctgatgtatcatgattatcagcaagc

SEQ ID NO: 500317 - DNA, 55 bp, Artificial
  Synthetic oligonucleotide
ggctttcaccctagggatcaggatactgataatgtcttctttgatcttggccagc

SEQ ID NO: 500318 - DNA, 55 bp, Artificial
  Synthetic oligonucleotide
ggctttaccgggagggaaaagtggttgtcttacaaaacaatcaacctgtgcaccc

SEQ ID NO: 500319 - DNA, 55 bp, Artificial
  Synthetic oligonucleotide
ggctcttgatcctgataaacagctcctccctgaagtatggttcgttcatttccag

SEQ ID NO: 500320 - DNA, 55 bp, Artificial
  Synthetic oligonucleotide
ggcggaagctcagttgacaacgcttgcaggtcttgaggcatctttgattgctgta

SEQ ID NO: 500321 - DNA, 55 bp, Artificial
  Synthetic oligonucleotide
gctggctttagaataggggatatgactgcacagaagaaggtcaatggtacccaaa

SEQ ID NO: 500322 - DNA, 55 bp, Artificial
  Synthetic oligonucleotide
gctgctgggatacttcttgttgatagtagtgttgaggaatggacgttattgtcct

SEQ ID NO: 500323 - DNA, 55 bp, Artificial
  Synthetic oligonucleotide
gctgctgaagtacatggccgacatgctggtaggggataatgacctgcagttttcg

SEQ ID NO: 500324 - DNA, 55 bp, Artificial
  Synthetic oligonucleotide
gctctgccttcaccttcctcggtagaggagcccattactgcagcaccagcatcct

SEQ ID NO: 500325 - DNA, 55 bp, Artificial
  Synthetic oligonucleotide
ccattttctcggaaccgcttcagccgaagacctgtggtataggtccactgactgg

SEQ ID NO: 500326 - DNA, 55 bp, Artificial
  Synthetic oligonucleotide
ccacatcctgaataatattgaaacttggggaaacaggctgcattcggataatccg

SEQ ID NO: 500327 - DNA, 55 bp, Artificial
  Synthetic oligonucleotide
catttggggtgatcagaacagtgcagaactcgaatggagaagatgcacttcatcg

SEQ ID NO: 500328 - DNA, 55 bp, Artificial
  Synthetic oligonucleotide
cagtccagatatttcccggagggttaatgaacaagccttttacttggacagcgtc

SEQ ID NO: 500329 - DNA, 55 bp, Artificial
  Synthetic oligonucleotide
caggacccaaagtaatccctgcgggcatacctagtcctttacccagtgatcccgt

SEQ ID NO: 500330 - DNA, 55 bp, Artificial
  Synthetic oligonucleotide
cagatccggttcggtacagatcaggtaggctgggtctcggtagagcagttttgac

SEQ ID NO: 500331 - DNA, 55 bp, Artificial
  Synthetic oligonucleotide
caccggatttattggtcctaatgatgacatgctttaagtgtccagaattcgttcg

SEQ ID NO: 500332 - DNA, 55 bp, Artificial
  Synthetic oligonucleotide
caatgcgcgtttagcccaaatcacagctggactggagccttataacgggccattc

SEQ ID NO: 500333 - DNA, 55 bp, Artificial
  Synthetic oligonucleotide
caatactcaaagctatgatatcagagtcagctcccaaagcagcaccagtaacagg

SEQ ID NO: 500334 - DNA, 55 bp, Artificial
  Synthetic oligonucleotide
atcctggtcaaattaaaataaccgtgatccgtgagatgcgggcagtgaattacgc

SEQ ID NO: 500335 - DNA, 55 bp, Artificial
  Synthetic oligonucleotide
agtcctgtccaatggctgtaatatctcctaccccatccactctcaacaaggcatc

SEQ ID NO: 500336 - DNA, 55 bp, Artificial
  Synthetic oligonucleotide
aggtagtcaatgaagaatggggcaataggtaaacgcagataatttgaagggtccc

SEQ ID NO: 500337 - DNA, 55 bp, Artificial
  Synthetic oligonucleotide
accctgaaggccacacaactatggtcaatcaagtgggcactgcagctttacgatt

SEQ ID NO: 500338 - DNA, 55 bp, Artificial
  Synthetic oligonucleotide
acagaacttcctcccgaacctttatagacaccgcctgatagaaaatcggaacctg

SEQ ID NO: 500339 - DNA, 55 bp, Artificial
  Synthetic oligonucleotide
aattcagggaccctgatggatcttggttcggtttaacctacagggccaggatttt

SEQ ID NO: 500340 - DNA, 55 bp, Artificial
  Synthetic oligonucleotide
aatcaaactctctggacttacccttcaggaagctaagatgctcatcgaagagcgt

SEQ ID NO: 500341 - DNA, 55 bp, Artificial
  Synthetic oligonucleotide
aacacaggctgaggctacgtcctacgaacttcctccagcaaaaggagcggtgaag

SEQ ID NO: 500342 - DNA, 55 bp, Artificial
  Synthetic oligonucleotide
cggcaccgaccatcaggatagccatggataccaaacctccaaggatcactgatag

SEQ ID NO: 500343 - DNA, 55 bp, Artificial
  Synthetic oligonucleotide
cgctaacagattggggagatggagatagttatcctaactcagggactccaggtcc

SEQ ID NO: 500344 - DNA, 55 bp, Artificial
  Synthetic oligonucleotide
cgcagaaaataagatcgggtgcaggattgtgcttcagccaggaaagtgcaacaga

SEQ ID NO: 500345 - DNA, 55 bp, Artificial
  Synthetic oligonucleotide
cgacgcctgctcctagtacgggtgacatagggttttcgcaccagaacgtgcatgc

SEQ ID NO: 500346 - DNA, 55 bp, Artificial
  Synthetic oligonucleotide
cgaacctgcataatgggcttcgtctatgattagcaataactcttcgatacatgga

SEQ ID NO: 500347 - DNA, 55 bp, Artificial
  Synthetic oligonucleotide
cgaaccgagaaatccgcatcacctacgctatgtggtagaccgaccaccgagcagt

SEQ ID NO: 500348 - DNA, 55 bp, Artificial
  Synthetic oligonucleotide
cctgtttaccgatatggtcgtcaaggaaatagctatgacccaactgctcaaagcg

SEQ ID NO: 500349 - DNA, 55 bp, Artificial
  Synthetic oligonucleotide
cctggacttgcatgggtaaatagtcttcagcccaccgcagaacttagaccacagg

SEQ ID NO: 500350 - DNA, 55 bp, Artificial
  Synthetic oligonucleotide
cctcctgtggaagatacttgtacgggccagcctaaatcaagcatccatcttacag

SEQ ID NO: 500351 - DNA, 55 bp, Artificial
  Synthetic oligonucleotide
cctcaggtagaaagtcagctggcattagcgatcccaacacaataatctacaatga

SEQ ID NO: 500352 - DNA, 55 bp, Artificial
  Synthetic oligonucleotide
ccgagcttttcaccccttaaatttgggaggggaatctgacccgggagatatctgg

SEQ ID NO: 500353 - DNA, 55 bp, Artificial
  Synthetic oligonucleotide
ccctggttccttagactcagagtattgctgataagacctgttgacccctacaaat

SEQ ID NO: 500354 - DNA, 55 bp, Artificial
  Synthetic oligonucleotide
ccccgtgaaaacagtgaaggaccagggctgcgtcagcttatgcgtaggggcccaa

SEQ ID NO: 500355 - DNA, 55 bp, Artificial
  Synthetic oligonucleotide
ccctccataattgctgtatttatgaatatcaacccactgtgcggctcctcgggtg

SEQ ID NO: 500356 - DNA, 55 bp, Artificial
  Synthetic oligonucleotide
ccccttctctgtacacaaaggtccattctccgttcatgtagccttgcctattgac

SEQ ID NO: 500357 - DNA, 54 bp, Artificial
  Synthetic oligonucleotide
gcgatacagcacaacactcgtcaacctctctacatggccttctcacgaagacca

SEQ ID NO: 500358 - DNA, 54 bp, Artificial
  Synthetic oligonucleotide
tattctttcaattcatacatagaaggagattgcaatagactagcccgatccgca

SEQ ID NO: 500359 - DNA, 53 bp, Artificial
  Synthetic oligonucleotide
cggataggtaatgcgatagaccctgccatgaacgtggtccctcaagggatctc

SEQ ID NO: 500360 - DNA, 53 bp, Artificial
  Synthetic oligonucleotide
cccagccgggtaattgatcgactttaattgcgacggtattcgtaatgccaaat

SEQ ID NO: 500361 - DNA, 52 bp, Artificial
  Synthetic oligonucleotide
ctgcgcttaggaggcttctttatcggcacaagctccgggcttagcagcgcct

SEQ ID NO: 500362 - DNA, 52 bp, Artificial
  Synthetic oligonucleotide
tggctatcgacaagtaggggccaggaaattttctatccatttaggtgtgttg

SEQ ID NO: 500363 - DNA, 52 bp, Artificial
  Synthetic oligonucleotide
tacataccccgctcccacccaaagcaaaatgattgtgaatattcgggaaatg

SEQ ID NO: 500364 - DNA, 52 bp, Artificial
  Synthetic oligonucleotide
tacttctcctatgacgcctgcacgcaggaactctacagtctccctgatacca

SEQ ID NO: 500365 - DNA, 51 bp, Artificial
  Synthetic oligonucleotide
ttttccgggtagttctgatctccaagccgaagcaggcctatggcttcccct

SEQ ID NO: 500366 - DNA, 51 bp, Artificial
  Synthetic oligonucleotide
cgagattattctgtcctgtggatctttcgcctgaacagttgccacatttac

SEQ ID NO: 500367 - DNA, 51 bp, Artificial
  Synthetic oligonucleotide
gtagaggcatttaatcctgctactgtgtccaatgtcatgtgcaccaacaca

SEQ ID NO: 500368 - DNA, 50 bp, Artificial
  Synthetic oligonucleotide
acagtcatttgccccttctgcttatgggtattatcagttggcaagtccct

SEQ ID NO: 500369 - DNA, 50 bp, Artificial
  Synthetic oligonucleotide
atcgccattctaagacctaccaacggaatcatctatccaggtgccttggt

SEQ ID NO: 500370 - DNA, 50 bp, Artificial
  Synthetic oligonucleotide
cacctcagatgagctatggcgctacattctcaagtacttaggaggggagt

SEQ ID NO: 500371 - DNA, 55 bp, Artificial
  Synthetic oligonucleotide
gaatacatcctgtgccgatgaagtcagatagcctgttgcttgtacgggcataccg

SEQ ID NO: 500372 - DNA, 55 bp, Artificial
  Synthetic oligonucleotide
gaatagaatccgaacagtaggctatggaggaaatcgtccaatttctacaaaccca

SEQ ID NO: 500373 - DNA, 55 bp, Artificial
  Synthetic oligonucleotide
gacaaggctcatgagaagcttgtcgggttgttttaaagtaatctccgtcttcttg

SEQ ID NO: 500374 - DNA, 55 bp, Artificial
  Synthetic oligonucleotide
gaccaactgttacccattctttctaaatatggctactctcctaccctataccaaa

SEQ ID NO: 500375 - DNA, 55 bp, Artificial
  Synthetic oligonucleotide
gagaaagtcaattcaatgctaacacaacttcattcacaagccatgttcaatggcg

SEQ ID NO: 500376 - DNA, 55 bp, Artificial
  Synthetic oligonucleotide
gagcagctcctttagcaatggtgcgtaatgctggtatggccgtacaagtcagtgg

SEQ ID NO: 500377 - DNA, 55 bp, Artificial
  Synthetic oligonucleotide
gagccaatggataaaccgttttgccgatgacacttcgagtatgatcgatggacac

SEQ ID NO: 500378 - DNA, 55 bp, Artificial
  Synthetic oligonucleotide
gagccatttcattcctccacctacacgtaagccaacaaaagcaggtgccgaaaca

SEQ ID NO: 500379 - DNA, 55 bp, Artificial
  Synthetic oligonucleotide
gagggttggacttcgcaccataacatggatatttggcgaaatgctgaacctattg

SEQ ID NO: 500380 - DNA, 55 bp, Artificial
  Synthetic oligonucleotide
gatctagccaagtttcgtaccattggatacgtaggtatccgttactgcttctttc

SEQ ID NO: 500381 - DNA, 55 bp, Artificial
  Synthetic oligonucleotide
gattacggttcgggtagtaaaacgactggaactgcttacccgaccggatcagggc

SEQ ID NO: 500382 - DNA, 55 bp, Artificial
  Synthetic oligonucleotide
gcaagcccatgaaggctcgaacgattcagtttcatgtagccagtgctatgggtcg

SEQ ID NO: 500383 - DNA, 55 bp, Artificial
  Synthetic oligonucleotide
gcaagttatctggaccagaaggccaacagccttaccattgaccaggtgcatcggg

SEQ ID NO: 500384 - DNA, 55 bp, Artificial
  Synthetic oligonucleotide
gcaggtatatggaaatcagaggatgctggaaatacatggcgtttgcttccaacgg

SEQ ID NO: 500385 - DNA, 55 bp, Artificial
  Synthetic oligonucleotide
gccaaatcctaattcggtcattcaaccagtagttcctgtcgaaaaccaatcagac

SEQ ID NO: 500386 - DNA, 55 bp, Artificial
  Synthetic oligonucleotide
gccaacgtgcagcagcttatggtaggacaatagattttggaatgcgtttacacgt

SEQ ID NO: 500387 - DNA, 55 bp, Artificial
  Synthetic oligonucleotide
gccaccgctggccattattgcgaaaggtaggaatttgccgctggttcagttcgtc

SEQ ID NO: 500388 - DNA, 55 bp, Artificial
  Synthetic oligonucleotide
gccattagacgaaaccacgattgccttaggaatggcctgcggaagtgtggcaatg

SEQ ID NO: 500389 - DNA, 55 bp, Artificial
  Synthetic oligonucleotide
gccgctcctcttccgtgtacacgctgccataggcaatgtccctggggtctaccct

SEQ ID NO: 500390 - DNA, 55 bp, Artificial
  Synthetic oligonucleotide
gccgtgatttatagtcttcgttgcgagccaatacaagcatcattccaagtgagaa

SEQ ID NO: 500391 - DNA, 55 bp, Artificial
  Synthetic oligonucleotide
cggtcgagagcaatgggtcggccaacgtcgagcagaattattgccaacgacatac

SEQ ID NO: 500392 - DNA, 55 bp, Artificial
  Synthetic oligonucleotide
cggttattcagggtagaactcctaaagaaacgcctataactccactaacgcatgg

SEQ ID NO: 500393 - DNA, 55 bp, Artificial
  Synthetic oligonucleotide
cgtctggttccgttatgtggcggcatatgtaagcagcgatacgctggatcacccc

SEQ ID NO: 500394 - DNA, 55 bp, Artificial
  Synthetic oligonucleotide
cgtgcatttactcgctgctcaagggcagggtcttcactcaaaattgcaatacgtt

SEQ ID NO: 500395 - DNA, 55 bp, Artificial
  Synthetic oligonucleotide
cgttggccacccaaagtttcataaacgcttaaccgcccatccagctaacgggtcg

SEQ ID NO: 500396 - DNA, 55 bp, Artificial
  Synthetic oligonucleotide
cgtttgggcacggctactcgatggcgaccacgctttaaaattgttgacaaacctt

SEQ ID NO: 500397 - DNA, 55 bp, Artificial
  Synthetic oligonucleotide
ctaacacggtatcttttggccctttctcattcgcatacaacgtgttacgtcctcc

SEQ ID NO: 500398 - DNA, 55 bp, Artificial
  Synthetic oligonucleotide
ctaactcacaagcaatggcaaattcttcgcgggaaaatggtgtcagcgaaagggc

SEQ ID NO: 500399 - DNA, 55 bp, Artificial
  Synthetic oligonucleotide
ctacctgccattttggaaggttcagcatgacagctatgaaagagaattgggacga

SEQ ID NO: 500400 - DNA, 55 bp, Artificial
  Synthetic oligonucleotide
ctatttctgaatgtttggaaacctgctaatgctactgaaagctcaaaattgcctg

SEQ ID NO: 500401 - DNA, 55 bp, Artificial
  Synthetic oligonucleotide
ctcctatacgcgcacttacagacctgactaactcccatgcatgctaacctgcaca

SEQ ID NO: 500402 - DNA, 55 bp, Artificial
  Synthetic oligonucleotide
ctcgtaaccgtcaagaattcacccgcaggaccattaccgtcaataaatacatcgg

SEQ ID NO: 500403 - DNA, 55 bp, Artificial
  Synthetic oligonucleotide
ctgagcgcgtttatactcttcaaatcgttttacggcttcgctgacttgttgctcg

SEQ ID NO: 500404 - DNA, 55 bp, Artificial
  Synthetic oligonucleotide
ctgcaccggatcgaaaatgccctgatgcgcgataaagtaaaacagcttcgggaat

SEQ ID NO: 500405 - DNA, 55 bp, Artificial
  Synthetic oligonucleotide
ctggcgtctatacgcagtccgtttgagtaaccgagcttactgtctgttctggcat

SEQ ID NO: 500406 - DNA, 55 bp, Artificial
  Synthetic oligonucleotide
cttagtaatccaatcagtgtttcctaatcgaagggtaatttcaccaaccgggctg

SEQ ID NO: 500407 - DNA, 55 bp, Artificial
  Synthetic oligonucleotide
cttctgctaaacgctgtggttcgatattgttagtgactacgactttccctccaga

SEQ ID NO: 500408 - DNA, 55 bp, Artificial
  Synthetic oligonucleotide
ctttacccaatcctgatgcggtgttggcaaccttaaccgagataaaacaacgctt

SEQ ID NO: 500409 - DNA, 55 bp, Artificial
  Synthetic oligonucleotide
tgcgtgcatttatcgcacacggtacgcaggatacaactctgcctgtgcattatgc

SEQ ID NO: 500410 - DNA, 55 bp, Artificial
  Synthetic oligonucleotide
gaaccgaaaccaagactgatgccgataaaaggcgaatggatgctactagacggac

SEQ ID NO: 500411 - DNA, 55 bp, Artificial
  Synthetic oligonucleotide
gaaccttgaaacgttttccgacgaaatagtcatctgtaaccgtaccccatcggag

SEQ ID NO: 500412 - DNA, 55 bp, Artificial
  Synthetic oligonucleotide
gggcctggccgactcgaattacttgaaaatatcatcgaaacaggttcgataagtc

SEQ ID NO: 500413 - DNA, 55 bp, Artificial
  Synthetic oligonucleotide
ggggcagttcagtctgtctttggcaggttctgacgaaaccactttaagagaatac

SEQ ID NO: 500414 - DNA, 55 bp, Artificial
  Synthetic oligonucleotide
ggggccgaaaagttggcaagtcgcgaaataagaataccgatgctttctccccaag

SEQ ID NO: 500415 - DNA, 55 bp, Artificial
  Synthetic oligonucleotide
ggggtggcacacaaccctacagctatcaatggagtaacggagctacaacgccgag

SEQ ID NO: 500416 - DNA, 55 bp, Artificial
  Synthetic oligonucleotide
ggggtttgcggatatgttccaacagaaccggtcgcgggatgtactgctgcaacgt

SEQ ID NO: 500417 - DNA, 55 bp, Artificial
  Synthetic oligonucleotide
gggtctgctccaaaacccaatgattgtcctagtggaaatgggtgttgtgctactg

SEQ ID NO: 500418 - DNA, 55 bp, Artificial
  Synthetic oligonucleotide
gggttgttgggtcttagtagtataacaaacagttcgcttgttgcaaagctactac

SEQ ID NO: 500419 - DNA, 55 bp, Artificial
  Synthetic oligonucleotide
ggtacgtctccatgttctccgtaatgatcttgagcatgaagtcgtattcaccggc

SEQ ID NO: 500420 - DNA, 55 bp, Artificial
  Synthetic oligonucleotide
ggtactgccaaagaaactaccatccgcttactttctgagttcaaagaagaaggac

SEQ ID NO: 500421 - DNA, 55 bp, Artificial
  Synthetic oligonucleotide
ggtcagaaagcgtggaatgtgtatgccaaacgtccctttggtggagcgatgggcg

SEQ ID NO: 500422 - DNA, 55 bp, Artificial
  Synthetic oligonucleotide
ggtgatgggcaatcgtacgttactgtataatttgttactggagtcatcctctcag

SEQ ID NO: 500423 - DNA, 55 bp, Artificial
  Synthetic oligonucleotide
gtaaaatgcaggcctataaggagtaccaggtgtctatccgtgagatccaccacct

SEQ ID NO: 500424 - DNA, 55 bp, Artificial
  Synthetic oligonucleotide
gtaagaaatgaatatctcgaaggtgtacatgtagcggcggtgctatgtccatccg

SEQ ID NO: 500425 - DNA, 55 bp, Artificial
  Synthetic oligonucleotide
gtctcgatagccgtgatttatagttttcgttgcgagccaatacaagcatcattcc

SEQ ID NO: 500426 - DNA, 55 bp, Artificial
  Synthetic oligonucleotide
tattattagcccactaataggttttagcaggcatgtaccacccctgacgtacggt

SEQ ID NO: 500427 - DNA, 55 bp, Artificial
  Synthetic oligonucleotide
gtgtcattcctgtagttttcacatgctttggcgataaatcactggcctctgagcc

SEQ ID NO: 500428 - DNA, 55 bp, Artificial
  Synthetic oligonucleotide
taaattggtacgctgacccctgttcatccgcatcaacaaacagaacgtcacgccc

SEQ ID NO: 500429 - DNA, 55 bp, Artificial
  Synthetic oligonucleotide
taattcgattttgttcacccacaagtacaggctcgcttgtttggatacttagggg

SEQ ID NO: 500430 - DNA, 55 bp, Artificial
  Synthetic oligonucleotide
tacccttcaatcgttggtatgtgactgtgaaattactgagcaacagccccgttgt

SEQ ID NO: 500431 - DNA, 55 bp, Artificial
  Synthetic oligonucleotide
tacttgtctgtttcggtcaacttcgtaggcttctactgtccaagtgtagagtcct

SEQ ID NO: 500432 - DNA, 55 bp, Artificial
  Synthetic oligonucleotide
gcctcgaaatgctacaggtccaatcggttgttatccatctaatggaacatctggc

SEQ ID NO: 500433 - DNA, 55 bp, Artificial
  Synthetic oligonucleotide
tgaataaccaatgcttttgcatttccacttactatgtttgtgccttcccaaagac

SEQ ID NO: 500434 - DNA, 55 bp, Artificial
  Synthetic oligonucleotide
gcctgccccagcgacattttattctctacgttctgcataccgccgtccgtcagcg

SEQ ID NO: 500435 - DNA, 55 bp, Artificial
  Synthetic oligonucleotide
gcgaatagcccagttggtctggtagtacagcaagttctcggaattcatcttgact

SEQ ID NO: 500436 - DNA, 55 bp, Artificial
  Synthetic oligonucleotide
gcggtacagggcatcaccattagatgggtctacgccatagtactcacgcagccag

SEQ ID NO: 500437 - DNA, 55 bp, Artificial
  Synthetic oligonucleotide
gcgtacatctttcggtgaccccttgttgggtagcaagccaaacaacggatgtaaa

SEQ ID NO: 500438 - DNA, 55 bp, Artificial
  Synthetic oligonucleotide
gcgtcgctgactgaccaggcccatttaacccgcgatctgggactcgactcactgg

SEQ ID NO: 500439 - DNA, 55 bp, Artificial
  Synthetic oligonucleotide
gctaaagactgcccaaaagcaagttttagctcaacaagttgcctatgattctgcc

SEQ ID NO: 500440 - DNA, 55 bp, Artificial
  Synthetic oligonucleotide
gctatctcccactgcttgaactgtctcagccaagcaattttgtcgttatgagtcg

SEQ ID NO: 500441 - DNA, 55 bp, Artificial
  Synthetic oligonucleotide
gctcataggccgctctttggtcaatgagcatcataccactcttggcttgtgccac

SEQ ID NO: 500442 - DNA, 55 bp, Artificial
  Synthetic oligonucleotide
gctggccacatcataccaatagcgggtcgaaagttcaacattgaatccggtcgtt

SEQ ID NO: 500443 - DNA, 55 bp, Artificial
  Synthetic oligonucleotide
tgaaacgtccccaacgtggttcggtagcaatatctacttgtggcgaaagggcagt

SEQ ID NO: 500444 - DNA, 55 bp, Artificial
  Synthetic oligonucleotide
ggaacgacaaatatacatccgttgttcctgcgaaccttatctaactgaaggaagg

SEQ ID NO: 500445 - DNA, 55 bp, Artificial
  Synthetic oligonucleotide
ggagccacagagtaaacccattacggcctgacttaatgcgtacacagagctatgc

SEQ ID NO: 500446 - DNA, 55 bp, Artificial
  Synthetic oligonucleotide
ggaggccgtgcaaaaggctataccgaactcgctttcttttggagctcctacccgt

SEQ ID NO: 500447 - DNA, 55 bp, Artificial
  Synthetic oligonucleotide
ggataacctgaatgccaccccgtaaacgaggcattatcgtagcaaacatcggcca

SEQ ID NO: 500448 - DNA, 55 bp, Artificial
  Synthetic oligonucleotide
tcggagtccgtccgacggcttcctcaaaattacgtaccgcccgctccgtagctgg

SEQ ID NO: 500449 - DNA, 55 bp, Artificial
  Synthetic oligonucleotide
ggccggtttcatgggtggccgataaccagcagaaaggtatttcgcctaaccagcc

SEQ ID NO: 500450 - DNA, 55 bp, Artificial
  Synthetic oligonucleotide
ggcgtagtactgaacatggtaaagccccggacaggtcttaataagtcagtgcagg

SEQ ID NO: 500451 - DNA, 55 bp, Artificial
  Synthetic oligonucleotide
gggatcttcccgtaaggtgaagcctatgatgcgcctggccaagcttaccgcgctc

SEQ ID NO: 500452 - DNA, 55 bp, Artificial
  Synthetic oligonucleotide
gggcccctgcaacgcaaattcattcctggagacgaatggttatttctgaaactgt

SEQ ID NO: 500453 - DNA, 55 bp, Artificial
  Synthetic oligonucleotide
agtttgattcaacaacttttcaaggtaagccaatcgaacgggcatttagtttagg

SEQ ID NO: 500454 - DNA, 55 bp, Artificial
  Synthetic oligonucleotide
agttttgataatttggtcgctataacctgcacccgccacattcaatacaccatac

SEQ ID NO: 500455 - DNA, 55 bp, Artificial
  Synthetic oligonucleotide
atgacaaacgcaagtccacttgttgcaccgacgcattcgaaggagcgcatgttgg

SEQ ID NO: 500456 - DNA, 55 bp, Artificial
  Synthetic oligonucleotide
caaagtcagccgcttctctagcaacatccactgcattatcaaccgatattcccac

SEQ ID NO: 500457 - DNA, 55 bp, Artificial
  Synthetic oligonucleotide
caacacctgaaattgagcgaccttgatagacccaatttacggcttcgagtatccc

SEQ ID NO: 500458 - DNA, 55 bp, Artificial
  Synthetic oligonucleotide
caacgaccctacgttccgccacaagttggagcattcgcttaagcttgaggatgtc

SEQ ID NO: 500459 - DNA, 55 bp, Artificial
  Synthetic oligonucleotide
caagcctatcttcagcaagtccgctaagagacgtctatgcgttagtaaaatgcat

SEQ ID NO: 500460 - DNA, 55 bp, Artificial
  Synthetic oligonucleotide
caccccgatgatgctaatagagttttgaatggtattcacgcagccattgagagtg

SEQ ID NO: 500461 - DNA, 55 bp, Artificial
  Synthetic oligonucleotide
cacgggcctgacaccgggtgtgccttactcagtgagcttcacggctcctcagaac

SEQ ID NO: 500462 - DNA, 55 bp, Artificial
  Synthetic oligonucleotide
cacgtcacaatactttcatcgttagttagcgttacttctacgtcgccgaatgccc

SEQ ID NO: 500463 - DNA, 55 bp, Artificial
  Synthetic oligonucleotide
cacttactgaggcaattagctcctgttctcgctctgacatcttaatatccgatgg

SEQ ID NO: 500464 - DNA, 55 bp, Artificial
  Synthetic oligonucleotide
cagagccacagtaactccaacgagtgcctcgccagatttgtctttgatggcccca

SEQ ID NO: 500465 - DNA, 55 bp, Artificial
  Synthetic oligonucleotide
cagccaaccaacgttatcagttccgcaccaatttaggacgttcagttagccaagg

SEQ ID NO: 500466 - DNA, 55 bp, Artificial
  Synthetic oligonucleotide
cagccttcaccatcgcacgaaaagcgggcatctcgatacgccaattttactagtc

SEQ ID NO: 500467 - DNA, 55 bp, Artificial
  Synthetic oligonucleotide
caggacgccttgctttcatataacgatttccgcctgcttgaataagcttatcagg

SEQ ID NO: 500468 - DNA, 55 bp, Artificial
  Synthetic oligonucleotide
caggcagcacaacaccgtgttggagattatgtgaccctggccgttttagcggctt

SEQ ID NO: 500469 - DNA, 55 bp, Artificial
  Synthetic oligonucleotide
caggctgcgagaaaccttttctgatcgcctctactcctgcaataaatgtggtggc

SEQ ID NO: 500470 - DNA, 55 bp, Artificial
  Synthetic oligonucleotide
caggtagcagttacactcacttcttcaccactataaaacgatgttttatcggccg

SEQ ID NO: 500471 - DNA, 55 bp, Artificial
  Synthetic oligonucleotide
tgtggccaagaatgccgtcttcgtgtggacgcagcgtaccagtgtgccttacatg

SEQ ID NO: 500472 - DNA, 55 bp, Artificial
  Synthetic oligonucleotide
tttaccagtaagcaaagatgcacgggttggacaacaacggccagcattgtagaag

SEQ ID NO: 500473 - DNA, 55 bp, Artificial
  Synthetic oligonucleotide
aaacggagcgggtcccaggggcgtttgggcgcactacccaggtacgtatcccagt

SEQ ID NO: 500474 - DNA, 55 bp, Artificial
  Synthetic oligonucleotide
aaactcaccgctgtagtaatgaagttttgcgtttctcagcttagcttcttgcccg

SEQ ID NO: 500475 - DNA, 55 bp, Artificial
  Synthetic oligonucleotide
aacactgctccaggagaaggtattgtaagtttacaaggtgttggaggtactgctg

SEQ ID NO: 500476 - DNA, 55 bp, Artificial
  Synthetic oligonucleotide
aacgcccatcctggtgtattggtatgccaaacacttagcacgaagtagctaaatc

SEQ ID NO: 500477 - DNA, 55 bp, Artificial
  Synthetic oligonucleotide
aactcaaacaagattttctgcccaaagcaagtagggtagggctgagagctgacga

SEQ ID NO: 500478 - DNA, 55 bp, Artificial
  Synthetic oligonucleotide
ttggcgtgaaagattttagtttgcagattgcctaccaggctatgcacccggtcat

SEQ ID NO: 500479 - DNA, 55 bp, Artificial
  Synthetic oligonucleotide
aagacttagcctcggcggtaaacattgtctgcaacctaggggctaacgggcgggg

SEQ ID NO: 500480 - DNA, 55 bp, Artificial
  Synthetic oligonucleotide
aaggcagcagtgtatatccaaactttactctgaaatctgagtaatctaaagccgg

SEQ ID NO: 500481 - DNA, 55 bp, Artificial
  Synthetic oligonucleotide
ttatcgcggctatgttagggttatatttgaaatcgtttagggttctggttccccg

SEQ ID NO: 500482 - DNA, 55 bp, Artificial
  Synthetic oligonucleotide
acacaaactggtactaaagcaggagaattgagccaccgctcggttttaagtatct

SEQ ID NO: 500483 - DNA, 55 bp, Artificial
  Synthetic oligonucleotide
acatcgcattcaggaaggataacgcatccttgatctgcgtgtaaccctgatagcg

SEQ ID NO: 500484 - DNA, 55 bp, Artificial
  Synthetic oligonucleotide
acttcaagggtttgcagatagagtaaagacagaaccggcacagcttcccgtccag

SEQ ID NO: 500485 - DNA, 55 bp, Artificial
  Synthetic oligonucleotide
acttgcccacttgtatgtgtaatagttactatttgacttggtggacaggctccta

SEQ ID NO: 500486 - DNA, 55 bp, Artificial
  Synthetic oligonucleotide
actttcgtacagtcgtaattacggcatttaccgcgctccatttgagaaggcagtc

SEQ ID NO: 500487 - DNA, 55 bp, Artificial
  Synthetic oligonucleotide
ttaccagcacaatgccaactcgcgattttgccaagcctttgtctatttcgcggag

SEQ ID NO: 500488 - DNA, 55 bp, Artificial
  Synthetic oligonucleotide
agagctgttatcaactaatgcagagacaagaggtacagtggccagcctacgcgga

SEQ ID NO: 500489 - DNA, 55 bp, Artificial
  Synthetic oligonucleotide
tgtttccagctttctgtagggcctagcttggcatcacggcggggaaaatacacat

SEQ ID NO: 500490 - DNA, 55 bp, Artificial
  Synthetic oligonucleotide
aggaatggagccaccgattagtacagagtggtcatggccctaacacgtattaccg

SEQ ID NO: 500491 - DNA, 55 bp, Artificial
  Synthetic oligonucleotide
agtgtcgtatgcgccgagcccgtaaccgggtcttcgtcaatgccggattgagggc

SEQ ID NO: 500492 - DNA, 55 bp, Artificial
  Synthetic oligonucleotide
ccgtttggccgtactccgttgaaacgggcaacgtaccacaaccgtttggacaggt

SEQ ID NO: 500493 - DNA, 55 bp, Artificial
  Synthetic oligonucleotide
cctacacctgttgggcttgtccatttgaacattcccgtgctacaatctgaaatac

SEQ ID NO: 500494 - DNA, 55 bp, Artificial
  Synthetic oligonucleotide
cctgaggttttgaccaatgggtaataaactctcgccatccttatcaaagtaccta

SEQ ID NO: 500495 - DNA, 55 bp, Artificial
  Synthetic oligonucleotide
cgaaactaagcaaggaacccagcattgaccaggcccataacacaattagaccagc

SEQ ID NO: 500496 - DNA, 55 bp, Artificial
  Synthetic oligonucleotide
cgcaagaccccacacaagtgaaaggacaagggcctgaccacggagattcgtatcg

SEQ ID NO: 500497 - DNA, 55 bp, Artificial
  Synthetic oligonucleotide
cgcacaccggtagtcagtaccacctctcccacgtgagtgataaccggcaaccggg

SEQ ID NO: 500498 - DNA, 55 bp, Artificial
  Synthetic oligonucleotide
cgcactattcacagccaccaacgtaaccttgagcagctcaccaagtttgctattg

SEQ ID NO: 500499 - DNA, 55 bp, Artificial
  Synthetic oligonucleotide
cgcattcctcgcggctctgtggggccgttcggacaatatcatgcatcaagggtac

SEQ ID NO: 500500 - DNA, 55 bp, Artificial
  Synthetic oligonucleotide
cgccaacgctcgcggggtggttttcgatagatgtaccattgagcaattttacagg

SEQ ID NO: 500501 - DNA, 55 bp, Artificial
  Synthetic oligonucleotide
cgccatgctatgcctgattttgcacctatccaatctgtaattccgtgtcttgctg

SEQ ID NO: 500502 - DNA, 55 bp, Artificial
  Synthetic oligonucleotide
cgcctgctcaaatgagaggtttgcaagaacgactactttctcgtttcaaatgggg

SEQ ID NO: 500503 - DNA, 55 bp, Artificial
  Synthetic oligonucleotide
cgcgtgaagtagagaccattaccgatactctgacattcaagaaaggttcggtcat

SEQ ID NO: 500504 - DNA, 55 bp, Artificial
  Synthetic oligonucleotide
cggctctacagttacgccaattcattgatagtagccttgcgtttatcgaccatag

SEQ ID NO: 500505 - DNA, 55 bp, Artificial
  Synthetic oligonucleotide
cggctggaagacggtcgcctctaaagatagattgcccgttggcggcagtgaagtg

SEQ ID NO: 500506 - DNA, 55 bp, Artificial
  Synthetic oligonucleotide
cgggaattagcattgtgttgatgctggtcggatactggagttttactcacctaaa

SEQ ID NO: 500507 - DNA, 55 bp, Artificial
  Synthetic oligonucleotide
cgggccatacctataaagtgggcgccagcttcctctacgacgactataccgagcg

SEQ ID NO: 500508 - DNA, 55 bp, Artificial
  Synthetic oligonucleotide
cgggctctccgatgttcaactacggtcagtttgtgccagcctggcaaagcgcgca

SEQ ID NO: 500509 - DNA, 55 bp, Artificial
  Synthetic oligonucleotide
cggggtgtattctgtcaccgtgaccgacaataaccagtgtacggctttccgttcc

SEQ ID NO: 500510 - DNA, 55 bp, Artificial
  Synthetic oligonucleotide
cggtccgccgtgcggtcattcgccttaagcaatgtaacagccgtccgaataacgg

SEQ ID NO: 500511 - DNA, 55 bp, Artificial
  Synthetic oligonucleotide
ccaaatggcggcacattgcagacactctatctaggtactagctatgtacaaaacc

SEQ ID NO: 500512 - DNA, 55 bp, Artificial
  Synthetic oligonucleotide
ccaactggggttgttagacacccgagctagggctggggctacgaccaacgagggt

SEQ ID NO: 500513 - DNA, 55 bp, Artificial
  Synthetic oligonucleotide
ccataatcaccacttcgaattcaagaaatacgctgatggaacttgtccggagcaa

SEQ ID NO: 500514 - DNA, 55 bp, Artificial
  Synthetic oligonucleotide
ccatgtgcgattgagattacacatcaaggttcgagccgactcataagcgtccatt

SEQ ID NO: 500515 - DNA, 55 bp, Artificial
  Synthetic oligonucleotide
cccagaagcagtggccatttctataaatgctgtttctccgtcggcagagatacca

SEQ ID NO: 500516 - DNA, 55 bp, Artificial
  Synthetic oligonucleotide
cccaggcaggatctcatggggaagccccaactcgatgaatggctccaccgtctga

SEQ ID NO: 500517 - DNA, 55 bp, Artificial
  Synthetic oligonucleotide
ccccaaagtggagaaattcgcttaggtaatgtttcgctcgaaaatatcagccaca

SEQ ID NO: 500518 - DNA, 55 bp, Artificial
  Synthetic oligonucleotide
ccccactcgcaatgcgtgtagtcgtactgccattcgacaaacgagtgattctcgc

SEQ ID NO: 500519 - DNA, 55 bp, Artificial
  Synthetic oligonucleotide
cccctgtttctgatgttatggcaaatttcaacgaccatccctaaagcgttctggt

SEQ ID NO: 500520 - DNA, 55 bp, Artificial
  Synthetic oligonucleotide
ccctattcagcgcggggtaaaccagaaccgccggcttattaactgatcaggatgc

SEQ ID NO: 500521 - DNA, 55 bp, Artificial
  Synthetic oligonucleotide
ccctcggcattgacgacgtaagccgccggatagttaatgttcaggacaggctggc

SEQ ID NO: 500522 - DNA, 55 bp, Artificial
  Synthetic oligonucleotide
ccgaataccgtaaaccagattctgtccctatttcgggcatttcgtcagcatgggt

SEQ ID NO: 500523 - DNA, 55 bp, Artificial
  Synthetic oligonucleotide
ccgtcgactatgccgccggatcaggtaaaatcgtttggacatgacgtacccctga

SEQ ID NO: 500524 - DNA, 55 bp, Artificial
  Synthetic oligonucleotide
ccgccataaataggattatcttgtacttgcctaatgggcagttcatgctccattg

SEQ ID NO: 500525 - DNA, 55 bp, Artificial
  Synthetic oligonucleotide
ccgcccattcgaatattacccaaaacgtaaagctgattgtacctatgaaactata

SEQ ID NO: 500526 - DNA, 55 bp, Artificial
  Synthetic oligonucleotide
ccgctacccggctacaaagtgatgggctatcattaccacgtaggcctggtgaaac

SEQ ID NO: 500527 - DNA, 55 bp, Artificial
  Synthetic oligonucleotide
ccgctacgggtactttctctgctgtcactggggtttctttggtattctccacccc

SEQ ID NO: 500528 - DNA, 55 bp, Artificial
  Synthetic oligonucleotide
ccgtcattggccctaaatttacttcacccgcaatactaacagaactcgaaaggcc

SEQ ID NO: 500529 - DNA, 55 bp, Artificial
  Synthetic oligonucleotide
ccggagaggtattcgaacccaacctcacggggtgccggaggggaaactaaacgcc

SEQ ID NO: 500530 - DNA, 54 bp, Artificial
  Synthetic oligonucleotide
tacttttggtggtgtaggttctggtacaatcgtagaacacatcgaagtatatgc

SEQ ID NO: 500531 - DNA, 54 bp, Artificial
  Synthetic oligonucleotide
aaattgggccgttgtcttacggaaaatcagtacatcatgccataccgtttccaa

SEQ ID NO: 500532 - DNA, 54 bp, Artificial
  Synthetic oligonucleotide
ggagctcacgctagaattgcctcaaactgtactcaatgtcatgcaggaggtaat

SEQ ID NO: 500533 - DNA, 54 bp, Artificial
  Synthetic oligonucleotide
gtcgctgtgcttattatcgggacacttacttatatgcaaccagagattggcgga

SEQ ID NO: 500534 - DNA, 54 bp, Artificial
  Synthetic oligonucleotide
aacggttcggaacacatctatttcaacgatccgccagtggggttcagagtccac

SEQ ID NO: 500535 - DNA, 54 bp, Artificial
  Synthetic oligonucleotide
aatcaacaaagtatggtgtgccattgattgcggaattgttgtcaatcccaatgc

SEQ ID NO: 500536 - DNA, 53 bp, Artificial
  Synthetic oligonucleotide
tagtgactacgactttccctccagaagattttaatacctgacgttgtggtttt

SEQ ID NO: 500537 - DNA, 53 bp, Artificial
  Synthetic oligonucleotide
tggcctgggtttaagatggtatatttcaggtagagcaccttggagtaatggct

SEQ ID NO: 500538 - DNA, 53 bp, Artificial
  Synthetic oligonucleotide
tcaagctgccacttccacctagctgcttacctacactatggaatgatgacgac

SEQ ID NO: 500539 - DNA, 53 bp, Artificial
  Synthetic oligonucleotide
ttttacggcacagcttgcaaaccgactttcaacagattatcgctggttcaaaa

SEQ ID NO: 500540 - DNA, 53 bp, Artificial
  Synthetic oligonucleotide
gtgcaggaagaatcggccagcttttaaacctaaatgcagtagctagtgagtgc

SEQ ID NO: 500541 - DNA, 53 bp, Artificial
  Synthetic oligonucleotide
agcacgaggctttgggtgttcggggctacattcagcataagcatcggcatccg

SEQ ID NO: 500542 - DNA, 52 bp, Artificial
  Synthetic oligonucleotide
tacggtcgagatgttcccacatgctacctccctcgttatagtcttcgggata

SEQ ID NO: 500543 - DNA, 52 bp, Artificial
  Synthetic oligonucleotide
gggtgatataatcttttacgctggtcatggcggacgggatcagaaaacgggg

SEQ ID NO: 500544 - DNA, 52 bp, Artificial
  Synthetic oligonucleotide
tcatacccagcaaggggtagcgacaagtcagcttttcaaccgtttgggtgcg

SEQ ID NO: 500545 - DNA, 52 bp, Artificial
  Synthetic oligonucleotide
aaaatgcagggcaacactaccagcaagccgtaaaagtaattagcaccgataa

SEQ ID NO: 500546 - DNA, 52 bp, Artificial
  Synthetic oligonucleotide
ggcagggcgttcgctaagatggtggagtgtggccggctcaatcttcggaacg

SEQ ID NO: 500547 - DNA, 52 bp, Artificial
  Synthetic oligonucleotide
gctggtcgttattccgatcgcaggccgtactgaacaagcccagtgaaactac

SEQ ID NO: 500548 - DNA, 52 bp, Artificial
  Synthetic oligonucleotide
aatgcctacctcgttcaggcgattggtagcggccagcagttcatactggcgc

SEQ ID NO: 500549 - DNA, 51 bp, Artificial
  Synthetic oligonucleotide
aaaatcctgttacagaccctaagcgtgtggctggatgtggagcaaccggcg

SEQ ID NO: 500550 - DNA, 51 bp, Artificial
  Synthetic oligonucleotide
ttcgttccaccggaacccgatctgcttctgcatgaagtcgttcactagggg

SEQ ID NO: 500551 - DNA, 51 bp, Artificial
  Synthetic oligonucleotide
ttacctcaactacgccagcttcgatgcccttgggaggagtggctaccgaac

SEQ ID NO: 500552 - DNA, 51 bp, Artificial
  Synthetic oligonucleotide
agaaccggcacagcttcccgtccagaaagtaacaccagtacaatctatagc

SEQ ID NO: 500553 - DNA, 51 bp, Artificial
  Synthetic oligonucleotide
cagtcactgaccccgacaaaacaggccgggtatcgtcggacggtatctcgg

SEQ ID NO: 500554 - DNA, 51 bp, Artificial
  Synthetic oligonucleotide
ccgttttcataatctgtaagcccggaaactgaaccgttgaatcgagtaaaa

SEQ ID NO: 500555 - DNA, 51 bp, Artificial
  Synthetic oligonucleotide
gaaatgggacctctggagtttagtgccggaagtcatgtgattgtagagggg

SEQ ID NO: 500556 - DNA, 51 bp, Artificial
  Synthetic oligonucleotide
gcctgaactccgcccaacaaatagatttcatcggcacccgccatgtacatt

SEQ ID NO: 500557 - DNA, 50 bp, Artificial
  Synthetic oligonucleotide
ttgccttcccaagtctggctatctattttaccctccccagttatcaaaat

SEQ ID NO: 500558 - DNA, 50 bp, Artificial
  Synthetic oligonucleotide
aagacattgctcgcaacgaagttggtcccatcaatcgaatactgtaccgt

SEQ ID NO: 500559 - DNA, 50 bp, Artificial
  Synthetic oligonucleotide
tcgcgtcaaattcgtgtctgattactcttcaacctgaggcatcgtctatg

SEQ ID NO: 500560 - DNA, 50 bp, Artificial
  Synthetic oligonucleotide
gtttgaacgcatggcagagagttacgggctttcaaacaaaggcttagtgg

SEQ ID NO: 500561 - DNA, 55 bp, Artificial
  Synthetic oligonucleotide
ggcacgaggattgtgcgtatactcgaactatgtgatgacgacacggtaggcctgc

SEQ ID NO: 500562 - DNA, 55 bp, Artificial
  Synthetic oligonucleotide
ggcaccctcctgtgtagggagagcctgcccggaaactttcccgagggtcccgaca

SEQ ID NO: 500563 - DNA, 55 bp, Artificial
  Synthetic oligonucleotide
gctgcccgcttcagacgactgaacactcaagagggtacgaatcaaggccagatgc

SEQ ID NO: 500564 - DNA, 55 bp, Artificial
  Synthetic oligonucleotide
gctctgttgaaagaggtcactggtgaaatcactgcctccatcgctctgcaccacg

SEQ ID NO: 500565 - DNA, 55 bp, Artificial
  Synthetic oligonucleotide
gcgctagttcagctacagattcgtataataagccctccatgaccatttccttatg

SEQ ID NO: 500566 - DNA, 55 bp, Artificial
  Synthetic oligonucleotide
gcgcgcatatttgcagaccgggaggtgccctttatctcgcaggaaatctggacgg

SEQ ID NO: 500567 - DNA, 55 bp, Artificial
  Synthetic oligonucleotide
gccgctgtcgctctgattcttcattgtggtcccagaatatcgtaggtcagggtaa

SEQ ID NO: 500568 - DNA, 55 bp, Artificial
  Synthetic oligonucleotide
gcagtagttatagaaattgcgacacacgaaggatcaagtcaaagctttcgacgtg

SEQ ID NO: 500569 - DNA, 55 bp, Artificial
  Synthetic oligonucleotide
gcaggaggtaaagatcaagttcgccatgattatcatcttaagccgcgctatgctc

SEQ ID NO: 500570 - DNA, 55 bp, Artificial
  Synthetic oligonucleotide
gattactccgaatattaaggagactgccgtcacagaaagcccatccaagcggggc

SEQ ID NO: 500571 - DNA, 55 bp, Artificial
  Synthetic oligonucleotide
gatctccggcactggacgggcattggtacctgtgctcatgcctcttccttccaac

SEQ ID NO: 500572 - DNA, 55 bp, Artificial
  Synthetic oligonucleotide
gatcattgaccacgaattcggtattccaggtcgtaatcgtctggtcgacccgggt

SEQ ID NO: 500573 - DNA, 55 bp, Artificial
  Synthetic oligonucleotide
gagggcattctcagcgtgtccgccacacagatctcttacctttcgtcggacgcgg

SEQ ID NO: 500574 - DNA, 55 bp, Artificial
  Synthetic oligonucleotide
gagcgggaacacgaggcctctcccatccggagccaggcgtaagaggtctgctgag

SEQ ID NO: 500575 - DNA, 55 bp, Artificial
  Synthetic oligonucleotide
gacgtgtatcgcgctctggggtcaccgcggctcttcgctgtaggcaatcgttgtg

SEQ ID NO: 500576 - DNA, 55 bp, Artificial
  Synthetic oligonucleotide
gaagcacagggcagagtctttatactcgcggcacacatgccaggtcttttccgcg

SEQ ID NO: 500577 - DNA, 55 bp, Artificial
  Synthetic oligonucleotide
ctggggtatacgcggctgaaattcgaactgacggccacagcatgagctgacatgc

SEQ ID NO: 500578 - DNA, 55 bp, Artificial
  Synthetic oligonucleotide
ctggccctctcgcctcacccggatctctgcctctcgctggggcgcgaacaaaggg

SEQ ID NO: 500579 - DNA, 55 bp, Artificial
  Synthetic oligonucleotide
ctgacggcgctgccctaaacccctctgaattggaagcgaaactcaccttgccggg

SEQ ID NO: 500580 - DNA, 55 bp, Artificial
  Synthetic oligonucleotide
ctgaatctcggggaggcgatctatgccgtgcccctcttcggcagcatggtcagca

SEQ ID NO: 500581 - DNA, 55 bp, Artificial
  Synthetic oligonucleotide
ttacaggagtcatcggagcgttcgacaactgtaacaatgctaccgaagccccttg

SEQ ID NO: 500582 - DNA, 55 bp, Artificial
  Synthetic oligonucleotide
tgcgctcctttatcgtcacccctgacgacacagtgaaggccccggctggtttgcc

SEQ ID NO: 500583 - DNA, 55 bp, Artificial
  Synthetic oligonucleotide
tgaggcgatgcgtcagggactgccctatacccacgcagctgtgatcgtctcagcg

SEQ ID NO: 500584 - DNA, 55 bp, Artificial
  Synthetic oligonucleotide
tctctgaacgcaagcccacagaagagatatcccatcatcttcgtctcctcagcag

SEQ ID NO: 500585 - DNA, 55 bp, Artificial
  Synthetic oligonucleotide
tctaatctcaagttgggagcttccacgggcccgaacatcattcctctggcaacgg

SEQ ID NO: 500586 - DNA, 55 bp, Artificial
  Synthetic oligonucleotide
tcactacgtccgtgtggggtgccctctatgtccggacccggggaagttctgcaga

SEQ ID NO: 500587 - DNA, 55 bp, Artificial
  Synthetic oligonucleotide
gtttggttccttttcggcctgttgagcccgcgtgagggttatcggcctgcgtgcg

SEQ ID NO: 500588 - DNA, 55 bp, Artificial
  Synthetic oligonucleotide
gttcagcgtctgtttgcagaagcgaaacgtatgttccagatcgaaccgacgcgtg

SEQ ID NO: 500589 - DNA, 55 bp, Artificial
  Synthetic oligonucleotide
gtgagcgtctgaactgttctcgcactggtcaaacagtgttgaggctgcagagcgc

SEQ ID NO: 500590 - DNA, 55 bp, Artificial
  Synthetic oligonucleotide
gtctcgatcagcacactcagctgtgtggttgggcgcgtcagggcgaggttctggt

SEQ ID NO: 500591 - DNA, 55 bp, Artificial
  Synthetic oligonucleotide
ggtccgtcccttgcagtccttatgctccgtcaaggcccggcttggttggaaagcg

SEQ ID NO: 500592 - DNA, 55 bp, Artificial
  Synthetic oligonucleotide
ggtcacgttcccaatctatgcctccccgcgcgcgggcataaaccgtcactgttcc

SEQ ID NO: 500593 - DNA, 55 bp, Artificial
  Synthetic oligonucleotide
gggtcatggagggagggtagcgcggtgtcccactaatcgaccttagacaccaccc

SEQ ID NO: 500594 - DNA, 55 bp, Artificial
  Synthetic oligonucleotide
gggtcaacgactgcggcccacagtagcccagccaattggatagaactttgacggg

SEQ ID NO: 500595 - DNA, 55 bp, Artificial
  Synthetic oligonucleotide
gggctgggccagagcgacgaatctgctgtgagcggcgtccactagaaagatgacc

SEQ ID NO: 500596 - DNA, 55 bp, Artificial
  Synthetic oligonucleotide
gggcatacgcccgaaattcttcgggtgtcagagggtaatcatccagagcgctgtg

SEQ ID NO: 500597 - DNA, 55 bp, Artificial
  Synthetic oligonucleotide
ggctagtcttaccctcctcggtgacgataagcacaccatcagtgtgtcgccccag

SEQ ID NO: 500598 - DNA, 55 bp, Artificial
  Synthetic oligonucleotide
ggccgatgtacatcgtgttgtgcgtgggcctcctgacgatgtggttgaccaacct

SEQ ID NO: 500599 - DNA, 55 bp, Artificial
  Synthetic oligonucleotide
ggccgaagcttagtcccaggggtgggaatcaactgggaatgttccctgctacccc

SEQ ID NO: 500600 - DNA, 55 bp, Artificial
  Synthetic oligonucleotide
ggcatggtacgttttgatattcgggcgtggtcacgtcaaatcgaggcgaacggaa

SEQ ID NO: 500601 - DNA, 55 bp, Artificial
  Synthetic oligonucleotide
acagccggagaagaggcggacgaacctcgccttggcacccgcctaggcgatgaga

SEQ ID NO: 500602 - DNA, 55 bp, Artificial
  Synthetic oligonucleotide
ccccgtcatgatacggcgagagacgtttctctagaaacgaggctagaaaaccagg

SEQ ID NO: 500603 - DNA, 55 bp, Artificial
  Synthetic oligonucleotide
ccccggggtggggccaggacgtccctgagaggcattcgggcttctgaacgtgtca

SEQ ID NO: 500604 - DNA, 55 bp, Artificial
  Synthetic oligonucleotide
ccccacataaaagctatacagacggtcttacggcatgttacacctgaagaccagc

SEQ ID NO: 500605 - DNA, 55 bp, Artificial
  Synthetic oligonucleotide
cccagctccagggttgagggaacgcacagaaagaattgcgaacgaacggatctgg

SEQ ID NO: 500606 - DNA, 55 bp, Artificial
  Synthetic oligonucleotide
ccatccaagcggggcataatttcctgcgaatatccgaatttcaccgagaaagggg

SEQ ID NO: 500607 - DNA, 55 bp, Artificial
  Synthetic oligonucleotide
ccagcggggatgagttacgggacctggtaggcggatgtgatctgctggtcctcct

SEQ ID NO: 500608 - DNA, 55 bp, Artificial
  Synthetic oligonucleotide
ccacgtagcgtgacctatggatgtctcagtggcgtcgcatcaggcgagacccatg

SEQ ID NO: 500609 - DNA, 55 bp, Artificial
  Synthetic oligonucleotide
acagttcggcccatacgccacacacaccgtgaaaatcgacatgaaaggcaaccgc

SEQ ID NO: 500610 - DNA, 55 bp, Artificial
  Synthetic oligonucleotide
ccaccgcagggagccgtcatcccacaacaggtcagagccacctcatactgaaccg

SEQ ID NO: 500611 - DNA, 55 bp, Artificial
  Synthetic oligonucleotide
ccacattacgggtcagctttgctacccagaactcctgacgactcttcggccagtg

SEQ ID NO: 500612 - DNA, 55 bp, Artificial
  Synthetic oligonucleotide
caggagccgactttctgctgcctactgtgcgttttgaagggtagtcagaaggctg

SEQ ID NO: 500613 - DNA, 55 bp, Artificial
  Synthetic oligonucleotide
cagagggatgctcggtgagtggcagacggtcaacatgacctcgaaaggaaaccgt

SEQ ID NO: 500614 - DNA, 55 bp, Artificial
  Synthetic oligonucleotide
cacagaccctacaaagtacgcatcagctctcgtagggcgtcaggcgctgcggagc

SEQ ID NO: 500615 - DNA, 55 bp, Artificial
  Synthetic oligonucleotide
caatacgtccgcttaaggacgccctcccgcaccagaggtcaccccaagtacacgc

SEQ ID NO: 500616 - DNA, 55 bp, Artificial
  Synthetic oligonucleotide
caacttcatctagaactggctatagccaatatcgataggcggccagtcgctgaaa

SEQ ID NO: 500617 - DNA, 55 bp, Artificial
  Synthetic oligonucleotide
caaacgcccttcgcgaccaacctcgtcgaaccactcaggcaaccctaggtatcca

SEQ ID NO: 500618 - DNA, 55 bp, Artificial
  Synthetic oligonucleotide
atctgataacggccgatcccatgtctctgaggtccgatttcaaggagaacccatg

SEQ ID NO: 500619 - DNA, 55 bp, Artificial
  Synthetic oligonucleotide
agtagaaaggcgcctggaagatgtggtagtaatgccagcccttggcacgcacgtg

SEQ ID NO: 500620 - DNA, 55 bp, Artificial
  Synthetic oligonucleotide
cgttgaacgcgaaggcaattctcaaggtacttgagtccagtgcaccggacgatcc

SEQ ID NO: 500621 - DNA, 55 bp, Artificial
  Synthetic oligonucleotide
aaagaggtcactggtgaaatcactgcctccatcgctctgcaccacgagagtctcg

SEQ ID NO: 500622 - DNA, 55 bp, Artificial
  Synthetic oligonucleotide
aacggtcctcctatcccctatggttccggcgcccgctcccctagacttgcctttt

SEQ ID NO: 500623 - DNA, 55 bp, Artificial
  Synthetic oligonucleotide
cggacagcgaccatctgacataatgactccggccgacttgacccacaccgaaata

SEQ ID NO: 500624 - DNA, 55 bp, Artificial
  Synthetic oligonucleotide
cgcggggttgcctgaagagaccttccctatctatccccgtgcagagcactttgcc

SEQ ID NO: 500625 - DNA, 55 bp, Artificial
  Synthetic oligonucleotide
cgcgactggggtcattcaacacaggttgagcggcgaggcgtcgttcttccaattg

SEQ ID NO: 500626 - DNA, 55 bp, Artificial
  Synthetic oligonucleotide
cgcagggaaaggccctgcacgttactcaggtagggcgccgtaaccggaattccgt

SEQ ID NO: 500627 - DNA, 55 bp, Artificial
  Synthetic oligonucleotide
cgaggcgtaaaccacgccattcagtacgaggggttgttggccgaaggtggcatgg

SEQ ID NO: 500628 - DNA, 55 bp, Artificial
  Synthetic oligonucleotide
cgacacgatcttccctcctacacgcaggcgtatatccggggacagcgattgcttg

SEQ ID NO: 500629 - DNA, 55 bp, Artificial
  Synthetic oligonucleotide
cgacaatggagcggagtatgaatgacgcgggcataccgggactgctgcacatcgg

SEQ ID NO: 500630 - DNA, 55 bp, Artificial
  Synthetic oligonucleotide
ccgtgaagtagggattcacggcctgccgactggcccctttgaaggttgcaaattc

SEQ ID NO: 500631 - DNA, 55 bp, Artificial
  Synthetic oligonucleotide
ccgagagacaagtgcctttgacggaagctcaacttcgaaaacttgccgatgaggg

SEQ ID NO: 500632 - DNA, 55 bp, Artificial
  Synthetic oligonucleotide
cccttacctgggtagagacttaaactggacaaccgatggaggacgggcatgtcag

SEQ ID NO: 500633 - DNA, 55 bp, Artificial
  Synthetic oligonucleotide
cccgcgaagacatggctttaggttttggatgctcaaagtagactgtaatataatc

SEQ ID NO: 500634 - DNA, 54 bp, Artificial
  Synthetic oligonucleotide
cgtttgcttagatactgtcatcatgaacggtgtgcgggcgcaaagtcaagtcgg

SEQ ID NO: 500635 - DNA, 53 bp, Artificial
  Synthetic oligonucleotide
cctcttgggtcccgtgcacccagagggcagggttaccgtccccgtcgaatcgt

SEQ ID NO: 500636 - DNA, 53 bp, Artificial
  Synthetic oligonucleotide
gaagcgaaccaagccgcgccggctagcagagcgggctgcgtctcagatgtgcc

SEQ ID NO: 500637 - DNA, 53 bp, Artificial
  Synthetic oligonucleotide
ggactcctggaacgcctcaaccggacatacaagtatcagtttgccttccgcca

SEQ ID NO: 500638 - DNA, 53 bp, Artificial
  Synthetic oligonucleotide
cggaacggctgtcagtcctgcacttccaggacctcaaccagagtcagccgctc

SEQ ID NO: 500639 - DNA, 53 bp, Artificial
  Synthetic oligonucleotide
gcagtacatggtcgcgtacaacattcccaagagcagcctgaacctgcagtcgc

SEQ ID NO: 500640 - DNA, 53 bp, Artificial
  Synthetic oligonucleotide
acgtatacggtcttcaacgtttgagaggcgtggcccgggcacagctccgggcc

SEQ ID NO: 500641 - DNA, 53 bp, Artificial
  Synthetic oligonucleotide
ccctcaccgtcagtatcctgggcaccggtcgcgtcggcattcatctcgcgaca

SEQ ID NO: 500642 - DNA, 53 bp, Artificial
  Synthetic oligonucleotide
atgctgtcaagtcttttcaaaccgcgtgagctttagggcctagtacatcgggg

SEQ ID NO: 500643 - DNA, 53 bp, Artificial
  Synthetic oligonucleotide
agtcgcttcataggaacctccggggacagtgggccaggtcagaagaacccctg

SEQ ID NO: 500644 - DNA, 52 bp, Artificial
  Synthetic oligonucleotide
tctgggaatacgcgagtgccgtgtgccttttcagcggtccagaaggcacccc

SEQ ID NO: 500645 - DNA, 52 bp, Artificial
  Synthetic oligonucleotide
tgaccggccgcccacattcccgaggtctgatcgaacgcatggcacgtccccg

SEQ ID NO: 500646 - DNA, 52 bp, Artificial
  Synthetic oligonucleotide
tcaccagcacgactgccacgggtgaacgccgttacgtcgacaccgggtacga

SEQ ID NO: 500647 - DNA, 52 bp, Artificial
  Synthetic oligonucleotide
ggctaacacctacaccgcgacagtcgtcgacagccaggtcactacggtcccc

SEQ ID NO: 500648 - DNA, 52 bp, Artificial
  Synthetic oligonucleotide
ggccatcggacaggtgaagactaaaggacagacggtcacgtcaaaggtgaaa

SEQ ID NO: 500649 - DNA, 52 bp, Artificial
  Synthetic oligonucleotide
ccccggaagcagcgcgcacaacccacgtgccaaccagaaacgcccctacgct

SEQ ID NO: 500650 - DNA, 52 bp, Artificial
  Synthetic oligonucleotide
cccctcaccgccgaagacagctgctcacgcctgagtgccccactcgtcttcg

SEQ ID NO: 500651 - DNA, 52 bp, Artificial
  Synthetic oligonucleotide
ctctagtttggtcgaggctcccattcactctgtgcagacgaaaacgttgcgg

SEQ ID NO: 500652 - DNA, 51 bp, Artificial
  Synthetic oligonucleotide
tatgtattgctggaagatgaaacgcgtggaccacagcattactcggtcttt

SEQ ID NO: 500653 - DNA, 51 bp, Artificial
  Synthetic oligonucleotide
ctctgtctgggtaccaatgtttgggccagccgaatcattcatatatgcggt

SEQ ID NO: 500654 - DNA, 51 bp, Artificial
  Synthetic oligonucleotide
tggaacctgcgaggaggaacacccttcctttacccgatctgcggccctggt

SEQ ID NO: 500655 - DNA, 51 bp, Artificial
  Synthetic oligonucleotide
tttcatcctgagtggctggaggccggatttggtacggaacggggtgagggg

SEQ ID NO: 500656 - DNA, 50 bp, Artificial
  Synthetic oligonucleotide
gtcccattctattagctagacggcgtactattaaaatagtcggtcgttct

SEQ ID NO: 500657 - DNA, 55 bp, Artificial
  Synthetic oligonucleotide
gtggttccgcagcccctcaagcccgtcgacaacaccagactgctgtgctcggaac

SEQ ID NO: 500658 - DNA, 55 bp, Artificial
  Synthetic oligonucleotide
gtcgtttgagagattgcgaagcgacggcagcatcaaacatgtgaatcacttcgag

SEQ ID NO: 500659 - DNA, 55 bp, Artificial
  Synthetic oligonucleotide
gtcgacatggcgctcgtagctgaacagggtcgtcggatccatcttgacctccagg

SEQ ID NO: 500660 - DNA, 55 bp, Artificial
  Synthetic oligonucleotide
gtcccctttccggagaccagtctatcaccgggagggtgtgctactcttcgccgct

SEQ ID NO: 500661 - DNA, 55 bp, Artificial
  Synthetic oligonucleotide
ggggactcttggagagcaccactgtctagatgtcgcacgaggtcatccgccatcg

SEQ ID NO: 500662 - DNA, 55 bp, Artificial
  Synthetic oligonucleotide
gggctcgagaaggcccgtccgacagctccgcaccggtacctcggcaaaatgcggt

SEQ ID NO: 500663 - DNA, 55 bp, Artificial
  Synthetic oligonucleotide
ctttcctggatggtgaacgatgtgagccacgctaccaaggggtcctgacgaacgg

SEQ ID NO: 500664 - DNA, 55 bp, Artificial
  Synthetic oligonucleotide
cgcgagcaccgcgggctacagtcgcacagagattcgatcgaacaggagttcggag

SEQ ID NO: 500665 - DNA, 55 bp, Artificial
  Synthetic oligonucleotide
cgcactgatcgcattctctaattcacccaggactgcctcgcctgagcgattcggc

SEQ ID NO: 500666 - DNA, 55 bp, Artificial
  Synthetic oligonucleotide
ccttggcgtgcccgactcgaacacttgtctggtcattctgtagatcggtagggcg

SEQ ID NO: 500667 - DNA, 55 bp, Artificial
  Synthetic oligonucleotide
cctcggcgaatagaaacgagggcggtcacgaatcttcatctccgacacccttccg

SEQ ID NO: 500668 - DNA, 55 bp, Artificial
  Synthetic oligonucleotide
ccgatgagtactcactcatgagcaccctcaggaactaatggtccgagccctcttg

SEQ ID NO: 500669 - DNA, 55 bp, Artificial
  Synthetic oligonucleotide
ccctgagcgcccgagcggatcctggcttccgaggaaggaccctccatgcagttca

SEQ ID NO: 500670 - DNA, 55 bp, Artificial
  Synthetic oligonucleotide
cactcgggtatacccaaacaggacaccattagtgccgtgcagttgttcggggagc

SEQ ID NO: 500671 - DNA, 55 bp, Artificial
  Synthetic oligonucleotide
agcctcgagagctgaaggatctctgcacgggtccgcacgctcccgtcctccgtaa

SEQ ID NO: 500672 - DNA, 55 bp, Artificial
  Synthetic oligonucleotide
actcgtccgctgcgtcgtcccgatccgactcgtccgctgcgtcgtcccgattcga

SEQ ID NO: 500673 - DNA, 55 bp, Artificial
  Synthetic oligonucleotide
acagtcatcctcgcccgtcgagagaaccgcacgtccatccgcgagaccggagcaa

SEQ ID NO: 500674 - DNA, 55 bp, Artificial
  Synthetic oligonucleotide
aaggtgaatgtagagctatcaatactaaatatgcggcccatttgctcggacacgg

SEQ ID NO: 500675 - DNA, 54 bp, Artificial
  Synthetic oligonucleotide
caaccattgcctggattgacgagaggagatcccacctcttggaggggtccgcat

SEQ ID NO: 500676 - DNA, 53 bp, Artificial
  Synthetic oligonucleotide
agggagacctagaacatcggtcaagcacaaatgttccgacccagcacacgaca

SEQ ID NO: 500677 - DNA, 51 bp, Artificial
  Synthetic oligonucleotide
catgagatccggagctcgctctcgtcggaccagacaatcaccaggacgtga

SEQ ID NO: 500678 - DNA, 51 bp, Artificial
  Synthetic oligonucleotide
gcgtggtcgactgatggcgtcctgcgtcccggtacggatatatcgccgtac

SEQ ID NO: 500679 - DNA, 51 bp, Artificial
  Synthetic oligonucleotide
ggcgtgaggatcatgggtcccagcctagggtccgacggttcctgatcaggg

SEQ ID NO: 500680 - DNA, 51 bp, Artificial
  Synthetic oligonucleotide
tcagaccctgtcgaagaggtgtccagccagcacgctgcagaggcagacctc

SEQ ID NO: 500681 - DNA, 51 bp, Artificial
  Synthetic oligonucleotide
ttcacgcgaaacatggggtaaagcgcctcccgcgtccgattttgccagtcc

SEQ ID NO: 500682 - DNA, 55 bp, Artificial
  Synthetic oligonucleotide
ctcgcggaatattcgcagccggtcactccttctacgtgaccagcacatctggccc

SEQ ID NO: 500683 - DNA, 55 bp, Artificial
  Synthetic oligonucleotide
cttaggtagcgaaggtgaactgttcgctgggtaaggccttgcactcgggcatcct

SEQ ID NO: 500684 - DNA, 55 bp, Artificial
  Synthetic oligonucleotide
gaaggacaggctgacacgtcatggagaggtccctctgggagcaactgctctggcc

SEQ ID NO: 500685 - DNA, 55 bp, Artificial
  Synthetic oligonucleotide
gacaaaactcaaacggtcctgaacccgcacaagctcctggacatcactgggccga

SEQ ID NO: 500686 - DNA, 55 bp, Artificial
  Synthetic oligonucleotide
gaccttccgtatcgacgtattggagatggccttggagatcgtgcgccgttcgggg

SEQ ID NO: 500687 - DNA, 55 bp, Artificial
  Synthetic oligonucleotide
gacgtcgtcggaagacttcacgcatgactcccgtcgtcttctaccgcagcactcg

SEQ ID NO: 500688 - DNA, 55 bp, Artificial
  Synthetic oligonucleotide
gcccttcaatggatacgagatcacgggctcttcccgatcaacggtgtaggcgtcg

SEQ ID NO: 500689 - DNA, 55 bp, Artificial
  Synthetic oligonucleotide
gctcgagcgcctagccatgccctgcggtgcggactgagcaacgtaatagcaacca

SEQ ID NO: 500690 - DNA, 55 bp, Artificial
  Synthetic oligonucleotide
ggacagccgagcgacccgatgcgaaacactcggacacgatcagagcccacgatca

SEQ ID NO: 500691 - DNA, 55 bp, Artificial
  Synthetic oligonucleotide
ggaccgacggccctcgcatctcttcgagtattgaccctcgattggtctagtccaa

SEQ ID NO: 500692 - DNA, 55 bp, Artificial
  Synthetic oligonucleotide
ggaggctggttgacctgcacggatgactctcgttgtctaacgtggaacgagggtg

SEQ ID NO: 500693 - DNA, 55 bp, Artificial
  Synthetic oligonucleotide
ggatggacgggtctgtcccaatccaagagatcaagtccgaaggctcccactggcg

SEQ ID NO: 500694 - DNA, 55 bp, Artificial
  Synthetic oligonucleotide
tagtgacaggaaggcaaaccgctactacagatgccaacaccaaagatgaccgaag

SEQ ID NO: 500695 - DNA, 55 bp, Artificial
  Synthetic oligonucleotide
tatgactacccggtcttcggtccgggaactggtgaggccgtccggttggatgacg

SEQ ID NO: 500696 - DNA, 55 bp, Artificial
  Synthetic oligonucleotide
tccatggcgcggtgactctgttggagcggggtgttcctctggaggaggtcgtcgg

SEQ ID NO: 500697 - DNA, 55 bp, Artificial
  Synthetic oligonucleotide
tcggcatcacgtcgaccgacctcctcacgcctccggttgctgtccgctccattgt

SEQ ID NO: 500698 - DNA, 55 bp, Artificial
  Synthetic oligonucleotide
tgaaggaagtgcggtggggtgtgccgacgtagcgggtactggattgccgcctcaa

SEQ ID NO: 500699 - DNA, 55 bp, Artificial
  Synthetic oligonucleotide
tggatggccggacgctgcaggggctactcgcccgcctcaccacgagcgatgactc

SEQ ID NO: 500700 - DNA, 55 bp, Artificial
  Synthetic oligonucleotide
aaccgccccgtggacctacggatgtcgcccggcccaatgtcatgtgaacaacacc

SEQ ID NO: 500701 - DNA, 55 bp, Artificial
  Synthetic oligonucleotide
acaggccagacggatcagccctcgacacccaaggactccaggatcaaggcacgca

SEQ ID NO: 500702 - DNA, 55 bp, Artificial
  Synthetic oligonucleotide
acatatggtcttcctctcgtcaggggcgatggcgagaaagattctccgacgccat

SEQ ID NO: 500703 - DNA, 55 bp, Artificial
  Synthetic oligonucleotide
agagagtccctgtatctctcctcgaacggcacggaccgaccgctcaagggcactc

SEQ ID NO: 500704 - DNA, 55 bp, Artificial
  Synthetic oligonucleotide
aggctctcaatagggtggcctttagtcaggcgcacactgacgtacccggggcacg

SEQ ID NO: 500705 - DNA, 55 bp, Artificial
  Synthetic oligonucleotide
agttagcactcccggcccttgagtgacagaatcggcgtgtccgaggcctgtcgca

SEQ ID NO: 500706 - DNA, 55 bp, Artificial
  Synthetic oligonucleotide
attcggccgtctaccttcgaccgcgaggggacacgctcaggcgtcaccgtccggt

SEQ ID NO: 500707 - DNA, 55 bp, Artificial
  Synthetic oligonucleotide
caccccgctgtggacagttcacccagatcactcacgccaccccaactctgtgagg

SEQ ID NO: 500708 - DNA, 55 bp, Artificial
  Synthetic oligonucleotide
cacgaggtgacaacgtagcagaggggcgttcttgttcccacccgggcacgtcagt

SEQ ID NO: 500709 - DNA, 55 bp, Artificial
  Synthetic oligonucleotide
ccatcggaggttctcttcccgggttacctaagctcgcccgagtatggcgggaacc

SEQ ID NO: 500710 - DNA, 55 bp, Artificial
  Synthetic oligonucleotide
cccgcgagcctgagacaatcggatacgtgcctatggagaacacgaagacccgcgg

SEQ ID NO: 500711 - DNA, 55 bp, Artificial
  Synthetic oligonucleotide
ccgagtcgcgtacccggtgtgccgcgggtcacccctctgtacagtgagcccgccg

SEQ ID NO: 500712 - DNA, 55 bp, Artificial
  Synthetic oligonucleotide
cctgtgccggagacaccctgatctgctgttcccttccctacgagaggatcgacga

SEQ ID NO: 500713 - DNA, 55 bp, Artificial
  Synthetic oligonucleotide
ccttttgcacccacgcccgaggtgatccatggcccaagagctgctcgcacacacc

SEQ ID NO: 500714 - DNA, 55 bp, Artificial
  Synthetic oligonucleotide
cgtgcggaagaaacgccgtcgacacatgaggggcttaacttgtgggcgcatgacc

SEQ ID NO: 500715 - DNA, 55 bp, Artificial
  Synthetic oligonucleotide
ctaacactctttgtcgtcgcacggcgggtacaacaccccacgttctacgctggtg

SEQ ID NO: 500716 - DNA, 54 bp, Artificial
  Synthetic oligonucleotide
ggggtgtcgttcacgggaaagtccgtgagagttcagctcggctctcaggatgcg

SEQ ID NO: 500717 - DNA, 54 bp, Artificial
  Synthetic oligonucleotide
aaccccacccagacgcaggaaattgcgacgactgaccgtctgtgccacgaccga

SEQ ID NO: 500718 - DNA, 53 bp, Artificial
  Synthetic oligonucleotide
cttcgcgggagagaccgaactcgggcaaccactgacgggtgtccaaccagcga

SEQ ID NO: 500719 - DNA, 53 bp, Artificial
  Synthetic oligonucleotide
ctcagttcccttggtgtcggcatagaggccctggtacctgtcccgacgatagg

SEQ ID NO: 500720 - DNA, 53 bp, Artificial
  Synthetic oligonucleotide
aaacttcgtatggatctccgggcagacctctcggtaatgcgtcggaaggggaa

SEQ ID NO: 500721 - DNA, 52 bp, Artificial
  Synthetic oligonucleotide
gcatgtacatcgtcttgttgacgagcagaacgttgatgccctgacctgtgga

SEQ ID NO: 500722 - DNA, 52 bp, Artificial
  Synthetic oligonucleotide
gacgcaccaagaaggtcgacggactgaacgccgacccgctggaatggacctg

SEQ ID NO: 500723 - DNA, 51 bp, Artificial
  Synthetic oligonucleotide
cgctacccgtgggtagggagcgagggtgagaccgaccacaacaccccacat

SEQ ID NO: 500724 - DNA, 51 bp, Artificial
  Synthetic oligonucleotide
ctcgaccacatccggtacatgcggaacttcgcgtcggcagcgcaccctaac

SEQ ID NO: 500725 - DNA, 50 bp, Artificial
  Synthetic oligonucleotide
tgcatcaggagttctcaaggtttaagctaccgggctgccaccgtctatgg

SEQ ID NO: 500726 - DNA, 55 bp, Artificial
  Synthetic oligonucleotide
gtgaacctgttatgaccatccaacaggcaacgcacaagacaagaggtatgtccct

SEQ ID NO: 500727 - DNA, 55 bp, Artificial
  Synthetic oligonucleotide
gtcatcacattcatacaccattgttccaaaggaaccctttctgcaggcactgata

SEQ ID NO: 500728 - DNA, 55 bp, Artificial
  Synthetic oligonucleotide
ggtaatctgggtgaccagggccgacgcaaccgtcacctcctgttccagtgatccg

SEQ ID NO: 500729 - DNA, 55 bp, Artificial
  Synthetic oligonucleotide
ggggaaaggactctggggtctccggggtaaggggtgtcatacccttttacagtgt

SEQ ID NO: 500730 - DNA, 55 bp, Artificial
  Synthetic oligonucleotide
ggaatggaccgccgacaaccagccgcctccgtttgctagcagcaaggctaagttt

SEQ ID NO: 500731 - DNA, 55 bp, Artificial
  Synthetic oligonucleotide
ggaaagggaccctactttgttcacgtaactaacgagcgaggatcaggagattgca

SEQ ID NO: 500732 - DNA, 55 bp, Artificial
  Synthetic oligonucleotide
gctggtgttgtatccaacgttttctactcagccttaatctaatagcggccatgtg

SEQ ID NO: 500733 - DNA, 55 bp, Artificial
  Synthetic oligonucleotide
gcggaggggatgccattaaacatgcggatatgtcaaggcaacttctggaaccaag

SEQ ID NO: 500734 - DNA, 55 bp, Artificial
  Synthetic oligonucleotide
gccggaatattgtacagggttttatgtggtaatgatgctggtaccatggaccctg

SEQ ID NO: 500735 - DNA, 55 bp, Artificial
  Synthetic oligonucleotide
cttaatccggtgttgctctcattcggggatgtattgggttgagggaacagtttgt

SEQ ID NO: 500736 - DNA, 55 bp, Artificial
  Synthetic oligonucleotide
ctcatacaatgccaaccatgaagccatgcggacccggaaacttttattgcacagt

SEQ ID NO: 500737 - DNA, 55 bp, Artificial
  Synthetic oligonucleotide
cgtaccatcggcattgcaggacacttgataccgaaaatcgcggtattctggtcca

SEQ ID NO: 500738 - DNA, 55 bp, Artificial
  Synthetic oligonucleotide
cgggagttgactggcggagcttcccgatatgctcattttcaacagcgttgtgaaa

SEQ ID NO: 500739 - DNA, 55 bp, Artificial
  Synthetic oligonucleotide
cgggacgaacggcataaccggtaagattaagccagcggtgttcaaattgtgccga

SEQ ID NO: 500740 - DNA, 55 bp, Artificial
  Synthetic oligonucleotide
ccacctttgagatcgatatgtgggaagcgagagagataagcagtgccgcagatcg

SEQ ID NO: 500741 - DNA, 55 bp, Artificial
  Synthetic oligonucleotide
ccaaggtctgcgcccatatcagagaccgggtcctggagggaattgatctttaaca

SEQ ID NO: 500742 - DNA, 55 bp, Artificial
  Synthetic oligonucleotide
catggattttcagggattgatcggtttgtgccatgacaatactgtcaccaagggt

SEQ ID NO: 500743 - DNA, 55 bp, Artificial
  Synthetic oligonucleotide
atccggcctgccgggctttaatcaagcagaacgctaccgacatttcagcgtccgc

SEQ ID NO: 500744 - DNA, 55 bp, Artificial
  Synthetic oligonucleotide
atcactgtggccgtgtcttttatggatctgggaaagctcaatgtctggatcaccc

SEQ ID NO: 500745 - DNA, 55 bp, Artificial
  Synthetic oligonucleotide
aacacaggtaaaagccgggttgtcttataatccttgatttggacagattgcatgc

SEQ ID NO: 500746 - DNA, 54 bp, Artificial
  Synthetic oligonucleotide
ccaaccggggccttttggaaaccttggatgagcggtcaatgaacatcgtggatg

SEQ ID NO: 500747 - DNA, 54 bp, Artificial
  Synthetic oligonucleotide
gttaccacatggatggaccggcctttataattaacactgtctgagccgcctggg

SEQ ID NO: 500748 - DNA, 51 bp, Artificial
  Synthetic oligonucleotide
ggactttaatccccaggcgcttaagttcgatcaggttcaaccccttatttc

SEQ ID NO: 500749 - DNA, 51 bp, Artificial
  Synthetic oligonucleotide
ggtgattatcttgaccctgtctgttgccggaggaagataaaagttggtcca

SEQ ID NO: 500750 - DNA, 50 bp, Artificial
  Synthetic oligonucleotide
tacttcaagctggacaaagatgccaggtggtctgacggcaagcctgttac

SEQ ID NO: 500751 - DNA, 60 bp, Artificial
  Synthetic oligonucleotide
gatgtacgggatttttcatcatgcgcggcagtggtccacggcgtcgaaccggggaatgga

SEQ ID NO: 500752 - DNA, 60 bp, Artificial
  Synthetic oligonucleotide
tggggtttggggcctaggccgtcgaaaacctcccctccggtttggaataaccaggcggac

SEQ ID NO: 500753 - DNA, 60 bp, Artificial
  Synthetic oligonucleotide
acgacgcctgcagcaagaccatgcgggagctggggaaggtgcgtggtggcatcacctatg

SEQ ID NO: 500754 - DNA, 60 bp, Artificial
  Synthetic oligonucleotide
gtgtgtggcggccccggaaacggccttctcgggcgttctggcgggaaccctggttgtgga

SEQ ID NO: 500755 - DNA, 59 bp, Artificial
  Synthetic oligonucleotide
agacgaggtatccggccgcaatatgcctctttccggtcgcggccttttttcgccccaac

SEQ ID NO: 500756 - DNA, 55 bp, Artificial
  Synthetic oligonucleotide
ctgaaccccttacgggtaaaattggcgtttctgaacgccggtctacgatttccgg

SEQ ID NO: 500757 - DNA, 55 bp, Artificial
  Synthetic oligonucleotide
ctggaacttaacgaacgctgtgctgcttacgtccgggagcggtttggccttccgg

SEQ ID NO: 500758 - DNA, 55 bp, Artificial
  Synthetic oligonucleotide
gacctcaaggacgggtgctttcgtatggcggttctggacgtcccagagctcgcga

SEQ ID NO: 500759 - DNA, 55 bp, Artificial
  Synthetic oligonucleotide
gccggccggaaaatattgacgaaaactcgccggacattgtccgtcccggtgccta

SEQ ID NO: 500760 - DNA, 55 bp, Artificial
  Synthetic oligonucleotide
gcgcaaacgccggaggaaagaaccaccaggggcctctcttcgacttttccggtgc

SEQ ID NO: 500761 - DNA, 55 bp, Artificial
  Synthetic oligonucleotide
gcgctccgctgaaaggcccggaaccgtttgtcgcagtcgccgtcctcataaagtg

SEQ ID NO: 500762 - DNA, 55 bp, Artificial
  Synthetic oligonucleotide
gctatctccttgggatggcgaggactacggtccgggatcgcttgggagggagtcc

SEQ ID NO: 500763 - DNA, 55 bp, Artificial
  Synthetic oligonucleotide
gctcaaccctggtgtggcttgggaccgctgatccttgcgacagtcgaggcgaaat

SEQ ID NO: 500764 - DNA, 55 bp, Artificial
  Synthetic oligonucleotide
ggccggacgctccatgagcatgatctcgccgatcatggacgaatagccgaacacc

SEQ ID NO: 500765 - DNA, 55 bp, Artificial
  Synthetic oligonucleotide
ggtggtgggccggggccctctatgaaaagtgcctggtggagacggattacacgta

SEQ ID NO: 500766 - DNA, 55 bp, Artificial
  Synthetic oligonucleotide
gtggctgatattggttatacttacggctattatacggaactgaaccccttacggg

SEQ ID NO: 500767 - DNA, 55 bp, Artificial
  Synthetic oligonucleotide
tccttgctgttttctatgacgctttccaaagagctataagggacataagtatagc

SEQ ID NO: 500768 - DNA, 55 bp, Artificial
  Synthetic oligonucleotide
tgccctgagccgcggacgtctgagcgactggccccgtatttgcaaaagaattccg

SEQ ID NO: 500769 - DNA, 55 bp, Artificial
  Synthetic oligonucleotide
tgtcagtcgagtgtatcgattcaacttcgaggaggacttctcatggctagcagtt

SEQ ID NO: 500770 - DNA, 55 bp, Artificial
  Synthetic oligonucleotide
ttcatcatgcgcggcagtggtccacggcgtcgaaccggggaatggagccgatttc

SEQ ID NO: 500771 - DNA, 55 bp, Artificial
  Synthetic oligonucleotide
ttccataagggaagatcgccagacttgggattttttccggggccagtcaaggccg

SEQ ID NO: 500772 - DNA, 55 bp, Artificial
  Synthetic oligonucleotide
ttcgctgaaaggcccggaaccgtttgtcgcagtcgccgtcctcataaagtttgcg

SEQ ID NO: 500773 - DNA, 55 bp, Artificial
  Synthetic oligonucleotide
ttgttcgtccggccggcgtctagccgcagggattgggacaaaggatgtgcgggga

SEQ ID NO: 500774 - DNA, 55 bp, Artificial
  Synthetic oligonucleotide
ttgttgctaagcaataggacgcactcttggtctgcgcccggggaggctgggcagg

SEQ ID NO: 500775 - DNA, 55 bp, Artificial
  Synthetic oligonucleotide
aaacattgattgacccgcgtttggaaggcatgggttccactgccaccgtggcttg

SEQ ID NO: 500776 - DNA, 55 bp, Artificial
  Synthetic oligonucleotide
aagccgaaacaggcccaaacctgacgtgatttgttcctctgacctgacgctcggt

SEQ ID NO: 500777 - DNA, 55 bp, Artificial
  Synthetic oligonucleotide
aatgccataaaacacaccgctgtatcggtgtgcacccggggcaggccttttcgcg

SEQ ID NO: 500778 - DNA, 55 bp, Artificial
  Synthetic oligonucleotide
acctcacagccgcaggcgtggccagatggttcttgacaccagcagatccatgacc

SEQ ID NO: 500779 - DNA, 55 bp, Artificial
  Synthetic oligonucleotide
acgggaactatcggtactccgggcgttcttacggctacccttgctggtaacaact

SEQ ID NO: 500780 - DNA, 55 bp, Artificial
  Synthetic oligonucleotide
actccacaaccgggcacccgaactgaacacccgaaccgaacacccgtttcgggca

SEQ ID NO: 500781 - DNA, 55 bp, Artificial
  Synthetic oligonucleotide
agaacgtcaagagagaaattctaccgaaagcaatggtcatggttacggaccatcg

SEQ ID NO: 500782 - DNA, 55 bp, Artificial
  Synthetic oligonucleotide
agggttcgggtaccaggctctgtggacggtccggtttcaggtcctgcgttctgcg

SEQ ID NO: 500783 - DNA, 55 bp, Artificial
  Synthetic oligonucleotide
caatattggccggtataggttgacattcgctggcaacggccggtaaagtctgcga

SEQ ID NO: 500784 - DNA, 55 bp, Artificial
  Synthetic oligonucleotide
cagaccaggcggagctgagctacccgtggcagtcctttatccacaattcgctagc

SEQ ID NO: 500785 - DNA, 55 bp, Artificial
  Synthetic oligonucleotide
cagccgctaggcttatcgaaaaggcgaacttgggttacagtttacgccgtgttca

SEQ ID NO: 500786 - DNA, 55 bp, Artificial
  Synthetic oligonucleotide
cagcctctgcagtcaaagggcaacatcttccctcgcgtagcttccgccctccggt

SEQ ID NO: 500787 - DNA, 55 bp, Artificial
  Synthetic oligonucleotide
caggctagccgtcacttgacgccgggaggccgcaaccggcatagatgtcgggtct

SEQ ID NO: 500788 - DNA, 55 bp, Artificial
  Synthetic oligonucleotide
ccgaagcaaaggccctcgtgtcctggagttgccgtctggaaaatcggtagctttg

SEQ ID NO: 500789 - DNA, 55 bp, Artificial
  Synthetic oligonucleotide
cgaaagagtcacgctccgcttcgagcttttcaaacccggcgactaggatgccgag

SEQ ID NO: 500790 - DNA, 55 bp, Artificial
  Synthetic oligonucleotide
cgaaatggacaaccccaccttcggcccgacagccttttccggcaaggtatcggcg

SEQ ID NO: 500791 - DNA, 55 bp, Artificial
  Synthetic oligonucleotide
cggcacgccttgctgtttcacgtcaaaagctcccatggccttgcggcttaggcgg

SEQ ID NO: 500792 - DNA, 55 bp, Artificial
  Synthetic oligonucleotide
ctcgcgttggaatccctctaggatgaaacagaaaagcgctgcgcagcgtacgtga

SEQ ID NO: 500793 - DNA, 53 bp, Artificial
  Synthetic oligonucleotide
ggcatttaaacgacgtcgcgccctttgacggggagaatccgtcgtcggaaaat

SEQ ID NO: 500794 - DNA, 52 bp, Artificial
  Synthetic oligonucleotide
ctcacctacggtttctgggtcaggtttctcactggatggacttctgcgaacc

SEQ ID NO: 500795 - DNA, 50 bp, Artificial
  Synthetic oligonucleotide
tgcagcgcacttcctgagtctcttccgcaaagagggcaatactgagtacc

SEQ ID NO: 500796 - DNA, 50 bp, Artificial
  Synthetic oligonucleotide
acaaacgaggagaaaggagcgggacatggtgcgaaagacaatggctatcc

SEQ ID NO: 500797 - DNA, 50 bp, Artificial
  Synthetic oligonucleotide
aaagggaggaatattcacgtctctcgcttcatcggccgtgtacctcccgt

SEQ ID NO: 500798 - DNA, 50 bp, Artificial
  Synthetic oligonucleotide
aaagaacctggagaatcgacagaaggccctcaacctcgaatgggctccca

SEQ ID NO: 500799 - DNA, 55 bp, Artificial
  Synthetic oligonucleotide
tgacaggggtggcagggccggaccgtcaggaaggaaagccatccggaaccgtgta

SEQ ID NO: 500800 - DNA, 55 bp, Artificial
  Synthetic oligonucleotide
aacgaaatggggaaggtagatgcaactgcgaggagccgtcactacggtgggagac

SEQ ID NO: 500801 - DNA, 55 bp, Artificial
  Synthetic oligonucleotide
acactggtcgagtgatgagaacccggtccccgctcggcgcggtgtccagggccat

SEQ ID NO: 500802 - DNA, 55 bp, Artificial
  Synthetic oligonucleotide
atcacgtggcacgcgctcccctgtggatgcacgaacatggcctgggctggctctc

SEQ ID NO: 500803 - DNA, 55 bp, Artificial
  Synthetic oligonucleotide
cactgttagtgccatgccctcgtccttcgcggagttagaggccaccccagccatc

SEQ ID NO: 500804 - DNA, 55 bp, Artificial
  Synthetic oligonucleotide
cagggcgatctcagtgcaggtataccgtgaggacagctcgataggggagggtggg

SEQ ID NO: 500805 - DNA, 55 bp, Artificial
  Synthetic oligonucleotide
cgcctggactgtcgtcaccccgagctcacacctgacttccagtattgccccacgt

SEQ ID NO: 500806 - DNA, 55 bp, Artificial
  Synthetic oligonucleotide
cgtcaccggtcgacacctcgaagacagggcatcactcaaggaatccgtccgcacc

SEQ ID NO: 500807 - DNA, 55 bp, Artificial
  Synthetic oligonucleotide
gaaaaccaggtggcagcgattctccagcaagctgatcagacagtgaagggttccg

SEQ ID NO: 500808 - DNA, 55 bp, Artificial
  Synthetic oligonucleotide
gatcgcgcgtaataaaggtctcccacttgctgatgcccagtaccgggtcttgatc

SEQ ID NO: 500809 - DNA, 55 bp, Artificial
  Synthetic oligonucleotide
gcccaacggctggcggataggtggtcgcgccgaggtgtggacacgactggacagt

SEQ ID NO: 500810 - DNA, 55 bp, Artificial
  Synthetic oligonucleotide
gcgaaactcatcgtggttgattatcgccggaccatgctcggggaggtggagagcg

SEQ ID NO: 500811 - DNA, 55 bp, Artificial
  Synthetic oligonucleotide
ggaatgccggtacgccaactcgacagaccacggagctgactccggcggcacaatg

SEQ ID NO: 500812 - DNA, 55 bp, Artificial
  Synthetic oligonucleotide
gttccgtcctgaagaatgaaccgatctgtctactcgcaagtgtacgggacgaggc

SEQ ID NO: 500813 - DNA, 55 bp, Artificial
  Synthetic oligonucleotide
tcgattcaccgaaatcaggatgcggacgggccactaccgcgcaatccaggaccgc

SEQ ID NO: 500814 - DNA, 54 bp, Artificial
  Synthetic oligonucleotide
aaagcgggtagcctcagaccaaagagtgacatacgacacccctaagcgacccct

SEQ ID NO: 500815 - DNA, 52 bp, Artificial
  Synthetic oligonucleotide
ttttgagttgacagttgtgtagttgctcggtccgggttactgtcagaacggt

SEQ ID NO: 500816 - DNA, 55 bp, Artificial
  Synthetic oligonucleotide
cgccgcatatagtgccaccgccttatcccactgcgctgtctgttgatataaagac

SEQ ID NO: 500817 - DNA, 55 bp, Artificial
  Synthetic oligonucleotide
cgcctttcatgctcgatccgcccagcaacttcgttaaatcaacgtctatggagtc

SEQ ID NO: 500818 - DNA, 55 bp, Artificial
  Synthetic oligonucleotide
cgtttcgtgccgatacctgactcacaatcaccgaacccgcccacaggacgttccc

SEQ ID NO: 500819 - DNA, 55 bp, Artificial
  Synthetic oligonucleotide
ctccgacggcattgttgacacagcaattaactggattcccagctaaagttaccgt

SEQ ID NO: 500820 - DNA, 55 bp, Artificial
  Synthetic oligonucleotide
ctcgattgccgtaagcctgctcaatctgaatgcgacttgagcctggtattagctg

SEQ ID NO: 500821 - DNA, 55 bp, Artificial
  Synthetic oligonucleotide
gacccacccgtgatcgtcagctgagcgttttctgcttcaaccctggggtatcccc

SEQ ID NO: 500822 - DNA, 55 bp, Artificial
  Synthetic oligonucleotide
gcccaaggctctaacgttgaacccgcgccgatcttttgaccactgatcattcctg

SEQ ID NO: 500823 - DNA, 55 bp, Artificial
  Synthetic oligonucleotide
gcgctattacccggaacgggatttgcgccgcgtgatccagttgcacatggaggcg

SEQ ID NO: 500824 - DNA, 55 bp, Artificial
  Synthetic oligonucleotide
gcggctgacgctaagctgttcggtgcgtacacgctggacagtgggcaaaggactc

SEQ ID NO: 500825 - DNA, 55 bp, Artificial
  Synthetic oligonucleotide
ggaagttggtcccagtttccgtaaagaatggtggggtcaccctcaaggtaatcgg

SEQ ID NO: 500826 - DNA, 55 bp, Artificial
  Synthetic oligonucleotide
ggcccgtattgacattgaagcggtatgtgtattgatcgctgtgtggcagggtgaa

SEQ ID NO: 500827 - DNA, 55 bp, Artificial
  Synthetic oligonucleotide
tattgaggttcgagtgtctccctggcgggcgtccgggtcaatcaccggtcctggc

SEQ ID NO: 500828 - DNA, 55 bp, Artificial
  Synthetic oligonucleotide
ggggagcgatgcaacttaaaccggcgcaactgggcgcgcatttacaccagcatgg

SEQ ID NO: 500829 - DNA, 55 bp, Artificial
  Synthetic oligonucleotide
ggtaaggtattgcgtttgccagtatacccggatgtcagtcgcaaactgatcagtg

SEQ ID NO: 500830 - DNA, 55 bp, Artificial
  Synthetic oligonucleotide
gttcagccaaccctcaaagtttgccataaaagtgataggtggcaaggtgaccgag

SEQ ID NO: 500831 - DNA, 55 bp, Artificial
  Synthetic oligonucleotide
ggtgcctcaccccgatggcatgacagttagcgtggaagtcacggcctgtctcgtg

SEQ ID NO: 500832 - DNA, 55 bp, Artificial
  Synthetic oligonucleotide
ggttagccaatggtttagccggtgatgtcaaacctgttggtcaaggcgtgagtga

SEQ ID NO: 500833 - DNA, 55 bp, Artificial
  Synthetic oligonucleotide
gtcggtaatcgccaatctgtgtacccggcatagcctccggaacgcatcataatac

SEQ ID NO: 500834 - DNA, 55 bp, Artificial
  Synthetic oligonucleotide
ttactgcgggatccgcggggtcgctggcatgtgctgttcaagtcggaccgccatt

SEQ ID NO: 500835 - DNA, 55 bp, Artificial
  Synthetic oligonucleotide
aagcgtcactcgtcacccctgtttcactcgcttcgcgccatagggatcgcctccg

SEQ ID NO: 500836 - DNA, 55 bp, Artificial
  Synthetic oligonucleotide
aaggtcgaagtcgcgggttgccttcgctgcccacagccgcaggttgttcacgttc

SEQ ID NO: 500837 - DNA, 55 bp, Artificial
  Synthetic oligonucleotide
agatttagccacatgatcgggctggcattagagtcagccttggagacctgcgggg

SEQ ID NO: 500838 - DNA, 55 bp, Artificial
  Synthetic oligonucleotide
tgtcccctttccgcatcccggctcttgcctggcggatcgatgccgtagtctgatg

SEQ ID NO: 500839 - DNA, 55 bp, Artificial
  Synthetic oligonucleotide
atattagcccgcctattgtcttggttaaacctgaggatttcatgaacagccgcgt

SEQ ID NO: 500840 - DNA, 55 bp, Artificial
  Synthetic oligonucleotide
cacagatcgcaggtcacaaagtcgctcatgcattatcctgcttaggcgctggcgt

SEQ ID NO: 500841 - DNA, 55 bp, Artificial
  Synthetic oligonucleotide
cacccaaccgttcaccttcaagccgcccgtataccagatgacagaaggcgcaacg

SEQ ID NO: 500842 - DNA, 55 bp, Artificial
  Synthetic oligonucleotide
catccagcaaacggaaatccagggtatccccatgggagaggaactgaaacacgga

SEQ ID NO: 500843 - DNA, 55 bp, Artificial
  Synthetic oligonucleotide
ccacgcacgtgctggcagtccgtcctcaaccccgtctcgtctccccagtggatct

SEQ ID NO: 500844 - DNA, 55 bp, Artificial
  Synthetic oligonucleotide
ccagggcagcatgtaccccgatgcgaaactctggaaaactatccttgatgcgccg

SEQ ID NO: 500845 - DNA, 55 bp, Artificial
  Synthetic oligonucleotide
ccccaaggcctatcaggagtctatcgaaaaggctgacgaaccccagatcaagact

SEQ ID NO: 500846 - DNA, 55 bp, Artificial
  Synthetic oligonucleotide
ccccaggcctcggcacagctacaacaaggactggtatatcatctggccaccggag

SEQ ID NO: 500847 - DNA, 55 bp, Artificial
  Synthetic oligonucleotide
ccccgcatgagcgagcaagttaaaggcggcctgactgatcggtaacaaagaggca

SEQ ID NO: 500848 - DNA, 55 bp, Artificial
  Synthetic oligonucleotide
ccggatggcccatgatgacagcctcgccggacttgtgcaccaaactggaacgacg

SEQ ID NO: 500849 - DNA, 55 bp, Artificial
  Synthetic oligonucleotide
cctctcagcgtggcggctagtacggtgagtagtgtcagcgaactacaagccgcac

SEQ ID NO: 500850 - DNA, 55 bp, Artificial
  Synthetic oligonucleotide
cgcattgagcgctccagcaaacacagggcaatcgcgtataaccgtttgggaaacg

SEQ ID NO: 500851 - DNA, 55 bp, Artificial
  Synthetic oligonucleotide
cgccatcctgaatccagagccgttctcgaggattggtatcgaaaagtgtgtgcct

SEQ ID NO: 500852 - DNA, 54 bp, Artificial
  Synthetic oligonucleotide
gcggccagagcccggcgatgaaacttctgtctgcggtgtgtcggtaatagcgtt

SEQ ID NO: 500853 - DNA, 54 bp, Artificial
  Synthetic oligonucleotide
tgacttaaaaccgccttgggcagctcggttcccgcaatcgggataaacccctga

SEQ ID NO: 500854 - DNA, 53 bp, Artificial
  Synthetic oligonucleotide
aacaagaaagagatcctgccgacccgctccaacaccgacttcgaggagagcac

SEQ ID NO: 500855 - DNA, 52 bp, Artificial
  Synthetic oligonucleotide
gactatgaccctgcagccgctttggagagtgacgaagccattgcgatctttc

SEQ ID NO: 500856 - DNA, 52 bp, Artificial
  Synthetic oligonucleotide
ttttccagtcttaaccgacattttccactcgccggggtttgtaactgctggc

SEQ ID NO: 500857 - DNA, 51 bp, Artificial
  Synthetic oligonucleotide
ggcggccagggaagaaccctgtatcaagagtgtcaccctcaggccaagtac

SEQ ID NO: 500858 - DNA, 50 bp, Artificial
  Synthetic oligonucleotide
ggtgcaatctcgtcgagatgcggacacaggtaggaaccaccactcggaaa

SEQ ID NO: 500859 - DNA, 50 bp, Artificial
  Synthetic oligonucleotide
tcactgacatcgtcattacggcctccccttgagacactttggtggtggta

SEQ ID NO: 500860 - DNA, 50 bp, Artificial
  Synthetic oligonucleotide
ataaccgcggatatagcgtgagcgtacactcccagacaaagagactgacc

SEQ ID NO: 500861 - DNA, 60 bp, Artificial
  Synthetic oligonucleotide
caaagaatcggaatcagatccgaaaaataacggcccattcacccaggtttatcagaaggg

SEQ ID NO: 500862 - DNA, 60 bp, Artificial
  Synthetic oligonucleotide
caacacttcacggaaccggattaaaatccgttcccgttcaccgtttctttttccgaaagc

SEQ ID NO: 500863 - DNA, 60 bp, Artificial
  Synthetic oligonucleotide
caactgtatgttactttcaaacgacatggtgtcgcaggagagatagtctatgcaaactca

SEQ ID NO: 500864 - DNA, 60 bp, Artificial
  Synthetic oligonucleotide
ggttgttgccgatcaaacccatttagcatcgttgcttggtgttggtagacaaacaatatc

SEQ ID NO: 500865 - DNA, 60 bp, Artificial
  Synthetic oligonucleotide
ctagtctgacagtcgtacgctgtcaagtgtttgcagtcggtttcttttttaatacgactg

SEQ ID NO: 500866 - DNA, 60 bp, Artificial
  Synthetic oligonucleotide
ggttagctcacgcatgtgtgagctaggtcgacctatcatggtttacgtttgagctatgat

SEQ ID NO: 500867 - DNA, 60 bp, Artificial
  Synthetic oligonucleotide
ggtggtcgagtccccaatgacgcgccgcaacccactaacgggggatgatcgcccaatgtg

SEQ ID NO: 500868 - DNA, 60 bp, Artificial
  Synthetic oligonucleotide
ctactttcatctcatctgattccttttcgatatgccccacaacatacagaaggtaatggt

SEQ ID NO: 500869 - DNA, 60 bp, Artificial
  Synthetic oligonucleotide
gatgtttcggaattgagtggggagttgcgaaatcgtcaatatgttgtgaatcaattggtt

SEQ ID NO: 500870 - DNA, 60 bp, Artificial
  Synthetic oligonucleotide
gattaggatggatgggtacgatggatgtaaattccataaaaaataaagtcgcatcatcaa

SEQ ID NO: 500871 - DNA, 60 bp, Artificial
  Synthetic oligonucleotide
gcaacaattcaggcaggtgctggtgttgttttcaattcaatcccccaagatgaagttaaa

SEQ ID NO: 500872 - DNA, 60 bp, Artificial
  Synthetic oligonucleotide
tcattgaagacgtgatgtgaataaccataagttccgtcaatttctttggtttttataaga

SEQ ID NO: 500873 - DNA, 60 bp, Artificial
  Synthetic oligonucleotide
ttagcgggaacagtcaccaaatcagtatggttagtttagcctctaaaggctgataccttc

SEQ ID NO: 500874 - DNA, 60 bp, Artificial
  Synthetic oligonucleotide
ttacggcggtaatgaagtcaggtcaaaatgttcatgggataaggtggaatcaggctcagg

SEQ ID NO: 500875 - DNA, 60 bp, Artificial
  Synthetic oligonucleotide
cagcccccgagacttaagtgaacgtatgtccgaaaatatacgagctatgaaaaacacact

SEQ ID NO: 500876 - DNA, 60 bp, Artificial
  Synthetic oligonucleotide
ttacggcatgcatgagtatgcgcgcaagtgcatagcgcggaaattcacaccattcagcca

SEQ ID NO: 500877 - DNA, 60 bp, Artificial
  Synthetic oligonucleotide
cgttgaggcttacatcagtcggcggatcaatatcgaatgagcagcacagaccctttttca

SEQ ID NO: 500878 - DNA, 60 bp, Artificial
  Synthetic oligonucleotide
caggcattctgctgcataaccatgcatacaggcaaaagcgcctgagggcgtttctgacga

SEQ ID NO: 500879 - DNA, 60 bp, Artificial
  Synthetic oligonucleotide
ttatgccgcaaatggagctatcgacctatcagttagtctctattatcttggctatgaatt

SEQ ID NO: 500880 - DNA, 60 bp, Artificial
  Synthetic oligonucleotide
ctctagccgtcagaagtgcttgcgcattctggcagtcaagagggttaaatagactcgctg

SEQ ID NO: 500881 - DNA, 60 bp, Artificial
  Synthetic oligonucleotide
atcgaagtcgagacgcccactttccgcgtgcttggacatttgattgatcaggtggtcgag

SEQ ID NO: 500882 - DNA, 60 bp, Artificial; identical to SEQ ID NO: 177687
  Synthetic oligonucleotide

SEQ ID NO: 500883 - DNA, 60 bp, Artificial
  Synthetic oligonucleotide
atgaatgtggattatctaccttatcagactctggtaataaatctattactcgtgcttcac

SEQ ID NO: 500884 - DNA, 60 bp, Artificial
  Synthetic oligonucleotide
atgaatgtggattatctactttttcagaatctggaaacaaatctattactcgtgcttctc

SEQ ID NO: 500885 - DNA, 60 bp, Artificial; identical to SEQ ID NO: 186437
  Synthetic oligonucleotide

SEQ ID NO: 500886 - DNA, 60 bp, Artificial
  Synthetic oligonucleotide
ttatgcaatgaaaaaagcatcagagatcgatgtctctagaagtaaattaaatgatacctt

SEQ ID NO: 500887 - DNA, 60 bp, Artificial
  Synthetic oligonucleotide
atgatgataccggacgtgaagcattgggtgaggtggatgtccctgccctgtcgctggagg

SEQ ID NO: 500888 - DNA, 60 bp, Artificial
  Synthetic oligonucleotide
ctcgcaatctgaagagaaaacgttagaaacactaaccaatagattatctatatctgcgat

SEQ ID NO: 500889 - DNA, 60 bp, Artificial
  Synthetic oligonucleotide
tgcacatcctgtcctgtttctttaggacgtatcatggcacagcatatcaactgataaata

SEQ ID NO: 500890 - DNA, 60 bp, Artificial
  Synthetic oligonucleotide
atgttcttcaaagttcagtcttatggagagagatagtagataatgtgtctaaaaaatatc

SEQ ID NO: 500891 - DNA, 60 bp, Artificial
  Synthetic oligonucleotide
attaagaaaaatcgcagtacatggcaagggtaaaattattgaaggaaaagctggtgtaat

SEQ ID NO: 500892 - DNA, 60 bp, Artificial
  Synthetic oligonucleotide
gtatgagaatatagacgttataagcataacagctagaaaaaaaataaaccttccgattat

SEQ ID NO: 500893 - DNA, 60 bp, Artificial
  Synthetic oligonucleotide
attcgcatcgagctacatctattgtttcagctcttttcatagcataacgaataaatgcag

SEQ ID NO: 500894 - DNA, 60 bp, Artificial
  Synthetic oligonucleotide
attgtatgtatcatggactctgagttttactgctccaacaagtaaagaagctcacgatgt

SEQ ID NO: 500895 - DNA, 60 bp, Artificial
  Synthetic oligonucleotide
atttagatacttgtataacaatacgttcagcttatgttgaaaaagatattgcaacaattc

SEQ ID NO: 500896 - DNA, 60 bp, Artificial
  Synthetic oligonucleotide
atttgttcaccttccgttgttctccgtcagttccgggtgtcgggggggggaccctgagca

SEQ ID NO: 500897 - DNA, 60 bp, Artificial
  Synthetic oligonucleotide
caaaaatggactagttctgctgtggttactcctgctgagtctgttcaatggagtgaatta

SEQ ID NO: 500898 - DNA, 60 bp, Artificial
  Synthetic oligonucleotide
cggaacccctgaaggggcccccacgatttttcggttgccaatggttaaattttcaccgtt

SEQ ID NO: 500899 - DNA, 60 bp, Artificial
  Synthetic oligonucleotide
ggaggtctgatttacactgaagtacttggctgggtggatctggggcatgcacaggggacg

SEQ ID NO: 500900 - DNA, 60 bp, Artificial
  Synthetic oligonucleotide
gccggactggttcaccaggacggctagaggcggagtactccgattatccagactgatctc

SEQ ID NO: 500901 - DNA, 60 bp, Artificial
  Synthetic oligonucleotide
ccctttttcagcggcccgtgtcggtgacgggattgagcacaccgcctcaaaaggctggct

SEQ ID NO: 500902 - DNA, 60 bp, Artificial
  Synthetic oligonucleotide
tgttcatgcgcacttattccgattacgggtgagattcgggatgaaaacgtcagtcaggca

SEQ ID NO: 500903 - DNA, 60 bp, Artificial
  Synthetic oligonucleotide
gccgtaggaaattcaatatcagcgatacaagcaggtgctagacaaatcgaggggactatt

SEQ ID NO: 500904 - DNA, 60 bp, Artificial
  Synthetic oligonucleotide
gccgtgcgacattgtttaacgaccacggttgtgggtatccggtgtttggtcagataaacc

SEQ ID NO: 500905 - DNA, 60 bp, Artificial
  Synthetic oligonucleotide
gcttttcacgctggcctggggctaagtccttttcggcaaaggacagcaccccggaggtgt

SEQ ID NO: 500906 - DNA, 60 bp, Artificial
  Synthetic oligonucleotide
tgaaaacgagctttagcactcgaaacattggagtaggaatggataaaagatagataactt

SEQ ID NO: 500907 - DNA, 60 bp, Artificial
  Synthetic oligonucleotide
cgcctcagagcgtcgacaggagcaaaaaaaccaaaacttcacccaagtataccctttagg

SEQ ID NO: 500908 - DNA, 60 bp, Artificial
  Synthetic oligonucleotide
ccgggcgacaagtgcaaggccaaggcgtccagcgggctggaggtgcctccggcagcgact

SEQ ID NO: 500909 - DNA, 60 bp, Artificial
  Synthetic oligonucleotide
gcctttgatactgaaatttattatgattatgagattaatagaattgctcatttagctttt

SEQ ID NO: 500910 - DNA, 60 bp, Artificial
  Synthetic oligonucleotide
tcggtcaaaagagttggtagctctgaagaccttgaaaaaccaccgttggtagcggtggtt

SEQ ID NO: 500911 - DNA, 60 bp, Artificial
  Synthetic oligonucleotide
tgtcgctgcttaccgcgctacagcagtcgcccgaaacccccgttcgccatctgaacatcc

SEQ ID NO: 500912 - DNA, 60 bp, Artificial
  Synthetic oligonucleotide
cctcctcgttcattcgctcactacgttcggtcatgaagctgcggcgggcgttgcggttta

SEQ ID NO: 500913 - DNA, 60 bp, Artificial
  Synthetic oligonucleotide
tctttagaaaagtctggtatagatatcatggaaataggattccctatttcatcaccagga

SEQ ID NO: 500914 - DNA, 60 bp, Artificial
  Synthetic oligonucleotide
tgtccccggataaacttcgccatgttcagggtggtggtttcctgcttgttcatgcgcact

SEQ ID NO: 500915 - DNA, 60 bp, Artificial
  Synthetic oligonucleotide
cgaaaacacaagacaaatagaactttatcctatagctggtactagacctagaggaagaaa

SEQ ID NO: 500916 - DNA, 60 bp, Artificial
  Synthetic oligonucleotide
gggtcggcatattacactgaacgcgactggataaagtatgaattttatacgcccgatctg

SEQ ID NO: 500917 - DNA, 60 bp, Artificial
  Synthetic oligonucleotide
cgttagtagtatttgtaatatgcctatcccatctaacaaagctatagtaggtagtaatgc

SEQ ID NO: 500918 - DNA, 60 bp, Artificial
  Synthetic oligonucleotide
ggggtatctgggtatttatacctttgtatactactagtagttttagggtaccatatttac

SEQ ID NO: 500919 - DNA, 60 bp, Artificial
  Synthetic oligonucleotide
tccgttaggacctagttttgttaactcactgatagaatatttagctactagtgcacgaag

SEQ ID NO: 500920 - DNA, 60 bp, Artificial
  Synthetic oligonucleotide
tccttaatcgatattgcattagtaggtggattattagttatggtaatgttttctggatat

SEQ ID NO: 500921 - DNA, 60 bp, Artificial
  Synthetic oligonucleotide
ttaaagcggtagcggtcataacggacagaggctgcgaagagaagggccagagcaaagggc

SEQ ID NO: 500922 - DNA, 60 bp, Artificial
  Synthetic oligonucleotide
cgtcgggcaagaagcttaatcagccgaaccggcatatcgttctaaaccgggcgcgagcgc

SEQ ID NO: 500923 - DNA, 60 bp, Artificial
  Synthetic oligonucleotide
ccaaatcgccgaagcccgcccgcaagggcggtacaggttccacaaggagctgcttcacca

SEQ ID NO: 500924 - DNA, 60 bp, Artificial
  Synthetic oligonucleotide
gcatcatcaatagtagcaatttcttctgttcatcttttgcgtctttttatggaagcagaa

SEQ ID NO: 500925 - DNA, 60 bp, Artificial
  Synthetic oligonucleotide
ccactcctgagcctgattccaccttatcccatgaacattttgacctgacttcattaccgc

SEQ ID NO: 500926 - DNA, 60 bp, Artificial
  Synthetic oligonucleotide
gcatccagtatgatgctttacagaattgatttcaaacactttttttgggtgccgtgcgac

SEQ ID NO: 500927 - DNA, 60 bp, Artificial
  Synthetic oligonucleotide
gccacattgagcacttacgcactgatgcggggtgtcggggtgaagccctgaccaagtggt

SEQ ID NO: 500928 - DNA, 60 bp, Artificial
  Synthetic oligonucleotide
ccagtctcgaggagagtgtacggaaaagatgctctgcatcatcgtggagtttctcacaaa

SEQ ID NO: 500929 - DNA, 60 bp, Artificial; identical to SEQ ID NO: 176183
  Synthetic oligonucleotide

SEQ ID NO: 500930 - DNA, 60 bp, Artificial
  Synthetic oligonucleotide
gccagcgaattaactaagataggtccaaaaggcctcaaaaaaaagatagatatcgaatat

SEQ ID NO: 500931 - DNA, 60 bp, Artificial
  Synthetic oligonucleotide
cccctgggggcgctgctaggggtgtctgttcagatatgtagcaatgagtcagggattcac

SEQ ID NO: 500932 - DNA, 60 bp, Artificial
  Synthetic oligonucleotide
ggatgaacgatcaagaggaaacgaagtgacctacagcaatctcattccggccacggactg

SEQ ID NO: 500933 - DNA, 60 bp, Artificial
  Synthetic oligonucleotide
cccgtgctttacaacagaggtataacttaacttcccgctgttaatcatcttgtaaatagt

SEQ ID NO: 500934 - DNA, 60 bp, Artificial
  Synthetic oligonucleotide
aatccgactggcggctgagttagcgaaatactgtcgggttcgtttttctgctgcctgtcg

SEQ ID NO: 500935 - DNA, 60 bp, Artificial
  Synthetic oligonucleotide
taagttttgggtcgccagaattaagaagctttcgaatcactttttcatgtgacgaaacat

SEQ ID NO: 500936 - DNA, 60 bp, Artificial
  Synthetic oligonucleotide
tatcgaccctgagccgccatccagatgaaagcaccacaaccgtcattcagccgggcgaca

SEQ ID NO: 500937 - DNA, 60 bp, Artificial
  Synthetic oligonucleotide
aattgtattctagtctgacagtcgtacgctgtcaagtgtttgcagtcggtttctttttta

SEQ ID NO: 500938 - DNA, 60 bp, Artificial
  Synthetic oligonucleotide
aatttggataatgcaaaaagtttggctaaaagaatgttgcgctcgatgggaatagatgac

SEQ ID NO: 500939 - DNA, 60 bp, Artificial
  Synthetic oligonucleotide
taagccatttttccgcccaaagcccacgtgagcccgtagaacgtcaaaaaacgcgtcaaa

SEQ ID NO: 500940 - DNA, 60 bp, Artificial
  Synthetic oligonucleotide
ctttccgcgtgcttggacatttgattgatcaggtggtcgagtccccaatgacgcgccgca

SEQ ID NO: 500941 - DNA, 60 bp, Artificial
  Synthetic oligonucleotide
acaggcaacaaaccacccgaaaacccgccagaaacgcgcaggctctgtttttacggcatg

SEQ ID NO: 500942 - DNA, 60 bp, Artificial
  Synthetic oligonucleotide
taaccagccgcatcaaattttgaataagagcctctcgcaaaatctagcatttcctttgaa

SEQ ID NO: 500943 - DNA, 60 bp, Artificial
  Synthetic oligonucleotide
gactcacctatgaacatgttgtgtgactccttgatcccaagaatatctagtattgttggc

SEQ ID NO: 500944 - DNA, 60 bp, Artificial
  Synthetic oligonucleotide
gagaatgagccggtgaagaggggtcgtgcttgtgctccaaaagctgcatagcctggcgaa

SEQ ID NO: 500945 - DNA, 60 bp, Artificial
  Synthetic oligonucleotide
ctgttcagcgccctgctgaactaccgtcacaatgacaccgacgtcacgcagcccctgatt

SEQ ID NO: 500946 - DNA, 60 bp, Artificial; identical to SEQ ID NO: 179039
  Synthetic oligonucleotide

SEQ ID NO: 500947 - DNA, 60 bp, Artificial
  Synthetic oligonucleotide
acgcgtcaaaacgcgttttattgcgttttacgggtgatttcgtgggtcttgccggactgg

SEQ ID NO: 500948 - DNA, 60 bp, Artificial
  Synthetic oligonucleotide
actataactcaactcattgaagctataatctattttaatggtgtttggacactgccctcg

SEQ ID NO: 500949 - DNA, 60 bp, Artificial
  Synthetic oligonucleotide
gttccccgcgccctttgctctggtctttctctttgcccagccacccctgcatgaccactg

SEQ ID NO: 500950 - DNA, 60 bp, Artificial
  Synthetic oligonucleotide
ctggccgggagccgaaacccagagttggggcgtcaacctgatctatacctcaactgggcg

SEQ ID NO: 500951 - DNA, 60 bp, Artificial
  Synthetic oligonucleotide
gacctttacgccagtattgctctgaatcgtgccagaaatggcgactatttgttttttgac

SEQ ID NO: 500952 - DNA, 60 bp, Artificial
  Synthetic oligonucleotide
gacacggccatcatggccgtagccgggaagtccggcagccaaaccatgcgcgacggccgt

SEQ ID NO: 500953 - DNA, 60 bp, Artificial
  Synthetic oligonucleotide
tttctatacatgacagaaaaccccgcccacggtggtaaagagtatgagccagacacaaga

SEQ ID NO: 500954 - DNA, 60 bp, Artificial
  Synthetic oligonucleotide
tgcgcccaaaccgatcgtcattcactttcatgcatagctatgcagtgagctgaaagcgat

SEQ ID NO: 500955 - DNA, 60 bp, Artificial
  Synthetic oligonucleotide
tttcatcacctctcaatataaagctgaaagctaaaaactcgtaaccctcatcattgaaga

SEQ ID NO: 500956 - DNA, 60 bp, Artificial
  Synthetic oligonucleotide
aaaatcccagtagctggaaaggtatgcgcttatgctctcaacccgcatgaagtctggaaa

SEQ ID NO: 500957 - DNA, 60 bp, Artificial
  Synthetic oligonucleotide
tttcaccgttttttgcccgactgaaaggagggtgctacctggagatctcgcagctcgctg

SEQ ID NO: 500958 - DNA, 60 bp, Artificial
  Synthetic oligonucleotide
aaacaatatctaggtacgttaagtggctagaagagcaaggtgttttagtaaaaatcccag

SEQ ID NO: 500959 - DNA, 60 bp, Artificial
  Synthetic oligonucleotide
tagcagcagtgcaagtctgcacctgcgaggcatgacatgcaggagggcgctatcgaccct

SEQ ID NO: 500960 - DNA, 60 bp, Artificial
  Synthetic oligonucleotide
aaatcaaaatccgcatgaccgagactgagcatcagcgtctgcttgaacggtgtgaccgta

SEQ ID NO: 500961 - DNA, 60 bp, Artificial
  Synthetic oligonucleotide
gaactagtcaaatcgttagtagtatttgtaatatgcctatcccatctaacaaagctatag

SEQ ID NO: 500962 - DNA, 60 bp, Artificial
  Synthetic oligonucleotide
tttcaccacaaattacttgggggacaaatcctgatcaggtaatggggattgatcaaaaaa

SEQ ID NO: 500963 - DNA, 60 bp, Artificial
  Synthetic oligonucleotide
taccgctttaaaccgcaacgcccgccgcagcttcatgaccgaacgtagtgagcgaatgaa

SEQ ID NO: 500964 - DNA, 60 bp, Artificial
  Synthetic oligonucleotide
gaacatggccccgcgccacagcgggtggcagaaggatcatcccgcgtttatatcaacgga

SEQ ID NO: 500965 - DNA, 60 bp, Artificial
  Synthetic oligonucleotide
aagttcagcatccttgaagatcttttcaacaatacgaagtattttgtatgcctctgattt

SEQ ID NO: 500966 - DNA, 60 bp, Artificial
  Synthetic oligonucleotide
aatactgtgccagcggtaaacatctagacaggatggaagtatcagtgtgcaaagcgggcg

SEQ ID NO: 500967 - DNA, 60 bp, Artificial
  Synthetic oligonucleotide
gagctatgatggcttatatttgagccatcattagaccgtggagatttaccatgtatatcg

SEQ ID NO: 500968 - DNA, 60 bp, Artificial
  Synthetic oligonucleotide
atattcataaatctactatttcagtacattgccatgatgatttaggaatggccgtaggaa

SEQ ID NO: 500969 - DNA, 60 bp, Artificial
  Synthetic oligonucleotide
tcaggtagaccctaatttcgactcaaaacagaaagaacttgaatcgttataccctgatga

SEQ ID NO: 500970 - DNA, 60 bp, Artificial
  Synthetic oligonucleotide
ttctggatatgaaaattttatttccaaaatggatatacaagataatcaaaaaagattagg

SEQ ID NO: 500971 - DNA, 60 bp, Artificial
  Synthetic oligonucleotide
atagtagaagcctatggtggcatcattggctatgcaggtgaaatattccatgggaaggca

SEQ ID NO: 500972 - DNA, 60 bp, Artificial
  Synthetic oligonucleotide
tgcttcaccactccaccctgcaaagccctaaaacgctctcagaacgcacgtaagccattt

SEQ ID NO: 500973 - DNA, 60 bp, Artificial
  Synthetic oligonucleotide
agagaatgactcattacacgttagatccgttttctatggatatactcatgtagtaccatc

SEQ ID NO: 500974 - DNA, 60 bp, Artificial; identical to SEQ ID NO: 177598
  Synthetic oligonucleotide

SEQ ID NO: 500975 - DNA, 60 bp, Artificial
  Synthetic oligonucleotide
ctgcgtcgagtgtttcttaatcaataattccgctgatactccggaaaaacgcgagtctgt

SEQ ID NO: 500976 - DNA, 60 bp, Artificial
  Synthetic oligonucleotide
agacacaagagcggggcgaaatgtaggaaatcattttccaggggatggtccaaaatatat

SEQ ID NO: 500977 - DNA, 60 bp, Artificial
  Synthetic oligonucleotide
gtgcaccgcctcagaggccctcagcgcgtttctgacgggaaaccggtaaaacaggcaaca

SEQ ID NO: 500978 - DNA, 60 bp, Artificial
  Synthetic oligonucleotide
agtctggaaaggctacgataatgccaaaccgtatgccgcatttttgacgaaaaccctagt

SEQ ID NO: 500979 - DNA, 60 bp, Artificial
  Synthetic oligonucleotide
gtcgaactacaattgataatttatgtcgtattgttgaaaaactaatatcttgtggtgtaa

SEQ ID NO: 500980 - DNA, 60 bp, Artificial; identical to SEQ ID NO: 178616
  Synthetic oligonucleotide

SEQ ID NO: 500981 - DNA, 60 bp, Artificial
  Synthetic oligonucleotide
gtgttagccgaagcacaattaagcgctggctcaactacttagaatcaaaaaacgcgttag

SEQ ID NO: 500982 - DNA, 59 bp, Artificial
  Synthetic oligonucleotide
ggtagtagttttattttccagccaacactatttgtctctgatatatttgctagtgcaag

SEQ ID NO: 500983 - DNA, 59 bp, Artificial
  Synthetic oligonucleotide
ctatttatcattggggaattgggatcatcaggaggatctggatatataattgagttttg

SEQ ID NO: 500984 - DNA, 59 bp, Artificial
  Synthetic oligonucleotide
tcaatcatagttattggtttaaaacctttactaatgagatttttgtttatccatcccaa

SEQ ID NO: 500985 - DNA, 58 bp, Artificial
  Synthetic oligonucleotide
aggaatagctattgatcgtgagggtgttgctttgccaaaaagcacattaataggatgt

SEQ ID NO: 500986 - DNA, 58 bp, Artificial
  Synthetic oligonucleotide
aatgagagagtatccgttgaatccatcaacagaggaaaactggcctaccaaaatcagg

SEQ ID NO: 500987 - DNA, 58 bp, Artificial
  Synthetic oligonucleotide
atttagcagaaacattactggttttagaccatcaaaaaaaaacatgcttaattcaaag

SEQ ID NO: 500988 - DNA, 58 bp, Artificial
  Synthetic oligonucleotide
gcttcaagtaaagcgattctatgttgtaaatcatgtaaaccaatggtgttaacctctg

SEQ ID NO: 500989 - DNA, 58 bp, Artificial; identical to SEQ ID NO: 179513
  Synthetic oligonucleotide

SEQ ID NO: 500990 - DNA, 58 bp, Artificial
  Synthetic oligonucleotide
cgtgatagcgcatttgctctgtttattaagaaatttcagtccgttaattcgttgaatg

SEQ ID NO: 500991 - DNA, 58 bp, Artificial
  Synthetic oligonucleotide
cacatcgagctacatctatttctgatgctcttttcatagcataacagataaaagaagg

SEQ ID NO: 500992 - DNA, 57 bp, Artificial
  Synthetic oligonucleotide
cttccgtatatatgattaaactttaaagttgatagcattaaactcaatggggcatct

SEQ ID NO: 500993 - DNA, 56 bp, Artificial
  Synthetic oligonucleotide
ttttataagagacttccttgaaaaaacatcaaagcaatcaagcatataattagaca

SEQ ID NO: 500994 - DNA, 56 bp, Artificial
  Synthetic oligonucleotide
aaatagcgattgacactctttcccgattccgatactatagtggtatggtatcactt

SEQ ID NO: 500995 - DNA, 56 bp, Artificial
  Synthetic oligonucleotide
ggtataaagatagcgcctaatcctactatagatatttcacttacagttaaggctcc

SEQ ID NO: 500996 - DNA, 56 bp, Artificial
  Synthetic oligonucleotide
caacaatctggttactgacagcggtttcagcggcgaagatttggtgtcagatctgc

SEQ ID NO: 500997 - DNA, 55 bp, Artificial
  Synthetic oligonucleotide
gcccctatacgattgaagttatctataagctctcggtatgccatgcccctgacgg

SEQ ID NO: 500998 - DNA, 55 bp, Artificial
  Synthetic oligonucleotide
gactatgcgcgaaggttaatgtgaatagttgactatgcgcgatgtgactacagtc

SEQ ID NO: 500999 - DNA, 55 bp, Artificial
  Synthetic oligonucleotide
gcggcaatcctgaatatagaaactgcctcagacactaccggttttgatcggccgc

SEQ ID NO: 501000 - DNA, 55 bp, Artificial
  Synthetic oligonucleotide
gcccgcccagagtgtggaatctttccagggaccgctgaacgtgggtaaagagccg

SEQ ID NO: 501001 - DNA, 55 bp, Artificial
  Synthetic oligonucleotide
gccgcaaaccccaggggcattttccactatctgacacacacgtgatcggcgactt

SEQ ID NO: 501002 - DNA, 55 bp, Artificial
  Synthetic oligonucleotide
gactaagggtataacgaataagctcagcacctgcgcctttattactagcgttaag

SEQ ID NO: 501003 - DNA, 55 bp, Artificial
  Synthetic oligonucleotide
gcgaccttagcggtatcgcggttccaaaaccggttaaatgcaagtctttggcccg

SEQ ID NO: 501004 - DNA, 55 bp, Artificial
  Synthetic oligonucleotide
gcgaaggcattttacgttatccacagagtagccgaagacaaagatctactctgga

SEQ ID NO: 501005 - DNA, 55 bp, Artificial
  Synthetic oligonucleotide
gccgctgccacaggttgaatttctttcttatgctcaagcagaagcatcgcctgtt

SEQ ID NO: 501006 - DNA, 55 bp, Artificial
  Synthetic oligonucleotide
gcggatcttgtcagccgtgaaaaggtcaccatcgcgcagtttgttccctccacgc

SEQ ID NO: 501007 - DNA, 55 bp, Artificial
  Synthetic oligonucleotide
gataagtaacgtgaaaatctgacatcttgtagttcatgactaaggccgcgctaat

SEQ ID NO: 501008 - DNA, 55 bp, Artificial
  Synthetic oligonucleotide
tgcgcagcatgcctttcgtccgctggctcatggctgaggacagcttctggtcgtg

SEQ ID NO: 501009 - DNA, 55 bp, Artificial
  Synthetic oligonucleotide
gataatgcaacgcctccacgtgcatccccgtctaatttagtgagaataattcctg

SEQ ID NO: 501010 - DNA, 55 bp, Artificial
  Synthetic oligonucleotide
gcgcttatatcgctgtgccgatgtccgggctttctggtcatgcaggaggcgggtc

SEQ ID NO: 501011 - DNA, 55 bp, Artificial
  Synthetic oligonucleotide
gccggtgcgaataaaagtaatgcggcctgtaccggcgaaaacgtatcacccgaac

SEQ ID NO: 501012 - DNA, 55 bp, Artificial
  Synthetic oligonucleotide
gatccttatattgtaggtgacgagcattatgaaaccgcattaggagtgcagtcca

SEQ ID NO: 501013 - DNA, 55 bp, Artificial
  Synthetic oligonucleotide
gcgctgcacgtttatgagaatggtcgtaaagcctatgacgttctgctccatgccc

SEQ ID NO: 501014 - DNA, 55 bp, Artificial
  Synthetic oligonucleotide
gatcgggttgcctctctgaccaactttcttctgcaactgagaatggtgagtctgc

SEQ ID NO: 501015 - DNA, 55 bp, Artificial
  Synthetic oligonucleotide
gcgctcagtattccctgctgaatgcccgtggtcgtttgagcagtttatggatccg

SEQ ID NO: 501016 - DNA, 55 bp, Artificial
  Synthetic oligonucleotide
gcctaacgactggcgctcgcaggtcatcccataaagcctgtcatattcagcagag

SEQ ID NO: 501017 - DNA, 55 bp, Artificial
  Synthetic oligonucleotide
gcgctaacgagagatcagcaatgaaacctggcgtgaaaggtccaaccaagacccc

SEQ ID NO: 501018 - DNA, 55 bp, Artificial
  Synthetic oligonucleotide
gcctccaccagggcatttaccatcgcacgcgcgtcacttgcgtatcgcgaagcgt

SEQ ID NO: 501019 - DNA, 55 bp, Artificial
  Synthetic oligonucleotide
gccttatccagcaagcccggcttaccgcgggcgatgttaagtgatttcaccacgc

SEQ ID NO: 501020 - DNA, 55 bp, Artificial
  Synthetic oligonucleotide
gcgcctattaaatttgttcgagatcgtaaatgtgctacttctctcagatattctg

SEQ ID NO: 501021 - DNA, 55 bp, Artificial
  Synthetic oligonucleotide
tgcagtgggtgcggtagttctgctgacgatccgcatcacatcatcaactcaggtc

SEQ ID NO: 501022 - DNA, 55 bp, Artificial
  Synthetic oligonucleotide
gcgatccccaagatgacggcaggcatactgcatcagattcacggtttcagccatt

SEQ ID NO: 501023 - DNA, 55 bp, Artificial
  Synthetic oligonucleotide
gcctgtagagaaggggattattatgttttgcgctgaccataacgtggtgacgggc

SEQ ID NO: 501024 - DNA, 55 bp, Artificial
  Synthetic oligonucleotide
gacggtgagtactcagatgaagtagcaagcaccggattctgtgtcttaagagcga

SEQ ID NO: 501025 - DNA, 55 bp, Artificial
  Synthetic oligonucleotide
gatatgtcaacagatctgattgtgttgaaaatgctcgccgcaatggctataccgg

SEQ ID NO: 501026 - DNA, 55 bp, Artificial
  Synthetic oligonucleotide
gcgccctgcccatcgccacgacttctttaacgctaaatgaaaacaataggtgact

SEQ ID NO: 501027 - DNA, 55 bp, Artificial
  Synthetic oligonucleotide
tgagccatcattagaccgtggagatttaccatgtatatcgggactgaagagcagc

SEQ ID NO: 501028 - DNA, 55 bp, Artificial
  Synthetic oligonucleotide
gatgcagataacgccagaaagactattgacccgcatgaactccgtgagctggccg

SEQ ID NO: 501029 - DNA, 55 bp, Artificial
  Synthetic oligonucleotide
tgatgctctatcagcccagccagcgcccgcgcctgcggtctggcgactggacaga

SEQ ID NO: 501030 - DNA, 55 bp, Artificial
  Synthetic oligonucleotide
gatgcgcttacaccacgaatgccttctacgccatacattacgacgcggttgtatt

SEQ ID NO: 501031 - DNA, 55 bp, Artificial
  Synthetic oligonucleotide
gactctgagttttactgctccaacaagtaaagaagctcacgatgtgttgtctggg

SEQ ID NO: 501032 - DNA, 55 bp, Artificial
  Synthetic oligonucleotide
gagaaataccaacgactccagaacgagtcacctcaatcacttctgatatattgcg

SEQ ID NO: 501033 - DNA, 55 bp, Artificial
  Synthetic oligonucleotide
gcacctgcaacgggacgagtgaatcttatgaacgatacggatgcacttaatgtat

SEQ ID NO: 501034 - DNA, 55 bp, Artificial
  Synthetic oligonucleotide
gagagcgtatccacatactaaactctgtggttggcagctcatcctgtaaccggtc

SEQ ID NO: 501035 - DNA, 55 bp, Artificial
  Synthetic oligonucleotide
gagcctcatcgctttacgccgaggcagtataacagaaataattcgtcatgccgac

SEQ ID NO: 501036 - DNA, 55 bp, Artificial
  Synthetic oligonucleotide
gcacacgcctaaaaccgtgcgacttgatgccctgtcgctgtttgacaccggccag

SEQ ID NO: 501037 - DNA, 55 bp, Artificial
  Synthetic oligonucleotide
gcaatcttgtactaaagcaatcgtagttgcacacaacgcagcttttgaccatagt

SEQ ID NO: 501038 - DNA, 55 bp, Artificial
  Synthetic oligonucleotide
gagagtcgcgcttacaccagaagcttttgtcgaacaacatagcttaatcaccagt

SEQ ID NO: 501039 - DNA, 55 bp, Artificial
  Synthetic oligonucleotide
gcaacgtaagccaaatcgagtacagtagaaccagtacatctaaaagaaatgccag

SEQ ID NO: 501040 - DNA, 55 bp, Artificial
  Synthetic oligonucleotide
gagatggagagttgtgaaagtatttaacggacttgagtgactggacaatctggcc

SEQ ID NO: 501041 - DNA, 55 bp, Artificial
  Synthetic oligonucleotide
gcaacaaaacccctgtttactcagcaacacatgacgatatggctaaacgtgcctt

SEQ ID NO: 501042 - DNA, 55 bp, Artificial
  Synthetic oligonucleotide
gatttagacgattaaatgaacatcgcgcatgtgctatgagagctatagtacttgc

SEQ ID NO: 501043 - DNA, 55 bp, Artificial
  Synthetic oligonucleotide
tgattaaacctcctgtaaagggcgctacaggccgtgctacgttctgctgccctga

SEQ ID NO: 501044 - DNA, 55 bp, Artificial
  Synthetic oligonucleotide
tgatgctgcgttccgccggtttatcggatccgctctcccactgcgtgagccgtca

SEQ ID NO: 501045 - DNA, 55 bp, Artificial
  Synthetic oligonucleotide
gagcattcacgtctcgcgtgccaccacgaatggcaactcagagagtcgaactctg

SEQ ID NO: 501046 - DNA, 55 bp, Artificial
  Synthetic oligonucleotide
gatgtcaggtattcacaggggatgacgtcaccctttggcgtgatacggtcgggta

SEQ ID NO: 501047 - DNA, 55 bp, Artificial
  Synthetic oligonucleotide
gagccgggacggcgtaaagacaccacatttcattaaatcgagttgtgtcgtccca

SEQ ID NO: 501048 - DNA, 55 bp, Artificial
  Synthetic oligonucleotide
tgaaccgaacctatggattcaagagactttcagatgtctgactacaccctccagg

SEQ ID NO: 501049 - DNA, 55 bp, Artificial
  Synthetic oligonucleotide
tgacctgtcgcagaagttcgggcgccacatcaggcacacggcgcttgcgtgaggt

SEQ ID NO: 501050 - DNA, 55 bp, Artificial
  Synthetic oligonucleotide
gccatttcagtatcaattgagcccaacgttaccggtcagaaaggatgggccaagt

SEQ ID NO: 501051 - DNA, 55 bp, Artificial
  Synthetic oligonucleotide
gccatgcgtctggcgaaaataagacagtatcaatccccaacaatccgtgtgtcct

SEQ ID NO: 501052 - DNA, 55 bp, Artificial
  Synthetic oligonucleotide
tgattagatgagatggtctaattcatcatctatcatggctttgacgctggagtcg

SEQ ID NO: 501053 - DNA, 55 bp, Artificial
  Synthetic oligonucleotide
gccagatatggagacataagccacgtccctcattcctgcgtcatctttgaaagtc

SEQ ID NO: 501054 - DNA, 55 bp, Artificial
  Synthetic oligonucleotide
gccacgcctgctgctgttgctcgtagcttgtctgtaagctctctaaggcgctcag

SEQ ID NO: 501055 - DNA, 55 bp, Artificial
  Synthetic oligonucleotide
tgcatggagtcgttcatctgccggcagcttaatcagattgttggcacgtttacgc

SEQ ID NO: 501056 - DNA, 55 bp, Artificial
  Synthetic oligonucleotide
gccacctgtctggaccagcccaatcataatgcacacgggacttagcagcgttcgc

SEQ ID NO: 501057 - DNA, 55 bp, Artificial
  Synthetic oligonucleotide
tgactcgtaataaggcgacctttgttgaacaacctaaacagagcgaaccccagcc

SEQ ID NO: 501058 - DNA, 55 bp, Artificial
  Synthetic oligonucleotide
gcatggactttaccgggcatcagcacatactggcgcaggacgtcatacagcggct

SEQ ID NO: 501059 - DNA, 55 bp, Artificial
  Synthetic oligonucleotide
gcatgcatctaataataatcttccaataggacgatcttctacgtgcatacgagaa

SEQ ID NO: 501060 - DNA, 55 bp, Artificial
  Synthetic oligonucleotide
gatgaagtattattgagactagaaagctcgggaggtgtaattcatggatacggcc

SEQ ID NO: 501061 - DNA, 55 bp, Artificial
  Synthetic oligonucleotide
gcagttaacgtcgcatccaaaggctgtttacctgcgagggcatttgtcatagtgg

SEQ ID NO: 501062 - DNA, 55 bp, Artificial
  Synthetic oligonucleotide
gcaggtgatttatggcctggaggttgattccagagtcacgcacttctgacgttcg

SEQ ID NO: 501063 - DNA, 55 bp, Artificial
  Synthetic oligonucleotide
gcaggtctctgtctacccgtagatggctcccctgcacactcagttgatcagcggc

SEQ ID NO: 501064 - DNA, 55 bp, Artificial
  Synthetic oligonucleotide
gcagggaacaacgttcccaacctggtctccgagcggactattgtggtaaccatag

SEQ ID NO: 501065 - DNA, 55 bp, Artificial
  Synthetic oligonucleotide
gcaggcgttttggctaccgccgcatctggcagttactgcgccgtgaagggcttca

SEQ ID NO: 501066 - DNA, 55 bp, Artificial
  Synthetic oligonucleotide
gcagctaatcctactatagagatttcacttacagttaacgccccagaacgacaaa

SEQ ID NO: 501067 - DNA, 55 bp, Artificial
  Synthetic oligonucleotide
gcagcctgctcgaaggattcattatgttcaagccctccaccgggcgttgcccagt

SEQ ID NO: 501068 - DNA, 55 bp, Artificial
  Synthetic oligonucleotide
tgagcactgtcacggcaataagagcggaggcgttagctccaaatggtaccagcgc

SEQ ID NO: 501069 - DNA, 55 bp, Artificial
  Synthetic oligonucleotide
gtgaccgggcggcgaaacctacccgtccagtgtttcctgcatcacgccatcactg

SEQ ID NO: 501070 - DNA, 55 bp, Artificial
  Synthetic oligonucleotide
gtgaatatctttcggtgacaaacgtatcgttactttatctgaacgtggctcttcc

SEQ ID NO: 501071 - DNA, 55 bp, Artificial
  Synthetic oligonucleotide
gtctgcccagtttacggcgctttatcgcatcagcgtggcgctgagtcaggaaagc

SEQ ID NO: 501072 - DNA, 55 bp, Artificial
  Synthetic oligonucleotide
gtctattcaaagccaaaataatcgctatcgcttatgccagaaagcgcttaacgag

SEQ ID NO: 501073 - DNA, 55 bp, Artificial
  Synthetic oligonucleotide
gtcgataattaagcgaccactgttgaaagagtgctcaggtaaaatgctacttggc

SEQ ID NO: 501074 - DNA, 55 bp, Artificial
  Synthetic oligonucleotide
gtccgatgattaaggacaaaatcgctctaatcggacgttgagaactgctaaatgg

SEQ ID NO: 501075 - DNA, 55 bp, Artificial
  Synthetic oligonucleotide
gtccataaatcacaaacttcattgttttctctcggttatcctcgcagaactgggg

SEQ ID NO: 501076 - DNA, 55 bp, Artificial
  Synthetic oligonucleotide
gtccaccttctgacaccgccccaaccacttgttgataaagaggttctcccatgcc

SEQ ID NO: 501077 - DNA, 55 bp, Artificial
  Synthetic oligonucleotide
gtcaggtcaaaatgttcatgggataaggtggaatcaggctcaggagtggcagggg

SEQ ID NO: 501078 - DNA, 55 bp, Artificial
  Synthetic oligonucleotide
gtcaggatttccagaaccgccaccatggagaattatcagatgccgctgccacagg

SEQ ID NO: 501079 - DNA, 55 bp, Artificial
  Synthetic oligonucleotide
gtcagccgctctgattttctggctgaccgggcaaaaccccaccgcagtggcgaga

SEQ ID NO: 501080 - DNA, 55 bp, Artificial
  Synthetic oligonucleotide
gtagctttccctgacgcttcttctgcaagatatgcgataggattacattcgtaca

SEQ ID NO: 501081 - DNA, 55 bp, Artificial
  Synthetic oligonucleotide
tcagtacattgccatgatgatttaggaatggccgtaggaaattcaatatcagcga

SEQ ID NO: 501082 - DNA, 55 bp, Artificial
  Synthetic oligonucleotide
gtaatgtcatctgatgctggctacggatttatttgcaccttcggtgatttagtga

SEQ ID NO: 501083 - DNA, 55 bp, Artificial
  Synthetic oligonucleotide
gtaacggcggcaaaatcagtaacggcacgaacgagcaatacgtaggccgtgacct

SEQ ID NO: 501084 - DNA, 55 bp, Artificial
  Synthetic oligonucleotide
ggtttcgatatttatcatgctaccgattcatttactcggctctcgtccgaacagg

SEQ ID NO: 501085 - DNA, 55 bp, Artificial
  Synthetic oligonucleotide
tcatcaataccgtatatcagggtaaagtccttcttactggccaggcaccgacccc

SEQ ID NO: 501086 - DNA, 55 bp, Artificial
  Synthetic oligonucleotide
ggttgatgtgacggctatcccggacgaggagattgtcacacatcgacacgttgcc

SEQ ID NO: 501087 - DNA, 55 bp, Artificial
  Synthetic oligonucleotide
ggttcccaacagtagtaaaacggtacaaccagtagctctactcaggctgagcgtc

SEQ ID NO: 501088 - DNA, 55 bp, Artificial
  Synthetic oligonucleotide
ggtgggacggagccgaggatggtgtgtaacgcctacctagcgactcagcgaaagg

SEQ ID NO: 501089 - DNA, 55 bp, Artificial
  Synthetic oligonucleotide
ggtgcgccctttataaagatcggcatcataaaatcggctttgaatagcggcagtg

SEQ ID NO: 501090 - DNA, 55 bp, Artificial
  Synthetic oligonucleotide
ggtgaacactcatgtagctcacgactgcacagtaggtagtcactgtattatggca

SEQ ID NO: 501091 - DNA, 55 bp, Artificial
  Synthetic oligonucleotide
ggtctcacgcgtgtgattggtacacttaaatctcatttagacgcactccatgctt

SEQ ID NO: 501092 - DNA, 55 bp, Artificial
  Synthetic oligonucleotide
ggtcagcaatgatttgcatttgatcaccccgctctccaacattaatctgatgggg

SEQ ID NO: 501093 - DNA, 55 bp, Artificial
  Synthetic oligonucleotide
ggtcagattatgaaggatgacccagattttcctgtggctctcggttctgatggta

SEQ ID NO: 501094 - DNA, 55 bp, Artificial
  Synthetic oligonucleotide
ggtcacagccatctctttaccatgggttacgtcgcagcgtttacgcgctttgagg

SEQ ID NO: 501095 - DNA, 55 bp, Artificial
  Synthetic oligonucleotide
ggtatcccaagcaacgtggcggcgcaggttacagcacaaagatctgcgaattcta

SEQ ID NO: 501096 - DNA, 55 bp, Artificial
  Synthetic oligonucleotide
ggtacgcctagagctgtcgatttagagagttcgtacttaatggctaacttgctgg

SEQ ID NO: 501097 - DNA, 55 bp, Artificial
  Synthetic oligonucleotide
tataagcaagcctagccagaagggccagttgcttaaggctgccagcggatctgcc

SEQ ID NO: 501098 - DNA, 55 bp, Artificial
  Synthetic oligonucleotide
tagttgaattttgggaggggcaaggttccatattggtcgaggattctggagctga

SEQ ID NO: 501099 - DNA, 55 bp, Artificial
  Synthetic oligonucleotide
tagtcattcgccctacttgagtggcgtagccacaccgacagagattgcgcagcac

SEQ ID NO: 501100 - DNA, 55 bp, Artificial
  Synthetic oligonucleotide
taggatcacatccgagtccgaacattgattctgtaggatatgcgatcacatcatc

SEQ ID NO: 501101 - DNA, 55 bp, Artificial
  Synthetic oligonucleotide
tagaggccgatcctgagcaggaggccgtggttcgctacgttgttgagcaattggc

SEQ ID NO: 501102 - DNA, 55 bp, Artificial
  Synthetic oligonucleotide
tacgtcctaaaatgaagattgcggcgcttagtttcgaagttctctctcaatcagt

SEQ ID NO: 501103 - DNA, 55 bp, Artificial
  Synthetic oligonucleotide
tatatcttgcagggaactatccctacccgctcccgtcgtcttaatgaacatcgag

SEQ ID NO: 501104 - DNA, 55 bp, Artificial
  Synthetic oligonucleotide
tacacgtcagtctccagatttattcataggcctttgcgggtttgccggatgtggt

SEQ ID NO: 501105 - DNA, 55 bp, Artificial
  Synthetic oligonucleotide
taataccctgccgctgcggctgaatatcgaccagcgcgccacgcgtgaagcggta

SEQ ID NO: 501106 - DNA, 55 bp, Artificial
  Synthetic oligonucleotide
taagcagggtgaatacgccacaattcaggtgacgcacgcttaggatccgcttccg

SEQ ID NO: 501107 - DNA, 55 bp, Artificial
  Synthetic oligonucleotide
taacaaatccaattttaatgctatcacctggaccaggtttaccccgtgatgccgg

SEQ ID NO: 501108 - DNA, 55 bp, Artificial
  Synthetic oligonucleotide
tattacaggaaacggcgatgttatacaacctgaagacgacttaatagctatagga

SEQ ID NO: 501109 - DNA, 55 bp, Artificial
  Synthetic oligonucleotide
taaagtaacgatacgtttgtcaccgaaagatattcacagcatgacaaaacgcgcc

SEQ ID NO: 501110 - DNA, 55 bp, Artificial
  Synthetic oligonucleotide
gttttgtggactattgtgatttacgcaccgtaatcggtctggataaacaggatca

SEQ ID NO: 501111 - DNA, 55 bp, Artificial
  Synthetic oligonucleotide
gttggtcttcacgcccttcccggttttcgccgcgttatcgcgttcaaactcagcc

SEQ ID NO: 501112 - DNA, 55 bp, Artificial
  Synthetic oligonucleotide
gttgcggaaacaatcggtttacgttcgtcaaatgactggccagagtaggtggccg

SEQ ID NO: 501113 - DNA, 55 bp, Artificial
  Synthetic oligonucleotide
tcaagtgtcattccggggtacaccgccagtccgtcacagagcgggtattacgggg

SEQ ID NO: 501114 - DNA, 55 bp, Artificial
  Synthetic oligonucleotide
gttctataaacgttcgcagacgatccctgtttggtgcgctaattgctaacaagag

SEQ ID NO: 501115 - DNA, 55 bp, Artificial
  Synthetic oligonucleotide
gttcgacaaaacccgcaagtgggcatatcgtgccatccgtcaggggtggcctgag

SEQ ID NO: 501116 - DNA, 55 bp, Artificial
  Synthetic oligonucleotide
gttattgtgcatgtgcctgatccactaactcctggaggtttcttgtgtcagatcg

SEQ ID NO: 501117 - DNA, 55 bp, Artificial
  Synthetic oligonucleotide
tcacgcagggtggacggcatacggtgcaggttccacaggttctgcacggcaaaac

SEQ ID NO: 501118 - DNA, 55 bp, Artificial
  Synthetic oligonucleotide
gttataattgagccgtggcgttagtcaactacgaagacgtggccattacctactt

SEQ ID NO: 501119 - DNA, 55 bp, Artificial
  Synthetic oligonucleotide
gtgtggatagctataccagttaccctacttgagtgtgttctcacgttctcatatc

SEQ ID NO: 501120 - DNA, 55 bp, Artificial
  Synthetic oligonucleotide
gtgggttatcagagcccgtttgaaattgtcttcgaaattttcttgagcgaggctc

SEQ ID NO: 501121 - DNA, 55 bp, Artificial
  Synthetic oligonucleotide
gtgctgctatcactttatccttggagtagtgtggctgagggagctagccctttcg

SEQ ID NO: 501122 - DNA, 55 bp, Artificial
  Synthetic oligonucleotide
gtgcgattgcgggaagggtatgattattttcgtctgcaacatgattatgacatgg

SEQ ID NO: 501123 - DNA, 55 bp, Artificial
  Synthetic oligonucleotide
gtgcccttagctattccgttagtagcaggaccatctttactagcaacattaatgt

SEQ ID NO: 501124 - DNA, 55 bp, Artificial
  Synthetic oligonucleotide
gtgccaggttagccaccataatggtgtgacgaccaatcagtgcctgtggatctgg

SEQ ID NO: 501125 - DNA, 55 bp, Artificial
  Synthetic oligonucleotide
gtgagccgtggccaactggatgacagtgattacatagcccgtcatctggtaacta

SEQ ID NO: 501126 - DNA, 55 bp, Artificial
  Synthetic oligonucleotide
ggattgccagaaggagcagagatcactatcatactagaaggagaacgtatgttaa

SEQ ID NO: 501127 - DNA, 55 bp, Artificial
  Synthetic oligonucleotide
ggatgtgattctacagcaacttggatgctttagcagttcggacattaggctacga

SEQ ID NO: 501128 - DNA, 55 bp, Artificial; identical to SEQ ID NO: 180468
  Synthetic oligonucleotide

SEQ ID NO: 501129 - DNA, 55 bp, Artificial
  Synthetic oligonucleotide
ggatcgcatatagcgatcgctggatacccaatgcgattctcacgatatcgaccgg

SEQ ID NO: 501130 - DNA, 55 bp, Artificial
  Synthetic oligonucleotide
ggatccgataagtacacttacgatccagtttgcaccacctgataaccaatagata

SEQ ID NO: 501131 - DNA, 55 bp, Artificial
  Synthetic oligonucleotide
ggatcagacgccttatcacgaagttctatcaacgctttgagattgcggttgtagg

SEQ ID NO: 501132 - DNA, 55 bp, Artificial
  Synthetic oligonucleotide
ggagaatggcagggtggggttgtgagtaaacgtataatagccaagattggtgtcg

SEQ ID NO: 501133 - DNA, 55 bp, Artificial
  Synthetic oligonucleotide
ggacgccttccctccagcgactctccattgatgctgattccgcgttctggccgga

SEQ ID NO: 501134 - DNA, 55 bp, Artificial
  Synthetic oligonucleotide
ggaccggaagcccgcgacagggcaactttccattccgagccttcgagctgacccc

SEQ ID NO: 501135 - DNA, 55 bp, Artificial
  Synthetic oligonucleotide
ggaagtggactgagtcgctttcagatgaacaccatcgaggcattgagtattcccc

SEQ ID NO: 501136 - DNA, 55 bp, Artificial
  Synthetic oligonucleotide
ggaaacgaagtgacctacagcaatctcattccggccacggactggttctacgtcc

SEQ ID NO: 501137 - DNA, 55 bp, Artificial
  Synthetic oligonucleotide
gctttgtatttgcgtcccgactcactcatatcgcgaatcatggcgtcaaccagcg

SEQ ID NO: 501138 - DNA, 55 bp, Artificial
  Synthetic oligonucleotide
gctttctctctcaatgggatggcaatattgaaggctttaaaacatacgttaagca

SEQ ID NO: 501139 - DNA, 55 bp, Artificial
  Synthetic oligonucleotide
gcttgtcacatttcccctcagcccagagtgtcgtttgtcacacttaagagcgccc

SEQ ID NO: 501140 - DNA, 55 bp, Artificial
  Synthetic oligonucleotide
gcttgcagaaaacattgatggctcttgtggtgcggttgttgccgatcaaacccat

SEQ ID NO: 501141 - DNA, 55 bp, Artificial
  Synthetic oligonucleotide
gcttagctttagatttacatgacgatgcaataaccaccacagaagacccgtcgag

SEQ ID NO: 501142 - DNA, 55 bp, Artificial
  Synthetic oligonucleotide
gctggtctcaacggcgacgattaatcgccaattgatgtaaacgcctccctcgcgc

SEQ ID NO: 501143 - DNA, 55 bp, Artificial
  Synthetic oligonucleotide
gctggagaaactcatcttcccgttaataacgaaatcagtcaggacatcagttaag

SEQ ID NO: 501144 - DNA, 55 bp, Artificial
  Synthetic oligonucleotide
gctgctggattagcgttaatagtagttggtagctactggcatcaagcagatggtc

SEQ ID NO: 501145 - DNA, 55 bp, Artificial
  Synthetic oligonucleotide
gctgccctcagtatttcttttaacgtaagcgtcgtgttgtccgggatcatggcct

SEQ ID NO: 501146 - DNA, 55 bp, Artificial
  Synthetic oligonucleotide
gctgcagctcgtttagaaaatgcgacaggagcttctattgattcgacgatcgaac

SEQ ID NO: 501147 - DNA, 55 bp, Artificial
  Synthetic oligonucleotide
gctcatcgccccttcgtatccccaggtggtctgacggtgcaaatgatgccggtca

SEQ ID NO: 501148 - DNA, 55 bp, Artificial
  Synthetic oligonucleotide
gctacgcgagcaacgattatcagtaatctcgaaagcacgggctatttcaccgtac

SEQ ID NO: 501149 - DNA, 55 bp, Artificial
  Synthetic oligonucleotide
gcgttggctcccttgtaacgagtaccgctaaccgggttgtgcggcattctgcttg

SEQ ID NO: 501150 - DNA, 55 bp, Artificial
  Synthetic oligonucleotide
tctcgatggtgatcagtctttcatcatcgggtacaagctgaagcaatgaacgcat

SEQ ID NO: 501151 - DNA, 55 bp, Artificial
  Synthetic oligonucleotide
gcgtacaccaaagtgtaaatcatccgagaagtacggcttgtgcggtaagcggtcg

SEQ ID NO: 501152 - DNA, 55 bp, Artificial
  Synthetic oligonucleotide
gcgggataatagcccctatatgccgtggctgtacttcctcacctctcgctatggc

SEQ ID NO: 501153 - DNA, 55 bp, Artificial
  Synthetic oligonucleotide
gcggcatgcgggccttttacattaacgcctcccgtgcgcgcgatcatgtgcagat

SEQ ID NO: 501154 - DNA, 55 bp, Artificial
  Synthetic oligonucleotide
gggtttgatggtatcaacttccggctcccaccacgtttaacgtcatccttccaag

SEQ ID NO: 501155 - DNA, 55 bp, Artificial
  Synthetic oligonucleotide
tccgatgttccgggtctttaaaggcgatgaggatgccacccgttcaggaacccgg

SEQ ID NO: 501156 - DNA, 55 bp, Artificial
  Synthetic oligonucleotide
tccgtaagagttgccgatcataaagtccggtttacgggtaaacatcagcgagcgg

SEQ ID NO: 501157 - DNA, 55 bp, Artificial
  Synthetic oligonucleotide
ggggtggcctgagtatgagcagtggttacaagcctgctatgaacgagcctgtgcc

SEQ ID NO: 501158 - DNA, 55 bp, Artificial
  Synthetic oligonucleotide
ggggctttccccggggttctggtacactttgcaccaggcgatatactgaataagc

SEQ ID NO: 501159 - DNA, 55 bp, Artificial
  Synthetic oligonucleotide
tcctgcccccacacagcgcggacctgaatcagctgcgcccgcaaccgaggtacga

SEQ ID NO: 501160 - DNA, 55 bp, Artificial
  Synthetic oligonucleotide
ggggaacatagcaagtcaatgaaaagcttagaagtgtagtcccgtttctgtgggg

SEQ ID NO: 501161 - DNA, 55 bp, Artificial
  Synthetic oligonucleotide
gggcttggtttacgctggtagcgagggtaagggtactgctaatggtggggcggcc

SEQ ID NO: 501162 - DNA, 55 bp, Artificial
  Synthetic oligonucleotide
tcgccattacttagcttcacattaagtaatcctgctggtccatggcagaccgcgc

SEQ ID NO: 501163 - DNA, 55 bp, Artificial
  Synthetic oligonucleotide
tcgcgtgttattggtacacttaaatctcatttagacgcactccatgcttactctt

SEQ ID NO: 501164 - DNA, 55 bp, Artificial
  Synthetic oligonucleotide
gggcgccagcacctcatctcggtattcctgtttaatcgattctaattctcggtcg

SEQ ID NO: 501165 - DNA, 55 bp, Artificial
  Synthetic oligonucleotide
gggatgcttgcatgtggctatatacttttacgtcatgccatggaggccagaaaga

SEQ ID NO: 501166 - DNA, 55 bp, Artificial
  Synthetic oligonucleotide
gggagaaagagtggcacgggcaacctcaataacagatgccattacgcttcctcgg

SEQ ID NO: 501167 - DNA, 55 bp, Artificial
  Synthetic oligonucleotide
gggaagttacggtggtgctataggttattttaccgattctggagatttagatacc

SEQ ID NO: 501168 - DNA, 55 bp, Artificial
  Synthetic oligonucleotide
gggaaccgcagataacccctgtgactgctccggtgatggaggcgataaaacgggt

SEQ ID NO: 501169 - DNA, 55 bp, Artificial
  Synthetic oligonucleotide
gggaaaagtatgctggaaagtactcctgtacccataagtcgacatcggccagtca

SEQ ID NO: 501170 - DNA, 55 bp, Artificial
  Synthetic oligonucleotide
ggctgtaattcttgaatcgcttgctgccgatgaaggagcacgctgttgtctcgcg

SEQ ID NO: 501171 - DNA, 55 bp, Artificial
  Synthetic oligonucleotide
ggctggctagagaacgaaggcaaaggacgtgcgttaggggtcggagaagtcaagt

SEQ ID NO: 501172 - DNA, 55 bp, Artificial
  Synthetic oligonucleotide
ggctatcttgcatccggccattatgtcttgcatccagcagcaatcccttccggct

SEQ ID NO: 501173 - DNA, 55 bp, Artificial
  Synthetic oligonucleotide
ggcggtatagacctcgttgccgtagccatcatcttttaagccgtattgatagcct

SEQ ID NO: 501174 - DNA, 55 bp, Artificial
  Synthetic oligonucleotide
ggcggaactaagtgacaacactctggcactgtacgcccctaatcgcttcgtgctg

SEQ ID NO: 501175 - DNA, 55 bp, Artificial
  Synthetic oligonucleotide
ggcgccaactggcaacctggctggggttaacgccatcgcaatacagcagtggtgg

SEQ ID NO: 501176 - DNA, 55 bp, Artificial
  Synthetic oligonucleotide
ggcgaaatgtaggaaatcattttccaggggatggtccaaaatatatcggcagggg

SEQ ID NO: 501177 - DNA, 55 bp, Artificial
  Synthetic oligonucleotide
ggccttatccggcgaaccgttgcctgcacgatgagtttgaaatgcaggcggccgc

SEQ ID NO: 501178 - DNA, 55 bp, Artificial
  Synthetic oligonucleotide
ggcccgacgagagggttattatctggtataggagtcagtttggagatcggataat

SEQ ID NO: 501179 - DNA, 55 bp, Artificial
  Synthetic oligonucleotide
ggccatgacgcacggttgtgtactccgctttgtgtatatatacaacgtgcctcgt

SEQ ID NO: 501180 - DNA, 55 bp, Artificial
  Synthetic oligonucleotide
ggcatgcacaggggacggatattcgtattcttctggatctgatagcgcggggcga

SEQ ID NO: 501181 - DNA, 55 bp, Artificial
  Synthetic oligonucleotide
ggcagcatccgcaaaccgtaacccgcaacatagctaataccttttgacaggatgt

SEQ ID NO: 501182 - DNA, 55 bp, Artificial
  Synthetic oligonucleotide
catgatgttgcacgttttggatctgaagtattacgtgcgtctcctagacaagctg

SEQ ID NO: 501183 - DNA, 55 bp, Artificial
  Synthetic oligonucleotide
ttaccacttggtcagggcttcaccccgacaccccgcatcagtgcgtaagtgctca

SEQ ID NO: 501184 - DNA, 55 bp, Artificial
  Synthetic oligonucleotide
catccagaggcgatgcgaattgcaggttataggcgctggcacgttcatagcaggc

SEQ ID NO: 501185 - DNA, 55 bp, Artificial
  Synthetic oligonucleotide
ttacctgatgttctggcattcattgatgaggacgccgacgaatttgataatgcag

SEQ ID NO: 501186 - DNA, 55 bp, Artificial
  Synthetic oligonucleotide
catatctctcttataattactggacacggagacgttatacaaccagaaagcgatg

SEQ ID NO: 501187 - DNA, 55 bp, Artificial
  Synthetic oligonucleotide
catagcaaataattcatttccgccgcctaaagttaacgctaccatgcatgtacga

SEQ ID NO: 501188 - DNA, 55 bp, Artificial
  Synthetic oligonucleotide
catacgatgtgcaccgtgttcggaatgtctaatgagggcatcagttaagcattag

SEQ ID NO: 501189 - DNA, 55 bp, Artificial
  Synthetic oligonucleotide
cagtacgcagaacgggcctcagaaaagctgcgtaaagagcgccagtactgccggc

SEQ ID NO: 501190 - DNA, 55 bp, Artificial
  Synthetic oligonucleotide
caggtatgtgactatgtttctgagtgaaggctgagaataatgctagtgggctaac

SEQ ID NO: 501191 - DNA, 55 bp, Artificial
  Synthetic oligonucleotide
caggcagacctttgttgaatgggcggccaagacggttaactcatcatactgggac

SEQ ID NO: 501192 - DNA, 55 bp, Artificial
  Synthetic oligonucleotide
caggaaatcattccacataagaagtcggggcgcactcgcagaaaatctttccaca

SEQ ID NO: 501193 - DNA, 55 bp, Artificial
  Synthetic oligonucleotide
cagcggtgcctatggaaaagcgaacgaaagaaatcaaaatccgcatgaccgagac

SEQ ID NO: 501194 - DNA, 55 bp, Artificial
  Synthetic oligonucleotide
cagcctcaaagtacccgtgtcgatcgtaaaagaagggaccgaagagcgaggcatg

SEQ ID NO: 501195 - DNA, 55 bp, Artificial
  Synthetic oligonucleotide
cagagcagggaaccatcctgtagtggcaaaatattagcggcgtggttttgcgggc

SEQ ID NO: 501196 - DNA, 55 bp, Artificial
  Synthetic oligonucleotide
cagacctgcgggaatgtgcaccttttcaggcaatcagcggagtctttatgaccag

SEQ ID NO: 501197 - DNA, 55 bp, Artificial
  Synthetic oligonucleotide
cagaaaaccccgcccacggtggtaaagagtatgagccagacacaagagcggggcg

SEQ ID NO: 501198 - DNA, 55 bp, Artificial
  Synthetic oligonucleotide
cactttatcagccgggaaataatgcgggcaacggtgtttaattatatcgaatgtg

SEQ ID NO: 501199 - DNA, 55 bp, Artificial
  Synthetic oligonucleotide
cacttggaaagaaggttccaatatcgcccattgcagtagcgcctaataatgcatc

SEQ ID NO: 501200 - DNA, 55 bp, Artificial
  Synthetic oligonucleotide
cactgtggatctgttcctttatcggtatttacaggagaagggaatgccgtgctgt

SEQ ID NO: 501201 - DNA, 55 bp, Artificial
  Synthetic oligonucleotide
cactctttcccgattccgatactatagtggtatggtatcacttcgccccgtcgct

SEQ ID NO: 501202 - DNA, 55 bp, Artificial
  Synthetic oligonucleotide
cacggcgatcgctaagattgcgcaagaacgggcaatgcctgacgttaagagatca

SEQ ID NO: 501203 - DNA, 55 bp, Artificial
  Synthetic oligonucleotide
cacctgcgagaactctaccacgaactatgccataaacgtgaatatttccgtctgc

SEQ ID NO: 501204 - DNA, 55 bp, Artificial
  Synthetic oligonucleotide
cacctatctggtggtactgccgaagaaagcgcatggcaccgagacctatacatcg

SEQ ID NO: 501205 - DNA, 55 bp, Artificial
  Synthetic oligonucleotide
caccgttaaagagtccccatattgcaaacaaaaggcctattgagaaggctgtggc

SEQ ID NO: 501206 - DNA, 55 bp, Artificial
  Synthetic oligonucleotide
cacacggaaaggacattcaggatgagtaagcgatcagaaattattgatgggcgat

SEQ ID NO: 501207 - DNA, 55 bp, Artificial
  Synthetic oligonucleotide
caattgagcccaacgttaccggtcagaaaggatgggccaagtaatgccataattg

SEQ ID NO: 501208 - DNA, 55 bp, Artificial
  Synthetic oligonucleotide
caattaaagaatcgacatagtgtggattggcgtcagtttgagaaaacccatcaag

SEQ ID NO: 501209 - DNA, 55 bp, Artificial
  Synthetic oligonucleotide
caatggtggcggttaactcttccatagggaagcacacccgccctgtatcccaggg

SEQ ID NO: 501210 - DNA, 55 bp, Artificial
  Synthetic oligonucleotide
caatgctgagggtcattatcgggtggtgtatggtgatcccgctcttctgcgtggc

SEQ ID NO: 501211 - DNA, 55 bp, Artificial
  Synthetic oligonucleotide
cccttgaagctgaggattccgatgatgacagtacagaggaaaacaccgattcggc

SEQ ID NO: 501212 - DNA, 55 bp, Artificial
  Synthetic oligonucleotide
ccctgcgcgccgggtcacaggaaaggtacataacacaatatctggtagccagatt

SEQ ID NO: 501213 - DNA, 55 bp, Artificial
  Synthetic oligonucleotide
ccctgataatactagcggtgagccgttatccagcgagcagttagctgatcaaatt

SEQ ID NO: 501214 - DNA, 55 bp, Artificial
  Synthetic oligonucleotide
ccctgaaacaatggctatctcactcatcaaacaactatactccatcaatgctgtt

SEQ ID NO: 501215 - DNA, 55 bp, Artificial
  Synthetic oligonucleotide
cccgtcaggaattctacctgttgatttatctaacaacgaatggaggatggttaat

SEQ ID NO: 501216 - DNA, 55 bp, Artificial
  Synthetic oligonucleotide
cccgggaattaagtgtcagtgagccccagaagctggccataatctgtaaacctgg

SEQ ID NO: 501217 - DNA, 55 bp, Artificial
  Synthetic oligonucleotide
cccgcaagggcggtacaggttccacaaggagctgcttcaccactccaccctgcaa

SEQ ID NO: 501218 - DNA, 55 bp, Artificial
  Synthetic oligonucleotide
cccctgcgtgatcctcggaccgggcgaaccttccatggctcaccaaacagatgaa

SEQ ID NO: 501219 - DNA, 55 bp, Artificial
  Synthetic oligonucleotide
cccctgaaccagtcacggtagcaactcgttagaggggacgctgtgtgtactggct

SEQ ID NO: 501220 - DNA, 55 bp, Artificial
  Synthetic oligonucleotide
cccctcaagacaaactctcatatccagttcgtcacgattaaaggcacggccttgt

SEQ ID NO: 501221 - DNA, 55 bp, Artificial
  Synthetic oligonucleotide
tgttgacagctgtgtacatatgcaccaaagtcgccatccttgtctgggaaggcgc

SEQ ID NO: 501222 - DNA, 55 bp, Artificial
  Synthetic oligonucleotide
ccccaacaaagcaacgtcccatctggttaagcccagttgtaaacaagctcgccac

SEQ ID NO: 501223 - DNA, 55 bp, Artificial
  Synthetic oligonucleotide
cccatttaacgggctggtcatggattcggtgattctgataccatccagccggaac

SEQ ID NO: 501224 - DNA, 55 bp, Artificial; identical to SEQ ID NO: 491758
  Synthetic oligonucleotide

SEQ ID NO: 501225 - DNA, 55 bp, Artificial
  Synthetic oligonucleotide
ccatcaggcgcgatttctccgcgtctgcaatgtcaggttcctgaaatgacagcac

SEQ ID NO: 501226 - DNA, 55 bp, Artificial
  Synthetic oligonucleotide
ccagtgcggaggatacggcggacatcagtatctatgaagaaattggcgggtgggg

SEQ ID NO: 501227 - DNA, 55 bp, Artificial
  Synthetic oligonucleotide
ccagtatcgacaggcgattatcacgacaatccccggtactgtgcatcaggtgccg

SEQ ID NO: 501228 - DNA, 55 bp, Artificial
  Synthetic oligonucleotide
ccagtaacggtaactgtgccgctttaatgtctgatgccagctgtaccgtcgtcgg

SEQ ID NO: 501229 - DNA, 55 bp, Artificial
  Synthetic oligonucleotide
ccaggtgcatccggcttaaccgtgatttgctgtatctctttacggcggctgcgcc

SEQ ID NO: 501230 - DNA, 55 bp, Artificial
  Synthetic oligonucleotide
ccagccgccgccagcgttgcggatctccataagaccgttacgcgagtaaacgtag

SEQ ID NO: 501231 - DNA, 55 bp, Artificial
  Synthetic oligonucleotide
ccagatagatcacctcggcggtggccagaaagtaaatcaccctcacgctgccgct

SEQ ID NO: 501232 - DNA, 55 bp, Artificial
  Synthetic oligonucleotide
ccacttctaccctggctgaccagttctctttacataacttctcggtaggtaagcg

SEQ ID NO: 501233 - DNA, 55 bp, Artificial
  Synthetic oligonucleotide
ccacgaaggatcctactggcactacatgctcggtgtggtgcaattctatctcgcg

SEQ ID NO: 501234 - DNA, 55 bp, Artificial
  Synthetic oligonucleotide
ccaataccgtagtttcggatgtggtgagtgctttaatatgccaaccccttgatcg

SEQ ID NO: 501235 - DNA, 55 bp, Artificial
  Synthetic oligonucleotide
ccaagaacagccattgcggctgtcagggattccaagaacgatatagaaacctgga

SEQ ID NO: 501236 - DNA, 55 bp, Artificial
  Synthetic oligonucleotide
ccaaacgcgtaccacgatagacccgtgaaagcgcaaaatcgggactcacttgtag

SEQ ID NO: 501237 - DNA, 55 bp, Artificial
  Synthetic oligonucleotide
ccaaacaaccctagtgctccaccttgaaaaggtaaattgctatcgtatgaagcat

SEQ ID NO: 501238 - DNA, 55 bp, Artificial
  Synthetic oligonucleotide
cattggcaggcatttgatatgcaggtcgaaggggtcagtattattactacgaaac

SEQ ID NO: 501239 - DNA, 55 bp, Artificial
  Synthetic oligonucleotide
cattgatgattaccgtgcggggtatgaccgcctaactgctcaccttgacacactg

SEQ ID NO: 501240 - DNA, 55 bp, Artificial
  Synthetic oligonucleotide
cattacacttcaatcgatgttacgaaaagggatccgtcctatcacattagtgccg

SEQ ID NO: 501241 - DNA, 55 bp, Artificial
  Synthetic oligonucleotide
ttctggccatgcccggatcattacgacggcagccagattgccatcggccggccga

SEQ ID NO: 501242 - DNA, 55 bp, Artificial
  Synthetic oligonucleotide
agaacttgaatcgttataccctgatgacttttacgtctgatcaacccaacgtagg

SEQ ID NO: 501243 - DNA, 55 bp, Artificial
  Synthetic oligonucleotide
agaacctgcacgccccggtggattttaggccgcctgtcggccgggaagcgttata

SEQ ID NO: 501244 - DNA, 55 bp, Artificial
  Synthetic oligonucleotide
agaaagaaactagagacgtgatgacagtatcactgcataatccggccaggacata

SEQ ID NO: 501245 - DNA, 55 bp, Artificial
  Synthetic oligonucleotide
actggtgacaatgtcacgtgagcatggccgcgaggtgaaaatactggccagttct

SEQ ID NO: 501246 - DNA, 55 bp, Artificial
  Synthetic oligonucleotide
acgtaacggctcatcaactttggcgaacatcatcagaatgccccacatggcgatc

SEQ ID NO: 501247 - DNA, 55 bp, Artificial
  Synthetic oligonucleotide
acgacatggtgtcgcaggagagatagtctatgcaaactcaaaatgttgtgacgga

SEQ ID NO: 501248 - DNA, 55 bp, Artificial
  Synthetic oligonucleotide
accgctggttttcggtcaaacacatagacggataaatatcacgcgagcacggctg

SEQ ID NO: 501249 - DNA, 55 bp, Artificial
  Synthetic oligonucleotide
ttgcgttttacgggtgatttcgtgggtcttgccggactggttcaccaggacggct

SEQ ID NO: 501250 - DNA, 55 bp, Artificial
  Synthetic oligonucleotide
acccgcatcgtagagtgttttccagggaaacgcggcaccagggtcacttttgcgc

SEQ ID NO: 501251 - DNA, 55 bp, Artificial
  Synthetic oligonucleotide
acccctcctggaccagatacgtaccctcccattccaagaacaatgtctggagacc

SEQ ID NO: 501252 - DNA, 55 bp, Artificial
  Synthetic oligonucleotide
accatcgcactctaagacaattgacctggaagctttgcctgcttgtacggtagag

SEQ ID NO: 501253 - DNA, 55 bp, Artificial
  Synthetic oligonucleotide
acataccctgctgatctacagacagaatatgctcgccataaggcaggtttaactc

SEQ ID NO: 501254 - DNA, 55 bp, Artificial
  Synthetic oligonucleotide
acagtaccacccggtggttgtacccaacgtattcttccaggtagaaaccacccca

SEQ ID NO: 501255 - DNA, 55 bp, Artificial
  Synthetic oligonucleotide
acaggacgtagatgcttgataccagactctgcgcgttcatcctgcgagagctagc

SEQ ID NO: 501256 - DNA, 55 bp, Artificial
  Synthetic oligonucleotide
acaatggtcaggcgcagtgataaccatcagttcagccaggtcaaaatgcaggatg

SEQ ID NO: 501257 - DNA, 55 bp, Artificial
  Synthetic oligonucleotide
aattagaaaccagctgaatgcagatattcgacgcctcaattattcactggaggtt

SEQ ID NO: 501258 - DNA, 55 bp, Artificial
  Synthetic oligonucleotide
ttggtgtggaaacgattaccagagactcgaccaatctgtgcacttgaaagtaatc

SEQ ID NO: 501259 - DNA, 55 bp, Artificial
  Synthetic oligonucleotide
aagtatctcaatcaatgaacgctgacgacaaagaacgctttatgagccgcgtccg

SEQ ID NO: 501260 - DNA, 55 bp, Artificial
  Synthetic oligonucleotide
aagctatcgaacgcactacagagcttatcataaaatgctgccatggaagtccagg

SEQ ID NO: 501261 - DNA, 55 bp, Artificial
  Synthetic oligonucleotide
aacgtctatgacacgtctcaggccatctctaacctgccggttaacatgcgactca

SEQ ID NO: 501262 - DNA, 55 bp, Artificial
  Synthetic oligonucleotide
ttgtgatggccgtggatgatgatggcctgtcgctcggccttagcgcccaggtcac

SEQ ID NO: 501263 - DNA, 55 bp, Artificial
  Synthetic oligonucleotide
aaatgcaggcggccgctaacccgcagacgatcgcactgacctgtggtgaacagcg

SEQ ID NO: 501264 - DNA, 55 bp, Artificial
  Synthetic oligonucleotide
aaatcgcgtgcagtcaacaataaatcgtgcacagtcaacataaaatcgcgtatag

SEQ ID NO: 501265 - DNA, 55 bp, Artificial
  Synthetic oligonucleotide
aaacatcggggtctcgataaactcaatcgcgtgactcacggctgtctcctgtttt

SEQ ID NO: 501266 - DNA, 55 bp, Artificial
  Synthetic oligonucleotide
aaaatatgcggcgtcatctactgattgttcgacgcgcggtagagttagtttgcca

SEQ ID NO: 501267 - DNA, 55 bp, Artificial
  Synthetic oligonucleotide
tttctggctaatcggctgtagggcgataattcgtgctttctggtcatttagagtc

SEQ ID NO: 501268 - DNA, 55 bp, Artificial
  Synthetic oligonucleotide
tttctttgtcgttcgccgcgttcaggtcgagaaagtcagccagccagtccagcgt

SEQ ID NO: 501269 - DNA, 55 bp, Artificial
  Synthetic oligonucleotide
caatgcggtctgtgtaaggaatatagctatgccaagactggcgttcgcccatttt

SEQ ID NO: 501270 - DNA, 55 bp, Artificial
  Synthetic oligonucleotide
caaggcaggagtcaacatactctccactctctcattgtcaaaattacacgcagac

SEQ ID NO: 501271 - DNA, 55 bp, Artificial
  Synthetic oligonucleotide
caacgcatgttcgagactacctcacaggcactggagcgcaacggcagggtatgtc

SEQ ID NO: 501272 - DNA, 55 bp, Artificial
  Synthetic oligonucleotide
caaatttaccacgactctcctgatggcaccctgaactatttcctagggctcccag

SEQ ID NO: 501273 - DNA, 55 bp, Artificial
  Synthetic oligonucleotide
ttatccaacgtgaccttcagcgactcggacgtgattagtgtcgggctggtatttg

SEQ ID NO: 501274 - DNA, 55 bp, Artificial
  Synthetic oligonucleotide
attgttaatcaggtacatctttaccaaccacgcggtacgttttaaccaaccacgc

SEQ ID NO: 501275 - DNA, 55 bp, Artificial
  Synthetic oligonucleotide
attccgtgccactccattgcactaatatgagatatgtatgagcaagggctcatac

SEQ ID NO: 501276 - DNA, 55 bp, Artificial
  Synthetic oligonucleotide
attcaaagcgagagaactcatacttgacagccttaagttctcctgccgccatatg

SEQ ID NO: 501277 - DNA, 55 bp, Artificial
  Synthetic oligonucleotide
atgtcaaaccaattaaccgttatagacgggtatgcggaaagagaggcgactaacg

SEQ ID NO: 501278 - DNA, 55 bp, Artificial
  Synthetic oligonucleotide
atgcggaaagagaggcgactaacgataacaatgccgaaaatctcaacatttctta

SEQ ID NO: 501279 - DNA, 55 bp, Artificial
  Synthetic oligonucleotide
atgaataatcgcctgatgaattcctttcttaactacgccacgtgtagcacgggat

SEQ ID NO: 501280 - DNA, 55 bp, Artificial
  Synthetic oligonucleotide
atctatcacaacttgcgtgaggagaggataatcaccgggtggaatataaataacc

SEQ ID NO: 501281 - DNA, 55 bp, Artificial
  Synthetic oligonucleotide
atcccagcttcacgcgagacttttcgcaaacttagactaacaaaactacgctcag

SEQ ID NO: 501282 - DNA, 55 bp, Artificial
  Synthetic oligonucleotide
atccatatggtcttggagaaactgtaacctcaggtattatttctgctctaggacg

SEQ ID NO: 501283 - DNA, 55 bp, Artificial
  Synthetic oligonucleotide
ttatggggtcatatactgcgctttctgaaggaatgaaggtgaaatgcacaggacg

SEQ ID NO: 501284 - DNA, 55 bp, Artificial
  Synthetic oligonucleotide
atcaaattcggtagacaagccgtagttggaggtcgcagacgcacctactgcccag

SEQ ID NO: 501285 - DNA, 55 bp, Artificial
  Synthetic oligonucleotide
atatcgttcaattctgccccaaaacgtatgcggggcgctcgaatatagagagccg

SEQ ID NO: 501286 - DNA, 55 bp, Artificial
  Synthetic oligonucleotide
atactcagcattggataagccaggctgacgggcaaccgctgcagcactaacagcc

SEQ ID NO: 501287 - DNA, 55 bp, Artificial
  Synthetic oligonucleotide
ataccgcggcgcacggcagtatccgtttctccctgtcacggtttacccgtgagcg

SEQ ID NO: 501288 - DNA, 55 bp, Artificial
  Synthetic oligonucleotide
ttcccacaaccgcagataggggctgtcacgcataatccactcgctgtcactggcg

SEQ ID NO: 501289 - DNA, 55 bp, Artificial
  Synthetic oligonucleotide
agttcgagtactgcgttattcaatgtgccctgcgcttatggcgggctgttgtctg

SEQ ID NO: 501290 - DNA, 55 bp, Artificial
  Synthetic oligonucleotide
agtgataacacaaggcaatcagcttattgaaggtagttacgatattaacctggcg

SEQ ID NO: 501291 - DNA, 55 bp, Artificial
  Synthetic oligonucleotide
agtcacggtcttcaattatgacgggtgactgcatcaggttgtcatatccttcccc

SEQ ID NO: 501292 - DNA, 55 bp, Artificial
  Synthetic oligonucleotide
aggtcttgccgatgtatgactgataatcatagaaacgttgctggattgctgcctg

SEQ ID NO: 501293 - DNA, 55 bp, Artificial
  Synthetic oligonucleotide
aggtatagtgcacgtcattggtcctgaacaaggcatgtctttaccaggcatgaca

SEQ ID NO: 501294 - DNA, 55 bp, Artificial
  Synthetic oligonucleotide
agcgatcatgatcttaatcacaccctgcagcatgcctgtcgagtgtggatgcttt

SEQ ID NO: 501295 - DNA, 55 bp, Artificial
  Synthetic oligonucleotide
agcctcgccgtttataattctcttagaagagaaggccgggataggatgaatggaa

SEQ ID NO: 501296 - DNA, 55 bp, Artificial
  Synthetic oligonucleotide
agcagctccgtgttcgggatcaggaagttcagctccagccgccccttgtcctggt

SEQ ID NO: 501297 - DNA, 55 bp, Artificial
  Synthetic oligonucleotide
agcacaatgccaaaatttatgcggctaagatcacggcgttagatcgctcactgcg

SEQ ID NO: 501298 - DNA, 55 bp, Artificial
  Synthetic oligonucleotide
ctatagtagttatactgccgatcaagcctcctctagaacccgaaatcaaactacc

SEQ ID NO: 501299 - DNA, 55 bp, Artificial
  Synthetic oligonucleotide
ctagtttctggtggataagcttcgcaacttttcttgtttgtccggtatcagaccc

SEQ ID NO: 501300 - DNA, 55 bp, Artificial
  Synthetic oligonucleotide
ctactctccctatttctagcaaatttcgcctctagcgcatcacaacaaggcggtt

SEQ ID NO: 501301 - DNA, 55 bp, Artificial
  Synthetic oligonucleotide
ctacgtaaaacgatcttgcttatattggtaaaccgggatcgcgatacgttacaga

SEQ ID NO: 501302 - DNA, 55 bp, Artificial
  Synthetic oligonucleotide
ctacggcgtactttgcgttatgatccttgctaccctaaagggtatcgggacccgc

SEQ ID NO: 501303 - DNA, 55 bp, Artificial
  Synthetic oligonucleotide
ctacgccaagaattgcagcctcctctctggcactagcgatactaatatctgaagt

SEQ ID NO: 501304 - DNA, 55 bp, Artificial
  Synthetic oligonucleotide
ctaatcaggtacagttttaccaaaagcgcggtacagattttacgttatcgcggta

SEQ ID NO: 501305 - DNA, 55 bp, Artificial
  Synthetic oligonucleotide
ctaataggaatcgtaagagacccagaacatacagtaaggaaccttaaggaggatg

SEQ ID NO: 501306 - DNA, 55 bp, Artificial
  Synthetic oligonucleotide
tgggagcagaaaagcattgcgttggcgatgatgatgagtatggcgcgcaagtttg

SEQ ID NO: 501307 - DNA, 55 bp, Artificial
  Synthetic oligonucleotide
cgttgcatccaacgaaagaaccgcgtataccatatattagtcaaattatgaacgc

SEQ ID NO: 501308 - DNA, 55 bp, Artificial
  Synthetic oligonucleotide
cgttgcactctctttgtcaccatctcaaactcccaatacggtcaatccgtgttac

SEQ ID NO: 501309 - DNA, 55 bp, Artificial
  Synthetic oligonucleotide
cgtgtcggtgacgggattgagcacaccgcctcaaaaggctggctggttgtcggtc

SEQ ID NO: 501310 - DNA, 55 bp, Artificial
  Synthetic oligonucleotide
cgtgacgacatatatatttaagccattatacaccccgctagtgctccgtgactgg

SEQ ID NO: 501311 - DNA, 55 bp, Artificial
  Synthetic oligonucleotide
cgtgacaatgtcacctttgactgccagcacagagttttcaggtacgctgttgcgg

SEQ ID NO: 501312 - DNA, 55 bp, Artificial
  Synthetic oligonucleotide
cgtctgcacacatcgaagcaaccaaagactcgaccgcagtaatggctgcgttccc

SEQ ID NO: 501313 - DNA, 55 bp, Artificial
  Synthetic oligonucleotide
cgtcggtaacccgcataacctcggcggtatcatgcgtacctgtgcgcactttggt

SEQ ID NO: 501314 - DNA, 55 bp, Artificial
  Synthetic oligonucleotide
cgtcatgccatggaggccagaaagatgagtgtgattgagtaaaagttgtgctgat

SEQ ID NO: 501315 - DNA, 55 bp, Artificial
  Synthetic oligonucleotide
cgtcatgacgatgacgtaattacgattgctaaatttcagtcgccaaaggaagtat

SEQ ID NO: 501316 - DNA, 55 bp, Artificial
  Synthetic oligonucleotide
cgtcaatttgcggggatatgtctcgatgccattccctccgatcccacgatcctgc

SEQ ID NO: 501317 - DNA, 55 bp, Artificial
  Synthetic oligonucleotide
cgtcaaatgaataacactctcttcagcctacctcaagagcccgagtagacgttaa

SEQ ID NO: 501318 - DNA, 55 bp, Artificial
  Synthetic oligonucleotide
cgtatggcggttaaaggaagtatttctacagtaaggggccagctatcagttttgc

SEQ ID NO: 501319 - DNA, 55 bp, Artificial
  Synthetic oligonucleotide
cgtatgcctatcattttcgtcttaattctccaggcagttggctggccattcactg

SEQ ID NO: 501320 - DNA, 55 bp, Artificial
  Synthetic oligonucleotide
cgtataggccgttagtaacagaccgttacgactgaaattgctcagttcctcgagg

SEQ ID NO: 501321 - DNA, 55 bp, Artificial
  Synthetic oligonucleotide
cggtggtgctataggttattttaccgattctggagatttagatacctgtattact

SEQ ID NO: 501322 - DNA, 55 bp, Artificial
  Synthetic oligonucleotide
cggtgatgcttccaacttactgatttagtggatgacggtgcttttgaggtgctcc

SEQ ID NO: 501323 - DNA, 55 bp, Artificial
  Synthetic oligonucleotide
cggtaattcgtacacgcgggcgtcatgatccgtgtattgggataagagctatacc

SEQ ID NO: 501324 - DNA, 55 bp, Artificial
  Synthetic oligonucleotide
cggggatcggcggtctcaatcatcatggtcagaatgaaattctggggcggcagtg

SEQ ID NO: 501325 - DNA, 55 bp, Artificial
  Synthetic oligonucleotide
cgggctcgtcgagctagtaactcttcgaaaccggacggtaactggactttagcgg

SEQ ID NO: 501326 - DNA, 55 bp, Artificial
  Synthetic oligonucleotide
gaccaggctatgcgttgtttcttggagcgaaatggaggggatatgacagcccgtt

SEQ ID NO: 501327 - DNA, 55 bp, Artificial
  Synthetic oligonucleotide
gacaggcgttatttgcccgctaaaacacgagcgcttattgaatacatacatcaga

SEQ ID NO: 501328 - DNA, 55 bp, Artificial
  Synthetic oligonucleotide
gaattgagcgtaattattttatcagccggtcaaggaaagcgcatgttcagtgcga

SEQ ID NO: 501329 - DNA, 55 bp, Artificial
  Synthetic oligonucleotide
gaacggccgataccatttggtaatactattgagcttcgaatattctgatcggatt

SEQ ID NO: 501330 - DNA, 55 bp, Artificial
  Synthetic oligonucleotide
gaaccgatacggcgggttatctacacaactaatgccatcgaatcggtgcatcgac

SEQ ID NO: 501331 - DNA, 55 bp, Artificial
  Synthetic oligonucleotide
gaaacacagtccactcctgtacagaataacaaacgatatgaataggtctggttta

SEQ ID NO: 501332 - DNA, 55 bp, Artificial
  Synthetic oligonucleotide
cttgtcgctacccatcaaccgttccagaggtggatccgctctaccggttttcggc

SEQ ID NO: 501333 - DNA, 55 bp, Artificial
  Synthetic oligonucleotide
cttggcgggtgccagcggggctttggttggcggattacaaaatatgggatcaggg

SEQ ID NO: 501334 - DNA, 55 bp, Artificial
  Synthetic oligonucleotide
cttgaattatcgatgtagtgccgaataccgccctggttaacactgaatacgcctg

SEQ ID NO: 501335 - DNA, 55 bp, Artificial
  Synthetic oligonucleotide
cttaggacagacaccatggctaccaatgcgaaacccgtttatcagcgtatcctgc

SEQ ID NO: 501336 - DNA, 55 bp, Artificial
  Synthetic oligonucleotide
ctgtgaccacggtgaatgcgagtgttctattcataccccgggctagaggcgcgtt

SEQ ID NO: 501337 - DNA, 55 bp, Artificial
  Synthetic oligonucleotide
ctgtcttgagctgacacaccagtagaaataccttgtgaagcctctattgttactg

SEQ ID NO: 501338 - DNA, 55 bp, Artificial
  Synthetic oligonucleotide
ctggtgccctttactgcccgacaggtaacctcaaagttgatctggcgtgctgagg

SEQ ID NO: 501339 - DNA, 55 bp, Artificial
  Synthetic oligonucleotide
ctggagttacgggcagatatgtctactatttgattccatcatgcgagactacccg

SEQ ID NO: 501340 - DNA, 55 bp, Artificial
  Synthetic oligonucleotide
ctggacgtcattacaggtacaccatggtcagtgtggcttctacaggcagggcatc

SEQ ID NO: 501341 - DNA, 55 bp, Artificial
  Synthetic oligonucleotide
ctgcctcctgggtttatcccgtgatgaaagcatcacgacggtacttagcgggatt

SEQ ID NO: 501342 - DNA, 55 bp, Artificial
  Synthetic oligonucleotide
ctgccctgttttatgctgtcattgcgtggccgactaaaacgcagcagaaagccac

SEQ ID NO: 501343 - DNA, 55 bp, Artificial
  Synthetic oligonucleotide
ctgcccgggtggttgttcaccctgttgccggttgggtgcctttatctagaccacg

SEQ ID NO: 501344 - DNA, 55 bp, Artificial
  Synthetic oligonucleotide
ctgagataagcaaactcacctgtactgcccagtggcgtcagaccgtgcacgccac

SEQ ID NO: 501345 - DNA, 55 bp, Artificial
  Synthetic oligonucleotide
ctctgtcatgtactatctgtaattcgattgattgccgccttgccgtaactcgaaa

SEQ ID NO: 501346 - DNA, 55 bp, Artificial
  Synthetic oligonucleotide
tggacgcaagcctgatttaagaaacaaatcagtaccttcacgtcgactcaatttt

SEQ ID NO: 501347 - DNA, 55 bp, Artificial
  Synthetic oligonucleotide
ctctcaacccgcatgaagtctggaaaggctacgataatgccaaaccgtatgccgc

SEQ ID NO: 501348 - DNA, 55 bp, Artificial
  Synthetic oligonucleotide
ctcgctcataaatcattcctttcagccggatatttcggccgccgtccggatcggc

SEQ ID NO: 501349 - DNA, 55 bp, Artificial
  Synthetic oligonucleotide
ctcctgacgtttatgatagtgtacgcagtaagtcggaaaatactccagacgctgt

SEQ ID NO: 501350 - DNA, 55 bp, Artificial
  Synthetic oligonucleotide
ctcagcatggaacatcagtcagccgtattacttcgccgcttaaacccgtattgcg

SEQ ID NO: 501351 - DNA, 55 bp, Artificial
  Synthetic oligonucleotide
ctcaatactctgggaagtgtattatccaatacaaagcacctgaacggtgttggta

SEQ ID NO: 501352 - DNA, 55 bp, Artificial
  Synthetic oligonucleotide
ctcaacagctcaaccttaacacccttaaacccgataaggcgcaggtcttagcggc

SEQ ID NO: 501353 - DNA, 55 bp, Artificial
  Synthetic oligonucleotide
ctcaaagtcttcatgcgaaggatccaggccccactcgattacgcgtgcctgaatg

SEQ ID NO: 501354 - DNA, 55 bp, Artificial
  Synthetic oligonucleotide
cgaggaggcgtaatttaatctggccgttcattttcccctgccactcctgagcctg

SEQ ID NO: 501355 - DNA, 55 bp, Artificial
  Synthetic oligonucleotide
cgacctgatgttgaggagtcactttatggtgcctgtctaaaataattctaacggg

SEQ ID NO: 501356 - DNA, 55 bp, Artificial
  Synthetic oligonucleotide
cgaatccgtcagagcagattcgtcctgtaagatgattaactacggtttatgtctg

SEQ ID NO: 501357 - DNA, 55 bp, Artificial
  Synthetic oligonucleotide
cgaaattgtcggatacctgcaattacctaccgtgccttacggcttggtcaatgcc

SEQ ID NO: 501358 - DNA, 55 bp, Artificial
  Synthetic oligonucleotide
ccttgagtagctgtttgccaaccactaatttataccaccggccttcggggctaag

SEQ ID NO: 501359 - DNA, 55 bp, Artificial
  Synthetic oligonucleotide
ccttccatggctcacccaacgatggtcgtccacctcctttacttttcatccctct

SEQ ID NO: 501360 - DNA, 55 bp, Artificial
  Synthetic oligonucleotide
cctgtgaaaccgtccgtcagttagtccggcgcataacgattcaaccgctcagaac

SEQ ID NO: 501361 - DNA, 55 bp, Artificial
  Synthetic oligonucleotide
cctgtagccctgtccgctagtcccaatattctaattgtagtaccgagtcacatgt

SEQ ID NO: 501362 - DNA, 55 bp, Artificial
  Synthetic oligonucleotide
cctggtgggcgtttgcaagccttaattcgcgctttaactcgcacagctacttcgt

SEQ ID NO: 501363 - DNA, 55 bp, Artificial
  Synthetic oligonucleotide
cctggaagaatttcgggttcgcctggatggttgccagtaccttcgccgccagtcc

SEQ ID NO: 501364 - DNA, 55 bp, Artificial
  Synthetic oligonucleotide
cctgattcagggtgcgcatttggcatctggaatactgtgtagggtcatggcgcaa

SEQ ID NO: 501365 - DNA, 55 bp, Artificial
  Synthetic oligonucleotide
cctatgttaggcgtaggaggcatgcaactgtataaagcagaaatgccaggaccta

SEQ ID NO: 501366 - DNA, 55 bp, Artificial
  Synthetic oligonucleotide
cctagcaattcggatgtacgtgcagccataaccattcctactgatattgcctccc

SEQ ID NO: 501367 - DNA, 55 bp, Artificial
  Synthetic oligonucleotide
ccgttattctgccggattcgtataacacccggtaaccaccgtaagcatcggcctg

SEQ ID NO: 501368 - DNA, 55 bp, Artificial
  Synthetic oligonucleotide
ccgttacccacatcgtaagcattttgctgcgtttgtctgccaatgctgcctcctg

SEQ ID NO: 501369 - DNA, 55 bp, Artificial
  Synthetic oligonucleotide
ccgtcagcactgctcaggccagcaaattgccatagacgatccggttctgcagcgg

SEQ ID NO: 501370 - DNA, 55 bp, Artificial
  Synthetic oligonucleotide
ccgtacgtcccttacggtcaggggtttccgctcaacaaaacgaaaatacgcgtta

SEQ ID NO: 501371 - DNA, 55 bp, Artificial
  Synthetic oligonucleotide
ccgggtcagaaaacacggtactggcattaacgtgccagtcatgactcgccctcta

SEQ ID NO: 501372 - DNA, 55 bp, Artificial
  Synthetic oligonucleotide
ccggccagtatgcccgtcaggccaatcaccacatacatcacgttacctatccttt

SEQ ID NO: 501373 - DNA, 55 bp, Artificial
  Synthetic oligonucleotide
ccggattagcatacccgtgctactgctcccaagaacgcctaaataatttacgatc

SEQ ID NO: 501374 - DNA, 55 bp, Artificial
  Synthetic oligonucleotide
ccggatgcctcccgcagaattttacgcgaagactccaggcactctattgcctgca

SEQ ID NO: 501375 - DNA, 55 bp, Artificial
  Synthetic oligonucleotide
ccgcggctaagccaacgcaagttgttgttcttcatcggccaaattaaagcgcaat

SEQ ID NO: 501376 - DNA, 55 bp, Artificial
  Synthetic oligonucleotide
ccgccaatctgcggcgtaagcgtgacctggttgccatttacgtaagcatcatcgg

SEQ ID NO: 501377 - DNA, 55 bp, Artificial
  Synthetic oligonucleotide
ccgcaccagataggaacgagaaggcatagagccgccaaactgctcagaattaacc

SEQ ID NO: 501378 - DNA, 55 bp, Artificial
  Synthetic oligonucleotide
ccgagacgatcatcaacgtatttctcatggcgctggtgatgagagctaaggggaa

SEQ ID NO: 501379 - DNA, 55 bp, Artificial
  Synthetic oligonucleotide
ccgaagtagatattcaagtcgctagtttgtttatggatcgcttgcagctgcatgg

SEQ ID NO: 501380 - DNA, 55 bp, Artificial
  Synthetic oligonucleotide
ccgaaaatggaacggagttaaatgagacgctaccaaaactcagtccactgaatcc

SEQ ID NO: 501381 - DNA, 55 bp, Artificial
  Synthetic oligonucleotide
cgggcagcggacatacgctgcaccttatccccgcctcagtaccgctgaaggctaa

SEQ ID NO: 501382 - DNA, 55 bp, Artificial
  Synthetic oligonucleotide
cggctcccgtttccagatcttgtttggcgatgtgttggctaccgttgttggagct

SEQ ID NO: 501383 - DNA, 55 bp, Artificial
  Synthetic oligonucleotide
cggcgtgcatttctgcgatggccgtttgccaaaaccgggagaagcctgggaccag

SEQ ID NO: 501384 - DNA, 55 bp, Artificial
  Synthetic oligonucleotide
cggcgctctgtcaagatacggcctgcgttgcgtcaagaacgggtcaagagcgcga

SEQ ID NO: 501385 - DNA, 55 bp, Artificial
  Synthetic oligonucleotide
cggccttatctgtaggttgaaagcaagtagggtcattatccataactgtgtggac

SEQ ID NO: 501386 - DNA, 55 bp, Artificial
  Synthetic oligonucleotide
cggccagacggaggtcactgtcttcacagcctacgaatctgaaaggtaagagacc

SEQ ID NO: 501387 - DNA, 55 bp, Artificial
  Synthetic oligonucleotide
cggcaagcaatggtcggatcgttggagcctccagccaaggatatgtcaacagatc

SEQ ID NO: 501388 - DNA, 55 bp, Artificial
  Synthetic oligonucleotide
cggatttcgttcggaatttatgagtataacttctggaacaggtctgtgttattca

SEQ ID NO: 501389 - DNA, 55 bp, Artificial
  Synthetic oligonucleotide
cggactggaatcacgcggaaaagattgtaatttaagcaccgcattccaacgctct

SEQ ID NO: 501390 - DNA, 55 bp, Artificial
  Synthetic oligonucleotide
cggaacgcctttgaaagacgcttacgtggatagccgcatcgatcggcaaactcgg

SEQ ID NO: 501391 - DNA, 55 bp, Artificial
  Synthetic oligonucleotide
cgctttaccaaagatttgcgggtaacttgctgacatcaattcgctctagcgcggg

SEQ ID NO: 501392 - DNA, 55 bp, Artificial
  Synthetic oligonucleotide
cgcttcctcggtttgacagactccgctagtcaaacgctgcggcgagcgttgcggt

SEQ ID NO: 501393 - DNA, 55 bp, Artificial
  Synthetic oligonucleotide
cgcttatcaggaaggtctgttttctgatagcgtgaccaaagcgctcgttcgccca

SEQ ID NO: 501394 - DNA, 55 bp, Artificial
  Synthetic oligonucleotide
cgctcttcttcggctatatagctaagtgctgcttctaattgaaaaccgcaatcgc

SEQ ID NO: 501395 - DNA, 55 bp, Artificial
  Synthetic oligonucleotide
cgcggtgtctggcagactgtacagagttattctgaccggagattcacatgacgcg

SEQ ID NO: 501396 - DNA, 55 bp, Artificial
  Synthetic oligonucleotide
cgcgcagtttgttccctccacgctggcacctttccttgcaacccagtcggctgac

SEQ ID NO: 501397 - DNA, 55 bp, Artificial
  Synthetic oligonucleotide
cgcgcacctgctttatgcgctggaaacctctatacgcacagcacctgacggaaaa

SEQ ID NO: 501398 - DNA, 55 bp, Artificial
  Synthetic oligonucleotide
cgcgacataggtagacatactcttaacctagtgcgtcaagcagcacgtgagcgcc

SEQ ID NO: 501399 - DNA, 55 bp, Artificial
  Synthetic oligonucleotide
cgaggatcgcttaggtgatgcgttttacattgcatcacaaataagaaggggctta

SEQ ID NO: 501400 - DNA, 55 bp, Artificial
  Synthetic oligonucleotide
cgagtagaggaattcgaacatatgccgaagagcatccgtaatctgatcaatccgc

SEQ ID NO: 501401 - DNA, 55 bp, Artificial
  Synthetic oligonucleotide
cgcctagcggcttgtccaacgcctcacgccaccggattaaaatccgctcccgttc

SEQ ID NO: 501402 - DNA, 55 bp, Artificial
  Synthetic oligonucleotide
cgccgtacatttaaaatacgatcacagctgattgccggtatgcgccaatttatgg

SEQ ID NO: 501403 - DNA, 55 bp, Artificial
  Synthetic oligonucleotide
cgccacccgctgaaataatacggtaagacgttgcgccatgttcagtcgcttactc

SEQ ID NO: 501404 - DNA, 55 bp, Artificial
  Synthetic oligonucleotide
cgatagtatctatagcacgcgtaagcgccggaagttcagcctcaaagtacccgtg

SEQ ID NO: 501405 - DNA, 55 bp, Artificial
  Synthetic oligonucleotide
cgatctgacgggttatcgtgagggtgcaaaggttattcaggtcaaaccaacacgc

SEQ ID NO: 501406 - DNA, 55 bp, Artificial
  Synthetic oligonucleotide
cgattagctacaattcctgatagttgtccgcaagccgcattaattgaatcgcctc

SEQ ID NO: 501407 - DNA, 55 bp, Artificial
  Synthetic oligonucleotide
tgggcggtatatggcgaattttaaccctggtccaagaacagccattgcggctgtc

SEQ ID NO: 501408 - DNA, 55 bp, Artificial
  Synthetic oligonucleotide
cgcaagttgagtccggaaatatctatactggtattgaaggagccgagctcagtaa

SEQ ID NO: 501409 - DNA, 54 bp, Artificial
  Synthetic oligonucleotide
ttttcgcatttccccggaacgcagacgcaaggtaacatacgcgccatcacgggc

SEQ ID NO: 501410 - DNA, 54 bp, Artificial
  Synthetic oligonucleotide
tgtttcaagctatcgatatgtgattgctgagcggtcaccagttctctgagatgt

SEQ ID NO: 501411 - DNA, 54 bp, Artificial
  Synthetic oligonucleotide
tgcgcttatggcgggctgttgtctggcacgtttcatgtgctaatatcctttcaa

SEQ ID NO: 501412 - DNA, 54 bp, Artificial
  Synthetic oligonucleotide
tcacgtcataggtacacgatgcaccgtgcaggcatacgccaactcccggcaaaa

SEQ ID NO: 501413 - DNA, 54 bp, Artificial
  Synthetic oligonucleotide
tcgctaatactcgccgccgttgagtaaccttcagcatagagaaccggctcaccg

SEQ ID NO: 501414 - DNA, 54 bp, Artificial
  Synthetic oligonucleotide
tgtgacgtcgcgataatcacggtcacccactaccgtcgaaacagcggcaaatgc

SEQ ID NO: 501415 - DNA, 54 bp, Artificial
  Synthetic oligonucleotide
tgctgaatgcccgtggtcgtttgagcagtttatggatccgaaattctacccgga

SEQ ID NO: 501416 - DNA, 54 bp, Artificial
  Synthetic oligonucleotide
ttgatagcgccctacgtgtttccgctataaaaaattctgtcaaaataacggctc

SEQ ID NO: 501417 - DNA, 54 bp, Artificial
  Synthetic oligonucleotide
tcaaagggctctgagtgcgtctcaggcggtgcgggcaacgggtgttatggtaaa

SEQ ID NO: 501418 - DNA, 54 bp, Artificial
  Synthetic oligonucleotide
ggggcgatattgaggttccagcactagacggaagagtaaaactgagaattccgt

SEQ ID NO: 501419 - DNA, 54 bp, Artificial
  Synthetic oligonucleotide
ggggatggataagactctagagaaaagcatcgttcatgcgctacagattcttcc

SEQ ID NO: 501420 - DNA, 54 bp, Artificial
  Synthetic oligonucleotide
gcttcatcagggctcattttcagcgcaaccgattcttctaccaaacgactacgc

SEQ ID NO: 501421 - DNA, 54 bp, Artificial
  Synthetic oligonucleotide
gcgtgataaccctatgtacatgattaaggtacgcggcctattccctaaatcaca

SEQ ID NO: 501422 - DNA, 54 bp, Artificial
  Synthetic oligonucleotide
gcccagagacgtcaccatcagcaaacagaatacctgcatgttgatgcctgggat

SEQ ID NO: 501423 - DNA, 54 bp, Artificial
  Synthetic oligonucleotide
gcattataggtttgtttatagtcccaccggcaatcattttcccgtgaacaactc

SEQ ID NO: 501424 - DNA, 54 bp, Artificial
  Synthetic oligonucleotide
gcagcaatcagattaaatcttaatccaaaacgttttcgcctgtttcgataacgg

SEQ ID NO: 501425 - DNA, 54 bp, Artificial
  Synthetic oligonucleotide
gatggctatgctgtcgctatcccacattgcgatagccagcacgccgtcagcccg

SEQ ID NO: 501426 - DNA, 54 bp, Artificial
  Synthetic oligonucleotide
gatagagaacggcaaagtgtgcatcaagcatgagctgttcgagtggttgttctg

SEQ ID NO: 501427 - DNA, 54 bp, Artificial
  Synthetic oligonucleotide
ctgaattctgacacatgtcactgagtaccgcgttgattgcgttagactgatctg

SEQ ID NO: 501428 - DNA, 54 bp, Artificial
  Synthetic oligonucleotide
cctcaatatttacccgtagctcgatatcattcgttgatttgtagcaatgcaccc

SEQ ID NO: 501429 - DNA, 54 bp, Artificial
  Synthetic oligonucleotide
ccggcttaagaccatagccagtatgtcgatagatgctcggcattgcgccttcac

SEQ ID NO: 501430 - DNA, 54 bp, Artificial
  Synthetic oligonucleotide
cagctcgaacatgacgtaagtagacaggtaataccagaatccgaagccttcaac

SEQ ID NO: 501431 - DNA, 54 bp, Artificial
  Synthetic oligonucleotide
agaagcaggaacaaattcgtcacttgacacaactttgccatcaggattacagtt

SEQ ID NO: 501432 - DNA, 54 bp, Artificial
  Synthetic oligonucleotide
accctgatgacttttacgtctgatcaacccaacgtaggcccccggtaaggacgc

SEQ ID NO: 501433 - DNA, 54 bp, Artificial
  Synthetic oligonucleotide
aacataatcggcgtctccgctttcagccagcagtgcgcgtgtttcagcgcgtcc

SEQ ID NO: 501434 - DNA, 54 bp, Artificial
  Synthetic oligonucleotide
aaaaaagtgttccgctttgcgcaacactttcagcagaaaagatatttaagggcg

SEQ ID NO: 501435 - DNA, 54 bp, Artificial
  Synthetic oligonucleotide
tacatcacacaaaataagtccttcctactagcgcacacgtcaggagtgctgact

SEQ ID NO: 501436 - DNA, 54 bp, Artificial
  Synthetic oligonucleotide
taaatactcaggtgaaatattccatggaaaagtgtcttcgatcagtcacgacgg

SEQ ID NO: 501437 - DNA, 54 bp, Artificial
  Synthetic oligonucleotide
gttgaaagatcagtcctcattacccagcaacattgggatacgctgataggtgag

SEQ ID NO: 501438 - DNA, 54 bp, Artificial
  Synthetic oligonucleotide
gtctgtttatcacgccagttatctgacgttgcgagttgcagatttgccactgcg

SEQ ID NO: 501439 - DNA, 53 bp, Artificial
  Synthetic oligonucleotide
taaggcaggcgaatctgacggcaatgaatccccttttcctcgtgtagataaaa

SEQ ID NO: 501440 - DNA, 53 bp, Artificial
  Synthetic oligonucleotide
aaccaggccacatcgtggagacagtatgttcatggtgatctcgtgactgaaaa

SEQ ID NO: 501441 - DNA, 53 bp, Artificial
  Synthetic oligonucleotide
tatgagaatacgcggcctttaacagcggagagacaccggtaaaccgcagggca

SEQ ID NO: 501442 - DNA, 53 bp, Artificial
  Synthetic oligonucleotide
catcagaaatagatgttgctagaagtaaattaaattacactttgctacctgta

SEQ ID NO: 501443 - DNA, 53 bp, Artificial
  Synthetic oligonucleotide
cattatggagtacgtgaatttggaatgaccgctattgcaaatggcatatctca

SEQ ID NO: 501444 - DNA, 53 bp, Artificial
  Synthetic oligonucleotide
ccgaaaaataacggcccattcacccaggtttatcagaagggctgggaaaggat

SEQ ID NO: 501445 - DNA, 53 bp, Artificial
  Synthetic oligonucleotide
tcaatataagacttggccactctatcgggcactacgggcttataagagctgtc

SEQ ID NO: 501446 - DNA, 53 bp, Artificial
  Synthetic oligonucleotide
tgtccatgggtgtgcgataacatcggagtagagcgatagcgtttagctagtac

SEQ ID NO: 501447 - DNA, 53 bp, Artificial
  Synthetic oligonucleotide
cgcaataaaatgttatgttaaatgtctgctgaatggtttttaggttttttcct

SEQ ID NO: 501448 - DNA, 53 bp, Artificial
  Synthetic oligonucleotide
gttctctgagcttattgccgatcttccagttcaccagtttcctgagaacgctt

SEQ ID NO: 501449 - DNA, 53 bp, Artificial
  Synthetic oligonucleotide
tccgcttgcatcacgcaaagctttaatacgaccatattcgaacccacataata

SEQ ID NO: 501450 - DNA, 53 bp, Artificial
  Synthetic oligonucleotide
ggggaatacccggtcgtgaaactggatctgaagtaccgtccgcagaagaagta

SEQ ID NO: 501451 - DNA, 53 bp, Artificial
  Synthetic oligonucleotide
gggcggtagccaggcgagtccttcttttgtcaagggaaaatattcaatccagg

SEQ ID NO: 501452 - DNA, 53 bp, Artificial
  Synthetic oligonucleotide
gctcgccaaactcttctccatgtacatcaaagatgtccccaacagaaaattgg

SEQ ID NO: 501453 - DNA, 53 bp, Artificial
  Synthetic oligonucleotide
gcgtgacgggcatgcgctgtttgcccgccaggcactgcgctattcccactgcc

SEQ ID NO: 501454 - DNA, 53 bp, Artificial
  Synthetic oligonucleotide
tgaaaccgttcgtccgcagcaaatttagccactatacccttcgcctttcaagt

SEQ ID NO: 501455 - DNA, 53 bp, Artificial
  Synthetic oligonucleotide
gtacggttaccgggatacttacaccttgacgccggagacagaacgccgccagg

SEQ ID NO: 501456 - DNA, 53 bp, Artificial
  Synthetic oligonucleotide
gcccacgcagttgataaacaaaatggtgaccgagcgtcgttaatgccaactga

SEQ ID NO: 501457 - DNA, 52 bp, Artificial; identical to SEQ ID NO: 185948
  Synthetic oligonucleotide

SEQ ID NO: 501458 - DNA, 52 bp, Artificial
  Synthetic oligonucleotide
aaaataataccgttcagcccgtggccttaatgcgtctgggactctttgttcc

SEQ ID NO: 501459 - DNA, 52 bp, Artificial
  Synthetic oligonucleotide
tatcagcctgtgagtctaagcggtcatcgagttgcagtgttccgtctcgatg

SEQ ID NO: 501460 - DNA, 52 bp, Artificial
  Synthetic oligonucleotide
aatgggcacaagcgcggaaaccgagctggagtcgcgcctcgaagtcctgttt

SEQ ID NO: 501461 - DNA, 52 bp, Artificial
  Synthetic oligonucleotide
ttgggatgcaggattagccagctgtgatgtcgatgtttcatgcggtgagggt

SEQ ID NO: 501462 - DNA, 52 bp, Artificial
  Synthetic oligonucleotide
tcactaacagaatacttggccactaaagcacgcagaatagtttgtctagctt

SEQ ID NO: 501463 - DNA, 52 bp, Artificial
  Synthetic oligonucleotide
atgagtcggagcatgtcatcatgcgcaatatgcacaaaatatgtaagggcag

SEQ ID NO: 501464 - DNA, 52 bp, Artificial
  Synthetic oligonucleotide
gttgttggctgcgggtgctcgtctcatggtacgtccactctcatcggccggt

SEQ ID NO: 501465 - DNA, 52 bp, Artificial
  Synthetic oligonucleotide
catggtcgtgattccactacgccagtagcagtgattagccgaggcacatgta

SEQ ID NO: 501466 - DNA, 52 bp, Artificial
  Synthetic oligonucleotide
gcagattcgacgagctgtaagtctactaatgcctgatttgcttgagctaaaa

SEQ ID NO: 501467 - DNA, 52 bp, Artificial
  Synthetic oligonucleotide
tcatactgaaggtggggttgttacaacagcggaaacactgatggtcatcgtt

SEQ ID NO: 501468 - DNA, 52 bp, Artificial
  Synthetic oligonucleotide
gcagacatccagatttacttctgcgatcctcaatcccctggcaacatggctc

SEQ ID NO: 501469 - DNA, 52 bp, Artificial
  Synthetic oligonucleotide
gaagcacgagtaatagatttattacctgccttagataaagtggacaaaccgc

SEQ ID NO: 501470 - DNA, 52 bp, Artificial
  Synthetic oligonucleotide
tgattccttttcgatatgccccacaacatacagaaggtaatggtgtagtatc

SEQ ID NO: 501471 - DNA, 51 bp, Artificial
  Synthetic oligonucleotide
tttgaaggtaaggcaatccagaaagattttcttacccaggtaactggcttt

SEQ ID NO: 501472 - DNA, 51 bp, Artificial
  Synthetic oligonucleotide
aaaagcattcctaaagccatagtcatagttgcagcggagagagataaacta

SEQ ID NO: 501473 - DNA, 51 bp, Artificial
  Synthetic oligonucleotide
gttatgttcaattcaatccattagttaacgagtcacttctaaattattcct

SEQ ID NO: 501474 - DNA, 51 bp, Artificial
  Synthetic oligonucleotide
aaaatccaccagcgtcaacgaatgtcgcctatagtcaacttctcgctatcg

SEQ ID NO: 501475 - DNA, 51 bp, Artificial
  Synthetic oligonucleotide
gggtgatgttattgctaatactttaattagtggtgaataaaatgacaagta

SEQ ID NO: 501476 - DNA, 51 bp, Artificial
  Synthetic oligonucleotide
gacgtggtggcgtacatgatttcgcaagaagtcacgaccacttacgactcc

SEQ ID NO: 501477 - DNA, 51 bp, Artificial
  Synthetic oligonucleotide
cttgcatgaagactcgtaacggttttcacatagcccactcaaatacgaata

SEQ ID NO: 501478 - DNA, 51 bp, Artificial
  Synthetic oligonucleotide
ggtattgctctgccgacttctcttatccttcaggggacagtgtgccgttag

SEQ ID NO: 501479 - DNA, 51 bp, Artificial
  Synthetic oligonucleotide
accggtggcaaccgatacattgaggctttccactaaccccgtacccagtat

SEQ ID NO: 501480 - DNA, 51 bp, Artificial
  Synthetic oligonucleotide
ctggagtcacctggcgttttcagtttgaggtcggagatgcaatctgatttt

SEQ ID NO: 501481 - DNA, 51 bp, Artificial
  Synthetic oligonucleotide
ataacattagcgctctcgaactgcatcgtgcaattgttgagttgagtaaaa

SEQ ID NO: 501482 - DNA, 51 bp, Artificial
  Synthetic oligonucleotide
atattcagataggtagctggatattagcaaggcatttccagatatgcggta

SEQ ID NO: 501483 - DNA, 51 bp, Artificial
  Synthetic oligonucleotide
atccaggctgatgaacattccgctgtcacggcgagagatagggccaccttt

SEQ ID NO: 501484 - DNA, 51 bp, Artificial
  Synthetic oligonucleotide
tgaacgttacggcctgaatatctcactggttgcgtttgataaggctcttta

SEQ ID NO: 501485 - DNA, 51 bp, Artificial
  Synthetic oligonucleotide
tgggatcatcttccaatagataagcgtcctgaaagagcttctttattacca

SEQ ID NO: 501486 - DNA, 51 bp, Artificial
  Synthetic oligonucleotide
gattacagtgaatgtcggctcgaaagcaaacctccgcgtcgtcatactgtt

SEQ ID NO: 501487 - DNA, 51 bp, Artificial
  Synthetic oligonucleotide
cctttcatagcggcctctcttactttaatacgacttaatccaaatttacgc

SEQ ID NO: 501488 - DNA, 51 bp, Artificial
  Synthetic oligonucleotide
ctaacgtgcctatttacccatcctgggatgtgctacgccagtatccacgct

SEQ ID NO: 501489 - DNA, 51 bp, Artificial
  Synthetic oligonucleotide
tggcctccgatatgatacaaaccagcgaggcataacggcgaacatccgtga

SEQ ID NO: 501490 - DNA, 51 bp, Artificial
  Synthetic oligonucleotide
tggcaccttccttattaccagcatttatgaagggcgtcagcgcgggtcgcg

SEQ ID NO: 501491 - DNA, 51 bp, Artificial
  Synthetic oligonucleotide
ccccgtaaccacctgaaatccccacatccggccatacacggccataaaatc

SEQ ID NO: 501492 - DNA, 51 bp, Artificial
  Synthetic oligonucleotide
ggtttcaaaacgacggggatagatgccgccagtttcactaatgacgtgact

SEQ ID NO: 501493 - DNA, 51 bp, Artificial
  Synthetic oligonucleotide
ctctcgcccgccctggggtacttgcgctccagtgcatgaggcagatacacg

SEQ ID NO: 501494 - DNA, 51 bp, Artificial
  Synthetic oligonucleotide
ttaatgtggttgctattcatcatgcgttgatgcagtcaggtattgttccac

SEQ ID NO: 501495 - DNA, 51 bp, Artificial
  Synthetic oligonucleotide
catctgaacatgtcgagtcgaaaacgggataggcactcagcagtttcacga

SEQ ID NO: 501496 - DNA, 51 bp, Artificial; identical to SEQ ID NO: 186784
  Synthetic oligonucleotide

SEQ ID NO: 501497 - DNA, 51 bp, Artificial
  Synthetic oligonucleotide
cagaactttcatcatgaaaagcatttgcgtaagatgtggtgaatttatcaa

SEQ ID NO: 501498 - DNA, 51 bp, Artificial
  Synthetic oligonucleotide
caaacgcgcctgccggcttatatgatcccggcggcgtatattgccatacct

SEQ ID NO: 501499 - DNA, 50 bp, Artificial
  Synthetic oligonucleotide
gtcgtttaggaactgctcttgctatggccgttgatgataagactaatatg

SEQ ID NO: 501500 - DNA, 50 bp, Artificial
  Synthetic oligonucleotide
gggcggtaagtccttttcggcaaaggacagcaccccggaggtgtattttt

SEQ ID NO: 501501 - DNA, 50 bp, Artificial
  Synthetic oligonucleotide
agccaactcgactgggtaattcttcgtcccggtacgctaaccaatgtggc

SEQ ID NO: 501502 - DNA, 50 bp, Artificial
  Synthetic oligonucleotide
gaggaagaaaaagggatggtactctggatttagatttagatagtagaata

SEQ ID NO: 501503 - DNA, 50 bp, Artificial
  Synthetic oligonucleotide
tggaataccatgcggataaggagagtctgtacagctacgccgtgggtgag

SEQ ID NO: 501504 - DNA, 50 bp, Artificial
  Synthetic oligonucleotide
tttcgccaatacgctgaatgcaggccagaaagttgtggtggaatttacat

SEQ ID NO: 501505 - DNA, 50 bp, Artificial
  Synthetic oligonucleotide
gatctatcgtatttagctcccggtcgaactttcgcgtacaatcgaggtac

SEQ ID NO: 501506 - DNA, 50 bp, Artificial
  Synthetic oligonucleotide
atcaggagcggtttagagagcttgtaagcaagtaccctaccctgtacagc

SEQ ID NO: 501507 - DNA, 50 bp, Artificial
  Synthetic oligonucleotide
gcctgagtggggtcaactcgaatagaatctcgcggagatgccagttgata

SEQ ID NO: 501508 - DNA, 50 bp, Artificial
  Synthetic oligonucleotide
gatcttagtatggattttctttggcgcggtctggccattagggatcatgt

SEQ ID NO: 501509 - DNA, 60 bp, Artificial
  Synthetic oligonucleotide
atgattacggttggaaaagggatattgtcggtaccaacaaaattaaagatattcacgaat

SEQ ID NO: 501510 - DNA, 60 bp, Artificial
  Synthetic oligonucleotide
attatccctaagcacgccgttaaatatatttatgcggtagctgaaagtagtggagaagct

SEQ ID NO: 501511 - DNA, 60 bp, Artificial
  Synthetic oligonucleotide
attcgcttaatttcttcctgtgtttcggaagagcataaggggaactggggggcacacaag

SEQ ID NO: 501512 - DNA, 60 bp, Artificial
  Synthetic oligonucleotide
caggaagttgagtcaattgaacgtttgatggcagattttggttgggagcgtgagttagtc

SEQ ID NO: 501513 - DNA, 60 bp, Artificial
  Synthetic oligonucleotide
cgttggagctagaaaagcaactgcatagattatctgctaatcgtctagccaacgatcaac

SEQ ID NO: 501514 - DNA, 60 bp, Artificial
  Synthetic oligonucleotide
ctatttctggttcttgactgctagctggatgcaaaaggatgccaattactcggtggccgt

SEQ ID NO: 501515 - DNA, 60 bp, Artificial
  Synthetic oligonucleotide
ctgccgaaatccaaagacaccgaacgacacaagaaaaaaaagggggaggagcgctcatgt

SEQ ID NO: 501516 - DNA, 60 bp, Artificial
  Synthetic oligonucleotide
gatttgtatcaacgagctacgagagcaacaaatgccaagagaaatgctgataacatgagt

SEQ ID NO: 501517 - DNA, 60 bp, Artificial
  Synthetic oligonucleotide
gcgggatgtcaccggtttggatggcattaacgaggatggcaccgatgaaatttgttcgtt

SEQ ID NO: 501518 - DNA, 60 bp, Artificial
  Synthetic oligonucleotide
gtccattttttggccaacttagcgttagcgaagtttgggggcgccctttttaaagggtgc

SEQ ID NO: 501519 - DNA, 60 bp, Artificial
  Synthetic oligonucleotide
gttataaacggggtgttcaaaagcagccgagctttaataaagcactggttcaacaaggga

SEQ ID NO: 501520 - DNA, 60 bp, Artificial
  Synthetic oligonucleotide
taattgtggcggaaatcgtcagctttttaaggctatgatggtgactgtttatcgtcggtt

SEQ ID NO: 501521 - DNA, 60 bp, Artificial
  Synthetic oligonucleotide
tacaaggagtttcaagagagaaaccctaatttggctgtttataatgctgttattcataat

SEQ ID NO: 501522 - DNA, 60 bp, Artificial
  Synthetic oligonucleotide
tacgccagcgtttagagcgattaaaaaacgcatttcaaaaatcgatcactcgtttgtcta

SEQ ID NO: 501523 - DNA, 60 bp, Artificial
  Synthetic oligonucleotide
tcatgagcgaaatttccgaattgcgtcaaacggccgtaaaagagcgtgagagcgtttctg

SEQ ID NO: 501524 - DNA, 60 bp, Artificial
  Synthetic oligonucleotide
tcctcattacttgcctgctgatacaagtgtagctgacaaaatgatgattactgctttaac

SEQ ID NO: 501525 - DNA, 60 bp, Artificial
  Synthetic oligonucleotide
tttacgtttactggtctgaaaaccaacaaaccaagcgtaaccatgcacgattgggtaaac

SEQ ID NO: 501526 - DNA, 60 bp, Artificial
  Synthetic oligonucleotide
acctattcccaagatgtttttgacacgttctattttgctatgaaaggtcgtcagctgatg

SEQ ID NO: 501527 - DNA, 60 bp, Artificial
  Synthetic oligonucleotide
aagggcaaagtccaagcaatgaaccaactggaaacgaagcgaaacgaaatcattaactct

SEQ ID NO: 501528 - DNA, 60 bp, Artificial
  Synthetic oligonucleotide
aaggaagaaaatcgttctttgcgtcagcggttaactcaactgaaaaacgcatttcaaaaa

SEQ ID NO: 501529 - DNA, 60 bp, Artificial
  Synthetic oligonucleotide
aacggaatcctagtttatccgtctacaatgctgttattcataatgacgaagtaagtccgc

SEQ ID NO: 501530 - DNA, 60 bp, Artificial
  Synthetic oligonucleotide
actgtctgaagaacaagtgctagagaagaaagcttttacgtttgaacagtcgacagataa

SEQ ID NO: 501531 - DNA, 60 bp, Artificial
  Synthetic oligonucleotide
aaaactttttacacccccttgaaaatacggtggtcaattgaccgaaatttatgcctttgg

SEQ ID NO: 501532 - DNA, 59 bp, Artificial
  Synthetic oligonucleotide
tgatgatatggcggaaatgcacgagaaattgtggagggcgctaaatgactaatcaaatt

SEQ ID NO: 501533 - DNA, 59 bp, Artificial
  Synthetic oligonucleotide
gtagtcagtattgaagacttcagagaattgttagacatacccgaatattatcaaatggg

SEQ ID NO: 501534 - DNA, 58 bp, Artificial
  Synthetic oligonucleotide
cccaaaaccgtaacgaaagtcttacaagattatggtaattatctgcagtatcaagatg

SEQ ID NO: 501535 - DNA, 58 bp, Artificial
  Synthetic oligonucleotide
cagttgatagaattgaattgatgtatgaacgattagctgattatttgaatttgccgga

SEQ ID NO: 501536 - DNA, 58 bp, Artificial
  Synthetic oligonucleotide
gggtaactattttcgggagaaaatcgtgcctatgtatggtcttttcccttgtggctct

SEQ ID NO: 501537 - DNA, 57 bp, Artificial
  Synthetic oligonucleotide
gcaaaaccttggaaaacatgaaagcctgtggatcattcatggagtttatagcaacgg

SEQ ID NO: 501538 - DNA, 57 bp, Artificial
  Synthetic oligonucleotide
gatcatagcaaggataatagccataaatgaatttaccagtaggagtcaactgtttgg

SEQ ID NO: 501539 - DNA, 56 bp, Artificial
  Synthetic oligonucleotide
atgctgaacctttcttatcgtacagaaaacgatgacgaaatagagtattttgtttt

SEQ ID NO: 501540 - DNA, 56 bp, Artificial
  Synthetic oligonucleotide
ggacgttctcaattctacaatcaatgtaggcctagcaaattcttctttgattactg

SEQ ID NO: 501541 - DNA, 55 bp, Artificial
  Synthetic oligonucleotide
ggagccagcttgtcgtgtagttgcaagttcggcacgatcttcaacatcccttgtc

SEQ ID NO: 501542 - DNA, 55 bp, Artificial
  Synthetic oligonucleotide
ggcgggctgtgtgccacgtggctctaaggaagagcagatggtaccaacaactttt

SEQ ID NO: 501543 - DNA, 55 bp, Artificial
  Synthetic oligonucleotide
ggcgcaatcctaaccaagataccctaaaacaactaaacatgtcttaaagatcttc

SEQ ID NO: 501544 - DNA, 55 bp, Artificial
  Synthetic oligonucleotide
gctacatgatagaaacttgtccggaaagatggactaggctcactccttacctcta

SEQ ID NO: 501545 - DNA, 55 bp, Artificial
  Synthetic oligonucleotide
gcggaatcagttgcctatattgtctcccgtcacttaggactggatacgtcctcgt

SEQ ID NO: 501546 - DNA, 55 bp, Artificial
  Synthetic oligonucleotide
gcgcgtcaatacgattatgcagactttgggtagtgatgggtatacaggaacggta

SEQ ID NO: 501547 - DNA, 55 bp, Artificial
  Synthetic oligonucleotide
gcgagtggcaactctacagatggaggcggagtattcaatttagtcgtacctcaag

SEQ ID NO: 501548 - DNA, 55 bp, Artificial
  Synthetic oligonucleotide
ggcatactcgacaaatggctctttcagtaaaccaacaccgttgtcccacgacaaa

SEQ ID NO: 501549 - DNA, 55 bp, Artificial
  Synthetic oligonucleotide
gcgacttcagcgttggagttagaaggcaactgcttagattatcggctaatcgtct

SEQ ID NO: 501550 - DNA, 55 bp, Artificial
  Synthetic oligonucleotide
gccatccacgcgccaccctgtcaaccattcgacagaagctgagagtaaaacagca

SEQ ID NO: 501551 - DNA, 55 bp, Artificial
  Synthetic oligonucleotide
gcagaatgccccagaacgtaatatagggcgttctgagaatgagatggagtggtag

SEQ ID NO: 501552 - DNA, 55 bp, Artificial
  Synthetic oligonucleotide
gcacgaagtgacccatattgtcgcgtcatcggacgatttgatcagttatccaagg

SEQ ID NO: 501553 - DNA, 55 bp, Artificial
  Synthetic oligonucleotide
gcaccttgtacaaaactagattgagtacatgagtggtgcaatcccactccagcga

SEQ ID NO: 501554 - DNA, 55 bp, Artificial
  Synthetic oligonucleotide
gatttgtggcgggatgtcaccggtttggatggcattaacgaggatggcaccgatg

SEQ ID NO: 501555 - DNA, 55 bp, Artificial
  Synthetic oligonucleotide
actcatctagatgaaattgtgactcatgagattgttgggcaagctttggagcgtg

SEQ ID NO: 501556 - DNA, 55 bp, Artificial
  Synthetic oligonucleotide
gattcgacgtgttgcggtgattaatacgcgtacagataaggtagaatttgaagta

SEQ ID NO: 501557 - DNA, 55 bp, Artificial
  Synthetic oligonucleotide
gatgtcatttataaggactggaacgacgttttaaaagttcgaacagcacggagtg

SEQ ID NO: 501558 - DNA, 55 bp, Artificial
  Synthetic oligonucleotide
gatacgcatggatcaaatagagtagatcggtcactttatcgtcttcatcggttct

SEQ ID NO: 501559 - DNA, 55 bp, Artificial
  Synthetic oligonucleotide
gacgggttttacgtaggaggtcctagaatagggtatcttccttgttttgtcagta

SEQ ID NO: 501560 - DNA, 55 bp, Artificial
  Synthetic oligonucleotide
gacgggttaactacttaccttcacgaaagactaggtcatgctaaagaaaccattt

SEQ ID NO: 501561 - DNA, 55 bp, Artificial
  Synthetic oligonucleotide
ctttgtgagcggaaaccagttggttcgttaattgcagattgttttctgtcttgtg

SEQ ID NO: 501562 - DNA, 55 bp, Artificial
  Synthetic oligonucleotide
ttctggtcgaacatatagacaaaactcgtgccaaccacaacaagttagttcccga

SEQ ID NO: 501563 - DNA, 55 bp, Artificial
  Synthetic oligonucleotide
ttccctggtctgcacctgcttgttgaatgatcgtccaagctatcagttccccttc

SEQ ID NO: 501564 - DNA, 55 bp, Artificial
  Synthetic oligonucleotide
ttcaagaagaattgccaacctatttgcaagaacgaggctatgctattgagcgtgg

SEQ ID NO: 501565 - DNA, 55 bp, Artificial
  Synthetic oligonucleotide
ttaacgaggatggcaccgatgaaatttgttcgttggatgtccgcaaggtcaaagg

SEQ ID NO: 501566 - DNA, 55 bp, Artificial
  Synthetic oligonucleotide
tgtacttcagatcctgcgtttaaaggagctgtcggcgtacccttcttaccgtcat

SEQ ID NO: 501567 - DNA, 55 bp, Artificial
  Synthetic oligonucleotide
tctccgtctgtagttgtaataggtgttgttacactgggcacgtgtgtgatttctg

SEQ ID NO: 501568 - DNA, 55 bp, Artificial
  Synthetic oligonucleotide
aacggcttaattgaaacctacgacttaaccatgtatgatcatccgaaagcgacag

SEQ ID NO: 501569 - DNA, 55 bp, Artificial
  Synthetic oligonucleotide
taagtctcttaatatgccttggtactgctgtagctctaacttcgcattagaaagg

SEQ ID NO: 501570 - DNA, 55 bp, Artificial
  Synthetic oligonucleotide
taaggtgccctattcaaggctagataatctgtatccactgcctgaatttcatttt

SEQ ID NO: 501571 - DNA, 55 bp, Artificial
  Synthetic oligonucleotide
taaacgtctcctgccgcaattcgttctacaccaatgaacgctttccatgagtgcg

SEQ ID NO: 501572 - DNA, 55 bp, Artificial
  Synthetic oligonucleotide
gttttctacatcacctgttttgatccgttcgacttccagatacacagaccaagct

SEQ ID NO: 501573 - DNA, 55 bp, Artificial
  Synthetic oligonucleotide
gtttgctcattggaccattttcatgtttacgccaaattgtacgtggtgcagcatg

SEQ ID NO: 501574 - DNA, 55 bp, Artificial
  Synthetic oligonucleotide
acagcacctactccctctatataaccgtcccagtgacaatatatgccttgatacg

SEQ ID NO: 501575 - DNA, 55 bp, Artificial
  Synthetic oligonucleotide
gtgtctgtttcctaaaggaactgcgcgtggaattggtggcattgaaggtggctgg

SEQ ID NO: 501576 - DNA, 55 bp, Artificial
  Synthetic oligonucleotide
gtggccaagcccacagactctttgtaacgcgatagcaggaagctccgcttcctct

SEQ ID NO: 501577 - DNA, 55 bp, Artificial
  Synthetic oligonucleotide
gtggattggcaaatttcgttaccatttaatccagtagcaacgcctagaccaggcg

SEQ ID NO: 501578 - DNA, 55 bp, Artificial
  Synthetic oligonucleotide
gtgaaccgtgacacggtgactgtgcatagtacgtctttatttaaggattcgccag

SEQ ID NO: 501579 - DNA, 55 bp, Artificial
  Synthetic oligonucleotide
gtcttagacgtcttggtggccttttctaattcgtcgtaaaatatccgagcgcctg

SEQ ID NO: 501580 - DNA, 55 bp, Artificial
  Synthetic oligonucleotide
accctgttcctttaacgagttttgaaaaattaccggatggctcgtatcgcttatc

SEQ ID NO: 501581 - DNA, 55 bp, Artificial
  Synthetic oligonucleotide
gtcagacagacaaatacggccaaaacggctggcgtagacaaatgaaagtagaacc

SEQ ID NO: 501582 - DNA, 55 bp, Artificial
  Synthetic oligonucleotide
gtatgttcccaggtttatttaatggtttgtccggcttgaaagtgagccaattctt

SEQ ID NO: 501583 - DNA, 55 bp, Artificial
  Synthetic oligonucleotide
gtacgcattgcgttttaatactttgatgtggttgtttaagcattccaatggtccg

SEQ ID NO: 501584 - DNA, 55 bp, Artificial
  Synthetic oligonucleotide
ggtacatatcgctccatcttggatcaattggtgacaaccagtggattgacctgtc

SEQ ID NO: 501585 - DNA, 55 bp, Artificial
  Synthetic oligonucleotide
ggggtgtcttttatctctgttgctttaagttcaactacagaagcaagtgctagag

SEQ ID NO: 501586 - DNA, 55 bp, Artificial
  Synthetic oligonucleotide
ggggactatagtcgggtctatgagggagtctatgaaacgctcataaacggagccg

SEQ ID NO: 501587 - DNA, 55 bp, Artificial
  Synthetic oligonucleotide
gggagaaaatcaaacaaatcattgagagccaacgaatcagtaaacgagcggttag

SEQ ID NO: 501588 - DNA, 55 bp, Artificial
  Synthetic oligonucleotide
gggaacttcctcgtggaacattaatcaatgtagaagtttacgctcccggtgaaag

SEQ ID NO: 501589 - DNA, 55 bp, Artificial
  Synthetic oligonucleotide
cggtaccagtggggcattaagatttattacagacaaaccacaactacatcccgag

SEQ ID NO: 501590 - DNA, 55 bp, Artificial
  Synthetic oligonucleotide
cggagagttctggtaatctgctaactgatcaacaaagcgagtaaactcctccgtt

SEQ ID NO: 501591 - DNA, 55 bp, Artificial
  Synthetic oligonucleotide
cggaaggctggtaaccttcgtcgacgtccacaggtggcattaagtctatacccct

SEQ ID NO: 501592 - DNA, 55 bp, Artificial
  Synthetic oligonucleotide
cgccgaactattatccgcaaggactaatcgcattgaagcaaccaaagacagcgat

SEQ ID NO: 501593 - DNA, 55 bp, Artificial
  Synthetic oligonucleotide
cgcatacgcaaatggactagctttatctggtagtacttctttccctgatgcatca

SEQ ID NO: 501594 - DNA, 55 bp, Artificial
  Synthetic oligonucleotide
cgatccccagtggtcatcgatccaactgatcgtttgttcaacggtgctttgttcg

SEQ ID NO: 501595 - DNA, 55 bp, Artificial
  Synthetic oligonucleotide
cgaccaaccttttcggttgagagagtgaggcgccgggtgttaggggtgcaacccc

SEQ ID NO: 501596 - DNA, 55 bp, Artificial
  Synthetic oligonucleotide
cgaattgcgtcaaacggccgtaaaagagcgtgagagcgtttctgatgagttgagg

SEQ ID NO: 501597 - DNA, 55 bp, Artificial
  Synthetic oligonucleotide
cctttaggaacttccagctggttttctacttctgcgtttaaatgaatcgttcccg

SEQ ID NO: 501598 - DNA, 55 bp, Artificial
  Synthetic oligonucleotide
cctttacaacactaggaaccaagcctcctattactactacgccaagtaaagttgc

SEQ ID NO: 501599 - DNA, 55 bp, Artificial
  Synthetic oligonucleotide
cctacaggtaaactatgttcttcagcatggagaatctgccaatcatgtatggtta

SEQ ID NO: 501600 - DNA, 55 bp, Artificial
  Synthetic oligonucleotide
ccccacggccaataatgttaggctgtccgaaagggatacggtcatgttccgctct

SEQ ID NO: 501601 - DNA, 55 bp, Artificial
  Synthetic oligonucleotide
cccataagtacagctggaacaacacaaatcgtagaaacaactaaacgtgtgccta

SEQ ID NO: 501602 - DNA, 55 bp, Artificial
  Synthetic oligonucleotide
cccagccattgtgggttagaattggtagatatgctctgttcaatgatatcagggg

SEQ ID NO: 501603 - DNA, 55 bp, Artificial
  Synthetic oligonucleotide
ccacagcgttcctttaacggatggatggtgggatgtattgcaagtttaagcttgc

SEQ ID NO: 501604 - DNA, 55 bp, Artificial
  Synthetic oligonucleotide
cattactagcaccggctagcagaaagctagcacgttcactaatttcaggcagtcg

SEQ ID NO: 501605 - DNA, 55 bp, Artificial
  Synthetic oligonucleotide
cataagtatggctcattttagaaagtaaacgcgcattgaccaagtaagcttccat

SEQ ID NO: 501606 - DNA, 55 bp, Artificial
  Synthetic oligonucleotide
caggttttgcgaccatctctgtccgctcataccccatcaagacgagttgttgcgg

SEQ ID NO: 501607 - DNA, 55 bp, Artificial
  Synthetic oligonucleotide
cacgttgtttgcacagctcttacgagtagttccagtacaaacaatgcgtgaaagc

SEQ ID NO: 501608 - DNA, 55 bp, Artificial
  Synthetic oligonucleotide
cacctttaaaagacagtgaacgagtaagaatagtgaaaagtgcgtactcggggaa

SEQ ID NO: 501609 - DNA, 55 bp, Artificial
  Synthetic oligonucleotide
caccgtcatgcgtacgtatgtgccaacaattaagttagttagtttgaccacagag

SEQ ID NO: 501610 - DNA, 55 bp, Artificial
  Synthetic oligonucleotide
caactgtttgacacagcaaaagaagcctatccgtcaatttaccaacggggtggtg

SEQ ID NO: 501611 - DNA, 55 bp, Artificial
  Synthetic oligonucleotide
caacgggatacagcgacgcctaacaacaatggattgaacgcttcacagaatccat

SEQ ID NO: 501612 - DNA, 55 bp, Artificial
  Synthetic oligonucleotide
caaataggcattttagatgatttccagacaaatcgagcagatggttcttctactg

SEQ ID NO: 501613 - DNA, 55 bp, Artificial
  Synthetic oligonucleotide
caaagaacctagacgcgacattctgtgtatcgatgtaaaatcattttatgcgagc

SEQ ID NO: 501614 - DNA, 55 bp, Artificial
  Synthetic oligonucleotide
caaactgaagggtcagaattaaatacggatcgaaaagtaatgttggcctatgcgt

SEQ ID NO: 501615 - DNA, 55 bp, Artificial
  Synthetic oligonucleotide
atcgaggttgcgatattatctacgtgttctgttggatgtgcataactgccgccgc

SEQ ID NO: 501616 - DNA, 55 bp, Artificial
  Synthetic oligonucleotide
attaagattaagcagactgtcgcaattcctcgtgcggccccttgtgttgcaaccg

SEQ ID NO: 501617 - DNA, 55 bp, Artificial
  Synthetic oligonucleotide
atgatggtgactgtttatcgtcggttggatggggaaaatgctgagacagctgtgg

SEQ ID NO: 501618 - DNA, 55 bp, Artificial
  Synthetic oligonucleotide
ctgcagggacacctgtccaaagtttagacccagcaactgctgtagatcaaacgag

SEQ ID NO: 501619 - DNA, 55 bp, Artificial
  Synthetic oligonucleotide
ctgatttatgcgttacctggacaaacgttagagggctatcgagagacattgaatc

SEQ ID NO: 501620 - DNA, 55 bp, Artificial
  Synthetic oligonucleotide
ctgaaacagaccactccatatgcggtttcaaatagaccacataatttggtgctgg

SEQ ID NO: 501621 - DNA, 55 bp, Artificial
  Synthetic oligonucleotide
ctcgaaatactcctacgcagcatttagctacaagtattcatgaattagcccatgc

SEQ ID NO: 501622 - DNA, 55 bp, Artificial
  Synthetic oligonucleotide
ctgccgtcagaattgacatactctacaactgccacatgcccatagggcggtgcag

SEQ ID NO: 501623 - DNA, 55 bp, Artificial
  Synthetic oligonucleotide
ctgctaaagcgctgcttaatggcaccgtcccatcacttaaatccgtctcactcac

SEQ ID NO: 501624 - DNA, 55 bp, Artificial
  Synthetic oligonucleotide
ctccttattccatgagtttgcgtcaaagcctagatcccttagtagctgctcatga

SEQ ID NO: 501625 - DNA, 55 bp, Artificial
  Synthetic oligonucleotide
ctcaaatcgatcgtaaaccgctagtaaatccactcctaatcgattcaccttctgt

SEQ ID NO: 501626 - DNA, 55 bp, Artificial
  Synthetic oligonucleotide
agacaagttagaatagcgcctagattaatcatgagcagctactaagggatctagg

SEQ ID NO: 501627 - DNA, 55 bp, Artificial
  Synthetic oligonucleotide
ctagttggttcacaaggatttgccaaacgattagtaggagcgatgtaaaatggcg

SEQ ID NO: 501628 - DNA, 55 bp, Artificial
  Synthetic oligonucleotide
ctagcttccaatccgaacggctgaacttttgttttcggtttcacagtctcgggtg

SEQ ID NO: 501629 - DNA, 55 bp, Artificial
  Synthetic oligonucleotide
ctaagtcggtcatacattctacttattgatacggtagcctacaaagttacgctag

SEQ ID NO: 501630 - DNA, 55 bp, Artificial
  Synthetic oligonucleotide
cttgtcactcgtacgtccataacgcccctcctcctgatgctttcttagtataccg

SEQ ID NO: 501631 - DNA, 55 bp, Artificial
  Synthetic oligonucleotide
cggttattgaagcctggagaatggattgtttatcgcacgaaaatgcgtagagact

SEQ ID NO: 501632 - DNA, 55 bp, Artificial
  Synthetic oligonucleotide
cggttctgtttcaataaatcggcgattgcacctttatcgatcgtaccgactacga

SEQ ID NO: 501633 - DNA, 55 bp, Artificial
  Synthetic oligonucleotide
cgtacgccgcaaacgtctcgtctgggttttcgggagttgggtctggctaaaggcg

SEQ ID NO: 501634 - DNA, 55 bp, Artificial
  Synthetic oligonucleotide
cgtacggattggggaatcgcttatttaacttttcaagaggacgtgggtttcagcg

SEQ ID NO: 501635 - DNA, 55 bp, Artificial
  Synthetic oligonucleotide
cgtcctcgcggatatatgcgaaaattcggcatgtctcgtgtgaaatttcgcgaac

SEQ ID NO: 501636 - DNA, 55 bp, Artificial
  Synthetic oligonucleotide
cgttgatgtttgcgacagtcggagaagtgttgcgaaataaatcagaccaagtacg

SEQ ID NO: 501637 - DNA, 55 bp, Artificial
  Synthetic oligonucleotide
agttgtcattaggggaggtgatggacttagttagtaacgatggcgtctatcgtta

SEQ ID NO: 501638 - DNA, 55 bp, Artificial
  Synthetic oligonucleotide
cgtttatctaccaataccttgcttctaggaatgatgggagctggtaaatcgaccg

SEQ ID NO: 501639 - DNA, 54 bp, Artificial
  Synthetic oligonucleotide
ccaaagcttctcattagacattcaaaaggacctagttatcgtctccgacctgac

SEQ ID NO: 501640 - DNA, 54 bp, Artificial
  Synthetic oligonucleotide
ggtctccgacaaagattttgtccaccgccaatataacctgcagtaacagaccct

SEQ ID NO: 501641 - DNA, 54 bp, Artificial
  Synthetic oligonucleotide
gaaattcaaactttcttatggtggccgaaatgtggaagtggtaactaacgctaa

SEQ ID NO: 501642 - DNA, 54 bp, Artificial
  Synthetic oligonucleotide
ccgtacattgggctatatatttgtggatgggatgctacttcaggaaacactcgt

SEQ ID NO: 501643 - DNA, 54 bp, Artificial
  Synthetic oligonucleotide
ggcgaggcgatcgactcaaccgctacacttgttcgttatgtgattggcgtaaac

SEQ ID NO: 501644 - DNA, 53 bp, Artificial
  Synthetic oligonucleotide
atatttctctgatcgctgcggtcgacaaaatgtcgcctatgccacggtacatt

SEQ ID NO: 501645 - DNA, 53 bp, Artificial
  Synthetic oligonucleotide
gaaatcaaccggtaccaacaaagcaatccctttctggcacaaatgccgggcga

SEQ ID NO: 501646 - DNA, 53 bp, Artificial
  Synthetic oligonucleotide
tccaatataagatcaaagaagaccaagtgccaggctacgaaaccagttatgaa

SEQ ID NO: 501647 - DNA, 53 bp, Artificial
  Synthetic oligonucleotide
gatactgtggtgcttcaaagttagtcaagtcggttctagcttttgcagtgtaa

SEQ ID NO: 501648 - DNA, 53 bp, Artificial
  Synthetic oligonucleotide
cggtggttatcgtcaatttctgacgatcagcaacacgaaaaatcagtggataa

SEQ ID NO: 501649 - DNA, 53 bp, Artificial
  Synthetic oligonucleotide
ggctgtaaaagagcgtgagagcgtttctgcggaaatgaggtatatttctaagc

SEQ ID NO: 501650 - DNA, 53 bp, Artificial
  Synthetic oligonucleotide
cgttaggattaatcggttctaatgggttcgttggtgttgtgtccggttcaaaa

SEQ ID NO: 501651 - DNA, 53 bp, Artificial
  Synthetic oligonucleotide
gtattttggtaagaaaaattggttggtaaatttaacaggtgattacgttgtgg

SEQ ID NO: 501652 - DNA, 53 bp, Artificial
  Synthetic oligonucleotide
atatggggaaaccatgacaggcggcccatttgtctggaatgccacgtataaaa

SEQ ID NO: 501653 - DNA, 53 bp, Artificial
  Synthetic oligonucleotide
gatatcatacgtttgaacttggacccactgatcataagccgtaataccaggtg

SEQ ID NO: 501654 - DNA, 53 bp, Artificial
  Synthetic oligonucleotide
tagtttcgaaatgtcgtcccctttattcactttggttccgtctgctaaaacaa

SEQ ID NO: 501655 - DNA, 52 bp, Artificial
  Synthetic oligonucleotide
cagcacacagattggggattttcttatgacccggttggattaagatatgctt

SEQ ID NO: 501656 - DNA, 52 bp, Artificial
  Synthetic oligonucleotide
tgcgccaaacggctgtaaaagagcgtgagagcgtttctgcggaaatgaggta

SEQ ID NO: 501657 - DNA, 52 bp, Artificial
  Synthetic oligonucleotide
aacatgcgttccctctaatttcagcgttcgtcatacggcaaagagccacacg

SEQ ID NO: 501658 - DNA, 52 bp, Artificial
  Synthetic oligonucleotide
ttcaggcgctacgtttgagacaatcttacgaactttggatgaattggggtat

SEQ ID NO: 501659 - DNA, 52 bp, Artificial
  Synthetic oligonucleotide
attaattggatgtcttctaaaggtgacacatctgtggctgcaattggaatcg

SEQ ID NO: 501660 - DNA, 52 bp, Artificial
  Synthetic oligonucleotide
ttcgctgtaatcgttccctaaaagaattttacctaacccaacattgtggcca

SEQ ID NO: 501661 - DNA, 51 bp, Artificial
  Synthetic oligonucleotide
tggacgcgacccatgatcgtttcacagggaaatggcacgctattacaaact

SEQ ID NO: 501662 - DNA, 51 bp, Artificial
  Synthetic oligonucleotide
tctagttggtttggtgctatccatgtcagtgtctcttgggtgtgtgatagc

SEQ ID NO: 501663 - DNA, 51 bp, Artificial
  Synthetic oligonucleotide
tagagacgccctcattcaagtccttaacgatgttttcataaactaaacgtc

SEQ ID NO: 501664 - DNA, 50 bp, Artificial
  Synthetic oligonucleotide
ttgtgccgaggataaggagttgacggctaaaccactagcctattaagctg

SEQ ID NO: 501665 - DNA, 50 bp, Artificial
  Synthetic oligonucleotide
tattgacttcacgaaatcggatgaaaatatttatttagagcagacgaatc

SEQ ID NO: 501666 - DNA, 55 bp, Artificial
  Synthetic oligonucleotide
ttacaggtatcggattggctatggatgccagtgctgtttcaattgcgaagggtat

SEQ ID NO: 501667 - DNA, 55 bp, Artificial
  Synthetic oligonucleotide
tcatctgaagatatctagaacgagctttcgcacgattttgataatccccatgctc

SEQ ID NO: 501668 - DNA, 55 bp, Artificial
  Synthetic oligonucleotide
gtgtatatacctgcgcacgaacagataactggccatggtccgttttcatgactgt

SEQ ID NO: 501669 - DNA, 55 bp, Artificial
  Synthetic oligonucleotide
ggcgtatccggatacaaacattatcttaggtggtattgaggctagccttcgccgt

SEQ ID NO: 501670 - DNA, 55 bp, Artificial
  Synthetic oligonucleotide
gagttgtacgcatgatcgtaggaagaaccataattgcaagagtcaaggaacctgc

SEQ ID NO: 501671 - DNA, 55 bp, Artificial
  Synthetic oligonucleotide
gagctgtctgattccattcggcctgtaaatcgattcttcttgacaaccagtctag

SEQ ID NO: 501672 - DNA, 55 bp, Artificial
  Synthetic oligonucleotide
cttttatcgcagaaggatagttccctgaaccagttcccgcaataacaactccatc

SEQ ID NO: 501673 - DNA, 55 bp, Artificial
  Synthetic oligonucleotide
ctgaccggaaatgatattgatcacagcttctaatgcagcacagatataccatgcg

SEQ ID NO: 501674 - DNA, 55 bp, Artificial
  Synthetic oligonucleotide
cgcataactctcatctgcatgttgatagattgccagctggagattggtaaaaggt

SEQ ID NO: 501675 - DNA, 55 bp, Artificial
  Synthetic oligonucleotide
cgatccgctgcatagcgcattgcctgacgagctgtttcaaccgctggcgtttgag

SEQ ID NO: 501676 - DNA, 55 bp, Artificial
  Synthetic oligonucleotide
ccgtaaatctcatagtatcccacgggatagctgttctgtcgcacggagtcgccag

SEQ ID NO: 501677 - DNA, 55 bp, Artificial
  Synthetic oligonucleotide
cccgcatgatatttatggttggcgatgcttaccatcaccttatagcttccgttac

SEQ ID NO: 501678 - DNA, 55 bp, Artificial
  Synthetic oligonucleotide
caatgcgtacacgcgcacaaaacgtgaagcatatgttagacatgggatactcagg

SEQ ID NO: 501679 - DNA, 55 bp, Artificial
  Synthetic oligonucleotide
atcaatgtcaacaagatgccacccacaaagaattgatatccactcaacatgaccg

SEQ ID NO: 501680 - DNA, 55 bp, Artificial
  Synthetic oligonucleotide
agaaataccagctgcttcccgcactgcctggcatagtacttgtttcgcgttttcc

SEQ ID NO: 501681 - DNA, 54 bp, Artificial
  Synthetic oligonucleotide
acctttggtcaattcagaccttgacgccaattcttccagtgttagatcattggc

SEQ ID NO: 501682 - DNA, 53 bp, Artificial
  Synthetic oligonucleotide
gcccgtaatttaatcgaggccaaagatcgcctggatgtggtaggaaaaccatt

SEQ ID NO: 501683 - DNA, 58 bp, Artificial
  Synthetic oligonucleotide
ccaaagttgtcatagtgaattgcgtagttatattgtcatcttgcacatataaaggcac

SEQ ID NO: 501684 - DNA, 55 bp, Artificial
  Synthetic oligonucleotide
gcagacactttatgggttattgcacctgagtacaatttcagttatcctggagttt

SEQ ID NO: 501685 - DNA, 55 bp, Artificial
  Synthetic oligonucleotide
gcacttggataacaaggcggacgaacgaaagtcaaaggcacgtacttagggtacg

SEQ ID NO: 501686 - DNA, 55 bp, Artificial
  Synthetic oligonucleotide
gcacgatcaccatttcagttccgcgaacctttcatggcttaatcaccgcttcctc

SEQ ID NO: 501687 - DNA, 55 bp, Artificial
  Synthetic oligonucleotide
gcaatatcctctttgcttattgctacgctataccaagggaatatgcaaggcgaga

SEQ ID NO: 501688 - DNA, 55 bp, Artificial
  Synthetic oligonucleotide
gcaaaagcgtacttagtcgacagtttggtgataccgaatatacatacgcaagtag

SEQ ID NO: 501689 - DNA, 55 bp, Artificial
  Synthetic oligonucleotide
gattgtgatcgatgctttaacgctggtgctgggaaatcgcgggaataaaacaaat

SEQ ID NO: 501690 - DNA, 55 bp, Artificial
  Synthetic oligonucleotide
gagagggagcttgctcaaagatataatgttgggagaccttcgataagggaggcga

SEQ ID NO: 501691 - DNA, 55 bp, Artificial
  Synthetic oligonucleotide
gaccttagatctcgtgtattttgatgaagcggctcttgttactctcaccaatctg

SEQ ID NO: 501692 - DNA, 55 bp, Artificial
  Synthetic oligonucleotide
gaccataagctatttagccgaaaacggagcgagaaacatactctgtgtcaacaga

SEQ ID NO: 501693 - DNA, 55 bp, Artificial
  Synthetic oligonucleotide
gacagatcatcgtcagtcgggtactgcttttaacaaatagacccagggccgaacc

SEQ ID NO: 501694 - DNA, 55 bp, Artificial
  Synthetic oligonucleotide
gaatgtctatgctgccaagcttccatttacagacgtaccggaaaagtcttggtac

SEQ ID NO: 501695 - DNA, 55 bp, Artificial
  Synthetic oligonucleotide
gaacggcagggctcaactcacaagagtggatagtagtaatagctatggcatttac

SEQ ID NO: 501696 - DNA, 55 bp, Artificial
  Synthetic oligonucleotide
gaaagtggctctatgtatacgtcttcccgatagtggattcttctgacaatatcct

SEQ ID NO: 501697 - DNA, 55 bp, Artificial
  Synthetic oligonucleotide
cttcgcttgcaataacgagaagccttctgcatataggttttatatctcccgcttt

SEQ ID NO: 501698 - DNA, 55 bp, Artificial
  Synthetic oligonucleotide
ctctccaaatataaccgtaccgagtcttaccatggttgcaccttcctcaatagct

SEQ ID NO: 501699 - DNA, 55 bp, Artificial
  Synthetic oligonucleotide
ctatagctacaggcggaaatactgtcggtgagagaacatcaaaaggtctgggagt

SEQ ID NO: 501700 - DNA, 55 bp, Artificial
  Synthetic oligonucleotide
tttgtgaattacttctggcaaaacttgacggagtcaaaactgacgctcaacaggg

SEQ ID NO: 501701 - DNA, 55 bp, Artificial
  Synthetic oligonucleotide
ttgttacactggcaatcgtttgatcagtcgaagtgtttccgctacccaagatcgc

SEQ ID NO: 501702 - DNA, 55 bp, Artificial
  Synthetic oligonucleotide
tatgtactctaccgctgttgtgttcatagacttagctgcctcttggtatcttctc

SEQ ID NO: 501703 - DNA, 55 bp, Artificial
  Synthetic oligonucleotide
tacttctgcaagatgcgtgtccaacaccgtcttctatagctattactattgccgg

SEQ ID NO: 501704 - DNA, 55 bp, Artificial
  Synthetic oligonucleotide
tacacactgtcctgtaggggcattagtggaacgagatgatacagaaagattgtgg

SEQ ID NO: 501705 - DNA, 55 bp, Artificial
  Synthetic oligonucleotide
gttcacactatcacagaggacccggatcaatgggtatgtgttcagatccgtcaag

SEQ ID NO: 501706 - DNA, 55 bp, Artificial
  Synthetic oligonucleotide
gtaaatcattataaggtaagcggcaatgtgctttccgggaataagacaaatgagg

SEQ ID NO: 501707 - DNA, 55 bp, Artificial
  Synthetic oligonucleotide
ggtgcaagtggccgtagatatgtggagatacaatccccgaaaattgtctatgcga

SEQ ID NO: 501708 - DNA, 55 bp, Artificial
  Synthetic oligonucleotide
ggtcaagagtatcaccgcttgaaaggttgaatgtatggtattcggaatcatcagc

SEQ ID NO: 501709 - DNA, 55 bp, Artificial
  Synthetic oligonucleotide
ggggattccgatttccgtcatgttaggaggattgatgactccggcaggaagcggc

SEQ ID NO: 501710 - DNA, 55 bp, Artificial
  Synthetic oligonucleotide
ggcaattgcgaaaatgccatgaactttgggtgcagtttctcacgaaacaatttct

SEQ ID NO: 501711 - DNA, 55 bp, Artificial
  Synthetic oligonucleotide
ggaggtgcttgcaatgagtaagatagcactttacattcgtttgtcggtagaagat

SEQ ID NO: 501712 - DNA, 55 bp, Artificial
  Synthetic oligonucleotide
ggaagcacgctcacaaatccctgctcttgactatggtctaagcgtttcagcttgc

SEQ ID NO: 501713 - DNA, 55 bp, Artificial
  Synthetic oligonucleotide
gctccatatttgtagaaagtctcaagcacatactgacctctcttgtccttactcc

SEQ ID NO: 501714 - DNA, 55 bp, Artificial
  Synthetic oligonucleotide
gctcatggaaggcggtataccttttgagtttccggcaatagctgtatgtgacggc

SEQ ID NO: 501715 - DNA, 55 bp, Artificial
  Synthetic oligonucleotide
gctatatcacagtcggtaccaagaaggttaaatcaaatccgcttctgccggtatt

SEQ ID NO: 501716 - DNA, 55 bp, Artificial
  Synthetic oligonucleotide
gcgatgaactcatgattgatatgacaacttcagttggtccaggggttcttttacc

SEQ ID NO: 501717 - DNA, 55 bp, Artificial
  Synthetic oligonucleotide
gcatacgaaccgccttccattccaagcccgactacagtatatttcttatcctgca

SEQ ID NO: 501718 - DNA, 55 bp, Artificial
  Synthetic oligonucleotide
cagtctacctgaacgagtctttctaagcggcattgtcttattcttcataccggca

SEQ ID NO: 501719 - DNA, 55 bp, Artificial
  Synthetic oligonucleotide
caggctgagacctccacctgtaccgagcggaatatcctcgtctatatagtttacg

SEQ ID NO: 501720 - DNA, 55 bp, Artificial
  Synthetic oligonucleotide
cacggttcaggagtagtaacactatatgcacactgctcatcaatagacgtatctg

SEQ ID NO: 501721 - DNA, 55 bp, Artificial
  Synthetic oligonucleotide
caagacctatggataccatagttatgattgatgccgttcctatcagcacaccgag

SEQ ID NO: 501722 - DNA, 55 bp, Artificial
  Synthetic oligonucleotide
caacaagaaacttttgatcgccttcaacactgatatgaaacaccccgtctctggt

SEQ ID NO: 501723 - DNA, 55 bp, Artificial
  Synthetic oligonucleotide
attggatatgtcgtgcgtttgtcagaagataatcggcatcctggttaactgttcc

SEQ ID NO: 501724 - DNA, 55 bp, Artificial
  Synthetic oligonucleotide
atattccgtgaataccctgatctgcgggatcaaatcaataaggcccgcgttattg

SEQ ID NO: 501725 - DNA, 55 bp, Artificial
  Synthetic oligonucleotide
atagtagaatcacctttatatgacaactgctcccacgctgtaacgtcttgctcgt

SEQ ID NO: 501726 - DNA, 55 bp, Artificial
  Synthetic oligonucleotide
atacttgctccacctatgagtatagcagctatcgtctggaaggtaaatgccgatg

SEQ ID NO: 501727 - DNA, 55 bp, Artificial
  Synthetic oligonucleotide
atactcaggcatctcatctggcacaggattaggaataggttgttgtacaggcgct

SEQ ID NO: 501728 - DNA, 55 bp, Artificial
  Synthetic oligonucleotide
agttgctgtcaatgttagtgtggcgggatcgtatacataagtcgctccaccagga

SEQ ID NO: 501729 - DNA, 55 bp, Artificial
  Synthetic oligonucleotide
agtgcatttaagagggcgatgaatatcaaggactacggcaatctcatacccggac

SEQ ID NO: 501730 - DNA, 55 bp, Artificial
  Synthetic oligonucleotide
aggcgattgttcatattcactatagccataggctctataaacattgttgcccctg

SEQ ID NO: 501731 - DNA, 55 bp, Artificial
  Synthetic oligonucleotide
agctgtgcttctaggttgggtgttggcggcaagtttgtccactactgcggacatt

SEQ ID NO: 501732 - DNA, 55 bp, Artificial
  Synthetic oligonucleotide
acgattgcagtgcatcggcccaaagtttacaatggatggagtgcagatacttacc

SEQ ID NO: 501733 - DNA, 55 bp, Artificial
  Synthetic oligonucleotide
acaaggtcaagggaagcgatccgaatgactatacatcaaccctttatttggtctt

SEQ ID NO: 501734 - DNA, 55 bp, Artificial
  Synthetic oligonucleotide
aagtcccagtgatccggcggaggtggccattcgggttaatgaaatcaccccgacc

SEQ ID NO: 501735 - DNA, 55 bp, Artificial
  Synthetic oligonucleotide
cggtatcaagacatatagcgcctaatcttcctccatgaaagcaggcgccacagtc

SEQ ID NO: 501736 - DNA, 55 bp, Artificial
  Synthetic oligonucleotide
cggctcccggtttgtctcagccaacaaccggtcaaccggatacttcatgacgtcc

SEQ ID NO: 501737 - DNA, 55 bp, Artificial
  Synthetic oligonucleotide
cggatgtcgcctttcggtgctaatcactaaattcgaatatcaccagattggaatg

SEQ ID NO: 501738 - DNA, 55 bp, Artificial
  Synthetic oligonucleotide
cgcttgattcggtgacaagtgacgtcagtggacgcggtggttgtgccctcagttt

SEQ ID NO: 501739 - DNA, 55 bp, Artificial
  Synthetic oligonucleotide
cgtcagattatgtattgatacctgttgaattatcggcgttcggagtggaaggttt

SEQ ID NO: 501740 - DNA, 55 bp, Artificial
  Synthetic oligonucleotide
cctgctatatcagttgcccctacgcctttacgcaccaatctgtaaacatctctca

SEQ ID NO: 501741 - DNA, 55 bp, Artificial
  Synthetic oligonucleotide
cctgcctttcttgaacaatactgtaatgggcgtagtcttttccatgattgcaggc

SEQ ID NO: 501742 - DNA, 55 bp, Artificial
  Synthetic oligonucleotide
ccggactttagagcaagagcaaaggcatctacagtcacattcggtctgccctcat

SEQ ID NO: 501743 - DNA, 55 bp, Artificial
  Synthetic oligonucleotide
ccgcataagagctttgcgggacggatatactgcttatgagtaaaacaagtgccaa

SEQ ID NO: 501744 - DNA, 55 bp, Artificial
  Synthetic oligonucleotide
ccgcaataaccggcattatttgcttaactgacggttctgaccgaaccattctgga

SEQ ID NO: 501745 - DNA, 55 bp, Artificial
  Synthetic oligonucleotide
ccattgccccgcttttcaagtccggtttcggttgcattaggttgaaacagctttg

SEQ ID NO: 501746 - DNA, 55 bp, Artificial
  Synthetic oligonucleotide
cgtgggtcgaaccagccgggattttcaacgaatacctggcggattgaggcggtca

SEQ ID NO: 501747 - DNA, 55 bp, Artificial
  Synthetic oligonucleotide
ccatcaggtcatacagtgtcattggaagtcaaagtatcaggaggcaaggaaccgt

SEQ ID NO: 501748 - DNA, 54 bp, Artificial
  Synthetic oligonucleotide
cgaaaaccacattttcaccaaatgagaacatgacaagaggaatgctggtagcga

SEQ ID NO: 501749 - DNA, 54 bp, Artificial
  Synthetic oligonucleotide
atactcccataagctctccttgaacttgtggtataccgctaccgctacttaaag

SEQ ID NO: 501750 - DNA, 53 bp, Artificial
  Synthetic oligonucleotide
cactgttaaatagagcgcgtattcttgaacgtcaaggttgtgttgaggctttt

SEQ ID NO: 501751 - DNA, 53 bp, Artificial
  Synthetic oligonucleotide
gtttaccggatcttgccgactcaatcccaccatgggcatctgattgataacaa

SEQ ID NO: 501752 - DNA, 53 bp, Artificial
  Synthetic oligonucleotide
tacttaatctttccgcctctgccgatattatattaagtcctgttgccacatct

SEQ ID NO: 501753 - DNA, 52 bp, Artificial
  Synthetic oligonucleotide
ggccggggtcagacagagtttcgcaactaaacgagagactaagagatctaaa

SEQ ID NO: 501754 - DNA, 52 bp, Artificial
  Synthetic oligonucleotide
gtaagaggacttacacaagcatcaagaaatgcccaagacggtatctcagcag

SEQ ID NO: 501755 - DNA, 52 bp, Artificial
  Synthetic oligonucleotide
cagtaggtaaagagcctgcgcctttagcgtagtacatagattctccaagcag

SEQ ID NO: 501756 - DNA, 51 bp, Artificial
  Synthetic oligonucleotide
cttaggtgtaagtttggatgaacattacccgcattgtttgcaattgtcccg

SEQ ID NO: 501757 - DNA, 51 bp, Artificial
  Synthetic oligonucleotide
cgctcctactatgggacaaataggcgccgcacaactttataaaacacctgt

SEQ ID NO: 501758 - DNA, 51 bp, Artificial
  Synthetic oligonucleotide
gcacctgttttaagtagcattctcctgagtcgattgatgcaaagccgtcac

SEQ ID NO: 501759 - DNA, 50 bp, Artificial
  Synthetic oligonucleotide
tcatagaagtgatgagtaggtccgcagcctttcccaagctcaagggagtg

SEQ ID NO: 501760 - DNA, 50 bp, Artificial
  Synthetic oligonucleotide
ttttaaccaccttaaccagcagcgcctctagtcgcagggcactgccaacc

SEQ ID NO: 501761 - DNA, 59 bp, Artificial
  Synthetic oligonucleotide
gatactcgatatagttcttctagaaagtatggctttaagctagaaggagtatatgatcc

SEQ ID NO: 501762 - DNA, 57 bp, Artificial
  Synthetic oligonucleotide
cgagttatgggtatcatccagattgtaaattacagattcaaaattcttttccgaggg

SEQ ID NO: 501763 - DNA, 55 bp, Artificial
  Synthetic oligonucleotide
gcggacatgtcagcgtgtcatattgtcacatatcaagaactgtatgtcgaagagc

SEQ ID NO: 501764 - DNA, 55 bp, Artificial
  Synthetic oligonucleotide
gcgctcctttgaccatagtagttcaatcaaggctgtaaaataagcctcaaacccc

SEQ ID NO: 501765 - DNA, 55 bp, Artificial
  Synthetic oligonucleotide
gcgagcgttctacgccgtctagcgtaacaaatttagtacctgcggccaacgtttt

SEQ ID NO: 501766 - DNA, 55 bp, Artificial
  Synthetic oligonucleotide
gccttagaagacctcttcggaattaaagtggggcgtctttcgggaatcgttgctc

SEQ ID NO: 501767 - DNA, 55 bp, Artificial
  Synthetic oligonucleotide
gccgataaagtattgcaagagtttgcgaagcttcagtcttcggattctcgcgcac

SEQ ID NO: 501768 - DNA, 55 bp, Artificial
  Synthetic oligonucleotide
gcccattgaggccggcgatatgatggtgatcctgagcccgaaagacgactggaca

SEQ ID NO: 501769 - DNA, 55 bp, Artificial
  Synthetic oligonucleotide
gcccatgaggtgggtcatacgttagggtttgctcataattttgctgctagtacgg

SEQ ID NO: 501770 - DNA, 55 bp, Artificial
  Synthetic oligonucleotide
gccattcgtcagggaaggtttggattcgggcatactcacgtactgtgaatggtct

SEQ ID NO: 501771 - DNA, 55 bp, Artificial
  Synthetic oligonucleotide
gccaaaggattagtcggaatagctgcatttacacagctgaattcccaagatccgg

SEQ ID NO: 501772 - DNA, 55 bp, Artificial
  Synthetic oligonucleotide
gcatctgcgatatcactgatactcgtacttggtttgtacccctttactcctcctg

SEQ ID NO: 501773 - DNA, 55 bp, Artificial
  Synthetic oligonucleotide
gcaggtgtattgctgccaggagttcaggctaactctgtcgcagacggaatacaga

SEQ ID NO: 501774 - DNA, 55 bp, Artificial
  Synthetic oligonucleotide
gcaggcatgccgcaacaggcttacggtttaggagtagactaccgagaccctaaat

SEQ ID NO: 501775 - DNA, 55 bp, Artificial
  Synthetic oligonucleotide
gcagcgggaaccttctctaacggaattactacgctccaaaactattatgctccgc

SEQ ID NO: 501776 - DNA, 55 bp, Artificial
  Synthetic oligonucleotide
gcagccgctaattgggcggtatatccgaatcctgtacagaaaagccagtggttat

SEQ ID NO: 501777 - DNA, 55 bp, Artificial
  Synthetic oligonucleotide
gcagataggaaaccaagggtgccgttgacgtgtaaacactcgtgaacgcgattgg

SEQ ID NO: 501778 - DNA, 55 bp, Artificial
  Synthetic oligonucleotide
gcactgctaatctaggagatagtagaactatcgttacccaccctgcttctaccac

SEQ ID NO: 501779 - DNA, 55 bp, Artificial
  Synthetic oligonucleotide
gcactctaagaatgagtggatcatgcctaacaccggcttcgatagaactacgctg

SEQ ID NO: 501780 - DNA, 55 bp, Artificial
  Synthetic oligonucleotide
gcacgcttgtaaaacagttgataatctttctagcaccgataagcagttccgcaaa

SEQ ID NO: 501781 - DNA, 55 bp, Artificial
  Synthetic oligonucleotide
gcaccactgtatccttctagagtaaacatttcgtctcttgctgagaattgccatg

SEQ ID NO: 501782 - DNA, 55 bp, Artificial
  Synthetic oligonucleotide
gcacaaaacacctagccttgacagcagtgaaaagcctatgcagtcgtaaaaccgc

SEQ ID NO: 501783 - DNA, 55 bp, Artificial
  Synthetic oligonucleotide
gcaaaggcgagggtatacgcaaattgcttgtagaatattcccgcaggaccttgca

SEQ ID NO: 501784 - DNA, 55 bp, Artificial
  Synthetic oligonucleotide
gcaaagcgtctgaagtctttacaactccaggctccacattatctcctactaaacg

SEQ ID NO: 501785 - DNA, 55 bp, Artificial
  Synthetic oligonucleotide
ggaccatcagggcatctttaggataggggtggccctctccggttcgccgacagga

SEQ ID NO: 501786 - DNA, 55 bp, Artificial
  Synthetic oligonucleotide
ggaattgtaatggatgtcctgggcatcaaagcttagcgactgtacttttaaatgg

SEQ ID NO: 501787 - DNA, 55 bp, Artificial
  Synthetic oligonucleotide
ggaattagagtgataagtgacctttgcatccaaatctgtactagccgggacagcg

SEQ ID NO: 501788 - DNA, 55 bp, Artificial
  Synthetic oligonucleotide
ggaagtagcccaaaagccaggcatttgaattttatcccagttctcagtgttgagg

SEQ ID NO: 501789 - DNA, 55 bp, Artificial
  Synthetic oligonucleotide
ggaaggctcatttccagctgaacttcgtttgcatttaggttattcagcatctcgg

SEQ ID NO: 501790 - DNA, 55 bp, Artificial
  Synthetic oligonucleotide
ggaactaggcttagctacgagtggtttacgccatgccattcccaaagcgggtacg

SEQ ID NO: 501791 - DNA, 55 bp, Artificial
  Synthetic oligonucleotide
ggaaaggtttcctctataccgggatattttaccgtctacgatcttcacgggtaat

SEQ ID NO: 501792 - DNA, 55 bp, Artificial
  Synthetic oligonucleotide
ggaaagagcgaggacgaacttagagttttcgcccaatccattggtatagaagtag

SEQ ID NO: 501793 - DNA, 55 bp, Artificial
  Synthetic oligonucleotide
gcttttgccatatttgttgagtaacatcactccccgcttttacccactcagtacc

SEQ ID NO: 501794 - DNA, 55 bp, Artificial
  Synthetic oligonucleotide
gcttaggtgcacaaatgataggccaaagcctaggagcaccagtattatctagtcc

SEQ ID NO: 501795 - DNA, 55 bp, Artificial
  Synthetic oligonucleotide
gctgtagtgaaaccaggtaaactctatgtggtgcaacgtcatgtaaaccaacgtt

SEQ ID NO: 501796 - DNA, 55 bp, Artificial
  Synthetic oligonucleotide
gctggacttgatttcggcaaaccttgaccaacagtctttatgatggcaccccatc

SEQ ID NO: 501797 - DNA, 55 bp, Artificial
  Synthetic oligonucleotide
gctgaagagactccgcctctgtaggtagtacctctaatacctcatcatacttagc

SEQ ID NO: 501798 - DNA, 55 bp, Artificial
  Synthetic oligonucleotide
gctctctatagtcttctgcccgattagaatcgatacgatatttcacccctggagg

SEQ ID NO: 501799 - DNA, 55 bp, Artificial
  Synthetic oligonucleotide
gctctcacatgctagatttctctgaggagccactagaagaaaacttagacctttc

SEQ ID NO: 501800 - DNA, 55 bp, Artificial
  Synthetic oligonucleotide
gctcgtgcggtgtaagccatagtatggtttggaattcccttttggaggattgctt

SEQ ID NO: 501801 - DNA, 55 bp, Artificial
  Synthetic oligonucleotide
gctcgaattgtaggatgttgcggaggtttgctgggtctggatccctgtagtttcg

SEQ ID NO: 501802 - DNA, 55 bp, Artificial
  Synthetic oligonucleotide
gctccttgagaacgaccaatccaattggtttgtgcatcttttaaaggttgtggcc

SEQ ID NO: 501803 - DNA, 55 bp, Artificial
  Synthetic oligonucleotide
gctcccaacatcaatctgcacgaaagatacatgaacgccgaggaaagtaactttc

SEQ ID NO: 501804 - DNA, 55 bp, Artificial
  Synthetic oligonucleotide
gctccatttggtaatagtggcctgacaaggcaggtaatctccgcttccgttgggc

SEQ ID NO: 501805 - DNA, 55 bp, Artificial
  Synthetic oligonucleotide
gctatctacttttgctgaccagtctgcctgactgaatgctctgcgacgcactcgt

SEQ ID NO: 501806 - DNA, 55 bp, Artificial
  Synthetic oligonucleotide
gctatcatgtacaacatcttgcggacctcctttaaatttggtccctgaaccaccg

SEQ ID NO: 501807 - DNA, 55 bp, Artificial
  Synthetic oligonucleotide
gctacgcactcctattaggcttcatatttataatcttgcggcagaagaccctgag

SEQ ID NO: 501808 - DNA, 55 bp, Artificial
  Synthetic oligonucleotide
gcgtattgtggtagtttcatcggcaccacaaatccgttatccagattgctacggg

SEQ ID NO: 501809 - DNA, 55 bp, Artificial
  Synthetic oligonucleotide
gaaatcagttacgtcaaattcccatcctcttggtaacttttcagaacctacccaa

SEQ ID NO: 501810 - DNA, 55 bp, Artificial
  Synthetic oligonucleotide
gaaagagtcgactgtgtataataatgcggaagcctatgttccaacaatgagtgcc

SEQ ID NO: 501811 - DNA, 55 bp, Artificial
  Synthetic oligonucleotide
gaaagacactatttgaaatcgaaccagttgcggcaaggccataaccgaagccaac

SEQ ID NO: 501812 - DNA, 55 bp, Artificial
  Synthetic oligonucleotide
gaaaatatggagcgcgtaacagctatgggacgcaaagcattaaacaccgtcgggg

SEQ ID NO: 501813 - DNA, 55 bp, Artificial
  Synthetic oligonucleotide
ctttggtggaagccccgatgtatttgtataatccccaaagtatgcctaacgccag

SEQ ID NO: 501814 - DNA, 55 bp, Artificial
  Synthetic oligonucleotide
ctttgctcactgaacccgattttcctaaaccggcacaacttagcacacctcccga

SEQ ID NO: 501815 - DNA, 55 bp, Artificial
  Synthetic oligonucleotide
ctttccacgttcggcaattattgcgggtgtcgtaaggggcgaagaaggattaata

SEQ ID NO: 501816 - DNA, 55 bp, Artificial
  Synthetic oligonucleotide
ctttcaagggttctgtttgtggaagcataaagacccaatgtccatcgctttcgct

SEQ ID NO: 501817 - DNA, 55 bp, Artificial
  Synthetic oligonucleotide
cttctggacgtattttggtagaattgccaggagccaaagatgtagctcgtgtaca

SEQ ID NO: 501818 - DNA, 55 bp, Artificial
  Synthetic oligonucleotide
cttcgttgccgccaacttctgccaataaggttattcggtttaaaacaatggcggt

SEQ ID NO: 501819 - DNA, 55 bp, Artificial
  Synthetic oligonucleotide
cttcgtacaacatagcaatacgctgctcaattgaaaggggtttgtacttggcgtt

SEQ ID NO: 501820 - DNA, 55 bp, Artificial
  Synthetic oligonucleotide
cttccctagtagcccaattgcgtacttccgaagatccttttaaatctatttgacc

SEQ ID NO: 501821 - DNA, 55 bp, Artificial
  Synthetic oligonucleotide
cttatcactaaaggacagttaaacttcattaaagctgtgatgccggtccaatctg

SEQ ID NO: 501822 - DNA, 55 bp, Artificial
  Synthetic oligonucleotide
ctgttattcggccacaatctgatcagcacagagattatagaggctatgctggtag

SEQ ID NO: 501823 - DNA, 55 bp, Artificial
  Synthetic oligonucleotide
ctgtcattctaattccacccggtacccgtggtacacagggatagaacccttgtca

SEQ ID NO: 501824 - DNA, 55 bp, Artificial
  Synthetic oligonucleotide
ctggtcctcgcctaattgagaatccgaaagcatcgggacgcggacatttacgatc

SEQ ID NO: 501825 - DNA, 55 bp, Artificial
  Synthetic oligonucleotide
ctggagttttctgctaaaacaagaatggggctcttatgtggtaggtattccggtg

SEQ ID NO: 501826 - DNA, 55 bp, Artificial
  Synthetic oligonucleotide
ctggacctaaagaagaaacccgtttgtctgttaaccacgatgctataggaacttt

SEQ ID NO: 501827 - DNA, 55 bp, Artificial
  Synthetic oligonucleotide
ctgcccaacaggccagttccctctttactaatttagcacctagcgaccgattaaa

SEQ ID NO: 501828 - DNA, 55 bp, Artificial
  Synthetic oligonucleotide
ctgataccgaattacatacctcaccatgcaacccaaacaaggctgctttgtcacg

SEQ ID NO: 501829 - DNA, 55 bp, Artificial
  Synthetic oligonucleotide
ctctcacaatggacagctaccatctcaggtcaagtcccttgtacgcgccagttcc

SEQ ID NO: 501830 - DNA, 55 bp, Artificial
  Synthetic oligonucleotide
ctcgtgtcaaatcacctaccttttgaagatagagtaggttggtgggcatcataaa

SEQ ID NO: 501831 - DNA, 55 bp, Artificial
  Synthetic oligonucleotide
ctccggctacaactccatacgcgctatttagatttcaatacctatatggtgcagt

SEQ ID NO: 501832 - DNA, 55 bp, Artificial
  Synthetic oligonucleotide
gattcatggcttcccaatatcccatttcggtcagtccttgcacatcaattatgtg

SEQ ID NO: 501833 - DNA, 55 bp, Artificial
  Synthetic oligonucleotide
gatggttcaggcgggacggaatgacgatggtaccgatccatggacagcctctcac

SEQ ID NO: 501834 - DNA, 55 bp, Artificial
  Synthetic oligonucleotide
gatgggatcctgaagaacctttgcaaacagatatgggaaccactattggaggtag

SEQ ID NO: 501835 - DNA, 55 bp, Artificial
  Synthetic oligonucleotide
gatcgcctccgtatgattcgcatcggtaatagttaaggtgtacacactagtgccc

SEQ ID NO: 501836 - DNA, 55 bp, Artificial
  Synthetic oligonucleotide
gagtcaagaaatcacgcgttacgctttacaagggcttattagagaggtttgctca

SEQ ID NO: 501837 - DNA, 55 bp, Artificial
  Synthetic oligonucleotide
gaggtgagccgtgggaatgaagcgatatttatcttcttggtgtgtttaggattcg

SEQ ID NO: 501838 - DNA, 55 bp, Artificial
  Synthetic oligonucleotide
gaggagatctcctactgatgtcagctttcggtagtggatttacttggggaagcgt

SEQ ID NO: 501839 - DNA, 55 bp, Artificial
  Synthetic oligonucleotide
gagctggattccttatatgggagatttagacaaaatgcttacggatgctacctgt

SEQ ID NO: 501840 - DNA, 55 bp, Artificial
  Synthetic oligonucleotide
gagctgagcatttccatatgggagacatcggaaatttagtggcggatcagaacgg

SEQ ID NO: 501841 - DNA, 55 bp, Artificial
  Synthetic oligonucleotide
gagccaagtacatagcctgctctcctactttcatcgttttatacagacctctttc

SEQ ID NO: 501842 - DNA, 55 bp, Artificial
  Synthetic oligonucleotide
gagcagggaaatgtacttcccaagagtcctttagcaaaggcgatccattatagtc

SEQ ID NO: 501843 - DNA, 55 bp, Artificial
  Synthetic oligonucleotide
gacgttcgttgtccaattcattctgcgttcttattccataaggaggggcttgctc

SEQ ID NO: 501844 - DNA, 55 bp, Artificial
  Synthetic oligonucleotide
gaccttcaccagggagaataactacccttcacgctccaggaggacatggaatccg

SEQ ID NO: 501845 - DNA, 55 bp, Artificial
  Synthetic oligonucleotide
gaccactagctatgtctagtagccttccgactaaacgatacgctgatctagaacc

SEQ ID NO: 501846 - DNA, 55 bp, Artificial
  Synthetic oligonucleotide
gaatggtcgcctgaaaggattgctcaaagcgataagcatagatctaatgaacttg

SEQ ID NO: 501847 - DNA, 55 bp, Artificial
  Synthetic oligonucleotide
gaatgcgtgatatggcaattaaaatgatgcgtagtattggaaattttgcgggtgg

SEQ ID NO: 501848 - DNA, 55 bp, Artificial
  Synthetic oligonucleotide
gaatagttccaatacccatagttatagccctggtaggcacattttcttccccaaa

SEQ ID NO: 501849 - DNA, 55 bp, Artificial
  Synthetic oligonucleotide
gaagatataggattaggagtagcgagtgccacagcgtctgttagtcatccttgga

SEQ ID NO: 501850 - DNA, 55 bp, Artificial
  Synthetic oligonucleotide
gaagataatgacagaaccggatgaaggaataggagacggggctgtttcacctgcc

SEQ ID NO: 501851 - DNA, 55 bp, Artificial
  Synthetic oligonucleotide
gaactatactgctggtctagataagattagaacttctcctgaccacggaactgct

SEQ ID NO: 501852 - DNA, 55 bp, Artificial
  Synthetic oligonucleotide
gaaccttgtaatttgaacgaaggttcggtacggtaggcatcttccatagctgccg

SEQ ID NO: 501853 - DNA, 55 bp, Artificial
  Synthetic oligonucleotide
gaaccgcttgtgggtttaacaacaactctgcatacctactaccatcatgattgcg

SEQ ID NO: 501854 - DNA, 55 bp, Artificial
  Synthetic oligonucleotide
gaacacaaaaggcaaatgaccattagcaaagcgcttttagcaaatacccatgaat

SEQ ID NO: 501855 - DNA, 55 bp, Artificial
  Synthetic oligonucleotide
tctacgctatctggaagggcttttaagtagttttgcgggttggagcctttacctg

SEQ ID NO: 501856 - DNA, 55 bp, Artificial
  Synthetic oligonucleotide
tcgcaatcctctcgaatcaaatctgtagcgaaattgttgagaatacctccatcgc

SEQ ID NO: 501857 - DNA, 55 bp, Artificial
  Synthetic oligonucleotide
tccgcctggagcaattttagccgtggtaatacttgaaggtttaatacttaacgaa

SEQ ID NO: 501858 - DNA, 55 bp, Artificial
  Synthetic oligonucleotide
tccgaaatcggacattccaatgcttctgccagtctgtatttgaaacgagcgctat

SEQ ID NO: 501859 - DNA, 55 bp, Artificial
  Synthetic oligonucleotide
tccctaagtggtccctgtactggtacacataatcattcctccctgtccgtctggg

SEQ ID NO: 501860 - DNA, 55 bp, Artificial
  Synthetic oligonucleotide
tccaaaggtgtagaaaccggagcgcctcttttaggtcgtacacagtaaggcgcag

SEQ ID NO: 501861 - DNA, 55 bp, Artificial
  Synthetic oligonucleotide
tcattttgaggatctcgatttgcaatcagagtaatacaggtttcttctgctgcta

SEQ ID NO: 501862 - DNA, 55 bp, Artificial
  Synthetic oligonucleotide
tcattaacggagagagtaagcattttacagatgtatatgcagacccagtgcccca

SEQ ID NO: 501863 - DNA, 55 bp, Artificial
  Synthetic oligonucleotide
tattttagacatcaagtaacaaaccactaagccgacaagaacgcgtccttactcc

SEQ ID NO: 501864 - DNA, 55 bp, Artificial
  Synthetic oligonucleotide
tagttattggttactattcatcagtcggcttatcgccggggtgacaggtgctacc

SEQ ID NO: 501865 - DNA, 55 bp, Artificial
  Synthetic oligonucleotide
tagtctttaaacgatgcaaatgagttccctgcttctgcgaaagtcaacacataaa

SEQ ID NO: 501866 - DNA, 55 bp, Artificial
  Synthetic oligonucleotide
tactcgccgttcgtggttctaacaatctgcgcgtatcttcggaaagtgaagtgat

SEQ ID NO: 501867 - DNA, 55 bp, Artificial
  Synthetic oligonucleotide
tacgtgtaattctcgggtttgtccttcgctatcgaccctatcccaatcatacacg

SEQ ID NO: 501868 - DNA, 55 bp, Artificial
  Synthetic oligonucleotide
taccaatatagcgccaattgctaagctgcaaagcttaaatccgcctacgcaacca

SEQ ID NO: 501869 - DNA, 55 bp, Artificial
  Synthetic oligonucleotide
taagtcctcgaaaccctcatcacaggatactaccatcgctaatgcgaatagtgcc

SEQ ID NO: 501870 - DNA, 55 bp, Artificial
  Synthetic oligonucleotide
taacttaatggaccaccactttagagttggtgcaagtgcaaagtttgatgggttc

SEQ ID NO: 501871 - DNA, 55 bp, Artificial
  Synthetic oligonucleotide
taacacagcgccaactcggtttaaaacggcttctttgccattgcgcggacgagat

SEQ ID NO: 501872 - DNA, 55 bp, Artificial
  Synthetic oligonucleotide
gtttaccctgaacaaatttggctataccctagcagtacttaccgcctattatctg

SEQ ID NO: 501873 - DNA, 55 bp, Artificial
  Synthetic oligonucleotide
gttcttctgacggtattaccatgaatgccgatttgggtgtcggaatacaaggtgt

SEQ ID NO: 501874 - DNA, 55 bp, Artificial
  Synthetic oligonucleotide
gttctgttgcgcataagtctgcacatactcccatagcattattatcgtaagcgtc

SEQ ID NO: 501875 - DNA, 55 bp, Artificial
  Synthetic oligonucleotide
gtggccgtatttcttgtgaggagtaaacataaatggtggttgctaggaggtgttg

SEQ ID NO: 501876 - DNA, 55 bp, Artificial
  Synthetic oligonucleotide
gtgccgaattgtctcttcccgtcaatgtaaaatgaagcgtcctggcaactgtcga

SEQ ID NO: 501877 - DNA, 55 bp, Artificial
  Synthetic oligonucleotide
gtctatcaggaaaagtacctggatagtgcgggctattatgacaaacagctatcgg

SEQ ID NO: 501878 - DNA, 55 bp, Artificial
  Synthetic oligonucleotide
ttttggatctgtagggtatctaagcgattcacttgggttgggttgggcactggta

SEQ ID NO: 501879 - DNA, 55 bp, Artificial
  Synthetic oligonucleotide
ttttgctattacgtcttccaaagccttattcggtttaaactgcctcaaatcccat

SEQ ID NO: 501880 - DNA, 55 bp, Artificial
  Synthetic oligonucleotide
tttggccgttggagatgtaattcacaccgccaataacaaacccgctacctattgg

SEQ ID NO: 501881 - DNA, 55 bp, Artificial
  Synthetic oligonucleotide
tttgaaatggccacaaacctcttgcatagcctctcatatacaagaaagtttgctg

SEQ ID NO: 501882 - DNA, 55 bp, Artificial
  Synthetic oligonucleotide
ttgtgatatctttgccactcacggctccaagctctagtaatgcgttacttgctgt

SEQ ID NO: 501883 - DNA, 55 bp, Artificial
  Synthetic oligonucleotide
ttgtagcactcctttcatcgatttcaagggtgatttcatcaagtctctcctgggc

SEQ ID NO: 501884 - DNA, 55 bp, Artificial
  Synthetic oligonucleotide
ttgggaatggctcattggggcggtgcatcatctgcctacgccaaacacctttgcg

SEQ ID NO: 501885 - DNA, 55 bp, Artificial
  Synthetic oligonucleotide
ttgcaaacgcttacgcgagaaaaggaatcactgttagtgaggttatcaaacatgc

SEQ ID NO: 501886 - DNA, 55 bp, Artificial
  Synthetic oligonucleotide
ttgagggttagttgtttgaaacttcgacaagctcagtttgacaactattcgacga

SEQ ID NO: 501887 - DNA, 55 bp, Artificial
  Synthetic oligonucleotide
ttcttaccgtagagctatccgtatggctatggctgcagcgatgagaatgaacgct

SEQ ID NO: 501888 - DNA, 55 bp, Artificial
  Synthetic oligonucleotide
ttcgtcaggaacgaccaatttattgtctgggattttgcgccaacagttcaaaacg

SEQ ID NO: 501889 - DNA, 55 bp, Artificial
  Synthetic oligonucleotide
ttccataggagttttagtacctacacctactctgtccccaaagtacacatatcca

SEQ ID NO: 501890 - DNA, 55 bp, Artificial
  Synthetic oligonucleotide
ttcaatcacttctaagccagaaaagagcatagattgacgcattaccgaaagatct

SEQ ID NO: 501891 - DNA, 55 bp, Artificial
  Synthetic oligonucleotide
ttagtcgtgattctcttaatgtggatcggggcatcgccagtatcaacaggagggg

SEQ ID NO: 501892 - DNA, 55 bp, Artificial
  Synthetic oligonucleotide
ttagcattacctctgcgatcaacactacttttaatacgatcggaagggaagacgc

SEQ ID NO: 501893 - DNA, 55 bp, Artificial
  Synthetic oligonucleotide
ttacttatcgcttttcaaggctcaattaactcccgatggctcagatttacaatcc

SEQ ID NO: 501894 - DNA, 55 bp, Artificial
  Synthetic oligonucleotide
ttactggctgtgtttaaattgattcccacggcatttacacaacgtatcacggtgc

SEQ ID NO: 501895 - DNA, 55 bp, Artificial
  Synthetic oligonucleotide
tgtagcttcttcccctattgcaaaaggcaccaatacattcagtcttttacaacag

SEQ ID NO: 501896 - DNA, 55 bp, Artificial
  Synthetic oligonucleotide
tggtagctctcggcttctgtacttctggatacgaataaactgccggagcaccttt

SEQ ID NO: 501897 - DNA, 55 bp, Artificial
  Synthetic oligonucleotide
tggaactcgtattggcgattatgccatcgatttaagtgccttacaaatgttaggg

SEQ ID NO: 501898 - DNA, 55 bp, Artificial
  Synthetic oligonucleotide
tgcattcttaatccagttaccaaaacgtccttctccagtcgctttaggcttccag

SEQ ID NO: 501899 - DNA, 55 bp, Artificial
  Synthetic oligonucleotide
tctggtaagcgatactttgcagcacaggcttaaacgtgccgttatcttaccggat

SEQ ID NO: 501900 - DNA, 55 bp, Artificial
  Synthetic oligonucleotide
tctgcccctactcttgcctgaataaggtggtctgcatgcacagtagaaggaacag

SEQ ID NO: 501901 - DNA, 55 bp, Artificial
  Synthetic oligonucleotide
tctcatcggttattttgagatgctagacgctttagaccaagtgaaaggggtgacc

SEQ ID NO: 501902 - DNA, 55 bp, Artificial
  Synthetic oligonucleotide
ggctgacgaacgctatttatacaagttcctccacgtgtagcctcaagataatagg

SEQ ID NO: 501903 - DNA, 55 bp, Artificial
  Synthetic oligonucleotide
ggctaccacagccgaaagattagccattacaggaattactgaagggaatatggtt

SEQ ID NO: 501904 - DNA, 55 bp, Artificial
  Synthetic oligonucleotide
ggcgtcgtagacgttttgtctagccgaattaagcgattgtatggtattttaagcg

SEQ ID NO: 501905 - DNA, 55 bp, Artificial
  Synthetic oligonucleotide
ggcgattgctcggcttgggttttgaggtcggaaaggtactgcacgatgtgttgcc

SEQ ID NO: 501906 - DNA, 55 bp, Artificial
  Synthetic oligonucleotide
ggccgtcaccttaattttaggaggtattacctgtggaatgggtgctggattaacg

SEQ ID NO: 501907 - DNA, 55 bp, Artificial
  Synthetic oligonucleotide
ggcattgaagcttaccgattagagtcacaaggttatggaccaagtgtaccgaaga

SEQ ID NO: 501908 - DNA, 55 bp, Artificial
  Synthetic oligonucleotide
ggcattaatcaccagggcaaataatcccagggtgataatcgtcagcgggagcccg

SEQ ID NO: 501909 - DNA, 55 bp, Artificial
  Synthetic oligonucleotide
ggcataccctccacggaagcgccacgcatctactctatattctactcccgctctt

SEQ ID NO: 501910 - DNA, 55 bp, Artificial
  Synthetic oligonucleotide
ggcagatggcacgcaagttaccgctctagggagtttgcgaggcatgcaagatgta

SEQ ID NO: 501911 - DNA, 55 bp, Artificial
  Synthetic oligonucleotide
ggcactgttttgtatgcttggtgcgtttagcgtagccgcacaagacattgcaggt

SEQ ID NO: 501912 - DNA, 55 bp, Artificial
  Synthetic oligonucleotide
ggcacaagcggtagaagaaggttgcgaatacgcctttatggaagtgagctctcac

SEQ ID NO: 501913 - DNA, 55 bp, Artificial
  Synthetic oligonucleotide
ggcaaacgctctctcgcagcgcccctgttatgctcctataccgctacttccactc

SEQ ID NO: 501914 - DNA, 55 bp, Artificial
  Synthetic oligonucleotide
ggatcaatggcgttatttccggcaactatcattcccttgtccgtccatggaccag

SEQ ID NO: 501915 - DNA, 55 bp, Artificial
  Synthetic oligonucleotide
ggagttcctcagttctatcgagattatatttgggatgttggaggcgtactctgtc

SEQ ID NO: 501916 - DNA, 55 bp, Artificial
  Synthetic oligonucleotide
ggaggtgcaatcatttctatgagcgtaggagcaatatcgatatgtgtgcctggcg

SEQ ID NO: 501917 - DNA, 55 bp, Artificial
  Synthetic oligonucleotide
ggaggggaatacatcatcaagcaagtaagcttaagagctggatatcgcttcgaac

SEQ ID NO: 501918 - DNA, 55 bp, Artificial
  Synthetic oligonucleotide
ggagctattatcgcttcgggagctatcgttataaaggatgtcgaaccgtatacca

SEQ ID NO: 501919 - DNA, 55 bp, Artificial
  Synthetic oligonucleotide
ggagctacttgtagggaatctgtaccagtaacacttcttcaagtgccatgcacag

SEQ ID NO: 501920 - DNA, 55 bp, Artificial
  Synthetic oligonucleotide
ggagatggaacagtaaccttaaacggaaccggatcaactacagtaggcgttacct

SEQ ID NO: 501921 - DNA, 55 bp, Artificial
  Synthetic oligonucleotide
ggacggacaaccgacacagctcacaacggagcaattgaaaaccatcctcaaaggt

SEQ ID NO: 501922 - DNA, 55 bp, Artificial
  Synthetic oligonucleotide
ggacgataggcttgtttacgttgctcatagcccattacactcatagatccctggg

SEQ ID NO: 501923 - DNA, 55 bp, Artificial
  Synthetic oligonucleotide
ggacgaacaaattacatcgtactaatgatgtgactcctcctgttgccgaagtgac

SEQ ID NO: 501924 - DNA, 55 bp, Artificial
  Synthetic oligonucleotide
ggacccagcattttctggtatccaaagtgcatcccattgcccaggtatagcttca

SEQ ID NO: 501925 - DNA, 55 bp, Artificial
  Synthetic oligonucleotide
gtccgttgcctgtttagattcgcaaattgggcttttgtaattatgttcttctgcc

SEQ ID NO: 501926 - DNA, 55 bp, Artificial
  Synthetic oligonucleotide
gtcccaccatttctcctaaagttctgaatcctaattgcgccataatacctctcaa

SEQ ID NO: 501927 - DNA, 55 bp, Artificial
  Synthetic oligonucleotide
gtcagagcactgttcaaaatgacgctattggtaaacaaatatctcaggcccatcc

SEQ ID NO: 501928 - DNA, 55 bp, Artificial
  Synthetic oligonucleotide
gtcaatcaggatgtaacggctgatttattctatgatgccttgggacgccttcgca

SEQ ID NO: 501929 - DNA, 55 bp, Artificial
  Synthetic oligonucleotide
gtatgccgcaaacctagaacgattgaataccgaattagaaatgagcaactcccta

SEQ ID NO: 501930 - DNA, 55 bp, Artificial
  Synthetic oligonucleotide
gtagttttcagcatctgtatccgataaatgcttgttactagcggcaggatattca

SEQ ID NO: 501931 - DNA, 55 bp, Artificial
  Synthetic oligonucleotide
gtagcaaatgtaggtctggtaggtgttatccctgccaatggagaaatcattatcg

SEQ ID NO: 501932 - DNA, 55 bp, Artificial
  Synthetic oligonucleotide
gtagacaccgctccaatcaaacattgccccttcaatcgccatactcaagaagcca

SEQ ID NO: 501933 - DNA, 55 bp, Artificial
  Synthetic oligonucleotide
gtacttgtggcattcttcacaggagaagagaaggggctatggggatctaagcatc

SEQ ID NO: 501934 - DNA, 55 bp, Artificial
  Synthetic oligonucleotide
gtaatcctatttcgaaagtagttgctccggtacgtggaattccgattaagggacc

SEQ ID NO: 501935 - DNA, 55 bp, Artificial
  Synthetic oligonucleotide
ggtgtggttctagctacttttaccccatctaatttctcagcggccatatgcggtg

SEQ ID NO: 501936 - DNA, 55 bp, Artificial
  Synthetic oligonucleotide
ggtgctaatggaaatccatctccgcaaatctactcaggaatgctgcctacaaccg

SEQ ID NO: 501937 - DNA, 55 bp, Artificial
  Synthetic oligonucleotide
ggtgacatctcttttatgtatgagattccggcgatgcgggattttaaacctttgg

SEQ ID NO: 501938 - DNA, 55 bp, Artificial
  Synthetic oligonucleotide
ggtctatcttttgctcaggtaactttcaatcccgggatcagaggcggtcttaacc

SEQ ID NO: 501939 - DNA, 55 bp, Artificial
  Synthetic oligonucleotide
ggtaagtataaattccgacggaacagtgttggctattggtgcgccaggtgctacg

SEQ ID NO: 501940 - DNA, 55 bp, Artificial
  Synthetic oligonucleotide
gggttcaaggaacggatacgcccaaaacacggaacgagcaaatatcctaggagaa

SEQ ID NO: 501941 - DNA, 55 bp, Artificial
  Synthetic oligonucleotide
gggtaagacaggagttcgaagaggcagagacagaatactctatcgctaaggcggc

SEQ ID NO: 501942 - DNA, 55 bp, Artificial
  Synthetic oligonucleotide
gggcttcgtcttaatgatgcgtggaataaacaaccacttccacatttaggaagac

SEQ ID NO: 501943 - DNA, 55 bp, Artificial
  Synthetic oligonucleotide
gggctggaggctccaccgctggaagtaaaggaatcaaattggcctatgaaaccgc

SEQ ID NO: 501944 - DNA, 55 bp, Artificial
  Synthetic oligonucleotide
gggcggcagttccgatcgtggagtaattagcgcagctagttatgaggcgcgtaag

SEQ ID NO: 501945 - DNA, 55 bp, Artificial
  Synthetic oligonucleotide
gggatgcccgataaaacagcaatgtataggaaagagtcatgaaaagcggatcaat

SEQ ID NO: 501946 - DNA, 55 bp, Artificial
  Synthetic oligonucleotide
gggaaatggtacgatgtaatcatgctagagcgccgaagttcagtagtgggtaatg

SEQ ID NO: 501947 - DNA, 55 bp, Artificial
  Synthetic oligonucleotide
gggaaagaggttatcgaacttttgctagctgcttatctcgaaccattcttttacc

SEQ ID NO: 501948 - DNA, 55 bp, Artificial
  Synthetic oligonucleotide
ggcttcgcatgagttttatgaagatcctatgggagttccttctttatcgtcttgg

SEQ ID NO: 501949 - DNA, 55 bp, Artificial
  Synthetic oligonucleotide
catggtcccaagctctactgttgattttggctgtaacagcttcattgtacatgtg

SEQ ID NO: 501950 - DNA, 55 bp, Artificial
  Synthetic oligonucleotide
catggtaagtgggcagggagagaactctctcgtatagatgtgctttgtcccacgg

SEQ ID NO: 501951 - DNA, 55 bp, Artificial
  Synthetic oligonucleotide
catgcaacgtgctatatcgagagcaatttactcttttatcccaaattgttgcggg

SEQ ID NO: 501952 - DNA, 55 bp, Artificial
  Synthetic oligonucleotide
catgataggcagtcaaatcgaattgaacgggaaccacggatacatagccgtttgc

SEQ ID NO: 501953 - DNA, 55 bp, Artificial
  Synthetic oligonucleotide
catcgcgtacatcttctacgacacatatcgtctggtgatcgcgtgcttcgttagc

SEQ ID NO: 501954 - DNA, 55 bp, Artificial
  Synthetic oligonucleotide
catagggatgggtaactccccataatgtaacaacaggcaccccgtaatttgccgc

SEQ ID NO: 501955 - DNA, 55 bp, Artificial
  Synthetic oligonucleotide
caggcaacaggtatgtttgagcccctgctgtataacggagcaaaattttggcaaa

SEQ ID NO: 501956 - DNA, 55 bp, Artificial
  Synthetic oligonucleotide
cagccgtacttggcgcttgaggtaaaccataaagaatatacgttccgtaatcttc

SEQ ID NO: 501957 - DNA, 55 bp, Artificial
  Synthetic oligonucleotide
cagcaggagcctcacgggaaagattttcgaaattcctggtaaactttcctgaagg

SEQ ID NO: 501958 - DNA, 55 bp, Artificial
  Synthetic oligonucleotide
cagcaaactgtagagtataattacgacacacttgctagcagaatgcgtgaattgg

SEQ ID NO: 501959 - DNA, 55 bp, Artificial
  Synthetic oligonucleotide
cagaggagcttttgtaccagctactacatcacctgtcgcctgtgttgccatcacc

SEQ ID NO: 501960 - DNA, 55 bp, Artificial
  Synthetic oligonucleotide
cacttacatatactcttggcttttccaaacacgtattttgccgacttgaatcctt

SEQ ID NO: 501961 - DNA, 55 bp, Artificial
  Synthetic oligonucleotide
cactaatttctcgggctctggtctaggtactccagggtatacctcttcgtggtac

SEQ ID NO: 501962 - DNA, 55 bp, Artificial
  Synthetic oligonucleotide
cacgcttttccgatcacagctctagcattaatgatcgcgcctgaggacacataag

SEQ ID NO: 501963 - DNA, 55 bp, Artificial
  Synthetic oligonucleotide
cacgctgaacgctgaaagagtgagcgtggtgcttggtcaagataagggcggacgc

SEQ ID NO: 501964 - DNA, 55 bp, Artificial
  Synthetic oligonucleotide
cacctactaaatggtcgccaggctttggaaaactaacttctatatcaggtgtagt

SEQ ID NO: 501965 - DNA, 55 bp, Artificial
  Synthetic oligonucleotide
cacccctaagctcaacccagcataaaggtctaatggacgagggaggttgaataag

SEQ ID NO: 501966 - DNA, 55 bp, Artificial
  Synthetic oligonucleotide
cacagcgattggcagctacacgatttacaaggtattagaatccgagaattttcgg

SEQ ID NO: 501967 - DNA, 55 bp, Artificial
  Synthetic oligonucleotide
caatcatccaaacaggaatgcgcgatggttttatttcaatggggcatggtcgtgc

SEQ ID NO: 501968 - DNA, 55 bp, Artificial
  Synthetic oligonucleotide
caatacgtattgcaaaaccgggaaatctaaaagctagcttacgcaaagaattagg

SEQ ID NO: 501969 - DNA, 55 bp, Artificial
  Synthetic oligonucleotide
caagacaaagtagcggagattttaggaatcaaacccgtggaagtttacgaagtgg

SEQ ID NO: 501970 - DNA, 55 bp, Artificial
  Synthetic oligonucleotide
cccctgctattagaccagccatgcctactagggtaaaattactttcggaaacatg

SEQ ID NO: 501971 - DNA, 55 bp, Artificial
  Synthetic oligonucleotide
ccccaatgagaatcatacaccgtgcggtcataaaattttacacgtccattttcgg

SEQ ID NO: 501972 - DNA, 55 bp, Artificial
  Synthetic oligonucleotide
cccatctggagctttagctaccgaaacgccttttgcacctgcatcaaggacttct

SEQ ID NO: 501973 - DNA, 55 bp, Artificial
  Synthetic oligonucleotide
cccatagagccatcaagaggagggaaaccttctacatctttaaacttgtctataa

SEQ ID NO: 501974 - DNA, 55 bp, Artificial
  Synthetic oligonucleotide
cccagtagcagtatggagttggaataccatgatcgcatgggtatgtggtgatgtg

SEQ ID NO: 501975 - DNA, 55 bp, Artificial
  Synthetic oligonucleotide
cccaccattgatacaacgccatgcactttgaatatacgaattcacagtcaacgca

SEQ ID NO: 501976 - DNA, 55 bp, Artificial
  Synthetic oligonucleotide
cccaattgttttgccttttcggctaagtcagctgatagggcttcactatgacctg

SEQ ID NO: 501977 - DNA, 55 bp, Artificial
  Synthetic oligonucleotide
cccaaatcggtaaacaaccctgttaagtgggtggtacgcaccacagcaccggata

SEQ ID NO: 501978 - DNA, 55 bp, Artificial
  Synthetic oligonucleotide
cccaaaccacggcatcatcattaattggcttggtgaatgaaggccaacccgttcc

SEQ ID NO: 501979 - DNA, 55 bp, Artificial
  Synthetic oligonucleotide
ccatgggcaattgccgtttctatttctagaccactgacacaatcggctcccaagc

SEQ ID NO: 501980 - DNA, 55 bp, Artificial
  Synthetic oligonucleotide
ccatcagttccctccaatagtgatttcaattgatcccctgaaagcattactttct

SEQ ID NO: 501981 - DNA, 55 bp, Artificial
  Synthetic oligonucleotide
ccataggcatggggtccgttggaatatccgataccccaaagcggctaattacctg

SEQ ID NO: 501982 - DNA, 55 bp, Artificial
  Synthetic oligonucleotide
ccagttgcagtaaaccattgaagatgtggttacaagcccaaatgttcgattgtac

SEQ ID NO: 501983 - DNA, 55 bp, Artificial
  Synthetic oligonucleotide
ccagcgatatgtaaccaccaagcactgcgttcaacaatgattagtgcgctttcgg

SEQ ID NO: 501984 - DNA, 55 bp, Artificial
  Synthetic oligonucleotide
ccagcagttatgaatgcacaaacagtcaaagggattgtgacggatgagaatgggc

SEQ ID NO: 501985 - DNA, 55 bp, Artificial
  Synthetic oligonucleotide
ccactggcgtttctaggtttccacccgccagaaacaaatggctcgttggacacca

SEQ ID NO: 501986 - DNA, 55 bp, Artificial
  Synthetic oligonucleotide
ccacatcgctagaaggctttggacttgttgatttaaagcagatggcatcgtctcc

SEQ ID NO: 501987 - DNA, 55 bp, Artificial
  Synthetic oligonucleotide
ccaacaccaggggataaagcaggaagccatagcgaacacttcgttgactaccata

SEQ ID NO: 501988 - DNA, 55 bp, Artificial
  Synthetic oligonucleotide
ccaaatttacgacagttctaaagtaagaccgaaacaacgcgaatttgctcgtaga

SEQ ID NO: 501989 - DNA, 55 bp, Artificial
  Synthetic oligonucleotide
ccaaaatttcgttgtcctgagtctggaacatttcaactgctaaaagaccaacgtg

SEQ ID NO: 501990 - DNA, 55 bp, Artificial
  Synthetic oligonucleotide
cattaaaggctctaagtactgaccatcgtgaaacaaagttccgtatgtagtcccc

SEQ ID NO: 501991 - DNA, 55 bp, Artificial
  Synthetic oligonucleotide
agacttcaaggcgttgatagagaagcgcgaccttgccaagaccaccttagagacc

SEQ ID NO: 501992 - DNA, 55 bp, Artificial
  Synthetic oligonucleotide
agacccatcaggtacttatacctacacgaatgaggctggtgtagcggtggtgatt

SEQ ID NO: 501993 - DNA, 55 bp, Artificial
  Synthetic oligonucleotide
acttttctttcggcatccatcgtttctatagaagcctctatccaccagcgttcag

SEQ ID NO: 501994 - DNA, 55 bp, Artificial
  Synthetic oligonucleotide
acttagacttcgcgaggaagctaattatgtcagagttggggatagaacaatatcc

SEQ ID NO: 501995 - DNA, 55 bp, Artificial
  Synthetic oligonucleotide
actgccaggaccagaagtgcacccatgaaagtgtatcactatacatcctagtttt

SEQ ID NO: 501996 - DNA, 55 bp, Artificial
  Synthetic oligonucleotide
actctggcaatggcagaagttaaaccttcttcaaatggactgttagaaggctgtc

SEQ ID NO: 501997 - DNA, 55 bp, Artificial
  Synthetic oligonucleotide
acgaagtcgcaggataaacaatgcattttccttccgttaaaagtcagactctttt

SEQ ID NO: 501998 - DNA, 55 bp, Artificial
  Synthetic oligonucleotide
acatggtagatacgaagcccatgcctaaaccgccgtaagcttcaggaaccgctac

SEQ ID NO: 501999 - DNA, 55 bp, Artificial
  Synthetic oligonucleotide
acagcttccatccttagcctgacgacgataataagtcgtttgcgttaacgtttgg

SEQ ID NO: 502000 - DNA, 55 bp, Artificial
  Synthetic oligonucleotide
acaagccgtaataaggccctgccatagtgtccaacttctgggctttggcatcgcc

SEQ ID NO: 502001 - DNA, 55 bp, Artificial
  Synthetic oligonucleotide
acaaattgttgtacacatcccatactttgaattgaatcgtatgcattcccggatc

SEQ ID NO: 502002 - DNA, 55 bp, Artificial
  Synthetic oligonucleotide
aatgccaacggcgctggatgtccccaaaatatggccataaccttgagcccgcagt

SEQ ID NO: 502003 - DNA, 55 bp, Artificial
  Synthetic oligonucleotide
aatcgcgaaaggccaaatggcgtgtccaattttcagacgtggtaggaataacgtg

SEQ ID NO: 502004 - DNA, 55 bp, Artificial
  Synthetic oligonucleotide
aataagccgaattagaatatgctcgatctgtatcaggagcaaacttcactccttg

SEQ ID NO: 502005 - DNA, 55 bp, Artificial
  Synthetic oligonucleotide
aagttttggtattggttctatgatcggttcgtggttgggcggcaaactttcggac

SEQ ID NO: 502006 - DNA, 55 bp, Artificial
  Synthetic oligonucleotide
aagtcctgttgcattggcatctctaaaattaccttcgcgggtggtgtttgtattg

SEQ ID NO: 502007 - DNA, 55 bp, Artificial
  Synthetic oligonucleotide
aaggattgtcccgcagctatataacctaatggttctgatcctccggatgttgctg

SEQ ID NO: 502008 - DNA, 55 bp, Artificial
  Synthetic oligonucleotide
aaggaagcggctccattacgtccggttgctgcaaatcaacccgagcctgcaagaa

SEQ ID NO: 502009 - DNA, 55 bp, Artificial
  Synthetic oligonucleotide
aacagagcctcgatgctagtaccttagcctacatggatatttacatcaatgacgg

SEQ ID NO: 502010 - DNA, 55 bp, Artificial
  Synthetic oligonucleotide
aacacagctggttctgtagatcctaaactggctaccgaattggctaaaggagtgg

SEQ ID NO: 502011 - DNA, 55 bp, Artificial
  Synthetic oligonucleotide
aaacaattgtcttcgggtgcgtatatcgttaagggatatgtatacgagaacggtg

SEQ ID NO: 502012 - DNA, 55 bp, Artificial
  Synthetic oligonucleotide
caagaagactgtaatcggggtcgttgctaaagtaggtgtaaagacttacgggctc

SEQ ID NO: 502013 - DNA, 55 bp, Artificial
  Synthetic oligonucleotide
caaatgggcgaaaacgtaagatcaggagcacaaaaggtaggaagttctttaggcg

SEQ ID NO: 502014 - DNA, 55 bp, Artificial
  Synthetic oligonucleotide
caaacccggagacgagattatctcaaccagtgatctttatggtggctcctaccgc

SEQ ID NO: 502015 - DNA, 55 bp, Artificial
  Synthetic oligonucleotide
caaaccacttacaatggacggataatggatacgggcgaacacccaattagtgggg

SEQ ID NO: 502016 - DNA, 55 bp, Artificial
  Synthetic oligonucleotide
attacacctgcgcttaaaccaaaagacaactgattcaaggttctaaaatcgcccc

SEQ ID NO: 502017 - DNA, 55 bp, Artificial
  Synthetic oligonucleotide
atgggctacaccgacttgagaataagcaatactcattcctccgtgccaagaggcc

SEQ ID NO: 502018 - DNA, 55 bp, Artificial
  Synthetic oligonucleotide
atggatcattccggagactatgtagaactagccatgtatgggcctggcagcgaac

SEQ ID NO: 502019 - DNA, 55 bp, Artificial
  Synthetic oligonucleotide
atggaaatgcgcaaacgtggggtgggtacggataagattgtttatggcggtgacc

SEQ ID NO: 502020 - DNA, 55 bp, Artificial
  Synthetic oligonucleotide
atctttcgaacacccaatttacgctagagggaaattatgcttttggagatgtgcc

SEQ ID NO: 502021 - DNA, 55 bp, Artificial
  Synthetic oligonucleotide
atctgctttacttaggtgtttgtggtgtactttatgggcttttcttagccctcgt

SEQ ID NO: 502022 - DNA, 55 bp, Artificial
  Synthetic oligonucleotide
atctactgggagaattagtaaagcaagtcgagaaagacttccgtatgactgtgga

SEQ ID NO: 502023 - DNA, 55 bp, Artificial
  Synthetic oligonucleotide
atcggacgcgttgaatgctccatcaagtgaaacaagtgcagagtcggtagctcct

SEQ ID NO: 502024 - DNA, 55 bp, Artificial
  Synthetic oligonucleotide
atataatcggtgtgttgttctggcacaaaatttcctttggtacgggtcccctcta

SEQ ID NO: 502025 - DNA, 55 bp, Artificial
  Synthetic oligonucleotide
ataggacactgcattggtttacgtcatacagactggtttagccgtcaaagctgtg

SEQ ID NO: 502026 - DNA, 55 bp, Artificial
  Synthetic oligonucleotide
ataattgaatctcgacttagcccagtattatctgtcccaggaatgttacgtgcac

SEQ ID NO: 502027 - DNA, 55 bp, Artificial
  Synthetic oligonucleotide
agtttctacagatataggccctactcctaaacgtagacccactcttttagagggg

SEQ ID NO: 502028 - DNA, 55 bp, Artificial
  Synthetic oligonucleotide
agtacttgcctgttgaataatagcaattcctttctctgacgctatcccttgtgat

SEQ ID NO: 502029 - DNA, 55 bp, Artificial
  Synthetic oligonucleotide
aggactatacacctttggtgtacattatgcgcttgaccgctaagagctcaccaaa

SEQ ID NO: 502030 - DNA, 55 bp, Artificial
  Synthetic oligonucleotide
agctgtacaacttgggtaatttgttcaacgctcataagaggaagtgttagcccgt

SEQ ID NO: 502031 - DNA, 55 bp, Artificial
  Synthetic oligonucleotide
agcctcactcactaagaattttccaggttcaaaagctaatgtcaacgttcgaccg

SEQ ID NO: 502032 - DNA, 55 bp, Artificial
  Synthetic oligonucleotide
agcattgcgtcttccgtatccttttaatactgctggttctccaaacttctcggca

SEQ ID NO: 502033 - DNA, 55 bp, Artificial
  Synthetic oligonucleotide
cgatgagatgttttctggtcatatgcacggcattgctaatgaattggtcctgctc

SEQ ID NO: 502034 - DNA, 55 bp, Artificial
  Synthetic oligonucleotide
cgaggcctctgagttctgctagaccttttagccttcccaaaagcgagtagccagg

SEQ ID NO: 502035 - DNA, 55 bp, Artificial
  Synthetic oligonucleotide
cggtgctagtaaactacgctccggcttatcagttgttatagcgtcaaaactattt

SEQ ID NO: 502036 - DNA, 55 bp, Artificial
  Synthetic oligonucleotide
cgaccacgctgatattttagacagtatgactggttccgttgcaccaaaccctttc

SEQ ID NO: 502037 - DNA, 55 bp, Artificial
  Synthetic oligonucleotide
cgaatgcaaagtaggtcgcacgcataggaagtcggttctcttcttggaccgacgg

SEQ ID NO: 502038 - DNA, 55 bp, Artificial
  Synthetic oligonucleotide
cggtggcatcgcgcagtgcatcaatgagttctgaggtagtacgagggcggaaagc

SEQ ID NO: 502039 - DNA, 55 bp, Artificial
  Synthetic oligonucleotide
cgaagcacctatacgaagacctcttgtaacaggcgataaaggttaccacgatgta

SEQ ID NO: 502040 - DNA, 55 bp, Artificial
  Synthetic oligonucleotide
cgaaccgcttcaatgttggaaagtgtaccctcatgataatctcccgtacgaatgt

SEQ ID NO: 502041 - DNA, 55 bp, Artificial
  Synthetic oligonucleotide
cctttacaacgtatgcgaatttgtcaatccaaccttgggctgaagggttcatagc

SEQ ID NO: 502042 - DNA, 55 bp, Artificial
  Synthetic oligonucleotide
ccttgctctaggtattgggcgtagttaccgtagtaaacaatacccatctggtccg

SEQ ID NO: 502043 - DNA, 55 bp, Artificial
  Synthetic oligonucleotide
ccttctgcaaaccgttcttgcaatatgacagtatgacacggttgtatgtccgccc

SEQ ID NO: 502044 - DNA, 55 bp, Artificial
  Synthetic oligonucleotide
cctgttggcctactcgtggagatgatgacgatcttagaaggagtagttatgagcc

SEQ ID NO: 502045 - DNA, 55 bp, Artificial
  Synthetic oligonucleotide
cggttatgattggtaaccttttccggattaagtaggaaagcctggtccgtgtgga

SEQ ID NO: 502046 - DNA, 55 bp, Artificial
  Synthetic oligonucleotide
cggttcctttaattgcggctggaggtatcgctacaggtagaggaatgcttgcggc

SEQ ID NO: 502047 - DNA, 55 bp, Artificial
  Synthetic oligonucleotide
cctgtggattagtaaacacagctctaaagttcacacttccagtacgagggtctac

SEQ ID NO: 502048 - DNA, 55 bp, Artificial
  Synthetic oligonucleotide
cctgtataacgaagacctccatcaccgatcactggtacacctgttccttttagag

SEQ ID NO: 502049 - DNA, 55 bp, Artificial
  Synthetic oligonucleotide
cctgcgatcaattcggctgctttaaggaaaatagcggcacgttgttcccaagcca

SEQ ID NO: 502050 - DNA, 55 bp, Artificial
  Synthetic oligonucleotide
cctctgtccctgcctcattggtataggtgtacttaccgttacctgatgcatcctt

SEQ ID NO: 502051 - DNA, 55 bp, Artificial
  Synthetic oligonucleotide
cgcttgtggattgtaaacttacgggagtaggaccttgtcatgtacaaaaccaaag

SEQ ID NO: 502052 - DNA, 55 bp, Artificial
  Synthetic oligonucleotide
cggaacaaggtcgagcagatttagctgaacctgaattggctcaagctactgtgat

SEQ ID NO: 502053 - DNA, 55 bp, Artificial
  Synthetic oligonucleotide
cggaagctttaaagtatttggtaccggctacagatgataacagaaacatcccgga

SEQ ID NO: 502054 - DNA, 55 bp, Artificial
  Synthetic oligonucleotide
cgcttgtcgcacacaagcgcgaatagataccgttccaaatcgcaatgctattccc

SEQ ID NO: 502055 - DNA, 55 bp, Artificial
  Synthetic oligonucleotide
cgctactggagctgaatgataccaaactgatggatgtcaataagaccgttgagtt

SEQ ID NO: 502056 - DNA, 55 bp, Artificial
  Synthetic oligonucleotide
cgctaagttggttctagacttagccccttgatactctccgaaatacttccctgtc

SEQ ID NO: 502057 - DNA, 55 bp, Artificial
  Synthetic oligonucleotide
cgcgggtttaatgatcctcgcgtaattcgacagcctaatcagttgcctgtttggt

SEQ ID NO: 502058 - DNA, 55 bp, Artificial
  Synthetic oligonucleotide
cgcgcatatccaatactgtcgagtaagccccgatcaaagaatagcggcgtttcac

SEQ ID NO: 502059 - DNA, 55 bp, Artificial
  Synthetic oligonucleotide
cggactatgaacaccaagctcccaaatcatttcagcaagatttagactgggcaag

SEQ ID NO: 502060 - DNA, 55 bp, Artificial
  Synthetic oligonucleotide
cgcgatcggagttcgttatcgactgattaaacgtcgaagaataggctgcaaaacc

SEQ ID NO: 502061 - DNA, 55 bp, Artificial
  Synthetic oligonucleotide
cgccggtgctccaacaaaaggttgttttccccagtaggttggtgcactctccgca

SEQ ID NO: 502062 - DNA, 55 bp, Artificial
  Synthetic oligonucleotide
cggcgctatcaaagagcgttccggcttatcagttgtaatggcgtcataaccattc

SEQ ID NO: 502063 - DNA, 55 bp, Artificial
  Synthetic oligonucleotide
cgccaccaaggctcactcgacttgttcctgtcttgggatcaccaagtgaaatcgc

SEQ ID NO: 502064 - DNA, 55 bp, Artificial
  Synthetic oligonucleotide
cgccaatcaatcgacacaatccaacacaacgccaatgttggttacgaagcagctg

SEQ ID NO: 502065 - DNA, 55 bp, Artificial
  Synthetic oligonucleotide
cgcatggcgtactttctttgtccccaaatttgtacactacttactccctgaatgg

SEQ ID NO: 502066 - DNA, 55 bp, Artificial
  Synthetic oligonucleotide
cggtagcatatcagtatactattggtgacaaagcataccaggtgggagagtttgg

SEQ ID NO: 502067 - DNA, 55 bp, Artificial
  Synthetic oligonucleotide
cggtgaaaagatgttcgggcgaccagatattttctatccctttcggaaactgcgg

SEQ ID NO: 502068 - DNA, 55 bp, Artificial
  Synthetic oligonucleotide
cgatgtaacgaacaacaaattctactacatcaaagaggatggaacccaaggcgaa

SEQ ID NO: 502069 - DNA, 55 bp, Artificial
  Synthetic oligonucleotide
ccgcagtggtttgggattgtccttgtataacgaccgcaatggttacaccaagcag

SEQ ID NO: 502070 - DNA, 55 bp, Artificial
  Synthetic oligonucleotide
ccgcaaggcgttcttgtttccacggcatatcgtgttgcaataaaatggaggattc

SEQ ID NO: 502071 - DNA, 55 bp, Artificial
  Synthetic oligonucleotide
ccgcaacgatcaacccagcttatgctggaagtgtagatcacttgcaactctttgg

SEQ ID NO: 502072 - DNA, 55 bp, Artificial
  Synthetic oligonucleotide
ccgagcattatgccagtcattggtttgaaccctggaactataaatggtatactgg

SEQ ID NO: 502073 - DNA, 55 bp, Artificial
  Synthetic oligonucleotide
ctattacgagttcttctagaggccttaagaatacgtctatctcctgcaccccttc

SEQ ID NO: 502074 - DNA, 55 bp, Artificial
  Synthetic oligonucleotide
ccgaagcgtaggttctctctagtagcagtaagtacttcgtcacggccatctgcta

SEQ ID NO: 502075 - DNA, 55 bp, Artificial
  Synthetic oligonucleotide
ccctctttaggtgacatgacaactccggttctcataatcgctaatcttttcccca

SEQ ID NO: 502076 - DNA, 55 bp, Artificial
  Synthetic oligonucleotide
ctcatagagcgtaatgccgggttggcacttctgaaatgtaatattggcaacggct

SEQ ID NO: 502077 - DNA, 55 bp, Artificial
  Synthetic oligonucleotide
cccgttccggttttcccgattaggtaaacaaactcgcccttatcaacggttacgc

SEQ ID NO: 502078 - DNA, 55 bp, Artificial
  Synthetic oligonucleotide
cccgtggtcttttaccggggcgccaaagctatccatagaatacacgtggtaatcc

SEQ ID NO: 502079 - DNA, 55 bp, Artificial
  Synthetic oligonucleotide
cccgtattcgcaccatcatctgataagccgtaagagtaataaggattaccttcct

SEQ ID NO: 502080 - DNA, 55 bp, Artificial
  Synthetic oligonucleotide
cccggtgcttccaaacaacggcgggcttttaaataacggaaaccttccgcaacga

SEQ ID NO: 502081 - DNA, 55 bp, Artificial
  Synthetic oligonucleotide
cccgggatcgatgactactaatggctatatagtcgaaggtctgggaaatgcagag

SEQ ID NO: 502082 - DNA, 55 bp, Artificial
  Synthetic oligonucleotide
cccgcaaattcaatttcgaaatgggatattagcagtgctcctaatgatgcatgga

SEQ ID NO: 502083 - DNA, 55 bp, Artificial
  Synthetic oligonucleotide
ctccacgcatggaaagtttatctgctgtagttttagcttcaggaacaaagatcca

SEQ ID NO: 502084 - DNA, 55 bp, Artificial
  Synthetic oligonucleotide
cccgactgagcttttagttcatttaaagctattgggtgcgctccttttaacaatg

SEQ ID NO: 502085 - DNA, 55 bp, Artificial
  Synthetic oligonucleotide
cccgaattttcggtttacaaaatagacaatactagtccgcagccctacagtttcc

SEQ ID NO: 502086 - DNA, 55 bp, Artificial
  Synthetic oligonucleotide
cgtacgagatctgatccaatccagctcctccatattcagcagggatgtaaggacc

SEQ ID NO: 502087 - DNA, 55 bp, Artificial
  Synthetic oligonucleotide
cctagtggcacttttgttcgattcattatttgctgcgtacgtgcattaaaccacg

SEQ ID NO: 502088 - DNA, 55 bp, Artificial
  Synthetic oligonucleotide
ccgttgtgtaaccctcaagcaggtgctattgtatccccaacaggcaggcgaacag

SEQ ID NO: 502089 - DNA, 55 bp, Artificial
  Synthetic oligonucleotide
cgtagacagacttgtctctggatctactcctcctacataagcgacacttaccacc

SEQ ID NO: 502090 - DNA, 55 bp, Artificial
  Synthetic oligonucleotide
ccgtgttggattcatcgtagagaatgatcttgggttgcagaattagtgttctcgc

SEQ ID NO: 502091 - DNA, 55 bp, Artificial
  Synthetic oligonucleotide
ccgtctattgggaattgcgccagtggctccagatgtaaactttatcgatagtgag

SEQ ID NO: 502092 - DNA, 55 bp, Artificial
  Synthetic oligonucleotide
ccggtttggtggagtgattgtccggcaaaacttaaaggatggtttgacagggttt

SEQ ID NO: 502093 - DNA, 55 bp, Artificial
  Synthetic oligonucleotide
ccggtatcgataagcagcatcttggactcgaattaggagctgaagcacagttaac

SEQ ID NO: 502094 - DNA, 55 bp, Artificial
  Synthetic oligonucleotide
cgtcaataaccattcgaacatcagcgggcacaacattgtgctgatttccagcctc

SEQ ID NO: 502095 - DNA, 55 bp, Artificial
  Synthetic oligonucleotide
ccgccgcgatcacgtctataatcgtaaccatcttttattcgctggcttcttgtgt

SEQ ID NO: 502096 - DNA, 55 bp, Artificial
  Synthetic oligonucleotide
cgtctgattgcatgttccaatcactttagatgtccagtcccaaagacttccaatg

SEQ ID NO: 502097 - DNA, 55 bp, Artificial
  Synthetic oligonucleotide
cgtgactgcagttgtttcaactgttggcggtgttctgggcttttagaggtcacgt

SEQ ID NO: 502098 - DNA, 55 bp, Artificial
  Synthetic oligonucleotide
cgtgtgactcgattgagtgtttacaagtacctgttgtgtataacgttcctagtgg

SEQ ID NO: 502099 - DNA, 55 bp, Artificial
  Synthetic oligonucleotide
ccgcccatattaccgcctgtgggacaactcaaacactgccttatgtagcgcgagc

SEQ ID NO: 502100 - DNA, 55 bp, Artificial
  Synthetic oligonucleotide
ccgccatcacggtcgataattccaattacttttgcgcccatttcgactagataaa

SEQ ID NO: 502101 - DNA, 55 bp, Artificial
  Synthetic oligonucleotide
ctaaactccaagtataaacaatttcgctttgatctagtgcactgtagtccgcctc

SEQ ID NO: 502102 - DNA, 55 bp, Artificial
  Synthetic oligonucleotide
ccgccaacaacagggattctaattgcagtagcagatacctgaacagattcgtctc

SEQ ID NO: 502103 - DNA, 54 bp, Artificial
  Synthetic oligonucleotide
tagttaccattccatccgacagccttaacaatccactacttcccaacacagcgg

SEQ ID NO: 502104 - DNA, 54 bp, Artificial
  Synthetic oligonucleotide
aacgctcctagatcaggctaccctttctaaagttcttaaagcgtcacaggtttt

SEQ ID NO: 502105 - DNA, 54 bp, Artificial
  Synthetic oligonucleotide
cgggcgcacctgtagtgacacccaaagtgtcccctaatgatgcacgttttggtt

SEQ ID NO: 502106 - DNA, 54 bp, Artificial
  Synthetic oligonucleotide
tagggtctccgagaggaagttttacaacatcgctcaatgtgttaattcgatctt

SEQ ID NO: 502107 - DNA, 54 bp, Artificial
  Synthetic oligonucleotide
cggggttagatgtaccccagagtacttcagataacgcaagcattcttgggaaaa

SEQ ID NO: 502108 - DNA, 54 bp, Artificial
  Synthetic oligonucleotide
aagatcgtgtgcgtaataccccaatatgcgaatcgggtatcgtttcaacagcta

SEQ ID NO: 502109 - DNA, 54 bp, Artificial
  Synthetic oligonucleotide
cctccacacccagggcataaccaccctgtctcacgatagaacatacacgataga

SEQ ID NO: 502110 - DNA, 54 bp, Artificial
  Synthetic oligonucleotide
agttccatttgtaccgcgaatgtaagatccagtcgcacgaacgttgtgaataga

SEQ ID NO: 502111 - DNA, 54 bp, Artificial
  Synthetic oligonucleotide
gtgttggttatacagggcctgctgtaggtttgtcagcgagtttggggctaagct

SEQ ID NO: 502112 - DNA, 54 bp, Artificial
  Synthetic oligonucleotide
gacatcacggttcagttagatgaatctggaaatgcttcgattactgcagcagat

SEQ ID NO: 502113 - DNA, 54 bp, Artificial
  Synthetic oligonucleotide
ccatctcggtaagcaactctgcatcatctgtattatgagctcctaatcctttac

SEQ ID NO: 502114 - DNA, 54 bp, Artificial
  Synthetic oligonucleotide
gtatggacaatgcttatagaacagagcctgcctttaagctacaaggttcttacc

SEQ ID NO: 502115 - DNA, 54 bp, Artificial
  Synthetic oligonucleotide
gcatacatttatggctatccaatgttaatgggctatcgggctttgtatgcctct

SEQ ID NO: 502116 - DNA, 54 bp, Artificial
  Synthetic oligonucleotide
gccatatcaataccggattgaatcgcaagtcgataggcaagcatttcccaagca

SEQ ID NO: 502117 - DNA, 53 bp, Artificial
  Synthetic oligonucleotide
cttcagatggatcgtagtagcctccaatgtcttgtggatgcccatgagaagcc

SEQ ID NO: 502118 - DNA, 53 bp, Artificial
  Synthetic oligonucleotide
aatttcaggtcgccaccattatgaaaaccctcaccaatgggttccaaaagcaa

SEQ ID NO: 502119 - DNA, 53 bp, Artificial
  Synthetic oligonucleotide
caacagtccatgtaataaatgtaggcggcccagaaacggagccaactttacgc

SEQ ID NO: 502120 - DNA, 53 bp, Artificial
  Synthetic oligonucleotide
atttatgaaccagtatatgtagccacgcctcctgtgtttagcttgttctgggg

SEQ ID NO: 502121 - DNA, 53 bp, Artificial
  Synthetic oligonucleotide
ttatacagggcttgtaaatatgttagattctgtggcgactggagtggtagtaa

SEQ ID NO: 502122 - DNA, 53 bp, Artificial
  Synthetic oligonucleotide
gcatcacagcgaatgacattgcagatttgtggatccatgaaggtttcactacg

SEQ ID NO: 502123 - DNA, 53 bp, Artificial
  Synthetic oligonucleotide
acttgtaccgcctcccgattctacgaaggctactgctaaaataatcgaactgg

SEQ ID NO: 502124 - DNA, 53 bp, Artificial
  Synthetic oligonucleotide
aagctctgctttagataccatagctgccctacgacaagtgtaatactgctttc

SEQ ID NO: 502125 - DNA, 53 bp, Artificial
  Synthetic oligonucleotide
agaccatagccataatcggctcctgctctggtagattggactaaatgggacac

SEQ ID NO: 502126 - DNA, 53 bp, Artificial
  Synthetic oligonucleotide
gccgtggacgtatgtggctagtaaccgatgccagtggaggtaccgagtatttt

SEQ ID NO: 502127 - DNA, 53 bp, Artificial
  Synthetic oligonucleotide
tcatcccaaagtctttgcccgatacaatggcaactccggacacatcaggaatc

SEQ ID NO: 502128 - DNA, 53 bp, Artificial
  Synthetic oligonucleotide
tagtaatagtgaaacctttactcaagcaacccgtactaccaaaggagcaatag

SEQ ID NO: 502129 - DNA, 53 bp, Artificial
  Synthetic oligonucleotide
agcgataatcagaatgggtgccgtagtgggcagtgagccctcgataatgcttg

SEQ ID NO: 502130 - DNA, 53 bp, Artificial
  Synthetic oligonucleotide
gaaagtgtattctacccctacagtacctgtgattagtccgaatgctccactgt

SEQ ID NO: 502131 - DNA, 53 bp, Artificial
  Synthetic oligonucleotide
ggaagatacggacgttctgcaagtgtgcaaggttggtatggcggacgcaccgc

SEQ ID NO: 502132 - DNA, 52 bp, Artificial
  Synthetic oligonucleotide
aacgacatcgtgagtgttaatccaaatagattcaccagctacgcagatacca

SEQ ID NO: 502133 - DNA, 52 bp, Artificial
  Synthetic oligonucleotide
ccctaatgtagccgctggacaaaccgttcccgtagcaaccataggtacaaaa

SEQ ID NO: 502134 - DNA, 52 bp, Artificial
  Synthetic oligonucleotide
gattcacctgccatctctaacatacgcgctacgtgtgcaacgtattgttcgc

SEQ ID NO: 502135 - DNA, 52 bp, Artificial
  Synthetic oligonucleotide
ggctggaattacccagcttccttttgcatcgataaatccccattttccgcca

SEQ ID NO: 502136 - DNA, 52 bp, Artificial
  Synthetic oligonucleotide
caagtctaattccacgaacaccggaagcgttacgtcccatagatctggtttt

SEQ ID NO: 502137 - DNA, 52 bp, Artificial
  Synthetic oligonucleotide
aggcacaacctttctcgcccagaaaagagctataattcccacaggcagattg

SEQ ID NO: 502138 - DNA, 52 bp, Artificial
  Synthetic oligonucleotide
attcagcatcatctcacttttatctgttagcaccatagcttccggcaaaacc

SEQ ID NO: 502139 - DNA, 52 bp, Artificial
  Synthetic oligonucleotide
agataccgtttctagaagcagcccctattcctccaaagtatcctagcggaac

SEQ ID NO: 502140 - DNA, 52 bp, Artificial
  Synthetic oligonucleotide
atgtgaatcgctgtcgcaattttagaaggtttggacttggtaacttagcctg

SEQ ID NO: 502141 - DNA, 51 bp, Artificial
  Synthetic oligonucleotide
aaaaggcgatacaccttatctgtctgccatccgctaaaatacaggcgctgg

SEQ ID NO: 502142 - DNA, 51 bp, Artificial
  Synthetic oligonucleotide
aaagccgctttacgcgaaatgatgttgccaggagttttgaccattgggttc

SEQ ID NO: 502143 - DNA, 51 bp, Artificial
  Synthetic oligonucleotide
cgcgcacaagaaaatacttctgtagctgggcaaacgggtagggagttatcc

SEQ ID NO: 502144 - DNA, 51 bp, Artificial
  Synthetic oligonucleotide
cggggctgaaactaaaccttgtaacacaggagtaatggaaagtcagtgtct

SEQ ID NO: 502145 - DNA, 51 bp, Artificial
  Synthetic oligonucleotide
actgcgttacgacctacgggtgcgccatagcggttggctgtatataggggc

SEQ ID NO: 502146 - DNA, 51 bp, Artificial
  Synthetic oligonucleotide
ttcaaatctcgagcgacggagttcgagccagaagagacacctacaattggg

SEQ ID NO: 502147 - DNA, 51 bp, Artificial
  Synthetic oligonucleotide
aatctgaaccttctaacaacaccgtgtttgcaaaacgatctctcagcctta

SEQ ID NO: 502148 - DNA, 50 bp, Artificial
  Synthetic oligonucleotide
attagcttcatacaaaggcttagtttccacatcggcactcaacacctttt

SEQ ID NO: 502149 - DNA, 50 bp, Artificial
  Synthetic oligonucleotide
ttcgcccctataatgccttagccccttctaaagctgcattttactctgcc

SEQ ID NO: 502150 - DNA, 50 bp, Artificial
  Synthetic oligonucleotide
agacaagccgcctgtggcgattcaagatgtagaccagcgattgatttcta

SEQ ID NO: 502151 - DNA, 50 bp, Artificial
  Synthetic oligonucleotide
catttactgacaacacctccaggagcttctacggctaaaagtacagggat

SEQ ID NO: 502152 - DNA, 50 bp, Artificial
  Synthetic oligonucleotide
taaaaccttatgccctgtcgcttcaatggcacccgtttcattgtttaaaa

SEQ ID NO: 502153 - DNA, 50 bp, Artificial
  Synthetic oligonucleotide
tttctctggtcttcatcgaagcgtccttgtcgtgagcatgttcatcgttg

SEQ ID NO: 502154 - DNA, 50 bp, Artificial
  Synthetic oligonucleotide
ccgcgagaaaagaatagacgatcatacatgcgataatcccagccttcacg

SEQ ID NO: 502155 - DNA, 50 bp, Artificial
  Synthetic oligonucleotide
cagtcccggtttaatcacgtgtctcgtctcatagaaaggcataagtcccc

SEQ ID NO: 502156 - DNA, 50 bp, Artificial
  Synthetic oligonucleotide
cccctccaatagtaaacctatctgcccatttcactccttcaaaaccgatg

SEQ ID NO: 502157 - DNA, 55 bp, Artificial
  Synthetic oligonucleotide
tcccgaggtcctccccaggttcaggcaggttacccacagcttttccacaagggcc

SEQ ID NO: 502158 - DNA, 55 bp, Artificial
  Synthetic oligonucleotide
tcagggcggcgagtggaccggactgccggtaaccccgacaaggatggttcaccat

SEQ ID NO: 502159 - DNA, 55 bp, Artificial
  Synthetic oligonucleotide
tacatggactcctgggcgtccgaccgctacgacgagtggcgctcccaccagcccg

SEQ ID NO: 502160 - DNA, 55 bp, Artificial
  Synthetic oligonucleotide
gggtgaaccggtcccgtgagctgggcgtattcctgaccaggtccgcgacaagcgt

SEQ ID NO: 502161 - DNA, 55 bp, Artificial
  Synthetic oligonucleotide
ggcggaagtgcacggagccagcgtaactcgtggatagtcggcgtgacttaccgca

SEQ ID NO: 502162 - DNA, 55 bp, Artificial
  Synthetic oligonucleotide
ggccacgtgtcgaggatcgaggtcgccgtagcgtgattcgctacctgctgcttag

SEQ ID NO: 502163 - DNA, 55 bp, Artificial
  Synthetic oligonucleotide
ggaagttcttatcagccgttcgacttccacaccaacgactcctcacggccgtatg

SEQ ID NO: 502164 - DNA, 55 bp, Artificial
  Synthetic oligonucleotide
gctgtttaaccttggatccgcgctgcagacccgattcgagcagacaggcgcgcac

SEQ ID NO: 502165 - DNA, 55 bp, Artificial
  Synthetic oligonucleotide
tcggccaagacgcaccgaacaactcgttgagctcagcatccgtcagaccaggacg

SEQ ID NO: 502166 - DNA, 55 bp, Artificial
  Synthetic oligonucleotide
ctttcggtcactcgacgtgggactctagagacattgtttggggcgcactctgatc

SEQ ID NO: 502167 - DNA, 55 bp, Artificial
  Synthetic oligonucleotide
ctatccgcgccttgatgtaaccgtcggtcgtccgtacgccttgtacgtccacggg

SEQ ID NO: 502168 - DNA, 55 bp, Artificial
  Synthetic oligonucleotide
cgggcaacgacgcgccatcggtcaacttgtccaacgagttggtgtcggacaggtg

SEQ ID NO: 502169 - DNA, 55 bp, Artificial
  Synthetic oligonucleotide
cgggaactccatgcacactaatccgcaggatttcagggacacctatggatggccc

SEQ ID NO: 502170 - DNA, 55 bp, Artificial
  Synthetic oligonucleotide
cccggatcccagcatgctcggcccagccggccatatcgccaatttgatcatcccc

SEQ ID NO: 502171 - DNA, 55 bp, Artificial
  Synthetic oligonucleotide
cccgccacggtagacttcaggctccgctctgggtagagttcctgtcgtagccaag

SEQ ID NO: 502172 - DNA, 55 bp, Artificial
  Synthetic oligonucleotide
atcacctgacgtcgacacctgacgtcgacccgccttcgtacagttcgggcatgcc

SEQ ID NO: 502173 - DNA, 55 bp, Artificial
  Synthetic oligonucleotide
aggtcaagtgccagagccccgccaacttccgtggtcttcgtctgaccttggcgca

SEQ ID NO: 502174 - DNA, 55 bp, Artificial
  Synthetic oligonucleotide
acgacaccgtcagtgtcggatgttcaacgctcggacgcactcgtggtagctcccc

SEQ ID NO: 502175 - DNA, 55 bp, Artificial
  Synthetic oligonucleotide
acgaacgtcatgctgggttccgggatgcagtcgctggagatctacgcgccagggt

SEQ ID NO: 502176 - DNA, 55 bp, Artificial
  Synthetic oligonucleotide
acatccgactgcttggtccggtacagctcctgagatcggggctggtcgtcgacgt

SEQ ID NO: 502177 - DNA, 54 bp, Artificial
  Synthetic oligonucleotide
ctaactgatttcactatctgtatgtctgtgctggtggccgtgttatggcggacc

SEQ ID NO: 502178 - DNA, 54 bp, Artificial
  Synthetic oligonucleotide
cccgttcctctacgctgggcgggtgatgatctgtatccggcggctgtgcgtcga

SEQ ID NO: 502179 - DNA, 53 bp, Artificial
  Synthetic oligonucleotide
ttaacgtcacccatccgaagcagtcccatccgtagggccacttcgctgcgctc

SEQ ID NO: 502180 - DNA, 52 bp, Artificial
  Synthetic oligonucleotide
gactctgctccgggcagttcacgccgagctctacgaactcgaaggcgtccta

SEQ ID NO: 502181 - DNA, 52 bp, Artificial
  Synthetic oligonucleotide
ctgtcctccctgacaaggaggtgccctggccgctaggcgacaccagcatcgt

SEQ ID NO: 502182 - DNA, 55 bp, Artificial
  Synthetic oligonucleotide
ttgggagtacaatccattcgtctgttgacaaataatcctgcgaaattggaaggct

SEQ ID NO: 502183 - DNA, 55 bp, Artificial
  Synthetic oligonucleotide
tgaccgttttcatcgttatagggcataacatattttcccattgccgtactgaaaa

SEQ ID NO: 502184 - DNA, 55 bp, Artificial
  Synthetic oligonucleotide
gttccctgcggctttaagttgataaaaggttccgattcttgtgtttcatctacga

SEQ ID NO: 502185 - DNA, 55 bp, Artificial
  Synthetic oligonucleotide
gtcaatctacctgtaagtgcgacagaagacagagtggttggaagtttggatatcg

SEQ ID NO: 502186 - DNA, 55 bp, Artificial
  Synthetic oligonucleotide
ggtatcttcctgccctctggaatatactcgtttagtatcggaagccatgttacat

SEQ ID NO: 502187 - DNA, 55 bp, Artificial
  Synthetic oligonucleotide
ggggaactttcgactttaaaggaaaacatttggtggtgaaagcggttacaacagg

SEQ ID NO: 502188 - DNA, 55 bp, Artificial
  Synthetic oligonucleotide
ggaatggttgcctatattggaaatgttacttcaaaaccgtctgtagcagtatctg

SEQ ID NO: 502189 - DNA, 55 bp, Artificial
  Synthetic oligonucleotide
ggaacatttaccggaaactctacgagatcaggagtccgtattgttaacagattgg

SEQ ID NO: 502190 - DNA, 55 bp, Artificial
  Synthetic oligonucleotide
gctacagtttcgcattgtaacgtaggataagaagcaagaattacgccggaacttt

SEQ ID NO: 502191 - DNA, 55 bp, Artificial
  Synthetic oligonucleotide
gcccaagtacttgcccacattaaattcgctctcgcttcatagttatccggatgtt

SEQ ID NO: 502192 - DNA, 55 bp, Artificial
  Synthetic oligonucleotide
gatttatctaccatatccggtacaatcaatttacttccctcttccgcagaacgat

SEQ ID NO: 502193 - DNA, 55 bp, Artificial
  Synthetic oligonucleotide
gagacgcggaaataccaatgccgagcggaagcactacaattactttcgacagctc

SEQ ID NO: 502194 - DNA, 55 bp, Artificial
  Synthetic oligonucleotide
atgtagcgatcattcaagtatccgctcctgatgaacacgggtattgcagttacgg

SEQ ID NO: 502195 - DNA, 55 bp, Artificial
  Synthetic oligonucleotide
atttaatcgctccgtttggtttcttccaatttcgggaatcatcgcattgtagggg

SEQ ID NO: 502196 - DNA, 55 bp, Artificial
  Synthetic oligonucleotide
caaagtgacgaggaagtattggaagatattcgaatcgcctccgatttgggagtgg

SEQ ID NO: 502197 - DNA, 55 bp, Artificial
  Synthetic oligonucleotide
caatggcaccaaagtagtttccgagatgtagaataccgctcggttggataccaga

SEQ ID NO: 502198 - DNA, 55 bp, Artificial
  Synthetic oligonucleotide
catgattcgcataaatgactttcgcctgtgaggagttaggagcccacattttcgc

SEQ ID NO: 502199 - DNA, 55 bp, Artificial
  Synthetic oligonucleotide
ccaaccccgtgacgacgttaggcccaaaacctcgtgaaaatagcggtaaggtcag

SEQ ID NO: 502200 - DNA, 55 bp, Artificial
  Synthetic oligonucleotide
ccacggacggaacgcatctttctcatatcggctatgccttatttaattcttgggt

SEQ ID NO: 502201 - DNA, 55 bp, Artificial
  Synthetic oligonucleotide
cccctgccatagtttccgtattatttctacttggtgccacggatactttcgcatg

SEQ ID NO: 502202 - DNA, 55 bp, Artificial
  Synthetic oligonucleotide
ccgctccaatgcgtaagtatagactgttatccgatacaatcttttcaatcagaat

SEQ ID NO: 502203 - DNA, 55 bp, Artificial
  Synthetic oligonucleotide
cctatgcttcgaatcggcatcgaagtctgtctgatgaaatggttgtcaaaatagg

SEQ ID NO: 502204 - DNA, 55 bp, Artificial
  Synthetic oligonucleotide
ctctgggagaacaggatcaaaatcgttttgccttaactcaaattaagccaagcag

SEQ ID NO: 502205 - DNA, 54 bp, Artificial
  Synthetic oligonucleotide
ctccaacagatatgattgctccccacatcgcatctgcatactgaaatatcatca

SEQ ID NO: 502206 - DNA, 54 bp, Artificial
  Synthetic oligonucleotide
tgccaatactgctcccgcgaaagcaaccaaagcgttggctatcataagtccgta

SEQ ID NO: 502207 - DNA, 53 bp, Artificial
  Synthetic oligonucleotide
ttgccaaatctcccgagagtaatgttgagttagaacccgttaggtaaatatca

SEQ ID NO: 502208 - DNA, 51 bp, Artificial
  Synthetic oligonucleotide
tctaatctcacagaaacatgatatttgggcttatgaattctggcgacatcg

SEQ ID NO: 502209 - DNA, 51 bp, Artificial
  Synthetic oligonucleotide
ttccgtctaaatctacgtcaattccgtccatagtgtaatgctgagaaggaa

SEQ ID NO: 502210 - DNA, 51 bp, Artificial
  Synthetic oligonucleotide
atatgtcctaaaccatgtggcataaatagagcatgggctcccgcaatcaca

SEQ ID NO: 502211 - DNA, 55 bp, Artificial
  Synthetic oligonucleotide
ttgagcccgcggcatctgcctgatcagttccgaaacgccgacaaagcggtaccgg

SEQ ID NO: 502212 - DNA, 55 bp, Artificial
  Synthetic oligonucleotide
tgttcagccgctcgaccatggaactcctcacgggccgggctccacgctacgacgc

SEQ ID NO: 502213 - DNA, 55 bp, Artificial
  Synthetic oligonucleotide
tggttggacgaccccaccaaaccccgtttctcctccggttgatgcgcgcggtatg

SEQ ID NO: 502214 - DNA, 55 bp, Artificial
  Synthetic oligonucleotide
tcctcccgcaccgcagaccatgaggaaggacactccacgatcaggtcacctgagc

SEQ ID NO: 502215 - DNA, 55 bp, Artificial
  Synthetic oligonucleotide
gttacgtttgaaacgagacatctccgtgtcacgatctggccatggagcacaggac

SEQ ID NO: 502216 - DNA, 55 bp, Artificial
  Synthetic oligonucleotide
gccgtgtataagtgcgtttgcaagagcttcgcgtactgcgacactcgggtaatcc

SEQ ID NO: 502217 - DNA, 55 bp, Artificial
  Synthetic oligonucleotide
gccgatgacacgcacgctgagacctgatcgactcttcgggtccgggtcgaaccaa

SEQ ID NO: 502218 - DNA, 55 bp, Artificial
  Synthetic oligonucleotide
gaggaagatgaagtacttctcccagggtgtccttgaaccacattctgggtgggga

SEQ ID NO: 502219 - DNA, 55 bp, Artificial
  Synthetic oligonucleotide
gaccttgctgctggaggtctagtcaccgttccgggcgggtaccacaccgttgtca

SEQ ID NO: 502220 - DNA, 55 bp, Artificial
  Synthetic oligonucleotide
ctcttgagtatcggcacataccgcgtcgccatatctatgccctccgctcccggcg

SEQ ID NO: 502221 - DNA, 55 bp, Artificial
  Synthetic oligonucleotide
cggtggcacgagcgcactgtgcatgtcgttactgaccgtgtcgagcacgtcactg

SEQ ID NO: 502222 - DNA, 55 bp, Artificial
  Synthetic oligonucleotide
cgggtgatcacgggaacggaccgaacatgggtgggtcgagagatgaagttccggg

SEQ ID NO: 502223 - DNA, 55 bp, Artificial
  Synthetic oligonucleotide
ccttgctcttcgcgtccagttcgaacaactgttcgcacaacagctaccaccgggc

SEQ ID NO: 502224 - DNA, 55 bp, Artificial
  Synthetic oligonucleotide
cctgaggcgagaatcacgttttgcgtgatcatgaggccatccacagggcgcgcag

SEQ ID NO: 502225 - DNA, 55 bp, Artificial
  Synthetic oligonucleotide
ccgggcgggtccgacaagatcaggaaacctgcatcacgccttcaccgtaaagggg

SEQ ID NO: 502226 - DNA, 55 bp, Artificial
  Synthetic oligonucleotide
ccatgcgtccactgtattagacgcccgtccatcttgaccgcagcttgttggcgtg

SEQ ID NO: 502227 - DNA, 55 bp, Artificial
  Synthetic oligonucleotide
cacgtgcggatggaaccagtaggtccccggatcgggagcgacaaaggagtaacgc

SEQ ID NO: 502228 - DNA, 55 bp, Artificial
  Synthetic oligonucleotide
caatcggacaaatcccatgacagtggacggcacgcatcccgcgcacgacaaccac

SEQ ID NO: 502229 - DNA, 55 bp, Artificial
  Synthetic oligonucleotide
acctgagcaggcgacggggtcacggcctgcgtccgcacacatcaccggaccggtc

SEQ ID NO: 502230 - DNA, 55 bp, Artificial
  Synthetic oligonucleotide
aagagatcgccgagagccagcacctcctgatgtccacgatggcccgagcgttgct

SEQ ID NO: 502231 - DNA, 54 bp, Artificial
  Synthetic oligonucleotide
ggagcagtactccctcttctggaggcagctggtcgacggggcactcgaatcagg

SEQ ID NO: 502232 - DNA, 53 bp, Artificial
  Synthetic oligonucleotide
gacgacctcccgaggctgtggtggattgcgatatgcgctgtcggcacttaagt

SEQ ID NO: 502233 - DNA, 52 bp, Artificial
  Synthetic oligonucleotide
tacgctacgggagagtcgcgccgtgggcaggcgcctccggacgtctgccggc

SEQ ID NO: 502234 - DNA, 52 bp, Artificial
  Synthetic oligonucleotide
cacacggactgttgtcccggtcacacgatgatctctacggtccgctccgaag

SEQ ID NO: 502235 - DNA, 51 bp, Artificial
  Synthetic oligonucleotide
gacaaatctagcccgtagctcgcgtccgctaagtcgagatcaatgaagcgc

SEQ ID NO: 502236 - DNA, 55 bp, Artificial
  Synthetic oligonucleotide
gacccgatgttgggcaatcccgctttagttcacaacgcttgggcttatgcgaaac

SEQ ID NO: 502237 - DNA, 55 bp, Artificial
  Synthetic oligonucleotide
gaccgattgacggcactctcgacaatcgactcaccggcgtgaatttctcgcgtga

SEQ ID NO: 502238 - DNA, 55 bp, Artificial
  Synthetic oligonucleotide
gaccggaactcgctaagacaccaatcccgttggaaatcaacgtcccggtcctgcc

SEQ ID NO: 502239 - DNA, 55 bp, Artificial
  Synthetic oligonucleotide
gagcgcttcccatcgacatcgactgcgaagacgacggtcgctgatactgaactga

SEQ ID NO: 502240 - DNA, 55 bp, Artificial
  Synthetic oligonucleotide
gatagacgtgcaccgtggtcggtagtccacgcgcgcaataggtgtgggccaatcc

SEQ ID NO: 502241 - DNA, 55 bp, Artificial
  Synthetic oligonucleotide
gcaacgcgccgaagcaaccctcaatgaaaccttcaactccgtccaggcgtacggt

SEQ ID NO: 502242 - DNA, 55 bp, Artificial
  Synthetic oligonucleotide
gcaagggatagcgagactcaagacacgcaagaccacgcgcagcgagggagctgaa

SEQ ID NO: 502243 - DNA, 55 bp, Artificial
  Synthetic oligonucleotide
gcacgagaccgacatggttgcgcagcgggccccgatacgtcaagggcgggactca

SEQ ID NO: 502244 - DNA, 55 bp, Artificial
  Synthetic oligonucleotide
gcagccgtggtactgaggttagtttggcggatcgatgcagatcttcgcggggctc

SEQ ID NO: 502245 - DNA, 55 bp, Artificial
  Synthetic oligonucleotide
gcagcgctcgcttatccttattggccaccgatacgaagatcgcaccgctgagcgg

SEQ ID NO: 502246 - DNA, 55 bp, Artificial
  Synthetic oligonucleotide
gcatggactcagaacacggcgagcactggaaattccggcttcccaaggaccggat

SEQ ID NO: 502247 - DNA, 55 bp, Artificial
  Synthetic oligonucleotide
gccccacgaaggcaggagcagtaccgacaatctggaacgatcttcttcagtacgg

SEQ ID NO: 502248 - DNA, 55 bp, Artificial
  Synthetic oligonucleotide
gcccgccatgcggtactaccggaaagcgcacatgctctgatgttcgtcatcaccc

SEQ ID NO: 502249 - DNA, 55 bp, Artificial
  Synthetic oligonucleotide
gcccgtgttgcgctagtgccgcccgttcacgatgtgatttgagaggttcgaactc

SEQ ID NO: 502250 - DNA, 55 bp, Artificial
  Synthetic oligonucleotide
gccctagaacctttcgggaaagatcagggctgcgagtagatacaccgccacggcg

SEQ ID NO: 502251 - DNA, 55 bp, Artificial
  Synthetic oligonucleotide
gccgagtagaaacgacacctcaccacaatgacgcttgctgcagagaacttcctgc

SEQ ID NO: 502252 - DNA, 55 bp, Artificial
  Synthetic oligonucleotide
gccgcgagcgagtcccgacgaaaccgtctcataactctcgctatgttctgacatc

SEQ ID NO: 502253 - DNA, 55 bp, Artificial
  Synthetic oligonucleotide
gcctcgctgttcgacaggatcgcacgaagcaccccggataaagcagcggcgacaa

SEQ ID NO: 502254 - DNA, 55 bp, Artificial
  Synthetic oligonucleotide
gcctctccggcgaagatgttccaccccgaagacgttcctacacaactgtttccac

SEQ ID NO: 502255 - DNA, 55 bp, Artificial
  Synthetic oligonucleotide
gcctttcacccgatcattcgcccgacactgagttacgctacctgcccgcgtgacc

SEQ ID NO: 502256 - DNA, 55 bp, Artificial
  Synthetic oligonucleotide
gcgcactcgtcggagtcttcgggccgctgagcttgttgattgaaaacggtggcca

SEQ ID NO: 502257 - DNA, 55 bp, Artificial
  Synthetic oligonucleotide
gcgtacggtccatttggtttgaccggtacccttcgggtccagtgaccgggtcacc

SEQ ID NO: 502258 - DNA, 55 bp, Artificial
  Synthetic oligonucleotide
gctctccgcaccccagtacaccgaccacctggcgatacgacgtgcaatcgggagt

SEQ ID NO: 502259 - DNA, 55 bp, Artificial
  Synthetic oligonucleotide
cgcctggttgcgagtctgctagtcgtggatgagacgtacaccacaccatgaactg

SEQ ID NO: 502260 - DNA, 55 bp, Artificial
  Synthetic oligonucleotide
cgcgacggggtacgactcgctggagtgaaggtgggatatgtaacggctgtcgacc

SEQ ID NO: 502261 - DNA, 55 bp, Artificial
  Synthetic oligonucleotide
cggcagagtgcacaacacacagcaacgcgccgcatccaacagctattcgtacagg

SEQ ID NO: 502262 - DNA, 55 bp, Artificial
  Synthetic oligonucleotide
cggctttcgcagaaccgtataaccgttccgcggccgtacgttgactcaggggcct

SEQ ID NO: 502263 - DNA, 55 bp, Artificial
  Synthetic oligonucleotide
cgggagaccgctgatgttcactgacaccgccgtcatagtcgagcgcaatctgctc

SEQ ID NO: 502264 - DNA, 55 bp, Artificial
  Synthetic oligonucleotide
cggggccgattgctgttgtgcgagagccctatcagtcaatgagcgcggagagaac

SEQ ID NO: 502265 - DNA, 55 bp, Artificial
  Synthetic oligonucleotide
cggtatgcagtcggaacgccgacagaggtgtgcggcaatacctgaaacgtgcccc

SEQ ID NO: 502266 - DNA, 55 bp, Artificial
  Synthetic oligonucleotide
cgtgctgggcgcacctcatatcgtgccgaaatagggctaagactcgaacccgacg

SEQ ID NO: 502267 - DNA, 55 bp, Artificial
  Synthetic oligonucleotide
cgtgtcggggtttctgtacgcaacagtgaaaactgcccatataatgagcaccttg

SEQ ID NO: 502268 - DNA, 55 bp, Artificial
  Synthetic oligonucleotide
cgtgtgagtcgacgtcgtggttacagtgaggaggcagccgtacggacgacccgaa

SEQ ID NO: 502269 - DNA, 55 bp, Artificial
  Synthetic oligonucleotide
ctacagcctactatcggcaggcccacggtgaggtcatccgcctacccggatgtac

SEQ ID NO: 502270 - DNA, 55 bp, Artificial
  Synthetic oligonucleotide
ctcaccttcggatcgctactcctcccatggtaggtattgacgcgtgaacagttcg

SEQ ID NO: 502271 - DNA, 55 bp, Artificial
  Synthetic oligonucleotide
ctccacttgatcgtcgatcgttcacgcggaactgcggcaaagccgcgggctgatg

SEQ ID NO: 502272 - DNA, 55 bp, Artificial
  Synthetic oligonucleotide
ctcgtcgaggagtggaattgttccaggctttgtcatcgtattcgctgaggggagt

SEQ ID NO: 502273 - DNA, 55 bp, Artificial
  Synthetic oligonucleotide
ctcgttcgttcgacgaaactgccactcgtgcaacatcttttgccgccatggagcc

SEQ ID NO: 502274 - DNA, 55 bp, Artificial
  Synthetic oligonucleotide
ctgatattcctcatctcacgcccaaatgtagtgtatcgcgataatgatccttatc

SEQ ID NO: 502275 - DNA, 55 bp, Artificial
  Synthetic oligonucleotide
ctgctcattaatccgaaagtgtaccccgcagtgggaattagccgctggcgtggcg

SEQ ID NO: 502276 - DNA, 55 bp, Artificial
  Synthetic oligonucleotide
ctggcggattggcgatccagtgatgtagtcgctggcgattccgtaggcggggcaa

SEQ ID NO: 502277 - DNA, 55 bp, Artificial
  Synthetic oligonucleotide
ctgtgggacccgcgaatgcacccgcgttgatgggctactacgaacgggaggacat

SEQ ID NO: 502278 - DNA, 55 bp, Artificial
  Synthetic oligonucleotide
gaaaccatgttgcactcagtacaaggtcctgtgaagtgctacgtactgggctgct

SEQ ID NO: 502279 - DNA, 55 bp, Artificial
  Synthetic oligonucleotide
gaacagaggtgctgcgtccatctgacctcacctcgagctgggcccgtcctggcga

SEQ ID NO: 502280 - DNA, 55 bp, Artificial
  Synthetic oligonucleotide
gaaccaacgccgaatccaacgccttccggccttctggagtcagggtcagccgtac

SEQ ID NO: 502281 - DNA, 55 bp, Artificial
  Synthetic oligonucleotide
gacatgacactcctccgatcagtccttcgcaccgaaacgccgactctgccgaccg

SEQ ID NO: 502282 - DNA, 55 bp, Artificial
  Synthetic oligonucleotide
gtgacaccgtcggaaccctcatctgtgcgaacttcgaatgctcggagaacgtgcg

SEQ ID NO: 502283 - DNA, 55 bp, Artificial
  Synthetic oligonucleotide
gtgctgtgggtgtgacagtccaagcggttaagcggtgtcctttctgatggatgcg

SEQ ID NO: 502284 - DNA, 55 bp, Artificial
  Synthetic oligonucleotide
gtggcggctcgcacgtaccaaatgtcgaccgaagtggaaggaactcatatgagcg

SEQ ID NO: 502285 - DNA, 55 bp, Artificial
  Synthetic oligonucleotide
tacaagcgccgatgcgagttgttcggattgttcggtgaacgatccttcgagtttt

SEQ ID NO: 502286 - DNA, 55 bp, Artificial
  Synthetic oligonucleotide
tacacaccgccgctggtgatcgaatactgggcgaaggaccgcaccgtggtgttcc

SEQ ID NO: 502287 - DNA, 55 bp, Artificial
  Synthetic oligonucleotide
tagacagcgtggtctgccctgagcggtccgtcgtgagtaggcggatacccgatag

SEQ ID NO: 502288 - DNA, 55 bp, Artificial
  Synthetic oligonucleotide
tatgcgtggggtcatgcctggtcctcccgtgatgtcgaccgagtgtctgggctgt

SEQ ID NO: 502289 - DNA, 55 bp, Artificial
  Synthetic oligonucleotide
tcagaccttgcacacaaccacgctacgagaccggtgaactcacccgcaaggctcg

SEQ ID NO: 502290 - DNA, 55 bp, Artificial
  Synthetic oligonucleotide
tccggcgtgtgcaccgcatttgatgcacccgcgatcccgcaccagcaacgctttg

SEQ ID NO: 502291 - DNA, 55 bp, Artificial
  Synthetic oligonucleotide
tcgagggcgtgcaggctattgcgctcaatccctttgagggacaaccattgagagg

SEQ ID NO: 502292 - DNA, 55 bp, Artificial
  Synthetic oligonucleotide
tcgcctaagggcctgtccctatggaatcgaacgcctactgtggctgcagcgccgt

SEQ ID NO: 502293 - DNA, 55 bp, Artificial
  Synthetic oligonucleotide
tcggacccgagggtgtcgaattcagcaggtaccggacacggggaaggacggaatc

SEQ ID NO: 502294 - DNA, 55 bp, Artificial
  Synthetic oligonucleotide
tcggagagccatgcgaattctctgtcgctgagcatctttcgggtgtcgccggtca

SEQ ID NO: 502295 - DNA, 55 bp, Artificial
  Synthetic oligonucleotide
tctggaatcgaatcgctgatgggcgtatggccatttctggtcgtactcgatggct

SEQ ID NO: 502296 - DNA, 55 bp, Artificial
  Synthetic oligonucleotide
tctggtcacgatgaccctacgtcgaccgctcgctgtgatccccggatgtcgatcg

SEQ ID NO: 502297 - DNA, 55 bp, Artificial
  Synthetic oligonucleotide
tgacgttaagtcaataggcttccgttaacacgtggtcaaagtcactacacagggg

SEQ ID NO: 502298 - DNA, 55 bp, Artificial
  Synthetic oligonucleotide
tgaggagtccaacatcactcccgtacgctgtggattcgaagtgtccaaagtgacg

SEQ ID NO: 502299 - DNA, 55 bp, Artificial
  Synthetic oligonucleotide
tgatcggacctgacaatggtgacctgatactgcgtaccggcgtggctggggcagc

SEQ ID NO: 502300 - DNA, 55 bp, Artificial
  Synthetic oligonucleotide
tgattcggtcactgtgtgcccctttgcacctcaccagtcgatcctcaaaagctca

SEQ ID NO: 502301 - DNA, 55 bp, Artificial
  Synthetic oligonucleotide
tggccaccgactcacctcatcccacccgaaaagctctgcgccggaacgtattggc

SEQ ID NO: 502302 - DNA, 55 bp, Artificial
  Synthetic oligonucleotide
tgggatcgcctcaccgggcgcgaacacaccgagccgaatgatctgcaacaaccga

SEQ ID NO: 502303 - DNA, 55 bp, Artificial
  Synthetic oligonucleotide
tgtcaaattccgttccaatggtgcatagtgacctaaggcacatcggatcaacggg

SEQ ID NO: 502304 - DNA, 55 bp, Artificial
  Synthetic oligonucleotide
tgtcgacttgtcatcgatcgaccttgtcgcctgtggtggagctcccgtcccgcag

SEQ ID NO: 502305 - DNA, 55 bp, Artificial
  Synthetic oligonucleotide
gctggctggtgagtcggttaccgagattcgtatcgagttgatcagggaggaccac

SEQ ID NO: 502306 - DNA, 55 bp, Artificial
  Synthetic oligonucleotide
gctgggtgacgggcaatgcctcacgtatcggtggcgacactcgtttcctcggagt

SEQ ID NO: 502307 - DNA, 55 bp, Artificial
  Synthetic oligonucleotide
ggaccggggcgatatcgactgatctcgtcacaatcacctgtgaagcgtcgcttcc

SEQ ID NO: 502308 - DNA, 55 bp, Artificial
  Synthetic oligonucleotide
ggaccggtcccagtcaccatacgtggtgcagatcacgagagcaataggatgggcg

SEQ ID NO: 502309 - DNA, 55 bp, Artificial
  Synthetic oligonucleotide
ggaggtggttggtcgagcaagggcatattgccctcggtgacggactattcggacg

SEQ ID NO: 502310 - DNA, 55 bp, Artificial
  Synthetic oligonucleotide
ggagtaagaactccgtcttcgctggtgcaaacgccagccaaccatatccacccac

SEQ ID NO: 502311 - DNA, 55 bp, Artificial
  Synthetic oligonucleotide
ggatcgaccggccatccgggagtcagaccagtccctcgcactgcacccgccatcc

SEQ ID NO: 502312 - DNA, 55 bp, Artificial
  Synthetic oligonucleotide
ggatttccgcaactgctcgacgctaacgacggccacccgtcgatcgaacttgaac

SEQ ID NO: 502313 - DNA, 55 bp, Artificial
  Synthetic oligonucleotide
ggcaaggccgaaccggttaatctctcgtaaccaaccggtgaaagcagctccgagg

SEQ ID NO: 502314 - DNA, 55 bp, Artificial
  Synthetic oligonucleotide
ggcatccgagagtcgagccccgtggacctcgttgcagtcaggttgattgcagcgt

SEQ ID NO: 502315 - DNA, 55 bp, Artificial
  Synthetic oligonucleotide
ggcatgtctcaactctgccatccgcgtaggcttcgactcgtgaccgccactgcag

SEQ ID NO: 502316 - DNA, 55 bp, Artificial
  Synthetic oligonucleotide
ggccatacgaaacagtctcacaaatccccgaaaataggtggagatcggggttagg

SEQ ID NO: 502317 - DNA, 55 bp, Artificial
  Synthetic oligonucleotide
ggcctccgtaacgcctgtgactgatgtgacgattgggacttaagtgaccctagtg

SEQ ID NO: 502318 - DNA, 55 bp, Artificial
  Synthetic oligonucleotide
ggcgacgggtggattcctgcgacacggggctggacatgtgaccgacgctacacta

SEQ ID NO: 502319 - DNA, 55 bp, Artificial
  Synthetic oligonucleotide
ggcgagccgaatagtgcgaacgtaggtcagtttccggcctgtgaagtccctggcg

SEQ ID NO: 502320 - DNA, 55 bp, Artificial
  Synthetic oligonucleotide
ggctcatcacccagggtcgccgttcgacgtcgtatcgaggagaggactttctcgc

SEQ ID NO: 502321 - DNA, 55 bp, Artificial
  Synthetic oligonucleotide
gggaatggcatctgtcttcagcatgatcattaacggtgacctacccggccgattc

SEQ ID NO: 502322 - DNA, 55 bp, Artificial
  Synthetic oligonucleotide
gggtcctcgcacccgagttcgaactggagacaccgtggccgatacacatcgcatc

SEQ ID NO: 502323 - DNA, 55 bp, Artificial
  Synthetic oligonucleotide
ggtctcgtctcgtctgaggtttgtaccttatgtatagcgccatttgcacatcaga

SEQ ID NO: 502324 - DNA, 55 bp, Artificial
  Synthetic oligonucleotide
ggtgaccctattgagacctgggttactcctgtgggtgatgttgcccgtgggataa

SEQ ID NO: 502325 - DNA, 55 bp, Artificial
  Synthetic oligonucleotide
ggttgacaagctaaccgcggtacgacggtcgaatgttcagacgcgtgtcggtcgt

SEQ ID NO: 502326 - DNA, 55 bp, Artificial
  Synthetic oligonucleotide
gtaacgaaagatcccgctatcgctacacagactccagtgcatattccgaaggtct

SEQ ID NO: 502327 - DNA, 55 bp, Artificial
  Synthetic oligonucleotide
gtacccacgcgcaatgcgtcgatcggttcttgtgcccagcccttcgtcgaacctc

SEQ ID NO: 502328 - DNA, 55 bp, Artificial
  Synthetic oligonucleotide
gtcaaacgtcccgatcgctttgtgaccctccgcgacctctgttacgttcactcac

SEQ ID NO: 502329 - DNA, 55 bp, Artificial
  Synthetic oligonucleotide
caacttcgtaccgcggcatgtaatcgaggagtcgctccaatgcgatgacactttc

SEQ ID NO: 502330 - DNA, 55 bp, Artificial
  Synthetic oligonucleotide
caattccgttgtgcgtcatagcaccatgacctcggttcaggtacgggagaagggc

SEQ ID NO: 502331 - DNA, 55 bp, Artificial
  Synthetic oligonucleotide
caattgctccgttgactgttgagtggtttcgagtatctgatgtcaggactgcgcg

SEQ ID NO: 502332 - DNA, 55 bp, Artificial
  Synthetic oligonucleotide
cacccggattcgcgataccgtactgaagaagatcgttccagattgtcggtactgc

SEQ ID NO: 502333 - DNA, 55 bp, Artificial
  Synthetic oligonucleotide
cacctgcgatcccagaccaagcacaaagcggcctttcgtatagcgagcgaggtca

SEQ ID NO: 502334 - DNA, 55 bp, Artificial
  Synthetic oligonucleotide
cacgcgcccaatcaaagcagccgaaagctcgggatagggcttaccgaaggtggag

SEQ ID NO: 502335 - DNA, 55 bp, Artificial
  Synthetic oligonucleotide
cactggtgccgagatcgtcctggaagagcccgttgagcactgcgggcatggccaa

SEQ ID NO: 502336 - DNA, 55 bp, Artificial
  Synthetic oligonucleotide
cagcacgcctctacatcgaccactgacacctgtcagaggccaccggcacaattag

SEQ ID NO: 502337 - DNA, 55 bp, Artificial
  Synthetic oligonucleotide
cagcgcatcacttgccgagatcgataatgaccccggcgaaatgtgagttcgacac

SEQ ID NO: 502338 - DNA, 55 bp, Artificial
  Synthetic oligonucleotide
cagtcagcggactattcggagtcacctgcaactgaatgaagccgccgtgacccag

SEQ ID NO: 502339 - DNA, 55 bp, Artificial
  Synthetic oligonucleotide
catcacgtagggcgttctgttgcgcatggggtagctgttactaaagttgctcagg

SEQ ID NO: 502340 - DNA, 55 bp, Artificial
  Synthetic oligonucleotide
catcccctacaggggccacccgatcggatacatcttcgcactcgacccggatcag

SEQ ID NO: 502341 - DNA, 55 bp, Artificial
  Synthetic oligonucleotide
ccacctccgaggcacatatcaatggttccgaaggcactgcacccgagcaggtttc

SEQ ID NO: 502342 - DNA, 55 bp, Artificial
  Synthetic oligonucleotide
ccacctcgcttcacaccgaaacccattggttcgacacagccgatattaaaccaag

SEQ ID NO: 502343 - DNA, 55 bp, Artificial
  Synthetic oligonucleotide
ccactccgaaacctggatctgacggccacggaggaactgatcaacgacatgccgg

SEQ ID NO: 502344 - DNA, 55 bp, Artificial
  Synthetic oligonucleotide
ccactgatcacattcctccggaaaacctttactgggccacattttgagtacggcg

SEQ ID NO: 502345 - DNA, 55 bp, Artificial
  Synthetic oligonucleotide
ccagatattgtaggtgccaacaggtttggtcagcccatagtgtgggcgatgcgcc

SEQ ID NO: 502346 - DNA, 55 bp, Artificial
  Synthetic oligonucleotide
cccatgtcgtcggtgagcaaggtgttcgtggccagattagtcgggttggccgtcc

SEQ ID NO: 502347 - DNA, 55 bp, Artificial
  Synthetic oligonucleotide
ccccacgcgttggggccgtgctttcacgtcagcttaccagccgttgtgttgcaag

SEQ ID NO: 502348 - DNA, 55 bp, Artificial
  Synthetic oligonucleotide
ccccagcaaacgccacatgctgttcgtcagctttcccaccgagcgttctcctacc

SEQ ID NO: 502349 - DNA, 55 bp, Artificial
  Synthetic oligonucleotide
aaacgggcccaaatggtacgaggtactccgcggcgaagctacagctcaggcgttg

SEQ ID NO: 502350 - DNA, 55 bp, Artificial
  Synthetic oligonucleotide
aagccgtcccggacaccgctaacacggtcgtggactacgaggactgaacagcccc

SEQ ID NO: 502351 - DNA, 55 bp, Artificial
  Synthetic oligonucleotide
aatcgcgaacagaaccctcgccgggatcgtcttgcgcccctagccgtcctgcctg

SEQ ID NO: 502352 - DNA, 55 bp, Artificial
  Synthetic oligonucleotide
acaataatctcctcggcgccccgctcacgtcacgattgtgtacgcacccggccgc

SEQ ID NO: 502353 - DNA, 55 bp, Artificial
  Synthetic oligonucleotide
accttctgccacgacgacgtcccgaactcgtgccgcaggttgttgcgcaacttct

SEQ ID NO: 502354 - DNA, 55 bp, Artificial
  Synthetic oligonucleotide
accttgagaaccggtcggacgggcatgcacttagtcggccaccctcggtggtcta

SEQ ID NO: 502355 - DNA, 55 bp, Artificial
  Synthetic oligonucleotide
acgatgctcgctaccgcgaagacacccaacccgacgagtaccgatgttcgacgcc

SEQ ID NO: 502356 - DNA, 55 bp, Artificial
  Synthetic oligonucleotide
acgcggcaattatcaaacgttgcacgagtccaaggtttcagggtcgcaacgttgc

SEQ ID NO: 502357 - DNA, 55 bp, Artificial
  Synthetic oligonucleotide
acgtgttctcattcgagatgctgcgcggtagggttgctcgccatgggacgagtcg

SEQ ID NO: 502358 - DNA, 55 bp, Artificial
  Synthetic oligonucleotide
agattgccgaccaatggcaacgcaccgcgactgacctcggacacttcttcgcgcc

SEQ ID NO: 502359 - DNA, 55 bp, Artificial
  Synthetic oligonucleotide
agcactggaacacctcgtcgcgaatggctcgctctccggtctcggattcgcccag

SEQ ID NO: 502360 - DNA, 55 bp, Artificial
  Synthetic oligonucleotide
agccccatccagtgcggccgtaaccttcagaaacgtcgcgacacaagcccgtgga

SEQ ID NO: 502361 - DNA, 55 bp, Artificial
  Synthetic oligonucleotide
agcgtcaatagcgtgttggacaacgagtcaatagtgctagcgtgatgctcgtggc

SEQ ID NO: 502362 - DNA, 55 bp, Artificial
  Synthetic oligonucleotide
atacggggagccttgggtacggccgaagcgtttccagaggggagccagaactgac

SEQ ID NO: 502363 - DNA, 55 bp, Artificial
  Synthetic oligonucleotide
atcaagattctggtacgcccgtacggtcacgaagccgggccgagtaccgcccatc

SEQ ID NO: 502364 - DNA, 55 bp, Artificial
  Synthetic oligonucleotide
atgcgtggccggtcaccgtttggcctcctacccgagcgtggaactcatgcattgc

SEQ ID NO: 502365 - DNA, 55 bp, Artificial
  Synthetic oligonucleotide
attcacgctcggtacgtgaagtcgtggccgcagatcccgcgtcaatcctgctccg

SEQ ID NO: 502366 - DNA, 55 bp, Artificial
  Synthetic oligonucleotide
attcgcggcgcaatatcgagagtgtgatgtccggagtctgccccgccgttggctg

SEQ ID NO: 502367 - DNA, 55 bp, Artificial
  Synthetic oligonucleotide
attgaaccggttgtttacccgctggcgtcgattgggcgagaggccttggaatgcc

SEQ ID NO: 502368 - DNA, 55 bp, Artificial
  Synthetic oligonucleotide
attgcgcggaccacccggcgatcagaagtccgtgcgaggacacgatgtcacgcaa

SEQ ID NO: 502369 - DNA, 55 bp, Artificial
  Synthetic oligonucleotide
cctcactctgtcagacgtttggcgtccaggtattgttccgggagcgttttcggtg

SEQ ID NO: 502370 - DNA, 55 bp, Artificial
  Synthetic oligonucleotide
cctccgccctagtctcgacgcatgatcacaaacatttcgctcctgtccgtgtggg

SEQ ID NO: 502371 - DNA, 55 bp, Artificial
  Synthetic oligonucleotide
cctgcagcgcgtgttcacatgcacagctgtgatatcagcctcccggtctagtgcg

SEQ ID NO: 502372 - DNA, 55 bp, Artificial
  Synthetic oligonucleotide
cctgttccatgcttccgaaccaccctaggctcatgtgtctggagtgactcaggag

SEQ ID NO: 502373 - DNA, 55 bp, Artificial
  Synthetic oligonucleotide
ccttggaaggtgcattcggcgaatctgtcatgaacaaaccttagagtgccctatg

SEQ ID NO: 502374 - DNA, 55 bp, Artificial
  Synthetic oligonucleotide
ccttgggtccacgggcgcacacttgaccgagcagtacgtcgatggaccgtaccgc

SEQ ID NO: 502375 - DNA, 55 bp, Artificial
  Synthetic oligonucleotide
cgaaccggacacgactcacccacctgctgatcttccggtagtccacccggaggat

SEQ ID NO: 502376 - DNA, 55 bp, Artificial
  Synthetic oligonucleotide
cgaatccgggtgtcgacttgtcatcaatcgaccttgtcgcctgtggtggagctcc

SEQ ID NO: 502377 - DNA, 55 bp, Artificial
  Synthetic oligonucleotide
cgaatggcgctggtccagaatcggatcgtggagccattaactcatcagtcacgga

SEQ ID NO: 502378 - DNA, 55 bp, Artificial
  Synthetic oligonucleotide
cgacgccagaatgccatctgcgaccggagcgataggagccgaatcaattatcacg

SEQ ID NO: 502379 - DNA, 55 bp, Artificial
  Synthetic oligonucleotide
cgactgacacgtcaaaccgcatagctgacaccggtcatcgactcggaatggtccc

SEQ ID NO: 502380 - DNA, 55 bp, Artificial
  Synthetic oligonucleotide
cgacttatggtcatcaagaaatcctaacggcgagtgatgtgagtgagtttcggcc

SEQ ID NO: 502381 - DNA, 55 bp, Artificial
  Synthetic oligonucleotide
cgagcagtttcatcggccgttccccgaacaccccgatcccttgggaccacgattg

SEQ ID NO: 502382 - DNA, 55 bp, Artificial
  Synthetic oligonucleotide
cgagtcgcttgattcgtacctcgagcggattgcacttgtgaacgatctgacgacc

SEQ ID NO: 502383 - DNA, 55 bp, Artificial
  Synthetic oligonucleotide
cgatacttcaacgatctccctcactgtgttctcgggcatggggtgcgccggtggg

SEQ ID NO: 502384 - DNA, 55 bp, Artificial
  Synthetic oligonucleotide
cgatcaccgcggcttgtacccgctcaccacgacgttgtagaagaacttcggcggc

SEQ ID NO: 502385 - DNA, 55 bp, Artificial
  Synthetic oligonucleotide
cgcagcagctagtccggccgtgtcgcatgagtgggttagaggatcgtgtagccca

SEQ ID NO: 502386 - DNA, 55 bp, Artificial
  Synthetic oligonucleotide
cgccagcgactaattcccactgcggggtacactttcggattaatgagcagcgggt

SEQ ID NO: 502387 - DNA, 55 bp, Artificial
  Synthetic oligonucleotide
ccgtgcggtgggtgtgtgttcgagggtgaaacatcagacaggtcaacgactgtgc

SEQ ID NO: 502388 - DNA, 55 bp, Artificial
  Synthetic oligonucleotide
ccggtcgacgtctgccctgctcacgaatgatcaccagctgtggatgatccttggg

SEQ ID NO: 502389 - DNA, 55 bp, Artificial
  Synthetic oligonucleotide
ccggtcaaccccgtccgcatgatcgttgatgtcatcagttccctcccagtgccga

SEQ ID NO: 502390 - DNA, 55 bp, Artificial
  Synthetic oligonucleotide
ccccgccggcctatcgcactgcgctgaaaccttggcgaccgtgcatcaatgtgtg

SEQ ID NO: 502391 - DNA, 55 bp, Artificial
  Synthetic oligonucleotide
cccggtaatcccagtaatgctggcaaatgagcgtgcacggtacagaccgagacgg

SEQ ID NO: 502392 - DNA, 55 bp, Artificial
  Synthetic oligonucleotide
ccggcggctccttctctgttctgtcccggaaatggaggtggtgtcgtgatcgatg

SEQ ID NO: 502393 - DNA, 55 bp, Artificial
  Synthetic oligonucleotide
ccggcaggtttagagtccgatatggcccgtgttacacccaacatcagcgggcaca

SEQ ID NO: 502394 - DNA, 55 bp, Artificial
  Synthetic oligonucleotide
cccgtccgcgaaccggtggtgtcccactcacagaccgacgtgttgttgacggtct

SEQ ID NO: 502395 - DNA, 55 bp, Artificial
  Synthetic oligonucleotide
ccgcacgttactacctctcgctacggttgatccgaatcgactgtgacacgtgagg

SEQ ID NO: 502396 - DNA, 55 bp, Artificial
  Synthetic oligonucleotide
ccgcaaacccaaagcgagccagggagtttgagatattccgagcacgagagccggc

SEQ ID NO: 502397 - DNA, 55 bp, Artificial
  Synthetic oligonucleotide
cccgaatgctcggagagatgactcgaaatggtcttcccgcaccacgtttcagttc

SEQ ID NO: 502398 - DNA, 55 bp, Artificial
  Synthetic oligonucleotide
ccctggcattctgatccggccacatttgttagcaataggaagggtctttcggccc

SEQ ID NO: 502399 - DNA, 55 bp, Artificial
  Synthetic oligonucleotide
cccgcttcacctgacgcactacttcttgagcgtgcgaactcagatcggcatcagc

SEQ ID NO: 502400 - DNA, 55 bp, Artificial
  Synthetic oligonucleotide
ccgaactgcgcgcacgtcttctcccgtgcaccggcgtagatcccgaacttcaacc

SEQ ID NO: 502401 - DNA, 54 bp, Artificial
  Synthetic oligonucleotide
tctggtcactgaaagtggctgtcggcccggtgacatggacagtggtgcccgtac

SEQ ID NO: 502402 - DNA, 54 bp, Artificial
  Synthetic oligonucleotide
gccttcttgtcagcgaattcgtcgtaggcttgacgcttgtggcgacgtaatacc

SEQ ID NO: 502403 - DNA, 54 bp, Artificial
  Synthetic oligonucleotide
gttcgggaatcgccctgttcgccatgtcgtaacgactcgccatgtcgtagcgac

SEQ ID NO: 502404 - DNA, 54 bp, Artificial
  Synthetic oligonucleotide
agaacgctgcgtagcgcttccaatgactctggccgtgcgtggtagtagacgttc

SEQ ID NO: 502405 - DNA, 54 bp, Artificial
  Synthetic oligonucleotide
taggtgtgctcaccatgtgagacacgtggaggatcagatgagtgaatcgcccgc

SEQ ID NO: 502406 - DNA, 54 bp, Artificial
  Synthetic oligonucleotide
acttccgtcacgaatacctggctgaaaatagatccaaggtcagttgaaccggca

SEQ ID NO: 502407 - DNA, 54 bp, Artificial
  Synthetic oligonucleotide
actcggttcttgcccggtgtcggatcctccaccttctggaaacccaaggtcggt

SEQ ID NO: 502408 - DNA, 54 bp, Artificial
  Synthetic oligonucleotide
tcatttatggccgcgcattggcgtcgtgtgtgcccgagcatgccccgactcgcg

SEQ ID NO: 502409 - DNA, 54 bp, Artificial
  Synthetic oligonucleotide
agcgctcctgcttggggcgacgtttcgtgcccttctcccagtgggccggattgg

SEQ ID NO: 502410 - DNA, 54 bp, Artificial
  Synthetic oligonucleotide
ccccttgctcactacttctaagtggcgccatgcatgatactgaaccggtggtta

SEQ ID NO: 502411 - DNA, 54 bp, Artificial
  Synthetic oligonucleotide
cctcgtcgtgggttgttcgggtggcgcaagaagaagtctgccgatcgctcagcc

SEQ ID NO: 502412 - DNA, 53 bp, Artificial
  Synthetic oligonucleotide
acagcggattcgagacaggctgacccacggattgtgcgcctcctcagcttcta

SEQ ID NO: 502413 - DNA, 53 bp, Artificial
  Synthetic oligonucleotide
gccgatcgcgcgtgtagctgatggcggcactgataagcgctaccaccgcaact

SEQ ID NO: 502414 - DNA, 53 bp, Artificial
  Synthetic oligonucleotide
ggtgaagttcagccggaacggggtaccgggccgctcgtcctcaccactcttga

SEQ ID NO: 502415 - DNA, 53 bp, Artificial
  Synthetic oligonucleotide
cggactctcgtcgagagaagctcggactgcttctggaagcgcggaatgccatt

SEQ ID NO: 502416 - DNA, 53 bp, Artificial
  Synthetic oligonucleotide
cggtgggtatggtcgcctcggagttgatgtgacgacgaagggtgttcatggca

SEQ ID NO: 502417 - DNA, 53 bp, Artificial
  Synthetic oligonucleotide
ggggccaccagtgtcgtcaccaccccgacgatcctcggcaatcggaacaagag

SEQ ID NO: 502418 - DNA, 53 bp, Artificial
  Synthetic oligonucleotide
ggggcaacaatcgacgctcctggacgacacgaccggggatatccgcacaatgc

SEQ ID NO: 502419 - DNA, 52 bp, Artificial
  Synthetic oligonucleotide
tcgcctgccatgagcgagccgttggtgactggtgcggtcattcaaccacaac

SEQ ID NO: 502420 - DNA, 52 bp, Artificial
  Synthetic oligonucleotide
acggccgattcaccttccggcggaacaaccgccaacgagcgatcagtgcgca

SEQ ID NO: 502421 - DNA, 52 bp, Artificial
  Synthetic oligonucleotide
aagcatctcccgagaacacgacgtcacgcatctcctgagaccgcacacgtca

SEQ ID NO: 502422 - DNA, 52 bp, Artificial
  Synthetic oligonucleotide
aaacgttccgatctggccgggtgggccgaatacggttactgcgcgtcgcatt

SEQ ID NO: 502423 - DNA, 52 bp, Artificial
  Synthetic oligonucleotide
ttcctcattgatcggcggaacagtcacccttcgcgacgtctcgccgcgttgt

SEQ ID NO: 502424 - DNA, 52 bp, Artificial
  Synthetic oligonucleotide
cttttgcgtctgtcgaggacttggctcaggccttgaccattcggaccaacga

SEQ ID NO: 502425 - DNA, 52 bp, Artificial
  Synthetic oligonucleotide
ggggcaacccggctcaatgtccagaaccatcagacccgatgagcgccagtcg

SEQ ID NO: 502426 - DNA, 52 bp, Artificial
  Synthetic oligonucleotide
gtcaccaaagcctcccgggcgacgatcttgttcgccagttgtgctccctgac

SEQ ID NO: 502427 - DNA, 52 bp, Artificial
  Synthetic oligonucleotide
gtgatcagaccatggtcggcggcccgtttcattccttcggaatcggcgtcga

SEQ ID NO: 502428 - DNA, 52 bp, Artificial
  Synthetic oligonucleotide
agcagcgtcatatcggacatatacgccaatgtgcagacatggaaaacctggt

SEQ ID NO: 502429 - DNA, 52 bp, Artificial
  Synthetic oligonucleotide
gtggggtcccgacgatcctggatctgcgccgggcacgtacagttcttcggtg

SEQ ID NO: 502430 - DNA, 51 bp, Artificial
  Synthetic oligonucleotide
cgaggagaactttcgcgcgctcggtatcgagagcatgcgcgacttccgtaa

SEQ ID NO: 502431 - DNA, 51 bp, Artificial
  Synthetic oligonucleotide
acctctatgagaaccccgatgtgatgctggctaatcagggcttcaacaagt

SEQ ID NO: 502432 - DNA, 51 bp, Artificial
  Synthetic oligonucleotide
cccgatgcgtcgcggggaaccaggaagcgtgcggggctgccgtcgagtaca

SEQ ID NO: 502433 - DNA, 51 bp, Artificial
  Synthetic oligonucleotide
ttaccgcctcggcgattgaccacgagtcgggattgcggaccgtccacgtgc

SEQ ID NO: 502434 - DNA, 51 bp, Artificial
  Synthetic oligonucleotide
acacgtggccggcgtcaaacgacggggatgggtcgctcacctgagtaccta

SEQ ID NO: 502435 - DNA, 51 bp, Artificial
  Synthetic oligonucleotide
ctatgaccagcaccgcgtggccgctgtagttctcgcgtgccagcgccgacc

SEQ ID NO: 502436 - DNA, 51 bp, Artificial
  Synthetic oligonucleotide
atcttgtagtgacagtggggatatggcgccgactagtgctacgaaatcccg

SEQ ID NO: 502437 - DNA, 51 bp, Artificial
  Synthetic oligonucleotide
ccccaggttgcgcaattcagggtcccgtcgcactcgatgagcctctcatcg

SEQ ID NO: 502438 - DNA, 51 bp, Artificial
  Synthetic oligonucleotide
ccttcacgacgtcgcgttcatcgtggaggacaaggccattcctctcagcga

SEQ ID NO: 502439 - DNA, 51 bp, Artificial
  Synthetic oligonucleotide
agattgctcgacacgcagggtgtttcagggctcccgatcgccgggacttgg

SEQ ID NO: 502440 - DNA, 50 bp, Artificial
  Synthetic oligonucleotide
cacatggaggtcgacatcattgaacgtcaattgcatcattggtagccccg

SEQ ID NO: 502441 - DNA, 50 bp, Artificial
  Synthetic oligonucleotide
agcgcaacacgtacaacatcaggcacaataaacaacacgagtgtgatatc

SEQ ID NO: 502442 - DNA, 50 bp, Artificial
  Synthetic oligonucleotide
gtccgcgcgtggaatcgcaaggagttcgtgagttggatccgatttctcct

SEQ ID NO: 502443 - DNA, 58 bp, Artificial
  Synthetic oligonucleotide
ctatttacctacaactctttctactatcctctaaccttttgctacaaccaattacctc

SEQ ID NO: 502444 - DNA, 58 bp, Artificial
  Synthetic oligonucleotide
cagctttaagacctattaactaaacatatattgtaccgcctacttttcctcatacagc

SEQ ID NO: 502445 - DNA, 58 bp, Artificial
  Synthetic oligonucleotide
ggttggtaagatgcttagttcaaagtttgtaggttaaagttgataggttagatgttgc

SEQ ID NO: 502446 - DNA, 55 bp, Artificial
  Synthetic oligonucleotide
gagatttaccgactcatggcaggctcacccaacgcatccaatatggttgtcgggc

SEQ ID NO: 502447 - DNA, 55 bp, Artificial
  Synthetic oligonucleotide
gaggccaccgaccatgactaagccgtattcgctggatcgccgtaacttcctcaag

SEQ ID NO: 502448 - DNA, 55 bp, Artificial
  Synthetic oligonucleotide
gagttactggttgtatacgtaatctaaacaattgttactcctcagatggaggtct

SEQ ID NO: 502449 - DNA, 55 bp, Artificial
  Synthetic oligonucleotide
gatgccgttcgcggtgaaagccgttgcactcgacgccatgaggtagcatcgtacg

SEQ ID NO: 502450 - DNA, 55 bp, Artificial
  Synthetic oligonucleotide
gccacagggtatagcgcagcgtaagctccgcgatcggcgagaagataccgacacc

SEQ ID NO: 502451 - DNA, 55 bp, Artificial
  Synthetic oligonucleotide
gccacgaataagcggctttctctacacaaccagcgggaatctggcagactagagg

SEQ ID NO: 502452 - DNA, 55 bp, Artificial
  Synthetic oligonucleotide
gcccacagttcactcagaccgctgcccatcgccggcatgtttcctgacttggcca

SEQ ID NO: 502453 - DNA, 55 bp, Artificial
  Synthetic oligonucleotide
gcctattcatcactgcggggatacgagctaaagctgataggaccgcgtttggtgg

SEQ ID NO: 502454 - DNA, 55 bp, Artificial
  Synthetic oligonucleotide
gcctgcgcaataccacacattgcgcccttttccaggctccaaagagcctaacccg

SEQ ID NO: 502455 - DNA, 55 bp, Artificial
  Synthetic oligonucleotide
gcgaggctatcaagtagttcatgaacgccaaccatatacgacgtccggcagactg

SEQ ID NO: 502456 - DNA, 55 bp, Artificial
  Synthetic oligonucleotide
gcggaaactttcatgatcgtatcgtcctgtgtcccaaaggtggtatatcccaaag

SEQ ID NO: 502457 - DNA, 55 bp, Artificial
  Synthetic oligonucleotide
gcgtatgtgtattgcgcgcccttgcaccagaggtacgctttctaatcgccgatga

SEQ ID NO: 502458 - DNA, 55 bp, Artificial
  Synthetic oligonucleotide
gcttctgctatgcggcagctactgtagtttacaacgcgtacccagtgctcggctg

SEQ ID NO: 502459 - DNA, 55 bp, Artificial
  Synthetic oligonucleotide
ggaatatggagtgatcagcggtcggggacagaaagcgttaaagcaacgtgtctgg

SEQ ID NO: 502460 - DNA, 55 bp, Artificial
  Synthetic oligonucleotide
ggagatccaggcctttcttgacttcgatcatagtctcgcccagttgatggatcgg

SEQ ID NO: 502461 - DNA, 55 bp, Artificial
  Synthetic oligonucleotide
ggctagcctcttccaggagatgcaccctctcggtggatgttaccggctgccttgt

SEQ ID NO: 502462 - DNA, 55 bp, Artificial
  Synthetic oligonucleotide
ggctcaacccgactggggagttgtgaggtcaacataggcgcgcaatgataggcac

SEQ ID NO: 502463 - DNA, 55 bp, Artificial
  Synthetic oligonucleotide
gggattgcagttaggttatatgtaatgcagttaggtggttagtgcgttgatgttg

SEQ ID NO: 502464 - DNA, 55 bp, Artificial
  Synthetic oligonucleotide
ggggcggtgaactggtgcatgacaaatcacacttaggtgctaggcttaatcccat

SEQ ID NO: 502465 - DNA, 55 bp, Artificial
  Synthetic oligonucleotide
gtaaaggtgaggtcaacggttcaattctgttcatgagctcaagcagttatagttg

SEQ ID NO: 502466 - DNA, 55 bp, Artificial
  Synthetic oligonucleotide
gtactccgttcagctaaaccggtttcggcaacaaacacgttaaaactacgtgata

SEQ ID NO: 502467 - DNA, 55 bp, Artificial
  Synthetic oligonucleotide
gtagtagtgatcgagagtgggcaaataagaattaaggtcagttatccacgcagat

SEQ ID NO: 502468 - DNA, 55 bp, Artificial
  Synthetic oligonucleotide
gtattagcggtaataaagtcagtaccagcggtaatatacgaccagtattagcggt

SEQ ID NO: 502469 - DNA, 55 bp, Artificial
  Synthetic oligonucleotide
tagggcaagagaatagtcgagccggtagttttacggctctgtagggcgtcctggg

SEQ ID NO: 502470 - DNA, 55 bp, Artificial
  Synthetic oligonucleotide
tcaggaaacatgccggcgatgggcagcggtctgagtgaactgtgggcgcgtttgc

SEQ ID NO: 502471 - DNA, 55 bp, Artificial
  Synthetic oligonucleotide
tgcacgccgagaggtggtgcactttatggtgtcacgtggcctgagtgagcgccgg

SEQ ID NO: 502472 - DNA, 55 bp, Artificial
  Synthetic oligonucleotide
ttacgttgacgttaactggattcgtccaggcataacaacgacgccagaggtcccg

SEQ ID NO: 502473 - DNA, 55 bp, Artificial
  Synthetic oligonucleotide
tttgacttcgatcatagtctcgcccagttgttggatcggatatacgaaggtatgg

SEQ ID NO: 502474 - DNA, 55 bp, Artificial
  Synthetic oligonucleotide
aataacactgcgccattagcatgttcaccacccagcgggcagaaccctcatggac

SEQ ID NO: 502475 - DNA, 55 bp, Artificial
  Synthetic oligonucleotide
atagtacagcctcccttatgtattccatacgatgcttattccacgttcgataacg

SEQ ID NO: 502476 - DNA, 55 bp, Artificial
  Synthetic oligonucleotide
caagcacaggaagattaggtccagttttggtagatattcctaaagacatgacggc

SEQ ID NO: 502477 - DNA, 55 bp, Artificial
  Synthetic oligonucleotide
caatagggttcgctaaagttactcacaatctcgccgataaccactgccgacgcgc

SEQ ID NO: 502478 - DNA, 55 bp, Artificial
  Synthetic oligonucleotide
cagaacttctagccgccgcatttatgcgcataatccataaacttctaaattgccg

SEQ ID NO: 502479 - DNA, 55 bp, Artificial
  Synthetic oligonucleotide
cagcatgccggttagaatctcgccatcacgggtatggcttaaggttttggcggca

SEQ ID NO: 502480 - DNA, 55 bp, Artificial
  Synthetic oligonucleotide
cagcgcagcttccatgtagcgtggatactccgtgagccactcgtccgcatcacga

SEQ ID NO: 502481 - DNA, 55 bp, Artificial
  Synthetic oligonucleotide
catacctcattaatcacgtccgcagctatatctggccatgcaccgttcaacaaat

SEQ ID NO: 502482 - DNA, 55 bp, Artificial
  Synthetic oligonucleotide
catcgacaaacgtattcctagacaaacacagacaacctgcacaaatcttgcgcga

SEQ ID NO: 502483 - DNA, 55 bp, Artificial
  Synthetic oligonucleotide
catctgtggtctcggttggattatgtgtatctacgcgtagctctctgcgtacaac

SEQ ID NO: 502484 - DNA, 55 bp, Artificial
  Synthetic oligonucleotide
cattctatacgttgagctcccgctaacactgctacttctgaggaagttatagcag

SEQ ID NO: 502485 - DNA, 55 bp, Artificial
  Synthetic oligonucleotide
ccaataccaacccttaactattacctcctaaccgctaaccgcaaacaccaaccac

SEQ ID NO: 502486 - DNA, 55 bp, Artificial
  Synthetic oligonucleotide
cccactctaggcccaccagttcggacgagcgtagacctgaccacagcgcgaattg

SEQ ID NO: 502487 - DNA, 55 bp, Artificial
  Synthetic oligonucleotide
ccccgttccccgcgcgccacgagattaaggagcccactatgttgacagggaggaa

SEQ ID NO: 502488 - DNA, 55 bp, Artificial
  Synthetic oligonucleotide
cttatagaccagagtgttggtggcttgtgatgggccgccttgggttgtggcgtgg

SEQ ID NO: 502489 - DNA, 55 bp, Artificial
  Synthetic oligonucleotide
ctgggtagggtctgttggtacttacatgatgctctcattcagtgagcatccctgc

SEQ ID NO: 502490 - DNA, 55 bp, Artificial
  Synthetic oligonucleotide
ctatcgttactcggtgatactgcgagtcggggatgaatgacgcccagtacccaga

SEQ ID NO: 502491 - DNA, 55 bp, Artificial
  Synthetic oligonucleotide
cgggtcgtgagtagtgaaaccgccgctctttacgcgtgctcccgagtggtcgtag

SEQ ID NO: 502492 - DNA, 55 bp, Artificial
  Synthetic oligonucleotide
cggcttgttgagtttaatcgattcagcgccccaggtgtttcattcttcttcgtcg

SEQ ID NO: 502493 - DNA, 55 bp, Artificial
  Synthetic oligonucleotide
cgctgaacgggtggatttagatggtctacctgccggtaaggttgataaagaagcc

SEQ ID NO: 502494 - DNA, 55 bp, Artificial
  Synthetic oligonucleotide
cgccattgcactaattctatcgcattctttaactcttaattctgatgcacctcgc

SEQ ID NO: 502495 - DNA, 55 bp, Artificial
  Synthetic oligonucleotide
ccgagcgtttgagcacctggcttgcggtgagaatactgccgacttggctactgca

SEQ ID NO: 502496 - DNA, 55 bp, Artificial
  Synthetic oligonucleotide
ccgcgattgaggcccgctttgatgagctagaaacatcctttgcagagtctgtcgc

SEQ ID NO: 502497 - DNA, 55 bp, Artificial
  Synthetic oligonucleotide
ccgtcgtcaaccaggatttctgttgcatgtttctgctcccttggtggtgtcctcc

SEQ ID NO: 502498 - DNA, 55 bp, Artificial
  Synthetic oligonucleotide
cctggtactaaacggtttggtatagagggtggagaaactttaattgctatgttgt

SEQ ID NO: 502499 - DNA, 55 bp, Artificial
  Synthetic oligonucleotide
cgcatccctgctggccccatatcgaacattatcggctgcactatctcgaaggacg

SEQ ID NO: 502500 - DNA, 54 bp, Artificial
  Synthetic oligonucleotide
gtagcgggcgtaaattaaagggttgttgcggtgaatagtggcatcgttcagcct

SEQ ID NO: 502501 - DNA, 54 bp, Artificial
  Synthetic oligonucleotide
tactttgagttcggtgatatgacccaagggctgggttgggaaagctacgcctac

SEQ ID NO: 502502 - DNA, 53 bp, Artificial
  Synthetic oligonucleotide
gtaagcgtattagcttcaccggctgcccatagaaagccgcctagaattagccc

SEQ ID NO: 502503 - DNA, 53 bp, Artificial
  Synthetic oligonucleotide
tagacgaagtggggataataatggaactgaaatctctagagaaggcgtacaac

SEQ ID NO: 502504 - DNA, 52 bp, Artificial
  Synthetic oligonucleotide
gggtgttctcgcccacccatcccgactcgatgtgcagggaggccacctcgta

SEQ ID NO: 502505 - DNA, 52 bp, Artificial
  Synthetic oligonucleotide
ttagccgagggcgccattgcgttaggcgacaaaccggcacgcaagctgaccc

SEQ ID NO: 502506 - DNA, 52 bp, Artificial
  Synthetic oligonucleotide
ttagctatttctccagtcgcagctacgtggtgagtctacaagtcgaacaggc

SEQ ID NO: 502507 - DNA, 51 bp, Artificial
  Synthetic oligonucleotide
cgggaatgatactcctccaccgcccatttctaaaccgagaaacgcaaaagc

SEQ ID NO: 502508 - DNA, 51 bp, Artificial
  Synthetic oligonucleotide
ccaatgccgtccgaaacgcattggcgcgcaggggcagtccctcttgccgat

SEQ ID NO: 502509 - DNA, 51 bp, Artificial
  Synthetic oligonucleotide
ctccatgcccacctgctaatataaattcacaagcggtactatcatcacctg

SEQ ID NO: 502510 - DNA, 51 bp, Artificial
  Synthetic oligonucleotide
tgggagctggaggtgcagttaacagtgtaatacaacaagttttagatttag

SEQ ID NO: 502511 - DNA, 50 bp, Artificial
  Synthetic oligonucleotide
tatcgactagaaggtaacgttcccgagatagcgacaggtgccatggtgat

SEQ ID NO: 502512 - DNA, 50 bp, Artificial
  Synthetic oligonucleotide
gctagctgcagaataacatcgcggtcaccgtggctattatcgacagcgtc

SEQ ID NO: 502513 - DNA, 60 bp, Artificial
  Synthetic oligonucleotide
cccctaaagataaaacctatatcacctaccacaataacgctaataaagtcaatctaggga

SEQ ID NO: 502514 - DNA, 60 bp, Artificial
  Synthetic oligonucleotide
ccaactcaacgactgcctaaaaccctacttgctagggcttaggaagaatttcacgcagat

SEQ ID NO: 502515 - DNA, 60 bp, Artificial
  Synthetic oligonucleotide
gcgagacagaaacttcaatcattcaagaaaattacgtgctttttagtcggtgtaaaattg

SEQ ID NO: 502516 - DNA, 60 bp, Artificial
  Synthetic oligonucleotide
cggttaaattcccatgaatacgaattttgaacagcttagaaaacaagaattggaattacg

SEQ ID NO: 502517 - DNA, 60 bp, Artificial
  Synthetic oligonucleotide
caagctatttgaaaatcactaacattgtcaaattgaatgacaatcggatctgtgtttcag

SEQ ID NO: 502518 - DNA, 60 bp, Artificial
  Synthetic oligonucleotide
ctatcccttgaacctagctatcactcaaactcaaatcttttaatactaagagctagaaac

SEQ ID NO: 502519 - DNA, 60 bp, Artificial
  Synthetic oligonucleotide
atccaactcaacgataactaccaatacttgctcaacaatctaggcatgggtcaatacact

SEQ ID NO: 502520 - DNA, 60 bp, Artificial; identical to SEQ ID NO: 194692
  Synthetic oligonucleotide

SEQ ID NO: 502521 - DNA, 60 bp, Artificial
  Synthetic oligonucleotide
agagcggtaactctagggggtttggctatcgctacgatcatatcgtcttttgcctttgag

SEQ ID NO: 502522 - DNA, 60 bp, Artificial; identical to SEQ ID NO: 194211
  Synthetic oligonucleotide

SEQ ID NO: 502523 - DNA, 60 bp, Artificial
  Synthetic oligonucleotide
aaaagcgcatatgacttgagttagccatccaacccctactaaaaccgcagagcgagcgtt

SEQ ID NO: 502524 - DNA, 60 bp, Artificial
  Synthetic oligonucleotide
tgtgtttcagtccaagacgtggacaagcctgacaaactcctaaaacctttcatcgctaaa

SEQ ID NO: 502525 - DNA, 59 bp, Artificial
  Synthetic oligonucleotide
ccacaagcttaaattaaatcataggcaatattggtgtttagaatgcgggtatagagaac

SEQ ID NO: 502526 - DNA, 59 bp, Artificial
  Synthetic oligonucleotide
ctttaagccctaataagtagggtttcatgcgtttattgatttgacacttaaataccgac

SEQ ID NO: 502527 - DNA, 59 bp, Artificial
  Synthetic oligonucleotide
gctgacaagcaatgcttttacctacaaatgcattcaatcccttaataattttgtcagtg

SEQ ID NO: 502528 - DNA, 59 bp, Artificial
  Synthetic oligonucleotide
ctgcccaaaactttatagaaatagttttcatgcctaaaacccttattgtttctagcctg

SEQ ID NO: 502529 - DNA, 58 bp, Artificial
  Synthetic oligonucleotide
gcccctaaaatttcactaataggagctttacaagggataaaatgcgtatcttgtaaag

SEQ ID NO: 502530 - DNA, 57 bp, Artificial
  Synthetic oligonucleotide
agcctaaacaacgaagctgtagggtttctcatttttggggtgaaaatgaataaaggg

SEQ ID NO: 502531 - DNA, 57 bp, Artificial
  Synthetic oligonucleotide
taaagatcaagggaataccctcattcgttttgaaccgcaagatttaaaacgcatgct

SEQ ID NO: 502532 - DNA, 56 bp, Artificial
  Synthetic oligonucleotide
cctaacccaagaagacttaaccctttgcttaaaatattacttgcggcgtttatatc

SEQ ID NO: 502533 - DNA, 56 bp, Artificial
  Synthetic oligonucleotide
ctagtgggttgggagtttgtagtgggtggcactccgttaggaggcacaccatgaaa

SEQ ID NO: 502534 - DNA, 55 bp, Artificial
  Synthetic oligonucleotide
gcgcttcagagtttccggcacagtcttgaagttcaagccaaataaccggcgcacg

SEQ ID NO: 502535 - DNA, 55 bp, Artificial
  Synthetic oligonucleotide
gcgatccgcatctatcaaatcctattaagcgaactcaatcaaaaccgcaacgaag

SEQ ID NO: 502536 - DNA, 55 bp, Artificial
  Synthetic oligonucleotide
gacaagcaacgcgctaaaagggatattaagcttgtagcatgggatattaacaatc

SEQ ID NO: 502537 - DNA, 55 bp, Artificial
  Synthetic oligonucleotide
gcggagattatcgtggtgagtgcgatcagccgtgtcgagagccgaggggcacatt

SEQ ID NO: 502538 - DNA, 55 bp, Artificial
  Synthetic oligonucleotide
gctaagcaacgattacgagagcctagagacagaaaccttgaacttaaaagagagc

SEQ ID NO: 502539 - DNA, 55 bp, Artificial
  Synthetic oligonucleotide
gcgagagtagtcgctgagaggtcggccgaaaccgaaagattttcgcttgatgcgg

SEQ ID NO: 502540 - DNA, 55 bp, Artificial
  Synthetic oligonucleotide
gctcaatccactatagaagccagactcatcgagcttcaaaccttgatcggctatc

SEQ ID NO: 502541 - DNA, 55 bp, Artificial
  Synthetic oligonucleotide
gctcatcacttgcttggaggtgatacacaggcttagattctataaacactccttt

SEQ ID NO: 502542 - DNA, 55 bp, Artificial
  Synthetic oligonucleotide
gctccctagaaactcggtagccctaaaatagcctagtattctatcgcttaatcgg

SEQ ID NO: 502543 - DNA, 55 bp, Artificial
  Synthetic oligonucleotide
gctcgcaaactctttgtcattcgccttagcccatttgttcgcttcgtttctaata

SEQ ID NO: 502544 - DNA, 55 bp, Artificial
  Synthetic oligonucleotide
gctgataagcaaacaccaacaagcgaagcatggacaagagcgcatcgcagtttga

SEQ ID NO: 502545 - DNA, 55 bp, Artificial
  Synthetic oligonucleotide
gctgatgatatgacatggcagttatcctagtgtcaagcaaatttggagcaattag

SEQ ID NO: 502546 - DNA, 55 bp, Artificial
  Synthetic oligonucleotide
ggagtaattagtttctaactaatgggcgggagtttgtagtgggtagcactccgtt

SEQ ID NO: 502547 - DNA, 55 bp, Artificial
  Synthetic oligonucleotide
gagttggacatctaagtattctatagtttgggttggcttatggatgcggatttca

SEQ ID NO: 502548 - DNA, 55 bp, Artificial
  Synthetic oligonucleotide
gagttagccatccaacccctactaaaaccgctccaatcgctttagcggttgggta

SEQ ID NO: 502549 - DNA, 55 bp, Artificial
  Synthetic oligonucleotide
gatttaccttgcattgatagttcctgattgcttttaccaataatcactgcaaccc

SEQ ID NO: 502550 - DNA, 55 bp, Artificial
  Synthetic oligonucleotide
gatttagctatcgctaaagagtggaaattaacagagcttgacattaagggcaacg

SEQ ID NO: 502551 - DNA, 55 bp, Artificial
  Synthetic oligonucleotide
gagagcacgccatatggcattaatcccttatattgtggatagaaagaaagtggta

SEQ ID NO: 502552 - DNA, 55 bp, Artificial
  Synthetic oligonucleotide
gcaattacaagactatcaaaagactatgctcttactcgccaaagaaagactactc

SEQ ID NO: 502553 - DNA, 55 bp, Artificial
  Synthetic oligonucleotide
gcacaaccacgcaatctgtccgcttgtaatagaatctattcctttagattctggc

SEQ ID NO: 502554 - DNA, 55 bp, Artificial
  Synthetic oligonucleotide
gcactagggagtattacagaaataagagtgcatggagtaggaacacctgcgatat

SEQ ID NO: 502555 - DNA, 55 bp, Artificial
  Synthetic oligonucleotide
gcatcagcttctttgactccatcaaacagcatagtgctttgtaacatatcacgct

SEQ ID NO: 502556 - DNA, 55 bp, Artificial
  Synthetic oligonucleotide
gccaacaggtccggttaaaatgcttagtcctcttgtaagagcggcatttgctcct

SEQ ID NO: 502557 - DNA, 55 bp, Artificial
  Synthetic oligonucleotide
gacttgagttagccatccaacccctactaaaaccgcagagcgagcgttagcgagc

SEQ ID NO: 502558 - DNA, 55 bp, Artificial
  Synthetic oligonucleotide
gccatccaacccctactaaaaccgcctagcgagctttagcgagcaatacaagcgg

SEQ ID NO: 502559 - DNA, 55 bp, Artificial
  Synthetic oligonucleotide
gccattactttccacttaggagccacctcgacaatgtcctgtgcgtagagtgccc

SEQ ID NO: 502560 - DNA, 55 bp, Artificial
  Synthetic oligonucleotide
gccccgcactgtagtcatcactgcagggcaatccttaggaatcttgaaggaggtt

SEQ ID NO: 502561 - DNA, 55 bp, Artificial
  Synthetic oligonucleotide
gaccgccacacagcaagagctagaaacaatcctagaaacttaccgccaagagcga

SEQ ID NO: 502562 - DNA, 55 bp, Artificial
  Synthetic oligonucleotide
gccctaatctctactttgcaatacaaacccctgaaggcgtagcctacaccagaga

SEQ ID NO: 502563 - DNA, 55 bp, Artificial
  Synthetic oligonucleotide
gcgaagcatggacaagagcgcatcgcagtttgaaatcgtaggcgttagccgaagc

SEQ ID NO: 502564 - DNA, 55 bp, Artificial
  Synthetic oligonucleotide
gacatcaagctcatagcgtgggatattcacaaccaaatcgctaaaagaagcgcaa

SEQ ID NO: 502565 - DNA, 55 bp, Artificial
  Synthetic oligonucleotide
gtcttcactatgtatccaatcccataatctcttttcgcctattctttgtcttgac

SEQ ID NO: 502566 - DNA, 55 bp, Artificial
  Synthetic oligonucleotide
gtgagagagagtaaaaggcttttagttagattagggtcgccccttaaaactttag

SEQ ID NO: 502567 - DNA, 55 bp, Artificial
  Synthetic oligonucleotide
gtgcgcatgcgagggattaggggttagaaccacctaaataccgaagctgtagagt

SEQ ID NO: 502568 - DNA, 55 bp, Artificial
  Synthetic oligonucleotide
gtggagcaaggcacagctaaggttttaaggggcgaccctaatctaactaaaagcc

SEQ ID NO: 502569 - DNA, 55 bp, Artificial
  Synthetic oligonucleotide
gtggatcaatgccctgaggggatcagcaactacctgaaaatcactaggatcgtga

SEQ ID NO: 502570 - DNA, 55 bp, Artificial
  Synthetic oligonucleotide
gtgtagccagtgaaagcacctataacttgagttagccatccaacccctactaaaa

SEQ ID NO: 502571 - DNA, 55 bp, Artificial
  Synthetic oligonucleotide
gttaaatacgatcgcctcaaaagatgacccagaatacgatgtttcgtttggagac

SEQ ID NO: 502572 - DNA, 55 bp, Artificial
  Synthetic oligonucleotide
taaacgcacgaatcgtctctgtataagcctcttgtaaactagcaggagcgagtgc

SEQ ID NO: 502573 - DNA, 55 bp, Artificial
  Synthetic oligonucleotide
taccggggtaacggttgagaaaaccgtagtcacatttgaacacggcgggtatgaa

SEQ ID NO: 502574 - DNA, 55 bp, Artificial
  Synthetic oligonucleotide
tagcgagcattcaagcggttttagaccgattgtttgctgacaagcaaacacagat

SEQ ID NO: 502575 - DNA, 55 bp, Artificial
  Synthetic oligonucleotide
taggctttggtgtagcaataagagggaatcctttatcactaaagacattgccact

SEQ ID NO: 502576 - DNA, 55 bp, Artificial
  Synthetic oligonucleotide
tattggttattctcatacaccttgccccaatgatttgtatcgtgtgtaacgggac

SEQ ID NO: 502577 - DNA, 55 bp, Artificial
  Synthetic oligonucleotide
tgatttaatgctcgcaaactctttgtcattcgccttagcccatttgttcgcttcg

SEQ ID NO: 502578 - DNA, 55 bp, Artificial
  Synthetic oligonucleotide
tgcagaatacatcggcaaaacgatccacatcaccaacttcaatgtggatcaatgc

SEQ ID NO: 502579 - DNA, 55 bp, Artificial
  Synthetic oligonucleotide
tgtgcaaattccttgataggttcattcgtgatagggtggatgctaggcgtaaagg

SEQ ID NO: 502580 - DNA, 55 bp, Artificial
  Synthetic oligonucleotide
ttgctctttgatttgagcgttctgtaattcttgttgtaaaatctgctcgtagtcc

SEQ ID NO: 502581 - DNA, 55 bp, Artificial
  Synthetic oligonucleotide
ttggaatcgtagagttctaggcaggttcgtatctttgagattccttgtggttgtg

SEQ ID NO: 502582 - DNA, 55 bp, Artificial
  Synthetic oligonucleotide
ttggcttgtagtctcttgcgacttctagcatttcaacgctactaaaaccgctcac

SEQ ID NO: 502583 - DNA, 55 bp, Artificial
  Synthetic oligonucleotide
tttgaattacaacgctatgcaggctctatgagtccttcatcttacgcttcagaag

SEQ ID NO: 502584 - DNA, 55 bp, Artificial
  Synthetic oligonucleotide
ttttcgcacctttacttcactaggtttattaaaagccaatcccttgtttatgggg

SEQ ID NO: 502585 - DNA, 55 bp, Artificial
  Synthetic oligonucleotide
ggatcgtgaaactgaacgataatcggatctgtgtttcaatccaagatgtggataa

SEQ ID NO: 502586 - DNA, 55 bp, Artificial
  Synthetic oligonucleotide
ggctctagcgtaagctagggtcttaaagtctatggttgctagcgttttaaatcgc

SEQ ID NO: 502587 - DNA, 55 bp, Artificial
  Synthetic oligonucleotide
ggctttctatgataccagagactgccggatttgctattatggttgggttaagccc

SEQ ID NO: 502588 - DNA, 55 bp, Artificial
  Synthetic oligonucleotide
gggcaaatacgctaagacgctctatcgcttgctcaagcaatacaaaagcacaggg

SEQ ID NO: 502589 - DNA, 55 bp, Artificial
  Synthetic oligonucleotide
gggcatgtccgaccaccaaatcgttacgatggatcaaagcgcggatttcgggaat

SEQ ID NO: 502590 - DNA, 55 bp, Artificial
  Synthetic oligonucleotide
gggctattgccatggtattgggtgtggaatattcaagttagctcagtgttatggc

SEQ ID NO: 502591 - DNA, 55 bp, Artificial
  Synthetic oligonucleotide
ggggcattagtaaagatttcttggctaggttcttgtggacctgtttctctagctc

SEQ ID NO: 502592 - DNA, 55 bp, Artificial
  Synthetic oligonucleotide
ggggtaagtgagctcaaatccgctaggatctcctaaactcgtgtagataatagga

SEQ ID NO: 502593 - DNA, 55 bp, Artificial
  Synthetic oligonucleotide
gggtggggagtgcagtgggtggcactctgttaggaggcacaccatgaagttcatt

SEQ ID NO: 502594 - DNA, 55 bp, Artificial
  Synthetic oligonucleotide
gggtttaggagtttgtcaggtttatccacatcttggactgaaacacagatccgat

SEQ ID NO: 502595 - DNA, 55 bp, Artificial
  Synthetic oligonucleotide
ggtataggtgttatctttaggggtgctaaccactaaatctttgcatggtgtgggg

SEQ ID NO: 502596 - DNA, 55 bp, Artificial
  Synthetic oligonucleotide
ggtctatatccaaggttttgaacaagaaaatgcccatctgatagggttgctcacg

SEQ ID NO: 502597 - DNA, 55 bp, Artificial
  Synthetic oligonucleotide
ggtttctgtctctaggctctcgtaatcgttgcttagcctttgaaattctgctgta

SEQ ID NO: 502598 - DNA, 55 bp, Artificial
  Synthetic oligonucleotide
gtaatatcttgtttacgcaggtgcgaacatcgcaaaatagggagttctatcatgt

SEQ ID NO: 502599 - DNA, 55 bp, Artificial
  Synthetic oligonucleotide
gtagggtcgcatatagtcgttaagttggtaagtaatctcggcttgtccctctgtg

SEQ ID NO: 502600 - DNA, 55 bp, Artificial
  Synthetic oligonucleotide
gtagtgtgatagcccaacaatcacgcatgaacgttgaaagggctttaaaagatgc

SEQ ID NO: 502601 - DNA, 55 bp, Artificial
  Synthetic oligonucleotide
gtattgaccgcccattcctagattgttgagcaagtattgatagctatcattgagt

SEQ ID NO: 502602 - DNA, 55 bp, Artificial
  Synthetic oligonucleotide
gtattgcttgagcaagcggtaaagcgttttagcgtatttgcctctcactctttgg

SEQ ID NO: 502603 - DNA, 55 bp, Artificial
  Synthetic oligonucleotide
gtcaagctacccaatgaacctaaagccaaacgattgaaaggattttactaccatg

SEQ ID NO: 502604 - DNA, 55 bp, Artificial
  Synthetic oligonucleotide
gtcgataatctctatgcctatggaatcgagtttgtttaaagcccaagtggtgcag

SEQ ID NO: 502605 - DNA, 55 bp, Artificial
  Synthetic oligonucleotide
gtctcgtgttcttgtgtaaattccgtgtaagattgttctagctcttgtttgagag

SEQ ID NO: 502606 - DNA, 55 bp, Artificial
  Synthetic oligonucleotide
caatcttcgtcagcaccctcatcaactcaaagtacaaccgttcctcaaaacgtgg

SEQ ID NO: 502607 - DNA, 55 bp, Artificial
  Synthetic oligonucleotide
cacaggctcaggctctgtggtttgaatttgcgtgttctgcgtaaataaattactc

SEQ ID NO: 502608 - DNA, 55 bp, Artificial
  Synthetic oligonucleotide
cacctcgttaggaggtatcgtgccatgaagttattattcatgttagttctagtgc

SEQ ID NO: 502609 - DNA, 55 bp, Artificial
  Synthetic oligonucleotide
cacgcagatccccttacaacacattttgccgattagaagcggttatgcgatccgc

SEQ ID NO: 502610 - DNA, 55 bp, Artificial
  Synthetic oligonucleotide
cacttgcaatggctgtggctataaatgcagtaatagcaattcctgcggaagctac

SEQ ID NO: 502611 - DNA, 55 bp, Artificial
  Synthetic oligonucleotide
cactttcggtgtaggtaaagtagcgttgccacatttctagccatttggcttggct

SEQ ID NO: 502612 - DNA, 55 bp, Artificial
  Synthetic oligonucleotide
caggggcaaactctcgcataatcaccaaagagcgcatatccacaactagatttcc

SEQ ID NO: 502613 - DNA, 55 bp, Artificial
  Synthetic oligonucleotide
catgcaaaatcgctacaacattttatgggtagaacacacagacaaagggcgtttg

SEQ ID NO: 502614 - DNA, 55 bp, Artificial
  Synthetic oligonucleotide
ccaatatttgttatggagtgtgcctatcatgccgttatagcccttgacatcagcc

SEQ ID NO: 502615 - DNA, 55 bp, Artificial; identical to SEQ ID NO: 194705
  Synthetic oligonucleotide

SEQ ID NO: 502616 - DNA, 55 bp, Artificial
  Synthetic oligonucleotide
ccacgatacccaatgccgccaacgccataacccatgtcacctccaccgcctgagg

SEQ ID NO: 502617 - DNA, 55 bp, Artificial
  Synthetic oligonucleotide
ccagatgaggagataatgcaagggcttttatactccacttgggaaagtttaaaag

SEQ ID NO: 502618 - DNA, 55 bp, Artificial
  Synthetic oligonucleotide
ccatacttcaaatgcactttgcaatctaatggtttcgtgggctatttcgttttgc

SEQ ID NO: 502619 - DNA, 55 bp, Artificial
  Synthetic oligonucleotide
ccatgcaaggatttagtagttagcacccctaaagataacacctataccacctacc

SEQ ID NO: 502620 - DNA, 55 bp, Artificial
  Synthetic oligonucleotide
cccaccacgccaagccaactagacatagcggtgctattagacatgctagaaagga

SEQ ID NO: 502621 - DNA, 55 bp, Artificial
  Synthetic oligonucleotide
cccaccgatccgctagatgaaaacgctatcatcgcattagtgtatcgtggcatgc

SEQ ID NO: 502622 - DNA, 55 bp, Artificial
  Synthetic oligonucleotide
ccccaaaacccacaccaataaaagagccacagaccaccattacaccatgcaagga

SEQ ID NO: 502623 - DNA, 55 bp, Artificial
  Synthetic oligonucleotide
cccctcattagcgaccttttcactcccaagctacaacagacaaggacttccggtc

SEQ ID NO: 502624 - DNA, 55 bp, Artificial
  Synthetic oligonucleotide
cccgcaaaggatacaagcattctgtctataaagaaccaaagcataataacaccaa

SEQ ID NO: 502625 - DNA, 55 bp, Artificial
  Synthetic oligonucleotide
aacagattcgcaaaccaccctaaatgccctagagattcaaaagctccaacaaacc

SEQ ID NO: 502626 - DNA, 55 bp, Artificial
  Synthetic oligonucleotide
aacattgtcaaattgaatgacaatcggatctgtgtttcagtccaagacgtggaca

SEQ ID NO: 502627 - DNA, 55 bp, Artificial
  Synthetic oligonucleotide
aatgcccctaactttcattatggggttagtcatcatggggacaatattagtgggg

SEQ ID NO: 502628 - DNA, 55 bp, Artificial
  Synthetic oligonucleotide
acagctcgtcttaaatcactaggaatgcttcgcataacccagctacgaaaattcg

SEQ ID NO: 502629 - DNA, 55 bp, Artificial
  Synthetic oligonucleotide
accgtgaaagggtggtatcctaaccactagatgaaggagccactatgctcaatta

SEQ ID NO: 502630 - DNA, 55 bp, Artificial
  Synthetic oligonucleotide
acgctttggttgagataatggcttgagcaccgatcgtaagcgctgaggcctcatc

SEQ ID NO: 502631 - DNA, 55 bp, Artificial
  Synthetic oligonucleotide
actgcttgcatgaataaaagaatgctatcaatcggtcaagcgagtaagcttttgg

SEQ ID NO: 502632 - DNA, 55 bp, Artificial
  Synthetic oligonucleotide
agcaattcgatatgccacatacagccctaatccgattccctcttcgcctcgaaca

SEQ ID NO: 502633 - DNA, 55 bp, Artificial
  Synthetic oligonucleotide
agctatgcgacaatttagccaaacgcacttttactgatgaaacgctaagtattga

SEQ ID NO: 502634 - DNA, 55 bp, Artificial
  Synthetic oligonucleotide
atcacctaccacaataacgctaataaagtcaatctagggaaattgagcgaaaggg

SEQ ID NO: 502635 - DNA, 55 bp, Artificial
  Synthetic oligonucleotide
atcgtggcatgcatgagatcaaagaagtgaaaggcaagctacaagtggtattgac

SEQ ID NO: 502636 - DNA, 55 bp, Artificial
  Synthetic oligonucleotide
atcgtttggctttaggttcgttgggtagcttgacactaatataatccttgccttg

SEQ ID NO: 502637 - DNA, 55 bp, Artificial
  Synthetic oligonucleotide
attgatccaccaagtatccaccctatcacgaacgaacctatcaaagagtttgcag

SEQ ID NO: 502638 - DNA, 55 bp, Artificial
  Synthetic oligonucleotide
attttagtgtttctaaccctgtcttcatggctaggcaatagcggattagtggggc

SEQ ID NO: 502639 - DNA, 55 bp, Artificial
  Synthetic oligonucleotide
caaacgaacccataaactccaagagagtcataataaactaggggttgatataggg

SEQ ID NO: 502640 - DNA, 55 bp, Artificial
  Synthetic oligonucleotide
caagatgaccctacctataagcttaatgacaatacttgtgagttagtgagtaagc

SEQ ID NO: 502641 - DNA, 55 bp, Artificial
  Synthetic oligonucleotide
caagtgcggtatttcctatgtgcgacaaaatttggagcaactagcttgactttgt

SEQ ID NO: 502642 - DNA, 55 bp, Artificial
  Synthetic oligonucleotide
caagttcgtacctatctagcccattagttcgtatcagtgggctgtaagttctttt

SEQ ID NO: 502643 - DNA, 55 bp, Artificial
  Synthetic oligonucleotide
cgtttaaatattcaaggaccgcatcgataaataccaatccgcttttctcttgatg

SEQ ID NO: 502644 - DNA, 55 bp, Artificial
  Synthetic oligonucleotide
ctaccacaacaacactaacaaggtcaatctggggaaattgagcgaaagggaagcc

SEQ ID NO: 502645 - DNA, 55 bp, Artificial
  Synthetic oligonucleotide
ctaccctaaacaccctatatcttggacactcacatgcatacatcatatttatcgc

SEQ ID NO: 502646 - DNA, 55 bp, Artificial
  Synthetic oligonucleotide
ctagcgagattaaggcgatgataggcaatagtaaaatcagcggaaaagagcttac

SEQ ID NO: 502647 - DNA, 55 bp, Artificial
  Synthetic oligonucleotide
ctcacaacgtgccctgattgaccgtatgaactccgatctctctaacgatttaggg

SEQ ID NO: 502648 - DNA, 55 bp, Artificial
  Synthetic oligonucleotide
ctcatatccgtattgtgtaagaaattgatttcgctatcgcttaatggaacgccgc

SEQ ID NO: 502649 - DNA, 55 bp, Artificial
  Synthetic oligonucleotide
ctcgtaagaagttctgttatcactcgtaagaagttctgttatcactcgtaagaag

SEQ ID NO: 502650 - DNA, 55 bp, Artificial
  Synthetic oligonucleotide
ctctactaaaaccgcctagcgagctttagcgagcattcaagcggttttagaccga

SEQ ID NO: 502651 - DNA, 55 bp, Artificial
  Synthetic oligonucleotide
ctctccttcatcatacacccctccaataattatctttaactctgtggtattgtct

SEQ ID NO: 502652 - DNA, 55 bp, Artificial
  Synthetic oligonucleotide
ctgcctcatactgctcttttgaggcttcaaatacacagcggttttgttgccaaaa

SEQ ID NO: 502653 - DNA, 55 bp, Artificial
  Synthetic oligonucleotide
ctgctacactattagcgttcaaggtgcttatcattccgctatgcccagtatttgc

SEQ ID NO: 502654 - DNA, 55 bp, Artificial
  Synthetic oligonucleotide
ctgtaactttctctagcttggttaatagctcgtttctgtcgttctctaaactcgc

SEQ ID NO: 502655 - DNA, 55 bp, Artificial
  Synthetic oligonucleotide
cttaccgactgaataaccatttattaagcgaagaatacctgtatgtcaatgagcc

SEQ ID NO: 502656 - DNA, 55 bp, Artificial
  Synthetic oligonucleotide
ctttgtattctagcagcctctcgtggtgtgatagagcggtgtaattctgggtgtg

SEQ ID NO: 502657 - DNA, 55 bp, Artificial
  Synthetic oligonucleotide
gaaaagcaaagccctttcattgatgcggataaaatggctattcaatctgcagagc

SEQ ID NO: 502658 - DNA, 55 bp, Artificial
  Synthetic oligonucleotide
gaaatcataggggctaatcggttcttaacccactatgacaacctaaaccttgaaa

SEQ ID NO: 502659 - DNA, 55 bp, Artificial
  Synthetic oligonucleotide
gaacacgagacacaattaacgcaattaaagacatctacagaaacgcaaaagagcg

SEQ ID NO: 502660 - DNA, 55 bp, Artificial
  Synthetic oligonucleotide
gaagtcatcaaaccgcttgctgaactcaaagacaaaactctagcctaccccaccg

SEQ ID NO: 502661 - DNA, 55 bp, Artificial
  Synthetic oligonucleotide
ccgcaacgaagttacaaagggtttgttgtatttgcaagatatattgtgcgtgcca

SEQ ID NO: 502662 - DNA, 55 bp, Artificial
  Synthetic oligonucleotide
ccgttaaatcaaacaactctcctttaatatctaacaccacacaagagctaggcac

SEQ ID NO: 502663 - DNA, 55 bp, Artificial
  Synthetic oligonucleotide
cctagcttgagttcgtgtcgccattttaacccttaagagtttggcacaagcttag

SEQ ID NO: 502664 - DNA, 55 bp, Artificial
  Synthetic oligonucleotide
cctagtgtcaagcaaatttggagcaattagtttctaactaatgggcgggagtttg

SEQ ID NO: 502665 - DNA, 55 bp, Artificial
  Synthetic oligonucleotide
cctatggctctactccctttagggattaaaaccgctctacccatcgttgcgtata

SEQ ID NO: 502666 - DNA, 55 bp, Artificial
  Synthetic oligonucleotide
cctgcaatatcaatagctgtccatacgcctgtaattatccagccaacaggtccgg

SEQ ID NO: 502667 - DNA, 55 bp, Artificial
  Synthetic oligonucleotide
ccttacaccctaatgagcttgattatgaccccaaagctcatgctggattgaaaga

SEQ ID NO: 502668 - DNA, 55 bp, Artificial
  Synthetic oligonucleotide
cgataagggaacttcttgccacgaaacgataagggaacttcttgccaacgaaacg

SEQ ID NO: 502669 - DNA, 55 bp, Artificial
  Synthetic oligonucleotide
cgatgaggaacgcttcaagacattcactctgatgaaaatgcctttactcatgcgc

SEQ ID NO: 502670 - DNA, 55 bp, Artificial
  Synthetic oligonucleotide
cgatgcgattgtaggtgcgccagattctcaaggtttagggcgattaagacaaggc

SEQ ID NO: 502671 - DNA, 55 bp, Artificial
  Synthetic oligonucleotide
cgtcgttttagctgctctgacttccataacccagaagctaaagaacaatgcaagg

SEQ ID NO: 502672 - DNA, 55 bp, Artificial
  Synthetic oligonucleotide
cggtatgggcatgtgcggcacgagtaggcatgtaagcggggtcgctcactctacg

SEQ ID NO: 502673 - DNA, 55 bp, Artificial
  Synthetic oligonucleotide
cggcttggtattctttggaatcgtagaggtcaagacaggtatagaatcgtggcat

SEQ ID NO: 502674 - DNA, 55 bp, Artificial
  Synthetic oligonucleotide
cgctcttcttagtaagggaagtgaagtcagtttgaaagcatgtgtcttagataaa

SEQ ID NO: 502675 - DNA, 55 bp, Artificial
  Synthetic oligonucleotide
cgctattaggatgagagataataatcggttcgcccttatccccaccaatacgcac

SEQ ID NO: 502676 - DNA, 55 bp, Artificial
  Synthetic oligonucleotide
cgccctctttgacacatttgcaaccttcgctaatcttatgactaacagctttaac

SEQ ID NO: 502677 - DNA, 55 bp, Artificial
  Synthetic oligonucleotide
cgccgctttaacttctcatgcggtaggggttcaaaataatagagacctttcaagt

SEQ ID NO: 502678 - DNA, 54 bp, Artificial
  Synthetic oligonucleotide
gtggtagcaccacaacaagaccccaattagtggaaagcgaattgacaaatcttt

SEQ ID NO: 502679 - DNA, 54 bp, Artificial
  Synthetic oligonucleotide
ggctcttactaaagtggctacatgcaaccacaatgccccactaagcatgcccgc

SEQ ID NO: 502680 - DNA, 54 bp, Artificial
  Synthetic oligonucleotide
gcccagtatcacttcgggaatcacttcaaacgctctgttcacaatcgcaacata

SEQ ID NO: 502681 - DNA, 53 bp, Artificial
  Synthetic oligonucleotide
tagtggtaatcttaacacagccactatattaaaaccttagcgttttaataacc

SEQ ID NO: 502682 - DNA, 53 bp, Artificial
  Synthetic oligonucleotide
aagcacagggattttgagcgtggaatgggatcaattcagggaacttttagaca

SEQ ID NO: 502683 - DNA, 53 bp, Artificial
  Synthetic oligonucleotide
taccaattcgctctcaaagtccttacacactttggcaaacaccgatcctaaaa

SEQ ID NO: 502684 - DNA, 52 bp, Artificial
  Synthetic oligonucleotide
agatgtggacaagcctgacaagcttttgaagcctttcatcgctaaagatgag

SEQ ID NO: 502685 - DNA, 52 bp, Artificial
  Synthetic oligonucleotide
agacaaaagcgcatcgcagtttgaaatcgtaggcgttagccgaagctgtttt

SEQ ID NO: 502686 - DNA, 51 bp, Artificial
  Synthetic oligonucleotide
caatatacgagtaaaacttgtcatagttgtgggcaaatcaaccacgagctt

SEQ ID NO: 502687 - DNA, 51 bp, Artificial
  Synthetic oligonucleotide
tggcttccctttcgctcaatttccctagattgaccttattagcgttattgt

SEQ ID NO: 502688 - DNA, 51 bp, Artificial
  Synthetic oligonucleotide
gcaagggttatgtcaatggataaatcctcaagggttatctctgtgccacga

SEQ ID NO: 502689 - DNA, 51 bp, Artificial
  Synthetic oligonucleotide
tcttaatcgcttttgccacagatatttgcatggagcgtaacgaacacaaaa

SEQ ID NO: 502690 - DNA, 51 bp, Artificial
  Synthetic oligonucleotide
cgcgctcaataaatcccacgcctctttacctatactagaagtccctccggt

SEQ ID NO: 502691 - DNA, 50 bp, Artificial
  Synthetic oligonucleotide
aatctagggaaattgagcgaaagggaagcgaaccttttgttcgctatttt

SEQ ID NO: 502692 - DNA, 50 bp, Artificial
  Synthetic oligonucleotide
agatatattgtgcgtgccaaaaagtttttatgcgtggatagacttcaaac

SEQ ID NO: 502693 - DNA, 55 bp, Artificial
  Synthetic oligonucleotide
tttggggttacggcaaggcctcttccgcggagagtcgcaggatcagcactccgag

SEQ ID NO: 502694 - DNA, 55 bp, Artificial
  Synthetic oligonucleotide
tttcgggatctccaagggttccggggtcgccggtgcacccaatactgagggatgc

SEQ ID NO: 502695 - DNA, 55 bp, Artificial
  Synthetic oligonucleotide
ttggccccatgcacgggttccgaaaaggtgatccggaccatggccgaagggtcca

SEQ ID NO: 502696 - DNA, 55 bp, Artificial
  Synthetic oligonucleotide
ttcccgaacaccgtatgcatgttgtaagtggtcatactagcacagtgatccctcc

SEQ ID NO: 502697 - DNA, 55 bp, Artificial
  Synthetic oligonucleotide
ggtgccacgccccatcatgtgacgccagcagacttccgatagactcctccaaagg

SEQ ID NO: 502698 - DNA, 55 bp, Artificial
  Synthetic oligonucleotide
ggtcagcctcatcggggtcatgcgcatggtgactgaggtgctctggagtgcggat

SEQ ID NO: 502699 - DNA, 55 bp, Artificial
  Synthetic oligonucleotide
ggcggtttactccctcaccttcgttgtgggagcctaccctcaggactggatcggc

SEQ ID NO: 502700 - DNA, 55 bp, Artificial
  Synthetic oligonucleotide
ggccaggcttctggagaacctgaccgggtactacaacgtggccgagttggcggaa

SEQ ID NO: 502701 - DNA, 55 bp, Artificial
  Synthetic oligonucleotide
ggacatggctccgaattggatcgcaccgatggcagtaagctccatggccttccac

SEQ ID NO: 502702 - DNA, 55 bp, Artificial
  Synthetic oligonucleotide
ctaccagggtttcctcaacgtaggactccgctggagggacgcatccctgcgcttc

SEQ ID NO: 502703 - DNA, 55 bp, Artificial
  Synthetic oligonucleotide
cgggtttccaatcatggaggcactcaggaaagctggcagtgcttttgccgcaaaa

SEQ ID NO: 502704 - DNA, 55 bp, Artificial
  Synthetic oligonucleotide
cctgggactggtctattcggatggccggacacatccacccctgaacgagggttcc

SEQ ID NO: 502705 - DNA, 55 bp, Artificial
  Synthetic oligonucleotide
ccaccgaagaaagatgccaccgacatgaaagaaacgctcaggcatgacgactgcc

SEQ ID NO: 502706 - DNA, 55 bp, Artificial
  Synthetic oligonucleotide
acgccaggtcccctgtcgcccagggattgctgactgctgagcccgacagtcccgg

SEQ ID NO: 502707 - DNA, 52 bp, Artificial
  Synthetic oligonucleotide
ttgaagcttggagtgctgcctgtctgaaaacactgcaggcgctaggcgccgc

SEQ ID NO: 502708 - DNA, 51 bp, Artificial
  Synthetic oligonucleotide
ggcagtgcccttcgaccttcaggcaggaatggcccgccgactgtaaatgga

SEQ ID NO: 502709 - DNA, 51 bp, Artificial
  Synthetic oligonucleotide
cccatcgcgaaggcaggtccaccattatccccatggactcggatgagtgct

SEQ ID NO: 502710 - DNA, 55 bp, Artificial
  Synthetic oligonucleotide
tttcgcagcatacgttgcggcactgtcatcctggggttgcgcatgcaaagtcccg

SEQ ID NO: 502711 - DNA, 55 bp, Artificial
  Synthetic oligonucleotide
gtgtctgggtatattcaatccgatcaaccgtttcgttgcccacggcttttgaagc

SEQ ID NO: 502712 - DNA, 55 bp, Artificial
  Synthetic oligonucleotide
ggttgtgcactccggtaagagggtcggtcaaccccagatgcttgaggcgctcgct

SEQ ID NO: 502713 - DNA, 55 bp, Artificial
  Synthetic oligonucleotide
ggtcatctgaactaaactgttccatctatcctgtaaccactcgcaactggagccg

SEQ ID NO: 502714 - DNA, 55 bp, Artificial
  Synthetic oligonucleotide
ggaccaggttaattcttgcctggcggcttattcgccgtagtgcttctttgcttcg

SEQ ID NO: 502715 - DNA, 55 bp, Artificial
  Synthetic oligonucleotide
gcccgtgggtattacccgctaggtgggaaaacaaggaaggaaagcgagtacatgt

SEQ ID NO: 502716 - DNA, 55 bp, Artificial
  Synthetic oligonucleotide
cgcctgccagaaatgttcacgccgcaaatcgtggaagccttgctttactcgccgg

SEQ ID NO: 502717 - DNA, 55 bp, Artificial
  Synthetic oligonucleotide
cgacaggcagtatctcggacagcaaagcccggccgaccgtagtctcgtaacgcgt

SEQ ID NO: 502718 - DNA, 55 bp, Artificial
  Synthetic oligonucleotide
ccttgtggacggaagatgctacccgcggtgcctatgaattacggcaggtagctca

SEQ ID NO: 502719 - DNA, 55 bp, Artificial
  Synthetic oligonucleotide
cctccagggaaatgaatgccattttcccgcgccgcgtcatctgagtacgaatggc

SEQ ID NO: 502720 - DNA, 55 bp, Artificial
  Synthetic oligonucleotide
ccgcccacatccactgcttttcccaatgggtgaccttgacgtgtatcggcgtgcc

SEQ ID NO: 502721 - DNA, 55 bp, Artificial
  Synthetic oligonucleotide
cccgatgatccatcgtgaacaaagactcgtagctcctcgcctttggcgctcaagg

SEQ ID NO: 502722 - DNA, 55 bp, Artificial
  Synthetic oligonucleotide
cattaatctgaccctgtggtggcaatctggttccggtatctctgccaatcgaagc

SEQ ID NO: 502723 - DNA, 55 bp, Artificial
  Synthetic oligonucleotide
caggaaggagcccaactggtcagcaatgatcccggttgcaatgccctcgtgcccg

SEQ ID NO: 502724 - DNA, 55 bp, Artificial
  Synthetic oligonucleotide
cagccatggaacggatcatgaacaggtgtcagaataccaacaaccatgtcaccgc

SEQ ID NO: 502725 - DNA, 53 bp, Artificial
  Synthetic oligonucleotide
ggggcagatggattctcaactggatgtcttcctgcagagaagttagaagcggc

SEQ ID NO: 502726 - DNA, 52 bp, Artificial
  Synthetic oligonucleotide
aactggccgacacttctgcttgcggcttgagtccgaagcggatgacgcgatg

SEQ ID NO: 502727 - DNA, 60 bp, Artificial
  Synthetic oligonucleotide
agatagacgtagtcgtcggtatcatagaacagaaccaacccggccatttgctgaaagttt

SEQ ID NO: 502728 - DNA, 60 bp, Artificial
  Synthetic oligonucleotide
agtctcggctgcagcggtttcattctgtgagaagttgacgccgacccgtaccccaaggcc

SEQ ID NO: 502729 - DNA, 60 bp, Artificial
  Synthetic oligonucleotide
cgccaggtaccattcgcctgtatgtgtttcgatcaaagagccatgtcccgacttttgcag

SEQ ID NO: 502730 - DNA, 60 bp, Artificial
  Synthetic oligonucleotide
atttgtgcccaaaaaaatcgtttcggggcgacccaccaatcgtcgctccgccaccgaata

SEQ ID NO: 502731 - DNA, 60 bp, Artificial
  Synthetic oligonucleotide
tttcgctcgaagcggtaaatcccgaatacagcccccactcgagccaagcatcgtagacct

SEQ ID NO: 502732 - DNA, 60 bp, Artificial
  Synthetic oligonucleotide
cactcgaaggtagacgttgcgatgtagtagtcttgcccgacccgtaaaaacgacgggtcg

SEQ ID NO: 502733 - DNA, 60 bp, Artificial
  Synthetic oligonucleotide
cagtgatcgtattttgtaccgccttccgccaccatgagatggtagaacccgtcgtggtaa

SEQ ID NO: 502734 - DNA, 60 bp, Artificial
  Synthetic oligonucleotide
cgaaagatttcgtatatcgagttgcggccctatacgcgtccattcggagtcaccaagagc

SEQ ID NO: 502735 - DNA, 60 bp, Artificial
  Synthetic oligonucleotide
tcaccttggactgcgaatgcaattccgcgggcccgttctattcgtcggacagtctcggct

SEQ ID NO: 502736 - DNA, 60 bp, Artificial
  Synthetic oligonucleotide
tctatactggaagccgtcaccaggtaattatgagtatctttgaaggcgccacgtcgcgac

SEQ ID NO: 502737 - DNA, 59 bp, Artificial
  Synthetic oligonucleotide
ccccaaggccggctagcgcgcaacaaatttcacgccccagccctctggatcctccggtt

SEQ ID NO: 502738 - DNA, 59 bp, Artificial
  Synthetic oligonucleotide
ttattttcaccttgagcaagtctaagccagccatccgcgctccaagaacaacgctgcag

SEQ ID NO: 502739 - DNA, 55 bp, Artificial
  Synthetic oligonucleotide
tggtttccgcagcgatagaacacatgcctgccgggcacgacggcgaaaggctcca

SEQ ID NO: 502740 - DNA, 55 bp, Artificial
  Synthetic oligonucleotide
taggccgcattgccgtcgcgcgtgctgatgagatgtgcgctggttctatcgcgtc

SEQ ID NO: 502741 - DNA, 55 bp, Artificial
  Synthetic oligonucleotide
ttttgtgactgaaggtctgccatcggcggctccgtcaaacctcgggcccattgac

SEQ ID NO: 502742 - DNA, 55 bp, Artificial
  Synthetic oligonucleotide
gtcggtatcatagaacagaaccaacccggccatttgctgaaagttttccggtgcg

SEQ ID NO: 502743 - DNA, 55 bp, Artificial
  Synthetic oligonucleotide
gggccccggtacgcaagcttctcgaacgctcaggatacgcagtgggactgcaaga

SEQ ID NO: 502744 - DNA, 55 bp, Artificial
  Synthetic oligonucleotide
ggaccgcctgtctcatgccaagagatcttgatcgtagaggtattcgggaagctcc

SEQ ID NO: 502745 - DNA, 55 bp, Artificial
  Synthetic oligonucleotide
gccggcggcaccccagcaaaactttgccctggtgcgtgtatttcagcgcgtttcc

SEQ ID NO: 502746 - DNA, 55 bp, Artificial
  Synthetic oligonucleotide
gcatgacaggatcggtcccctgtatccttgccggaaagcctcgatcgtcaaagcg

SEQ ID NO: 502747 - DNA, 55 bp, Artificial
  Synthetic oligonucleotide
gaagtagtagctcacagcgccctcacagcatgcaacagcccgtgccaagcaatag

SEQ ID NO: 502748 - DNA, 55 bp, Artificial
  Synthetic oligonucleotide
ctgtatgtgtttcgatcaaagagccatgtcccgacttttgcagcggtagtgagcg

SEQ ID NO: 502749 - DNA, 55 bp, Artificial
  Synthetic oligonucleotide
cggtgctggagaattttcagcggattgcgcgttggttgttcgtgctcgcttggtt

SEQ ID NO: 502750 - DNA, 55 bp, Artificial
  Synthetic oligonucleotide
cgctctccgcgacatcgagcctggcgaagaacttcctacgattacgacgaagaat

SEQ ID NO: 502751 - DNA, 55 bp, Artificial
  Synthetic oligonucleotide
ccgtcatgatttccctccgctgaattgatcttttctatttgcgtcgaaatgagcg

SEQ ID NO: 502752 - DNA, 55 bp, Artificial
  Synthetic oligonucleotide
ccgatctgccgaacggtctcaaaggcttgatcgaggaaagcttcgcgcttcacga

SEQ ID NO: 502753 - DNA, 55 bp, Artificial
  Synthetic oligonucleotide
cccgtcagcattcttcgtgagcgtctatcttggatcgacccgaaaccagaacgcg

SEQ ID NO: 502754 - DNA, 55 bp, Artificial
  Synthetic oligonucleotide
ccatcgtcgaaagctattcacgatcgctcattgacgaaggcgttctcacaaccgc

SEQ ID NO: 502755 - DNA, 55 bp, Artificial
  Synthetic oligonucleotide
cattctgtgagaagttgacgccgacccgtaccccaaggccggctagcgcgcaaca

SEQ ID NO: 502756 - DNA, 55 bp, Artificial
  Synthetic oligonucleotide
caaccccgccgcttctcgactcccttccactgcacgtccatctcaggaacgttgg

SEQ ID NO: 502757 - DNA, 55 bp, Artificial
  Synthetic oligonucleotide
attaatcgaaggcccgccccactctcctgagttgtagtagggatagtaaccgcgc

SEQ ID NO: 502758 - DNA, 54 bp, Artificial
  Synthetic oligonucleotide
gcgcggatgaaatcctcataccatttgttcggatccgtgctgcggcaacgctcg

SEQ ID NO: 502759 - DNA, 53 bp, Artificial
  Synthetic oligonucleotide
tcggggcgacccaccaatcgtcgctccgccaccgaatactcctgcagtacaat

SEQ ID NO: 502760 - DNA, 52 bp, Artificial
  Synthetic oligonucleotide
tacgggtcaatctcccgtcggctgtagaggacgattctgccacctagcgcaa

SEQ ID NO: 502761 - DNA, 55 bp, Artificial
  Synthetic oligonucleotide
tgattcggtatcatggggtaaagttggcagtatcgtgggtagctggatagtgacc

SEQ ID NO: 502762 - DNA, 55 bp, Artificial
  Synthetic oligonucleotide
ggtgtcggcaaacgcagcgacctcttccacatgcaacactgcgcggctgtcagag

SEQ ID NO: 502763 - DNA, 55 bp, Artificial
  Synthetic oligonucleotide
ggtgcggcaatcgctaacggtaaacctggcaagcctggcccggtacccacgtcaa

SEQ ID NO: 502764 - DNA, 55 bp, Artificial
  Synthetic oligonucleotide
ggctgtaaaccgtacgccgaatatcgtctttcaatcggtgattcaacccaatcac

SEQ ID NO: 502765 - DNA, 55 bp, Artificial
  Synthetic oligonucleotide
gcgcggtaaacttcaactgctcccaagtatggtcacaggccggtgttttactgtg

SEQ ID NO: 502766 - DNA, 55 bp, Artificial
  Synthetic oligonucleotide
gcgcagcgaccaacatagcgacaggggttaaacggggattcatcagactctcctt

SEQ ID NO: 502767 - DNA, 55 bp, Artificial
  Synthetic oligonucleotide
gccgagaagaaaattgactgcccatcggctgaccaactcagttgtccgctatgat

SEQ ID NO: 502768 - DNA, 55 bp, Artificial
  Synthetic oligonucleotide
gaccaccatccatcgatgagacaaagtggacattgaggtgatgacggctagcgtc

SEQ ID NO: 502769 - DNA, 55 bp, Artificial
  Synthetic oligonucleotide
cggtcaaacagactagtacctctatagccgtgacagccgtttactggcagagggc

SEQ ID NO: 502770 - DNA, 55 bp, Artificial
  Synthetic oligonucleotide
ccggtttagacccggtcaatcaggaaattgtgttgcaagtactcacgcagttgcg

SEQ ID NO: 502771 - DNA, 55 bp, Artificial
  Synthetic oligonucleotide
ccagcgtaaacaacagcgcggagaattgacttacgatgacttactgacgcggcta

SEQ ID NO: 502772 - DNA, 55 bp, Artificial
  Synthetic oligonucleotide
atcacgtgcttcttcgggtagcgtcgatactaagcggcctttatcgctaacactg

SEQ ID NO: 502773 - DNA, 55 bp, Artificial
  Synthetic oligonucleotide
agtaccgaccaccgcgccctcaggtaaatcgcgtaattgctggtaatgattagac

SEQ ID NO: 502774 - DNA, 55 bp, Artificial
  Synthetic oligonucleotide
agcatataaacaccaaggcaactagggcctttaatgccgccgctcatcttgtcgc

SEQ ID NO: 502775 - DNA, 55 bp, Artificial
  Synthetic oligonucleotide
acacataagtattgcccgctaaactcgcatcggttgcctcgttaactgccatcga

SEQ ID NO: 502776 - DNA, 51 bp, Artificial
  Synthetic oligonucleotide
agtaccagctggcgatgtgacttcaattgcaatatctgatgcggcggtggt

SEQ ID NO: 502777 - DNA, 50 bp, Artificial
  Synthetic oligonucleotide
ccgataaactggtggagagctgcaacaacacttgcttgcccaaaattttc

SEQ ID NO: 502778 - DNA, 55 bp, Artificial
  Synthetic oligonucleotide
ttgcgccgattaaagaggaagcgagaaccgttagtttatcctcgtcgataagcgg

SEQ ID NO: 502779 - DNA, 55 bp, Artificial
  Synthetic oligonucleotide
gttggtttcgctcttcatttaactcagccaactcctgttcgagttcatttagccg

SEQ ID NO: 502780 - DNA, 55 bp, Artificial
  Synthetic oligonucleotide
gtcgtgtaaattcctctggtaatcggcaaaagatgcgttacaaaagtgaaggaaa

SEQ ID NO: 502781 - DNA, 55 bp, Artificial
  Synthetic oligonucleotide
gggtaagcaaagcacctaaagtgaatcccttagaaacctgatagttgaatcccac

SEQ ID NO: 502782 - DNA, 55 bp, Artificial
  Synthetic oligonucleotide
ggacgggcgagttaaagcaatccgaagacgcttatacgcatccccaaccgcacgc

SEQ ID NO: 502783 - DNA, 55 bp, Artificial
  Synthetic oligonucleotide
gcgcgtatctcaatggttcggagaaacctgattcatttaagtggttgttaacagg

SEQ ID NO: 502784 - DNA, 55 bp, Artificial
  Synthetic oligonucleotide
gcccttggtttggggtatggtttaatgcttaccgaccgtgtgtcggttggtcttc

SEQ ID NO: 502785 - DNA, 55 bp, Artificial
  Synthetic oligonucleotide
gaggaacacgataaatctttcgatggcgataaacttaaacatcgttatgcggcgt

SEQ ID NO: 502786 - DNA, 55 bp, Artificial
  Synthetic oligonucleotide
gacggaaccggatatactaatttcgaactgagcgccgacagagcaaattcggcta

SEQ ID NO: 502787 - DNA, 55 bp, Artificial
  Synthetic oligonucleotide
gaattttcggtagtccaccccgggacgggcgaaattataactccggtaaatctcc

SEQ ID NO: 502788 - DNA, 55 bp, Artificial
  Synthetic oligonucleotide
ctttacataaccgtcgatcgtagcaaagagagaatggtcgcctgccaattttaca

SEQ ID NO: 502789 - DNA, 55 bp, Artificial
  Synthetic oligonucleotide
ctgattcggtagtgaggttgcccatcaatccagattaaaccagcaccaccggtta

SEQ ID NO: 502790 - DNA, 55 bp, Artificial
  Synthetic oligonucleotide
ctcatgccccgatgtccgaaagcgaaattaaaactatgttcggggaaatacctct

SEQ ID NO: 502791 - DNA, 55 bp, Artificial
  Synthetic oligonucleotide
ctacaaagatattgcaggagccgacctcgtaattattaccgcaggattgccgaga

SEQ ID NO: 502792 - DNA, 55 bp, Artificial
  Synthetic oligonucleotide
cgtgcaaaccaccattcaccacttgctctacccgaacatttgcataatcactcgg

SEQ ID NO: 502793 - DNA, 55 bp, Artificial
  Synthetic oligonucleotide
cgtatggctattcccctgataattcaactgacgagtcgctcgtacgccaagttcg

SEQ ID NO: 502794 - DNA, 55 bp, Artificial
  Synthetic oligonucleotide
cagtcaggaaggaactacttctgcaggtgtgcctggtagtgttgcaggaatgatt

SEQ ID NO: 502795 - DNA, 55 bp, Artificial
  Synthetic oligonucleotide
cagcgaataccgggcgcttacgaacgtttgctgcacgataccatcagaggcgaca

SEQ ID NO: 502796 - DNA, 55 bp, Artificial
  Synthetic oligonucleotide
caaagcaattccatcttcggttactaaagcaaaatcataagagccgcctctgcta

SEQ ID NO: 502797 - DNA, 55 bp, Artificial
  Synthetic oligonucleotide
aatcctgtttgggaggctcagatacttagtcacttaaagctcacaggtaaacgat

SEQ ID NO: 502798 - DNA, 54 bp, Artificial
  Synthetic oligonucleotide
acgcgtaatatcgacgaggcaaacgtaattcttttgaatacgtgcagcgtaaga

SEQ ID NO: 502799 - DNA, 53 bp, Artificial
  Synthetic oligonucleotide
cgaaacgtcgacattttgatataggaagcccaacgttgcatagccgccgtttt

SEQ ID NO: 502800 - DNA, 52 bp, Artificial
  Synthetic oligonucleotide
gatcaagcagcggttatgagctctggttggagccgaattacggggcaacaat

SEQ ID NO: 502801 - DNA, 52 bp, Artificial
  Synthetic oligonucleotide
atccggacagttggaaaattttgtggtcttagtttgaagaagtgccagtgag

SEQ ID NO: 502802 - DNA, 50 bp, Artificial
  Synthetic oligonucleotide
gttccaattcatcagctttatggggaaatgcgagtggtggtgttgtgaat

SEQ ID NO: 502803 - DNA, 55 bp, Artificial
  Synthetic oligonucleotide
tgctctcagcggaccggcctcacacccgcgcaccgagaggtatgccgtgcccgca

SEQ ID NO: 502804 - DNA, 55 bp, Artificial
  Synthetic oligonucleotide
tgcgcagggagcgggcgttagggtcagtgaaagtcgtgaaccacgagagcaaccg

SEQ ID NO: 502805 - DNA, 55 bp, Artificial
  Synthetic oligonucleotide
tgaccggccgttatgcttttgagaccctaacccaccgtccgcggccgagcaaagg

SEQ ID NO: 502806 - DNA, 55 bp, Artificial
  Synthetic oligonucleotide
tcgaaacggggtccttcggtcaggtcaggcatctccggagggtcgtggatcggtc

SEQ ID NO: 502807 - DNA, 55 bp, Artificial
  Synthetic oligonucleotide
taccaggctttcaagggcgggtcggcacccggcgtcctggcgttctccttctatg

SEQ ID NO: 502808 - DNA, 55 bp, Artificial
  Synthetic oligonucleotide
gttctcgtgcgggaaacttttacggaaacatttcgccaccggctgcgcctacgag

SEQ ID NO: 502809 - DNA, 55 bp, Artificial
  Synthetic oligonucleotide
gcttaacttcggtcgcgcattgctgggtcctctaccatgggaatggaccggcccc

SEQ ID NO: 502810 - DNA, 55 bp, Artificial
  Synthetic oligonucleotide
cttctggggtgactacgccttccaaggcaactacgacgggttccgcatctgggac

SEQ ID NO: 502811 - DNA, 55 bp, Artificial
  Synthetic oligonucleotide
ctgcataccaccgcctgtgacctgcggcgatagcgacatctgtggcacgatgacg

SEQ ID NO: 502812 - DNA, 55 bp, Artificial
  Synthetic oligonucleotide
ctgaggacggctgtcccatgctcgtctaggtttggggcatgtcactccgcagacg

SEQ ID NO: 502813 - DNA, 55 bp, Artificial
  Synthetic oligonucleotide
cggctcgtcgggtcaagcggatttcagtcatgctcaatcatccaccttcatcgtg

SEQ ID NO: 502814 - DNA, 55 bp, Artificial
  Synthetic oligonucleotide
cgcccacaggcgccagcagatttcttgctagtctgagcaccagttggggagaact

SEQ ID NO: 502815 - DNA, 55 bp, Artificial
  Synthetic oligonucleotide
cgaatcacaacacaactcgtgagtagcatgggcgcatggtgactgacactacccc

SEQ ID NO: 502816 - DNA, 55 bp, Artificial
  Synthetic oligonucleotide
ccgcgaggggtaacccggaggcatcacgattcagggctccgtacccgaagtcata

SEQ ID NO: 502817 - DNA, 55 bp, Artificial
  Synthetic oligonucleotide
ccgagcttgggaactccgtaccgtaaaaggggcaacactggacatcgtcggagac

SEQ ID NO: 502818 - DNA, 55 bp, Artificial
  Synthetic oligonucleotide
ccgagaggaggatcgcgtggcggagactgcccatcaaccgggtcccgtggccgat

SEQ ID NO: 502819 - DNA, 55 bp, Artificial
  Synthetic oligonucleotide
cactccagtcacacagacaacactcgtcacgtaaatacagacctgtaactcaggc

SEQ ID NO: 502820 - DNA, 55 bp, Artificial
  Synthetic oligonucleotide
atatacgggccggtcgccaacgacccagactcgaggggccgcatccttgtcacga

SEQ ID NO: 502821 - DNA, 55 bp, Artificial
  Synthetic oligonucleotide
agaaggcgcctgcgtgcactgttgacacccttgccagggccgtcgcctcactcat

SEQ ID NO: 502822 - DNA, 53 bp, Artificial
  Synthetic oligonucleotide
catctggggacaaatgacacgcgtgtaactcccggatttccggggtttcgcac

SEQ ID NO: 502823 - DNA, 53 bp, Artificial
  Synthetic oligonucleotide
cagttgacgtggtgtggtgggccggagcgaagggagcgacccgccggtggacc

SEQ ID NO: 502824 - DNA, 53 bp, Artificial
  Synthetic oligonucleotide
aggggttgtgccacagatagcgggcgatgaacccggagtggccgtagcgtgcc

SEQ ID NO: 502825 - DNA, 52 bp, Artificial
  Synthetic oligonucleotide
cctgatcccggtcattccattctgaggaggaagcatggcggatccacaggac

SEQ ID NO: 502826 - DNA, 52 bp, Artificial
  Synthetic oligonucleotide
actctccaaactttgacgtacggactctaaccgcatccgttggtggcgcgga

SEQ ID NO: 502827 - DNA, 50 bp, Artificial
  Synthetic oligonucleotide
cacctggagacactccttcgtgcgtcgaacatgaaaggtgattcacgttt

SEQ ID NO: 502828 - DNA, 55 bp, Artificial
  Synthetic oligonucleotide
gcagcctgccgatatctctgaaggcagcggtataagtcttccttcaactttatgc

SEQ ID NO: 502829 - DNA, 55 bp, Artificial
  Synthetic oligonucleotide
gcattccgcaccgcatccatcatatcctcgctaacgctggtgctagtagccttgg

SEQ ID NO: 502830 - DNA, 55 bp, Artificial
  Synthetic oligonucleotide
gccaacaatgtagaatttgccgaggtgacaaatcttgacgaggctatacctgaac

SEQ ID NO: 502831 - DNA, 55 bp, Artificial
  Synthetic oligonucleotide
gccgtaaccttctcattttcctgtaaggagaggagatttaccagcgctgttcctc

SEQ ID NO: 502832 - DNA, 55 bp, Artificial
  Synthetic oligonucleotide
gccttggaatctccggaagcctcggttgtggtgtttccggtctgatcgtctccct

SEQ ID NO: 502833 - DNA, 55 bp, Artificial
  Synthetic oligonucleotide
gccttgtgttaatgtacttcctgctgctctatttccaggtacctgcacactaaat

SEQ ID NO: 502834 - DNA, 55 bp, Artificial
  Synthetic oligonucleotide
gcctttccgcttacccaccatataagcagagtacctgcaattaccagaaatgcca

SEQ ID NO: 502835 - DNA, 55 bp, Artificial
  Synthetic oligonucleotide
gcgagctctttgtatgtggattccagcggaagtcccgagagtccggacggagaag

SEQ ID NO: 502836 - DNA, 55 bp, Artificial
  Synthetic oligonucleotide
gcgcgaggagtgtatgaatacacgattacggaaagtggagagtatcccggagtgg

SEQ ID NO: 502837 - DNA, 55 bp, Artificial
  Synthetic oligonucleotide
gcggaggccagggcggaaaatgccccgaagattcatcaaaacggaaatctctgcc

SEQ ID NO: 502838 - DNA, 55 bp, Artificial
  Synthetic oligonucleotide
gcgtctgggtgcatcgtatatctatcttgccggtacatttaagaatggagatcat

SEQ ID NO: 502839 - DNA, 55 bp, Artificial
  Synthetic oligonucleotide
gctcacttgcctctgccgtagcatacttctcttcctcagcagcaaggaacacctc

SEQ ID NO: 502840 - DNA, 55 bp, Artificial
  Synthetic oligonucleotide
gctctattgacgttatgacagcgactgttgctgagattccgcacgaattaatggt

SEQ ID NO: 502841 - DNA, 55 bp, Artificial
  Synthetic oligonucleotide
gctctccgatcacaacggcacgttaagcggacggaaagagctgatacggctcccg

SEQ ID NO: 502842 - DNA, 55 bp, Artificial
  Synthetic oligonucleotide
gctggggcttacagtggtagtcatcacacatgagatggctgttgtaaagcagatc

SEQ ID NO: 502843 - DNA, 55 bp, Artificial
  Synthetic oligonucleotide
gcttccgattccctatgtactttccacaagagccttacagaaactccgcgccttt

SEQ ID NO: 502844 - DNA, 55 bp, Artificial
  Synthetic oligonucleotide
ggacgcactatctcttccacctgggtcacatctgcatcagctatcgcctgtatag

SEQ ID NO: 502845 - DNA, 55 bp, Artificial
  Synthetic oligonucleotide
ggagtagtggacgatttaaaagcaaagaacgtccatgtgcggatggtgaagcttc

SEQ ID NO: 502846 - DNA, 55 bp, Artificial
  Synthetic oligonucleotide
ggatatgccgccatgtgtgactgcggcgtgggatggcagaggattaacagagcgg

SEQ ID NO: 502847 - DNA, 55 bp, Artificial
  Synthetic oligonucleotide
ggcaaaagacacgaagctagaagcggaggaacatgggagtttgtaaccacaaggc

SEQ ID NO: 502848 - DNA, 55 bp, Artificial
  Synthetic oligonucleotide
ctgaatcagataaaacaggagtttctatcggagcaaaacactcctgcggaaactc

SEQ ID NO: 502849 - DNA, 55 bp, Artificial
  Synthetic oligonucleotide
ctgactggttgtttggtaaatactgccggttcagtgcaagaggtcgagagctatc

SEQ ID NO: 502850 - DNA, 55 bp, Artificial
  Synthetic oligonucleotide
ctgtgctgatcgcacagtatctgggagccaagaggcggaaggatatgcaggagac

SEQ ID NO: 502851 - DNA, 55 bp, Artificial
  Synthetic oligonucleotide
cttctctcgcatttgataaaatatatcgcgatgcattactgcttagatttgcagg

SEQ ID NO: 502852 - DNA, 55 bp, Artificial
  Synthetic oligonucleotide
cttgagcagggaacaaatacggtacttgcaactcaggagacacttgacggaacta

SEQ ID NO: 502853 - DNA, 55 bp, Artificial
  Synthetic oligonucleotide
cttggcgatatgtattatcttacaagacagggaatatttgctttggcggggttcc

SEQ ID NO: 502854 - DNA, 55 bp, Artificial
  Synthetic oligonucleotide
gaacaccgatatcatagttctggcttgccttgtatggtctgtcatctacagcctg

SEQ ID NO: 502855 - DNA, 55 bp, Artificial
  Synthetic oligonucleotide
gaactgaatcgtgtcatcggtacttcgccggtggaattagacggtgtctgggaac

SEQ ID NO: 502856 - DNA, 55 bp, Artificial
  Synthetic oligonucleotide
gaattccgttaactgcaggtgatcacgaaatcgagatgcgttttgtaccggaggg

SEQ ID NO: 502857 - DNA, 55 bp, Artificial
  Synthetic oligonucleotide
gacaaagatatattccagtcgatattcgagaggatcagggacttccaccatctcg

SEQ ID NO: 502858 - DNA, 55 bp, Artificial
  Synthetic oligonucleotide
gacaggatgcactgggtacttgcagaagccatcaatacatccgcagtgctctggc

SEQ ID NO: 502859 - DNA, 55 bp, Artificial
  Synthetic oligonucleotide
gacctgatcatcgacccactccatcgccaagtactctcgaaaggctccctgctga

SEQ ID NO: 502860 - DNA, 55 bp, Artificial
  Synthetic oligonucleotide
gacgtctttgtcctgagcaattggcaggtcgcatacacgaatcgtatcgccgacc

SEQ ID NO: 502861 - DNA, 55 bp, Artificial
  Synthetic oligonucleotide
gagcccttcaaacttcctgccgttaggaaggatgttcctgacatagttgtggttg

SEQ ID NO: 502862 - DNA, 55 bp, Artificial
  Synthetic oligonucleotide
gagctttaagaaggaagcgggctgaaatagtgtgttatggcggccacagtgcctt

SEQ ID NO: 502863 - DNA, 55 bp, Artificial
  Synthetic oligonucleotide
gaggaactccatagacatgtagtaaacacactttggatcctgcttggtaaactcc

SEQ ID NO: 502864 - DNA, 55 bp, Artificial
  Synthetic oligonucleotide
gatacagaattccgatgcttccgggtgtaatgtcgcctacagaggctattacggc

SEQ ID NO: 502865 - DNA, 55 bp, Artificial
  Synthetic oligonucleotide
gatcctgcgaaacccgatgctggaagagatccgtaagaattatgtgctttcttat

SEQ ID NO: 502866 - DNA, 55 bp, Artificial
  Synthetic oligonucleotide
gatttacctaatcttcagattgacagattccgttctgctagtacaccaggtaccc

SEQ ID NO: 502867 - DNA, 55 bp, Artificial
  Synthetic oligonucleotide
gcaactcacatgcggtatttggaagtctcttatcctgagtggaggtacccactat

SEQ ID NO: 502868 - DNA, 55 bp, Artificial
  Synthetic oligonucleotide
gcagatggaagtgtaaccgttccgaagtctttacaaccgtacatgggaggaaagg

SEQ ID NO: 502869 - DNA, 55 bp, Artificial
  Synthetic oligonucleotide
gtttgtggcaggcgtaccggaccagaaccacggagccgctgtcattgcgtatccc

SEQ ID NO: 502870 - DNA, 55 bp, Artificial
  Synthetic oligonucleotide
taactcttgacagcgaagaggggcttatcaccatgtcaaagagagtgcctgacag

SEQ ID NO: 502871 - DNA, 55 bp, Artificial
  Synthetic oligonucleotide
taatgctggtacagggctccatcccagccggggtagaggcgggcgagaatgctcc

SEQ ID NO: 502872 - DNA, 55 bp, Artificial
  Synthetic oligonucleotide
tacgtcgttcaccggcgcaccgattacacagttctctgtgatggatgcagcaccg

SEQ ID NO: 502873 - DNA, 55 bp, Artificial
  Synthetic oligonucleotide
tagccttcattgtgcattaccacggattcagtcacttcaatatgcagtaagtttt

SEQ ID NO: 502874 - DNA, 55 bp, Artificial
  Synthetic oligonucleotide
tatgtactttcgggtgaatatggacaggagagcagaaacacctgtgtctattccg

SEQ ID NO: 502875 - DNA, 55 bp, Artificial
  Synthetic oligonucleotide
tcctacaccgggaaaagattgtggagtaatggttgtcggtaagaccacacctgac

SEQ ID NO: 502876 - DNA, 55 bp, Artificial
  Synthetic oligonucleotide
tcctgcaatggaaagaggctttactccattctcctgaagcttcttgcaaacttcc

SEQ ID NO: 502877 - DNA, 55 bp, Artificial
  Synthetic oligonucleotide
tcttctggagaataagacccatgcggacccaatgtttccgtacaatacttacctg

SEQ ID NO: 502878 - DNA, 55 bp, Artificial
  Synthetic oligonucleotide
tgaagacatcacagtaccgatcgtattgagtgcagatgatacaaaggttaccttt

SEQ ID NO: 502879 - DNA, 55 bp, Artificial
  Synthetic oligonucleotide
tgcgtctgacgtccactttaccgtgggcaaaccgccatgttaccgtatcgatggc

SEQ ID NO: 502880 - DNA, 55 bp, Artificial
  Synthetic oligonucleotide
tggatttaggaggacgacaacatgccgattaaaatacaggatgatttgccggcaa

SEQ ID NO: 502881 - DNA, 55 bp, Artificial
  Synthetic oligonucleotide
tgggatgcgtgagcaggtcagggagcttgatggaatagacagaagtataaatgag

SEQ ID NO: 502882 - DNA, 55 bp, Artificial
  Synthetic oligonucleotide
ttaccgctaacctgatttccggacttatccgaaacatatacggtaatactgttgc

SEQ ID NO: 502883 - DNA, 55 bp, Artificial
  Synthetic oligonucleotide
ttaccttgtggatatcgggcattctccaaaagactgggataacattgatgtcaca

SEQ ID NO: 502884 - DNA, 55 bp, Artificial
  Synthetic oligonucleotide
ttagcgttatataggaagcctatatttgtggaggattgtagggcgtgggtacatg

SEQ ID NO: 502885 - DNA, 55 bp, Artificial
  Synthetic oligonucleotide
ttataaagacgaggatgtaaagaggcagtcagccgaagatatagaaactgcgggg

SEQ ID NO: 502886 - DNA, 55 bp, Artificial
  Synthetic oligonucleotide
ttcaggcagattttacagtaccggtgcttggaacaatggatacagagatggtgcg

SEQ ID NO: 502887 - DNA, 55 bp, Artificial
  Synthetic oligonucleotide
ttgacttgacgcttccagcttaatacctacctgccggtcaaacatgcgtatctgc

SEQ ID NO: 502888 - DNA, 55 bp, Artificial
  Synthetic oligonucleotide
ttgccccaaatgagccgcctgccccggcagaggacaccccagcgcacctctctgc

SEQ ID NO: 502889 - DNA, 55 bp, Artificial
  Synthetic oligonucleotide
ggcactggaaagctctgtaacaatggccacccagctcaaaattgcaccggataga

SEQ ID NO: 502890 - DNA, 55 bp, Artificial
  Synthetic oligonucleotide
ggcctggaaataacccttaagagtaccttgaatgtcaattccgccacccatggac

SEQ ID NO: 502891 - DNA, 55 bp, Artificial
  Synthetic oligonucleotide
ggcgcaatcgcctgggcaagtatttagccgtgaacagctttatcatgccgcatgg

SEQ ID NO: 502892 - DNA, 55 bp, Artificial
  Synthetic oligonucleotide
ggcggcttatttgataggtagagagctgcccctttatggtgtagatttaagggct

SEQ ID NO: 502893 - DNA, 55 bp, Artificial
  Synthetic oligonucleotide
ggctgccctcttcgacagatggttatggcaggagaaggaaatacggattctgccg

SEQ ID NO: 502894 - DNA, 55 bp, Artificial
  Synthetic oligonucleotide
gggagagagtccctttgttaatccgggagggaatggctttgccggaacagtaggg

SEQ ID NO: 502895 - DNA, 55 bp, Artificial
  Synthetic oligonucleotide
ggtatactgtaaatactctccggcaaattcaatatcgcttacctgcatgttcggc

SEQ ID NO: 502896 - DNA, 55 bp, Artificial
  Synthetic oligonucleotide
ggtgaagcaatttcgcgccttctgcgctttaactatacgaatcaggaacctaagg

SEQ ID NO: 502897 - DNA, 55 bp, Artificial
  Synthetic oligonucleotide
ggtgagggccctgttactctcatcaatccagtggtacttgaaacatctggtgagc

SEQ ID NO: 502898 - DNA, 55 bp, Artificial
  Synthetic oligonucleotide
ggtgggatagcgaggaggcgtactacataagaccggagcgaatagagagaagacc

SEQ ID NO: 502899 - DNA, 55 bp, Artificial
  Synthetic oligonucleotide
gtccaatttagcagtttcgctcccgttaggcgaaccaacgctttgtcgttactgc

SEQ ID NO: 502900 - DNA, 55 bp, Artificial
  Synthetic oligonucleotide
gtccgacgtatgccggacggattccgaacaaaatcatgccttttattcgtgacag

SEQ ID NO: 502901 - DNA, 55 bp, Artificial
  Synthetic oligonucleotide
gtccttggtgtaaccgcctgaaataaacttgagagcactcttgtcttgatgtcca

SEQ ID NO: 502902 - DNA, 55 bp, Artificial
  Synthetic oligonucleotide
gtgactcactgtccctcagtgctcgattatagtatcatccaaaacactcggtgtc

SEQ ID NO: 502903 - DNA, 55 bp, Artificial
  Synthetic oligonucleotide
gtgcggttcttggtttggaatcagccacctgtccttttacgtcaagataatcgtc

SEQ ID NO: 502904 - DNA, 55 bp, Artificial
  Synthetic oligonucleotide
gtgctttccgactttgcgatgaaatatagggcacttcctatgctcggatacacgc

SEQ ID NO: 502905 - DNA, 55 bp, Artificial
  Synthetic oligonucleotide
gtggacagctcacaggaagcagtccagcttatggaaaacggagtatttaaaggcc

SEQ ID NO: 502906 - DNA, 55 bp, Artificial
  Synthetic oligonucleotide
gtggtacagctttaggagtggaacgacagagtagaatgaagtctgccggagtaag

SEQ ID NO: 502907 - DNA, 55 bp, Artificial
  Synthetic oligonucleotide
gttaccagtgcagggcctcttaagctcttcacactgagaatgtagataccgccga

SEQ ID NO: 502908 - DNA, 55 bp, Artificial
  Synthetic oligonucleotide
gttattgtaagatttcaccccaagactcaccgctccaattatcagcacacctgct

SEQ ID NO: 502909 - DNA, 55 bp, Artificial
  Synthetic oligonucleotide
gttctggctcacaagtggattattctcgttatctccttttacgtagctgccatta

SEQ ID NO: 502910 - DNA, 55 bp, Artificial
  Synthetic oligonucleotide
cactcataatctcattcagaacaccagtagctatgcggagtgaatgattctctat

SEQ ID NO: 502911 - DNA, 55 bp, Artificial
  Synthetic oligonucleotide
cagaaccgctcctgccttaaaatgtgtcctcaacaataaagtatccacatcactt

SEQ ID NO: 502912 - DNA, 55 bp, Artificial
  Synthetic oligonucleotide
cagactatatctaccaggccgccgtctaagatcatgttgccggagaacgtatagg

SEQ ID NO: 502913 - DNA, 55 bp, Artificial
  Synthetic oligonucleotide
cagactgatggaggatgcgaagtttctggaggaatatggttgtacggcggtggtt

SEQ ID NO: 502914 - DNA, 55 bp, Artificial
  Synthetic oligonucleotide
cagtgactgttcaccacactgggctccaccggaattctgtaattggaaatattac

SEQ ID NO: 502915 - DNA, 55 bp, Artificial
  Synthetic oligonucleotide
catcttcacagatagctacaccggctattacaggttcagagattaagaagggcta

SEQ ID NO: 502916 - DNA, 55 bp, Artificial
  Synthetic oligonucleotide
aagtgtcagcatcaaaggtcgtgtaacttatttcttcatccttaagtcgagcctc

SEQ ID NO: 502917 - DNA, 55 bp, Artificial
  Synthetic oligonucleotide
cattcaagacacctgtggatctcagtgatacaggatatattgacggggagctgaa

SEQ ID NO: 502918 - DNA, 55 bp, Artificial
  Synthetic oligonucleotide
ccactgttccgatcacaagcgccggaatctgtccccagcttctatatgccagtac

SEQ ID NO: 502919 - DNA, 55 bp, Artificial
  Synthetic oligonucleotide
ccagccatgtatacgaggaaagctcctccatagccctgtaaaatctctctgtata

SEQ ID NO: 502920 - DNA, 55 bp, Artificial
  Synthetic oligonucleotide
ccatacgatagtgtttacatccgccctgacagcatgggagatactcacacactct

SEQ ID NO: 502921 - DNA, 55 bp, Artificial
  Synthetic oligonucleotide
ccatatcttgatcgatctgatgatagctctcgacctcttgcactgaaccggcagt

SEQ ID NO: 502922 - DNA, 55 bp, Artificial
  Synthetic oligonucleotide
aagataaagaatcatatccccgtctaccagatttccctcgctgtctaccgcaagg

SEQ ID NO: 502923 - DNA, 55 bp, Artificial
  Synthetic oligonucleotide
cccgattaagctcgcggcatccgcgttcacatagagggaaatgtcccagagcggg

SEQ ID NO: 502924 - DNA, 55 bp, Artificial
  Synthetic oligonucleotide
cccgatttcttccctgcaaccggattttccgatagtatgagagacgtaaagacgg

SEQ ID NO: 502925 - DNA, 55 bp, Artificial
  Synthetic oligonucleotide
ccctgcagctgtagtggcactgaccaacctttccaccggaatcattattgtcagt

SEQ ID NO: 502926 - DNA, 55 bp, Artificial
  Synthetic oligonucleotide
ccctttggggtccacataatgatcttctataaaagttgaggactgaatctgcgaa

SEQ ID NO: 502927 - DNA, 55 bp, Artificial
  Synthetic oligonucleotide
accgggtgccggaggtccaaaggctccccgaaggtttccgtctctgcggtaaagg

SEQ ID NO: 502928 - DNA, 55 bp, Artificial
  Synthetic oligonucleotide
acggaggtagtgggctccgcccgtacccggttgggcagtggatagagggttttca

SEQ ID NO: 502929 - DNA, 55 bp, Artificial
  Synthetic oligonucleotide
actacatccgcacctgcctcgtttaacttggtaatagccggcgtatagtcgtcgg

SEQ ID NO: 502930 - DNA, 55 bp, Artificial
  Synthetic oligonucleotide
agatgctaaggatgctcacagagtatcaggtcttaatgctatcgatggttctgta

SEQ ID NO: 502931 - DNA, 55 bp, Artificial
  Synthetic oligonucleotide
agcagcacggtcgaaatcactgacacagattgtaattggcttagcgccttcatgg

SEQ ID NO: 502932 - DNA, 55 bp, Artificial
  Synthetic oligonucleotide
agcagctatgcagagagccgcagaaacagtagtcagttttgcacatcgctgtccg

SEQ ID NO: 502933 - DNA, 55 bp, Artificial
  Synthetic oligonucleotide
agctgcatctgacttccgtaatatacaagatcgggttcccaggacattgagccgg

SEQ ID NO: 502934 - DNA, 55 bp, Artificial
  Synthetic oligonucleotide
aggagagcggttgtagtactcgtggcgcatgatgtagggcagacactggtactcc

SEQ ID NO: 502935 - DNA, 55 bp, Artificial
  Synthetic oligonucleotide
acagttccttatagacatttccgcagttggcacaaatcgcatgcccgtgagaagc

SEQ ID NO: 502936 - DNA, 55 bp, Artificial
  Synthetic oligonucleotide
atatggaaacggatactgggtagctttgacattgaaagcatgtcctggatgtctg

SEQ ID NO: 502937 - DNA, 55 bp, Artificial
  Synthetic oligonucleotide
atccgcacctcctgctgaagtttcacccgtgcttgaatttgcagtattgcctgca

SEQ ID NO: 502938 - DNA, 55 bp, Artificial
  Synthetic oligonucleotide
atccggctttacggttacggctgtgtacacttgcacatgttacgatcagatcccc

SEQ ID NO: 502939 - DNA, 55 bp, Artificial
  Synthetic oligonucleotide
atcgacgtgttaagaccctttctcccggtgcgatggtagccaagcgtttcttcag

SEQ ID NO: 502940 - DNA, 55 bp, Artificial
  Synthetic oligonucleotide
caaagcattctgtttcgtggtaaacagcacgttctttgaaacatacaacgctttt

SEQ ID NO: 502941 - DNA, 55 bp, Artificial
  Synthetic oligonucleotide
caaatcgacggtacggaaaagttccttttcgaattgtcggatggacatcgaatcg

SEQ ID NO: 502942 - DNA, 55 bp, Artificial
  Synthetic oligonucleotide
caagtgccgacagacatgacagatggggagctgaaatcacatatgccacagacgg

SEQ ID NO: 502943 - DNA, 55 bp, Artificial
  Synthetic oligonucleotide
cacatccctgccgtcacttacgcatgttctggcatctttcagcgcacttacaaca

SEQ ID NO: 502944 - DNA, 55 bp, Artificial
  Synthetic oligonucleotide
cacggatcgtgcgagcatggttcacacggatatctgcataagttccgccctgatt

SEQ ID NO: 502945 - DNA, 55 bp, Artificial
  Synthetic oligonucleotide
cgcattccatcaacctttcgattgtattcctgcaaattgcggacaccaaactccg

SEQ ID NO: 502946 - DNA, 55 bp, Artificial
  Synthetic oligonucleotide
aacctgttacatcaaaacggttgtcatttatgctgtacgccatggtaccatttgt

SEQ ID NO: 502947 - DNA, 55 bp, Artificial
  Synthetic oligonucleotide
cgccgcaactccagccaatagaaacggagaattgtcaccacctattgcacctgtc

SEQ ID NO: 502948 - DNA, 55 bp, Artificial
  Synthetic oligonucleotide
cgccggaaagaataacgccatgaattcgggtatcatcggtcaaatgctgtcttaa

SEQ ID NO: 502949 - DNA, 55 bp, Artificial
  Synthetic oligonucleotide
cgcctgttcgtcacacagtatgaggacgatgtattcggggagacagtgacctatc

SEQ ID NO: 502950 - DNA, 55 bp, Artificial
  Synthetic oligonucleotide
cggcacaccgtttggatggacgacgatgtgtgggatcaggtggagtcccactacc

SEQ ID NO: 502951 - DNA, 55 bp, Artificial
  Synthetic oligonucleotide
cggcggagtcggacatcagatttacatgcagttaatgaacggtgtttcccatatg

SEQ ID NO: 502952 - DNA, 55 bp, Artificial
  Synthetic oligonucleotide
cgggagaactacacatgaatgccacaggattttccgtaaccgtagatgcactgga

SEQ ID NO: 502953 - DNA, 55 bp, Artificial
  Synthetic oligonucleotide
cgggattcagacgactcctcttaaggttttggtactcccgaatatggaaatcccg

SEQ ID NO: 502954 - DNA, 55 bp, Artificial
  Synthetic oligonucleotide
cgggttaatcgggcttggattaaccggattgatcggtgttatagggctcggtgtc

SEQ ID NO: 502955 - DNA, 55 bp, Artificial
  Synthetic oligonucleotide
cgtaacaaggagcatcttcactcgctcttcaatatacgtacacgaaaagattccc

SEQ ID NO: 502956 - DNA, 55 bp, Artificial
  Synthetic oligonucleotide
cgtcggggctgactgtaggaatggagcattgttcaatgatttctccgttttcctt

SEQ ID NO: 502957 - DNA, 55 bp, Artificial
  Synthetic oligonucleotide
cgtctgccacaagagttaattcccggtcataaggaagagcggcaatactatctcg

SEQ ID NO: 502958 - DNA, 55 bp, Artificial
  Synthetic oligonucleotide
ctatgcaatcgcaccactcaagatcgtataccgcatgtaccgcaaacgcgatggt

SEQ ID NO: 502959 - DNA, 55 bp, Artificial
  Synthetic oligonucleotide
ctccaaatccatagacggacaagatgacgagatggtcagctacaatccagctgac

SEQ ID NO: 502960 - DNA, 55 bp, Artificial
  Synthetic oligonucleotide
ctccattagagacaagagagccggtctgtagtatctttccggcctgtggtggctg

SEQ ID NO: 502961 - DNA, 55 bp, Artificial
  Synthetic oligonucleotide
ctcgcccctcttatcgaggttactttatccactcgcttagtaccctgcattactg

SEQ ID NO: 502962 - DNA, 55 bp, Artificial
  Synthetic oligonucleotide
ctctggtcatagttgccgttagcgttgtaatccaagaaaatggcaccggcaaaat

SEQ ID NO: 502963 - DNA, 55 bp, Artificial
  Synthetic oligonucleotide
ctctttcgtgtgagtacgaagctgaaagacttacaggagctgatcacggagaatt

SEQ ID NO: 502964 - DNA, 55 bp, Artificial
  Synthetic oligonucleotide
ccggctattcataaaagtttcttgcctggccgcttagccctttatactgtttaca

SEQ ID NO: 502965 - DNA, 55 bp, Artificial
  Synthetic oligonucleotide
ccggctcgcttccctctattctgtcaccacgcgaatttcttccggccaccatctc

SEQ ID NO: 502966 - DNA, 55 bp, Artificial
  Synthetic oligonucleotide
ccgtgtttgttatcttgacaagcggtatcctcggaacgattgatccgtctacggg

SEQ ID NO: 502967 - DNA, 55 bp, Artificial
  Synthetic oligonucleotide
cctagcgctataacctggggatcatttgtaaagaatcccataagagcttcagcga

SEQ ID NO: 502968 - DNA, 55 bp, Artificial
  Synthetic oligonucleotide
cctgacagaactcatatgggaagaaacgtgcctgatgctgtcaaggatcatcctg

SEQ ID NO: 502969 - DNA, 55 bp, Artificial
  Synthetic oligonucleotide
cctggcaggcgaatccggtctgagttgaaaacgagcgtacacggctctgccgtgc

SEQ ID NO: 502970 - DNA, 55 bp, Artificial
  Synthetic oligonucleotide
ccggcgagcgcaacgaaccacaccgtttacgcaaagtggagcgccgcaaagacct

SEQ ID NO: 502971 - DNA, 55 bp, Artificial
  Synthetic oligonucleotide
ccggaggaattgacggagagtatggagagattattctcggaggaccttttacagg

SEQ ID NO: 502972 - DNA, 55 bp, Artificial
  Synthetic oligonucleotide
cctttgtaaggtctataagtgctatataccccgcaactgaagtctccttgagcaa

SEQ ID NO: 502973 - DNA, 55 bp, Artificial
  Synthetic oligonucleotide
cgaagcttcatgcctatctcttcggagatgaggattataaaccgagctccgctgt

SEQ ID NO: 502974 - DNA, 55 bp, Artificial
  Synthetic oligonucleotide
cgcaatctctatgattgccagtgggactcggttgggcaactgcgacatcggtctc

SEQ ID NO: 502975 - DNA, 55 bp, Artificial
  Synthetic oligonucleotide
cgcaggtgatcccacttttgcaggtccgttaacaggagtccagttgggactgacg

SEQ ID NO: 502976 - DNA, 55 bp, Artificial
  Synthetic oligonucleotide
ccgcacgctacgcgagcgatactcgttataaattttaaaagtcccggaggagctt

SEQ ID NO: 502977 - DNA, 54 bp, Artificial
  Synthetic oligonucleotide
gcgaatggagcatcagggcagtaactggaacatgattctaaccgtcactacccc

SEQ ID NO: 502978 - DNA, 54 bp, Artificial
  Synthetic oligonucleotide
accggaccgtctattccaaagatgtatggtcttacaggcgctgcacaggcagac

SEQ ID NO: 502979 - DNA, 54 bp, Artificial
  Synthetic oligonucleotide
catagcaaaacttgttcaggacagatacattccgtgccagacgataatagttgt

SEQ ID NO: 502980 - DNA, 54 bp, Artificial
  Synthetic oligonucleotide
gctgccgtctttgcatatgaaagcctgcgccctccttcagttccttttggaaac

SEQ ID NO: 502981 - DNA, 54 bp, Artificial
  Synthetic oligonucleotide
atacggccggaagagttggaagagataagtccagtggcatcggttagtataaaa

SEQ ID NO: 502982 - DNA, 54 bp, Artificial
  Synthetic oligonucleotide
gcgcctggccctgcggtcatgtataaggagtatcagggcgtatggggcccctgg

SEQ ID NO: 502983 - DNA, 54 bp, Artificial
  Synthetic oligonucleotide
tacaggagggtcggtgtgggtgattaaaccgggacaaaccctgcagaagcaccg

SEQ ID NO: 502984 - DNA, 53 bp, Artificial
  Synthetic oligonucleotide
atatcattgcagcgattatacttcctcggcaggcggtctttacacttatgccc

SEQ ID NO: 502985 - DNA, 53 bp, Artificial
  Synthetic oligonucleotide
atgcagacggattcttggcgcactccagtccggggcggagcattctggagatt

SEQ ID NO: 502986 - DNA, 53 bp, Artificial
  Synthetic oligonucleotide
gtcttgcttcataattgcaagtcgccaccactccccgctccgtgggttttgca

SEQ ID NO: 502987 - DNA, 53 bp, Artificial
  Synthetic oligonucleotide
gtcgactcttgttacggaaggctcgaatagagagagggtaacgtatgaggagc

SEQ ID NO: 502988 - DNA, 53 bp, Artificial
  Synthetic oligonucleotide
caccgggtgcaaagagcgtagtactaaacctttatgaagcaggagacggctgt

SEQ ID NO: 502989 - DNA, 52 bp, Artificial
  Synthetic oligonucleotide
acatgtgacctttgtggtcgccctttccaaaatactgagcgccgtaaatact

SEQ ID NO: 502990 - DNA, 52 bp, Artificial
  Synthetic oligonucleotide
acagatgtgaccttatccaatctgtcgcttagaagtttatggagtcgggcgg

SEQ ID NO: 502991 - DNA, 52 bp, Artificial
  Synthetic oligonucleotide
aactccgagactgccgtagccaacgccctcctctttaaagatctggaaggca

SEQ ID NO: 502992 - DNA, 52 bp, Artificial
  Synthetic oligonucleotide
ggcaaatatatccgcataattaccgcatacactgtctatcgccgattccgca

SEQ ID NO: 502993 - DNA, 52 bp, Artificial
  Synthetic oligonucleotide
gaggaggtgtagcacgatgccggaggtcttacagcagatgttgaactatgtg

SEQ ID NO: 502994 - DNA, 51 bp, Artificial
  Synthetic oligonucleotide
aggggtgcttatcaggcaggggcgtcttccgaggaatttccgctggaaaga

SEQ ID NO: 502995 - DNA, 51 bp, Artificial
  Synthetic oligonucleotide
agtgcaagcaccgcaactcccgaccataccgtcagctcctgatctgcaaat

SEQ ID NO: 502996 - DNA, 51 bp, Artificial
  Synthetic oligonucleotide
aatgtcaaatagcagccgttgatgtccgaatcctccacattcatgttgtga

SEQ ID NO: 502997 - DNA, 51 bp, Artificial
  Synthetic oligonucleotide
cccctccgggtgttgctctagtgaatttctgccggatgataggtctccaca

SEQ ID NO: 502998 - DNA, 51 bp, Artificial
  Synthetic oligonucleotide
aacttcagcctctccgtatgctattgagcgaaatgcctcacctatacagtg

SEQ ID NO: 502999 - DNA, 51 bp, Artificial
  Synthetic oligonucleotide
gatccgatacggccatttgctcttcattagggtttacaacaaagaaaccgc

SEQ ID NO: 503000 - DNA, 50 bp, Artificial
  Synthetic oligonucleotide
tactatgcgcagaagagccgctgctactacaagcggagcgactttgtgaa

SEQ ID NO: 503001 - DNA, 50 bp, Artificial
  Synthetic oligonucleotide
catgcagacaatattcggaatgcttatgagcgaggtgtaagatgcgtttt

SEQ ID NO: 503002 - DNA, 50 bp, Artificial
  Synthetic oligonucleotide
ttctgtatggtgtcgagatagaaggagaaaacgagtaccttacgcccctc

SEQ ID NO: 503003 - DNA, 50 bp, Artificial
  Synthetic oligonucleotide
aacagccactgcggcggtatacgtttggatgaggtgagcttaatgaagcg

SEQ ID NO: 503004 - DNA, 60 bp, Artificial
  Synthetic oligonucleotide
tcgagaatggtgtgatttcaaaacggtaggggacaagctgccgggtaaagactaagggga

SEQ ID NO: 503005 - DNA, 60 bp, Artificial
  Synthetic oligonucleotide
gctctcagaagcccaaaattgccttctaagccattttaagaattaacaagttatttaact

SEQ ID NO: 503006 - DNA, 60 bp, Artificial
  Synthetic oligonucleotide
tctgactgcaaaacgtcagaagggcgcacttgcaccccaccaaataaatggggtgcaagt

SEQ ID NO: 503007 - DNA, 60 bp, Artificial
  Synthetic oligonucleotide
catattcagaaccatttaggaaatttgaatggtgtaacaccagaagatcagtatctatcg

SEQ ID NO: 503008 - DNA, 60 bp, Artificial
  Synthetic oligonucleotide
agcgtatgctgagattcttgctacagtattgaatttgcgtgttgaaaaaggcttaactca

SEQ ID NO: 503009 - DNA, 60 bp, Artificial
  Synthetic oligonucleotide
tgcactttacggagcacctttaacagctcacgtttcagcaactttggtttggggtccagc

SEQ ID NO: 503010 - DNA, 60 bp, Artificial
  Synthetic oligonucleotide
atctctaaaattgagagtcaatatacagtaccgagtgtaaaaaatttcttacgatatatt

SEQ ID NO: 503011 - DNA, 60 bp, Artificial
  Synthetic oligonucleotide
gacaagactgtggcaaaaggcgttaaaagtcgattatgagccagtggtgcatgtgcaagt

SEQ ID NO: 503012 - DNA, 60 bp, Artificial
  Synthetic oligonucleotide
cagctttggaaaatagcaatgttgattacgatgtgttgggttcatcgtattatccatttt

SEQ ID NO: 503013 - DNA, 60 bp, Artificial
  Synthetic oligonucleotide
atgtgcaagtcgttaaggcaaataaacgaaaagggacggattctttacaagctagtgcgg

SEQ ID NO: 503014 - DNA, 60 bp, Artificial; identical to SEQ ID NO: 198237
  Synthetic oligonucleotide

SEQ ID NO: 503015 - DNA, 60 bp, Artificial
  Synthetic oligonucleotide
ttatttaactgtctgtcaacgttaaatcgacgtagatagccttattgagccgtacaggcg

SEQ ID NO: 503016 - DNA, 60 bp, Artificial
  Synthetic oligonucleotide
gaacttactaggttacttacgctcaacggaaattacagtgaacgaacatgacggctcata

SEQ ID NO: 503017 - DNA, 60 bp, Artificial
  Synthetic oligonucleotide
cttaccgcataaaagtgaacccatatatcattctctgatctcaatgattcagttaattgg

SEQ ID NO: 503018 - DNA, 60 bp, Artificial
  Synthetic oligonucleotide
gtaaacttttcgctattatcatagatcatgaccttatcagatttaaaggccactaatggc

SEQ ID NO: 503019 - DNA, 60 bp, Artificial
  Synthetic oligonucleotide
aaatataagacaatggcgcacttacacgtcactttcatgacgtcgtgcgttctgactgca

SEQ ID NO: 503020 - DNA, 60 bp, Artificial
  Synthetic oligonucleotide
gcatttaaaactgtatcagacttggttttgcaaaaagcggttgtgtccgttatgcaattg

SEQ ID NO: 503021 - DNA, 60 bp, Artificial
  Synthetic oligonucleotide
ggcagttgtgagagagcctaaaggacggtttttgtttttaactttgaccgttaagaatgc

SEQ ID NO: 503022 - DNA, 59 bp, Artificial
  Synthetic oligonucleotide
aaagtccagtcgctagccgacttcggactttaactgctttgaatgttggctttaaatgg

SEQ ID NO: 503023 - DNA, 58 bp, Artificial
  Synthetic oligonucleotide
gttctgcgttaatctgagttgcattaaatctcttggtcatattaaaagcctccattag

SEQ ID NO: 503024 - DNA, 58 bp, Artificial
  Synthetic oligonucleotide
ccaaccatattattcatttcaattaatgaacttacagactcttgagctgcacgactag

SEQ ID NO: 503025 - DNA, 57 bp, Artificial
  Synthetic oligonucleotide
gatgtagagcttccttataaggttccaagaatcgaaaatatgtatcgtagcgatatg

SEQ ID NO: 503026 - DNA, 57 bp, Artificial
  Synthetic oligonucleotide
tattctagggggtaaaccctatgatgtcaaggctgtaaacttagctaaaatgataat

SEQ ID NO: 503027 - DNA, 57 bp, Artificial
  Synthetic oligonucleotide
ctgttttacgtcaccaactctttaaaccttcttccaaatttcatcgtgttctactag

SEQ ID NO: 503028 - DNA, 56 bp, Artificial
  Synthetic oligonucleotide
cagtaattgatcagcagactaagtattcttatcggacgattatcatagatgatggg

SEQ ID NO: 503029 - DNA, 55 bp, Artificial
  Synthetic oligonucleotide
gcctactactttatctgtgaatcgtaccaccacgacgtccatgtttatgatgttg

SEQ ID NO: 503030 - DNA, 55 bp, Artificial
  Synthetic oligonucleotide
gccggtcaaaatgctgctattcctaaagctaagatttctggcttagaaccaatag

SEQ ID NO: 503031 - DNA, 55 bp, Artificial
  Synthetic oligonucleotide
ggatcaagtggaatcttactggctcgacttgctgtcaaaagaaattgcgctaacg

SEQ ID NO: 503032 - DNA, 55 bp, Artificial
  Synthetic oligonucleotide
gccgcttttggcgtgttctgttccgctgttgcctgatctgccaacgaaataaggc

SEQ ID NO: 503033 - DNA, 55 bp, Artificial
  Synthetic oligonucleotide
gccgaagtgttttaagacggcatcaatcagccggaaagtcccgccatagacgtca

SEQ ID NO: 503034 - DNA, 55 bp, Artificial
  Synthetic oligonucleotide
gcccagctggcaaccggtaagcaatcccgctttagtaagactttaaagcaacgag

SEQ ID NO: 503035 - DNA, 55 bp, Artificial
  Synthetic oligonucleotide
gcccacggtgagaaagtgaatgccaatctggtacttctcgactagcagcatatgg

SEQ ID NO: 503036 - DNA, 55 bp, Artificial
  Synthetic oligonucleotide
ggattaccacggatctacaagaatgctgaagacatgcgtgctatcgaagctatgc

SEQ ID NO: 503037 - DNA, 55 bp, Artificial
  Synthetic oligonucleotide
gccagttatttgctacggcctggggaattgatcgcgcgcaagttacggaaccaac

SEQ ID NO: 503038 - DNA, 55 bp, Artificial
  Synthetic oligonucleotide
gccagtacgatcgacacgacgcgttccgatacaatcatattcgcccgtttggagc

SEQ ID NO: 503039 - DNA, 55 bp, Artificial
  Synthetic oligonucleotide
gccagccgaaaccatagtagtcaccctgactcttcccgttgccccgatcatcggg

SEQ ID NO: 503040 - DNA, 55 bp, Artificial
  Synthetic oligonucleotide
gccacctattctggtgcaattgaccactgaacgttaggtagctggtcattcgagc

SEQ ID NO: 503041 - DNA, 55 bp, Artificial
  Synthetic oligonucleotide
gccaacgcaggggcaagtcgtgattagcggctacgacctatctgacaaagggacc

SEQ ID NO: 503042 - DNA, 55 bp, Artificial
  Synthetic oligonucleotide
ggcaaacttagccactgcttcccgagaaatttgggcatccttaaatggttcgccc

SEQ ID NO: 503043 - DNA, 55 bp, Artificial
  Synthetic oligonucleotide
gccaaaattcccgttaaacttgacttgcctgaaccaataattcccgataatgtga

SEQ ID NO: 503044 - DNA, 55 bp, Artificial
  Synthetic oligonucleotide
gctggggcaataggaatttctgattctagaggtaaaggttcacctgttctcaacg

SEQ ID NO: 503045 - DNA, 55 bp, Artificial
  Synthetic oligonucleotide
gctcgtggtaacggcgttatgatgtttatcctaattgctgttctaggtactgttg

SEQ ID NO: 503046 - DNA, 55 bp, Artificial
  Synthetic oligonucleotide
gctcatgatgattgggctagttgggttactgggtgtaactaagcgtcgtaagcgg

SEQ ID NO: 503047 - DNA, 55 bp, Artificial
  Synthetic oligonucleotide
gctacggcctggggaattgatcgcgcgcaagttacggcaccaactaaggttaaag

SEQ ID NO: 503048 - DNA, 55 bp, Artificial
  Synthetic oligonucleotide
gcttcccgcttgtaggttcggggaatcttagtgtttaactggtgagccaactcag

SEQ ID NO: 503049 - DNA, 55 bp, Artificial
  Synthetic oligonucleotide
gcttgccgcatcccagtccaagatgtttaaatcagtgcccaggtcccagtgagcc

SEQ ID NO: 503050 - DNA, 55 bp, Artificial
  Synthetic oligonucleotide
gcgtgccagagcggtcgccatcgtatacattcctcccttaataaagtaaattccg

SEQ ID NO: 503051 - DNA, 55 bp, Artificial
  Synthetic oligonucleotide
gcgtcagagacgcttattcaggtgactatcgaggggccgcactgagttatgttca

SEQ ID NO: 503052 - DNA, 55 bp, Artificial
  Synthetic oligonucleotide
ggaaaagtaagaccttggcgagagcgcaaaattgaaaatgtacgctatgcagaat

SEQ ID NO: 503053 - DNA, 55 bp, Artificial
  Synthetic oligonucleotide
ggacaaccggagaatggacacagtattcggtaccaagcatctctggatacacgcc

SEQ ID NO: 503054 - DNA, 55 bp, Artificial
  Synthetic oligonucleotide
gcggtgccgtgtccagctcaaacgactggctcatggtcagtgcaaccgtcttggc

SEQ ID NO: 503055 - DNA, 55 bp, Artificial
  Synthetic oligonucleotide
ggacgttgaaacgggtcggcatctgttcaagaaaacgttgaatgacattttcacg

SEQ ID NO: 503056 - DNA, 55 bp, Artificial
  Synthetic oligonucleotide
gcggggtattcccaggatcagtctgctaacaccttggcccaagcggctgatttca

SEQ ID NO: 503057 - DNA, 55 bp, Artificial
  Synthetic oligonucleotide
gcggcaacgggtactgtattgccacgctggatcattcaagtactttcgccgcttt

SEQ ID NO: 503058 - DNA, 55 bp, Artificial
  Synthetic oligonucleotide
gcgctttcgctatactgggtggtgactaatgctttccaggttgtgcagacgttgt

SEQ ID NO: 503059 - DNA, 55 bp, Artificial
  Synthetic oligonucleotide
gcgcgtgttttgtcagtgagaggattgaaataatcaaccccgaaaacatgtggtc

SEQ ID NO: 503060 - DNA, 55 bp, Artificial
  Synthetic oligonucleotide
gcgatcctttccctaggtaacacttccaacgaaattacgccagacgacctttccg

SEQ ID NO: 503061 - DNA, 55 bp, Artificial
  Synthetic oligonucleotide
gagccttagccgttctattaggggctttgatggcccatagaagtcgggtcttacg

SEQ ID NO: 503062 - DNA, 55 bp, Artificial
  Synthetic oligonucleotide
gagcacaccaagttgccaaatattgaaccagcgaattacgatgaactcagagtta

SEQ ID NO: 503063 - DNA, 55 bp, Artificial
  Synthetic oligonucleotide
gagcaaccagtgatgattgctcgtccgttttgtttgtcgtcgtttatgcatttgg

SEQ ID NO: 503064 - DNA, 55 bp, Artificial
  Synthetic oligonucleotide
gagagtcataaagaaaggccatttcgctttccggccggtggtagatagcagcaag

SEQ ID NO: 503065 - DNA, 55 bp, Artificial
  Synthetic oligonucleotide
gagacactctttgatctcgttaacggtagcctggatccgttccaagaagcgaacc

SEQ ID NO: 503066 - DNA, 55 bp, Artificial
  Synthetic oligonucleotide
gacttgccaagttcaattggcttgggcggtaccagtctgttgatcgtcattgggg

SEQ ID NO: 503067 - DNA, 55 bp, Artificial
  Synthetic oligonucleotide
gactgctcattacgccaggatagcctaacttttctgccagatcataggccaatgt

SEQ ID NO: 503068 - DNA, 55 bp, Artificial
  Synthetic oligonucleotide
gacggaaaagtcatactggtactgcagttgtaacagcggatgctggtaaaagtcg

SEQ ID NO: 503069 - DNA, 55 bp, Artificial
  Synthetic oligonucleotide
gaccttcgtgtcgattctggagttccgaattagttaaatcaattagcgcctcagt

SEQ ID NO: 503070 - DNA, 55 bp, Artificial
  Synthetic oligonucleotide
gaccgcaacggcatgtttcatcagcacacgctccctgactacaagcagcactccg

SEQ ID NO: 503071 - DNA, 55 bp, Artificial
  Synthetic oligonucleotide
gaccatcactggcaaaatgccctgccgtcttggcaagttcagaagccttctgctg

SEQ ID NO: 503072 - DNA, 55 bp, Artificial
  Synthetic oligonucleotide
gaccacgtcaaaacggttccgtcagtttgcttataggacaccgtgacagttctag

SEQ ID NO: 503073 - DNA, 55 bp, Artificial
  Synthetic oligonucleotide
gacaagttactcgttggtagttctgactcatttcatggtcaaagttggttcgtag

SEQ ID NO: 503074 - DNA, 55 bp, Artificial
  Synthetic oligonucleotide
gaattagctgccttagacttttccctagccgttggttcagtcgtcttggtggatt

SEQ ID NO: 503075 - DNA, 55 bp, Artificial
  Synthetic oligonucleotide
gaatatttgtcgattttagaatttaagcgggcgcatgatgtccgaggctgtggtg

SEQ ID NO: 503076 - DNA, 55 bp, Artificial
  Synthetic oligonucleotide
gaagcggagatttacgcgcacttcaatgagctggttgccaataagacggcggtct

SEQ ID NO: 503077 - DNA, 55 bp, Artificial
  Synthetic oligonucleotide
gaacgtcacgatttgggcactggcccagccaatccctgacagaatcgagaaccag

SEQ ID NO: 503078 - DNA, 55 bp, Artificial
  Synthetic oligonucleotide
gaacggtcatttagccggtttgacgacagttgacggtcaagaagacatcatggtc

SEQ ID NO: 503079 - DNA, 55 bp, Artificial
  Synthetic oligonucleotide
gaaccagtctggcagattcggcgttcaatgaccggcaatgcgcttgaatacaccg

SEQ ID NO: 503080 - DNA, 55 bp, Artificial
  Synthetic oligonucleotide
gccaaaacgtttcccaattaaattcggagtaggtactctcattcaaatcatctcc

SEQ ID NO: 503081 - DNA, 55 bp, Artificial
  Synthetic oligonucleotide
gcattcactattcccgtttagctgggaacagtaccctacctacgtccagtcgggt

SEQ ID NO: 503082 - DNA, 55 bp, Artificial
  Synthetic oligonucleotide
gcatgtgcttctcaatcgaaccggggatttacatgccggggatcgctggggtgcg

SEQ ID NO: 503083 - DNA, 55 bp, Artificial
  Synthetic oligonucleotide
gcatattcaccgcgtaaatagacgtcagttgactgcatatctagttcggccaggt

SEQ ID NO: 503084 - DNA, 55 bp, Artificial
  Synthetic oligonucleotide
gcaccatccttgtacggcggtaatacagctacatcccaagttagaggcgctccca

SEQ ID NO: 503085 - DNA, 55 bp, Artificial
  Synthetic oligonucleotide
gcaagtcgtgaattaggacatgggcgcaactatgttagtgcttggttgagcagac

SEQ ID NO: 503086 - DNA, 55 bp, Artificial
  Synthetic oligonucleotide
gcaacagcaaatattgcactagtgattaagttccaaatagcatgcactacagcgc

SEQ ID NO: 503087 - DNA, 55 bp, Artificial
  Synthetic oligonucleotide
gattttcgctcgtagcaagggtttgcggggtgtcgtcaacgaactttcgcgaacg

SEQ ID NO: 503088 - DNA, 55 bp, Artificial
  Synthetic oligonucleotide
gattagggctagattacagtggtagatatggtctgcctccaatgattatggttgg

SEQ ID NO: 503089 - DNA, 55 bp, Artificial
  Synthetic oligonucleotide
gattacagaagaggcacctaccttagccggaaatatgggatggggcgtggaggaa

SEQ ID NO: 503090 - DNA, 55 bp, Artificial
  Synthetic oligonucleotide
gatgtatggcagtcattacagcccagctcaggtatctaacatctccaagcagatg

SEQ ID NO: 503091 - DNA, 55 bp, Artificial
  Synthetic oligonucleotide
gatcgtggtatgatgaaatgaatggggttatattctggcgaatcacagtgcttac

SEQ ID NO: 503092 - DNA, 55 bp, Artificial
  Synthetic oligonucleotide
gatccacaattattgttttctccttggctttgaggggtccgaacagggtcaacga

SEQ ID NO: 503093 - DNA, 55 bp, Artificial
  Synthetic oligonucleotide
gatcatctcttgatgcgggttaaacacctatatgaggatcgccctagtctatcag

SEQ ID NO: 503094 - DNA, 55 bp, Artificial
  Synthetic oligonucleotide
gatcagttgaactaactcgggcatacccaattttcatcacgacttctcctctcgg

SEQ ID NO: 503095 - DNA, 55 bp, Artificial
  Synthetic oligonucleotide
gatagagctgctgtcaaatcaaatccagcatttactagtccaactatcgttgaac

SEQ ID NO: 503096 - DNA, 55 bp, Artificial
  Synthetic oligonucleotide
gataattacttagcgtttgcattgcatgacgcggctcaattggttgctcaaggtg

SEQ ID NO: 503097 - DNA, 55 bp, Artificial
  Synthetic oligonucleotide
gaggacgccatgaatattgtatgggtgagcctccgttaactgcggctgcatctgt

SEQ ID NO: 503098 - DNA, 55 bp, Artificial
  Synthetic oligonucleotide
gagctcacaataaccgtgagcgagggctttaaccagtgctatttaagggcagagc

SEQ ID NO: 503099 - DNA, 55 bp, Artificial
  Synthetic oligonucleotide
gagcgcttagctttaagaataccttttcgatcccaggtttgtaaggttctcgtgg

SEQ ID NO: 503100 - DNA, 55 bp, Artificial
  Synthetic oligonucleotide
tatttcgatacgaccggtgataaatcgactggttatgggctgaaagataagttgc

SEQ ID NO: 503101 - DNA, 55 bp, Artificial
  Synthetic oligonucleotide
tatggttcattaatatatgttggcttgtttggcgtcatcttttcagaaacggggc

SEQ ID NO: 503102 - DNA, 55 bp, Artificial
  Synthetic oligonucleotide
taggccaggagctggtggtagtgaccctcaatcgataggcggtaggtcaaacggt

SEQ ID NO: 503103 - DNA, 55 bp, Artificial
  Synthetic oligonucleotide
tactgggattaagcggacaacctttattcggtatcgaaagaaattcagtgtgtat

SEQ ID NO: 503104 - DNA, 55 bp, Artificial
  Synthetic oligonucleotide
tactgatcattgggacctacttatttcgtaatcgtgcacgcccttttctcgtttt

SEQ ID NO: 503105 - DNA, 55 bp, Artificial
  Synthetic oligonucleotide
tacggaggtgatgagtcatgccaaattggatagactggagagtgcgaaagccgcg

SEQ ID NO: 503106 - DNA, 55 bp, Artificial
  Synthetic oligonucleotide
taccgcagctcaccaggcagctaagaatcacaatataagtgatgtttgtcacgcc

SEQ ID NO: 503107 - DNA, 55 bp, Artificial
  Synthetic oligonucleotide
tacaaaagcgcatgaggcaaaagaattggactttgctttagatcttgctaagcgg

SEQ ID NO: 503108 - DNA, 55 bp, Artificial
  Synthetic oligonucleotide
taagtgttaccatcgtccatcgtaatcgtgtctttcgaagtagctgtcgaacctg

SEQ ID NO: 503109 - DNA, 55 bp, Artificial
  Synthetic oligonucleotide
taagtgcccgtctttagcctcgaaattaacggccatcccggcgtaggcttgcacg

SEQ ID NO: 503110 - DNA, 55 bp, Artificial
  Synthetic oligonucleotide
taacttcgaagcagtcttaggtccaacaccagttactccaggatagttatcggag

SEQ ID NO: 503111 - DNA, 55 bp, Artificial
  Synthetic oligonucleotide
taaacgtcagacccaggcgatggtccacgtgagcttagctttgtcgatggcggca

SEQ ID NO: 503112 - DNA, 55 bp, Artificial
  Synthetic oligonucleotide
gtttgccacgcgaacagattaagacgaacgattcaccggccgtagaagtcatcac

SEQ ID NO: 503113 - DNA, 55 bp, Artificial
  Synthetic oligonucleotide
gtttacatcgctttacaatggctcatttcactgaagacggtcagaatttacgccg

SEQ ID NO: 503114 - DNA, 55 bp, Artificial
  Synthetic oligonucleotide
gttgctgcaaagccactcccaactcgtccaaagagtgcctgaccactaaagtaac

SEQ ID NO: 503115 - DNA, 55 bp, Artificial
  Synthetic oligonucleotide
gttaaccgccatctggattggtttagcctggaagaatctgccagtttacatcctc

SEQ ID NO: 503116 - DNA, 55 bp, Artificial
  Synthetic oligonucleotide
gtgtaaacgtaggtaacggtctgatcttgatccgtaaagctccccgttgggttgc

SEQ ID NO: 503117 - DNA, 55 bp, Artificial
  Synthetic oligonucleotide
gtggccgaacatggacaagcaaagattgcggcagttcagcggattttgactgggc

SEQ ID NO: 503118 - DNA, 55 bp, Artificial
  Synthetic oligonucleotide
gtgcatatcgaccattcttgtttggccgacataatcatagccccaaaccccattc

SEQ ID NO: 503119 - DNA, 55 bp, Artificial
  Synthetic oligonucleotide
tttggggttttgaaagtgacgttttttgtcactttcctcttatcttgatacagta

SEQ ID NO: 503120 - DNA, 55 bp, Artificial
  Synthetic oligonucleotide
ttggttcatgatcgaccacgcgatatttgacccttctcgaccactatcggtggcc

SEQ ID NO: 503121 - DNA, 55 bp, Artificial
  Synthetic oligonucleotide
ttggtgagattagctattggcgcagaagatatgtctgtccaggcaagaaggccca

SEQ ID NO: 503122 - DNA, 55 bp, Artificial
  Synthetic oligonucleotide
ttggtgaatgctttactggtatcacagttatgaactagttgatgaataagtgggc

SEQ ID NO: 503123 - DNA, 55 bp, Artificial
  Synthetic oligonucleotide
ttggctaaaaccaaaacaggtcgacaaagacagattcactacaatcctaactggc

SEQ ID NO: 503124 - DNA, 55 bp, Artificial
  Synthetic oligonucleotide
ttgatgccttctctagcgaatgcgatttgggcgactttgtagacgggattcccgt

SEQ ID NO: 503125 - DNA, 55 bp, Artificial
  Synthetic oligonucleotide
tgtttatatgcaagtctagcttcgatgacaagtggaacagagcgtacaaccatgt

SEQ ID NO: 503126 - DNA, 55 bp, Artificial
  Synthetic oligonucleotide
tgtctctttggtaacctttaaaaggcttaaattagctctttcggcttcgctcagg

SEQ ID NO: 503127 - DNA, 55 bp, Artificial
  Synthetic oligonucleotide
tggttgacgtgtttaattagttcgccccgaacatctcacgcttaccagcgaccgt

SEQ ID NO: 503128 - DNA, 55 bp, Artificial
  Synthetic oligonucleotide
tggtaccataccggtattccttttggcggtataccttaagtgatgatgccgttga

SEQ ID NO: 503129 - DNA, 55 bp, Artificial
  Synthetic oligonucleotide
tggcctatccacggctttatccactgatatagatttcaattcagtagtgcaaaag

SEQ ID NO: 503130 - DNA, 55 bp, Artificial
  Synthetic oligonucleotide
tgccatgcggatccgatttggtcggggcgtcaaccatcgaaacaaagcaggacac

SEQ ID NO: 503131 - DNA, 55 bp, Artificial
  Synthetic oligonucleotide
tgatttgtaaatccgagtaatcttacaacttcactatcttcgcatcccttgcaga

SEQ ID NO: 503132 - DNA, 55 bp, Artificial
  Synthetic oligonucleotide
tgatggccggaaaatttctcccaaaatccaggtccgtttcgggtgcttactatgc

SEQ ID NO: 503133 - DNA, 55 bp, Artificial; identical to SEQ ID NO: 198475
  Synthetic oligonucleotide

SEQ ID NO: 503134 - DNA, 55 bp, Artificial
  Synthetic oligonucleotide
tctggcatcgcggctaactgttttaactgttcggtcaccgctcgcttggccgtcg

SEQ ID NO: 503135 - DNA, 55 bp, Artificial
  Synthetic oligonucleotide
tcgcacctatcaaaatagggacaacatacccaatacgacatttcttcaaaagcat

SEQ ID NO: 503136 - DNA, 55 bp, Artificial
  Synthetic oligonucleotide
tccgaaaggtcgctcactccaccattacgacatcattgatattcagagcttccag

SEQ ID NO: 503137 - DNA, 55 bp, Artificial
  Synthetic oligonucleotide
tccagtgattaccattgttgtcactagcacgggcacttaaatggtaggttcccgg

SEQ ID NO: 503138 - DNA, 55 bp, Artificial
  Synthetic oligonucleotide
tcattaactgaggcgctaattgatttaactaattcggaactccagaatcgacacg

SEQ ID NO: 503139 - DNA, 55 bp, Artificial
  Synthetic oligonucleotide
ggtgatgtcaccgcaaatactaacgtcaagccaaataggatccaccaaatcacgc

SEQ ID NO: 503140 - DNA, 55 bp, Artificial
  Synthetic oligonucleotide
ggtgaggaaacaacgccattgttaactttcgatcccgtattagtcgacgtattga

SEQ ID NO: 503141 - DNA, 55 bp, Artificial
  Synthetic oligonucleotide
ggtcattaccacatatttcatctggtacgatgtccgctagcattaccagactctt

SEQ ID NO: 503142 - DNA, 55 bp, Artificial
  Synthetic oligonucleotide
ggtcaccaagaagctaacctcttatttcagctagtcaatgcccgctatgaaaagc

SEQ ID NO: 503143 - DNA, 55 bp, Artificial
  Synthetic oligonucleotide
ggtatcaggaccaatttctgctttcagtttactaaagactgtttcacaggcagcg

SEQ ID NO: 503144 - DNA, 55 bp, Artificial
  Synthetic oligonucleotide
gggttggacccggaaggtatcgtcgatattcgtaagttactgatcgatttaagcc

SEQ ID NO: 503145 - DNA, 55 bp, Artificial
  Synthetic oligonucleotide
gggtgaccagtcagtgctgcgaaagtcttcaacgggtgactttaccggctcaagc

SEQ ID NO: 503146 - DNA, 55 bp, Artificial
  Synthetic oligonucleotide
gggtagatgtccatctcttagactgtttgcaccagatcccttatcagtagtacga

SEQ ID NO: 503147 - DNA, 55 bp, Artificial
  Synthetic oligonucleotide
ggggttggcggctttgtggataccttgaacacttacattacgttggcggttaatg

SEQ ID NO: 503148 - DNA, 55 bp, Artificial
  Synthetic oligonucleotide
ggggtcaaggccgccagctttgactggcatgcgattgccgacaatgatcagcact

SEQ ID NO: 503149 - DNA, 55 bp, Artificial
  Synthetic oligonucleotide
gggccggaataagatctaaatttgggagtatgttgacgactaaatcagttagatc

SEQ ID NO: 503150 - DNA, 55 bp, Artificial
  Synthetic oligonucleotide
gggccaggcatgtaccgtatttagtagagaaataaaagcggacggttaacgcaga

SEQ ID NO: 503151 - DNA, 55 bp, Artificial
  Synthetic oligonucleotide
gggcagatttaacgttgctttcaacttcagcggccgttaagcctggatcttggtt

SEQ ID NO: 503152 - DNA, 55 bp, Artificial
  Synthetic oligonucleotide
gggcaccggttgctttgtttcttaattgatcgacgatacggcggtagataaaccg

SEQ ID NO: 503153 - DNA, 55 bp, Artificial
  Synthetic oligonucleotide
gggatgtgatgcaaactctggtgaggtaagtgttacaagttggaatgtaacgcaa

SEQ ID NO: 503154 - DNA, 55 bp, Artificial
  Synthetic oligonucleotide
ggctgacatacgttgcggtgaaaatcgttcctttgcgtccagtcagcttattggc

SEQ ID NO: 503155 - DNA, 55 bp, Artificial
  Synthetic oligonucleotide
ggccgtcgatgtcttgtcgattggccaatatggctttaatctggtgaaaatccca

SEQ ID NO: 503156 - DNA, 55 bp, Artificial
  Synthetic oligonucleotide
ggccagctagcggttattaaatatcgttaaaatctgccaccgtctttaacggctc

SEQ ID NO: 503157 - DNA, 55 bp, Artificial
  Synthetic oligonucleotide
ggcatgagattccctaattctccttgcagctaatgataaagtctcatttagtcgt

SEQ ID NO: 503158 - DNA, 55 bp, Artificial
  Synthetic oligonucleotide
gtgaagaaagtggcgtagtagcaaatttgtgcttcgcatctaccaaaatgaccgc

SEQ ID NO: 503159 - DNA, 55 bp, Artificial
  Synthetic oligonucleotide
gtctgtcagacaagtaacatgacgattgtggccccaattagcagtaccgagcgga

SEQ ID NO: 503160 - DNA, 55 bp, Artificial
  Synthetic oligonucleotide
gtctgcgtctacaccaaacgttaaactcgtgtgtccttgtggatcgccgtcaatc

SEQ ID NO: 503161 - DNA, 55 bp, Artificial
  Synthetic oligonucleotide
gtctaacctcagccaaggtaatcggtctgcttggcggcagacttgacagcgatgg

SEQ ID NO: 503162 - DNA, 55 bp, Artificial
  Synthetic oligonucleotide
gtcgcatcgtctcgctacaaaagtattcagtatcgaaatttgtgacatatacctt

SEQ ID NO: 503163 - DNA, 55 bp, Artificial
  Synthetic oligonucleotide
gtcccgcctgcaattaggtcagcatagtcacgacgtaatgcgactagcttcttaa

SEQ ID NO: 503164 - DNA, 55 bp, Artificial
  Synthetic oligonucleotide
gtcccagtaactatcatttcgtagaccgtttcgtggtgcggattgtagacggcgc

SEQ ID NO: 503165 - DNA, 55 bp, Artificial
  Synthetic oligonucleotide
gtccagcaatgaacattcttgtcccaacttgtacgcttcttgtttctggtgtgtc

SEQ ID NO: 503166 - DNA, 55 bp, Artificial
  Synthetic oligonucleotide
gtcagtcgaggagctgttaaaggtgaattgtgccaaggccgtcgatgtcttgtcg

SEQ ID NO: 503167 - DNA, 55 bp, Artificial
  Synthetic oligonucleotide
gtcaagacgaccaggccaacttgtcggtctaagtcaaacgcaatcgccggtccag

SEQ ID NO: 503168 - DNA, 55 bp, Artificial
  Synthetic oligonucleotide
gtatgtcttttcgttatcgcggccacgggcgatgtattccccgtagcaagaggcg

SEQ ID NO: 503169 - DNA, 55 bp, Artificial
  Synthetic oligonucleotide
gtataagcatccaaaagcttggcaccgtctagacccagcaggctagcatattgtc

SEQ ID NO: 503170 - DNA, 55 bp, Artificial
  Synthetic oligonucleotide
gtagttaacccggcaggaaatctcacgatcacattcttgatcaggcaatgtcgtt

SEQ ID NO: 503171 - DNA, 55 bp, Artificial
  Synthetic oligonucleotide
ggtttatcttaatcaggctgttggtgtcaagaaagccaagcggactgagtggcag

SEQ ID NO: 503172 - DNA, 55 bp, Artificial
  Synthetic oligonucleotide
ggttgggtcagtcagttatccgaaattagcggaaacgctgctatactgcactagc

SEQ ID NO: 503173 - DNA, 55 bp, Artificial
  Synthetic oligonucleotide
ggttgctggccgcgccaaatcatatcaagaacagcgcattacaggtgccaatgcc

SEQ ID NO: 503174 - DNA, 55 bp, Artificial
  Synthetic oligonucleotide
ggttctttcggtcaaagtcattaaagcaggctgattcttgcgtctgacgccttta

SEQ ID NO: 503175 - DNA, 55 bp, Artificial
  Synthetic oligonucleotide
ggttccaaaggtcattcgcattgtgggctcatcaatacgtagaataggtaatgcc

SEQ ID NO: 503176 - DNA, 55 bp, Artificial
  Synthetic oligonucleotide
ggttagcgccgtggcaacttaccgcaataccgctctagcagttaataccctttct

SEQ ID NO: 503177 - DNA, 55 bp, Artificial
  Synthetic oligonucleotide
ggtgcctagggatcgcaacggcatgtttcatcagcacacgctccctgactacaag

SEQ ID NO: 503178 - DNA, 55 bp, Artificial
  Synthetic oligonucleotide
catagattcaaccaccgtaatctatgatcgctctattcaactagttgcggtaaga

SEQ ID NO: 503179 - DNA, 55 bp, Artificial
  Synthetic oligonucleotide
cataagtgcaatgtacttgtgcccaaaaggtataaatacgtcgccggtatattta

SEQ ID NO: 503180 - DNA, 55 bp, Artificial
  Synthetic oligonucleotide
cataagcgcgaaccacccctgccgttccttctggtcgcaaagttatatgccgctg

SEQ ID NO: 503181 - DNA, 55 bp, Artificial
  Synthetic oligonucleotide
cataacattccagtgccaatcaatctcgacagcccatactccatcgacgaaaact

SEQ ID NO: 503182 - DNA, 55 bp, Artificial
  Synthetic oligonucleotide
cagtcaaacaaagaaatggctgtacaggtgctgcatgaattctatcaaaactggg

SEQ ID NO: 503183 - DNA, 55 bp, Artificial
  Synthetic oligonucleotide
cagcgtgaacctctaccgttgataccccaccggcgacaagaaaagaaaatgtcgc

SEQ ID NO: 503184 - DNA, 55 bp, Artificial
  Synthetic oligonucleotide
cagccgtcttattacactacatcttacaagccaacaaggatgcggggactttgcc

SEQ ID NO: 503185 - DNA, 55 bp, Artificial
  Synthetic oligonucleotide
cagcccagctcaggtatctaacatctccaagcagatgattccaaaagtcgaggcc

SEQ ID NO: 503186 - DNA, 55 bp, Artificial
  Synthetic oligonucleotide
cagccactagatagttgcgtcaataagggattacttcctgcagaatggatatccg

SEQ ID NO: 503187 - DNA, 55 bp, Artificial
  Synthetic oligonucleotide
cagccaatcgtagttgttaacgattgtgaagttctcctcaccaaataagcgtttc

SEQ ID NO: 503188 - DNA, 55 bp, Artificial
  Synthetic oligonucleotide
cagatggcgttgtaggcatgaagacagtgctggagcagacttatccgaaagctca

SEQ ID NO: 503189 - DNA, 55 bp, Artificial
  Synthetic oligonucleotide
cactctcccgagcaccgccgtaattatcccaataggtgtgaattggttttaacac

SEQ ID NO: 503190 - DNA, 55 bp, Artificial
  Synthetic oligonucleotide
cactattgctggtaatgatcgttgaatgcttttcatagcgggcattgactagctg

SEQ ID NO: 503191 - DNA, 55 bp, Artificial
  Synthetic oligonucleotide
cacgtccaaagaacagcattaacgcaattatcccattcccaaccttgaaccaagc

SEQ ID NO: 503192 - DNA, 55 bp, Artificial
  Synthetic oligonucleotide
cacgtcattgagtaagtcctacagcgactcggaatctgaatcgacgtcgttgagc

SEQ ID NO: 503193 - DNA, 55 bp, Artificial
  Synthetic oligonucleotide
cacggtaaatagtcatggtactgatctgaaccggatacttttcgactgccaagcg

SEQ ID NO: 503194 - DNA, 55 bp, Artificial
  Synthetic oligonucleotide
cacggcaactacgggtgttaacctaattgccaatggtcaggtttggggatccaca

SEQ ID NO: 503195 - DNA, 55 bp, Artificial
  Synthetic oligonucleotide
cacgcttgctaatgaagcggggcatcataatcacaaacgtcaactattcaatcat

SEQ ID NO: 503196 - DNA, 55 bp, Artificial
  Synthetic oligonucleotide
ccgcttattgatgcagaacatgtatcgtggtgagcgtgagtttactgagaacgag

SEQ ID NO: 503197 - DNA, 55 bp, Artificial
  Synthetic oligonucleotide
ccgcccaagtcagcttcatgttgatcgaccacacgctactgaccttcacgactga

SEQ ID NO: 503198 - DNA, 55 bp, Artificial
  Synthetic oligonucleotide
ccctgtgccatgacgaggaatgtcacgtcaaagagttgctggttatcgtcttgca

SEQ ID NO: 503199 - DNA, 55 bp, Artificial
  Synthetic oligonucleotide
ccctctactctattgtcctgatactgcttgatcctgcgattgacctgtctaacgg

SEQ ID NO: 503200 - DNA, 55 bp, Artificial
  Synthetic oligonucleotide
cccgacaatttaaatctgcttaacccctcggactgcccggaagtaactttccgcc

SEQ ID NO: 503201 - DNA, 55 bp, Artificial
  Synthetic oligonucleotide
cccctaaaccggcatcgctgccccacgacattcaatccggctatccggccttgtt

SEQ ID NO: 503202 - DNA, 55 bp, Artificial
  Synthetic oligonucleotide
ccccagggatatccacttcatatgcaccatcaatagctaattttcgacctttgtc

SEQ ID NO: 503203 - DNA, 55 bp, Artificial
  Synthetic oligonucleotide
ccccactcaaattttcaagtgaaccgtagcgacttgcccaatcaactaacggccg

SEQ ID NO: 503204 - DNA, 55 bp, Artificial
  Synthetic oligonucleotide
cccagtttgttcacgcatcattagaggaatttgcgcacgagagactagacgaaca

SEQ ID NO: 503205 - DNA, 55 bp, Artificial
  Synthetic oligonucleotide
ccattacttggtaagatttattcccctcattgaccagttgtgctagtgcgccacg

SEQ ID NO: 503206 - DNA, 55 bp, Artificial
  Synthetic oligonucleotide
ccatcgttttggggacgacggcagtactgttacgttggcatgaccatcaaggccg

SEQ ID NO: 503207 - DNA, 55 bp, Artificial
  Synthetic oligonucleotide
ccagttacaagggatctggtgcaaacagtctaagagatggacatctacccagcta

SEQ ID NO: 503208 - DNA, 55 bp, Artificial; identical to SEQ ID NO: 199168
  Synthetic oligonucleotide

SEQ ID NO: 503209 - DNA, 55 bp, Artificial
  Synthetic oligonucleotide
ccagcaactaatgtctcgttaggaatcttcgctgaactttgagcttgacgagcac

SEQ ID NO: 503210 - DNA, 55 bp, Artificial
  Synthetic oligonucleotide
ccagatcatttctccttgtgtagaggtatagccgtaatatgaaccacgaggatcc

SEQ ID NO: 503211 - DNA, 55 bp, Artificial
  Synthetic oligonucleotide
ccacgttcaactaagccaatatatgttcgatccaaacctactagctcagataacc

SEQ ID NO: 503212 - DNA, 55 bp, Artificial
  Synthetic oligonucleotide
ccacgctgccaaaattttgtaagagcaagcgagcagccttaattccaacgtgatg

SEQ ID NO: 503213 - DNA, 55 bp, Artificial
  Synthetic oligonucleotide
catcccagttttcggttcgttgcttttctggaatccaccgagcatacgtccgttt

SEQ ID NO: 503214 - DNA, 55 bp, Artificial
  Synthetic oligonucleotide
catcagcactagtggaatcatcagctgatttagcggagccggtggcacttgccga

SEQ ID NO: 503215 - DNA, 55 bp, Artificial
  Synthetic oligonucleotide
catcacgagcacagttaatgagctgggtactgctaaactcgtcacccaaaattcc

SEQ ID NO: 503216 - DNA, 55 bp, Artificial
  Synthetic oligonucleotide
attcgctaagttcgccagtgaatatattcatcccctagctggctatttgactgcc

SEQ ID NO: 503217 - DNA, 55 bp, Artificial
  Synthetic oligonucleotide
atggcgcacttacacgtcactttcatgacgtcgtgcgttctgactgcaaaacgtc

SEQ ID NO: 503218 - DNA, 55 bp, Artificial
  Synthetic oligonucleotide
atgagttggacgctaatgtgcaccaatctcgagttgtctaggaggtgataacgtg

SEQ ID NO: 503219 - DNA, 55 bp, Artificial
  Synthetic oligonucleotide
atatctaggatagggtgctcctcttgttgggtgcctacgcttagaagctgtctag

SEQ ID NO: 503220 - DNA, 55 bp, Artificial
  Synthetic oligonucleotide
agttcaagtgctgctaggatctcatcagtcgttacttggctaaaattggtctttt

SEQ ID NO: 503221 - DNA, 55 bp, Artificial
  Synthetic oligonucleotide
agagcatcatcttccgtgcaatcaattgtcgtcggacaaaattaccaatgccggc

SEQ ID NO: 503222 - DNA, 55 bp, Artificial
  Synthetic oligonucleotide
acgtgtcaccattgcgtaagtgcatatcgtcatacgagactccatgtaacattag

SEQ ID NO: 503223 - DNA, 55 bp, Artificial
  Synthetic oligonucleotide
acgaattctacttcggccccggcgtgttcttgaagtaaaaccccaaaccgtaagc

SEQ ID NO: 503224 - DNA, 55 bp, Artificial
  Synthetic oligonucleotide
acgaaactgtgccggataaaatttggtcaattactgaattaacggacgtttgggg

SEQ ID NO: 503225 - DNA, 55 bp, Artificial
  Synthetic oligonucleotide
accgcgtaaatagacgtcagttgaccgcatatctagttcggccaggtaaagtcgg

SEQ ID NO: 503226 - DNA, 55 bp, Artificial
  Synthetic oligonucleotide
accatgagattgtgcgtctttcttggattcaggggcgttaagttcttcttttaac

SEQ ID NO: 503227 - DNA, 55 bp, Artificial
  Synthetic oligonucleotide
acaaagcaagtacctgtaaggtgggacttcagtccatcattgatgattacggtgc

SEQ ID NO: 503228 - DNA, 55 bp, Artificial
  Synthetic oligonucleotide
aattgataacaagccttatgctagttgcgaggccgttgcccggggacttaacccc

SEQ ID NO: 503229 - DNA, 55 bp, Artificial
  Synthetic oligonucleotide
aatgaacggtgccaattatcacattagtaaagcaaatgctgtttacttcccgtca

SEQ ID NO: 503230 - DNA, 55 bp, Artificial
  Synthetic oligonucleotide
aagttactttgatcagtgtggttccggatattgatactcgtgtctgcagcctgtc

SEQ ID NO: 503231 - DNA, 55 bp, Artificial
  Synthetic oligonucleotide
aactgtgtaaataactgacatcctgtcggcacagacgcattccttgtcgcatgcg

SEQ ID NO: 503232 - DNA, 55 bp, Artificial
  Synthetic oligonucleotide
aacatttgcatgtcttgctgtttgtaaggtctagctatttcaagtcgagtgacag

SEQ ID NO: 503233 - DNA, 55 bp, Artificial
  Synthetic oligonucleotide
aacaattatacccttatcaagggtgtgatgcaaggaaaccatacgatcaaagctg

SEQ ID NO: 503234 - DNA, 55 bp, Artificial
  Synthetic oligonucleotide
aaatggcatggatattcgattgctgatattctgtccttgagtattgaagacgcac

SEQ ID NO: 503235 - DNA, 55 bp, Artificial
  Synthetic oligonucleotide
cacctgtgagcgtctctcctaagtggctaagtaaatcctggttctgtgcggctac

SEQ ID NO: 503236 - DNA, 55 bp, Artificial
  Synthetic oligonucleotide
cacctgtaaagcagaagtcgttccccaaaacttcaatagtgctgctagctggggc

SEQ ID NO: 503237 - DNA, 55 bp, Artificial
  Synthetic oligonucleotide
caccccgaagaacagaacactgacaatgagcgctcttggaattaaacgccgtata

SEQ ID NO: 503238 - DNA, 55 bp, Artificial
  Synthetic oligonucleotide
cacatcttaatagacaggtttgctaacggggacccacattctgacccggaagatg

SEQ ID NO: 503239 - DNA, 55 bp, Artificial
  Synthetic oligonucleotide
cacatcgctacctttgcctcgataggtgccctttgcgatcagcttatcgacccgc

SEQ ID NO: 503240 - DNA, 55 bp, Artificial
  Synthetic oligonucleotide
cacacaaggttaggccaccatcagaagataattgaccgccggtatgcgatgctag

SEQ ID NO: 503241 - DNA, 55 bp, Artificial
  Synthetic oligonucleotide
caatttggcggaaatctccttactttagtgaggggatggatagcctaagcctagg

SEQ ID NO: 503242 - DNA, 55 bp, Artificial
  Synthetic oligonucleotide
caatggctaattgcttggtgacttggttggccagtccaaaggcagccgcataggg

SEQ ID NO: 503243 - DNA, 55 bp, Artificial
  Synthetic oligonucleotide
caatcagaactagagtaagagatgcggtaacggataatggatatacaatagcacg

SEQ ID NO: 503244 - DNA, 55 bp, Artificial
  Synthetic oligonucleotide
caataacatcaatactaccaaccgtttctactgaatttacccgacgcatgatcgc

SEQ ID NO: 503245 - DNA, 55 bp, Artificial
  Synthetic oligonucleotide
caagtcgcagattctcggcttttatatcaataaagtctacatgggtaacggggtc

SEQ ID NO: 503246 - DNA, 55 bp, Artificial
  Synthetic oligonucleotide
caagcggaagaacccatccatcgagttcaatgagatcgcccgaccattcccagcg

SEQ ID NO: 503247 - DNA, 55 bp, Artificial
  Synthetic oligonucleotide
caagcaacaggctgaaacgattttagctgcgatgcatacgaccggtctcaaacgg

SEQ ID NO: 503248 - DNA, 55 bp, Artificial
  Synthetic oligonucleotide
caactgtaagtggagcgataaattgaccgttgtattggtcgtgattttgatcgta

SEQ ID NO: 503249 - DNA, 55 bp, Artificial
  Synthetic oligonucleotide
caacgcctgtatgtggttttacctggattcattggttagttgctgatgttccggc

SEQ ID NO: 503250 - DNA, 55 bp, Artificial
  Synthetic oligonucleotide
caacccctatcttcaaactgaccgttaccatggtcgttaaggcagcgaaagtcag

SEQ ID NO: 503251 - DNA, 55 bp, Artificial
  Synthetic oligonucleotide
caaccaccgtaatctatgatcgctctattcaactagttgcggtaagaactttgtt

SEQ ID NO: 503252 - DNA, 55 bp, Artificial
  Synthetic oligonucleotide
caaactatgccagggattatatcgtatcctcacgaatccaaagctttcaccaggg

SEQ ID NO: 503253 - DNA, 55 bp, Artificial
  Synthetic oligonucleotide
caaaagttggtagcggccgtaacagttgccgtttctagcggtgtaggagccactt

SEQ ID NO: 503254 - DNA, 55 bp, Artificial
  Synthetic oligonucleotide
ctacattcgttatcgtgtaactcctatttggcgtggtaatgagttgcttgctcgc

SEQ ID NO: 503255 - DNA, 55 bp, Artificial
  Synthetic oligonucleotide
ctaaattgtaagttggcacaacgatggttaaatctaagttcgacgtaattgcctc

SEQ ID NO: 503256 - DNA, 55 bp, Artificial
  Synthetic oligonucleotide
ctaaagcgactatttatcggcgttttagagaattaagggattcgcccaacagaaa

SEQ ID NO: 503257 - DNA, 55 bp, Artificial
  Synthetic oligonucleotide
cgttacatagtaggccatcgcgccccaaaccatgaagccgaagttgttccaaagg

SEQ ID NO: 503258 - DNA, 55 bp, Artificial
  Synthetic oligonucleotide
cgtctataagctgcgaacaacactttgggataaaatcttaaccctgccggtgggt

SEQ ID NO: 503259 - DNA, 55 bp, Artificial
  Synthetic oligonucleotide
cgtcgcagccaaccgcatccccgtttcaaaatattgggttctcacagtcggcgct

SEQ ID NO: 503260 - DNA, 55 bp, Artificial
  Synthetic oligonucleotide
cgtcgcacgggcaattgtccagttgacggtggtgggttacgtcttgaagggcgtc

SEQ ID NO: 503261 - DNA, 55 bp, Artificial
  Synthetic oligonucleotide
cgtcccaaccactacttagataagcgcctagggttgtttgtaaatcgtctgcgtc

SEQ ID NO: 503262 - DNA, 55 bp, Artificial
  Synthetic oligonucleotide
cgtcaccgtagctaggccgaccgtatcggtaacgtatgtttgtggatctaaggcc

SEQ ID NO: 503263 - DNA, 55 bp, Artificial
  Synthetic oligonucleotide
cgtcaattctgccggttcttgcacaaagtccggctggcaataataaggacagcgc

SEQ ID NO: 503264 - DNA, 55 bp, Artificial
  Synthetic oligonucleotide
cgtacaaccaatgtatcgcggatctactgagtacttacatttgcggaaattgatc

SEQ ID NO: 503265 - DNA, 55 bp, Artificial
  Synthetic oligonucleotide
cggttgggctcgatccgctttctcagtgaatttgtcggggcgttcattatcggtc

SEQ ID NO: 503266 - DNA, 55 bp, Artificial
  Synthetic oligonucleotide
cggttgcttggtttgtgctgcctgactactaaaggaacctgctaaagcagttacg

SEQ ID NO: 503267 - DNA, 55 bp, Artificial
  Synthetic oligonucleotide
cggtaatacgctaggcggacgctgggccaatgcacgcccgctaattgccctgttc

SEQ ID NO: 503268 - DNA, 55 bp, Artificial
  Synthetic oligonucleotide
cgggtacgtcaacaagaacaattggtgtttgatgatctcgatttagcagcgatgg

SEQ ID NO: 503269 - DNA, 55 bp, Artificial
  Synthetic oligonucleotide
cgggcgagtgttcggggccaccgggaaaataacctcgcgcaaattaatagcctgg

SEQ ID NO: 503270 - DNA, 55 bp, Artificial
  Synthetic oligonucleotide
cggcctgttactacgttaacccaagccatgtgaacactagacattaatacgctaa

SEQ ID NO: 503271 - DNA, 55 bp, Artificial
  Synthetic oligonucleotide
cggacgttcaaggttttaacttttcccatgattacttgctcccttcgttttgagc

SEQ ID NO: 503272 - DNA, 55 bp, Artificial
  Synthetic oligonucleotide
cttggatcacttctgggtggtctaagtccagaactgctaagtcagcttgcttgcc

SEQ ID NO: 503273 - DNA, 55 bp, Artificial
  Synthetic oligonucleotide
cttcgccacaaccacagccgattcattattgagttgaagcttgaccgtaaacgat

SEQ ID NO: 503274 - DNA, 55 bp, Artificial
  Synthetic oligonucleotide
cttccgagagtggtgccttgaaagccagttcttcagtctttagccggctccagaa

SEQ ID NO: 503275 - DNA, 55 bp, Artificial; identical to SEQ ID NO: 199378
  Synthetic oligonucleotide

SEQ ID NO: 503276 - DNA, 55 bp, Artificial
  Synthetic oligonucleotide
ctgctaacacagaaatatttccagcgccacccatcgagttatcaactagaccagc

SEQ ID NO: 503277 - DNA, 55 bp, Artificial
  Synthetic oligonucleotide
ctgcccggtaccgtctcgtctccgttttgactcgctcaggagattacgcaggcag

SEQ ID NO: 503278 - DNA, 55 bp, Artificial
  Synthetic oligonucleotide
ctgatttgaatcgttcccaaatgtttggtttatcgctaaactatcgtaaggttgg

SEQ ID NO: 503279 - DNA, 55 bp, Artificial
  Synthetic oligonucleotide
ctgatgcggattcataatgactatccgttggtgccagtgacctacgtgacagaaa

SEQ ID NO: 503280 - DNA, 55 bp, Artificial
  Synthetic oligonucleotide
ctgataagggatctggtgcaaacagtctaagagatggacatctacccagctattg

SEQ ID NO: 503281 - DNA, 55 bp, Artificial
  Synthetic oligonucleotide
ctcgtaaggtacgcagcattgtctcgcaaatctattcaacgaccagctacgaact

SEQ ID NO: 503282 - DNA, 55 bp, Artificial
  Synthetic oligonucleotide
ctcgctcaagcattgttgccaaacgctcaagcagttatggctcaattggttaaac

SEQ ID NO: 503283 - DNA, 55 bp, Artificial
  Synthetic oligonucleotide
ctcgccggcctttagttgcctaactgagaccagctcactaattaaactaagtgcc

SEQ ID NO: 503284 - DNA, 55 bp, Artificial
  Synthetic oligonucleotide
ctcctatcgaataacccttcggacctcataaacattcgctaaattccggagactg

SEQ ID NO: 503285 - DNA, 55 bp, Artificial
  Synthetic oligonucleotide
ctccgcgagcaactgctagacgctgagaaccactaggaattaaatcgacattaga

SEQ ID NO: 503286 - DNA, 55 bp, Artificial
  Synthetic oligonucleotide
ctccaatttggcgtggcaatgaactattagcacgcggagttcagatggaagcaca

SEQ ID NO: 503287 - DNA, 55 bp, Artificial
  Synthetic oligonucleotide
ctcacagcatccattcaccataacttgatcaggaggcggccacatgtgcactagt

SEQ ID NO: 503288 - DNA, 55 bp, Artificial
  Synthetic oligonucleotide
ctagtatcaccattaatcccgttggcaatggcttcatatagatcatttacgccgg

SEQ ID NO: 503289 - DNA, 55 bp, Artificial
  Synthetic oligonucleotide
ctacggcccacagcaaacttgcaccgcctagttatcacccatgacgggcgcacta

SEQ ID NO: 503290 - DNA, 55 bp, Artificial
  Synthetic oligonucleotide
ctaccatgtaaacaaagatggaatatggcgcgtaatggaagcaggagaaccactc

SEQ ID NO: 503291 - DNA, 55 bp, Artificial
  Synthetic oligonucleotide
ccggtacacacctttactgtcgatcgtggaactgagtttagcaatctagtgtcgt

SEQ ID NO: 503292 - DNA, 55 bp, Artificial
  Synthetic oligonucleotide
cgcacgttttggccatgaacacgatggactacgtcatgaattttggtggaaccgg

SEQ ID NO: 503293 - DNA, 55 bp, Artificial
  Synthetic oligonucleotide
cgcaaaactaagcgaagaattaagcaacttcgttggaagacgcgtttaattgcca

SEQ ID NO: 503294 - DNA, 55 bp, Artificial
  Synthetic oligonucleotide
cgattggcgggtacttggtcgagcaagtcctgtatccgcaagccgccactttgag

SEQ ID NO: 503295 - DNA, 55 bp, Artificial
  Synthetic oligonucleotide
cgatgaccgtgctaaccttaggagaagctacggcttttccagcaatcccagctta

SEQ ID NO: 503296 - DNA, 55 bp, Artificial
  Synthetic oligonucleotide
cgagcactgtggataagctctatcagtgttgatggacagggctttcccgtgctat

SEQ ID NO: 503297 - DNA, 55 bp, Artificial
  Synthetic oligonucleotide
cgagaatcatcagtaacatgtaaacgacgtagcgtaatccgccgaccgagtaggc

SEQ ID NO: 503298 - DNA, 55 bp, Artificial
  Synthetic oligonucleotide
cgactgccaagcgattcgatatttcctccggagaccaaaggtcttcgcagaagtg

SEQ ID NO: 503299 - DNA, 55 bp, Artificial
  Synthetic oligonucleotide
ccgttaccattgtccctgaggttgccactgaacttaagcaaaactatccgcagtc

SEQ ID NO: 503300 - DNA, 55 bp, Artificial
  Synthetic oligonucleotide
cgacggacccttggacgtcagccttgataatgatcggcaaggacttcatttggcc

SEQ ID NO: 503301 - DNA, 55 bp, Artificial
  Synthetic oligonucleotide
cctcaacggtagcagctgatcgtgcacaagttcgtaaattaggtcgtaagattgc

SEQ ID NO: 503302 - DNA, 55 bp, Artificial
  Synthetic oligonucleotide
cgaacgctagtaaagctcttcgcgtcagtgtagatttcgtaggcgtcatcgctag

SEQ ID NO: 503303 - DNA, 55 bp, Artificial
  Synthetic oligonucleotide
cctcagttggccatagcaatgctacacgagaagagttattgcattctaaggcttc

SEQ ID NO: 503304 - DNA, 55 bp, Artificial
  Synthetic oligonucleotide
cctggaaaatttcccgaatacattggtctccacgaaagcgatagtttcagaacta

SEQ ID NO: 503305 - DNA, 55 bp, Artificial
  Synthetic oligonucleotide
cctttccggtcagttggcacgacgtcattcaagtcttcatgcacgatccgggccg

SEQ ID NO: 503306 - DNA, 55 bp, Artificial
  Synthetic oligonucleotide
cctttaatacgtgatgtttgccaaaactctgtgttacctcggtaaccaagtaagg

SEQ ID NO: 503307 - DNA, 55 bp, Artificial
  Synthetic oligonucleotide
cctgtcttatatgcaacattttggcttgccaactaggttattagatgtaacgacc

SEQ ID NO: 503308 - DNA, 55 bp, Artificial
  Synthetic oligonucleotide
cgcttggcgctttacccacaaatcttatcgcaagccgtaagtgtttcagttggcg

SEQ ID NO: 503309 - DNA, 55 bp, Artificial
  Synthetic oligonucleotide
cgccagttacctcccaattggcaaacggtttaaggctacttccgccgctggttag

SEQ ID NO: 503310 - DNA, 55 bp, Artificial
  Synthetic oligonucleotide
ccgcttttgcctaacacggtatcaccttcccagtgaccaatttctacacggttgt

SEQ ID NO: 503311 - DNA, 55 bp, Artificial
  Synthetic oligonucleotide
cgccatagtcgcggaaacggggatcagacaagcgtttatcactgttatcccagtg

SEQ ID NO: 503312 - DNA, 55 bp, Artificial
  Synthetic oligonucleotide
cgcctagggttgtttgtaaatcgtctgcgtctacaccaaacgttaaactcgtgtg

SEQ ID NO: 503313 - DNA, 55 bp, Artificial
  Synthetic oligonucleotide
cgcgaggtcgtaaacgaaattgctaacttaatggcctttgaggttacaagagata

SEQ ID NO: 503314 - DNA, 55 bp, Artificial
  Synthetic oligonucleotide
cgctctgctctaaggctgaagcaaccttgttgcaattttcactatcagactttcc

SEQ ID NO: 503315 - DNA, 55 bp, Artificial
  Synthetic oligonucleotide
cgcgagtggcattttagcgatttacaactttagtccggccttgtcgggtctcgtg

SEQ ID NO: 503316 - DNA, 55 bp, Artificial
  Synthetic oligonucleotide
cgcgtgagatcactcgtggctccgttctacagcgaattcccgggcataaggtagc

SEQ ID NO: 503317 - DNA, 55 bp, Artificial
  Synthetic oligonucleotide
cgctagtaacgcaattaacccaaataagatcgtaaacgccgatggcaaccgtcgc

SEQ ID NO: 503318 - DNA, 55 bp, Artificial
  Synthetic oligonucleotide
cgcgtgagcgatgctacagacaaaacgaaggaagccttcagtaagggcgcaaaga

SEQ ID NO: 503319 - DNA, 54 bp, Artificial
  Synthetic oligonucleotide
aaaattaggcacccattgatccaatagtccttgaacataactcagtgcggcccc

SEQ ID NO: 503320 - DNA, 54 bp, Artificial
  Synthetic oligonucleotide
aggaactgcaattcctgactctactagcgaccgcttaagacggtggcgataaac

SEQ ID NO: 503321 - DNA, 54 bp, Artificial
  Synthetic oligonucleotide
cagagctgcgacttgcgaatgttctttaacgtatcccagaataagggatcttgt

SEQ ID NO: 503322 - DNA, 54 bp, Artificial
  Synthetic oligonucleotide
tgacatcaggtgcagccagtaggtgatcgaacatcctgtctactccaggatatg

SEQ ID NO: 503323 - DNA, 54 bp, Artificial
  Synthetic oligonucleotide
tgcgtaaagaatactctagccggtcttttagtaccatgtaagctagcttggcgg

SEQ ID NO: 503324 - DNA, 54 bp, Artificial
  Synthetic oligonucleotide
aaaatttggagtatgccttagctggaacacgacaaatcagctatggtggtctgt

SEQ ID NO: 503325 - DNA, 54 bp, Artificial
  Synthetic oligonucleotide
gttggattctcagtgatcattctgcctatatggagaaagcttccatttctgaac

SEQ ID NO: 503326 - DNA, 54 bp, Artificial
  Synthetic oligonucleotide
cacaggaggcaccctatggattcaatctggcacattatcgttacatcgacccct

SEQ ID NO: 503327 - DNA, 54 bp, Artificial
  Synthetic oligonucleotide
gatgccttagaggaccaagccgtgttaccgtttaacgtcgaacatgtaacaaca

SEQ ID NO: 503328 - DNA, 54 bp, Artificial
  Synthetic oligonucleotide
cctaattaccatgcgcaaacttgcctcaaggcagttgacgggaccattaagcaa

SEQ ID NO: 503329 - DNA, 53 bp, Artificial
  Synthetic oligonucleotide
taacttgaattgttgtttttgtcaaggatcctattgctattgacaataactgc

SEQ ID NO: 503330 - DNA, 53 bp, Artificial
  Synthetic oligonucleotide
acagagttggcgcgttgactggcttggcttcagttacccggtgagccttgaat

SEQ ID NO: 503331 - DNA, 53 bp, Artificial
  Synthetic oligonucleotide
cctcagtggaaaactcacatcaagaaagtcccgacagacattcaacgcgttag

SEQ ID NO: 503332 - DNA, 53 bp, Artificial
  Synthetic oligonucleotide
attccactagttcaggacagtttagcggttgactttgacctagccgccgttca

SEQ ID NO: 503333 - DNA, 53 bp, Artificial
  Synthetic oligonucleotide
accgtataagtagttctccacgttcttgatatgcttctcatcgcttcttaggg

SEQ ID NO: 503334 - DNA, 53 bp, Artificial
  Synthetic oligonucleotide
ggcacttcataatattgtgtattcgaaacagcttcgcgatgcgcatagagatg

SEQ ID NO: 503335 - DNA, 53 bp, Artificial
  Synthetic oligonucleotide
agatcgccaataaggtcgaagcatttgcgtctgatatggaggccatgtctgac

SEQ ID NO: 503336 - DNA, 53 bp, Artificial
  Synthetic oligonucleotide
gagttagcgcttctaggtaggcggctagataggttgcctgcaccaaactttct

SEQ ID NO: 503337 - DNA, 53 bp, Artificial
  Synthetic oligonucleotide
gcaagcttcgagtaattaaggtggtgttgatctacagcaatttgaatatgacg

SEQ ID NO: 503338 - DNA, 53 bp, Artificial
  Synthetic oligonucleotide
gtgattacccaattagtaactggtcattccatatgaagtgcagattgcaactt

SEQ ID NO: 503339 - DNA, 52 bp, Artificial
  Synthetic oligonucleotide
gaagggattggggtggaacaacggccaccgttctttgaccaggtccgcgtag

SEQ ID NO: 503340 - DNA, 52 bp, Artificial
  Synthetic oligonucleotide
aacagcggatgctggtaaaagtcgaaccgctgactcccggtgatccgtaaaa

SEQ ID NO: 503341 - DNA, 52 bp, Artificial
  Synthetic oligonucleotide
caagttgtggtcgcgggttgtcaaatgaacgattggcgtgatgccataattc

SEQ ID NO: 503342 - DNA, 52 bp, Artificial
  Synthetic oligonucleotide
taaacatgcaggggatccagtcattggggcgacgatcaatacgactggcagt

SEQ ID NO: 503343 - DNA, 52 bp, Artificial
  Synthetic oligonucleotide
cgaacgtccgattttcggattttcgctcgtagcaagggtttgcggctctttt

SEQ ID NO: 503344 - DNA, 52 bp, Artificial
  Synthetic oligonucleotide
gtctgccattgcttaaagcccgcgacttgagtggcttgcggattttgcgcaa

SEQ ID NO: 503345 - DNA, 52 bp, Artificial
  Synthetic oligonucleotide
tagcgaaggccggaattcagggcaacttcgctaacattggtaagtatgttta

SEQ ID NO: 503346 - DNA, 52 bp, Artificial
  Synthetic oligonucleotide
tcaaccagatagatatctgtgaacacaaaagattatgggaagccgccacttt

SEQ ID NO: 503347 - DNA, 52 bp, Artificial
  Synthetic oligonucleotide
agcctgaaaatcagctgctggtgaaacataggtccagttaacgtctttagca

SEQ ID NO: 503348 - DNA, 52 bp, Artificial
  Synthetic oligonucleotide
tatgaaaagcattcaacgatcattaccagcaatagtgatctatccgcttggg

SEQ ID NO: 503349 - DNA, 51 bp, Artificial
  Synthetic oligonucleotide
acagcttgcttgccgattttacgaagaagcatcaaaactgctatgcagcct

SEQ ID NO: 503350 - DNA, 51 bp, Artificial
  Synthetic oligonucleotide
gatacatgacagtcaatgctttatcagtggtcgtcatttgtggatcagcca

SEQ ID NO: 503351 - DNA, 51 bp, Artificial
  Synthetic oligonucleotide
ttcccgttcatctatggtaatatgcttgtagtgatccatggctaaattcct

SEQ ID NO: 503352 - DNA, 51 bp, Artificial
  Synthetic oligonucleotide
ttcccgtgttcaacaggaatttgtgccaatgcaatccttaatgtcatgcaa

SEQ ID NO: 503353 - DNA, 51 bp, Artificial
  Synthetic oligonucleotide
aacgtagttagagatcttagacaggttgagcctgatctgttaaccttttac

SEQ ID NO: 503354 - DNA, 51 bp, Artificial
  Synthetic oligonucleotide
ctagcaatgatataatggttttgacatggcctatcgtttccaagacgtgct

SEQ ID NO: 503355 - DNA, 51 bp, Artificial
  Synthetic oligonucleotide
tgtgtcggtggtcgtactaatgttgctatgacccagccggctactaatcgc

SEQ ID NO: 503356 - DNA, 51 bp, Artificial
  Synthetic oligonucleotide
tgtgcagggttagttggtatccggtatgcggtaactgctggagaagctttt

SEQ ID NO: 503357 - DNA, 51 bp, Artificial
  Synthetic oligonucleotide
gcggcgtcccttgagctaacgcgatcccaccacgaatcaacattaaataat

SEQ ID NO: 503358 - DNA, 51 bp, Artificial
  Synthetic oligonucleotide
gcgcccaaagtgttgacaaaattcaagccacccatcaattaacaccggatt

SEQ ID NO: 503359 - DNA, 51 bp, Artificial
  Synthetic oligonucleotide
atcctgagctacggtcaaaccacgagagttaactacaatagcggaaatagc

SEQ ID NO: 503360 - DNA, 51 bp, Artificial
  Synthetic oligonucleotide
aattttggtccattggtctagttttggttaggacgcatccctgtcacggat

SEQ ID NO: 503361 - DNA, 51 bp, Artificial
  Synthetic oligonucleotide
tgacaacagttaagtcggggcatggtttagcccgtcataacaccgttatga

SEQ ID NO: 503362 - DNA, 51 bp, Artificial
  Synthetic oligonucleotide
taggcacctgttttattcaacgctgggaagtatttaattacgccagaacct

SEQ ID NO: 503363 - DNA, 51 bp, Artificial
  Synthetic oligonucleotide
acagattttcgtacttcgccgccagttggtggactaactgatactgagcgt

SEQ ID NO: 503364 - DNA, 50 bp, Artificial
  Synthetic oligonucleotide
gcaagcatgtattcataccttacacatgagtctaaagatgctattgagaa

SEQ ID NO: 503365 - DNA, 50 bp, Artificial
  Synthetic oligonucleotide
caacattttgaatatgggcttaattgacaatacgccgactggccaattag

SEQ ID NO: 503366 - DNA, 50 bp, Artificial
  Synthetic oligonucleotide
gacgttacaacaaatggaaaagtaagaccttggcgagagcgcaaaattga

SEQ ID NO: 503367 - DNA, 50 bp, Artificial
  Synthetic oligonucleotide
ggccggcgcaatgtttgttcaatggctgggcaacgtgactacgatttacg

SEQ ID NO: 503368 - DNA, 55 bp, Artificial
  Synthetic oligonucleotide
cgtagggcttatttcaccgtcgagccctattatggaacaggatatagaagcggga

SEQ ID NO: 503369 - DNA, 55 bp, Artificial
  Synthetic oligonucleotide
cgtttggattttattgagtggttcgttaattagggatgcacatagtgccccgctg

SEQ ID NO: 503370 - DNA, 55 bp, Artificial
  Synthetic oligonucleotide
ctactggggtgtttccgatggcggcaagtatattgggataaatcatatctagtcc

SEQ ID NO: 503371 - DNA, 55 bp, Artificial
  Synthetic oligonucleotide
ctgagtcgagatagcattatgtatgctctttctgggcatgaatatgatggggttg

SEQ ID NO: 503372 - DNA, 55 bp, Artificial
  Synthetic oligonucleotide
ctgcaaagacggacattaccgcagcattactgtcgtcatcctcaaaatgccgacc

SEQ ID NO: 503373 - DNA, 55 bp, Artificial
  Synthetic oligonucleotide
ctgcccaaggctcggaaagcgaacaaaaggaagcctctgttgttcttatgcagtc

SEQ ID NO: 503374 - DNA, 55 bp, Artificial
  Synthetic oligonucleotide
cttgatgatgcaaccacttatcttacaacaacttaccaagcaagcatcgggtatt

SEQ ID NO: 503375 - DNA, 55 bp, Artificial
  Synthetic oligonucleotide
gaacaacctccagttgaccgcttatcgcaagaggatgcattgattggcactgaac

SEQ ID NO: 503376 - DNA, 55 bp, Artificial
  Synthetic oligonucleotide
gaccccacttggaatgattcagaactggcctttgttctaaatcctgaagccgttt

SEQ ID NO: 503377 - DNA, 55 bp, Artificial
  Synthetic oligonucleotide
gacttgaatcagattcctcgtgtggtaattgagcgagttgctattcaaatcaagg

SEQ ID NO: 503378 - DNA, 55 bp, Artificial
  Synthetic oligonucleotide
gagggttgtgttttattggatgtacgtatgcctgctatgagcggcatggaggtac

SEQ ID NO: 503379 - DNA, 55 bp, Artificial
  Synthetic oligonucleotide
gagtcagactcccaagatgattctctggacgtgctcagtatggtattgcgtgatt

SEQ ID NO: 503380 - DNA, 55 bp, Artificial
  Synthetic oligonucleotide
gagtcggttcagtatagggtaaacccagcagtaacatgccgtgatggaataacgg

SEQ ID NO: 503381 - DNA, 55 bp, Artificial
  Synthetic oligonucleotide
gatggaacaccactgttgattcgacctggagcggttttaatctctaaggatcttg

SEQ ID NO: 503382 - DNA, 55 bp, Artificial
  Synthetic oligonucleotide
gcaagtctttcgaatcaaatgggtaccgatttaagggaggcgcaaacggcaagcc

SEQ ID NO: 503383 - DNA, 55 bp, Artificial
  Synthetic oligonucleotide
gccgtcgttatcgacgctttgggatttgggcttgtctatccagtaatgaccgcta

SEQ ID NO: 503384 - DNA, 55 bp, Artificial
  Synthetic oligonucleotide
gcctggctgttgagctttatgctcgactacactgaacggtaagtcaaaagagggg

SEQ ID NO: 503385 - DNA, 55 bp, Artificial
  Synthetic oligonucleotide
gcgactttaaatcctcgccttttccacgcacgctccaatctttgaatatgatgta

SEQ ID NO: 503386 - DNA, 55 bp, Artificial
  Synthetic oligonucleotide
gcggaagcgtctgtggcgcgagacttatgctgcaatactgccggtactcaatcag

SEQ ID NO: 503387 - DNA, 55 bp, Artificial
  Synthetic oligonucleotide
gttagtagattggctattcaccgggatctctggttttgtacaagcactaacggga

SEQ ID NO: 503388 - DNA, 55 bp, Artificial
  Synthetic oligonucleotide
gcggttcgctctaccctgagcacgtccctgctcttcaaccagatagatgaccgag

SEQ ID NO: 503389 - DNA, 55 bp, Artificial
  Synthetic oligonucleotide
gcgtgcaaggtcatagaggcaggttatggaggatacgttctaagtttatggaaac

SEQ ID NO: 503390 - DNA, 55 bp, Artificial
  Synthetic oligonucleotide
gctgggcgtttacgtgtatggttcattcgtctggggtgattttgatgaaacaacc

SEQ ID NO: 503391 - DNA, 55 bp, Artificial
  Synthetic oligonucleotide
gctgtagggtcaacgccctctatgtctaacaatcgattgaccacgtcaagatggc

SEQ ID NO: 503392 - DNA, 55 bp, Artificial
  Synthetic oligonucleotide
gctttgtggttggggtaagtagccaccagcccaatagaccacctccgaaaataac

SEQ ID NO: 503393 - DNA, 55 bp, Artificial
  Synthetic oligonucleotide
gctttgttaaacctggcaatggtaagttgtggaaaagtccttattggtggcccaa

SEQ ID NO: 503394 - DNA, 55 bp, Artificial
  Synthetic oligonucleotide
ggctacacaatcaccgatattaaaaggtgctcgattcaccatagtacttccaaga

SEQ ID NO: 503395 - DNA, 55 bp, Artificial
  Synthetic oligonucleotide
gggatttcacgatacttgcatccttttccagcattaaccaacaacttaccctttc

SEQ ID NO: 503396 - DNA, 55 bp, Artificial
  Synthetic oligonucleotide
ggggaaaactccatagagttgactgtaacaggagtgtcagtaaacgatcggaggt

SEQ ID NO: 503397 - DNA, 55 bp, Artificial
  Synthetic oligonucleotide
ggggtactaatagctaccctacctcctctatttgggctgcattggcaagaatggg

SEQ ID NO: 503398 - DNA, 55 bp, Artificial
  Synthetic oligonucleotide
gtgcggtgctactcgcatcagccctttcattgggctctgtacctgaacttttgat

SEQ ID NO: 503399 - DNA, 55 bp, Artificial
  Synthetic oligonucleotide
gtggagtcatctgcctattcaagctgtaaacaatagcggttgggacaatagaacc

SEQ ID NO: 503400 - DNA, 55 bp, Artificial
  Synthetic oligonucleotide
tgcgccacatggaatgataagacagacggtgtcctatcacgcggctcacttttat

SEQ ID NO: 503401 - DNA, 55 bp, Artificial
  Synthetic oligonucleotide
aaacgcgcatgagtgactaccgtataataacgattagtgctcttaatttgaccgc

SEQ ID NO: 503402 - DNA, 55 bp, Artificial
  Synthetic oligonucleotide
aactctacagtgcaactccccttttgaaagcggatgaaccattcccttccaccgc

SEQ ID NO: 503403 - DNA, 55 bp, Artificial
  Synthetic oligonucleotide
acgtgtcgatttacccgagatggtacttgagatagccacacgtactggatttgcg

SEQ ID NO: 503404 - DNA, 55 bp, Artificial
  Synthetic oligonucleotide
agacaggtatcgcactaattccatgttggctttatcttcaatagaaggtgccgcg

SEQ ID NO: 503405 - DNA, 55 bp, Artificial
  Synthetic oligonucleotide
tctttggcaacaataagcagtcgcttaaactccgcttcacttaagactctggcct

SEQ ID NO: 503406 - DNA, 55 bp, Artificial
  Synthetic oligonucleotide
agtaaacagataccagccgttactcctatagttgtagcaagtgctccgacaccac

SEQ ID NO: 503407 - DNA, 55 bp, Artificial
  Synthetic oligonucleotide
taggacgagtcactcgttgactacctagggaaataccatctcggatgctgttggc

SEQ ID NO: 503408 - DNA, 55 bp, Artificial
  Synthetic oligonucleotide
atgccaatcaaccgcatggctaccgaaatccaaccaatgagctatcgcgcatcca

SEQ ID NO: 503409 - DNA, 55 bp, Artificial
  Synthetic oligonucleotide
atgccacaggatttagattacacccgaactggtatgttgtttggttcacgcacgt

SEQ ID NO: 503410 - DNA, 55 bp, Artificial
  Synthetic oligonucleotide
attgatggaacttgccccaaaatccgcattagtccgacgtaataatagcgagttc

SEQ ID NO: 503411 - DNA, 55 bp, Artificial
  Synthetic oligonucleotide
caagggcaatgacgctcccctcaacgcgctgagaagtgacgtagtgaggaggaag

SEQ ID NO: 503412 - DNA, 55 bp, Artificial
  Synthetic oligonucleotide
caagtggtcttcgcatgttaaaatcttaactgtagatgagcgcattacaatgcgc

SEQ ID NO: 503413 - DNA, 55 bp, Artificial
  Synthetic oligonucleotide
tagatgatggaagtcaaccaacaacaacggcttatcgaagtagtttcttatgatg

SEQ ID NO: 503414 - DNA, 55 bp, Artificial
  Synthetic oligonucleotide
cacctcactgacatggagagccatgcaaggtacgccagtcgtctggtttgctgtc

SEQ ID NO: 503415 - DNA, 55 bp, Artificial
  Synthetic oligonucleotide
tacgacaagaaggcttccccgtatacgatgaagatgtagccagactgtccgcata

SEQ ID NO: 503416 - DNA, 55 bp, Artificial
  Synthetic oligonucleotide
cagattttcattggcactattaataaccttggtgcctgtaagttcgccggattta

SEQ ID NO: 503417 - DNA, 55 bp, Artificial
  Synthetic oligonucleotide
cagcgggcaattccgggcaaacgttttagactagagttaagttacggcctgggtt

SEQ ID NO: 503418 - DNA, 55 bp, Artificial
  Synthetic oligonucleotide
caggaaaagcacatagacaccctcaaaatattaagcactcaatcatcacccgaac

SEQ ID NO: 503419 - DNA, 55 bp, Artificial
  Synthetic oligonucleotide
catgcccagaaagagcatacataatgctatctcgactcagcaacctatcatggtt

SEQ ID NO: 503420 - DNA, 55 bp, Artificial
  Synthetic oligonucleotide
taatcacgctgttgcttatgtggggttactggtcgaccttgagtgatcgtgatac

SEQ ID NO: 503421 - DNA, 55 bp, Artificial
  Synthetic oligonucleotide
ccaggctgaggtgaactgagtcaaaggcggtttagtcttcgcctccctgtgggat

SEQ ID NO: 503422 - DNA, 55 bp, Artificial
  Synthetic oligonucleotide
ccccaaatccgcatcgacaaatcgccaccctaatgattgagacacagactttgct

SEQ ID NO: 503423 - DNA, 55 bp, Artificial
  Synthetic oligonucleotide
ccgaggtccattcagtaaactcaacctcacaaaccagttcgggcttaacccatgt

SEQ ID NO: 503424 - DNA, 55 bp, Artificial
  Synthetic oligonucleotide
ccgcaaacgattaagcccaaatttaaattaaacggtcttgaccaccataagccct

SEQ ID NO: 503425 - DNA, 55 bp, Artificial
  Synthetic oligonucleotide
ccgcgattggctgatatgggtggtgctagattctggcggattgatccgttggctg

SEQ ID NO: 503426 - DNA, 55 bp, Artificial
  Synthetic oligonucleotide
ccggggacgttggtcattgcttctcatgatacggagctcatcaatacagtcgcag

SEQ ID NO: 503427 - DNA, 55 bp, Artificial
  Synthetic oligonucleotide
ccttagagattaaaaccgctccaggtcgaatcaacagtggtgttccatctaagca

SEQ ID NO: 503428 - DNA, 55 bp, Artificial
  Synthetic oligonucleotide
cgcatagagaggttttaaacagcgcctattcagcgaacccaaactggagtcacgc

SEQ ID NO: 503429 - DNA, 55 bp, Artificial
  Synthetic oligonucleotide
cgcgcacgaggagacttcacagtaaccagtgattatgatgttgcagggattaggg

SEQ ID NO: 503430 - DNA, 55 bp, Artificial
  Synthetic oligonucleotide
gttggtacaaggaagggcgttatgaataagcaaacacgtgtacttagaagggcgg

SEQ ID NO: 503431 - DNA, 54 bp, Artificial
  Synthetic oligonucleotide
taagagcccatggcaattttgcagagtatgttccctttacgctaatcctgcttt

SEQ ID NO: 503432 - DNA, 54 bp, Artificial
  Synthetic oligonucleotide
ccgctctgctcgcgcagaagtactttggatttagcaagtttggatagttctcga

SEQ ID NO: 503433 - DNA, 54 bp, Artificial
  Synthetic oligonucleotide
aaaatgggcaggcctgtggtaacaggaatacccgcaattttaggctcatcagag

SEQ ID NO: 503434 - DNA, 54 bp, Artificial
  Synthetic oligonucleotide
caatcgtgcctatgtgtccgatatgacctatatcccaacccatgagggctggtt

SEQ ID NO: 503435 - DNA, 54 bp, Artificial
  Synthetic oligonucleotide
agtatgaacacggtgattcctaaaggatgaaccaatttgaggagtagtccatga

SEQ ID NO: 503436 - DNA, 54 bp, Artificial
  Synthetic oligonucleotide
agctgcacgcccatataggtatcgactaggatatcggtaaaggatacgcaatgg

SEQ ID NO: 503437 - DNA, 53 bp, Artificial
  Synthetic oligonucleotide
ttttgcatcgtatgtcgcattaaatctggttggcagacttcgggctaccaaaa

SEQ ID NO: 503438 - DNA, 53 bp, Artificial
  Synthetic oligonucleotide
ttgtgggcagcttgggtttcgctgtgttaaatgccgccttcgacaaccttcca

SEQ ID NO: 503439 - DNA, 53 bp, Artificial
  Synthetic oligonucleotide
tggcctttctccaatatggtggccgctaatgtggctcctgcatctcctttctg

SEQ ID NO: 503440 - DNA, 53 bp, Artificial
  Synthetic oligonucleotide
tgactaaatttaatcaactgtggcgcactcccttacttaggcagccctgaaat

SEQ ID NO: 503441 - DNA, 53 bp, Artificial
  Synthetic oligonucleotide
tactgtagatgattggcgagactcaataggtcagcttgcctctggtaattctc

SEQ ID NO: 503442 - DNA, 52 bp, Artificial
  Synthetic oligonucleotide
cagaggcttccttttgttcgctttccgagccatgggcagataccacttctca

SEQ ID NO: 503443 - DNA, 52 bp, Artificial
  Synthetic oligonucleotide
tggggtgtacaaatttgcttgaccacgtcaatgagtgcatttagggttgggg

SEQ ID NO: 503444 - DNA, 52 bp, Artificial
  Synthetic oligonucleotide
ttccgtcgtcagactttggtacaactaaatttgggcgaaggcagacacagtt

SEQ ID NO: 503445 - DNA, 52 bp, Artificial
  Synthetic oligonucleotide
ttgcctatgcccattggccggagcttccctaaactggacgttcaatttccca

SEQ ID NO: 503446 - DNA, 51 bp, Artificial
  Synthetic oligonucleotide
tagtcgtcctctatcttaactgcttgaaacataaatggcagacaagctgat

SEQ ID NO: 503447 - DNA, 51 bp, Artificial
  Synthetic oligonucleotide
ttccaccttaagatgggccattaaccaatctgcttcctctaaagagtcaaa

SEQ ID NO: 503448 - DNA, 51 bp, Artificial
  Synthetic oligonucleotide
cgggctcagatgaagacagggcctcagggtatctggataattcgggaaaac

SEQ ID NO: 503449 - DNA, 50 bp, Artificial
  Synthetic oligonucleotide
cattaaaacgagcggacgcaggaattgccatgggtaagaaaggcagcgag

SEQ ID NO: 503450 - DNA, 50 bp, Artificial
  Synthetic oligonucleotide
gcggcatcctaatcgaagtgattgccgaaacaaatggctgcgcgcaagtg

SEQ ID NO: 503451 - DNA, 60 bp, Artificial
  Synthetic oligonucleotide
agctaaacaagcggcttactacgctggtttggttccgagagttgacatttcaggagacac

SEQ ID NO: 503452 - DNA, 60 bp, Artificial
  Synthetic oligonucleotide
cgatcatcattccagaaggagtcaatttatatggagacttcaacggaaaaggtttgatcg

SEQ ID NO: 503453 - DNA, 59 bp, Artificial
  Synthetic oligonucleotide
cttgcataaaggaccaagaattaaataatgtatcattggtttctgtagagtgtgaaggc

SEQ ID NO: 503454 - DNA, 59 bp, Artificial
  Synthetic oligonucleotide
gattaagattgttaacaatttcctccaatgatagtctataccatctacgagtcgttagg

SEQ ID NO: 503455 - DNA, 56 bp, Artificial
  Synthetic oligonucleotide
cggtagtttagaaatttcgttctcgaaaaccggtttatcaaaagtacatagagtcg

SEQ ID NO: 503456 - DNA, 55 bp, Artificial
  Synthetic oligonucleotide
gcaagtgtttgagcagcacttaagctctgattgtacgcactattattcatcgcgc

SEQ ID NO: 503457 - DNA, 55 bp, Artificial
  Synthetic oligonucleotide
gatttgagtattcgattcaaagcatggctaacgtattaggagtgtctcgttcagg

SEQ ID NO: 503458 - DNA, 55 bp, Artificial
  Synthetic oligonucleotide
gattggaaattcagtcaggatacaatgtatggatgcgtttcggacttctcatcgt

SEQ ID NO: 503459 - DNA, 55 bp, Artificial
  Synthetic oligonucleotide
gattgcggaaacataggcggcaatatcgtcttagatgatgagccaacttttgcac

SEQ ID NO: 503460 - DNA, 55 bp, Artificial
  Synthetic oligonucleotide
gattgaatgtgtccgcactcacggcaatcctacttccgcttatgtttacgagttc

SEQ ID NO: 503461 - DNA, 55 bp, Artificial
  Synthetic oligonucleotide
tcgttgaactctggcaagacgtctgggcaaatccggatataaaacgcagaagagc

SEQ ID NO: 503462 - DNA, 55 bp, Artificial
  Synthetic oligonucleotide
gattagtgatggaatgccttgatcgcagagaattctgtatcactctggaatcggc

SEQ ID NO: 503463 - DNA, 55 bp, Artificial
  Synthetic oligonucleotide
gatcgtaacactcggcgtcgggatttatcaggtttatcgttatttcaaagaacgg

SEQ ID NO: 503464 - DNA, 55 bp, Artificial
  Synthetic oligonucleotide
gatcgggaacgtttctccaatcgaagcgtcgtaagtgcctggcgcaatcgcaatg

SEQ ID NO: 503465 - DNA, 55 bp, Artificial
  Synthetic oligonucleotide
gatccaataattttcccggcggcacatttgcgaacttttgtcggatccaatttgc

SEQ ID NO: 503466 - DNA, 55 bp, Artificial
  Synthetic oligonucleotide
gatcatgagctactaatgaaacttgtacgtaaacgagtcagcgaccgtcgcgtat

SEQ ID NO: 503467 - DNA, 55 bp, Artificial
  Synthetic oligonucleotide
gataacgggagcttccggatatttaggcggacgtatcctccaaaattttgcgggg

SEQ ID NO: 503468 - DNA, 55 bp, Artificial
  Synthetic oligonucleotide
gagtttcgcttaacaactttgcagaccagagcccatcttcgtgaaatccgttacg

SEQ ID NO: 503469 - DNA, 55 bp, Artificial
  Synthetic oligonucleotide
gagttcctcgtatgcgttagatgcggattccttatcgagtccgaacggggtgagc

SEQ ID NO: 503470 - DNA, 55 bp, Artificial
  Synthetic oligonucleotide
tctaaccggtttggatttacctgctctggaatttacggaagaccgggtgccaagt

SEQ ID NO: 503471 - DNA, 55 bp, Artificial
  Synthetic oligonucleotide
gagtgacaggtggaagtaaatcgaatagtgaagctgcaagtagggcaactttgac

SEQ ID NO: 503472 - DNA, 55 bp, Artificial
  Synthetic oligonucleotide
gagtatccgattgtcctgtctcaacacattgtgagacgatcatcttcgatttgca

SEQ ID NO: 503473 - DNA, 55 bp, Artificial
  Synthetic oligonucleotide
tcttgccggtgtcaccgatctcaaagcgggatctatcctcgcggaacataaaacg

SEQ ID NO: 503474 - DNA, 55 bp, Artificial
  Synthetic oligonucleotide
gagggattccttcggtttgatgaaattcaaataggattgcttttccgttcttagg

SEQ ID NO: 503475 - DNA, 55 bp, Artificial
  Synthetic oligonucleotide
tgagaagtgccgctatttaacttcaaggctgagttatacgccattgcaccatttt

SEQ ID NO: 503476 - DNA, 55 bp, Artificial
  Synthetic oligonucleotide
gaggaatggaaagaagttccgcaacttgaaccacaacttgagaagaatcggtgtc

SEQ ID NO: 503477 - DNA, 55 bp, Artificial
  Synthetic oligonucleotide
gagctaattattaatcttccaggataggcattttcgctagacttgcagcgagtaa

SEQ ID NO: 503478 - DNA, 55 bp, Artificial
  Synthetic oligonucleotide
gagcgccgcaaacgagagcggttccgaatacgcacttcagtttgagcaacctgtg

SEQ ID NO: 503479 - DNA, 55 bp, Artificial
  Synthetic oligonucleotide
gagcgagttttgtaagctatgtgatgactacgtacccaaatcaacgtaccgacac

SEQ ID NO: 503480 - DNA, 55 bp, Artificial
  Synthetic oligonucleotide
gcgaacgggtatagtttgatgaaatgggcggacttggctttacctaaagatgcgg

SEQ ID NO: 503481 - DNA, 55 bp, Artificial
  Synthetic oligonucleotide
gcgaacggattttcataaacatcatacgcagtcgagttcttaaacgagtgcatac

SEQ ID NO: 503482 - DNA, 55 bp, Artificial
  Synthetic oligonucleotide
gcgaacatcgagatcaaaataaggtggatttgaaggttcttgttgcagcaaccgg

SEQ ID NO: 503483 - DNA, 55 bp, Artificial
  Synthetic oligonucleotide
gccttgcagtacaggatcgtttattacggagaaggttccggtccgaatcggatcg

SEQ ID NO: 503484 - DNA, 55 bp, Artificial
  Synthetic oligonucleotide
gccttgattccagcgactaaacgaacggttcctcccacataggatcgttcggtac

SEQ ID NO: 503485 - DNA, 55 bp, Artificial
  Synthetic oligonucleotide
gcctctcctgaacacggactcgtttatgcttctggtaaggatattactgaaattc

SEQ ID NO: 503486 - DNA, 55 bp, Artificial
  Synthetic oligonucleotide
gccgttgctcgggttcgttcaaacttgattacgccggatcacaagttatagctgg

SEQ ID NO: 503487 - DNA, 55 bp, Artificial
  Synthetic oligonucleotide
gccgtctaacgcaacttgaagagcgtccggaaaacttaagattctcaaaccgccg

SEQ ID NO: 503488 - DNA, 55 bp, Artificial
  Synthetic oligonucleotide
gccgcaatcgtccaaccgatcggaccggttaaagtaaagacagagattaggtttt

SEQ ID NO: 503489 - DNA, 55 bp, Artificial
  Synthetic oligonucleotide
gccgaacagacggcgctattttgaccggaggcgcagtatttccaggtgagacccg

SEQ ID NO: 503490 - DNA, 55 bp, Artificial
  Synthetic oligonucleotide
gccctcccggaggaatacgcagttcgtaatctttcagttcggccacggataaccc

SEQ ID NO: 503491 - DNA, 55 bp, Artificial
  Synthetic oligonucleotide
gccatgcttcgaatcgaatactcaaatcgatgagtttccatgaacatcaatcggg

SEQ ID NO: 503492 - DNA, 55 bp, Artificial
  Synthetic oligonucleotide
gccaggtcaggggcatatgcagggcttgtaagttattggaaccaagcatacttcc

SEQ ID NO: 503493 - DNA, 55 bp, Artificial
  Synthetic oligonucleotide
gccactgatgaagagctgcgttcagcgtttgaggcattcggtcaggtaacgtcgg

SEQ ID NO: 503494 - DNA, 55 bp, Artificial
  Synthetic oligonucleotide
gcatcgggtgaagtagttggaaacttaaaatgttggccctatccaaaaccgtggg

SEQ ID NO: 503495 - DNA, 55 bp, Artificial
  Synthetic oligonucleotide
gcagttaatgctcttgcgaaatggagaggggtgtcggttggtgtaagtatggttg

SEQ ID NO: 503496 - DNA, 55 bp, Artificial
  Synthetic oligonucleotide
gcagtcgaagaaaatactcttgcgattgcgaaaattgcggaggcgacgtatgtgg

SEQ ID NO: 503497 - DNA, 55 bp, Artificial
  Synthetic oligonucleotide
gcaggttcgatcggagaattagcaagcctatttccttcctcgccaggaattagcg

SEQ ID NO: 503498 - DNA, 55 bp, Artificial
  Synthetic oligonucleotide
gcagggatcggagtagacgtattccgttttcctaatagtgcggaatcggcttcgg

SEQ ID NO: 503499 - DNA, 55 bp, Artificial
  Synthetic oligonucleotide
gcagccatgctttcgcgagaacaaaatcccgattgatgttcatggaaactcatcg

SEQ ID NO: 503500 - DNA, 55 bp, Artificial
  Synthetic oligonucleotide
gcagagtgccgcaagcgagatccttcttggagatcgcagtattgtccgtaacatt

SEQ ID NO: 503501 - DNA, 55 bp, Artificial
  Synthetic oligonucleotide
gcacttggttacggatacgtgattaagaagtctggaaatgcaatgactgagacgg

SEQ ID NO: 503502 - DNA, 55 bp, Artificial
  Synthetic oligonucleotide
gcacttcgttatccacgaaatcccaaagacctccgtaatatgtatttggtcccgg

SEQ ID NO: 503503 - DNA, 55 bp, Artificial
  Synthetic oligonucleotide
gcactcaccttttgggaacatggaatcaggaacgtgacttgcagttacggagtgg

SEQ ID NO: 503504 - DNA, 55 bp, Artificial
  Synthetic oligonucleotide
gcaccttcaaatgcacggccgattccgtcacgcgatggaaattgagtgaggcgcc

SEQ ID NO: 503505 - DNA, 55 bp, Artificial
  Synthetic oligonucleotide
gcacctgagcaggctttattttctaacgatcaattctccggggattttaacggag

SEQ ID NO: 503506 - DNA, 55 bp, Artificial
  Synthetic oligonucleotide
gcaattctattcggaattagcgtgagtcgatgcgacaagcattccaatcatgggc

SEQ ID NO: 503507 - DNA, 55 bp, Artificial
  Synthetic oligonucleotide
gcaatgccagcggtgggagaaacttacggaatgtcggtctattaatcctaacaag

SEQ ID NO: 503508 - DNA, 55 bp, Artificial
  Synthetic oligonucleotide
ctgaagaccaacaacctttggattctgtcaatggaaaggctttggaaagaaccat

SEQ ID NO: 503509 - DNA, 55 bp, Artificial
  Synthetic oligonucleotide
ctgaaatcggaaatgtgtcttcccacaaactgtacggaatcaggattatcgctat

SEQ ID NO: 503510 - DNA, 55 bp, Artificial
  Synthetic oligonucleotide
ctctttgacgagttaaatttccattcgcgtcatactgcatgacaaacgcgtcagt

SEQ ID NO: 503511 - DNA, 55 bp, Artificial
  Synthetic oligonucleotide
ctctatcgagtgggacaaggacccagagttaaaatcccgaaggatctaaaaccag

SEQ ID NO: 503512 - DNA, 55 bp, Artificial
  Synthetic oligonucleotide
ctcgcttccgttcttccgttttcaagaatctgcactcgggcagagcggatcagac

SEQ ID NO: 503513 - DNA, 55 bp, Artificial
  Synthetic oligonucleotide
ctcgctcgcgccgttaaccttcaagagcatgccataaagatcagagcttgtcgaa

SEQ ID NO: 503514 - DNA, 55 bp, Artificial
  Synthetic oligonucleotide
ctccgatttcggctaagattccgttcacgagttcggataagatgtcacgagtggg

SEQ ID NO: 503515 - DNA, 55 bp, Artificial
  Synthetic oligonucleotide
ctccgaaattcgagaggtggaaacattccggatcttttgtatttcgcggatttgg

SEQ ID NO: 503516 - DNA, 55 bp, Artificial
  Synthetic oligonucleotide
ctcccgcctcccgaaacgatataaaacttaccggtctttcagtttcactcataga

SEQ ID NO: 503517 - DNA, 55 bp, Artificial
  Synthetic oligonucleotide
ctcaggcacgttgctcccgtatggtgtcgcaacgagaaactcaacactctactag

SEQ ID NO: 503518 - DNA, 55 bp, Artificial
  Synthetic oligonucleotide
ctcagaagttcgcggatgctcttccgttttacagacaagttggtattctgcaaag

SEQ ID NO: 503519 - DNA, 55 bp, Artificial
  Synthetic oligonucleotide
ctatcgttaagtctttccaagttcccgcaacaccctgcacgtctgctgtccgcct

SEQ ID NO: 503520 - DNA, 55 bp, Artificial
  Synthetic oligonucleotide
ctacttcttattacgtaccattattctgcaagctgtcatgaatggggatgcgccg

SEQ ID NO: 503521 - DNA, 55 bp, Artificial
  Synthetic oligonucleotide
ctactctcactttgtattttaccgccacgtatgcgggagtcgtctcattactgac

SEQ ID NO: 503522 - DNA, 55 bp, Artificial
  Synthetic oligonucleotide
ctaccgagtgaaggtattgtgatgcgcactagtccagatacggatgcagaagtca

SEQ ID NO: 503523 - DNA, 55 bp, Artificial
  Synthetic oligonucleotide
ctacattccgaaaacggaagcagcggcgactctcttttatttagaggagagtgat

SEQ ID NO: 503524 - DNA, 55 bp, Artificial
  Synthetic oligonucleotide
ctacaaccataccttagactctacgatgaatgattgggttaagacagtggccact

SEQ ID NO: 503525 - DNA, 55 bp, Artificial
  Synthetic oligonucleotide
cgttttcggtaattacgatggaggcgtccacaaggaggccaaaatcgattgctcc

SEQ ID NO: 503526 - DNA, 55 bp, Artificial
  Synthetic oligonucleotide
cgttttcactccgctaaaacgagtagacgctgatccctgtttgatacaaggagtt

SEQ ID NO: 503527 - DNA, 55 bp, Artificial
  Synthetic oligonucleotide
cgtttgggtgatcgctccgttcggatctgtgactgaaatttccaatccggtcgca

SEQ ID NO: 503528 - DNA, 55 bp, Artificial
  Synthetic oligonucleotide
cgtttatgggatcagaatcctttcgtcaaaccggcgtttccactcggttagtgac

SEQ ID NO: 503529 - DNA, 55 bp, Artificial
  Synthetic oligonucleotide
cgttgaagtctccatataaattgactccttctggaatgatgatcgggaacgtttc

SEQ ID NO: 503530 - DNA, 55 bp, Artificial
  Synthetic oligonucleotide
tggtcgttatctcttagacaagaaaggtaatccgttgggtatgacgagcgcgatg

SEQ ID NO: 503531 - DNA, 55 bp, Artificial
  Synthetic oligonucleotide
cgtggacgactttggaatcggttattcttcgttaaaacaaattcatcgttatccg

SEQ ID NO: 503532 - DNA, 55 bp, Artificial
  Synthetic oligonucleotide
cgtgcttttgattacggcggtatttgtttggagattcaaaagccggataccgcaa

SEQ ID NO: 503533 - DNA, 55 bp, Artificial
  Synthetic oligonucleotide
cgtgagtggaacgaatgcgttcagctacaattcccaaacgggactatcgtctaac

SEQ ID NO: 503534 - DNA, 55 bp, Artificial
  Synthetic oligonucleotide
tgagatggtatgatcgactcaagggatttagatatgccgcacttcggtatttcaa

SEQ ID NO: 503535 - DNA, 55 bp, Artificial
  Synthetic oligonucleotide
gagcaaccgaatcccgtgcagaatccgaggtagcatctggtttggaaaacgggac

SEQ ID NO: 503536 - DNA, 55 bp, Artificial
  Synthetic oligonucleotide
tgcgggtgtgattcctgtgacgtattcgtatttgggttggaatatgatcacttac

SEQ ID NO: 503537 - DNA, 55 bp, Artificial
  Synthetic oligonucleotide
tgcttggttccaataacttacaagccctgcatatgcccctgacctggcaatcacg

SEQ ID NO: 503538 - DNA, 55 bp, Artificial
  Synthetic oligonucleotide
gactcgtactcgccaaattcgctaccgacctacttttgccagataactcaggact

SEQ ID NO: 503539 - DNA, 55 bp, Artificial
  Synthetic oligonucleotide
gacgggccaaaagatgtatgtggacctcgcttggagcccgacggttcgttgtgtg

SEQ ID NO: 503540 - DNA, 55 bp, Artificial
  Synthetic oligonucleotide
gaccttccatctgcgtttatatcgacgcagctcccgcccatcctgtgtgctctcc

SEQ ID NO: 503541 - DNA, 55 bp, Artificial
  Synthetic oligonucleotide
gacctctccggcccatctgtttgtagaactatccaacgcactggactacgatcgt

SEQ ID NO: 503542 - DNA, 55 bp, Artificial
  Synthetic oligonucleotide
gacactgcttatgaaaaccaaacggatgcgcagtttagggacaggacgcgaggaa

SEQ ID NO: 503543 - DNA, 55 bp, Artificial
  Synthetic oligonucleotide
gacaaccttttccgactggcacaggagaccccgactttgcgtcacgcacctacac

SEQ ID NO: 503544 - DNA, 55 bp, Artificial
  Synthetic oligonucleotide
gaatttgttttaacgaagaataaccgattccaaagtcgtccacggaaagtccgat

SEQ ID NO: 503545 - DNA, 55 bp, Artificial
  Synthetic oligonucleotide
gaattcgggaatttataaatcatatcagtcccctaagaaccctaaatagatccgc

SEQ ID NO: 503546 - DNA, 55 bp, Artificial
  Synthetic oligonucleotide
gaatggaatttggtcctagggctttaggaaatcgaagtatcattgcggatccccg

SEQ ID NO: 503547 - DNA, 55 bp, Artificial
  Synthetic oligonucleotide
gaatgcagtcttgagtaagcgttgtaggccctctgatacagcattggagaccccg

SEQ ID NO: 503548 - DNA, 55 bp, Artificial
  Synthetic oligonucleotide
gaagtggatcgtaaactgagagagctcggaaccggaatgcctggggcttcaagac

SEQ ID NO: 503549 - DNA, 55 bp, Artificial
  Synthetic oligonucleotide
gaagcgacggaaacgtatatggctgggcggcgaccaacggaggatttcaaaacgg

SEQ ID NO: 503550 - DNA, 55 bp, Artificial
  Synthetic oligonucleotide
gaagaaattacgaacgttaagtttgtggggtaaccgacttaaaacactccctaac

SEQ ID NO: 503551 - DNA, 55 bp, Artificial
  Synthetic oligonucleotide
gaactctttctttcaaatctccgcaaaagttccgattgaaatttgatacgcgctg

SEQ ID NO: 503552 - DNA, 55 bp, Artificial
  Synthetic oligonucleotide
gaacaagagccaaggcggcgggtgggaattatgatggcggctcgatagggttcgc

SEQ ID NO: 503553 - DNA, 55 bp, Artificial
  Synthetic oligonucleotide
gaaagacgtaatagtctgagagttcccgatgcggaatttcgtccttattaatctc

SEQ ID NO: 503554 - DNA, 55 bp, Artificial
  Synthetic oligonucleotide
ctttcattcatccgcttcgcaggggcgagacggcgcgtaaatgaaagtggtgatc

SEQ ID NO: 503555 - DNA, 55 bp, Artificial
  Synthetic oligonucleotide
tggagaacttcataaggcagcagaacggaatggaattcctcttgggacgcatgtc

SEQ ID NO: 503556 - DNA, 55 bp, Artificial
  Synthetic oligonucleotide
cttgctttgacttaatagcctctttcaggtcggtattgatctttgcctgtaggga

SEQ ID NO: 503557 - DNA, 55 bp, Artificial
  Synthetic oligonucleotide
cttgagatgcgtcggttatattcgtatgtctggcaatcgattgaagcccttcgag

SEQ ID NO: 503558 - DNA, 55 bp, Artificial
  Synthetic oligonucleotide
cttcgatcccggatgtatgatcggaataccccacctttattttaaaagcgtctgc

SEQ ID NO: 503559 - DNA, 55 bp, Artificial
  Synthetic oligonucleotide
cttcacagctttacaacgcagcgaccggactctatcaaacgtaccaatattcggc

SEQ ID NO: 503560 - DNA, 55 bp, Artificial
  Synthetic oligonucleotide
ctgggtggagggcgctacaagcgatacggaagccccaccgactccatctgtatct

SEQ ID NO: 503561 - DNA, 55 bp, Artificial
  Synthetic oligonucleotide
gtcccaccggacttaaagcgaagggtaatgttgcatatcgttcccgtacgtcaca

SEQ ID NO: 503562 - DNA, 55 bp, Artificial
  Synthetic oligonucleotide
gtccacgtttcggaggacgttttcaggaagtccttccgattgtttgtaagcgctc

SEQ ID NO: 503563 - DNA, 55 bp, Artificial
  Synthetic oligonucleotide
gtcatcgaatttcacggcgctttaccctactcgtcattatcggcatcggaggatg

SEQ ID NO: 503564 - DNA, 55 bp, Artificial
  Synthetic oligonucleotide
gtatgttttcgtgactcttgttcggtctcgattttgcgttaaggaaaccgcttgc

SEQ ID NO: 503565 - DNA, 55 bp, Artificial
  Synthetic oligonucleotide
gtatccccgattggaattgcaggtagttcggaagcatacgattcctgtgcgaacg

SEQ ID NO: 503566 - DNA, 55 bp, Artificial
  Synthetic oligonucleotide
gtagctatagttcactcctgcattcacgactcctgtgtcgcttgccgatacgttc

SEQ ID NO: 503567 - DNA, 55 bp, Artificial
  Synthetic oligonucleotide
gtacaggtccgcatgatcaaatgtgtctattcccgattccagacaaacttctatc

SEQ ID NO: 503568 - DNA, 55 bp, Artificial
  Synthetic oligonucleotide
gtaataagtcccctacttgccaatatctatcttcacgtcttcgatatgtattggc

SEQ ID NO: 503569 - DNA, 55 bp, Artificial
  Synthetic oligonucleotide
gtaacttggcgggaagtttccagaccaatagacatatcggcaagcatatgttgaa

SEQ ID NO: 503570 - DNA, 55 bp, Artificial
  Synthetic oligonucleotide
gtaacatgcacctgccgctttcactcgaacattgatttacggacgtactggtcgg

SEQ ID NO: 503571 - DNA, 55 bp, Artificial
  Synthetic oligonucleotide
ggttcttacaagcggattctgttgtaatgccgactaacgtgaatggtttaaaccg

SEQ ID NO: 503572 - DNA, 55 bp, Artificial
  Synthetic oligonucleotide
ggttcctccatataaataccgagtggaagaattctataattgtccagtattcgtc

SEQ ID NO: 503573 - DNA, 55 bp, Artificial
  Synthetic oligonucleotide
ggtgggtaatcgatgcggacatccaaaagtatttcgacacaattgatcatgagct

SEQ ID NO: 503574 - DNA, 55 bp, Artificial
  Synthetic oligonucleotide
ggtgatgagctgtatttcagtgcaaatggcaaagtcgcgagggctcaattgactt

SEQ ID NO: 503575 - DNA, 55 bp, Artificial
  Synthetic oligonucleotide
ggtcgacctgcgatctctccaaagaaagtaatttcggctcttttctattccatct

SEQ ID NO: 503576 - DNA, 55 bp, Artificial
  Synthetic oligonucleotide
ggtcccgggatccgaggagaatattcttctaaccaatacgtgaaactttaggatc

SEQ ID NO: 503577 - DNA, 55 bp, Artificial
  Synthetic oligonucleotide
ggtcatgttcatacaaattcttcccagaattttcgcgcgcttgccccgtaccagc

SEQ ID NO: 503578 - DNA, 55 bp, Artificial
  Synthetic oligonucleotide
tattcctagaattcacaagtgcgccggttagtgtgtaatctgcacagccatgtcc

SEQ ID NO: 503579 - DNA, 55 bp, Artificial
  Synthetic oligonucleotide
gggtcggtgttttaggaagcaactcagctaaagcgaagcgacagcttacaagcgt

SEQ ID NO: 503580 - DNA, 55 bp, Artificial
  Synthetic oligonucleotide
gggtcggatggatcctttcctgcgcctctaccggacgcgaggaagtaatattagg

SEQ ID NO: 503581 - DNA, 55 bp, Artificial
  Synthetic oligonucleotide
gggtcacggccgtatatcctaacaataacattgtcttaccatccgatgacttcgt

SEQ ID NO: 503582 - DNA, 55 bp, Artificial
  Synthetic oligonucleotide
gggtatacggaagtttagttcctctatctctaaattacaggagccctgcccaagg

SEQ ID NO: 503583 - DNA, 55 bp, Artificial
  Synthetic oligonucleotide
tcacactcataaaattctgcaattacgtgcttacccaatgcgttcatctactgcc

SEQ ID NO: 503584 - DNA, 55 bp, Artificial
  Synthetic oligonucleotide
ggggcgattcttatgtaagtatggctcctggttttactatgaccatggacagact

SEQ ID NO: 503585 - DNA, 55 bp, Artificial
  Synthetic oligonucleotide
tcactgttagacgatagtcccgtttgggaattgtagctgaacgcattcgttccgc

SEQ ID NO: 503586 - DNA, 55 bp, Artificial
  Synthetic oligonucleotide
tccaagcctacatttccactaacgcttcctgttttactgtcgtaactgaggcccg

SEQ ID NO: 503587 - DNA, 55 bp, Artificial
  Synthetic oligonucleotide
gggatcattaaagtggaagacattttgatagttaaggatggagctaccaccggaa

SEQ ID NO: 503588 - DNA, 55 bp, Artificial
  Synthetic oligonucleotide
taggggctaaaacgcttcgaattggcgaacgctaagagaaaattgcaagattaac

SEQ ID NO: 503589 - DNA, 55 bp, Artificial
  Synthetic oligonucleotide
tagcagccggattcgccccgactttcaaccgtctaactcacgttatattaggatc

SEQ ID NO: 503590 - DNA, 55 bp, Artificial
  Synthetic oligonucleotide
tagaaacaaaacatcctgtcccataacacgatttaggtgtattccccgagaacgg

SEQ ID NO: 503591 - DNA, 55 bp, Artificial
  Synthetic oligonucleotide
tacccgtaaacatgtcaattacgccaagggcgaccgaggcaaagtgtatccgtgc

SEQ ID NO: 503592 - DNA, 55 bp, Artificial
  Synthetic oligonucleotide
taccagccgtcggaacctatctcactcttaaatttacgaaactgagcgctcgttt

SEQ ID NO: 503593 - DNA, 55 bp, Artificial
  Synthetic oligonucleotide
tatagaattaccttccgaatctctcaaggcttgaccaagttgtgcaaaggattgt

SEQ ID NO: 503594 - DNA, 55 bp, Artificial
  Synthetic oligonucleotide
taacttattatgtagtccgctcgatgcaagacctggggcaaaatacggcgcaccg

SEQ ID NO: 503595 - DNA, 55 bp, Artificial
  Synthetic oligonucleotide
tatggatcggcagccaggtccgaaacatagaatcgccttcgcattttgttatacc

SEQ ID NO: 503596 - DNA, 55 bp, Artificial
  Synthetic oligonucleotide
taaattacgaagatccctgctgagtcctgtgcacttctccaccattcctataaag

SEQ ID NO: 503597 - DNA, 55 bp, Artificial
  Synthetic oligonucleotide
gtttgcagccatgctttcccgcgaacaaaatcccgattgatgttcatggaaactc

SEQ ID NO: 503598 - DNA, 55 bp, Artificial
  Synthetic oligonucleotide
gtttgagattgcaaatctaccggcgttcagacgttgaaagtcctgaccgaatttc

SEQ ID NO: 503599 - DNA, 55 bp, Artificial
  Synthetic oligonucleotide
gtttcggaggtgtcaggcagtagatgaacgcattgggtaagcacgtaattgcaga

SEQ ID NO: 503600 - DNA, 55 bp, Artificial
  Synthetic oligonucleotide
gtttccgcgatcccgggaatttcctgttctaggatacttttgaccgtatccgaag

SEQ ID NO: 503601 - DNA, 55 bp, Artificial
  Synthetic oligonucleotide
gttgttaggtggtaagtctaagtttcccgtcgggtcgatccttacagttagtaag

SEQ ID NO: 503602 - DNA, 55 bp, Artificial
  Synthetic oligonucleotide
gttcatacaaatacatccgtatccgtagtttacgtttgtgttgacccattccgac

SEQ ID NO: 503603 - DNA, 55 bp, Artificial
  Synthetic oligonucleotide
gtgtccgagttatttactccgcccacgattgcttctatctccgcgttgactcccg

SEQ ID NO: 503604 - DNA, 55 bp, Artificial
  Synthetic oligonucleotide
gtgcccgattatcgtggattgaacaattccgcgaagtacctggctacggaagccg

SEQ ID NO: 503605 - DNA, 55 bp, Artificial
  Synthetic oligonucleotide
gtgcatgtccgcacataaactgaacgtatccgtaatctctcccgaaaagatcctc

SEQ ID NO: 503606 - DNA, 55 bp, Artificial
  Synthetic oligonucleotide
gtgagcgatccagagcggatctgttgaacatgcatgctctatttctactgccgaa

SEQ ID NO: 503607 - DNA, 55 bp, Artificial
  Synthetic oligonucleotide
gtgactccgtattttaacagcgtttctttggaaactttcccagggtccattgtga

SEQ ID NO: 503608 - DNA, 55 bp, Artificial
  Synthetic oligonucleotide
gtgaaagcgtatgtgaaagacgagacggtaaacgcaatttcgaaagcgactggga

SEQ ID NO: 503609 - DNA, 55 bp, Artificial
  Synthetic oligonucleotide
gtcttaagccagggcggctcggtcagctttcagattgaacgcactgcgccacact

SEQ ID NO: 503610 - DNA, 55 bp, Artificial
  Synthetic oligonucleotide
gtctccggttatccggtcgaccaatttccgaagaactacgagaatctccttagtt

SEQ ID NO: 503611 - DNA, 55 bp, Artificial
  Synthetic oligonucleotide
gtcgcgtcatcgaatattggtcgattcagtaatgcgcgtctatggttttcctccc

SEQ ID NO: 503612 - DNA, 55 bp, Artificial
  Synthetic oligonucleotide
gtcgaatcttccctatggagcgaggaaagttcgaaaagcgatgaagctctgtaaa

SEQ ID NO: 503613 - DNA, 55 bp, Artificial
  Synthetic oligonucleotide
gtccttcatcactccgatcacgatcttattcgcaatccctcctgcaatttccgga

SEQ ID NO: 503614 - DNA, 55 bp, Artificial
  Synthetic oligonucleotide
gtcctcttcgtaggaatttatcggattgatcatcctggcctccccatgaagcacc

SEQ ID NO: 503615 - DNA, 55 bp, Artificial
  Synthetic oligonucleotide
gtccgatctcttgaggaagagatgtaagtctattttgatgtagatagatctgttc

SEQ ID NO: 503616 - DNA, 55 bp, Artificial
  Synthetic oligonucleotide
ggacctgaagttgtgactattgctgacgttccgcttctcccaaatcggttacatg

SEQ ID NO: 503617 - DNA, 55 bp, Artificial
  Synthetic oligonucleotide
ggaccgatcacctaactccggcttcgcacattcgctcggcttgcgagacgcgact

SEQ ID NO: 503618 - DNA, 55 bp, Artificial
  Synthetic oligonucleotide
ggacccacaatgaatataatagcgaggactcaccagtaattggtcatatcggtgc

SEQ ID NO: 503619 - DNA, 55 bp, Artificial
  Synthetic oligonucleotide
ggaatcattcccacccctaaaggaataccgcaacagattccgtttcaaaatctgg

SEQ ID NO: 503620 - DNA, 55 bp, Artificial
  Synthetic oligonucleotide
ggaagtcccgcaggattgaatagcattccaaatggtataagatcggcagtattct

SEQ ID NO: 503621 - DNA, 55 bp, Artificial
  Synthetic oligonucleotide
tcgacaggcagtatcgagccatgctcgacagagagggcagccgaaaccagaacgc

SEQ ID NO: 503622 - DNA, 55 bp, Artificial
  Synthetic oligonucleotide
tcgctttcgtaatcgaacgaaacggagcggattgtgtgcctatatttgtgacatc

SEQ ID NO: 503623 - DNA, 55 bp, Artificial
  Synthetic oligonucleotide
gcttttgataagcgaatttgttcgtcgatcgcgacttccgaatctattccttccg

SEQ ID NO: 503624 - DNA, 55 bp, Artificial
  Synthetic oligonucleotide
gcttgcgagtagggaagacaacgaatttaaacccggaagcttaaactggtggtcg

SEQ ID NO: 503625 - DNA, 55 bp, Artificial
  Synthetic oligonucleotide
gcttccgcttgcgctcggttctaaaattgcggtcaactctaagtcaggatcgttg

SEQ ID NO: 503626 - DNA, 55 bp, Artificial
  Synthetic oligonucleotide
gctctgcgcctgagtttcttcgtaagcgacctaaacaccgcctcataggaaggtg

SEQ ID NO: 503627 - DNA, 55 bp, Artificial
  Synthetic oligonucleotide
gctctgcaccagagcatctcaggagcgggctaacatacgaaagattttgcacggc

SEQ ID NO: 503628 - DNA, 55 bp, Artificial
  Synthetic oligonucleotide
gctctattcttcaacaacgactagtatggacggaatcgtaggaatagccgccact

SEQ ID NO: 503629 - DNA, 55 bp, Artificial
  Synthetic oligonucleotide
gcgttgttccttccgacttttgagcagtaacagcttccgtctcacccgcaacagc

SEQ ID NO: 503630 - DNA, 55 bp, Artificial
  Synthetic oligonucleotide
gcgttgaatgaaggcggtggcgatttatatcaggtaatgggatttattagcggac

SEQ ID NO: 503631 - DNA, 55 bp, Artificial
  Synthetic oligonucleotide
gcgttcagctacaattcccaaacaggactgtcgtctaacagtgatttcttgtccc

SEQ ID NO: 503632 - DNA, 55 bp, Artificial
  Synthetic oligonucleotide
tcgtcctcttctaatcttgccgattgaacaagtccattttccgaacgaactcggg

SEQ ID NO: 503633 - DNA, 55 bp, Artificial
  Synthetic oligonucleotide
gcgtcctgggatctcaatcctacgacgactactgcctgaatggaaagtttcgata

SEQ ID NO: 503634 - DNA, 55 bp, Artificial
  Synthetic oligonucleotide
gcggttggatgagtaagatcgcctcccgtttctgttccaggcttacccactcttg

SEQ ID NO: 503635 - DNA, 55 bp, Artificial
  Synthetic oligonucleotide
gcggtgaacattcttctttcctggcgtccgatccattccgtggtcaacggatttc

SEQ ID NO: 503636 - DNA, 55 bp, Artificial
  Synthetic oligonucleotide
gcggcttcttaccttgcgttggggagaatttcgagtaaaagggtggtcccgatct

SEQ ID NO: 503637 - DNA, 55 bp, Artificial
  Synthetic oligonucleotide
gcggagacagcgaagttgttactttcggcgctcattgatttcttaggaaagtcag

SEQ ID NO: 503638 - DNA, 55 bp, Artificial
  Synthetic oligonucleotide
gcgccaggcacttacgacgcttcgattggagaaacgttcccgatcatcattccag

SEQ ID NO: 503639 - DNA, 55 bp, Artificial
  Synthetic oligonucleotide
gcgcatagactctgctacactctgcatgtatccaagtatagtgtccatcaaggcg

SEQ ID NO: 503640 - DNA, 55 bp, Artificial
  Synthetic oligonucleotide
tcgtgaagtctgtaaacgccggaaagatcgatcactttgtgacccgcgtccaaaa

SEQ ID NO: 503641 - DNA, 55 bp, Artificial
  Synthetic oligonucleotide
gcgagtgcgattcgatttgcggaaggactccccgcaagagacgaccaaaagtccc

SEQ ID NO: 503642 - DNA, 55 bp, Artificial
  Synthetic oligonucleotide
gcgaagcaggtctaactccgtattcggaagcagaaatagtatccaacattgaatc

SEQ ID NO: 503643 - DNA, 55 bp, Artificial
  Synthetic oligonucleotide
gggatattctcgaatcccagatgtcagcttaaacgggttaaagggtcaaggcctc

SEQ ID NO: 503644 - DNA, 55 bp, Artificial
  Synthetic oligonucleotide
gggagcttagaaccggaatgtctaggaacatatccatccgaaacacattcgatcc

SEQ ID NO: 503645 - DNA, 55 bp, Artificial
  Synthetic oligonucleotide
gggaatagtacgagattcgagttcgaacggagtggaagggatagcggatcttaga

SEQ ID NO: 503646 - DNA, 55 bp, Artificial
  Synthetic oligonucleotide
ggcttcgttcgtattagatgcgttagttgtatttgaccaaagttgtacatctccc

SEQ ID NO: 503647 - DNA, 55 bp, Artificial
  Synthetic oligonucleotide
ggctcttttctattccatcttaatcggcaatctttcgatgagagaactctgcagg

SEQ ID NO: 503648 - DNA, 55 bp, Artificial
  Synthetic oligonucleotide
ggctaaaccataccccttttgccagcgtgcaagtcggcgttcgaaagtcggaggc

SEQ ID NO: 503649 - DNA, 55 bp, Artificial
  Synthetic oligonucleotide
ggcggatccggaagtatgggccaacgttttacacaagcggttcgctcggaggcac

SEQ ID NO: 503650 - DNA, 55 bp, Artificial
  Synthetic oligonucleotide
ggcggataacggatcccagacctccgttttcgaaggcaaggagacgttaggatcc

SEQ ID NO: 503651 - DNA, 55 bp, Artificial
  Synthetic oligonucleotide
ggcggaggaaagactgtccttatctcggacgaaattcacgggaaggtatccgtag

SEQ ID NO: 503652 - DNA, 55 bp, Artificial
  Synthetic oligonucleotide
ggcgatttcaaaattcccatctcttgcagccaaaattaaaggagtctgaccctct

SEQ ID NO: 503653 - DNA, 55 bp, Artificial
  Synthetic oligonucleotide
ggcgaacggaagattcctgacggagctaaccggaaaggaacctacgaagttaccg

SEQ ID NO: 503654 - DNA, 55 bp, Artificial
  Synthetic oligonucleotide
ggccttttccgagtccctttcccacgtctttccaggctttgccgtaggaccgaac

SEQ ID NO: 503655 - DNA, 55 bp, Artificial
  Synthetic oligonucleotide
ggcccgcgttaaatccacctttcgttagtcctaaatcaaccgtcgttccgcctct

SEQ ID NO: 503656 - DNA, 55 bp, Artificial
  Synthetic oligonucleotide
ggccacattcgcgtgcccctaccagacagtgttcgcgtcgtcatttatgcctcgc

SEQ ID NO: 503657 - DNA, 55 bp, Artificial
  Synthetic oligonucleotide
ggcataactcaggaagcgatggacgaaggtgactacgcgatttcttaccggacag

SEQ ID NO: 503658 - DNA, 55 bp, Artificial
  Synthetic oligonucleotide
ggattggttagttgatcaaatgtcgaagggttatcgaagatttccaggctgtggt

SEQ ID NO: 503659 - DNA, 55 bp, Artificial
  Synthetic oligonucleotide
ggattccggaagtttatccgactcccgagacgtctccgattcaacctcagtatcc

SEQ ID NO: 503660 - DNA, 55 bp, Artificial
  Synthetic oligonucleotide
ggatgagttacagagtatatcttcgtaaagaaggccagacaggaaagttgacatt

SEQ ID NO: 503661 - DNA, 55 bp, Artificial
  Synthetic oligonucleotide
ggatcttatgattccagatgtagacggagtagacgtattacggatgttatccgga

SEQ ID NO: 503662 - DNA, 55 bp, Artificial
  Synthetic oligonucleotide
ggatctcgtatctatacctggatctgtgcgattgcaagcgtattagccgaaagcg

SEQ ID NO: 503663 - DNA, 55 bp, Artificial
  Synthetic oligonucleotide
ggataggttacagaagggaggttggggatcaactttcttacgacaaagaaaactc

SEQ ID NO: 503664 - DNA, 55 bp, Artificial
  Synthetic oligonucleotide
tcgaaagacgatacaacaaacctattgcttttacttgtagccgcgtccaagtccc

SEQ ID NO: 503665 - DNA, 55 bp, Artificial
  Synthetic oligonucleotide
ggagtcaataacaacgcactacagactggcagttacgctcggccgacaatgacag

SEQ ID NO: 503666 - DNA, 55 bp, Artificial
  Synthetic oligonucleotide
ggagcttgccggtgatttgcttcgaaagtccattcgtgcgaaaggcttaatggga

SEQ ID NO: 503667 - DNA, 55 bp, Artificial
  Synthetic oligonucleotide
ggagctaaacccgggtaacagaaaagtgtatttgcgacctggaatcacggattta

SEQ ID NO: 503668 - DNA, 55 bp, Artificial
  Synthetic oligonucleotide
ggagcggcgctttcagggagtatagcggattcgtttggaaggagtgagagttaca

SEQ ID NO: 503669 - DNA, 55 bp, Artificial
  Synthetic oligonucleotide
ggagagggaaatcgttcgagatagagacgtcgttcgtccggcccgagtccttgcc

SEQ ID NO: 503670 - DNA, 55 bp, Artificial
  Synthetic oligonucleotide
ggacgaaattccgcatcgggaactctcagactattacgtctttcacaatgctctt

SEQ ID NO: 503671 - DNA, 55 bp, Artificial
  Synthetic oligonucleotide
cagattagtaattcggaaacaaatacttcacagctttacaacgcagcgaccggac

SEQ ID NO: 503672 - DNA, 55 bp, Artificial
  Synthetic oligonucleotide
ttaatctcacagcggattggaaactcgtttcgggaagaaatctagacgcttcggt

SEQ ID NO: 503673 - DNA, 55 bp, Artificial
  Synthetic oligonucleotide
cagacgcaacccgagatccgagactcttggaattcgtatcaaatcacctcaaagg

SEQ ID NO: 503674 - DNA, 55 bp, Artificial
  Synthetic oligonucleotide
cagaatcgttccgtcataaaacttccaaaactttccgagcagtccctcacgacga

SEQ ID NO: 503675 - DNA, 55 bp, Artificial
  Synthetic oligonucleotide
cagaaatttccatgctctttaccgacccacagtcagggcctcagacaccagatta

SEQ ID NO: 503676 - DNA, 55 bp, Artificial
  Synthetic oligonucleotide
cacttttgaattcttattcgggaattgcagcctccgccaccggatttgtcctcgg

SEQ ID NO: 503677 - DNA, 55 bp, Artificial
  Synthetic oligonucleotide
cacttcctagattgtctacataaccccatcgaagtcctccaaataaccaagttcc

SEQ ID NO: 503678 - DNA, 55 bp, Artificial
  Synthetic oligonucleotide
cactcgccggtgacagaagcgaattagaatttcagaatatgagtgaactcaaagg

SEQ ID NO: 503679 - DNA, 55 bp, Artificial
  Synthetic oligonucleotide
cactccccttgttccatccggaggataactactccattttagaaaatcctgcacc

SEQ ID NO: 503680 - DNA, 55 bp, Artificial
  Synthetic oligonucleotide
cacggtttaactggtgggaatagcgaacatctacgaaatgttgtcattgtaacgt

SEQ ID NO: 503681 - DNA, 55 bp, Artificial
  Synthetic oligonucleotide
cacggacaaaacgatcccgagcaaccagatgaagttcacctgaccttcgagactg

SEQ ID NO: 503682 - DNA, 55 bp, Artificial
  Synthetic oligonucleotide
caccttttgaaatgcgcatgttctagccgacacggttacaatggatgtcacggcg

SEQ ID NO: 503683 - DNA, 55 bp, Artificial
  Synthetic oligonucleotide
ttacactgcattcgtttcgcaaggtgcaaatatttctcatatcctgcgcttgacc

SEQ ID NO: 503684 - DNA, 55 bp, Artificial
  Synthetic oligonucleotide
caccgaacaagaccttgcgttcagcatttgcccggtcatcaatgcagcaggccgc

SEQ ID NO: 503685 - DNA, 55 bp, Artificial
  Synthetic oligonucleotide
ttactttgaacgtcaatagaagcgagacactttagtttcaagaatggttgagccc

SEQ ID NO: 503686 - DNA, 55 bp, Artificial
  Synthetic oligonucleotide
cacccatcaggaagctcaaataaatcgacggatatgcaaaattaccgtcttctaa

SEQ ID NO: 503687 - DNA, 55 bp, Artificial
  Synthetic oligonucleotide
cacatagctatcacgatcataagcgttaggttgcatatcagcttgtatgcacgag

SEQ ID NO: 503688 - DNA, 55 bp, Artificial
  Synthetic oligonucleotide
ttagaagggattggtaagatttaggggttagacttgaggaaagactcataggcgg

SEQ ID NO: 503689 - DNA, 55 bp, Artificial
  Synthetic oligonucleotide
caattgtgtcgaaatacttttggatgtccgcatcgattacccaccaattacgaac

SEQ ID NO: 503690 - DNA, 55 bp, Artificial
  Synthetic oligonucleotide
caatacggactcagagcggaaatttattatggcgcgtagttccaattctaaggac

SEQ ID NO: 503691 - DNA, 55 bp, Artificial
  Synthetic oligonucleotide
caaggaccagatcgggaaaatgggagccctgaagacaatccatcaactgacagga

SEQ ID NO: 503692 - DNA, 55 bp, Artificial
  Synthetic oligonucleotide
ttatttcgcgagtataattccatcggtaaggctttagcttatgcgtctaccttcg

SEQ ID NO: 503693 - DNA, 55 bp, Artificial
  Synthetic oligonucleotide
caacctaatctaggaaaggacctctacttcagttaagctatagcatggaggtaag

SEQ ID NO: 503694 - DNA, 55 bp, Artificial
  Synthetic oligonucleotide
caaccgctgcgtctacagaagaaatgtccgccaccgtagaggaacttgcatccgg

SEQ ID NO: 503695 - DNA, 55 bp, Artificial
  Synthetic oligonucleotide
caacaatagcccggtgtcgaactgagcttcgtagattttcggatttctactgtag

SEQ ID NO: 503696 - DNA, 55 bp, Artificial
  Synthetic oligonucleotide
caaagtcaaacttgtctcgactttgagccatcgcaatccgatctttcacaggtgt

SEQ ID NO: 503697 - DNA, 55 bp, Artificial
  Synthetic oligonucleotide
cccgaggtgcgtgggtaacggaagtgtacggataccaaatggccggaattgaagg

SEQ ID NO: 503698 - DNA, 55 bp, Artificial
  Synthetic oligonucleotide
ccccggtagctcagtccatccaacgatcatgttcccaaacctgagcaacgatcgg

SEQ ID NO: 503699 - DNA, 55 bp, Artificial
  Synthetic oligonucleotide
ccccgcctcagcgaaaggaatattcccgcaagctctacaaagactttagcccaga

SEQ ID NO: 503700 - DNA, 55 bp, Artificial
  Synthetic oligonucleotide
cccaatccttatgaaacctttcctgttcggtcacgaactccggacgatcgtcgca

SEQ ID NO: 503701 - DNA, 55 bp, Artificial
  Synthetic oligonucleotide
cccaaatcggtagaattcgaaaacacctcatctattatcgaggagacctctctac

SEQ ID NO: 503702 - DNA, 55 bp, Artificial
  Synthetic oligonucleotide
cccaaacgaaacctgcgatttggcttaagagcgtgtcccaaaacctggttgtacc

SEQ ID NO: 503703 - DNA, 55 bp, Artificial
  Synthetic oligonucleotide
ccattccaatcggataagtcctcactaattcgtttgcgacgtaatcgtaaccacc

SEQ ID NO: 503704 - DNA, 55 bp, Artificial
  Synthetic oligonucleotide
ccataagatgcagtaattactattttggggcgacaatcatcaaggcgaacggcca

SEQ ID NO: 503705 - DNA, 55 bp, Artificial
  Synthetic oligonucleotide
ccagagccgtcaattgcttttgtgtccgagttgttgccggcgcccgatagaatgc

SEQ ID NO: 503706 - DNA, 55 bp, Artificial
  Synthetic oligonucleotide
ccagacaagcaatgctgagcggggtcctatcggtttccaaagtaacggatccggg

SEQ ID NO: 503707 - DNA, 55 bp, Artificial
  Synthetic oligonucleotide
ccagaacatattattgtcagagacgcggaacacattttaaacggacctgaacctg

SEQ ID NO: 503708 - DNA, 55 bp, Artificial
  Synthetic oligonucleotide
ccactaaacccgttccctaaacttctatctcgttttatcaacatagttcccctcg

SEQ ID NO: 503709 - DNA, 55 bp, Artificial
  Synthetic oligonucleotide
ccacggaaagaactcgtgtgatcgcagtcacggtatccccgctgaaagaaggttg

SEQ ID NO: 503710 - DNA, 55 bp, Artificial
  Synthetic oligonucleotide
ccacgagcgttcttgggtgagcgggccgttgctttgaactgagattctagatgaa

SEQ ID NO: 503711 - DNA, 55 bp, Artificial
  Synthetic oligonucleotide
ccaatttgagcatagaagtgcgcgatccgtgtttgattcctgattccgctctact

SEQ ID NO: 503712 - DNA, 55 bp, Artificial
  Synthetic oligonucleotide
ccaatttctcctggaagtaaatagtggacgactatctctaaaggacgggagtacg

SEQ ID NO: 503713 - DNA, 55 bp, Artificial
  Synthetic oligonucleotide
ccaagtttcgaaaggtacattcgaggatctattttcccagacggtatttcttgga

SEQ ID NO: 503714 - DNA, 55 bp, Artificial
  Synthetic oligonucleotide
ccaaccaaacgaagtccgaatgaatgtaacatcagacacccaaattcggttctgc

SEQ ID NO: 503715 - DNA, 55 bp, Artificial
  Synthetic oligonucleotide
ccaaatcgccggatgttatcaatctacgatcccaaaagtggaattttctagaaag

SEQ ID NO: 503716 - DNA, 55 bp, Artificial
  Synthetic oligonucleotide
ccaaaggaccaggttcttccatcactcggatgtttgagacccttacaccaggggc

SEQ ID NO: 503717 - DNA, 55 bp, Artificial
  Synthetic oligonucleotide
catttcttcgacgactcgggtaagtcagaaagcctcgcgaaatccgcaaacgacg

SEQ ID NO: 503718 - DNA, 55 bp, Artificial
  Synthetic oligonucleotide
cattcgtagtcttgtgtccggaaacttgagttcgttggcataggttcacaaccgc

SEQ ID NO: 503719 - DNA, 55 bp, Artificial
  Synthetic oligonucleotide
cataaatcgtaagttcaccctcgatcgtaactttcatactggaaacaatgtccgg

SEQ ID NO: 503720 - DNA, 55 bp, Artificial
  Synthetic oligonucleotide
cagttgcgatacgcagaatccgcatacaactttgtcccttcctttcgattcttta

SEQ ID NO: 503721 - DNA, 55 bp, Artificial
  Synthetic oligonucleotide
cagggcgtgaatttggcttacaactaagcgctaagatcgtagatagaataaacgt

SEQ ID NO: 503722 - DNA, 55 bp, Artificial
  Synthetic oligonucleotide
caggcggagcggtaacagtaggactcagctactctgcagaaaacggatttggtgc

SEQ ID NO: 503723 - DNA, 55 bp, Artificial
  Synthetic oligonucleotide
caggatctgcaaaatgaagcttctcgaatttctcttaatagtagcgcggctctac

SEQ ID NO: 503724 - DNA, 55 bp, Artificial
  Synthetic oligonucleotide
aggatgttccgctgtgaaactctgcggggtggtgttgcagtcgttcgccgtagtg

SEQ ID NO: 503725 - DNA, 55 bp, Artificial
  Synthetic oligonucleotide
agcttcgcggtcaattttggagtcaaagcgacgccgcagtcaaagagcgatatgg

SEQ ID NO: 503726 - DNA, 55 bp, Artificial
  Synthetic oligonucleotide
agaggttatcgcgaagatgcgcccagcttgaatgattatcgccggtccagagcgc

SEQ ID NO: 503727 - DNA, 55 bp, Artificial
  Synthetic oligonucleotide
agaattgtaaggtggcgttagccggcatcggtttactataaaagtaaccctgtcc

SEQ ID NO: 503728 - DNA, 55 bp, Artificial
  Synthetic oligonucleotide
acttctcccatgcagttgggtgagatcgttgtatatgcaaatagtacgtctatcc

SEQ ID NO: 503729 - DNA, 55 bp, Artificial
  Synthetic oligonucleotide
actcgaaaacgaatgttatgaggaagaaagtgtggattctgaagagaacctctcg

SEQ ID NO: 503730 - DNA, 55 bp, Artificial
  Synthetic oligonucleotide
acgtccgggtaaattgttcacaaatttgatggccaaagagacagacaaaccgccc

SEQ ID NO: 503731 - DNA, 55 bp, Artificial
  Synthetic oligonucleotide
acggtcgaccatctcaattttgattcctcgagttagggcatcccgaatgatgatc

SEQ ID NO: 503732 - DNA, 55 bp, Artificial
  Synthetic oligonucleotide
tttggtcgcgagttcccaaagagcggcggttgcataaaagtccgtgttccgcttg

SEQ ID NO: 503733 - DNA, 55 bp, Artificial
  Synthetic oligonucleotide
acctccaagagatcttcgacatctttgacgccggtgtatggtcgacccgcatttt

SEQ ID NO: 503734 - DNA, 55 bp, Artificial
  Synthetic oligonucleotide
accggttaggttattggaagagttgtaactcctttgattttgcaccacaccggcc

SEQ ID NO: 503735 - DNA, 55 bp, Artificial
  Synthetic oligonucleotide
accgatttctatatactattcgaatgcatgaaaatagcgccagaaagtatgggcg

SEQ ID NO: 503736 - DNA, 55 bp, Artificial
  Synthetic oligonucleotide
tttgtagcggaatccgttagatgttgcctctccgatccagaactttccgtccgtc

SEQ ID NO: 503737 - DNA, 55 bp, Artificial
  Synthetic oligonucleotide
acagttttgagggtatcttgtgtcactccgattgctacttgatcgcctcccatgc

SEQ ID NO: 503738 - DNA, 55 bp, Artificial
  Synthetic oligonucleotide
ttttaagtttcggcactgggaaagcggagacagatcttggatcgagttattcgat

SEQ ID NO: 503739 - DNA, 55 bp, Artificial
  Synthetic oligonucleotide
aatattatcagtaggattggaactaattacttgccatgcattttccggggatgct

SEQ ID NO: 503740 - DNA, 55 bp, Artificial
  Synthetic oligonucleotide
aagctgtgaagtgtttgtttccgaattactaatctgtgtttccaattggttcgct

SEQ ID NO: 503741 - DNA, 55 bp, Artificial
  Synthetic oligonucleotide
aagctgcaaatagttttacacgtggaatcaccgtttagaagcgaaattcccgaca

SEQ ID NO: 503742 - DNA, 55 bp, Artificial
  Synthetic oligonucleotide
aagcgaacagtcgactcaaatctcatggcgttctgtatataggatcggtaaaagc

SEQ ID NO: 503743 - DNA, 55 bp, Artificial
  Synthetic oligonucleotide
ttttcctatggatcggcataactcagcggctgcgtctaacgcgggatttgcgctc

SEQ ID NO: 503744 - DNA, 55 bp, Artificial
  Synthetic oligonucleotide
aacgtaaggactcgaacgcgagaaagcgtgaggtccggtagtgccccataggaag

SEQ ID NO: 503745 - DNA, 55 bp, Artificial
  Synthetic oligonucleotide
aaattactcccgctcatccgagaggtgatcgatatataacagggtaaacgcggct

SEQ ID NO: 503746 - DNA, 55 bp, Artificial
  Synthetic oligonucleotide
aaatctcatccgtaaaatcgcgagcgaagtcgaaaacgaattggtctcaacgaac

SEQ ID NO: 503747 - DNA, 55 bp, Artificial
  Synthetic oligonucleotide
aaacttgccgaaagacagggatggaaaataggctacgcgcttccgtctaaacccc

SEQ ID NO: 503748 - DNA, 55 bp, Artificial
  Synthetic oligonucleotide
aaactgtaaaaccattcacctgaatccgtatgcctgccgttatataagattcttc

SEQ ID NO: 503749 - DNA, 55 bp, Artificial
  Synthetic oligonucleotide
aaactgacttcggatcttgtcgtagacttgaactggaacctttaaataaccggcc

SEQ ID NO: 503750 - DNA, 55 bp, Artificial
  Synthetic oligonucleotide
aaaatggagtagttatcctccggatggaacaaggggagtgggttattcgaatgcg

SEQ ID NO: 503751 - DNA, 55 bp, Artificial
  Synthetic oligonucleotide
caaagaatcgtagaggttgaacaaggaaaagaacgggcaagttacggagatcggg

SEQ ID NO: 503752 - DNA, 55 bp, Artificial
  Synthetic oligonucleotide
caaaccaacgtaataagctgcttgtttaccggaggagaatcgtttacaatctccc

SEQ ID NO: 503753 - DNA, 55 bp, Artificial
  Synthetic oligonucleotide
atttggaacatccggaatctttagcggagttggcacgggaaggatttgcagaggg

SEQ ID NO: 503754 - DNA, 55 bp, Artificial
  Synthetic oligonucleotide
atttcgagtaaacataaactggcttcttgctggggagggagaaatgttcatccct

SEQ ID NO: 503755 - DNA, 55 bp, Artificial
  Synthetic oligonucleotide
attggcctaaagatctatattcgaggacctaccgaaaaggctccatgcctgaccc

SEQ ID NO: 503756 - DNA, 55 bp, Artificial
  Synthetic oligonucleotide
attcggaaacaaacacttcacagctttacaacgcagcgaccggactctatcaaac

SEQ ID NO: 503757 - DNA, 55 bp, Artificial
  Synthetic oligonucleotide
attcaccgcgtttgtgttagacgctgttacgttgttcgatgtgttttgcgaaagc

SEQ ID NO: 503758 - DNA, 55 bp, Artificial
  Synthetic oligonucleotide
ttcaggaggaaatgttgtaattccttgcgaactcaaatccaaactaagaaccttc

SEQ ID NO: 503759 - DNA, 55 bp, Artificial
  Synthetic oligonucleotide
attaggttatctcttgatagttgtgctcgctacgccatggatacaagagattcgg

SEQ ID NO: 503760 - DNA, 55 bp, Artificial
  Synthetic oligonucleotide
atgtggtggattctaaactcggttatgcatggtgtgatccttctcaaatgggaac

SEQ ID NO: 503761 - DNA, 55 bp, Artificial
  Synthetic oligonucleotide
ttcctgtaaccgtcttagaggtaggtccctgcgcagtttcccaagtgaagtccgt

SEQ ID NO: 503762 - DNA, 55 bp, Artificial
  Synthetic oligonucleotide
ttcggtggtagcgatttcacgctcgggcgttgataagcagtttatgactgcgaat

SEQ ID NO: 503763 - DNA, 55 bp, Artificial
  Synthetic oligonucleotide
atgagtgatgtccactcccacgaaccacttctcccaacccggaagcgaaaactcc

SEQ ID NO: 503764 - DNA, 55 bp, Artificial
  Synthetic oligonucleotide
atctgtcaaagctcctacggaattattgatcccttttagcagcacagcctggttc

SEQ ID NO: 503765 - DNA, 55 bp, Artificial
  Synthetic oligonucleotide
atcgatttaagaatccgctcgcgctaaaatacgcttcggtgcatcctcgttgtcc

SEQ ID NO: 503766 - DNA, 55 bp, Artificial
  Synthetic oligonucleotide
atcgaaccgaatgtgacaaaagtcattgacttaatccggaaattgttgctctcgg

SEQ ID NO: 503767 - DNA, 55 bp, Artificial
  Synthetic oligonucleotide
atcctctgtgaaacttagttcccacccttaggtatgaaccagggacataggtaac

SEQ ID NO: 503768 - DNA, 55 bp, Artificial
  Synthetic oligonucleotide
atcccttgtccccttggtaaattccgtttccggcttgcaccgtaagtacacgtgc

SEQ ID NO: 503769 - DNA, 55 bp, Artificial
  Synthetic oligonucleotide
atcatgaacattggctccactcaatgttatggccaaaggaattccattccatctg

SEQ ID NO: 503770 - DNA, 55 bp, Artificial
  Synthetic oligonucleotide
atatcgttggcggagaaaacacgtctaacgcgggatacgttgtccataactatac

SEQ ID NO: 503771 - DNA, 55 bp, Artificial
  Synthetic oligonucleotide
ttcgtgttgccaaacatatcgatcatcgcagttttactcgttcttcgctggaatg

SEQ ID NO: 503772 - DNA, 55 bp, Artificial
  Synthetic oligonucleotide
atactccggtagtccttctcaccgcaagtaacgaaaaggaagacgtaataagcgc

SEQ ID NO: 503773 - DNA, 55 bp, Artificial
  Synthetic oligonucleotide
agttgaactgatctcaaaatcgatcggaggtttaccagtaacaaaacgaaccgca

SEQ ID NO: 503774 - DNA, 55 bp, Artificial
  Synthetic oligonucleotide
ttcttaccggtataatgaatcgcttacacttaattttatagcattgggctccacg

SEQ ID NO: 503775 - DNA, 55 bp, Artificial
  Synthetic oligonucleotide
tttcgtttctatctctcgaataacggatcagccagcgaattccaagagcgagtcg

SEQ ID NO: 503776 - DNA, 55 bp, Artificial
  Synthetic oligonucleotide
agggtctacaaccatgtataaagctttcgatgggaagcgactttcgatttctgcg

SEQ ID NO: 503777 - DNA, 55 bp, Artificial
  Synthetic oligonucleotide
aggctccttatctacgttagtcggtcgctttaatagttcgatgcgttctagtatt

SEQ ID NO: 503778 - DNA, 55 bp, Artificial
  Synthetic oligonucleotide
cgcttcggcgttgtttccataatgagccgctacttgatccgcagatgctattcga

SEQ ID NO: 503779 - DNA, 55 bp, Artificial
  Synthetic oligonucleotide
cgctgttgttgccacatagttaacaccggctataatcgacttaccagttccaccg

SEQ ID NO: 503780 - DNA, 55 bp, Artificial
  Synthetic oligonucleotide
cgctggttcccctctgcaacttgattgtggactccattcttactccaacgatctc

SEQ ID NO: 503781 - DNA, 55 bp, Artificial
  Synthetic oligonucleotide
cgctggtcataaacttttgctcaacaatgcctgtatcaaccgtccctttcgtaat

SEQ ID NO: 503782 - DNA, 55 bp, Artificial
  Synthetic oligonucleotide
tgtccatcgatcgatagagtttggagattctaagaaccgaaacgtcaattgggag

SEQ ID NO: 503783 - DNA, 55 bp, Artificial
  Synthetic oligonucleotide
cgctaaggatttaattcgttccgctacgggctccgatccggattcttcccatctg

SEQ ID NO: 503784 - DNA, 55 bp, Artificial
  Synthetic oligonucleotide
cgcgttttggactgcagatgggcattatcgtttgaaagatgtgaagtggtatgcc

SEQ ID NO: 503785 - DNA, 55 bp, Artificial
  Synthetic oligonucleotide
cgcggcggcaaatgactgcttgagaaaagacaggtcgaaaggcgcattgtgaaac

SEQ ID NO: 503786 - DNA, 55 bp, Artificial
  Synthetic oligonucleotide
cgcgatgccctttgctcagcgacttgaggttatagataacgccgaatcgcgcctt

SEQ ID NO: 503787 - DNA, 55 bp, Artificial
  Synthetic oligonucleotide
cgcgaagatgcttatccgttagcgatgataatatacgataatggctccagctaag

SEQ ID NO: 503788 - DNA, 55 bp, Artificial
  Synthetic oligonucleotide
cgccttttcttatacggagtttgtaaacacagacgaacttgtccatagagcgccg

SEQ ID NO: 503789 - DNA, 55 bp, Artificial
  Synthetic oligonucleotide
cgcccatgaggcctttattctctcgcagctcggtgagagcggcagcgattaccag

SEQ ID NO: 503790 - DNA, 55 bp, Artificial
  Synthetic oligonucleotide
cgcaatgcgccaaaggcggaataccaaacccgagagaccggagcatcagaaagtc

SEQ ID NO: 503791 - DNA, 55 bp, Artificial
  Synthetic oligonucleotide
cgcaactttcgagagagaggcatgagtctgtcaggctacggttgctgaagggagt

SEQ ID NO: 503792 - DNA, 55 bp, Artificial
  Synthetic oligonucleotide
cgcaacgaatagatcggctttactgatcatcgtaagtggaaccttgcttgcgttt

SEQ ID NO: 503793 - DNA, 55 bp, Artificial
  Synthetic oligonucleotide
cgcaaccctcgcttggccttaggcacattggcttctgtcactcgccttgcagggc

SEQ ID NO: 503794 - DNA, 55 bp, Artificial
  Synthetic oligonucleotide
cgcaacagtgaatttaggcatctcagagagaggcggcacaactgtagacttggga

SEQ ID NO: 503795 - DNA, 55 bp, Artificial
  Synthetic oligonucleotide
cgatggcggctcgatagggttcgcaggacaggatcaattacaaacccatcgtcat

SEQ ID NO: 503796 - DNA, 55 bp, Artificial
  Synthetic oligonucleotide
cgatcgtacaaatatagtccacccggaagatcgcgataaaatgttagacgccgtc

SEQ ID NO: 503797 - DNA, 55 bp, Artificial
  Synthetic oligonucleotide
cgagcgttagatggcatatggaggtcatacaatgccgtttgtattccttcaggtg

SEQ ID NO: 503798 - DNA, 55 bp, Artificial
  Synthetic oligonucleotide
cgagcgggatggttttactgcgagctttaacgtaagcggaacgaatgcgttcagc

SEQ ID NO: 503799 - DNA, 55 bp, Artificial
  Synthetic oligonucleotide
cgagatctctaggtgcgtcaaagattcgggttacacgaatttctctatccgcagt

SEQ ID NO: 503800 - DNA, 55 bp, Artificial
  Synthetic oligonucleotide
cgagacactcctaaaacgttagccatgctttgaatcgaatactcaaatcgatgag

SEQ ID NO: 503801 - DNA, 55 bp, Artificial
  Synthetic oligonucleotide
cgactcaggatgtagtgggtagctttcttggtagtacgggtttaggtgcgagtga

SEQ ID NO: 503802 - DNA, 55 bp, Artificial
  Synthetic oligonucleotide
cgacccagccattatgtttacgactgtcataatacactatcccatgctcaactgc

SEQ ID NO: 503803 - DNA, 55 bp, Artificial
  Synthetic oligonucleotide
cgacaggttttacccgatgcagaaagtcgatgaggttctcgtaggaagaggggcc

SEQ ID NO: 503804 - DNA, 55 bp, Artificial
  Synthetic oligonucleotide
tggtttgaccatcccttggcctccacgagaagttgtctctgccggtacacctacc

SEQ ID NO: 503805 - DNA, 55 bp, Artificial
  Synthetic oligonucleotide
cgtctgcgctaaaagcgctccgggctataacatcggcaaacctagccgttagacg

SEQ ID NO: 503806 - DNA, 55 bp, Artificial
  Synthetic oligonucleotide
cgtcgttccgataccaattaggatgcgttaggcgacttaccactacgaagtcgtg

SEQ ID NO: 503807 - DNA, 55 bp, Artificial
  Synthetic oligonucleotide
cgtcctttagtggtagtgaatccgtatgcgaaagaactgaagtttccggatacga

SEQ ID NO: 503808 - DNA, 55 bp, Artificial
  Synthetic oligonucleotide
tgtagacgctccagccgaccaaaacccatccgaagcgcctgcttgctccggagtc

SEQ ID NO: 503809 - DNA, 55 bp, Artificial
  Synthetic oligonucleotide
cgtcattcagagcaacaccccggttacgctgctacgcccggtagctccagaaagc

SEQ ID NO: 503810 - DNA, 55 bp, Artificial
  Synthetic oligonucleotide
cgtaattgcgagcatatttacgaatccctgcccttcggaattcctgacctctccg

SEQ ID NO: 503811 - DNA, 55 bp, Artificial
  Synthetic oligonucleotide
cgtaaaggatcaaagtacaactaaagcgccttacttccatgggctcctcaacatg

SEQ ID NO: 503812 - DNA, 55 bp, Artificial
  Synthetic oligonucleotide
cggtggcggtagaagcaccgaagcagattagcgattcaaattcgtctgggatggt

SEQ ID NO: 503813 - DNA, 55 bp, Artificial
  Synthetic oligonucleotide
cggtggcggaagcaacaggccttcccgcaagtctcgtaggagcgttagttggtgg

SEQ ID NO: 503814 - DNA, 55 bp, Artificial
  Synthetic oligonucleotide
cgggttgatcgtattcaccgcgtttgtgttagacgctgttacgttgttcgatgtg

SEQ ID NO: 503815 - DNA, 55 bp, Artificial
  Synthetic oligonucleotide
cgggttcttactactcggacgcgtgaaaatgatactcgaaaataaacggtcggtt

SEQ ID NO: 503816 - DNA, 55 bp, Artificial
  Synthetic oligonucleotide
cgggtggatttatctttgtgtaatactggatctttattctcgaaaagtagtgggt

SEQ ID NO: 503817 - DNA, 55 bp, Artificial
  Synthetic oligonucleotide
cggggttcaggaacatcaccccagatttggtcgatctatatttaaagcgatgatc

SEQ ID NO: 503818 - DNA, 55 bp, Artificial
  Synthetic oligonucleotide
tgtattgcattccgtttctcggaaaatccgtaccgaaggtttgttgcagtcgaac

SEQ ID NO: 503819 - DNA, 55 bp, Artificial
  Synthetic oligonucleotide
cggctgttataattcgacgccatgacgaatccataagcgcccgttgtggctaacg

SEQ ID NO: 503820 - DNA, 55 bp, Artificial
  Synthetic oligonucleotide
cggcggcataaccttgttctacttgcgcccatcctgagatccctggccttacaac

SEQ ID NO: 503821 - DNA, 55 bp, Artificial
  Synthetic oligonucleotide
cggatctgaattcttggggagaaccgtcgggtaaaatttcaagaaggttttcgga

SEQ ID NO: 503822 - DNA, 55 bp, Artificial
  Synthetic oligonucleotide
cggagtgaaagacccgaggtggtagttcaatgtattctacatccaaccgaaccaa

SEQ ID NO: 503823 - DNA, 55 bp, Artificial
  Synthetic oligonucleotide
cggagagcttgcacccaagctatatgaagaaattgcaatgcagatcataggacgg

SEQ ID NO: 503824 - DNA, 55 bp, Artificial
  Synthetic oligonucleotide
cggactattcggtatctgcgcgtattgatacaacgccgcatagaacataagatcc

SEQ ID NO: 503825 - DNA, 55 bp, Artificial
  Synthetic oligonucleotide
cggacgtcttccacctgtcggttttccatcgggtccaaacgatcccgatgaagtt

SEQ ID NO: 503826 - DNA, 55 bp, Artificial
  Synthetic oligonucleotide
cggacctttcgcgctcttgtattgactcgctgtttggtgattgaaccgatttgct

SEQ ID NO: 503827 - DNA, 55 bp, Artificial
  Synthetic oligonucleotide
cggacagacgatctgggcaatcggcttatttctcgcggctcgtaaaacacccgag

SEQ ID NO: 503828 - DNA, 55 bp, Artificial
  Synthetic oligonucleotide
cggaatggtcttacttttagttgtagcgggatggcagttaagagcgtcttcttcc

SEQ ID NO: 503829 - DNA, 55 bp, Artificial
  Synthetic oligonucleotide
cgcttcttacgaaagctcaaaacactttcaagttctcgcttcgagtcctaaagtt

SEQ ID NO: 503830 - DNA, 55 bp, Artificial
  Synthetic oligonucleotide
ccgtttctttgactttactcatgagatcccgttcgctccagcccttttgtatggc

SEQ ID NO: 503831 - DNA, 55 bp, Artificial
  Synthetic oligonucleotide
ccgttggtcaagatctctggattagaaatgatagaacacgtcagacgtagggtag

SEQ ID NO: 503832 - DNA, 55 bp, Artificial
  Synthetic oligonucleotide
ccggtggcgctggtcaggtttattcccataccaccaatcctaaaatcgctacggg

SEQ ID NO: 503833 - DNA, 55 bp, Artificial
  Synthetic oligonucleotide
ccgggatcttcggtgcgattctttcgggacgaattcgaacttgctgtccgaactc

SEQ ID NO: 503834 - DNA, 55 bp, Artificial
  Synthetic oligonucleotide
ccggctgcatcttgttcatccctgtagaactccaatagaatgcctctatggtatc

SEQ ID NO: 503835 - DNA, 55 bp, Artificial
  Synthetic oligonucleotide
ccggagatgtgccaaaggagtgatctataatacttcttaactcggtaatatttgg

SEQ ID NO: 503836 - DNA, 55 bp, Artificial
  Synthetic oligonucleotide
tgtgcgttaccgattggaaaccgtagaactcttgttaaacgaaatccaatgccct

SEQ ID NO: 503837 - DNA, 55 bp, Artificial
  Synthetic oligonucleotide
ccgctcgcttcaggcttcgccacattgaccttcagtcactaaacttgctaacgca

SEQ ID NO: 503838 - DNA, 55 bp, Artificial
  Synthetic oligonucleotide
ccgctaacgcaggcatcggattaggacttggcaagaacgcagcgacaggatcgta

SEQ ID NO: 503839 - DNA, 55 bp, Artificial
  Synthetic oligonucleotide
tgttttaatcgcctccatagggtaaaattcgcaggacggaacctgttttaatgcg

SEQ ID NO: 503840 - DNA, 55 bp, Artificial
  Synthetic oligonucleotide
ccgccgttcgaggggagatttctaattcaactcgttcgcttctcgggtcaacgcc

SEQ ID NO: 503841 - DNA, 55 bp, Artificial
  Synthetic oligonucleotide
ccgcaattactgatctgttacgagtacgatcaaaataaaatggcgggccctcctt

SEQ ID NO: 503842 - DNA, 55 bp, Artificial
  Synthetic oligonucleotide
ccgattcttcttattcggtttgaaattccgttaaattaagccaggagagactcga

SEQ ID NO: 503843 - DNA, 55 bp, Artificial
  Synthetic oligonucleotide
ccgagcacaagtatttgaaatcacggaggagggtgaaaagtcgatttcgaacttt

SEQ ID NO: 503844 - DNA, 55 bp, Artificial
  Synthetic oligonucleotide
tgttttatgcggcgttgtatcaatacgcgcagataccgaatagtccgcagaagga

SEQ ID NO: 503845 - DNA, 55 bp, Artificial
  Synthetic oligonucleotide
ccgacactgcaattccaagtgagtttccgtagtctccgattccctttaccgcacg

SEQ ID NO: 503846 - DNA, 55 bp, Artificial
  Synthetic oligonucleotide
ccgaagaaaagggaatcgttacgttatcgccgtttgaagagaatcaactgccgat

SEQ ID NO: 503847 - DNA, 55 bp, Artificial
  Synthetic oligonucleotide
ccgaactcagccgtaattcttacgacttgttagccacgtttcccgaatgaactcg

SEQ ID NO: 503848 - DNA, 55 bp, Artificial
  Synthetic oligonucleotide
ccgaaacggattctactactccgtcgaatggagcgatggccggaagaccgttcaa

SEQ ID NO: 503849 - DNA, 55 bp, Artificial
  Synthetic oligonucleotide
cccttcgggaaacgatcagctaccgacgttcaaatgattaatgcgcgcccggcct

SEQ ID NO: 503850 - DNA, 55 bp, Artificial
  Synthetic oligonucleotide
ccctgaaagcgccgctccttgttggttccaactcgtttgattctgttggttcgtt

SEQ ID NO: 503851 - DNA, 55 bp, Artificial
  Synthetic oligonucleotide
ccctctgatacagcatttgaaattccgtgtttcgaccatcgatctttagaccatc

SEQ ID NO: 503852 - DNA, 55 bp, Artificial
  Synthetic oligonucleotide
cccggtatgtggtccgaagttccggcttatgcgaatgaaaggctgacttggttcg

SEQ ID NO: 503853 - DNA, 55 bp, Artificial
  Synthetic oligonucleotide
cccgggcaaccacaatctgcagacatgcctgaaattctcgagcgtaagcttgtcg

SEQ ID NO: 503854 - DNA, 55 bp, Artificial
  Synthetic oligonucleotide
cccgggagaggattcaactccgcttgcaacgtctaccccgtagggtttcacagtt

SEQ ID NO: 503855 - DNA, 55 bp, Artificial
  Synthetic oligonucleotide
cccgctgtgaatttggcgatacgcgctgattccttccccgtccgttctaaatccg

SEQ ID NO: 503856 - DNA, 55 bp, Artificial
  Synthetic oligonucleotide
cccgcgaacaaaatcccgattgatgttcatggaaactcatcgatttgagtattcg

SEQ ID NO: 503857 - DNA, 55 bp, Artificial
  Synthetic oligonucleotide
cgaacacagtcttccatgatagatgaggcgttttggactagaattggtttaccgg

SEQ ID NO: 503858 - DNA, 55 bp, Artificial
  Synthetic oligonucleotide
cgaaattcagactgtgtggatttacgaatcggacgaatttgtttgagcgatacca

SEQ ID NO: 503859 - DNA, 55 bp, Artificial
  Synthetic oligonucleotide
cctttgcaggtgagttcaaattctctatccgattccggagtaagatgggctaaaa

SEQ ID NO: 503860 - DNA, 55 bp, Artificial
  Synthetic oligonucleotide
ccttgcttggccttcggcacattggctccagtcacgacttttgcttggcaaaagg

SEQ ID NO: 503861 - DNA, 55 bp, Artificial
  Synthetic oligonucleotide
cctgggtctcggaggtctggactgtattttgtgagttcccaaccggctcgtctgc

SEQ ID NO: 503862 - DNA, 55 bp, Artificial
  Synthetic oligonucleotide
cgaacgaattttccgcttctttatggcctatgatctctgcagtcttccaatccgc

SEQ ID NO: 503863 - DNA, 55 bp, Artificial
  Synthetic oligonucleotide
cctgcgcgggcagatttctcatcatgaaacccaagcatgcatttgtgttcgtcaa

SEQ ID NO: 503864 - DNA, 55 bp, Artificial
  Synthetic oligonucleotide
cctctcaagccaacggaattagacccgatagttccggaaacgtatatgtgattgg

SEQ ID NO: 503865 - DNA, 55 bp, Artificial
  Synthetic oligonucleotide
cctcggccaactgctttcgactccaatggcctttcatatccagatagatcccttc

SEQ ID NO: 503866 - DNA, 55 bp, Artificial
  Synthetic oligonucleotide
cctccgtaacaatcttttgaacccgatcaaaatgttcccgaaaagcattggaggc

SEQ ID NO: 503867 - DNA, 55 bp, Artificial
  Synthetic oligonucleotide
cgaacgagagaaagttcggcaatcgatcgatgaggaacacggtggagtcaagggg

SEQ ID NO: 503868 - DNA, 55 bp, Artificial
  Synthetic oligonucleotide
cgaacttcccgcaattccgatcggggatacattcgtcaaagtctgaggaattccc

SEQ ID NO: 503869 - DNA, 55 bp, Artificial
  Synthetic oligonucleotide
cctccgctccccttatttcttcggagtcgctcgaattttccaaagcgagctttcc

SEQ ID NO: 503870 - DNA, 55 bp, Artificial
  Synthetic oligonucleotide
cgaagcatattgcaaaaggaccaaacttttccgatgattccgtttgtttgagaag

SEQ ID NO: 503871 - DNA, 55 bp, Artificial
  Synthetic oligonucleotide
cgaagcgccttgacttaaggaattagcggtggaagaaacttcgctagcagaagtg

SEQ ID NO: 503872 - DNA, 55 bp, Artificial
  Synthetic oligonucleotide
cctcacgatatcgtgtcttaaatgccgataatcaaactcaggagcacctatggcc

SEQ ID NO: 503873 - DNA, 55 bp, Artificial
  Synthetic oligonucleotide
cctatccattttcccgattcagattgtagaggctaaaaccaggaatctgaacgcc

SEQ ID NO: 503874 - DNA, 55 bp, Artificial
  Synthetic oligonucleotide
cgaaggttagccgtcttgaaagaggagtggaaaagccgggatcttcccgtgatgg

SEQ ID NO: 503875 - DNA, 55 bp, Artificial
  Synthetic oligonucleotide
cctataagatttacacacagacgttaggccctaaaatgtccataagctaacagtc

SEQ ID NO: 503876 - DNA, 55 bp, Artificial
  Synthetic oligonucleotide
cctacgccgctcgacctgattgccttcgtgtcgaacgaccgaaatctgataaata

SEQ ID NO: 503877 - DNA, 55 bp, Artificial
  Synthetic oligonucleotide
cctaagcagatagtaggaatcgtcacagtaagggctggagataaatcaattcgga

SEQ ID NO: 503878 - DNA, 55 bp, Artificial
  Synthetic oligonucleotide
cgaattgaaacggcttattttactcgatgagcgaacactacgtccggtatccgct

SEQ ID NO: 503879 - DNA, 54 bp, Artificial
  Synthetic oligonucleotide
ttttcgccgttcataacagagcaagagtaatttctttccggtgctgttgttctt

SEQ ID NO: 503880 - DNA, 54 bp, Artificial
  Synthetic oligonucleotide
tacatcgcaagcagatcaacgatctaagtgtaccatgggcagatcacacgcttt

SEQ ID NO: 503881 - DNA, 54 bp, Artificial
  Synthetic oligonucleotide
ccccgagcatggaaccgcaaaccttgttgtctcctataagaaacgccaacgcga

SEQ ID NO: 503882 - DNA, 54 bp, Artificial
  Synthetic oligonucleotide
tgtgattgactccggagacggattctctcgttccgatgatgtcccgacccaggg

SEQ ID NO: 503883 - DNA, 54 bp, Artificial
  Synthetic oligonucleotide
tcctctgcgacggactttaccataaagttaggagcgtttccgatataagtgagc

SEQ ID NO: 503884 - DNA, 54 bp, Artificial
  Synthetic oligonucleotide
acatgtctttatcagcgcgcaagttaattttacgaatcaatggagtggtgctta

SEQ ID NO: 503885 - DNA, 54 bp, Artificial
  Synthetic oligonucleotide
ctatgcatttaatggcacgggtaaaactcgtctttctcaggaatttaagcgcct

SEQ ID NO: 503886 - DNA, 54 bp, Artificial
  Synthetic oligonucleotide
gatccgataaaagccaaggttcacgactttaggcgggtctgatttgcgggaagt

SEQ ID NO: 503887 - DNA, 54 bp, Artificial
  Synthetic oligonucleotide
gtcgaccgcgtataggaaactaaagcatctcacttcccatggggcgttcgatgg

SEQ ID NO: 503888 - DNA, 54 bp, Artificial
  Synthetic oligonucleotide
actgggcccatctgtgacgttgtgctgcctatacttgcggaaagaaattggact

SEQ ID NO: 503889 - DNA, 54 bp, Artificial
  Synthetic oligonucleotide
gaaaatacagtgcatagcagttgtgatataacccatttgcaggctatttaccgc

SEQ ID NO: 503890 - DNA, 54 bp, Artificial
  Synthetic oligonucleotide
atcattccgcctaacgtaccttgctaggcaagaaatcgtgccgacgctaacatc

SEQ ID NO: 503891 - DNA, 54 bp, Artificial
  Synthetic oligonucleotide
gtccattgcgccacaagatcaccgtgcaaacccctcacatacaacgtatgtttt

SEQ ID NO: 503892 - DNA, 54 bp, Artificial
  Synthetic oligonucleotide
gtcacgcggtaggccgtgcgatttccatctgtccctgattccaaaaccatccga

SEQ ID NO: 503893 - DNA, 54 bp, Artificial
  Synthetic oligonucleotide
tgtgcaaccggaacaactggaatccgatcggtagtgatgccaattcccagttct

SEQ ID NO: 503894 - DNA, 53 bp, Artificial
  Synthetic oligonucleotide
tttgcgttcttccccggtcattctccatgccatacaccagcaataatgagggc

SEQ ID NO: 503895 - DNA, 53 bp, Artificial
  Synthetic oligonucleotide
tggcgagtagggacgacggcgactttaaggccggacaactaaattggtggtcc

SEQ ID NO: 503896 - DNA, 53 bp, Artificial
  Synthetic oligonucleotide
ttttgcccatgcagaaatggagtgagtaaccccttgagaattatttctagcac

SEQ ID NO: 503897 - DNA, 53 bp, Artificial
  Synthetic oligonucleotide
cgaacgaagcttacaaacgcacacaagaaatggaaacacgtcgtaacgacatg

SEQ ID NO: 503898 - DNA, 53 bp, Artificial
  Synthetic oligonucleotide
cgggcttttaagttcgtgaaaagactaaaactgccccgtagatgtttgcaaaa

SEQ ID NO: 503899 - DNA, 53 bp, Artificial
  Synthetic oligonucleotide
caccgtatcggatccaaaggaatccgaaaatccataatcaccttatacaagag

SEQ ID NO: 503900 - DNA, 53 bp, Artificial
  Synthetic oligonucleotide
caccctggcaactatagcaagcccgcggtgattatgtcacctgcaacttcgcc

SEQ ID NO: 503901 - DNA, 53 bp, Artificial
  Synthetic oligonucleotide
cacaactccaatggcaccacttgaagtaaatatgcgtacagaaccccaaaatg

SEQ ID NO: 503902 - DNA, 53 bp, Artificial
  Synthetic oligonucleotide
atggagcgcatatcctagaagccaagtacaggcggtcagaactccataactgg

SEQ ID NO: 503903 - DNA, 53 bp, Artificial
  Synthetic oligonucleotide
agtgttaggacccatcttcggtaaggaaaagcatactgactccggtagaacgt

SEQ ID NO: 503904 - DNA, 53 bp, Artificial
  Synthetic oligonucleotide
gattcaccgggaatcgtagttcctcgaatatccgtttacaaaggattagttag

SEQ ID NO: 503905 - DNA, 53 bp, Artificial
  Synthetic oligonucleotide
ggatacgatctttgccccttggagtcccgaagatcacgatgtagaaagtgttc

SEQ ID NO: 503906 - DNA, 53 bp, Artificial
  Synthetic oligonucleotide
accaccttgagcccatggggcgatttggctctacctggtatttcaaggctctg

SEQ ID NO: 503907 - DNA, 53 bp, Artificial
  Synthetic oligonucleotide
gggattgaggattgttgaatccgtccggaccgaatgacgcgctataaaattcg

SEQ ID NO: 503908 - DNA, 52 bp, Artificial
  Synthetic oligonucleotide
aacgttttcttgatgcaatttattggtgagagcggaggccctaagtaacgtt

SEQ ID NO: 503909 - DNA, 52 bp, Artificial
  Synthetic oligonucleotide
taacccgactgtgaacgattttcaaatctcctcaacgttgacaggggcgatt

SEQ ID NO: 503910 - DNA, 52 bp, Artificial
  Synthetic oligonucleotide
ccgacctatttcaacctgcaagggatttaacggctaagatttctccagaggg

SEQ ID NO: 503911 - DNA, 52 bp, Artificial
  Synthetic oligonucleotide
ttacacgctccttttcgatctgaggtaataaggaatccggcctttcaatagg

SEQ ID NO: 503912 - DNA, 52 bp, Artificial
  Synthetic oligonucleotide
ggtcatattgataatgtcagcaccgcaggaacgataaagatgagactccgct

SEQ ID NO: 503913 - DNA, 52 bp, Artificial
  Synthetic oligonucleotide
ctgcgacatagccaagaaaactcccagtcattaattcccaaaaccttccatg

SEQ ID NO: 503914 - DNA, 52 bp, Artificial
  Synthetic oligonucleotide
attcaacgctcaaacggacaaatctgcttgactatgtcgggattgttcaatc

SEQ ID NO: 503915 - DNA, 52 bp, Artificial
  Synthetic oligonucleotide
gggccgccgactctaaaggccttgcccgctatgttttcgggcatgtgcgcta

SEQ ID NO: 503916 - DNA, 52 bp, Artificial
  Synthetic oligonucleotide
atgctatgacccgcaaactgccggcgacatgcttaaaccctgcgagcaatgc

SEQ ID NO: 503917 - DNA, 52 bp, Artificial
  Synthetic oligonucleotide
atagcgcgtgccgacaaaatagacagcgaccgcaacgatcaaaccacccact

SEQ ID NO: 503918 - DNA, 52 bp, Artificial
  Synthetic oligonucleotide
gagggagcttgttttgcttagatgaaaacagtgcgccgagagttccgaaaac

SEQ ID NO: 503919 - DNA, 52 bp, Artificial
  Synthetic oligonucleotide
gagttatggtatatcgaatcagtggagccaagttttggaagacagacccatt

SEQ ID NO: 503920 - DNA, 52 bp, Artificial
  Synthetic oligonucleotide
acgcgtgcagctcattgcagaatttcagcgggcgcaacaagtaatcagagat

SEQ ID NO: 503921 - DNA, 52 bp, Artificial
  Synthetic oligonucleotide
gcgattcgaaaccactaacaaacttgaaacaccttcggcctcctaagttgtt

SEQ ID NO: 503922 - DNA, 52 bp, Artificial
  Synthetic oligonucleotide
ttcttctatcggtgaaaattccttcatgctgtcgactccttgaaagcggagc

SEQ ID NO: 503923 - DNA, 52 bp, Artificial
  Synthetic oligonucleotide
ggaaatgattcgagaaggcaatcgggctttcaacgagggtgatatccgaaga

SEQ ID NO: 503924 - DNA, 52 bp, Artificial
  Synthetic oligonucleotide
tcgatctttaaaatctaactccgagaatgttcaaacgcaaagcgacggagaa

SEQ ID NO: 503925 - DNA, 52 bp, Artificial
  Synthetic oligonucleotide
ttgattctctgtcagcaaaactccagaagtagccttaccccaacacggccta

SEQ ID NO: 503926 - DNA, 52 bp, Artificial
  Synthetic oligonucleotide
ggcggctatctgggcagcgggtatgtctttgagcacctgaacgacgtctcgc

SEQ ID NO: 503927 - DNA, 52 bp, Artificial
  Synthetic oligonucleotide
agtatgtaggactagtgaacctaatgttggacttgtgaacatggggcgactg

SEQ ID NO: 503928 - DNA, 51 bp, Artificial
  Synthetic oligonucleotide
aatggagaataacgtggccaagaactcgacaagcggccaaggagaatgaaa

SEQ ID NO: 503929 - DNA, 51 bp, Artificial
  Synthetic oligonucleotide
agacacatggcacgttgtggatgcacacctcgactatggatataccgtaaa

SEQ ID NO: 503930 - DNA, 51 bp, Artificial
  Synthetic oligonucleotide
ccggaaggatcaaatccaccctaaatccggaagtttgtggtacgatctgca

SEQ ID NO: 503931 - DNA, 51 bp, Artificial
  Synthetic oligonucleotide
cctaacgaatgttgggaggccgaaggattgcaagtttgttagtggttaggg

SEQ ID NO: 503932 - DNA, 51 bp, Artificial
  Synthetic oligonucleotide
cgtcccaaatcctatttccctggaatcgggtgtaagtaaattttcgttggc

SEQ ID NO: 503933 - DNA, 51 bp, Artificial
  Synthetic oligonucleotide
cgtctttaaagagggaataaagtcggtcaattgggtaagaggcttccgcaa

SEQ ID NO: 503934 - DNA, 51 bp, Artificial
  Synthetic oligonucleotide
taatggatctccacaatccgaaggtaactatgctcccaaaggttctggcgc

SEQ ID NO: 503935 - DNA, 51 bp, Artificial
  Synthetic oligonucleotide
tattggcgagtcctggtcctcaactctggttattaaattgtatgcaggaaa

SEQ ID NO: 503936 - DNA, 51 bp, Artificial
  Synthetic oligonucleotide
tggcggaaaggaaaacagatttcaacccggttcctcttcccgacattttaa

SEQ ID NO: 503937 - DNA, 51 bp, Artificial
  Synthetic oligonucleotide
cttggggcgcgaagcgtatgaaaatagagaggcgattgatactgcgataac

SEQ ID NO: 503938 - DNA, 51 bp, Artificial
  Synthetic oligonucleotide
tcctaccgtgccgacttacttgcagtccggggtcaccaatcaacgacctac

SEQ ID NO: 503939 - DNA, 51 bp, Artificial
  Synthetic oligonucleotide
gagcgaaaaggccgtggtcgataagatttcgcaggtcgccgaatataaaga

SEQ ID NO: 503940 - DNA, 50 bp, Artificial
  Synthetic oligonucleotide
aaaaggccgctgcgtatttgggactgtcgattcgttcgttcaaccgacac

SEQ ID NO: 503941 - DNA, 50 bp, Artificial
  Synthetic oligonucleotide
aaatagtttaacagatttgggtaagtagcgaaaggtgcggttgattaggc

SEQ ID NO: 503942 - DNA, 50 bp, Artificial
  Synthetic oligonucleotide
ggggtgacctcccaagactatatccgctccggaagaaaatgcatgatcca

SEQ ID NO: 503943 - DNA, 50 bp, Artificial
  Synthetic oligonucleotide
tccggtgatccgaacgcttttccataattcgtagtgtatctggtcttgag

SEQ ID NO: 503944 - DNA, 50 bp, Artificial
  Synthetic oligonucleotide
tccgtaattttcggtactgctggttccgctttagttatcgaacaaggagc

SEQ ID NO: 503945 - DNA, 50 bp, Artificial
  Synthetic oligonucleotide
ttgcgcttaacgaccaaggtgttccgacgtttgcaatggcacgagtttgc

SEQ ID NO: 503946 - DNA, 50 bp, Artificial
  Synthetic oligonucleotide
ggaacatacggcaaggctgacggaaggattttggccatgacttctctagc

SEQ ID NO: 503947 - DNA, 50 bp, Artificial
  Synthetic oligonucleotide
gcgtccttctcggaaaggctctgccctttcatattctaagggtatgatga

SEQ ID NO: 503948 - DNA, 50 bp, Artificial
  Synthetic oligonucleotide
gaggtatgttttcgtcaaggggccaggtgtcaatagaaatctacgaacta

SEQ ID NO: 503949 - DNA, 50 bp, Artificial
  Synthetic oligonucleotide
tgattcgggactggacatagacgcgcttcgaatcgtaagcgagggaatca

SEQ ID NO: 503950 - DNA, 50 bp, Artificial
  Synthetic oligonucleotide
gagattaacggcgaattgtgcgaagtccgatcttggcgttggataggccg

SEQ ID NO: 503951 - DNA, 50 bp, Artificial
  Synthetic oligonucleotide
gactgattcgaacgagtgccgacacggatgtgggaactcatacaactgcg

SEQ ID NO: 503952 - DNA, 50 bp, Artificial
  Synthetic oligonucleotide
caagaatggtgctggaccttgagagtattgctgactcgttcaaagagacg

SEQ ID NO: 503953 - DNA, 50 bp, Artificial
  Synthetic oligonucleotide
cgtgtacgctatgacttttcgctgccttcagccttcaagggagatggtta

SEQ ID NO: 503954 - DNA, 50 bp, Artificial
  Synthetic oligonucleotide
tggttaaagccgctttctccgcttacggttacattcgccctgagtttagt

SEQ ID NO: 503955 - DNA, 50 bp, Artificial
  Synthetic oligonucleotide
cagaggcaaaacgttcttggcatattaccgcagtagctattcacagtttt

SEQ ID NO: 503956 - DNA, 50 bp, Artificial
  Synthetic oligonucleotide
ccgcgtttctatatcagagacccggaggtcccatcgatcccatagaactc

SEQ ID NO: 503957 - DNA, 50 bp, Artificial
  Synthetic oligonucleotide
cgctctcaaggaatccctaccggtctgtatacggactatttcgccggaca

SEQ ID NO: 503958 - DNA, 60 bp, Artificial
  Synthetic oligonucleotide
catcagttgtagcgtcagttgctgcatttttgtccgctacttttttcgaactatcatctg

SEQ ID NO: 503959 - DNA, 60 bp, Artificial
  Synthetic oligonucleotide
ccagtccctggcgccataattaactgcccgcgatcacgctctttaaaatgattaagtgcg

SEQ ID NO: 503960 - DNA, 60 bp, Artificial
  Synthetic oligonucleotide
cgtcctttatcagcctctattccttgtggcgacattagaagaaagtcattatctcctaat

SEQ ID NO: 503961 - DNA, 60 bp, Artificial
  Synthetic oligonucleotide
cgtctttagcaagcccagcttccattgccgcatttaatagcacatcatggtcagaaatcg

SEQ ID NO: 503962 - DNA, 60 bp, Artificial
  Synthetic oligonucleotide
ctatagttaagtaaaggtgcagagtgtagccatagattacagtactttctaaattagaat

SEQ ID NO: 503963 - DNA, 60 bp, Artificial
  Synthetic oligonucleotide
gatgtcattttctactcgcttgtacgttactgggtcaaagtagtaataggtattgtcata

SEQ ID NO: 503964 - DNA, 60 bp, Artificial
  Synthetic oligonucleotide
gcaaggtcattatatgactatgtaaatatcgtagtgactcgtgttatactagttgtacag

SEQ ID NO: 503965 - DNA, 60 bp, Artificial
  Synthetic oligonucleotide
gcgaatttaataatccggtgcgcatccatactatttgtaggtactacactgtcaagatcc

SEQ ID NO: 503966 - DNA, 60 bp, Artificial
  Synthetic oligonucleotide
taacgttgaaatagatgtattcatagcgatgccaattagacttgagtgctttatataaac

SEQ ID NO: 503967 - DNA, 60 bp, Artificial
  Synthetic oligonucleotide
taccacgagaggcatcacgatctgatgtcacagccatacttgtcatggtcagttcagtat

SEQ ID NO: 503968 - DNA, 60 bp, Artificial
  Synthetic oligonucleotide
tccatcaaccaaacctgaccccgtaattcgaaatgccatcagaaatcctgctagcaaaag

SEQ ID NO: 503969 - DNA, 60 bp, Artificial
  Synthetic oligonucleotide
aaaggcacaatgttagcacgttcgatttcatcagtaataccgttggctgccagaagtggt

SEQ ID NO: 503970 - DNA, 59 bp, Artificial
  Synthetic oligonucleotide
ggaagagttttatggatttcaacaacatcctgtgcatctaatattaatctcccagattc

SEQ ID NO: 503971 - DNA, 59 bp, Artificial
  Synthetic oligonucleotide
ctagacatcaaaagtcttatgttacttacagacacaagtaacgcaaacgaaatgctaac

SEQ ID NO: 503972 - DNA, 58 bp, Artificial
  Synthetic oligonucleotide
gatcaagtcaacgtttcaggttctaaggacaacatgaacattaaatacttgttgacac

SEQ ID NO: 503973 - DNA, 58 bp, Artificial
  Synthetic oligonucleotide
ctgatactgcaatggtatcttcggattacatagttattgtcttacaaacacaagaacg

SEQ ID NO: 503974 - DNA, 57 bp, Artificial
  Synthetic oligonucleotide
gatgtaataaattgttttggatcatcaaggggcgcgttaaaagtgtttactagtacg

SEQ ID NO: 503975 - DNA, 57 bp, Artificial
  Synthetic oligonucleotide
gagactaggaataagattaaccatttgtgcagaaaactctcttttggcacctcgacc

SEQ ID NO: 503976 - DNA, 55 bp, Artificial
  Synthetic oligonucleotide
ggtccgaatcaccaacgatgattaacttcataccattaggcactgctgctaacag

SEQ ID NO: 503977 - DNA, 55 bp, Artificial
  Synthetic oligonucleotide
gggtggaaactaaaaccagtgatccatgaaatgtggcagtggggtgaactctata

SEQ ID NO: 503978 - DNA, 55 bp, Artificial
  Synthetic oligonucleotide
ggggcgccatgtgtctgttctatatcaaagacaggtatataacgatagccgacta

SEQ ID NO: 503979 - DNA, 55 bp, Artificial
  Synthetic oligonucleotide
ggggagcgatgttggtagtctcttcgcaatgggagacttcaataatgcgccatat

SEQ ID NO: 503980 - DNA, 55 bp, Artificial
  Synthetic oligonucleotide
gggaaacattcatcaaagctctaaccttggtggatgtagtagcagtggccgaggc

SEQ ID NO: 503981 - DNA, 55 bp, Artificial
  Synthetic oligonucleotide
ggctttgtaatcagcaaaccttacttactgtggtatgaccgtggttgaaaccaaa

SEQ ID NO: 503982 - DNA, 55 bp, Artificial
  Synthetic oligonucleotide
ggcttcgtcaatcaaatttaattgtgctttaccactaccggcaagtgttgtttcc

SEQ ID NO: 503983 - DNA, 55 bp, Artificial
  Synthetic oligonucleotide
ggcggccaatcgtaatagcacctagcaattgcgcatgtgccccaatgaaactatg

SEQ ID NO: 503984 - DNA, 55 bp, Artificial
  Synthetic oligonucleotide
ggcgatcatttcatcactagtaacgacctgtatggtggtacatatcgctattttg

SEQ ID NO: 503985 - DNA, 55 bp, Artificial
  Synthetic oligonucleotide
ggccgctgctgttggaccgtttgaattggattctgactgagactcaggaactggt

SEQ ID NO: 503986 - DNA, 55 bp, Artificial
  Synthetic oligonucleotide
ggcaatccagtcacggttagcttttcgttatcctgttggtaaggaacattaacag

SEQ ID NO: 503987 - DNA, 55 bp, Artificial
  Synthetic oligonucleotide
ggatccggcctaatttatatcgacggtactggtaaacaagaagctgagtactggg

SEQ ID NO: 503988 - DNA, 55 bp, Artificial
  Synthetic oligonucleotide
ggaaatatgaacgggatctttagctgctccgaaaggaggagcatacgttaattcc

SEQ ID NO: 503989 - DNA, 55 bp, Artificial
  Synthetic oligonucleotide
ggaaaagcaactttattacgagtcagtgatgtcatgagattacgttgggtcgatg

SEQ ID NO: 503990 - DNA, 55 bp, Artificial
  Synthetic oligonucleotide
gcggttgatggtccagtttcaaacgttggtatgtatgaaatgactaacgatgctg

SEQ ID NO: 503991 - DNA, 55 bp, Artificial
  Synthetic oligonucleotide
gcgaccacctgggcgaatgagtcagcccgtactatggttgtggttaagggtgagt

SEQ ID NO: 503992 - DNA, 55 bp, Artificial
  Synthetic oligonucleotide
aatggtcgggcctacattagattcctataagtcggtcaagccgattggacgtgcc

SEQ ID NO: 503993 - DNA, 55 bp, Artificial
  Synthetic oligonucleotide
gcctttcgatggctttctttgatgagcgcactctgttcgaagaccagattaatcg

SEQ ID NO: 503994 - DNA, 55 bp, Artificial
  Synthetic oligonucleotide
gcccagcttccattgccgcatttaatagcacatcatggtcagaaatcgattgacc

SEQ ID NO: 503995 - DNA, 55 bp, Artificial
  Synthetic oligonucleotide
gccattggctggtaagtatgagttccatgtgtcggttgagactaaaatttaatgg

SEQ ID NO: 503996 - DNA, 55 bp, Artificial
  Synthetic oligonucleotide
gccaatcaagaataacccagctgactccatttcgacagccataacaccatactgc

SEQ ID NO: 503997 - DNA, 55 bp, Artificial
  Synthetic oligonucleotide
gcatcaggagtcgttgaattgactgtcgtttctttattaacatctgatggagctg

SEQ ID NO: 503998 - DNA, 55 bp, Artificial
  Synthetic oligonucleotide
gcagacgggtataggtgtaaagtacaatagctcacgatttgcacaggatcaagcg

SEQ ID NO: 503999 - DNA, 55 bp, Artificial
  Synthetic oligonucleotide
gatatattacaagtatacgaacaagcaggttatgagacgtccgcttttgctacta

SEQ ID NO: 504000 - DNA, 55 bp, Artificial
  Synthetic oligonucleotide
gatacgcggcaattaattcgacatctacgtgaaacaggaccacagaaagctacga

SEQ ID NO: 504001 - DNA, 55 bp, Artificial
  Synthetic oligonucleotide
gaggttagtggaggaggtaagcccatatactggggtgctaatggatacgcatctc

SEQ ID NO: 504002 - DNA, 55 bp, Artificial
  Synthetic oligonucleotide
gagctacactatacaggcgtatgaatgcctataatatgaagtctagtaagcgatc

SEQ ID NO: 504003 - DNA, 55 bp, Artificial
  Synthetic oligonucleotide
gacctagacgtccccttgcccaccctgtaaaatggatattaagggctttacctaa

SEQ ID NO: 504004 - DNA, 55 bp, Artificial
  Synthetic oligonucleotide
tttcctgcggttttcatggctgtaatgagtgtaccctcggtaaatggaacagggg

SEQ ID NO: 504005 - DNA, 55 bp, Artificial
  Synthetic oligonucleotide
ttggcgggcatattccggaagtcattcctcagacaagcgtaaaaggatccggcct

SEQ ID NO: 504006 - DNA, 55 bp, Artificial
  Synthetic oligonucleotide
ttgatctcctcggtgttccaaatgatggcaccattcaattcggggatgacctgtt

SEQ ID NO: 504007 - DNA, 55 bp, Artificial
  Synthetic oligonucleotide
ttgagacatgccgcctaaggccaacgctaaattctcatcgcccttttgaactggc

SEQ ID NO: 504008 - DNA, 55 bp, Artificial
  Synthetic oligonucleotide
ttcggtacagctcagctaccggcacaacgttttcatgcgctgcaatttgtaacac

SEQ ID NO: 504009 - DNA, 55 bp, Artificial
  Synthetic oligonucleotide
ttactctcttgacgttgtcctgactcgaagaagtaataagtattttgatagtatc

SEQ ID NO: 504010 - DNA, 55 bp, Artificial
  Synthetic oligonucleotide
tgggagcgatgtttaatcgttttgctaatgtggtaaggtaacccacaatttgcaa

SEQ ID NO: 504011 - DNA, 55 bp, Artificial
  Synthetic oligonucleotide
tggaatctgaacggacgtacgaaaggcaatagcgatctagctgttgagttgattg

SEQ ID NO: 504012 - DNA, 55 bp, Artificial
  Synthetic oligonucleotide
tgcccgaaaccatacgttataaatgtctcattgggtaaaacagggtcactaactg

SEQ ID NO: 504013 - DNA, 55 bp, Artificial
  Synthetic oligonucleotide
tgcaggttgaaagggatcatggcgtaaccgtaaaagcaagagccattcagaatac

SEQ ID NO: 504014 - DNA, 55 bp, Artificial
  Synthetic oligonucleotide
tctagcttgtgtgttagttgttttgatcgttaagaagctgccgggagggaaatac

SEQ ID NO: 504015 - DNA, 55 bp, Artificial
  Synthetic oligonucleotide
tcgctgcactcttcaaattatacgtaccatttgtaccaaagtcataggcttggcc

SEQ ID NO: 504016 - DNA, 55 bp, Artificial
  Synthetic oligonucleotide
aacttgcacgagatttagttttagcgcatgcaacgggtgttcattaccacgttgc

SEQ ID NO: 504017 - DNA, 55 bp, Artificial
  Synthetic oligonucleotide
tcagaaatcgattgaccatcactaaagtaaacttggtagaagcgtctaattactc

SEQ ID NO: 504018 - DNA, 55 bp, Artificial
  Synthetic oligonucleotide
aagtggacgtatctcaaaactacccttgaattgcgctattttgatgagaatggct

SEQ ID NO: 504019 - DNA, 55 bp, Artificial
  Synthetic oligonucleotide
taagggcaatcatttccagcgttgatacaggaactaattcagcaaatgtctggcc

SEQ ID NO: 504020 - DNA, 55 bp, Artificial
  Synthetic oligonucleotide
taactacgtcagagtagacgaattaacgtccatcacttacaaatcggaatcagaa

SEQ ID NO: 504021 - DNA, 55 bp, Artificial
  Synthetic oligonucleotide
gtgtccgcagatgatagcagtagttcaagtagtacgttagttaatcaagatacgc

SEQ ID NO: 504022 - DNA, 55 bp, Artificial
  Synthetic oligonucleotide
gtggctgttatcatgatgcctacagactagatattaataaaattaaccgtagccc

SEQ ID NO: 504023 - DNA, 55 bp, Artificial
  Synthetic oligonucleotide
gtctctgatagtgactgctgtgttcggaattactttaggagctgctatgggcggc

SEQ ID NO: 504024 - DNA, 55 bp, Artificial
  Synthetic oligonucleotide
gtattttcacgacaatacgtatgcctaaatcacagttaaaatctggagaagtggg

SEQ ID NO: 504025 - DNA, 55 bp, Artificial
  Synthetic oligonucleotide
gtagtagtaccaatacgtgtggtagtcgtcgctccagctgcgagattatcgtcag

SEQ ID NO: 504026 - DNA, 55 bp, Artificial
  Synthetic oligonucleotide
gtaagtctctgatatttccccacgttgcactaccgtgcgtatcggtatctgctgt

SEQ ID NO: 504027 - DNA, 55 bp, Artificial
  Synthetic oligonucleotide
ggttgaattcatcagttccaccatagtaatccatgttatcgacagcatcatcact

SEQ ID NO: 504028 - DNA, 55 bp, Artificial
  Synthetic oligonucleotide
ggttaggggacggtgagccaccacatatgcttggcagtgagacgtcattagaagc

SEQ ID NO: 504029 - DNA, 55 bp, Artificial
  Synthetic oligonucleotide
ggtgcgcatccatactatttgtaggtactacactgtcaagatccattggtagacc

SEQ ID NO: 504030 - DNA, 55 bp, Artificial
  Synthetic oligonucleotide
ggtgatttcacaacggacgcaaacagttagtataacggctactttggttaagacg

SEQ ID NO: 504031 - DNA, 55 bp, Artificial
  Synthetic oligonucleotide
ggtcggggctttacagacgttcactgatagttttatcccagcgattaatttcggc

SEQ ID NO: 504032 - DNA, 55 bp, Artificial
  Synthetic oligonucleotide
caacggacgcaaacagttagtataacggctactttggttaagacgtgttatgtcg

SEQ ID NO: 504033 - DNA, 55 bp, Artificial
  Synthetic oligonucleotide
cggtttcgttcgacacgtacatagaaccactttcgccggttaccttaacagagtc

SEQ ID NO: 504034 - DNA, 55 bp, Artificial
  Synthetic oligonucleotide
cggtctagcgattacacgcccgatttgatagggcggctgatttactaaagtacgt

SEQ ID NO: 504035 - DNA, 55 bp, Artificial
  Synthetic oligonucleotide
cggtataattatccaacaattgctttacagcgtcattctcatagtgctgacctgt

SEQ ID NO: 504036 - DNA, 55 bp, Artificial
  Synthetic oligonucleotide
cggcttgtaatgtatcactggcactagcgtggtaacgcttgtttatctcactttg

SEQ ID NO: 504037 - DNA, 55 bp, Artificial
  Synthetic oligonucleotide
cggcggatgccttcaatcacggtgtctggcggtgttggctgaccgtcccaaagca

SEQ ID NO: 504038 - DNA, 55 bp, Artificial
  Synthetic oligonucleotide
cggcacctacttgaactaagaatgatggtgctaccgtagaattaagtccaacgcc

SEQ ID NO: 504039 - DNA, 55 bp, Artificial
  Synthetic oligonucleotide
cggcaaacgttgagtaattatcagccatgggaattaaaactcaaccgtcacccac

SEQ ID NO: 504040 - DNA, 55 bp, Artificial
  Synthetic oligonucleotide
cggaagcctgtatatggcttaccattctcaaaccaattataaccaccattcgctg

SEQ ID NO: 504041 - DNA, 55 bp, Artificial
  Synthetic oligonucleotide
cgctcaactggcaatcaccgcgaaaagtctttcagcaacatgtggtgttcggatg

SEQ ID NO: 504042 - DNA, 55 bp, Artificial
  Synthetic oligonucleotide
cgccaaagccatcattgccaacacacgttagcattgcaacccgagcgcccaatcg

SEQ ID NO: 504043 - DNA, 55 bp, Artificial
  Synthetic oligonucleotide
cgaagaagtaaatgaccacgaaactggcaaattaacggcctacagattgaatgta

SEQ ID NO: 504044 - DNA, 55 bp, Artificial
  Synthetic oligonucleotide
cctgactccattaacatactgcttgggaagtcgtctttatgtctacgcaaccaca

SEQ ID NO: 504045 - DNA, 55 bp, Artificial
  Synthetic oligonucleotide
ccgtcaattaggttactttgtagcgattgctatgcagaaaccaacggctgacacg

SEQ ID NO: 504046 - DNA, 55 bp, Artificial
  Synthetic oligonucleotide
ccggcagtttccaagctgctttcgggttacgaccgttcatcagcggggcagagga

SEQ ID NO: 504047 - DNA, 55 bp, Artificial
  Synthetic oligonucleotide
ccgcaacatcttttaagttagcatatgtcatgttggtagttgaggtaccatcatc

SEQ ID NO: 504048 - DNA, 55 bp, Artificial
  Synthetic oligonucleotide
cccgccgcaaaaccaataaccaatccaatcagcacaaaccatatccagttcatct

SEQ ID NO: 504049 - DNA, 55 bp, Artificial
  Synthetic oligonucleotide
cccatttgactggctggaaagaacaatagcgacccagccatatacagcccgagcc

SEQ ID NO: 504050 - DNA, 55 bp, Artificial
  Synthetic oligonucleotide
ccatctgacaacttagttgaatattccaatccttttagtgatatcgcacccttcg

SEQ ID NO: 504051 - DNA, 55 bp, Artificial
  Synthetic oligonucleotide
caacgtcaattgtgctcagcttgctactgggctttaccacacactgggagtggac

SEQ ID NO: 504052 - DNA, 55 bp, Artificial
  Synthetic oligonucleotide
ccagaggcttgccaattagttgattggttgttcacagtccgtgttacattaaagt

SEQ ID NO: 504053 - DNA, 55 bp, Artificial
  Synthetic oligonucleotide
catgcaacgattgcacttaatattcatctttctagtggcaaaatcggtgaagcca

SEQ ID NO: 504054 - DNA, 55 bp, Artificial
  Synthetic oligonucleotide
caatacaagccacttctactgtattgccacaagtaaaagcagtcgccttaacgtc

SEQ ID NO: 504055 - DNA, 55 bp, Artificial
  Synthetic oligonucleotide
catcaaattccgacgatgcatctctgccaccccaccttgttgcgcaacccaattc

SEQ ID NO: 504056 - DNA, 55 bp, Artificial
  Synthetic oligonucleotide
cataagtacttgagtgtgtccagaagctttgcatttggttgcccaacagttagtg

SEQ ID NO: 504057 - DNA, 55 bp, Artificial
  Synthetic oligonucleotide
cagtagcgactttaactgcatgattaaccgtgtcctctgatagtccgcctgcgtc

SEQ ID NO: 504058 - DNA, 55 bp, Artificial
  Synthetic oligonucleotide
caggtggcgttattcaacaagagacgcgtcgttacaacgaaccaacaaagtcaac

SEQ ID NO: 504059 - DNA, 55 bp, Artificial
  Synthetic oligonucleotide
cagcgcgataatttagttattgagacttggcacgctgatgaggtggctggtaagc

SEQ ID NO: 504060 - DNA, 55 bp, Artificial
  Synthetic oligonucleotide
cagattttggctggcttagtgttaatctcgttgcagaattatattgaggatcaca

SEQ ID NO: 504061 - DNA, 55 bp, Artificial
  Synthetic oligonucleotide
cacgggtgagataatctcctatgtcgtgataatgaacctcatgattatcactacc

SEQ ID NO: 504062 - DNA, 55 bp, Artificial
  Synthetic oligonucleotide
caccggtccacgacctatcggtcttagtccctggtcacagcagagctgttccctg

SEQ ID NO: 504063 - DNA, 55 bp, Artificial
  Synthetic oligonucleotide
gacatgccctcaaagttcataagccatgcttttgtcgctttacgaacatctgtat

SEQ ID NO: 504064 - DNA, 55 bp, Artificial
  Synthetic oligonucleotide
gaatgtaccgtctcttggtcaatggtttaccttgcctgtgtcacctagtcgggta

SEQ ID NO: 504065 - DNA, 55 bp, Artificial
  Synthetic oligonucleotide
gaacgggatctttagctgctccgaaaggaggagcatacgttaattccagttcagg

SEQ ID NO: 504066 - DNA, 55 bp, Artificial
  Synthetic oligonucleotide
cttgccccatgcttcgcgccatcctgcattttgacgaacaccattcacgaaccag

SEQ ID NO: 504067 - DNA, 55 bp, Artificial
  Synthetic oligonucleotide
cttaggcgttgtgattagacgcccagaagggaggtgttccttcgtgaaagcttct

SEQ ID NO: 504068 - DNA, 55 bp, Artificial
  Synthetic oligonucleotide
ctgttcagcgccatagtcccttagcgcttctgttcccgaataggggcgattcaac

SEQ ID NO: 504069 - DNA, 55 bp, Artificial
  Synthetic oligonucleotide
ctgtctgtagccttttcttgattggcttcagttgtcgttgcatcaggagtcgttg

SEQ ID NO: 504070 - DNA, 55 bp, Artificial
  Synthetic oligonucleotide
ctggacagaatgcaggcactagtaaagattatgaaattacgttagtgcctaagaa

SEQ ID NO: 504071 - DNA, 55 bp, Artificial
  Synthetic oligonucleotide
aggataatgtcgtgtccccgtacatcagaagtcaaatcagttctcaaagtaatgg

SEQ ID NO: 504072 - DNA, 55 bp, Artificial
  Synthetic oligonucleotide
ctgactaatgccacgtaaaggttatactaagcgtcaggaagttttgcctgaccct

SEQ ID NO: 504073 - DNA, 55 bp, Artificial
  Synthetic oligonucleotide
ctgacagaccacgtctgggatatcatggcttactatgtcgcccaagctgctttgc

SEQ ID NO: 504074 - DNA, 55 bp, Artificial
  Synthetic oligonucleotide
ctcgttttctggcaataagttaggcgttaatgctgagggtaaaagctttatcagc

SEQ ID NO: 504075 - DNA, 55 bp, Artificial
  Synthetic oligonucleotide
ctcgtggtatatcaatgtagctagctagtgttgcgcgcccctcattgtcggtgaa

SEQ ID NO: 504076 - DNA, 55 bp, Artificial
  Synthetic oligonucleotide
attctctttgtcacgatacagtttaaagacaagctctgtgtccttgaacaccgtt

SEQ ID NO: 504077 - DNA, 55 bp, Artificial
  Synthetic oligonucleotide
cgtggggataccttgaatgcctagttggctggcaacctgtttattttcatcgata

SEQ ID NO: 504078 - DNA, 55 bp, Artificial
  Synthetic oligonucleotide
atgatccagatcaagatgttttgttcttctccgctagtggcatttcaaaggcaac

SEQ ID NO: 504079 - DNA, 55 bp, Artificial
  Synthetic oligonucleotide
ctcaaaaggttctagatcaattgaatggcaagacgcaacctaaacctggacacca

SEQ ID NO: 504080 - DNA, 55 bp, Artificial
  Synthetic oligonucleotide
ctagattcagctaattgtgttcctgtgatcacactgccactaccattcaatggtg

SEQ ID NO: 504081 - DNA, 55 bp, Artificial
  Synthetic oligonucleotide
ctagctgttgagttgattggtgatagtgtcgcaaggattagccctgacgggcttg

SEQ ID NO: 504082 - DNA, 55 bp, Artificial
  Synthetic oligonucleotide
ataggaaagatgcatcacagaattttactcttgccggtgttcgtatccaggtggg

SEQ ID NO: 504083 - DNA, 54 bp, Artificial
  Synthetic oligonucleotide
ctaatatgactagtgtagcaggcatagagggctatgacgccacttatatgtatc

SEQ ID NO: 504084 - DNA, 54 bp, Artificial
  Synthetic oligonucleotide
tctactgtattgccacaagtaaaagtagtcgccttaacgtctagtgttgatcca

SEQ ID NO: 504085 - DNA, 54 bp, Artificial
  Synthetic oligonucleotide
ggtggaaaatgacagtttatggctatgcacgcgtctcaacagcgggacaatcgt

SEQ ID NO: 504086 - DNA, 54 bp, Artificial
  Synthetic oligonucleotide
gtgttaatgtttcgtatgccttcggatacacctcttcacgcatcaatattaaac

SEQ ID NO: 504087 - DNA, 54 bp, Artificial
  Synthetic oligonucleotide
cggagcatatggcggatcaaggtaaataaagtctccagacttaactcctgtaag

SEQ ID NO: 504088 - DNA, 54 bp, Artificial
  Synthetic oligonucleotide
gcgcttagacgggcgaataagccgttttaacgttagagacttggtcctttaaaa

SEQ ID NO: 504089 - DNA, 54 bp, Artificial
  Synthetic oligonucleotide
cctgagttagccaaagtagaggctctagataagccccttatggctaccttgaac

SEQ ID NO: 504090 - DNA, 54 bp, Artificial
  Synthetic oligonucleotide
gtcccgcaaaaaatgttgctacggcccaacctaatgaaccccacatccgagcac

SEQ ID NO: 504091 - DNA, 53 bp, Artificial
  Synthetic oligonucleotide
ttgccttatttccctgagtgaagtgattaatgtatccttcatcggtttccttt

SEQ ID NO: 504092 - DNA, 53 bp, Artificial
  Synthetic oligonucleotide
acatcggataacaaccaaacattttgatacaaagctctataagtgggctcatg

SEQ ID NO: 504093 - DNA, 53 bp, Artificial
  Synthetic oligonucleotide
acatcgtctgcatttaacggcctgatcagcatctcgcacctcgaatgtctcaa

SEQ ID NO: 504094 - DNA, 53 bp, Artificial
  Synthetic oligonucleotide
tgtaccagacttagacaattacattgttcctgtagcgaatggtgataatgccg

SEQ ID NO: 504095 - DNA, 52 bp, Artificial
  Synthetic oligonucleotide
agccattatcacaggaaatgctatgcaggtaccagtatttgtacggattcct

SEQ ID NO: 504096 - DNA, 52 bp, Artificial
  Synthetic oligonucleotide
tattattgtcttagcaattacggggttcatgcactttgctagtgggcgtacg

SEQ ID NO: 504097 - DNA, 52 bp, Artificial
  Synthetic oligonucleotide
ggtgactgatacgcaaggcagaattcgttactatgatgccgattcaggtgaa

SEQ ID NO: 504098 - DNA, 52 bp, Artificial
  Synthetic oligonucleotide
gcagttgacaaacgttgtactgtgcgtggttggtcagtttttgtatagaata

SEQ ID NO: 504099 - DNA, 52 bp, Artificial
  Synthetic oligonucleotide
gaatagtaacaccctcccaaccgagcttcgcgataatttaggctgccgaatt

SEQ ID NO: 504100 - DNA, 51 bp, Artificial
  Synthetic oligonucleotide
ttggcacattgccaccacgtaacacaagcggtacggcagtgagtagttgtt

SEQ ID NO: 504101 - DNA, 51 bp, Artificial
  Synthetic oligonucleotide
ttatacgtaccatttgtaccaaagtcataggcttggccatcaatgatttgg

SEQ ID NO: 504102 - DNA, 51 bp, Artificial
  Synthetic oligonucleotide
agattagccctttaatactgtcttttcggttactatatgtgtctggctcga

SEQ ID NO: 504103 - DNA, 51 bp, Artificial
  Synthetic oligonucleotide
acccatatcttccccgccttgtataacttctttctcatcgataagaactcc

SEQ ID NO: 504104 - DNA, 51 bp, Artificial
  Synthetic oligonucleotide
gttacgcttctctagcaacaacatctataggttactatcgtacgaatgttg

SEQ ID NO: 504105 - DNA, 51 bp, Artificial
  Synthetic oligonucleotide
aatacccatcacaccatacgacagaagaacatgacctgcaccaaattttgg

SEQ ID NO: 504106 - DNA, 51 bp, Artificial
  Synthetic oligonucleotide
aatatctatcaatgctgaacctgcgtgcatgataacagtattatgggttcg

SEQ ID NO: 504107 - DNA, 50 bp, Artificial
  Synthetic oligonucleotide
ttgacaagttagcagttgacaaacgttgtactgtgcgtggttggtcagtt

SEQ ID NO: 504108 - DNA, 50 bp, Artificial
  Synthetic oligonucleotide
ctcatcgtattaagttatgaccaatattcactgtaagcaaactacacgcg

SEQ ID NO: 504109 - DNA, 55 bp, Artificial
  Synthetic oligonucleotide
ttttgagagcgcctttgtcactactttgcggtcactggtgggtataaactaagtt

SEQ ID NO: 504110 - DNA, 55 bp, Artificial
  Synthetic oligonucleotide
tgggataaagaagtttattcaccagttgcaggtacaattgtggcagcttatgata

SEQ ID NO: 504111 - DNA, 55 bp, Artificial
  Synthetic oligonucleotide
tctaagcattaacttattcaacattggtgaggccacctccgttaattgaaagcac

SEQ ID NO: 504112 - DNA, 55 bp, Artificial
  Synthetic oligonucleotide
tcgacaactaggcgttgaatgagtttcgataaggcagcgataaattcctttgctc

SEQ ID NO: 504113 - DNA, 55 bp, Artificial
  Synthetic oligonucleotide
gttacctctatccgataccgtagcagtaaattgatagcggtgtcccggaacggtt

SEQ ID NO: 504114 - DNA, 55 bp, Artificial
  Synthetic oligonucleotide
gtggcgaaagagtttcaggtaccttgggagttattagcttcttggcataaggcgg

SEQ ID NO: 504115 - DNA, 55 bp, Artificial
  Synthetic oligonucleotide
gtgacgcaggctataagttcgcagattatacagccgttcgaaatggctttggtcg

SEQ ID NO: 504116 - DNA, 55 bp, Artificial
  Synthetic oligonucleotide
gtcaccactctaaccgctacttccagtggtataagcaatctaactggagtggatt

SEQ ID NO: 504117 - DNA, 55 bp, Artificial
  Synthetic oligonucleotide
ggatacggagatgtaacagatggtcctgtagtattagaattaattcctggaccaa

SEQ ID NO: 504118 - DNA, 55 bp, Artificial
  Synthetic oligonucleotide
gcgtaacttctattatcaatttgaggattttgtgccgggaccgattgtgcgtact

SEQ ID NO: 504119 - DNA, 55 bp, Artificial
  Synthetic oligonucleotide
gcgacccctgtcaccggctcaatccgcatgattttcgttccgaccgttttaatga

SEQ ID NO: 504120 - DNA, 55 bp, Artificial
  Synthetic oligonucleotide
gattagtgggttatcatttccaaatctagctcaggcaagtactctggatgagcca

SEQ ID NO: 504121 - DNA, 55 bp, Artificial
  Synthetic oligonucleotide
gaaatgtacggctatttcagcaggaagtagcggataacaagcgagggaagcgacc

SEQ ID NO: 504122 - DNA, 55 bp, Artificial
  Synthetic oligonucleotide
gaaaggacatagaagttcaccaaaagctggctcaccttctattgcaatcggttca

SEQ ID NO: 504123 - DNA, 55 bp, Artificial
  Synthetic oligonucleotide
cgtaagataatgaacttttgttaaactgcgggaaggaaggtagccagcctaggcg

SEQ ID NO: 504124 - DNA, 55 bp, Artificial
  Synthetic oligonucleotide
cggaacaactgataaaccaacggaatctgatttgcaaccagtagataaacctacg

SEQ ID NO: 504125 - DNA, 55 bp, Artificial
  Synthetic oligonucleotide
cgccagtcaagcatacatgatccgctgacaaagcttgcaaattaccggcattttg

SEQ ID NO: 504126 - DNA, 55 bp, Artificial
  Synthetic oligonucleotide
cgatggtgcttacatgtttctccaactgttttccctgcttttccgaccaaagccc

SEQ ID NO: 504127 - DNA, 55 bp, Artificial
  Synthetic oligonucleotide
cgaacatggcaattgatacagccggattaatgtgacaaccggaaattgtcccaat

SEQ ID NO: 504128 - DNA, 55 bp, Artificial
  Synthetic oligonucleotide
ccgcactccacaagcgattttcttcaatctccgttaaaagcgtctggtaaaccgc

SEQ ID NO: 504129 - DNA, 55 bp, Artificial
  Synthetic oligonucleotide
attatggggtttgggagttttcaacccttccgataaagaaatttcgacttccact

SEQ ID NO: 504130 - DNA, 55 bp, Artificial
  Synthetic oligonucleotide
agagagaaacggctggttggattttaggcatgctagaagcagttagtatttgctt

SEQ ID NO: 504131 - DNA, 55 bp, Artificial
  Synthetic oligonucleotide
aagtaatcaagacgtgaaccgtattgtcgaggcgatcgcaaaccgagataagcgc

SEQ ID NO: 504132 - DNA, 52 bp, Artificial
  Synthetic oligonucleotide
taagcaaggtgactatagaaaacttaccagcgtttccctctagttccagttt

SEQ ID NO: 504133 - DNA, 52 bp, Artificial
  Synthetic oligonucleotide
catcgggaccattttaaacacgacaccatttccgagtccgacggctaatgca

SEQ ID NO: 504134 - DNA, 55 bp, Artificial
  Synthetic oligonucleotide
gatgcgcgtttgtctcagacttttgctgcacggctgcttgaagagggtatttacg

SEQ ID NO: 504135 - DNA, 55 bp, Artificial
  Synthetic oligonucleotide
gatggcagttgcagcaataatagcatgagtgtggtcggcagtagccactaccacg

SEQ ID NO: 504136 - DNA, 55 bp, Artificial
  Synthetic oligonucleotide
gccccgacgtagcaggaacagcatccctggtctgtacaagtttcaagtccttccg

SEQ ID NO: 504137 - DNA, 55 bp, Artificial
  Synthetic oligonucleotide
gccggctcatccattgccagggaaacagacgcgggtgtctatacacatgcaggca

SEQ ID NO: 504138 - DNA, 55 bp, Artificial
  Synthetic oligonucleotide
gcctgcatgtaagcgggcctctaaggccgggtcttcaagtgctaacaaagatgga

SEQ ID NO: 504139 - DNA, 55 bp, Artificial
  Synthetic oligonucleotide
gcgaccatcggcgcacacttggtttatggcctacatttcaccagtccggatgccc

SEQ ID NO: 504140 - DNA, 55 bp, Artificial
  Synthetic oligonucleotide
gcgtatcagtcttagttttcgctcttacgccttcacgacagtttcggaatgttca

SEQ ID NO: 504141 - DNA, 55 bp, Artificial
  Synthetic oligonucleotide
gcgtgggtactcatcgcgttgttcttatagaaagaactgacagtacgtgtagcat

SEQ ID NO: 504142 - DNA, 55 bp, Artificial
  Synthetic oligonucleotide
ggacaggaccaaggtatcatcgcgaccaatagcgtcggcctgaattacagtgata

SEQ ID NO: 504143 - DNA, 55 bp, Artificial
  Synthetic oligonucleotide
ggacgcaaaattaccagccggtcctacagcaccaaatcccgggccgatgcctccc

SEQ ID NO: 504144 - DNA, 55 bp, Artificial
  Synthetic oligonucleotide
ggcaatatcaattattcgttcacgtgctctctcagggatctgatgtacaaagccg

SEQ ID NO: 504145 - DNA, 55 bp, Artificial
  Synthetic oligonucleotide
gggaaatctgcatgatgatttgtggtcagcgcatcttgaataccggacaaatgac

SEQ ID NO: 504146 - DNA, 55 bp, Artificial
  Synthetic oligonucleotide
gggagaacggatgacgcccgtcaatattttcgggatgatacttacaattagcggt

SEQ ID NO: 504147 - DNA, 55 bp, Artificial
  Synthetic oligonucleotide
gggatatgcgataacaactgtgaagattgagggtgttgaccatgagttctccagc

SEQ ID NO: 504148 - DNA, 55 bp, Artificial
  Synthetic oligonucleotide
gggcccagaaacagtgtccatgtggaaaacggcaggtaggcagatcggtaaccgt

SEQ ID NO: 504149 - DNA, 55 bp, Artificial
  Synthetic oligonucleotide
gggctaaagggatcatggcagggtgggaacctattcttgaagaccttgccccttt

SEQ ID NO: 504150 - DNA, 55 bp, Artificial
  Synthetic oligonucleotide
ggggtagatctgccaccgaggttagaatatgggcagagtatggttggtcgtcaga

SEQ ID NO: 504151 - DNA, 55 bp, Artificial
  Synthetic oligonucleotide
ggtcaacaccctcaatcttcacagttgttatcgcatatccttcgagtgaggacaa

SEQ ID NO: 504152 - DNA, 55 bp, Artificial
  Synthetic oligonucleotide
ggtcctcgtctggggaaatacaacggaaaacgaaaagcgattcccggccacagtt

SEQ ID NO: 504153 - DNA, 55 bp, Artificial
  Synthetic oligonucleotide
ggtcgggatacatataaccaatctcagtggcaataaccggataattgtcggccac

SEQ ID NO: 504154 - DNA, 55 bp, Artificial
  Synthetic oligonucleotide
ggtgtttccacctttaatttatgcgaaggtccgaggataaagcctccgcccgggg

SEQ ID NO: 504155 - DNA, 55 bp, Artificial
  Synthetic oligonucleotide
ggttgagaataccacttacggtattacctgtttctttacgccttgtcagatggta

SEQ ID NO: 504156 - DNA, 55 bp, Artificial
  Synthetic oligonucleotide
gtaccacggtatatgtccggaatcccaggacaggtacatttcagtgtgagctgcg

SEQ ID NO: 504157 - DNA, 55 bp, Artificial
  Synthetic oligonucleotide
gtcgacacttcctttctaatggccagaaataccttaacccaacgtactattggcc

SEQ ID NO: 504158 - DNA, 55 bp, Artificial
  Synthetic oligonucleotide
gtgagctaccaaatcgtcgcggctgctatcatcggtaataaaagtgcgcatcttc

SEQ ID NO: 504159 - DNA, 55 bp, Artificial
  Synthetic oligonucleotide
gtggtacacaggagggttcattttcctgggactgaccatctggacgtcggtaacc

SEQ ID NO: 504160 - DNA, 55 bp, Artificial
  Synthetic oligonucleotide
gtttacattctttacagcacttctcgtgaccactattatatcggaagcgcctcgg

SEQ ID NO: 504161 - DNA, 55 bp, Artificial
  Synthetic oligonucleotide
tacgcgaaaagatgaatttgccgctctattatcctactactcctatggacgatcg

SEQ ID NO: 504162 - DNA, 55 bp, Artificial
  Synthetic oligonucleotide
tatgcaaacggttgtcatgaaagttgccggaagtgacaacatccagtgcggtttt

SEQ ID NO: 504163 - DNA, 55 bp, Artificial
  Synthetic oligonucleotide
tccacaaaggctgatgcgggctttggaagtttgtatagcaactggacaaccttat

SEQ ID NO: 504164 - DNA, 55 bp, Artificial
  Synthetic oligonucleotide
ttttccttcacggagcatttgtgcctctctgtccggataggctgggtatccaaaa

SEQ ID NO: 504165 - DNA, 55 bp, Artificial
  Synthetic oligonucleotide
atcaatataccataaccccggaatctgtcagggactcgatgaaaacccttcagac

SEQ ID NO: 504166 - DNA, 55 bp, Artificial
  Synthetic oligonucleotide
caccatgcgcattacatggattcggtccttcattattccgttactgggcaacctg

SEQ ID NO: 504167 - DNA, 55 bp, Artificial
  Synthetic oligonucleotide
cacttctacgcaaataaagttcttccccgagcgaagccaattgttcatcccacac

SEQ ID NO: 504168 - DNA, 55 bp, Artificial
  Synthetic oligonucleotide
cataaatggcagcattcttggtatctctgatgtaataatcagcttccagcgagag

SEQ ID NO: 504169 - DNA, 55 bp, Artificial
  Synthetic oligonucleotide
catagagtggctgatatctatcatcaggaccgtggaagtttgcgtgcggtactca

SEQ ID NO: 504170 - DNA, 55 bp, Artificial
  Synthetic oligonucleotide
catcgattttgcccgtattatgccaggtatccctaaggcttccgtaaaatcgcgt

SEQ ID NO: 504171 - DNA, 55 bp, Artificial
  Synthetic oligonucleotide
catgatgccaacggggatgtccaccttcccggattcaatttcgcaataatctgcc

SEQ ID NO: 504172 - DNA, 55 bp, Artificial
  Synthetic oligonucleotide
cattcattcttggacctgattcggcaaataaagcccagaccattaccgctcccaa

SEQ ID NO: 504173 - DNA, 55 bp, Artificial
  Synthetic oligonucleotide
cccacctgctcgttgcatcaccgaatgtcatacctacggcattgattggaatccg

SEQ ID NO: 504174 - DNA, 55 bp, Artificial
  Synthetic oligonucleotide
cccgcaatatttacccctgtggctttctctatgccttccaggccaggactactgt

SEQ ID NO: 504175 - DNA, 55 bp, Artificial
  Synthetic oligonucleotide
aaacccgctgatatgcagcccggccataggttccacctgtattccggacaaactc

SEQ ID NO: 504176 - DNA, 55 bp, Artificial
  Synthetic oligonucleotide
cccgtcgcaagactcaggagccgttaatatgaaatagatatgcacggccgttaat

SEQ ID NO: 504177 - DNA, 55 bp, Artificial
  Synthetic oligonucleotide
ccggaagtggaaaatgatcaacctgtaacttcgtatcacggctattccgttaccg

SEQ ID NO: 504178 - DNA, 55 bp, Artificial
  Synthetic oligonucleotide
ccggtaagtttgttgtactcatccaacaccccttgccaattacccatgtgtagca

SEQ ID NO: 504179 - DNA, 55 bp, Artificial
  Synthetic oligonucleotide
cctgccagagtccctgtacgataccaggaatgcgactttacgcctcgccatccta

SEQ ID NO: 504180 - DNA, 55 bp, Artificial
  Synthetic oligonucleotide
cgcaagtaatggactcactacgcctccctgaggtgttcctgcttttgtctcctcg

SEQ ID NO: 504181 - DNA, 55 bp, Artificial
  Synthetic oligonucleotide
cgctaccaatatgcctttaaagcaaatggctgcggaggatggtttccggcaagac

SEQ ID NO: 504182 - DNA, 55 bp, Artificial
  Synthetic oligonucleotide
cggctggacagcccgcccgtattcatttgacatgcgacagagaggtgattagggc

SEQ ID NO: 504183 - DNA, 55 bp, Artificial
  Synthetic oligonucleotide
cggtgcatcgggtccccagccagggttctgttctaaaacaccatcagacaaactt

SEQ ID NO: 504184 - DNA, 55 bp, Artificial
  Synthetic oligonucleotide
cgttaaagagcagggcgaacatgaaggtgacaatggtcatgctggccatttgacc

SEQ ID NO: 504185 - DNA, 55 bp, Artificial
  Synthetic oligonucleotide
ctatcgtggggtatactggaaacgcggagccgttaccatgacagcaatatcggct

SEQ ID NO: 504186 - DNA, 55 bp, Artificial
  Synthetic oligonucleotide
ctgtccgatggacgccgaaagattaatccccacaccggatattaccagggttaac

SEQ ID NO: 504187 - DNA, 55 bp, Artificial
  Synthetic oligonucleotide
ctttcatccggcaataagtgcattcacttcgggacagatttctgcaaaatcaccc

SEQ ID NO: 504188 - DNA, 55 bp, Artificial
  Synthetic oligonucleotide
gaaaatagcaccgtatgaagtgccgtatgttgcccacgagatgggtcaatactgt

SEQ ID NO: 504189 - DNA, 55 bp, Artificial
  Synthetic oligonucleotide
gacaggctggatggaaatgatcagtccctggcagtatgaaatgagtgttctgatt

SEQ ID NO: 504190 - DNA, 55 bp, Artificial
  Synthetic oligonucleotide
gacggggcttttcctcgtgcagtttgccggtctgtttacaggaatgcacctgttg

SEQ ID NO: 504191 - DNA, 54 bp, Artificial
  Synthetic oligonucleotide
ccccggcatcaataaactccgattcactcatgatggttgcctcatatcggggac

SEQ ID NO: 504192 - DNA, 54 bp, Artificial
  Synthetic oligonucleotide
cggtttgtcggaacagggctgaggcgtttgcccaatctgacgattcaggtttat

SEQ ID NO: 504193 - DNA, 54 bp, Artificial
  Synthetic oligonucleotide
accgaaccgtttacgtgacttctgaataaagtgaagtccgttccgatgttgata

SEQ ID NO: 504194 - DNA, 53 bp, Artificial
  Synthetic oligonucleotide
aaaagcgcgggtggggactcggattgactttggttcgacgtattgtggaggat

SEQ ID NO: 504195 - DNA, 53 bp, Artificial
  Synthetic oligonucleotide
acctactggtttaaacagaccggccctgaaagcatattggtcaggtacactca

SEQ ID NO: 504196 - DNA, 53 bp, Artificial
  Synthetic oligonucleotide
cctgaatggtatcttctctgccaaaagactgaggaaggtaagcagtaagtttt

SEQ ID NO: 504197 - DNA, 52 bp, Artificial
  Synthetic oligonucleotide
tgaagtcacccgaaatgccggtttcgagtccctggcgggtgcgaataattcc

SEQ ID NO: 504198 - DNA, 51 bp, Artificial
  Synthetic oligonucleotide
ggggcactggttcttacagggcatatgtcaatgcctccacgccgtgtatag

SEQ ID NO: 504199 - DNA, 51 bp, Artificial
  Synthetic oligonucleotide
ttgggcagccacaacggcggaacatttccgctcttctccggcacaaacatt

SEQ ID NO: 504200 - DNA, 55 bp, Artificial
  Synthetic oligonucleotide
tttgcagcttatgagctaacgacaaaatgcatgccatctgtcagtaaatttggga

SEQ ID NO: 504201 - DNA, 55 bp, Artificial
  Synthetic oligonucleotide
ttctgtagatcgacaagacgagaagggctggctatatcggcttgtgggaagtagg

SEQ ID NO: 504202 - DNA, 55 bp, Artificial
  Synthetic oligonucleotide
ttcccaatttccccttctgcgcagctaaccgttacaaacgatccgttttgaagca

SEQ ID NO: 504203 - DNA, 55 bp, Artificial
  Synthetic oligonucleotide
ggagaatttactcctctagaacctccttctgtgcttcatcctatcgttcatagtc

SEQ ID NO: 504204 - DNA, 55 bp, Artificial
  Synthetic oligonucleotide
gaggcggtcatagtgcacatctcctgggtgcaaacgggagtaaaggccattggga

SEQ ID NO: 504205 - DNA, 55 bp, Artificial
  Synthetic oligonucleotide
ctgctgactttagaaaggcttttggatgctatgcgtcgcaagcctatacggctgt

SEQ ID NO: 504206 - DNA, 55 bp, Artificial
  Synthetic oligonucleotide
cccctggtttccatgggatgccattggctaccaaattaagtccaagagcggtagg

SEQ ID NO: 504207 - DNA, 55 bp, Artificial
  Synthetic oligonucleotide
cccctcgtcttgaactatggtttaaaatcgattccctgtcgatgctcaacagcct

SEQ ID NO: 504208 - DNA, 55 bp, Artificial
  Synthetic oligonucleotide
ccccaagtgccgtggaaacctttggtgctccgaatgcagcggttcttccaaccga

SEQ ID NO: 504209 - DNA, 55 bp, Artificial
  Synthetic oligonucleotide
cccatgtcttcagcagtataggcgggtatagtggaggacaagttaactttggggc

SEQ ID NO: 504210 - DNA, 55 bp, Artificial
  Synthetic oligonucleotide
ccatgatagaggtccgtctccatacaagccgatagggaagctttgtccaacagtc

SEQ ID NO: 504211 - DNA, 55 bp, Artificial
  Synthetic oligonucleotide
cactccttctccaatttgacaagcagattcatatccagcttgctctacgatatcc

SEQ ID NO: 504212 - DNA, 55 bp, Artificial
  Synthetic oligonucleotide
attccccaataggagtactatctgcaactagaccgcctccagcttgaagatacgc

SEQ ID NO: 504213 - DNA, 55 bp, Artificial
  Synthetic oligonucleotide
aggcgaaaggattctttgtagaagtccattgggttaaaatcgagcctctagccag

SEQ ID NO: 504214 - DNA, 55 bp, Artificial
  Synthetic oligonucleotide
aacgaatcggggcggaaggacctgtcatgcggctattgttagccgagagttaggg

SEQ ID NO: 504215 - DNA, 51 bp, Artificial
  Synthetic oligonucleotide
gcacatagtaggcagcgctcattctgacagtatcgtcgggatccatcgaca

SEQ ID NO: 504216 - DNA, 50 bp, Artificial
  Synthetic oligonucleotide
acaagcgggaatgaggtgtgcttgcttgatcgattgaatggtgctcttca

SEQ ID NO: 504217 - DNA, 55 bp, Artificial
  Synthetic oligonucleotide
ttgacggtgagaagccaatgctcccggaccaggggcgtcattccggggaacggtc

SEQ ID NO: 504218 - DNA, 55 bp, Artificial
  Synthetic oligonucleotide
ttcacccatgtggatgccccaagtgtcactcgcgcaagccccatccggaccgcat

SEQ ID NO: 504219 - DNA, 55 bp, Artificial
  Synthetic oligonucleotide
ttactgtctcaccgcccggatcctacggcaagccgcgtcctgccctcgtcattca

SEQ ID NO: 504220 - DNA, 55 bp, Artificial
  Synthetic oligonucleotide
tcgcgtctgtcattgcatgcctcctagtttgtcgccgccggaagcaggacgggtc

SEQ ID NO: 504221 - DNA, 55 bp, Artificial
  Synthetic oligonucleotide
ggtagcctccttggtgatcggggataatgacccgtggcacaccgggttccaggct

SEQ ID NO: 504222 - DNA, 55 bp, Artificial
  Synthetic oligonucleotide
gggcaatgatccgacatctgccaagtacgccatttgcgatagagcttctcaggcg

SEQ ID NO: 504223 - DNA, 55 bp, Artificial
  Synthetic oligonucleotide
ggcgtgtgctcttctcaggacgcatatcgaggatgtggggaaatccctgcagacc

SEQ ID NO: 504224 - DNA, 55 bp, Artificial
  Synthetic oligonucleotide
gaagcaatcaacgatctggatcggctacaaggtgcatctgaccgagacgtgcgac

SEQ ID NO: 504225 - DNA, 55 bp, Artificial
  Synthetic oligonucleotide
ctggcctcatagctgacccaccaatattccctgcgatcgtccattctgcaccctc

SEQ ID NO: 504226 - DNA, 55 bp, Artificial
  Synthetic oligonucleotide
cggtccacccgcgtattgagcgccttcccgaactgcgcatactcgatctggttcg

SEQ ID NO: 504227 - DNA, 55 bp, Artificial
  Synthetic oligonucleotide
cgcggcgcctatgctcaaagggcagccgttccctggcagtctggaagttgtatgc

SEQ ID NO: 504228 - DNA, 55 bp, Artificial
  Synthetic oligonucleotide
cctagacaggcctatagacgcgcagcacggttaatcggcggtgtgtcagcgaatg

SEQ ID NO: 504229 - DNA, 55 bp, Artificial
  Synthetic oligonucleotide
catctcagaatcccaaaccgggaagaactcaagcaatcggggctatcacacgctg

SEQ ID NO: 504230 - DNA, 55 bp, Artificial
  Synthetic oligonucleotide
cagcgtcagaattcccgttccggactccacgtcaatagcaacgtgctgattccaa

SEQ ID NO: 504231 - DNA, 55 bp, Artificial
  Synthetic oligonucleotide
caagtcggtgaactgcgcgcgatcatgcctccatcctgcggctcaactcggaacc

SEQ ID NO: 504232 - DNA, 55 bp, Artificial
  Synthetic oligonucleotide
atcctgtgtccacccgttcggatcgaatggtcagacgcgcttcgccccaggacgg

SEQ ID NO: 504233 - DNA, 55 bp, Artificial
  Synthetic oligonucleotide
atatcgacaccacggacagtcacagcggtccgttcctcccggccgcttcgctcat

SEQ ID NO: 504234 - DNA, 55 bp, Artificial
  Synthetic oligonucleotide
agcaaatactgatgcggcgttcggacccggttcacgcccttgaaatagtgcgtgc

SEQ ID NO: 504235 - DNA, 55 bp, Artificial
  Synthetic oligonucleotide
acttgtcgacgcgcaggggacaacggtgctggcgaacccagccttccggcgttac

SEQ ID NO: 504236 - DNA, 55 bp, Artificial
  Synthetic oligonucleotide
accgcatttgtcgatcgttgtgacacgcgacctgtttgatctgcatctaaactgc

SEQ ID NO: 504237 - DNA, 51 bp, Artificial
  Synthetic oligonucleotide
tatagacgttcgacaggtaaaagtagcagagcccggcaatggacacgtaaa

SEQ ID NO: 504238 - DNA, 51 bp, Artificial
  Synthetic oligonucleotide
ttccactgtctttccgcaggtctctgtagaatagtcaccaacgttgagacg

SEQ ID NO: 504239 - DNA, 50 bp, Artificial
  Synthetic oligonucleotide
atgtacctgttttgttctatttcggcaagggtgcgggatacgagaacgct

SEQ ID NO: 504240 - DNA, 50 bp, Artificial
  Synthetic oligonucleotide
tctccaatggaacagcgattagatacgcctctgccccagaagttagagat

SEQ ID NO: 504241 - DNA, 50 bp, Artificial
  Synthetic oligonucleotide
ttgcaacttagttcgctactgctctggaaagacgtaccccagacatgcaa

SEQ ID NO: 504242 - DNA, 60 bp, Artificial
  Synthetic oligonucleotide
caccgcttaacattctgcgcaacgaactccccatcctctaatgcggaagtacccgattcc

SEQ ID NO: 504243 - DNA, 60 bp, Artificial
  Synthetic oligonucleotide
gctatcgcgctttgcttcgtgattttcacttggtttctccgtagtctcaggcaaaaggca

SEQ ID NO: 504244 - DNA, 57 bp, Artificial
  Synthetic oligonucleotide
gtccaaggaaatagttacgacaacgcccgtctattgcatgatgcttggtgcgctgca

SEQ ID NO: 504245 - DNA, 55 bp, Artificial
  Synthetic oligonucleotide
tttcacggggagtgtatgcgtgcgcttggtcagcaaagcgtcataagcgtttaac

SEQ ID NO: 504246 - DNA, 55 bp, Artificial
  Synthetic oligonucleotide
gcgtgtgctcgccaatgtagcgcagcttcaacaggtaaggctcgggcaggcgaag

SEQ ID NO: 504247 - DNA, 55 bp, Artificial
  Synthetic oligonucleotide
gcggaaacgaagcatgtgcttggtgtacgttgctttgccttcgatgcgggaaccc

SEQ ID NO: 504248 - DNA, 55 bp, Artificial
  Synthetic oligonucleotide
gccgcaaatattctcaacaagaaatttcgcattgtcatgccctcccctctgtcgg

SEQ ID NO: 504249 - DNA, 55 bp, Artificial
  Synthetic oligonucleotide
ctccactgaatactcctcagtacacaccggcctaatctctacatgcctcccgtcg

SEQ ID NO: 504250 - DNA, 55 bp, Artificial
  Synthetic oligonucleotide
cgatcagaaagggcatagggacgttgttcaccaaaaccgtgccccggaaatggcc

SEQ ID NO: 504251 - DNA, 55 bp, Artificial
  Synthetic oligonucleotide
cgaatcgcatcaacgatttagcgccttaatggacaaacaacagtttcaagtcgtc

SEQ ID NO: 504252 - DNA, 55 bp, Artificial
  Synthetic oligonucleotide
cgaaggcactaaactcactaaattgggcagtgaagggcgaagcacttcaacaacc

SEQ ID NO: 504253 - DNA, 55 bp, Artificial
  Synthetic oligonucleotide
ccactttagaggtgatgccttgcgttaatcaacggattatagttctgcgctccgt

SEQ ID NO: 504254 - DNA, 55 bp, Artificial
  Synthetic oligonucleotide
catcccagcatacaggcggcgctactgcactgcgggatcgacgacgatctactcg

SEQ ID NO: 504255 - DNA, 55 bp, Artificial
  Synthetic oligonucleotide
caggtacttggtaatggtactcagactgcctcggcctaacttctcatgcaggctt

SEQ ID NO: 504256 - DNA, 55 bp, Artificial
  Synthetic oligonucleotide
actcctctgcacaagaatgaggcttaggcatggaacccgatacatttcatgtcgt

SEQ ID NO: 504257 - DNA, 54 bp, Artificial
  Synthetic oligonucleotide
ttgcctgaaaatccgctgatttaaacgtcatagtgccctgccttgtaaacttct

SEQ ID NO: 504258 - DNA, 52 bp, Artificial
  Synthetic oligonucleotide
aaatcagaaggcgtgatcactctgcagcatgccttgaagcgtgctatcgaaa

SEQ ID NO: 504259 - DNA, 55 bp, Artificial
  Synthetic oligonucleotide
tttccatgcggaccccgtgacttcctccctcgccgcgctaactgctgactgcatc

SEQ ID NO: 504260 - DNA, 55 bp, Artificial
  Synthetic oligonucleotide
ttccgactttcctcaccccagaagacgcccgacgtctttaaggccatacgccagc

SEQ ID NO: 504261 - DNA, 55 bp, Artificial
  Synthetic oligonucleotide
gggtcacatacgcggcttgaccaatacaattccgcttcaggtggagatactctac

SEQ ID NO: 504262 - DNA, 55 bp, Artificial
  Synthetic oligonucleotide
gggaaaacctagtccccaatataggcccaaaatctttagttgtcagagcccctga

SEQ ID NO: 504263 - DNA, 55 bp, Artificial
  Synthetic oligonucleotide
ggctttgcacagcgactcccgcgccttaaatccgaaacgacatgccccgcacgct

SEQ ID NO: 504264 - DNA, 55 bp, Artificial
  Synthetic oligonucleotide
ggcgtgaagcgagccatggcaggtgaatatagccgcgaactgtcgactaaagtgt

SEQ ID NO: 504265 - DNA, 55 bp, Artificial
  Synthetic oligonucleotide
ggccgttcttggacgcccgcacattgattgggacggacaactcgcgcagttcgtc

SEQ ID NO: 504266 - DNA, 55 bp, Artificial
  Synthetic oligonucleotide
gcttgccccgccgtcttccgtcattgcgtcgcttcgctcacaaggacaatcgcgt

SEQ ID NO: 504267 - DNA, 55 bp, Artificial
  Synthetic oligonucleotide
gcgcccgaaatctggagtgcggtgctcgctgcctgatcgtaacgaaatgccagcc

SEQ ID NO: 504268 - DNA, 55 bp, Artificial
  Synthetic oligonucleotide
gcatcggcgaaggagtcgcaatccagtttccacgtgccgccggaagtcatctcct

SEQ ID NO: 504269 - DNA, 55 bp, Artificial
  Synthetic oligonucleotide
cttcaatctgcgatgcagcgtgcgttcggaagtcgagagcgcctttgcgagatcc

SEQ ID NO: 504270 - DNA, 55 bp, Artificial
  Synthetic oligonucleotide
ctcgacctttcgaacttaaacgctgtcgccttgcctgtgaccgccaagtaccttt

SEQ ID NO: 504271 - DNA, 55 bp, Artificial
  Synthetic oligonucleotide
cgttcccacgatcaccatgtacgcccatggcggaagtcagggcagtatccggtgg

SEQ ID NO: 504272 - DNA, 55 bp, Artificial
  Synthetic oligonucleotide
cggccaaggcggaatatacgttgcgggataaacttctgcgctggtccaagagacg

SEQ ID NO: 504273 - DNA, 55 bp, Artificial
  Synthetic oligonucleotide
cgcgtgcccatgccggacctcagtgcgaaatcggctcgaggctgcccttgccctt

SEQ ID NO: 504274 - DNA, 55 bp, Artificial
  Synthetic oligonucleotide
cgcgggccgcaaagagaaagtcactttcccatgaaagcgcttaccttccacggca

SEQ ID NO: 504275 - DNA, 55 bp, Artificial
  Synthetic oligonucleotide
ccggtttacgacgagaatcttcgtgtctttgcgcgctgataagatttggctggga

SEQ ID NO: 504276 - DNA, 55 bp, Artificial
  Synthetic oligonucleotide
attgaccgggtcaaacgcggccgtggcgcttttcaaacggggcaactcggcttac

SEQ ID NO: 504277 - DNA, 55 bp, Artificial
  Synthetic oligonucleotide
acgagcctggatcttcgcgagcgcgatactgttgatggtccactctgccccggga

SEQ ID NO: 504278 - DNA, 55 bp, Artificial
  Synthetic oligonucleotide
aaatatccggcgcgtagccgaccaccgatagcaatccaaccgcgctccccgtgtg

SEQ ID NO: 504279 - DNA, 54 bp, Artificial
  Synthetic oligonucleotide
attattaccgctacaatttccgaggccagaatcaactcccgctgaattacagtt

SEQ ID NO: 504280 - DNA, 53 bp, Artificial
  Synthetic oligonucleotide
ggcctgagagcgtatgcctataaatgcgattatttcgctcggtatcaagaaca

SEQ ID NO: 504281 - DNA, 52 bp, Artificial
  Synthetic oligonucleotide
cctccggctattcccagcttgcgccaggcatgcgtgtaacggtgaaggacga

SEQ ID NO: 504282 - DNA, 51 bp, Artificial
  Synthetic oligonucleotide
gaagcaagaccatccggggcaacccacccggccgtaagagtcctcacaaga

SEQ ID NO: 504283 - DNA, 51 bp, Artificial
  Synthetic oligonucleotide
cctagctgagattgggcggcgtttggaggtgaggcatgtcgaaaactctgt

SEQ ID NO: 504284 - DNA, 55 bp, Artificial
  Synthetic oligonucleotide
gcatctagcagattgctgcacgacggctgactttgtccccaggttgctatagcgt

SEQ ID NO: 504285 - DNA, 55 bp, Artificial
  Synthetic oligonucleotide
gcacggacatcgcgaatcagaccaattaccgcgagtacaacgagaagtgtgacgc

SEQ ID NO: 504286 - DNA, 55 bp, Artificial
  Synthetic oligonucleotide
gcacgcaggctccccagcaagtgtcatgactgctgatgttccgtactccgtgccc

SEQ ID NO: 504287 - DNA, 55 bp, Artificial
  Synthetic oligonucleotide
gatgagaccgttggcgaatgtcagagaggggtcgtccgactcatgcgggtttccg

SEQ ID NO: 504288 - DNA, 55 bp, Artificial
  Synthetic oligonucleotide
gagccgggaggcatgctgcgacctaagctgtgcatatgaccgattccacgctccg

SEQ ID NO: 504289 - DNA, 55 bp, Artificial
  Synthetic oligonucleotide
gagagacgcaagtcttcataatggttcggattcgacctagcagtgccatggatcg

SEQ ID NO: 504290 - DNA, 55 bp, Artificial
  Synthetic oligonucleotide
gactgagaaggatttcacgaccgggctgaacttcacgaaggaagcggatgcctcg

SEQ ID NO: 504291 - DNA, 55 bp, Artificial
  Synthetic oligonucleotide
gacgtcgctcctcggtcgaacacgagctgaagtgtgggttgcatcgaaactctcc

SEQ ID NO: 504292 - DNA, 55 bp, Artificial
  Synthetic oligonucleotide
gacgccacgcaaatgaatacgagcccggaggggagccgagcccacaatgaagtcc

SEQ ID NO: 504293 - DNA, 55 bp, Artificial
  Synthetic oligonucleotide
ctgccgaacggatcactccatcgccgagaagcgactcggagcctatgcggttcac

SEQ ID NO: 504294 - DNA, 55 bp, Artificial
  Synthetic oligonucleotide
ctcgaggtcttgatcttcttcaacgctagaggcgtcgtcgtgaggcactgcggca

SEQ ID NO: 504295 - DNA, 55 bp, Artificial
  Synthetic oligonucleotide
ctagaagggttccagtttctagaaggggagtgctaaggcgagactctcagcgttg

SEQ ID NO: 504296 - DNA, 55 bp, Artificial
  Synthetic oligonucleotide
cgtaagcgcacctcagtcactaccgtgcacaacaacgacggagtcaataactccg

SEQ ID NO: 504297 - DNA, 55 bp, Artificial
  Synthetic oligonucleotide
cggttagtcacccggtaggcgcgacaggactcaccgtcacagtcatccgatcgac

SEQ ID NO: 504298 - DNA, 55 bp, Artificial
  Synthetic oligonucleotide
cggtggaggggatgtccattccgagttcgtttataggagagtcatcgacgggcag

SEQ ID NO: 504299 - DNA, 55 bp, Artificial
  Synthetic oligonucleotide
cgggttcgttcgactcgagcatccattccctgattgtcgcagatgactcggctca

SEQ ID NO: 504300 - DNA, 55 bp, Artificial
  Synthetic oligonucleotide
cggggagcactgctgcactgtcgatcacgatgcattcctctcgccgggtttcgga

SEQ ID NO: 504301 - DNA, 55 bp, Artificial
  Synthetic oligonucleotide
cgggcatgacatcgatggcacggaacacttgctcaagcgcggtgtaacgcacgac

SEQ ID NO: 504302 - DNA, 55 bp, Artificial
  Synthetic oligonucleotide
cgggagcgtatggatttgctgttgattctcgctggtgaccttgccagagtgcggc

SEQ ID NO: 504303 - DNA, 55 bp, Artificial
  Synthetic oligonucleotide
cggattgtgtacgtgttgtatacacgtgccatgcactgtagcaggcgtgggccgc

SEQ ID NO: 504304 - DNA, 55 bp, Artificial
  Synthetic oligonucleotide
ttgaagcttgtgcgaggagacatcgcgcgagttttcgaagtgccgtaccgggtta

SEQ ID NO: 504305 - DNA, 55 bp, Artificial
  Synthetic oligonucleotide
tgggagccacatgactagcaaggtgcctgcaacccggaccgtaaccgagaagagc

SEQ ID NO: 504306 - DNA, 55 bp, Artificial
  Synthetic oligonucleotide
tggagcaggatactctgaacgatcttctgcgccctcccaagatctttacccggtg

SEQ ID NO: 504307 - DNA, 55 bp, Artificial
  Synthetic oligonucleotide
tctcaactcgcagttctccgcggcgtgggcactcggtgatcttgaacgcgcagaa

SEQ ID NO: 504308 - DNA, 55 bp, Artificial
  Synthetic oligonucleotide
tcggaggatgccgggaacccatcgcttcgagggaccgagcgatctgcacctgcac

SEQ ID NO: 504309 - DNA, 55 bp, Artificial
  Synthetic oligonucleotide
tcgattcccggtacggagattgacgcctcgaaggtgcccgcctgagtggaggtca

SEQ ID NO: 504310 - DNA, 55 bp, Artificial
  Synthetic oligonucleotide
tccgatgggagctactaccatgcgggagtcttccgcgaacaatgcgatcggggtg

SEQ ID NO: 504311 - DNA, 55 bp, Artificial
  Synthetic oligonucleotide
tacaagaaatcagccgggttattcacagtttccacaacggttaagagtgtgacct

SEQ ID NO: 504312 - DNA, 55 bp, Artificial
  Synthetic oligonucleotide
taagtgactcccctctagacattgaagactagattaagagagagaaggctaagac

SEQ ID NO: 504313 - DNA, 55 bp, Artificial
  Synthetic oligonucleotide
gttgatgagacttcattgaacacgcagtctctgccctcgagtacgcaagtgggcg

SEQ ID NO: 504314 - DNA, 55 bp, Artificial
  Synthetic oligonucleotide
gtggttatcaaataaccggaagaatcgatctagcctcacgtcaatgctgcttggc

SEQ ID NO: 504315 - DNA, 55 bp, Artificial
  Synthetic oligonucleotide
gtcagccatttcggggtgaaacagctgacatatcgcgaccggagcggggtgggtc

SEQ ID NO: 504316 - DNA, 55 bp, Artificial
  Synthetic oligonucleotide
ggtgacctgcgtgcgctgcgcgtattgtcctcgttttcaacccgaaggatctgct

SEQ ID NO: 504317 - DNA, 55 bp, Artificial
  Synthetic oligonucleotide
gggttcccaggctgtatcgctagcatgaacgcggcacgacgaagtgtctggtcgg

SEQ ID NO: 504318 - DNA, 55 bp, Artificial
  Synthetic oligonucleotide
gggatgctctgtgccgtgccttcggaaggagtgctcacccgcccattatcccggt

SEQ ID NO: 504319 - DNA, 55 bp, Artificial
  Synthetic oligonucleotide
gggaagtcgaagtgtttctctagctcgtgatcctgtgagctcgagcagtattgag

SEQ ID NO: 504320 - DNA, 55 bp, Artificial
  Synthetic oligonucleotide
ggctagcgtcacgcaccacaaacccagaaacccagatgcgcgaagactcggggtc

SEQ ID NO: 504321 - DNA, 55 bp, Artificial
  Synthetic oligonucleotide
gctgggctccgacatcgtttgatttggcgtcacacttatcaggctggatagagct

SEQ ID NO: 504322 - DNA, 55 bp, Artificial
  Synthetic oligonucleotide
gctcaacagcggcatccgtctgagcgtcgctaacatcgtcctcagcgaggccaag

SEQ ID NO: 504323 - DNA, 55 bp, Artificial
  Synthetic oligonucleotide
gcggaacctgagacgtagcccaagtatccaggaacgaggggcaaaacgcagggcg

SEQ ID NO: 504324 - DNA, 55 bp, Artificial
  Synthetic oligonucleotide
gcccgggagaacggcattttggtccttgaagacaacccatacgggctgttgtact

SEQ ID NO: 504325 - DNA, 55 bp, Artificial
  Synthetic oligonucleotide
attcgcgaccgtcgcctgccgtgcttaagacgggactcagctgggtcagtttggc

SEQ ID NO: 504326 - DNA, 55 bp, Artificial
  Synthetic oligonucleotide
caagctggcaatagacactgccaacgagataagggttcgagggaagttgccggtg

SEQ ID NO: 504327 - DNA, 55 bp, Artificial
  Synthetic oligonucleotide
atgccactgtatccgcagagcttgcaatccttggcactgagagcgcggaaatccg

SEQ ID NO: 504328 - DNA, 55 bp, Artificial
  Synthetic oligonucleotide
agatagcttgttgataggcgatttcggctcggattcggtagtccaggttcagggg

SEQ ID NO: 504329 - DNA, 55 bp, Artificial
  Synthetic oligonucleotide
agagcgcatcaatgtccgacagcagaacaagcatgtctgcccgaaccaacaccga

SEQ ID NO: 504330 - DNA, 55 bp, Artificial
  Synthetic oligonucleotide
acgggtcatggccctcaccctacggaatcggtcgtccggggatggtcctctcaca

SEQ ID NO: 504331 - DNA, 55 bp, Artificial
  Synthetic oligonucleotide
caggcgtatcgtgtcccggtgcacaacatccttcgtgggacgggtagtaagcgaa

SEQ ID NO: 504332 - DNA, 55 bp, Artificial
  Synthetic oligonucleotide
acgccccggtctcatcagcagtagcggcgcagaacatcgtcgcgagtgttcctgc

SEQ ID NO: 504333 - DNA, 55 bp, Artificial
  Synthetic oligonucleotide
catcacagtggcgacactagagtttgctgtgaacaacgcgccggtgccacgccgg

SEQ ID NO: 504334 - DNA, 55 bp, Artificial
  Synthetic oligonucleotide
catgcccggagatctaaacatatccatccacgaatgtttcgcagattcgagctcg

SEQ ID NO: 504335 - DNA, 55 bp, Artificial
  Synthetic oligonucleotide
cattctcccagaggaatctcgcccttcgctgaatcggaccacctagcctggggat

SEQ ID NO: 504336 - DNA, 55 bp, Artificial
  Synthetic oligonucleotide
ccaacggttctggaacagattacgcagatggggctaactacgccttcacaagcga

SEQ ID NO: 504337 - DNA, 55 bp, Artificial
  Synthetic oligonucleotide
acccgaacggcagatctcggcacgccatctactgctgaccgcaacagagggtcag

SEQ ID NO: 504338 - DNA, 55 bp, Artificial
  Synthetic oligonucleotide
aagctctcgtcgcagaagcgcaaaagctctccgctcgggtaaaggccgcccagct

SEQ ID NO: 504339 - DNA, 55 bp, Artificial
  Synthetic oligonucleotide
aagagatgtggttcgagacgtagccctcttcccaaatctgcatgaactcggcgtg

SEQ ID NO: 504340 - DNA, 55 bp, Artificial
  Synthetic oligonucleotide
cccgggctatggcttcttaagcgaaaatgccgaacttggaaggcaggccaagcta

SEQ ID NO: 504341 - DNA, 55 bp, Artificial
  Synthetic oligonucleotide
cggattcttcctgggagttcgccgtgtgttgtactgtcccgagaccttcccaccg

SEQ ID NO: 504342 - DNA, 55 bp, Artificial
  Synthetic oligonucleotide
cgctcaagtcgtccagattctggtcgtccgagtcgttcttcctcagatagaccgg

SEQ ID NO: 504343 - DNA, 55 bp, Artificial
  Synthetic oligonucleotide
cgcgttctgcacaatgtggacaggctgtggataactcggcatctcggtggactct

SEQ ID NO: 504344 - DNA, 55 bp, Artificial
  Synthetic oligonucleotide
cgcacgtaagggaaaccgagtcaccgctcaagcgtgccacggctcagtggtagtg

SEQ ID NO: 504345 - DNA, 55 bp, Artificial
  Synthetic oligonucleotide
cgatcggcatgctgagctcggtcgaaagcacggcgtcaaccggagcaggaccaat

SEQ ID NO: 504346 - DNA, 55 bp, Artificial
  Synthetic oligonucleotide
cgatagacagacctgttcgggcggtttagggtggccttggcgggtcgttacgagg

SEQ ID NO: 504347 - DNA, 55 bp, Artificial
  Synthetic oligonucleotide
cgatacgtcgagtgcggaggggcggaactggcgattcgggtcatgccgaccatta

SEQ ID NO: 504348 - DNA, 55 bp, Artificial
  Synthetic oligonucleotide
cgagtggatacctttgcgtgaagttctgacaggtgttctaaagttcggccgtcga

SEQ ID NO: 504349 - DNA, 55 bp, Artificial
  Synthetic oligonucleotide
aaccgagacgaaacaccggatgttccccagtgctcgagaccggccgatcagagcc

SEQ ID NO: 504350 - DNA, 55 bp, Artificial
  Synthetic oligonucleotide
cgaccggaataagtgcatctagcggactcgtcagttcgcgtgagcgcaacatcgc

SEQ ID NO: 504351 - DNA, 55 bp, Artificial
  Synthetic oligonucleotide
cctcaggcgttccctcgggaatcaccatcgtaaaagtcgactacgacaccaacca

SEQ ID NO: 504352 - DNA, 55 bp, Artificial
  Synthetic oligonucleotide
ccgcgacccctggtccggagtcgatgtctctcacaaagcgtggtggttgtgcgag

SEQ ID NO: 504353 - DNA, 54 bp, Artificial
  Synthetic oligonucleotide
acccaagatctgcccagcggtaccgacagttacaactcgcgatcccacggtcga

SEQ ID NO: 504354 - DNA, 54 bp, Artificial
  Synthetic oligonucleotide
gccacaaagattgtggcgattctcacggagcgtcgtcagacagttgccctgggg

SEQ ID NO: 504355 - DNA, 54 bp, Artificial
  Synthetic oligonucleotide
gaggtatcccgaatggatgccggaaggcagacaacctcgacagtctagcggaag

SEQ ID NO: 504356 - DNA, 54 bp, Artificial
  Synthetic oligonucleotide
acctgcgactcaacagctgggacatccgccatccgggatcaatgatccgcaagt

SEQ ID NO: 504357 - DNA, 54 bp, Artificial
  Synthetic oligonucleotide
gagcgttgcagaccgatcgagacttgagcgaacgtgtcgttacctgcgctcgtg

SEQ ID NO: 504358 - DNA, 54 bp, Artificial
  Synthetic oligonucleotide
tgaggaactaagagtgagcctgttcgctcaatcgcttggaactcaagaggcggt

SEQ ID NO: 504359 - DNA, 54 bp, Artificial
  Synthetic oligonucleotide
ttaaggacaggagataactttgcgcacaaagtcaaaagaccatggaccatagca

SEQ ID NO: 504360 - DNA, 54 bp, Artificial
  Synthetic oligonucleotide
cggagcgcgtactctggaactcatggatttgaagttctccttcggaggggcgtc

SEQ ID NO: 504361 - DNA, 54 bp, Artificial
  Synthetic oligonucleotide
ggggattctcatgaccaccacgatgagccacgtttgtcaggacgcaatgcgaga

SEQ ID NO: 504362 - DNA, 54 bp, Artificial
  Synthetic oligonucleotide
ccgccaggcagtcgggcggttagttgagccgcaatgattctggcaatgcccgga

SEQ ID NO: 504363 - DNA, 53 bp, Artificial
  Synthetic oligonucleotide
aaaccagccggaaacaacctgcaaatgttaagtcaatgcggcccaaccgcgaa

SEQ ID NO: 504364 - DNA, 53 bp, Artificial
  Synthetic oligonucleotide
tgcaacggtgcgaggtctccagagcgtgccttgatggcttgagcaataagtgg

SEQ ID NO: 504365 - DNA, 53 bp, Artificial
  Synthetic oligonucleotide
ggtcgcgggctcttgcacggatcccacaaaggcatcggcaataggctgtgcag

SEQ ID NO: 504366 - DNA, 53 bp, Artificial
  Synthetic oligonucleotide
ggcattcgcccgatgagtcgcccacccctcagcgaggagagtcgtacctgtcc

SEQ ID NO: 504367 - DNA, 52 bp, Artificial
  Synthetic oligonucleotide
ctaggggatctctggatgttcccgggcaacggaaagggcggctggggctcta

SEQ ID NO: 504368 - DNA, 52 bp, Artificial
  Synthetic oligonucleotide
cccgctgatccatcgacagatcggaccccatccgaaacatctgacctgcggg

SEQ ID NO: 504369 - DNA, 52 bp, Artificial
  Synthetic oligonucleotide
gagcagtaaccactggagccggtactacggtcgagggaaatctttatgctaa

SEQ ID NO: 504370 - DNA, 52 bp, Artificial
  Synthetic oligonucleotide
ccccttcttggtgtctgatcaatcctaacctttagaacgcctgttctacgcg

SEQ ID NO: 504371 - DNA, 52 bp, Artificial
  Synthetic oligonucleotide
tgaatcgacacgatcgctcgtttgatggtctctggactcgctgagtagtgcg

SEQ ID NO: 504372 - DNA, 52 bp, Artificial
  Synthetic oligonucleotide
aattggctgctctccgcgtttgagctgagcgatggcaattggaattaggttt

SEQ ID NO: 504373 - DNA, 52 bp, Artificial
  Synthetic oligonucleotide
ccagaggtaggcgagatccatagcgtgctccgaaagctctcagtagaccgtc

SEQ ID NO: 504374 - DNA, 52 bp, Artificial
  Synthetic oligonucleotide
cagggtccctgctacggctatcagttgcgttccgaattcgaccggcgcaccg

SEQ ID NO: 504375 - DNA, 52 bp, Artificial
  Synthetic oligonucleotide
gtccgccctggaccgctagcactgtgccgagggatccgtctccgcgcgagat

SEQ ID NO: 504376 - DNA, 52 bp, Artificial
  Synthetic oligonucleotide
ggttgactgcacctcgggtacctacattcgagcgttggcgcgtgacgttggg

SEQ ID NO: 504377 - DNA, 51 bp, Artificial
  Synthetic oligonucleotide
gcgttcgtgtcgagccgtgattacgcggcgaggtgggccgagaggaaccag

SEQ ID NO: 504378 - DNA, 51 bp, Artificial
  Synthetic oligonucleotide
cccaccctatccgcgtgctctttccccttccccgagccgccatcatgcgac

SEQ ID NO: 504379 - DNA, 51 bp, Artificial
  Synthetic oligonucleotide
gtttctccttggtccttagccgacagcggtgaagatgtcgatagaaccgga

SEQ ID NO: 504380 - DNA, 51 bp, Artificial
  Synthetic oligonucleotide
ggcgggatagctctcgaccgtccagaggccgtccacccggatgctccccgg

SEQ ID NO: 504381 - DNA, 51 bp, Artificial
  Synthetic oligonucleotide
cagcacgttcaggaatggagctcccgtgttcaccggtctcagcgcgtttcc

SEQ ID NO: 504382 - DNA, 51 bp, Artificial
  Synthetic oligonucleotide
cactctttgcgggctacttgcacacgccccgctcgccaagacacgccgggc

SEQ ID NO: 504383 - DNA, 51 bp, Artificial
  Synthetic oligonucleotide
cggggctctgccgtcatgaagcagacagtagcgctctgtgagaaatcggcg

SEQ ID NO: 504384 - DNA, 51 bp, Artificial
  Synthetic oligonucleotide
cgcctaggctggggaggtgccggatctcagccgtgacccacgcgggacccc

SEQ ID NO: 504385 - DNA, 50 bp, Artificial
  Synthetic oligonucleotide
gatagttttcgagctagtcggtgtgcttacggtcggcaccttgagtttgg

SEQ ID NO: 504386 - DNA, 55 bp, Artificial
  Synthetic oligonucleotide
gccgttgatttccatgggtgcacctttcggcgtcaggggacagttctgcgccgca

SEQ ID NO: 504387 - DNA, 55 bp, Artificial
  Synthetic oligonucleotide
gcgccggtggcaggtatgctgaaaccgcttccatccgtgtgataccgactcagta

SEQ ID NO: 504388 - DNA, 55 bp, Artificial
  Synthetic oligonucleotide
gcgggttatagtctcatcgttctacgtggcccgttgcttcagtcgatgggccgcc

SEQ ID NO: 504389 - DNA, 55 bp, Artificial
  Synthetic oligonucleotide
gcgggttcccgacggcacggtgtgacccaacgcaacattgggtaaactcccgagt

SEQ ID NO: 504390 - DNA, 55 bp, Artificial
  Synthetic oligonucleotide
gctgagcccggcgtgatagttccgggcgtacttgtccgaacgcatcgcgatccct

SEQ ID NO: 504391 - DNA, 55 bp, Artificial
  Synthetic oligonucleotide
ggaatctcgtagtgttgatcctatggcccaggacagcacatccgtcggatatccg

SEQ ID NO: 504392 - DNA, 55 bp, Artificial
  Synthetic oligonucleotide
ggactcaattgggcttttcgccgctccattgcgcgttgcccacctttgcaaggtt

SEQ ID NO: 504393 - DNA, 55 bp, Artificial
  Synthetic oligonucleotide
ggatcctggaatcggctgtgacaccgtagcggccgttgtaccagtcaacccactg

SEQ ID NO: 504394 - DNA, 55 bp, Artificial
  Synthetic oligonucleotide
ggcacgtgtggaccctgcagccggagcccgcgtcggagagcatcacgggttcgtt

SEQ ID NO: 504395 - DNA, 55 bp, Artificial
  Synthetic oligonucleotide
ggcatgacgacagaatattggcatacgcaaagtgatgtggcccactgccggaagg

SEQ ID NO: 504396 - DNA, 55 bp, Artificial
  Synthetic oligonucleotide
ggcggcgggttagcgctgggcgttaaagctgtaccccacgttgcgtacggttgag

SEQ ID NO: 504397 - DNA, 55 bp, Artificial
  Synthetic oligonucleotide
ggcttgatccggagcaaatgggcatacctcggctatgaggcgggcatcctggggt

SEQ ID NO: 504398 - DNA, 55 bp, Artificial
  Synthetic oligonucleotide
gggaacggtgacgaacctcggcattccatagatctctagccgcacgttacgtgag

SEQ ID NO: 504399 - DNA, 55 bp, Artificial
  Synthetic oligonucleotide
gggccaatggcctgtgcttgttgacgacaacccaaggactcgccggatccgtcag

SEQ ID NO: 504400 - DNA, 55 bp, Artificial
  Synthetic oligonucleotide
gggcgcaccctagtattcagatgcacccagtaaagctacccgtgtgtgctcttac

SEQ ID NO: 504401 - DNA, 55 bp, Artificial
  Synthetic oligonucleotide
ggggacattcttccgactccgaaccgcgaacactggccttccgaccagaccatgc

SEQ ID NO: 504402 - DNA, 55 bp, Artificial
  Synthetic oligonucleotide
gggtagcgggagtcacgtgggattctggtcgcggtgagaggcggggctatgtaag

SEQ ID NO: 504403 - DNA, 55 bp, Artificial
  Synthetic oligonucleotide
ggtccggacattcggccctatccgggtgtgaagaggttcaggtaccctgcgctct

SEQ ID NO: 504404 - DNA, 55 bp, Artificial
  Synthetic oligonucleotide
gaccggactcgtaggtgcacccgactcgacgggccaacacgcggggcacgctagg

SEQ ID NO: 504405 - DNA, 55 bp, Artificial
  Synthetic oligonucleotide
gacgaaagattgcgagaccatgactgaaacgttgaccgaagaacgcacgtccacc

SEQ ID NO: 504406 - DNA, 55 bp, Artificial
  Synthetic oligonucleotide
gacgcgctccgtttgagggatggaagcgaccaccattagtgggacacccacgcca

SEQ ID NO: 504407 - DNA, 55 bp, Artificial
  Synthetic oligonucleotide
gactctacactgcggcatgcgctttgctgaaaatcatccagcgggaaccccaggt

SEQ ID NO: 504408 - DNA, 55 bp, Artificial
  Synthetic oligonucleotide
gactgctttggagacaagggactaagagacgatataatcccatctcgctccgaaa

SEQ ID NO: 504409 - DNA, 55 bp, Artificial
  Synthetic oligonucleotide
gacttcgaggttggatgacggccgagtagtgccctcactaacggactagctgggc

SEQ ID NO: 504410 - DNA, 55 bp, Artificial
  Synthetic oligonucleotide
gagaacgctcagccgttattcgtgtcagtcgacaagtcctcggatcgctccgact

SEQ ID NO: 504411 - DNA, 55 bp, Artificial
  Synthetic oligonucleotide
gagacctcacactgctgggtcgaacccgaacttccgaggtgccgggcagagtcat

SEQ ID NO: 504412 - DNA, 55 bp, Artificial
  Synthetic oligonucleotide
gaggggccagggcatatgtgaaggagggtcatccatagtgccaatcattctacgg

SEQ ID NO: 504413 - DNA, 55 bp, Artificial
  Synthetic oligonucleotide
gatcacgcgcactgtactgacccaaggtaaggtcattagcaaccttgttggccac

SEQ ID NO: 504414 - DNA, 55 bp, Artificial
  Synthetic oligonucleotide
gatgattaagatgaccgttgagggtgctcagcgtgcatcggtcaccgcgggtaag

SEQ ID NO: 504415 - DNA, 55 bp, Artificial
  Synthetic oligonucleotide
gcaatccggactgagtgggtcaaggtaggcgccggtggtggaaatttccttatcg

SEQ ID NO: 504416 - DNA, 55 bp, Artificial
  Synthetic oligonucleotide
gcagttgtaggagcgccatcgccggatgctgacatttcgggctgaggttcgcgct

SEQ ID NO: 504417 - DNA, 55 bp, Artificial
  Synthetic oligonucleotide
gcatggctgcgtagctccacggcgcacccgtttaccctgtcgttggatactgagc

SEQ ID NO: 504418 - DNA, 55 bp, Artificial
  Synthetic oligonucleotide
gccagcttcctttacgttgatgaaattcgctgcagatcggtccgttgctcagagt

SEQ ID NO: 504419 - DNA, 55 bp, Artificial
  Synthetic oligonucleotide
gcccagtcttgccctggggagagtgtttaggttgatacctcaagcgtttgggccg

SEQ ID NO: 504420 - DNA, 55 bp, Artificial
  Synthetic oligonucleotide
gccccatgaagcgtggtagagcgtcatcgcgtgctcgaacacggaacctgtctcg

SEQ ID NO: 504421 - DNA, 55 bp, Artificial
  Synthetic oligonucleotide
gccgctggggtcaaatcccgcatattgtttaggagtcacgccatccagccatgcg

SEQ ID NO: 504422 - DNA, 55 bp, Artificial
  Synthetic oligonucleotide
gccggggatcctgccgttgtagctccaccccgggaaggtcacgccgggagcgatt

SEQ ID NO: 504423 - DNA, 55 bp, Artificial
  Synthetic oligonucleotide
tcacgacggtgacaggtccttcccttgtaggcccacgcgtgcagcagtaccatcc

SEQ ID NO: 504424 - DNA, 55 bp, Artificial
  Synthetic oligonucleotide
tccaccgtggacgcgccgcagccttccctgtgtctcgaggaccgcgaggtcccgt

SEQ ID NO: 504425 - DNA, 55 bp, Artificial
  Synthetic oligonucleotide
tcccggactcgaccgtcggcagggcgggtttgccgagtttcatcgccggagcgta

SEQ ID NO: 504426 - DNA, 55 bp, Artificial
  Synthetic oligonucleotide
tccggtgccgaaccctctgtgtatgtaatcctacattgtaagagcgcatatttcg

SEQ ID NO: 504427 - DNA, 55 bp, Artificial
  Synthetic oligonucleotide
tcgcggttgccggtatagttgccggttcgagggcggtgctgggatcctccgatga

SEQ ID NO: 504428 - DNA, 55 bp, Artificial
  Synthetic oligonucleotide
tcgctaggagcggcaccccaaaacaacgacgctgtgaacaatgcggtcaccccac

SEQ ID NO: 504429 - DNA, 55 bp, Artificial
  Synthetic oligonucleotide
tcgctattgctgattcctcctctgatcaggcggttggccaaatcggactgtggct

SEQ ID NO: 504430 - DNA, 55 bp, Artificial
  Synthetic oligonucleotide
tgaaccacccgtcatcggcatacaaggaacgcaaggctcggcgtctgcgggcgat

SEQ ID NO: 504431 - DNA, 55 bp, Artificial
  Synthetic oligonucleotide
tgcgttcaggatatgtgcaggtgcggtgggccacaagatggagcggggttccgtg

SEQ ID NO: 504432 - DNA, 55 bp, Artificial
  Synthetic oligonucleotide
tggaagaactcggcaccatcgatcacgtggcccacctggccatcactctcggcac

SEQ ID NO: 504433 - DNA, 55 bp, Artificial
  Synthetic oligonucleotide
tggccagacccgaccggggatggaccagcccaacgtacccgtccggtagagcgat

SEQ ID NO: 504434 - DNA, 55 bp, Artificial
  Synthetic oligonucleotide
tggggcgatgtagcgacacgcctgtgaattcagaaattcttcccgtggatggagc

SEQ ID NO: 504435 - DNA, 55 bp, Artificial
  Synthetic oligonucleotide
tggtgttcatggccccagcccatcggtccccgtgttgtcacagcgtatgcggatc

SEQ ID NO: 504436 - DNA, 55 bp, Artificial
  Synthetic oligonucleotide
ttacacctgagtccgtggcgggtgtgggtctgttgccggcttgcggtcacaatcg

SEQ ID NO: 504437 - DNA, 55 bp, Artificial
  Synthetic oligonucleotide
ttccaagcacgttgaccaacctgaggagggacgatgacgtccactgctgatctct

SEQ ID NO: 504438 - DNA, 55 bp, Artificial
  Synthetic oligonucleotide
ttcgacaacagtcatgatgctacggaagcccttcgcgcataggccgcacggcagg

SEQ ID NO: 504439 - DNA, 55 bp, Artificial
  Synthetic oligonucleotide
ttctcgggcgtagcgtcaaccacgggtggggtcacttcctcggacgtcggcggca

SEQ ID NO: 504440 - DNA, 55 bp, Artificial
  Synthetic oligonucleotide
ttgcgcggaggaactttgcgtcttcgacgaataccggccgctcacggcgcactgc

SEQ ID NO: 504441 - DNA, 55 bp, Artificial
  Synthetic oligonucleotide
ttggctcctccccacggacgtgatgatgactggccatgcctcccaacgctcagga

SEQ ID NO: 504442 - DNA, 55 bp, Artificial
  Synthetic oligonucleotide
ggtccggtcgcagaagagattactgagccctaaagccctctctggcaccaccagg

SEQ ID NO: 504443 - DNA, 55 bp, Artificial
  Synthetic oligonucleotide
ggtcgcccggaatgggaatcatcgcgtgaagggtcacgccaacagcctaactccg

SEQ ID NO: 504444 - DNA, 55 bp, Artificial
  Synthetic oligonucleotide
ggtgcccgaacccagaatacgcagagccagcagacccgcattgcgagcaccgtta

SEQ ID NO: 504445 - DNA, 55 bp, Artificial
  Synthetic oligonucleotide
ggtggcgcttccgcgaaacgccttgctaacttctttcccgttagtcagagttcgc

SEQ ID NO: 504446 - DNA, 55 bp, Artificial
  Synthetic oligonucleotide
ggtggttccagccttcaatttgtgagaccaccattttccgcttactgaaaatcga

SEQ ID NO: 504447 - DNA, 55 bp, Artificial
  Synthetic oligonucleotide
ggtgtagctggggatcctattagtgcttttgctcggtacctggccatgtcggttt

SEQ ID NO: 504448 - DNA, 55 bp, Artificial
  Synthetic oligonucleotide
ggtgtgggttgcgaagagcagccgaactacgagaactccaagaagtctgacagtg

SEQ ID NO: 504449 - DNA, 55 bp, Artificial
  Synthetic oligonucleotide
ggtgttatttcctcgtttgcaccggataacctgtccccgctgaagggtctgccgg

SEQ ID NO: 504450 - DNA, 55 bp, Artificial
  Synthetic oligonucleotide
ggttcggcccgatcactgccccacccagaaatgactttgtgatgggcgacaagtg

SEQ ID NO: 504451 - DNA, 55 bp, Artificial
  Synthetic oligonucleotide
ggttgcagacgcctaagaagcggtgaatccttatgtttgaatttcctagtgttga

SEQ ID NO: 504452 - DNA, 55 bp, Artificial
  Synthetic oligonucleotide
gtacgtcggtcatatgttcaacaggagttctcattaagcgagatgcaagttcgcc

SEQ ID NO: 504453 - DNA, 55 bp, Artificial
  Synthetic oligonucleotide
gtactcagattttgcggggtgggctgagaacggtatggaacagcggttcttctcc

SEQ ID NO: 504454 - DNA, 55 bp, Artificial
  Synthetic oligonucleotide
gtcaggggcatataggaagcatcgccaactggcctccgattgcagatcctctccc

SEQ ID NO: 504455 - DNA, 55 bp, Artificial
  Synthetic oligonucleotide
gtccgtgaccgaggtccatgcagcgctgtcaacgagcggcatttcagtggtgtgg

SEQ ID NO: 504456 - DNA, 55 bp, Artificial
  Synthetic oligonucleotide
gtctttgaacgaaatctatgtttcttcccagggcgtgaacggtgttaattcgggg

SEQ ID NO: 504457 - DNA, 55 bp, Artificial
  Synthetic oligonucleotide
gtggcagtcgcccattgtcatgttcgggattaccctctagtccagacggtggggc

SEQ ID NO: 504458 - DNA, 55 bp, Artificial
  Synthetic oligonucleotide
gtggtcagcttcgacttccaatccgatgtgacctcctgcgggcggcatgtgcggt

SEQ ID NO: 504459 - DNA, 55 bp, Artificial
  Synthetic oligonucleotide
tacaacgtctccgggatctcctacctgccgtatttcccggcggggccccaaatgc

SEQ ID NO: 504460 - DNA, 55 bp, Artificial
  Synthetic oligonucleotide
taccacacgtattacgaccccaaacgatcagtgcggacatccacgcacaagctga

SEQ ID NO: 504461 - DNA, 55 bp, Artificial
  Synthetic oligonucleotide
cctcatcttgcgaaggaataaatcttgtctgatccgataatagcttgctcgaaac

SEQ ID NO: 504462 - DNA, 55 bp, Artificial
  Synthetic oligonucleotide
aaccaccatgggaggagacacacagtgacggttcacagctggcgcgttctcgggg

SEQ ID NO: 504463 - DNA, 55 bp, Artificial
  Synthetic oligonucleotide
ccgtgagtccggtctgacgatgtgtctctgatttgtagccatgaccgcagttgag

SEQ ID NO: 504464 - DNA, 55 bp, Artificial
  Synthetic oligonucleotide
ccgcccaaggaaaccgtaggcttcaccctggaggagtccaaggtccgttcgaagt

SEQ ID NO: 504465 - DNA, 55 bp, Artificial
  Synthetic oligonucleotide
ccgacgttacagaattgtccgctgagaccagatggttcggggtccggaaggacaa

SEQ ID NO: 504466 - DNA, 55 bp, Artificial
  Synthetic oligonucleotide
cccgtgcgcaatctcgtgggagacatccgcgaagggctctccgaattctttggac

SEQ ID NO: 504467 - DNA, 55 bp, Artificial
  Synthetic oligonucleotide
ccatgaaactctcgctgacccgggatcagtgccaggcgatcacaggggactccgt

SEQ ID NO: 504468 - DNA, 55 bp, Artificial
  Synthetic oligonucleotide
ccagcgagacgagccatagtggcggtactccttgaataaaccggaggtcgtaggc

SEQ ID NO: 504469 - DNA, 55 bp, Artificial
  Synthetic oligonucleotide
aaagtgcggcgcccacggtgcctgccgtgagctgagttaaccatggggcaagtgt

SEQ ID NO: 504470 - DNA, 55 bp, Artificial
  Synthetic oligonucleotide
ccacgaattcggccggaatcctcagggcggggttcaatacgggtcctttctgcgg

SEQ ID NO: 504471 - DNA, 55 bp, Artificial
  Synthetic oligonucleotide
catccctccaggaactagcagagtattttggagtgctggagtctgtagccggcca

SEQ ID NO: 504472 - DNA, 55 bp, Artificial
  Synthetic oligonucleotide
cagttacgcttggcctggctaccggtttgcgtctaatcggtaagcgagtgttgat

SEQ ID NO: 504473 - DNA, 55 bp, Artificial
  Synthetic oligonucleotide
cagcactgccaaggtggcgtaacggacgggttcgaagctgccaacgagcaatccg

SEQ ID NO: 504474 - DNA, 55 bp, Artificial
  Synthetic oligonucleotide
cagcacgaatcgcgccgctccaaccagaaggcagcaactgaccgctcgtcagatc

SEQ ID NO: 504475 - DNA, 55 bp, Artificial
  Synthetic oligonucleotide
cagattgtgtctcatcgacgccgaggccacaaatcatgtcggccatgttgagccg

SEQ ID NO: 504476 - DNA, 55 bp, Artificial
  Synthetic oligonucleotide
acgcgtttccatctgcgagatcgtaccgggcacaacagccctggtgagacgccgt

SEQ ID NO: 504477 - DNA, 55 bp, Artificial
  Synthetic oligonucleotide
cacgttgggtcctctcgatctgtgaggatcagtgtgccgactccgagcaatgtgt

SEQ ID NO: 504478 - DNA, 55 bp, Artificial
  Synthetic oligonucleotide
acgtaggagtcctccccacggtgcgggtctccatggtcatgtgggactcgtgacc

SEQ ID NO: 504479 - DNA, 55 bp, Artificial
  Synthetic oligonucleotide
attgaggacatgagaccgggatgatgacactccagcctaccgcacggcgtccccg

SEQ ID NO: 504480 - DNA, 55 bp, Artificial
  Synthetic oligonucleotide
attcctcccatgtgcgcgtgggcattccacgggacgggtacaagttgttccggcc

SEQ ID NO: 504481 - DNA, 55 bp, Artificial
  Synthetic oligonucleotide
atggtcacggagaatccgatctgtcgagggatgagggactcgggtgcacggaccc

SEQ ID NO: 504482 - DNA, 55 bp, Artificial
  Synthetic oligonucleotide
agtcgctactgagtctggatcaaacggcattacccgactcaacagcatggtcgtg

SEQ ID NO: 504483 - DNA, 55 bp, Artificial
  Synthetic oligonucleotide
aggtgtgtatcggtgcgacaagccgcgaggacacacgcacacgccccagtgtgga

SEQ ID NO: 504484 - DNA, 55 bp, Artificial
  Synthetic oligonucleotide
aggtaggccgacgtctacgtggcagtagtgcgcctagcagggagggatcggagcg

SEQ ID NO: 504485 - DNA, 55 bp, Artificial
  Synthetic oligonucleotide
agactggtccccacctgtgacgtgccccatatcgaagtgcggagtctccccatgc

SEQ ID NO: 504486 - DNA, 55 bp, Artificial
  Synthetic oligonucleotide
aggacaccgcgcactcggttgttacggacacccagttccagacagagctggtggg

SEQ ID NO: 504487 - DNA, 55 bp, Artificial
  Synthetic oligonucleotide
agctgtcgggatctgccatatcgagtccgcctctcccacgaccgatgggaccaga

SEQ ID NO: 504488 - DNA, 55 bp, Artificial
  Synthetic oligonucleotide
agctggggctgtacttgaatctgtacctggattatctggcgtgcgggtagcttag

SEQ ID NO: 504489 - DNA, 55 bp, Artificial
  Synthetic oligonucleotide
agctggcgtgaccgcgttgcactacctcgatgccagtacggccctgggtttgttc

SEQ ID NO: 504490 - DNA, 55 bp, Artificial
  Synthetic oligonucleotide
aagcgaaagtggcaggtctccccgatgctgagcgaaacaaccggtgcgttggagc

SEQ ID NO: 504491 - DNA, 55 bp, Artificial
  Synthetic oligonucleotide
gaacccaggcagccaatgacacttatggggccgtcctcgaccattggatggcgtg

SEQ ID NO: 504492 - DNA, 55 bp, Artificial
  Synthetic oligonucleotide
ctttacgcagagcgccgatcataagggcacttactagccaagcggggttggcatc

SEQ ID NO: 504493 - DNA, 55 bp, Artificial
  Synthetic oligonucleotide
cttgaccgaatggttatctcacgattttccggggtactgctgacaggagtccgcg

SEQ ID NO: 504494 - DNA, 55 bp, Artificial
  Synthetic oligonucleotide
aagtacgtatacgctgtgactgcaatcacatagttctggccgttcacgtgcggcg

SEQ ID NO: 504495 - DNA, 55 bp, Artificial
  Synthetic oligonucleotide
ctgaacaagtacgactgcgggcattgcattggcacctttcaaagataaggatgcc

SEQ ID NO: 504496 - DNA, 55 bp, Artificial
  Synthetic oligonucleotide
ctcgcgtaatgagtcgcgtgttctgcttctgactgcgaccccgtttaacctgtcg

SEQ ID NO: 504497 - DNA, 55 bp, Artificial
  Synthetic oligonucleotide
ctccatgatagccccaccgccccgaatatcccttgcaccatgaactcaacccgcg

SEQ ID NO: 504498 - DNA, 55 bp, Artificial
  Synthetic oligonucleotide
ctagcggagctgcgcgagcatcctgagtggtttgacgagacggcactcgctgaga

SEQ ID NO: 504499 - DNA, 55 bp, Artificial
  Synthetic oligonucleotide
cgttggagcactcttatcgtgtaccggaggaaagcggtccacgtaacaacgttac

SEQ ID NO: 504500 - DNA, 55 bp, Artificial
  Synthetic oligonucleotide
cgttagccgtctgggaggctttgtatacggctcgacctagaccagcccgcacacg

SEQ ID NO: 504501 - DNA, 55 bp, Artificial
  Synthetic oligonucleotide
cggtgtctgcgcccacccctcgcgagaacccgtaataactacggttttgcctgcc

SEQ ID NO: 504502 - DNA, 55 bp, Artificial
  Synthetic oligonucleotide
cgggtgcgagatccttcgaccctactgccatttctactcaccaccttcgcgacgc

SEQ ID NO: 504503 - DNA, 55 bp, Artificial
  Synthetic oligonucleotide
cggggccacgaattcggccggaatcctcaaggcggggttcaatacgggtcctttc

SEQ ID NO: 504504 - DNA, 55 bp, Artificial
  Synthetic oligonucleotide
cggggacaggtgggtcgcgtgggagtagtctttgtgactacgggtacacaccgga

SEQ ID NO: 504505 - DNA, 55 bp, Artificial
  Synthetic oligonucleotide
cctgtgatgcacatctcacgttcggcgctacactaaaaccgactcagttcagcat

SEQ ID NO: 504506 - DNA, 55 bp, Artificial
  Synthetic oligonucleotide
acctgattgtctgttgcgaagtcgagccatgagcacggcgctttgacggcggagg

SEQ ID NO: 504507 - DNA, 55 bp, Artificial
  Synthetic oligonucleotide
cgactcggcaacccgtatgacaatctgtgaatacgcgtccaaagctccgtcgtcg

SEQ ID NO: 504508 - DNA, 55 bp, Artificial
  Synthetic oligonucleotide
aaccctggcctggagagcaggcactgttcggagagcaggcatcgtcgggacaaca

SEQ ID NO: 504509 - DNA, 55 bp, Artificial
  Synthetic oligonucleotide
cgcaccaccgtcggagtttgagagcacccgagcatccatacctcaaggagctcgt

SEQ ID NO: 504510 - DNA, 55 bp, Artificial
  Synthetic oligonucleotide
cgccggagttgcggtgctggtctaaactggcgggagatccccatgtcattcagcg

SEQ ID NO: 504511 - DNA, 55 bp, Artificial
  Synthetic oligonucleotide
aacggatttgcatgacatacaaaacgctggtatagttgattgagttgccgcggga

SEQ ID NO: 504512 - DNA, 55 bp, Artificial
  Synthetic oligonucleotide
cgcctcccataagcgtatatgccaaacttagaatggaactggggttcgtagccgt

SEQ ID NO: 504513 - DNA, 55 bp, Artificial
  Synthetic oligonucleotide
cgcgtgagtgtcgagtggaactgaacagagcggcgtcggcgtatcaaaatttgag

SEQ ID NO: 504514 - DNA, 55 bp, Artificial
  Synthetic oligonucleotide
cgctagaatgcatccgtccgtcttcttgtatctggtctcaccctgcaaggccgag

SEQ ID NO: 504515 - DNA, 55 bp, Artificial
  Synthetic oligonucleotide
cggaaccctctcatatcaggtcaccactgacttcgcgaaccgcaatagacaggac

SEQ ID NO: 504516 - DNA, 55 bp, Artificial
  Synthetic oligonucleotide
cggacgaatgtccttaacggacatattcaagcgccctgtcttgacccagaagtcc

SEQ ID NO: 504517 - DNA, 55 bp, Artificial
  Synthetic oligonucleotide
cgggcggaaaaggagtatcactgatgattactaacaagaggagcaaccgcagtgg

SEQ ID NO: 504518 - DNA, 54 bp, Artificial
  Synthetic oligonucleotide
cacggcccaggaacttgtcttcgagctgatgaaagtcaccccggaaggacaacg

SEQ ID NO: 504519 - DNA, 54 bp, Artificial
  Synthetic oligonucleotide
aacgggtgcgttcggatcaatcccagtgtgttcgtgaacgcccagtgccaatgc

SEQ ID NO: 504520 - DNA, 54 bp, Artificial
  Synthetic oligonucleotide
tccagagtcagagaataactactgcacaggcttcagcgcacaacaggcgtggtc

SEQ ID NO: 504521 - DNA, 54 bp, Artificial
  Synthetic oligonucleotide
ggcaccgtgtttctacacatgcctttgtgatgaggcgcatcaagtgtctcaatc

SEQ ID NO: 504522 - DNA, 54 bp, Artificial
  Synthetic oligonucleotide
agagcaggacctgccctagttgcagggtggccacgaagtactcgacggcggaca

SEQ ID NO: 504523 - DNA, 54 bp, Artificial
  Synthetic oligonucleotide
ttgccgcaggaaactcaatgcctcgttgactttcgacgcactccgctgctgtgc

SEQ ID NO: 504524 - DNA, 53 bp, Artificial
  Synthetic oligonucleotide
actgacactgaacggactgatttgggccgatcgggtacttgcggttactgaac

SEQ ID NO: 504525 - DNA, 53 bp, Artificial
  Synthetic oligonucleotide
actgtgtgtgcagacaatctttaggattcagtgcgaggcctttgagatgtgag

SEQ ID NO: 504526 - DNA, 53 bp, Artificial
  Synthetic oligonucleotide
acgaggttgttcgagtcatcggccgcgctaccgagcgcagcaatgtatagatt

SEQ ID NO: 504527 - DNA, 53 bp, Artificial
  Synthetic oligonucleotide
aggccaaattggctgtgtattgggtgaccccgtgtgcaagttcgtggccgatg

SEQ ID NO: 504528 - DNA, 53 bp, Artificial
  Synthetic oligonucleotide
aaaccagcgactcggagtgcccgcccaccacgatctggatattcttgctctca

SEQ ID NO: 504529 - DNA, 53 bp, Artificial
  Synthetic oligonucleotide
gcggcgctcattgtccttcaattttgcacaaagtcgacgggaaagccaggccc

SEQ ID NO: 504530 - DNA, 53 bp, Artificial
  Synthetic oligonucleotide
cagaagccatgaccaacgcaacacccaccgcacagctttccgacgccggtttg

SEQ ID NO: 504531 - DNA, 53 bp, Artificial
  Synthetic oligonucleotide
catttgtcagtggacacacgaacgtatttggagtggtggagtgactagtacga

SEQ ID NO: 504532 - DNA, 53 bp, Artificial
  Synthetic oligonucleotide
ggaagaacccgcggattcacgatctacggcacacgcatgcttcttggctaatt

SEQ ID NO: 504533 - DNA, 52 bp, Artificial
  Synthetic oligonucleotide
tggcatgctcgacctgcacccctgcactgtacgcgaggttgcacaatttagg

SEQ ID NO: 504534 - DNA, 52 bp, Artificial
  Synthetic oligonucleotide
ctgcctcagcttgtgagttggaaccggatgagtaaagaacgtccagagggaa

SEQ ID NO: 504535 - DNA, 52 bp, Artificial
  Synthetic oligonucleotide
gcgtgagatctggtgctcaaagaggctgttcagcactccttcaatgtagtac

SEQ ID NO: 504536 - DNA, 52 bp, Artificial
  Synthetic oligonucleotide
ggatatgcgacgtgacggacccttccacgaacctcctgcccaccgactcctc

SEQ ID NO: 504537 - DNA, 52 bp, Artificial
  Synthetic oligonucleotide
tcgctgatgcggttacgtcagggttagtccgtcaggatccgcgataggtacc

SEQ ID NO: 504538 - DNA, 52 bp, Artificial
  Synthetic oligonucleotide
attggcactatggatgaccctccttcacatatgccctggcccctcgaccttc
